United States Patent Application Publication US 2006/0003322 A1 - sequence listing, part 31

SEQ ID NO: 1328235 - RNA, 25 nt, Human
caaaaaguaagcaacccuaagauuu

SEQ ID NO: 1328236 - RNA, 19 nt, Human
caagaaugaagccucagac

SEQ ID NO: 1328237 - RNA, 20 nt, Human
caagguggcauggacccaaa

SEQ ID NO: 1328238 - RNA, 23 nt, Human
cacagaaaacaaaaccaaaaaaa

SEQ ID NO: 1328239 - RNA, 18 nt, Human
cacagagcgcugacuggu

SEQ ID NO: 1328240 - RNA, 22 nt, Human
cacggcccaucugcgaagcaaa

SEQ ID NO: 1328241 - RNA, 19 nt, Human
cagaaaaggcaaugaacag

SEQ ID NO: 1328242 - RNA, 24 nt, Human
cagaaaaggcaaugaacauuuuug

SEQ ID NO: 1328243 - RNA, 26 nt, Human
cagaaaaggcaaugaacauuuuugau

SEQ ID NO: 1328244 - RNA, 21 nt, Human
cagcauggaaggugauccgag

SEQ ID NO: 1328245 - RNA, 22 nt, Human
caucugcgaagcaaaacuaauc

SEQ ID NO: 1328246 - RNA, 22 nt, Human
cauuucuccauuuccauacuga

SEQ ID NO: 1328247 - RNA, 19 nt, Human
cgccugagggaaacagcua

SEQ ID NO: 1328248 - RNA, 24 nt, Human
cggcccaucugcgaagcaaaacua

SEQ ID NO: 1328249 - RNA, 19 nt, Human
cguggaacaggccgccuga

SEQ ID NO: 1328250 - RNA, 20 nt, Human
cguggugaguguuacagcuc

SEQ ID NO: 1328251 - RNA, 23 nt, Human
cugcuggcuaggggcgccagcug

SEQ ID NO: 1328252 - RNA, 22 nt, Human
gacccaaaaaguaagcaacccu

SEQ ID NO: 1328253 - RNA, 19 nt, Human
gcaccacgaccucccuccu

SEQ ID NO: 1328254 - RNA, 20 nt, Human
gcgaaacgacugauggaaca

SEQ ID NO: 1328255 - RNA, 19 nt, Human
gcgaagcaaaacuaauccu

SEQ ID NO: 1328256 - RNA, 22 nt, Human
ggggagaaggacaugcauggua

SEQ ID NO: 1328257 - RNA, 21 nt, Human
guccauuuuacagagugcuga

SEQ ID NO: 1328258 - RNA, 24 nt, Human
gugaaauaacaaagcuuccacagc

SEQ ID NO: 1328259 - RNA, 18 nt, Human
uaagccuccauaacgcag

SEQ ID NO: 1328260 - RNA, 22 nt, Human
uaauagcacagaaaacaaaacc

SEQ ID NO: 1328261 - RNA, 25 nt, Human
ucagaaaaggcaaugaacauuuuug

SEQ ID NO: 1328262 - RNA, 25 nt, Human
uccaaguccccacucgacccaggaa

SEQ ID NO: 1328263 - RNA, 23 nt, Human
uccacagcauggaaggugauccg

SEQ ID NO: 1328264 - RNA, 20 nt, Human
uccauacugauugcuuccuc

SEQ ID NO: 1328265 - RNA, 20 nt, Human
uccucucaccaccacggccc

SEQ ID NO: 1328266 - RNA, 20 nt, Human
uccuggggagaaggacaugc

SEQ ID NO: 1328267 - RNA, 21 nt, Human
uccuggggagaaggacaugca

SEQ ID NO: 1328268 - RNA, 21 nt, Human
ucuccaaguccccacucgacc

SEQ ID NO: 1328269 - RNA, 22 nt, Human
ucuccaaguccccacucgaccc

SEQ ID NO: 1328270 - RNA, 20 nt, Human
ucugcgaagcaaaacuaauc

SEQ ID NO: 1328271 - RNA, 23 nt, Human
ucuuuugacacaaugaacucuga

SEQ ID NO: 1328272 - RNA, 24 nt, Human
ugagccaguggaaaagccugaaga

SEQ ID NO: 1328273 - RNA, 21 nt, Human
ugauugguccauuuuacaggg

SEQ ID NO: 1328274 - RNA, 20 nt, Human
uggcuucaccucucacaagc

SEQ ID NO: 1328275 - RNA, 24 nt, Human
uucaagguggcauggacccaaaaa

SEQ ID NO: 1328276 - RNA, 22 nt, Human
uucguggugaguguuacagcuc

SEQ ID NO: 1328277 - RNA, 21 nt, Human
uucuaacagagcguucuguga

SEQ ID NO: 1328278 - RNA, 19 nt, Human
uugguccauuuuacagagu

SEQ ID NO: 1328279 - RNA, 19 nt, Human
uugguccauuuuacagggu

SEQ ID NO: 1328280 - RNA, 20 nt, Human
uugguuccuuccgguggguu

SEQ ID NO: 1328281 - RNA, 23 nt, Human
uuucugggaaaauuguuuuucag

SEQ ID NO: 1328282 - RNA, 18 nt, Human
aaguuuccagaaugcagc

SEQ ID NO: 1328283 - RNA, 22 nt, Human
acaacugggccagguucuaugu

SEQ ID NO: 1328284 - RNA, 20 nt, Human
agucaaaaguaugcagcagc

SEQ ID NO: 1328285 - RNA, 18 nt, Human
ccugguaucacugaaaug

SEQ ID NO: 1328286 - RNA, 21 nt, Human
cugcagagcgcucuucuuggu

SEQ ID NO: 1328287 - RNA, 21 nt, Human
cuuguucugcuguccaggcug

SEQ ID NO: 1328288 - RNA, 22 nt, Human
cuuguucugcuguccaggcugg

SEQ ID NO: 1328289 - RNA, 22 nt, Human
gauggaguacaagaagguccag

SEQ ID NO: 1328290 - RNA, 22 nt, Human
ggaguacaagaagguccaguug

SEQ ID NO: 1328291 - RNA, 22 nt, Human
gguccaguuggcuguguauaug

SEQ ID NO: 1328292 - RNA, 25 nt, Human
ggucuuguucugcuguccaggcugg

SEQ ID NO: 1328293 - RNA, 20 nt, Human
guauauguaauauacacagg

SEQ ID NO: 1328294 - RNA, 20 nt, Human
guccaggcuggaguacaacu

SEQ ID NO: 1328295 - RNA, 20 nt, Human
ucaaaguuuccagaaugcag

SEQ ID NO: 1328296 - RNA, 22 nt, Human
ucugauauuuauggcuucccuu

SEQ ID NO: 1328297 - RNA, 19 nt, Human
ucuucuugguccacuaaau

SEQ ID NO: 1328298 - RNA, 20 nt, Human
ucuuguucugcuguccaggc

SEQ ID NO: 1328299 - RNA, 23 nt, Human
ucuuguucugcuguccaggcugg

SEQ ID NO: 1328300 - RNA, 24 nt, Human
ucuuguucugcuguccaggcugga

SEQ ID NO: 1328301 - RNA, 23 nt, Human
ugaaaugggcugaauagguucug

SEQ ID NO: 1328302 - RNA, 22 nt, Human
ugagacagggucuuguucugcu

SEQ ID NO: 1328303 - RNA, 22 nt, Human
ugcucggccuacgguaauuuua

SEQ ID NO: 1328304 - RNA, 20 nt, Human
uggguuugguaucacucgag

SEQ ID NO: 1328305 - RNA, 21 nt, Human
uggguuugguaucacucgagg

SEQ ID NO: 1328306 - RNA, 18 nt, Human
uguguauauguaauauac

SEQ ID NO: 1328307 - RNA, 24 nt, Human
uugucauaaaaauuauucauggcu

SEQ ID NO: 1328308 - RNA, 24 nt, Human
uuguucugcuguccaggcuggagu

SEQ ID NO: 1328309 - RNA, 22 nt, Human
uuugguaucacucgaggagaug

SEQ ID NO: 1328310 - RNA, 20 nt, Human
aggcugccgcccuggcagcu

SEQ ID NO: 1328311 - RNA, 20 nt, Human
gcccuggcagcucccagggc

SEQ ID NO: 1328312 - RNA, 20 nt, Human
aaaaagccccaaaugagaug

SEQ ID NO: 1328313 - RNA, 22 nt, Human
aagaaagaggcucuuuguucuc

SEQ ID NO: 1328314 - RNA, 22 nt, Human
acaaaaucaauaaaaucaguga

SEQ ID NO: 1328315 - RNA, 19 nt, Human
acacauuuccaaugcugcc

SEQ ID NO: 1328316 - RNA, 18 nt, Human
accauggggugccacagc

SEQ ID NO: 1328317 - RNA, 22 nt, Human
acccuggcagccgggaguucug

SEQ ID NO: 1328318 - RNA, 24 nt, Human
agaaagucgaugucaacaugagaa

SEQ ID NO: 1328319 - RNA, 24 nt, Human
agacaaaauaaccucccugugauc

SEQ ID NO: 1328320 - RNA, 20 nt, Human
agagacuguucugcacauug

SEQ ID NO: 1328321 - RNA, 20 nt, Human
agagcaggaagggccccuuc

SEQ ID NO: 1328322 - RNA, 20 nt, Human
agaguucuucccagcugcac

SEQ ID NO: 1328323 - RNA, 22 nt, Human
agaguucuucccagcugcacuc

SEQ ID NO: 1328324 - RNA, 23 nt, Human
aggcagggaaggaauaggauuag

SEQ ID NO: 1328325 - RNA, 20 nt, Human
agggaagccugacccucucu

SEQ ID NO: 1328326 - RNA, 18 nt, Human
augccucagcucugauga

SEQ ID NO: 1328327 - RNA, 25 nt, Human
caaaauaaccucccugugaucagac

SEQ ID NO: 1328328 - RNA, 20 nt, Human
caaaaucaauaaaaucagug

SEQ ID NO: 1328329 - RNA, 21 nt, Human
caaagcggacagccaucuguc

SEQ ID NO: 1328330 - RNA, 22 nt, Human
caaagcggacagccaucugucu

SEQ ID NO: 1328331 - RNA, 22 nt, Human
caacgaugggugcccaugcaug

SEQ ID NO: 1328332 - RNA, 20 nt, Human
cacugccaaaaagccccaaa

SEQ ID NO: 1328333 - RNA, 23 nt, Human
cagaacacugcagacacaccaug

SEQ ID NO: 1328334 - RNA, 18 nt, Human
cagagccucaaagcggac

SEQ ID NO: 1328335 - RNA, 18 nt, Human
cagcaaaacagguuuccc

SEQ ID NO: 1328336 - RNA, 19 nt, Human
cagcacgcagaccgucuug

SEQ ID NO: 1328337 - RNA, 21 nt, Human
ccagaacacugcagacacacc

SEQ ID NO: 1328338 - RNA, 21 nt, Human
ccagaacacugcagacacacc

SEQ ID NO: 1328339 - RNA, 23 nt, Human
ccagaacacugcagacacaccau

SEQ ID NO: 1328340 - RNA, 28 nt, Human
cccacagucacugugacccccucaacaa

SEQ ID NO: 1328341 - RNA, 21 nt, Human
cccacugccaaaaagccccaa

SEQ ID NO: 1328342 - RNA, 26 nt, Human
ccccaaaugagaugccguccuccucu

SEQ ID NO: 1328343 - RNA, 22 nt, Human
ccccaaggcaacaguguagucu

SEQ ID NO: 1328344 - RNA, 24 nt, Human
cccccacagucacugugacccccu

SEQ ID NO: 1328345 - RNA, 23 nt, Human
ccccucaugcauuugugaaacag

SEQ ID NO: 1328346 - RNA, 22 nt, Human
cccgacaagcccccaaggcaac

SEQ ID NO: 1328347 - RNA, 19 nt, Human
cccuggcagccgggaguuc

SEQ ID NO: 1328348 - RNA, 18 nt, Human
cccuggcccgacaagccc

SEQ ID NO: 1328349 - RNA, 21 nt, Human
ccucaacacacacacauuucc

SEQ ID NO: 1328350 - RNA, 24 nt, Human
cuacaauuggcauugaauggacca

SEQ ID NO: 1328351 - RNA, 18 nt, Human
cuccucauccucacacca

SEQ ID NO: 1328352 - RNA, 20 nt, Human
cuggcaggcagcccugcagg

SEQ ID NO: 1328353 - RNA, 22 nt, Human
cuucaaaaauaccagucucccu

SEQ ID NO: 1328354 - RNA, 21 nt, Human
cuuggcccuggcccgacaagc

SEQ ID NO: 1328355 - RNA, 18 nt, Human
gaacacugcagacacacc

SEQ ID NO: 1328356 - RNA, 18 nt, Human
gacacaccauggggugcc

SEQ ID NO: 1328357 - RNA, 20 nt, Human
gagcaggaagggccccuucu

SEQ ID NO: 1328358 - RNA, 18 nt, Human
gagccaagguccagggaa

SEQ ID NO: 1328359 - RNA, 21 nt, Human
gaugccguccuccucauccuc

SEQ ID NO: 1328360 - RNA, 23 nt, Human
gaugggugcccaugcaugugccc

SEQ ID NO: 1328361 - RNA, 22 nt, Human
gcccacugccaaaaagccccaa

SEQ ID NO: 1328362 - RNA, 22 nt, Human
gcccuggcccgacaagccccca

SEQ ID NO: 1328363 - RNA, 24 nt, Human
ggagcaaggggcuggggguagggg

SEQ ID NO: 1328364 - RNA, 23 nt, Human
ggguggggaguagguucccaggg

SEQ ID NO: 1328365 - RNA, 19 nt, Human
gugaaacagaagccccaga

SEQ ID NO: 1328366 - RNA, 18 nt, Human
guucaaggccaugccuca

SEQ ID NO: 1328367 - RNA, 23 nt, Human
uaaaaucagugaaucacaauuca

SEQ ID NO: 1328368 - RNA, 19 nt, Human
uaaaaugaggcccacugcc

SEQ ID NO: 1328369 - RNA, 18 nt, Human
uaagccccacugucuagc

SEQ ID NO: 1328370 - RNA, 20 nt, Human
uagaugccaggggugccccc

SEQ ID NO: 1328371 - RNA, 21 nt, Human
uaguaagccccacugucuagc

SEQ ID NO: 1328372 - RNA, 23 nt, Human
uaucauagagccccucuguuggg

SEQ ID NO: 1328373 - RNA, 21 nt, Human
uauccuggagagagcugaaau

SEQ ID NO: 1328374 - RNA, 21 nt, Human
ucaacacacacacauuuccaa

SEQ ID NO: 1328375 - RNA, 19 nt, Human
ucaacaugagaaagaaaga

SEQ ID NO: 1328376 - RNA, 23 nt, Human
ucauugaacucauucuuggcuac

SEQ ID NO: 1328377 - RNA, 20 nt, Human
ucccugugaucagacuuagc

SEQ ID NO: 1328378 - RNA, 21 nt, Human
ucugacagggagaaggcauug

SEQ ID NO: 1328379 - RNA, 21 nt, Human
ucuguccuggcccugcagcac

SEQ ID NO: 1328380 - RNA, 21 nt, Human
ugaaacagaagccccagagac

SEQ ID NO: 1328381 - RNA, 24 nt, Human
ugaaugaagggagcuacuucccuc

SEQ ID NO: 1328382 - RNA, 20 nt, Human
ugagaugccguccuccucau

SEQ ID NO: 1328383 - RNA, 22 nt, Human
ugccaaaaagccccaaaugaga

SEQ ID NO: 1328384 - RNA, 18 nt, Human
ugccaggggugcccccac

SEQ ID NO: 1328385 - RNA, 19 nt, Human
ugcccagaacacugcagac

SEQ ID NO: 1328386 - RNA, 18 nt, Human
ugccccugguuuaaagcc

SEQ ID NO: 1328387 - RNA, 18 nt, Human
ugccuggagggacaaccu

SEQ ID NO: 1328388 - RNA, 19 nt, Human
uggcccgacaagcccccaa

SEQ ID NO: 1328389 - RNA, 23 nt, Human
uggggaguagguucccaggggag

SEQ ID NO: 1328390 - RNA, 25 nt, Human
ugucagagacuguucugcacauugu

SEQ ID NO: 1328391 - RNA, 27 nt, Human
aacccggcccagccuagcccagcgggg

SEQ ID NO: 1328392 - RNA, 21 nt, Human
acacagccucccugguccucc

SEQ ID NO: 1328393 - RNA, 18 nt, Human
acuccuggugcccucccc

SEQ ID NO: 1328394 - RNA, 22 nt, Human
agcccaguccaacccggcccag

SEQ ID NO: 1328395 - RNA, 22 nt, Human
aggugaccagccaccauggagc

SEQ ID NO: 1328396 - RNA, 19 nt, Human
augaagcaggcauggcccu

SEQ ID NO: 1328397 - RNA, 18 nt, Human
caccauggagcagcccca

SEQ ID NO: 1328398 - RNA, 20 nt, Human
caccgcucuucacuccucgc

SEQ ID NO: 1328399 - RNA, 23 nt, Human
caccucgugcugggcgccgggga

SEQ ID NO: 1328400 - RNA, 26 nt, Human
cagcccccuccccuuaggcucugucc

SEQ ID NO: 1328401 - RNA, 23 nt, Human
ccaagccuggcacguuccccagg

SEQ ID NO: 1328402 - RNA, 22 nt, Human
ccagccaccauggagcagcccc

SEQ ID NO: 1328403 - RNA, 24 nt, Human
ccagccaccauggagcagccccaa

SEQ ID NO: 1328404 - RNA, 24 nt, Human
ccagggcuccuggcagcccccucc

SEQ ID NO: 1328405 - RNA, 24 nt, Human
cccaccgcucuucacuccucgccc

SEQ ID NO: 1328406 - RNA, 18 nt, Human
ccccagcccaguccaacc

SEQ ID NO: 1328407 - RNA, 22 nt, Human
ccccagcccaguccaacccggc

SEQ ID NO: 1328408 - RNA, 24 nt, Human
ccucgcugcgacacagccucccug

SEQ ID NO: 1328409 - RNA, 24 nt, Human
ccucgugcugggcgccggggaagc

SEQ ID NO: 1328410 - RNA, 22 nt, Human
cgccccagcccaguccaacccg

SEQ ID NO: 1328411 - RNA, 18 nt, Human
cucgccccagcccagucc

SEQ ID NO: 1328412 - RNA, 21 nt, Human
cugcacaggcucuccugggug

SEQ ID NO: 1328413 - RNA, 21 nt, Human
cuggugcccuccccagaugug

SEQ ID NO: 1328414 - RNA, 21 nt, Human
gaagcaggcauggcccugacc

SEQ ID NO: 1328415 - RNA, 23 nt, Human
gacacagccucccugguccuccc

SEQ ID NO: 1328416 - RNA, 21 nt, Human
gcgccggggaagcgcucgcgc

SEQ ID NO: 1328417 - RNA, 19 nt, Human
gcgcucccugguuccccac

SEQ ID NO: 1328418 - RNA, 19 nt, Human
ggcagcccccuccccuuag

SEQ ID NO: 1328419 - RNA, 20 nt, Human
gguuccccaccgcucuucac

SEQ ID NO: 1328420 - RNA, 26 nt, Human
guggagggcgcaccucgaccccacag

SEQ ID NO: 1328421 - RNA, 25 nt, Human
guggagggcgcaccucgaccccacg

SEQ ID NO: 1328422 - RNA, 19 nt, Human
uccccagcgcucccugguu

SEQ ID NO: 1328423 - RNA, 25 nt, Human
uccccagcgcucccugguuccccac

SEQ ID NO: 1328424 - RNA, 25 nt, Human
uccccaggcugcacaggcucuccug

SEQ ID NO: 1328425 - RNA, 19 nt, Human
ucccccagaccagggcucc

SEQ ID NO: 1328426 - RNA, 21 nt, Human
ucccccagaccagggcuccug

SEQ ID NO: 1328427 - RNA, 19 nt, Human
ucccugguuccccaccgcu

SEQ ID NO: 1328428 - RNA, 24 nt, Human
ucgcugcgacacagccucccuggu

SEQ ID NO: 1328429 - RNA, 18 nt, Human
ucugucccugacccucgc

SEQ ID NO: 1328430 - RNA, 22 nt, Human
ugacccucgcugcgacacagcc

SEQ ID NO: 1328431 - RNA, 24 nt, Human
aaaaaaauaaacuaucacuaguua

SEQ ID NO: 1328432 - RNA, 27 nt, Human
aaaauaaacuaucacuaguuacauaaa

SEQ ID NO: 1328433 - RNA, 18 nt, Human
aaacaagaaaauucaugc

SEQ ID NO: 1328434 - RNA, 26 nt, Human
aaaccaccccccaacccuaaaagcuc

SEQ ID NO: 1328435 - RNA, 20 nt, Human
aacgguucuucuuuuucuuu

SEQ ID NO: 1328436 - RNA, 21 nt, Human
aagacagcaagagugaggagu

SEQ ID NO: 1328437 - RNA, 18 nt, Human
aagagauagcaaaccacc

SEQ ID NO: 1328438 - RNA, 23 nt, Human
aaucuuuagcuaucaaguucaaa

SEQ ID NO: 1328439 - RNA, 23 nt, Human
acauguucugugcauauaccacu

SEQ ID NO: 1328440 - RNA, 21 nt, Human
acccuaaaagcuccuuccccu

SEQ ID NO: 1328441 - RNA, 21 nt, Human
agacaacaaacuuuuaaaaca

SEQ ID NO: 1328442 - RNA, 19 nt, Human
agcagccuucuuuuucuuc

SEQ ID NO: 1328443 - RNA, 23 nt, Human
agcagccuucuuuuucuucuucu

SEQ ID NO: 1328444 - RNA, 23 nt, Human
agcuuuuggggcuuucucaugcu

SEQ ID NO: 1328445 - RNA, 19 nt, Human
aggcaaaauuguacaucaa

SEQ ID NO: 1328446 - RNA, 22 nt, Human
agucaucuggucauuucugauu

SEQ ID NO: 1328447 - RNA, 22 nt, Human
auaaaauuuuccugacugguua

SEQ ID NO: 1328448 - RNA, 23 nt, Human
auaaaauuuuccugacugguuaa

SEQ ID NO: 1328449 - RNA, 21 nt, Human
auccuuuucuuucucaguucc

SEQ ID NO: 1328450 - RNA, 23 nt, Human
caaaaguauuaauuuuauuccca

SEQ ID NO: 1328451 - RNA, 19 nt, Human
caaagcagcauaugacagc

SEQ ID NO: 1328452 - RNA, 18 nt, Human
cagcauccaaagaugaca

SEQ ID NO: 1328453 - RNA, 23 nt, Human
cagccuaaacaaaauucauacaa

SEQ ID NO: 1328454 - RNA, 22 nt, Human
cagcucugaccuccccgugaag

SEQ ID NO: 1328455 - RNA, 18 nt, Human
caguaaagggcaagacug

SEQ ID NO: 1328456 - RNA, 21 nt, Human
cauaguaaugaacuuaagaag

SEQ ID NO: 1328457 - RNA, 21 nt, Human
cauuauuacuaaaguggaggu

SEQ ID NO: 1328458 - RNA, 22 nt, Human
ccaaaaacaagaaaauucaugc

SEQ ID NO: 1328459 - RNA, 25 nt, Human
ccaaauaucuuaaccacuaguacga

SEQ ID NO: 1328460 - RNA, 20 nt, Human
ccaagccaaaguguagucag

SEQ ID NO: 1328461 - RNA, 23 nt, Human
cccaagccaaaguguagucaaaa

SEQ ID NO: 1328462 - RNA, 18 nt, Human
cccccaacccuaaaagcu

SEQ ID NO: 1328463 - RNA, 19 nt, Human
cccccaacccuaaaagcuc

SEQ ID NO: 1328464 - RNA, 22 nt, Human
cccccaacccuaaaagcuccuu

SEQ ID NO: 1328465 - RNA, 22 nt, Human
ccccccaacccuaaaagcuccc

SEQ ID NO: 1328466 - RNA, 21 nt, Human
cuaaagagauagcaaaccacc

SEQ ID NO: 1328467 - RNA, 18 nt, Human
cuacagaguaaggguuuu

SEQ ID NO: 1328468 - RNA, 22 nt, Human
cuagcagccuucuuuuucuucu

SEQ ID NO: 1328469 - RNA, 23 nt, Human
cuuaagacagcaagagugaggag

SEQ ID NO: 1328470 - RNA, 20 nt, Human
cuuguuucuuauccucaucu

SEQ ID NO: 1328471 - RNA, 24 nt, Human
gcaaaccaccccccaacccuaaaa

SEQ ID NO: 1328472 - RNA, 21 nt, Human
gcauccaaagaugacacuaag

SEQ ID NO: 1328473 - RNA, 19 nt, Human
gcuaaagagauagcaaacc

SEQ ID NO: 1328474 - RNA, 23 nt, Human
ggaugugugaggaucaaaggcac

SEQ ID NO: 1328475 - RNA, 26 nt, Human
uaaaacauuacauuuacuaagauucu

SEQ ID NO: 1328476 - RNA, 22 nt, Human
uaaaauacacuuaucuacagag

SEQ ID NO: 1328477 - RNA, 21 nt, Human
uaaaauagcuauuuauucagc

SEQ ID NO: 1328478 - RNA, 18 nt, Human
uaaaguggagguaaaucc

SEQ ID NO: 1328479 - RNA, 22 nt, Human
uaacacauucuaaugcuaaaaa

SEQ ID NO: 1328480 - RNA, 19 nt, Human
uaagcucaguaaagggcaa

SEQ ID NO: 1328481 - RNA, 18 nt, Human
uaaggguuuugaaauauu

SEQ ID NO: 1328482 - RNA, 24 nt, Human
uacaaagacaacaaacuuuuaaaa

SEQ ID NO: 1328483 - RNA, 24 nt, Human
uacuaagauucuggcaauaagaca

SEQ ID NO: 1328484 - RNA, 19 nt, Human
uauacgaggggaaaaaauu

SEQ ID NO: 1328485 - RNA, 19 nt, Human
uauguuguaguuuucacag

SEQ ID NO: 1328486 - RNA, 23 nt, Human
ucacucaaagcagcauaugacag

SEQ ID NO: 1328487 - RNA, 23 nt, Human
ucagcaguagacaugaggcacaa

SEQ ID NO: 1328488 - RNA, 21 nt, Human
ucaucuggucauuucugauua

SEQ ID NO: 1328489 - RNA, 21 nt, Human
uccaaaaacaagaaaauucau

SEQ ID NO: 1328490 - RNA, 23 nt, Human
uccccagguaaauaaaaguauac

SEQ ID NO: 1328491 - RNA, 21 nt, Human
ucgcaccuccucaauauacuc

SEQ ID NO: 1328492 - RNA, 21 nt, Human
ugaaauauuaauguaaucccu

SEQ ID NO: 1328493 - RNA, 22 nt, Human
ugaagcauggcuacugugucca

SEQ ID NO: 1328494 - RNA, 23 nt, Human
ugacacagggagagcaauaaugu

SEQ ID NO: 1328495 - RNA, 22 nt, Human
ugacagcauccaaagaugacug

SEQ ID NO: 1328496 - RNA, 20 nt, Human
ugacauggagcuuucagaag

SEQ ID NO: 1328497 - RNA, 18 nt, Human
ugcugcaaauggcuguuu

SEQ ID NO: 1328498 - RNA, 18 nt, Human
ugcugguagccagcucug

SEQ ID NO: 1328499 - RNA, 18 nt, Human
uggagcuuucagaagauu

SEQ ID NO: 1328500 - RNA, 27 nt, Human
ugucuauuuaaaauaauuccucuccca

SEQ ID NO: 1328501 - RNA, 21 nt, Human
ugugaacgguucuucuuuuuc

SEQ ID NO: 1328502 - RNA, 20 nt, Human
ugugaggaucaaaggcacac

SEQ ID NO: 1328503 - RNA, 22 nt, Human
uuaagacagcaagagugaggag

SEQ ID NO: 1328504 - RNA, 21 nt, Human
uuaauauacaaagacaacaaa

SEQ ID NO: 1328505 - RNA, 24 nt, Human
uucucaguuccaucuuuugacuuc

SEQ ID NO: 1328506 - RNA, 21 nt, Human
uuucacaguugaaauuuccuc

SEQ ID NO: 1328507 - RNA, 22 nt, Human
uuuuuuccuguugcuuuuucuc

SEQ ID NO: 1328508 - RNA, 19 nt, Human
cccucuucucuucucucuc

SEQ ID NO: 1328509 - RNA, 23 nt, Human
ccuccuccucauuuucccugagc

SEQ ID NO: 1328510 - RNA, 18 nt, Human
cgagucaguccuggagca

SEQ ID NO: 1328511 - RNA, 23 nt, Human
cucuucucucuccucuauccuug

SEQ ID NO: 1328512 - RNA, 22 nt, Human
cucuucucuucucucuccucua

SEQ ID NO: 1328513 - RNA, 18 nt, Human
cuucucucuccucuaucc

SEQ ID NO: 1328514 - RNA, 23 nt, Human
uccucauuuucccugagcagugg

SEQ ID NO: 1328515 - RNA, 19 nt, Human
uccuggaaaauguucugcu

SEQ ID NO: 1328516 - RNA, 23 nt, Human
uccuggagcaucaugucuuuggu

SEQ ID NO: 1328517 - RNA, 20 nt, Human
ucucccucuucucuucucuc

SEQ ID NO: 1328518 - RNA, 23 nt, Human
ucugcuguucucccucuucucuu

SEQ ID NO: 1328519 - RNA, 19 nt, Human
ucuucucuucucucuccuc

SEQ ID NO: 1328520 - RNA, 18 nt, Human
aaacaagaaaagcccuga

SEQ ID NO: 1328521 - RNA, 19 nt, Human
acaagaaaagcccugacgc

SEQ ID NO: 1328522 - RNA, 18 nt, Human
caagaaaagcccugacgc

SEQ ID NO: 1328523 - RNA, 20 nt, Human
cccgcccagucccgcccgcc

SEQ ID NO: 1328524 - RNA, 24 nt, Human
ccgcccgccgagguccguguccaa

SEQ ID NO: 1328525 - RNA, 19 nt, Human
ccgccgagguccgugucca

SEQ ID NO: 1328526 - RNA, 19 nt, Human
gauccuccucgcgcacccc

SEQ ID NO: 1328527 - RNA, 22 nt, Human
gggaaagauggugaaaaaaugc

SEQ ID NO: 1328528 - RNA, 23 nt, Human
ggugaaaaaaugcgaggaaaaga

SEQ ID NO: 1328529 - RNA, 30 nt, Human
uaacuuuauuaaacaagaaaagcccugacu

SEQ ID NO: 1328530 - RNA, 23 nt, Human
uauuaaacaagaaaagcccugac

SEQ ID NO: 1328531 - RNA, 20 nt, Human
ugaugccccgccccgcccag

SEQ ID NO: 1328532 - RNA, 23 nt, Human
uuggcuccuggagauugagggaa

SEQ ID NO: 1328533 - RNA, 21 nt, Human
aaaacauuaccugaaugaguu

SEQ ID NO: 1328534 - RNA, 18 nt, Human
aagaagccgaauaaggga

SEQ ID NO: 1328535 - RNA, 20 nt, Human
aaggaaaagcaggaauaaug

SEQ ID NO: 1328536 - RNA, 22 nt, Human
aauaagggaacacuaggaaaaa

SEQ ID NO: 1328537 - RNA, 20 nt, Human
aauuucuccauuuccaaaga

SEQ ID NO: 1328538 - RNA, 21 nt, Human
acaaaaaaucguuuccccuca

SEQ ID NO: 1328539 - RNA, 18 nt, Human
agcuauuuagaccucauu

SEQ ID NO: 1328540 - RNA, 23 nt, Human
aggauaaaagugacaaaaaagga

SEQ ID NO: 1328541 - RNA, 22 nt, Human
augaagccaaugguguuaugcu

SEQ ID NO: 1328542 - RNA, 23 nt, Human
cacaaaaaaucguuuccccucac

SEQ ID NO: 1328543 - RNA, 24 nt, Human
cauacccacuugaaaaaucaaagg

SEQ ID NO: 1328544 - RNA, 23 nt, Human
ccaaagaagccgaauaagggaac

SEQ ID NO: 1328545 - RNA, 19 nt, Human
cuaggaggcauacccacuu

SEQ ID NO: 1328546 - RNA, 20 nt, Human
cuaggaggcauacccacuug

SEQ ID NO: 1328547 - RNA, 19 nt, Human
gaggcauacccacuugaaa

SEQ ID NO: 1328548 - RNA, 27 nt, Human
gggaacacuaggaaaaaaccgguaccc

SEQ ID NO: 1328549 - RNA, 19 nt, Human
uacccacuugaaaaaucaa

SEQ ID NO: 1328550 - RNA, 25 nt, Human
uccauuguccagaacacagucauac

SEQ ID NO: 1328551 - RNA, 21 nt, Human
ugaaaugcaaaacauuaccug

SEQ ID NO: 1328552 - RNA, 22 nt, Human
ugacaaaaaaggaaaagcagga

SEQ ID NO: 1328553 - RNA, 19 nt, Human
uguuaugcucuggaauguu

SEQ ID NO: 1328554 - RNA, 25 nt, Human
uuagauauuuguacagaaauucaac

SEQ ID NO: 1328555 - RNA, 21 nt, Human
uucuaaaugcaucagccucaa

SEQ ID NO: 1328556 - RNA, 23 nt, Human
acagacagacgugcacacugagg

SEQ ID NO: 1328557 - RNA, 23 nt, Human
accccuuccgcccucaggccccu

SEQ ID NO: 1328558 - RNA, 18 nt, Human
accuaccuccuggccagc

SEQ ID NO: 1328559 - RNA, 19 nt, Human
acugaggccaccgaaggac

SEQ ID NO: 1328560 - RNA, 20 nt, Human
agagcaggaaggaaggcugg

SEQ ID NO: 1328561 - RNA, 22 nt, Human
agcacagagagccuggcuccgg

SEQ ID NO: 1328562 - RNA, 26 nt, Human
agccacaagcacagacggacagacag

SEQ ID NO: 1328563 - RNA, 19 nt, Human
agcuggccugugaaccacu

SEQ ID NO: 1328564 - RNA, 28 nt, Human
aggaaggcuggccucggcagugagaggc

SEQ ID NO: 1328565 - RNA, 24 nt, Human
agggacuggccggcgaaaugggag

SEQ ID NO: 1328566 - RNA, 21 nt, Human
caacccccggccagcuggccu

SEQ ID NO: 1328567 - RNA, 21 nt, Human
caagcacagacggacagacag

SEQ ID NO: 1328568 - RNA, 19 nt, Human
cacagagagccuggcuccg

SEQ ID NO: 1328569 - RNA, 22 nt, Human
caggccccucuuccugccucuc

SEQ ID NO: 1328570 - RNA, 24 nt, Human
cagggcaguggggcauggagccgg

SEQ ID NO: 1328571 - RNA, 19 nt, Human
caucggccaggcuucugag

SEQ ID NO: 1328572 - RNA, 25 nt, Human
cauggcacugagagagcagagcagg

SEQ ID NO: 1328573 - RNA, 18 nt, Human
ccaggcuucugagggaag

SEQ ID NO: 1328574 - RNA, 28 nt, Human
cccaaaagcacccaucggccaggcuucu

SEQ ID NO: 1328575 - RNA, 24 nt, Human
ccccaaaccccuuccgcccucagg

SEQ ID NO: 1328576 - RNA, 21 nt, Human
ccccggccagcuggccuguga

SEQ ID NO: 1328577 - RNA, 20 nt, Human
ccuccgugucaguccuccuc

SEQ ID NO: 1328578 - RNA, 21 nt, Human
ccuuccgcccucaggccccuc

SEQ ID NO: 1328579 - RNA, 21 nt, Human
cgaaaugggagccccaaaccc

SEQ ID NO: 1328580 - RNA, 23 nt, Human
cuccccaacccccggccagcugg

SEQ ID NO: 1328581 - RNA, 19 nt, Human
cucgcagcucagucaccgu

SEQ ID NO: 1328582 - RNA, 23 nt, Human
cucggcagugagaggccugugug

SEQ ID NO: 1328583 - RNA, 23 nt, Human
cugagaggcuccccaaaagcacc

SEQ ID NO: 1328584 - RNA, 22 nt, Human
cugaggccaccgaaggacucau

SEQ ID NO: 1328585 - RNA, 21 nt, Human
gcacaguagucacgggucgug

SEQ ID NO: 1328586 - RNA, 20 nt, Human
gcagcucagucaccgugggg

SEQ ID NO: 1328587 - RNA, 19 nt, Human
gcaguggggcauggagccg

SEQ ID NO: 1328588 - RNA, 23 nt, Human
gcgaagccaggucugguggccuu

SEQ ID NO: 1328589 - RNA, 25 nt, Human
gcgagcggguccugcgugucugcgg

SEQ ID NO: 1328590 - RNA, 23 nt, Human
gcuguggcgggggaccucagcca

SEQ ID NO: 1328591 - RNA, 20 nt, Human
ggacggguaagcaggagggc

SEQ ID NO: 1328592 - RNA, 21 nt, Human
ggccccucuuccugccucucc

SEQ ID NO: 1328593 - RNA, 21 nt, Human
ggccucggcagugagaggccu

SEQ ID NO: 1328594 - RNA, 19 nt, Human
gggcauggagccggcugcu

SEQ ID NO: 1328595 - RNA, 20 nt, Human
ggguaagcaggagggcgagc

SEQ ID NO: 1328596 - RNA, 18 nt, Human
ggucugguggccuugccc

SEQ ID NO: 1328597 - RNA, 18 nt, Human
gugggguggguggaggca

SEQ ID NO: 1328598 - RNA, 18 nt, Human
gugggguggguggaggca

SEQ ID NO: 1328599 - RNA, 19 nt, Human
uagccacaagcacagacgg

SEQ ID NO: 1328600 - RNA, 19 nt, Human
ucaguccuccuccccugcc

SEQ ID NO: 1328601 - RNA, 20 nt, Human
ucaguccuccuccccugcca

SEQ ID NO: 1328602 - RNA, 21 nt, Human
ucggcagugagaggccugugu

SEQ ID NO: 1328603 - RNA, 19 nt, Human
uguguggcuccccaacccc

SEQ ID NO: 1328604 - RNA, 20 nt, Human
aaaggccccaauguuaacau

SEQ ID NO: 1328605 - RNA, 18 nt, Human
accagauacaagcccauc

SEQ ID NO: 1328606 - RNA, 21 nt, Human
agaaggcagcuuuugugaaag

SEQ ID NO: 1328607 - RNA, 24 nt, Human
agaaggcagcuuuugugaaaguug

SEQ ID NO: 1328608 - RNA, 18 nt, Human
agcaggaauuacagaucc

SEQ ID NO: 1328609 - RNA, 19 nt, Human
agcaggaauuacagaucca

SEQ ID NO: 1328610 - RNA, 21 nt, Human
aggacacugccuguugacuuc

SEQ ID NO: 1328611 - RNA, 25 nt, Human
aggaggcuuuggugaaagauaacca

SEQ ID NO: 1328612 - RNA, 21 nt, Human
aggcuuuggugaaagauaacc

SEQ ID NO: 1328613 - RNA, 20 nt, Human
aguggaaaguucucugucuu

SEQ ID NO: 1328614 - RNA, 19 nt, Human
ccauaaacaugccucuagu

SEQ ID NO: 1328615 - RNA, 27 nt, Human
ccauaaacaugccucuaguaucauccu

SEQ ID NO: 1328616 - RNA, 22 nt, Human
cccaggaagaauacauugugcc

SEQ ID NO: 1328617 - RNA, 21 nt, Human
ccuagcugaaggucugacaca

SEQ ID NO: 1328618 - RNA, 19 nt, Human
ccuagcuucacguugucuc

SEQ ID NO: 1328619 - RNA, 21 nt, Human
cggaagccuccuccaaccucc

SEQ ID NO: 1328620 - RNA, 23 nt, Human
cucaaguuggaguucacugagaa

SEQ ID NO: 1328621 - RNA, 19 nt, Human
cucguauaaccaauagucu

SEQ ID NO: 1328622 - RNA, 19 nt, Human
gaagaauacauugugcccc

SEQ ID NO: 1328623 - RNA, 19 nt, Human
gagaacuuucuggggaaga

SEQ ID NO: 1328624 - RNA, 21 nt, Human
gagcaggaauuacagauccag

SEQ ID NO: 1328625 - RNA, 19 nt, Human
gcuucggaugcacuaacug

SEQ ID NO: 1328626 - RNA, 19 nt, Human
ggaagccuccuccaaccuc

SEQ ID NO: 1328627 - RNA, 21 nt, Human
gugucugaggaggaugauucu

SEQ ID NO: 1328628 - RNA, 18 nt, Human
gugugaggcguggaugac

SEQ ID NO: 1328629 - RNA, 21 nt, Human
uaaaaguuucuuugaggcucu

SEQ ID NO: 1328630 - RNA, 21 nt, Human
uacgguauucuaauagagaaa

SEQ ID NO: 1328631 - RNA, 21 nt, Human
ucagggcucuuuacccaggaa

SEQ ID NO: 1328632 - RNA, 22 nt, Human
ucaguuaaauuagaauuucuaa

SEQ ID NO: 1328633 - RNA, 19 nt, Human
uccaggguuuuauguaggg

SEQ ID NO: 1328634 - RNA, 27 nt, Human
ucgcugagguguuccaacuugagguug

SEQ ID NO: 1328635 - RNA, 28 nt, Human
ucggaagccuccuccaaccuccaacuga

SEQ ID NO: 1328636 - RNA, 19 nt, Human
ucugucagggcucuuuacc

SEQ ID NO: 1328637 - RNA, 21 nt, Human
ugaauauuuucccgugugcuu

SEQ ID NO: 1328638 - RNA, 23 nt, Human
ugacacagguuccuuuucuccag

SEQ ID NO: 1328639 - RNA, 20 nt, Human
ugagcaggaauuacagaucc

SEQ ID NO: 1328640 - RNA, 26 nt, Human
ugagcaggaauuacagauccagguga

SEQ ID NO: 1328641 - RNA, 18 nt, Human
ugaguauuggcuggaagg

SEQ ID NO: 1328642 - RNA, 22 nt, Human
ugcaacuuuguuggcacagaag

SEQ ID NO: 1328643 - RNA, 22 nt, Human
ugcuguacaggugugugaggcg

SEQ ID NO: 1328644 - RNA, 22 nt, Human
uggauucuggggugugcaauuc

SEQ ID NO: 1328645 - RNA, 21 nt, Human
uggggaagaaauauucucaaa

SEQ ID NO: 1328646 - RNA, 24 nt, Human
uggggaucugguuuugugaauauu

SEQ ID NO: 1328647 - RNA, 24 nt, Human
uggggugauacacuaaugagugga

SEQ ID NO: 1328648 - RNA, 18 nt, Human
uggugaaagauaaccaug

SEQ ID NO: 1328649 - RNA, 22 nt, Human
ugugaauauuuucccgugugcu

SEQ ID NO: 1328650 - RNA, 21 nt, Human
ugugcaggcguuuccaggguu

SEQ ID NO: 1328651 - RNA, 18 nt, Human
uucuaggugaggugaugg

SEQ ID NO: 1328652 - RNA, 23 nt, Human
uucuaggugaggugauggaggac

SEQ ID NO: 1328653 - RNA, 22 nt, Human
uucuugcagacccaguucaguu

SEQ ID NO: 1328654 - RNA, 24 nt, Human
uuggcacagaaggcagcuuuugug

SEQ ID NO: 1328655 - RNA, 19 nt, Human
uuguuggcacagaaggcag

SEQ ID NO: 1328656 - RNA, 24 nt, Human
uuucccgugugcuugagcaggaau

SEQ ID NO: 1328657 - RNA, 20 nt, Human
uuuuccuagcuucacguugu

SEQ ID NO: 1328658 - RNA, 22 nt, Human
uuuuccuagcuucacguugucu

SEQ ID NO: 1328659 - RNA, 21 nt, Human
cacuuccauuccaggauggga

SEQ ID NO: 1328660 - RNA, 21 nt, Human
cucuucccaaggcagccuuag

SEQ ID NO: 1328661 - RNA, 22 nt, Human
ggcaacucuuaguagguaacac

SEQ ID NO: 1328662 - RNA, 18 nt, Human
ucccaaggcagccuuagc

SEQ ID NO: 1328663 - RNA, 21 nt, Human
uggagauuauagauggagguu

SEQ ID NO: 1328664 - RNA, 25 nt, Human
ccuagaaaaccauauuuucccauuu

SEQ ID NO: 1328665 - RNA, 22 nt, Human
gaaaaggagccuuaguguccug

SEQ ID NO: 1328666 - RNA, 18 nt, Human
gaaguuuucccuagcucu

SEQ ID NO: 1328667 - RNA, 24 nt, Human
ucucuaaaauagagccucaacuuu

SEQ ID NO: 1328668 - RNA, 18 nt, Human
ugagacugguaaaaggcu

SEQ ID NO: 1328669 - RNA, 23 nt, Human
uguauuagaaauaucuuugugca

SEQ ID NO: 1328670 - RNA, 24 nt, Human
uugaaguuuucccuagcucuuucu

SEQ ID NO: 1328671 - RNA, 24 nt, Human
aaauccacugcagauuaggggugg

SEQ ID NO: 1328672 - RNA, 20 nt, Human
accccuuguccagcagccuc

SEQ ID NO: 1328673 - RNA, 21 nt, Human
acugcccccuggcugauguac

SEQ ID NO: 1328674 - RNA, 18 nt, Human
agauccuccaggguagca

SEQ ID NO: 1328675 - RNA, 23 nt, Human
agugcugcgucuuuggcacugcc

SEQ ID NO: 1328676 - RNA, 20 nt, Human
cacacucuccagcuccuucc

SEQ ID NO: 1328677 - RNA, 19 nt, Human
caccagaaguggcuguguc

SEQ ID NO: 1328678 - RNA, 22 nt, Human
cacugaguugacugauuauugc

SEQ ID NO: 1328679 - RNA, 22 nt, Human
cagaugaugcauggccuucccc

SEQ ID NO: 1328680 - RNA, 21 nt, Human
cagccucucauccugcuccug

SEQ ID NO: 1328681 - RNA, 22 nt, Human
caucuccuccugguccugggcc

SEQ ID NO: 1328682 - RNA, 21 nt, Human
ccagaaguggcugugucaggg

SEQ ID NO: 1328683 - RNA, 21 nt, Human
ccagcagccucuccuguuccu

SEQ ID NO: 1328684 - RNA, 21 nt, Human
ccagcagccucuccuguuccu

SEQ ID NO: 1328685 - RNA, 20 nt, Human
ccccaggugagugguaacca

SEQ ID NO: 1328686 - RNA, 18 nt, Human
cccguagauaccuguugc

SEQ ID NO: 1328687 - RNA, 21 nt, Human
cccguagauaccuguugcuga

SEQ ID NO: 1328688 - RNA, 22 nt, Human
cccguagauaccuguugcugaa

SEQ ID NO: 1328689 - RNA, 22 nt, Human
ccucuccagcucccacagaguc

SEQ ID NO: 1328690 - RNA, 18 nt, Human
ccugacgauguccuccuc

SEQ ID NO: 1328691 - RNA, 23 nt, Human
ccugcagccucuccuccugucuc

SEQ ID NO: 1328692 - RNA, 25 nt, Human
ccugcagccucuccuccugucuccu

SEQ ID NO: 1328693 - RNA, 22 nt, Human
ccugcuccugaagccucuccug

SEQ ID NO: 1328694 - RNA, 20 nt, Human
ccuuguccagcagccucucc

SEQ ID NO: 1328695 - RNA, 21 nt, Human
cuccugucuccuguucaggag

SEQ ID NO: 1328696 - RNA, 24 nt, Human
cugaagccucuccuguuccagcag

SEQ ID NO: 1328697 - RNA, 23 nt, Human
cugcagccucuccuccugucucc

SEQ ID NO: 1328698 - RNA, 22 nt, Human
cuguuagcuccugcuggaaugc

SEQ ID NO: 1328699 - RNA, 20 nt, Human
gcacugcccccuggcugaug

SEQ ID NO: 1328700 - RNA, 19 nt, Human
gccacagccucucauccug

SEQ ID NO: 1328701 - RNA, 21 nt, Human
gcccccuggcugauguacuuu

SEQ ID NO: 1328702 - RNA, 22 nt, Human
gccuggagcugucuucccacac

SEQ ID NO: 1328703 - RNA, 21 nt, Human
gcuccugaagccucuccuguu

SEQ ID NO: 1328704 - RNA, 19 nt, Human
gcuggaaugccagggcucu

SEQ ID NO: 1328705 - RNA, 19 nt, Human
ggcucuggggccagggguu

SEQ ID NO: 1328706 - RNA, 25 nt, Human
gggggcucuggggccagggguucag

SEQ ID NO: 1328707 - RNA, 20 nt, Human
ggggugguagucaggguccc

SEQ ID NO: 1328708 - RNA, 22 nt, Human
ggucucaucuuguagcugcucc

SEQ ID NO: 1328709 - RNA, 23 nt, Human
uagcagaugaugcauggccuucc

SEQ ID NO: 1328710 - RNA, 23 nt, Human
uauugcggagcuugagugcaggg

SEQ ID NO: 1328711 - RNA, 24 nt, Human
ucaguggugaucuucaucuccucc

SEQ ID NO: 1328712 - RNA, 23 nt, Human
uccugcuccugaagccucuccug

SEQ ID NO: 1328713 - RNA, 20 nt, Human
ucucaucuuguagcugcucc

SEQ ID NO: 1328714 - RNA, 20 nt, Human
ucuccagcucccacagaguc

SEQ ID NO: 1328715 - RNA, 28 nt, Human
ucuccagcuccuuccuuagggggccgcc

SEQ ID NO: 1328716 - RNA, 24 nt, Human
ucuccugcugccacagccucucau

SEQ ID NO: 1328717 - RNA, 20 nt, Human
ucuuuggcacugcccccugg

SEQ ID NO: 1328718 - RNA, 18 nt, Human
ugaagcucuaguuucucc

SEQ ID NO: 1328719 - RNA, 21 nt, Human
ugagugguaaccaccagaagu

SEQ ID NO: 1328720 - RNA, 22 nt, Human
ugaguugacugauuauugcgga

SEQ ID NO: 1328721 - RNA, 20 nt, Human
ugcgucuuuggcacugcccu

SEQ ID NO: 1328722 - RNA, 21 nt, Human
ugcugcgucuuuggcacugcc

SEQ ID NO: 1328723 - RNA, 24 nt, Human
uggagcugucuucccacacucucc

SEQ ID NO: 1328724 - RNA, 21 nt, Human
uggcacugcccccuggcugau

SEQ ID NO: 1328725 - RNA, 22 nt, Human
uggcugauguacuuucucaugg

SEQ ID NO: 1328726 - RNA, 19 nt, Human
uguccagcagccucuccug

SEQ ID NO: 1328727 - RNA, 24 nt, Human
uguucaggagacucaacaucugau

SEQ ID NO: 1328728 - RNA, 19 nt, Human
uucaguggugaucuucauc

SEQ ID NO: 1328729 - RNA, 19 nt, Human
uuccaccucagccuggagc

SEQ ID NO: 1328730 - RNA, 19 nt, Human
acauugacauuaaauauau

SEQ ID NO: 1328731 - RNA, 22 nt, Human
cacaucaacauugacauuaaau

SEQ ID NO: 1328732 - RNA, 24 nt, Human
cacuucuuuccaucucucauggga

SEQ ID NO: 1328733 - RNA, 24 nt, Human
cugagggcagagacuaugacuuac

SEQ ID NO: 1328734 - RNA, 24 nt, Human
uauaaauugccugagggcagagac

SEQ ID NO: 1328735 - RNA, 24 nt, Human
ucuauacugcuauaugucuuugag

SEQ ID NO: 1328736 - RNA, 19 nt, Human
ugaaagggagaacaaugca

SEQ ID NO: 1328737 - RNA, 21 nt, Human
agacauaugggagaggucaga

SEQ ID NO: 1328738 - RNA, 19 nt, Human
agacugccacgugaccggc

SEQ ID NO: 1328739 - RNA, 23 nt, Human
agaggucagagaacuggcgagcc

SEQ ID NO: 1328740 - RNA, 23 nt, Human
agcugcagcagaguccuaagcag

SEQ ID NO: 1328741 - RNA, 20 nt, Human
aggccagugcuaggugggga

SEQ ID NO: 1328742 - RNA, 18 nt, Human
auggggaaacccagugcc

SEQ ID NO: 1328743 - RNA, 21 nt, Human
ccuccaaccagggaaggcggg

SEQ ID NO: 1328744 - RNA, 21 nt, Human
ccucugaagcagagaagcaga

SEQ ID NO: 1328745 - RNA, 21 nt, Human
ccucugagacugcuggcugag

SEQ ID NO: 1328746 - RNA, 18 nt, Human
cgucuauguuccucugag

SEQ ID NO: 1328747 - RNA, 18 nt, Human
gaagcagagaagcagagg

SEQ ID NO: 1328748 - RNA, 18 nt, Human
gcagaguccuaagcagac

SEQ ID NO: 1328749 - RNA, 21 nt, Human
gccaggcuucuuguggaccau

SEQ ID NO: 1328750 - RNA, 18 nt, Human
gcgagccugggccucuga

SEQ ID NO: 1328751 - RNA, 21 nt, Human
uccauuccucauccaacuauu

SEQ ID NO: 1328752 - RNA, 21 nt, Human
ucuauguuccucugagacugc

SEQ ID NO: 1328753 - RNA, 23 nt, Human
ucuauguuccucugagacugcug

SEQ ID NO: 1328754 - RNA, 21 nt, Human
ucugaagcagagaagcagagg

SEQ ID NO: 1328755 - RNA, 21 nt, Human
ucugcugggagccuuccaaca

SEQ ID NO: 1328756 - RNA, 24 nt, Human
ucugugcggacagccgaugcuggg

SEQ ID NO: 1328757 - RNA, 20 nt, Human
ugagaagccaucaggugggu

SEQ ID NO: 1328758 - RNA, 18 nt, Human
ugagacugcuggcugaga

SEQ ID NO: 1328759 - RNA, 19 nt, Human
ugaggacagcugcagcaga

SEQ ID NO: 1328760 - RNA, 19 nt, Human
ugccaggcuucuuguggac

SEQ ID NO: 1328761 - RNA, 20 nt, Human
ugcccuguggguagugggau

SEQ ID NO: 1328762 - RNA, 25 nt, Human
uggcugagaagccaucagguggguu

SEQ ID NO: 1328763 - RNA, 27 nt, Human
uggcugagaagccaucagguggguucc

SEQ ID NO: 1328764 - RNA, 23 nt, Human
ugggagaggucagagaacuggcg

SEQ ID NO: 1328765 - RNA, 21 nt, Human
uucagcccagcccacagcccu

SEQ ID NO: 1328766 - RNA, 19 nt, Human
uuccauuccucauccaacu

SEQ ID NO: 1328767 - RNA, 18 nt, Human
uucuuguggaccaugcag

SEQ ID NO: 1328768 - RNA, 22 nt, Human
aaaguuuuggggcaccagcuau

SEQ ID NO: 1328769 - RNA, 24 nt, Human
aagcagccccuugagagcaagagc

SEQ ID NO: 1328770 - RNA, 24 nt, Human
aagccaaguggaugguggcccggc

SEQ ID NO: 1328771 - RNA, 24 nt, Human
acagagccaggcccagaaagaagc

SEQ ID NO: 1328772 - RNA, 23 nt, Human
acccagguggccaccaggagaau

SEQ ID NO: 1328773 - RNA, 19 nt, Human
acccugcagggcccagccc

SEQ ID NO: 1328774 - RNA, 23 nt, Human
acucuggguccuguccaccuggu

SEQ ID NO: 1328775 - RNA, 21 nt, Human
agcaguagcacacaagccaca

SEQ ID NO: 1328776 - RNA, 23 nt, Human
agcauccgccuccuacaggcagc

SEQ ID NO: 1328777 - RNA, 20 nt, Human
aggcaacuuugucucaucuu

SEQ ID NO: 1328778 - RNA, 19 nt, Human
aggccucugccccacucag

SEQ ID NO: 1328779 - RNA, 21 nt, Human
aggggaugaagcuaagguggu

SEQ ID NO: 1328780 - RNA, 23 nt, Human
agggggaaaagaaaagguagucg

SEQ ID NO: 1328781 - RNA, 18 nt, Human
agguggccagggagggag

SEQ ID NO: 1328782 - RNA, 27 nt, Human
aggugguagcuggucuuggcccgccug

SEQ ID NO: 1328783 - RNA, 21 nt, Human
auccucgccugccuucugcca

SEQ ID NO: 1328784 - RNA, 21 nt, Human
caaaugcagacaugcacauac

SEQ ID NO: 1328785 - RNA, 19 nt, Human
caacacaucugucacuugc

SEQ ID NO: 1328786 - RNA, 21 nt, Human
caagagcagaggccaggccag

SEQ ID NO: 1328787 - RNA, 22 nt, Human
cacggcccagcagaggcauccc

SEQ ID NO: 1328788 - RNA, 31 nt, Human
cagagccaggcccagaaagaagcauccgccu

SEQ ID NO: 1328789 - RNA, 22 nt, Human
cagcaccaucccuggugcacgg

SEQ ID NO: 1328790 - RNA, 24 nt, Human
cagcagcuuggaugaagcagugcu

SEQ ID NO: 1328791 - RNA, 23 nt, Human
cagcaguagcacacaagccacag

SEQ ID NO: 1328792 - RNA, 19 nt, Human
cagccagcaguagcacaca

SEQ ID NO: 1328793 - RNA, 22 nt, Human
cagccccuugagagcaagagca

SEQ ID NO: 1328794 - RNA, 23 nt, Human
caggcagccacagcugaccccug

SEQ ID NO: 1328795 - RNA, 22 nt, Human
cagggacacacauucucuuccu

SEQ ID NO: 1328796 - RNA, 19 nt, Human
caucuuguucacugugaac

SEQ ID NO: 1328797 - RNA, 22 nt, Human
ccagcagucacucuccaucucu

SEQ ID NO: 1328798 - RNA, 21 nt, Human
ccagcaucagcuagggugcag

SEQ ID NO: 1328799 - RNA, 19 nt, Human
cccagaaagaagcauccgc

SEQ ID NO: 1328800 - RNA, 21 nt, Human
cccagagguucugacuggggc

SEQ ID NO: 1328801 - RNA, 21 nt, Human
ccccuugagagcaagagcaga

SEQ ID NO: 1328802 - RNA, 21 nt, Human
ccucgccugccuucugccagc

SEQ ID NO: 1328803 - RNA, 23 nt, Human
ccucgccugccuucugccagcag

SEQ ID NO: 1328804 - RNA, 19 nt, Human
ccuuacccuugggaaaaaa

SEQ ID NO: 1328805 - RNA, 20 nt, Human
cgccuccuacaggcagccac

SEQ ID NO: 1328806 - RNA, 23 nt, Human
cgugcagggcccacaugaugucc

SEQ ID NO: 1328807 - RNA, 21 nt, Human
cuaccacgccgcuuacuccuc

SEQ ID NO: 1328808 - RNA, 21 nt, Human
cucaucuuggcuggccagcag

SEQ ID NO: 1328809 - RNA, 22 nt, Human
cucuccaucucugcuggcuggg

SEQ ID NO: 1328810 - RNA, 23 nt, Human
cucucggugaagauuuguuucac

SEQ ID NO: 1328811 - RNA, 26 nt, Human
cucuucauuguuguuucccucuucca

SEQ ID NO: 1328812 - RNA, 18 nt, Human
cugagaucccagagguuc

SEQ ID NO: 1328813 - RNA, 22 nt, Human
cuggugcacggcccagcagagg

SEQ ID NO: 1328814 - RNA, 26 nt, Human
cuucaaaggacgccguucaccucucc

SEQ ID NO: 1328815 - RNA, 27 nt, Human
cuucauuguuguuucccucuuccauuu

SEQ ID NO: 1328816 - RNA, 21 nt, Human
cuugacccugcagggcccagc

SEQ ID NO: 1328817 - RNA, 22 nt, Human
cuuugaagucggccaugaggag

SEQ ID NO: 1328818 - RNA, 19 nt, Human
gaaagaagcauccgccucc

SEQ ID NO: 1328819 - RNA, 19 nt, Human
gaccaggcucacaaggcuc

SEQ ID NO: 1328820 - RNA, 21 nt, Human
gacucuggguccuguccaccu

SEQ ID NO: 1328821 - RNA, 19 nt, Human
gagccaggcccagaaagaa

SEQ ID NO: 1328822 - RNA, 27 nt, Human
gaggggaggaagaauucuagaggacag

SEQ ID NO: 1328823 - RNA, 19 nt, Human
gcagugaaaguuguucaag

SEQ ID NO: 1328824 - RNA, 18 nt, Human
gcauggaggccacagcag

SEQ ID NO: 1328825 - RNA, 25 nt, Human
gccccuugagagcaagagcagaggc

SEQ ID NO: 1328826 - RNA, 23 nt, Human
ggagggaggugaaaguuuugggg

SEQ ID NO: 1328827 - RNA, 20 nt, Human
ggccaggccagcuucacuga

SEQ ID NO: 1328828 - RNA, 23 nt, Human
ggcccagaaagaagcauccgccu

SEQ ID NO: 1328829 - RNA, 21 nt, Human
gggacacacauucucuuccuc

SEQ ID NO: 1328830 - RNA, 19 nt, Human
ggugugggggaggggagga

SEQ ID NO: 1328831 - RNA, 18 nt, Human
gucccuguggccuucuag

SEQ ID NO: 1328832 - RNA, 18 nt, Human
guggaugguggcccggcc

SEQ ID NO: 1328833 - RNA, 23 nt, Human
uaacccgggacugguuggugcaa

SEQ ID NO: 1328834 - RNA, 24 nt, Human
uaauaauacuguuaaaaacaacac

SEQ ID NO: 1328835 - RNA, 22 nt, Human
uacccuugggaaaaaaguucug

SEQ ID NO: 1328836 - RNA, 18 nt, Human
uaggggagcuaaggggug

SEQ ID NO: 1328837 - RNA, 18 nt, Human
uaucuaaacauggugacc

SEQ ID NO: 1328838 - RNA, 24 nt, Human
ucacugagaucccagagguucuga

SEQ ID NO: 1328839 - RNA, 21 nt, Human
ucagcaccaucccuggugcac

SEQ ID NO: 1328840 - RNA, 19 nt, Human
uccccgauggcagugaaag

SEQ ID NO: 1328841 - RNA, 25 nt, Human
uccguggcagccgcugcauuccuuc

SEQ ID NO: 1328842 - RNA, 22 nt, Human
uccuacaggcagccacagcugc

SEQ ID NO: 1328843 - RNA, 19 nt, Human
uccucgccugccuucugcc

SEQ ID NO: 1328844 - RNA, 20 nt, Human
uccuugaaggcaggccucug

SEQ ID NO: 1328845 - RNA, 18 nt, Human
ucgucuuuccucccaaag

SEQ ID NO: 1328846 - RNA, 23 nt, Human
ucucucuuuggauaaucuggguu

SEQ ID NO: 1328847 - RNA, 21 nt, Human
ucugccagcagucacucucca

SEQ ID NO: 1328848 - RNA, 20 nt, Human
ucugucuucucucuuuggau

SEQ ID NO: 1328849 - RNA, 30 nt, Human
ugaaaagcagccccuugagagcaagagcag

SEQ ID NO: 1328850 - RNA, 18 nt, Human
ugaaggcaggccucugcc

SEQ ID NO: 1328851 - RNA, 20 nt, Human
ugaggaaaguagacucuggg

SEQ ID NO: 1328852 - RNA, 21 nt, Human
ugagugcauggaggccacagc

SEQ ID NO: 1328853 - RNA, 18 nt, Human
ugcagacaugcacauacg

SEQ ID NO: 1328854 - RNA, 21 nt, Human
ugccccacucagcaccauccc

SEQ ID NO: 1328855 - RNA, 19 nt, Human
ugcuggucaagaggaguca

SEQ ID NO: 1328856 - RNA, 20 nt, Human
uggaauccugcugggcagcc

SEQ ID NO: 1328857 - RNA, 18 nt, Human
uggcugggucugauccug

SEQ ID NO: 1328858 - RNA, 25 nt, Human
ugggcaucccugacuuccggcauuu

SEQ ID NO: 1328859 - RNA, 18 nt, Human
ugggcucccagcaucagc

SEQ ID NO: 1328860 - RNA, 19 nt, Human
ugguugaaaagcagccccu

SEQ ID NO: 1328861 - RNA, 19 nt, Human
uguuucacgaauugaauga

SEQ ID NO: 1328862 - RNA, 20 nt, Human
uucaaaggacgccguucacc

SEQ ID NO: 1328863 - RNA, 24 nt, Human
uugaaaagcagccccuugagagca

SEQ ID NO: 1328864 - RNA, 23 nt, Human
uuuauaaugauucugucuucucu

SEQ ID NO: 1328865 - RNA, 19 nt, Human
accgcgcucgcucagaagc

SEQ ID NO: 1328866 - RNA, 23 nt, Human
aggcacccucaggaggacggcaa

SEQ ID NO: 1328867 - RNA, 19 nt, Human
agugauucgggcuccuucc

SEQ ID NO: 1328868 - RNA, 20 nt, Human
aguguggaggccaagagcac

SEQ ID NO: 1328869 - RNA, 26 nt, Human
caaaagcaccgcgcucgcucagaagc

SEQ ID NO: 1328870 - RNA, 21 nt, Human
cacacagugcuuaagcuccag

SEQ ID NO: 1328871 - RNA, 20 nt, Human
caucagugauucgggcuccu

SEQ ID NO: 1328872 - RNA, 21 nt, Human
cccgucccgcguucccaaaag

SEQ ID NO: 1328873 - RNA, 18 nt, Human
ccgccacccagccccucg

SEQ ID NO: 1328874 - RNA, 24 nt, Human
ccgccgcgccucggcccagcuccu

SEQ ID NO: 1328875 - RNA, 18 nt, Human
ccgcgccgccgcgccucg

SEQ ID NO: 1328876 - RNA, 23 nt, Human
ccgcgccgccgcgccucggccca

SEQ ID NO: 1328877 - RNA, 20 nt, Human
ccucagaaacgcugggugga

SEQ ID NO: 1328878 - RNA, 18 nt, Human
ccugcugaaccaucucca

SEQ ID NO: 1328879 - RNA, 20 nt, Human
ccuuccaaggcuccccauga

SEQ ID NO: 1328880 - RNA, 19 nt, Human
cgggcuccuuccaaggcuc

SEQ ID NO: 1328881 - RNA, 25 nt, Human
cucgcgacccucaccuacgccuccc

SEQ ID NO: 1328882 - RNA, 18 nt, Human
cucggcccagcuccuggc

SEQ ID NO: 1328883 - RNA, 22 nt, Human
cugcugaaccaucuccaugcac

SEQ ID NO: 1328884 - RNA, 19 nt, Human
gaaagauuggccaucuucc

SEQ ID NO: 1328885 - RNA, 20 nt, Human
gaccuggacuugccccugca

SEQ ID NO: 1328886 - RNA, 19 nt, Human
gcccgggucaccgggaacc

SEQ ID NO: 1328887 - RNA, 22 nt, Human
gcccgucccgcguucccaaaag

SEQ ID NO: 1328888 - RNA, 24 nt, Human
ggaaccuucgccugggucuaaaca

SEQ ID NO: 1328889 - RNA, 19 nt, Human
gucccgcguucccaaaagc

SEQ ID NO: 1328890 - RNA, 20 nt, Human
uccaaggcuccccaugacug

SEQ ID NO: 1328891 - RNA, 26 nt, Human
ucccgcguucccaaaagcaccgcgcu

SEQ ID NO: 1328892 - RNA, 23 nt, Human
ucgcccgucccgcguucccaaaa

SEQ ID NO: 1328893 - RNA, 21 nt, Human
ucucaaccgccacccagcccc

SEQ ID NO: 1328894 - RNA, 22 nt, Human
ugaauucuuagcaguacgauuc

SEQ ID NO: 1328895 - RNA, 29 nt, Human
ugucucaaccgccacccagccccucgcug

SEQ ID NO: 1328896 - RNA, 19 nt, Human
uguggaggccaagagcaca

SEQ ID NO: 1328897 - RNA, 23 nt, Human
uucagauugccucagaaacgcug

SEQ ID NO: 1328898 - RNA, 21 nt, Human
acgcaggcuuccccgcccccu

SEQ ID NO: 1328899 - RNA, 25 nt, Human
aggagcugcgcagucgcaccgagcc

SEQ ID NO: 1328900 - RNA, 22 nt, Human
caccgagcccggaacggacccu

SEQ ID NO: 1328901 - RNA, 22 nt, Human
cacgcaggcuuccccgcccccu

SEQ ID NO: 1328902 - RNA, 21 nt, Human
cagaaccggguccagagccgg

SEQ ID NO: 1328903 - RNA, 24 nt, Human
cagaaccggguccagagccgggga

SEQ ID NO: 1328904 - RNA, 23 nt, Human
cagagccggggagggggcgggcu

SEQ ID NO: 1328905 - RNA, 18 nt, Human
ccaccgaggaagcgccga

SEQ ID NO: 1328906 - RNA, 24 nt, Human
cccgcccccugcggggaggagacc

SEQ ID NO: 1328907 - RNA, 18 nt, Human
ccgagcugcgcacacgca

SEQ ID NO: 1328908 - RNA, 22 nt, Human
gaaccggguccagagccgggga

SEQ ID NO: 1328909 - RNA, 21 nt, Human
gaagucuccccgaacuuaccu

SEQ ID NO: 1328910 - RNA, 18 nt, Human
gagaagacaggagacugc

SEQ ID NO: 1328911 - RNA, 19 nt, Human
gcaggcuuccccgcccccu

SEQ ID NO: 1328912 - RNA, 22 nt, Human
gcagucgcaccgagcccggaac

SEQ ID NO: 1328913 - RNA, 20 nt, Human
ggaacggacccucccacaga

SEQ ID NO: 1328914 - RNA, 24 nt, Human
gggaagccaccgaggaagcgccga

SEQ ID NO: 1328915 - RNA, 19 nt, Human
gugcaugggcugcuguggu

SEQ ID NO: 1328916 - RNA, 25 nt, Human
uauauaucuuucauuaugccaucuu

SEQ ID NO: 1328917 - RNA, 24 nt, Human
uccaagagaagacaggagacugcc

SEQ ID NO: 1328918 - RNA, 21 nt, Human
ucugugugcaugggcugcugu

SEQ ID NO: 1328919 - RNA, 19 nt, Human
uugcuaaacugucuucugc

SEQ ID NO: 1328920 - RNA, 23 nt, Human
aaaaaauaacauucaaacacuga

SEQ ID NO: 1328921 - RNA, 25 nt, Human
aaaaaauaacauucaaacacugaga

SEQ ID NO: 1328922 - RNA, 26 nt, Human
aaaaacaaaguuaaauaaccugaaua

SEQ ID NO: 1328923 - RNA, 23 nt, Human
aaaaaguaucugacaauuaugaa

SEQ ID NO: 1328924 - RNA, 22 nt, Human
aaaggaccaugcuuaacgucaa

SEQ ID NO: 1328925 - RNA, 21 nt, Human
aaaggccaucuuuccugagcc

SEQ ID NO: 1328926 - RNA, 22 nt, Human
aacaagugaugaaauauuuuaa

SEQ ID NO: 1328927 - RNA, 19 nt, Human
aaguuaaaaucauaggcac

SEQ ID NO: 1328928 - RNA, 23 nt, Human
aaucucuagcccagguuucuuuc

SEQ ID NO: 1328929 - RNA, 25 nt, Human
acaaaauaaucaacauucauaaaac

SEQ ID NO: 1328930 - RNA, 19 nt, Human
acaggaaaugaacuuaugu

SEQ ID NO: 1328931 - RNA, 21 nt, Human
accaaacacaucugauguuaa

SEQ ID NO: 1328932 - RNA, 24 nt, Human
accacauauacaaguucggcuaua

SEQ ID NO: 1328933 - RNA, 21 nt, Human
acccaccccaucacccucaaa

SEQ ID NO: 1328934 - RNA, 27 nt, Human
acccuuacuacuauauaucaaacauaa

SEQ ID NO: 1328935 - RNA, 22 nt, Human
acugagaggaaaaaaggaaucu

SEQ ID NO: 1328936 - RNA, 22 nt, Human
agaguuauacaaacaucugggg

SEQ ID NO: 1328937 - RNA, 20 nt, Human
aggaccaugcuuaacgucaa

SEQ ID NO: 1328938 - RNA, 24 nt, Human
aggcaauuuuucucuuuaagaaaa

SEQ ID NO: 1328939 - RNA, 24 nt, Human
auccaaccccaugaagacuaaauc

SEQ ID NO: 1328940 - RNA, 20 nt, Human
caccaaauacauaguacugg

SEQ ID NO: 1328941 - RNA, 22 nt, Human
caccccaucacccucaaauuca

SEQ ID NO: 1328942 - RNA, 22 nt, Human
cagcagaguuucuauuacuuuc

SEQ ID NO: 1328943 - RNA, 24 nt, Human
cauacaagaaaagaugcacgugau

SEQ ID NO: 1328944 - RNA, 20 nt, Human
cauagucuagaucauucuag

SEQ ID NO: 1328945 - RNA, 20 nt, Human
caucaaccuaucaaccuuaa

SEQ ID NO: 1328946 - RNA, 18 nt, Human
cauucaaaauacaucagu

SEQ ID NO: 1328947 - RNA, 18 nt, Human
cccacccccuaaucucaa

SEQ ID NO: 1328948 - RNA, 24 nt, Human
ccuaccacauaauagaccguuaug

SEQ ID NO: 1328949 - RNA, 22 nt, Human
ccuugcauuauacaccaaauac

SEQ ID NO: 1328950 - RNA, 19 nt, Human
cuagcauucaguuaacaua

SEQ ID NO: 1328951 - RNA, 23 nt, Human
cugaaaacugagacuuguucugu

SEQ ID NO: 1328952 - RNA, 25 nt, Human
cugaaaacugagacuuguucuguuu

SEQ ID NO: 1328953 - RNA, 19 nt, Human
cugugguaguacaacagca

SEQ ID NO: 1328954 - RNA, 18 nt, Human
cuuaacgucaaaaaugga

SEQ ID NO: 1328955 - RNA, 20 nt, Human
cuuggaaacucauaauagcu

SEQ ID NO: 1328956 - RNA, 20 nt, Human
gaaacugauuaucuaacuua

SEQ ID NO: 1328957 - RNA, 24 nt, Human
gauagccugaauucaccauuuucu

SEQ ID NO: 1328958 - RNA, 19 nt, Human
gcaaucaaaacaaacacac

SEQ ID NO: 1328959 - RNA, 21 nt, Human
gcccagguuucuuuccuccca

SEQ ID NO: 1328960 - RNA, 27 nt, Human
gccucugucaaauauuuuuuaaaaauc

SEQ ID NO: 1328961 - RNA, 25 nt, Human
gcuugugcuaaaugaaugacucucc

SEQ ID NO: 1328962 - RNA, 23 nt, Human
gcuuucuaguaaaaaggcaauuu

SEQ ID NO: 1328963 - RNA, 19 nt, Human
ggguuucugugguuaaaga

SEQ ID NO: 1328964 - RNA, 20 nt, Human
ggugguggugacaugugagc

SEQ ID NO: 1328965 - RNA, 28 nt, Human
guaaauccuuagauuuucccaaacagaa

SEQ ID NO: 1328966 - RNA, 18 nt, Human
gugagcuacauccaaaac

SEQ ID NO: 1328967 - RNA, 19 nt, Human
gugguguuguaucaagaau

SEQ ID NO: 1328968 - RNA, 21 nt, Human
uaaaguggaucaacuuaagua

SEQ ID NO: 1328969 - RNA, 23 nt, Human
uaaauaaccugaauacuccuuuu

SEQ ID NO: 1328970 - RNA, 24 nt, Human
uaaauggcucuucaaguuuuuaga

SEQ ID NO: 1328971 - RNA, 23 nt, Human
uaacaagugaugaaauauuuuaa

SEQ ID NO: 1328972 - RNA, 24 nt, Human
uaagacauaauccaaccccaugaa

SEQ ID NO: 1328973 - RNA, 20 nt, Human
uaagugacaauaucuuagag

SEQ ID NO: 1328974 - RNA, 24 nt, Human
uaauccaaccccaugaagacuaaa

SEQ ID NO: 1328975 - RNA, 24 nt, Human
uacaaacaaguuuuguagaaaaau

SEQ ID NO: 1328976 - RNA, 19 nt, Human
uacauagucuagaucauuc

SEQ ID NO: 1328977 - RNA, 26 nt, Human
uaccaaaaaugcaaaaauugauguaa

SEQ ID NO: 1328978 - RNA, 21 nt, Human
uaccaaacacaucugauguua

SEQ ID NO: 1328979 - RNA, 24 nt, Human
uaugaaauaacucugacagagaaa

SEQ ID NO: 1328980 - RNA, 21 nt, Human
ucaaaacaaacacacacaagu

SEQ ID NO: 1328981 - RNA, 21 nt, Human
uccaaccccaugaagacuaaa

SEQ ID NO: 1328982 - RNA, 25 nt, Human
uccagaauaucaagccuucuauuuc

SEQ ID NO: 1328983 - RNA, 23 nt, Human
ucccaauuucuuuugccaacuua

SEQ ID NO: 1328984 - RNA, 24 nt, Human
uccuaucaugaaaaccugcuaaua

SEQ ID NO: 1328985 - RNA, 22 nt, Human
ucugcauucuugucuuugcugg

SEQ ID NO: 1328986 - RNA, 22 nt, Human
ugaaauaacucugacagagaaa

SEQ ID NO: 1328987 - RNA, 25 nt, Human
ugagaaaauuaaauaacuuuggaag

SEQ ID NO: 1328988 - RNA, 19 nt, Human
ugagagaaaaaaacagaag

SEQ ID NO: 1328989 - RNA, 23 nt, Human
ugcaaaaaucauuucugaaauuc

SEQ ID NO: 1328990 - RNA, 22 nt, Human
ugcacugaaaacugagacuugu

SEQ ID NO: 1328991 - RNA, 22 nt, Human
ugcagccauuuaaaaacaaagu

SEQ ID NO: 1328992 - RNA, 24 nt, Human
ugcauuauacaccaaauacauagu

SEQ ID NO: 1328993 - RNA, 22 nt, Human
ugcccagauauuggccucuguc

SEQ ID NO: 1328994 - RNA, 19 nt, Human
uggcaaucaaaacaaacac

SEQ ID NO: 1328995 - RNA, 18 nt, Human
uggcaguuuaaaucucca

SEQ ID NO: 1328996 - RNA, 21 nt, Human
uguacaaacaaguuuuguaga

SEQ ID NO: 1328997 - RNA, 22 nt, Human
uguagaaaaaugauccagcaaa

SEQ ID NO: 1328998 - RNA, 19 nt, Human
uguaugauuaccaaacaca

SEQ ID NO: 1328999 - RNA, 22 nt, Human
uguaugauuaccaaacacaucu

SEQ ID NO: 1329000 - RNA, 20 nt, Human
ugucaaugcaacaugaugga

SEQ ID NO: 1329001 - RNA, 31 nt, Human; identical to SEQ ID NO: 791533

SEQ ID NO: 1329002 - RNA, 24 nt, Human
uuagauuuucccaaacagaaaaau

SEQ ID NO: 1329003 - RNA, 22 nt, Human
uucccaaacagaaaaauugcaa

SEQ ID NO: 1329004 - RNA, 19 nt, Human
uuuaaaguggaucaacuua

SEQ ID NO: 1329005 - RNA, 21 nt, Human
uuuaacaagugaugaaauauu

SEQ ID NO: 1329006 - RNA, 22 nt, Human
uuuaggaucauucaaaauacau

SEQ ID NO: 1329007 - RNA, 21 nt, Human
uuuccucccacccccuaaucu

SEQ ID NO: 1329008 - RNA, 21 nt, Human
uuugaugaucucugucgguuu

SEQ ID NO: 1329009 - RNA, 21 nt, Human
aaagguguacaucaaauucua

SEQ ID NO: 1329010 - RNA, 22 nt, Human
accacagauucuuuccaauccu

SEQ ID NO: 1329011 - RNA, 21 nt, Human
accacuguggauuccaaauug

SEQ ID NO: 1329012 - RNA, 24 nt, Human
agaaaacacuauucucucuuccca

SEQ ID NO: 1329013 - RNA, 21 nt, Human
aggcugcaccgugacuagcag

SEQ ID NO: 1329014 - RNA, 22 nt, Human
auccagaguuucaacaccacug

SEQ ID NO: 1329015 - RNA, 26 nt, Human
aucuuccuccaggcccucuaguguca

SEQ ID NO: 1329016 - RNA, 19 nt, Human
caacuggaucagcaucaaa

SEQ ID NO: 1329017 - RNA, 27 nt, Human
cauuccaucccuuugcuggcagaucca

SEQ ID NO: 1329018 - RNA, 18 nt, Human
ccacuguggauuccaaau

SEQ ID NO: 1329019 - RNA, 21 nt, Human
cccuaucauccucaucuuccu

SEQ ID NO: 1329020 - RNA, 22 nt, Human
ccuacaucuucuggcaaacacu

SEQ ID NO: 1329021 - RNA, 25 nt, Human
cuaguagauuuucaaacugugcaaa

SEQ ID NO: 1329022 - RNA, 21 nt, Human
cuaucauccucaucuuccucc

SEQ ID NO: 1329023 - RNA, 24 nt, Human
cuccucuacugaguacaaugguug

SEQ ID NO: 1329024 - RNA, 24 nt, Human
cucucuucccagaauuuucuaaaa

SEQ ID NO: 1329025 - RNA, 19 nt, Human
gagugagcuuuaacaacug

SEQ ID NO: 1329026 - RNA, 24 nt, Human
gcacaaaguccuuugaaaggugua

SEQ ID NO: 1329027 - RNA, 23 nt, Human
guagauuuucaaacugugcaaag

SEQ ID NO: 1329028 - RNA, 21 nt, Human
guccauggucaauaacaauuu

SEQ ID NO: 1329029 - RNA, 23 nt, Human
uacaaaggcugcaccgugacuag

SEQ ID NO: 1329030 - RNA, 22 nt, Human
uacuggaauuucaaauaauuca

SEQ ID NO: 1329031 - RNA, 21 nt, Human
uaucauccucaucuuccucca

SEQ ID NO: 1329032 - RNA, 22 nt, Human
uauccaaaaacagauucaugcc

SEQ ID NO: 1329033 - RNA, 20 nt, Human
uccuccaggcccucuagugu

SEQ ID NO: 1329034 - RNA, 20 nt, Human
ucuucuggcaaacacucuaa

SEQ ID NO: 1329035 - RNA, 18 nt, Human
ugacacaggagguuuuuc

SEQ ID NO: 1329036 - RNA, 20 nt, Human
ugcaauggggguugucggag

SEQ ID NO: 1329037 - RNA, 22 nt, Human
ugcagaauccagaguuucaaca

SEQ ID NO: 1329038 - RNA, 24 nt, Human
uggucaauaacaauuucacuuucu

SEQ ID NO: 1329039 - RNA, 21 nt, Human
ugugcaaauaucugcaucaaa

SEQ ID NO: 1329040 - RNA, 18 nt, Human
uucaacaccacuguggau

SEQ ID NO: 1329041 - RNA, 21 nt, Human
uucaacaccacuguggauucc

SEQ ID NO: 1329042 - RNA, 24 nt, Human
uucaggauaaaucucagauuuucc

SEQ ID NO: 1329043 - RNA, 23 nt, Human
uucugccuuugccaaaccauugu

SEQ ID NO: 1329044 - RNA, 25 nt, Human
uucuugguuauugacacaggagguu

SEQ ID NO: 1329045 - RNA, 21 nt, Human
uuuacuggaauuucaaauaau

SEQ ID NO: 1329046 - RNA, 22 nt, Human
aagccacuuccagggcagcuag

SEQ ID NO: 1329047 - RNA, 18 nt, Human
aaggaacccuccugagug

SEQ ID NO: 1329048 - RNA, 22 nt, Human
acagcucuugcccaaggaagca

SEQ ID NO: 1329049 - RNA, 23 nt, Human
agagaaaauaauuuaauagagaa

SEQ ID NO: 1329050 - RNA, 19 nt, Human
agagaugaggaccaaggaa

SEQ ID NO: 1329051 - RNA, 19 nt, Human
agcucccgccuccggcccg

SEQ ID NO: 1329052 - RNA, 23 nt, Human
aggaagcauuuaagggcagaagg

SEQ ID NO: 1329053 - RNA, 25 nt, Human
agguccccugccucagcagggccug

SEQ ID NO: 1329054 - RNA, 23 nt, Human
agugccccucugcuccagauggc

SEQ ID NO: 1329055 - RNA, 18 nt, Human
aucuugaccugcuccuuc

SEQ ID NO: 1329056 - RNA, 22 nt, Human
caaggaacccuccugagugcuc

SEQ ID NO: 1329057 - RNA, 20 nt, Human
caaguauucagcucgggcca

SEQ ID NO: 1329058 - RNA, 23 nt, Human
cacuuuguccucauaauguccca

SEQ ID NO: 1329059 - RNA, 26 nt, Human
cagccccauugaagagauggggagac

SEQ ID NO: 1329060 - RNA, 19 nt, Human
cagccuggguuagugcccc

SEQ ID NO: 1329061 - RNA, 23 nt, Human
cagccuggguuagugccccucug

SEQ ID NO: 1329062 - RNA, 25 nt, Human
cagcgagauucccucaucuugaccu

SEQ ID NO: 1329063 - RNA, 22 nt, Human
ccaaggaagcauuuaagggcag

SEQ ID NO: 1329064 - RNA, 23 nt, Human
cccaaaagauccagcuuucaugc

SEQ ID NO: 1329065 - RNA, 18 nt, Human
ccccugccucagcagggc

SEQ ID NO: 1329066 - RNA, 24 nt, Human
ccuaggccagggcaggaacaaggc

SEQ ID NO: 1329067 - RNA, 22 nt, Human
ccucccucucccugucccaggc

SEQ ID NO: 1329068 - RNA, 22 nt, Human
ccugcagggaggacagacagcu

SEQ ID NO: 1329069 - RNA, 21 nt, Human
ccuucaaguauucagcucggg

SEQ ID NO: 1329070 - RNA, 26 nt, Human
cucauaaugucccaugcugugggcuu

SEQ ID NO: 1329071 - RNA, 22 nt, Human
cugcuccagauggcucacaucu

SEQ ID NO: 1329072 - RNA, 24 nt, Human
cuucuagggucacugaagggugca

SEQ ID NO: 1329073 - RNA, 20 nt, Human
cuugucccgggccaucucuc

SEQ ID NO: 1329074 - RNA, 22 nt, Human
gaaccucagugugaagcagcuc

SEQ ID NO: 1329075 - RNA, 20 nt, Human
gaccaaggaacccuccugag

SEQ ID NO: 1329076 - RNA, 25 nt, Human
gagauucccucaucuugaccugcuc

SEQ ID NO: 1329077 - RNA, 21 nt, Human
gcagggaggacagacagcucu

SEQ ID NO: 1329078 - RNA, 20 nt, Human
gcccgggacacguacugccc

SEQ ID NO: 1329079 - RNA, 19 nt, Human
gcuugcccagggcuccacg

SEQ ID NO: 1329080 - RNA, 22 nt, Human
ggaacaaggcuugggcuucuua

SEQ ID NO: 1329081 - RNA, 18 nt, Human
ggaacggaggugggagag

SEQ ID NO: 1329082 - RNA, 23 nt, Human
ggcagaagggcuacaaaucacca

SEQ ID NO: 1329083 - RNA, 25 nt, Human
ggccauggcagcugaagccacuucc

SEQ ID NO: 1329084 - RNA, 23 nt, Human
ggcccagaaaggggaaagagcuu

SEQ ID NO: 1329085 - RNA, 19 nt, Human
ggcccggggcuccgcuugg

SEQ ID NO: 1329086 - RNA, 21 nt, Human
ggcggcagggcaggccuagaa

SEQ ID NO: 1329087 - RNA, 18 nt, Human
gggaaagagcuugcccag

SEQ ID NO: 1329088 - RNA, 24 nt, Human
gggcaggaacaaggcuugggcuuc

SEQ ID NO: 1329089 - RNA, 19 nt, Human
uaaaccccaaaagauccag

SEQ ID NO: 1329090 - RNA, 19 nt, Human
uaggccagggcaggaacaa

SEQ ID NO: 1329091 - RNA, 25 nt, Human
ucaaauacauucuuuuccagguucc

SEQ ID NO: 1329092 - RNA, 20 nt, Human
ucacaucuguccaaucauuc

SEQ ID NO: 1329093 - RNA, 20 nt, Human
ucagccccauugaagagauu

SEQ ID NO: 1329094 - RNA, 22 nt, Human
ucagcccgggacacguacugcc

SEQ ID NO: 1329095 - RNA, 19 nt, Human
uccaagccucccucucccu

SEQ ID NO: 1329096 - RNA, 22 nt, Human
uccaagccucccucucccuguc

SEQ ID NO: 1329097 - RNA, 20 nt, Human
uccagcacaaggcccgcgcu

SEQ ID NO: 1329098 - RNA, 21 nt, Human
ucccagcgagauucccucauc

SEQ ID NO: 1329099 - RNA, 21 nt, Human
ucccuaggccagggcaggaac

SEQ ID NO: 1329100 - RNA, 28 nt, Human
ucucucugagcaggucucgggcagaggu

SEQ ID NO: 1329101 - RNA, 25 nt, Human
ucuucuagggucacugaagggugca

SEQ ID NO: 1329102 - RNA, 23 nt, Human
ugaccugcuccuucaaguauuca

SEQ ID NO: 1329103 - RNA, 18 nt, Human
ugagguucugaaccucag

SEQ ID NO: 1329104 - RNA, 21 nt, Human
uggccuugagcuccucagccc

SEQ ID NO: 1329105 - RNA, 18 nt, Human
ugggcugugaagguauca

SEQ ID NO: 1329106 - RNA, 21 nt, Human
ugggucagacugucuccaagc

SEQ ID NO: 1329107 - RNA, 22 nt, Human
ugucccaggcucaaacuccagc

SEQ ID NO: 1329108 - RNA, 19 nt, Human
ugugaagguaucagcccca

SEQ ID NO: 1329109 - RNA, 18 nt, Human
uuacacucgagcuccugc

SEQ ID NO: 1329110 - RNA, 22 nt, Human
uucuagggucacugaagggugc

SEQ ID NO: 1329111 - RNA, 21 nt, Human
uugcccagggcuccacggcgg

SEQ ID NO: 1329112 - RNA, 26 nt, Human
uuggaagaggagacgauggccuugag

SEQ ID NO: 1329113 - RNA, 23 nt, Human
acuuugcacguguucaaaaacca

SEQ ID NO: 1329114 - RNA, 21 nt, Human
uacucucagcuuuagaaaguu

SEQ ID NO: 1329115 - RNA, 20 nt, Human
ugcagagaaagaaucagaac

SEQ ID NO: 1329116 - RNA, 23 nt, Human
uguaauggagcucaguuuugagg

SEQ ID NO: 1329117 - RNA, 23 nt, Human
uguguaauggagcucaguuuuga

SEQ ID NO: 1329118 - RNA, 21 nt, Human
uucaaaaaccaaagccuuuuc

SEQ ID NO: 1329119 - RNA, 24 nt, Human
uucaaaaaccaaagccuuuucuuu

SEQ ID NO: 1329120 - RNA, 18 nt, Human
acucgcuccuucaggucc

SEQ ID NO: 1329121 - RNA, 21 nt, Human
acugcccccuggcugauguac

SEQ ID NO: 1329122 - RNA, 22 nt, Human
agggccacugcuaguucuuggu

SEQ ID NO: 1329123 - RNA, 20 nt, Human
cacacucuccagcuccuucc

SEQ ID NO: 1329124 - RNA, 21 nt, Human
cagauccuccaggguagcaga

SEQ ID NO: 1329125 - RNA, 22 nt, Human
cagaugaugcacggcccucccc

SEQ ID NO: 1329126 - RNA, 23 nt, Human
cagcagcuccuccaccuuguccu

SEQ ID NO: 1329127 - RNA, 23 nt, Human
ccagcagccucuccuguuccucc

SEQ ID NO: 1329128 - RNA, 25 nt, Human
ccccacacacagauucacccccagu

SEQ ID NO: 1329129 - RNA, 28 nt, Human
cccgaaaaccucuccuguuccagcagcu

SEQ ID NO: 1329130 - RNA, 22 nt, Human
ccuccugccaccccuccuguuc

SEQ ID NO: 1329131 - RNA, 22 nt, Human
ccucuccagcucccguagaguc

SEQ ID NO: 1329132 - RNA, 18 nt, Human
ccugacgauguccuccuc

SEQ ID NO: 1329133 - RNA, 23 nt, Human
ccugcagccucuccuccugucuc

SEQ ID NO: 1329134 - RNA, 25 nt, Human
ccugcagccucuccuccugucuccu

SEQ ID NO: 1329135 - RNA, 23 nt, Human
ccuuccauaaagucgcugcagcu

SEQ ID NO: 1329136 - RNA, 21 nt, Human
cgcugcagcuucuccauggcc

SEQ ID NO: 1329137 - RNA, 22 nt, Human
cgcugcagcuucuccauggccc

SEQ ID NO: 1329138 - RNA, 22 nt, Human
cgucucugacacugcccccugg

SEQ ID NO: 1329139 - RNA, 27 nt, Human
cuccagcuccuuccuuagggggccgcc

SEQ ID NO: 1329140 - RNA, 21 nt, Human
cuccccacacacagauucacc

SEQ ID NO: 1329141 - RNA, 21 nt, Human
cuccugucuccuguucaggag

SEQ ID NO: 1329142 - RNA, 21 nt, Human
cucuccagauccuccagggua

SEQ ID NO: 1329143 - RNA, 19 nt, Human
cugcagccucuccuccugu

SEQ ID NO: 1329144 - RNA, 23 nt, Human
cugcagccucuccuccugucucc

SEQ ID NO: 1329145 - RNA, 22 nt, Human
cugcagcuucuccauggccccc

SEQ ID NO: 1329146 - RNA, 19 nt, Human
gccacagccucucauccug

SEQ ID NO: 1329147 - RNA, 21 nt, Human
gcccccuggcugauguacuuu

SEQ ID NO: 1329148 - RNA, 22 nt, Human
gccuggagcugucuucccacac

SEQ ID NO: 1329149 - RNA, 23 nt, Human
gcugcagcuucuccauggccccc

SEQ ID NO: 1329150 - RNA, 19 nt, Human
ggcucuggggccagggguu

SEQ ID NO: 1329151 - RNA, 23 nt, Human
gggcucuggggccagggguucag

SEQ ID NO: 1329152 - RNA, 18 nt, Human
gugcugggggcucugggg

SEQ ID NO: 1329153 - RNA, 21 nt, Human
guggagcuugaauccagggcc

SEQ ID NO: 1329154 - RNA, 24 nt, Human
guggaugaauugaagcuccaguuu

SEQ ID NO: 1329155 - RNA, 25 nt, Human
uagcagaugaugcacggcccuccuc

SEQ ID NO: 1329156 - RNA, 22 nt, Human
ucagguccaccuucuccuucca

SEQ ID NO: 1329157 - RNA, 18 nt, Human
uccccacacacagauuca

SEQ ID NO: 1329158 - RNA, 22 nt, Human
ucccgaaaaccucuccuguucu

SEQ ID NO: 1329159 - RNA, 21 nt, Human
ucgcugcagcuucuccauggc

SEQ ID NO: 1329160 - RNA, 23 nt, Human
ucucccagugcugcgucucugac

SEQ ID NO: 1329161 - RNA, 24 nt, Human
ucuccugcugccacagccucucau

SEQ ID NO: 1329162 - RNA, 22 nt, Human
ucuccuguuccuccugccaccc

SEQ ID NO: 1329163 - RNA, 21 nt, Human
ugacacugcccccuggcugau

SEQ ID NO: 1329164 - RNA, 23 nt, Human
ugacacugcccccuggcugaugu

SEQ ID NO: 1329165 - RNA, 20 nt, Human
ugcgucucugacacugcccu

SEQ ID NO: 1329166 - RNA, 24 nt, Human
uggagcugucuucccacacucucc

SEQ ID NO: 1329167 - RNA, 24 nt, Human
uguucaggagacucaacaucugau

SEQ ID NO: 1329168 - RNA, 19 nt, Human
uuccaccucagccuggagc

SEQ ID NO: 1329169 - RNA, 19 nt, Human
uuccugcagccucuccucc

SEQ ID NO: 1329170 - RNA, 19 nt, Human
aagagaggacucaagcaca

SEQ ID NO: 1329171 - RNA, 19 nt, Human
aagugcugggauuauaggc

SEQ ID NO: 1329172 - RNA, 19 nt, Human
aagugcugggauuauaggc

SEQ ID NO: 1329173 - RNA, 23 nt, Human
aagugcugggauuauaggcuuga

SEQ ID NO: 1329174 - RNA, 23 nt, Human
aggcggaaggcacaaggcgugac

SEQ ID NO: 1329175 - RNA, 24 nt, Human
agugcugggauuauaggcuugagu

SEQ ID NO: 1329176 - RNA, 19 nt, Human
auaggcuugagucaccacc

SEQ ID NO: 1329177 - RNA, 18 nt, Human
augggguuucacuauguu

SEQ ID NO: 1329178 - RNA, 19 nt, Human
augggguuucacuauguug

SEQ ID NO: 1329179 - RNA, 25 nt, Human
augggguuucacuauguugccccgg

SEQ ID NO: 1329180 - RNA, 19 nt, Human
caagcgauccuccugccuc

SEQ ID NO: 1329181 - RNA, 27 nt, Human
caagcgauccuccugccuccgccuucc

SEQ ID NO: 1329182 - RNA, 18 nt, Human
ccgaagugcugggauuau

SEQ ID NO: 1329183 - RNA, 22 nt, Human
ccgaagugcugggauuauaggc

SEQ ID NO: 1329184 - RNA, 23 nt, Human
ccgaagugcugggauuauaggcu

SEQ ID NO: 1329185 - RNA, 19 nt, Human
ccgcugcccuuccuggcug

SEQ ID NO: 1329186 - RNA, 25 nt, Human
ccuccugccuccgccuuccgaagug

SEQ ID NO: 1329187 - RNA, 18 nt, Human
ccuggccucaagcgaucc

SEQ ID NO: 1329188 - RNA, 20 nt, Human
ccuggccucaagcgauccuc

SEQ ID NO: 1329189 - RNA, 23 nt, Human
ccuggccucaagcgauccuccug

SEQ ID NO: 1329190 - RNA, 20 nt, Human
ccuggugcgccccgcugccc

SEQ ID NO: 1329191 - RNA, 24 nt, Human
cucaagcgauccuccugccuccgc

SEQ ID NO: 1329192 - RNA, 21 nt, Human
cuccugccuccgccuuccgaa

SEQ ID NO: 1329193 - RNA, 20 nt, Human
cuuccuggcugugacucugg

SEQ ID NO: 1329194 - RNA, 20 nt, Human
cuuuaugcccggcagacccc

SEQ ID NO: 1329195 - RNA, 26 nt, Human
gauuauaggcuugagucaccaccgug

SEQ ID NO: 1329196 - RNA, 21 nt, Human
gccccgcugcccuuccuggcu

SEQ ID NO: 1329197 - RNA, 19 nt, Human
gccucgagguuucuagccc

SEQ ID NO: 1329198 - RNA, 23 nt, Human
gcuggucuaaaauuccuggccuc

SEQ ID NO: 1329199 - RNA, 18 nt, Human
guagagaugggguuucac

SEQ ID NO: 1329200 - RNA, 18 nt, Human
guagagaugggguuucac

SEQ ID NO: 1329201 - RNA, 22 nt, Human
guagagaugggguuucacuaug

SEQ ID NO: 1329202 - RNA, 22 nt, Human
uagagaugggguuucacuaugu

SEQ ID NO: 1329203 - RNA, 19 nt, Human
uauguugccccggcugguc

SEQ ID NO: 1329204 - RNA, 23 nt, Human
uauguugccccggcuggucuaaa

SEQ ID NO: 1329205 - RNA, 24 nt, Human
uauuuuguagagaugggguuucac

SEQ ID NO: 1329206 - RNA, 27 nt, Human
uauuuuuauuuuguagagaugggguuu

SEQ ID NO: 1329207 - RNA, 22 nt, Human
ucacuauguugccccggcuggu

SEQ ID NO: 1329208 - RNA, 24 nt, Human
ucccuguggcgugagccuucggcc

SEQ ID NO: 1329209 - RNA, 23 nt, Human
uccgaagugcugggauuauaggc

SEQ ID NO: 1329210 - RNA, 24 nt, Human
uccgaagugcugggauuauaggcu

SEQ ID NO: 1329211 - RNA, 18 nt, Human
ugagccuucggccuggug

SEQ ID NO: 1329212 - RNA, 23 nt, Human
ugagccuucggccuggugcgccc

SEQ ID NO: 1329213 - RNA, 18 nt, Human
uggccucaagcgauccuc

SEQ ID NO: 1329214 - RNA, 21 nt, Human
uggccucaagcgauccuccug

SEQ ID NO: 1329215 - RNA, 24 nt, Human
uggccucaagcgauccuccugccu

SEQ ID NO: 1329216 - RNA, 21 nt, Human
ugggauguaaagagcaagaga

SEQ ID NO: 1329217 - RNA, 18 nt, Human
ugggauuauaggcuugag

SEQ ID NO: 1329218 - RNA, 18 nt, Human
ugggauuauaggcuugag

SEQ ID NO: 1329219 - RNA, 22 nt, Human
ugggauuauaggcuugagucac

SEQ ID NO: 1329220 - RNA, 24 nt, Human
ugggauuauaggcuugagucacca

SEQ ID NO: 1329221 - RNA, 24 nt, Human
ugggauuauaggcuugagucacca

SEQ ID NO: 1329222 - RNA, 18 nt, Human
ugggguuucacuauguug

SEQ ID NO: 1329223 - RNA, 24 nt, Human
ugggguuucacuauguugccccgg

SEQ ID NO: 1329224 - RNA, 19 nt, Human
uggugggguuccgaaggcc

SEQ ID NO: 1329225 - RNA, 22 nt, Human
uguagagaugggguuucacuau

SEQ ID NO: 1329226 - RNA, 24 nt, Human
uguagagaugggguuucacuaugu

SEQ ID NO: 1329227 - RNA, 24 nt, Human
uuguagagaugggguuucacuaug

SEQ ID NO: 1329228 - RNA, 24 nt, Human
uuuguagagaugggguuucacuau

SEQ ID NO: 1329229 - RNA, 23 nt, Human
aaagaaccugaccaaugucaggc

SEQ ID NO: 1329230 - RNA, 19 nt, Human
aaagagggacugucccgua

SEQ ID NO: 1329231 - RNA, 20 nt, Human
aagaaccugaccaaugucag

SEQ ID NO: 1329232 - RNA, 23 nt, Human
aagcagguccccuccaaaacccc

SEQ ID NO: 1329233 - RNA, 26 nt, Human
acugaaguucuuguaacuugggaugg

SEQ ID NO: 1329234 - RNA, 21 nt, Human
agacccaggaggcuguggaga

SEQ ID NO: 1329235 - RNA, 27 nt, Human
agcuggagggugagaccucucccugug

SEQ ID NO: 1329236 - RNA, 19 nt, Human
aggcagguagccaaaggga

SEQ ID NO: 1329237 - RNA, 18 nt, Human
cacaggagccugcuucca

SEQ ID NO: 1329238 - RNA, 18 nt, Human
cagccuccucugauaccc

SEQ ID NO: 1329239 - RNA, 20 nt, Human
caggagccugcuuccaaaga

SEQ ID NO: 1329240 - RNA, 20 nt, Human
caggaggcuguggagauugc

SEQ ID NO: 1329241 - RNA, 23 nt, Human
cagguccccuccaaaaccccucc

SEQ ID NO: 1329242 - RNA, 20 nt, Human
ccaaggcugaccauccuccu

SEQ ID NO: 1329243 - RNA, 19 nt, Human
ccccuccaaaaccccuccu

SEQ ID NO: 1329244 - RNA, 26 nt, Human
cccguaauugagagaugcuccaaggc

SEQ ID NO: 1329245 - RNA, 24 nt, Human
cccuccaaaaccccuccugcugga

SEQ ID NO: 1329246 - RNA, 20 nt, Human
cccuccugcuggaauccucc

SEQ ID NO: 1329247 - RNA, 20 nt, Human
ccuccagaugugaggaguag

SEQ ID NO: 1329248 - RNA, 21 nt, Human
ccuccagaugugaggaguagg

SEQ ID NO: 1329249 - RNA, 24 nt, Human
ccuccagaugugaggaguaggagc

SEQ ID NO: 1329250 - RNA, 18 nt, Human
ccuccugcuggaauccuc

SEQ ID NO: 1329251 - RNA, 18 nt, Human
ccuuccccacuucuagag

SEQ ID NO: 1329252 - RNA, 21 nt, Human
cgcaagcagguccccuccaaa

SEQ ID NO: 1329253 - RNA, 24 nt, Human
cgcaagcagguccccuccaaaacc

SEQ ID NO: 1329254 - RNA, 18 nt, Human
cuccugcugcacacccag

SEQ ID NO: 1329255 - RNA, 21 nt, Human
cuccugcuggaauccuccaga

SEQ ID NO: 1329256 - RNA, 19 nt, Human
cucucccuguggaucugga

SEQ ID NO: 1329257 - RNA, 19 nt, Human
cugcugcacacccagcagc

SEQ ID NO: 1329258 - RNA, 21 nt, Human
gaagcuacacaucuggccuuc

SEQ ID NO: 1329259 - RNA, 23 nt, Human
gacaggguuccgcgcccuguccc

SEQ ID NO: 1329260 - RNA, 24 nt, Human
gagaagcucccaaaagagagggaa

SEQ ID NO: 1329261 - RNA, 23 nt, Human
gagccugcuuccaaagagggacu

SEQ ID NO: 1329262 - RNA, 21 nt, Human
gaggagggugcuagcggugaa

SEQ ID NO: 1329263 - RNA, 20 nt, Human
gcaagcagguccccuccaaa

SEQ ID NO: 1329264 - RNA, 18 nt, Human
gcagacagaucaaggcug

SEQ ID NO: 1329265 - RNA, 18 nt, Human
gcccuguccagccucccc

SEQ ID NO: 1329266 - RNA, 18 nt, Human
ggugagaccucucccugu

SEQ ID NO: 1329267 - RNA, 22 nt, Human
gguuuaacauccacagcuggag

SEQ ID NO: 1329268 - RNA, 20 nt, Human
guaggagcagacagaucaag

SEQ ID NO: 1329269 - RNA, 21 nt, Human
guggaaugaaaccgcucugcc

SEQ ID NO: 1329270 - RNA, 22 nt, Human
uaacuugggaugggggccaggu

SEQ ID NO: 1329271 - RNA, 18 nt, Human
uagccaaagggaaacugg

SEQ ID NO: 1329272 - RNA, 24 nt, Human
uagucucacugaaguucuuguaac

SEQ ID NO: 1329273 - RNA, 20 nt, Human
uagugguggaaugaaaccgc

SEQ ID NO: 1329274 - RNA, 25 nt, Human
uccaaaaccccuccugcuggaaucc

SEQ ID NO: 1329275 - RNA, 21 nt, Human
uccacagcuggagggugagac

SEQ ID NO: 1329276 - RNA, 22 nt, Human
uccacagcuggagggugagacc

SEQ ID NO: 1329277 - RNA, 24 nt, Human
uccccuccaaaaccccuccugcug

SEQ ID NO: 1329278 - RNA, 18 nt, Human
ucccuuagucucacugaa

SEQ ID NO: 1329279 - RNA, 25 nt, Human
uccucuggucaguaaggaacccuga

SEQ ID NO: 1329280 - RNA, 18 nt, Human
uccugcuggaauccucca

SEQ ID NO: 1329281 - RNA, 23 nt, Human
ucgcaagcagguccccuccaaaa

SEQ ID NO: 1329282 - RNA, 26 nt, Human
ucgcaagcagguccccuccaaaaccc

SEQ ID NO: 1329283 - RNA, 18 nt, Human
ucucccuguggaucugga

SEQ ID NO: 1329284 - RNA, 24 nt, Human
ugaaagaaggcagguagccaaagg

SEQ ID NO: 1329285 - RNA, 23 nt, Human
ugacccugaggucaguucaucuu

SEQ ID NO: 1329286 - RNA, 22 nt, Human
ugagauagauuccaaggagacu

SEQ ID NO: 1329287 - RNA, 21 nt, Human
ugcagagauggaaaggauuau

SEQ ID NO: 1329288 - RNA, 24 nt, Human
ugcagagauggaaaggauuauuac

SEQ ID NO: 1329289 - RNA, 24 nt, Human
uggaaugaaaccgcucugccauuu

SEQ ID NO: 1329290 - RNA, 22 nt, Human
ugggaugggggccaggucagcc

SEQ ID NO: 1329291 - RNA, 20 nt, Human
uggucaguaaggaacccuga

SEQ ID NO: 1329292 - RNA, 20 nt, Human
ugugcagagauggaaaggau

SEQ ID NO: 1329293 - RNA, 21 nt, Human
ugugcagagauggaaaggauu

SEQ ID NO: 1329294 - RNA, 23 nt, Human
uucugcccagagaagcucccaaa

SEQ ID NO: 1329295 - RNA, 23 nt, Human
uucuuguaacuugggaugggggc

SEQ ID NO: 1329296 - RNA, 19 nt, Human
acccugagugccuggagcc

SEQ ID NO: 1329297 - RNA, 25 nt, Human
agcugucggcccgagaggaagcuuc

SEQ ID NO: 1329298 - RNA, 23 nt, Human
auccugagugcccaugggaggca

SEQ ID NO: 1329299 - RNA, 24 nt, Human
auccuugucuuccuccagugcugg

SEQ ID NO: 1329300 - RNA, 21 nt, Human
caccucucagagucuucugag

SEQ ID NO: 1329301 - RNA, 21 nt, Human
caccugguagaggaaagaccc

SEQ ID NO: 1329302 - RNA, 22 nt, Human
cacuucuggauccugagugccc

SEQ ID NO: 1329303 - RNA, 21 nt, Human
ccagaccaccucucagagucu

SEQ ID NO: 1329304 - RNA, 18 nt, Human
ccagaccuuccugcugac

SEQ ID NO: 1329305 - RNA, 18 nt, Human
cccugaacguccagaccu

SEQ ID NO: 1329306 - RNA, 22 nt, Human
ccuccagugcuggucccggucc

SEQ ID NO: 1329307 - RNA, 18 nt, Human
ccuccucugcuugacccc

SEQ ID NO: 1329308 - RNA, 19 nt, Human
ccucugauugucccuggcc

SEQ ID NO: 1329309 - RNA, 19 nt, Human
ccugagugcccaugggagg

SEQ ID NO: 1329310 - RNA, 20 nt, Human
cgagaggaagcuucauggug

SEQ ID NO: 1329311 - RNA, 26 nt, Human
cucguggugguaccccugccuuccuc

SEQ ID NO: 1329312 - RNA, 22 nt, Human
cuugaccccggguguccaugaa

SEQ ID NO: 1329313 - RNA, 22 nt, Human
cuugucuuccuccagugcuggu

SEQ ID NO: 1329314 - RNA, 19 nt, Human
gaggaaagacccugaacgg

SEQ ID NO: 1329315 - RNA, 20 nt, Human
gcagacccagaccaccucuc

SEQ ID NO: 1329316 - RNA, 23 nt, Human
gccuggagccgucuccugauugu

SEQ ID NO: 1329317 - RNA, 25 nt, Human
gccuggagccgucuccugauuguuc

SEQ ID NO: 1329318 - RNA, 26 nt, Human
gccuggagcugucuuguggcgucgcg

SEQ ID NO: 1329319 - RNA, 20 nt, Human
gcgacccugagugccuggag

SEQ ID NO: 1329320 - RNA, 19 nt, Human
gucucgugccugcuugugg

SEQ ID NO: 1329321 - RNA, 22 nt, Human
uccaugaaugguguccugaccc

SEQ ID NO: 1329322 - RNA, 19 nt, Human
uccaugggcggacucagac

SEQ ID NO: 1329323 - RNA, 27 nt, Human
ucccugacugucacuguccuggcuaaa

SEQ ID NO: 1329324 - RNA, 18 nt, Human
ucccugggauguggugug

SEQ ID NO: 1329325 - RNA, 20 nt, Human
ucccugggaugugguguggc

SEQ ID NO: 1329326 - RNA, 25 nt, Human
ugacgcgacccugagugccuggagc

SEQ ID NO: 1329327 - RNA, 21 nt, Human
ugagugccuggagcugucuug

SEQ ID NO: 1329328 - RNA, 23 nt, Human
ugagugcucaccugguagaggaa

SEQ ID NO: 1329329 - RNA, 26 nt, Human
ugagugucccugacugucacuguccu

SEQ ID NO: 1329330 - RNA, 18 nt, Human
ugccuuccuccucugcuu

SEQ ID NO: 1329331 - RNA, 24 nt, Human
uggaagcagacccagaccaccucu

SEQ ID NO: 1329332 - RNA, 19 nt, Human
ugucacuguccuggcuaaa

SEQ ID NO: 1329333 - RNA, 20 nt, Human
uguccagaucuaucuaccaa

SEQ ID NO: 1329334 - RNA, 21 nt, Human
uguccagaucuaucuaccaau

SEQ ID NO: 1329335 - RNA, 18 nt, Human
ugugaugagacccugagu

SEQ ID NO: 1329336 - RNA, 20 nt, Human
uuccuccacugcuugacccc

SEQ ID NO: 1329337 - RNA, 20 nt, Human
uuccucuagugcugggcccc

SEQ ID NO: 1329338 - RNA, 21 nt, Human
uugagugccuggagcugucuc

SEQ ID NO: 1329339 - RNA, 22 nt, Human
uugggaugcugagugccuggag

SEQ ID NO: 1329340 - RNA, 26 nt, Human
uugguggcucugcugauggggcccag

SEQ ID NO: 1329341 - RNA, 21 nt, Human
aaaaacacucccccaggggcc

SEQ ID NO: 1329342 - RNA, 20 nt, Human
aaaaagacaaauaaagccca

SEQ ID NO: 1329343 - RNA, 22 nt, Human
aaacagaacaacaaacacaaga

SEQ ID NO: 1329344 - RNA, 23 nt, Human
aaagacccccaccaccaccgcau

SEQ ID NO: 1329345 - RNA, 19 nt, Human
aaagccaguggaaacaagg

SEQ ID NO: 1329346 - RNA, 24 nt, Human
aaagccaguggaaacaaggaccaa

SEQ ID NO: 1329347 - RNA, 21 nt, Human
aacaaacacaagaguugagca

SEQ ID NO: 1329348 - RNA, 18 nt, Human
aacacaaaaacagcaaca

SEQ ID NO: 1329349 - RNA, 19 nt, Human
aacacaaaaacagcaacag

SEQ ID NO: 1329350 - RNA, 22 nt, Human
aacaccccugcccuccggaucu

SEQ ID NO: 1329351 - RNA, 19 nt, Human
aagaaacugccauaaccag

SEQ ID NO: 1329352 - RNA, 19 nt, Human
aaggaccaagagccaaaca

SEQ ID NO: 1329353 - RNA, 20 nt, Human
aaggaccaagagccaaacau

SEQ ID NO: 1329354 - RNA, 23 nt, Human
aauccccauuuauucccuaaagc

SEQ ID NO: 1329355 - RNA, 21 nt, Human
aauuccucuggccagaaaccu

SEQ ID NO: 1329356 - RNA, 20 nt, Human
acaacacaaaaacagcaaca

SEQ ID NO: 1329357 - RNA, 21 nt, Human
acagaacaacaaacacaagag

SEQ ID NO: 1329358 - RNA, 19 nt, Human
acaguacaaaagaccccca

SEQ ID NO: 1329359 - RNA, 22 nt, Human
acaucaaaaaaaucacccugga

SEQ ID NO: 1329360 - RNA, 21 nt, Human
accaccaccgcauucugccau

SEQ ID NO: 1329361 - RNA, 18 nt, Human
accacuaggucuuugcca

SEQ ID NO: 1329362 - RNA, 21 nt, Human
acccacaggcugugacagggc

SEQ ID NO: 1329363 - RNA, 21 nt, Human
acuguuucugccccaugggga

SEQ ID NO: 1329364 - RNA, 19 nt, Human
agaacaacaaacacaagag

SEQ ID NO: 1329365 - RNA, 19 nt, Human
agagccaaacaucaaaaaa

SEQ ID NO: 1329366 - RNA, 20 nt, Human
agcaaagagaagcaacaaac

SEQ ID NO: 1329367 - RNA, 24 nt, Human
agcacgagagaggcugagaaagga

SEQ ID NO: 1329368 - RNA, 23 nt, Human
aggaaugugugcaugaacagaaa

SEQ ID NO: 1329369 - RNA, 23 nt, Human
agggagcagauccagcaaaaaca

SEQ ID NO: 1329370 - RNA, 19 nt, Human
agggccacaccccaugccu

SEQ ID NO: 1329371 - RNA, 20 nt, Human
agggguguuaggcacaggug

SEQ ID NO: 1329372 - RNA, 19 nt, Human
aggguaccaccaaagucca

SEQ ID NO: 1329373 - RNA, 25 nt, Human
aucuuccuccagccccuuuucucuu

SEQ ID NO: 1329374 - RNA, 21 nt, Human
augaaagaauagcaaagagaa

SEQ ID NO: 1329375 - RNA, 27 nt, Human
auggaaagccaguggaaacaaggacca

SEQ ID NO: 1329376 - RNA, 25 nt, Human
auggcaaugaggaucccgccgcauc

SEQ ID NO: 1329377 - RNA, 19 nt, Human
caaaaaaaucacccuggaa

SEQ ID NO: 1329378 - RNA, 22 nt, Human
caaaaacacucccccaggggcc

SEQ ID NO: 1329379 - RNA, 22 nt, Human
caaacuccaggcucuucuaccu

SEQ ID NO: 1329380 - RNA, 25 nt, Human
caagagccaaacaucaaaaaaauca

SEQ ID NO: 1329381 - RNA, 19 nt, Human
caagccaggaaggcagggg

SEQ ID NO: 1329382 - RNA, 22 nt, Human
caauuccucuggccagaaaccu

SEQ ID NO: 1329383 - RNA, 19 nt, Human
caccaccaccgcauucugc

SEQ ID NO: 1329384 - RNA, 20 nt, Human
cacccuggaagagcagggag

SEQ ID NO: 1329385 - RNA, 25 nt, Human
cacuuuguuccaaaaaguaguggag

SEQ ID NO: 1329386 - RNA, 19 nt, Human
cagaaggggugucaggggc

SEQ ID NO: 1329387 - RNA, 18 nt, Human
cagcaaaaacacuccccc

SEQ ID NO: 1329388 - RNA, 23 nt, Human
cagcaucucucaccuacugucuu

SEQ ID NO: 1329389 - RNA, 23 nt, Human
cagccacacuccugggccuccag

SEQ ID NO: 1329390 - RNA, 23 nt, Human
cagccccuuuucucuugcagcca

SEQ ID NO: 1329391 - RNA, 20 nt, Human
cagcggcgggggauggaggc

SEQ ID NO: 1329392 - RNA, 24 nt, Human
caggagccacuguuucugccccau

SEQ ID NO: 1329393 - RNA, 24 nt, Human
caguacaaaagacccccaccacca

SEQ ID NO: 1329394 - RNA, 28 nt, Human
caugccugccuuccccaccccauggagg

SEQ ID NO: 1329395 - RNA, 26 nt, Human
ccaaacaucaaaaaaaucacccugga

SEQ ID NO: 1329396 - RNA, 25 nt, Human
ccaagagccaaacaucaaaaaaauc

SEQ ID NO: 1329397 - RNA, 23 nt, Human
ccacaccccaugccugccuuccc

SEQ ID NO: 1329398 - RNA, 19 nt, Human
ccacacuccugggccucca

SEQ ID NO: 1329399 - RNA, 22 nt, Human
ccacacuccugggccuccagaa

SEQ ID NO: 1329400 - RNA, 25 nt, Human
ccacaggcugugacagggccucacu

SEQ ID NO: 1329401 - RNA, 20 nt, Human
ccacuaggucuuugccacug

SEQ ID NO: 1329402 - RNA, 22 nt, Human
ccacuguaucuugagcuggggg

SEQ ID NO: 1329403 - RNA, 21 nt, Human
ccagaaggggugucaggggca

SEQ ID NO: 1329404 - RNA, 19 nt, Human
ccaggaaggcaggggaaua

SEQ ID NO: 1329405 - RNA, 21 nt, Human
ccaucgcccagaagggguguc

SEQ ID NO: 1329406 - RNA, 20 nt, Human
cccagaggcugcucuccucc

SEQ ID NO: 1329407 - RNA, 24 nt, Human
cccaggagccacuguuucugcccc

SEQ ID NO: 1329408 - RNA, 23 nt, Human
ccccaaaucaccaagaaacugcc

SEQ ID NO: 1329409 - RNA, 23 nt, Human
ccccuacccacaggcugugacag

SEQ ID NO: 1329410 - RNA, 21 nt, Human
ccuaaagcugucucccagagc

SEQ ID NO: 1329411 - RNA, 23 nt, Human
ccuaacuucuccgagggccacac

SEQ ID NO: 1329412 - RNA, 22 nt, Human
ccucaucaggccccaggcccau

SEQ ID NO: 1329413 - RNA, 29 nt, Human
ccuccagccccuuuucucuuggggccgcc

SEQ ID NO: 1329414 - RNA, 22 nt, Human
ccuuugaguaccauggcaauga

SEQ ID NO: 1329415 - RNA, 21 nt, Human
cgagagggagcagauccagca

SEQ ID NO: 1329416 - RNA, 21 nt, Human
cgagggccacaccccaugccu

SEQ ID NO: 1329417 - RNA, 20 nt, Human
cggggugggggugggggguu

SEQ ID NO: 1329418 - RNA, 22 nt, Human
cucaaagguugucagcuccacc

SEQ ID NO: 1329419 - RNA, 23 nt, Human
cucccagagcccauaaaagggcu

SEQ ID NO: 1329420 - RNA, 19 nt, Human
cucuccucccagccucaaa

SEQ ID NO: 1329421 - RNA, 22 nt, Human
cucuucugccugcccaccucaa

SEQ ID NO: 1329422 - RNA, 22 nt, Human
cugcaccaucgcccagaagggg

SEQ ID NO: 1329423 - RNA, 20 nt, Human
gaaaaggagaacgagcagcg

SEQ ID NO: 1329424 - RNA, 19 nt, Human
gaaagaauagcaaagagaa

SEQ ID NO: 1329425 - RNA, 20 nt, Human
gagcagcggggugggggugg

SEQ ID NO: 1329426 - RNA, 23 nt, Human
gagcagggucuucucuccucaug

SEQ ID NO: 1329427 - RNA, 24 nt, Human
gaggaagcaaaggaguggguagaa

SEQ ID NO: 1329428 - RNA, 21 nt, Human
gaggcugagaaaggaccagug

SEQ ID NO: 1329429 - RNA, 27 nt, Human
gaguugagcagcggggugggggugggg

SEQ ID NO: 1329430 - RNA, 18 nt, Human
gcaaagagaagcaacaaa

SEQ ID NO: 1329431 - RNA, 19 nt, Human
gcagccacacuccugggcc

SEQ ID NO: 1329432 - RNA, 22 nt, Human
gcagcggggugggggugggggg

SEQ ID NO: 1329433 - RNA, 23 nt, Human
gcccaagaggauaugaaagaaua

SEQ ID NO: 1329434 - RNA, 26 nt, Human
gcccaggcccccgagcugcagcaacc

SEQ ID NO: 1329435 - RNA, 22 nt, Human
gcucccaggagccacuguuucu

SEQ ID NO: 1329436 - RNA, 19 nt, Human
gcugcaccaucgcccagaa

SEQ ID NO: 1329437 - RNA, 19 nt, Human
ggaaaauccccauuuauuc

SEQ ID NO: 1329438 - RNA, 22 nt, Human
ggaaagccaguggaaacaagga

SEQ ID NO: 1329439 - RNA, 24 nt, Human
ggaaggaguuggguaagucuugga

SEQ ID NO: 1329440 - RNA, 25 nt, Human
ggaccaagagccaaacaucaaaaaa

SEQ ID NO: 1329441 - RNA, 19 nt, Human
ggaggaaaugagguauagg

SEQ ID NO: 1329442 - RNA, 23 nt, Human
ggaucccgccgcauccccuaccc

SEQ ID NO: 1329443 - RNA, 23 nt, Human
ggaucuuccuccagccccuuuuc

SEQ ID NO: 1329444 - RNA, 21 nt, Human
gggcauccaucaucagcagag

SEQ ID NO: 1329445 - RNA, 19 nt, Human
gggcugcaccaucgcccag

SEQ ID NO: 1329446 - RNA, 18 nt, Human
gggcugggggaggagggu

SEQ ID NO: 1329447 - RNA, 18 nt, Human
ggggauggaaagccagug

SEQ ID NO: 1329448 - RNA, 20 nt, Human
gggggauggaggcgcccuug

SEQ ID NO: 1329449 - RNA, 20 nt, Human
ggggguaggggaccacuagg

SEQ ID NO: 1329450 - RNA, 18 nt, Human
ggguaccaccaaagucca

SEQ ID NO: 1329451 - RNA, 24 nt, Human
gggucuucucuccucaugccagga

SEQ ID NO: 1329452 - RNA, 18 nt, Human
gggugggggugggggguu

SEQ ID NO: 1329453 - RNA, 18 nt, Human
gguaccaccaaaguccag

SEQ ID NO: 1329454 - RNA, 19 nt, Human
gugggggguugccaucuac

SEQ ID NO: 1329455 - RNA, 24 nt, Human
guugagcagcgggguggggguggg

SEQ ID NO: 1329456 - RNA, 19 nt, Human
uaaaaaauaaaaaaagaca

SEQ ID NO: 1329457 - RNA, 20 nt, Human
uaacacuugacuccaaaaac

SEQ ID NO: 1329458 - RNA, 22 nt, Human
uaacuucuccgagggccacacc

SEQ ID NO: 1329459 - RNA, 18 nt, Human
uagcaaagagaagcaaca

SEQ ID NO: 1329460 - RNA, 20 nt, Human
uagcggcagcggcgggggau

SEQ ID NO: 1329461 - RNA, 24 nt, Human
uagcggcagcggcgggggauggag

SEQ ID NO: 1329462 - RNA, 20 nt, Human
uagugugagggacacuggga

SEQ ID NO: 1329463 - RNA, 22 nt, Human
uagugugagggacacugggaac

SEQ ID NO: 1329464 - RNA, 22 nt, Human
uaucuugagcugggggacuccu

SEQ ID NO: 1329465 - RNA, 24 nt, Human
ucaccaagaaacugccauaaccag

SEQ ID NO: 1329466 - RNA, 20 nt, Human
ucaccaggcccaagaggaua

SEQ ID NO: 1329467 - RNA, 18 nt, Human
ucaggggcagcccaggcc

SEQ ID NO: 1329468 - RNA, 19 nt, Human
uccaaaaacuaaggcugga

SEQ ID NO: 1329469 - RNA, 23 nt, Human
ucccaggagccacuguuucugcc

SEQ ID NO: 1329470 - RNA, 21 nt, Human
uccuggaucucuguagaucuc

SEQ ID NO: 1329471 - RNA, 22 nt, Human
uccugggccuccagaaauagcc

SEQ ID NO: 1329472 - RNA, 23 nt, Human
ucuccgagggccacaccccaugc

SEQ ID NO: 1329473 - RNA, 22 nt, Human
ucucugagggggaaggaguugg

SEQ ID NO: 1329474 - RNA, 24 nt, Human
ucuuccuccagccccuuuucucuu

SEQ ID NO: 1329475 - RNA, 21 nt, Human
ucuugcagccacacuccuggg

SEQ ID NO: 1329476 - RNA, 22 nt, Human
ugaagccccaaaucaccaagaa

SEQ ID NO: 1329477 - RNA, 19 nt, Human
ugagagagcgagagggagc

SEQ ID NO: 1329478 - RNA, 21 nt, Human
ugagcagcggggugggggugg

SEQ ID NO: 1329479 - RNA, 22 nt, Human
ugagcagcgggguggggguggg

SEQ ID NO: 1329480 - RNA, 18 nt, Human
ugagggggaaggaguugg

SEQ ID NO: 1329481 - RNA, 21 nt, Human
ugagguauagggcucugcgcc

SEQ ID NO: 1329482 - RNA, 20 nt, Human
ugcaccaucgcccagaaggg

SEQ ID NO: 1329483 - RNA, 18 nt, Human
ugcagccacacuccuggg

SEQ ID NO: 1329484 - RNA, 19 nt, Human
ugccauaaccaggaacucu

SEQ ID NO: 1329485 - RNA, 18 nt, Human
ugccaucacuuuguucca

SEQ ID NO: 1329486 - RNA, 18 nt, Human
ugcccuccggaucuuccu

SEQ ID NO: 1329487 - RNA, 19 nt, Human
ugcccuccggaucuuccuc

SEQ ID NO: 1329488 - RNA, 24 nt, Human
uggcaagaccccaauuccucuggc

SEQ ID NO: 1329489 - RNA, 21 nt, Human
uggcaggcagugcuuaaaaaa

SEQ ID NO: 1329490 - RNA, 23 nt, Human
ugggggaggaggguaccaccaaa

SEQ ID NO: 1329491 - RNA, 21 nt, Human
uggguagaaaaaggggaaaau

SEQ ID NO: 1329492 - RNA, 19 nt, Human
ugguaugaagaagauacgu

SEQ ID NO: 1329493 - RNA, 20 nt, Human
uugaagccccaaaucaccaa

SEQ ID NO: 1329494 - RNA, 21 nt, Human
uugacuccaaaaacuaaggcu

SEQ ID NO: 1329495 - RNA, 21 nt, Human
uugcagccacacuccugggcc

SEQ ID NO: 1329496 - RNA, 23 nt, Human
acuguugugaacacuugcuuuca

SEQ ID NO: 1329497 - RNA, 18 nt, Human
agagugaggggagcuuga

SEQ ID NO: 1329498 - RNA, 22 nt, Human
aguauggaagaaucgaaagaga

SEQ ID NO: 1329499 - RNA, 18 nt, Human
aucuuccucagggucgcu

SEQ ID NO: 1329500 - RNA, 23 nt, Human
auggcaaugggaaaagcagaugg

SEQ ID NO: 1329501 - RNA, 23 nt, Human
cgcuaacaucgaacucuuggcac

SEQ ID NO: 1329502 - RNA, 21 nt, Human
cgggagcagucugacucugau

SEQ ID NO: 1329503 - RNA, 33 nt, Human; identical to SEQ ID NO: 379763

SEQ ID NO: 1329504 - RNA, 24 nt, Human
gaacucuuggcacacuaagaaaaa

SEQ ID NO: 1329505 - RNA, 18 nt, Human
ggaaacagagugagggga

SEQ ID NO: 1329506 - RNA, 23 nt, Human
gggcaugugucguaucccugagg

SEQ ID NO: 1329507 - RNA, 20 nt, Human
gugugugugugugugugugu

SEQ ID NO: 1329508 - RNA, 21 nt, Human
gugugugugugugugugugug

SEQ ID NO: 1329509 - RNA, 21 nt, Human
gugugugugugugugugugug

SEQ ID NO: 1329510 - RNA, 19 nt, Human
uaaacacucagaacugccc

SEQ ID NO: 1329511 - RNA, 23 nt, Human
uaacagaaugacacaguguaaga

SEQ ID NO: 1329512 - RNA, 22 nt, Human
uacacaaaccaaaauaugcauu

SEQ ID NO: 1329513 - RNA, 18 nt, Human
uacugguacuuggugugu

SEQ ID NO: 1329514 - RNA, 19 nt, Human
uccaaagagaaaaucagac

SEQ ID NO: 1329515 - RNA, 19 nt, Human
ugaccaggacgcauggcaa

SEQ ID NO: 1329516 - RNA, 25 nt, Human
uggaagaauccaaagagaaaaucag

SEQ ID NO: 1329517 - RNA, 25 nt, Human
uggauacacaaaccaaaauaugcau

SEQ ID NO: 1329518 - RNA, 21 nt, Human
uggcaaugggaaaagcagaug

SEQ ID NO: 1329519 - RNA, 18 nt, Human
ugggaaaagcagauggca

SEQ ID NO: 1329520 - RNA, 23 nt, Human
ugguacuuggugugugugugugu

SEQ ID NO: 1329521 - RNA, 22 nt, Human
uggugugugugugugugugugu

SEQ ID NO: 1329522 - RNA, 22 nt, Human
ugguuugugugcgugugugugu

SEQ ID NO: 1329523 - RNA, 22 nt, Human
uguggugugguuugugugcgug

SEQ ID NO: 1329524 - RNA, 19 nt, Human
ugugugugugugguguggu

SEQ ID NO: 1329525 - RNA, 25 nt, Human
uguguguguguggugugguuugugu

SEQ ID NO: 1329526 - RNA, 18 nt, Human
ugugugugugugugugug

SEQ ID NO: 1329527 - RNA, 18 nt, Human
ugugugugugugugugug

SEQ ID NO: 1329528 - RNA, 18 nt, Human
ugugugugugugugugug

SEQ ID NO: 1329529 - RNA, 18 nt, Human
ugugugugugugugugug

SEQ ID NO: 1329530 - RNA, 18 nt, Human
ugugugugugugugugug

SEQ ID NO: 1329531 - RNA, 18 nt, Human
ugugugugugugugugug

SEQ ID NO: 1329532 - RNA, 18 nt, Human
ugugugugugugugugug

SEQ ID NO: 1329533 - RNA, 18 nt, Human
ugugugugugugugugug

SEQ ID NO: 1329534 - RNA, 18 nt, Human
ugugugugugugugugug

SEQ ID NO: 1329535 - RNA, 18 nt, Human
ugugugugugugugugug

SEQ ID NO: 1329536 - RNA, 18 nt, Human
ugugugugugugugugug

SEQ ID NO: 1329537 - RNA, 18 nt, Human
ugugugugugugugugug

SEQ ID NO: 1329538 - RNA, 22 nt, Human
uguguguguguguguguggugu

SEQ ID NO: 1329539 - RNA, 20 nt, Human
ugugugugugugugugugug

SEQ ID NO: 1329540 - RNA, 21 nt, Human
ugugugugugugugugugugu

SEQ ID NO: 1329541 - RNA, 21 nt, Human
ugugugugugugugugugugu

SEQ ID NO: 1329542 - RNA, 21 nt, Human
ugugugugugugugugugugu

SEQ ID NO: 1329543 - RNA, 21 nt, Human
ugugugugugugugugugugu

SEQ ID NO: 1329544 - RNA, 21 nt, Human
ugugugugugugugugugugu

SEQ ID NO: 1329545 - RNA, 21 nt, Human
ugugugugugugugugugugu

SEQ ID NO: 1329546 - RNA, 21 nt, Human
ugugugugugugugugugugu

SEQ ID NO: 1329547 - RNA, 21 nt, Human
ugugugugugugugugugugu

SEQ ID NO: 1329548 - RNA, 21 nt, Human
ugugugugugugugugugugu

SEQ ID NO: 1329549 - RNA, 21 nt, Human
ugugugugugugugugugugu

SEQ ID NO: 1329550 - RNA, 21 nt, Human
ugugugugugugugugugugu

SEQ ID NO: 1329551 - RNA, 21 nt, Human
ugugugugugugugugugugu

SEQ ID NO: 1329552 - RNA, 21 nt, Human
ugugugugugugugugugugu

SEQ ID NO: 1329553 - RNA, 21 nt, Human
ugugugugugugugugugugu

SEQ ID NO: 1329554 - RNA, 21 nt, Human
ugugugugugugugugugugu

SEQ ID NO: 1329555 - RNA, 21 nt, Human
ugugugugugugugugugugu

SEQ ID NO: 1329556 - RNA, 21 nt, Human
ugugugugugugugugugugu

SEQ ID NO: 1329557 - RNA, 21 nt, Human
ugugugugugugugugugugu

SEQ ID NO: 1329558 - RNA, 21 nt, Human
ugugugugugugugugugugu

SEQ ID NO: 1329559 - RNA, 21 nt, Human
ugugugugugugugugugugu

SEQ ID NO: 1329560 - RNA, 21 nt, Human
ugugugugugugugugugugu

SEQ ID NO: 1329561 - RNA, 21 nt, Human
ugugugugugugugugugugu

SEQ ID NO: 1329562 - RNA, 22 nt, Human
ugugugugugugugugugugug

SEQ ID NO: 1329563 - RNA, 22 nt, Human
ugugugugugugugugugugug

SEQ ID NO: 1329564 - RNA, 22 nt, Human
ugugugugugugugugugugug

SEQ ID NO: 1329565 - RNA, 22 nt, Human
ugugugugugugugugugugug

SEQ ID NO: 1329566 - RNA, 22 nt, Human
ugugugugugugugugugugug

SEQ ID NO: 1329567 - RNA, 22 nt, Human
ugugugugugugugugugugug

SEQ ID NO: 1329568 - RNA, 22 nt, Human
ugugugugugugugugugugug

SEQ ID NO: 1329569 - RNA, 22 nt, Human
ugugugugugugugugugugug

SEQ ID NO: 1329570 - RNA, 22 nt, Human
ugugugugugugugugugugug

SEQ ID NO: 1329571 - RNA, 22 nt, Human
uuaaacacucagaacugcccuc

SEQ ID NO: 1329572 - RNA, 18 nt, Human
uugcuaugcaccugauga

SEQ ID NO: 1329573 - RNA, 18 nt, Human
uuggugugugugugugug

SEQ ID NO: 1329574 - RNA, 24 nt, Human
acucuggaccagccaccaggugcc

SEQ ID NO: 1329575 - RNA, 20 nt, Human
acucuuuuggccacuauuga

SEQ ID NO: 1329576 - RNA, 19 nt, Human
agaguccuucccugggacu

SEQ ID NO: 1329577 - RNA, 24 nt, Human
caauuagaguccucgacucucagu

SEQ ID NO: 1329578 - RNA, 22 nt, Human
caccaggugccuuggcugcccu

SEQ ID NO: 1329579 - RNA, 27 nt, Human
cagccaaucagaguccuuccccgacuc

SEQ ID NO: 1329580 - RNA, 18 nt, Human
cagccaccaggugccuug

SEQ ID NO: 1329581 - RNA, 18 nt, Human
cagccaggugcccagccu

SEQ ID NO: 1329582 - RNA, 23 nt, Human
ccccgacucuggaccagccacca

SEQ ID NO: 1329583 - RNA, 22 nt, Human
ccuggcucagccaaucagaguc

SEQ ID NO: 1329584 - RNA, 21 nt, Human
cgcuggggucagauggacccu

SEQ ID NO: 1329585 - RNA, 20 nt, Human
cucgaagaugccucuucauc

SEQ ID NO: 1329586 - RNA, 19 nt, Human
cuggaccagccaccaggug

SEQ ID NO: 1329587 - RNA, 22 nt, Human
cuuaacccuggcucagccaauc

SEQ ID NO: 1329588 - RNA, 20 nt, Human
gacagccaggugcccagccc

SEQ ID NO: 1329589 - RNA, 21 nt, Human
gggaccacccaaucagagucc

SEQ ID NO: 1329590 - RNA, 23 nt, Human
guggaguccuugucuuuagagga

SEQ ID NO: 1329591 - RNA, 18 nt, Human
ucagaguccuuccccgac

SEQ ID NO: 1329592 - RNA, 21 nt, Human
ugauuggcuacguucuucccu

SEQ ID NO: 1329593 - RNA, 23 nt, Human
ugccuuggcugcccuuugguggc

SEQ ID NO: 1329594 - RNA, 19 nt, Human
ugggacuuaacccuggcuc

SEQ ID NO: 1329595 - RNA, 22 nt, Human
uucaagacccacuaauuggccu

SEQ ID NO: 1329596 - RNA, 21 nt, Human
uucccugggacuuaacccugg

SEQ ID NO: 1329597 - RNA, 21 nt, Human
uugcagcagaacuggcuggag

SEQ ID NO: 1329598 - RNA, 21 nt, Human
uuggcugcccuuugguggcaa

SEQ ID NO: 1329599 - RNA, 19 nt, Human
accaccugccgagacccca

SEQ ID NO: 1329600 - RNA, 21 nt, Human
caccugccgagaccccagagc

SEQ ID NO: 1329601 - RNA, 22 nt, Human
ggaccaccugccgagaccccag

SEQ ID NO: 1329602 - RNA, 21 nt, Human
ucagccuuguccgccuggagc

SEQ ID NO: 1329603 - RNA, 21 nt, Human
ugccgagaccccagagcuggc

SEQ ID NO: 1329604 - RNA, 24 nt, Human
aagaaaaaggauuuuuaaaaaaca

SEQ ID NO: 1329605 - RNA, 23 nt, Human
aaguguccagacccugggucuuu

SEQ ID NO: 1329606 - RNA, 20 nt, Human
acccugggucuuucccuccc

SEQ ID NO: 1329607 - RNA, 19 nt, Human
aggguuuuguguuggagga

SEQ ID NO: 1329608 - RNA, 25 nt, Human
agucuuggguggguguacaggccag

SEQ ID NO: 1329609 - RNA, 24 nt, Human
auggauaacgugccggggcugacc

SEQ ID NO: 1329610 - RNA, 23 nt, Human
caaauauaugugcaaaugccccc

SEQ ID NO: 1329611 - RNA, 21 nt, Human
caagauaccaucuccugcugc

SEQ ID NO: 1329612 - RNA, 20 nt, Human
ccaguggcgggguagccgcc

SEQ ID NO: 1329613 - RNA, 18 nt, Human
cccuagaacuugagaaaa

SEQ ID NO: 1329614 - RNA, 22 nt, Human
ccuauggauaacgugccggggc

SEQ ID NO: 1329615 - RNA, 21 nt, Human
cugaaggcccccagccgcugg

SEQ ID NO: 1329616 - RNA, 22 nt, Human
cugaaucguugguuggcuguug

SEQ ID NO: 1329617 - RNA, 22 nt, Human
cuguuguggccaagauaccauc

SEQ ID NO: 1329618 - RNA, 23 nt, Human
gagcuggggccaguggcauucuc

SEQ ID NO: 1329619 - RNA, 25 nt, Human
gcccccagccgcugguggcgugagg

SEQ ID NO: 1329620 - RNA, 18 nt, Human
ggccaguggcgggguagc

SEQ ID NO: 1329621 - RNA, 18 nt, Human
gggagugagcacccgggu

SEQ ID NO: 1329622 - RNA, 21 nt, Human
gggcaagagcuggggccagug

SEQ ID NO: 1329623 - RNA, 18 nt, Human
ggggugagcccaguggcc

SEQ ID NO: 1329624 - RNA, 19 nt, Human
guggcguuugggggugagc

SEQ ID NO: 1329625 - RNA, 21 nt, Human
gugguucugaaggcccccagc

SEQ ID NO: 1329626 - RNA, 24 nt, Human
guugguuggcuguuguggccaaga

SEQ ID NO: 1329627 - RNA, 24 nt, Human
uacaaauauaugugcaaaugcccc

SEQ ID NO: 1329628 - RNA, 23 nt, Human
ucugugauuggacagucuuucuu

SEQ ID NO: 1329629 - RNA, 19 nt, Human
ugaaggcccccagccgcug

SEQ ID NO: 1329630 - RNA, 21 nt, Human
ugcaggagucuugggugggug

SEQ ID NO: 1329631 - RNA, 26 nt, Human
ugcuugcgggggagugagcacccggg

SEQ ID NO: 1329632 - RNA, 19 nt, Human
uggaagggggcaggcuugg

SEQ ID NO: 1329633 - RNA, 20 nt, Human
uggaagggggcaggcuugga

SEQ ID NO: 1329634 - RNA, 24 nt, Human
uggaagggggcaggcuugggacag

SEQ ID NO: 1329635 - RNA, 20 nt, Human
uggcguuugggggugagccc

SEQ ID NO: 1329636 - RNA, 23 nt, Human
uggcguuugggggugagcccagu

SEQ ID NO: 1329637 - RNA, 24 nt, Human
uggcguuugggggugagcccagug

SEQ ID NO: 1329638 - RNA, 18 nt, Human
ugggaauggaagggggca

SEQ ID NO: 1329639 - RNA, 21 nt, Human
ugggaauggaagggggcaggc

SEQ ID NO: 1329640 - RNA, 20 nt, Human
ugggggcaagagcuggggcc

SEQ ID NO: 1329641 - RNA, 20 nt, Human
ugggggugagcccaguggcc

SEQ ID NO: 1329642 - RNA, 18 nt, Human
uugguuggcuguuguggc

SEQ ID NO: 1329643 - RNA, 22 nt, Human
uuuaaaaaacagucaaaagguu

SEQ ID NO: 1329644 - RNA, 24 nt, Human
uuugggggugagcccaguggccuu

SEQ ID NO: 1329645 - RNA, 18 nt, Human
acagcugggagggcagga

SEQ ID NO: 1329646 - RNA, 22 nt, Human
acgcagcuguuccuccgugggg

SEQ ID NO: 1329647 - RNA, 19 nt, Human
aggaaguccccgucagcuc

SEQ ID NO: 1329648 - RNA, 20 nt, Human
aggagccagggcugagaacg

SEQ ID NO: 1329649 - RNA, 20 nt, Human
aggagugcugggcaggcagg

SEQ ID NO: 1329650 - RNA, 22 nt, Human
aggcaggagccagggcugagaa

SEQ ID NO: 1329651 - RNA, 19 nt, Human
aggcaggagccggggcuga

SEQ ID NO: 1329652 - RNA, 22 nt, Human
aggcaggagccggggcugagaa

SEQ ID NO: 1329653 - RNA, 19 nt, Human
aggugcuugggcugcccgg

SEQ ID NO: 1329654 - RNA, 22 nt, Human
aucccaucugggucgacagcug

SEQ ID NO: 1329655 - RNA, 26 nt, Human
augcaacuucagggcauccucaaagg

SEQ ID NO: 1329656 - RNA, 18 nt, Human
augcucucaaacagcacg

SEQ ID NO: 1329657 - RNA, 22 nt, Human
cacugagcacucaugcaacuuc

SEQ ID NO: 1329658 - RNA, 21 nt, Human
cagcugggagggcaggacugg

SEQ ID NO: 1329659 - RNA, 22 nt, Human
caggaggagggcugagagcccc

SEQ ID NO: 1329660 - RNA, 18 nt, Human
cccagguggaguaggggc

SEQ ID NO: 1329661 - RNA, 20 nt, Human
ccccgagaucccaggugacc

SEQ ID NO: 1329662 - RNA, 21 nt, Human
cccucgggguccacgagcagc

SEQ ID NO: 1329663 - RNA, 22 nt, Human
ccuccgugggggccacaggggc

SEQ ID NO: 1329664 - RNA, 22 nt, Human
ccuuccccugcucccaggugga

SEQ ID NO: 1329665 - RNA, 22 nt, Human
cugccgcccggcggcucauccg

SEQ ID NO: 1329666 - RNA, 19 nt, Human
cugggagggcaggacuggg

SEQ ID NO: 1329667 - RNA, 21 nt, Human
cugggccacugguccuccaag

SEQ ID NO: 1329668 - RNA, 22 nt, Human
gaggcagcggugguucggccug

SEQ ID NO: 1329669 - RNA, 18 nt, Human
gagugcugggcaggcagg

SEQ ID NO: 1329670 - RNA, 19 nt, Human
ggaccagagcugggagaaa

SEQ ID NO: 1329671 - RNA, 20 nt, Human
ggacuggggggaagcugcug

SEQ ID NO: 1329672 - RNA, 23 nt, Human
ggacuggggggaagcugcugggc

SEQ ID NO: 1329673 - RNA, 18 nt, Human
ggcaggcagggggcaagc

SEQ ID NO: 1329674 - RNA, 19 nt, Human
ggccaggcaaccacguccu

SEQ ID NO: 1329675 - RNA, 19 nt, Human
gugcugggcaggcaggggg

SEQ ID NO: 1329676 - RNA, 27 nt, Human
uacuccugccgggaccagagcugggag

SEQ ID NO: 1329677 - RNA, 18 nt, Human
uaggggccucacgacugc

SEQ ID NO: 1329678 - RNA, 22 nt, Human
uccaggaggagggcugagagcc

SEQ ID NO: 1329679 - RNA, 22 nt, Human
ucgacagcugggagggcaggac

SEQ ID NO: 1329680 - RNA, 20 nt, Human
ucgcacaaggaaguccccgu

SEQ ID NO: 1329681 - RNA, 21 nt, Human
ugacaggcaggagccggggcu

SEQ ID NO: 1329682 - RNA, 18 nt, Human
ugacgcagcuguuccucc

SEQ ID NO: 1329683 - RNA, 22 nt, Human
ugagaacaggcaggagccaggg

SEQ ID NO: 1329684 - RNA, 18 nt, Human
ugccgggaccagagcugg

SEQ ID NO: 1329685 - RNA, 21 nt, Human
ugccgggaccagagcugggag

SEQ ID NO: 1329686 - RNA, 22 nt, Human
ugcucccagguggaguaggggc

SEQ ID NO: 1329687 - RNA, 23 nt, Human
uggcugaugcucucaaacagcac

SEQ ID NO: 1329688 - RNA, 21 nt, Human
ugggggccacaggggcccggc

SEQ ID NO: 1329689 - RNA, 20 nt, Human
ugguucggccugaccaggau

SEQ ID NO: 1329690 - RNA, 20 nt, Human
aaccagcccagggguucugc

SEQ ID NO: 1329691 - RNA, 24 nt, Human
agacacaagcuggucaccugagca

SEQ ID NO: 1329692 - RNA, 19 nt, Human
aggagaaaggaggggaggc

SEQ ID NO: 1329693 - RNA, 21 nt, Human
aggaggagaaaggaggggagg

SEQ ID NO: 1329694 - RNA, 18 nt, Human
agggguucugcgauuucc

SEQ ID NO: 1329695 - RNA, 23 nt, Human
agguagccaaggggaggaggagg

SEQ ID NO: 1329696 - RNA, 23 nt, Human
auaauaaaccagcccagggguuc

SEQ ID NO: 1329697 - RNA, 20 nt, Human
auagaauuccagaggccgac

SEQ ID NO: 1329698 - RNA, 27 nt, Human
caacagccaggccugacuccaaaugaa

SEQ ID NO: 1329699 - RNA, 28 nt, Human
caagcccgaauagaauuccagaggccga

SEQ ID NO: 1329700 - RNA, 19 nt, Human
cagccaagcuucugaagcc

SEQ ID NO: 1329701 - RNA, 23 nt, Human
ccagggguucugcgauuucuccu

SEQ ID NO: 1329702 - RNA, 25 nt, Human
ccucccagagacacaagcuggucac

SEQ ID NO: 1329703 - RNA, 25 nt, Human
ccugagcaacagccaggccugacuc

SEQ ID NO: 1329704 - RNA, 21 nt, Human
gaacagccaagcuucugaagc

SEQ ID NO: 1329705 - RNA, 18 nt, Human
gaggagaaaggaggggag

SEQ ID NO: 1329706 - RNA, 22 nt, Human
ggaggaggaggagaaaggaggg

SEQ ID NO: 1329707 - RNA, 19 nt, Human
uaauaaaccagcccagggg

SEQ ID NO: 1329708 - RNA, 23 nt, Human
uaauaaaccagcccagggguucu

SEQ ID NO: 1329709 - RNA, 21 nt, Human
uagaauuccagaggccgacac

SEQ ID NO: 1329710 - RNA, 22 nt, Human
uccaaagagagccgucgcaggu

SEQ ID NO: 1329711 - RNA, 25 nt, Human
uccagagggagguagccaaggggag

SEQ ID NO: 1329712 - RNA, 19 nt, Human
ucccauguaaaagaugcua

SEQ ID NO: 1329713 - RNA, 21 nt, Human
ucccauguaaaagaugcuagc

SEQ ID NO: 1329714 - RNA, 20 nt, Human
ugaaugccaaccccaagcug

SEQ ID NO: 1329715 - RNA, 25 nt, Human
ugacuuccgggaugugcgguuggag

SEQ ID NO: 1329716 - RNA, 21 nt, Human
ugccaaccccaagcugggguu

SEQ ID NO: 1329717 - RNA, 21 nt, Human
uggagaacacagaggccaagc

SEQ ID NO: 1329718 - RNA, 18 nt, Human
uggucaccugagcaacag

SEQ ID NO: 1329719 - RNA, 24 nt, Human
uucacaaaaauucauuucucugau

SEQ ID NO: 1329720 - RNA, 22 nt, Human
uucagaacagccaagcuucuga

SEQ ID NO: 1329721 - RNA, 21 nt, Human
uucuggaucaucgcgccgggu

SEQ ID NO: 1329722 - RNA, 22 nt, Human
aacaugcaaucuauacauaaaa

SEQ ID NO: 1329723 - RNA, 20 nt, Human
acccccucgugcuccccaac

SEQ ID NO: 1329724 - RNA, 20 nt, Human
cauuucaacaugcaaucuau

SEQ ID NO: 1329725 - RNA, 19 nt, Human
ccccuccccuuccugguuc

SEQ ID NO: 1329726 - RNA, 18 nt, Human
ccccucgugcuccccaac

SEQ ID NO: 1329727 - RNA, 24 nt, Human
cccuuccugguucagguccugcuc

SEQ ID NO: 1329728 - RNA, 21 nt, Human
ccggccuccugccccuggguc

SEQ ID NO: 1329729 - RNA, 22 nt, Human
cgccccuccccuuccugguuca

SEQ ID NO: 1329730 - RNA, 23 nt, Human
cgccucgagccacccccucgugc

SEQ ID NO: 1329731 - RNA, 20 nt, Human
cucccgccucgagccacccc

SEQ ID NO: 1329732 - RNA, 18 nt, Human
cuccugggacucagcgcu

SEQ ID NO: 1329733 - RNA, 18 nt, Human
cugccccugggucuuccu

SEQ ID NO: 1329734 - RNA, 19 nt, Human
ggacucagcgcugcgccuc

SEQ ID NO: 1329735 - RNA, 22 nt, Human
ucagguccugcuccugggacuc

SEQ ID NO: 1329736 - RNA, 22 nt, Human
ucccgccucgagccacccccuc

SEQ ID NO: 1329737 - RNA, 20 nt, Human
ugaccagagaaaccacugca

SEQ ID NO: 1329738 - RNA, 21 nt, Human
ugaccagagaaaccacugcau

SEQ ID NO: 1329739 - RNA, 21 nt, Human
ugcuauuucuuccugccccuc

SEQ ID NO: 1329740 - RNA, 26 nt, Human
uggaccgugagugaccagagaaacca

SEQ ID NO: 1329741 - RNA, 24 nt, Human
ugugcggggaggaggaggcaggac

SEQ ID NO: 1329742 - RNA, 19 nt, Human
uuccugcuauuucuuccug

SEQ ID NO: 1329743 - RNA, 18 nt, Human
aggcugacgagagcuggg

SEQ ID NO: 1329744 - RNA, 18 nt, Human
ggagauggccagcaggag

SEQ ID NO: 1329745 - RNA, 20 nt, Human
ggaggcugacgagagcuggg

SEQ ID NO: 1329746 - RNA, 22 nt, Human
aaaaaauuuaaaaaaucagcca

SEQ ID NO: 1329747 - RNA, 21 nt, Human
aaaacgccuuucugagcauuu

SEQ ID NO: 1329748 - RNA, 22 nt, Human
aaaagcauguuuaaguguacac

SEQ ID NO: 1329749 - RNA, 24 nt, Human
aaaagcuaaaacuaugaaggcagu

SEQ ID NO: 1329750 - RNA, 21 nt, Human
aaacaaaacgccuuucugagc

SEQ ID NO: 1329751 - RNA, 21 nt, Human
aaacaagacacaaaaaucagg

SEQ ID NO: 1329752 - RNA, 26 nt, Human
aaacaagacacaaaaaucaggcugaa

SEQ ID NO: 1329753 - RNA, 21 nt, Human
aaauaacugagacaccaaacu

SEQ ID NO: 1329754 - RNA, 18 nt, Human
aaauuauuguacccaaga

SEQ ID NO: 1329755 - RNA, 21 nt, Human
aacauagcaagacuccauucu

SEQ ID NO: 1329756 - RNA, 23 nt, Human
aaccaguccaaaaucugauccuc

SEQ ID NO: 1329757 - RNA, 18 nt, Human
aacccacaaacaagacac

SEQ ID NO: 1329758 - RNA, 23 nt, Human
aacccacaaacaagacacaaaaa

SEQ ID NO: 1329759 - RNA, 18 nt, Human
aaggacacaccccagagc

SEQ ID NO: 1329760 - RNA, 20 nt, Human
aaggacacaccccagagccc

SEQ ID NO: 1329761 - RNA, 25 nt, Human
aaugcaaagacacagguggaaaaga

SEQ ID NO: 1329762 - RNA, 23 nt, Human
aauuaccaaaaaaaaaaaaaaaa

SEQ ID NO: 1329763 - RNA, 23 nt, Human
aauuauuguacccaagaggcaaa

SEQ ID NO: 1329764 - RNA, 24 nt, Human
acaagacacaaaaaucaggcugaa

SEQ ID NO: 1329765 - RNA, 20 nt, Human
acaauggagaaaacauccac

SEQ ID NO: 1329766 - RNA, 20 nt, Human
acuucgaaaauguuuuuaga

SEQ ID NO: 1329767 - RNA, 20 nt, Human
acuuugggugauaauggauu

SEQ ID NO: 1329768 - RNA, 20 nt, Human
agaaaagccagugugaaagg

SEQ ID NO: 1329769 - RNA, 21 nt, Human
agagaugaaggugaagagaaa

SEQ ID NO: 1329770 - RNA, 19 nt, Human
agaguaaacucuaauguaa

SEQ ID NO: 1329771 - RNA, 20 nt, Human
agcaccuguagucccagcug

SEQ ID NO: 1329772 - RNA, 22 nt, Human
agccugggcaacauagcaagac

SEQ ID NO: 1329773 - RNA, 24 nt, Human
agccugggcaacauagcaagacuc

SEQ ID NO: 1329774 - RNA, 24 nt, Human
agcuauguaugacaaacgacaaaa

SEQ ID NO: 1329775 - RNA, 24 nt, Human
agcuggucuuuuagcugguauagg

SEQ ID NO: 1329776 - RNA, 24 nt, Human
agcuguucaggaggcugagguggg

SEQ ID NO: 1329777 - RNA, 21 nt, Human
aggaggcugaggugggagggu

SEQ ID NO: 1329778 - RNA, 23 nt, Human
aggaguucaagaccagccugggc

SEQ ID NO: 1329779 - RNA, 19 nt, Human
aggcugaggugggaggguc

SEQ ID NO: 1329780 - RNA, 19 nt, Human
agggagguggagcacaggg

SEQ ID NO: 1329781 - RNA, 20 nt, Human
aggugggagggucacuuaag

SEQ ID NO: 1329782 - RNA, 18 nt, Human
agugaugaagaaaagggc

SEQ ID NO: 1329783 - RNA, 24 nt, Human
auaaaggacacaccccagagccca

SEQ ID NO: 1329784 - RNA, 18 nt, Human
auaaaguguaguacaucc

SEQ ID NO: 1329785 - RNA, 24 nt, Human
auagaacaagaaccugucucaaaa

SEQ ID NO: 1329786 - RNA, 26 nt, Human
aucagccacacaugguggcaagcacc

SEQ ID NO: 1329787 - RNA, 24 nt, Human
aucaugccauugcacuccagccug

SEQ ID NO: 1329788 - RNA, 19 nt, Human
augcuuguaaucccagcac

SEQ ID NO: 1329789 - RNA, 23 nt, Human
auugcacuccagccuggggauag

SEQ ID NO: 1329790 - RNA, 23 nt, Human
auugccauaacuuaaaagcaacc

SEQ ID NO: 1329791 - RNA, 26 nt, Human
caaacaagacacaaaaaucaggcugu

SEQ ID NO: 1329792 - RNA, 22 nt, Human
caaagacacagguggaaaagau

SEQ ID NO: 1329793 - RNA, 22 nt, Human
caagacacaaaaaucaggcuga

SEQ ID NO: 1329794 - RNA, 24 nt, Human
caagacacaaaaaucaggcugaac

SEQ ID NO: 1329795 - RNA, 19 nt, Human
caagaggcaaaaaacauca

SEQ ID NO: 1329796 - RNA, 24 nt, Human
caaguucgagccagcucuacagua

SEQ ID NO: 1329797 - RNA, 19 nt, Human
caauauggaguugacugau

SEQ ID NO: 1329798 - RNA, 22 nt, Human
cacaaacaagacacaaaaauca

SEQ ID NO: 1329799 - RNA, 18 nt, Human
cacaugguggcaagcacc

SEQ ID NO: 1329800 - RNA, 24 nt, Human
caccuguagucccagcuguucagg

SEQ ID NO: 1329801 - RNA, 22 nt, Human
cagaaaauuauuguacccaaga

SEQ ID NO: 1329802 - RNA, 25 nt, Human
cagaggucaaggcugcaagugagcc

SEQ ID NO: 1329803 - RNA, 19 nt, Human
cagcacuuugggaggccag

SEQ ID NO: 1329804 - RNA, 21 nt, Human
cagcacuuugggaggccagug

SEQ ID NO: 1329805 - RNA, 24 nt, Human
cagcucauaaaggacacaccccag

SEQ ID NO: 1329806 - RNA, 24 nt, Human
cagcuguucaggaggcugaggugg

SEQ ID NO: 1329807 - RNA, 24 nt, Human
cauagcaagacuccauucuacaaa

SEQ ID NO: 1329808 - RNA, 22 nt, Human
cauccauucuggcugggcaugg

SEQ ID NO: 1329809 - RNA, 24 nt, Human
caugaucaugccauugcacuccag

SEQ ID NO: 1329810 - RNA, 18 nt, Human
cauugcacuccagccugg

SEQ ID NO: 1329811 - RNA, 19 nt, Human
cauugcacuccagccuggg

SEQ ID NO: 1329812 - RNA, 19 nt, Human
cauugcacuccagccuggg

SEQ ID NO: 1329813 - RNA, 22 nt, Human
cauugcacuccagccuggggau

SEQ ID NO: 1329814 - RNA, 23 nt, Human
cauugcacuccagccuggggaua

SEQ ID NO: 1329815 - RNA, 24 nt, Human
cauugcacuccagccuggggauag

SEQ ID NO: 1329816 - RNA, 24 nt, Human
cauugcacuccagccuggggauag

SEQ ID NO: 1329817 - RNA, 23 nt, Human
ccagaggucaaggcugcaaguga

SEQ ID NO: 1329818 - RNA, 21 nt, Human
ccagauauuaucuucaguacc

SEQ ID NO: 1329819 - RNA, 19 nt, Human
ccaugaucaugccauugca

SEQ ID NO: 1329820 - RNA, 19 nt, Human
ccauugcacuccagccugg

SEQ ID NO: 1329821 - RNA, 20 nt, Human
ccauugcacuccagccuggg

SEQ ID NO: 1329822 - RNA, 23 nt, Human
ccauugcacuccagccuggggau

SEQ ID NO: 1329823 - RNA, 25 nt, Human
ccauugcacuccagccuggggauag

SEQ ID NO: 1329824 - RNA, 20 nt, Human
cccacaaaauuugucucacu

SEQ ID NO: 1329825 - RNA, 21 nt, Human
ccccagagcccaaaugucacu

SEQ ID NO: 1329826 - RNA, 24 nt, Human
ccucccacaaaauuugucucacua

SEQ ID NO: 1329827 - RNA, 24 nt, Human
ccugggcaacauagcaagacucca

SEQ ID NO: 1329828 - RNA, 21 nt, Human
cuaaaacuaugaaggcaguaa

SEQ ID NO: 1329829 - RNA, 23 nt, Human
cuaaacccacaaacaagacacaa

SEQ ID NO: 1329830 - RNA, 20 nt, Human
cuagaaaagcuaaaacuaug

SEQ ID NO: 1329831 - RNA, 24 nt, Human
cucaugcuuguaaucccagcacuu

SEQ ID NO: 1329832 - RNA, 23 nt, Human
cugauccucuugaaacaaaacgc

SEQ ID NO: 1329833 - RNA, 23 nt, Human
cugcuugaacccaggaguucaag

SEQ ID NO: 1329834 - RNA, 18 nt, Human
cuggcugggcaugguggc

SEQ ID NO: 1329835 - RNA, 18 nt, Human
cuucugcaauaagcugag

SEQ ID NO: 1329836 - RNA, 23 nt, Human
cuugaacccaggaguucaagacc

SEQ ID NO: 1329837 - RNA, 21 nt, Human
gaaaagcuaaaacuaugaagg

SEQ ID NO: 1329838 - RNA, 22 nt, Human
gaaccugucucaaaaaaaaaaa

SEQ ID NO: 1329839 - RNA, 18 nt, Human
gaacucucuguacuuucc

SEQ ID NO: 1329840 - RNA, 21 nt, Human
gaagaaaagggcgaaaaaugc

SEQ ID NO: 1329841 - RNA, 24 nt, Human
gcaaaaaacaucauaugugaacaa

SEQ ID NO: 1329842 - RNA, 18 nt, Human
gcacuuugggaggccagu

SEQ ID NO: 1329843 - RNA, 19 nt, Human
gcugcaagugagccaugau

SEQ ID NO: 1329844 - RNA, 21 nt, Human
gcugggcaugguggcucaugc

SEQ ID NO: 1329845 - RNA, 22 nt, Human
gcuugaacccaggaguucaaga

SEQ ID NO: 1329846 - RNA, 18 nt, Human
ggagguuggagggaggug

SEQ ID NO: 1329847 - RNA, 23 nt, Human
ggcaugguggcucaugcuuguaa

SEQ ID NO: 1329848 - RNA, 24 nt, Human
gguacauaggaacucucuguacuu

SEQ ID NO: 1329849 - RNA, 24 nt, Human
gguggcucaugcuuguaaucccag

SEQ ID NO: 1329850 - RNA, 19 nt, Human
gguuggagggagguggagc

SEQ ID NO: 1329851 - RNA, 21 nt, Human
gguugugcaugugugaggaag

SEQ ID NO: 1329852 - RNA, 22 nt, Human
guaaagcaaccagugguugcca

SEQ ID NO: 1329853 - RNA, 22 nt, Human
uaaacccacaaacaagacacaa

SEQ ID NO: 1329854 - RNA, 23 nt, Human
uaaaggacacaccccagagccca

SEQ ID NO: 1329855 - RNA, 21 nt, Human
uaacuuaaaagcaaccaagau

SEQ ID NO: 1329856 - RNA, 21 nt, Human
uaagaagaaauaagguaugaa

SEQ ID NO: 1329857 - RNA, 22 nt, Human
uaagguuuguuuucacagauuu

SEQ ID NO: 1329858 - RNA, 23 nt, Human
uaauuauguuggcagaauguuau

SEQ ID NO: 1329859 - RNA, 21 nt, Human
uaauugccauaacuuaaaagc

SEQ ID NO: 1329860 - RNA, 18 nt, Human
uacaauaccaagaguaaa

SEQ ID NO: 1329861 - RNA, 21 nt, Human
uacacagcucauaaaggacac

SEQ ID NO: 1329862 - RNA, 25 nt, Human
uacacagcucauaaaggacacaccc

SEQ ID NO: 1329863 - RNA, 19 nt, Human
uacauaaauacaaugggau

SEQ ID NO: 1329864 - RNA, 26 nt, Human
uagaacaagaaccugucucaaaaaaa

SEQ ID NO: 1329865 - RNA, 24 nt, Human
uagaagcuuuauucauaauugcca

SEQ ID NO: 1329866 - RNA, 20 nt, Human
uagaauaauggauaaagugu

SEQ ID NO: 1329867 - RNA, 23 nt, Human
uauaucaggcuucuguauauaau

SEQ ID NO: 1329868 - RNA, 24 nt, Human
uaucuguacaaaccaguccaaaau

SEQ ID NO: 1329869 - RNA, 22 nt, Human
ucaauacagagguugugcaugu

SEQ ID NO: 1329870 - RNA, 21 nt, Human
ucagagaugaaggugaagaga

SEQ ID NO: 1329871 - RNA, 23 nt, Human
ucaugccauugcacuccagccug

SEQ ID NO: 1329872 - RNA, 22 nt, Human
ucaugcuuguaaucccagcacu

SEQ ID NO: 1329873 - RNA, 25 nt, Human
uccaaaaucugauccucuugaaaca

SEQ ID NO: 1329874 - RNA, 20 nt, Human
ucuaaacccacaaacaagac

SEQ ID NO: 1329875 - RNA, 22 nt, Human
ucucaaaaaaaaaaauuaccaa

SEQ ID NO: 1329876 - RNA, 23 nt, Human
ucuggagaauaaaagccucccac

SEQ ID NO: 1329877 - RNA, 24 nt, Human
ucuggcugggcaugguggcucaug

SEQ ID NO: 1329878 - RNA, 18 nt, Human
ugaaacaaaacgccuuuc

SEQ ID NO: 1329879 - RNA, 21 nt, Human
ugaaacaaaacgccuuucuga

SEQ ID NO: 1329880 - RNA, 23 nt, Human
ugaaacaaaacgccuuucugagc

SEQ ID NO: 1329881 - RNA, 23 nt, Human
ugaacccaggaguucaagaccag

SEQ ID NO: 1329882 - RNA, 21 nt, Human
ugaagcuggucuuuuagcugg

SEQ ID NO: 1329883 - RNA, 21 nt, Human
ugaaggcaguaaagcaaccag

SEQ ID NO: 1329884 - RNA, 19 nt, Human
ugaagugaugaagaaaagg

SEQ ID NO: 1329885 - RNA, 20 nt, Human
ugacaaacgacaaaauuacu

SEQ ID NO: 1329886 - RNA, 21 nt, Human
ugagaaaagccagugugaaag

SEQ ID NO: 1329887 - RNA, 21 nt, Human
ugaggagagagaaacuuuuca

SEQ ID NO: 1329888 - RNA, 28 nt, Human
ugaggagagagaaacuuuucaaucguuu

SEQ ID NO: 1329889 - RNA, 18 nt, Human
ugaggugggagggucacu

SEQ ID NO: 1329890 - RNA, 18 nt, Human
ugccaagaguugggaggg

SEQ ID NO: 1329891 - RNA, 20 nt, Human
ugccaagaguugggagggag

SEQ ID NO: 1329892 - RNA, 23 nt, Human
ugcuuguaaucccagcacuuugg

SEQ ID NO: 1329893 - RNA, 23 nt, Human
ugcuuguaaucccagcacuuugg

SEQ ID NO: 1329894 - RNA, 24 nt, Human
ugcuuguaaucccagcacuuuggg

SEQ ID NO: 1329895 - RNA, 24 nt, Human
uggaagaaaagaaauaauaugaug

SEQ ID NO: 1329896 - RNA, 25 nt, Human
uggaagaaaagaaauaauaugauga

SEQ ID NO: 1329897 - RNA, 22 nt, Human
uggcaagcaccuguagucccag

SEQ ID NO: 1329898 - RNA, 22 nt, Human
uggcucaugcuuguaaucccag

SEQ ID NO: 1329899 - RNA, 24 nt, Human
uggcucaugcuuguaaucccagca

SEQ ID NO: 1329900 - RNA, 23 nt, Human
uggcugggcaugguggcucaugc

SEQ ID NO: 1329901 - RNA, 24 nt, Human
uggcugggcaugguggcucaugcu

SEQ ID NO: 1329902 - RNA, 22 nt, Human
uggggauagaacaagaaccugu

SEQ ID NO: 1329903 - RNA, 23 nt, Human
uggggauagaacaagaaccuguc

SEQ ID NO: 1329904 - RNA, 21 nt, Human
uggucuuuuagcugguauagg

SEQ ID NO: 1329905 - RNA, 23 nt, Human
ugguggcaagcaccuguaguccc

SEQ ID NO: 1329906 - RNA, 24 nt, Human
ugguggcaagcaccuguaguccca

SEQ ID NO: 1329907 - RNA, 24 nt, Human
ugguggcucaugcuuguaauccca

SEQ ID NO: 1329908 - RNA, 18 nt, Human
uguaaucccagcacuuug

SEQ ID NO: 1329909 - RNA, 27 nt, Human
uguacacagcucauaaaggacacaccc

SEQ ID NO: 1329910 - RNA, 21 nt, Human
uguccugaagcuggucuuuua

SEQ ID NO: 1329911 - RNA, 19 nt, Human
ugugaacaauggagaaaac

SEQ ID NO: 1329912 - RNA, 21 nt, Human
uguucugagauuuaaugucuc

SEQ ID NO: 1329913 - RNA, 22 nt, Human
uuagcugguauaggcugugauc

SEQ ID NO: 1329914 - RNA, 18 nt, Human
uucaggaggcugaggugg

SEQ ID NO: 1329915 - RNA, 23 nt, Human
uugcaccucagaaaauuauugua

SEQ ID NO: 1329916 - RNA, 22 nt, Human
uuggcagaauguuaucacaugu

SEQ ID NO: 1329917 - RNA, 20 nt, Human
uuugcugugaaccccaaauc

SEQ ID NO: 1329918 - RNA, 23 nt, Human
aaaaaaaaaccaaaaaaaaaacc

SEQ ID NO: 1329919 - RNA, 23 nt, Human
aaaaaaaaccaaaaaaaaaaccg

SEQ ID NO: 1329920 - RNA, 20 nt, Human
aaaaaaaccaaaaaaaaaac

SEQ ID NO: 1329921 - RNA, 21 nt, Human
aaaaagcaaaccucugcccuu

SEQ ID NO: 1329922 - RNA, 18 nt, Human
aaaccaaaaaaaaaaccg

SEQ ID NO: 1329923 - RNA, 19 nt, Human
aaagaaguggggaggccaa

SEQ ID NO: 1329924 - RNA, 19 nt, Human
aaccaaaaaaaaaaccgcu

SEQ ID NO: 1329925 - RNA, 23 nt, Human
aagaggaaaguaaaaaaaaaaac

SEQ ID NO: 1329926 - RNA, 26 nt, Human
aagcaagagaaauucagaaguuucuu

SEQ ID NO: 1329927 - RNA, 25 nt, Human
aaggaaaggcugaaaaggugggggg

SEQ ID NO: 1329928 - RNA, 23 nt, Human
aaguaguugggaccagaguaugc

SEQ ID NO: 1329929 - RNA, 23 nt, Human
aauucagaaguuucuuuugcuga

SEQ ID NO: 1329930 - RNA, 20 nt, Human
acccccuuuuuuuccuucua

SEQ ID NO: 1329931 - RNA, 21 nt, Human
acuacagucaugccuuuugcc

SEQ ID NO: 1329932 - RNA, 26 nt, Human
agaaaggaaaggcugaaaaggugggg

SEQ ID NO: 1329933 - RNA, 21 nt, Human
agaaauaauguagggguuggc

SEQ ID NO: 1329934 - RNA, 18 nt, Human
agaggaaagaagugggga

SEQ ID NO: 1329935 - RNA, 22 nt, Human
agaggaaagaaguggggaggcc

SEQ ID NO: 1329936 - RNA, 21 nt, Human
agauguguccagcaggccauu

SEQ ID NO: 1329937 - RNA, 23 nt, Human
agccgaacauucagagaacaagg

SEQ ID NO: 1329938 - RNA, 21 nt, Human
agccugaggcugaggacggcu

SEQ ID NO: 1329939 - RNA, 23 nt, Human
agcuuccuuucuuccuuuccuuc

SEQ ID NO: 1329940 - RNA, 24 nt, Human
aggaaagaaguggggaggccaaaa

SEQ ID NO: 1329941 - RNA, 19 nt, Human
aggaaaggcugaaaaggug

SEQ ID NO: 1329942 - RNA, 18 nt, Human
aggagagagauagcaggg

SEQ ID NO: 1329943 - RNA, 20 nt, Human
aggaguucagacacaacaag

SEQ ID NO: 1329944 - RNA, 19 nt, Human
aggaugcauucgcuuguca

SEQ ID NO: 1329945 - RNA, 24 nt, Human
aguaaaaaaaaaaaccaaaaaaaa

SEQ ID NO: 1329946 - RNA, 19 nt, Human
aguagaugaccaaauuugc

SEQ ID NO: 1329947 - RNA, 21 nt, Human
agugauggauggagaaacugg

SEQ ID NO: 1329948 - RNA, 23 nt, Human
agugauggauggagaaacuggga

SEQ ID NO: 1329949 - RNA, 25 nt, Human
auacugccggguguuccucagggcc

SEQ ID NO: 1329950 - RNA, 18 nt, Human
aucagacuuugcuuuugc

SEQ ID NO: 1329951 - RNA, 21 nt, Human
aucuuuguccucuccuaccag

SEQ ID NO: 1329952 - RNA, 20 nt, Human
auucgcuugucauuuccccu

SEQ ID NO: 1329953 - RNA, 24 nt, Human
auugcacuagauuguccccaaggu

SEQ ID NO: 1329954 - RNA, 21 nt, Human
caaaaaaaaaaccgcuccagu

SEQ ID NO: 1329955 - RNA, 21 nt, Human
caacagcagugauggauggag

SEQ ID NO: 1329956 - RNA, 21 nt, Human
caaggaguagaugaaaacgaa

SEQ ID NO: 1329957 - RNA, 23 nt, Human
caaggugugaacgccaguguggg

SEQ ID NO: 1329958 - RNA, 21 nt, Human
caccuaucgaaggccaugugc

SEQ ID NO: 1329959 - RNA, 24 nt, Human
cagcuuccuuucuuccuuuccuuc

SEQ ID NO: 1329960 - RNA, 23 nt, Human
caggaaaaauaaacacaguucuc

SEQ ID NO: 1329961 - RNA, 19 nt, Human
cauccaucuuuguccucuc

SEQ ID NO: 1329962 - RNA, 19 nt, Human
ccccaaaaagcaaaccucu

SEQ ID NO: 1329963 - RNA, 22 nt, Human
ccccaaaaagcaaaccucugcc

SEQ ID NO: 1329964 - RNA, 20 nt, Human
ccccccaaaaagcaaaccuc

SEQ ID NO: 1329965 - RNA, 22 nt, Human
ccccccaaaaagcaaaccucug

SEQ ID NO: 1329966 - RNA, 20 nt, Human
cccccuccacccccuuuuuu

SEQ ID NO: 1329967 - RNA, 26 nt, Human
cccccuccacccccuuuuuuuccuuc

SEQ ID NO: 1329968 - RNA, 20 nt, Human
cccucccucccuuuccucuc

SEQ ID NO: 1329969 - RNA, 23 nt, Human
ccggguguuccucagggccugcu

SEQ ID NO: 1329970 - RNA, 22 nt, Human
ccucagggccugcuuuuacccc

SEQ ID NO: 1329971 - RNA, 23 nt, Human
ccucccucccuuuccucucguua

SEQ ID NO: 1329972 - RNA, 23 nt, Human
ccucgggaagcuuccccuucucu

SEQ ID NO: 1329973 - RNA, 21 nt, Human
ccugaccccugaguuagugga

SEQ ID NO: 1329974 - RNA, 22 nt, Human
ccugaccccugaguuaguggac

SEQ ID NO: 1329975 - RNA, 19 nt, Human
ccuuccucaggaaccucgg

SEQ ID NO: 1329976 - RNA, 18 nt, Human
cggcuggccccucagaua

SEQ ID NO: 1329977 - RNA, 21 nt, Human
cucaauaaccuuucaugucuu

SEQ ID NO: 1329978 - RNA, 19 nt, Human
cucacggcuggccccucag

SEQ ID NO: 1329979 - RNA, 22 nt, Human
cucacggcuggccccucagaua

SEQ ID NO: 1329980 - RNA, 23 nt, Human
cucuuuuuucucuuuucuccugu

SEQ ID NO: 1329981 - RNA, 23 nt, Human
cugagguuggugagauugcagga

SEQ ID NO: 1329982 - RNA, 21 nt, Human
cuggacaccucuaauguuuuc

SEQ ID NO: 1329983 - RNA, 22 nt, Human
cuggacaccucuaauguuuucc

SEQ ID NO: 1329984 - RNA, 22 nt, Human
cuggcuuccuuccucaggaacc

SEQ ID NO: 1329985 - RNA, 18 nt, Human
cuuggaguguccaucuua

SEQ ID NO: 1329986 - RNA, 18 nt, Human
gaacucagugacagagac

SEQ ID NO: 1329987 - RNA, 20 nt, Human
gacgccguguccugcagugu

SEQ ID NO: 1329988 - RNA, 23 nt, Human
gagaacaaggaguagaugaaaac

SEQ ID NO: 1329989 - RNA, 18 nt, Human
gagcaguuucuaccaccu

SEQ ID NO: 1329990 - RNA, 24 nt, Human
gaggaaaguaaaaaaaaaaaccaa

SEQ ID NO: 1329991 - RNA, 26 nt, Human
gaggauaacggagaggcuucuuuggc

SEQ ID NO: 1329992 - RNA, 20 nt, Human
gaguagaugaccaaauuugc

SEQ ID NO: 1329993 - RNA, 20 nt, Human
gauuuuggggaaagcaagag

SEQ ID NO: 1329994 - RNA, 19 nt, Human
gcugagaggaaagaagugg

SEQ ID NO: 1329995 - RNA, 19 nt, Human
gcuuuugcuguacuggaca

SEQ ID NO: 1329996 - RNA, 24 nt, Human
ggaaagcaagagaaauucagaagu

SEQ ID NO: 1329997 - RNA, 19 nt, Human
ggcugaggacggcucugag

SEQ ID NO: 1329998 - RNA, 20 nt, Human
gggaaagcaagagaaauuca

SEQ ID NO: 1329999 - RNA, 22 nt, Human
gggcugagaggaaagaaguggg

SEQ ID NO: 1330000 - RNA, 20 nt, Human
ggggaggccaaaaggagaga

SEQ ID NO: 1330001 - RNA, 23 nt, Human
gggggucauuuagagaaaggaaa

SEQ ID NO: 1330002 - RNA, 24 nt, Human
gguuugaaauguuuacuauuuggc

SEQ ID NO: 1330003 - RNA, 23 nt, Human
guagaugaccaaauuugcagauu

SEQ ID NO: 1330004 - RNA, 19 nt, Human
guauuucacuuaacuggcu

SEQ ID NO: 1330005 - RNA, 20 nt, Human
gucauuuagagaaaggaaag

SEQ ID NO: 1330006 - RNA, 20 nt, Human
guccugguagccaacacugu

SEQ ID NO: 1330007 - RNA, 25 nt, Human
gucuauacugaguuguuaacccccc

SEQ ID NO: 1330008 - RNA, 22 nt, Human
gugacagagacuguguggccca

SEQ ID NO: 1330009 - RNA, 19 nt, Human
guggcccaggagguuugaa

SEQ ID NO: 1330010 - RNA, 25 nt, Human
guguggcccaggagguuugaaaugu

SEQ ID NO: 1330011 - RNA, 20 nt, Human
uaaagguuucuuagcuggca

SEQ ID NO: 1330012 - RNA, 18 nt, Human
uaaccccccaaaaagcaa

SEQ ID NO: 1330013 - RNA, 18 nt, Human
uaccccaccagucuggcu

SEQ ID NO: 1330014 - RNA, 19 nt, Human
uagcagggcagugaaaaga

SEQ ID NO: 1330015 - RNA, 20 nt, Human
uagcuuggaguguccaucuu

SEQ ID NO: 1330016 - RNA, 20 nt, Human
uagcuuggaguguccaucuu

SEQ ID NO: 1330017 - RNA, 20 nt, Human
uauacugaguuguuaacccc

SEQ ID NO: 1330018 - RNA, 19 nt, Human
uccugcagugugccacaca

SEQ ID NO: 1330019 - RNA, 18 nt, Human
uccuuuccuucccucccu

SEQ ID NO: 1330020 - RNA, 22 nt, Human
ucuccugucuucuuucucuuuc

SEQ ID NO: 1330021 - RNA, 23 nt, Human
ucuccugucuucuuucucuuuca

SEQ ID NO: 1330022 - RNA, 24 nt, Human
ucuuagggugaucugggggucauu

SEQ ID NO: 1330023 - RNA, 22 nt, Human
ucuucuuucucuuucagcuuuu

SEQ ID NO: 1330024 - RNA, 23 nt, Human
ucuuuggcccuugaccccaguuu

SEQ ID NO: 1330025 - RNA, 27 nt, Human
ucuuuggcccuugaccccaguuucacu

SEQ ID NO: 1330026 - RNA, 22 nt, Human
ugaaaagaugcuuguuggcuua

SEQ ID NO: 1330027 - RNA, 19 nt, Human
ugaaaagguggggggggga

SEQ ID NO: 1330028 - RNA, 25 nt, Human
ugaagaggaaaguaaaaaaaaaaac

SEQ ID NO: 1330029 - RNA, 19 nt, Human
ugagaaugcuagcuuuucu

SEQ ID NO: 1330030 - RNA, 19 nt, Human
ugagcuaggugucuaagau

SEQ ID NO: 1330031 - RNA, 21 nt, Human
ugaggaauaaacaccaagagc

SEQ ID NO: 1330032 - RNA, 20 nt, Human
ugaucugugucccccuccac

SEQ ID NO: 1330033 - RNA, 20 nt, Human
ugauggauggagaaacuggg

SEQ ID NO: 1330034 - RNA, 25 nt, Human
ugcacuagauuguccccaagguuuc

SEQ ID NO: 1330035 - RNA, 23 nt, Human
ugcuguuuggucuauacugaguu

SEQ ID NO: 1330036 - RNA, 21 nt, Human
uggaaagagggcugagaggaa

SEQ ID NO: 1330037 - RNA, 19 nt, Human
uggaaaguaguugggacca

SEQ ID NO: 1330038 - RNA, 18 nt, Human
uggcagagaaugccuggc

SEQ ID NO: 1330039 - RNA, 20 nt, Human
uggcauggaaagagggcuga

SEQ ID NO: 1330040 - RNA, 22 nt, Human
uggcgagcaggagggcggcgcu

SEQ ID NO: 1330041 - RNA, 19 nt, Human
uggcucaaggaaaacauca

SEQ ID NO: 1330042 - RNA, 18 nt, Human
ugggaggaggaggaguuc

SEQ ID NO: 1330043 - RNA, 25 nt, Human
uggggauggggguuggguugauuuu

SEQ ID NO: 1330044 - RNA, 18 nt, Human
ugggggggggaagcaaca

SEQ ID NO: 1330045 - RNA, 18 nt, Human
uggugagauugcaggaag

SEQ ID NO: 1330046 - RNA, 29 nt, Human
uguacuggacaccucuaauguuuuccucu

SEQ ID NO: 1330047 - RNA, 22 nt, Human
uguagggguuggcaaacuacag

SEQ ID NO: 1330048 - RNA, 18 nt, Human
ugucugugugugugugug

SEQ ID NO: 1330049 - RNA, 20 nt, Human
uguggcccaggagguuugaa

SEQ ID NO: 1330050 - RNA, 22 nt, Human
uguguggcccaggagguuugaa

SEQ ID NO: 1330051 - RNA, 20 nt, Human
uguuacacauaucuucugug

SEQ ID NO: 1330052 - RNA, 20 nt, Human
uuagcaguuuccacguuccc

SEQ ID NO: 1330053 - RNA, 19 nt, Human
uucagugaucugugucccc

SEQ ID NO: 1330054 - RNA, 22 nt, Human
uuccugaccccugaguuagugg

SEQ ID NO: 1330055 - RNA, 22 nt, Human
uucuugguauugugcauucauu

SEQ ID NO: 1330056 - RNA, 21 nt, Human
uucuuuggcccuugaccccag

SEQ ID NO: 1330057 - RNA, 21 nt, Human
uuucaaguguauugcagggag

SEQ ID NO: 1330058 - RNA, 21 nt, Human
uuugcagauuuuggggaaagc

SEQ ID NO: 1330059 - RNA, 19 nt, Human
uuugguggaaaguaguugg

SEQ ID NO: 1330060 - RNA, 19 nt, Human
aaaaaaaaaagaaaagaag

SEQ ID NO: 1330061 - RNA, 19 nt, Human
aaaaagaaccugagaaaca

SEQ ID NO: 1330062 - RNA, 22 nt, Human
aaaacugguaaaaaugagacaa

SEQ ID NO: 1330063 - RNA, 20 nt, Human
aaaagauaaaacaaaaagga

SEQ ID NO: 1330064 - RNA, 18 nt, Human
aaaauuagcugggcgugg

SEQ ID NO: 1330065 - RNA, 24 nt, Human
aaacagcagcagaguauaauccca

SEQ ID NO: 1330066 - RNA, 26 nt, Human
aaacuuuuuuuuagaauaaaaaaagg

SEQ ID NO: 1330067 - RNA, 25 nt, Human
aaauaaugaggagugaccgguaccc

SEQ ID NO: 1330068 - RNA, 22 nt, Human
aacaaaaaggaggaggcacaaa

SEQ ID NO: 1330069 - RNA, 21 nt, Human
aacacauguauuuucucugua

SEQ ID NO: 1330070 - RNA, 19 nt, Human
aacauggugaaacaccauc

SEQ ID NO: 1330071 - RNA, 20 nt, Human
aacauggugaaacaccaucu

SEQ ID NO: 1330072 - RNA, 21 nt, Human
aacauggugaaacaccaucuc

SEQ ID NO: 1330073 - RNA, 21 nt, Human
aaccugagaaacaaccugacu

SEQ ID NO: 1330074 - RNA, 20 nt, Human
aagaaaagaagguuuagcua

SEQ ID NO: 1330075 - RNA, 18 nt, Human
aagcuugcccacgaccgc

SEQ ID NO: 1330076 - RNA, 25 nt, Human
aaucaaucaauacauauaugugugu

SEQ ID NO: 1330077 - RNA, 24 nt, Human
aauuguuugaacucgggaggcgga

SEQ ID NO: 1330078 - RNA, 23 nt, Human
acacacacaugugcguacacaca

SEQ ID NO: 1330079 - RNA, 18 nt, Human
acaccacugcacuccagc

SEQ ID NO: 1330080 - RNA, 20 nt, Human
acaccacugcacuccagccu

SEQ ID NO: 1330081 - RNA, 21 nt, Human
acacuaugagagcugaaauaa

SEQ ID NO: 1330082 - RNA, 21 nt, Human
acagaaacauauauguauagu

SEQ ID NO: 1330083 - RNA, 24 nt, Human
acagagugagacuccaucucaaaa

SEQ ID NO: 1330084 - RNA, 19 nt, Human
acauggugaaacaccaucu

SEQ ID NO: 1330085 - RNA, 20 nt, Human
acaugugcguacacacagaa

SEQ ID NO: 1330086 - RNA, 18 nt, Human
accacuuuaagcaguaga

SEQ ID NO: 1330087 - RNA, 24 nt, Human
acuccagccuggaagacagaguga

SEQ ID NO: 1330088 - RNA, 24 nt, Human
acucgggaggcggaggcugcagug

SEQ ID NO: 1330089 - RNA, 18 nt, Human
acugcacuccagccugga

SEQ ID NO: 1330090 - RNA, 24 nt, Human
acugcacuccagccuggaagacag

SEQ ID NO: 1330091 - RNA, 22 nt, Human
agaaacaaccugacuugacaua

SEQ ID NO: 1330092 - RNA, 24 nt, Human
agaaacaauaaauagcgcuucagc

SEQ ID NO: 1330093 - RNA, 30 nt, Human
agacaaguaugcauacacacacaugugcgg

SEQ ID NO: 1330094 - RNA, 24 nt, Human
agauaacaagcagaaaggaacuca

SEQ ID NO: 1330095 - RNA, 18 nt, Human
agccuggaagacagagug

SEQ ID NO: 1330096 - RNA, 19 nt, Human
agccuggccaacaugguga

SEQ ID NO: 1330097 - RNA, 23 nt, Human
agcugggcgugguggcacgcgcc

SEQ ID NO: 1330098 - RNA, 24 nt, Human
aggcaggagaauuguuugaacucg

SEQ ID NO: 1330099 - RNA, 21 nt, Human
aggccaaggcggguggaucac

SEQ ID NO: 1330100 - RNA, 21 nt, Human
aggcccagcgcucccggcccg

SEQ ID NO: 1330101 - RNA, 19 nt, Human
aggcggaggcugcagugag

SEQ ID NO: 1330102 - RNA, 24 nt, Human
aggcggaggcugcagugagccaag

SEQ ID NO: 1330103 - RNA, 25 nt, Human
aggcggguggaucaccaaggucagg

SEQ ID NO: 1330104 - RNA, 21 nt, Human
aggcugaggcaggagaauugu

SEQ ID NO: 1330105 - RNA, 24 nt, Human
aggcugaggcaggagaauuguuug

SEQ ID NO: 1330106 - RNA, 23 nt, Human
aggggaaacacagagucagguuc

SEQ ID NO: 1330107 - RNA, 19 nt, Human
agugagcaggugaauucuc

SEQ ID NO: 1330108 - RNA, 19 nt, Human
agugauuuguauuugucug

SEQ ID NO: 1330109 - RNA, 21 nt, Human
auaaaacaaaaaggaggaggc

SEQ ID NO: 1330110 - RNA, 21 nt, Human
auaauuuuuuaaaagauaaaa

SEQ ID NO: 1330111 - RNA, 23 nt, Human
auagaaugcacaaauaaugagga

SEQ ID NO: 1330112 - RNA, 24 nt, Human
aucacaccacugcacuccagccug

SEQ ID NO: 1330113 - RNA, 22 nt, Human
aucccagcacuuugggaggcca

SEQ ID NO: 1330114 - RNA, 24 nt, Human
augcauacacacacaugugcguac

SEQ ID NO: 1330115 - RNA, 19 nt, Human
augccuguaaucccagcac

SEQ ID NO: 1330116 - RNA, 23 nt, Human
augucacaauuucccguuugagc

SEQ ID NO: 1330117 - RNA, 24 nt, Human
caacauggugaaacaccaucucua

SEQ ID NO: 1330118 - RNA, 18 nt, Human
caagagcagccuggccaa

SEQ ID NO: 1330119 - RNA, 24 nt, Human
caagagcagccuggccaacauggu

SEQ ID NO: 1330120 - RNA, 25 nt, Human
caaggcggguggaucaccaagguca

SEQ ID NO: 1330121 - RNA, 24 nt, Human
caaggcuggacacgguggcucaug

SEQ ID NO: 1330122 - RNA, 26 nt, Human
caccacugcacuccagccuggaagac

SEQ ID NO: 1330123 - RNA, 23 nt, Human
cacuccaaaugcacccaaucuca

SEQ ID NO: 1330124 - RNA, 23 nt, Human
cacuccaaaugcacccaaucuca

SEQ ID NO: 1330125 - RNA, 22 nt, Human
cacuccagccuggaagacagag

SEQ ID NO: 1330126 - RNA, 23 nt, Human
cacuccagccuggaagacagagu

SEQ ID NO: 1330127 - RNA, 24 nt, Human
cacuccagccuggaagacagagug

SEQ ID NO: 1330128 - RNA, 18 nt, Human
cacugcacuccagccugg

SEQ ID NO: 1330129 - RNA, 19 nt, Human
cacugcacuccagccugga

SEQ ID NO: 1330130 - RNA, 25 nt, Human
cacugcacuccagccuggaagacag

SEQ ID NO: 1330131 - RNA, 22 nt, Human
cagaaaggaacucaaugacuca

SEQ ID NO: 1330132 - RNA, 24 nt, Human
cagcacuuugggaggccaaggcgg

SEQ ID NO: 1330133 - RNA, 19 nt, Human
cagcagaguauaaucccau

SEQ ID NO: 1330134 - RNA, 20 nt, Human
cagcagcagaguauaauccc

SEQ ID NO: 1330135 - RNA, 21 nt, Human
caggcccagcgcucccggccc

SEQ ID NO: 1330136 - RNA, 20 nt, Human
caugccuguaaucccagcac

SEQ ID NO: 1330137 - RNA, 24 nt, Human
caugccuguaaucccagcacuuug

SEQ ID NO: 1330138 - RNA, 22 nt, Human
ccaaaaaagaaccugagaaaca

SEQ ID NO: 1330139 - RNA, 19 nt, Human
ccacugcacuccagccugg

SEQ ID NO: 1330140 - RNA, 20 nt, Human
ccacugcacuccagccugga

SEQ ID NO: 1330141 - RNA, 21 nt, Human
ccacugcacuccagccuggaa

SEQ ID NO: 1330142 - RNA, 24 nt, Human
ccacugcacuccagccuggaagac

SEQ ID NO: 1330143 - RNA, 25 nt, Human
ccacugcacuccagccuggaagaca

SEQ ID NO: 1330144 - RNA, 21 nt, Human
ccaucucaaaaaaaaaaagaa

SEQ ID NO: 1330145 - RNA, 21 nt, Human
cccgcuggguaaccgucccag

SEQ ID NO: 1330146 - RNA, 22 nt, Human
ccuggaacagccauaaagacac

SEQ ID NO: 1330147 - RNA, 19 nt, Human
ccuggccaacauggugaaa

SEQ ID NO: 1330148 - RNA, 24 nt, Human
ccuggccaacauggugaaacacca

SEQ ID NO: 1330149 - RNA, 22 nt, Human
ccuguaaucccagcacuuuggg

SEQ ID NO: 1330150 - RNA, 22 nt, Human
ccuguaaucccagcugcuaggg

SEQ ID NO: 1330151 - RNA, 23 nt, Human
cgccuguaaucccagcugcuagg

SEQ ID NO: 1330152 - RNA, 23 nt, Human
cggguggaucaccaaggucagga

SEQ ID NO: 1330153 - RNA, 24 nt, Human
cucaugccuguaaucccagcacuu

SEQ ID NO: 1330154 - RNA, 19 nt, Human
cuccaaaugcacccaaucu

SEQ ID NO: 1330155 - RNA, 19 nt, Human
cuccaucucaaaaaaaaaa

SEQ ID NO: 1330156 - RNA, 19 nt, Human
cugcuaguuacucgcugug

SEQ ID NO: 1330157 - RNA, 20 nt, Human
cuucccggcaggcccagcgc

SEQ ID NO: 1330158 - RNA, 24 nt, Human
cuuggaagaauuggaacacccaga

SEQ ID NO: 1330159 - RNA, 19 nt, Human
gaacacccagaacugcuag

SEQ ID NO: 1330160 - RNA, 24 nt, Human
gacagagugagacuccaucucaaa

SEQ ID NO: 1330161 - RNA, 23 nt, Human
gagaauuguuugaacucgggagg

SEQ ID NO: 1330162 - RNA, 18 nt, Human
gaggcugcagugagccaa

SEQ ID NO: 1330163 - RNA, 19 nt, Human
gaggcugcagugagccaag

SEQ ID NO: 1330164 - RNA, 23 nt, Human
gaucaccaaggucaggaguucaa

SEQ ID NO: 1330165 - RNA, 25 nt, Human
gaucaccaaggucaggaguucaaga

SEQ ID NO: 1330166 - RNA, 23 nt, Human
gcacuccagccuggaagacagag

SEQ ID NO: 1330167 - RNA, 24 nt, Human
gccaacauggugaaacaccaucuc

SEQ ID NO: 1330168 - RNA, 20 nt, Human
gccaagaucacaccacugca

SEQ ID NO: 1330169 - RNA, 22 nt, Human
gcuggacacgguggcucaugcc

SEQ ID NO: 1330170 - RNA, 24 nt, Human
ggacacgguggcucaugccuguaa

SEQ ID NO: 1330171 - RNA, 20 nt, Human
ggaggcugcagugagccaag

SEQ ID NO: 1330172 - RNA, 24 nt, Human
ggaggcugcagugagccaagauca

SEQ ID NO: 1330173 - RNA, 21 nt, Human
ggcacgcgccuguaaucccag

SEQ ID NO: 1330174 - RNA, 24 nt, Human
ggcggguggaucaccaaggucagg

SEQ ID NO: 1330175 - RNA, 21 nt, Human
gggaggcugaggcaggagaau

SEQ ID NO: 1330176 - RNA, 24 nt, Human
gggcgugguggcacgcgccuguaa

SEQ ID NO: 1330177 - RNA, 24 nt, Human
gguggaucaccaaggucaggaguu

SEQ ID NO: 1330178 - RNA, 24 nt, Human
gguggcacgcgccuguaaucccag

SEQ ID NO: 1330179 - RNA, 23 nt, Human
gguggcucaugccuguaauccca

SEQ ID NO: 1330180 - RNA, 24 nt, Human
gguggcucaugccuguaaucccag

SEQ ID NO: 1330181 - RNA, 25 nt, Human
guauagaaugcacaaauaaugagga

SEQ ID NO: 1330182 - RNA, 24 nt, Human
guggaucaccaaggucaggaguuc

SEQ ID NO: 1330183 - RNA, 23 nt, Human
guggcacgcgccuguaaucccag

SEQ ID NO: 1330184 - RNA, 19 nt, Human
guuacaaauaaauuuuagu

SEQ ID NO: 1330185 - RNA, 25 nt, Human
uaaaacaaaaaggaggaggcacaac

SEQ ID NO: 1330186 - RNA, 21 nt, Human
uaaaagauaaaacaaaaagga

SEQ ID NO: 1330187 - RNA, 19 nt, Human
uaaaaugucacaauuuccc

SEQ ID NO: 1330188 - RNA, 20 nt, Human
uacacacauagaaaagaaau

SEQ ID NO: 1330189 - RNA, 23 nt, Human
uacacuaugagagcugaaauaag

SEQ ID NO: 1330190 - RNA, 25 nt, Human
uaccacaauaccagaaauucuccaa

SEQ ID NO: 1330191 - RNA, 24 nt, Human
uaccaugaaguauaaccucccaaa

SEQ ID NO: 1330192 - RNA, 21 nt, Human
uacucuauuaccacaauacca

SEQ ID NO: 1330193 - RNA, 25 nt, Human
uagaaugcacaaauaaugaggagug

SEQ ID NO: 1330194 - RNA, 20 nt, Human
uagcugggcgugguggcacg

SEQ ID NO: 1330195 - RNA, 19 nt, Human
uauauauauuuacacacau

SEQ ID NO: 1330196 - RNA, 22 nt, Human
uaugcauacacacacaugugcg

SEQ ID NO: 1330197 - RNA, 22 nt, Human
uaugcauacacacacaugugcg

SEQ ID NO: 1330198 - RNA, 22 nt, Human
ucaaaaaauaaaaaagaucauu

SEQ ID NO: 1330199 - RNA, 20 nt, Human
ucaagagcagccuggccaac

SEQ ID NO: 1330200 - RNA, 22 nt, Human
ucaagagcagccuggccaacau

SEQ ID NO: 1330201 - RNA, 23 nt, Human
ucacaccacugcacuccagccug

SEQ ID NO: 1330202 - RNA, 22 nt, Human
ucaccaaggucaggaguucaag

SEQ ID NO: 1330203 - RNA, 22 nt, Human
ucaugccuguaaucccagcacu

SEQ ID NO: 1330204 - RNA, 23 nt, Human
uccagccuggaagacagagugag

SEQ ID NO: 1330205 - RNA, 24 nt, Human
uccagccuggaagacagagugaga

SEQ ID NO: 1330206 - RNA, 19 nt, Human
uccaucucaaaaaaaaaaa

SEQ ID NO: 1330207 - RNA, 24 nt, Human
uccaucucaaaaaaaaaaagaaaa

SEQ ID NO: 1330208 - RNA, 22 nt, Human
ucccugaaugaccaugaaagca

SEQ ID NO: 1330209 - RNA, 18 nt, Human
ucuauuaccacaauacca

SEQ ID NO: 1330210 - RNA, 21 nt, Human
ucucuacuaaaaguacaaaaa

SEQ ID NO: 1330211 - RNA, 20 nt, Human
ugaaacaccaucucuacuaa

SEQ ID NO: 1330212 - RNA, 21 nt, Human
ugaaacaccaucucuacuaaa

SEQ ID NO: 1330213 - RNA, 19 nt, Human
ugaaacacugcuccuaggg

SEQ ID NO: 1330214 - RNA, 22 nt, Human
ugacaagaaaauaaaacuggua

SEQ ID NO: 1330215 - RNA, 24 nt, Human
ugaggcaggagaauuguuugaacu

SEQ ID NO: 1330216 - RNA, 25 nt, Human
ugaggcaggagaauuguuugaacuc

SEQ ID NO: 1330217 - RNA, 20 nt, Human
ugaguuuauuuaacacaugu

SEQ ID NO: 1330218 - RNA, 19 nt, Human
ugcauacacacacaugugc

SEQ ID NO: 1330219 - RNA, 25 nt, Human
ugcauacacacacaugugcguacac

SEQ ID NO: 1330220 - RNA, 18 nt, Human
ugccucauuugacuucag

SEQ ID NO: 1330221 - RNA, 23 nt, Human
ugccuguaaucccagcacuuugg

SEQ ID NO: 1330222 - RNA, 22 nt, Human
ugcguacacacagaaacauaua

SEQ ID NO: 1330223 - RNA, 27 nt, Human
ugcguacacacagaaacauauauguag

SEQ ID NO: 1330224 - RNA, 19 nt, Human
ugcuagggaggcugaggca

SEQ ID NO: 1330225 - RNA, 22 nt, Human
uggaagaauuggaacacccaga

SEQ ID NO: 1330226 - RNA, 23 nt, Human
uggaucaccaaggucaggaguuc

SEQ ID NO: 1330227 - RNA, 21 nt, Human
uggcacgcgccuguaauccca

SEQ ID NO: 1330228 - RNA, 18 nt, Human
uggccaacauggugaaac

SEQ ID NO: 1330229 - RNA, 22 nt, Human
uggcucaugccuguaaucccag

SEQ ID NO: 1330230 - RNA, 24 nt, Human
uggcucaugccuguaaucccagca

SEQ ID NO: 1330231 - RNA, 24 nt, Human
ugggaacauauaaaucagaaucuu

SEQ ID NO: 1330232 - RNA, 18 nt, Human
ugggaaugggucaaaaaa

SEQ ID NO: 1330233 - RNA, 24 nt, Human
ugggaggccaaggcggguggauca

SEQ ID NO: 1330234 - RNA, 24 nt, Human
ugguggcacgcgccuguaauccca

SEQ ID NO: 1330235 - RNA, 19 nt, Human
ugugaucuuggaagaauuu

SEQ ID NO: 1330236 - RNA, 26 nt, Human
ugugcguacacacagaaacauauaug

SEQ ID NO: 1330237 - RNA, 18 nt, Human
uuagcugggcgugguggc

SEQ ID NO: 1330238 - RNA, 20 nt, Human
uuagcugggcgugguggcac

SEQ ID NO: 1330239 - RNA, 24 nt, Human
uuguuugaacucgggaggcggagg

SEQ ID NO: 1330240 - RNA, 25 nt, Human
uuuaauacacauugcugauuccuua

SEQ ID NO: 1330241 - RNA, 22 nt, Human
uuuagugagcaggugaauucuc

SEQ ID NO: 1330242 - RNA, 23 nt, Human
uuucucuguaagguaagccacag

SEQ ID NO: 1330243 - RNA, 19 nt, Human
aacucagggccaaguacaa

SEQ ID NO: 1330244 - RNA, 18 nt, Human
agacuugagagcagccag

SEQ ID NO: 1330245 - RNA, 19 nt, Human
agcagccaguggguaagac

SEQ ID NO: 1330246 - RNA, 24 nt, Human
aggaggaggugcucggacauugga

SEQ ID NO: 1330247 - RNA, 19 nt, Human
cacaggaggaggugcucgg

SEQ ID NO: 1330248 - RNA, 18 nt, Human
cagcugauggcugagacu

SEQ ID NO: 1330249 - RNA, 26 nt, Human
caugaacaaaccaucaguaguuauua

SEQ ID NO: 1330250 - RNA, 23 nt, Human
cauuggaggaguacuuccaacug

SEQ ID NO: 1330251 - RNA, 23 nt, Human
cgaguggauaggauuauaggcca

SEQ ID NO: 1330252 - RNA, 22 nt, Human
gauuauaggccacaggaggagg

SEQ ID NO: 1330253 - RNA, 22 nt, Human
ggagcccaagaaauaggagaug

SEQ ID NO: 1330254 - RNA, 19 nt, Human
uaaggagcccaagaaauag

SEQ ID NO: 1330255 - RNA, 18 nt, Human
ugaaagcaggauuucuuu

SEQ ID NO: 1330256 - RNA, 19 nt, Human
ugcagcugauggcugagac

SEQ ID NO: 1330257 - RNA, 24 nt, Human
uuuggagggcugugcagcugaugg

SEQ ID NO: 1330258 - RNA, 23 nt, Human
caaaacaucagcaguucccacaa

SEQ ID NO: 1330259 - RNA, 18 nt, Human
cacaaggcccacuuccaa

SEQ ID NO: 1330260 - RNA, 20 nt, Human
caccuucccucuuucuuuug

SEQ ID NO: 1330261 - RNA, 20 nt, Human
ccaagcagaaacuuaaaagc

SEQ ID NO: 1330262 - RNA, 26 nt, Human
ccaccuucccucuuucuuuugucaaa

SEQ ID NO: 1330263 - RNA, 20 nt, Human
ccuucccucuuucuuuuguc

SEQ ID NO: 1330264 - RNA, 21 nt, Human
ucaacucuuauuuagugucua

SEQ ID NO: 1330265 - RNA, 18 nt, Human
ucuucauccaucauauuu

SEQ ID NO: 1330266 - RNA, 21 nt, Human
ugcacaaggcccacuuccaag

SEQ ID NO: 1330267 - RNA, 23 nt, Human
ugugcacaaggcccacuuccaag

SEQ ID NO: 1330268 - RNA, 20 nt, Human
uuccaccuucccucuuucuc

SEQ ID NO: 1330269 - RNA, 24 nt, Human
aaauaauucuccaucuggagccca

SEQ ID NO: 1330270 - RNA, 24 nt, Human
acagcaaauaauucuccaucugga

SEQ ID NO: 1330271 - RNA, 21 nt, Human
cugaaguaaugggaugcucau

SEQ ID NO: 1330272 - RNA, 18 nt, Human
uaucacacaagcguaaag

SEQ ID NO: 1330273 - RNA, 30 nt, Human
uaucacacaagcguaaaguaugaaacggcg

SEQ ID NO: 1330274 - RNA, 24 nt, Human
ucucaaauaccugguaccuccccg

SEQ ID NO: 1330275 - RNA, 18 nt, Human
ugaaacgauccaacagca

SEQ ID NO: 1330276 - RNA, 24 nt, Human
ugagguugugaauuguacaguggg

SEQ ID NO: 1330277 - RNA, 22 nt, Human
uguauuuacucaaguuccagga

SEQ ID NO: 1330278 - RNA, 20 nt, Human
uucaccagcagauaaaauaa

SEQ ID NO: 1330279 - RNA, 24 nt, Human
uucaccagcagauaaaauaagauc

SEQ ID NO: 1330280 - RNA, 24 nt, Human
aaaaaagacuuaaaaaaauaucau

SEQ ID NO: 1330281 - RNA, 27 nt, Human
aaaaagaaaauacagcauaauaaaaaa

SEQ ID NO: 1330282 - RNA, 19 nt, Human
aaaaauaaccacaaugaau

SEQ ID NO: 1330283 - RNA, 26 nt, Human
aaacauacgcuucucaauuaaaugua

SEQ ID NO: 1330284 - RNA, 21 nt, Human
aacauucucuuaccacccaaa

SEQ ID NO: 1330285 - RNA, 22 nt, Human
aacuguauagcucuuacaagac

SEQ ID NO: 1330286 - RNA, 22 nt, Human
aagaaaaaaaaauaguguuuua

SEQ ID NO: 1330287 - RNA, 26 nt, Human
aagaaaagggauaauucacuauaaca

SEQ ID NO: 1330288 - RNA, 24 nt, Human
aagaggcacauuagcaacuacuug

SEQ ID NO: 1330289 - RNA, 26 nt, Human
aagcaaaaaaggaaaaugagggaccc

SEQ ID NO: 1330290 - RNA, 23 nt, Human
aagcaaaaaaggaaaaugauuga

SEQ ID NO: 1330291 - RNA, 21 nt, Human
aaguaaagccuacacuaugua

SEQ ID NO: 1330292 - RNA, 25 nt, Human
aauauaaacaauaauuaaaaaauaa

SEQ ID NO: 1330293 - RNA, 22 nt, Human
acaaaacccaugcaauuuuacc

SEQ ID NO: 1330294 - RNA, 25 nt, Human
acacucacacgcgcacaaaaaggcg

SEQ ID NO: 1330295 - RNA, 21 nt, Human
acauugguuauauugcccaac

SEQ ID NO: 1330296 - RNA, 23 nt, Human
accaaguuacugucaauccaaaa

SEQ ID NO: 1330297 - RNA, 24 nt, Human
acccaaaugccucaacuuauacau

SEQ ID NO: 1330298 - RNA, 23 nt, Human
accuuauuuuuuugguccuccaa

SEQ ID NO: 1330299 - RNA, 22 nt, Human
acgcuggggcccacacucacac

SEQ ID NO: 1330300 - RNA, 22 nt, Human
agacugacuaccuagacaaaaa

SEQ ID NO: 1330301 - RNA, 21 nt, Human
agagagggagacagggggagg

SEQ ID NO: 1330302 - RNA, 21 nt, Human
agagagggagacagggggagg

SEQ ID NO: 1330303 - RNA, 22 nt, Human
agauaaauaccaacauguucuc

SEQ ID NO: 1330304 - RNA, 18 nt, Human
agcagaagguguuccaga

SEQ ID NO: 1330305 - RNA, 21 nt, Human
agcggccagcagagcgagcgg

SEQ ID NO: 1330306 - RNA, 19 nt, Human
agggaagaagcaaaaaagg

SEQ ID NO: 1330307 - RNA, 18 nt, Human
agggggaggggguggcgg

SEQ ID NO: 1330308 - RNA, 20 nt, Human
agggggaggggguggcgguu

SEQ ID NO: 1330309 - RNA, 21 nt, Human
aguaccuacaaaacccaugca

SEQ ID NO: 1330310 - RNA, 18 nt, Human
auaaaaauaaccacaaug

SEQ ID NO: 1330311 - RNA, 24 nt, Human
auaaacaauaauuaaaaaauaaaa

SEQ ID NO: 1330312 - RNA, 22 nt, Human
auauacuauggaauaucauaca

SEQ ID NO: 1330313 - RNA, 20 nt, Human
caaaagaaaaaaaaauagug

SEQ ID NO: 1330314 - RNA, 18 nt, Human
caccccggcuccccgguc

SEQ ID NO: 1330315 - RNA, 21 nt, Human
caccccggcuccccgguccgc

SEQ ID NO: 1330316 - RNA, 23 nt, Human
caccccggcuccccgguccgcgg

SEQ ID NO: 1330317 - RNA, 19 nt, Human
cagacugacuaccuagaca

SEQ ID NO: 1330318 - RNA, 18 nt, Human
cagcccgcgcucuccucc

SEQ ID NO: 1330319 - RNA, 21 nt, Human
cccaaagaaucuagaucgaca

SEQ ID NO: 1330320 - RNA, 23 nt, Human
cccccauuaucugaagagccugu

SEQ ID NO: 1330321 - RNA, 18 nt, Human
ccccgccgacugcgcccg

SEQ ID NO: 1330322 - RNA, 26 nt, Human
ccccgcuccaagcaccccggcucccc

SEQ ID NO: 1330323 - RNA, 19 nt, Human
cccgggcaagcgccagccc

SEQ ID NO: 1330324 - RNA, 22 nt, Human
ccgccuuccgcccggaacccac

SEQ ID NO: 1330325 - RNA, 21 nt, Human
ccuccuccuccuccugguccc

SEQ ID NO: 1330326 - RNA, 27 nt, Human
cgccagcccacgccuggcgucccccgc

SEQ ID NO: 1330327 - RNA, 21 nt, Human
cgccuuccgcccggaacccac

SEQ ID NO: 1330328 - RNA, 18 nt, Human
cggcggcgggggccccgg

SEQ ID NO: 1330329 - RNA, 22 nt, Human
cgggcaagcgccagcccgcgcu

SEQ ID NO: 1330330 - RNA, 23 nt, Human
cuauaacauucucuuaccaccca

SEQ ID NO: 1330331 - RNA, 20 nt, Human
cuccuccuccuccuccuccu

SEQ ID NO: 1330332 - RNA, 20 nt, Human
cuccuccuccuccuccuccu

SEQ ID NO: 1330333 - RNA, 23 nt, Human
cuccuccuccuccuccugguccc

SEQ ID NO: 1330334 - RNA, 23 nt, Human
cugcgcgccgggccuccgccuuc

SEQ ID NO: 1330335 - RNA, 20 nt, Human
cugcggcggccgccuccucc

SEQ ID NO: 1330336 - RNA, 19 nt, Human
cugcugacuggaucugugg

SEQ ID NO: 1330337 - RNA, 24 nt, Human
cuggggcccacacucacacgcgca

SEQ ID NO: 1330338 - RNA, 19 nt, Human
cuuaggaacaauauucuuc

SEQ ID NO: 1330339 - RNA, 19 nt, Human
cuucaaaaugacaaauuga

SEQ ID NO: 1330340 - RNA, 23 nt, Human
gaaccaccaauugcaacucccug

SEQ ID NO: 1330341 - RNA, 22 nt, Human
gaacccacccccgggagggcac

SEQ ID NO: 1330342 - RNA, 18 nt, Human
gaauaucauacaaaguaa

SEQ ID NO: 1330343 - RNA, 24 nt, Human
gacuggaucugugguaucacuuga

SEQ ID NO: 1330344 - RNA, 23 nt, Human
gagagggagacagggggaggggg

SEQ ID NO: 1330345 - RNA, 18 nt, Human
gcacaggaaguacgacuc

SEQ ID NO: 1330346 - RNA, 21 nt, Human
gcccacacucacacgcgcaca

SEQ ID NO: 1330347 - RNA, 24 nt, Human
ggcccacacucacacgcgcacaaa

SEQ ID NO: 1330348 - RNA, 19 nt, Human
ggucccgccgccagcccac

SEQ ID NO: 1330349 - RNA, 21 nt, Human
guaugagauucuggauguuag

SEQ ID NO: 1330350 - RNA, 23 nt, Human
uaaaaaacauacgcuucucaaag

SEQ ID NO: 1330351 - RNA, 23 nt, Human
uaaaaaauaaaaagaaaauacag

SEQ ID NO: 1330352 - RNA, 27 nt, Human
uaaaaagaaaauacagcauaauaaaaa

SEQ ID NO: 1330353 - RNA, 24 nt, Human
uacaugauggcuuuuaaggcccug

SEQ ID NO: 1330354 - RNA, 20 nt, Human
uaccaacauguucucauuuu

SEQ ID NO: 1330355 - RNA, 24 nt, Human
uaccuagacaaaaaaaaaaaagac

SEQ ID NO: 1330356 - RNA, 22 nt, Human
uacuauggaauaucauacaaag

SEQ ID NO: 1330357 - RNA, 19 nt, Human
uagacaaaaaaaaaaaaga

SEQ ID NO: 1330358 - RNA, 22 nt, Human
uagcagaagguguuccagaggc

SEQ ID NO: 1330359 - RNA, 24 nt, Human
uauaacauucucuuaccacccaaa

SEQ ID NO: 1330360 - RNA, 20 nt, Human
uaucugaagagccugugaaa

SEQ ID NO: 1330361 - RNA, 26 nt, Human
uaucugaagagccugugaaaccaauu

SEQ ID NO: 1330362 - RNA, 21 nt, Human
ucacacgcgcacaaaaaggcg

SEQ ID NO: 1330363 - RNA, 25 nt, Human
ucacuauaacauucucuuaccaccc

SEQ ID NO: 1330364 - RNA, 22 nt, Human
ucauuucuucuagauuccaaaa

SEQ ID NO: 1330365 - RNA, 20 nt, Human
uccaaaaguaccuacaaaac

SEQ ID NO: 1330366 - RNA, 23 nt, Human
uccaaaaguaccuacaaaaccca

SEQ ID NO: 1330367 - RNA, 18 nt, Human
uccagaggcaaguaaggu

SEQ ID NO: 1330368 - RNA, 20 nt, Human
ucccccgcuccaagcacccc

SEQ ID NO: 1330369 - RNA, 18 nt, Human
uccccgccgacugcgccc

SEQ ID NO: 1330370 - RNA, 22 nt, Human
ucccgccgccagcccacgccug

SEQ ID NO: 1330371 - RNA, 21 nt, Human
ucccugaaccuggacuugacc

SEQ ID NO: 1330372 - RNA, 20 nt, Human
uccuccaauagucaagaaaa

SEQ ID NO: 1330373 - RNA, 21 nt, Human
ucuuaagaauaacaaaugaac

SEQ ID NO: 1330374 - RNA, 18 nt, Human
ugaagagccugugaaacc

SEQ ID NO: 1330375 - RNA, 22 nt, Human
ugaauaaguauuuguguaauau

SEQ ID NO: 1330376 - RNA, 22 nt, Human
ugaccaggaaaagaugaaccac

SEQ ID NO: 1330377 - RNA, 21 nt, Human
ugaccaggaaaagaugaaccc

SEQ ID NO: 1330378 - RNA, 22 nt, Human
ugggagacaugguuuuuggaaa

SEQ ID NO: 1330379 - RNA, 26 nt, Human
ugguccuccaauagucaagacccguc

SEQ ID NO: 1330380 - RNA, 23 nt, Human
uggugcaacggaaaauauuuguu

SEQ ID NO: 1330381 - RNA, 21 nt, Human
uguauagcucuuacaagacca

SEQ ID NO: 1330382 - RNA, 24 nt, Human
uguauagcucuuacaagaccagca

SEQ ID NO: 1330383 - RNA, 19 nt, Human
ugugcagaagccaaaucac

SEQ ID NO: 1330384 - RNA, 20 nt, Human
ugugcagaagccaaaucacc

SEQ ID NO: 1330385 - RNA, 19 nt, Human
uguuacacuuuacugguaa

SEQ ID NO: 1330386 - RNA, 22 nt, Human
uucacuauaacauucucuuacc

SEQ ID NO: 1330387 - RNA, 19 nt, Human
uucaucuuuuauaguugua

SEQ ID NO: 1330388 - RNA, 20 nt, Human
uucuugauuuauacccccau

SEQ ID NO: 1330389 - RNA, 21 nt, Human
uugaacacuggacacuguacc

SEQ ID NO: 1330390 - RNA, 21 nt, Human
uugaugcauuugguuagacua

SEQ ID NO: 1330391 - RNA, 22 nt, Human
uuggugcuccuccuaacugugc

SEQ ID NO: 1330392 - RNA, 24 nt, Human
uuucgcacaggaaguacgacucgg

SEQ ID NO: 1330393 - RNA, 25 nt, Human
uuugaccaggaaaagaugaaccacc

SEQ ID NO: 1330394 - RNA, 21 nt, Human
aaaauaacgaaacugccccag

SEQ ID NO: 1330395 - RNA, 18 nt, Human
aaaggccuaacaaccagu

SEQ ID NO: 1330396 - RNA, 24 nt, Human
aaccaguaagauaauuuuagacaa

SEQ ID NO: 1330397 - RNA, 23 nt, Human
acagcauggaaacacccaauguc

SEQ ID NO: 1330398 - RNA, 20 nt, Human
agacuucccuagagaggccc

SEQ ID NO: 1330399 - RNA, 21 nt, Human
agccuacagcauggaaacacc

SEQ ID NO: 1330400 - RNA, 19 nt, Human
aggcauuggggaucagcuu

SEQ ID NO: 1330401 - RNA, 24 nt, Human
aucacacaucaaagaccuagacuc

SEQ ID NO: 1330402 - RNA, 24 nt, Human
caaaauaacgaaacugccccagua

SEQ ID NO: 1330403 - RNA, 24 nt, Human
caaccagacuucccuagagaggcc

SEQ ID NO: 1330404 - RNA, 24 nt, Human
cacccaaugucugcucuagccuau

SEQ ID NO: 1330405 - RNA, 21 nt, Human
caccuguguucuuccugaggg

SEQ ID NO: 1330406 - RNA, 19 nt, Human
cagcauggaaacacccaau

SEQ ID NO: 1330407 - RNA, 24 nt, Human
cagccacacccuggucacagcaga

SEQ ID NO: 1330408 - RNA, 20 nt, Human
caggagaaggggucaugggg

SEQ ID NO: 1330409 - RNA, 21 nt, Human
caggagccuauucaggcucua

SEQ ID NO: 1330410 - RNA, 21 nt, Human
ccacacacaucagaaagggua

SEQ ID NO: 1330411 - RNA, 21 nt, Human
ccaggaaaggcaagcaugagg

SEQ ID NO: 1330412 - RNA, 21 nt, Human
cuauucaggcucuacaaccag

SEQ ID NO: 1330413 - RNA, 22 nt, Human
cucugagacaccaaaggccuaa

SEQ ID NO: 1330414 - RNA, 24 nt, Human
gagaggccccgugccaguuagucc

SEQ ID NO: 1330415 - RNA, 20 nt, Human
gagcuggggacaggagaagg

SEQ ID NO: 1330416 - RNA, 18 nt, Human
ggaaaggcaagcaugagg

SEQ ID NO: 1330417 - RNA, 20 nt, Human
ggaucuacugcucguccagu

SEQ ID NO: 1330418 - RNA, 21 nt, Human
gggaugggagcuggggacagg

SEQ ID NO: 1330419 - RNA, 23 nt, Human
ggggccaggaaaggcaagcauga

SEQ ID NO: 1330420 - RNA, 21 nt, Human
ggggcugggccugggggccag

SEQ ID NO: 1330421 - RNA, 19 nt, Human
ggucauggggccaggagcc

SEQ ID NO: 1330422 - RNA, 23 nt, Human
guucuuccugaggggugggggca

SEQ ID NO: 1330423 - RNA, 18 nt, Human
guugcacauguagguugg

SEQ ID NO: 1330424 - RNA, 18 nt, Human
uaaaaaggggcugggccu

SEQ ID NO: 1330425 - RNA, 19 nt, Human
uagagguggaccugucccu

SEQ ID NO: 1330426 - RNA, 25 nt, Human
uauaaacaaauaaaagauuaaauca

SEQ ID NO: 1330427 - RNA, 18 nt, Human
ucaaagaccuagacuccu

SEQ ID NO: 1330428 - RNA, 19 nt, Human
ucacacaucaaagaccuag

SEQ ID NO: 1330429 - RNA, 20 nt, Human
ugcacauguagguuggaggu

SEQ ID NO: 1330430 - RNA, 18 nt, Human
ugggaugggagcugggga

SEQ ID NO: 1330431 - RNA, 20 nt, Human
ugggccugggggccaggaaa

SEQ ID NO: 1330432 - RNA, 21 nt, Human
uggggccaggagccuauucag

SEQ ID NO: 1330433 - RNA, 20 nt, Human
ugggggccaggaaaggcaag

SEQ ID NO: 1330434 - RNA, 23 nt, Human
uuaacccacaacugggaugggag

SEQ ID NO: 1330435 - RNA, 21 nt, Human
uuccuuggagcugcaggcugc

SEQ ID NO: 1330436 - RNA, 22 nt, Human
uuggagguagcccaggugucag

SEQ ID NO: 1330437 - RNA, 20 nt, Human
aaauguuugcugacuugaaa

SEQ ID NO: 1330438 - RNA, 21 nt, Human
auuggagcaucacagccggug

SEQ ID NO: 1330439 - RNA, 20 nt, Human
cggccgcccggcgcccuggg

SEQ ID NO: 1330440 - RNA, 18 nt, Human
cggcgcccugggcucgcc

SEQ ID NO: 1330441 - RNA, 18 nt, Human
cgugggggagggaggccg

SEQ ID NO: 1330442 - RNA, 21 nt, Human
cugggcucgccgcugcucggg

SEQ ID NO: 1330443 - RNA, 23 nt, Human
ggcccuccggccucucggcccag

SEQ ID NO: 1330444 - RNA, 19 nt, Human
uaagccagaccagccuccc

SEQ ID NO: 1330445 - RNA, 21 nt, Human
ucccggccgcccggcgcccug

SEQ ID NO: 1330446 - RNA, 23 nt, Human
ucccggccgcccggcgcccuggg

SEQ ID NO: 1330447 - RNA, 21 nt, Human
ucucggcccagcuaagccaga

SEQ ID NO: 1330448 - RNA, 18 nt, Human
ugcggcaaggauggggug

SEQ ID NO: 1330449 - RNA, 23 nt, Human
ugggguguugcauagagagucag

SEQ ID NO: 1330450 - RNA, 18 nt, Human
acacagcaaaucgccaaa

SEQ ID NO: 1330451 - RNA, 19 nt, Human
acaugccacauacacagca

SEQ ID NO: 1330452 - RNA, 21 nt, Human
acccaaauuuggaccaucagu

SEQ ID NO: 1330453 - RNA, 24 nt, Human
auuuauugucuauuuauuuuuggu

SEQ ID NO: 1330454 - RNA, 21 nt, Human
cacauacacagcaaaucgcca

SEQ ID NO: 1330455 - RNA, 18 nt, Human
ccacuuuguccuucuccu

SEQ ID NO: 1330456 - RNA, 22 nt, Human
cccacaagacaugcaguaacag

SEQ ID NO: 1330457 - RNA, 21 nt, Human
cccucuccacuuuguccuucu

SEQ ID NO: 1330458 - RNA, 20 nt, Human
ccucccucuccacuuugucc

SEQ ID NO: 1330459 - RNA, 21 nt, Human
ccucuaaacgguugcuccgga

SEQ ID NO: 1330460 - RNA, 22 nt, Human
gcuccaucuccucccucuccac

SEQ ID NO: 1330461 - RNA, 18 nt, Human
gcugagcacauuacaguu

SEQ ID NO: 1330462 - RNA, 23 nt, Human
ggcagaugaguuaacaggaggga

SEQ ID NO: 1330463 - RNA, 19 nt, Human
ucacauaagagauugcucc

SEQ ID NO: 1330464 - RNA, 26 nt, Human
ucacauaagagauugcuccaucuccu

SEQ ID NO: 1330465 - RNA, 22 nt, Human
uccaaucaguccuucucuccca

SEQ ID NO: 1330466 - RNA, 18 nt, Human
ucccaaguauuuucaucu

SEQ ID NO: 1330467 - RNA, 19 nt, Human
ucccagggucacagggugc

SEQ ID NO: 1330468 - RNA, 20 nt, Human
ucuaaacgguugcuccggag

SEQ ID NO: 1330469 - RNA, 19 nt, Human
ucuccucccucuccacuuu

SEQ ID NO: 1330470 - RNA, 21 nt, Human
ugcuccaucuccucccucucc

SEQ ID NO: 1330471 - RNA, 18 nt, Human
uggauuccuguugccauu

SEQ ID NO: 1330472 - RNA, 20 nt, Human
uuccucuaaacgguugcucc

SEQ ID NO: 1330473 - RNA, 18 nt, Human
uugaaccagguguuaggu

SEQ ID NO: 1330474 - RNA, 23 nt, Human
aaaaaggcaacaccuguggagga

SEQ ID NO: 1330475 - RNA, 18 nt, Human
aaacaggcaagcuguccc

SEQ ID NO: 1330476 - RNA, 20 nt, Human
aaagagcagcagagagcgau

SEQ ID NO: 1330477 - RNA, 18 nt, Human
aaagagcuagcugacacc

SEQ ID NO: 1330478 - RNA, 25 nt, Human
aaaggucccaaacaguuccagaccc

SEQ ID NO: 1330479 - RNA, 24 nt, Human
aaaguucaaagcagucugcaucua

SEQ ID NO: 1330480 - RNA, 22 nt, Human
aaccaugagaaaggaaggguca

SEQ ID NO: 1330481 - RNA, 20 nt, Human
aagaaugggaaccugcccac

SEQ ID NO: 1330482 - RNA, 22 nt, Human
aagacucccacccauagcacaa

SEQ ID NO: 1330483 - RNA, 19 nt, Human
aagcagcagaucugugcca

SEQ ID NO: 1330484 - RNA, 20 nt, Human
aagcagcagaucugugccau

SEQ ID NO: 1330485 - RNA, 24 nt, Human
aagccaaacaggcacuugccuaaa

SEQ ID NO: 1330486 - RNA, 23 nt, Human
aagcugaggagccuggcugagag

SEQ ID NO: 1330487 - RNA, 24 nt, Human
aagcugaggagccuggcugagagg

SEQ ID NO: 1330488 - RNA, 22 nt, Human
aagcuuaaaguucucccuccag

SEQ ID NO: 1330489 - RNA, 20 nt, Human
aaggucccaaacaguuccag

SEQ ID NO: 1330490 - RNA, 26 nt, Human
acagcauaagacuggaaagcccccaa

SEQ ID NO: 1330491 - RNA, 18 nt, Human
accaaggcuucucacagc

SEQ ID NO: 1330492 - RNA, 18 nt, Human
acccagagcccucuacuu

SEQ ID NO: 1330493 - RNA, 26 nt, Human
acccgucccaccccacccucaggggc

SEQ ID NO: 1330494 - RNA, 23 nt, Human
agaaaggagcgggcucggaccga

SEQ ID NO: 1330495 - RNA, 22 nt, Human
agaaauauaacccuuuaaaagc

SEQ ID NO: 1330496 - RNA, 21 nt, Human
agaagcaaaagaaccaggucc

SEQ ID NO: 1330497 - RNA, 22 nt, Human
agaaugugggcaccugcaccca

SEQ ID NO: 1330498 - RNA, 19 nt, Human
agacuggaaagcccccaag

SEQ ID NO: 1330499 - RNA, 21 nt, Human
agagaaaccaauguccaaggg

SEQ ID NO: 1330500 - RNA, 20 nt, Human
agagcccucuacuucugggg

SEQ ID NO: 1330501 - RNA, 20 nt, Human
agaggcuguuucaggaauag

SEQ ID NO: 1330502 - RNA, 21 nt, Human
agagugggcguggaggggccc

SEQ ID NO: 1330503 - RNA, 21 nt, Human
agaucucaaagaucuagacaa

SEQ ID NO: 1330504 - RNA, 21 nt, Human
agaucugugccauuaagggcu

SEQ ID NO: 1330505 - RNA, 21 nt, Human
agccacagaucucaaagaucu

SEQ ID NO: 1330506 - RNA, 18 nt, Human
agcuagcugacacccaca

SEQ ID NO: 1330507 - RNA, 21 nt, Human
aggaagggcauggggcaaaag

SEQ ID NO: 1330508 - RNA, 23 nt, Human
aggagugagcgcgugagcagcgg

SEQ ID NO: 1330509 - RNA, 19 nt, Human
agggaguggccuucuuagg

SEQ ID NO: 1330510 - RNA, 21 nt, Human
auauaacccuuuaaaagcaag

SEQ ID NO: 1330511 - RNA, 19 nt, Human
augcggcagccucuccucc

SEQ ID NO: 1330512 - RNA, 21 nt, Human
auuuuaagucagcacaaacau

SEQ ID NO: 1330513 - RNA, 22 nt, Human
caaaagaaccagguccuuccca

SEQ ID NO: 1330514 - RNA, 24 nt, Human
caaagcagucugcaucuagggaac

SEQ ID NO: 1330515 - RNA, 19 nt, Human
caagaaaugggcacccaga

SEQ ID NO: 1330516 - RNA, 24 nt, Human
caagggaagagugggcguggaggg

SEQ ID NO: 1330517 - RNA, 21 nt, Human
caccacccgucccaccccacc

SEQ ID NO: 1330518 - RNA, 21 nt, Human
caccagaggcccugaggccug

SEQ ID NO: 1330519 - RNA, 18 nt, Human
cacccagggcccauacca

SEQ ID NO: 1330520 - RNA, 23 nt, Human
cacccagggcccauaccacgucc

SEQ ID NO: 1330521 - RNA, 21 nt, Human
caccccaacccaugaucccau

SEQ ID NO: 1330522 - RNA, 25 nt, Human
cacccccucccccgcacgcaagguc

SEQ ID NO: 1330523 - RNA, 19 nt, Human
cacccgucccaccccaccc

SEQ ID NO: 1330524 - RNA, 21 nt, Human
cacuaccauuaaauaacaggg

SEQ ID NO: 1330525 - RNA, 18 nt, Human
cacuccucaagcccucac

SEQ ID NO: 1330526 - RNA, 20 nt, Human
cagacaaagcucucauuagc

SEQ ID NO: 1330527 - RNA, 22 nt, Human
cagcacagcugccgaaacuuga

SEQ ID NO: 1330528 - RNA, 22 nt, Human
cagcagcagcacagcugccgaa

SEQ ID NO: 1330529 - RNA, 23 nt, Human
cagcauaagacuggaaagccccc

SEQ ID NO: 1330530 - RNA, 25 nt, Human
cagcauaagacuggaaagcccccaa

SEQ ID NO: 1330531 - RNA, 24 nt, Human
caggacauccccaaaaggucccaa

SEQ ID NO: 1330532 - RNA, 22 nt, Human
caggguucuccauuauuuuuuc

SEQ ID NO: 1330533 - RNA, 24 nt, Human
ccaaagaaugggaaccugcccacc

SEQ ID NO: 1330534 - RNA, 19 nt, Human
ccaaagagaaauauaaccc

SEQ ID NO: 1330535 - RNA, 23 nt, Human
ccaagggcacccugucccugcug

SEQ ID NO: 1330536 - RNA, 19 nt, Human
ccacagaaauggugcuggg

SEQ ID NO: 1330537 - RNA, 27 nt, Human
ccaggcccagggccaagagcgccuccu

SEQ ID NO: 1330538 - RNA, 24 nt, Human
ccagguccuucccaggguucucca

SEQ ID NO: 1330539 - RNA, 25 nt, Human
cccaaagaaugggaaccugcccacc

SEQ ID NO: 1330540 - RNA, 22 nt, Human
cccaaguuggggcuaagaaggc

SEQ ID NO: 1330541 - RNA, 20 nt, Human
cccaccccacccucaggggc

SEQ ID NO: 1330542 - RNA, 21 nt, Human
cccagggaagcacuauagaga

SEQ ID NO: 1330543 - RNA, 22 nt, Human
ccccaaagaaugggaaccugcc

SEQ ID NO: 1330544 - RNA, 21 nt, Human
cccccauggcugaagccacag

SEQ ID NO: 1330545 - RNA, 21 nt, Human
ccccuuccucuuuuaagcacc

SEQ ID NO: 1330546 - RNA, 22 nt, Human
cccucugccauaaguuggccuc

SEQ ID NO: 1330547 - RNA, 21 nt, Human
ccucacaaagggcugcugccu

SEQ ID NO: 1330548 - RNA, 28 nt, Human
ccucccagccccaaagaaugggaaccug

SEQ ID NO: 1330549 - RNA, 22 nt, Human
ccucugaguggcugugcagcuc

SEQ ID NO: 1330550 - RNA, 19 nt, Human
ccugagggcaccuauuaaa

SEQ ID NO: 1330551 - RNA, 18 nt, Human
ccugccugcaguggagag

SEQ ID NO: 1330552 - RNA, 27 nt, Human
ccugcuaggacaccgacuaucccccaa

SEQ ID NO: 1330553 - RNA, 21 nt, Human
ccuucggacucuuugccuccu

SEQ ID NO: 1330554 - RNA, 25 nt, Human
cgagcacccccucccccgcacgcaa

SEQ ID NO: 1330555 - RNA, 22 nt, Human
cuagcugacacccacagcauaa

SEQ ID NO: 1330556 - RNA, 24 nt, Human
cuaggcccacagaaauggugcugg

SEQ ID NO: 1330557 - RNA, 20 nt, Human
cuccagguguccaaagugcu

SEQ ID NO: 1330558 - RNA, 22 nt, Human
cucugccauaaguuggccucag

SEQ ID NO: 1330559 - RNA, 19 nt, Human
cugaucagacaaagcucuc

SEQ ID NO: 1330560 - RNA, 19 nt, Human
cugauggacccaggacuga

SEQ ID NO: 1330561 - RNA, 20 nt, Human
cugucccugcugccaagccc

SEQ ID NO: 1330562 - RNA, 18 nt, Human
cuuggugagagaggcugu

SEQ ID NO: 1330563 - RNA, 20 nt, Human
cuuuguucccaaguuggggc

SEQ ID NO: 1330564 - RNA, 22 nt, Human
gaaccugcccaccaguggcacc

SEQ ID NO: 1330565 - RNA, 24 nt, Human
gaagcagcagaucugugccauuaa

SEQ ID NO: 1330566 - RNA, 19 nt, Human
gagcagcccauccagcagc

SEQ ID NO: 1330567 - RNA, 22 nt, Human
gagccaccagaggcccugaggc

SEQ ID NO: 1330568 - RNA, 23 nt, Human
gaggagccuggcugagagggcgu

SEQ ID NO: 1330569 - RNA, 23 nt, Human
gcacccccucccccgcacgcaag

SEQ ID NO: 1330570 - RNA, 22 nt, Human
gcagaaugcggcagccucuccu

SEQ ID NO: 1330571 - RNA, 24 nt, Human
gcagaaugugggcaccugcaccca

SEQ ID NO: 1330572 - RNA, 23 nt, Human
gcagcaaaucccaggccuuccca

SEQ ID NO: 1330573 - RNA, 21 nt, Human
gcagccaaaaugacuaaaacc

SEQ ID NO: 1330574 - RNA, 19 nt, Human
gcagcccauccagcagcag

SEQ ID NO: 1330575 - RNA, 18 nt, Human
gcccagggaagcacuaua

SEQ ID NO: 1330576 - RNA, 21 nt, Human
gcuuggcccagggaagcacua

SEQ ID NO: 1330577 - RNA, 23 nt, Human
ggaaagggaccucugaguggcug

SEQ ID NO: 1330578 - RNA, 22 nt, Human
ggacaccgacuaucccccacuu

SEQ ID NO: 1330579 - RNA, 21 nt, Human
ggacagggcucucuggcaugg

SEQ ID NO: 1330580 - RNA, 22 nt, Human
ggacccaggacugaucagacaa

SEQ ID NO: 1330581 - RNA, 21 nt, Human
ggagggaguggccuucuuagg

SEQ ID NO: 1330582 - RNA, 21 nt, Human
ggcacccagagcccucuacuu

SEQ ID NO: 1330583 - RNA, 18 nt, Human
ggcauggggcaaaagcuc

SEQ ID NO: 1330584 - RNA, 22 nt, Human
ggccagagccaccagaggcccu

SEQ ID NO: 1330585 - RNA, 18 nt, Human
ggccuggggaaaugagac

SEQ ID NO: 1330586 - RNA, 24 nt, Human
ggcuggugucagcuuggcccaggg

SEQ ID NO: 1330587 - RNA, 22 nt, Human
gggaagcacuauagagagggcu

SEQ ID NO: 1330588 - RNA, 22 nt, Human
gggagggaguggccuucuuagg

SEQ ID NO: 1330589 - RNA, 21 nt, Human
gggagggguggggucccuggc

SEQ ID NO: 1330590 - RNA, 19 nt, Human
gggcguggaggggcccugc

SEQ ID NO: 1330591 - RNA, 24 nt, Human
gggcuuacaguuccccgagaagca

SEQ ID NO: 1330592 - RNA, 20 nt, Human
gguucugggggcccagaaca

SEQ ID NO: 1330593 - RNA, 20 nt, Human
gucccaaacaguuccagacc

SEQ ID NO: 1330594 - RNA, 23 nt, Human
guccccuuccucuuuuaagcacc

SEQ ID NO: 1330595 - RNA, 19 nt, Human
guggcugugcagcuccacc

SEQ ID NO: 1330596 - RNA, 21 nt, Human
uaaccaaauuguacagcuuua

SEQ ID NO: 1330597 - RNA, 22 nt, Human
uacagaaaggagcgggcucgga

SEQ ID NO: 1330598 - RNA, 23 nt, Human
uacaggagagaagacuguaauuu

SEQ ID NO: 1330599 - RNA, 21 nt, Human
uaccuuuaaagccaaacaggc

SEQ ID NO: 1330600 - RNA, 21 nt, Human
uaggacaggugccaaccuguc

SEQ ID NO: 1330601 - RNA, 19 nt, Human
ucacaaagggcugcugccc

SEQ ID NO: 1330602 - RNA, 20 nt, Human
ucaccugagcaccccaaccc

SEQ ID NO: 1330603 - RNA, 18 nt, Human
ucagcagggcccugcagc

SEQ ID NO: 1330604 - RNA, 19 nt, Human
ucaggagugagcgcgugag

SEQ ID NO: 1330605 - RNA, 19 nt, Human
ucaguggggugggagggag

SEQ ID NO: 1330606 - RNA, 18 nt, Human
uccaggcuacagcuaaaa

SEQ ID NO: 1330607 - RNA, 22 nt, Human
ucccaccccacccucaggggcu

SEQ ID NO: 1330608 - RNA, 22 nt, Human
ucccugcugccaagcccaccag

SEQ ID NO: 1330609 - RNA, 20 nt, Human
ucucauuagcagaauguggg

SEQ ID NO: 1330610 - RNA, 24 nt, Human
ucuccagguguccaaagugcuggu

SEQ ID NO: 1330611 - RNA, 23 nt, Human
ugaggaaagcaugaaggaaugag

SEQ ID NO: 1330612 - RNA, 21 nt, Human
ugaggagcagcagaaugcggc

SEQ ID NO: 1330613 - RNA, 18 nt, Human
ugaggagccuggcugaga

SEQ ID NO: 1330614 - RNA, 22 nt, Human
ugagggccauauucuaggccca

SEQ ID NO: 1330615 - RNA, 26 nt, Human
ugaucagacaaagcucucauuagcag

SEQ ID NO: 1330616 - RNA, 24 nt, Human
ugcagcuuugcucgcugugaggag

SEQ ID NO: 1330617 - RNA, 21 nt, Human
ugcagucagcccuguggugcc

SEQ ID NO: 1330618 - RNA, 18 nt, Human
ugccaggccccuugaugg

SEQ ID NO: 1330619 - RNA, 18 nt, Human
ugcggcagccucuccucc

SEQ ID NO: 1330620 - RNA, 26 nt, Human
uggaaagcccccaagaaaugggcacc

SEQ ID NO: 1330621 - RNA, 20 nt, Human
uggaaagggaccucugagug

SEQ ID NO: 1330622 - RNA, 22 nt, Human
uggaaagggaccucugaguggc

SEQ ID NO: 1330623 - RNA, 21 nt, Human
uggaggaagggcauggggcaa

SEQ ID NO: 1330624 - RNA, 22 nt, Human
uggcagggacagggcucucugg

SEQ ID NO: 1330625 - RNA, 21 nt, Human
uggcauggggcagggagaaag

SEQ ID NO: 1330626 - RNA, 22 nt, Human
uggccaucuguuagaagcagca

SEQ ID NO: 1330627 - RNA, 18 nt, Human
ugggaggagcagcccauc

SEQ ID NO: 1330628 - RNA, 20 nt, Human
uggggaaaugagacccugag

SEQ ID NO: 1330629 - RNA, 18 nt, Human
ugggggcccagaacaggg

SEQ ID NO: 1330630 - RNA, 19 nt, Human
uggggugggagggaguggc

SEQ ID NO: 1330631 - RNA, 21 nt, Human
ugggugcagcuuugcucgcug

SEQ ID NO: 1330632 - RNA, 24 nt, Human
ugucacgugccaacaggugccugg

SEQ ID NO: 1330633 - RNA, 18 nt, Human
uguggaggaagggcaugg

SEQ ID NO: 1330634 - RNA, 24 nt, Human
uuaaaagcaagucuguguguccuc

SEQ ID NO: 1330635 - RNA, 21 nt, Human
uuaccaaggcuucucacagcu

SEQ ID NO: 1330636 - RNA, 20 nt, Human
uucacuuuauauauauggau

SEQ ID NO: 1330637 - RNA, 20 nt, Human
uuuaaggaccaggaaaugag

SEQ ID NO: 1330638 - RNA, 20 nt, Human
uuucaggaauaggacaggug

SEQ ID NO: 1330639 - RNA, 19 nt, Human
acccacucuccuccauccc

SEQ ID NO: 1330640 - RNA, 28 nt, Human
acccacucuccuccaucccgcccuccaa

SEQ ID NO: 1330641 - RNA, 29 nt, Human
aggggcaggugcccggacauccccaaggg

SEQ ID NO: 1330642 - RNA, 25 nt, Human
caccaccaccagcgugccggccgcc

SEQ ID NO: 1330643 - RNA, 25 nt, Human
cagcaccaccaccaccagcgugccu

SEQ ID NO: 1330644 - RNA, 19 nt, Human
cagcaggcugguggccggg

SEQ ID NO: 1330645 - RNA, 20 nt, Human
cagcaggcugguggccgggg

SEQ ID NO: 1330646 - RNA, 20 nt, Human
cagcgugccggccgccagcc

SEQ ID NO: 1330647 - RNA, 22 nt, Human
cagcugcgccggcgggggcggc

SEQ ID NO: 1330648 - RNA, 24 nt, Human
cagugcccgucgcugaaguggucc

SEQ ID NO: 1330649 - RNA, 22 nt, Human
ccucacccacucuccuccaucc

SEQ ID NO: 1330650 - RNA, 22 nt, Human
cgcguccgggcgccuccucacc

SEQ ID NO: 1330651 - RNA, 22 nt, Human
cgggcgccuccucacccacucu

SEQ ID NO: 1330652 - RNA, 22 nt, Human
cucacccacucuccuccauccc

SEQ ID NO: 1330653 - RNA, 20 nt, Human
cuccaucccgcccuccaaaa

SEQ ID NO: 1330654 - RNA, 23 nt, Human
cuccgcguccgggcgccuccuca

SEQ ID NO: 1330655 - RNA, 24 nt, Human
cucuccuccaucccgcccuccaaa

SEQ ID NO: 1330656 - RNA, 25 nt, Human
cucuccuccaucccgcccuccaaaa

SEQ ID NO: 1330657 - RNA, 24 nt, Human
gcaccaccaccaccagcgugccgg

SEQ ID NO: 1330658 - RNA, 20 nt, Human
gccggggggcggcggacugg

SEQ ID NO: 1330659 - RNA, 23 nt, Human
gccuccucacccacucuccucca

SEQ ID NO: 1330660 - RNA, 21 nt, Human
gcuccacggucucaccugcgg

SEQ ID NO: 1330661 - RNA, 21 nt, Human
ggggguugcacuggccuuccg

SEQ ID NO: 1330662 - RNA, 24 nt, Human
uacuggucguacaggggguugcac

SEQ ID NO: 1330663 - RNA, 19 nt, Human
uccacggucucaccugcgg

SEQ ID NO: 1330664 - RNA, 18 nt, Human
ugcccggacaucaggcag

SEQ ID NO: 1330665 - RNA, 19 nt, Human
uugcacuggccuuccgcac

SEQ ID NO: 1330666 - RNA, 21 nt, Human
agcauagcccaggaaucugua

SEQ ID NO: 1330667 - RNA, 24 nt, Human
aggcccccugcuuaagagcagccc

SEQ ID NO: 1330668 - RNA, 24 nt, Human
augaaccaagagcugcgaagccca

SEQ ID NO: 1330669 - RNA, 25 nt, Human
caaaugcaacucgcggcccccgguu

SEQ ID NO: 1330670 - RNA, 18 nt, Human
cacugaugacccacacga

SEQ ID NO: 1330671 - RNA, 18 nt, Human
cagccccugacaauuucc

SEQ ID NO: 1330672 - RNA, 24 nt, Human
cagccccugacaauuucccuucuu

SEQ ID NO: 1330673 - RNA, 25 nt, Human
caggcccccugcuuaagagcagccc

SEQ ID NO: 1330674 - RNA, 21 nt, Human
caucugcucccaguucugcuc

SEQ ID NO: 1330675 - RNA, 19 nt, Human
ccacacacugaugacccac

SEQ ID NO: 1330676 - RNA, 21 nt, Human
cccccagcccgggcagggguu

SEQ ID NO: 1330677 - RNA, 18 nt, Human
ccccgccgcgcggaccgg

SEQ ID NO: 1330678 - RNA, 21 nt, Human
ccgccgccgcugccgcugcgc

SEQ ID NO: 1330679 - RNA, 21 nt, Human
ccgccggcggccgccgcugcc

SEQ ID NO: 1330680 - RNA, 22 nt, Human
ccgcuccgccgccuccuccggc

SEQ ID NO: 1330681 - RNA, 22 nt, Human
ccgcugccgcugcgcuggccgc

SEQ ID NO: 1330682 - RNA, 20 nt, Human
ccgcugcgcuggccgcugug

SEQ ID NO: 1330683 - RNA, 21 nt, Human
ccgcugcgcuggccgcugugg

SEQ ID NO: 1330684 - RNA, 24 nt, Human
ccugacaauuucccuucuucaccu

SEQ ID NO: 1330685 - RNA, 20 nt, Human
cgcccggggcgcaggagcag

SEQ ID NO: 1330686 - RNA, 18 nt, Human
cgccgccgcugccgcugc

SEQ ID NO: 1330687 - RNA, 18 nt, Human
cgccgccgcugccgcugc

SEQ ID NO: 1330688 - RNA, 19 nt, Human
cgcgcggaccggagcccgg

SEQ ID NO: 1330689 - RNA, 18 nt, Human
cgcuggccgcuguggcug

SEQ ID NO: 1330690 - RNA, 21 nt, Human
cgggcaucugcucccaguucu

SEQ ID NO: 1330691 - RNA, 19 nt, Human
cggggaccgggguguccgg

SEQ ID NO: 1330692 - RNA, 26 nt, Human
cguggacccgcuggcugcgcgcuccu

SEQ ID NO: 1330693 - RNA, 26 nt, Human
cuccaaaggcuacuucauugcgcucc

SEQ ID NO: 1330694 - RNA, 29 nt, Human
cuccucgccgcuccgccgccuccuccgau

SEQ ID NO: 1330695 - RNA, 19 nt, Human
cugcgcgcuccugcuccuc

SEQ ID NO: 1330696 - RNA, 23 nt, Human
gaccacacacugaugacccacac

SEQ ID NO: 1330697 - RNA, 19 nt, Human
gagcccccagcccgggcag

SEQ ID NO: 1330698 - RNA, 18 nt, Human
gcgggccgggcggcuggg

SEQ ID NO: 1330699 - RNA, 18 nt, Human
ggaagcgcgcccggggcg

SEQ ID NO: 1330700 - RNA, 19 nt, Human
ggccgggcggcuggggugc

SEQ ID NO: 1330701 - RNA, 19 nt, Human
gggcagggguguggaaggu

SEQ ID NO: 1330702 - RNA, 19 nt, Human
uacaaugaaccaagagcug

SEQ ID NO: 1330703 - RNA, 26 nt, Human
uacaaugaaccaagagcugcgaagcc

SEQ ID NO: 1330704 - RNA, 19 nt, Human
uacacagaauuucucuggg

SEQ ID NO: 1330705 - RNA, 19 nt, Human
uacacagugcuugaggucu

SEQ ID NO: 1330706 - RNA, 20 nt, Human
ucccgccggcggccgccgcu

SEQ ID NO: 1330707 - RNA, 20 nt, Human
uccgacgggcccucucccuu

SEQ ID NO: 1330708 - RNA, 23 nt, Human
ucgccgcuccgccgccuccuccg

SEQ ID NO: 1330709 - RNA, 22 nt, Human
ucugggguugagagccaagagc

SEQ ID NO: 1330710 - RNA, 18 nt, Human
ucuguggcagcauagccc

SEQ ID NO: 1330711 - RNA, 23 nt, Human
ucuguggcagcauagcccaggaa

SEQ ID NO: 1330712 - RNA, 21 nt, Human
ugcucccaguucugcucuccg

SEQ ID NO: 1330713 - RNA, 24 nt, Human
ugcugaccacacacugaugaccca

SEQ ID NO: 1330714 - RNA, 21 nt, Human
uggggugcgagcggugauggu

SEQ ID NO: 1330715 - RNA, 18 nt, Human
uugagagccaagagccgu

SEQ ID NO: 1330716 - RNA, 21 nt, Human
uugcugggucaugggcuacac

SEQ ID NO: 1330717 - RNA, 24 nt, Human
aaagugcugggauuacaggcguga

SEQ ID NO: 1330718 - RNA, 23 nt, Human
aaccucgcgacuccuuagccccu

SEQ ID NO: 1330719 - RNA, 19 nt, Human
aagugcugggauuacaggc

SEQ ID NO: 1330720 - RNA, 19 nt, Human
aagugcugggauuacaggc

SEQ ID NO: 1330721 - RNA, 26 nt, Human
aagugcugggauuacaggcgugagcc

SEQ ID NO: 1330722 - RNA, 23 nt, Human
accucagccucccaaagugcugg

SEQ ID NO: 1330723 - RNA, 25 nt, Human
agaaugucuccccguuuggguuggu

SEQ ID NO: 1330724 - RNA, 18 nt, Human
agucugcggcuccgcucu

SEQ ID NO: 1330725 - RNA, 19 nt, Human
agugauccacccaccucag

SEQ ID NO: 1330726 - RNA, 18 nt, Human
agugcugggauuacaggc

SEQ ID NO: 1330727 - RNA, 19 nt, Human
aucauuggagggaugucac

SEQ ID NO: 1330728 - RNA, 24 nt, Human
caaagugcugggauuacaggcgug

SEQ ID NO: 1330729 - RNA, 18 nt, Human
caccaugcccggcuccau

SEQ ID NO: 1330730 - RNA, 22 nt, Human
cacccaccucagccucccaaag

SEQ ID NO: 1330731 - RNA, 23 nt, Human
cacccaccucagccucccaaagu

SEQ ID NO: 1330732 - RNA, 23 nt, Human
cauaaacuugacacuuuugaagc

SEQ ID NO: 1330733 - RNA, 20 nt, Human
ccaaagugcugggauuacag

SEQ ID NO: 1330734 - RNA, 22 nt, Human
ccaaagugcugggauuacaggc

SEQ ID NO: 1330735 - RNA, 22 nt, Human
ccaaagugcugggauuacaggc

SEQ ID NO: 1330736 - RNA, 24 nt, Human
ccaaagugcugggauuacaggcgu

SEQ ID NO: 1330737 - RNA, 22 nt, Human
ccaccaugcccggcuccauagu

SEQ ID NO: 1330738 - RNA, 26 nt, Human
ccacccaccucagccucccaaagugc

SEQ ID NO: 1330739 - RNA, 25 nt, Human
ccacgcuccgccgccucgcccugga

SEQ ID NO: 1330740 - RNA, 20 nt, Human
ccagcacaccugacccuggc

SEQ ID NO: 1330741 - RNA, 21 nt, Human
ccagcacaccugacccuggcc

SEQ ID NO: 1330742 - RNA, 21 nt, Human
ccauuccuggccuuuuguucc

SEQ ID NO: 1330743 - RNA, 18 nt, Human
ccccgcuccagcacaccu

SEQ ID NO: 1330744 - RNA, 19 nt, Human
ccugccacgcuccgccgcc

SEQ ID NO: 1330745 - RNA, 18 nt, Human
ccugggcucaagugaucc

SEQ ID NO: 1330746 - RNA, 22 nt, Human
ccugggcucaagugauccaccc

SEQ ID NO: 1330747 - RNA, 24 nt, Human
ccugggcucaagugauccacccac

SEQ ID NO: 1330748 - RNA, 23 nt, Human
cgauacacuaccauuaacuaaau

SEQ ID NO: 1330749 - RNA, 22 nt, Human
cgcccuggaacccgggcccgga

SEQ ID NO: 1330750 - RNA, 19 nt, Human
cggcgccggcgcauggacc

SEQ ID NO: 1330751 - RNA, 25 nt, Human
cgugagccaccaugcccggcuccau

SEQ ID NO: 1330752 - RNA, 18 nt, Human
cguguuacccaggcuggu

SEQ ID NO: 1330753 - RNA, 23 nt, Human
cguguuacccaggcugguuacaa

SEQ ID NO: 1330754 - RNA, 21 nt, Human
cucaagugauccacccaccuc

SEQ ID NO: 1330755 - RNA, 24 nt, Human
cucaagugauccacccaccucagc

SEQ ID NO: 1330756 - RNA, 20 nt, Human
cucacgagacagcggccaug

SEQ ID NO: 1330757 - RNA, 21 nt, Human
cuccugggcucaagugaucca

SEQ ID NO: 1330758 - RNA, 18 nt, Human
cugccggggccgcgccgg

SEQ ID NO: 1330759 - RNA, 19 nt, Human
gaacccgggcccggacccc

SEQ ID NO: 1330760 - RNA, 18 nt, Human
gaccccgcuccagcacac

SEQ ID NO: 1330761 - RNA, 18 nt, Human
gauuacaggcgugagcca

SEQ ID NO: 1330762 - RNA, 21 nt, Human
gauuacaggcgugagccacca

SEQ ID NO: 1330763 - RNA, 24 nt, Human
gauuacaggcgugagccaccaugc

SEQ ID NO: 1330764 - RNA, 20 nt, Human
gcagccccucaaucugugug

SEQ ID NO: 1330765 - RNA, 19 nt, Human
gcgugagccaccaugcccg

SEQ ID NO: 1330766 - RNA, 20 nt, Human
gcuccgccgccucgcccugg

SEQ ID NO: 1330767 - RNA, 24 nt, Human
ggauuacaggcgugagccaccaug

SEQ ID NO: 1330768 - RNA, 20 nt, Human
ggcucaagugauccacccac

SEQ ID NO: 1330769 - RNA, 18 nt, Human
gggcucaagugauccacc

SEQ ID NO: 1330770 - RNA, 24 nt, Human
gucugcggcuccgcucugcccccg

SEQ ID NO: 1330771 - RNA, 24 nt, Human
gugauccacccaccucagccuccc

SEQ ID NO: 1330772 - RNA, 21 nt, Human
gugugucuuucauaaacuuga

SEQ ID NO: 1330773 - RNA, 23 nt, Human
uacaggcgugagccaccaugccc

SEQ ID NO: 1330774 - RNA, 18 nt, Human
ucagccucccaaagugcu

SEQ ID NO: 1330775 - RNA, 21 nt, Human
uccacccaccucagccuccca

SEQ ID NO: 1330776 - RNA, 24 nt, Human
ucccaaagugcugggauuacaggc

SEQ ID NO: 1330777 - RNA, 18 nt, Human
uccugggcucaagugauc

SEQ ID NO: 1330778 - RNA, 19 nt, Human
ucguguuacccaggcuggu

SEQ ID NO: 1330779 - RNA, 20 nt, Human
ucucacacugcauuuagcua

SEQ ID NO: 1330780 - RNA, 24 nt, Human
ugauccacccaccucagccuccca

SEQ ID NO: 1330781 - RNA, 24 nt, Human
ugcugggauuacaggcgugagcca

SEQ ID NO: 1330782 - RNA, 21 nt, Human
uggaacccgggcccggacccc

SEQ ID NO: 1330783 - RNA, 18 nt, Human
ugggauuacaggcgugag

SEQ ID NO: 1330784 - RNA, 22 nt, Human
ugggauuacaggcgugagccac

SEQ ID NO: 1330785 - RNA, 23 nt, Human
ugggauuacaggcgugagccacc

SEQ ID NO: 1330786 - RNA, 24 nt, Human
ugggauuacaggcgugagccacca

SEQ ID NO: 1330787 - RNA, 25 nt, Human
ugggauuacaggcgugagccaccau

SEQ ID NO: 1330788 - RNA, 23 nt, Human
ugggggaaccucgcgacuccuua

SEQ ID NO: 1330789 - RNA, 24 nt, Human
ugggguuuugucguguuacccagg

SEQ ID NO: 1330790 - RNA, 31 nt, Human
ugucguguuacccaggcugguuacaaacucc

SEQ ID NO: 1330791 - RNA, 19 nt, Human
ugucuucuuugucuccucc

SEQ ID NO: 1330792 - RNA, 23 nt, Human
uugccugccacgcuccgccgccu

SEQ ID NO: 1330793 - RNA, 19 nt, Human
uuucauaaacuugacacuu

SEQ ID NO: 1330794 - RNA, 22 nt, Human
aaccacugcacuaccugacuca

SEQ ID NO: 1330795 - RNA, 19 nt, Human
aaccagaccucaucagccc

SEQ ID NO: 1330796 - RNA, 22 nt, Human
aagcaggacaugacaugguccg

SEQ ID NO: 1330797 - RNA, 22 nt, Human
agaccagacuaggcgaggcggg

SEQ ID NO: 1330798 - RNA, 18 nt, Human
agacgccagguccggugg

SEQ ID NO: 1330799 - RNA, 18 nt, Human
agaggaaccagaccucau

SEQ ID NO: 1330800 - RNA, 22 nt, Human
agcugccgaaggccaagacgcc

SEQ ID NO: 1330801 - RNA, 18 nt, Human
aggcgaggcgggcggggc

SEQ ID NO: 1330802 - RNA, 23 nt, Human
agugaaugagcucucaggaggga

SEQ ID NO: 1330803 - RNA, 26 nt, Human
caaagacaccaucggaacuggagacc

SEQ ID NO: 1330804 - RNA, 21 nt, Human
cacaacaugaaagaaauggug

SEQ ID NO: 1330805 - RNA, 19 nt, Human
cacacuauggcugcccucu

SEQ ID NO: 1330806 - RNA, 21 nt, Human
cacccaccccgcaccggcgac

SEQ ID NO: 1330807 - RNA, 24 nt, Human
cacccaccccgcaccggcgacucc

SEQ ID NO: 1330808 - RNA, 21 nt, Human
caccgcucagccccuggggcu

SEQ ID NO: 1330809 - RNA, 19 nt, Human
cagaacccacaacaugaaa

SEQ ID NO: 1330810 - RNA, 22 nt, Human
cagagcccguggccaaggcggg

SEQ ID NO: 1330811 - RNA, 23 nt, Human
cagcacccaccccgcaccggcga

SEQ ID NO: 1330812 - RNA, 18 nt, Human
cagccccuggggcuggcu

SEQ ID NO: 1330813 - RNA, 24 nt, Human
caucaaagacaccaucggaacagc

SEQ ID NO: 1330814 - RNA, 18 nt, Human
ccccgcaccggcgacucc

SEQ ID NO: 1330815 - RNA, 22 nt, Human
cccgcagcacccaccccgcacc

SEQ ID NO: 1330816 - RNA, 19 nt, Human
ccucuagcuuggaaaugaa

SEQ ID NO: 1330817 - RNA, 20 nt, Human
ccugaacaccuuaggcuggu

SEQ ID NO: 1330818 - RNA, 21 nt, Human
cgaggccaggucuccagcugg

SEQ ID NO: 1330819 - RNA, 20 nt, Human
cgcagcacccaccccgcacc

SEQ ID NO: 1330820 - RNA, 21 nt, Human
cucccagaacccacaacauga

SEQ ID NO: 1330821 - RNA, 21 nt, Human
cucucaggagggaggauggug

SEQ ID NO: 1330822 - RNA, 20 nt, Human
cuggccuccagagcccgugg

SEQ ID NO: 1330823 - RNA, 19 nt, Human
gaaucggcucuggaagcua

SEQ ID NO: 1330824 - RNA, 18 nt, Human
gagcccguggccaaggcg

SEQ ID NO: 1330825 - RNA, 20 nt, Human
gagcgcagcgggcggcgagc

SEQ ID NO: 1330826 - RNA, 22 nt, Human
gaggaggcgcguccggccuucc

SEQ ID NO: 1330827 - RNA, 20 nt, Human
gcgacggagccgggaucggu

SEQ ID NO: 1330828 - RNA, 22 nt, Human
gcggacgguugaccaccagcca

SEQ ID NO: 1330829 - RNA, 19 nt, Human
ggcccacaguggacuuggu

SEQ ID NO: 1330830 - RNA, 18 nt, Human
ggcggggcggagugaaug

SEQ ID NO: 1330831 - RNA, 19 nt, Human
gggcggcgagcgggaggca

SEQ ID NO: 1330832 - RNA, 18 nt, Human
ggggcugcggcaagaagc

SEQ ID NO: 1330833 - RNA, 18 nt, Human
gucccacgaggcacugcg

SEQ ID NO: 1330834 - RNA, 19 nt, Human
uacaaccacugcacuaccu

SEQ ID NO: 1330835 - RNA, 23 nt, Human
ucagcccaacaucaaagacacca

SEQ ID NO: 1330836 - RNA, 20 nt, Human
uccugaacaccuuaggcugg

SEQ ID NO: 1330837 - RNA, 21 nt, Human
ucggugccucagcguucgggc

SEQ ID NO: 1330838 - RNA, 19 nt, Human
ucuggugcggagagggccc

SEQ ID NO: 1330839 - RNA, 19 nt, Human
ugacaugguccggugugac

SEQ ID NO: 1330840 - RNA, 20 nt, Human
ugacaugguccggugugacg

SEQ ID NO: 1330841 - RNA, 20 nt, Human
ugaggagcgcagcgggcggc

SEQ ID NO: 1330842 - RNA, 23 nt, Human
ugcccucugggcucccagaaccc

SEQ ID NO: 1330843 - RNA, 20 nt, Human
ugccgaaggccaagacgcca

SEQ ID NO: 1330844 - RNA, 24 nt, Human
ugccgaaggccaagacgccagguc

SEQ ID NO: 1330845 - RNA, 21 nt, Human
uggccaaggcgggccucgcgg

SEQ ID NO: 1330846 - RNA, 20 nt, Human
uggggcgagaccagacuagg

SEQ ID NO: 1330847 - RNA, 19 nt, Human
ugggguggacgugcccacc

SEQ ID NO: 1330848 - RNA, 25 nt, Human
uggugcggagagggcccacagugga

SEQ ID NO: 1330849 - RNA, 25 nt, Human
ugguggggcugcggcaagaagcggg

SEQ ID NO: 1330850 - RNA, 18 nt, Human
uguuucuuuacuuccucc

SEQ ID NO: 1330851 - RNA, 28 nt, Human
aaagaggacagaugguuuuccuuaauag

SEQ ID NO: 1330852 - RNA, 19 nt, Human
agagcucuuuucauuugac

SEQ ID NO: 1330853 - RNA, 24 nt, Human
aggugcagucuucaguuugggcug

SEQ ID NO: 1330854 - RNA, 19 nt, Human
auggagacacuguuggugg

SEQ ID NO: 1330855 - RNA, 18 nt, Human
cacugcugauguaguggu

SEQ ID NO: 1330856 - RNA, 21 nt, Human
cagaugggacagaagguucuu

SEQ ID NO: 1330857 - RNA, 20 nt, Human
cagggggcugcuuggccuug

SEQ ID NO: 1330858 - RNA, 23 nt, Human
ccacagagacuacagacaguggu

SEQ ID NO: 1330859 - RNA, 26 nt, Human
ccucagggggcugcuuggccuuggcu

SEQ ID NO: 1330860 - RNA, 21 nt, Human
cuagagcucuuuucauuugac

SEQ ID NO: 1330861 - RNA, 21 nt, Human
cugcagagguuuuccagaucc

SEQ ID NO: 1330862 - RNA, 21 nt, Human
cuuugcucucugaacugggac

SEQ ID NO: 1330863 - RNA, 23 nt, Human
cuuuuuaggcucaggugccuugg

SEQ ID NO: 1330864 - RNA, 22 nt, Human
gaacugggaccaggaugugaaa

SEQ ID NO: 1330865 - RNA, 20 nt, Human
ggaauaucagguuuuguugu

SEQ ID NO: 1330866 - RNA, 23 nt, Human
gggauuaaaaccacagagacuac

SEQ ID NO: 1330867 - RNA, 19 nt, Human
gugcagucuucaguuuggg

SEQ ID NO: 1330868 - RNA, 21 nt, Human
uaaaaccacagagacuacaga

SEQ ID NO: 1330869 - RNA, 18 nt, Human
uacaaggucagugguugg

SEQ ID NO: 1330870 - RNA, 19 nt, Human
uaccuccguuaaaugagga

SEQ ID NO: 1330871 - RNA, 18 nt, Human
uagaaucaaaugggcuga

SEQ ID NO: 1330872 - RNA, 22 nt, Human
ucagggggcugcuuggccuugg

SEQ ID NO: 1330873 - RNA, 19 nt, Human
ucagguuuuguuguugcug

SEQ ID NO: 1330874 - RNA, 19 nt, Human
ucugccucagggggcugcu

SEQ ID NO: 1330875 - RNA, 19 nt, Human
ucugcuguggcugugggga

SEQ ID NO: 1330876 - RNA, 22 nt, Human
ucuuugggaggggcuggcuugg

SEQ ID NO: 1330877 - RNA, 18 nt, Human
ugacaguucaaacagagc

SEQ ID NO: 1330878 - RNA, 22 nt, Human
ugaugaugaagauacaagguca

SEQ ID NO: 1330879 - RNA, 23 nt, Human
ugcaacagaaguucagugguauu

SEQ ID NO: 1330880 - RNA, 22 nt, Human
ugcuuugguuuaucaucagcaa

SEQ ID NO: 1330881 - RNA, 18 nt, Human
uggaaaacucugugaggg

SEQ ID NO: 1330882 - RNA, 19 nt, Human
uggagccagauccccgccu

SEQ ID NO: 1330883 - RNA, 22 nt, Human
uggcuuuuuaggcucaggugcc

SEQ ID NO: 1330884 - RNA, 20 nt, Human
ugggaggggcuggcuuggac

SEQ ID NO: 1330885 - RNA, 21 nt, Human
uggggaugauuugcucacugc

SEQ ID NO: 1330886 - RNA, 20 nt, Human
uuugacaguucaaacagagc

SEQ ID NO: 1330887 - RNA, 18 nt, Human
uuuggagcuuggaauauc

SEQ ID NO: 1330888 - RNA, 20 nt, Human
uuugggcuggggugaugacg

SEQ ID NO: 1330889 - RNA, 23 nt, Human
auauauaaaagcaaucaaucaaa

SEQ ID NO: 1330890 - RNA, 22 nt, Human
uacagaggcacuucaacagcua

SEQ ID NO: 1330891 - RNA, 19 nt, Human
aaaaagacuucugcacccc

SEQ ID NO: 1330892 - RNA, 20 nt, Human
aaaccccccagacaaggggg

SEQ ID NO: 1330893 - RNA, 20 nt, Human
aagaucacggaaaaaucacc

SEQ ID NO: 1330894 - RNA, 19 nt, Human
acgcaaucgcaggugggga

SEQ ID NO: 1330895 - RNA, 21 nt, Human
acuccaagaagccacugaggg

SEQ ID NO: 1330896 - RNA, 22 nt, Human
agguggggaacucggccugggc

SEQ ID NO: 1330897 - RNA, 24 nt, Human
aggugguugagagcacagucacag

SEQ ID NO: 1330898 - RNA, 20 nt, Human
auaaaaaccccccagacaag

SEQ ID NO: 1330899 - RNA, 23 nt, Human
auaaaaagacuucugcaccccca

SEQ ID NO: 1330900 - RNA, 22 nt, Human
auacauauauaugauaugcgca

SEQ ID NO: 1330901 - RNA, 20 nt, Human
auagagauaaaaagacuucu

SEQ ID NO: 1330902 - RNA, 21 nt, Human
auaugcgcaucuauauaugua

SEQ ID NO: 1330903 - RNA, 18 nt, Human
caaaagcaccacagagac

SEQ ID NO: 1330904 - RNA, 21 nt, Human
cacagagacagcucgggccag

SEQ ID NO: 1330905 - RNA, 27 nt, Human
caccacagagacagcucgggccaacuu

SEQ ID NO: 1330906 - RNA, 27 nt, Human
cacugagggugggugugaguggguucu

SEQ ID NO: 1330907 - RNA, 21 nt, Human
cagcagacucuuggugggugu

SEQ ID NO: 1330908 - RNA, 22 nt, Human
ccacagagacagcucgggccag

SEQ ID NO: 1330909 - RNA, 23 nt, Human
ccaggcccgacgcugagguacgc

SEQ ID NO: 1330910 - RNA, 19 nt, Human
ccccagacaaggggggggg

SEQ ID NO: 1330911 - RNA, 24 nt, Human
ccccccagacaagggggggggaca

SEQ ID NO: 1330912 - RNA, 24 nt, Human
cccccgaagacucaaucuugauuu

SEQ ID NO: 1330913 - RNA, 22 nt, Human
cccgacagccguaguuucuucu

SEQ ID NO: 1330914 - RNA, 19 nt, Human
cccgcccccagguaugagg

SEQ ID NO: 1330915 - RNA, 21 nt, Human
ccgacagccguaguuucuucu

SEQ ID NO: 1330916 - RNA, 22 nt, Human
ccucccuccucugaauggaagc

SEQ ID NO: 1330917 - RNA, 23 nt, Human
ccuccuguccucccuccucugaa

SEQ ID NO: 1330918 - RNA, 18 nt, Human
ccucugaauggaagcagg

SEQ ID NO: 1330919 - RNA, 24 nt, Human
cuccaagaagccacugaggguggg

SEQ ID NO: 1330920 - RNA, 21 nt, Human
cucggccugggcucucuuggc

SEQ ID NO: 1330921 - RNA, 21 nt, Human
cugcacccccaacccgccccc

SEQ ID NO: 1330922 - RNA, 22 nt, Human
cuuaagaggugacuccaagaag

SEQ ID NO: 1330923 - RNA, 21 nt, Human
gaagcaggugguugagagcac

SEQ ID NO: 1330924 - RNA, 20 nt, Human
gaaguggggguaagggaggg

SEQ ID NO: 1330925 - RNA, 20 nt, Human
gacuccaagaagccacugag

SEQ ID NO: 1330926 - RNA, 18 nt, Human
gagggcaaaagcaccaca

SEQ ID NO: 1330927 - RNA, 20 nt, Human
gcacccccaacccgccccca

SEQ ID NO: 1330928 - RNA, 20 nt, Human
gggaacggguagcaaagggg

SEQ ID NO: 1330929 - RNA, 19 nt, Human
gggaaguggggguaaggga

SEQ ID NO: 1330930 - RNA, 28 nt, Human
guacuuaagaggugacuccaagaagcca

SEQ ID NO: 1330931 - RNA, 19 nt, Human
uaaaaacaaagagaaaaua

SEQ ID NO: 1330932 - RNA, 24 nt, Human
uagaguuuuaaaaacaaagagaaa

SEQ ID NO: 1330933 - RNA, 25 nt, Human
uauagagauaaaaagacuucugcac

SEQ ID NO: 1330934 - RNA, 23 nt, Human
uauuuguucgacgcaaucgcagg

SEQ ID NO: 1330935 - RNA, 21 nt, Human
ucacggaaaaaucacccgaca

SEQ ID NO: 1330936 - RNA, 21 nt, Human
ucucuuggcagguguguccag

SEQ ID NO: 1330937 - RNA, 21 nt, Human
ucugcacccccaacccgcccc

SEQ ID NO: 1330938 - RNA, 23 nt, Human
ugacuccaagaagccacugaggg

SEQ ID NO: 1330939 - RNA, 21 nt, Human
ugagggcaaaagcaccacaga

SEQ ID NO: 1330940 - RNA, 20 nt, Human
ugagggugggugugaguggg

SEQ ID NO: 1330941 - RNA, 18 nt, Human
ugcacccccaacccgccc

SEQ ID NO: 1330942 - RNA, 21 nt, Human
ugcacccccaacccgccccca

SEQ ID NO: 1330943 - RNA, 24 nt, Human
ugcuugggggaacggguagcaaag

SEQ ID NO: 1330944 - RNA, 23 nt, Human
uggaccauaaauacauauauaug

SEQ ID NO: 1330945 - RNA, 18 nt, Human
uggcagguguguccagca

SEQ ID NO: 1330946 - RNA, 18 nt, Human
uggggaaguggggguaag

SEQ ID NO: 1330947 - RNA, 22 nt, Human
uggggaaguggggguaagggag

SEQ ID NO: 1330948 - RNA, 23 nt, Human
uggggccagaucccaagugagua

SEQ ID NO: 1330949 - RNA, 21 nt, Human
ugggggaacggguagcaaagg

SEQ ID NO: 1330950 - RNA, 22 nt, Human
uuaagaucacggaaaaaucacc

SEQ ID NO: 1330951 - RNA, 18 nt, Human
uucugagguuuggaccau

SEQ ID NO: 1330952 - RNA, 22 nt, Human
uucugcacccccaacccgcccc

SEQ ID NO: 1330953 - RNA, 19 nt, Human
uugagagcacagucacagc

SEQ ID NO: 1330954 - RNA, 21 nt, Human
uugggggaacggguagcaaag

SEQ ID NO: 1330955 - RNA, 27 nt, Human
aaacuauagagugaagauaucagccaa

SEQ ID NO: 1330956 - RNA, 24 nt, Human
aaauagccugauaaauuacuagac

SEQ ID NO: 1330957 - RNA, 24 nt, Human
aaauuacuagacagccugcacuca

SEQ ID NO: 1330958 - RNA, 20 nt, Human
aacacaaagaugacaccagg

SEQ ID NO: 1330959 - RNA, 22 nt, Human
aacauaacaauuuaccaaacug

SEQ ID NO: 1330960 - RNA, 23 nt, Human
aagaugacaccaggaaaagauaa

SEQ ID NO: 1330961 - RNA, 22 nt, Human
aagcacuucaucaguagaaaua

SEQ ID NO: 1330962 - RNA, 20 nt, Human
aagcagucuucuucacaaug

SEQ ID NO: 1330963 - RNA, 22 nt, Human
acaaagauuuguuucucagaca

SEQ ID NO: 1330964 - RNA, 18 nt, Human
acacaauuuuuuuuguca

SEQ ID NO: 1330965 - RNA, 21 nt, Human
agcaagauccaaguucccuca

SEQ ID NO: 1330966 - RNA, 21 nt, Human
agcaccuaaguguugaggggu

SEQ ID NO: 1330967 - RNA, 24 nt, Human
agcaucuauuccauaaacuguacu

SEQ ID NO: 1330968 - RNA, 19 nt, Human
agggguuaaauaaccagca

SEQ ID NO: 1330969 - RNA, 18 nt, Human
auaagcagucuucuucac

SEQ ID NO: 1330970 - RNA, 19 nt, Human
augaaaucagacagcaaca

SEQ ID NO: 1330971 - RNA, 25 nt, Human
cacaguaucuucacucugagauaag

SEQ ID NO: 1330972 - RNA, 20 nt, Human
cagaugucauaauuguuaac

SEQ ID NO: 1330973 - RNA, 19 nt, Human
cagcaagauccaaguuccc

SEQ ID NO: 1330974 - RNA, 24 nt, Human
ccuugcugcaagcugguuuucuug

SEQ ID NO: 1330975 - RNA, 26 nt, Human
cuccuuuagcuucaaaguuggagggu

SEQ ID NO: 1330976 - RNA, 24 nt, Human
cuuuuauuuccaauucagugacug

SEQ ID NO: 1330977 - RNA, 27 nt, Human
guaaaguuguuccauuguggccuaaaa

SEQ ID NO: 1330978 - RNA, 24 nt, Human
gucauguugcaaccuuuuauuucc

SEQ ID NO: 1330979 - RNA, 19 nt, Human
gugaagauaucagccacag

SEQ ID NO: 1330980 - RNA, 23 nt, Human
guugcaaccuuuuauuuccaauu

SEQ ID NO: 1330981 - RNA, 23 nt, Human
uaaagaguuucccuccccaaucu

SEQ ID NO: 1330982 - RNA, 21 nt, Human
uaugaaaucagacagcaacaa

SEQ ID NO: 1330983 - RNA, 27 nt, Human
ucagguucuuuuaaccucuuuuuaauu

SEQ ID NO: 1330984 - RNA, 19 nt, Human
ucauguugcaaccuuuuau

SEQ ID NO: 1330985 - RNA, 23 nt, Human
ugaaaucagacagcaacaaugac

SEQ ID NO: 1330986 - RNA, 19 nt, Human
ugaagcacuucaucaguag

SEQ ID NO: 1330987 - RNA, 19 nt, Human
ugaauggugcugguaaaua

SEQ ID NO: 1330988 - RNA, 20 nt, Human
ugacaaguuaugaaguaguu

SEQ ID NO: 1330989 - RNA, 21 nt, Human
uggcagcaagauccaaguucc

SEQ ID NO: 1330990 - RNA, 21 nt, Human
ugggcaacacaaagaugacac

SEQ ID NO: 1330991 - RNA, 23 nt, Human
uugcugcaagcugguuuucuuga

SEQ ID NO: 1330992 - RNA, 20 nt, Human
uuugaacuaugauuuaguag

SEQ ID NO: 1330993 - RNA, 22 nt, Human
uuugaacuaugauuuaguagcc

SEQ ID NO: 1330994 - RNA, 22 nt, Human
uuuuuuugucauguugcaaccu

SEQ ID NO: 1330995 - RNA, 23 nt, Human
aaaauacgaaaacaaaauuagcc

SEQ ID NO: 1330996 - RNA, 23 nt, Human
aaaauagcauuaucaaaauggca

SEQ ID NO: 1330997 - RNA, 18 nt, Human
aaagcagcacaguguaac

SEQ ID NO: 1330998 - RNA, 24 nt, Human
aacagagcgagacucugucucaaa

SEQ ID NO: 1330999 - RNA, 19 nt, Human
aacauggugaaaccccguc

SEQ ID NO: 1331000 - RNA, 20 nt, Human
aacauggugaaaccccgucu

SEQ ID NO: 1331001 - RNA, 21 nt, Human
aacauggugaaaccccgucuc

SEQ ID NO: 1331002 - RNA, 21 nt, Human
aacuaacuucuagugaaccua

SEQ ID NO: 1331003 - RNA, 21 nt, Human
aagagaaagacagagaaagga

SEQ ID NO: 1331004 - RNA, 24 nt, Human
aauaaaugcugaugcuccacacaa

SEQ ID NO: 1331005 - RNA, 24 nt, Human
aaucuggguaacagagcgagacuc

SEQ ID NO: 1331006 - RNA, 18 nt, Human
acacagugauaacuacuc

SEQ ID NO: 1331007 - RNA, 25 nt, Human
acagaacuuuguuguuaacugugga

SEQ ID NO: 1331008 - RNA, 21 nt, Human
acagagcgagacucugucuca

SEQ ID NO: 1331009 - RNA, 24 nt, Human
acagagcgagacucugucucaaaa

SEQ ID NO: 1331010 - RNA, 30 nt, Human; identical to SEQ ID NO: 778035

SEQ ID NO: 1331011 - RNA, 24 nt, Human
acaguaaaaagaucacuacauaga

SEQ ID NO: 1331012 - RNA, 21 nt, Human
acccaaggagaaagcaucagg

SEQ ID NO: 1331013 - RNA, 22 nt, Human
accccgucucuacuaaaaauac

SEQ ID NO: 1331014 - RNA, 28 nt, Human
acucugucucaaaaaaaaaaaaaaaaaa

SEQ ID NO: 1331015 - RNA, 18 nt, Human
acugcacuccaaucuggg

SEQ ID NO: 1331016 - RNA, 24 nt, Human
acugcacuccaaucuggguaacag

SEQ ID NO: 1331017 - RNA, 23 nt, Human
acuuauuuugcuuaauacaagug

SEQ ID NO: 1331018 - RNA, 20 nt, Human
agaaaaugcaaaauuuagca

SEQ ID NO: 1331019 - RNA, 21 nt, Human
agagaaaaugcaaaauuuagc

SEQ ID NO: 1331020 - RNA, 21 nt, Human
agagaaagacagagaaaggaa

SEQ ID NO: 1331021 - RNA, 19 nt, Human
agaggaaaugcuggguuuc

SEQ ID NO: 1331022 - RNA, 22 nt, Human
agcaucaacaaaacccagcacc

SEQ ID NO: 1331023 - RNA, 23 nt, Human
agcucugacaccucacuaccucu

SEQ ID NO: 1331024 - RNA, 23 nt, Human
agcuuuugggaggcugaggcggg

SEQ ID NO: 1331025 - RNA, 23 nt, Human
aggcauuuaaaaagaacuuaauc

SEQ ID NO: 1331026 - RNA, 24 nt, Human
aggcggagcuugcagugagcggag

SEQ ID NO: 1331027 - RNA, 24 nt, Human
aggcgggagaguggcgugaacccg

SEQ ID NO: 1331028 - RNA, 24 nt, Human
aggcgggcggaucacgaggucaag

SEQ ID NO: 1331029 - RNA, 21 nt, Human
aggcugaggcgggcggaucac

SEQ ID NO: 1331030 - RNA, 22 nt, Human
aggcugaggcgggcggaucacg

SEQ ID NO: 1331031 - RNA, 21 nt, Human
agggagcuuuguguaagugcu

SEQ ID NO: 1331032 - RNA, 22 nt, Human
aucaacaaaacccagcaccaag

SEQ ID NO: 1331033 - RNA, 19 nt, Human
aucccucucauccucuuuc

SEQ ID NO: 1331034 - RNA, 21 nt, Human
auccuggccaacauggugaaa

SEQ ID NO: 1331035 - RNA, 24 nt, Human
aucgcgccacugcacuccaaucug

SEQ ID NO: 1331036 - RNA, 21 nt, Human
augcaaaauuuagcauguaau

SEQ ID NO: 1331037 - RNA, 23 nt, Human
augcuggguuucugggugcuggc

SEQ ID NO: 1331038 - RNA, 23 nt, Human
auggcgggcgccuguagucccag

SEQ ID NO: 1331039 - RNA, 18 nt, Human
auuaaggaacuggcucug

SEQ ID NO: 1331040 - RNA, 20 nt, Human
auugcacucuugcuuugggc

SEQ ID NO: 1331041 - RNA, 24 nt, Human
auuuagcauguaauuguacugugu

SEQ ID NO: 1331042 - RNA, 22 nt, Human
caaaagaaaaagaccguguggc

SEQ ID NO: 1331043 - RNA, 18 nt, Human
caaaauggcaaaggcaca

SEQ ID NO: 1331044 - RNA, 25 nt, Human
caaagcagcacaguguaacagaggc

SEQ ID NO: 1331045 - RNA, 24 nt, Human
caacauggugaaaccccgucucua

SEQ ID NO: 1331046 - RNA, 24 nt, Human
caagaccauccuggccaacauggu

SEQ ID NO: 1331047 - RNA, 21 nt, Human
cacaguaguauugggacaaga

SEQ ID NO: 1331048 - RNA, 23 nt, Human
cacgccuguaaucccagcuuuug

SEQ ID NO: 1331049 - RNA, 23 nt, Human
cacuccaaucuggguaacagagc

SEQ ID NO: 1331050 - RNA, 23 nt, Human
cacugcacuccaaucuggguaac

SEQ ID NO: 1331051 - RNA, 24 nt, Human
cacugcacuccaaucuggguaaca

SEQ ID NO: 1331052 - RNA, 21 nt, Human
cagcaucaacaaaacccagca

SEQ ID NO: 1331053 - RNA, 22 nt, Human
cagcaucaacaaaacccagcac

SEQ ID NO: 1331054 - RNA, 21 nt, Human
cagcuaaucuaccaggaguac

SEQ ID NO: 1331055 - RNA, 21 nt, Human
cagcuuuugggaggcugaggc

SEQ ID NO: 1331056 - RNA, 23 nt, Human
cagcuuuugggaggcugaggcgg

SEQ ID NO: 1331057 - RNA, 18 nt, Human
ccacugcacuccaaucug

SEQ ID NO: 1331058 - RNA, 20 nt, Human
ccacugcacuccaaucuggg

SEQ ID NO: 1331059 - RNA, 24 nt, Human
ccacugcacuccaaucuggguaac

SEQ ID NO: 1331060 - RNA, 18 nt, Human
ccagaggaguaagauaau

SEQ ID NO: 1331061 - RNA, 23 nt, Human
ccagcaccaaguguuuugguggc

SEQ ID NO: 1331062 - RNA, 20 nt, Human
ccagcaucaacaaaacccag

SEQ ID NO: 1331063 - RNA, 18 nt, Human
ccagggacacagggaaga

SEQ ID NO: 1331064 - RNA, 24 nt, Human
ccaucccucucauccucuuucuca

SEQ ID NO: 1331065 - RNA, 23 nt, Human
ccccugagggguagugguuucug

SEQ ID NO: 1331066 - RNA, 19 nt, Human
ccucucauccucuuucuca

SEQ ID NO: 1331067 - RNA, 22 nt, Human
ccuggccaacauggugaaaccc

SEQ ID NO: 1331068 - RNA, 23 nt, Human
ccuggccaacauggugaaacccc

SEQ ID NO: 1331069 - RNA, 24 nt, Human
ccuggccaacauggugaaaccccg

SEQ ID NO: 1331070 - RNA, 19 nt, Human
ccuguagucccagcuaguc

SEQ ID NO: 1331071 - RNA, 21 nt, Human
ccuguagucccagcuagucgg

SEQ ID NO: 1331072 - RNA, 22 nt, Human
ccuguagucccagcuagucggg

SEQ ID NO: 1331073 - RNA, 21 nt, Human
cgaaaacaaaauuagccgggc

SEQ ID NO: 1331074 - RNA, 22 nt, Human
cgccuguaaucccagcuuuugg

SEQ ID NO: 1331075 - RNA, 23 nt, Human
cgccuguaaucccagcuuuuggg

SEQ ID NO: 1331076 - RNA, 21 nt, Human
cuacaaaagaaaaagaccgug

SEQ ID NO: 1331077 - RNA, 23 nt, Human
cucaaaaaaaaaaaaaaaaaaaa

SEQ ID NO: 1331078 - RNA, 20 nt, Human
cucacgccuguaaucccagc

SEQ ID NO: 1331079 - RNA, 20 nt, Human
cucacgccuguaaucccagc

SEQ ID NO: 1331080 - RNA, 20 nt, Human
cuccaccuuaaugcuggaac

SEQ ID NO: 1331081 - RNA, 19 nt, Human
cucugucucaaaaaaaaaa

SEQ ID NO: 1331082 - RNA, 19 nt, Human
cugaugcuuggccgggcgc

SEQ ID NO: 1331083 - RNA, 23 nt, Human
cugauuuacucacuuaaagcuuc

SEQ ID NO: 1331084 - RNA, 21 nt, Human
cuggguaacagagcgagacuc

SEQ ID NO: 1331085 - RNA, 25 nt, Human
cugugaaaaaaaggaagggaggugu

SEQ ID NO: 1331086 - RNA, 21 nt, Human
cuguuuaagcaaagcagcaca

SEQ ID NO: 1331087 - RNA, 18 nt, Human
cuuaauaaauucuuaguu

SEQ ID NO: 1331088 - RNA, 21 nt, Human
cuugcagugagcggagaucgc

SEQ ID NO: 1331089 - RNA, 19 nt, Human
cuuuguguaagugcucugc

SEQ ID NO: 1331090 - RNA, 21 nt, Human
gagaaagacagagaaaggaag

SEQ ID NO: 1331091 - RNA, 20 nt, Human
gcaaagacagcugaggggaa

SEQ ID NO: 1331092 - RNA, 24 nt, Human
gcaaagcagcacaguguaacagag

SEQ ID NO: 1331093 - RNA, 24 nt, Human
gccaacauggugaaaccccgucuc

SEQ ID NO: 1331094 - RNA, 24 nt, Human
gccacugcacuccaaucuggguaa

SEQ ID NO: 1331095 - RNA, 23 nt, Human
gccuguagucccagcuagucggg

SEQ ID NO: 1331096 - RNA, 20 nt, Human
gcggagaucgcgccacugca

SEQ ID NO: 1331097 - RNA, 23 nt, Human
gcugugcagaaauuuucuuggag

SEQ ID NO: 1331098 - RNA, 24 nt, Human
gcuuugggcuaaaaccuugugaag

SEQ ID NO: 1331099 - RNA, 25 nt, Human
gcuuuuggcaucuguagaacucuaa

SEQ ID NO: 1331100 - RNA, 20 nt, Human
ggaaaggacaagaagcuaca

SEQ ID NO: 1331101 - RNA, 23 nt, Human
ggagaucgcgccacugcacucca

SEQ ID NO: 1331102 - RNA, 18 nt, Human
ggagcuugcagugagcgg

SEQ ID NO: 1331103 - RNA, 24 nt, Human
ggagcuugcagugagcggagaucg

SEQ ID NO: 1331104 - RNA, 20 nt, Human
ggaguucuccaccuuaaugc

SEQ ID NO: 1331105 - RNA, 21 nt, Human
ggccgggcgcgguggcucacg

SEQ ID NO: 1331106 - RNA, 23 nt, Human
ggcgcgguggcucacgccuguaa

SEQ ID NO: 1331107 - RNA, 18 nt, Human
ggcgugauggcgggcgcc

SEQ ID NO: 1331108 - RNA, 21 nt, Human
ggcucacgccuguaaucccag

SEQ ID NO: 1331109 - RNA, 20 nt, Human
gggacaagaagcaaaacauu

SEQ ID NO: 1331110 - RNA, 19 nt, Human
gggcagcaccccacucaga

SEQ ID NO: 1331111 - RNA, 19 nt, Human
gggcggaucacgaggucaa

SEQ ID NO: 1331112 - RNA, 24 nt, Human
gggcgugauggcgggcgccuguag

SEQ ID NO: 1331113 - RNA, 23 nt, Human
gguggcucacgccuguaauccca

SEQ ID NO: 1331114 - RNA, 24 nt, Human
gguggcucacgccuguaaucccag

SEQ ID NO: 1331115 - RNA, 18 nt, Human
gucaagagaucaagacca

SEQ ID NO: 1331116 - RNA, 19 nt, Human
gucacauuauaccagcauc

SEQ ID NO: 1331117 - RNA, 20 nt, Human
gugcucgcuacagccaggcc

SEQ ID NO: 1331118 - RNA, 18 nt, Human
uaaaaaagggaagggagg

SEQ ID NO: 1331119 - RNA, 26 nt, Human
uaaaaauacgaaaacaaaauuagccg

SEQ ID NO: 1331120 - RNA, 21 nt, Human
uaaaauaaaugcugaugcucc

SEQ ID NO: 1331121 - RNA, 23 nt, Human
uaaagaaguagaaaaguugucag

SEQ ID NO: 1331122 - RNA, 25 nt, Human
uaacuaacuucuagugaaccuagau

SEQ ID NO: 1331123 - RNA, 19 nt, Human
uaauuugcauuucuaaggc

SEQ ID NO: 1331124 - RNA, 26 nt, Human
uacaaaagaaaaagaccguguggcaa

SEQ ID NO: 1331125 - RNA, 18 nt, Human
uagaaaaaugagcuaggu

SEQ ID NO: 1331126 - RNA, 21 nt, Human
uagaaaaaugagcuagguuua

SEQ ID NO: 1331127 - RNA, 23 nt, Human
uagaggaaaugcuggguuucugg

SEQ ID NO: 1331128 - RNA, 23 nt, Human
uagcggaaaguucauuucucugu

SEQ ID NO: 1331129 - RNA, 19 nt, Human
uagucccagcuagucggga

SEQ ID NO: 1331130 - RNA, 23 nt, Human
uauauagagaaaaugcaaaauuu

SEQ ID NO: 1331131 - RNA, 20 nt, Human
uauguccaaagagggagcuu

SEQ ID NO: 1331132 - RNA, 24 nt, Human
uauuucauucaaauaauuauguuu

SEQ ID NO: 1331133 - RNA, 23 nt, Human
ucaaaaaaaaaaaaaaaaaaaaa

SEQ ID NO: 1331134 - RNA, 20 nt, Human
ucaagaccauccuggccaac

SEQ ID NO: 1331135 - RNA, 22 nt, Human
ucaagaccauccuggccaacau

SEQ ID NO: 1331136 - RNA, 19 nt, Human
ucacagcugaccaucccuc

SEQ ID NO: 1331137 - RNA, 24 nt, Human
ucacgaggucaagagaucaagacc

SEQ ID NO: 1331138 - RNA, 22 nt, Human
ucagaauauaaaggcacaguca

SEQ ID NO: 1331139 - RNA, 19 nt, Human
uccagaugugcaacaaggc

SEQ ID NO: 1331140 - RNA, 23 nt, Human
ucgacgugggguauguccaaaga

SEQ ID NO: 1331141 - RNA, 18 nt, Human
ucuaccaggaguacccag

SEQ ID NO: 1331142 - RNA, 24 nt, Human
ucuccuagaaaaaugagcuagguu

SEQ ID NO: 1331143 - RNA, 22 nt, Human
ucucuacuaaaaauacgaaaac

SEQ ID NO: 1331144 - RNA, 18 nt, Human
ucuggguaacagagcgag

SEQ ID NO: 1331145 - RNA, 23 nt, Human
ucugucucaaaaaaaaaaaaaaa

SEQ ID NO: 1331146 - RNA, 23 nt, Human
ucuuucucacucucccuuuuugg

SEQ ID NO: 1331147 - RNA, 22 nt, Human
ugaaaaaaaggaagggaggugu

SEQ ID NO: 1331148 - RNA, 19 nt, Human
ugaagcaaagacagcugag

SEQ ID NO: 1331149 - RNA, 20 nt, Human
ugagaggggaaaagcugauu

SEQ ID NO: 1331150 - RNA, 22 nt, Human
ugagcggagaucgcgccacugc

SEQ ID NO: 1331151 - RNA, 24 nt, Human
ugaggcgggagaguggcgugaacc

SEQ ID NO: 1331152 - RNA, 24 nt, Human
ugaggcgggcggaucacgagguca

SEQ ID NO: 1331153 - RNA, 18 nt, Human
ugauggaaaguacagcuu

SEQ ID NO: 1331154 - RNA, 18 nt, Human
ugauggacuaacccucca

SEQ ID NO: 1331155 - RNA, 24 nt, Human
ugauggcgggcgccuguaguccca

SEQ ID NO: 1331156 - RNA, 18 nt, Human
ugcagaaauuuucuugga

SEQ ID NO: 1331157 - RNA, 18 nt, Human
ugcucgcuacagccaggc

SEQ ID NO: 1331158 - RNA, 20 nt, Human
ugcuuugcauauaucuuaaa

SEQ ID NO: 1331159 - RNA, 19 nt, Human
uggaaaguacagcuuuugg

SEQ ID NO: 1331160 - RNA, 21 nt, Human
uggaaccagagaggaaggagc

SEQ ID NO: 1331161 - RNA, 25 nt, Human
uggaaccagagaggaaggagcucca

SEQ ID NO: 1331162 - RNA, 19 nt, Human
uggacuaacccuccagagg

SEQ ID NO: 1331163 - RNA, 25 nt, Human
uggcaucuguagaacucuaauuuca

SEQ ID NO: 1331164 - RNA, 24 nt, Human
uggccaacauggugaaaccccguc

SEQ ID NO: 1331165 - RNA, 21 nt, Human
uggcucacgccuguaauccca

SEQ ID NO: 1331166 - RNA, 22 nt, Human
uggcucacgccuguaaucccag

SEQ ID NO: 1331167 - RNA, 18 nt, Human
ugggacaagaagcaaaac

SEQ ID NO: 1331168 - RNA, 19 nt, Human
ugggaggcugaggcgggcg

SEQ ID NO: 1331169 - RNA, 24 nt, Human
ugggaggcugaggcgggcggauca

SEQ ID NO: 1331170 - RNA, 24 nt, Human
uggggguaaaggugccuacaucuu

SEQ ID NO: 1331171 - RNA, 20 nt, Human
ugguugagggaaaugacaau

SEQ ID NO: 1331172 - RNA, 18 nt, Human
ugugaagcaaagacagcu

SEQ ID NO: 1331173 - RNA, 22 nt, Human
uuaaagaaguagaaaaguuguc

SEQ ID NO: 1331174 - RNA, 18 nt, Human
uucucuguggcuuuggga

SEQ ID NO: 1331175 - RNA, 19 nt, Human
uugcagugagcggagaucg

SEQ ID NO: 1331176 - RNA, 22 nt, Human
uugcagugagcggagaucgcgc

SEQ ID NO: 1331177 - RNA, 25 nt, Human
uugggaggcugaggcgggcggauca

SEQ ID NO: 1331178 - RNA, 18 nt, Human
uuuaauagaggaaaugcu

SEQ ID NO: 1331179 - RNA, 21 nt, Human
uuuaucugaaagcaaccccug

SEQ ID NO: 1331180 - RNA, 21 nt, Human
uuuuggucuucccucuucucc

SEQ ID NO: 1331181 - RNA, 21 nt, Human
cuggccugcuccagugcccug

SEQ ID NO: 1331182 - RNA, 21 nt, Human
uacgauguucuccuaguggug

SEQ ID NO: 1331183 - RNA, 21 nt, Human
caagguucaguucauccuuca

SEQ ID NO: 1331184 - RNA, 19 nt, Human
ccgggagcgccgccugagc

SEQ ID NO: 1331185 - RNA, 18 nt, Human
uagugaauuuucucuucu

SEQ ID NO: 1331186 - RNA, 21 nt, Human
uagugaauuuucucuucuuuu

SEQ ID NO: 1331187 - RNA, 21 nt, Human
ucaagauuugcaguacuguuc

SEQ ID NO: 1331188 - RNA, 23 nt, Human
ucaguucauccuucaacuucauc

SEQ ID NO: 1331189 - RNA, 22 nt, Human
acccccccuuuuccuccccaac

SEQ ID NO: 1331190 - RNA, 20 nt, Human
agugacagaaaaguaugaga

SEQ ID NO: 1331191 - RNA, 21 nt, Human
cacccccccuuuuccucccca

SEQ ID NO: 1331192 - RNA, 23 nt, Human
ccaccaaaauucuuguaaaugaa

SEQ ID NO: 1331193 - RNA, 20 nt, Human
ccccaaagucugcaaaacac

SEQ ID NO: 1331194 - RNA, 18 nt, Human
cccccuuuuccuccccaa

SEQ ID NO: 1331195 - RNA, 18 nt, Human
cggggcagcagcgcuagg

SEQ ID NO: 1331196 - RNA, 21 nt, Human
cggggcagcagcgcuagggcu

SEQ ID NO: 1331197 - RNA, 20 nt, Human
cugcccgggaccuggccacc

SEQ ID NO: 1331198 - RNA, 24 nt, Human
cuggccaccaggaagcggggcagc

SEQ ID NO: 1331199 - RNA, 20 nt, Human
cuugcagaagcuuccaggcc

SEQ ID NO: 1331200 - RNA, 22 nt, Human
gccaccaggaagcggggcagca

SEQ ID NO: 1331201 - RNA, 23 nt, Human
gccuucacccccccuuuuccucc

SEQ ID NO: 1331202 - RNA, 19 nt, Human
ggcaggcuuacagugacag

SEQ ID NO: 1331203 - RNA, 18 nt, Human
gugauucuugccuucacc

SEQ ID NO: 1331204 - RNA, 26 nt, Human
uacagugacagaaaaguaugagaaua

SEQ ID NO: 1331205 - RNA, 22 nt, Human
uagaccgcuccccaaagucugc

SEQ ID NO: 1331206 - RNA, 20 nt, Human
uagaugcccaccaaaauucu

SEQ ID NO: 1331207 - RNA, 29 nt, Human
ucacccccccuuuuccuccccaacgagaa

SEQ ID NO: 1331208 - RNA, 26 nt, Human
uccccaaagucugcaaaacacugccu

SEQ ID NO: 1331209 - RNA, 23 nt, Human
ucuugcucuggcauuccugcagg

SEQ ID NO: 1331210 - RNA, 19 nt, Human
ugacagaaaaguaugagaa

SEQ ID NO: 1331211 - RNA, 21 nt, Human
uguaaaugaagcaggacccga

SEQ ID NO: 1331212 - RNA, 25 nt, Human
uucacaaugaugaaccaucccuuuu

SEQ ID NO: 1331213 - RNA, 23 nt, Human
uucacccccccuuuuccucccca

SEQ ID NO: 1331214 - RNA, 25 nt, Human
uucacccccccuuuuccuccccaac

SEQ ID NO: 1331215 - RNA, 21 nt, Human
aaucuugccucucagucccac

SEQ ID NO: 1331216 - RNA, 20 nt, Human
aggaacacaggcacauucag

SEQ ID NO: 1331217 - RNA, 24 nt, Human
aggcacauucaggugccuuugcag

SEQ ID NO: 1331218 - RNA, 18 nt, Human
agggucaugguggacaug

SEQ ID NO: 1331219 - RNA, 19 nt, Human
auggacaggacaccugggg

SEQ ID NO: 1331220 - RNA, 24 nt, Human
caaaucuugccucucagucccaca

SEQ ID NO: 1331221 - RNA, 24 nt, Human
cacagaacccagacaccaaccugg

SEQ ID NO: 1331222 - RNA, 21 nt, Human
caccugggguggggaagggag

SEQ ID NO: 1331223 - RNA, 21 nt, Human
cauggcaagaauuugaaaaag

SEQ ID NO: 1331224 - RNA, 20 nt, Human
cauucaggugccuuugcaga

SEQ ID NO: 1331225 - RNA, 22 nt, Human
ccagacaccaaccuggacacag

SEQ ID NO: 1331226 - RNA, 21 nt, Human
ccagcagcacgcauguggcca

SEQ ID NO: 1331227 - RNA, 19 nt, Human
cccagacaccaaccuggac

SEQ ID NO: 1331228 - RNA, 24 nt, Human
ccccaccuccucauauuaugccua

SEQ ID NO: 1331229 - RNA, 18 nt, Human
ccucuauggagcaggaau

SEQ ID NO: 1331230 - RNA, 25 nt, Human
ccucucauggcaagaauuugaaaaa

SEQ ID NO: 1331231 - RNA, 18 nt, Human
ccugaccugaguggaggc

SEQ ID NO: 1331232 - RNA, 21 nt, Human
cgugaacaaaucuugccucuc

SEQ ID NO: 1331233 - RNA, 19 nt, Human
cucagccucaccucuaugg

SEQ ID NO: 1331234 - RNA, 20 nt, Human
cucagucccacacaaggcag

SEQ ID NO: 1331235 - RNA, 21 nt, Human
cucauggcaagaauuugaaaa

SEQ ID NO: 1331236 - RNA, 22 nt, Human
cuccagcagcacgcauguggcc

SEQ ID NO: 1331237 - RNA, 18 nt, Human
gaacaaaucuugccucuc

SEQ ID NO: 1331238 - RNA, 20 nt, Human
gaacacaggucagcaugagg

SEQ ID NO: 1331239 - RNA, 22 nt, Human
gggguggguuggucuccccacc

SEQ ID NO: 1331240 - RNA, 23 nt, Human
ggguggguuggucuccccaccuc

SEQ ID NO: 1331241 - RNA, 23 nt, Human
gucaggguuuuugaagucacaaa

SEQ ID NO: 1331242 - RNA, 23 nt, Human
gucaugguggacauggggguggg

SEQ ID NO: 1331243 - RNA, 22 nt, Human
gugaacaaaucuugccucucag

SEQ ID NO: 1331244 - RNA, 20 nt, Human
ucagaagagcuggacucaga

SEQ ID NO: 1331245 - RNA, 18 nt, Human
ucccugaggagggaacag

SEQ ID NO: 1331246 - RNA, 18 nt, Human
ugaccugaguggaggcug

SEQ ID NO: 1331247 - RNA, 19 nt, Human
ugacuucugguccugaccu

SEQ ID NO: 1331248 - RNA, 19 nt, Human
ugagggacucagaagagcu

SEQ ID NO: 1331249 - RNA, 21 nt, Human
ugagggacucagaagagcugg

SEQ ID NO: 1331250 - RNA, 21 nt, Human
ugggguggggaagggagcaca

SEQ ID NO: 1331251 - RNA, 24 nt, Human
uggguuggucuccccaccuccuca

SEQ ID NO: 1331252 - RNA, 19 nt, Human
ugguccugaccugagugga

SEQ ID NO: 1331253 - RNA, 18 nt, Human
ugucucucaaauuuuagg

SEQ ID NO: 1331254 - RNA, 23 nt, Human
aagaaaacguccugugagaggcc

SEQ ID NO: 1331255 - RNA, 21 nt, Human
aaucuugccucucagucccac

SEQ ID NO: 1331256 - RNA, 19 nt, Human
acagggucaugguggacac

SEQ ID NO: 1331257 - RNA, 21 nt, Human
agaaagagaagucaggguucu

SEQ ID NO: 1331258 - RNA, 19 nt, Human
agaggccaggaagguagca

SEQ ID NO: 1331259 - RNA, 20 nt, Human
agggucaugguggacacggg

SEQ ID NO: 1331260 - RNA, 22 nt, Human
augaacaaaucuugccucucag

SEQ ID NO: 1331261 - RNA, 24 nt, Human
caaaucuugccucucagucccaca

SEQ ID NO: 1331262 - RNA, 21 nt, Human
caugaacaaaucuugccucuc

SEQ ID NO: 1331263 - RNA, 23 nt, Human
cucacauuaugccuauagggaca

SEQ ID NO: 1331264 - RNA, 20 nt, Human
cucagucccacacaaggcag

SEQ ID NO: 1331265 - RNA, 21 nt, Human
gaacagggucaugguggacac

SEQ ID NO: 1331266 - RNA, 25 nt, Human
gaauguaggucaguguggggaacag

SEQ ID NO: 1331267 - RNA, 19 nt, Human
gggaaggaauguaggucag

SEQ ID NO: 1331268 - RNA, 23 nt, Human
gucaggguucuugaagucacaaa

SEQ ID NO: 1331269 - RNA, 25 nt, Human
uccccaccaccucacauuaugccua

SEQ ID NO: 1331270 - RNA, 22 nt, Human
ugaacaaaucuugccucucagu

SEQ ID NO: 1331271 - RNA, 23 nt, Human
ugagaggccaggaagguagcagg

SEQ ID NO: 1331272 - RNA, 23 nt, Human
ugugagaggccaggaagguagca

SEQ ID NO: 1331273 - RNA, 24 nt, Human
uguggggaacagggucauggugga

SEQ ID NO: 1331274 - RNA, 21 nt, Human
caggccccgugagaagcuaug

SEQ ID NO: 1331275 - RNA, 24 nt, Human
cguuccuguaggaagaacuagaga

SEQ ID NO: 1331276 - RNA, 22 nt, Human
gagccaggccccgugagaagcu

SEQ ID NO: 1331277 - RNA, 24 nt, Human
uaaaagcagaaauaaggaaaaugc

SEQ ID NO: 1331278 - RNA, 21 nt, Human
uaagagaacugagacaugugg

SEQ ID NO: 1331279 - RNA, 27 nt, Human
uaagagaacugagacauguggaggccg

SEQ ID NO: 1331280 - RNA, 19 nt, Human
uccgagaggaccugauggu

SEQ ID NO: 1331281 - RNA, 20 nt, Human
ugagcgaguuggugggguca

SEQ ID NO: 1331282 - RNA, 22 nt, Human
uguaggaagaacuagagauucc

SEQ ID NO: 1331283 - RNA, 23 nt, Human
ugucaggcgugagcgaguuggug

SEQ ID NO: 1331284 - RNA, 29 nt, Human
aaacuagaggcagaaauaagagggacccc

SEQ ID NO: 1331285 - RNA, 21 nt, Human
aacuagaggcagaaauaagau

SEQ ID NO: 1331286 - RNA, 25 nt, Human
aaggaaccugggggguuuaagggaa

SEQ ID NO: 1331287 - RNA, 23 nt, Human
aagugaccacugaggcccagagc

SEQ ID NO: 1331288 - RNA, 20 nt, Human
aaguggaaccuggaugcugg

SEQ ID NO: 1331289 - RNA, 20 nt, Human
acagcaaaaugaucuuaggc

SEQ ID NO: 1331290 - RNA, 26 nt, Human
accagcaggaggugggaaaagagccc

SEQ ID NO: 1331291 - RNA, 22 nt, Human
accauuacccuucucuccauuc

SEQ ID NO: 1331292 - RNA, 18 nt, Human
acucugugcccagcacug

SEQ ID NO: 1331293 - RNA, 18 nt, Human
agagagugcagagcuggg

SEQ ID NO: 1331294 - RNA, 28 nt, Human
agcaugugacacacacaaagugggcaac

SEQ ID NO: 1331295 - RNA, 23 nt, Human
aggcccagagccguuggaacagg

SEQ ID NO: 1331296 - RNA, 24 nt, Human
aggggcaccuggacagagguuggg

SEQ ID NO: 1331297 - RNA, 18 nt, Human
aggguggaggacuuaaaa

SEQ ID NO: 1331298 - RNA, 18 nt, Human
auccuuaguucagagagg

SEQ ID NO: 1331299 - RNA, 18 nt, Human
auggaaggcaacuacagc

SEQ ID NO: 1331300 - RNA, 21 nt, Human
auucaacaagucuuuauugag

SEQ ID NO: 1331301 - RNA, 18 nt, Human
auuccagagagugcagag

SEQ ID NO: 1331302 - RNA, 19 nt, Human
auugaucagugaucacagc

SEQ ID NO: 1331303 - RNA, 19 nt, Human
caaaacuagaggcagaaau

SEQ ID NO: 1331304 - RNA, 24 nt, Human
caagugaccacugaggcccagagc

SEQ ID NO: 1331305 - RNA, 18 nt, Human
caaugguggucaagugac

SEQ ID NO: 1331306 - RNA, 19 nt, Human
cacacacaaagugggcagc

SEQ ID NO: 1331307 - RNA, 18 nt, Human
cacccugcuggggaaccc

SEQ ID NO: 1331308 - RNA, 23 nt, Human
cacccugcuggggaacccgguca

SEQ ID NO: 1331309 - RNA, 20 nt, Human
cacucucuccuaggaaagug

SEQ ID NO: 1331310 - RNA, 23 nt, Human
cacugagugagauuucagggggc

SEQ ID NO: 1331311 - RNA, 22 nt, Human
cagcaugugacacacacaaagu

SEQ ID NO: 1331312 - RNA, 20 nt, Human
cagcgcgcacccugcuaugg

SEQ ID NO: 1331313 - RNA, 22 nt, Human
cagcgcgcacccugcuaugguu

SEQ ID NO: 1331314 - RNA, 20 nt, Human
caugugacacacacaaagug

SEQ ID NO: 1331315 - RNA, 25 nt, Human
cauucaacaagucuuuauugagcac

SEQ ID NO: 1331316 - RNA, 21 nt, Human
ccaaagaagugaagcaucuga

SEQ ID NO: 1331317 - RNA, 20 nt, Human
ccacuggauguuugucuugg

SEQ ID NO: 1331318 - RNA, 23 nt, Human
ccaucuccacucucuccuaggaa

SEQ ID NO: 1331319 - RNA, 24 nt, Human
cccaucuccacucucuccuaggaa

SEQ ID NO: 1331320 - RNA, 20 nt, Human
ccccaaagccguguaugucu

SEQ ID NO: 1331321 - RNA, 20 nt, Human
ccccaaagccguguaugucu

SEQ ID NO: 1331322 - RNA, 21 nt, Human
ccccccauugagaguccugga

SEQ ID NO: 1331323 - RNA, 26 nt, Human
ccccucacaaggaccaaucuagagau

SEQ ID NO: 1331324 - RNA, 19 nt, Human
cccugcuccaggugcuuag

SEQ ID NO: 1331325 - RNA, 18 nt, Human
ccguguaugucuggaucc

SEQ ID NO: 1331326 - RNA, 24 nt, Human
ccuaagaccacagauagcuccagg

SEQ ID NO: 1331327 - RNA, 21 nt, Human
ccucauggacuccagggucag

SEQ ID NO: 1331328 - RNA, 26 nt, Human
ccuccugcugccuuccuuucccuguc

SEQ ID NO: 1331329 - RNA, 21 nt, Human
ccugcugccuuccuuucccug

SEQ ID NO: 1331330 - RNA, 22 nt, Human
ccuuuuaugccgucaguauauu

SEQ ID NO: 1331331 - RNA, 18 nt, Human
cuaagaccacagauagcu

SEQ ID NO: 1331332 - RNA, 24 nt, Human
cuacucugugcccagcacugcacu

SEQ ID NO: 1331333 - RNA, 23 nt, Human
cuuguggccuccugcugccuucc

SEQ ID NO: 1331334 - RNA, 18 nt, Human
gaagacauguuacucccu

SEQ ID NO: 1331335 - RNA, 21 nt, Human
gaaggaaccugggggguuuaa

SEQ ID NO: 1331336 - RNA, 20 nt, Human
gaaguucccucgggaaacca

SEQ ID NO: 1331337 - RNA, 19 nt, Human
gacauguuacucccucucu

SEQ ID NO: 1331338 - RNA, 21 nt, Human
gcaagaaggaaccuggggggu

SEQ ID NO: 1331339 - RNA, 26 nt, Human
gccagagacagaggcuuaacacccug

SEQ ID NO: 1331340 - RNA, 21 nt, Human
gcugggggcagaugucagggg

SEQ ID NO: 1331341 - RNA, 18 nt, Human
ggaugaacaggggcuggc

SEQ ID NO: 1331342 - RNA, 22 nt, Human
ggcuauggaaauaugcucagcc

SEQ ID NO: 1331343 - RNA, 22 nt, Human
ggcugggggcagaugucagggc

SEQ ID NO: 1331344 - RNA, 18 nt, Human
gggcaagaaaaugcugca

SEQ ID NO: 1331345 - RNA, 18 nt, Human
gggcugggggcagauguc

SEQ ID NO: 1331346 - RNA, 21 nt, Human
gguaggucuguuuaaaaugcc

SEQ ID NO: 1331347 - RNA, 23 nt, Human
guggaggacuuaaaacuuggaug

SEQ ID NO: 1331348 - RNA, 20 nt, Human
gugggcuuguggccuccugc

SEQ ID NO: 1331349 - RNA, 26 nt, Human
guucacuggugaggacuucuucuccu

SEQ ID NO: 1331350 - RNA, 18 nt, Human
uaaaaccauuacccuucu

SEQ ID NO: 1331351 - RNA, 21 nt, Human
uacccuucucuccauuccuga

SEQ ID NO: 1331352 - RNA, 18 nt, Human
uacucugugcccagcacu

SEQ ID NO: 1331353 - RNA, 21 nt, Human
ucacuggugaggacuucuucu

SEQ ID NO: 1331354 - RNA, 26 nt, Human
ucagugaucacagcuuguaccccaaa

SEQ ID NO: 1331355 - RNA, 22 nt, Human
uccaggcuuuaaauggccuggg

SEQ ID NO: 1331356 - RNA, 20 nt, Human
ucccguccccccauugagag

SEQ ID NO: 1331357 - RNA, 18 nt, Human
uccuaggaaaguggaacc

SEQ ID NO: 1331358 - RNA, 19 nt, Human
uccuggaggacuugcucuc

SEQ ID NO: 1331359 - RNA, 22 nt, Human
ucgggcccuuauuccagagagu

SEQ ID NO: 1331360 - RNA, 22 nt, Human
ucucuuagaacaggguggagga

SEQ ID NO: 1331361 - RNA, 21 nt, Human
ucucuugacaugaagaccugg

SEQ ID NO: 1331362 - RNA, 19 nt, Human
ucuuaaaacuccccucaca

SEQ ID NO: 1331363 - RNA, 19 nt, Human
ugaggacuucuucuccugg

SEQ ID NO: 1331364 - RNA, 19 nt, Human
ugcaagaaggaaccugggg

SEQ ID NO: 1331365 - RNA, 22 nt, Human
ugccagggaaggugggcagcag

SEQ ID NO: 1331366 - RNA, 23 nt, Human
uggacagagguuggguccguggg

SEQ ID NO: 1331367 - RNA, 22 nt, Human
uggacuccagggucagaaguuc

SEQ ID NO: 1331368 - RNA, 21 nt, Human
uggaugcugguagggccagag

SEQ ID NO: 1331369 - RNA, 22 nt, Human
uggaugugcugaucaagagcaa

SEQ ID NO: 1331370 - RNA, 21 nt, Human
uggggagguggcuaccagugg

SEQ ID NO: 1331371 - RNA, 20 nt, Human
ugggguccccugcuccaggu

SEQ ID NO: 1331372 - RNA, 26 nt, Human
ugggguccccugcuccaggugcuuag

SEQ ID NO: 1331373 - RNA, 20 nt, Human
uggguaaggacaagacuggg

SEQ ID NO: 1331374 - RNA, 24 nt, Human
ugguucugcccuuuuaugccguca

SEQ ID NO: 1331375 - RNA, 23 nt, Human
ugugcaagaaggaaccugggggg

SEQ ID NO: 1331376 - RNA, 19 nt, Human
uuccaaagaagugaagcag

SEQ ID NO: 1331377 - RNA, 20 nt, Human
uugagcaccuacucugugcc

SEQ ID NO: 1331378 - RNA, 18 nt, Human
uuggaugugcugaucaag

SEQ ID NO: 1331379 - RNA, 21 nt, Human
aaaaauaccccaacuuuagga

SEQ ID NO: 1331380 - RNA, 22 nt, Human
aaacagcccaaggugaagcuca

SEQ ID NO: 1331381 - RNA, 24 nt, Human
aaagauccucaaaggucuguguua

SEQ ID NO: 1331382 - RNA, 21 nt, Human
aaagcacuaggagaaagcaug

SEQ ID NO: 1331383 - RNA, 20 nt, Human
aacagacaucccuauuuccu

SEQ ID NO: 1331384 - RNA, 20 nt, Human
aagacuuuuuagaaagauga

SEQ ID NO: 1331385 - RNA, 20 nt, Human
aaguagauaugcucaagaaa

SEQ ID NO: 1331386 - RNA, 20 nt, Human
aaguagcugggauuacaggc

SEQ ID NO: 1331387 - RNA, 26 nt, Human
aaguagcugggauuacaggcgcaugc

SEQ ID NO: 1331388 - RNA, 23 nt, Human
acagaguggcugggccugacccc

SEQ ID NO: 1331389 - RNA, 23 nt, Human
accagacuggagugcaauggcgu

SEQ ID NO: 1331390 - RNA, 25 nt, Human
acuaggagaaagcaugcaaaacagc

SEQ ID NO: 1331391 - RNA, 27 nt, Human
acucugucaaccagacuggagugcaau

SEQ ID NO: 1331392 - RNA, 19 nt, Human
acuggagugcaauggcgug

SEQ ID NO: 1331393 - RNA, 24 nt, Human
acuucaauagaaaguaagcuaaaa

SEQ ID NO: 1331394 - RNA, 25 nt, Human
agaaaaaaauaacacuaaauaagga

SEQ ID NO: 1331395 - RNA, 22 nt, Human
agaagagauggguuuuugccau

SEQ ID NO: 1331396 - RNA, 24 nt, Human
agaguaaaggugccaggggaaggg

SEQ ID NO: 1331397 - RNA, 24 nt, Human
agcauaaauagguauuugugaaug

SEQ ID NO: 1331398 - RNA, 19 nt, Human
agccacauccagggagcca

SEQ ID NO: 1331399 - RNA, 23 nt, Human
agcuacagaaaguccugacuauc

SEQ ID NO: 1331400 - RNA, 18 nt, Human
aggcccaggagagaacag

SEQ ID NO: 1331401 - RNA, 19 nt, Human
agggagccaaggauauagu

SEQ ID NO: 1331402 - RNA, 18 nt, Human
agggcugaugaaagagga

SEQ ID NO: 1331403 - RNA, 18 nt, Human
aggggaagggcugaggcu

SEQ ID NO: 1331404 - RNA, 19 nt, Human
aguagcugggauuacaggc

SEQ ID NO: 1331405 - RNA, 21 nt, Human
agugcaauggcgugaucucag

SEQ ID NO: 1331406 - RNA, 24 nt, Human
agugcaauggcgugaucucagcuc

SEQ ID NO: 1331407 - RNA, 21 nt, Human
auaagacaagguggcuccuuc

SEQ ID NO: 1331408 - RNA, 20 nt, Human
aucccuauuuccuuccuagg

SEQ ID NO: 1331409 - RNA, 20 nt, Human
auggguuuuugccauguugg

SEQ ID NO: 1331410 - RNA, 23 nt, Human
caacugauauaagaacuaagaaa

SEQ ID NO: 1331411 - RNA, 25 nt, Human
caagaucagaagggacacuaacacc

SEQ ID NO: 1331412 - RNA, 22 nt, Human
cacaacacuaaucacugucccc

SEQ ID NO: 1331413 - RNA, 23 nt, Human
cacaccauguacucuaaaaugag

SEQ ID NO: 1331414 - RNA, 21 nt, Human
cacauccagggagccaaggau

SEQ ID NO: 1331415 - RNA, 18 nt, Human
caccauguacucuaaaau

SEQ ID NO: 1331416 - RNA, 23 nt, Human
cacucugucaaccagacuggagu

SEQ ID NO: 1331417 - RNA, 18 nt, Human
cacuguugggugauagaa

SEQ ID NO: 1331418 - RNA, 25 nt, Human
cacuucacugugcccccugcugccc

SEQ ID NO: 1331419 - RNA, 20 nt, Human
cacuuugacagcuucccucu

SEQ ID NO: 1331420 - RNA, 22 nt, Human
cagcucacugcaaccuccuccu

SEQ ID NO: 1331421 - RNA, 23 nt, Human
cagguuccuucacacauaauuuc

SEQ ID NO: 1331422 - RNA, 22 nt, Human
caugcuaaaaugaaugcaucca

SEQ ID NO: 1331423 - RNA, 24 nt, Human
cauguuggccaggcuggucucaaa

SEQ ID NO: 1331424 - RNA, 19 nt, Human
ccagcuuacucuucucucc

SEQ ID NO: 1331425 - RNA, 22 nt, Human
ccagcuuacucuucucucccuc

SEQ ID NO: 1331426 - RNA, 23 nt, Human
ccagcuuacucuucucucccucc

SEQ ID NO: 1331427 - RNA, 19 nt, Human
ccauguuggccaggcuggu

SEQ ID NO: 1331428 - RNA, 22 nt, Human
ccauguuggccaggcuggucuc

SEQ ID NO: 1331429 - RNA, 20 nt, Human
cccaacccaggucuggcuuc

SEQ ID NO: 1331430 - RNA, 19 nt, Human
cccagggcacaggggucag

SEQ ID NO: 1331431 - RNA, 20 nt, Human
cccagguucaagcaauucuc

SEQ ID NO: 1331432 - RNA, 23 nt, Human
ccccacugcagggugugugccca

SEQ ID NO: 1331433 - RNA, 19 nt, Human
cccugcaccucccggcuac

SEQ ID NO: 1331434 - RNA, 19 nt, Human
ccgaaguagcugggauuac

SEQ ID NO: 1331435 - RNA, 23 nt, Human
ccgaaguagcugggauuacaggc

SEQ ID NO: 1331436 - RNA, 23 nt, Human
ccgaaguagcugggauuacaggc

SEQ ID NO: 1331437 - RNA, 22 nt, Human
ccucccagguucaagcaauucu

SEQ ID NO: 1331438 - RNA, 18 nt, Human
ccuccucccagguucaag

SEQ ID NO: 1331439 - RNA, 22 nt, Human
ccugcagcccagugcccagggc

SEQ ID NO: 1331440 - RNA, 25 nt, Human
cuaauuaaagaagacugagaagccc

SEQ ID NO: 1331441 - RNA, 20 nt, Human
cuacuucaauagaaaguaag

SEQ ID NO: 1331442 - RNA, 19 nt, Human
cuagggcccuucacuccuc

SEQ ID NO: 1331443 - RNA, 19 nt, Human
cucaagugauuugcccacc

SEQ ID NO: 1331444 - RNA, 23 nt, Human
cucacugcaaccuccuccuccca

SEQ ID NO: 1331445 - RNA, 24 nt, Human
cucacugcaaccuccuccucccag

SEQ ID NO: 1331446 - RNA, 22 nt, Human
cuccaaccugcagcccagugcc

SEQ ID NO: 1331447 - RNA, 20 nt, Human
cucccagguucaagcaauuc

SEQ ID NO: 1331448 - RNA, 21 nt, Human
cucucuacaggcccaggagag

SEQ ID NO: 1331449 - RNA, 23 nt, Human
cugcaaccuccuccucccagguu

SEQ ID NO: 1331450 - RNA, 24 nt, Human
cugcaaccuccuccucccagguuc

SEQ ID NO: 1331451 - RNA, 24 nt, Human
cuggagugcaauggcgugaucuca

SEQ ID NO: 1331452 - RNA, 23 nt, Human
cuuacucuucucucccucccaga

SEQ ID NO: 1331453 - RNA, 20 nt, Human
cuucagcacuucacugugcc

SEQ ID NO: 1331454 - RNA, 19 nt, Human
cuugucuccuuccacuucu

SEQ ID NO: 1331455 - RNA, 21 nt, Human
gaacuuaaagaauauuuggga

SEQ ID NO: 1331456 - RNA, 20 nt, Human
gaagcuacagaaaguccuga

SEQ ID NO: 1331457 - RNA, 25 nt, Human
gacccaacccaggucuggcuucugu

SEQ ID NO: 1331458 - RNA, 22 nt, Human
gaccucaagugauuugcccacc

SEQ ID NO: 1331459 - RNA, 20 nt, Human
gaggaagggcgaagaguaaa

SEQ ID NO: 1331460 - RNA, 19 nt, Human
gaguauguguuauccccac

SEQ ID NO: 1331461 - RNA, 20 nt, Human
gauagaguggcaggccagaa

SEQ ID NO: 1331462 - RNA, 22 nt, Human
gaucagaagggacacuaacacc

SEQ ID NO: 1331463 - RNA, 18 nt, Human
gauuacaggcgcaugcca

SEQ ID NO: 1331464 - RNA, 24 nt, Human
gauuacaggcgcaugccaccaugc

SEQ ID NO: 1331465 - RNA, 23 nt, Human
gcacugugguccaagaguguggu

SEQ ID NO: 1331466 - RNA, 20 nt, Human
gccagguauuagaagguucc

SEQ ID NO: 1331467 - RNA, 20 nt, Human
gccauguuggccaggcuggu

SEQ ID NO: 1331468 - RNA, 22 nt, Human
gcucacugcaaccuccuccucc

SEQ ID NO: 1331469 - RNA, 22 nt, Human
gcuuacucuucucucccuccca

SEQ ID NO: 1331470 - RNA, 24 nt, Human
ggagacagagguuuacaaaaggaa

SEQ ID NO: 1331471 - RNA, 23 nt, Human
ggcuugucuccuuccacuucuuu

SEQ ID NO: 1331472 - RNA, 22 nt, Human
ggguuuuugccauguuggccag

SEQ ID NO: 1331473 - RNA, 23 nt, Human
ggguuuuugccauguuggccagg

SEQ ID NO: 1331474 - RNA, 18 nt, Human
guaaaggugccaggggaa

SEQ ID NO: 1331475 - RNA, 20 nt, Human
uaauuuuuauauuuuuuaga

SEQ ID NO: 1331476 - RNA, 24 nt, Human
uagaagagauggguuuuugccaug

SEQ ID NO: 1331477 - RNA, 18 nt, Human
uagaagaugugggaaucc

SEQ ID NO: 1331478 - RNA, 19 nt, Human
uagggcccuucacuccucc

SEQ ID NO: 1331479 - RNA, 23 nt, Human
uaucacuggaacucaguuaaaau

SEQ ID NO: 1331480 - RNA, 20 nt, Human
uaugguuuugagagaucuuc

SEQ ID NO: 1331481 - RNA, 22 nt, Human
uaugguuuugagagaucuucuu

SEQ ID NO: 1331482 - RNA, 22 nt, Human
ucaagaaagcuaucccaaggac

SEQ ID NO: 1331483 - RNA, 18 nt, Human
ucacugcaaccuccuccc

SEQ ID NO: 1331484 - RNA, 18 nt, Human
ucacugcaaccuccuccu

SEQ ID NO: 1331485 - RNA, 24 nt, Human
ucacugcaaccuccuccucccagg

SEQ ID NO: 1331486 - RNA, 25 nt, Human
ucagcucacugcaaccuccuccucc

SEQ ID NO: 1331487 - RNA, 20 nt, Human
ucagggcugaugaaagagga

SEQ ID NO: 1331488 - RNA, 18 nt, Human
ucauucaggaguagauua

SEQ ID NO: 1331489 - RNA, 19 nt, Human
uccaauauuguccaacuag

SEQ ID NO: 1331490 - RNA, 20 nt, Human
uccaccaugccaggaggaag

SEQ ID NO: 1331491 - RNA, 19 nt, Human
ucccaaggacaggguugca

SEQ ID NO: 1331492 - RNA, 21 nt, Human
ucccagguucaagcaauucuc

SEQ ID NO: 1331493 - RNA, 21 nt, Human
ucccagguucaagcaauucuc

SEQ ID NO: 1331494 - RNA, 24 nt, Human
uccgaaguagcugggauuacaggc

SEQ ID NO: 1331495 - RNA, 25 nt, Human
ucuacaggcccaggagagaacagcu

SEQ ID NO: 1331496 - RNA, 24 nt, Human
ucucacucugucaaccagacugga

SEQ ID NO: 1331497 - RNA, 18 nt, Human
ucucagggcugaugaaag

SEQ ID NO: 1331498 - RNA, 21 nt, Human
ucuguggauuuugauuaucua

SEQ ID NO: 1331499 - RNA, 23 nt, Human
ugaagcucacuuggcagcugaga

SEQ ID NO: 1331500 - RNA, 25 nt, Human
ugaaggauacaaauggagccgaaaa

SEQ ID NO: 1331501 - RNA, 18 nt, Human
ugaccucaagugauuugc

SEQ ID NO: 1331502 - RNA, 22 nt, Human
ugaccucaagugauuugcccac

SEQ ID NO: 1331503 - RNA, 20 nt, Human
ugacucaaccuccgaaguag

SEQ ID NO: 1331504 - RNA, 24 nt, Human
ugacucaaccuccgaaguagcugg

SEQ ID NO: 1331505 - RNA, 22 nt, Human
ugagaaaaaaauaacacuaaau

SEQ ID NO: 1331506 - RNA, 23 nt, Human
ugagucucacucugucaaccaga

SEQ ID NO: 1331507 - RNA, 21 nt, Human
ugauagaguggcaggccagaa

SEQ ID NO: 1331508 - RNA, 18 nt, Human
ugccaggaggaagggcga

SEQ ID NO: 1331509 - RNA, 19 nt, Human
ugccaggggaagggcugag

SEQ ID NO: 1331510 - RNA, 24 nt, Human
ugccauguuggccaggcuggucuc

SEQ ID NO: 1331511 - RNA, 26 nt, Human
ugccauguuggccaggcuggucucaa

SEQ ID NO: 1331512 - RNA, 19 nt, Human
ugcccagcacacuuugaca

SEQ ID NO: 1331513 - RNA, 24 nt, Human
ugcuaaaaugaaugcauccaagga

SEQ ID NO: 1331514 - RNA, 22 nt, Human
ugcuacugcagccuaaugacuu

SEQ ID NO: 1331515 - RNA, 19 nt, Human
uggagugcaauggcgugau

SEQ ID NO: 1331516 - RNA, 24 nt, Human
uggagugcaauggcgugaucucag

SEQ ID NO: 1331517 - RNA, 19 nt, Human
uggcagcugagagugaguu

SEQ ID NO: 1331518 - RNA, 24 nt, Human
uggccaggcuggucucaaacucuu

SEQ ID NO: 1331519 - RNA, 24 nt, Human
uggcgugaucucagcucacugcaa

SEQ ID NO: 1331520 - RNA, 21 nt, Human
ugggauuacaggcgcaugcca

SEQ ID NO: 1331521 - RNA, 22 nt, Human
ugggauuacaggcgcaugccac

SEQ ID NO: 1331522 - RNA, 24 nt, Human
ugggauuacaggcgcaugccacca

SEQ ID NO: 1331523 - RNA, 25 nt, Human
ugggauuacaggcgcaugccaccau

SEQ ID NO: 1331524 - RNA, 20 nt, Human
uggguuuuugccauguuggc

SEQ ID NO: 1331525 - RNA, 24 nt, Human
uggguuuuugccauguuggccagg

SEQ ID NO: 1331526 - RNA, 23 nt, Human
uguaaauacgggguaagguacau

SEQ ID NO: 1331527 - RNA, 18 nt, Human
ugucauaucacuggaacu

SEQ ID NO: 1331528 - RNA, 18 nt, Human
uuacucuucucucccucc

SEQ ID NO: 1331529 - RNA, 24 nt, Human
uuagaagagauggguuuuugccau

SEQ ID NO: 1331530 - RNA, 18 nt, Human
uuaggagguuaaggucac

SEQ ID NO: 1331531 - RNA, 18 nt, Human
uucaauagaaaguaagcu

SEQ ID NO: 1331532 - RNA, 27 nt, Human
uucagacuuaagacuuuuuagaaagau

SEQ ID NO: 1331533 - RNA, 24 nt, Human
uuccguuuucucuauaaauaguuc

SEQ ID NO: 1331534 - RNA, 19 nt, Human
uucgccaggacccaaccca

SEQ ID NO: 1331535 - RNA, 24 nt, Human
uugccauguuggccaggcuggucu

SEQ ID NO: 1331536 - RNA, 18 nt, Human
uuuaagaaauagaagcca

SEQ ID NO: 1331537 - RNA, 23 nt, Human
uuuugccauguuggccaggcugg

SEQ ID NO: 1331538 - RNA, 23 nt, Human
uuuuugccauguuggccaggcug

SEQ ID NO: 1331539 - RNA, 24 nt, Human
uuuuuuucuaacuucugugagauu

SEQ ID NO: 1331540 - RNA, 23 nt, Human
aaagggagcuggauuuagaccuc

SEQ ID NO: 1331541 - RNA, 18 nt, Human
aaccuguuccuucuccca

SEQ ID NO: 1331542 - RNA, 25 nt, Human
acaaacuccaaaagggagggaacgc

SEQ ID NO: 1331543 - RNA, 23 nt, Human
agaauggcacaaacuccaaaagg

SEQ ID NO: 1331544 - RNA, 19 nt, Human
agggagcuggauuuagacc

SEQ ID NO: 1331545 - RNA, 21 nt, Human
caaacuccaaaagggagcugg

SEQ ID NO: 1331546 - RNA, 19 nt, Human
ccagaagcuccuggaauga

SEQ ID NO: 1331547 - RNA, 22 nt, Human
cuccucugaauuuugcaaccug

SEQ ID NO: 1331548 - RNA, 18 nt, Human
gcugcugcucaaaucgga

SEQ ID NO: 1331549 - RNA, 23 nt, Human
uccaaaagggagcuggauuuaga

SEQ ID NO: 1331550 - RNA, 21 nt, Human
uccccauguagauaacgggau

SEQ ID NO: 1331551 - RNA, 22 nt, Human
uccuggaaugagcaggucuggc

SEQ ID NO: 1331552 - RNA, 19 nt, Human
uggaaugagcaggucuggc

SEQ ID NO: 1331553 - RNA, 21 nt, Human
uggcacaaacuccaaaaggga

SEQ ID NO: 1331554 - RNA, 19 nt, Human
uguuccuucucccagaagc

SEQ ID NO: 1331555 - RNA, 19 nt, Human
acaagaguagcgcuggcug

SEQ ID NO: 1331556 - RNA, 20 nt, Human
acaccccagacucaucuccc

SEQ ID NO: 1331557 - RNA, 22 nt, Human
acaccccagacucaucucccuc

SEQ ID NO: 1331558 - RNA, 18 nt, Human
acagagccacagccacac

SEQ ID NO: 1331559 - RNA, 19 nt, Human
agaguccuucuggggcuuc

SEQ ID NO: 1331560 - RNA, 20 nt, Human
aggcucugcugggaauggug

SEQ ID NO: 1331561 - RNA, 20 nt, Human
aggcucugcugggaauggug

SEQ ID NO: 1331562 - RNA, 19 nt, Human
aggcucugcuggggauagu

SEQ ID NO: 1331563 - RNA, 19 nt, Human
aggcucugcuggggauagu

SEQ ID NO: 1331564 - RNA, 19 nt, Human
aggcucugcuggggauggu

SEQ ID NO: 1331565 - RNA, 19 nt, Human
aggcucugcuggggauggu

SEQ ID NO: 1331566 - RNA, 19 nt, Human
aggcucugcuggggauggu

SEQ ID NO: 1331567 - RNA, 18 nt, Human
agucuuuucuccauguuc

SEQ ID NO: 1331568 - RNA, 21 nt, Human
aguuuuuucugacucuucugg

SEQ ID NO: 1331569 - RNA, 21 nt, Human
augauuaucuguagagcuuuu

SEQ ID NO: 1331570 - RNA, 22 nt, Human
caaaugggguccuuuguccauu

SEQ ID NO: 1331571 - RNA, 22 nt, Human
caaaugggguccuuuguccauu

SEQ ID NO: 1331572 - RNA, 22 nt, Human
caaaugggguccuuuguccauu

SEQ ID NO: 1331573 - RNA, 22 nt, Human
caaaugggguccuuuuuccauu

SEQ ID NO: 1331574 - RNA, 22 nt, Human
cagcggauucuuuauguguggu

SEQ ID NO: 1331575 - RNA, 25 nt, Human
caguggaguccuuucugcguguucu

SEQ ID NO: 1331576 - RNA, 25 nt, Human
caguggaguccuuucuucguguucu

SEQ ID NO: 1331577 - RNA, 25 nt, Human
cagugggguccuuucuccauguucu

SEQ ID NO: 1331578 - RNA, 25 nt, Human
cagugggguccuuucuccguguucu

SEQ ID NO: 1331579 - RNA, 25 nt, Human
cagugggguccuuucuccguguucu

SEQ ID NO: 1331580 - RNA, 19 nt, Human
cauguucuguagacucugu

SEQ ID NO: 1331581 - RNA, 25 nt, Human
ccaaaggucuuccaguuuuaucuga

SEQ ID NO: 1331582 - RNA, 18 nt, Human
ccaaggccugcaggccca

SEQ ID NO: 1331583 - RNA, 23 nt, Human
ccacagccacaccccagacucau

SEQ ID NO: 1331584 - RNA, 22 nt, Human
cccuugguugcuggaguuuucu

SEQ ID NO: 1331585 - RNA, 23 nt, Human
ccugcaggcccaggagcagcacc

SEQ ID NO: 1331586 - RNA, 18 nt, Human
ccugccccccaagaagcu

SEQ ID NO: 1331587 - RNA, 19 nt, Human
ccuggagugaggggaaaua

SEQ ID NO: 1331588 - RNA, 20 nt, Human
ccuggagugaggggaaauau

SEQ ID NO: 1331589 - RNA, 20 nt, Human
ccuuucucuauuuucuguag

SEQ ID NO: 1331590 - RNA, 20 nt, Human
ccuuucucuauuuucuguag

SEQ ID NO: 1331591 - RNA, 20 nt, Human
ccuuucucuauuuucuguag

SEQ ID NO: 1331592 - RNA, 20 nt, Human
ccuuucucuauuuucuguag

SEQ ID NO: 1331593 - RNA, 20 nt, Human
ccuuucucuauuuucuguag

SEQ ID NO: 1331594 - RNA, 20 nt, Human
ccuuucucuauuuucuguag

SEQ ID NO: 1331595 - RNA, 20 nt, Human
ccuuucucuauuuucuguag

SEQ ID NO: 1331596 - RNA, 24 nt, Human
cuauguucuguagacucugcugca

SEQ ID NO: 1331597 - RNA, 20 nt, Human
cucauuggccaguggagucc

SEQ ID NO: 1331598 - RNA, 20 nt, Human
cucauuggccaguggagucc

SEQ ID NO: 1331599 - RNA, 20 nt, Human
cucugcugggaauagugugg

SEQ ID NO: 1331600 - RNA, 25 nt, Human
cugcuggggauagugugguguucuc

SEQ ID NO: 1331601 - RNA, 25 nt, Human
cugcuggggauagugugguguucuc

SEQ ID NO: 1331602 - RNA, 25 nt, Human
cugcuggggauagugugguguucuc

SEQ ID NO: 1331603 - RNA, 25 nt, Human
cugcuggggaugaugugguguucuc

SEQ ID NO: 1331604 - RNA, 25 nt, Human
cugcuggggauggugugguguucuc

SEQ ID NO: 1331605 - RNA, 25 nt, Human
cugcuggggauggugugguguucuc

SEQ ID NO: 1331606 - RNA, 20 nt, Human
cuggaaaagaugugcuuuuu

SEQ ID NO: 1331607 - RNA, 21 nt, Human
cuggcaggccuucuugauacc

SEQ ID NO: 1331608 - RNA, 18 nt, Human
cuucucauuggccaaugg

SEQ ID NO: 1331609 - RNA, 19 nt, Human
cuucucauuggccaaugga

SEQ ID NO: 1331610 - RNA, 23 nt, Human
cuucucauuggccaauggagucc

SEQ ID NO: 1331611 - RNA, 20 nt, Human
cuuuaugugugguaguggag

SEQ ID NO: 1331612 - RNA, 21 nt, Human
gacucaucucccuccggaacu

SEQ ID NO: 1331613 - RNA, 21 nt, Human
gacugucguuucuccauguuc

SEQ ID NO: 1331614 - RNA, 20 nt, Human
gagccacagccacaccccag

SEQ ID NO: 1331615 - RNA, 22 nt, Human
gaguccuuucugcguguucugu

SEQ ID NO: 1331616 - RNA, 24 nt, Human
gcagaacaaugugaucaaaaggga

SEQ ID NO: 1331617 - RNA, 25 nt, Human
gccacagccacaccccagacucauc

SEQ ID NO: 1331618 - RNA, 21 nt, Human
gccuguaggcuugucaguugg

SEQ ID NO: 1331619 - RNA, 20 nt, Human
gcguguucuguaggcucugc

SEQ ID NO: 1331620 - RNA, 21 nt, Human
gcucugcugggaauggugugg

SEQ ID NO: 1331621 - RNA, 21 nt, Human
gcucugcugggaauggugugg

SEQ ID NO: 1331622 - RNA, 20 nt, Human
gggaauggugcgguguucuc

SEQ ID NO: 1331623 - RNA, 23 nt, Human
gggaauggugcgguguucucauu

SEQ ID NO: 1331624 - RNA, 23 nt, Human
gguguucucauuggccaguggag

SEQ ID NO: 1331625 - RNA, 23 nt, Human
gguguucucauuggccaguggag

SEQ ID NO: 1331626 - RNA, 20 nt, Human
guccuuuuuccauuuucugu

SEQ ID NO: 1331627 - RNA, 24 nt, Human
guggagucagcaggaucaacagag

SEQ ID NO: 1331628 - RNA, 22 nt, Human
uaaaugggguccuuucuccauu

SEQ ID NO: 1331629 - RNA, 24 nt, Human
uccauuuucuguaggcucugcuag

SEQ ID NO: 1331630 - RNA, 24 nt, Human
uccauuuucuguaggcucugcuag

SEQ ID NO: 1331631 - RNA, 24 nt, Human
uccauuuucuguaggcucugcuga

SEQ ID NO: 1331632 - RNA, 24 nt, Human
uccauuuucuguaggcucugcugg

SEQ ID NO: 1331633 - RNA, 24 nt, Human
uccauuuucuguaggcucugcugg

SEQ ID NO: 1331634 - RNA, 24 nt, Human
uccauuuucuguaggcucugcugg

SEQ ID NO: 1331635 - RNA, 24 nt, Human
uccauuuucuguaggcucugcugg

SEQ ID NO: 1331636 - RNA, 24 nt, Human
uccauuuucuguaggcugugcugg

SEQ ID NO: 1331637 - RNA, 21 nt, Human
uccccaguuuucugauauucu

SEQ ID NO: 1331638 - RNA, 18 nt, Human
uccggaacuggcaggccu

SEQ ID NO: 1331639 - RNA, 24 nt, Human
ucuauuuucuguaggcccugcugg

SEQ ID NO: 1331640 - RNA, 24 nt, Human
ucuauuuucuguaggcccugcugg

SEQ ID NO: 1331641 - RNA, 22 nt, Human
ucuauuuucuguaggcucugcc

SEQ ID NO: 1331642 - RNA, 24 nt, Human
ucuauuuucuguaggcucugcugg

SEQ ID NO: 1331643 - RNA, 24 nt, Human
ucuauuuucuguaggcucugcugg

SEQ ID NO: 1331644 - RNA, 24 nt, Human
ucuauuuucuguaggcucugcugg

SEQ ID NO: 1331645 - RNA, 24 nt, Human
ucuauuuucuguaggcucugcugg

SEQ ID NO: 1331646 - RNA, 24 nt, Human
ucuauuuucuguaggcucugcugg

SEQ ID NO: 1331647 - RNA, 24 nt, Human
ucuauuuucuguaggcucugcugg

SEQ ID NO: 1331648 - RNA, 24 nt, Human
ucuauuuucuguaggcucugcugg

SEQ ID NO: 1331649 - RNA, 24 nt, Human
ucuauuuucuguaggcucugcugg

SEQ ID NO: 1331650 - RNA, 24 nt, Human
ucucauuggccaauguagucuuuu

SEQ ID NO: 1331651 - RNA, 22 nt, Human
ucucauuggcugaugguguccu

SEQ ID NO: 1331652 - RNA, 19 nt, Human
ucuguaggcccugcugggg

SEQ ID NO: 1331653 - RNA, 22 nt, Human
ucuucagaagugggaggagccu

SEQ ID NO: 1331654 - RNA, 24 nt, Human
ugagacagaguccuucuggggcuu

SEQ ID NO: 1331655 - RNA, 19 nt, Human
ugaucucauuggccagugg

SEQ ID NO: 1331656 - RNA, 19 nt, Human
ugauguggucuucucauug

SEQ ID NO: 1331657 - RNA, 19 nt, Human
ugauguggucuucucauug

SEQ ID NO: 1331658 - RNA, 19 nt, Human
ugauguggucuucucauug

SEQ ID NO: 1331659 - RNA, 19 nt, Human
ugaugugguuuucucauug

SEQ ID NO: 1331660 - RNA, 19 nt, Human
ugaugugguuuucucauug

SEQ ID NO: 1331661 - RNA, 27 nt, Human
ugcugaggaugauguggucgagccccu

SEQ ID NO: 1331662 - RNA, 27 nt, Human
ugcugaggaugauguggucgagccccu

SEQ ID NO: 1331663 - RNA, 27 nt, Human
ugcugaggaugauguggucgagccccu

SEQ ID NO: 1331664 - RNA, 27 nt, Human
ugcugaggaugauguggucgagccccu

SEQ ID NO: 1331665 - RNA, 26 nt, Human
ugcugaggaugauguggucgagcccu

SEQ ID NO: 1331666 - RNA, 26 nt, Human
ugcugaggaugauguggucgagcccu

SEQ ID NO: 1331667 - RNA, 26 nt, Human
ugcugaggaugauguggucgagcccu

SEQ ID NO: 1331668 - RNA, 26 nt, Human
ugcugaggaugauguggucgagcccu

SEQ ID NO: 1331669 - RNA, 27 nt, Human
ugcuggggaugauguggucgagccccu

SEQ ID NO: 1331670 - RNA, 27 nt, Human
ugcuggggaugauguggucgagccccu

SEQ ID NO: 1331671 - RNA, 26 nt, Human
ugcuggggaugauguggucgagcccu

SEQ ID NO: 1331672 - RNA, 24 nt, Human
ugcuggggaugauguggucuucuc

SEQ ID NO: 1331673 - RNA, 20 nt, Human
ugcuggggaugguguggccu

SEQ ID NO: 1331674 - RNA, 24 nt, Human
ugcuggggaugguguggucuucuc

SEQ ID NO: 1331675 - RNA, 24 nt, Human
ugcuggggaugguguggucuucuc

SEQ ID NO: 1331676 - RNA, 24 nt, Human
ugcuggggaugguguggucuucuc

SEQ ID NO: 1331677 - RNA, 24 nt, Human
ugcuggggauggugugguguucuc

SEQ ID NO: 1331678 - RNA, 23 nt, Human
ugcuuggucugugaauugccuga

SEQ ID NO: 1331679 - RNA, 19 nt, Human
uggaaggaaguuguagucu

SEQ ID NO: 1331680 - RNA, 19 nt, Human
uggaauguaguagcaccug

SEQ ID NO: 1331681 - RNA, 25 nt, Human
uggccaaaggaguccugucuccauu

SEQ ID NO: 1331682 - RNA, 22 nt, Human
uggccaauggggucauuucuuc

SEQ ID NO: 1331683 - RNA, 22 nt, Human
uggccgauggggucauuucuuc

SEQ ID NO: 1331684 - RNA, 22 nt, Human
uggcguuauauguuuuuuucca

SEQ ID NO: 1331685 - RNA, 19 nt, Human
ugguguggccuucucauug

SEQ ID NO: 1331686 - RNA, 19 nt, Human
ugguguggucuucucauug

SEQ ID NO: 1331687 - RNA, 19 nt, Human
ugguguggucuucucauug

SEQ ID NO: 1331688 - RNA, 19 nt, Human
ugguguggucuucucauug

SEQ ID NO: 1331689 - RNA, 19 nt, Human
ugguguggucuucucauug

SEQ ID NO: 1331690 - RNA, 19 nt, Human
ugguguggucuucucauug

SEQ ID NO: 1331691 - RNA, 19 nt, Human
ugguguggucuucucauug

SEQ ID NO: 1331692 - RNA, 19 nt, Human
ugguguggucuucucauug

SEQ ID NO: 1331693 - RNA, 23 nt, Human
uguaguuuuugucaggagcuugu

SEQ ID NO: 1331694 - RNA, 24 nt, Human
uguuggggauguugugguguucuc

SEQ ID NO: 1331695 - RNA, 25 nt, Human
uuacuggggauggugugguguucuc

SEQ ID NO: 1331696 - RNA, 23 nt, Human
uuccccaguuuucugauauucuu

SEQ ID NO: 1331697 - RNA, 24 nt, Human
uucuccauguucuguaggcuuuac

SEQ ID NO: 1331698 - RNA, 22 nt, Human
uugcuggagaugguauggucuu

SEQ ID NO: 1331699 - RNA, 22 nt, Human
uuucuuguuaccguugauuugc

SEQ ID NO: 1331700 - RNA, 20 nt, Human
uuugcuggggaugguguggc

SEQ ID NO: 1331701 - RNA, 19 nt, Human
uuuugcucuugggugcugg

SEQ ID NO: 1331702 - RNA, 21 nt, Human
aaaguggccugcccagacuau

SEQ ID NO: 1331703 - RNA, 24 nt, Human
aaaucgaaagcggccgccugcuca

SEQ ID NO: 1331704 - RNA, 19 nt, Human
agacuauuuugguagcaag

SEQ ID NO: 1331705 - RNA, 23 nt, Human
agcaagcguggaaaucagaucug

SEQ ID NO: 1331706 - RNA, 21 nt, Human
aggaagucugcauuaucacga

SEQ ID NO: 1331707 - RNA, 20 nt, Human
auccuguguuuguacuccag

SEQ ID NO: 1331708 - RNA, 18 nt, Human
cacaccaaagcaucagcc

SEQ ID NO: 1331709 - RNA, 22 nt, Human
caccacagagagaagaaaaggg

SEQ ID NO: 1331710 - RNA, 21 nt, Human
cagagugcuggccacaccaaa

SEQ ID NO: 1331711 - RNA, 22 nt, Human
caguaaggaauuacaaauccug

SEQ ID NO: 1331712 - RNA, 20 nt, Human
cgccuacuuccaaaaguggc

SEQ ID NO: 1331713 - RNA, 24 nt, Human
cucaaggcaaauuucaaguaacuc

SEQ ID NO: 1331714 - RNA, 22 nt, Human
cuuccaaaaguggccugcccag

SEQ ID NO: 1331715 - RNA, 19 nt, Human
gaaagcgaaaucgaaagcg

SEQ ID NO: 1331716 - RNA, 22 nt, Human
gcagcugccuacucugcagcug

SEQ ID NO: 1331717 - RNA, 23 nt, Human
ggaagucugcauuaucacgagga

SEQ ID NO: 1331718 - RNA, 19 nt, Human
uagcaagcguggaaaucag

SEQ ID NO: 1331719 - RNA, 24 nt, Human
uagcugaucaucuuuccguacauu

SEQ ID NO: 1331720 - RNA, 22 nt, Human
uaggggaaagcgaaaucgaaag

SEQ ID NO: 1331721 - RNA, 18 nt, Human
ucugcagcugugguucuc

SEQ ID NO: 1331722 - RNA, 21 nt, Human
ugagaaucucgggagcagccc

SEQ ID NO: 1331723 - RNA, 22 nt, Human
uggaaaggagguaacacacuca

SEQ ID NO: 1331724 - RNA, 22 nt, Human
uuacaguaaggaauuacaaauc

SEQ ID NO: 1331725 - RNA, 23 nt, Human
uucaaguaacucauccuggaggc

SEQ ID NO: 1331726 - RNA, 22 nt, Human
aaaaacaauuuguuuugaaaac

SEQ ID NO: 1331727 - RNA, 21 nt, Human
aaaaccuaauaacaaguauca

SEQ ID NO: 1331728 - RNA, 23 nt, Human
aaaauuacaacugagacagugag

SEQ ID NO: 1331729 - RNA, 19 nt, Human
aaacaagaaucuaccauac

SEQ ID NO: 1331730 - RNA, 25 nt, Human
aaacauuuagcacuguuaauggaca

SEQ ID NO: 1331731 - RNA, 19 nt, Human
aaaggacuuuggucuuccc

SEQ ID NO: 1331732 - RNA, 21 nt, Human
aacauuugaaaacaccaucgc

SEQ ID NO: 1331733 - RNA, 23 nt, Human
aaccuaauaacaaguaucauuca

SEQ ID NO: 1331734 - RNA, 23 nt, Human
aagagccaaggaagcugugguuu

SEQ ID NO: 1331735 - RNA, 22 nt, Human
aagcacccauaaauaauggcaa

SEQ ID NO: 1331736 - RNA, 21 nt, Human
aauagcagcccuuuccaaaac

SEQ ID NO: 1331737 - RNA, 20 nt, Human
aaucuauaaaguguuuccuu

SEQ ID NO: 1331738 - RNA, 22 nt, Human
aaucuuuucuucucuguguuga

SEQ ID NO: 1331739 - RNA, 23 nt, Human
acugcaauccacuuggggagacu

SEQ ID NO: 1331740 - RNA, 25 nt, Human
agaacaaauucacuacaaauuuuca

SEQ ID NO: 1331741 - RNA, 23 nt, Human
aggaagcugugguuucgcauuug

SEQ ID NO: 1331742 - RNA, 23 nt, Human
aggcuucaguuuuccaccuccag

SEQ ID NO: 1331743 - RNA, 19 nt, Human
agguagucgccaucucaaa

SEQ ID NO: 1331744 - RNA, 24 nt, Human
aucgcaaaauuacaacugagacag

SEQ ID NO: 1331745 - RNA, 25 nt, Human
auuacaacugagacagugagagauc

SEQ ID NO: 1331746 - RNA, 21 nt, Human
caaaaaacuaaaacuauagca

SEQ ID NO: 1331747 - RNA, 22 nt, Human
caaaaccuaauaacaaguauca

SEQ ID NO: 1331748 - RNA, 24 nt, Human
caagaggacagcuucgacucccuc

SEQ ID NO: 1331749 - RNA, 21 nt, Human
caaggcccggcaagccaaagg

SEQ ID NO: 1331750 - RNA, 23 nt, Human
cacacagccggcuuugcaugccc

SEQ ID NO: 1331751 - RNA, 23 nt, Human
cacugcuauagaaaucuauaaag

SEQ ID NO: 1331752 - RNA, 24 nt, Human
cagaaucaaggcccggcaagccaa

SEQ ID NO: 1331753 - RNA, 22 nt, Human
cagagcuuuccuuagacuaaaa

SEQ ID NO: 1331754 - RNA, 19 nt, Human
cagcguguggccacguggu

SEQ ID NO: 1331755 - RNA, 21 nt, Human
cagcuggaggcugcaagauuc

SEQ ID NO: 1331756 - RNA, 21 nt, Human
cauggcgcccagcaggaaugg

SEQ ID NO: 1331757 - RNA, 22 nt, Human
ccaaaacaaacccgcuuccugc

SEQ ID NO: 1331758 - RNA, 22 nt, Human
ccagagggcauauucaaaaaca

SEQ ID NO: 1331759 - RNA, 21 nt, Human
ccauaaauaauggcaagaaca

SEQ ID NO: 1331760 - RNA, 19 nt, Human
ccauacagaaagguagucg

SEQ ID NO: 1331761 - RNA, 27 nt, Human
ccauccagaaauuaagccaacacaaga

SEQ ID NO: 1331762 - RNA, 25 nt, Human
cccaagauagccauuugguugugcc

SEQ ID NO: 1331763 - RNA, 23 nt, Human
ccccuguacucuauggaucagcu

SEQ ID NO: 1331764 - RNA, 22 nt, Human
cccgcgcccggagagucgggac

SEQ ID NO: 1331765 - RNA, 21 nt, Human
cccuagauaacuacuauaggu

SEQ ID NO: 1331766 - RNA, 20 nt, Human
ccuccaaaaaacuaaaacua

SEQ ID NO: 1331767 - RNA, 19 nt, Human
cgacuaaucaacuuuccca

SEQ ID NO: 1331768 - RNA, 18 nt, Human
cgcacaugaaagcaccca

SEQ ID NO: 1331769 - RNA, 24 nt, Human
cgcgccggcagaggcuucagccug

SEQ ID NO: 1331770 - RNA, 21 nt, Human
cuaaaacuauagcaaggcuuc

SEQ ID NO: 1331771 - RNA, 19 nt, Human
cuaaccuccaagcuguccu

SEQ ID NO: 1331772 - RNA, 18 nt, Human
cucaaaaucugagaaagc

SEQ ID NO: 1331773 - RNA, 20 nt, Human
cucacugguccccuacccac

SEQ ID NO: 1331774 - RNA, 21 nt, Human
cucaucuggucuuguggcccc

SEQ ID NO: 1331775 - RNA, 21 nt, Human
cuccaaaaaacuaaaacuaua

SEQ ID NO: 1331776 - RNA, 22 nt, Human
cucccucugauuucaucuccga

SEQ ID NO: 1331777 - RNA, 19 nt, Human
cuccucaggauaacaucac

SEQ ID NO: 1331778 - RNA, 18 nt, Human
cucgcacaugaaagcacc

SEQ ID NO: 1331779 - RNA, 20 nt, Human
cucgccauaaaaccuuacua

SEQ ID NO: 1331780 - RNA, 24 nt, Human
cuguccuuguucauuccuggucgu

SEQ ID NO: 1331781 - RNA, 19 nt, Human
cugugcguuaucacaucaa

SEQ ID NO: 1331782 - RNA, 20 nt, Human
cuuaaaaacugcaauccacu

SEQ ID NO: 1331783 - RNA, 22 nt, Human
cuucagccuggagcucagggug

SEQ ID NO: 1331784 - RNA, 19 nt, Human
cuuuucuucucuguguuga

SEQ ID NO: 1331785 - RNA, 24 nt, Human
gaucauaacccuccaaaaaacuaa

SEQ ID NO: 1331786 - RNA, 21 nt, Human
gcaaaaagagccaaggaagcu

SEQ ID NO: 1331787 - RNA, 20 nt, Human
gcaaaauuacaacugagaca

SEQ ID NO: 1331788 - RNA, 21 nt, Human
gcaagauucuaaaccuccccc

SEQ ID NO: 1331789 - RNA, 20 nt, Human
ggagcucaggguggcgggca

SEQ ID NO: 1331790 - RNA, 27 nt, Human
ggcagaggcuucagccuggagcucagg

SEQ ID NO: 1331791 - RNA, 23 nt, Human
ggcaugauguugaagccccacuu

SEQ ID NO: 1331792 - RNA, 23 nt, Human
ggcuucagccuggagcucagggu

SEQ ID NO: 1331793 - RNA, 23 nt, Human
gguagaugaaucuuuucuucucu

SEQ ID NO: 1331794 - RNA, 23 nt, Human
guacaacagcuguuaccaaaacc

SEQ ID NO: 1331795 - RNA, 23 nt, Human
gugcgcgccggcagaggcuucag

SEQ ID NO: 1331796 - RNA, 23 nt, Human
uaaaaccuuacuauguaacacug

SEQ ID NO: 1331797 - RNA, 23 nt, Human
uaacacugcuauagaaaucuaua

SEQ ID NO: 1331798 - RNA, 27 nt, Human
uaaccaauuccaucuugcuucuaaccu

SEQ ID NO: 1331799 - RNA, 22 nt, Human
uaagccaacacaagaggacaac

SEQ ID NO: 1331800 - RNA, 23 nt, Human
uaauaacaaguaucauucaaagc

SEQ ID NO: 1331801 - RNA, 24 nt, Human
uacaacagcuguuaccaaaaccua

SEQ ID NO: 1331802 - RNA, 28 nt, Human
uagcaaggcuucaguuuuccaccuccag

SEQ ID NO: 1331803 - RNA, 21 nt, Human
uauuagaggaaaauaacucag

SEQ ID NO: 1331804 - RNA, 30 nt, Human; identical to SEQ ID NO: 1275747

SEQ ID NO: 1331805 - RNA, 19 nt, Human
ucacuacaaauuuucaaaa

SEQ ID NO: 1331806 - RNA, 21 nt, Human
ucagagcuuuccuuagacuaa

SEQ ID NO: 1331807 - RNA, 23 nt, Human
ucagagcuuuccuuagacuaaaa

SEQ ID NO: 1331808 - RNA, 19 nt, Human
ucaggauaacaucacuauu

SEQ ID NO: 1331809 - RNA, 22 nt, Human
uccgcagaaucaaggcccggca

SEQ ID NO: 1331810 - RNA, 20 nt, Human
ucgccaucucaaaacucuca

SEQ ID NO: 1331811 - RNA, 18 nt, Human
ucucaaaaucugagaaag

SEQ ID NO: 1331812 - RNA, 24 nt, Human
ucuuguggcccccauccagaaauu

SEQ ID NO: 1331813 - RNA, 23 nt, Human
ugaaaacaccaucgcaaaauuac

SEQ ID NO: 1331814 - RNA, 21 nt, Human
ugaaacaaagacaauagcagc

SEQ ID NO: 1331815 - RNA, 24 nt, Human
ugaaagcacccauaaauaauggca

SEQ ID NO: 1331816 - RNA, 18 nt, Human
ugaagcuuucucuucuaa

SEQ ID NO: 1331817 - RNA, 24 nt, Human
ugaucauaacccuccaaaaaacua

SEQ ID NO: 1331818 - RNA, 23 nt, Human
uggcaagaacaaauucacuacaa

SEQ ID NO: 1331819 - RNA, 25 nt, Human
uggcagcagcguguggccacguggu

SEQ ID NO: 1331820 - RNA, 21 nt, Human
uguggcccccauccagaaauu

SEQ ID NO: 1331821 - RNA, 20 nt, Human
uuagcacuguuaauggacag

SEQ ID NO: 1331822 - RNA, 21 nt, Human
uucuaaaccucccccaauugc

SEQ ID NO: 1331823 - RNA, 23 nt, Human
uucuuucuugcuugaucuucgau

SEQ ID NO: 1331824 - RNA, 21 nt, Human
uugaucuucgauaauacuggg

SEQ ID NO: 1331825 - RNA, 23 nt, Human
uugaucuucgauaauacugggaa

SEQ ID NO: 1331826 - RNA, 19 nt, Human
uuucaaauuuucagagcuu

SEQ ID NO: 1331827 - RNA, 21 nt, Human
aaacagaaaguaacaccagaa

SEQ ID NO: 1331828 - RNA, 21 nt, Human
aaaugucacugacuccugaaa

SEQ ID NO: 1331829 - RNA, 22 nt, Human
aaguucacagcuacauccucaa

SEQ ID NO: 1331830 - RNA, 22 nt, Human
aauaacuaauauaagagacaga

SEQ ID NO: 1331831 - RNA, 18 nt, Human
agacagaaggaccagccu

SEQ ID NO: 1331832 - RNA, 18 nt, Human
agcuacauccucaaaugu

SEQ ID NO: 1331833 - RNA, 27 nt, Human
aggaaaaacagaaaguaaccgguaccc

SEQ ID NO: 1331834 - RNA, 23 nt, Human
caaugucuuuggggaaucucaca

SEQ ID NO: 1331835 - RNA, 28 nt, Human
guucacagcuacauccucaaaugucacu

SEQ ID NO: 1331836 - RNA, 21 nt, Human
uaggaaaaacagaaaguaaca

SEQ ID NO: 1331837 - RNA, 26 nt, Human
uaggaaaaacagaaaguaacaccaga

SEQ ID NO: 1331838 - RNA, 21 nt, Human
uauuaggaagugauugauaaa

SEQ ID NO: 1331839 - RNA, 18 nt, Human
aagcagcaccaggagcgg

SEQ ID NO: 1331840 - RNA, 24 nt, Human
caaacgagcacacaagcagcacca

SEQ ID NO: 1331841 - RNA, 19 nt, Human
ucagcugccgcuucacaaa

SEQ ID NO: 1331842 - RNA, 24 nt, Human
uccucagcugccgcuucacaaaag

SEQ ID NO: 1331843 - RNA, 20 nt, Human
acagccaagucucccuugcc

SEQ ID NO: 1331844 - RNA, 21 nt, Human
caacugguccauccaccuccc

SEQ ID NO: 1331845 - RNA, 21 nt, Human
cacagccaagucucccuugcc

SEQ ID NO: 1331846 - RNA, 22 nt, Human
cacagccaagucucccuugccc

SEQ ID NO: 1331847 - RNA, 23 nt, Human
cacagccaagucucccuugcccc

SEQ ID NO: 1331848 - RNA, 22 nt, Human
caccacagccuaccugccccuc

SEQ ID NO: 1331849 - RNA, 23 nt, Human
caccagcccaccccaggggacac

SEQ ID NO: 1331850 - RNA, 18 nt, Human
cagccuaccugccccucc

SEQ ID NO: 1331851 - RNA, 24 nt, Human
caguggaccuugccuccaucucac

SEQ ID NO: 1331852 - RNA, 20 nt, Human
caugccacucugaagcccac

SEQ ID NO: 1331853 - RNA, 19 nt, Human
ccagcccaccccaggggac

SEQ ID NO: 1331854 - RNA, 19 nt, Human
ccccaggggacaccaacug

SEQ ID NO: 1331855 - RNA, 23 nt, Human
cucacagccaagucucccuugcc

SEQ ID NO: 1331856 - RNA, 21 nt, Human
cuccugccucacagccaaguc

SEQ ID NO: 1331857 - RNA, 18 nt, Human
cuggcaccacagccuacc

SEQ ID NO: 1331858 - RNA, 24 nt, Human
gacaccaacugguccauccaccuc

SEQ ID NO: 1331859 - RNA, 18 nt, Human
gaccuugccuccaucuca

SEQ ID NO: 1331860 - RNA, 21 nt, Human
guccauguugagccuuccuca

SEQ ID NO: 1331861 - RNA, 22 nt, Human
guugagccuuccucaaaggcag

SEQ ID NO: 1331862 - RNA, 18 nt, Human
ucugaagcccacaccauu

SEQ ID NO: 1331863 - RNA, 19 nt, Human
ucuuccccagagccccaca

SEQ ID NO: 1331864 - RNA, 19 nt, Human
ugccaugccacucugaagc

SEQ ID NO: 1331865 - RNA, 19 nt, Human
ugccccuccugccucacag

SEQ ID NO: 1331866 - RNA, 21 nt, Human
uguccauguugagccuuccuc

SEQ ID NO: 1331867 - RNA, 22 nt, Human
uugccaugccacucugaagccc

SEQ ID NO: 1331868 - RNA, 18 nt, Human
aacaucuccuuggcugcc

SEQ ID NO: 1331869 - RNA, 21 nt, Human
augaccccagggccccugggc

SEQ ID NO: 1331870 - RNA, 20 nt, Human
caccuucagacucccagcua

SEQ ID NO: 1331871 - RNA, 24 nt, Human
uccaagaacaacaucuccuuggcu

SEQ ID NO: 1331872 - RNA, 19 nt, Human
ugcccaugaccccagggcc

SEQ ID NO: 1331873 - RNA, 20 nt, Human
ugcucucugcccaugacccc

SEQ ID NO: 1331874 - RNA, 19 nt, Human
aacacaggucagugugagg

SEQ ID NO: 1331875 - RNA, 18 nt, Human
aagugcugggauuacagg

SEQ ID NO: 1331876 - RNA, 19 nt, Human
aagugcugggauuacaggc

SEQ ID NO: 1331877 - RNA, 21 nt, Human
aagugcugggauuacaggcau

SEQ ID NO: 1331878 - RNA, 22 nt, Human
aagugcugggauuacaggcaug

SEQ ID NO: 1331879 - RNA, 23 nt, Human
aagugcugggauuacaggcauga

SEQ ID NO: 1331880 - RNA, 26 nt, Human
aagugcugggauuacaggcaugagcu

SEQ ID NO: 1331881 - RNA, 19 nt, Human
acagacagauucagaggcc

SEQ ID NO: 1331882 - RNA, 19 nt, Human
acccaggcuggagugcagu

SEQ ID NO: 1331883 - RNA, 18 nt, Human
acccugucacccaggcug

SEQ ID NO: 1331884 - RNA, 25 nt, Human
acccugucacccaggcuggagugca

SEQ ID NO: 1331885 - RNA, 18 nt, Human
acgggguuucaccguguu

SEQ ID NO: 1331886 - RNA, 19 nt, Human
acgggguuucaccguguua

SEQ ID NO: 1331887 - RNA, 20 nt, Human
acgggguuucaccguguuag

SEQ ID NO: 1331888 - RNA, 24 nt, Human
acgggguuucaccguguuagccag

SEQ ID NO: 1331889 - RNA, 19 nt, Human
agaaaagagaacagggaag

SEQ ID NO: 1331890 - RNA, 21 nt, Human
agaaaagagaacagggaagga

SEQ ID NO: 1331891 - RNA, 21 nt, Human
aggaacacaggucagugugag

SEQ ID NO: 1331892 - RNA, 20 nt, Human
agggaaggaacacaggucag

SEQ ID NO: 1331893 - RNA, 19 nt, Human
aguagcugggacuacaggc

SEQ ID NO: 1331894 - RNA, 23 nt, Human
aguagcugggacuacaggcccgu

SEQ ID NO: 1331895 - RNA, 23 nt, Human
cacccugucacccaggcuggagu

SEQ ID NO: 1331896 - RNA, 24 nt, Human
cacccugucacccaggcuggagug

SEQ ID NO: 1331897 - RNA, 27 nt, Human
cacccugucacccaggcuggagugcag

SEQ ID NO: 1331898 - RNA, 18 nt, Human
caccguguuagccaggau

SEQ ID NO: 1331899 - RNA, 24 nt, Human
caccguguuagccaggaugguuuc

SEQ ID NO: 1331900 - RNA, 21 nt, Human
cacugcaaccuccgccucccg

SEQ ID NO: 1331901 - RNA, 23 nt, Human
cacugcaaccuccgccucccggg

SEQ ID NO: 1331902 - RNA, 18 nt, Human
ccgcacucugcccagguu

SEQ ID NO: 1331903 - RNA, 23 nt, Human
ccgccuccugaguagcugggacu

SEQ ID NO: 1331904 - RNA, 19 nt, Human
ccuaagugcugggauuaca

SEQ ID NO: 1331905 - RNA, 22 nt, Human
ccuaagugcugggauuacaggc

SEQ ID NO: 1331906 - RNA, 23 nt, Human
ccuaagugcugggauuacaggca

SEQ ID NO: 1331907 - RNA, 24 nt, Human
ccuaagugcugggauuacaggcau

SEQ ID NO: 1331908 - RNA, 18 nt, Human
ccucgugaucugcccucc

SEQ ID NO: 1331909 - RNA, 21 nt, Human
ccucgugaucugcccuccucg

SEQ ID NO: 1331910 - RNA, 20 nt, Human
ccucugcgcccagcuaauuu

SEQ ID NO: 1331911 - RNA, 23 nt, Human
ccugaguagcugggacuacaggc

SEQ ID NO: 1331912 - RNA, 24 nt, Human
ccugccuccgccuccugaguagcu

SEQ ID NO: 1331913 - RNA, 24 nt, Human
ccugucacccaggcuggagugcag

SEQ ID NO: 1331914 - RNA, 21 nt, Human
cgcacacaaggcagcugugca

SEQ ID NO: 1331915 - RNA, 19 nt, Human
cgccucccggguugacgcc

SEQ ID NO: 1331916 - RNA, 24 nt, Human
cgggguuucaccguguuagccagg

SEQ ID NO: 1331917 - RNA, 22 nt, Human
cuaagugcugggauuacaggca

SEQ ID NO: 1331918 - RNA, 23 nt, Human
cucacauugugcuaacagggaca

SEQ ID NO: 1331919 - RNA, 24 nt, Human
cucacugcaaccuccgccucccgg

SEQ ID NO: 1331920 - RNA, 22 nt, Human
cuccugaccucgugaucugccc

SEQ ID NO: 1331921 - RNA, 23 nt, Human
cugcaaccuccgccucccggguu

SEQ ID NO: 1331922 - RNA, 20 nt, Human
cuggagugcagucgcacaau

SEQ ID NO: 1331923 - RNA, 18 nt, Human
gaacacaggucaguguga

SEQ ID NO: 1331924 - RNA, 19 nt, Human
gaccucgugaucugcccuc

SEQ ID NO: 1331925 - RNA, 22 nt, Human
gaccucgugaucugcccuccuc

SEQ ID NO: 1331926 - RNA, 24 nt, Human
gaccucgugaucugcccuccucgg

SEQ ID NO: 1331927 - RNA, 24 nt, Human
gagacgggguuucaccguguuagc

SEQ ID NO: 1331928 - RNA, 26 nt, Human
gaguagcugggacuacaggcccgugc

SEQ ID NO: 1331929 - RNA, 19 nt, Human
gauuacaggcaugagcugc

SEQ ID NO: 1331930 - RNA, 23 nt, Human
gauuacaggcaugagcugccgca

SEQ ID NO: 1331931 - RNA, 21 nt, Human
gcaaccuccgccucccggguu

SEQ ID NO: 1331932 - RNA, 23 nt, Human
gcccagcuaauuuuuuguauuuu

SEQ ID NO: 1331933 - RNA, 19 nt, Human
ggaaauccugcaucucagu

SEQ ID NO: 1331934 - RNA, 20 nt, Human
ggaaauccugcaucucaguc

SEQ ID NO: 1331935 - RNA, 19 nt, Human
ggauuacaggcaugagcug

SEQ ID NO: 1331936 - RNA, 23 nt, Human
gggguuucaccguguuagccagg

SEQ ID NO: 1331937 - RNA, 20 nt, Human
gguuucgaucuccugaccuc

SEQ ID NO: 1331938 - RNA, 23 nt, Human
guagagacgggguuucaccgugu

SEQ ID NO: 1331939 - RNA, 24 nt, Human
uaagugcugggauuacaggcauga

SEQ ID NO: 1331940 - RNA, 25 nt, Human
uaauuuuuuguauuuuuuaguagag

SEQ ID NO: 1331941 - RNA, 21 nt, Human
uacaggcaugagcugccgcac

SEQ ID NO: 1331942 - RNA, 21 nt, Human
uagaaaagagaacagggaagg

SEQ ID NO: 1331943 - RNA, 21 nt, Human
uaguagagacgggguuucacc

SEQ ID NO: 1331944 - RNA, 24 nt, Human
uaguagagacgggguuucaccgug

SEQ ID NO: 1331945 - RNA, 26 nt, Human
uaguagagacgggguuucaccguguu

SEQ ID NO: 1331946 - RNA, 26 nt, Human
uaguagagacgggguuucaccguugg

SEQ ID NO: 1331947 - RNA, 21 nt, Human
ucacccaggcuggagugcagu

SEQ ID NO: 1331948 - RNA, 22 nt, Human
ucacccugucacccaggcugga

SEQ ID NO: 1331949 - RNA, 23 nt, Human
ucacccugucacccaggcuggag

SEQ ID NO: 1331950 - RNA, 24 nt, Human
ucacccugucacccaggcuggagu

SEQ ID NO: 1331951 - RNA, 24 nt, Human
ucaccguguuagccaggaugguuu

SEQ ID NO: 1331952 - RNA, 23 nt, Human
ucacugcaaccuccgccucccgg

SEQ ID NO: 1331953 - RNA, 24 nt, Human
ucacugcaaccuccgccucccggg

SEQ ID NO: 1331954 - RNA, 25 nt, Human
ucacugcaaccuccgccucccgggu

SEQ ID NO: 1331955 - RNA, 25 nt, Human
ucacugcaaccuccgccucccgggu

SEQ ID NO: 1331956 - RNA, 24 nt, Human
ucccggguugacgccauucuccug

SEQ ID NO: 1331957 - RNA, 24 nt, Human
ucccuaagugcugggauuacaggc

SEQ ID NO: 1331958 - RNA, 24 nt, Human
uccugaguagcugggacuacaggc

SEQ ID NO: 1331959 - RNA, 24 nt, Human
ucgcacaauccuggcucacugcaa

SEQ ID NO: 1331960 - RNA, 20 nt, Human
ugcaaaaagagaagccagag

SEQ ID NO: 1331961 - RNA, 24 nt, Human
ugcaaaaagagaagccagaguccc

SEQ ID NO: 1331962 - RNA, 23 nt, Human
ugccuccgccuccugaguagcug

SEQ ID NO: 1331963 - RNA, 24 nt, Human
ugccuccgccuccugaguagcugg

SEQ ID NO: 1331964 - RNA, 22 nt, Human
ugccucugcgcccagcuaauuu

SEQ ID NO: 1331965 - RNA, 24 nt, Human
ugccucugcgcccagcuaauuuuu

SEQ ID NO: 1331966 - RNA, 20 nt, Human
ugcugggauuacaggcauga

SEQ ID NO: 1331967 - RNA, 24 nt, Human
uggagugcagucgcacaauccugg

SEQ ID NO: 1331968 - RNA, 18 nt, Human
ugggauuacaggcaugag

SEQ ID NO: 1331969 - RNA, 19 nt, Human
ugggauuacaggcaugagc

SEQ ID NO: 1331970 - RNA, 21 nt, Human
ugggauuacaggcaugagcug

SEQ ID NO: 1331971 - RNA, 22 nt, Human
ugggauuacaggcaugagcugc

SEQ ID NO: 1331972 - RNA, 23 nt, Human
ugggauuacaggcaugagcugcc

SEQ ID NO: 1331973 - RNA, 24 nt, Human
ugggauuacaggcaugagcugccg

SEQ ID NO: 1331974 - RNA, 24 nt, Human
ugggauuacaggcaugagcugccg

SEQ ID NO: 1331975 - RNA, 25 nt, Human
ugggauuacaggcaugagcugccgc

SEQ ID NO: 1331976 - RNA, 21 nt, Human
ugugaggaagggggucauggu

SEQ ID NO: 1331977 - RNA, 18 nt, Human
uuaguagagacgggguuu

SEQ ID NO: 1331978 - RNA, 22 nt, Human
uuaguagagacgggguuucacc

SEQ ID NO: 1331979 - RNA, 24 nt, Human
uuaguagagacgggguuucaccgu

SEQ ID NO: 1331980 - RNA, 18 nt, Human
uugcaaaaagagaagcca

SEQ ID NO: 1331981 - RNA, 22 nt, Human
uuucacccugucacccaggcug

SEQ ID NO: 1331982 - RNA, 24 nt, Human
uuucacccugucacccaggcugga

SEQ ID NO: 1331983 - RNA, 19 nt, Human
uuucaccguguuagccagg

SEQ ID NO: 1331984 - RNA, 24 nt, Human
uuuuuaguagagacgggguuucac

SEQ ID NO: 1331985 - RNA, 27 nt, Human
uuuuuauuuuucaauuuuuauuuuuug

SEQ ID NO: 1331986 - RNA, 22 nt, Human
uuuuuguauuuuuuaguagaga

SEQ ID NO: 1331987 - RNA, 23 nt, Human
uuuuuuaguagagacgggguuuc

SEQ ID NO: 1331988 - RNA, 25 nt, Human
uuuuuuguauuuuuuaguagagacg

SEQ ID NO: 1331989 - RNA, 18 nt, Human
aaaaaagaagggagaaga

SEQ ID NO: 1331990 - RNA, 22 nt, Human
aacugacugccccccggggcag

SEQ ID NO: 1331991 - RNA, 20 nt, Human
agaguccugggugccgaccu

SEQ ID NO: 1331992 - RNA, 24 nt, Human
aggaaggaggcgcgcgugggagga

SEQ ID NO: 1331993 - RNA, 24 nt, Human
aggcgagaggaugaugcggggugg

SEQ ID NO: 1331994 - RNA, 24 nt, Human
agggggcggcggagcggagggcgg

SEQ ID NO: 1331995 - RNA, 24 nt, Human
agugcaaaagcgggcgagaaggga

SEQ ID NO: 1331996 - RNA, 21 nt, Human
caaagauacugggagggaaga

SEQ ID NO: 1331997 - RNA, 20 nt, Human
caccuggagggggcggcgga

SEQ ID NO: 1331998 - RNA, 18 nt, Human
cagauguucuccgcaacc

SEQ ID NO: 1331999 - RNA, 23 nt, Human
cagcgagggaagaaaagaguaau

SEQ ID NO: 1332000 - RNA, 22 nt, Human
cagcuguuagccuggaacagcc

SEQ ID NO: 1332001 - RNA, 21 nt, Human
caguggcaccgagagggcgcc

SEQ ID NO: 1332002 - RNA, 20 nt, Human
caguucaucuggggaagggg

SEQ ID NO: 1332003 - RNA, 22 nt, Human
cccacagcuguuagccuggaac

SEQ ID NO: 1332004 - RNA, 26 nt, Human
cccacagcuguuagccuggaacagcc

SEQ ID NO: 1332005 - RNA, 24 nt, Human
cccaggucaguccaaaagcaaaga

SEQ ID NO: 1332006 - RNA, 20 nt, Human
cccccggggcagcccccgcc

SEQ ID NO: 1332007 - RNA, 23 nt, Human
cccgggacccuagaggaggcggg

SEQ ID NO: 1332008 - RNA, 25 nt, Human
cccgggcuugaccuuaguggaaagc

SEQ ID NO: 1332009 - RNA, 24 nt, Human
cccuccaggagcgaggcgagagga

SEQ ID NO: 1332010 - RNA, 19 nt, Human
cccucuggcccgagagccu

SEQ ID NO: 1332011 - RNA, 21 nt, Human
cccucuggcccgagagccugu

SEQ ID NO: 1332012 - RNA, 21 nt, Human
ccgcaaccuuccggaagugga

SEQ ID NO: 1332013 - RNA, 19 nt, Human
ccgccgagcucccgccgcc

SEQ ID NO: 1332014 - RNA, 20 nt, Human
ccgccgagcucccgccgccu

SEQ ID NO: 1332015 - RNA, 24 nt, Human
ccucaacugacugccccccggggc

SEQ ID NO: 1332016 - RNA, 23 nt, Human
ccuccgccgagcucccgccgccu

SEQ ID NO: 1332017 - RNA, 18 nt, Human
cgagaagggaaacccaag

SEQ ID NO: 1332018 - RNA, 18 nt, Human
cgaggaccggauguggcg

SEQ ID NO: 1332019 - RNA, 24 nt, Human
cggggcuagcaggugacgucagcg

SEQ ID NO: 1332020 - RNA, 22 nt, Human
cugaggcuauacuacaaagccc

SEQ ID NO: 1332021 - RNA, 22 nt, Human
gacaaggacuuuuggggggagg

SEQ ID NO: 1332022 - RNA, 20 nt, Human
gagagggcgccccggcggcg

SEQ ID NO: 1332023 - RNA, 23 nt, Human
gagcugguugugguguuuuccag

SEQ ID NO: 1332024 - RNA, 21 nt, Human
gcaaagauacugggagggaag

SEQ ID NO: 1332025 - RNA, 20 nt, Human
gcccucuggcccgagagccu

SEQ ID NO: 1332026 - RNA, 21 nt, Human
gcgagaagggaaacccaagcg

SEQ ID NO: 1332027 - RNA, 20 nt, Human
gcggcgauggaaggcggacg

SEQ ID NO: 1332028 - RNA, 24 nt, Human
gcggcggcgauggaaggcggacgg

SEQ ID NO: 1332029 - RNA, 22 nt, Human
ggaacgaugauaaggagcaggu

SEQ ID NO: 1332030 - RNA, 23 nt, Human
ggaaggaggcgcgcgugggagga

SEQ ID NO: 1332031 - RNA, 24 nt, Human
ggacaaggacuuuuggggggaggu

SEQ ID NO: 1332032 - RNA, 19 nt, Human
ggagagggggcguggacac

SEQ ID NO: 1332033 - RNA, 19 nt, Human
ggagggaagauggcgcugg

SEQ ID NO: 1332034 - RNA, 19 nt, Human
ggcgagaagggaaacccaa

SEQ ID NO: 1332035 - RNA, 19 nt, Human
gggaaggggcuacaaagca

SEQ ID NO: 1332036 - RNA, 25 nt, Human
gggcgagaagggaaacccaagcggg

SEQ ID NO: 1332037 - RNA, 21 nt, Human
gggcgccccggcggcgaggaa

SEQ ID NO: 1332038 - RNA, 19 nt, Human
uaagugcaaaagcgggcga

SEQ ID NO: 1332039 - RNA, 25 nt, Human
uacagaucauaagugcaaaagcggg

SEQ ID NO: 1332040 - RNA, 18 nt, Human
uacccccaggucagucca

SEQ ID NO: 1332041 - RNA, 25 nt, Human
uaccuugcgcucccgggagaaccua

SEQ ID NO: 1332042 - RNA, 24 nt, Human
ucaccuggagggggcggcggagcg

SEQ ID NO: 1332043 - RNA, 21 nt, Human
ugagagccaguggcaccgaga

SEQ ID NO: 1332044 - RNA, 23 nt, Human
ugagagccaguggcaccgagagg

SEQ ID NO: 1332045 - RNA, 20 nt, Human
ugagaguccugggugccgac

SEQ ID NO: 1332046 - RNA, 19 nt, Human
ugaggagcugguuguggug

SEQ ID NO: 1332047 - RNA, 20 nt, Human
ugccccccggggcagccccc

SEQ ID NO: 1332048 - RNA, 19 nt, Human
ugcuggacuacaccggggg

SEQ ID NO: 1332049 - RNA, 22 nt, Human
ugcuggacuacaccgggggcac

SEQ ID NO: 1332050 - RNA, 18 nt, Human
uggagggggcggcggagc

SEQ ID NO: 1332051 - RNA, 21 nt, Human
ugggagggaagauggcgcugg

SEQ ID NO: 1332052 - RNA, 22 nt, Human
ugggguggcagaggggagauac

SEQ ID NO: 1332053 - RNA, 22 nt, Human
uucggaggagggggggcgcgug

SEQ ID NO: 1332054 - RNA, 19 nt, Human
aauguauagaaggaaaagg

SEQ ID NO: 1332055 - RNA, 24 nt, Human
agcuuuauuccaaaaauaauuuua

SEQ ID NO: 1332056 - RNA, 22 nt, Human
cagaggccuggagcccucggcu

SEQ ID NO: 1332057 - RNA, 23 nt, Human
cagcuaccuugggaccucuagga

SEQ ID NO: 1332058 - RNA, 22 nt, Human
cuggagccucagcuucgcaagu

SEQ ID NO: 1332059 - RNA, 26 nt, Human
ggccuggagcccucggcuggagccuc

SEQ ID NO: 1332060 - RNA, 22 nt, Human
guauagaaggaaaaggagcugg

SEQ ID NO: 1332061 - RNA, 22 nt, Human
gucagcuaccuugggaccucua

SEQ ID NO: 1332062 - RNA, 19 nt, Human
ucagaggccuggagcccuc

SEQ ID NO: 1332063 - RNA, 21 nt, Human
ugcucccggcccugaagcguc

SEQ ID NO: 1332064 - RNA, 27 nt, Human
uguauagaaggaaaaggagcugguuga

SEQ ID NO: 1332065 - RNA, 21 nt, Human
uuaauagguauuaaauaaugu

SEQ ID NO: 1332066 - RNA, 18 nt, Human
aaacaagaaaagcccuga

SEQ ID NO: 1332067 - RNA, 18 nt, Human
aacaagaaaagcccugac

SEQ ID NO: 1332068 - RNA, 19 nt, Human
acaagaaaagcccugacgc

SEQ ID NO: 1332069 - RNA, 18 nt, Human
caagaaaagcccugacgc

SEQ ID NO: 1332070 - RNA, 21 nt, Human
ccccgcccagucccgcccgcc

SEQ ID NO: 1332071 - RNA, 20 nt, Human
cccgcccagucccgcccgcc

SEQ ID NO: 1332072 - RNA, 20 nt, Human
cccgccgagguccgugucca

SEQ ID NO: 1332073 - RNA, 24 nt, Human
ccgcccgccgagguccguguccaa

SEQ ID NO: 1332074 - RNA, 19 nt, Human
gauccuccucgcgcacccc

SEQ ID NO: 1332075 - RNA, 18 nt, Human
ggcuccuggagauugagg

SEQ ID NO: 1332076 - RNA, 22 nt, Human
gggaaagauggugaaaaaaugc

SEQ ID NO: 1332077 - RNA, 23 nt, Human
ggugaaaaaaugcgaggaaaaga

SEQ ID NO: 1332078 - RNA, 30 nt, Human; identical to SEQ ID NO: 1328529

SEQ ID NO: 1332079 - RNA, 20 nt, Human
ugaugccccgccccgcccag

SEQ ID NO: 1332080 - RNA, 20 nt, Human
aaaugcagacacacagauaa

SEQ ID NO: 1332081 - RNA, 18 nt, Human
aauuagccaggcauggug

SEQ ID NO: 1332082 - RNA, 22 nt, Human
acacacagagcagguaguugua

SEQ ID NO: 1332083 - RNA, 26 nt, Human
acagagugaggcccugucccuacaaa

SEQ ID NO: 1332084 - RNA, 20 nt, Human
accacugcaaaacuccaucu

SEQ ID NO: 1332085 - RNA, 24 nt, Human
accagcuugugcaacagagugagg

SEQ ID NO: 1332086 - RNA, 22 nt, Human
accaggucuugggugcccaggu

SEQ ID NO: 1332087 - RNA, 21 nt, Human
acccaccccggggcacgcaca

SEQ ID NO: 1332088 - RNA, 22 nt, Human
accccccuccccccuccccccc

SEQ ID NO: 1332089 - RNA, 23 nt, Human
accccccuccccccucccccccc

SEQ ID NO: 1332090 - RNA, 25 nt, Human
accccccuccccccuccccccccac

SEQ ID NO: 1332091 - RNA, 21 nt, Human
acccgcccucccuccuuaucu

SEQ ID NO: 1332092 - RNA, 19 nt, Human
agagauacagggaccuugc

SEQ ID NO: 1332093 - RNA, 22 nt, Human
agaggucacacuggacccagag

SEQ ID NO: 1332094 - RNA, 18 nt, Human
agcagcuccccucugucu

SEQ ID NO: 1332095 - RNA, 22 nt, Human
agcauuuugggaggccaaggca

SEQ ID NO: 1332096 - RNA, 24 nt, Human
aggaauugaaggcugcaaugagcu

SEQ ID NO: 1332097 - RNA, 18 nt, Human
aggcaggaggauugccug

SEQ ID NO: 1332098 - RNA, 24 nt, Human
aggcaggaggauugccugagccca

SEQ ID NO: 1332099 - RNA, 21 nt, Human
aggcugaggcaggaggauugc

SEQ ID NO: 1332100 - RNA, 24 nt, Human
aggcugaggcaggaggauugccug

SEQ ID NO: 1332101 - RNA, 24 nt, Human
aggugcaguggcucacaccuguaa

SEQ ID NO: 1332102 - RNA, 24 nt, Human
aguggcucacaccuguaaucucag

SEQ ID NO: 1332103 - RNA, 18 nt, Human
auccugcucuuggcucuu

SEQ ID NO: 1332104 - RNA, 19 nt, Human
augucugagguggccacaa

SEQ ID NO: 1332105 - RNA, 24 nt, Human
caagugaauaugcguaccccccuc

SEQ ID NO: 1332106 - RNA, 22 nt, Human
cacaaccuaaucucuguguacc

SEQ ID NO: 1332107 - RNA, 24 nt, Human
cacaccuguaaucucagcauuuug

SEQ ID NO: 1332108 - RNA, 22 nt, Human
cacauggaaaugcccugggaac

SEQ ID NO: 1332109 - RNA, 19 nt, Human
caccccggggcacgcacag

SEQ ID NO: 1332110 - RNA, 24 nt, Human
caccuguaaucucagcauuuuggg

SEQ ID NO: 1332111 - RNA, 18 nt, Human
cagagugaggcccugucc

SEQ ID NO: 1332112 - RNA, 20 nt, Human
cagauggaguccagcaugga

SEQ ID NO: 1332113 - RNA, 24 nt, Human
cagcauuuugggaggccaaggcag

SEQ ID NO: 1332114 - RNA, 24 nt, Human
cagcauuuugggaggccaaggcag

SEQ ID NO: 1332115 - RNA, 24 nt, Human
cagcuacucaggaggcugaggcag

SEQ ID NO: 1332116 - RNA, 18 nt, Human
caggucuugggugcccag

SEQ ID NO: 1332117 - RNA, 21 nt, Human
caggucuugggugcccagguc

SEQ ID NO: 1332118 - RNA, 23 nt, Human
ccacacucccucuccaaaaaaua

SEQ ID NO: 1332119 - RNA, 23 nt, Human
ccagagccugcagaggucacacu

SEQ ID NO: 1332120 - RNA, 19 nt, Human
ccauagcaugcuggcaccc

SEQ ID NO: 1332121 - RNA, 23 nt, Human
ccaucuaaaaaaaaaauggccau

SEQ ID NO: 1332122 - RNA, 23 nt, Human
cccauagcaugcuggcacccgcc

SEQ ID NO: 1332123 - RNA, 22 nt, Human
ccccccuccccccccacacaca

SEQ ID NO: 1332124 - RNA, 24 nt, Human
ccccccuccccccccacacacaga

SEQ ID NO: 1332125 - RNA, 19 nt, Human
ccccccuccccccuccccc

SEQ ID NO: 1332126 - RNA, 22 nt, Human
cccccuccccccucccccccca

SEQ ID NO: 1332127 - RNA, 22 nt, Human
ccccucugucuuccaagaccug

SEQ ID NO: 1332128 - RNA, 22 nt, Human
cccucccuccuuaucucuccca

SEQ ID NO: 1332129 - RNA, 22 nt, Human
cccucccuccuuaucucuccca

SEQ ID NO: 1332130 - RNA, 21 nt, Human
ccuccacccugauggguaguc

SEQ ID NO: 1332131 - RNA, 19 nt, Human
ccuccaccucauccugcuc

SEQ ID NO: 1332132 - RNA, 18 nt, Human
ccuggagcacauggaaau

SEQ ID NO: 1332133 - RNA, 21 nt, Human
ccuugccuggggcaaaaagga

SEQ ID NO: 1332134 - RNA, 24 nt, Human
cguaccccccuccccccucccccc

SEQ ID NO: 1332135 - RNA, 21 nt, Human
cucacaccuguaaucucagca

SEQ ID NO: 1332136 - RNA, 21 nt, Human
cucacaccuguaaucucagca

SEQ ID NO: 1332137 - RNA, 19 nt, Human
cucauccugcucuuggcuc

SEQ ID NO: 1332138 - RNA, 19 nt, Human
cuccccccuccccccccac

SEQ ID NO: 1332139 - RNA, 22 nt, Human
cucuguguaccacaggccucac

SEQ ID NO: 1332140 - RNA, 19 nt, Human
cugaaacccaugacugcug

SEQ ID NO: 1332141 - RNA, 23 nt, Human
cugacacuggagaaacccaauug

SEQ ID NO: 1332142 - RNA, 21 nt, Human
cuguagucccagcuacucagg

SEQ ID NO: 1332143 - RNA, 18 nt, Human
gaaaggaaaccaggucuu

SEQ ID NO: 1332144 - RNA, 24 nt, Human
gaaagucuuucccuugggaaacca

SEQ ID NO: 1332145 - RNA, 23 nt, Human
gaauaugcguaccccccuccccc

SEQ ID NO: 1332146 - RNA, 22 nt, Human
gacuucaagugaauaugcguac

SEQ ID NO: 1332147 - RNA, 18 nt, Human
gagcagguaguuguaacg

SEQ ID NO: 1332148 - RNA, 19 nt, Human
gauugcaccacugcaaaac

SEQ ID NO: 1332149 - RNA, 19 nt, Human
gcugcaaugagcuaugauu

SEQ ID NO: 1332150 - RNA, 20 nt, Human
ggaaaacaugugcaacuggg

SEQ ID NO: 1332151 - RNA, 20 nt, Human
ggagcacucagggagaugag

SEQ ID NO: 1332152 - RNA, 22 nt, Human
ggaggauugccugagcccagga

SEQ ID NO: 1332153 - RNA, 22 nt, Human
ggcaaaaaggauuagaaaaugc

SEQ ID NO: 1332154 - RNA, 18 nt, Human
ggcgaggugcaguggcuc

SEQ ID NO: 1332155 - RNA, 21 nt, Human
ggcgaggugcaguggcucaca

SEQ ID NO: 1332156 - RNA, 20 nt, Human
gggaaaccagggagcacuca

SEQ ID NO: 1332157 - RNA, 23 nt, Human
ggggcaaaaaggauuagaaaaug

SEQ ID NO: 1332158 - RNA, 20 nt, Human
gugcagcucuucugggcggg

SEQ ID NO: 1332159 - RNA, 18 nt, Human
gugcaguggcucacaccu

SEQ ID NO: 1332160 - RNA, 21 nt, Human
uaagugguggaagauggagca

SEQ ID NO: 1332161 - RNA, 18 nt, Human
uaccacaggccucacgca

SEQ ID NO: 1332162 - RNA, 22 nt, Human
uagauaagcaucuuugugagag

SEQ ID NO: 1332163 - RNA, 22 nt, Human
uagcaugcuggcacccgcccuc

SEQ ID NO: 1332164 - RNA, 20 nt, Human
uagccucuaaagcagcuccc

SEQ ID NO: 1332165 - RNA, 23 nt, Human
uagcuaaaugagcaauauaguau

SEQ ID NO: 1332166 - RNA, 23 nt, Human
ucaaagcaacuuagccucuaaag

SEQ ID NO: 1332167 - RNA, 18 nt, Human
ucaaggaggccaggaguu

SEQ ID NO: 1332168 - RNA, 21 nt, Human
ucaaggaggccaggaguucaa

SEQ ID NO: 1332169 - RNA, 18 nt, Human
ucacaucacagacuuucu

SEQ ID NO: 1332170 - RNA, 24 nt, Human
ucagagcugcuguuccagagccug

SEQ ID NO: 1332171 - RNA, 25 nt, Human
ucagagcugcuguuccagagccugc

SEQ ID NO: 1332172 - RNA, 21 nt, Human
uccaucuaaaaaaaaaauggc

SEQ ID NO: 1332173 - RNA, 20 nt, Human
uccccccuccccccccacac

SEQ ID NO: 1332174 - RNA, 22 nt, Human
ucccuacaaaaaauucuaaaaa

SEQ ID NO: 1332175 - RNA, 20 nt, Human
ucuacugcugugaguugggg

SEQ ID NO: 1332176 - RNA, 18 nt, Human
ucucaaacaaagcuggga

SEQ ID NO: 1332177 - RNA, 21 nt, Human
ucucugcugagggcucugucc

SEQ ID NO: 1332178 - RNA, 23 nt, Human
ucuuugguuugcugacacuggag

SEQ ID NO: 1332179 - RNA, 18 nt, Human
ugaaacccaugacugcug

SEQ ID NO: 1332180 - RNA, 25 nt, Human
ugaauaugcguaccccccucccccc

SEQ ID NO: 1332181 - RNA, 20 nt, Human
ugaggcaggaggauugccug

SEQ ID NO: 1332182 - RNA, 24 nt, Human
ugaggcaggaggauugccugagcc

SEQ ID NO: 1332183 - RNA, 25 nt, Human
ugaggcaggaggauugccugagccc

SEQ ID NO: 1332184 - RNA, 19 nt, Human
ugaguuggggugaacccac

SEQ ID NO: 1332185 - RNA, 22 nt, Human
ugcaaugagcuaugauugcacc

SEQ ID NO: 1332186 - RNA, 21 nt, Human
ugcagcucuucugggcgggga

SEQ ID NO: 1332187 - RNA, 24 nt, Human
ugccugagcccaggaauugaaggc

SEQ ID NO: 1332188 - RNA, 21 nt, Human
ugcugaaacccaugacugcug

SEQ ID NO: 1332189 - RNA, 23 nt, Human
uggagguuuucuccuauaacuga

SEQ ID NO: 1332190 - RNA, 22 nt, Human
uggcacccgcccucccuccuua

SEQ ID NO: 1332191 - RNA, 21 nt, Human
uggcucacaccuguaaucuca

SEQ ID NO: 1332192 - RNA, 24 nt, Human
uggcucacaccuguaaucucagca

SEQ ID NO: 1332193 - RNA, 18 nt, Human
uggcuguguuggccccac

SEQ ID NO: 1332194 - RNA, 21 nt, Human
ugggaggggucuccugggaug

SEQ ID NO: 1332195 - RNA, 24 nt, Human
ugggaugaaugaaaggaaaccagg

SEQ ID NO: 1332196 - RNA, 22 nt, Human
uggggagguuagauaagcaucu

SEQ ID NO: 1332197 - RNA, 21 nt, Human
uggguagucaggccuggagca

SEQ ID NO: 1332198 - RNA, 24 nt, Human
ugguuugcugacacuggagaaacc

SEQ ID NO: 1332199 - RNA, 22 nt, Human
uguaacgccuccaccucauccu

SEQ ID NO: 1332200 - RNA, 18 nt, Human
ugucucagagauacaggg

SEQ ID NO: 1332201 - RNA, 21 nt, Human
ugugcaacagagugaggcccu

SEQ ID NO: 1332202 - RNA, 19 nt, Human
ugugcuggacucagaauug

SEQ ID NO: 1332203 - RNA, 20 nt, Human
ugugcuggacucagaauugg

SEQ ID NO: 1332204 - RNA, 21 nt, Human
uguggugguuucacuucaaga

SEQ ID NO: 1332205 - RNA, 22 nt, Human
uguguaccacaggccucacgca

SEQ ID NO: 1332206 - RNA, 18 nt, Human
uucaagauuuucaggauc

SEQ ID NO: 1332207 - RNA, 24 nt, Human
uucaaggaggccaggaguucaaga

SEQ ID NO: 1332208 - RNA, 20 nt, Human
uucuagaguaagcuuuuagg

SEQ ID NO: 1332209 - RNA, 24 nt, Human
uugccugagcccaggaauugaagg

SEQ ID NO: 1332210 - RNA, 23 nt, Human
uugcugacacuggagaaacccaa

SEQ ID NO: 1332211 - RNA, 22 nt, Human
uuggauuuuacuguggagauuu

SEQ ID NO: 1332212 - RNA, 23 nt, Human
acucuuuugggaaggagggaaac

SEQ ID NO: 1332213 - RNA, 18 nt, Human
augcacacacacaacagu

SEQ ID NO: 1332214 - RNA, 18 nt, Human
cuuguuugugcccaaggc

SEQ ID NO: 1332215 - RNA, 19 nt, Human
ggcaugcacacacacaaca

SEQ ID NO: 1332216 - RNA, 19 nt, Human
ugggaaggagggaaacuga

SEQ ID NO: 1332217 - RNA, 27 nt, Human
uuugugcccaaggcaugcacacacaca

SEQ ID NO: 1332218 - RNA, 23 nt, Human
acccacuucuccaggauccuccc

SEQ ID NO: 1332219 - RNA, 19 nt, Human
auccucccagcccccaggc

SEQ ID NO: 1332220 - RNA, 20 nt, Human
ccaggauccucccagccccc

SEQ ID NO: 1332221 - RNA, 21 nt, Human
ccaggauccucccagccccca

SEQ ID NO: 1332222 - RNA, 20 nt, Human
cccaggcuggcuuucccucc

SEQ ID NO: 1332223 - RNA, 21 nt, Human
cccccaggcuggcuuucccuc

SEQ ID NO: 1332224 - RNA, 22 nt, Human
gcucuagauucugucuccagcc

SEQ ID NO: 1332225 - RNA, 24 nt, Human
gggcaaccccaggauggggaaggg

SEQ ID NO: 1332226 - RNA, 23 nt, Human
uagagcagaauucagacucagcu

SEQ ID NO: 1332227 - RNA, 19 nt, Human
uccccaaccgcgagagccc

SEQ ID NO: 1332228 - RNA, 18 nt, Human
uccucccagcccccaggc

SEQ ID NO: 1332229 - RNA, 18 nt, Human
ucuguccccacccacuuc

SEQ ID NO: 1332230 - RNA, 21 nt, Human
uuccccaaccgcgagagcccc

SEQ ID NO: 1332231 - RNA, 19 nt, Human
aaccucaccgagagcccaa

SEQ ID NO: 1332232 - RNA, 21 nt, Human
agaagaggagagagagaggcc

SEQ ID NO: 1332233 - RNA, 21 nt, Human
agaggccagagccuggggaug

SEQ ID NO: 1332234 - RNA, 25 nt, Human
agccaggugcucugcauggcaaggu

SEQ ID NO: 1332235 - RNA, 21 nt, Human
agcccaaacucucaccuacag

SEQ ID NO: 1332236 - RNA, 23 nt, Human
agccuuuuccuucucccaaccuc

SEQ ID NO: 1332237 - RNA, 22 nt, Human
aucugucuuuaucgccuccccc

SEQ ID NO: 1332238 - RNA, 19 nt, Human
cacccccuggcccauaagc

SEQ ID NO: 1332239 - RNA, 20 nt, Human
cagggaccacaagccagcac

SEQ ID NO: 1332240 - RNA, 18 nt, Human
ccagcacagaggcgaccu

SEQ ID NO: 1332241 - RNA, 23 nt, Human
ccagcacagaggcgaccuccucc

SEQ ID NO: 1332242 - RNA, 20 nt, Human
cccaacccuuccacucugcu

SEQ ID NO: 1332243 - RNA, 20 nt, Human
ccccaacccuuccacucugc

SEQ ID NO: 1332244 - RNA, 18 nt, Human
cccccaacccuuccacuc

SEQ ID NO: 1332245 - RNA, 21 nt, Human
cccccaacccuuccacucugc

SEQ ID NO: 1332246 - RNA, 23 nt, Human
ccugcagccgggucagagugagc

SEQ ID NO: 1332247 - RNA, 23 nt, Human
ccuggcccauaagccuuuuccuu

SEQ ID NO: 1332248 - RNA, 21 nt, Human
cucccucccacccccuggccc

SEQ ID NO: 1332249 - RNA, 20 nt, Human
cuggcccauaagccuuuucc

SEQ ID NO: 1332250 - RNA, 21 nt, Human
cuguuccugcuucucuuuuca

SEQ ID NO: 1332251 - RNA, 23 nt, Human
gaaagaaaaaugguaauacggaa

SEQ ID NO: 1332252 - RNA, 19 nt, Human
gagagagagaggccagagc

SEQ ID NO: 1332253 - RNA, 25 nt, Human
gcugugcccauucucccucccaccc

SEQ ID NO: 1332254 - RNA, 21 nt, Human
ggcuugggggaagggcagcuc

SEQ ID NO: 1332255 - RNA, 20 nt, Human
gggcuugggggaagggcagc

SEQ ID NO: 1332256 - RNA, 23 nt, Human
gguugcccucaggguccuccuug

SEQ ID NO: 1332257 - RNA, 20 nt, Human
guggaguauuuuacuguucc

SEQ ID NO: 1332258 - RNA, 19 nt, Human
gugguugcccucagggucc

SEQ ID NO: 1332259 - RNA, 21 nt, Human
guucugguccccuugagucuu

SEQ ID NO: 1332260 - RNA, 21 nt, Human
ucccaaccucaccgagagccc

SEQ ID NO: 1332261 - RNA, 21 nt, Human
ucccaaccucaccgagagccc

SEQ ID NO: 1332262 - RNA, 22 nt, Human
ucccaaccucaccgagagccca

SEQ ID NO: 1332263 - RNA, 18 nt, Human
uccgggguuggcuccuuc

SEQ ID NO: 1332264 - RNA, 18 nt, Human
uccugcuucucuuuucac

SEQ ID NO: 1332265 - RNA, 23 nt, Human
ucucccaaccucaccgagagccc

SEQ ID NO: 1332266 - RNA, 24 nt, Human
ucucccaaccucaccgagagccca

SEQ ID NO: 1332267 - RNA, 21 nt, Human
ucugucuuuaucgccuccccc

SEQ ID NO: 1332268 - RNA, 27 nt, Human
ugaaagaaaaaugguaauacggaaaca

SEQ ID NO: 1332269 - RNA, 19 nt, Human
uggcagaugagaagccagg

SEQ ID NO: 1332270 - RNA, 19 nt, Human
uggcccauaagccuuuucc

SEQ ID NO: 1332271 - RNA, 24 nt, Human
uggcugugcccauucucccuccca

SEQ ID NO: 1332272 - RNA, 18 nt, Human
ugggcuugggggaagggc

SEQ ID NO: 1332273 - RNA, 18 nt, Human
ugggggaagggcagcucc

SEQ ID NO: 1332274 - RNA, 24 nt, Human
ugguugcccucaggguccuccuug

SEQ ID NO: 1332275 - RNA, 20 nt, Human
ugucagggaccacaagccag

SEQ ID NO: 1332276 - RNA, 19 nt, Human
ugucuuuaucgccuccccc

SEQ ID NO: 1332277 - RNA, 18 nt, Human
uuccugcagccgggucag

SEQ ID NO: 1332278 - RNA, 22 nt, Human
uuccugcagccgggucagagug

SEQ ID NO: 1332279 - RNA, 19 nt, Human
uugcccucaggguccuccu

SEQ ID NO: 1332280 - RNA, 19 nt, Human
uuuacuguuccugcuucuc

SEQ ID NO: 1332281 - RNA, 24 nt, Human
uuuuacuguuccugcuucucuuuu

SEQ ID NO: 1332282 - RNA, 19 nt, Human
aaccucaccgagagcccaa

SEQ ID NO: 1332283 - RNA, 21 nt, Human
agaagaggagagagagaggcc

SEQ ID NO: 1332284 - RNA, 21 nt, Human
agaggccagagccuggggaug

SEQ ID NO: 1332285 - RNA, 25 nt, Human
agccaggugcucugcauggcaaggu

SEQ ID NO: 1332286 - RNA, 21 nt, Human
agcccaaacucucaccuacag

SEQ ID NO: 1332287 - RNA, 23 nt, Human
agccuuuuccuucucccaaccuc

SEQ ID NO: 1332288 - RNA, 19 nt, Human
cacccccuggcccauaagc

SEQ ID NO: 1332289 - RNA, 25 nt, Human
cccugcgugucucaguuucucuccu

SEQ ID NO: 1332290 - RNA, 23 nt, Human
ccugcagccgggucagagugagc

SEQ ID NO: 1332291 - RNA, 23 nt, Human
ccuggcccauaagccuuuuccuu

SEQ ID NO: 1332292 - RNA, 21 nt, Human
cucccucccacccccuggccc

SEQ ID NO: 1332293 - RNA, 20 nt, Human
cuggcccauaagccuuuucc

SEQ ID NO: 1332294 - RNA, 19 nt, Human
gagagagagaggccagagc

SEQ ID NO: 1332295 - RNA, 23 nt, Human
gguugcccucaggguccuccuug

SEQ ID NO: 1332296 - RNA, 19 nt, Human
gugguugcccucagggucc

SEQ ID NO: 1332297 - RNA, 21 nt, Human
guucugguccccuugagucuu

SEQ ID NO: 1332298 - RNA, 21 nt, Human
ucccaaccucaccgagagccc

SEQ ID NO: 1332299 - RNA, 21 nt, Human
ucccaaccucaccgagagccc

SEQ ID NO: 1332300 - RNA, 22 nt, Human
ucccaaccucaccgagagccca

SEQ ID NO: 1332301 - RNA, 18 nt, Human
uccgggguuggcuccuuc

SEQ ID NO: 1332302 - RNA, 23 nt, Human
ucucccaaccucaccgagagccc

SEQ ID NO: 1332303 - RNA, 24 nt, Human
ucucccaaccucaccgagagccca

SEQ ID NO: 1332304 - RNA, 19 nt, Human
uggcagaugagaagccagg

SEQ ID NO: 1332305 - RNA, 19 nt, Human
uggcccauaagccuuuucc

SEQ ID NO: 1332306 - RNA, 21 nt, Human
ugucagggaccacaagcccug

SEQ ID NO: 1332307 - RNA, 18 nt, Human
uuccugcagccgggucag

SEQ ID NO: 1332308 - RNA, 22 nt, Human
uuccugcagccgggucagagug

SEQ ID NO: 1332309 - RNA, 19 nt, Human
uugcccucaggguccuccu

SEQ ID NO: 1332310 - RNA, 20 nt, Human
aaaaaacauaaucaaaagaa

SEQ ID NO: 1332311 - RNA, 24 nt, Human
aaaacauaaucaaaagaaggcaca

SEQ ID NO: 1332312 - RNA, 22 nt, Human
aagaaggcacagaggccagggg

SEQ ID NO: 1332313 - RNA, 19 nt, Human
aagcccccaauucucuuuu

SEQ ID NO: 1332314 - RNA, 26 nt, Human
aagcuguaggccccagugaguucugg

SEQ ID NO: 1332315 - RNA, 22 nt, Human
aaggaggggguaauaaagggau

SEQ ID NO: 1332316 - RNA, 19 nt, Human
acccuaagcccccaauucu

SEQ ID NO: 1332317 - RNA, 27 nt, Human
agaggccagggggcuacaugggaacag

SEQ ID NO: 1332318 - RNA, 19 nt, Human
agaugucagggaucaaagc

SEQ ID NO: 1332319 - RNA, 20 nt, Human
agcauucuggccagaaccaa

SEQ ID NO: 1332320 - RNA, 18 nt, Human
aggaaggccuaaggucca

SEQ ID NO: 1332321 - RNA, 24 nt, Human
agggagcuggcuccauggggaggg

SEQ ID NO: 1332322 - RNA, 18 nt, Human
aggggagagaggguggag

SEQ ID NO: 1332323 - RNA, 23 nt, Human
aggggguaauaaagggauugggg

SEQ ID NO: 1332324 - RNA, 22 nt, Human
auaguagggcgauuacagacac

SEQ ID NO: 1332325 - RNA, 23 nt, Human
caaacauaaauagagggagcugg

SEQ ID NO: 1332326 - RNA, 18 nt, Human
cacacauuccugaauccc

SEQ ID NO: 1332327 - RNA, 22 nt, Human
cacggaaaacaugucugagcca

SEQ ID NO: 1332328 - RNA, 18 nt, Human
cagugaguucuggaggcc

SEQ ID NO: 1332329 - RNA, 24 nt, Human
ccccaggauaccccggucucccaa

SEQ ID NO: 1332330 - RNA, 19 nt, Human
cccccaggauaccccgguc

SEQ ID NO: 1332331 - RNA, 19 nt, Human
cccuaagcccccaauucuc

SEQ ID NO: 1332332 - RNA, 23 nt, Human
ccugcagcauucuggccagaacc

SEQ ID NO: 1332333 - RNA, 21 nt, Human
cuccccuggggagcagaggcu

SEQ ID NO: 1332334 - RNA, 20 nt, Human
gauuacagacacaacucccc

SEQ ID NO: 1332335 - RNA, 20 nt, Human
gcauucuggccagaaccaaa

SEQ ID NO: 1332336 - RNA, 23 nt, Human
ggagcuggcuccauggggagggc

SEQ ID NO: 1332337 - RNA, 23 nt, Human
ggcucccuggucuccagauucca

SEQ ID NO: 1332338 - RNA, 18 nt, Human
ggcugggcuccgugucuc

SEQ ID NO: 1332339 - RNA, 22 nt, Human
gggguaauaaagggauuggggc

SEQ ID NO: 1332340 - RNA, 18 nt, Human
gguguccuuuccagggga

SEQ ID NO: 1332341 - RNA, 26 nt, Human
gucaauuucuaggugaggucuucuca

SEQ ID NO: 1332342 - RNA, 23 nt, Human
guguccuuuccaggggagagagg

SEQ ID NO: 1332343 - RNA, 20 nt, Human
uaagcccccaauucucuuuu

SEQ ID NO: 1332344 - RNA, 21 nt, Human
uacauugggucccccaggaua

SEQ ID NO: 1332345 - RNA, 19 nt, Human
uccaggggagagagggugg

SEQ ID NO: 1332346 - RNA, 22 nt, Human
ucugagccaaggcagcuccuac

SEQ ID NO: 1332347 - RNA, 19 nt, Human
ugagaggaagagaaccugc

SEQ ID NO: 1332348 - RNA, 19 nt, Human
ugagaggaagagaaccugc

SEQ ID NO: 1332349 - RNA, 21 nt, Human
ugagccagaagagguugaggg

SEQ ID NO: 1332350 - RNA, 22 nt, Human
uggagagaggaaggccuaaggu

SEQ ID NO: 1332351 - RNA, 24 nt, Human
uggggcaggggaggcguucugagu

SEQ ID NO: 1332352 - RNA, 20 nt, Human
ugguugccagcacuucacug

SEQ ID NO: 1332353 - RNA, 21 nt, Human
ugucagggaucaaagcuguag

SEQ ID NO: 1332354 - RNA, 18 nt, Human
ugucugaaggagggggua

SEQ ID NO: 1332355 - RNA, 20 nt, Human
acuugccaaggaccacaacu

SEQ ID NO: 1332356 - RNA, 21 nt, Human
aggacagaugcugcuggagga

SEQ ID NO: 1332357 - RNA, 18 nt, Human
aggaggccaaggggccag

SEQ ID NO: 1332358 - RNA, 20 nt, Human
aggaggccaaggggccagcu

SEQ ID NO: 1332359 - RNA, 22 nt, Human
caacugccagggaccucgagca

SEQ ID NO: 1332360 - RNA, 19 nt, Human
cccugaggagagaggacag

SEQ ID NO: 1332361 - RNA, 21 nt, Human
gccaaggaccacaacugccag

SEQ ID NO: 1332362 - RNA, 22 nt, Human
gucaccagauggggauggggag

SEQ ID NO: 1332363 - RNA, 20 nt, Human
ucccugaggagagaggacag

SEQ ID NO: 1332364 - RNA, 26 nt, Human
ucucuaggaggccaaggggccagcuu

SEQ ID NO: 1332365 - RNA, 18 nt, Human
ugccaaggaccacaacug

SEQ ID NO: 1332366 - RNA, 19 nt, Human
ugccucccugaggagagag

SEQ ID NO: 1332367 - RNA, 22 nt, Human
ugcugcuggaggagaugucagg

SEQ ID NO: 1332368 - RNA, 22 nt, Human
ugcuugccucccugaggagaga

SEQ ID NO: 1332369 - RNA, 21 nt, Human
uggguggaggaggaaggacuc

SEQ ID NO: 1332370 - RNA, 22 nt, Human
uguagccaggccuuuggucacc

SEQ ID NO: 1332371 - RNA, 19 nt, Human
uuggggucuuuugaagagg

SEQ ID NO: 1332372 - RNA, 20 nt, Human
agcuggaagucuccagcuuc

SEQ ID NO: 1332373 - RNA, 18 nt, Human
agcuggugcucugugugc

SEQ ID NO: 1332374 - RNA, 19 nt, Human
agcuggugcucugugugcc

SEQ ID NO: 1332375 - RNA, 21 nt, Human
caacucagcucccauuguacc

SEQ ID NO: 1332376 - RNA, 19 nt, Human
ccagcuucucccuccaaca

SEQ ID NO: 1332377 - RNA, 21 nt, Human
ccagcuucucccuccaacaac

SEQ ID NO: 1332378 - RNA, 19 nt, Human
cuugagugggagcuggagc

SEQ ID NO: 1332379 - RNA, 21 nt, Human
gagcuggagcuggaagucucc

SEQ ID NO: 1332380 - RNA, 22 nt, Human
ucccuccaacaacucagcuccc

SEQ ID NO: 1332381 - RNA, 20 nt, Human
ugagugggagcuggagcugg

SEQ ID NO: 1332382 - RNA, 18 nt, Human
aaaaaaaaacugaaggug

SEQ ID NO: 1332383 - RNA, 25 nt, Human
aaaaaaaacugaaggugggagaaaa

SEQ ID NO: 1332384 - RNA, 22 nt, Human
aacugcugccccaagggaccuc

SEQ ID NO: 1332385 - RNA, 25 nt, Human
aagcaaaaauaacagcuggugaauc

SEQ ID NO: 1332386 - RNA, 27 nt, Human
aagcaaaaauaacagcuggugaaucca

SEQ ID NO: 1332387 - RNA, 20 nt, Human
aaggugggagaaaaguaaaa

SEQ ID NO: 1332388 - RNA, 25 nt, Human
aaggugucccagaaacuggggaggc

SEQ ID NO: 1332389 - RNA, 22 nt, Human
acacugccugagcuaccagccc

SEQ ID NO: 1332390 - RNA, 23 nt, Human
acacugccugagcuaccagcccu

SEQ ID NO: 1332391 - RNA, 21 nt, Human
accacucucuuacugcagagg

SEQ ID NO: 1332392 - RNA, 21 nt, Human
accauccacacccccacaauc

SEQ ID NO: 1332393 - RNA, 18 nt, Human
accccaaguuucacucac

SEQ ID NO: 1332394 - RNA, 20 nt, Human
acccuggguuucccaaccac

SEQ ID NO: 1332395 - RNA, 22 nt, Human
acucaccaaggccacaccccaa

SEQ ID NO: 1332396 - RNA, 22 nt, Human
acucucuucacccuuugccccc

SEQ ID NO: 1332397 - RNA, 24 nt, Human
agaaucucagaucugacaaggccu

SEQ ID NO: 1332398 - RNA, 24 nt, Human
agacgcggccuccacaaggucaga

SEQ ID NO: 1332399 - RNA, 28 nt, Human
agcaaacuccagccagcagcguucgucc

SEQ ID NO: 1332400 - RNA, 22 nt, Human
agcagagacgcggccuccacaa

SEQ ID NO: 1332401 - RNA, 20 nt, Human
agccagcagcguucgucccu

SEQ ID NO: 1332402 - RNA, 24 nt, Human
aggucugucuauccugcccugguc

SEQ ID NO: 1332403 - RNA, 19 nt, Human
aguccuacucugaauucag

SEQ ID NO: 1332404 - RNA, 21 nt, Human
agugagcaaaccccuagcccc

SEQ ID NO: 1332405 - RNA, 20 nt, Human
aguuugcuuccucuucaguu

SEQ ID NO: 1332406 - RNA, 24 nt, Human
auccgcccugcaggcucccuguca

SEQ ID NO: 1332407 - RNA, 23 nt, Human
auucaccauccacacccccacaa

SEQ ID NO: 1332408 - RNA, 23 nt, Human
cacaccccaaggugucccagaaa

SEQ ID NO: 1332409 - RNA, 23 nt, Human
cacacugccugagcuaccagccc

SEQ ID NO: 1332410 - RNA, 24 nt, Human
cacccccacaaucugagauuccaa

SEQ ID NO: 1332411 - RNA, 20 nt, Human
cacccuuugcccccacccca

SEQ ID NO: 1332412 - RNA, 19 nt, Human
cacgcagcagagacgcggc

SEQ ID NO: 1332413 - RNA, 20 nt, Human
cagaagccagagucuuucug

SEQ ID NO: 1332414 - RNA, 21 nt, Human
cagagaguccucucugcguuu

SEQ ID NO: 1332415 - RNA, 20 nt, Human
cagcaaacuccagccagcaa

SEQ ID NO: 1332416 - RNA, 22 nt, Human
cagcagagacgcggccuccaca

SEQ ID NO: 1332417 - RNA, 19 nt, Human
cagcagcguucgucccuug

SEQ ID NO: 1332418 - RNA, 22 nt, Human
cagccagcagcguucgucccuu

SEQ ID NO: 1332419 - RNA, 23 nt, Human
cagcccuucugcacuggcccucc

SEQ ID NO: 1332420 - RNA, 18 nt, Human
caggaagguggccccagg

SEQ ID NO: 1332421 - RNA, 24 nt, Human
cauaaacacaaacacccuaaauag

SEQ ID NO: 1332422 - RNA, 31 nt, Human
caucauacuuuuuuuuuuuuuugcuuuuaaa

SEQ ID NO: 1332423 - RNA, 24 nt, Human
cauucaccauccacacccccacaa

SEQ ID NO: 1332424 - RNA, 19 nt, Human
ccagcaggcagcaccccaa

SEQ ID NO: 1332425 - RNA, 18 nt, Human
cccacacucucuucaccc

SEQ ID NO: 1332426 - RNA, 24 nt, Human
cccaugaucaccagauccgccuug

SEQ ID NO: 1332427 - RNA, 20 nt, Human
ccccaagggaccucaaggaa

SEQ ID NO: 1332428 - RNA, 20 nt, Human
ccccaguuacgaagcaaagc

SEQ ID NO: 1332429 - RNA, 19 nt, Human
cccccaaauucugaggcug

SEQ ID NO: 1332430 - RNA, 21 nt, Human
ccccuagcccccaagugggga

SEQ ID NO: 1332431 - RNA, 19 nt, Human
cccgcgaacacgcagcaga

SEQ ID NO: 1332432 - RNA, 21 nt, Human
cccuauccagacccccuaauc

SEQ ID NO: 1332433 - RNA, 20 nt, Human
cccugcacccucguacucgg

SEQ ID NO: 1332434 - RNA, 22 nt, Human
cccugcaggcucccugucaccu

SEQ ID NO: 1332435 - RNA, 20 nt, Human
ccucguacucggguuucuuc

SEQ ID NO: 1332436 - RNA, 19 nt, Human
ccugcacuguccccacucc

SEQ ID NO: 1332437 - RNA, 19 nt, Human
ccugggucaccaccagaga

SEQ ID NO: 1332438 - RNA, 20 nt, Human
ccuggguuucccaaccacuc

SEQ ID NO: 1332439 - RNA, 21 nt, Human
ccuucccagcaggcagcaccc

SEQ ID NO: 1332440 - RNA, 20 nt, Human
ccuucugcacuggcccuccu

SEQ ID NO: 1332441 - RNA, 21 nt, Human
cgaagcaaagcgcgggccuac

SEQ ID NO: 1332442 - RNA, 18 nt, Human
cgcagcagagacgcggcc

SEQ ID NO: 1332443 - RNA, 20 nt, Human
cgcagcagagacgcggccuc

SEQ ID NO: 1332444 - RNA, 23 nt, Human
cgggcgcugugcgcggggaccgc

SEQ ID NO: 1332445 - RNA, 22 nt, Human
cuaaagcccacacucucuucac

SEQ ID NO: 1332446 - RNA, 27 nt, Human
cuaccagcccuucugcacuggcccucc

SEQ ID NO: 1332447 - RNA, 24 nt, Human
cuagcccccaaguggggacuacag

SEQ ID NO: 1332448 - RNA, 18 nt, Human
cucaaggaauaggaauuc

SEQ ID NO: 1332449 - RNA, 22 nt, Human
cucucuucacccuuugccccca

SEQ ID NO: 1332450 - RNA, 20 nt, Human
cucuggcucccaugaucacc

SEQ ID NO: 1332451 - RNA, 19 nt, Human
cugagugagcaaaccccua

SEQ ID NO: 1332452 - RNA, 18 nt, Human
cugcacccucguacucgg

SEQ ID NO: 1332453 - RNA, 23 nt, Human
cugcacuggcccuccugccaaua

SEQ ID NO: 1332454 - RNA, 23 nt, Human
cugcacuguccccacucccucug

SEQ ID NO: 1332455 - RNA, 22 nt, Human
cugcaggcucccugucaccugu

SEQ ID NO: 1332456 - RNA, 20 nt, Human
cuguguaugaaggggggccc

SEQ ID NO: 1332457 - RNA, 21 nt, Human
cuucccagcaggcagcacccc

SEQ ID NO: 1332458 - RNA, 18 nt, Human
cuucgggaccuacgcguc

SEQ ID NO: 1332459 - RNA, 18 nt, Human
cuucugcacuggcccucc

SEQ ID NO: 1332460 - RNA, 19 nt, Human
cuuuuaaaaaguggaggug

SEQ ID NO: 1332461 - RNA, 21 nt, Human
cuuuuuuuuuuuuuugcuuuu

SEQ ID NO: 1332462 - RNA, 20 nt, Human
gacccccuaauccacuugcc

SEQ ID NO: 1332463 - RNA, 19 nt, Human
gagcaaaccccuagccccc

SEQ ID NO: 1332464 - RNA, 23 nt, Human
gcacuggcccuccugccaauacu

SEQ ID NO: 1332465 - RNA, 22 nt, Human
gcagcagagacgcggccuccac

SEQ ID NO: 1332466 - RNA, 25 nt, Human
gccucacacuuuucuccuaaagccc

SEQ ID NO: 1332467 - RNA, 19 nt, Human
gcucccugucaccuguggg

SEQ ID NO: 1332468 - RNA, 22 nt, Human
ggaagguggccccagguccuag

SEQ ID NO: 1332469 - RNA, 21 nt, Human
ggcaggaagguggccccaggu

SEQ ID NO: 1332470 - RNA, 25 nt, Human
gggcaggaagguggccccagguccu

SEQ ID NO: 1332471 - RNA, 18 nt, Human
ggguuucuuccccauccc

SEQ ID NO: 1332472 - RNA, 18 nt, Human
guaaugggcccccaaauu

SEQ ID NO: 1332473 - RNA, 22 nt, Human
guggagguggaaaaaaaaaaaa

SEQ ID NO: 1332474 - RNA, 23 nt, Human
uaaagcgggcaggaagguggccc

SEQ ID NO: 1332475 - RNA, 21 nt, Human
uaaaggggggcauacccaaau

SEQ ID NO: 1332476 - RNA, 22 nt, Human
uaagauguccucagagaucccc

SEQ ID NO: 1332477 - RNA, 24 nt, Human
uaauccacuugccuagcagcccca

SEQ ID NO: 1332478 - RNA, 23 nt, Human
uaaugggcccccaaauucugagg

SEQ ID NO: 1332479 - RNA, 20 nt, Human
uaggagguggaaugaaagug

SEQ ID NO: 1332480 - RNA, 22 nt, Human
uauccugcccuggucuccucca

SEQ ID NO: 1332481 - RNA, 23 nt, Human
ucagacucucaggaucuccucag

SEQ ID NO: 1332482 - RNA, 20 nt, Human
ucaguucugggguaaagggg

SEQ ID NO: 1332483 - RNA, 21 nt, Human
uccaagaaucucagaucugac

SEQ ID NO: 1332484 - RNA, 19 nt, Human
uccaagagcagugcccuca

SEQ ID NO: 1332485 - RNA, 21 nt, Human
uccaagagcagugcccucacu

SEQ ID NO: 1332486 - RNA, 23 nt, Human
uccauaaacacaaacacccuaaa

SEQ ID NO: 1332487 - RNA, 25 nt, Human
uccauaaacacaaacacccuaaaua

SEQ ID NO: 1332488 - RNA, 25 nt, Human
ucccagaaacuggggaggcagugcu

SEQ ID NO: 1332489 - RNA, 23 nt, Human
uccccaucccugaggucccuaug

SEQ ID NO: 1332490 - RNA, 23 nt, Human
uccuaaagcccacacucucuuca

SEQ ID NO: 1332491 - RNA, 22 nt, Human
uccuccaccccaggagaguuuu

SEQ ID NO: 1332492 - RNA, 24 nt, Human
ucucaggaucuccucagaagccag

SEQ ID NO: 1332493 - RNA, 22 nt, Human
ucucugaauagucaugcagccu

SEQ ID NO: 1332494 - RNA, 21 nt, Human
ugagcaaaccccuagccccca

SEQ ID NO: 1332495 - RNA, 18 nt, Human
ugcacuguccccacuccc

SEQ ID NO: 1332496 - RNA, 22 nt, Human
ugccucacacuuuucuccuaaa

SEQ ID NO: 1332497 - RNA, 21 nt, Human
uggaaaaaaaaaaaaaacuga

SEQ ID NO: 1332498 - RNA, 19 nt, Human
uggagguggaaaaaaaaaa

SEQ ID NO: 1332499 - RNA, 22 nt, Human
uggaucguguagucuuuaacug

SEQ ID NO: 1332500 - RNA, 19 nt, Human
uggcaaguaguuugcuucc

SEQ ID NO: 1332501 - RNA, 18 nt, Human
uggccccagguccuaggu

SEQ ID NO: 1332502 - RNA, 24 nt, Human
uggccccagguccuaggugcuccu

SEQ ID NO: 1332503 - RNA, 21 nt, Human
uggcccgcgaacacgcagcag

SEQ ID NO: 1332504 - RNA, 24 nt, Human
uggcccgcgaacacgcagcagaga

SEQ ID NO: 1332505 - RNA, 18 nt, Human
uggcucccaugaucaccu

SEQ ID NO: 1332506 - RNA, 19 nt, Human
uggggcccuauccagaccc

SEQ ID NO: 1332507 - RNA, 23 nt, Human
ugggguguguaaugggcccccaa

SEQ ID NO: 1332508 - RNA, 24 nt, Human
uguaaugggcccccaaauucugag

SEQ ID NO: 1332509 - RNA, 24 nt, Human
uguccccacucccucuggcuccca

SEQ ID NO: 1332510 - RNA, 19 nt, Human
uucaaagguagagaggacc

SEQ ID NO: 1332511 - RNA, 21 nt, Human
uugcuuccucuucaguucugg

SEQ ID NO: 1332512 - RNA, 21 nt, Human
uuucuuccccaucccugaggu

SEQ ID NO: 1332513 - RNA, 22 nt, Human
aacacaagcucaaucagaccua

SEQ ID NO: 1332514 - RNA, 21 nt, Human
aaucagaccuacuugcaccca

SEQ ID NO: 1332515 - RNA, 25 nt, Human
acaacacaagcucaaucagaccuac

SEQ ID NO: 1332516 - RNA, 22 nt, Human
accccacacccagcuccuccag

SEQ ID NO: 1332517 - RNA, 21 nt, Human
caccacaccaucccggaacaa

SEQ ID NO: 1332518 - RNA, 19 nt, Human
caccccacacccagcuccu

SEQ ID NO: 1332519 - RNA, 21 nt, Human
cagcccaacgcaccccacacc

SEQ ID NO: 1332520 - RNA, 24 nt, Human
cagcccaacgcaccccacacccag

SEQ ID NO: 1332521 - RNA, 20 nt, Human
caggccccccauuucuuucc

SEQ ID NO: 1332522 - RNA, 23 nt, Human
cagggacucucuccccuagaccc

SEQ ID NO: 1332523 - RNA, 21 nt, Human
cauccccucuuccaccacacc

SEQ ID NO: 1332524 - RNA, 20 nt, Human
ccacacccagcuccuccagc

SEQ ID NO: 1332525 - RNA, 23 nt, Human
ccaccacaccaucccggaacaag

SEQ ID NO: 1332526 - RNA, 21 nt, Human
ccaggccccccauuucuuucc

SEQ ID NO: 1332527 - RNA, 21 nt, Human
cccaaacuaggccuccccacc

SEQ ID NO: 1332528 - RNA, 22 nt, Human
cccaacgcaccccacacccagc

SEQ ID NO: 1332529 - RNA, 22 nt, Human
cccaccccacaauaaaaaucug

SEQ ID NO: 1332530 - RNA, 22 nt, Human
ccccacacccagcuccuccagc

SEQ ID NO: 1332531 - RNA, 19 nt, Human
cccccauuucuuucccuca

SEQ ID NO: 1332532 - RNA, 22 nt, Human
ccccucuuccaccacaccaucc

SEQ ID NO: 1332533 - RNA, 19 nt, Human
ccuagacccagggcugucc

SEQ ID NO: 1332534 - RNA, 23 nt, Human
cucaucccaccccacaauaaaaa

SEQ ID NO: 1332535 - RNA, 23 nt, Human
cucccgggcuggaucagagagcc

SEQ ID NO: 1332536 - RNA, 19 nt, Human
cuccuccagcucgguccuc

SEQ ID NO: 1332537 - RNA, 22 nt, Human
gaacaagugcuccaggauuccc

SEQ ID NO: 1332538 - RNA, 19 nt, Human
ggaaguggccgucccuggg

SEQ ID NO: 1332539 - RNA, 28 nt, Human
ggaggggguugagggagucccaggaggg

SEQ ID NO: 1332540 - RNA, 19 nt, Human
gggcuggaucagagagccg

SEQ ID NO: 1332541 - RNA, 18 nt, Human
ggggcugggaccggggaa

SEQ ID NO: 1332542 - RNA, 22 nt, Human
uaaaaaucugacccaggccccc

SEQ ID NO: 1332543 - RNA, 24 nt, Human
ucaaucagaccuacuugcacccaa

SEQ ID NO: 1332544 - RNA, 23 nt, Human
uccagcucgguccucucccgggc

SEQ ID NO: 1332545 - RNA, 26 nt, Human
uccccaccagcccaacgcaccccacc

SEQ ID NO: 1332546 - RNA, 24 nt, Human
uccccucuuccaccacaccauccc

SEQ ID NO: 1332547 - RNA, 22 nt, Human
ucccgggcuggaucagagagcc

SEQ ID NO: 1332548 - RNA, 21 nt, Human
ucuccccuagacccagggcug

SEQ ID NO: 1332549 - RNA, 18 nt, Human
ugcuccaggauucccugc

SEQ ID NO: 1332550 - RNA, 22 nt, Human
ugcuccaggauucccugcccac

SEQ ID NO: 1332551 - RNA, 24 nt, Human
uggagaaaauggaggggguugagg

SEQ ID NO: 1332552 - RNA, 20 nt, Human
ugggggaacugggaggggcu

SEQ ID NO: 1332553 - RNA, 23 nt, Human
uguccauuggguagcaaugugga

SEQ ID NO: 1332554 - RNA, 23 nt, Human
uguccuacucaucccaccccaca

SEQ ID NO: 1332555 - RNA, 20 nt, Human
uucccugcccacuggccauu

SEQ ID NO: 1332556 - RNA, 18 nt, Human
aaaacaaccccccugaac

SEQ ID NO: 1332557 - RNA, 24 nt, Human
accggacgcggcggcaaggaccug

SEQ ID NO: 1332558 - RNA, 21 nt, Human
caaccccccugaacugggccc

SEQ ID NO: 1332559 - RNA, 23 nt, Human
ccccugaacugggcccagacccu

SEQ ID NO: 1332560 - RNA, 21 nt, Human
cccugaacugggcccagaccc

SEQ ID NO: 1332561 - RNA, 19 nt, Human
ccuuaagcuccuggaaccu

SEQ ID NO: 1332562 - RNA, 22 nt, Human
cgaaaacaaccccccugaacug

SEQ ID NO: 1332563 - RNA, 21 nt, Human
gaaccucaguuuuuccuuccg

SEQ ID NO: 1332564 - RNA, 26 nt, Human
gcgaaaacaaccccccugaacugggc

SEQ ID NO: 1332565 - RNA, 22 nt, Human
uaagcuccuggaaccucaguuu

SEQ ID NO: 1332566 - RNA, 23 nt, Human
ucgaauggcgacaauggcugucu

SEQ ID NO: 1332567 - RNA, 21 nt, Human
ugaacugggcccagacccuua

SEQ ID NO: 1332568 - RNA, 24 nt, Human
aacagaaaccccuuggggccugag

SEQ ID NO: 1332569 - RNA, 21 nt, Human
agagaauagaaacagaaaccc

SEQ ID NO: 1332570 - RNA, 24 nt, Human
cacagccauccgccucaagguggg

SEQ ID NO: 1332571 - RNA, 20 nt, Human
cagcugggaauucugggcag

SEQ ID NO: 1332572 - RNA, 21 nt, Human
cgugcacaggcagaggcugug

SEQ ID NO: 1332573 - RNA, 21 nt, Human
cucaagguggggaugaaagga

SEQ ID NO: 1332574 - RNA, 19 nt, Human
gacaggcugacacagacag

SEQ ID NO: 1332575 - RNA, 20 nt, Human
gacaggcugacacagacagc

SEQ ID NO: 1332576 - RNA, 19 nt, Human
gaggcugugggucagugca

SEQ ID NO: 1332577 - RNA, 21 nt, Human
ggacaggcugacacagacagc

SEQ ID NO: 1332578 - RNA, 19 nt, Human
uaaaaaagcucuaaaguca

SEQ ID NO: 1332579 - RNA, 19 nt, Human
ucagugcaggaaguagggu

SEQ ID NO: 1332580 - RNA, 20 nt, Human
ugaaaggagaugaccuggug

SEQ ID NO: 1332581 - RNA, 20 nt, Human
ugaaaggagaugaccuggug

SEQ ID NO: 1332582 - RNA, 18 nt, Human
ugaccugguggcugcgug

SEQ ID NO: 1332583 - RNA, 21 nt, Human
ugggcagggacaagcaggcgu

SEQ ID NO: 1332584 - RNA, 19 nt, Human
uucaugugcuucucuugag

SEQ ID NO: 1332585 - RNA, 23 nt, Human
uugagacgaagggaaaaguggua

SEQ ID NO: 1332586 - RNA, 21 nt, Human
aaaguggccugcccagacuau

SEQ ID NO: 1332587 - RNA, 19 nt, Human
agacuauuuugguagcaag

SEQ ID NO: 1332588 - RNA, 18 nt, Human
agcaagcguggaaaucag

SEQ ID NO: 1332589 - RNA, 23 nt, Human
agcaagcguggaaaucagaucug

SEQ ID NO: 1332590 - RNA, 21 nt, Human
aggaagucugcauuaucacga

SEQ ID NO: 1332591 - RNA, 18 nt, Human
cacaccaaagcaucagcc

SEQ ID NO: 1332592 - RNA, 22 nt, Human
caccacagagagaagaaaaggg

SEQ ID NO: 1332593 - RNA, 21 nt, Human
cagagugcuggccacaccaaa

SEQ ID NO: 1332594 - RNA, 22 nt, Human
caguaaggaauuacaaauccug

SEQ ID NO: 1332595 - RNA, 18 nt, Human
ccuguguuuguacuccag

SEQ ID NO: 1332596 - RNA, 26 nt, Human
cgaaaucgaaagcggccgccugcuca

SEQ ID NO: 1332597 - RNA, 20 nt, Human
cgccuacuuccaaaaguggc

SEQ ID NO: 1332598 - RNA, 24 nt, Human
cucaaggcaaauuucaaguaacuc

SEQ ID NO: 1332599 - RNA, 22 nt, Human
cuuccaaaaguggccugcccag

SEQ ID NO: 1332600 - RNA, 22 nt, Human
gcagcugccuacucugcagcug

SEQ ID NO: 1332601 - RNA, 23 nt, Human
ggaagucugcauuaucacgagga

SEQ ID NO: 1332602 - RNA, 24 nt, Human
ggggaaagcgaaaucgaaagcggc

SEQ ID NO: 1332603 - RNA, 20 nt, Human
uaacgccuacuuccaaaagu

SEQ ID NO: 1332604 - RNA, 24 nt, Human
uagcugaucaucuuuccguacauu

SEQ ID NO: 1332605 - RNA, 22 nt, Human
uaggggaaagcgaaaucgaaag

SEQ ID NO: 1332606 - RNA, 18 nt, Human
ucugcagcugugguucuc

SEQ ID NO: 1332607 - RNA, 21 nt, Human
ugagaaucucgggagcagccc

SEQ ID NO: 1332608 - RNA, 21 nt, Human
uggaaaggagguaacacacuc

SEQ ID NO: 1332609 - RNA, 22 nt, Human
uuacaguaaggaauuacaaauc

SEQ ID NO: 1332610 - RNA, 18 nt, Human
uucagagugcuggccaca

SEQ ID NO: 1332611 - RNA, 22 nt, Human
aaggugacagugagggguucuu

SEQ ID NO: 1332612 - RNA, 19 nt, Human
aagugagaagaaaagcuga

SEQ ID NO: 1332613 - RNA, 18 nt, Human
agauggaguuuguagggc

SEQ ID NO: 1332614 - RNA, 18 nt, Human
caugaagugagaagaaaa

SEQ ID NO: 1332615 - RNA, 21 nt, Human
ggaguaguuuucacaugaagu

SEQ ID NO: 1332616 - RNA, 19 nt, Human
ggauaaggacagagcuuga

SEQ ID NO: 1332617 - RNA, 23 nt, Human
ggauaaggacagagcuugaaggg

SEQ ID NO: 1332618 - RNA, 21 nt, Human
gguauucucgggaaggugaca

SEQ ID NO: 1332619 - RNA, 22 nt, Human
guccucuucuguucagauauuu

SEQ ID NO: 1332620 - RNA, 24 nt, Human
ucagccacuggaguaguuuucaca

SEQ ID NO: 1332621 - RNA, 21 nt, Human
ucagucagccacuggaguagu

SEQ ID NO: 1332622 - RNA, 22 nt, Human
ucuauaauugaugacugugagc

SEQ ID NO: 1332623 - RNA, 20 nt, Human
ucuuaggguauucucgggaa

SEQ ID NO: 1332624 - RNA, 19 nt, Human
ugaagggucagcaauucag

SEQ ID NO: 1332625 - RNA, 21 nt, Human
aaguggagacaaguuuauuga

SEQ ID NO: 1332626 - RNA, 22 nt, Human
acuccgaggggauccguaagag

SEQ ID NO: 1332627 - RNA, 21 nt, Human
agugagacugaggaucuggua

SEQ ID NO: 1332628 - RNA, 22 nt, Human
caaguuuauugaggagcuugac

SEQ ID NO: 1332629 - RNA, 26 nt, Human
caccccucuucugcccuagcuugaga

SEQ ID NO: 1332630 - RNA, 20 nt, Human
caggccccugggugucuccc

SEQ ID NO: 1332631 - RNA, 19 nt, Human
ccuugucgccgcggccucg

SEQ ID NO: 1332632 - RNA, 21 nt, Human
cgcccgggaugcggaggucug

SEQ ID NO: 1332633 - RNA, 18 nt, Human
cgccgcggccucgccgcc

SEQ ID NO: 1332634 - RNA, 18 nt, Human
cgggaccagcgcacccug

SEQ ID NO: 1332635 - RNA, 19 nt, Human
cggucgaggcaugcugcgg

SEQ ID NO: 1332636 - RNA, 19 nt, Human
cugcagccagugagggccc

SEQ ID NO: 1332637 - RNA, 23 nt, Human
cugcccuagcuugagagaacaac

SEQ ID NO: 1332638 - RNA, 20 nt, Human
cuucugcccuagcuugagag

SEQ ID NO: 1332639 - RNA, 22 nt, Human
cuugacaccccucuucugcccu

SEQ ID NO: 1332640 - RNA, 23 nt, Human
gccuuuccuguggccccaggcac

SEQ ID NO: 1332641 - RNA, 20 nt, Human
gcgggccaggccccugggug

SEQ ID NO: 1332642 - RNA, 27 nt, Human
ggcgggccaggccccugggggacucuc

SEQ ID NO: 1332643 - RNA, 24 nt, Human
uaaggaaacagaucagcugcagcc

SEQ ID NO: 1332644 - RNA, 25 nt, Human
uaaggaaacagaucagcugcagcca

SEQ ID NO: 1332645 - RNA, 19 nt, Human
ucgccgcggccucgccgcc

SEQ ID NO: 1332646 - RNA, 25 nt, Human
ucucccauaucgcugucuuuaguga

SEQ ID NO: 1332647 - RNA, 19 nt, Human
ugagcgcgcgaccgggacc

SEQ ID NO: 1332648 - RNA, 24 nt, Human
ugagggccccugcguugggccugg

SEQ ID NO: 1332649 - RNA, 25 nt, Human
ugggugucucccauaucgcugucuu

SEQ ID NO: 1332650 - RNA, 21 nt, Human
aaguggagacaaguuuauuga

SEQ ID NO: 1332651 - RNA, 20 nt, Human
acucucagcucugaagccag

SEQ ID NO: 1332652 - RNA, 21 nt, Human
agugagacugaggaucuggua

SEQ ID NO: 1332653 - RNA, 22 nt, Human
caaguuuauugaggagcuugac

SEQ ID NO: 1332654 - RNA, 26 nt, Human
caccccucuucugcccuagcuugaga

SEQ ID NO: 1332655 - RNA, 19 nt, Human
cacuguguuggggcgaggc

SEQ ID NO: 1332656 - RNA, 23 nt, Human
cagcagggucuggcagccucugg

SEQ ID NO: 1332657 - RNA, 20 nt, Human
caggccccugggugucuccc

SEQ ID NO: 1332658 - RNA, 26 nt, Human
ccaggaauuucccauagcagcaccgg

SEQ ID NO: 1332659 - RNA, 22 nt, Human
ccagguuugugguguucugggg

SEQ ID NO: 1332660 - RNA, 23 nt, Human
ccccaggcacucucagcucugaa

SEQ ID NO: 1332661 - RNA, 22 nt, Human
ccugcugugggcagggcucugc

SEQ ID NO: 1332662 - RNA, 19 nt, Human
cgacaccgcaggaugccca

SEQ ID NO: 1332663 - RNA, 19 nt, Human
cugcagccagugagggccc

SEQ ID NO: 1332664 - RNA, 18 nt, Human
cuggggguccuggugaag

SEQ ID NO: 1332665 - RNA, 20 nt, Human
cuucugcccuagcuugagag

SEQ ID NO: 1332666 - RNA, 21 nt, Human
cuugacaccccucuucugccc

SEQ ID NO: 1332667 - RNA, 22 nt, Human
gcagcagggucuggcagccucu

SEQ ID NO: 1332668 - RNA, 21 nt, Human
gcccuagcuugagagaacaac

SEQ ID NO: 1332669 - RNA, 23 nt, Human
gccuuuccuguggccccaggcac

SEQ ID NO: 1332670 - RNA, 20 nt, Human
gcgggccaggccccugggug

SEQ ID NO: 1332671 - RNA, 18 nt, Human
gcugugggcagggcucug

SEQ ID NO: 1332672 - RNA, 27 nt, Human
ggcgggccaggccccugggggacucuc

SEQ ID NO: 1332673 - RNA, 18 nt, Human
gucuggcagccucugggc

SEQ ID NO: 1332674 - RNA, 21 nt, Human
guggccccaggcacucucagc

SEQ ID NO: 1332675 - RNA, 24 nt, Human
uaaggaaacagaucagcugcagcc

SEQ ID NO: 1332676 - RNA, 25 nt, Human
uaaggaaacagaucagcugcagcca

SEQ ID NO: 1332677 - RNA, 22 nt, Human
uccagguuugugguguucuggg

SEQ ID NO: 1332678 - RNA, 19 nt, Human
ucccauagcagcaccgguc

SEQ ID NO: 1332679 - RNA, 19 nt, Human
ucccuggagauguccuucc

SEQ ID NO: 1332680 - RNA, 19 nt, Human
uccuggugaagaccacacu

SEQ ID NO: 1332681 - RNA, 24 nt, Human
ucgacaccgcaggaugcccaggaa

SEQ ID NO: 1332682 - RNA, 20 nt, Human
ucuccagguuugugguguuc

SEQ ID NO: 1332683 - RNA, 24 nt, Human
ucucccauaucgcugucuuuagug

SEQ ID NO: 1332684 - RNA, 21 nt, Human
ucugaagccaggcuauugcuc

SEQ ID NO: 1332685 - RNA, 22 nt, Human
ucuggcagccucugggcucucc

SEQ ID NO: 1332686 - RNA, 24 nt, Human
ugagggccccugcguugggccugg

SEQ ID NO: 1332687 - RNA, 19 nt, Human
ugggcucuccagguuugug

SEQ ID NO: 1332688 - RNA, 25 nt, Human
ugggugucucccauaucgcugucuu

SEQ ID NO: 1332689 - RNA, 19 nt, Human
uucacagucucaaaauauu

SEQ ID NO: 1332690 - RNA, 22 nt, Human
aaaaacaauuuguuuugaaaac

SEQ ID NO: 1332691 - RNA, 23 nt, Human
aaaauuacaacugagacagugag

SEQ ID NO: 1332692 - RNA, 19 nt, Human
aaacaagaaucuaccauac

SEQ ID NO: 1332693 - RNA, 25 nt, Human
aaacauuuagcacuguuaauggaca

SEQ ID NO: 1332694 - RNA, 19 nt, Human
aaaggacuuuggucuuccc

SEQ ID NO: 1332695 - RNA, 21 nt, Human
aacauuugaaaacaccaucgc

SEQ ID NO: 1332696 - RNA, 23 nt, Human
aaccuaauaacaaguaucauuca

SEQ ID NO: 1332697 - RNA, 23 nt, Human
aagagccaaggaagcugugguuu

SEQ ID NO: 1332698 - RNA, 22 nt, Human
aagcacccauaaauaauggcaa

SEQ ID NO: 1332699 - RNA, 21 nt, Human
aauagcagcccuuuccaaaac

SEQ ID NO: 1332700 - RNA, 20 nt, Human
aaucuauaaaguguuuccuu

SEQ ID NO: 1332701 - RNA, 22 nt, Human
aaucuuuucuucucuguguuga

SEQ ID NO: 1332702 - RNA, 23 nt, Human
acugcaauccacuuggggagacu

SEQ ID NO: 1332703 - RNA, 25 nt, Human
agaacaaauucacuacaaauuuuca

SEQ ID NO: 1332704 - RNA, 18 nt, Human
agcacuguuaauggacag

SEQ ID NO: 1332705 - RNA, 19 nt, Human
aggaagcugugguuucgca

SEQ ID NO: 1332706 - RNA, 19 nt, Human
aggcccggcaagccaaagg

SEQ ID NO: 1332707 - RNA, 23 nt, Human
aggcuucaguuuuccaccuccag

SEQ ID NO: 1332708 - RNA, 19 nt, Human
agguagucgccaucucaaa

SEQ ID NO: 1332709 - RNA, 24 nt, Human
aucgcaaaauuacaacugagacag

SEQ ID NO: 1332710 - RNA, 25 nt, Human
auuacaacugagacagugagagauc

SEQ ID NO: 1332711 - RNA, 21 nt, Human
caaaaaacuaaaacuauagca

SEQ ID NO: 1332712 - RNA, 22 nt, Human
caaaaccuaauaacaaguauca

SEQ ID NO: 1332713 - RNA, 24 nt, Human
caagaggacagcuucgacucccuc

SEQ ID NO: 1332714 - RNA, 23 nt, Human
cacacagccggcuuugcaugccc

SEQ ID NO: 1332715 - RNA, 23 nt, Human
cacugcuauagaaaucuauaaag

SEQ ID NO: 1332716 - RNA, 24 nt, Human
cagaaucaaggcccggcaagccaa

SEQ ID NO: 1332717 - RNA, 22 nt, Human
cagagcuuuccuuagacuaaaa

SEQ ID NO: 1332718 - RNA, 19 nt, Human
cagcguguggccacguggu

SEQ ID NO: 1332719 - RNA, 21 nt, Human
cagcuggaggcugcaagauuc

SEQ ID NO: 1332720 - RNA, 21 nt, Human
cauggcgcccagcaggaaugg

SEQ ID NO: 1332721 - RNA, 22 nt, Human
ccaaaacaaacccgcuuccugc

SEQ ID NO: 1332722 - RNA, 22 nt, Human
ccagagggcauauucaaaaaca

SEQ ID NO: 1332723 - RNA, 21 nt, Human
ccauaaauaauggcaagaaca

SEQ ID NO: 1332724 - RNA, 19 nt, Human
ccauacagaaagguagucg

SEQ ID NO: 1332725 - RNA, 27 nt, Human
ccauccagaaauuaagccaacacaaga

SEQ ID NO: 1332726 - RNA, 25 nt, Human
cccaagauagccauuugguugugcc

SEQ ID NO: 1332727 - RNA, 23 nt, Human
ccccuguacucuauggaucagcu

SEQ ID NO: 1332728 - RNA, 22 nt, Human
cccgcgcccggagagucgggac

SEQ ID NO: 1332729 - RNA, 21 nt, Human
cccuagauaacuacuauaggu

SEQ ID NO: 1332730 - RNA, 20 nt, Human
ccuccaaaaaacuaaaacua

SEQ ID NO: 1332731 - RNA, 21 nt, Human
ccuuaaaaacugcaauccacu

SEQ ID NO: 1332732 - RNA, 19 nt, Human
cgacuaaucaacuuuccca

SEQ ID NO: 1332733 - RNA, 21 nt, Human
cgcaaaauuacaacugagaca

SEQ ID NO: 1332734 - RNA, 18 nt, Human
cgcacaugaaagcaccca

SEQ ID NO: 1332735 - RNA, 24 nt, Human
cgcgccggcagaggcuucagccug

SEQ ID NO: 1332736 - RNA, 21 nt, Human
cuaaaacuauagcaaggcuuc

SEQ ID NO: 1332737 - RNA, 19 nt, Human
cuaaccuccaagcuguccu

SEQ ID NO: 1332738 - RNA, 20 nt, Human
cucacugguccccuacccac

SEQ ID NO: 1332739 - RNA, 21 nt, Human
cucaucuggucuuguggcccc

SEQ ID NO: 1332740 - RNA, 21 nt, Human
cuccaaaaaacuaaaacuaua

SEQ ID NO: 1332741 - RNA, 22 nt, Human
cucccucugauuucaucuccga

SEQ ID NO: 1332742 - RNA, 19 nt, Human
cuccucaggauaacaucac

SEQ ID NO: 1332743 - RNA, 18 nt, Human
cucgcacaugaaagcacc

SEQ ID NO: 1332744 - RNA, 20 nt, Human
cucgccauaaaaccuuacua

SEQ ID NO: 1332745 - RNA, 24 nt, Human
cuguccuuguucauuccuggucgu

SEQ ID NO: 1332746 - RNA, 19 nt, Human
cugugcguuaucacaucaa

SEQ ID NO: 1332747 - RNA, 18 nt, Human
cuucagccuggagcucag

SEQ ID NO: 1332748 - RNA, 22 nt, Human
cuucagccuggagcucagggug

SEQ ID NO: 1332749 - RNA, 19 nt, Human
cuuuucuucucuguguuga

SEQ ID NO: 1332750 - RNA, 24 nt, Human
gaucauaacccuccaaaaaacuaa

SEQ ID NO: 1332751 - RNA, 21 nt, Human
gcaaaaagagccaaggaagcu

SEQ ID NO: 1332752 - RNA, 21 nt, Human
gcaagauucuaaaccuccccc

SEQ ID NO: 1332753 - RNA, 20 nt, Human
ggagcucaggguggcgggca

SEQ ID NO: 1332754 - RNA, 27 nt, Human
ggcagaggcuucagccuggagcucagg

SEQ ID NO: 1332755 - RNA, 23 nt, Human
ggcaugauguugaagccccacuu

SEQ ID NO: 1332756 - RNA, 23 nt, Human
gguagaugaaucuuuucuucucu

SEQ ID NO: 1332757 - RNA, 23 nt, Human
guacaacagcuguuaccaaaacc

SEQ ID NO: 1332758 - RNA, 23 nt, Human
gugcgcgccggcagaggcuucag

SEQ ID NO: 1332759 - RNA, 23 nt, Human
uaaaaccuuacuauguaacacug

SEQ ID NO: 1332760 - RNA, 23 nt, Human
uaacacugcuauagaaaucuaua

SEQ ID NO: 1332761 - RNA, 27 nt, Human
uaaccaauuccaucuugcuucuaaccu

SEQ ID NO: 1332762 - RNA, 22 nt, Human
uaagccaacacaagaggacaac

SEQ ID NO: 1332763 - RNA, 23 nt, Human
uaauaacaaguaucauucaaagc

SEQ ID NO: 1332764 - RNA, 24 nt, Human
uacaacagcuguuaccaaaaccua

SEQ ID NO: 1332765 - RNA, 25 nt, Human
uaccaaaaccuaauaacaaguauca

SEQ ID NO: 1332766 - RNA, 28 nt, Human
uagcaaggcuucaguuuuccaccuccag

SEQ ID NO: 1332767 - RNA, 23 nt, Human
uagucgccaucucaaaacucuca

SEQ ID NO: 1332768 - RNA, 21 nt, Human
uauuagaggaaaauaacucag

SEQ ID NO: 1332769 - RNA, 30 nt, Human; identical to SEQ ID NO: 1275747

SEQ ID NO: 1332770 - RNA, 19 nt, Human
ucacuacaaauuuucaaaa

SEQ ID NO: 1332771 - RNA, 21 nt, Human
ucagagcuuuccuuagacuaa

SEQ ID NO: 1332772 - RNA, 23 nt, Human
ucagagcuuuccuuagacuaaaa

SEQ ID NO: 1332773 - RNA, 19 nt, Human
ucaggauaacaucacuauu

SEQ ID NO: 1332774 - RNA, 22 nt, Human
uccgcagaaucaaggcccggca

SEQ ID NO: 1332775 - RNA, 18 nt, Human
ucucaaaaucugagaaag

SEQ ID NO: 1332776 - RNA, 24 nt, Human
ucuuguggcccccauccagaaauu

SEQ ID NO: 1332777 - RNA, 23 nt, Human
ugaaaacaccaucgcaaaauuac

SEQ ID NO: 1332778 - RNA, 21 nt, Human
ugaaacaaagacaauagcagc

SEQ ID NO: 1332779 - RNA, 24 nt, Human
ugaaagcacccauaaauaauggca

SEQ ID NO: 1332780 - RNA, 18 nt, Human
ugaagcuuucucuucuaa

SEQ ID NO: 1332781 - RNA, 24 nt, Human
ugaucauaacccuccaaaaaacua

SEQ ID NO: 1332782 - RNA, 23 nt, Human
uggcaagaacaaauucacuacaa

SEQ ID NO: 1332783 - RNA, 25 nt, Human
uggcagcagcguguggccacguggu

SEQ ID NO: 1332784 - RNA, 21 nt, Human
uucuaaaccucccccaauugc

SEQ ID NO: 1332785 - RNA, 23 nt, Human
uucuuucuugcuugaucuucgau

SEQ ID NO: 1332786 - RNA, 21 nt, Human
uugaucuucgauaauacuggg

SEQ ID NO: 1332787 - RNA, 23 nt, Human
uugaucuucgauaauacugggaa

SEQ ID NO: 1332788 - RNA, 19 nt, Human
uuucaaauuuucagagcuu

SEQ ID NO: 1332789 - RNA, 21 nt, Human
aaacagaaaguaacaccagaa

SEQ ID NO: 1332790 - RNA, 21 nt, Human
aaaugucacugacuccugaaa

SEQ ID NO: 1332791 - RNA, 22 nt, Human
aaguucacagcuacauccucaa

SEQ ID NO: 1332792 - RNA, 18 nt, Human
agacagaaggaccagccu

SEQ ID NO: 1332793 - RNA, 18 nt, Human
agcuacauccucaaaugu

SEQ ID NO: 1332794 - RNA, 27 nt, Human
aggaaaaacagaaaguaaccgguaccc

SEQ ID NO: 1332795 - RNA, 23 nt, Human
caaugucuuuggggaaucucaca

SEQ ID NO: 1332796 - RNA, 21 nt, Human
uaggaaaaacagaaaguaaca

SEQ ID NO: 1332797 - RNA, 26 nt, Human
uaggaaaaacagaaaguaacaccaga

SEQ ID NO: 1332798 - RNA, 21 nt, Human
uauuaggaagugauugauaaa

SEQ ID NO: 1332799 - RNA, 27 nt, Human
uucacagcuacauccucaaaugucacu

SEQ ID NO: 1332800 - RNA, 22 nt, Human
aaaaaauaccccaacuuuagga

SEQ ID NO: 1332801 - RNA, 21 nt, Human
aaacagacaucccuauuuccu

SEQ ID NO: 1332802 - RNA, 22 nt, Human
aaacagcccaaggugaagcuca

SEQ ID NO: 1332803 - RNA, 24 nt, Human
aaagauccucaaaggucuguguua

SEQ ID NO: 1332804 - RNA, 20 nt, Human
aagacuuuuuagaaagauga

SEQ ID NO: 1332805 - RNA, 20 nt, Human
aaguagauaugcucaagaaa

SEQ ID NO: 1332806 - RNA, 20 nt, Human
aaguagcugggauuacaggc

SEQ ID NO: 1332807 - RNA, 26 nt, Human
aaguagcugggauuacaggcgcaugc

SEQ ID NO: 1332808 - RNA, 23 nt, Human
acagaguggcugggccugacccc

SEQ ID NO: 1332809 - RNA, 23 nt, Human
accagacuggagugcaauggcgu

SEQ ID NO: 1332810 - RNA, 25 nt, Human
acuaggagaaagcaugcaaaacagc

SEQ ID NO: 1332811 - RNA, 27 nt, Human
acucugucaaccagacuggagugcaau

SEQ ID NO: 1332812 - RNA, 19 nt, Human
acuggagugcaauggcgug

SEQ ID NO: 1332813 - RNA, 24 nt, Human
acuucaauagaaaguaagcuaaaa

SEQ ID NO: 1332814 - RNA, 25 nt, Human
agaaaaaaauaacacuaaauaagga

SEQ ID NO: 1332815 - RNA, 24 nt, Human
agaguaaaggugccaggggaaggg

SEQ ID NO: 1332816 - RNA, 19 nt, Human
agccacauccagggagcca

SEQ ID NO: 1332817 - RNA, 23 nt, Human
agcuacagaaaguccugacuauc

SEQ ID NO: 1332818 - RNA, 18 nt, Human
aggcccaggagagaacag

SEQ ID NO: 1332819 - RNA, 19 nt, Human
agggagccaaggauauagu

SEQ ID NO: 1332820 - RNA, 18 nt, Human
aggggaagggcugaggcu

SEQ ID NO: 1332821 - RNA, 19 nt, Human
aguagcugggauuacaggc

SEQ ID NO: 1332822 - RNA, 21 nt, Human
agugcaauggcgugaucucag

SEQ ID NO: 1332823 - RNA, 24 nt, Human
agugcaauggcgugaucucagcuc

SEQ ID NO: 1332824 - RNA, 21 nt, Human
auaagacaagguggcuccuuc

SEQ ID NO: 1332825 - RNA, 20 nt, Human
aucccuauuuccuuccuagg

SEQ ID NO: 1332826 - RNA, 20 nt, Human
auggguuuuugccauguugg

SEQ ID NO: 1332827 - RNA, 18 nt, Human
auuccaaauuucaugagg

SEQ ID NO: 1332828 - RNA, 20 nt, Human
caaccuccuccucccagguu

SEQ ID NO: 1332829 - RNA, 23 nt, Human
caacugauauaagaacuaagaaa

SEQ ID NO: 1332830 - RNA, 25 nt, Human
caagaucagaagggacacuaacacc

SEQ ID NO: 1332831 - RNA, 22 nt, Human
cacaacacuaaucacugucccc

SEQ ID NO: 1332832 - RNA, 23 nt, Human
cacaccauguacucuaaaaugag

SEQ ID NO: 1332833 - RNA, 21 nt, Human
cacauccagggagccaaggau

SEQ ID NO: 1332834 - RNA, 18 nt, Human
caccauguacucuaaaau

SEQ ID NO: 1332835 - RNA, 23 nt, Human
cacucugucaaccagacuggagu

SEQ ID NO: 1332836 - RNA, 18 nt, Human
cacuguugggugauagaa

SEQ ID NO: 1332837 - RNA, 25 nt, Human
cacuucacugugcccccugcugccc

SEQ ID NO: 1332838 - RNA, 20 nt, Human
cacuuugacagcuucccucu

SEQ ID NO: 1332839 - RNA, 25 nt, Human
cagcauaaauagguauuugugaaug

SEQ ID NO: 1332840 - RNA, 22 nt, Human
cagcucacugcaaccuccuccu

SEQ ID NO: 1332841 - RNA, 23 nt, Human
cagguuccuucacacauaauuuc

SEQ ID NO: 1332842 - RNA, 22 nt, Human
caugcuaaaaugaaugcaucca

SEQ ID NO: 1332843 - RNA, 24 nt, Human
cauguuggccaggcuggucucaaa

SEQ ID NO: 1332844 - RNA, 19 nt, Human
ccagcuuacucuucucucc

SEQ ID NO: 1332845 - RNA, 22 nt, Human
ccagcuuacucuucucucccuc

SEQ ID NO: 1332846 - RNA, 23 nt, Human
ccagcuuacucuucucucccucc

SEQ ID NO: 1332847 - RNA, 19 nt, Human
ccauguuggccaggcuggu

SEQ ID NO: 1332848 - RNA, 20 nt, Human
cccaacccaggucuggcuuc

SEQ ID NO: 1332849 - RNA, 19 nt, Human
cccagggcacaggggucag

SEQ ID NO: 1332850 - RNA, 20 nt, Human
cccagguucaagcaauucuc

SEQ ID NO: 1332851 - RNA, 23 nt, Human
ccccacugcagggugugugccca

SEQ ID NO: 1332852 - RNA, 19 nt, Human
cccugcaccucccggcuac

SEQ ID NO: 1332853 - RNA, 19 nt, Human
ccgaaguagcugggauuac

SEQ ID NO: 1332854 - RNA, 23 nt, Human
ccgaaguagcugggauuacaggc

SEQ ID NO: 1332855 - RNA, 24 nt, Human
ccgaaguagcugggauuacaggcg

SEQ ID NO: 1332856 - RNA, 22 nt, Human
ccucccagguucaagcaauucu

SEQ ID NO: 1332857 - RNA, 18 nt, Human
ccuccucccagguucaag

SEQ ID NO: 1332858 - RNA, 22 nt, Human
ccugcagcccagugcccagggc

SEQ ID NO: 1332859 - RNA, 25 nt, Human
cuaauuaaagaagacugagaagccc

SEQ ID NO: 1332860 - RNA, 20 nt, Human
cuacuucaauagaaaguaag

SEQ ID NO: 1332861 - RNA, 19 nt, Human
cuagggcccuucacuccuc

SEQ ID NO: 1332862 - RNA, 19 nt, Human
cucaagugauuugcccacc

SEQ ID NO: 1332863 - RNA, 23 nt, Human
cucacugcaaccuccuccuccca

SEQ ID NO: 1332864 - RNA, 24 nt, Human
cucacugcaaccuccuccucccag

SEQ ID NO: 1332865 - RNA, 22 nt, Human
cuccaaccugcagcccagugcc

SEQ ID NO: 1332866 - RNA, 20 nt, Human
cucccagguucaagcaauuc

SEQ ID NO: 1332867 - RNA, 21 nt, Human
cucucuacaggcccaggagag

SEQ ID NO: 1332868 - RNA, 24 nt, Human
cugcaaccuccuccucccagguuc

SEQ ID NO: 1332869 - RNA, 23 nt, Human
cuuacucuucucucccucccaga

SEQ ID NO: 1332870 - RNA, 18 nt, Human
cuugucuccuuccacuuc

SEQ ID NO: 1332871 - RNA, 21 nt, Human
gaacuuaaagaauauuuggga

SEQ ID NO: 1332872 - RNA, 20 nt, Human
gaagcuacagaaaguccuga

SEQ ID NO: 1332873 - RNA, 25 nt, Human
gacccaacccaggucuggcuucugu

SEQ ID NO: 1332874 - RNA, 22 nt, Human
gaccucaagugauuugcccacc

SEQ ID NO: 1332875 - RNA, 20 nt, Human
gaggaagggcgaagaguaaa

SEQ ID NO: 1332876 - RNA, 21 nt, Human
gaguauguguuauccccacuc

SEQ ID NO: 1332877 - RNA, 21 nt, Human
gagugcaauggcgugaucuca

SEQ ID NO: 1332878 - RNA, 20 nt, Human
gauagaguggcaggccagaa

SEQ ID NO: 1332879 - RNA, 18 nt, Human
gauuacaggcgcaugcca

SEQ ID NO: 1332880 - RNA, 24 nt, Human
gauuacaggcgcaugccaccaugc

SEQ ID NO: 1332881 - RNA, 22 nt, Human
gcaaccuccuccucccagguuc

SEQ ID NO: 1332882 - RNA, 23 nt, Human
gcacugugguccaagaguguggu

SEQ ID NO: 1332883 - RNA, 20 nt, Human
gccagguauuagaagguucc

SEQ ID NO: 1332884 - RNA, 20 nt, Human
gccauguuggccaggcuggu

SEQ ID NO: 1332885 - RNA, 22 nt, Human
gcucacugcaaccuccuccucc

SEQ ID NO: 1332886 - RNA, 22 nt, Human
gcuuacucuucucucccuccca

SEQ ID NO: 1332887 - RNA, 24 nt, Human
ggagacagagguuuacaaaaggaa

SEQ ID NO: 1332888 - RNA, 23 nt, Human
ggcuugucuccuuccacuucuuu

SEQ ID NO: 1332889 - RNA, 22 nt, Human
ggguuuuugccauguuggccag

SEQ ID NO: 1332890 - RNA, 23 nt, Human
ggguuuuugccauguuggccagg

SEQ ID NO: 1332891 - RNA, 18 nt, Human
guaaaggugccaggggaa

SEQ ID NO: 1332892 - RNA, 18 nt, Human
guagcugggauuacaggc

SEQ ID NO: 1332893 - RNA, 22 nt, Human
uaaagcacuaggagaaagcaug

SEQ ID NO: 1332894 - RNA, 20 nt, Human
uaauuuuuauauuuuuuaga

SEQ ID NO: 1332895 - RNA, 24 nt, Human
uagaagagauggguuuuugccaug

SEQ ID NO: 1332896 - RNA, 18 nt, Human
uagaagaugugggaaucc

SEQ ID NO: 1332897 - RNA, 19 nt, Human
uagggcccuucacuccucc

SEQ ID NO: 1332898 - RNA, 23 nt, Human
uaucacuggaacucaguuaaaau

SEQ ID NO: 1332899 - RNA, 20 nt, Human
uaugguuuugagagaucuuc

SEQ ID NO: 1332900 - RNA, 22 nt, Human
uaugguuuugagagaucuucuu

SEQ ID NO: 1332901 - RNA, 22 nt, Human
ucaagaaagcuaucccaaggac

SEQ ID NO: 1332902 - RNA, 18 nt, Human
ucacugcaaccuccuccc

SEQ ID NO: 1332903 - RNA, 18 nt, Human
ucacugcaaccuccuccu

SEQ ID NO: 1332904 - RNA, 24 nt, Human
ucacugcaaccuccuccucccagg

SEQ ID NO: 1332905 - RNA, 25 nt, Human
ucagcucacugcaaccuccuccucc

SEQ ID NO: 1332906 - RNA, 20 nt, Human
ucagggcugaugaaagagga

SEQ ID NO: 1332907 - RNA, 21 nt, Human
ucagggcugaugaaagaggau

SEQ ID NO: 1332908 - RNA, 18 nt, Human
ucauucaggaguagauua

SEQ ID NO: 1332909 - RNA, 19 nt, Human
uccaauauuguccaacuag

SEQ ID NO: 1332910 - RNA, 20 nt, Human
uccaccaugccaggaggaag

SEQ ID NO: 1332911 - RNA, 19 nt, Human
ucccaaggacaggguugca

SEQ ID NO: 1332912 - RNA, 21 nt, Human
ucccagguucaagcaauucuc

SEQ ID NO: 1332913 - RNA, 21 nt, Human
ucccagguucaagcaauucuc

SEQ ID NO: 1332914 - RNA, 24 nt, Human
uccgaaguagcugggauuacaggc

SEQ ID NO: 1332915 - RNA, 25 nt, Human
ucuacaggcccaggagagaacagcu

SEQ ID NO: 1332916 - RNA, 24 nt, Human
ucucacucugucaaccagacugga

SEQ ID NO: 1332917 - RNA, 18 nt, Human
ucucagggcugaugaaag

SEQ ID NO: 1332918 - RNA, 21 nt, Human
ucuguggauuuugauuaucua

SEQ ID NO: 1332919 - RNA, 23 nt, Human
ugaagcucacuuggcagcugaga

SEQ ID NO: 1332920 - RNA, 25 nt, Human
ugaaggauacaaauggagccgaaaa

SEQ ID NO: 1332921 - RNA, 18 nt, Human
ugaccucaagugauuugc

SEQ ID NO: 1332922 - RNA, 22 nt, Human
ugaccucaagugauuugcccac

SEQ ID NO: 1332923 - RNA, 20 nt, Human
ugacucaaccuccgaaguag

SEQ ID NO: 1332924 - RNA, 24 nt, Human
ugacucaaccuccgaaguagcugg

SEQ ID NO: 1332925 - RNA, 22 nt, Human
ugagaaaaaaauaacacuaaau

SEQ ID NO: 1332926 - RNA, 23 nt, Human
ugagucucacucugucaaccaga

SEQ ID NO: 1332927 - RNA, 18 nt, Human
ugccaggaggaagggcga

SEQ ID NO: 1332928 - RNA, 19 nt, Human
ugccaggggaagggcugag

SEQ ID NO: 1332929 - RNA, 24 nt, Human
ugccauguuggccaggcuggucuc

SEQ ID NO: 1332930 - RNA, 27 nt, Human
ugccauguuggccaggcuggucucaaa

SEQ ID NO: 1332931 - RNA, 19 nt, Human
ugcccagcacacuuugaca

SEQ ID NO: 1332932 - RNA, 24 nt, Human
ugcuaaaaugaaugcauccaagga

SEQ ID NO: 1332933 - RNA, 22 nt, Human
ugcuacugcagccuaaugacuu

SEQ ID NO: 1332934 - RNA, 19 nt, Human
uggagugcaauggcgugau

SEQ ID NO: 1332935 - RNA, 24 nt, Human
uggagugcaauggcgugaucucag

SEQ ID NO: 1332936 - RNA, 19 nt, Human
uggcagcugagagugaguu

SEQ ID NO: 1332937 - RNA, 24 nt, Human
uggccaggcuggucucaaacucuu

SEQ ID NO: 1332938 - RNA, 24 nt, Human
uggcgugaucucagcucacugcaa

SEQ ID NO: 1332939 - RNA, 21 nt, Human
ugggauuacaggcgcaugcca

SEQ ID NO: 1332940 - RNA, 22 nt, Human
ugggauuacaggcgcaugccac

SEQ ID NO: 1332941 - RNA, 24 nt, Human
ugggauuacaggcgcaugccacca

SEQ ID NO: 1332942 - RNA, 25 nt, Human
ugggauuacaggcgcaugccaccau

SEQ ID NO: 1332943 - RNA, 20 nt, Human
uggguuuuugccauguuggc

SEQ ID NO: 1332944 - RNA, 24 nt, Human
uggguuuuugccauguuggccagg

SEQ ID NO: 1332945 - RNA, 23 nt, Human
uguaaauacgggguaagguacau

SEQ ID NO: 1332946 - RNA, 18 nt, Human
ugucauaucacuggaacu

SEQ ID NO: 1332947 - RNA, 18 nt, Human
uuacucuucucucccucc

SEQ ID NO: 1332948 - RNA, 24 nt, Human
uuagaagagauggguuuuugccau

SEQ ID NO: 1332949 - RNA, 18 nt, Human
uuaggagguuaaggucac

SEQ ID NO: 1332950 - RNA, 18 nt, Human
uucaauagaaaguaagcu

SEQ ID NO: 1332951 - RNA, 27 nt, Human
uucagacuuaagacuuuuuagaaagau

SEQ ID NO: 1332952 - RNA, 24 nt, Human
uuccguuuucucuauaaauaguuc

SEQ ID NO: 1332953 - RNA, 19 nt, Human
uucgccaggacccaaccca

SEQ ID NO: 1332954 - RNA, 24 nt, Human
uugccauguuggccaggcuggucu

SEQ ID NO: 1332955 - RNA, 18 nt, Human
uuuaagaaauagaagcca

SEQ ID NO: 1332956 - RNA, 23 nt, Human
uuuugccauguuggccaggcugg

SEQ ID NO: 1332957 - RNA, 24 nt, Human
uuuuuagaagagauggguuuuugc

SEQ ID NO: 1332958 - RNA, 23 nt, Human
uuuuugccauguuggccaggcug

SEQ ID NO: 1332959 - RNA, 24 nt, Human
uuuuuuucuaacuucugugagauu

SEQ ID NO: 1332960 - RNA, 23 nt, Human
aaacgaaaaggaaugggaaugag

SEQ ID NO: 1332961 - RNA, 19 nt, Human
aacuagacuucugacgcug

SEQ ID NO: 1332962 - RNA, 19 nt, Human
aaucaacuguguuccaaaa

SEQ ID NO: 1332963 - RNA, 20 nt, Human
aaugacaguaacaaacaaga

SEQ ID NO: 1332964 - RNA, 19 nt, Human
acacgcugcacaacugaca

SEQ ID NO: 1332965 - RNA, 25 nt, Human
acagcugccuauaaaacuagacuuc

SEQ ID NO: 1332966 - RNA, 24 nt, Human
caacugacaucacaggacagcugc

SEQ ID NO: 1332967 - RNA, 23 nt, Human
cacucaucuccuucagcauccca

SEQ ID NO: 1332968 - RNA, 19 nt, Human
cagguccaaacaaugaagg

SEQ ID NO: 1332969 - RNA, 23 nt, Human
cccacagaugaagcacauguucc

SEQ ID NO: 1332970 - RNA, 19 nt, Human
cugauucuaaacgaaaagg

SEQ ID NO: 1332971 - RNA, 26 nt, Human
gcugcacaacugacaucacaggacag

SEQ ID NO: 1332972 - RNA, 22 nt, Human
uaaaacuagacuucugacgcug

SEQ ID NO: 1332973 - RNA, 18 nt, Human
uaauaaugagguggcaca

SEQ ID NO: 1332974 - RNA, 21 nt, Human
uagauaauaaugagguggcac

SEQ ID NO: 1332975 - RNA, 18 nt, Human
uauaaaacuagacuucug

SEQ ID NO: 1332976 - RNA, 20 nt, Human
uauauuugaaacucaaggaa

SEQ ID NO: 1332977 - RNA, 18 nt, Human
ugaauauugugaugugac

SEQ ID NO: 1332978 - RNA, 18 nt, Human
ugacaguaacaaacaaga

SEQ ID NO: 1332979 - RNA, 24 nt, Human
ugggaaugacaguaacaaacaaga

SEQ ID NO: 1332980 - RNA, 22 nt, Human
uuuuugaacugccacauucacu

SEQ ID NO: 1332981 - RNA, 19 nt, Human
aacacaggucagugugagg

SEQ ID NO: 1332982 - RNA, 18 nt, Human
aagugcugggauuacagg

SEQ ID NO: 1332983 - RNA, 19 nt, Human
aagugcugggauuacaggc

SEQ ID NO: 1332984 - RNA, 21 nt, Human
aagugcugggauuacaggcau

SEQ ID NO: 1332985 - RNA, 23 nt, Human
aagugcugggauuacaggcauga

SEQ ID NO: 1332986 - RNA, 26 nt, Human
aagugcugggauuacaggcaugagcu

SEQ ID NO: 1332987 - RNA, 19 nt, Human
acagacagauucagaggcc

SEQ ID NO: 1332988 - RNA, 19 nt, Human
acccaggcuggagugcagu

SEQ ID NO: 1332989 - RNA, 18 nt, Human
acccugucacccaggcug

SEQ ID NO: 1332990 - RNA, 24 nt, Human
acccugucacccaggcuggagugc

SEQ ID NO: 1332991 - RNA, 18 nt, Human
acgggguuucaccguguu

SEQ ID NO: 1332992 - RNA, 19 nt, Human
acgggguuucaccguguua

SEQ ID NO: 1332993 - RNA, 20 nt, Human
acgggguuucaccguguuag

SEQ ID NO: 1332994 - RNA, 24 nt, Human
acgggguuucaccguguuagccag

SEQ ID NO: 1332995 - RNA, 19 nt, Human
agaaaagagaacagggaag

SEQ ID NO: 1332996 - RNA, 21 nt, Human
agaaaagagaacagggaagga

SEQ ID NO: 1332997 - RNA, 21 nt, Human
aggaacacaggucagugugag

SEQ ID NO: 1332998 - RNA, 21 nt, Human
aguagagacgggguuucaccg

SEQ ID NO: 1332999 - RNA, 19 nt, Human
aguagcugggacuacaggc

SEQ ID NO: 1333000 - RNA, 23 nt, Human
aguagcugggacuacaggcccgu

SEQ ID NO: 1333001 - RNA, 18 nt, Human
agugcugggauuacaggc

SEQ ID NO: 1333002 - RNA, 22 nt, Human
cacccugucacccaggcuggag

SEQ ID NO: 1333003 - RNA, 23 nt, Human
cacccugucacccaggcuggagu

SEQ ID NO: 1333004 - RNA, 27 nt, Human
cacccugucacccaggcuggagugcag

SEQ ID NO: 1333005 - RNA, 18 nt, Human
caccguguuagccaggau

SEQ ID NO: 1333006 - RNA, 21 nt, Human
caccguguuagccaggauggu

SEQ ID NO: 1333007 - RNA, 24 nt, Human
caccguguuagccaggaugguuuc

SEQ ID NO: 1333008 - RNA, 21 nt, Human
cacugcaaccuccgccucccg

SEQ ID NO: 1333009 - RNA, 23 nt, Human
cacugcaaccuccgccucccggg

SEQ ID NO: 1333010 - RNA, 18 nt, Human
ccgcacucugcccagguu

SEQ ID NO: 1333011 - RNA, 23 nt, Human
ccgccuccugaguagcugggacu

SEQ ID NO: 1333012 - RNA, 19 nt, Human
ccuaagugcugggauuaca

SEQ ID NO: 1333013 - RNA, 22 nt, Human
ccuaagugcugggauuacaggc

SEQ ID NO: 1333014 - RNA, 23 nt, Human
ccuaagugcugggauuacaggca

SEQ ID NO: 1333015 - RNA, 24 nt, Human
ccuaagugcugggauuacaggcau

SEQ ID NO: 1333016 - RNA, 19 nt, Human
ccuccgccuccugaguagc

SEQ ID NO: 1333017 - RNA, 18 nt, Human
ccucgugaucugcccucc

SEQ ID NO: 1333018 - RNA, 21 nt, Human
ccucgugaucugcccuccucg

SEQ ID NO: 1333019 - RNA, 20 nt, Human
ccucugcgcccagcuaauuu

SEQ ID NO: 1333020 - RNA, 23 nt, Human
ccugaguagcugggacuacaggc

SEQ ID NO: 1333021 - RNA, 24 nt, Human
ccugucacccaggcuggagugcag

SEQ ID NO: 1333022 - RNA, 21 nt, Human
cgcacacaaggcagcugugca

SEQ ID NO: 1333023 - RNA, 19 nt, Human
cgccucccggguugacgcc

SEQ ID NO: 1333024 - RNA, 24 nt, Human
cgggguuucaccguguuagccagg

SEQ ID NO: 1333025 - RNA, 22 nt, Human
cuaagugcugggauuacaggca

SEQ ID NO: 1333026 - RNA, 24 nt, Human
cuaagugcugggauuacaggcaug

SEQ ID NO: 1333027 - RNA, 23 nt, Human
cucacauugugcuaacagggaca

SEQ ID NO: 1333028 - RNA, 24 nt, Human
cucacugcaaccuccgccucccgg

SEQ ID NO: 1333029 - RNA, 22 nt, Human
cuccugaccucgugaucugccc

SEQ ID NO: 1333030 - RNA, 23 nt, Human
cugcaaccuccgccucccggguu

SEQ ID NO: 1333031 - RNA, 23 nt, Human
cugccuccgccuccugaguagcu

SEQ ID NO: 1333032 - RNA, 20 nt, Human
cuggagugcagucgcacaau

SEQ ID NO: 1333033 - RNA, 18 nt, Human
gaacacaggucaguguga

SEQ ID NO: 1333034 - RNA, 19 nt, Human
gaccucgugaucugcccuc

SEQ ID NO: 1333035 - RNA, 22 nt, Human
gaccucgugaucugcccuccuc

SEQ ID NO: 1333036 - RNA, 24 nt, Human
gaccucgugaucugcccuccucgg

SEQ ID NO: 1333037 - RNA, 24 nt, Human
gagacgggguuucaccguguuagc

SEQ ID NO: 1333038 - RNA, 26 nt, Human
gaguagcugggacuacaggcccgugc

SEQ ID NO: 1333039 - RNA, 19 nt, Human
gauuacaggcaugagcugc

SEQ ID NO: 1333040 - RNA, 23 nt, Human
gauuacaggcaugagcugccgca

SEQ ID NO: 1333041 - RNA, 22 nt, Human
gcacaauccuggcucacugcaa

SEQ ID NO: 1333042 - RNA, 23 nt, Human
gcccagcuaauuuuuuguauuuu

SEQ ID NO: 1333043 - RNA, 19 nt, Human
ggaaauccugcaucucagu

SEQ ID NO: 1333044 - RNA, 19 nt, Human
ggaaauccugcaucucagu

SEQ ID NO: 1333045 - RNA, 19 nt, Human
ggauuacaggcaugagcug

SEQ ID NO: 1333046 - RNA, 19 nt, Human
gggaaggaacacaggucag

SEQ ID NO: 1333047 - RNA, 23 nt, Human
gggguuucaccguguuagccagg

SEQ ID NO: 1333048 - RNA, 20 nt, Human
gguuucgaucuccugaccuc

SEQ ID NO: 1333049 - RNA, 23 nt, Human
guagagacgggguuucaccgugu

SEQ ID NO: 1333050 - RNA, 24 nt, Human
uaagugcugggauuacaggcauga

SEQ ID NO: 1333051 - RNA, 25 nt, Human
uaauuuuuuguauuuuuuaguagag

SEQ ID NO: 1333052 - RNA, 26 nt, Human
uaauuuuuuguauuuuuuaguagaga

SEQ ID NO: 1333053 - RNA, 21 nt, Human
uacaggcaugagcugccgcac

SEQ ID NO: 1333054 - RNA, 21 nt, Human
uagaaaagagaacagggaagg

SEQ ID NO: 1333055 - RNA, 21 nt, Human
uaguagagacgggguuucacc

SEQ ID NO: 1333056 - RNA, 24 nt, Human
uaguagagacgggguuucaccgug

SEQ ID NO: 1333057 - RNA, 26 nt, Human
uaguagagacgggguuucaccguguu

SEQ ID NO: 1333058 - RNA, 22 nt, Human
ucacccaggcuggagugcaguc

SEQ ID NO: 1333059 - RNA, 22 nt, Human
ucacccugucacccaggcugga

SEQ ID NO: 1333060 - RNA, 24 nt, Human
ucacccugucacccaggcuggagu

SEQ ID NO: 1333061 - RNA, 24 nt, Human
ucaccguguuagccaggaugguuu

SEQ ID NO: 1333062 - RNA, 23 nt, Human
ucacugcaaccuccgccucccgg

SEQ ID NO: 1333063 - RNA, 24 nt, Human
ucacugcaaccuccgccucccggg

SEQ ID NO: 1333064 - RNA, 25 nt, Human
ucacugcaaccuccgccucccgggu

SEQ ID NO: 1333065 - RNA, 26 nt, Human
ucacugcaaccuccgccucccggguu

SEQ ID NO: 1333066 - RNA, 24 nt, Human
ucccggguugacgccauucuccug

SEQ ID NO: 1333067 - RNA, 24 nt, Human
ucccuaagugcugggauuacaggc

SEQ ID NO: 1333068 - RNA, 24 nt, Human
uccugaguagcugggacuacaggc

SEQ ID NO: 1333069 - RNA, 24 nt, Human
ugcaaaaagagaagccagaguccc

SEQ ID NO: 1333070 - RNA, 19 nt, Human
ugcaaaaagagaagccagg

SEQ ID NO: 1333071 - RNA, 24 nt, Human
ugccuccgccuccugaguagcugg

SEQ ID NO: 1333072 - RNA, 22 nt, Human
ugccucugcgcccagcuaauuu

SEQ ID NO: 1333073 - RNA, 24 nt, Human
ugccucugcgcccagcuaauuuuu

SEQ ID NO: 1333074 - RNA, 20 nt, Human
ugcugggauuacaggcauga

SEQ ID NO: 1333075 - RNA, 24 nt, Human
uggagugcagucgcacaauccugg

SEQ ID NO: 1333076 - RNA, 18 nt, Human
ugggauuacaggcaugag

SEQ ID NO: 1333077 - RNA, 18 nt, Human
ugggauuacaggcaugag

SEQ ID NO: 1333078 - RNA, 19 nt, Human
ugggauuacaggcaugagc

SEQ ID NO: 1333079 - RNA, 22 nt, Human
ugggauuacaggcaugagcugc

SEQ ID NO: 1333080 - RNA, 23 nt, Human
ugggauuacaggcaugagcugcc

SEQ ID NO: 1333081 - RNA, 24 nt, Human
ugggauuacaggcaugagcugccg

SEQ ID NO: 1333082 - RNA, 24 nt, Human
ugggauuacaggcaugagcugccg

SEQ ID NO: 1333083 - RNA, 25 nt, Human
ugggauuacaggcaugagcugccgc

SEQ ID NO: 1333084 - RNA, 21 nt, Human
ugugaggaagggggucauggu

SEQ ID NO: 1333085 - RNA, 18 nt, Human
uuaguagagacgggguuu

SEQ ID NO: 1333086 - RNA, 22 nt, Human
uuaguagagacgggguuucacc

SEQ ID NO: 1333087 - RNA, 24 nt, Human
uuaguagagacgggguuucaccgu

SEQ ID NO: 1333088 - RNA, 24 nt, Human
uucacccugucacccaggcuggag

SEQ ID NO: 1333089 - RNA, 18 nt, Human
uugcaaaaagagaagcca

SEQ ID NO: 1333090 - RNA, 22 nt, Human
uuucacccugucacccaggcug

SEQ ID NO: 1333091 - RNA, 24 nt, Human
uuucacccugucacccaggcugga

SEQ ID NO: 1333092 - RNA, 19 nt, Human
uuucaccguguuagccagg

SEQ ID NO: 1333093 - RNA, 24 nt, Human
uuuuuaguagagacgggguuucac

SEQ ID NO: 1333094 - RNA, 27 nt, Human
uuuuuauuuuuuaauuuuuauuuuuug

SEQ ID NO: 1333095 - RNA, 22 nt, Human
uuuuuguauuuuuuaguagaga

SEQ ID NO: 1333096 - RNA, 23 nt, Human
uuuuuuaguagagacgggguuuc

SEQ ID NO: 1333097 - RNA, 25 nt, Human
uuuuuuguauuuuuuaguagagacg

SEQ ID NO: 1333098 - RNA, 22 nt, Human
aaacaacaagacgcuugacuug

SEQ ID NO: 1333099 - RNA, 18 nt, Human
aagcagcaccaggagcgg

SEQ ID NO: 1333100 - RNA, 25 nt, Human
aagcagcaccaggagcggcagaaga

SEQ ID NO: 1333101 - RNA, 25 nt, Human
agcaccaggagcggcagaagaagga

SEQ ID NO: 1333102 - RNA, 21 nt, Human
aggcggcagcaguggacaagg

SEQ ID NO: 1333103 - RNA, 24 nt, Human
caaacgagcacacaagcagcacca

SEQ ID NO: 1333104 - RNA, 24 nt, Human
caagcagcaccaggagcggcagaa

SEQ ID NO: 1333105 - RNA, 20 nt, Human
cacaagcagcaccaggagcg

SEQ ID NO: 1333106 - RNA, 24 nt, Human
cacaagcagcaccaggagcggcag

SEQ ID NO: 1333107 - RNA, 18 nt, Human
caggagcggcagaagaag

SEQ ID NO: 1333108 - RNA, 23 nt, Human
caggagcggcagaagaaggaggc

SEQ ID NO: 1333109 - RNA, 18 nt, Human
caguaaaggaauggggaa

SEQ ID NO: 1333110 - RNA, 18 nt, Human
caugccacuaauggagaa

SEQ ID NO: 1333111 - RNA, 20 nt, Human
gagaaaggggguauuuucac

SEQ ID NO: 1333112 - RNA, 19 nt, Human
gagcaugccacuaauggag

SEQ ID NO: 1333113 - RNA, 21 nt, Human
gaggcggcagcaguggacaag

SEQ ID NO: 1333114 - RNA, 21 nt, Human
gaggcggcagcaguggacaag

SEQ ID NO: 1333115 - RNA, 21 nt, Human
gcagaagaaggaggcggcagc

SEQ ID NO: 1333116 - RNA, 18 nt, Human
gcggcagcaguggacaag

SEQ ID NO: 1333117 - RNA, 20 nt, Human
ggaaaacuaucuaggauucu

SEQ ID NO: 1333118 - RNA, 23 nt, Human
gguauuuucacagaaucaguauu

SEQ ID NO: 1333119 - RNA, 19 nt, Human
uaaaauucuccaauugaac

SEQ ID NO: 1333120 - RNA, 19 nt, Human
uaagagcugaaugagcaug

SEQ ID NO: 1333121 - RNA, 19 nt, Human
ucagcugccgcuucacaaa

SEQ ID NO: 1333122 - RNA, 24 nt, Human
uccucagcugccgcuucacaaaag

SEQ ID NO: 1333123 - RNA, 21 nt, Human
ugcauguaacagcuaaguaca

SEQ ID NO: 1333124 - RNA, 19 nt, Human
uggggaagggggaaaugaa

SEQ ID NO: 1333125 - RNA, 23 nt, Human
uguuguuguuuuuuuguuguugu

SEQ ID NO: 1333126 - RNA, 20 nt, Human
uuguuguuguuguuaaaaca

SEQ ID NO: 1333127 - RNA, 19 nt, Human
uuguuguuuuuuuguuguu

SEQ ID NO: 1333128 - RNA, 23 nt, Human
uuucacagaaucaguauuuuucc

SEQ ID NO: 1333129 - RNA, 22 nt, Human
uuuguuguuguuguuaaaacag

SEQ ID NO: 1333130 - RNA, 23 nt, Human
uuuuguuguuguuguuaaaacag

SEQ ID NO: 1333131 - RNA, 24 nt, Human
uuuuuuuguuguuguuguuaaaac

SEQ ID NO: 1333132 - RNA, 18 nt, Human
aagcagcaccaggagcgg

SEQ ID NO: 1333133 - RNA, 24 nt, Human
caaacgagcacacaagcagcacca

SEQ ID NO: 1333134 - RNA, 20 nt, Human
cacaagcagcaccaggagcg

SEQ ID NO: 1333135 - RNA, 21 nt, Human
ucagcugccgcuucacaaaag

SEQ ID NO: 1333136 - RNA, 24 nt, Human
uccucagcugccgcuucacaaaag

SEQ ID NO: 1333137 - RNA, 19 nt, Human
aauguauagaaggaaaagg

SEQ ID NO: 1333138 - RNA, 24 nt, Human
agcuuuauuccaaaaauaauuuua

SEQ ID NO: 1333139 - RNA, 22 nt, Human
cagaggccuggagcccucggcu

SEQ ID NO: 1333140 - RNA, 23 nt, Human
cagcuaccuugggaccucuagga

SEQ ID NO: 1333141 - RNA, 22 nt, Human
cuggagccucagcuucgcaagu

SEQ ID NO: 1333142 - RNA, 26 nt, Human
ggccuggagcccucggcuggagccuc

SEQ ID NO: 1333143 - RNA, 22 nt, Human
gucagcuaccuugggaccucua

SEQ ID NO: 1333144 - RNA, 19 nt, Human
ucagaggccuggagcccuc

SEQ ID NO: 1333145 - RNA, 21 nt, Human
ugcucccggcccugaagcguc

SEQ ID NO: 1333146 - RNA, 23 nt, Human
uguauagaaggaaaaggagcugg

SEQ ID NO: 1333147 - RNA, 27 nt, Human
uguauagaaggaaaaggagcugguuga

SEQ ID NO: 1333148 - RNA, 21 nt, Human
uuaauagguauuaaauaaugu

SEQ ID NO: 1333149 - RNA, 21 nt, Human
caacugguccauccaccuccc

SEQ ID NO: 1333150 - RNA, 21 nt, Human
cacagccaagucucccuugcc

SEQ ID NO: 1333151 - RNA, 22 nt, Human
cacagccaagucucccuugccc

SEQ ID NO: 1333152 - RNA, 23 nt, Human
cacagccaagucucccuugcccc

SEQ ID NO: 1333153 - RNA, 22 nt, Human
caccacagccuaccugccccuc

SEQ ID NO: 1333154 - RNA, 21 nt, Human
caccagcccaccccaggggac

SEQ ID NO: 1333155 - RNA, 23 nt, Human
caccagcccaccccaggggacac

SEQ ID NO: 1333156 - RNA, 18 nt, Human
cagccuaccugccccucc

SEQ ID NO: 1333157 - RNA, 25 nt, Human
caguggaccuugccuccaucucacc

SEQ ID NO: 1333158 - RNA, 20 nt, Human
caugccacucugaagcccac

SEQ ID NO: 1333159 - RNA, 19 nt, Human
ccaugccacucugaagccc

SEQ ID NO: 1333160 - RNA, 19 nt, Human
ccccaggggacaccaacug

SEQ ID NO: 1333161 - RNA, 23 nt, Human
cucacagccaagucucccuugcc

SEQ ID NO: 1333162 - RNA, 21 nt, Human
cuccugccucacagccaaguc

SEQ ID NO: 1333163 - RNA, 18 nt, Human
cuggcaccacagccuacc

SEQ ID NO: 1333164 - RNA, 24 nt, Human
gacaccaacugguccauccaccuc

SEQ ID NO: 1333165 - RNA, 18 nt, Human
gaccuugccuccaucuca

SEQ ID NO: 1333166 - RNA, 21 nt, Human
guccauguugagccuuccuca

SEQ ID NO: 1333167 - RNA, 22 nt, Human
guugagccuuccucaaaggcag

SEQ ID NO: 1333168 - RNA, 18 nt, Human
ucugaagcccacaccauu

SEQ ID NO: 1333169 - RNA, 19 nt, Human
ucuuccccagagccccaca

SEQ ID NO: 1333170 - RNA, 19 nt, Human
ugccaugccacucugaagc

SEQ ID NO: 1333171 - RNA, 19 nt, Human
ugccccuccugccucacag

SEQ ID NO: 1333172 - RNA, 21 nt, Human
uguccauguugagccuuccuc

SEQ ID NO: 1333173 - RNA, 22 nt, Human
aaacaaacaccugaucaaacca

SEQ ID NO: 1333174 - RNA, 24 nt, Human
aaacagaaauugcaaguaggaacc

SEQ ID NO: 1333175 - RNA, 18 nt, Human
aaaccuucccucuuaaac

SEQ ID NO: 1333176 - RNA, 19 nt, Human
aaagugcuaggauuauagg

SEQ ID NO: 1333177 - RNA, 19 nt, Human
aaagugcuaggauuauagg

SEQ ID NO: 1333178 - RNA, 24 nt, Human
aaagugcugggauuacagguguga

SEQ ID NO: 1333179 - RNA, 21 nt, Human
aacaaacaccugaucaaacca

SEQ ID NO: 1333180 - RNA, 19 nt, Human
aaccccggguauuuacccc

SEQ ID NO: 1333181 - RNA, 18 nt, Human
aaccucaggugauccacc

SEQ ID NO: 1333182 - RNA, 26 nt, Human
aagcaugaaaacaacauuuaucuccu

SEQ ID NO: 1333183 - RNA, 20 nt, Human
aaggagagaagguugggguu

SEQ ID NO: 1333184 - RNA, 20 nt, Human
aaguagcugggauuacaggc

SEQ ID NO: 1333185 - RNA, 26 nt, Human
aaguagcugggauuacaggccucugc

SEQ ID NO: 1333186 - RNA, 18 nt, Human
aagugcugggauuacagg

SEQ ID NO: 1333187 - RNA, 19 nt, Human
aagugcugggauuacaggu

SEQ ID NO: 1333188 - RNA, 26 nt, Human
aagugcugggauuacaggugugagcu

SEQ ID NO: 1333189 - RNA, 23 nt, Human
aaugaugaaugcuuuccaaaaga

SEQ ID NO: 1333190 - RNA, 19 nt, Human
aauggagggaccagcugga

SEQ ID NO: 1333191 - RNA, 24 nt, Human
aauuuuauauuuuuaguagagaug

SEQ ID NO: 1333192 - RNA, 21 nt, Human
acaccccuccccuuuuaaaau

SEQ ID NO: 1333193 - RNA, 18 nt, Human
accaagcaugaaaacaac

SEQ ID NO: 1333194 - RNA, 18 nt, Human
accauguuggccaggcug

SEQ ID NO: 1333195 - RNA, 18 nt, Human
accauguuggccaggcug

SEQ ID NO: 1333196 - RNA, 18 nt, Human
acgagguuucaccguguu

SEQ ID NO: 1333197 - RNA, 20 nt, Human
acgagguuucaccguguuag

SEQ ID NO: 1333198 - RNA, 22 nt, Human
acucuuguugcccaggcuggag

SEQ ID NO: 1333199 - RNA, 23 nt, Human
acugcaaucucugaacauaaauu

SEQ ID NO: 1333200 - RNA, 20 nt, Human
agaauggacacuguguuacc

SEQ ID NO: 1333201 - RNA, 22 nt, Human
agacuugaaaguugaaaucacu

SEQ ID NO: 1333202 - RNA, 21 nt, Human
agagugcugggauuacaggug

SEQ ID NO: 1333203 - RNA, 24 nt, Human
agagugcugggauuacagguguga

SEQ ID NO: 1333204 - RNA, 19 nt, Human
agcaauagauaacaaacac

SEQ ID NO: 1333205 - RNA, 20 nt, Human
agccacaggugcaguaagga

SEQ ID NO: 1333206 - RNA, 25 nt, Human
agccugguaaauucuagucagaccg

SEQ ID NO: 1333207 - RNA, 21 nt, Human
agcuggccuucuuugguuugg

SEQ ID NO: 1333208 - RNA, 21 nt, Human
agcugggacuacaggggcccg

SEQ ID NO: 1333209 - RNA, 19 nt, Human
aggcccaguuguaaaauuu

SEQ ID NO: 1333210 - RNA, 25 nt, Human
aggcuggagugcaguggugcgaucu

SEQ ID NO: 1333211 - RNA, 21 nt, Human
agggacuccaucauugcaagu

SEQ ID NO: 1333212 - RNA, 24 nt, Human
aggugauccaccugccucggccuc

SEQ ID NO: 1333213 - RNA, 22 nt, Human
aguagagaugggguuucaccau

SEQ ID NO: 1333214 - RNA, 18 nt, Human
aguagcugggacuacagg

SEQ ID NO: 1333215 - RNA, 21 nt, Human
agugcaguggugcgaucucag

SEQ ID NO: 1333216 - RNA, 23 nt, Human
agugcaguggugcgaucucagcu

SEQ ID NO: 1333217 - RNA, 24 nt, Human
agugcaguggugcgaucucagcuc

SEQ ID NO: 1333218 - RNA, 23 nt, Human
agugcaguggugcggucuugguu

SEQ ID NO: 1333219 - RNA, 24 nt, Human
agugcaguggugcggucuugguuc

SEQ ID NO: 1333220 - RNA, 22 nt, Human
agugcugggauuacagguguga

SEQ ID NO: 1333221 - RNA, 24 nt, Human
aguggugcgaucucagcucacugc

SEQ ID NO: 1333222 - RNA, 22 nt, Human
auauaaagcuauuuuaucuaca

SEQ ID NO: 1333223 - RNA, 22 nt, Human
aucuuccucucuuaguagccca

SEQ ID NO: 1333224 - RNA, 21 nt, Human
auggaaagcaggcccaaauca

SEQ ID NO: 1333225 - RNA, 18 nt, Human
augggguuucaccauguu

SEQ ID NO: 1333226 - RNA, 22 nt, Human
augggguuucaccauguuggcc

SEQ ID NO: 1333227 - RNA, 22 nt, Human
augggguuucaccauguuggcc

SEQ ID NO: 1333228 - RNA, 23 nt, Human
augggguuucaccauguuggcca

SEQ ID NO: 1333229 - RNA, 24 nt, Human
augggguuucaccauguuggccag

SEQ ID NO: 1333230 - RNA, 24 nt, Human
augggguuucaccauguuggccag

SEQ ID NO: 1333231 - RNA, 19 nt, Human
auuauaggagugugucacc

SEQ ID NO: 1333232 - RNA, 23 nt, Human
caaaauggcggccccaucauccc

SEQ ID NO: 1333233 - RNA, 25 nt, Human
caaagugcuaggauuauaggagugu

SEQ ID NO: 1333234 - RNA, 24 nt, Human
caaagugcugggauuacaggugug

SEQ ID NO: 1333235 - RNA, 22 nt, Human
caagcaauucuccugccucagc

SEQ ID NO: 1333236 - RNA, 27 nt, Human
caagcaauucuccugccucagccuccc

SEQ ID NO: 1333237 - RNA, 23 nt, Human
caagcaugaaaacaacauuuauc

SEQ ID NO: 1333238 - RNA, 24 nt, Human
caccaggccuagcuaauuuuugua

SEQ ID NO: 1333239 - RNA, 21 nt, Human
caccauguuggccaggcuggu

SEQ ID NO: 1333240 - RNA, 21 nt, Human
caccauguuggccaggcuggu

SEQ ID NO: 1333241 - RNA, 22 nt, Human
caccauguuggccaggcugguc

SEQ ID NO: 1333242 - RNA, 27 nt, Human
caccauguuggccaggcuggucuggaa

SEQ ID NO: 1333243 - RNA, 24 nt, Human
caccauguuggccaggcugguuuc

SEQ ID NO: 1333244 - RNA, 31 nt, Human; identical to SEQ ID NO: 466129

SEQ ID NO: 1333245 - RNA, 21 nt, Human
cacccacaucggccucccaaa

SEQ ID NO: 1333246 - RNA, 23 nt, Human
caccccuccccuuuuaaaauccc

SEQ ID NO: 1333247 - RNA, 18 nt, Human
caccguguuagccaggau

SEQ ID NO: 1333248 - RNA, 24 nt, Human
caccguguuagccaggauggucuc

SEQ ID NO: 1333249 - RNA, 23 nt, Human
caccugccucggccucccaaagu

SEQ ID NO: 1333250 - RNA, 18 nt, Human
cacugcaaccucugccuc

SEQ ID NO: 1333251 - RNA, 21 nt, Human
cacugcaaccucugccuccca

SEQ ID NO: 1333252 - RNA, 26 nt, Human
cacuggccuuuuuuuuuuuuuuugag

SEQ ID NO: 1333253 - RNA, 23 nt, Human
cacuguguuaccaagcaugaaaa

SEQ ID NO: 1333254 - RNA, 22 nt, Human
cagagugcugggauuacaggug

SEQ ID NO: 1333255 - RNA, 24 nt, Human
cagagugcugggauuacaggugug

SEQ ID NO: 1333256 - RNA, 18 nt, Human
cagcaauagauaacaaac

SEQ ID NO: 1333257 - RNA, 20 nt, Human
cagccuccugaguagcuggg

SEQ ID NO: 1333258 - RNA, 22 nt, Human
caggugauccaccugccucggc

SEQ ID NO: 1333259 - RNA, 22 nt, Human
caggugcaguaaggagccgaca

SEQ ID NO: 1333260 - RNA, 20 nt, Human
caguaaggagccgacaaaau

SEQ ID NO: 1333261 - RNA, 26 nt, Human
caguaggucucucaacagugggcuua

SEQ ID NO: 1333262 - RNA, 24 nt, Human
cauguuggccaggcuggucuggaa

SEQ ID NO: 1333263 - RNA, 23 nt, Human
cauguuggccaggcugguuucaa

SEQ ID NO: 1333264 - RNA, 25 nt, Human
ccaaagugcuaggauuauaggagug

SEQ ID NO: 1333265 - RNA, 21 nt, Human
ccaaagugcugggauuacagg

SEQ ID NO: 1333266 - RNA, 21 nt, Human
ccaaagugcugggauuacagg

SEQ ID NO: 1333267 - RNA, 24 nt, Human
ccaaagugcugggauuacaggugu

SEQ ID NO: 1333268 - RNA, 19 nt, Human
ccacaucggccucccaaag

SEQ ID NO: 1333269 - RNA, 21 nt, Human
ccagacaacuggcugcuucac

SEQ ID NO: 1333270 - RNA, 21 nt, Human
ccagagugcugggauuacagg

SEQ ID NO: 1333271 - RNA, 21 nt, Human
ccagagugcugggauuacagg

SEQ ID NO: 1333272 - RNA, 24 nt, Human
ccagagugcugggauuacaggugu

SEQ ID NO: 1333273 - RNA, 25 nt, Human
cccaaguagcugggauuacaggccu

SEQ ID NO: 1333274 - RNA, 23 nt, Human
ccccagacaacuggcugcuucac

SEQ ID NO: 1333275 - RNA, 18 nt, Human
ccccgguucacgccaucc

SEQ ID NO: 1333276 - RNA, 22 nt, Human
ccccuuuucucucggaaguccc

SEQ ID NO: 1333277 - RNA, 19 nt, Human
cccuguucguacaccccuc

SEQ ID NO: 1333278 - RNA, 23 nt, Human
ccgacaaaauggcacccuccgag

SEQ ID NO: 1333279 - RNA, 18 nt, Human
ccgcuggaggcccaguug

SEQ ID NO: 1333280 - RNA, 23 nt, Human
ccgcuucagccuccugaguagcu

SEQ ID NO: 1333281 - RNA, 24 nt, Human
ccuaaccucaggugauccacccac

SEQ ID NO: 1333282 - RNA, 23 nt, Human
ccuauuaaaccuucccucuuaaa

SEQ ID NO: 1333283 - RNA, 24 nt, Human
ccuauuaucuucauaaacugagaa

SEQ ID NO: 1333284 - RNA, 21 nt, Human
ccuccagcugccccuuuucuc

SEQ ID NO: 1333285 - RNA, 24 nt, Human
ccucccagauucaagcaauucucc

SEQ ID NO: 1333286 - RNA, 25 nt, Human
ccucgcgacuccucgcguguguccg

SEQ ID NO: 1333287 - RNA, 21 nt, Human
ccucuguagcuaugaaugucc

SEQ ID NO: 1333288 - RNA, 22 nt, Human
ccugaccccgugauccgcccac

SEQ ID NO: 1333289 - RNA, 21 nt, Human
ccugaccucaggugauccacc

SEQ ID NO: 1333290 - RNA, 23 nt, Human
ccugaccucaggugauccaccug

SEQ ID NO: 1333291 - RNA, 23 nt, Human
ccugaccucaggugauccaccug

SEQ ID NO: 1333292 - RNA, 23 nt, Human
ccugaguagcugggacuacaggg

SEQ ID NO: 1333293 - RNA, 23 nt, Human
ccugccucagccucccaaguagc

SEQ ID NO: 1333294 - RNA, 24 nt, Human
ccugccucagccucccaaguagcu

SEQ ID NO: 1333295 - RNA, 20 nt, Human
cgacaaaauggcacccuccg

SEQ ID NO: 1333296 - RNA, 23 nt, Human
cgacaaaauggcacccuccgaga

SEQ ID NO: 1333297 - RNA, 24 nt, Human
cgagguuucaccguguuagccagg

SEQ ID NO: 1333298 - RNA, 24 nt, Human
cgcccaggcuggagugcaguggug

SEQ ID NO: 1333299 - RNA, 22 nt, Human
cggccagccuucccagcuaugu

SEQ ID NO: 1333300 - RNA, 21 nt, Human
cguacaccccuccccuuuuaa

SEQ ID NO: 1333301 - RNA, 25 nt, Human
cuaauacucuuauaauuucuuaugc

SEQ ID NO: 1333302 - RNA, 24 nt, Human
cuaauuuuauauuuuuaguagaga

SEQ ID NO: 1333303 - RNA, 24 nt, Human
cucacugcaaccucugccucccag

SEQ ID NO: 1333304 - RNA, 24 nt, Human
cucagccucccaaguagcugggau

SEQ ID NO: 1333305 - RNA, 20 nt, Human
cuccugaccccgugauccgc

SEQ ID NO: 1333306 - RNA, 25 nt, Human
cuccugccucagccucccaaguagc

SEQ ID NO: 1333307 - RNA, 19 nt, Human
cucgcccucccagagugcu

SEQ ID NO: 1333308 - RNA, 22 nt, Human
cucgggguugucaucacggucc

SEQ ID NO: 1333309 - RNA, 18 nt, Human
cugacuucuucacuuugu

SEQ ID NO: 1333310 - RNA, 23 nt, Human
cugcaaccucugccucccagauu

SEQ ID NO: 1333311 - RNA, 24 nt, Human
cugcaaccucugccucccagauuc

SEQ ID NO: 1333312 - RNA, 23 nt, Human
cugccucggccucccaaagugcu

SEQ ID NO: 1333313 - RNA, 21 nt, Human
cuguucguacaccccuccccu

SEQ ID NO: 1333314 - RNA, 23 nt, Human
cuguuuuccuuucucuuucuuuu

SEQ ID NO: 1333315 - RNA, 24 nt, Human
cuuacucuuguugcccaggcugga

SEQ ID NO: 1333316 - RNA, 24 nt, Human
cuuguugcccaggcuggagugcag

SEQ ID NO: 1333317 - RNA, 18 nt, Human
cuuuguacuguuucucuu

SEQ ID NO: 1333318 - RNA, 19 nt, Human
gaaagauagucuaugccuu

SEQ ID NO: 1333319 - RNA, 19 nt, Human
gacacaggaguuaagaaga

SEQ ID NO: 1333320 - RNA, 22 nt, Human
gaccccgugauccgcccaccuc

SEQ ID NO: 1333321 - RNA, 24 nt, Human
gaccucaggugauccaccugccuc

SEQ ID NO: 1333322 - RNA, 18 nt, Human
gacgccgccuccucaagc

SEQ ID NO: 1333323 - RNA, 18 nt, Human
gagaugggguuucaccau

SEQ ID NO: 1333324 - RNA, 24 nt, Human
gagaugggguuucaccauguuggc

SEQ ID NO: 1333325 - RNA, 25 nt, Human
gagccgacaaaauggcacccuccga

SEQ ID NO: 1333326 - RNA, 19 nt, Human
gagcuguuuuccuuucucu

SEQ ID NO: 1333327 - RNA, 26 nt, Human
gaguagcugggacuacaggggcccgc

SEQ ID NO: 1333328 - RNA, 18 nt, Human
gauuacaggugugagcca

SEQ ID NO: 1333329 - RNA, 22 nt, Human
gauuacaggugugagccagggc

SEQ ID NO: 1333330 - RNA, 22 nt, Human
gauuacaggugugagccagggc

SEQ ID NO: 1333331 - RNA, 18 nt, Human
gauuacaggugugagcua

SEQ ID NO: 1333332 - RNA, 21 nt, Human
gauuacaggugugagcuaccg

SEQ ID NO: 1333333 - RNA, 24 nt, Human
gauuacaggugugagcuaccgugc

SEQ ID NO: 1333334 - RNA, 22 nt, Human
gauuauaggagugugucaccau

SEQ ID NO: 1333335 - RNA, 22 nt, Human
gcaaccucugccucccagauuc

SEQ ID NO: 1333336 - RNA, 22 nt, Human
gcaagcuccgccuccccgguuc

SEQ ID NO: 1333337 - RNA, 19 nt, Human
gcacagcgggacauagacc

SEQ ID NO: 1333338 - RNA, 21 nt, Human
gcaucagagcucuuggguggc

SEQ ID NO: 1333339 - RNA, 19 nt, Human
gcccaggcuggagugcagu

SEQ ID NO: 1333340 - RNA, 20 nt, Human
gcccaggcuggagugcagug

SEQ ID NO: 1333341 - RNA, 23 nt, Human
gcccaggcuggagugcaguggug

SEQ ID NO: 1333342 - RNA, 22 nt, Human
gccuagcuaauuuuuguauuuu

SEQ ID NO: 1333343 - RNA, 25 nt, Human
gcucugucgcccaggcuggagugca

SEQ ID NO: 1333344 - RNA, 23 nt, Human
gcuggucuggaacuccuaaccuc

SEQ ID NO: 1333345 - RNA, 23 nt, Human
gcugguuucaaacuccugaccuc

SEQ ID NO: 1333346 - RNA, 23 nt, Human
gcuuaggguggggcggccagccu

SEQ ID NO: 1333347 - RNA, 23 nt, Human
gcuucagccuccugaguagcugg

SEQ ID NO: 1333348 - RNA, 27 nt, Human
ggagagaagguugggguuuguuuuuga

SEQ ID NO: 1333349 - RNA, 24 nt, Human
ggcugguuucaaacuccugaccuc

SEQ ID NO: 1333350 - RNA, 22 nt, Human
gggguuucaccauguuggccag

SEQ ID NO: 1333351 - RNA, 22 nt, Human
gggguuucaccauguuggccag

SEQ ID NO: 1333352 - RNA, 18 nt, Human
ggguuucaccauguuggc

SEQ ID NO: 1333353 - RNA, 23 nt, Human
guagagaugggguuucaccaugu

SEQ ID NO: 1333354 - RNA, 18 nt, Human
guagcugggauuacaggc

SEQ ID NO: 1333355 - RNA, 24 nt, Human
gugauccacccacaucggccuccc

SEQ ID NO: 1333356 - RNA, 24 nt, Human
gugauccaccugccucggccuccc

SEQ ID NO: 1333357 - RNA, 24 nt, Human
gugauccgcccaccucgcccuccc

SEQ ID NO: 1333358 - RNA, 21 nt, Human
gugcucagcucacaaguguuc

SEQ ID NO: 1333359 - RNA, 24 nt, Human
guuuuuuuguauuuuuaguagaga

SEQ ID NO: 1333360 - RNA, 24 nt, Human
uaaaacacaggcagaguagauuua

SEQ ID NO: 1333361 - RNA, 19 nt, Human
uaaacaaacaccugaucaa

SEQ ID NO: 1333362 - RNA, 23 nt, Human
uaaacaaacaccugaucaaacca

SEQ ID NO: 1333363 - RNA, 18 nt, Human
uaacaaagagcagccugu

SEQ ID NO: 1333364 - RNA, 20 nt, Human
uaacagggacuccaucauug

SEQ ID NO: 1333365 - RNA, 23 nt, Human
uaagaagaaauuacuuagguaga

SEQ ID NO: 1333366 - RNA, 24 nt, Human
uaagguuuguuuuuuuuaauuaaa

SEQ ID NO: 1333367 - RNA, 22 nt, Human
uaauaagacuugaaaguugaaa

SEQ ID NO: 1333368 - RNA, 18 nt, Human
uaauuugccauccggcug

SEQ ID NO: 1333369 - RNA, 22 nt, Human
uaauuuuuguauuuuuaguaga

SEQ ID NO: 1333370 - RNA, 22 nt, Human
uacaccagagcaaauuaaagug

SEQ ID NO: 1333371 - RNA, 23 nt, Human
uacaggggcccgccaccacgccc

SEQ ID NO: 1333372 - RNA, 22 nt, Human
uacaggugugagccagggcgcc

SEQ ID NO: 1333373 - RNA, 23 nt, Human
uacaggugugagccagggcgccu

SEQ ID NO: 1333374 - RNA, 19 nt, Human
uaccccagacaacuggcug

SEQ ID NO: 1333375 - RNA, 24 nt, Human
uacucuuguugcccaggcuggagu

SEQ ID NO: 1333376 - RNA, 21 nt, Human
uagaaaacaaacagaaauugc

SEQ ID NO: 1333377 - RNA, 22 nt, Human
uagaaaugggguuucaccaugu

SEQ ID NO: 1333378 - RNA, 20 nt, Human
uagaaugaugaaugcuuucc

SEQ ID NO: 1333379 - RNA, 22 nt, Human
uagagaugggguuucaccaugu

SEQ ID NO: 1333380 - RNA, 21 nt, Human
uagcccagaaaccccagguuc

SEQ ID NO: 1333381 - RNA, 22 nt, Human
uaggauuauaggagugugucac

SEQ ID NO: 1333382 - RNA, 24 nt, Human
uaggauuauaggagugugucacca

SEQ ID NO: 1333383 - RNA, 24 nt, Human
uaguagaaaugggguuucaccaug

SEQ ID NO: 1333384 - RNA, 26 nt, Human
uaguagaaaugggguuucaccauguu

SEQ ID NO: 1333385 - RNA, 21 nt, Human
uaguagagacgagguuucacc

SEQ ID NO: 1333386 - RNA, 24 nt, Human
uaguagagacgagguuucaccgug

SEQ ID NO: 1333387 - RNA, 26 nt, Human
uaguagagacgagguuucaccguguu

SEQ ID NO: 1333388 - RNA, 24 nt, Human
uaguagagaugggguuucaccaug

SEQ ID NO: 1333389 - RNA, 26 nt, Human
uaguagagaugggguuucaccauguu

SEQ ID NO: 1333390 - RNA, 24 nt, Human
uauguaaacaaacaccugaucaaa

SEQ ID NO: 1333391 - RNA, 19 nt, Human
uauguauguguguguguau

SEQ ID NO: 1333392 - RNA, 18 nt, Human
uauugcccuucgaagcau

SEQ ID NO: 1333393 - RNA, 24 nt, Human
ucaccguguuagccaggauggucu

SEQ ID NO: 1333394 - RNA, 18 nt, Human
ucacugcaaccucugccu

SEQ ID NO: 1333395 - RNA, 19 nt, Human
ucacugcaaccucugccuc

SEQ ID NO: 1333396 - RNA, 23 nt, Human
ucacugcaaccucugccucccag

SEQ ID NO: 1333397 - RNA, 24 nt, Human
ucacugcaaccucugccucccaga

SEQ ID NO: 1333398 - RNA, 18 nt, Human
ucacugcaagcuccgccu

SEQ ID NO: 1333399 - RNA, 19 nt, Human
ucacugcaagcuccgccuc

SEQ ID NO: 1333400 - RNA, 19 nt, Human
ucacugcaagcuccgccuc

SEQ ID NO: 1333401 - RNA, 24 nt, Human
ucacugcaagcuccgccuccccgg

SEQ ID NO: 1333402 - RNA, 25 nt, Human
ucacuuugugaaucaguccuucaca

SEQ ID NO: 1333403 - RNA, 18 nt, Human
ucagccucccaaguagcu

SEQ ID NO: 1333404 - RNA, 20 nt, Human
ucagccucccaaguagcugg

SEQ ID NO: 1333405 - RNA, 23 nt, Human
ucagccuccugaguagcugggac

SEQ ID NO: 1333406 - RNA, 27 nt, Human
ucagcucacugcaaccucugccuccca

SEQ ID NO: 1333407 - RNA, 21 nt, Human
ucaggugauccaccugccucg

SEQ ID NO: 1333408 - RNA, 18 nt, Human
ucaguugguaaccgggaa

SEQ ID NO: 1333409 - RNA, 20 nt, Human
uccaagcuuuguuguuccau

SEQ ID NO: 1333410 - RNA, 18 nt, Human
ucccaaagugcuaggauu

SEQ ID NO: 1333411 - RNA, 23 nt, Human
ucccaaagugcugggauuacagg

SEQ ID NO: 1333412 - RNA, 24 nt, Human
ucccaaguagcugggauuacaggc

SEQ ID NO: 1333413 - RNA, 23 nt, Human
ucccagagugcugggauuacagg

SEQ ID NO: 1333414 - RNA, 21 nt, Human
ucccagauucaagcaauucuc

SEQ ID NO: 1333415 - RNA, 24 nt, Human
ucccagauucaagcaauucuccug

SEQ ID NO: 1333416 - RNA, 21 nt, Human
uccccaggugacugcccucug

SEQ ID NO: 1333417 - RNA, 23 nt, Human
uccccaggugacugcccucugac

SEQ ID NO: 1333418 - RNA, 21 nt, Human
uccccgguucacgccauccug

SEQ ID NO: 1333419 - RNA, 25 nt, Human
uccugaguagcugggacuacagggg

SEQ ID NO: 1333420 - RNA, 18 nt, Human
uccuuggaguuuucccca

SEQ ID NO: 1333421 - RNA, 18 nt, Human
uccuugugacacaggagu

SEQ ID NO: 1333422 - RNA, 21 nt, Human
uccuuguggcuuacucccugu

SEQ ID NO: 1333423 - RNA, 24 nt, Human
ucgcccaggcuggagugcaguggu

SEQ ID NO: 1333424 - RNA, 23 nt, Human
ucggaaguccccucucucacuag

SEQ ID NO: 1333425 - RNA, 18 nt, Human
ucggccucccaaagugcu

SEQ ID NO: 1333426 - RNA, 18 nt, Human
ucggccucccaaagugcu

SEQ ID NO: 1333427 - RNA, 19 nt, Human
ucuauccuguaaacugucc

SEQ ID NO: 1333428 - RNA, 21 nt, Human
ucucggaaguccccucucuca

SEQ ID NO: 1333429 - RNA, 20 nt, Human
ucugaacauaaauugugaag

SEQ ID NO: 1333430 - RNA, 24 nt, Human
ucugucgcccaggcuggagugcag

SEQ ID NO: 1333431 - RNA, 24 nt, Human
ucuuacucuuguugcccaggcugg

SEQ ID NO: 1333432 - RNA, 25 nt, Human
ucuuacucuuguugcccaggcugga

SEQ ID NO: 1333433 - RNA, 22 nt, Human
ucuucaucaucacuugcugcuu

SEQ ID NO: 1333434 - RNA, 23 nt, Human
ucuugcucugucgcccaggcugg

SEQ ID NO: 1333435 - RNA, 24 nt, Human
ucuugcucugucgcccaggcugga

SEQ ID NO: 1333436 - RNA, 22 nt, Human
ucuuguugcccaggcuggagug

SEQ ID NO: 1333437 - RNA, 18 nt, Human
ugaaauaugcccuggucu

SEQ ID NO: 1333438 - RNA, 23 nt, Human
ugaccccgugauccgcccaccuc

SEQ ID NO: 1333439 - RNA, 24 nt, Human
ugaccucaggugauccaccugccu

SEQ ID NO: 1333440 - RNA, 18 nt, Human
ugagauaaggacugaaau

SEQ ID NO: 1333441 - RNA, 22 nt, Human
ugagauggagucuugcucuguc

SEQ ID NO: 1333442 - RNA, 18 nt, Human
ugaggcuuggaaagauag

SEQ ID NO: 1333443 - RNA, 24 nt, Human
ugauccgcccaccucgcccuccca

SEQ ID NO: 1333444 - RNA, 22 nt, Human
ugcaguggugcgaucucagcuc

SEQ ID NO: 1333445 - RNA, 18 nt, Human
ugcccaggcuggagugca

SEQ ID NO: 1333446 - RNA, 21 nt, Human
ugcccaggcuggagugcagug

SEQ ID NO: 1333447 - RNA, 24 nt, Human
ugcccaggcuggagugcaguggug

SEQ ID NO: 1333448 - RNA, 24 nt, Human
ugccucagccucccaaguagcugg

SEQ ID NO: 1333449 - RNA, 21 nt, Human
ugccucggccucccaaagugc

SEQ ID NO: 1333450 - RNA, 24 nt, Human
ugccucggccucccaaagugcuag

SEQ ID NO: 1333451 - RNA, 19 nt, Human
ugccuucgcuuugugaucu

SEQ ID NO: 1333452 - RNA, 24 nt, Human
ugcucugucgcccaggcuggagug

SEQ ID NO: 1333453 - RNA, 20 nt, Human
ugcugggauuacagguguga

SEQ ID NO: 1333454 - RNA, 24 nt, Human
ugcugggauuacaggugugagcca

SEQ ID NO: 1333455 - RNA, 22 nt, Human
uggaaaaucuguuguuuagugu

SEQ ID NO: 1333456 - RNA, 23 nt, Human
uggagucuugcucugucgcccag

SEQ ID NO: 1333457 - RNA, 24 nt, Human
uggagucuugcucugucgcccagg

SEQ ID NO: 1333458 - RNA, 23 nt, Human
uggagugcaguggugcgaucuca

SEQ ID NO: 1333459 - RNA, 24 nt, Human
uggagugcaguggugcgaucucag

SEQ ID NO: 1333460 - RNA, 20 nt, Human
uggagugcaguggugcgguc

SEQ ID NO: 1333461 - RNA, 23 nt, Human
uggagugcaguggugcggucuug

SEQ ID NO: 1333462 - RNA, 24 nt, Human
uggagugcaguggugcggucuugg

SEQ ID NO: 1333463 - RNA, 24 nt, Human
uggcaugggauggcaaaccccggg

SEQ ID NO: 1333464 - RNA, 24 nt, Human
uggccaggcuggucuggaacuccu

SEQ ID NO: 1333465 - RNA, 24 nt, Human
uggccaggcugguuucaaacuccu

SEQ ID NO: 1333466 - RNA, 21 nt, Human
uggcccagguuuaguuuauac

SEQ ID NO: 1333467 - RNA, 20 nt, Human
uggccuuuuuuuuuuuuuuu

SEQ ID NO: 1333468 - RNA, 19 nt, Human
uggcugcucugggaguguc

SEQ ID NO: 1333469 - RNA, 21 nt, Human
ugggacuacaggggcccgcca

SEQ ID NO: 1333470 - RNA, 22 nt, Human
ugggacuacaggggcccgccac

SEQ ID NO: 1333471 - RNA, 24 nt, Human
ugggacuacaggggcccgccacca

SEQ ID NO: 1333472 - RNA, 19 nt, Human
ugggauuacaggccucugc

SEQ ID NO: 1333473 - RNA, 21 nt, Human
ugggauuacaggccucugcca

SEQ ID NO: 1333474 - RNA, 22 nt, Human
ugggauuacaggccucugccac

SEQ ID NO: 1333475 - RNA, 24 nt, Human
ugggauuacaggccucugccacca

SEQ ID NO: 1333476 - RNA, 18 nt, Human
ugggauuacaggugugag

SEQ ID NO: 1333477 - RNA, 18 nt, Human
ugggauuacaggugugag

SEQ ID NO: 1333478 - RNA, 19 nt, Human
ugggauuacaggugugagc

SEQ ID NO: 1333479 - RNA, 20 nt, Human
ugggauuacaggugugagcc

SEQ ID NO: 1333480 - RNA, 21 nt, Human
ugggauuacaggugugagcca

SEQ ID NO: 1333481 - RNA, 21 nt, Human
ugggauuacaggugugagcca

SEQ ID NO: 1333482 - RNA, 23 nt, Human
ugggauuacaggugugagccagg

SEQ ID NO: 1333483 - RNA, 27 nt, Human
ugggauuacaggugugagccagggcgc

SEQ ID NO: 1333484 - RNA, 21 nt, Human
ugggauuacaggugugagcua

SEQ ID NO: 1333485 - RNA, 22 nt, Human
ugggauuacaggugugagcuac

SEQ ID NO: 1333486 - RNA, 23 nt, Human
ugggauuacaggugugagcuacc

SEQ ID NO: 1333487 - RNA, 23 nt, Human
ugggauuacaggugugagcuacc

SEQ ID NO: 1333488 - RNA, 24 nt, Human
ugggauuacaggugugagcuaccg

SEQ ID NO: 1333489 - RNA, 24 nt, Human
ugggguuucaccauguuggccagg

SEQ ID NO: 1333490 - RNA, 24 nt, Human
ugggguuucaccauguuggccagg

SEQ ID NO: 1333491 - RNA, 23 nt, Human
uggucuggaacuccuaaccucag

SEQ ID NO: 1333492 - RNA, 24 nt, Human
uggugcgaucucagcucacugcaa

SEQ ID NO: 1333493 - RNA, 21 nt, Human
ugguuuggguggcaaggagag

SEQ ID NO: 1333494 - RNA, 23 nt, Human
uguaaacaaacaccugaucaaac

SEQ ID NO: 1333495 - RNA, 24 nt, Human
uguaaacaaacaccugaucaaacc

SEQ ID NO: 1333496 - RNA, 19 nt, Human
uguauguaugugugugugu

SEQ ID NO: 1333497 - RNA, 20 nt, Human
uguauguguguguguaugug

SEQ ID NO: 1333498 - RNA, 21 nt, Human
uguauuuuuaguagaaauggg

SEQ ID NO: 1333499 - RNA, 19 nt, Human
uguccuuggaguuuucccc

SEQ ID NO: 1333500 - RNA, 21 nt, Human
ugugggaagucagggacccug

SEQ ID NO: 1333501 - RNA, 19 nt, Human
uguguauguaugugugugu

SEQ ID NO: 1333502 - RNA, 21 nt, Human
uguguauguaugugugugugu

SEQ ID NO: 1333503 - RNA, 22 nt, Human
uguguauguaugugugugugua

SEQ ID NO: 1333504 - RNA, 23 nt, Human
uguguauguauguguguguguaa

SEQ ID NO: 1333505 - RNA, 23 nt, Human
uguguauguauguguguguguau

SEQ ID NO: 1333506 - RNA, 19 nt, Human
uguguguauguaugugugu

SEQ ID NO: 1333507 - RNA, 19 nt, Human
uguguguauguaugugugu

SEQ ID NO: 1333508 - RNA, 23 nt, Human
uguguguauguaugugugugugu

SEQ ID NO: 1333509 - RNA, 21 nt, Human
uguguguguauguaugugugu

SEQ ID NO: 1333510 - RNA, 22 nt, Human
uguguguguauguaugugugug

SEQ ID NO: 1333511 - RNA, 19 nt, Human
uguguuuguguguguaugu

SEQ ID NO: 1333512 - RNA, 19 nt, Human
uguucguacaccccucccc

SEQ ID NO: 1333513 - RNA, 18 nt, Human
uuaaaacuucaacaauaa

SEQ ID NO: 1333514 - RNA, 18 nt, Human
uuaauacuguguuugugu

SEQ ID NO: 1333515 - RNA, 26 nt, Human
uuaauacuuuuauaauuucuuacacc

SEQ ID NO: 1333516 - RNA, 21 nt, Human
uuacuuagguagacagugagg

SEQ ID NO: 1333517 - RNA, 18 nt, Human
uuaguagaaaugggguuu

SEQ ID NO: 1333518 - RNA, 22 nt, Human
uuaguagaaaugggguuucacc

SEQ ID NO: 1333519 - RNA, 24 nt, Human
uuaguagaaaugggguuucaccau

SEQ ID NO: 1333520 - RNA, 22 nt, Human
uuaguagagacgagguuucacc

SEQ ID NO: 1333521 - RNA, 24 nt, Human
uuaguagagacgagguuucaccgu

SEQ ID NO: 1333522 - RNA, 18 nt, Human
uuaguagagaugggguuu

SEQ ID NO: 1333523 - RNA, 22 nt, Human
uuaguagagaugggguuucacc

SEQ ID NO: 1333524 - RNA, 24 nt, Human
uuaguagagaugggguuucaccau

SEQ ID NO: 1333525 - RNA, 21 nt, Human
uucaagcaauucuccugccuc

SEQ ID NO: 1333526 - RNA, 24 nt, Human
uucaagcaauucuccugccucagc

SEQ ID NO: 1333527 - RNA, 24 nt, Human
uucagccuccugaguagcugggac

SEQ ID NO: 1333528 - RNA, 24 nt, Human
uucauggacauuuagcaguucccc

SEQ ID NO: 1333529 - RNA, 23 nt, Human
uucauggauauuuaucacuuccc

SEQ ID NO: 1333530 - RNA, 21 nt, Human
uuccuuggagacucuugaugg

SEQ ID NO: 1333531 - RNA, 24 nt, Human
uucggcucaucugccuccagcugc

SEQ ID NO: 1333532 - RNA, 18 nt, Human
uucuuuggucucgaaccc

SEQ ID NO: 1333533 - RNA, 18 nt, Human
uugagauaaggacugaaa

SEQ ID NO: 1333534 - RNA, 21 nt, Human
uugagauggagucuugcucug

SEQ ID NO: 1333535 - RNA, 24 nt, Human
uugcaaguaggaaccuuauauagg

SEQ ID NO: 1333536 - RNA, 22 nt, Human
uugcaaguuuuccuuggagacu

SEQ ID NO: 1333537 - RNA, 24 nt, Human
uugcccaggcuggagugcaguggu

SEQ ID NO: 1333538 - RNA, 24 nt, Human
uugcucugucgcccaggcuggagu

SEQ ID NO: 1333539 - RNA, 21 nt, Human
uuggagacucuugauggccca

SEQ ID NO: 1333540 - RNA, 25 nt, Human
uuguacuguuucucuuuauuucuca

SEQ ID NO: 1333541 - RNA, 23 nt, Human
uuguauuuuuaguagaaaugggg

SEQ ID NO: 1333542 - RNA, 24 nt, Human
uuguguguguauguaugugugugu

SEQ ID NO: 1333543 - RNA, 21 nt, Human
uuuaucuacauggaaaaucug

SEQ ID NO: 1333544 - RNA, 24 nt, Human
uuucaccauguuggccaggcuggu

SEQ ID NO: 1333545 - RNA, 24 nt, Human
uuucaccauguuggccaggcuggu

SEQ ID NO: 1333546 - RNA, 19 nt, Human
uuucaccguguuagccagg

SEQ ID NO: 1333547 - RNA, 18 nt, Human
uuuccuuucucuuucuuu

SEQ ID NO: 1333548 - RNA, 23 nt, Human
uuuguguguguauguaugugugu

SEQ ID NO: 1333549 - RNA, 19 nt, Human
uuuuauauuuuuaguagag

SEQ ID NO: 1333550 - RNA, 20 nt, Human
uuuuauauuuuuaguagaga

SEQ ID NO: 1333551 - RNA, 24 nt, Human
uuuuuaguagaaaugggguuucac

SEQ ID NO: 1333552 - RNA, 24 nt, Human
uuuuuaguagagacgagguuucac

SEQ ID NO: 1333553 - RNA, 24 nt, Human
uuuuuaguagagaugggguuucac

SEQ ID NO: 1333554 - RNA, 18 nt, Human
uuuuuguauuuuuaguag

SEQ ID NO: 1333555 - RNA, 21 nt, Human
uuuuuguauuuuuaguagaga

SEQ ID NO: 1333556 - RNA, 21 nt, Human
uuuuuuguauuuuuaguagag

SEQ ID NO: 1333557 - RNA, 24 nt, Human
uuuuuuguauuuuuaguagagacg

SEQ ID NO: 1333558 - RNA, 24 nt, Human
uuuuuuuuuuuugagauggagucu

SEQ ID NO: 1333559 - RNA, 22 nt, Human
uuuuuuuuuuuuuugagaugga

SEQ ID NO: 1333560 - RNA, 18 nt, Human
aaacaagaaaagcccuga

SEQ ID NO: 1333561 - RNA, 19 nt, Human
acaagaaaagcccugacgc

SEQ ID NO: 1333562 - RNA, 18 nt, Human
caagaaaagcccugacgc

SEQ ID NO: 1333563 - RNA, 20 nt, Human
cccgcccagucccgcccgcc

SEQ ID NO: 1333564 - RNA, 20 nt, Human
cccgccgagguccgugucca

SEQ ID NO: 1333565 - RNA, 24 nt, Human
ccgcccgccgagguccguguccaa

SEQ ID NO: 1333566 - RNA, 19 nt, Human
gauccuccucgcgcacccc

SEQ ID NO: 1333567 - RNA, 22 nt, Human
gggaaagauggugaaaaaaugc

SEQ ID NO: 1333568 - RNA, 23 nt, Human
ggugaaaaaaugcgaggaaaaga

SEQ ID NO: 1333569 - RNA, 30 nt, Human; identical to SEQ ID NO: 1328529

SEQ ID NO: 1333570 - RNA, 23 nt, Human
uauuaaacaagaaaagcccugac

SEQ ID NO: 1333571 - RNA, 20 nt, Human
ugaugccccgccccgcccag

SEQ ID NO: 1333572 - RNA, 23 nt, Human
uuggcuccuggagauugagggaa

SEQ ID NO: 1333573 - RNA, 20 nt, Human
aaaugcagacacacagauaa

SEQ ID NO: 1333574 - RNA, 18 nt, Human
aauuagccaggcauggug

SEQ ID NO: 1333575 - RNA, 26 nt, Human
acagagugaggcccugucccuacaaa

SEQ ID NO: 1333576 - RNA, 20 nt, Human
accacugcaaaacuccaucu

SEQ ID NO: 1333577 - RNA, 22 nt, Human
accaggucuugggugcccaggu

SEQ ID NO: 1333578 - RNA, 21 nt, Human
acccaccccggggcacgcaca

SEQ ID NO: 1333579 - RNA, 21 nt, Human
accccccuccccccucccccc

SEQ ID NO: 1333580 - RNA, 23 nt, Human
accccccuccccccucccccccc

SEQ ID NO: 1333581 - RNA, 23 nt, Human
accccccuccccccucccccccc

SEQ ID NO: 1333582 - RNA, 25 nt, Human
accccccuccccccuccccccccac

SEQ ID NO: 1333583 - RNA, 21 nt, Human
acccgcccucccuccuuaucu

SEQ ID NO: 1333584 - RNA, 19 nt, Human
agagauacagggaccuugc

SEQ ID NO: 1333585 - RNA, 22 nt, Human
agaggucacacuggacccagag

SEQ ID NO: 1333586 - RNA, 22 nt, Human
agcauuuugggaggccaaggca

SEQ ID NO: 1333587 - RNA, 24 nt, Human
aggaauugaaggcugcaaugagcu

SEQ ID NO: 1333588 - RNA, 18 nt, Human
aggcaggaggauugccug

SEQ ID NO: 1333589 - RNA, 24 nt, Human
aggcaggaggauugccugagccca

SEQ ID NO: 1333590 - RNA, 21 nt, Human
aggcugaggcaggaggauugc

SEQ ID NO: 1333591 - RNA, 24 nt, Human
aggcugaggcaggaggauugccug

SEQ ID NO: 1333592 - RNA, 24 nt, Human
aggugcaguggcucacaccuguaa

SEQ ID NO: 1333593 - RNA, 24 nt, Human
aguggcucacaccuguaaucucag

SEQ ID NO: 1333594 - RNA, 18 nt, Human
auccugcucuuggcucuu

SEQ ID NO: 1333595 - RNA, 18 nt, Human
augucugagguggccaca

SEQ ID NO: 1333596 - RNA, 24 nt, Human
caagugaauaugcguaccccccuc

SEQ ID NO: 1333597 - RNA, 22 nt, Human
cacaaccuaaucucuguguacc

SEQ ID NO: 1333598 - RNA, 23 nt, Human
cacacacagagcagguaguugua

SEQ ID NO: 1333599 - RNA, 24 nt, Human
cacaccuguaaucucagcauuuug

SEQ ID NO: 1333600 - RNA, 22 nt, Human
cacauggaaaugcccugggaac

SEQ ID NO: 1333601 - RNA, 19 nt, Human
caccccggggcacgcacag

SEQ ID NO: 1333602 - RNA, 23 nt, Human
caccuguaaucucagcauuuugg

SEQ ID NO: 1333603 - RNA, 24 nt, Human
caccuguaaucucagcauuuuggg

SEQ ID NO: 1333604 - RNA, 18 nt, Human
cagagugaggcccugucc

SEQ ID NO: 1333605 - RNA, 20 nt, Human
cagauggaguccagcaugga

SEQ ID NO: 1333606 - RNA, 24 nt, Human
cagcauuuugggaggccaaggcag

SEQ ID NO: 1333607 - RNA, 25 nt, Human
cagcauuuugggaggccaaggcagg

SEQ ID NO: 1333608 - RNA, 24 nt, Human
cagcuacucaggaggcugaggcag

SEQ ID NO: 1333609 - RNA, 18 nt, Human
caggucuugggugcccag

SEQ ID NO: 1333610 - RNA, 21 nt, Human
caggucuugggugcccagguc

SEQ ID NO: 1333611 - RNA, 23 nt, Human
ccacacucccucuccaaaaaaua

SEQ ID NO: 1333612 - RNA, 23 nt, Human
ccagagccugcagaggucacacu

SEQ ID NO: 1333613 - RNA, 22 nt, Human
ccagcuugugcaacagagugag

SEQ ID NO: 1333614 - RNA, 19 nt, Human
ccauagcaugcuggcaccc

SEQ ID NO: 1333615 - RNA, 23 nt, Human
ccaucuaaaaaaaaaauggccau

SEQ ID NO: 1333616 - RNA, 23 nt, Human
cccauagcaugcuggcacccgcc

SEQ ID NO: 1333617 - RNA, 22 nt, Human
ccccccuccccccccacacaca

SEQ ID NO: 1333618 - RNA, 24 nt, Human
ccccccuccccccccacacacaga

SEQ ID NO: 1333619 - RNA, 19 nt, Human
ccccccuccccccuccccc

SEQ ID NO: 1333620 - RNA, 22 nt, Human
cccccuccccccucccccccca

SEQ ID NO: 1333621 - RNA, 22 nt, Human
ccccucugucuuccaagaccug

SEQ ID NO: 1333622 - RNA, 22 nt, Human
cccucccuccuuaucucuccca

SEQ ID NO: 1333623 - RNA, 23 nt, Human
cccucccuccuuaucucucccaa

SEQ ID NO: 1333624 - RNA, 21 nt, Human
ccuccacccugauggguaguc

SEQ ID NO: 1333625 - RNA, 19 nt, Human
ccuccaccucauccugcuc

SEQ ID NO: 1333626 - RNA, 18 nt, Human
ccuggagcacauggaaau

SEQ ID NO: 1333627 - RNA, 21 nt, Human
ccuugccuggggcaaaaagga

SEQ ID NO: 1333628 - RNA, 21 nt, Human
cucacaccuguaaucucagca

SEQ ID NO: 1333629 - RNA, 21 nt, Human
cucacaccuguaaucucagca

SEQ ID NO: 1333630 - RNA, 19 nt, Human
cucauccugcucuuggcuc

SEQ ID NO: 1333631 - RNA, 18 nt, Human
cuccccccucccccccca

SEQ ID NO: 1333632 - RNA, 22 nt, Human
cucuguguaccacaggccucac

SEQ ID NO: 1333633 - RNA, 19 nt, Human
cugaaacccaugacugcug

SEQ ID NO: 1333634 - RNA, 23 nt, Human
cugacacuggagaaacccaauug

SEQ ID NO: 1333635 - RNA, 21 nt, Human
cuguagucccagcuacucagg

SEQ ID NO: 1333636 - RNA, 18 nt, Human
gaaaggaaaccaggucuu

SEQ ID NO: 1333637 - RNA, 24 nt, Human
gaaagucuuucccuugggaaacca

SEQ ID NO: 1333638 - RNA, 23 nt, Human
gaauaugcguaccccccuccccc

SEQ ID NO: 1333639 - RNA, 22 nt, Human
gacuucaagugaauaugcguac

SEQ ID NO: 1333640 - RNA, 18 nt, Human
gagcagguaguuguaacg

SEQ ID NO: 1333641 - RNA, 19 nt, Human
gauugcaccacugcaaaac

SEQ ID NO: 1333642 - RNA, 19 nt, Human
gccacaggaugguggauuc

SEQ ID NO: 1333643 - RNA, 19 nt, Human
gcugcaaugagcuaugauu

SEQ ID NO: 1333644 - RNA, 20 nt, Human
ggaaaacaugugcaacuggg

SEQ ID NO: 1333645 - RNA, 20 nt, Human
ggagcacucagggagaugag

SEQ ID NO: 1333646 - RNA, 22 nt, Human
ggaggauugccugagcccagga

SEQ ID NO: 1333647 - RNA, 22 nt, Human
ggcaaaaaggauuagaaaaugc

SEQ ID NO: 1333648 - RNA, 18 nt, Human
ggcgaggugcaguggcuc

SEQ ID NO: 1333649 - RNA, 20 nt, Human
gggaaaccagggagcacuca

SEQ ID NO: 1333650 - RNA, 20 nt, Human
gugcagcucuucugggcggg

SEQ ID NO: 1333651 - RNA, 18 nt, Human
gugcaguggcucacaccu

SEQ ID NO: 1333652 - RNA, 21 nt, Human
uaaagcagcuccccucugucu

SEQ ID NO: 1333653 - RNA, 21 nt, Human
uaagugguggaagauggagca

SEQ ID NO: 1333654 - RNA, 18 nt, Human
uaccacaggccucacgca

SEQ ID NO: 1333655 - RNA, 22 nt, Human
uagauaagcaucuuugugagag

SEQ ID NO: 1333656 - RNA, 22 nt, Human
uagcaugcuggcacccgcccuc

SEQ ID NO: 1333657 - RNA, 20 nt, Human
uagccucuaaagcagcuccc

SEQ ID NO: 1333658 - RNA, 23 nt, Human
uagcuaaaugagcaauauaguau

SEQ ID NO: 1333659 - RNA, 23 nt, Human
ucaaagcaacuuagccucuaaag

SEQ ID NO: 1333660 - RNA, 18 nt, Human
ucaaggaggccaggaguu

SEQ ID NO: 1333661 - RNA, 21 nt, Human
ucaaggaggccaggaguucaa

SEQ ID NO: 1333662 - RNA, 18 nt, Human
ucacaucacagacuuucu

SEQ ID NO: 1333663 - RNA, 24 nt, Human
ucagagcugcuguuccagagccug

SEQ ID NO: 1333664 - RNA, 25 nt, Human
ucagagcugcuguuccagagccugc

SEQ ID NO: 1333665 - RNA, 21 nt, Human
uccaucuaaaaaaaaaauggc

SEQ ID NO: 1333666 - RNA, 20 nt, Human
uccccccuccccccccacac

SEQ ID NO: 1333667 - RNA, 22 nt, Human
ucccuacaaaaaauucuaaaaa

SEQ ID NO: 1333668 - RNA, 20 nt, Human
ucuacugcugugaguugggg

SEQ ID NO: 1333669 - RNA, 18 nt, Human
ucucaaacaaagcuggga

SEQ ID NO: 1333670 - RNA, 21 nt, Human
ucucugcugagggcucugucc

SEQ ID NO: 1333671 - RNA, 24 nt, Human
ucuggcgaggugcaguggcucaca

SEQ ID NO: 1333672 - RNA, 23 nt, Human
ucuuugguuugcugacacuggag

SEQ ID NO: 1333673 - RNA, 25 nt, Human
ugaauaugcguaccccccucccccc

SEQ ID NO: 1333674 - RNA, 20 nt, Human
ugaggcaggaggauugccug

SEQ ID NO: 1333675 - RNA, 24 nt, Human
ugaggcaggaggauugccugagcc

SEQ ID NO: 1333676 - RNA, 25 nt, Human
ugaggcaggaggauugccugagccc

SEQ ID NO: 1333677 - RNA, 19 nt, Human
ugagguggccacaggaugg

SEQ ID NO: 1333678 - RNA, 19 nt, Human
ugaguuggggugaacccac

SEQ ID NO: 1333679 - RNA, 22 nt, Human
ugcaaugagcuaugauugcacc

SEQ ID NO: 1333680 - RNA, 21 nt, Human
ugcagcucuucugggcgggga

SEQ ID NO: 1333681 - RNA, 24 nt, Human
ugccugagcccaggaauugaaggc

SEQ ID NO: 1333682 - RNA, 21 nt, Human
ugcugaaacccaugacugcug

SEQ ID NO: 1333683 - RNA, 23 nt, Human
uggagguuuucuccuauaacuga

SEQ ID NO: 1333684 - RNA, 22 nt, Human
uggcacccgcccucccuccuua

SEQ ID NO: 1333685 - RNA, 21 nt, Human
uggcucacaccuguaaucuca

SEQ ID NO: 1333686 - RNA, 24 nt, Human
uggcucacaccuguaaucucagca

SEQ ID NO: 1333687 - RNA, 18 nt, Human
uggcuguguuggccccac

SEQ ID NO: 1333688 - RNA, 21 nt, Human
ugggaggggucuccugggaug

SEQ ID NO: 1333689 - RNA, 24 nt, Human
ugggaugaaugaaaggaaaccagg

SEQ ID NO: 1333690 - RNA, 22 nt, Human
uggggagguuagauaagcaucu

SEQ ID NO: 1333691 - RNA, 21 nt, Human
uggguagucaggccuggagca

SEQ ID NO: 1333692 - RNA, 24 nt, Human
ugguuugcugacacuggagaaacc

SEQ ID NO: 1333693 - RNA, 22 nt, Human
uguaacgccuccaccucauccu

SEQ ID NO: 1333694 - RNA, 18 nt, Human
ugucucagagauacaggg

SEQ ID NO: 1333695 - RNA, 21 nt, Human
ugugcaacagagugaggcccu

SEQ ID NO: 1333696 - RNA, 19 nt, Human
ugugcuggacucagaauug

SEQ ID NO: 1333697 - RNA, 20 nt, Human
ugugcuggacucagaauugg

SEQ ID NO: 1333698 - RNA, 21 nt, Human
uguggugguuucacuucaaga

SEQ ID NO: 1333699 - RNA, 22 nt, Human
uguguaccacaggccucacgca

SEQ ID NO: 1333700 - RNA, 18 nt, Human
uucaagauuuucaggauc

SEQ ID NO: 1333701 - RNA, 24 nt, Human
uucaaggaggccaggaguucaaga

SEQ ID NO: 1333702 - RNA, 20 nt, Human
uucuagaguaagcuuuuagg

SEQ ID NO: 1333703 - RNA, 24 nt, Human
uugccugagcccaggaauugaagg

SEQ ID NO: 1333704 - RNA, 23 nt, Human
uugcugacacuggagaaacccaa

SEQ ID NO: 1333705 - RNA, 22 nt, Human
uuggauuuuacuguggagauuu

SEQ ID NO: 1333706 - RNA, 25 nt, Human
uuuggauuuuacuguggagauuuug

SEQ ID NO: 1333707 - RNA, 23 nt, Human
acucuuuugggaaggagggaaac

SEQ ID NO: 1333708 - RNA, 18 nt, Human
augcacacacacaacagu

SEQ ID NO: 1333709 - RNA, 18 nt, Human
cuuguuugugcccaaggc

SEQ ID NO: 1333710 - RNA, 19 nt, Human
ugggaaggagggaaacuga

SEQ ID NO: 1333711 - RNA, 25 nt, Human
ugugcccaaggcaugcacacacaca

SEQ ID NO: 1333712 - RNA, 19 nt, Human
acaggggaccagagagaga

SEQ ID NO: 1333713 - RNA, 18 nt, Human
agccaaugaagggggacu

SEQ ID NO: 1333714 - RNA, 19 nt, Human
aggagccaaugaaggggga

SEQ ID NO: 1333715 - RNA, 22 nt, Human
aggcggagcagcuaguugggga

SEQ ID NO: 1333716 - RNA, 24 nt, Human
ccaaugaagggggacugaggcgga

SEQ ID NO: 1333717 - RNA, 20 nt, Human
ugacacaggggaccagagag

SEQ ID NO: 1333718 - RNA, 19 nt, Human
uuucuuucuucuuuccuuu

SEQ ID NO: 1333719 - RNA, 20 nt, Human
aaaaaacauaaucaaaagaa

SEQ ID NO: 1333720 - RNA, 24 nt, Human
aaaacauaaucaaaagaaggcaca

SEQ ID NO: 1333721 - RNA, 22 nt, Human
aagaaggcacagaggccagggg

SEQ ID NO: 1333722 - RNA, 19 nt, Human
aagcccccaauucucuuuu

SEQ ID NO: 1333723 - RNA, 26 nt, Human
aagcuguaggccccagugaguucugg

SEQ ID NO: 1333724 - RNA, 22 nt, Human
aaggaggggguaauaaagggau

SEQ ID NO: 1333725 - RNA, 20 nt, Human
acccuaagcccccaauucuc

SEQ ID NO: 1333726 - RNA, 27 nt, Human
agaggccagggggcuacaugggaacag

SEQ ID NO: 1333727 - RNA, 19 nt, Human
agaugucagggaucaaagc

SEQ ID NO: 1333728 - RNA, 20 nt, Human
agcauucuggccagaaccaa

SEQ ID NO: 1333729 - RNA, 18 nt, Human
aggaaggccuaaggucca

SEQ ID NO: 1333730 - RNA, 24 nt, Human
agggagcuggcuccauggggaggg

SEQ ID NO: 1333731 - RNA, 18 nt, Human
aggggagagaggguggag

SEQ ID NO: 1333732 - RNA, 23 nt, Human
aggggguaauaaagggauugggg

SEQ ID NO: 1333733 - RNA, 22 nt, Human
auaguagggcgauuacagacac

SEQ ID NO: 1333734 - RNA, 23 nt, Human
caaacauaaauagagggagcugg

SEQ ID NO: 1333735 - RNA, 19 nt, Human
ccagugaguucuggaggcc

SEQ ID NO: 1333736 - RNA, 24 nt, Human
ccccaggauaccccggucucccaa

SEQ ID NO: 1333737 - RNA, 19 nt, Human
cccccaggauaccccgguc

SEQ ID NO: 1333738 - RNA, 19 nt, Human
cccuaagcccccaauucuc

SEQ ID NO: 1333739 - RNA, 23 nt, Human
ccugcagcauucuggccagaacc

SEQ ID NO: 1333740 - RNA, 20 nt, Human
cggaaaacaugucugagcca

SEQ ID NO: 1333741 - RNA, 20 nt, Human
gauuacagacacaacucccc

SEQ ID NO: 1333742 - RNA, 23 nt, Human
gcagcauucuggccagaaccaaa

SEQ ID NO: 1333743 - RNA, 23 nt, Human
ggagcuggcuccauggggagggc

SEQ ID NO: 1333744 - RNA, 23 nt, Human
ggcucccuggucuccagauucca

SEQ ID NO: 1333745 - RNA, 18 nt, Human
ggcugggcuccgugucuc

SEQ ID NO: 1333746 - RNA, 22 nt, Human
gggguaauaaagggauuggggc

SEQ ID NO: 1333747 - RNA, 26 nt, Human
gucaauuucuaggugaggucuucuca

SEQ ID NO: 1333748 - RNA, 20 nt, Human
uaagcccccaauucucuuuu

SEQ ID NO: 1333749 - RNA, 21 nt, Human
uacauugggucccccaggaua

SEQ ID NO: 1333750 - RNA, 19 nt, Human
uccaggggagagagggugg

SEQ ID NO: 1333751 - RNA, 19 nt, Human
uccccuggggagcagaggc

SEQ ID NO: 1333752 - RNA, 20 nt, Human
uccuuuccaggggagagagg

SEQ ID NO: 1333753 - RNA, 22 nt, Human
ucugagccaaggcagcuccuac

SEQ ID NO: 1333754 - RNA, 19 nt, Human
ugagaggaagagaaccugc

SEQ ID NO: 1333755 - RNA, 19 nt, Human
ugagaggaagagaaccugc

SEQ ID NO: 1333756 - RNA, 21 nt, Human
ugagccagaagagguugaggg

SEQ ID NO: 1333757 - RNA, 22 nt, Human
uggagagaggaaggccuaaggu

SEQ ID NO: 1333758 - RNA, 24 nt, Human
uggggcaggggaggcguucugagu

SEQ ID NO: 1333759 - RNA, 20 nt, Human
ugguugccagcacuucacug

SEQ ID NO: 1333760 - RNA, 21 nt, Human
ugucagggaucaaagcuguag

SEQ ID NO: 1333761 - RNA, 18 nt, Human
ugucugaaggagggggua

SEQ ID NO: 1333762 - RNA, 21 nt, Human
aggacagaugcugcuggagga

SEQ ID NO: 1333763 - RNA, 18 nt, Human
aggaggccaaggggccag

SEQ ID NO: 1333764 - RNA, 20 nt, Human
aggaggccaaggggccagcu

SEQ ID NO: 1333765 - RNA, 22 nt, Human
caacugccagggaccucgagca

SEQ ID NO: 1333766 - RNA, 21 nt, Human
cacuugccaaggaccacaacu

SEQ ID NO: 1333767 - RNA, 19 nt, Human
cccugaggagagaggacag

SEQ ID NO: 1333768 - RNA, 21 nt, Human
gccaaggaccacaacugccag

SEQ ID NO: 1333769 - RNA, 22 nt, Human
gucaccagauggggauggggag

SEQ ID NO: 1333770 - RNA, 18 nt, Human
ucccugaggagagaggac

SEQ ID NO: 1333771 - RNA, 20 nt, Human
ucccugaggagagaggacag

SEQ ID NO: 1333772 - RNA, 26 nt, Human
ucucuaggaggccaaggggccagcuu

SEQ ID NO: 1333773 - RNA, 18 nt, Human
ugccaaggaccacaacug

SEQ ID NO: 1333774 - RNA, 19 nt, Human
ugccucccugaggagagag

SEQ ID NO: 1333775 - RNA, 22 nt, Human
ugcugcuggaggagaugucagg

SEQ ID NO: 1333776 - RNA, 22 nt, Human
ugcuugccucccugaggagaga

SEQ ID NO: 1333777 - RNA, 21 nt, Human
uggguggaggaggaaggacuc

SEQ ID NO: 1333778 - RNA, 22 nt, Human
uguagccaggccuuuggucacc

SEQ ID NO: 1333779 - RNA, 19 nt, Human
uuggggucuuuugaagagg

SEQ ID NO: 1333780 - RNA, 21 nt, Human
aacucagcucccauuguaccc

SEQ ID NO: 1333781 - RNA, 20 nt, Human
agcuggaagucuccagcuuc

SEQ ID NO: 1333782 - RNA, 18 nt, Human
agcuggugcucugugugc

SEQ ID NO: 1333783 - RNA, 19 nt, Human
agcuggugcucugugugcc

SEQ ID NO: 1333784 - RNA, 21 nt, Human
caacucagcucccauuguacc

SEQ ID NO: 1333785 - RNA, 19 nt, Human
ccagcuucucccuccaaca

SEQ ID NO: 1333786 - RNA, 19 nt, Human
cuugagugggagcuggagc

SEQ ID NO: 1333787 - RNA, 21 nt, Human
gagcuggagcuggaagucucc

SEQ ID NO: 1333788 - RNA, 22 nt, Human
uccagcuucucccuccaacaac

SEQ ID NO: 1333789 - RNA, 22 nt, Human
ucccuccaacaacucagcuccc

SEQ ID NO: 1333790 - RNA, 20 nt, Human
ugagugggagcuggagcugg

SEQ ID NO: 1333791 - RNA, 18 nt, Human
uacaagccuugagagaca

SEQ ID NO: 1333792 - RNA, 20 nt, Human
uuuacaagccuugagagaca

SEQ ID NO: 1333793 - RNA, 22 nt, Human
aacccaucaacccgucauggaa

SEQ ID NO: 1333794 - RNA, 23 nt, Human
aagaaaacguccugugagaggcc

SEQ ID NO: 1333795 - RNA, 21 nt, Human
aaucuugccucucagucccac

SEQ ID NO: 1333796 - RNA, 19 nt, Human
acagggucaugguggacac

SEQ ID NO: 1333797 - RNA, 19 nt, Human
acccgucauggaaauaauu

SEQ ID NO: 1333798 - RNA, 21 nt, Human
agaaagagaagucaggguucu

SEQ ID NO: 1333799 - RNA, 19 nt, Human
agaggccaggaagguagca

SEQ ID NO: 1333800 - RNA, 20 nt, Human
agggucaugguggacacggg

SEQ ID NO: 1333801 - RNA, 22 nt, Human
augaacaaaucuugccucucag

SEQ ID NO: 1333802 - RNA, 24 nt, Human
caaaucuugccucucagucccaca

SEQ ID NO: 1333803 - RNA, 22 nt, Human
caacccgucauggaaauaauuu

SEQ ID NO: 1333804 - RNA, 21 nt, Human
caugaacaaaucuugccucuc

SEQ ID NO: 1333805 - RNA, 23 nt, Human
cucacauuaugccuauagggaca

SEQ ID NO: 1333806 - RNA, 25 nt, Human
gaauguaggucaguguggggaacag

SEQ ID NO: 1333807 - RNA, 19 nt, Human
gggaaggaauguaggucag

SEQ ID NO: 1333808 - RNA, 21 nt, Human
ggggaacagggucauggugga

SEQ ID NO: 1333809 - RNA, 23 nt, Human
gucaggguucuugaagucacaaa

SEQ ID NO: 1333810 - RNA, 25 nt, Human
uccccaccaccucacauuaugccua

SEQ ID NO: 1333811 - RNA, 21 nt, Human
ucucagucccacacaaggcag

SEQ ID NO: 1333812 - RNA, 22 nt, Human
ugaacaaaucuugccucucagu

SEQ ID NO: 1333813 - RNA, 23 nt, Human
ugagaggccaggaagguagcagg

SEQ ID NO: 1333814 - RNA, 18 nt, Human
ugucucucaaauuuuagg

SEQ ID NO: 1333815 - RNA, 23 nt, Human
ugugagaggccaggaagguagca

SEQ ID NO: 1333816 - RNA, 19 nt, Human
uuacagcucagugcaccau

SEQ ID NO: 1333817 - RNA, 21 nt, Human
uuacagcucagugcaccauga

SEQ ID NO: 1333818 - RNA, 19 nt, Human
auccucccagcccccaggc

SEQ ID NO: 1333819 - RNA, 25 nt, Human
cacccacuucuccaggauccuccca

SEQ ID NO: 1333820 - RNA, 20 nt, Human
ccaggauccucccagccccc

SEQ ID NO: 1333821 - RNA, 21 nt, Human
ccaggauccucccagccccca

SEQ ID NO: 1333822 - RNA, 20 nt, Human
cccaggcuggcuuucccucc

SEQ ID NO: 1333823 - RNA, 21 nt, Human
cccccaggcuggcuuucccuc

SEQ ID NO: 1333824 - RNA, 24 nt, Human
gggcaaccccaggauggggaaggg

SEQ ID NO: 1333825 - RNA, 23 nt, Human
uagagcagaauucagacucagcu

SEQ ID NO: 1333826 - RNA, 18 nt, Human
ucagccaucuauguuccc

SEQ ID NO: 1333827 - RNA, 19 nt, Human
uccccaaccgcgagagccc

SEQ ID NO: 1333828 - RNA, 19 nt, Human
ucuguccccacccacuucu

SEQ ID NO: 1333829 - RNA, 21 nt, Human
uuccccaaccgcgagagcccc

SEQ ID NO: 1333830 - RNA, 21 nt, Human
aacucguccauuccuucucca

SEQ ID NO: 1333831 - RNA, 26 nt, Human
aacucguccauuccuucuccaacucu

SEQ ID NO: 1333832 - RNA, 25 nt, Human
acagaacaacagggcuguuucaaga

SEQ ID NO: 1333833 - RNA, 20 nt, Human
accaccacccccgcccccau

SEQ ID NO: 1333834 - RNA, 19 nt, Human
acucucuucaccaccaccc

SEQ ID NO: 1333835 - RNA, 20 nt, Human
aggaagcugugccaagucug

SEQ ID NO: 1333836 - RNA, 23 nt, Human
agugucuccauccacccccuaca

SEQ ID NO: 1333837 - RNA, 20 nt, Human
caacucucuucaccaccacc

SEQ ID NO: 1333838 - RNA, 22 nt, Human
caagcguggggcggguggcugg

SEQ ID NO: 1333839 - RNA, 25 nt, Human
caccacagccaaagugauaagaagu

SEQ ID NO: 1333840 - RNA, 20 nt, Human
caccaccacccccgccccca

SEQ ID NO: 1333841 - RNA, 22 nt, Human
cacccccgcccccaucuccacu

SEQ ID NO: 1333842 - RNA, 19 nt, Human
cacuaggcggcaccacagc

SEQ ID NO: 1333843 - RNA, 23 nt, Human
cagaauggggaccucauucuauc

SEQ ID NO: 1333844 - RNA, 19 nt, Human
caguagcccgagcccuccc

SEQ ID NO: 1333845 - RNA, 20 nt, Human
ccaacucucuucaccaccac

SEQ ID NO: 1333846 - RNA, 18 nt, Human
ccccggaguccacugugg

SEQ ID NO: 1333847 - RNA, 25 nt, Human
cccgagcccucccauucuccacucc

SEQ ID NO: 1333848 - RNA, 23 nt, Human
ccucccauucuccacuccuucga

SEQ ID NO: 1333849 - RNA, 22 nt, Human
cgagcccucccauucuccacuc

SEQ ID NO: 1333850 - RNA, 24 nt, Human
cgagcccucccauucuccacuccu

SEQ ID NO: 1333851 - RNA, 22 nt, Human
cucaguagcccgagcccuccca

SEQ ID NO: 1333852 - RNA, 22 nt, Human
cucucuucaccaccacccccgc

SEQ ID NO: 1333853 - RNA, 20 nt, Human
cugugccaagucuguaggag

SEQ ID NO: 1333854 - RNA, 23 nt, Human
gacccaauuccacuaagucaaga

SEQ ID NO: 1333855 - RNA, 21 nt, Human
gauaugagggguugggagaga

SEQ ID NO: 1333856 - RNA, 23 nt, Human
gccccggaguccacuguggauac

SEQ ID NO: 1333857 - RNA, 20 nt, Human
gcuugcguggugguuccagu

SEQ ID NO: 1333858 - RNA, 19 nt, Human
ggagcaccaccgcuccccg

SEQ ID NO: 1333859 - RNA, 21 nt, Human
gguugggagagaagggggacg

SEQ ID NO: 1333860 - RNA, 18 nt, Human
uaggaagcugugccaagu

SEQ ID NO: 1333861 - RNA, 18 nt, Human
uaggcggcaccacagcca

SEQ ID NO: 1333862 - RNA, 18 nt, Human
ucaguagcccgagcccuc

SEQ ID NO: 1333863 - RNA, 22 nt, Human
uccaacucucuucaccaccacc

SEQ ID NO: 1333864 - RNA, 23 nt, Human
uccuucuccaacucucuucacca

SEQ ID NO: 1333865 - RNA, 22 nt, Human
ucuaugcuccgaaguccgugga

SEQ ID NO: 1333866 - RNA, 19 nt, Human
ugacccaggcuggcguugc

SEQ ID NO: 1333867 - RNA, 20 nt, Human
ugacccaggcuggcguugcu

SEQ ID NO: 1333868 - RNA, 18 nt, Human
ugauggacugugacccag

SEQ ID NO: 1333869 - RNA, 21 nt, Human
ugccaagucuguaggagcccc

SEQ ID NO: 1333870 - RNA, 22 nt, Human
ugcuccgaaguccguggagcac

SEQ ID NO: 1333871 - RNA, 18 nt, Human
ugcuuaaagagugcgggg

SEQ ID NO: 1333872 - RNA, 20 nt, Human
ugggagagaagggggacgug

SEQ ID NO: 1333873 - RNA, 24 nt, Human
ugggagagaagggggacgugggaa

SEQ ID NO: 1333874 - RNA, 21 nt, Human
uggggcggguggcuggagauu

SEQ ID NO: 1333875 - RNA, 22 nt, Human
ugguuccagucugcuaaauauu

SEQ ID NO: 1333876 - RNA, 25 nt, Human
uguaggaagcugugccaagucugua

SEQ ID NO: 1333877 - RNA, 18 nt, Human
uuagaagugucuccaucc

SEQ ID NO: 1333878 - RNA, 22 nt, Human
uucaccaccacccccgccccca

SEQ ID NO: 1333879 - RNA, 26 nt, Human
uucaccaccacccccgcccccaucuc

SEQ ID NO: 1333880 - RNA, 20 nt, Human
uucccuugcugauaugaggg

SEQ ID NO: 1333881 - RNA, 26 nt, Human
uucuccacuccuucgacccaauucca

SEQ ID NO: 1333882 - RNA, 18 nt, Human
uugcucgucucuggauuu

SEQ ID NO: 1333883 - RNA, 21 nt, Human
caggccccgugagaagcuaug

SEQ ID NO: 1333884 - RNA, 24 nt, Human
cguuccuguaggaagaacuagaga

SEQ ID NO: 1333885 - RNA, 22 nt, Human
gagccaggccccgugagaagcu

SEQ ID NO: 1333886 - RNA, 24 nt, Human
uaaaagcagaaauaaggaaaaugc

SEQ ID NO: 1333887 - RNA, 27 nt, Human
uaagagaacugagacauguggaggccg

SEQ ID NO: 1333888 - RNA, 19 nt, Human
uccgagaggaccugauggu

SEQ ID NO: 1333889 - RNA, 19 nt, Human
ugagcgaguuggugggguc

SEQ ID NO: 1333890 - RNA, 20 nt, Human
ugagcgaguuggugggguca

SEQ ID NO: 1333891 - RNA, 22 nt, Human
uguaggaagaacuagagauucc

SEQ ID NO: 1333892 - RNA, 23 nt, Human
ugucaggcgugagcgaguuggug

SEQ ID NO: 1333893 - RNA, 19 nt, Human
aaccucaccgagagcccaa

SEQ ID NO: 1333894 - RNA, 21 nt, Human
agaagaggagagagagaggcc

SEQ ID NO: 1333895 - RNA, 21 nt, Human
agaggccagagccuggggaug

SEQ ID NO: 1333896 - RNA, 25 nt, Human
agccaggugcucugcauggcaaggu

SEQ ID NO: 1333897 - RNA, 21 nt, Human
agcccaaacucucaccuacag

SEQ ID NO: 1333898 - RNA, 22 nt, Human
aucugucuuuaucgccuccccc

SEQ ID NO: 1333899 - RNA, 19 nt, Human
cacccccuggcccauaagc

SEQ ID NO: 1333900 - RNA, 20 nt, Human
cagggaccacaagccagcac

SEQ ID NO: 1333901 - RNA, 18 nt, Human
ccagcacagaggcgaccu

SEQ ID NO: 1333902 - RNA, 20 nt, Human
cccaacccuuccacucugcu

SEQ ID NO: 1333903 - RNA, 20 nt, Human
ccccaacccuuccacucugc

SEQ ID NO: 1333904 - RNA, 21 nt, Human
cccccaacccuuccacucugc

SEQ ID NO: 1333905 - RNA, 23 nt, Human
ccugcagccgggucagagugagc

SEQ ID NO: 1333906 - RNA, 23 nt, Human
ccuggcccauaagccuuuuccuu

SEQ ID NO: 1333907 - RNA, 21 nt, Human
cucccucccacccccuggccc

SEQ ID NO: 1333908 - RNA, 20 nt, Human
cuggcccauaagccuuuucc

SEQ ID NO: 1333909 - RNA, 21 nt, Human
cuguuccugcuucucuuuuca

SEQ ID NO: 1333910 - RNA, 23 nt, Human
gaaagaaaaaugguaauacggaa

SEQ ID NO: 1333911 - RNA, 19 nt, Human
gagagagagaggccagagc

SEQ ID NO: 1333912 - RNA, 24 nt, Human
gccagcacagaggcgaccuccucc

SEQ ID NO: 1333913 - RNA, 22 nt, Human
gccuuuuccuucucccaaccuc

SEQ ID NO: 1333914 - RNA, 25 nt, Human
gcugugcccauucucccucccaccc

SEQ ID NO: 1333915 - RNA, 21 nt, Human
ggcuugggggaagggcagcuc

SEQ ID NO: 1333916 - RNA, 20 nt, Human
gggcuugggggaagggcagc

SEQ ID NO: 1333917 - RNA, 23 nt, Human
gguugcccucaggguccuccuug

SEQ ID NO: 1333918 - RNA, 20 nt, Human
guggaguauuuuacuguucc

SEQ ID NO: 1333919 - RNA, 19 nt, Human
gugguugcccucagggucc

SEQ ID NO: 1333920 - RNA, 20 nt, Human
guuccugcuucucuuuucac

SEQ ID NO: 1333921 - RNA, 21 nt, Human
guucugguccccuugagucuu

SEQ ID NO: 1333922 - RNA, 21 nt, Human
ucccaaccucaccgagagccc

SEQ ID NO: 1333923 - RNA, 21 nt, Human
ucccaaccucaccgagagccc

SEQ ID NO: 1333924 - RNA, 22 nt, Human
ucccaaccucaccgagagccca

SEQ ID NO: 1333925 - RNA, 20 nt, Human
ucccccaacccuuccacucu

SEQ ID NO: 1333926 - RNA, 18 nt, Human
uccgggguuggcuccuuc

SEQ ID NO: 1333927 - RNA, 23 nt, Human
ucucccaaccucaccgagagccc

SEQ ID NO: 1333928 - RNA, 24 nt, Human
ucucccaaccucaccgagagccca

SEQ ID NO: 1333929 - RNA, 21 nt, Human
ucugucuuuaucgccuccccc

SEQ ID NO: 1333930 - RNA, 27 nt, Human
ugaaagaaaaaugguaauacggaaaca

SEQ ID NO: 1333931 - RNA, 19 nt, Human
uggcagaugagaagccagg

SEQ ID NO: 1333932 - RNA, 19 nt, Human
uggcccauaagccuuuucc

SEQ ID NO: 1333933 - RNA, 24 nt, Human
uggcugugcccauucucccuccca

SEQ ID NO: 1333934 - RNA, 18 nt, Human
ugggcuugggggaagggc

SEQ ID NO: 1333935 - RNA, 20 nt, Human
ugucagggaccacaagccag

SEQ ID NO: 1333936 - RNA, 19 nt, Human
ugucuuuaucgccuccccc

SEQ ID NO: 1333937 - RNA, 18 nt, Human
uuccugcagccgggucag

SEQ ID NO: 1333938 - RNA, 22 nt, Human
uuccugcagccgggucagagug

SEQ ID NO: 1333939 - RNA, 19 nt, Human
uugcccucaggguccuccu

SEQ ID NO: 1333940 - RNA, 19 nt, Human
uugggggaagggcagcucc

SEQ ID NO: 1333941 - RNA, 19 nt, Human
uuuacuguuccugcuucuc

SEQ ID NO: 1333942 - RNA, 19 nt, Human
aaccucaccgagagcccaa

SEQ ID NO: 1333943 - RNA, 21 nt, Human
agaagaggagagagagaggcc

SEQ ID NO: 1333944 - RNA, 21 nt, Human
agaggccagagccuggggaug

SEQ ID NO: 1333945 - RNA, 25 nt, Human
agccaggugcucugcauggcaaggu

SEQ ID NO: 1333946 - RNA, 21 nt, Human
agcccaaacucucaccuacag

SEQ ID NO: 1333947 - RNA, 23 nt, Human
agccuuuuccuucucccaaccuc

SEQ ID NO: 1333948 - RNA, 19 nt, Human
cacccccuggcccauaagc

SEQ ID NO: 1333949 - RNA, 25 nt, Human
cccugcgugucucaguuucucuccu

SEQ ID NO: 1333950 - RNA, 23 nt, Human
ccugcagccgggucagagugagc

SEQ ID NO: 1333951 - RNA, 23 nt, Human
ccuggcccauaagccuuuuccuu

SEQ ID NO: 1333952 - RNA, 21 nt, Human
cucccucccacccccuggccc

SEQ ID NO: 1333953 - RNA, 20 nt, Human
cuggcccauaagccuuuucc

SEQ ID NO: 1333954 - RNA, 19 nt, Human
gagagagagaggccagagc

SEQ ID NO: 1333955 - RNA, 23 nt, Human
gguugcccucaggguccuccuug

SEQ ID NO: 1333956 - RNA, 19 nt, Human
gugguugcccucagggucc

SEQ ID NO: 1333957 - RNA, 21 nt, Human
guucugguccccuugagucuu

SEQ ID NO: 1333958 - RNA, 21 nt, Human
ucccaaccucaccgagagccc

SEQ ID NO: 1333959 - RNA, 21 nt, Human
ucccaaccucaccgagagccc

SEQ ID NO: 1333960 - RNA, 22 nt, Human
ucccaaccucaccgagagccca

SEQ ID NO: 1333961 - RNA, 18 nt, Human
uccgggguuggcuccuuc

SEQ ID NO: 1333962 - RNA, 23 nt, Human
ucucccaaccucaccgagagccc

SEQ ID NO: 1333963 - RNA, 24 nt, Human
ucucccaaccucaccgagagccca

SEQ ID NO: 1333964 - RNA, 19 nt, Human
uggcagaugagaagccagg

SEQ ID NO: 1333965 - RNA, 19 nt, Human
uggcccauaagccuuuucc

SEQ ID NO: 1333966 - RNA, 24 nt, Human
ugguugcccucaggguccuccuug

SEQ ID NO: 1333967 - RNA, 21 nt, Human
ugucagggaccacaagcccug

SEQ ID NO: 1333968 - RNA, 22 nt, Human
uuccugcagccgggucagagug

SEQ ID NO: 1333969 - RNA, 19 nt, Human
uugcccucaggguccuccu

SEQ ID NO: 1333970 - RNA, 20 nt, Human
aaaggaacaggaaggggguu

SEQ ID NO: 1333971 - RNA, 21 nt, Human
aaccucaggccccucaguaac

SEQ ID NO: 1333972 - RNA, 23 nt, Human
aaggcgccgcggaggaacucagg

SEQ ID NO: 1333973 - RNA, 22 nt, Human
acacauucccugcggucuucga

SEQ ID NO: 1333974 - RNA, 19 nt, Human
agaacccgagaccaacuga

SEQ ID NO: 1333975 - RNA, 21 nt, Human
aggggguuccgggacacagga

SEQ ID NO: 1333976 - RNA, 19 nt, Human
aggucagggcccacaaagg

SEQ ID NO: 1333977 - RNA, 20 nt, Human
augaagcucauccuccacug

SEQ ID NO: 1333978 - RNA, 19 nt, Human
cacaggauccggcuucucu

SEQ ID NO: 1333979 - RNA, 21 nt, Human
cacuuuaugaagcucauccuc

SEQ ID NO: 1333980 - RNA, 21 nt, Human
cagggcccacaaaggaacagg

SEQ ID NO: 1333981 - RNA, 24 nt, Human
cauucccugcggucuucgagaacu

SEQ ID NO: 1333982 - RNA, 25 nt, Human
cccggcggccagcccaguucucccu

SEQ ID NO: 1333983 - RNA, 21 nt, Human
ccgcgcuucacgcucugauuc

SEQ ID NO: 1333984 - RNA, 18 nt, Human
ccgcggaggaacucaggg

SEQ ID NO: 1333985 - RNA, 23 nt, Human
ccugcggucuucgagaacuuucc

SEQ ID NO: 1333986 - RNA, 20 nt, Human
cgcggaggaacucagggccc

SEQ ID NO: 1333987 - RNA, 23 nt, Human
cgcggaggaacucagggcccacg

SEQ ID NO: 1333988 - RNA, 21 nt, Human
cuagaacccgagaccaacuga

SEQ ID NO: 1333989 - RNA, 19 nt, Human
cucuagaacccgagaccaa

SEQ ID NO: 1333990 - RNA, 19 nt, Human
cuggugguggugcgggccc

SEQ ID NO: 1333991 - RNA, 18 nt, Human
cuucgagaacuuuccuca

SEQ ID NO: 1333992 - RNA, 21 nt, Human
cuuggaguccaggaaggaucc

SEQ ID NO: 1333993 - RNA, 20 nt, Human
gaacccgagaccaacugaua

SEQ ID NO: 1333994 - RNA, 19 nt, Human
gcccaggaaccucaggccc

SEQ ID NO: 1333995 - RNA, 19 nt, Human
ggaggaacucagggcccac

SEQ ID NO: 1333996 - RNA, 20 nt, Human
gugguggugcgggcccagga

SEQ ID NO: 1333997 - RNA, 23 nt, Human
ucagggcgcccacagcccugugc

SEQ ID NO: 1333998 - RNA, 24 nt, Human
uccaggaaggauccuggagaucuc

SEQ ID NO: 1333999 - RNA, 21 nt, Human
ucucgccgcggcuguggaagc

SEQ ID NO: 1334000 - RNA, 21 nt, Human
ucuuggaguccaggaaggauc

SEQ ID NO: 1334001 - RNA, 22 nt, Human
ugacccuggugguggugcgggc

SEQ ID NO: 1334002 - RNA, 21 nt, Human
ugguggugcgggcccaggaac

SEQ ID NO: 1334003 - RNA, 24 nt, Human
ucuugcuuccagcaucagccugga

SEQ ID NO: 1334004 - RNA, 19 nt, Human
aagcaccgggugaaaagag

SEQ ID NO: 1334005 - RNA, 18 nt, Human
agaagcaccgggugaaaa

SEQ ID NO: 1334006 - RNA, 22 nt, Human
agcugcuuugggacgccugggu

SEQ ID NO: 1334007 - RNA, 25 nt, Human
auggcggcccccagcugcuuuggga

SEQ ID NO: 1334008 - RNA, 18 nt, Human
caaaauggcggcccccag

SEQ ID NO: 1334009 - RNA, 19 nt, Human
caccgggugaaaagagcuc

SEQ ID NO: 1334010 - RNA, 20 nt, Human
cagaagugggcugcccugcg

SEQ ID NO: 1334011 - RNA, 24 nt, Human
cgguugggccccaggcaggaaguu

SEQ ID NO: 1334012 - RNA, 21 nt, Human
gacgaugagggaaggcgaaga

SEQ ID NO: 1334013 - RNA, 21 nt, Human
gccccaggcaggaaguuucug

SEQ ID NO: 1334014 - RNA, 22 nt, Human
uacggcaaaauggcggccccca

SEQ ID NO: 1334015 - RNA, 23 nt, Human
ucuugccuuuuugcuccacaugg

SEQ ID NO: 1334016 - RNA, 21 nt, Human
ugccguacggcaaaauggcgg

SEQ ID NO: 1334017 - RNA, 19 nt, Human
ugcuuugggacgccugggu

SEQ ID NO: 1334018 - RNA, 22 nt, Human
ugcuuugggacgccuggguucg

SEQ ID NO: 1334019 - RNA, 24 nt, Human
uggcggagucguagaagcaccggg

SEQ ID NO: 1334020 - RNA, 21 nt, Human
uggucuuggucuugccuuuuu

SEQ ID NO: 1334021 - RNA, 21 nt, Human
uguugugcgcugagggcgcuu

SEQ ID NO: 1334022 - RNA, 24 nt, Human
uuccagcgccaaacaccaggguac

SEQ ID NO: 1334023 - RNA, 20 nt, Human
uuuuugcuccacaugguggu

SEQ ID NO: 1334024 - RNA, 22 nt, Human
aacacaagcucaaucagaccua

SEQ ID NO: 1334025 - RNA, 25 nt, Human
acaacacaagcucaaucagaccuac

SEQ ID NO: 1334026 - RNA, 22 nt, Human
accccacacccagcuccuccag

SEQ ID NO: 1334027 - RNA, 20 nt, Human
aucccaccccacaauaaaaa

SEQ ID NO: 1334028 - RNA, 21 nt, Human
caccacaccaucccggaacaa

SEQ ID NO: 1334029 - RNA, 19 nt, Human
caccccacacccagcuccu

SEQ ID NO: 1334030 - RNA, 21 nt, Human
cagcccaacgcaccccacacc

SEQ ID NO: 1334031 - RNA, 24 nt, Human
cagcccaacgcaccccacacccag

SEQ ID NO: 1334032 - RNA, 20 nt, Human
caggccccccauuucuuucc

SEQ ID NO: 1334033 - RNA, 23 nt, Human
cagggacucucuccccuagaccc

SEQ ID NO: 1334034 - RNA, 21 nt, Human
cauccccucuuccaccacacc

SEQ ID NO: 1334035 - RNA, 20 nt, Human
ccacacccagcuccuccagc

SEQ ID NO: 1334036 - RNA, 23 nt, Human
ccaccacaccaucccggaacaag

SEQ ID NO: 1334037 - RNA, 21 nt, Human
ccaggccccccauuucuuucc

SEQ ID NO: 1334038 - RNA, 21 nt, Human
cccaaacuaggccuccccacc

SEQ ID NO: 1334039 - RNA, 22 nt, Human
cccaacgcaccccacacccagc

SEQ ID NO: 1334040 - RNA, 22 nt, Human
cccaccccacaauaaaaaucug

SEQ ID NO: 1334041 - RNA, 22 nt, Human
ccccacacccagcuccuccagc

SEQ ID NO: 1334042 - RNA, 19 nt, Human
cccccauuucuuucccuca

SEQ ID NO: 1334043 - RNA, 21 nt, Human
cccucuuccaccacaccaucc

SEQ ID NO: 1334044 - RNA, 19 nt, Human
cuccuccagcucgguccuc

SEQ ID NO: 1334045 - RNA, 22 nt, Human
cucuccccuagacccagggcug

SEQ ID NO: 1334046 - RNA, 22 nt, Human
gaacaagugcuccaggauuccc

SEQ ID NO: 1334047 - RNA, 22 nt, Human
gagaaaauggaggggguugagg

SEQ ID NO: 1334048 - RNA, 22 nt, Human
gcccaacgcaccccacacccag

SEQ ID NO: 1334049 - RNA, 19 nt, Human
ggaaguggccgucccuggg

SEQ ID NO: 1334050 - RNA, 28 nt, Human
ggaggggguugagggagucccaggaggg

SEQ ID NO: 1334051 - RNA, 18 nt, Human
ggggcugggaccggggaa

SEQ ID NO: 1334052 - RNA, 22 nt, Human
uaaaaaucugacccaggccccc

SEQ ID NO: 1334053 - RNA, 23 nt, Human
ucaaucagaccuacuugcaccca

SEQ ID NO: 1334054 - RNA, 24 nt, Human
ucaaucagaccuacuugcacccaa

SEQ ID NO: 1334055 - RNA, 23 nt, Human
uccagcucgguccucucccuggc

SEQ ID NO: 1334056 - RNA, 26 nt, Human
uccccaccagcccaacgcaccccacc

SEQ ID NO: 1334057 - RNA, 24 nt, Human
uccccucuuccaccacaccauccc

SEQ ID NO: 1334058 - RNA, 24 nt, Human
ucuccccuagacccagggcugucc

SEQ ID NO: 1334059 - RNA, 18 nt, Human
ugcuccaggauucccugc

SEQ ID NO: 1334060 - RNA, 22 nt, Human
ugcuccaggauucccugcccac

SEQ ID NO: 1334061 - RNA, 20 nt, Human
ugggggaacugggaggggcu

SEQ ID NO: 1334062 - RNA, 23 nt, Human
uguccauuggguagcaaugugga

SEQ ID NO: 1334063 - RNA, 23 nt, Human
uguccuacucaucccaccccaca

SEQ ID NO: 1334064 - RNA, 20 nt, Human
uucccugcccacuggccauu

SEQ ID NO: 1334065 - RNA, 23 nt, Human
aauaacagacauucaaauacauc

SEQ ID NO: 1334066 - RNA, 20 nt, Human
acaaccgggguccccccacc

SEQ ID NO: 1334067 - RNA, 24 nt, Human
acaggaugugagggagugugauag

SEQ ID NO: 1334068 - RNA, 22 nt, Human
agaauuuccaagggaugguaac

SEQ ID NO: 1334069 - RNA, 20 nt, Human
agggagugugauagguggug

SEQ ID NO: 1334070 - RNA, 21 nt, Human
caaauaagcauccacacagga

SEQ ID NO: 1334071 - RNA, 21 nt, Human
caaccgggguccccccacccc

SEQ ID NO: 1334072 - RNA, 23 nt, Human
caaccgggguccccccacccccc

SEQ ID NO: 1334073 - RNA, 21 nt, Human
cacaaccgggguccccccacc

SEQ ID NO: 1334074 - RNA, 20 nt, Human
cacacaggaagaagaauguu

SEQ ID NO: 1334075 - RNA, 23 nt, Human
caccccccaccccgucccucccu

SEQ ID NO: 1334076 - RNA, 25 nt, Human
caguaaucuuuuuccaaacuggccc

SEQ ID NO: 1334077 - RNA, 19 nt, Human
ccaccccgucccucccugc

SEQ ID NO: 1334078 - RNA, 25 nt, Human
ccccaccccccaccccgucccuccc

SEQ ID NO: 1334079 - RNA, 18 nt, Human
ccccaccccgucccuccc

SEQ ID NO: 1334080 - RNA, 19 nt, Human
ccccaccccgucccucccu

SEQ ID NO: 1334081 - RNA, 20 nt, Human
ccccaccccgucccucccug

SEQ ID NO: 1334082 - RNA, 24 nt, Human
ccccaccccgucccucccugcaaa

SEQ ID NO: 1334083 - RNA, 22 nt, Human
cccccaccccccaccccguccc

SEQ ID NO: 1334084 - RNA, 19 nt, Human
cccccaccccgucccuccc

SEQ ID NO: 1334085 - RNA, 22 nt, Human
cgccuucgcuucaguuuggaaa

SEQ ID NO: 1334086 - RNA, 19 nt, Human
gaaacguccagauuacgca

SEQ ID NO: 1334087 - RNA, 20 nt, Human
gccuaguuuuccugagucca

SEQ ID NO: 1334088 - RNA, 22 nt, Human
gggguccccccaccccccaccc

SEQ ID NO: 1334089 - RNA, 18 nt, Human
uacauguagaggcauccu

SEQ ID NO: 1334090 - RNA, 24 nt, Human
uagguggugcaugagacuccuucu

SEQ ID NO: 1334091 - RNA, 20 nt, Human
uccaaagucagaaacaggau

SEQ ID NO: 1334092 - RNA, 19 nt, Human
uccacacaggaagaagaau

SEQ ID NO: 1334093 - RNA, 19 nt, Human
uccccccaccccccacccc

SEQ ID NO: 1334094 - RNA, 18 nt, Human
ugagggagugugauaggu

SEQ ID NO: 1334095 - RNA, 22 nt, Human
ugagggagugugauagguggug

SEQ ID NO: 1334096 - RNA, 22 nt, Human
ugaguccauuccaaagucagaa

SEQ ID NO: 1334097 - RNA, 20 nt, Human
ugcuucaguucuaaaaagaa

SEQ ID NO: 1334098 - RNA, 19 nt, Human
uuaaagaggggccuaguuu

SEQ ID NO: 1334099 - RNA, 19 nt, Human
agaggggcgcggugcggga

SEQ ID NO: 1334100 - RNA, 22 nt, Human
aggaggagccgggccauucgaa

SEQ ID NO: 1334101 - RNA, 21 nt, Human
cccacgcggagagggcagccg

SEQ ID NO: 1334102 - RNA, 18 nt, Human
gcgcggugcgggaggcgg

SEQ ID NO: 1334103 - RNA, 18 nt, Human
gcggagagggcagccgga

SEQ ID NO: 1334104 - RNA, 23 nt, Human
ggcgcggugcgggaggcgggggu

SEQ ID NO: 1334105 - RNA, 26 nt, Human
ggugacaggaggagccgggccauucg

SEQ ID NO: 1334106 - RNA, 22 nt, Human
ggugagugaacaguuuugguca

SEQ ID NO: 1334107 - RNA, 21 nt, Human
gugcgggaggcggggguaggg

SEQ ID NO: 1334108 - RNA, 20 nt, Human
uagucccuuccacggugagu

SEQ ID NO: 1334109 - RNA, 20 nt, Human
ucagcaccugcgcggccaaa

SEQ ID NO: 1334110 - RNA, 20 nt, Human
ugacaggaggagccgggcca

SEQ ID NO: 1334111 - RNA, 23 nt, Human
ugagugaacaguuuuggucagaa

SEQ ID NO: 1334112 - RNA, 20 nt, Human
uggcuacugaaugcugcccu

SEQ ID NO: 1334113 - RNA, 18 nt, Human
uggugacaggaggagccg

SEQ ID NO: 1334114 - RNA, 23 nt, Human
aaagggagcuggauuuagaccuc

SEQ ID NO: 1334115 - RNA, 18 nt, Human
aaccuguuccuucuccca

SEQ ID NO: 1334116 - RNA, 25 nt, Human
acaaacuccaaaagggagggaacgc

SEQ ID NO: 1334117 - RNA, 23 nt, Human
agaauggcacaaacuccaaaagg

SEQ ID NO: 1334118 - RNA, 19 nt, Human
agggagcuggauuuagacc

SEQ ID NO: 1334119 - RNA, 21 nt, Human
caaacuccaaaagggagcugg

SEQ ID NO: 1334120 - RNA, 19 nt, Human
ccagaagcuccuggaauga

SEQ ID NO: 1334121 - RNA, 22 nt, Human
cuccucugaauuuugcaaccug

SEQ ID NO: 1334122 - RNA, 18 nt, Human
gcugcugcucaaaucgga

SEQ ID NO: 1334123 - RNA, 23 nt, Human
uccaaaagggagcuggauuuaga

SEQ ID NO: 1334124 - RNA, 21 nt, Human
uccccauguagauaacgggau

SEQ ID NO: 1334125 - RNA, 22 nt, Human
uccuggaaugagcaggucuggc

SEQ ID NO: 1334126 - RNA, 19 nt, Human
uggaaugagcaggucuggc

SEQ ID NO: 1334127 - RNA, 21 nt, Human
uggcacaaacuccaaaaggga

SEQ ID NO: 1334128 - RNA, 19 nt, Human
uguuccuucucccagaagc

SEQ ID NO: 1334129 - RNA, 21 nt, Human
aaaugggguccuuuguccauu

SEQ ID NO: 1334130 - RNA, 19 nt, Human
acaagaguagcgcuggcug

SEQ ID NO: 1334131 - RNA, 22 nt, Human
acaccccagacucaucucccuc

SEQ ID NO: 1334132 - RNA, 18 nt, Human
acagagccacagccacac

SEQ ID NO: 1334133 - RNA, 19 nt, Human
agaguccuucuggggcuuc

SEQ ID NO: 1334134 - RNA, 20 nt, Human
aggcucugcugggaauggug

SEQ ID NO: 1334135 - RNA, 19 nt, Human
aggcucugcuggggauagu

SEQ ID NO: 1334136 - RNA, 19 nt, Human
aggcucugcuggggauggu

SEQ ID NO: 1334137 - RNA, 19 nt, Human
aggcucugcuggggauggu

SEQ ID NO: 1334138 - RNA, 19 nt, Human
aggcucugcuggggauggu

SEQ ID NO: 1334139 - RNA, 18 nt, Human
agucuuuucuccauguuc

SEQ ID NO: 1334140 - RNA, 21 nt, Human
aguuuuuucugacucuucugg

SEQ ID NO: 1334141 - RNA, 21 nt, Human
augauuaucuguagagcuuuu

SEQ ID NO: 1334142 - RNA, 22 nt, Human
caaaugggguccuuuguccauu

SEQ ID NO: 1334143 - RNA, 22 nt, Human
caaaugggguccuuuguccauu

SEQ ID NO: 1334144 - RNA, 22 nt, Human
caaaugggguccuuuuuccauu

SEQ ID NO: 1334145 - RNA, 22 nt, Human
cagcggauucuuuauguguggu

SEQ ID NO: 1334146 - RNA, 25 nt, Human
caguggaguccuuucugcguguucu

SEQ ID NO: 1334147 - RNA, 25 nt, Human
caguggaguccuuucuucguguucu

SEQ ID NO: 1334148 - RNA, 25 nt, Human
cagugggguccuuucuccauguucu

SEQ ID NO: 1334149 - RNA, 25 nt, Human
cagugggguccuuucuccguguucu

SEQ ID NO: 1334150 - RNA, 25 nt, Human
cagugggguccuuucuccguguucu

SEQ ID NO: 1334151 - RNA, 19 nt, Human
cauguucuguagacucugu

SEQ ID NO: 1334152 - RNA, 25 nt, Human
ccaaaggucuuccaguuuuaucuga

SEQ ID NO: 1334153 - RNA, 18 nt, Human
ccaaggccugcaggccca

SEQ ID NO: 1334154 - RNA, 22 nt, Human
ccacaccccagacucaucuccc

SEQ ID NO: 1334155 - RNA, 23 nt, Human
ccacagccacaccccagacucau

SEQ ID NO: 1334156 - RNA, 22 nt, Human
cccuugguugcuggaguuuucu

SEQ ID NO: 1334157 - RNA, 23 nt, Human
ccugcaggcccaggagcagcacc

SEQ ID NO: 1334158 - RNA, 18 nt, Human
ccugccccccaagaagcu

SEQ ID NO: 1334159 - RNA, 19 nt, Human
ccuggagugaggggaaaua

SEQ ID NO: 1334160 - RNA, 20 nt, Human
ccuggagugaggggaaauau

SEQ ID NO: 1334161 - RNA, 20 nt, Human
ccuuucucuauuuucuguag

SEQ ID NO: 1334162 - RNA, 20 nt, Human
ccuuucucuauuuucuguag

SEQ ID NO: 1334163 - RNA, 20 nt, Human
ccuuucucuauuuucuguag

SEQ ID NO: 1334164 - RNA, 20 nt, Human
ccuuucucuauuuucuguag

SEQ ID NO: 1334165 - RNA, 20 nt, Human
ccuuucucuauuuucuguag

SEQ ID NO: 1334166 - RNA, 20 nt, Human
ccuuucucuauuuucuguag

SEQ ID NO: 1334167 - RNA, 20 nt, Human
ccuuucucuauuuucuguag

SEQ ID NO: 1334168 - RNA, 20 nt, Human
ccuuucucuauuuucuguag

SEQ ID NO: 1334169 - RNA, 24 nt, Human
cuauguucuguagacucugcugca

SEQ ID NO: 1334170 - RNA, 20 nt, Human
cucauuggccaguggagucc

SEQ ID NO: 1334171 - RNA, 20 nt, Human
cucugcugggaauagugugg

SEQ ID NO: 1334172 - RNA, 20 nt, Human
cucugcugggaauggugugg

SEQ ID NO: 1334173 - RNA, 25 nt, Human
cugcuggggauagugugguguucuc

SEQ ID NO: 1334174 - RNA, 25 nt, Human
cugcuggggauagugugguguucuc

SEQ ID NO: 1334175 - RNA, 25 nt, Human
cugcuggggauagugugguguucuc

SEQ ID NO: 1334176 - RNA, 25 nt, Human
cugcuggggaugaugugguguucuc

SEQ ID NO: 1334177 - RNA, 25 nt, Human
cugcuggggauggugugguguucuc

SEQ ID NO: 1334178 - RNA, 25 nt, Human
cugcuggggauggugugguguucuc

SEQ ID NO: 1334179 - RNA, 20 nt, Human
cuggaaaagaugugcuuuuu

SEQ ID NO: 1334180 - RNA, 21 nt, Human
cuggcaggccuucuugauacc

SEQ ID NO: 1334181 - RNA, 19 nt, Human
cuucucauuggccaaugga

SEQ ID NO: 1334182 - RNA, 23 nt, Human
cuucucauuggccaauggagucc

SEQ ID NO: 1334183 - RNA, 20 nt, Human
cuuuaugugugguaguggag

SEQ ID NO: 1334184 - RNA, 21 nt, Human
gacucaucucccuccggaacu

SEQ ID NO: 1334185 - RNA, 21 nt, Human
gacugucguuucuccauguuc

SEQ ID NO: 1334186 - RNA, 20 nt, Human
gagccacagccacaccccag

SEQ ID NO: 1334187 - RNA, 22 nt, Human
gaguccuuucugcguguucugu

SEQ ID NO: 1334188 - RNA, 25 nt, Human
gccacagccacaccccagacucauc

SEQ ID NO: 1334189 - RNA, 21 nt, Human
gccuguaggcuugucaguugg

SEQ ID NO: 1334190 - RNA, 20 nt, Human
gcguguucuguaggcucugc

SEQ ID NO: 1334191 - RNA, 21 nt, Human
gcucugcugggaauggugugg

SEQ ID NO: 1334192 - RNA, 20 nt, Human
gggaauggugcgguguucuc

SEQ ID NO: 1334193 - RNA, 23 nt, Human
gggaauggugcgguguucucauu

SEQ ID NO: 1334194 - RNA, 23 nt, Human
gguguucucauuggccaguggag

SEQ ID NO: 1334195 - RNA, 23 nt, Human
gguguucucauuggccaguggag

SEQ ID NO: 1334196 - RNA, 20 nt, Human
guccuuuuuccauuuucugu

SEQ ID NO: 1334197 - RNA, 25 nt, Human
gugcuggggauggugugguguucuc

SEQ ID NO: 1334198 - RNA, 24 nt, Human
guggagucagcaggaucaacagag

SEQ ID NO: 1334199 - RNA, 22 nt, Human
uaaaugggguccuuucuccauu

SEQ ID NO: 1334200 - RNA, 24 nt, Human
uccauuuucuguaggcucugcuag

SEQ ID NO: 1334201 - RNA, 24 nt, Human
uccauuuucuguaggcucugcuag

SEQ ID NO: 1334202 - RNA, 24 nt, Human
uccauuuucuguaggcucugcuga

SEQ ID NO: 1334203 - RNA, 24 nt, Human
uccauuuucuguaggcucugcugg

SEQ ID NO: 1334204 - RNA, 24 nt, Human
uccauuuucuguaggcucugcugg

SEQ ID NO: 1334205 - RNA, 24 nt, Human
uccauuuucuguaggcucugcugg

SEQ ID NO: 1334206 - RNA, 24 nt, Human
uccauuuucuguaggcucugcugg

SEQ ID NO: 1334207 - RNA, 24 nt, Human
uccauuuucuguaggcugugcugg

SEQ ID NO: 1334208 - RNA, 21 nt, Human
uccccaguuuucugauauucu

SEQ ID NO: 1334209 - RNA, 18 nt, Human
uccggaacuggcaggccu

SEQ ID NO: 1334210 - RNA, 24 nt, Human
ucuauuuucuguaggcccugcugg

SEQ ID NO: 1334211 - RNA, 24 nt, Human
ucuauuuucuguaggcccugcugg

SEQ ID NO: 1334212 - RNA, 22 nt, Human
ucuauuuucuguaggcucugcc

SEQ ID NO: 1334213 - RNA, 24 nt, Human
ucuauuuucuguaggcucugcugg

SEQ ID NO: 1334214 - RNA, 24 nt, Human
ucuauuuucuguaggcucugcugg

SEQ ID NO: 1334215 - RNA, 24 nt, Human
ucuauuuucuguaggcucugcugg

SEQ ID NO: 1334216 - RNA, 24 nt, Human
ucuauuuucuguaggcucugcugg

SEQ ID NO: 1334217 - RNA, 24 nt, Human
ucuauuuucuguaggcucugcugg

SEQ ID NO: 1334218 - RNA, 24 nt, Human
ucuauuuucuguaggcucugcugg

SEQ ID NO: 1334219 - RNA, 24 nt, Human
ucuauuuucuguaggcucugcugg

SEQ ID NO: 1334220 - RNA, 24 nt, Human
ucuauuuucuguaggcucugcugg

SEQ ID NO: 1334221 - RNA, 24 nt, Human
ucuauuuucuguaggcucugcugg

SEQ ID NO: 1334222 - RNA, 24 nt, Human
ucucauuggccaauguagucuuuu

SEQ ID NO: 1334223 - RNA, 21 nt, Human
ucucauuggccaguggagucc

SEQ ID NO: 1334224 - RNA, 22 nt, Human
ucucauuggcugaugguguccu

SEQ ID NO: 1334225 - RNA, 19 nt, Human
ucuguaggcccugcugggg

SEQ ID NO: 1334226 - RNA, 22 nt, Human
ucuucagaagugggaggagccu

SEQ ID NO: 1334227 - RNA, 20 nt, Human
ucuucucauuggccaauggg

SEQ ID NO: 1334228 - RNA, 24 nt, Human
ugagacagaguccuucuggggcuu

SEQ ID NO: 1334229 - RNA, 19 nt, Human
ugaucucauuggccagugg

SEQ ID NO: 1334230 - RNA, 19 nt, Human
ugauguggucuucucauug

SEQ ID NO: 1334231 - RNA, 19 nt, Human
ugauguggucuucucauug

SEQ ID NO: 1334232 - RNA, 19 nt, Human
ugauguggucuucucauug

SEQ ID NO: 1334233 - RNA, 19 nt, Human
ugaugugguuuucucauug

SEQ ID NO: 1334234 - RNA, 19 nt, Human
ugaugugguuuucucauug

SEQ ID NO: 1334235 - RNA, 25 nt, Human
ugcagaacaaugugaucaaaaggga

SEQ ID NO: 1334236 - RNA, 27 nt, Human
ugcugaggaugauguggucgagccccu

SEQ ID NO: 1334237 - RNA, 27 nt, Human
ugcugaggaugauguggucgagccccu

SEQ ID NO: 1334238 - RNA, 27 nt, Human
ugcugaggaugauguggucgagccccu

SEQ ID NO: 1334239 - RNA, 27 nt, Human
ugcugaggaugauguggucgagccccu

SEQ ID NO: 1334240 - RNA, 26 nt, Human
ugcugaggaugauguggucgagcccu

SEQ ID NO: 1334241 - RNA, 26 nt, Human
ugcugaggaugauguggucgagcccu

SEQ ID NO: 1334242 - RNA, 27 nt, Human
ugcuggggaugauguggucgagccccu

SEQ ID NO: 1334243 - RNA, 27 nt, Human
ugcuggggaugauguggucgagccccu

SEQ ID NO: 1334244 - RNA, 26 nt, Human
ugcuggggaugauguggucgagcccu

SEQ ID NO: 1334245 - RNA, 24 nt, Human
ugcuggggaugauguggucuucuc

SEQ ID NO: 1334246 - RNA, 20 nt, Human
ugcuggggaugguguggccu

SEQ ID NO: 1334247 - RNA, 24 nt, Human
ugcuggggaugguguggucuucuc

SEQ ID NO: 1334248 - RNA, 24 nt, Human
ugcuggggaugguguggucuucuc

SEQ ID NO: 1334249 - RNA, 24 nt, Human
ugcuggggaugguguggucuucuc

SEQ ID NO: 1334250 - RNA, 23 nt, Human
ugcuuggucugugaauugccuga

SEQ ID NO: 1334251 - RNA, 19 nt, Human
uggaaggaaguuguagucu

SEQ ID NO: 1334252 - RNA, 19 nt, Human
uggaauguaguagcaccug

SEQ ID NO: 1334253 - RNA, 25 nt, Human
uggccaaaggaguccugucuccauu

SEQ ID NO: 1334254 - RNA, 22 nt, Human
uggccaauggggucauuucuuc

SEQ ID NO: 1334255 - RNA, 22 nt, Human
uggcguuauauguuuuuuucca

SEQ ID NO: 1334256 - RNA, 19 nt, Human
ugguguggccuucucauug

SEQ ID NO: 1334257 - RNA, 19 nt, Human
ugguguggucuucucauug

SEQ ID NO: 1334258 - RNA, 19 nt, Human
ugguguggucuucucauug

SEQ ID NO: 1334259 - RNA, 19 nt, Human
ugguguggucuucucauug

SEQ ID NO: 1334260 - RNA, 19 nt, Human
ugguguggucuucucauug

SEQ ID NO: 1334261 - RNA, 19 nt, Human
ugguguggucuucucauug

SEQ ID NO: 1334262 - RNA, 19 nt, Human
ugguguggucuucucauug

SEQ ID NO: 1334263 - RNA, 19 nt, Human
ugguguggucuucucauug

SEQ ID NO: 1334264 - RNA, 23 nt, Human
uguaguuuuugucaggagcuugu

SEQ ID NO: 1334265 - RNA, 24 nt, Human
uguuggggauguugugguguucuc

SEQ ID NO: 1334266 - RNA, 25 nt, Human
uuacuggggauggugugguguucuc

SEQ ID NO: 1334267 - RNA, 23 nt, Human
uuccccaguuuucugauauucuu

SEQ ID NO: 1334268 - RNA, 24 nt, Human
uucuccauguucuguaggcuuuac

SEQ ID NO: 1334269 - RNA, 22 nt, Human
uugcuggagaugguauggucuu

SEQ ID NO: 1334270 - RNA, 23 nt, Human
uuggcugauggggucauuucuuc

SEQ ID NO: 1334271 - RNA, 22 nt, Human
uuucuuguuaccguugauuugc

SEQ ID NO: 1334272 - RNA, 20 nt, Human
uuugcuggggaugguguggc

SEQ ID NO: 1334273 - RNA, 19 nt, Human
uuuugcucuugggugcugg

SEQ ID NO: 1334274 - RNA, 24 nt, Human
aaaaaaagcauaugaagcagauaa

SEQ ID NO: 1334275 - RNA, 24 nt, Human
aaaaaccuaauuguauuucaaagc

SEQ ID NO: 1334276 - RNA, 23 nt, Human
aaaaagacaaaaugagcuguuaa

SEQ ID NO: 1334277 - RNA, 26 nt, Human
aaaaagacaaaaugagcuguuaagug

SEQ ID NO: 1334278 - RNA, 24 nt, Human
aaaccagaauucuuguagaaaaua

SEQ ID NO: 1334279 - RNA, 25 nt, Human
aaaccuacagccaaaguuucuucca

SEQ ID NO: 1334280 - RNA, 18 nt, Human
aaauaaaaaccuacagcc

SEQ ID NO: 1334281 - RNA, 19 nt, Human
aagagaaaacauguccuaa

SEQ ID NO: 1334282 - RNA, 18 nt, Human
aaucaccuaagacauuug

SEQ ID NO: 1334283 - RNA, 19 nt, Human
acacacuuaaguacaacug

SEQ ID NO: 1334284 - RNA, 19 nt, Human
acacugaaauguauuuggu

SEQ ID NO: 1334285 - RNA, 19 nt, Human
acauacaauuguaagugcu

SEQ ID NO: 1334286 - RNA, 21 nt, Human
acccagugcuaaaccuuacag

SEQ ID NO: 1334287 - RNA, 22 nt, Human
agaaacuuuguuguauauaugg

SEQ ID NO: 1334288 - RNA, 20 nt, Human
agaaccuguuaaaaacagac

SEQ ID NO: 1334289 - RNA, 22 nt, Human
agacaaaaugagcuguuaagug

SEQ ID NO: 1334290 - RNA, 24 nt, Human
agagaaaaugugucccuauggagg

SEQ ID NO: 1334291 - RNA, 21 nt, Human
agcaaaguacaaagacuaaug

SEQ ID NO: 1334292 - RNA, 24 nt, Human
agcuuuugggaauguaagcaaagu

SEQ ID NO: 1334293 - RNA, 20 nt, Human
aggugauuuauaacuuaaaa

SEQ ID NO: 1334294 - RNA, 18 nt, Human
auaaaauguaccugcuua

SEQ ID NO: 1334295 - RNA, 25 nt, Human
auaaaguguucagaaaggccauuuu

SEQ ID NO: 1334296 - RNA, 23 nt, Human
auagaaccuguuaaaaacagacu

SEQ ID NO: 1334297 - RNA, 23 nt, Human
auuuuggagaagaccauuaaugg

SEQ ID NO: 1334298 - RNA, 22 nt, Human
caaaauauuuuggagaagacca

SEQ ID NO: 1334299 - RNA, 24 nt, Human
cacaugaaagaacagcauaacauu

SEQ ID NO: 1334300 - RNA, 23 nt, Human
cagaaaaggagauauuuauuuau

SEQ ID NO: 1334301 - RNA, 19 nt, Human
cagaggauaccccuagaca

SEQ ID NO: 1334302 - RNA, 20 nt, Human
ccaggggccuaagagggaaa

SEQ ID NO: 1334303 - RNA, 19 nt, Human
ccagugcuaaaccuuacag

SEQ ID NO: 1334304 - RNA, 23 nt, Human
ccuacagccaaaguuucuuccag

SEQ ID NO: 1334305 - RNA, 20 nt, Human
cugcuggggcgaucccgggc

SEQ ID NO: 1334306 - RNA, 23 nt, Human
cugguaauaaugaauuauccaag

SEQ ID NO: 1334307 - RNA, 18 nt, Human
cugucuuuuuacuuuguc

SEQ ID NO: 1334308 - RNA, 18 nt, Human
gaaagaacagcauaacau

SEQ ID NO: 1334309 - RNA, 25 nt, Human
gaaagaacagcauaacauuaaucau

SEQ ID NO: 1334310 - RNA, 21 nt, Human
gaaaucacucucugguuauca

SEQ ID NO: 1334311 - RNA, 18 nt, Human
gaauuauccaagucagca

SEQ ID NO: 1334312 - RNA, 19 nt, Human
gcccaauacucauuuauuu

SEQ ID NO: 1334313 - RNA, 21 nt, Human
gguaauaaugaauuauccaag

SEQ ID NO: 1334314 - RNA, 21 nt, Human
guucugcaaguguugcagagg

SEQ ID NO: 1334315 - RNA, 23 nt, Human
uaaaaaaagcauaugaagcagau

SEQ ID NO: 1334316 - RNA, 20 nt, Human
uaaaaaccuacagccaaagu

SEQ ID NO: 1334317 - RNA, 21 nt, Human
uaaaauuacaaacacccucca

SEQ ID NO: 1334318 - RNA, 25 nt, Human
uaaaucaccuaagacauuugcaaaa

SEQ ID NO: 1334319 - RNA, 24 nt, Human
uaacugccgcauuuacaaaaaagu

SEQ ID NO: 1334320 - RNA, 23 nt, Human
uaacuggaaauuaaucaucuccu

SEQ ID NO: 1334321 - RNA, 19 nt, Human
uaagaaucgugaaaauguc

SEQ ID NO: 1334322 - RNA, 24 nt, Human
uaaucaucuccuuugauuuauguu

SEQ ID NO: 1334323 - RNA, 21 nt, Human
uacauuuuauaaaauguaccu

SEQ ID NO: 1334324 - RNA, 20 nt, Human
uaccauaaaauuacaaacac

SEQ ID NO: 1334325 - RNA, 23 nt, Human
uaccauaaaauuacaaacacccu

SEQ ID NO: 1334326 - RNA, 19 nt, Human
uagauggcagaaacuuugu

SEQ ID NO: 1334327 - RNA, 21 nt, Human
uauaucuguacccugcuuuau

SEQ ID NO: 1334328 - RNA, 18 nt, Human
uauuguaguauuuuuaaa

SEQ ID NO: 1334329 - RNA, 23 nt, Human
uccgcguuuccucucuggacucc

SEQ ID NO: 1334330 - RNA, 25 nt, Human
ucucugguuaucauuauugcucauc

SEQ ID NO: 1334331 - RNA, 19 nt, Human
ucuuuuuacuuugucuaua

SEQ ID NO: 1334332 - RNA, 19 nt, Human
ugaaagaacagcauaacau

SEQ ID NO: 1334333 - RNA, 19 nt, Human
ugagggguucuauacccca

SEQ ID NO: 1334334 - RNA, 21 nt, Human
ugcauauguaaauagagaaaa

SEQ ID NO: 1334335 - RNA, 21 nt, Human
ugcggaaucaaugucuuuuaa

SEQ ID NO: 1334336 - RNA, 18 nt, Human
ugcuggggcgaucccggg

SEQ ID NO: 1334337 - RNA, 25 nt, Human
ugguguugcaauuaggcccaauacu

SEQ ID NO: 1334338 - RNA, 19 nt, Human
uguaaaugaaaucacucuc

SEQ ID NO: 1334339 - RNA, 19 nt, Human
uguaacugccgcauuuaca

SEQ ID NO: 1334340 - RNA, 19 nt, Human
uguagaaaauaaaaaccua

SEQ ID NO: 1334341 - RNA, 18 nt, Human
ugugucccuauggaggag

SEQ ID NO: 1334342 - RNA, 22 nt, Human
uguugagggguucuauacccca

SEQ ID NO: 1334343 - RNA, 21 nt, Human
uuaagauggcuguuuauaagu

SEQ ID NO: 1334344 - RNA, 18 nt, Human
uuacuugcacagaaagug

SEQ ID NO: 1334345 - RNA, 21 nt, Human
uucaaaaagcuagauggcaga

SEQ ID NO: 1334346 - RNA, 21 nt, Human
uucaugaugaaguuaaauuac

SEQ ID NO: 1334347 - RNA, 24 nt, Human
uucuuggccaauuaagguaauuga

SEQ ID NO: 1334348 - RNA, 25 nt, Human
uugcucaucaagaauuccagcauug

SEQ ID NO: 1334349 - RNA, 20 nt, Human
uuguauauugaaaaagacaa

SEQ ID NO: 1334350 - RNA, 21 nt, Human
uuuaaaaaccuugccaguagg

SEQ ID NO: 1334351 - RNA, 22 nt, Human
uuuaagauggcuguuuauaagu

SEQ ID NO: 1334352 - RNA, 21 nt, Human
uuuauucaauccaucauuagg

SEQ ID NO: 1334353 - RNA, 23 nt, Human
uuucauuugaggagacauacaau

SEQ ID NO: 1334354 - RNA, 22 nt, Human
uuuguaacugccgcauuuacaa

SEQ ID NO: 1334355 - RNA, 19 nt, Human
aaacgggcgaggaggaaca

SEQ ID NO: 1334356 - RNA, 20 nt, Human
aacaccaucaaaauggaaug

SEQ ID NO: 1334357 - RNA, 20 nt, Human
aagaaaaggcugacaccgca

SEQ ID NO: 1334358 - RNA, 23 nt, Human
aagaaaaggcugacaccgcaaaa

SEQ ID NO: 1334359 - RNA, 25 nt, Human
acaaaugcucugaagaaaaggcuga

SEQ ID NO: 1334360 - RNA, 21 nt, Human
acaccaucaaaauggaaugaa

SEQ ID NO: 1334361 - RNA, 18 nt, Human
agaggagaucuggguccc

SEQ ID NO: 1334362 - RNA, 22 nt, Human
agcccgagggcgaaaaacgggc

SEQ ID NO: 1334363 - RNA, 21 nt, Human
aggaagaugggcagugucaag

SEQ ID NO: 1334364 - RNA, 18 nt, Human
aggaauuacaguccuuca

SEQ ID NO: 1334365 - RNA, 21 nt, Human
agggcgaaaaacgggcgagga

SEQ ID NO: 1334366 - RNA, 20 nt, Human
agucuugcaacacauggucc

SEQ ID NO: 1334367 - RNA, 21 nt, Human
caaacaaaugcucugaagaaa

SEQ ID NO: 1334368 - RNA, 21 nt, Human
caaacacaggaaaggccccga

SEQ ID NO: 1334369 - RNA, 20 nt, Human
cacccguuucuuccaccccg

SEQ ID NO: 1334370 - RNA, 21 nt, Human
ccccaaggccgguaugucacc

SEQ ID NO: 1334371 - RNA, 18 nt, Human
ccccgaaggcacgcguac

SEQ ID NO: 1334372 - RNA, 25 nt, Human
cccuuaaaauucuauuuuaaauagg

SEQ ID NO: 1334373 - RNA, 23 nt, Human
ccucccuggaaaccgcccggccg

SEQ ID NO: 1334374 - RNA, 23 nt, Human
ccugcgaguccacggauugggac

SEQ ID NO: 1334375 - RNA, 22 nt, Human
ccuuugguuuuuaucagucccu

SEQ ID NO: 1334376 - RNA, 25 nt, Human
cgaaggcacgcguaccccaaggccg

SEQ ID NO: 1334377 - RNA, 24 nt, Human
cugaagaaaaggcugacaccgcaa

SEQ ID NO: 1334378 - RNA, 18 nt, Human
cuggaaaccgcccggccg

SEQ ID NO: 1334379 - RNA, 19 nt, Human
cuuccaccccgaccucauc

SEQ ID NO: 1334380 - RNA, 20 nt, Human
gauccuuugguuuuuaucag

SEQ ID NO: 1334381 - RNA, 22 nt, Human
gucccaaacacaggaaaggccc

SEQ ID NO: 1334382 - RNA, 19 nt, Human
uagcaaugccuccagaucc

SEQ ID NO: 1334383 - RNA, 22 nt, Human
ucaaaaaaagggaaucacccgu

SEQ ID NO: 1334384 - RNA, 22 nt, Human
ucacccggaagggugacggcag

SEQ ID NO: 1334385 - RNA, 25 nt, Human
ucacccggaagggugacggcagccu

SEQ ID NO: 1334386 - RNA, 21 nt, Human
ucagucaaacaaaugcucuga

SEQ ID NO: 1334387 - RNA, 25 nt, Human
ucagucaaacaaaugcucugaagaa

SEQ ID NO: 1334388 - RNA, 22 nt, Human
uccuucuggaugaggaagaugg

SEQ ID NO: 1334389 - RNA, 24 nt, Human
ucuuccaccccgaccucauccauu

SEQ ID NO: 1334390 - RNA, 22 nt, Human
ugaauguuauucucuccagacu

SEQ ID NO: 1334391 - RNA, 18 nt, Human
ugacaccgcaaaacaacu

SEQ ID NO: 1334392 - RNA, 21 nt, Human
uguaaagucugcuagacgugg

SEQ ID NO: 1334393 - RNA, 18 nt, Human
uuaaauaacaccaucaaa

SEQ ID NO: 1334394 - RNA, 20 nt, Human
uucaaaaaaagggaaucacc

SEQ ID NO: 1334395 - RNA, 23 nt, Human
uugaugauuguucccuuaaaauu

SEQ ID NO: 1334396 - RNA, 21 nt, Human
uuuuuuuuuuuuuaaagauca

SEQ ID NO: 1334397 - RNA, 24 nt, Human
uuuuuuuuuuuuuuuuuuuuaaag

SEQ ID NO: 1334398 - RNA, 27 nt, Human
aacucgcugggccgcacgucccccucu

SEQ ID NO: 1334399 - RNA, 27 nt, Human
acugcauuuuaacauaccuggcuaacc

SEQ ID NO: 1334400 - RNA, 19 nt, Human
aggaggaaguccuguaagu

SEQ ID NO: 1334401 - RNA, 22 nt, Human
auacugcauuuuaacauacaua

SEQ ID NO: 1334402 - RNA, 24 nt, Human
cauuaaugaggcuccucaacuuaa

SEQ ID NO: 1334403 - RNA, 23 nt, Human
cccguagcgggugaccccgggac

SEQ ID NO: 1334404 - RNA, 18 nt, Human
cuaguagacugggaacua

SEQ ID NO: 1334405 - RNA, 22 nt, Human
cugggccgcacgucccccucgu

SEQ ID NO: 1334406 - RNA, 24 nt, Human
gggaacuauuccauaaggaggaag

SEQ ID NO: 1334407 - RNA, 24 nt, Human
uaaauccccacuggagaaagcaau

SEQ ID NO: 1334408 - RNA, 20 nt, Human
uaaugaggcuccucaacuuu

SEQ ID NO: 1334409 - RNA, 24 nt, Human
uacuugagcuaguagacugggaac

SEQ ID NO: 1334410 - RNA, 22 nt, Human
ucauuuauucauauauauauuc

SEQ ID NO: 1334411 - RNA, 19 nt, Human
uccauaaggaggaaguccu

SEQ ID NO: 1334412 - RNA, 19 nt, Human
ugacaaagccauuuuucuu

SEQ ID NO: 1334413 - RNA, 23 nt, Human
uggcauuuaaaaauauauucauu

SEQ ID NO: 1334414 - RNA, 22 nt, Human
ugucagaggauaucugaggcug

SEQ ID NO: 1334415 - RNA, 21 nt, Human
uucauuuauucauauauauau

SEQ ID NO: 1334416 - RNA, 22 nt, Human
uugggcagaauuauucuccuga

SEQ ID NO: 1334417 - RNA, 26 nt, Human
uuugggcagaauuauucuccugaaaa

SEQ ID NO: 1334418 - RNA, 23 nt, Human
uuuuuuuuuuuuuuuuuggcauu

SEQ ID NO: 1334419 - RNA, 20 nt, Human
uuuuuuuuuuuuuuuuuugg

SEQ ID NO: 1334420 - RNA, 24 nt, Human
agucaggaaaggaaaaucaauguu

SEQ ID NO: 1334421 - RNA, 21 nt, Human
caacuuccggaagcgauggcc

SEQ ID NO: 1334422 - RNA, 21 nt, Human
ccggaagcgauggccaauccc

SEQ ID NO: 1334423 - RNA, 20 nt, Human
uagucaggaaaggaaaaucc

SEQ ID NO: 1334424 - RNA, 22 nt, Human
uuauagucaggaaaggaaaauc

SEQ ID NO: 1334425 - RNA, 24 nt, Human
aaaacaccuuacaaauccacaggg

SEQ ID NO: 1334426 - RNA, 21 nt, Human
aaaagcccagagacgcgggcg

SEQ ID NO: 1334427 - RNA, 23 nt, Human
aaagcacacuaaagguucuaggg

SEQ ID NO: 1334428 - RNA, 18 nt, Human
aaagguucuaggggcuac

SEQ ID NO: 1334429 - RNA, 21 nt, Human
aacaaacgaagacaccaaaac

SEQ ID NO: 1334430 - RNA, 21 nt, Human
aagccaccuugcaaagcaggu

SEQ ID NO: 1334431 - RNA, 20 nt, Human
aagcccagagacgcgggcga

SEQ ID NO: 1334432 - RNA, 21 nt, Human
acaaacgaagacaccaaaacg

SEQ ID NO: 1334433 - RNA, 18 nt, Human
acagagcaaaagcccaga

SEQ ID NO: 1334434 - RNA, 19 nt, Human
acagagcaaaagcccagag

SEQ ID NO: 1334435 - RNA, 24 nt, Human
acuaaccacuaguuguccugccau

SEQ ID NO: 1334436 - RNA, 24 nt, Human
acuccgcuacucucacuacaucuu

SEQ ID NO: 1334437 - RNA, 22 nt, Human
agccugacagagcaaaagccca

SEQ ID NO: 1334438 - RNA, 23 nt, Human
agccugacagagcaaaagcccag

SEQ ID NO: 1334439 - RNA, 24 nt, Human
augguagcuuucccaaaugaacac

SEQ ID NO: 1334440 - RNA, 21 nt, Human
caaaacgccaccagccugaca

SEQ ID NO: 1334441 - RNA, 22 nt, Human
caaauccacagggaaaucaaag

SEQ ID NO: 1334442 - RNA, 23 nt, Human
caaauccacagggaaaucaaaga

SEQ ID NO: 1334443 - RNA, 22 nt, Human
cacagggaaaucaaagaacaau

SEQ ID NO: 1334444 - RNA, 18 nt, Human
cagagcaaaagcccagag

SEQ ID NO: 1334445 - RNA, 20 nt, Human
cagagcaaaagcccagagac

SEQ ID NO: 1334446 - RNA, 25 nt, Human
cagguaauacaguuauuuccugucc

SEQ ID NO: 1334447 - RNA, 22 nt, Human
cauguuuguucuaaagucaaga

SEQ ID NO: 1334448 - RNA, 23 nt, Human
cauguuuguucuaaagucaagag

SEQ ID NO: 1334449 - RNA, 21 nt, Human
cccaccccuaccccaugcccc

SEQ ID NO: 1334450 - RNA, 22 nt, Human
cccaccccuaccccaugcccca

SEQ ID NO: 1334451 - RNA, 21 nt, Human
ccccaugccccagugccuuau

SEQ ID NO: 1334452 - RNA, 21 nt, Human
cgaagacaccaaaacgccacc

SEQ ID NO: 1334453 - RNA, 23 nt, Human
cuguccugcagaauucaagaacc

SEQ ID NO: 1334454 - RNA, 27 nt, Human
cuuagaauucaguauacuugguggccc

SEQ ID NO: 1334455 - RNA, 25 nt, Human
gaaaaacaccuuacaaauccacagg

SEQ ID NO: 1334456 - RNA, 22 nt, Human
gaacagcuagccuuagaauuca

SEQ ID NO: 1334457 - RNA, 23 nt, Human
gaagacaccaaaacgcuggagac

SEQ ID NO: 1334458 - RNA, 22 nt, Human
gcaaaagcccagagacgcgggc

SEQ ID NO: 1334459 - RNA, 23 nt, Human
guaaaaaagaaaaacaccuuaca

SEQ ID NO: 1334460 - RNA, 22 nt, Human
guagcuuucccaaaugaacacu

SEQ ID NO: 1334461 - RNA, 19 nt, Human
guuuucauuuuuuuugucu

SEQ ID NO: 1334462 - RNA, 19 nt, Human
uaacuaaccacuaguuguc

SEQ ID NO: 1334463 - RNA, 19 nt, Human
ucaaugguagcuuucccaa

SEQ ID NO: 1334464 - RNA, 19 nt, Human
ucagguuuaacagaaauag

SEQ ID NO: 1334465 - RNA, 23 nt, Human
uccuguccugcagaauucaagaa

SEQ ID NO: 1334466 - RNA, 22 nt, Human
ugacagagcaaaagcccagaga

SEQ ID NO: 1334467 - RNA, 22 nt, Human
ugcccuacuauaugucaggaac

SEQ ID NO: 1334468 - RNA, 21 nt, Human
ugguuugugguaccucccaaa

SEQ ID NO: 1334469 - RNA, 23 nt, Human
uguuuguucuaaagucaagaguc

SEQ ID NO: 1334470 - RNA, 21 nt, Human
uucagugauucuuaaagccac

SEQ ID NO: 1334471 - RNA, 22 nt, Human
uuccuguccuaugauuuaaaga

SEQ ID NO: 1334472 - RNA, 21 nt, Human
uuguucuaaagucaagagucc

SEQ ID NO: 1334473 - RNA, 22 nt, Human
ggauguucuuuuucaucaacgu

SEQ ID NO: 1334474 - RNA, 22 nt, Human
accagcuccccaaccacccggc

SEQ ID NO: 1334475 - RNA, 21 nt, Human
cagguguccucucagccgagg

SEQ ID NO: 1334476 - RNA, 18 nt, Human
ccagcuccccaaccaccc

SEQ ID NO: 1334477 - RNA, 21 nt, Human
cccuggagaccagcuccccaa

SEQ ID NO: 1334478 - RNA, 20 nt, Human
cgugagccgugucgggagcg

SEQ ID NO: 1334479 - RNA, 19 nt, Human
cucccgacucacucccugg

SEQ ID NO: 1334480 - RNA, 21 nt, Human
gagaccagcuccccaaccacc

SEQ ID NO: 1334481 - RNA, 19 nt, Human
gcggccagguguccucuca

SEQ ID NO: 1334482 - RNA, 22 nt, Human
ggcaucccgcugcggccaggug

SEQ ID NO: 1334483 - RNA, 19 nt, Human
gggcucccgacucacuccc

SEQ ID NO: 1334484 - RNA, 19 nt, Human
uaucccagccaccgccucc

SEQ ID NO: 1334485 - RNA, 19 nt, Human
ucccuggagaccagcuccc

SEQ ID NO: 1334486 - RNA, 20 nt, Human
ucccuggagaccagcucccc

SEQ ID NO: 1334487 - RNA, 26 nt, Human
ucccuggagaccagcuccccaaccac

SEQ ID NO: 1334488 - RNA, 23 nt, Human
ugcggccagguguccucucagcc

SEQ ID NO: 1334489 - RNA, 18 nt, Human
uuuuuuuuuuuuuuccug

SEQ ID NO: 1334490 - RNA, 23 nt, Human
uuuuuuuuuuuuuuccugcuggg

SEQ ID NO: 1334491 - RNA, 24 nt, Human
uuuuuuuuuuuuuuuuccugcugg

SEQ ID NO: 1334492 - RNA, 20 nt, Human
aaaaaaaccagaacacacua

SEQ ID NO: 1334493 - RNA, 21 nt, Human
aaaaagacaagucacuguaug

SEQ ID NO: 1334494 - RNA, 20 nt, Human
aaagauaaaacucugggugg

SEQ ID NO: 1334495 - RNA, 21 nt, Human
aaagucaccauccaaaugucc

SEQ ID NO: 1334496 - RNA, 19 nt, Human
aacauggagaaaccccauc

SEQ ID NO: 1334497 - RNA, 20 nt, Human
aacauggagaaaccccaucu

SEQ ID NO: 1334498 - RNA, 21 nt, Human
aacauggagaaaccccaucuc

SEQ ID NO: 1334499 - RNA, 24 nt, Human
aagaggaagcaagccaaguguuca

SEQ ID NO: 1334500 - RNA, 24 nt, Human
aagcaagccaaguguucacuggcu

SEQ ID NO: 1334501 - RNA, 24 nt, Human
aagcaggagaaucgcuuaaauccg

SEQ ID NO: 1334502 - RNA, 25 nt, Human
aagcaggagaaucgcuuaaauccgg

SEQ ID NO: 1334503 - RNA, 24 nt, Human
aaucgcuuaaauccgggaggcaga

SEQ ID NO: 1334504 - RNA, 30 nt, Human
aauuacuguuuaauggguacaguuuccauu

SEQ ID NO: 1334505 - RNA, 21 nt, Human
acaagagggaaacuccgucuc

SEQ ID NO: 1334506 - RNA, 25 nt, Human
acaggaaggaaauccugucaccuga

SEQ ID NO: 1334507 - RNA, 24 nt, Human
accccaucucuacuagaaauacaa

SEQ ID NO: 1334508 - RNA, 24 nt, Human
accugaggucgggaguucaagacc

SEQ ID NO: 1334509 - RNA, 21 nt, Human
accuugaggacauuaugcuaa

SEQ ID NO: 1334510 - RNA, 21 nt, Human
accuugaggacauuaugcuaa

SEQ ID NO: 1334511 - RNA, 18 nt, Human
agaaauacaaaauuagcc

SEQ ID NO: 1334512 - RNA, 20 nt, Human
agacagaaagcagaaugggg

SEQ ID NO: 1334513 - RNA, 21 nt, Human
agacagaaagcagaauggugg

SEQ ID NO: 1334514 - RNA, 22 nt, Human
agacagaaagcagaaugguggc

SEQ ID NO: 1334515 - RNA, 24 nt, Human
agagguugcugugagccgagaucg

SEQ ID NO: 1334516 - RNA, 27 nt, Human
agagguugcugugagccgagaucgcgc

SEQ ID NO: 1334517 - RNA, 23 nt, Human
agccaggcaugguggugcaugcc

SEQ ID NO: 1334518 - RNA, 18 nt, Human
aggaaagucaccauccaa

SEQ ID NO: 1334519 - RNA, 23 nt, Human
aggaaggaaauccugucaccuuu

SEQ ID NO: 1334520 - RNA, 21 nt, Human
aggcaaacaacuuuaaugguu

SEQ ID NO: 1334521 - RNA, 21 nt, Human
aggcagagguugcugugagcc

SEQ ID NO: 1334522 - RNA, 24 nt, Human
aggcagagguugcugugagccgag

SEQ ID NO: 1334523 - RNA, 18 nt, Human
aggcagguggaucaccug

SEQ ID NO: 1334524 - RNA, 22 nt, Human
aggcagguggaucaccugaggg

SEQ ID NO: 1334525 - RNA, 22 nt, Human
aggcagguggaucaccugaggu

SEQ ID NO: 1334526 - RNA, 24 nt, Human
aggcaugguggugcaugccuguaa

SEQ ID NO: 1334527 - RNA, 23 nt, Human
agggaagccgaggcccugaauca

SEQ ID NO: 1334528 - RNA, 23 nt, Human
agucgucacgccuguaaucccag

SEQ ID NO: 1334529 - RNA, 24 nt, Human
caacauggaugaaccuugaggaca

SEQ ID NO: 1334530 - RNA, 25 nt, Human
caagccaaguguucacugauggagg

SEQ ID NO: 1334531 - RNA, 24 nt, Human
caaggcagguggaucaccugaggu

SEQ ID NO: 1334532 - RNA, 24 nt, Human
cacacagcauuaugaauguauuaa

SEQ ID NO: 1334533 - RNA, 21 nt, Human
cacagcauuaugaauguauua

SEQ ID NO: 1334534 - RNA, 23 nt, Human
caccugaggucgggaguucaaga

SEQ ID NO: 1334535 - RNA, 24 nt, Human
cacgccuguaaucccagcacuuug

SEQ ID NO: 1334536 - RNA, 24 nt, Human
cagcacuuugggaggccaaggcag

SEQ ID NO: 1334537 - RNA, 25 nt, Human
cagcacuuugggaggccaaggcagg

SEQ ID NO: 1334538 - RNA, 22 nt, Human
cagcauuaugaauguauuaaca

SEQ ID NO: 1334539 - RNA, 24 nt, Human
cagccugaccaacauggagaaacc

SEQ ID NO: 1334540 - RNA, 24 nt, Human
caggugcagucgucacgccuguaa

SEQ ID NO: 1334541 - RNA, 24 nt, Human
cagguggaucaccugaggucggga

SEQ ID NO: 1334542 - RNA, 24 nt, Human
cagucgucacgccuguaaucccag

SEQ ID NO: 1334543 - RNA, 22 nt, Human
ccaaaugauauuccaauuaugc

SEQ ID NO: 1334544 - RNA, 21 nt, Human
ccaauagucaagaggaagccg

SEQ ID NO: 1334545 - RNA, 18 nt, Human
ccacaucccugcuuggca

SEQ ID NO: 1334546 - RNA, 21 nt, Human
ccauccaaauguccacauccc

SEQ ID NO: 1334547 - RNA, 19 nt, Human
cccaccaccaucucagcug

SEQ ID NO: 1334548 - RNA, 21 nt, Human
cccugaaucaucaaagagaag

SEQ ID NO: 1334549 - RNA, 20 nt, Human
ccgaggcccugaaucaucaa

SEQ ID NO: 1334550 - RNA, 24 nt, Human
ccugaccaacauggagaaacccca

SEQ ID NO: 1334551 - RNA, 21 nt, Human
ccuguaaucccagcuacucgg

SEQ ID NO: 1334552 - RNA, 22 nt, Human
ccuguaaucccagcuacucggg

SEQ ID NO: 1334553 - RNA, 23 nt, Human
cgccauuuccagccugggcaaca

SEQ ID NO: 1334554 - RNA, 23 nt, Human
cgccuguaaucccagcacuuugg

SEQ ID NO: 1334555 - RNA, 24 nt, Human
cgccuguaaucccagcacuuuggg

SEQ ID NO: 1334556 - RNA, 22 nt, Human
cgucacgccuguaaucccagca

SEQ ID NO: 1334557 - RNA, 20 nt, Human
cucaaagagauauuugcacc

SEQ ID NO: 1334558 - RNA, 18 nt, Human
cugugagccgagaucgcg

SEQ ID NO: 1334559 - RNA, 23 nt, Human
cuucgaggugguuuggagaggaa

SEQ ID NO: 1334560 - RNA, 24 nt, Human
gaacacacuaaggguuauaggcac

SEQ ID NO: 1334561 - RNA, 23 nt, Human
gaucaccugaggucgggaguuca

SEQ ID NO: 1334562 - RNA, 24 nt, Human
gaucaccugaggucgggaguucaa

SEQ ID NO: 1334563 - RNA, 21 nt, Human
gaucgcgccauuuccagccug

SEQ ID NO: 1334564 - RNA, 18 nt, Human
gcacuuaaaaauggugaa

SEQ ID NO: 1334565 - RNA, 18 nt, Human
gccauuuccagccugggc

SEQ ID NO: 1334566 - RNA, 18 nt, Human
ggcugcgggggcugggag

SEQ ID NO: 1334567 - RNA, 25 nt, Human
ggggaaccacccaggaaagucacca

SEQ ID NO: 1334568 - RNA, 24 nt, Human
ggugguaaaggaauuaaaggcaga

SEQ ID NO: 1334569 - RNA, 24 nt, Human
gguggugcaugccuguaaucccag

SEQ ID NO: 1334570 - RNA, 24 nt, Human
gucgucacgccuguaaucccagca

SEQ ID NO: 1334571 - RNA, 23 nt, Human
guggugcaugccuguaaucccag

SEQ ID NO: 1334572 - RNA, 25 nt, Human
uaaaagaaaaaaaaccagaacacac

SEQ ID NO: 1334573 - RNA, 24 nt, Human
uaagugaaauaagccagucacaaa

SEQ ID NO: 1334574 - RNA, 21 nt, Human
uacugagaauagucaaaacca

SEQ ID NO: 1334575 - RNA, 20 nt, Human
uagaaauacaaaauuagcca

SEQ ID NO: 1334576 - RNA, 18 nt, Human
uauuccaauuaugccccu

SEQ ID NO: 1334577 - RNA, 26 nt, Human
uauuccaauuaugccccugcuucgag

SEQ ID NO: 1334578 - RNA, 22 nt, Human
uauuuugcuaaagauaaaacuc

SEQ ID NO: 1334579 - RNA, 23 nt, Human
ucaccugaggucgggaguucaag

SEQ ID NO: 1334580 - RNA, 18 nt, Human
ucacgccuguaaucccag

SEQ ID NO: 1334581 - RNA, 23 nt, Human
ucacgccuguaaucccagcacuu

SEQ ID NO: 1334582 - RNA, 21 nt, Human
ucagcugguaguaugacgggu

SEQ ID NO: 1334583 - RNA, 20 nt, Human
uccaaauguccacaucccug

SEQ ID NO: 1334584 - RNA, 24 nt, Human
ucgggaggcugaagcaggagaauc

SEQ ID NO: 1334585 - RNA, 18 nt, Human
ucgugagggaagccgagg

SEQ ID NO: 1334586 - RNA, 23 nt, Human
ucuccaaaugauauuccaauuau

SEQ ID NO: 1334587 - RNA, 20 nt, Human
ucucuacuagaaauacaaaa

SEQ ID NO: 1334588 - RNA, 19 nt, Human
ugaagcaggagaaucgcuu

SEQ ID NO: 1334589 - RNA, 25 nt, Human
ugaagcaggagaaucgcuuaaaucc

SEQ ID NO: 1334590 - RNA, 19 nt, Human
ugaaucaucaaagagaagg

SEQ ID NO: 1334591 - RNA, 23 nt, Human
ugaaucaucaaagagaaggagaa

SEQ ID NO: 1334592 - RNA, 18 nt, Human
ugagaauagucaaaacca

SEQ ID NO: 1334593 - RNA, 25 nt, Human
ugagaauagucaaaaccagagagac

SEQ ID NO: 1334594 - RNA, 26 nt, Human
ugagauacugagaauagucaaaacca

SEQ ID NO: 1334595 - RNA, 18 nt, Human
ugagccgagaucgcgcca

SEQ ID NO: 1334596 - RNA, 22 nt, Human
ugauggaggaacagaguguggu

SEQ ID NO: 1334597 - RNA, 22 nt, Human
ugccccugcuucgaggugguuu

SEQ ID NO: 1334598 - RNA, 23 nt, Human
ugccuguaaucccagcuacucgg

SEQ ID NO: 1334599 - RNA, 24 nt, Human
ugccuguaaucccagcuacucggg

SEQ ID NO: 1334600 - RNA, 20 nt, Human
ugcgggggcugggaggagug

SEQ ID NO: 1334601 - RNA, 20 nt, Human
uggaggaacagaguguggua

SEQ ID NO: 1334602 - RNA, 22 nt, Human
uggaggaacagagugugguacg

SEQ ID NO: 1334603 - RNA, 24 nt, Human
uggaucaccugaggucgggaguuc

SEQ ID NO: 1334604 - RNA, 21 nt, Human
uggcugcgggggcugggagga

SEQ ID NO: 1334605 - RNA, 24 nt, Human
uggcugcgggggcugggaggaguu

SEQ ID NO: 1334606 - RNA, 24 nt, Human
ugggaggccaaggcagguggauca

SEQ ID NO: 1334607 - RNA, 21 nt, Human
uggugcaugccuguaauccca

SEQ ID NO: 1334608 - RNA, 24 nt, Human
ugguggugcaugccuguaauccca

SEQ ID NO: 1334609 - RNA, 21 nt, Human
uuaaaagaaaaaaaaccagaa

SEQ ID NO: 1334610 - RNA, 22 nt, Human
uugcugugagccgagaucgcgc

SEQ ID NO: 1334611 - RNA, 23 nt, Human
uuuggagaggaagaggaaagcug

SEQ ID NO: 1334612 - RNA, 21 nt, Human
uuuuaugaguauuuuacgaca

SEQ ID NO: 1334613 - RNA, 24 nt, Human
agaagaggcggcuugcagggcugg

SEQ ID NO: 1334614 - RNA, 24 nt, Human
agagagcucuguccuucucccuuc

SEQ ID NO: 1334615 - RNA, 18 nt, Human
caccagugaccgcagcca

SEQ ID NO: 1334616 - RNA, 18 nt, Human
caccuguccacaccuguc

SEQ ID NO: 1334617 - RNA, 20 nt, Human
cagagccugccgcggcggcc

SEQ ID NO: 1334618 - RNA, 19 nt, Human
cagccagccggggaaaugc

SEQ ID NO: 1334619 - RNA, 24 nt, Human
cagcugcuaacccagggccacucg

SEQ ID NO: 1334620 - RNA, 22 nt, Human
ccagugaccgcagccagccggg

SEQ ID NO: 1334621 - RNA, 18 nt, Human
cccagggccacucggccg

SEQ ID NO: 1334622 - RNA, 24 nt, Human
ccugucacugggccuuucccuggg

SEQ ID NO: 1334623 - RNA, 20 nt, Human
ccuucucccuucuaccgaga

SEQ ID NO: 1334624 - RNA, 23 nt, Human
cgagaagaggcggcuugcagggc

SEQ ID NO: 1334625 - RNA, 20 nt, Human
cgggcgccugagcacugcca

SEQ ID NO: 1334626 - RNA, 22 nt, Human
gcagggcuggcaccuguccaca

SEQ ID NO: 1334627 - RNA, 25 nt, Human
gccgcggcggccgaucuuccugcgc

SEQ ID NO: 1334628 - RNA, 22 nt, Human
gcuggcaccuguccacaccugu

SEQ ID NO: 1334629 - RNA, 24 nt, Human
uaugugcagggccugugcaggagc

SEQ ID NO: 1334630 - RNA, 21 nt, Human
ugagugggagcagaugcccuc

SEQ ID NO: 1334631 - RNA, 22 nt, Human
ugccgcggcggccgaucuuccu

SEQ ID NO: 1334632 - RNA, 20 nt, Human
uugcagggcuggcaccuguc

SEQ ID NO: 1334633 - RNA, 21 nt, Human
aaaaagaaaaaaggagagcaa

SEQ ID NO: 1334634 - RNA, 21 nt, Human
aaaagcacugaaaauguaaug

SEQ ID NO: 1334635 - RNA, 29 nt, Human
aaacaaaagucugacauuuuccgacgacg

SEQ ID NO: 1334636 - RNA, 18 nt, Human
aaagauacacagcagagc

SEQ ID NO: 1334637 - RNA, 21 nt, Human
aaaucacuuuaggguagcuaa

SEQ ID NO: 1334638 - RNA, 20 nt, Human
aacacaauguaaacccuaua

SEQ ID NO: 1334639 - RNA, 20 nt, Human
aacccuauagucuacagaau

SEQ ID NO: 1334640 - RNA, 22 nt, Human
aagaaaaaaggagagcaacuaa

SEQ ID NO: 1334641 - RNA, 23 nt, Human
aagagaagcggaaaaggccugag

SEQ ID NO: 1334642 - RNA, 18 nt, Human
aagcuagugagaaaucaa

SEQ ID NO: 1334643 - RNA, 19 nt, Human
aaggcaauuuucuuccucc

SEQ ID NO: 1334644 - RNA, 20 nt, Human
aaguagucuuaaaugguuaa

SEQ ID NO: 1334645 - RNA, 22 nt, Human
acaaaaaaaagaaaaaaggaga

SEQ ID NO: 1334646 - RNA, 26 nt, Human
agaaauaaaauaugcacgacaaaaaa

SEQ ID NO: 1334647 - RNA, 22 nt, Human
agcagagcagguucacgccugu

SEQ ID NO: 1334648 - RNA, 21 nt, Human
agccuuucggggggugaaggg

SEQ ID NO: 1334649 - RNA, 23 nt, Human
agcugguuuaaauuauaaacccc

SEQ ID NO: 1334650 - RNA, 23 nt, Human
aggcggcggcggccucaaccgag

SEQ ID NO: 1334651 - RNA, 22 nt, Human
caaaauaccaaaguuuagugug

SEQ ID NO: 1334652 - RNA, 24 nt, Human
caaaaugaguuccaaaguuuuucc

SEQ ID NO: 1334653 - RNA, 19 nt, Human
caaauaggaaacacaaagc

SEQ ID NO: 1334654 - RNA, 27 nt, Human
caacaaguguaugaguaaggauuuaaa

SEQ ID NO: 1334655 - RNA, 21 nt, Human
caccccgcaaagauacacagc

SEQ ID NO: 1334656 - RNA, 25 nt, Human
caguggcaauggugcaucaauucuc

SEQ ID NO: 1334657 - RNA, 21 nt, Human
caugaggauaaaauguauggc

SEQ ID NO: 1334658 - RNA, 21 nt, Human
cauuguacaucccucccaaca

SEQ ID NO: 1334659 - RNA, 22 nt, Human
cggcaggccucagcgcaggcca

SEQ ID NO: 1334660 - RNA, 25 nt, Human
cuaauacuaacaauuguuaauuuaa

SEQ ID NO: 1334661 - RNA, 19 nt, Human
gacaaaaaaaagaaaaaag

SEQ ID NO: 1334662 - RNA, 23 nt, Human
gacaaaaaaaagaaaaaaggaga

SEQ ID NO: 1334663 - RNA, 18 nt, Human
gagagggucggaaguggg

SEQ ID NO: 1334664 - RNA, 19 nt, Human
gaguaaggauuuaaaaaug

SEQ ID NO: 1334665 - RNA, 21 nt, Human
gcgcaggccaccccgcaaaga

SEQ ID NO: 1334666 - RNA, 18 nt, Human
gcuacaguucaucacauu

SEQ ID NO: 1334667 - RNA, 21 nt, Human
ggugaaggggcggagccugag

SEQ ID NO: 1334668 - RNA, 20 nt, Human
guagucuuaaaugguuaaaa

SEQ ID NO: 1334669 - RNA, 24 nt, Human
uaaaccccaaaaacaaaagucuga

SEQ ID NO: 1334670 - RNA, 20 nt, Human
uaaccagaaacuacagaaau

SEQ ID NO: 1334671 - RNA, 21 nt, Human
uaaccagaaacuacagaaaua

SEQ ID NO: 1334672 - RNA, 19 nt, Human
uaagggcaagagcuagcca

SEQ ID NO: 1334673 - RNA, 20 nt, Human
uagaggacagcaauauuaca

SEQ ID NO: 1334674 - RNA, 22 nt, Human
uagcauagcugguuuaaauuau

SEQ ID NO: 1334675 - RNA, 26 nt, Human
uauaaaccccaaaaacaaaagucuga

SEQ ID NO: 1334676 - RNA, 22 nt, Human
uaugcacgacaaaaaaaagaaa

SEQ ID NO: 1334677 - RNA, 18 nt, Human
ucacauuugguuuucuua

SEQ ID NO: 1334678 - RNA, 21 nt, Human
uccuuguaaaagcacugaaaa

SEQ ID NO: 1334679 - RNA, 22 nt, Human
ugaauagcccaaaaugaguucc

SEQ ID NO: 1334680 - RNA, 23 nt, Human
ugaauauuuaacaugaauagccc

SEQ ID NO: 1334681 - RNA, 20 nt, Human
ugagacaccggcucccguga

SEQ ID NO: 1334682 - RNA, 20 nt, Human
ugagagggucggaagugggg

SEQ ID NO: 1334683 - RNA, 19 nt, Human
ugaguaaggauuuaaaaau

SEQ ID NO: 1334684 - RNA, 20 nt, Human
ugaguaaggauuuaaaaaug

SEQ ID NO: 1334685 - RNA, 19 nt, Human
uggaacaaaaucuuauuuc

SEQ ID NO: 1334686 - RNA, 19 nt, Human
uggaacaaaaucuuauuuc

SEQ ID NO: 1334687 - RNA, 21 nt, Human
uggagugcguacguggaagcc

SEQ ID NO: 1334688 - RNA, 21 nt, Human
ugggagauucgggaucagagc

SEQ ID NO: 1334689 - RNA, 19 nt, Human
uggggagguaaaagagaag

SEQ ID NO: 1334690 - RNA, 24 nt, Human
uguaauauuucuaccuguuacaaa

SEQ ID NO: 1334691 - RNA, 24 nt, Human
uguacaucccucccaacaagugua

SEQ ID NO: 1334692 - RNA, 19 nt, Human
ugugaggggcgcagacggg

SEQ ID NO: 1334693 - RNA, 24 nt, Human
uuacaaagucugauauuuaaggcc

SEQ ID NO: 1334694 - RNA, 19 nt, Human
uuagaggacagcaauauua

SEQ ID NO: 1334695 - RNA, 22 nt, Human
uucaucacauuugguuuucuua

SEQ ID NO: 1334696 - RNA, 24 nt, Human
uucuaagcuagugagaaaucaauu

SEQ ID NO: 1334697 - RNA, 23 nt, Human
uugaauauuuaacaugaauagcc

SEQ ID NO: 1334698 - RNA, 18 nt, Human
uuuaagcugggaaugacu

SEQ ID NO: 1334699 - RNA, 18 nt, Human
aaaagcacuacauccaca

SEQ ID NO: 1334700 - RNA, 21 nt, Human
aaagauguuaaaacagcccuc

SEQ ID NO: 1334701 - RNA, 24 nt, Human
aaauuaauacuaccaaaucauuac

SEQ ID NO: 1334702 - RNA, 21 nt, Human
aacucacuaaguggacaacau

SEQ ID NO: 1334703 - RNA, 18 nt, Human
aagaauacucauagagcc

SEQ ID NO: 1334704 - RNA, 19 nt, Human
aagauguugguaaagauau

SEQ ID NO: 1334705 - RNA, 23 nt, Human
acaaaauuaauacuaccaaauca

SEQ ID NO: 1334706 - RNA, 18 nt, Human
acccuucuaucccauccc

SEQ ID NO: 1334707 - RNA, 21 nt, Human
agaacagaacaugaacauuuu

SEQ ID NO: 1334708 - RNA, 20 nt, Human
agaauacucauagagccauc

SEQ ID NO: 1334709 - RNA, 22 nt, Human
agacugagaaacagaagagcac

SEQ ID NO: 1334710 - RNA, 21 nt, Human
auaaaagacagcaguuucaca

SEQ ID NO: 1334711 - RNA, 22 nt, Human
caaaacccucuaacaaguauuu

SEQ ID NO: 1334712 - RNA, 24 nt, Human
caaaauaagaaaucaguauaguca

SEQ ID NO: 1334713 - RNA, 22 nt, Human
caaauguccuauacuuuggaaa

SEQ ID NO: 1334714 - RNA, 25 nt, Human
cacccgcccgcgccgcuguugggga

SEQ ID NO: 1334715 - RNA, 23 nt, Human
cacuuuggaaagauacgaucaga

SEQ ID NO: 1334716 - RNA, 21 nt, Human
cagaagagcaccgggacugug

SEQ ID NO: 1334717 - RNA, 22 nt, Human
caggcaucuucauuguaauuuu

SEQ ID NO: 1334718 - RNA, 23 nt, Human
caguagagacaaaacaggcagua

SEQ ID NO: 1334719 - RNA, 21 nt, Human
cauugcaaacccuucuauccc

SEQ ID NO: 1334720 - RNA, 25 nt, Human
cauuguugguacgucauuuucuuua

SEQ ID NO: 1334721 - RNA, 23 nt, Human
cccuucuaucccaucccuuuuca

SEQ ID NO: 1334722 - RNA, 23 nt, Human
ccgaagccgccacuguucccccg

SEQ ID NO: 1334723 - RNA, 20 nt, Human
ccgcgccgcuguuggggagc

SEQ ID NO: 1334724 - RNA, 21 nt, Human
ccuucuaucccaucccuuuuc

SEQ ID NO: 1334725 - RNA, 22 nt, Human
cuuaucagcuaccagcugaacg

SEQ ID NO: 1334726 - RNA, 22 nt, Human
gaagagaaacaaugaccacaaa

SEQ ID NO: 1334727 - RNA, 23 nt, Human
gcaaaaaaggagccguuuuugac

SEQ ID NO: 1334728 - RNA, 18 nt, Human
gcgcaaaaaaggagccgu

SEQ ID NO: 1334729 - RNA, 25 nt, Human
ggggaguggguaacaugauucagag

SEQ ID NO: 1334730 - RNA, 24 nt, Human
gugaacaauuuaagaaaacuucac

SEQ ID NO: 1334731 - RNA, 24 nt, Human
uaaaacagcccuccaccaauaaua

SEQ ID NO: 1334732 - RNA, 24 nt, Human
uaaaagcacuacauccacauuaac

SEQ ID NO: 1334733 - RNA, 26 nt, Human
uaaauuuaucgaagagaaacaaugac

SEQ ID NO: 1334734 - RNA, 19 nt, Human
uaacaaaaaaggaagguaa

SEQ ID NO: 1334735 - RNA, 19 nt, Human
uaagaaaacuucacaagag

SEQ ID NO: 1334736 - RNA, 22 nt, Human
uaagaaaucaguauagucaaga

SEQ ID NO: 1334737 - RNA, 18 nt, Human
uaagcagcaccggaagcc

SEQ ID NO: 1334738 - RNA, 18 nt, Human
uaccaguucuucaaaugu

SEQ ID NO: 1334739 - RNA, 21 nt, Human
uaccaguucuucaaauguccu

SEQ ID NO: 1334740 - RNA, 24 nt, Human
uagaaucccuggaagaauacucau

SEQ ID NO: 1334741 - RNA, 21 nt, Human
uaggugaagaaaauauagaac

SEQ ID NO: 1334742 - RNA, 26 nt, Human
uauagaacagaacaugaacauuuuaa

SEQ ID NO: 1334743 - RNA, 23 nt, Human
ucaguuaaaagagagaauauuaa

SEQ ID NO: 1334744 - RNA, 21 nt, Human
ucgaagagaaacaaugaccac

SEQ ID NO: 1334745 - RNA, 21 nt, Human
ugacuguccuucaccagugag

SEQ ID NO: 1334746 - RNA, 25 nt, Human
ugcaaacccuucuaucccaucccuu

SEQ ID NO: 1334747 - RNA, 21 nt, Human
uggaugagcagcucguagccc

SEQ ID NO: 1334748 - RNA, 19 nt, Human
uggcauugcaaacccuucu

SEQ ID NO: 1334749 - RNA, 20 nt, Human
uguaaaguaaaagcacuaca

SEQ ID NO: 1334750 - RNA, 24 nt, Human
uucaaaacccucuaacaaguauuu

SEQ ID NO: 1334751 - RNA, 26 nt, Human
uuggaaagcagacccgacucuggagc

SEQ ID NO: 1334752 - RNA, 19 nt, Human
uuuaagaaaacuucacaag

SEQ ID NO: 1334753 - RNA, 25 nt, Human
uuuaguaauagugaccaaaauaaga

SEQ ID NO: 1334754 - RNA, 25 nt, Human
uuucacuaggaggcgcaaaaaagga

SEQ ID NO: 1334755 - RNA, 20 nt, Human
uuuucaguuaaaagagagaa

SEQ ID NO: 1334756 - RNA, 22 nt, Human
cccugggucccggaguccgccc

SEQ ID NO: 1334757 - RNA, 23 nt, Human
cggcgcccugggucccggagucc

SEQ ID NO: 1334758 - RNA, 27 nt, Human
cggcucccggcgcccugggucccuccu

SEQ ID NO: 1334759 - RNA, 18 nt, Human
gcccugggucccggaguc

SEQ ID NO: 1334760 - RNA, 23 nt, Human
gcuucgguucggcgacaacgcua

SEQ ID NO: 1334761 - RNA, 19 nt, Human
guagcccgccggcucccgg

SEQ ID NO: 1334762 - RNA, 19 nt, Human
uaacucgacucgcagguag

SEQ ID NO: 1334763 - RNA, 19 nt, Human
uugcauccgagccccgccu

SEQ ID NO: 1334764 - RNA, 19 nt, Human
aaaaaacaccaaccauucc

SEQ ID NO: 1334765 - RNA, 26 nt, Human
aaaaaacaccaaccauucccaaaaac

SEQ ID NO: 1334766 - RNA, 21 nt, Human
aaaaacaccaaccauucccaa

SEQ ID NO: 1334767 - RNA, 21 nt, Human
aacacaaagcaaaaaacacca

SEQ ID NO: 1334768 - RNA, 23 nt, Human
aacacaaagcaaaaaacaccaac

SEQ ID NO: 1334769 - RNA, 21 nt, Human
acaaagcaaaaaacaccaacc

SEQ ID NO: 1334770 - RNA, 23 nt, Human
acuucaaagaguuuaaugaugaa

SEQ ID NO: 1334771 - RNA, 21 nt, Human
agucuuuuggcuuucuuacaa

SEQ ID NO: 1334772 - RNA, 24 nt, Human
auaauacaccaauagacaugacca

SEQ ID NO: 1334773 - RNA, 23 nt, Human
auucccaaaaacuacagauacau

SEQ ID NO: 1334774 - RNA, 20 nt, Human
caaaaaacaccaaccauucc

SEQ ID NO: 1334775 - RNA, 21 nt, Human
caaagcaaaaaacaccaacca

SEQ ID NO: 1334776 - RNA, 23 nt, Human
caaagcaaaaaacaccaaccauu

SEQ ID NO: 1334777 - RNA, 21 nt, Human
caacacaaagcaaaaaacacc

SEQ ID NO: 1334778 - RNA, 23 nt, Human
caauagacaugaccaauaugauc

SEQ ID NO: 1334779 - RNA, 20 nt, Human
caauaugauccuggcaaaau

SEQ ID NO: 1334780 - RNA, 23 nt, Human
cacaaagcaaaaaacaccaacca

SEQ ID NO: 1334781 - RNA, 21 nt, Human
caccaaccauucccaaaaacu

SEQ ID NO: 1334782 - RNA, 26 nt, Human
caccaauagacaugaccaauaugauc

SEQ ID NO: 1334783 - RNA, 26 nt, Human
cuucccaacacaaagcaaaaaacacc

SEQ ID NO: 1334784 - RNA, 23 nt, Human
gaaaacauuggugauacugaaau

SEQ ID NO: 1334785 - RNA, 27 nt, Human
gugauacugaaauaauacaccaauuga

SEQ ID NO: 1334786 - RNA, 30 nt, Human
uaacuucccaacacaaagcaaaaaacaccu

SEQ ID NO: 1334787 - RNA, 22 nt, Human
uaaguuagaaggcagaaaaaua

SEQ ID NO: 1334788 - RNA, 23 nt, Human
uaauacaccaauagacaugacca

SEQ ID NO: 1334789 - RNA, 20 nt, Human
uagaaaaaauaaaacgacug

SEQ ID NO: 1334790 - RNA, 19 nt, Human
uauaaaguguacaugaaaa

SEQ ID NO: 1334791 - RNA, 23 nt, Human
uauauagguuuucucaauaacuu

SEQ ID NO: 1334792 - RNA, 24 nt, Human
ucuagaaaaaauaaaacgacugca

SEQ ID NO: 1334793 - RNA, 18 nt, Human
ugaaaucuggcaaaaguc

SEQ ID NO: 1334794 - RNA, 19 nt, Human
ugaggaacaaugcuuaaaa

SEQ ID NO: 1334795 - RNA, 21 nt, Human
ugagucuauaaguuagaaggc

SEQ ID NO: 1334796 - RNA, 23 nt, Human
uggcaaaaugcacaucucgcugg

SEQ ID NO: 1334797 - RNA, 20 nt, Human
uuacaaauguucugaggaac

SEQ ID NO: 1334798 - RNA, 21 nt, Human
uucucaauaacuucccaacac

SEQ ID NO: 1334799 - RNA, 27 nt, Human
aacuuuccccccaagugcccgccuccg

SEQ ID NO: 1334800 - RNA, 20 nt, Human
acagaauguaaauguacccc

SEQ ID NO: 1334801 - RNA, 23 nt, Human
aguucacccacaaaccccuccca

SEQ ID NO: 1334802 - RNA, 23 nt, Human
auguaccccuaugcaugcauaug

SEQ ID NO: 1334803 - RNA, 19 nt, Human
cacccacaaaccccuccca

SEQ ID NO: 1334804 - RNA, 20 nt, Human
cacccacaaaccccucccag

SEQ ID NO: 1334805 - RNA, 21 nt, Human
cacccacaaaccccucccaga

SEQ ID NO: 1334806 - RNA, 18 nt, Human
cccacaaaccccucccag

SEQ ID NO: 1334807 - RNA, 19 nt, Human
cccacaaaccccucccaga

SEQ ID NO: 1334808 - RNA, 20 nt, Human
cccccaagugcccgccuccg

SEQ ID NO: 1334809 - RNA, 22 nt, Human
ccccgaguucacccacaaaccc

SEQ ID NO: 1334810 - RNA, 19 nt, Human
ccccucccagauggggccc

SEQ ID NO: 1334811 - RNA, 21 nt, Human
cccucccagauggggcccgcc

SEQ ID NO: 1334812 - RNA, 18 nt, Human
ccuaugcaugcauaugua

SEQ ID NO: 1334813 - RNA, 19 nt, Human
uagaagaagcuugguagug

SEQ ID NO: 1334814 - RNA, 21 nt, Human
ucagcgggcgguggaccccga

SEQ ID NO: 1334815 - RNA, 24 nt, Human
ucccagauggggcccgcccaaccc

SEQ ID NO: 1334816 - RNA, 23 nt, Human
aaacaaacagacucacaucuagg

SEQ ID NO: 1334817 - RNA, 18 nt, Human
aaacacaauacaaugaaa

SEQ ID NO: 1334818 - RNA, 26 nt, Human
aaacacaauacaaugaaauggaaaaa

SEQ ID NO: 1334819 - RNA, 18 nt, Human
aagagaggaagaaaucgg

SEQ ID NO: 1334820 - RNA, 22 nt, Human
aagcagucugcagugaaauuca

SEQ ID NO: 1334821 - RNA, 25 nt, Human
acaggagugcagcaauuuagagagu

SEQ ID NO: 1334822 - RNA, 23 nt, Human
acaggcacugccaccuccagugu

SEQ ID NO: 1334823 - RNA, 23 nt, Human
accccaguuccuauuuauauuuc

SEQ ID NO: 1334824 - RNA, 23 nt, Human
agaccaacaauggcaaaacacaa

SEQ ID NO: 1334825 - RNA, 22 nt, Human
agggaaaucaacagaccaacaa

SEQ ID NO: 1334826 - RNA, 22 nt, Human
caaacagacucacaucuaggga

SEQ ID NO: 1334827 - RNA, 18 nt, Human
caacaauggcaaaacaca

SEQ ID NO: 1334828 - RNA, 28 nt, Human
caauugaaaacaaacagacucacaucua

SEQ ID NO: 1334829 - RNA, 18 nt, Human
cacaauacaaugaaaugg

SEQ ID NO: 1334830 - RNA, 24 nt, Human
cagugaaauucaaaaucuggcuca

SEQ ID NO: 1334831 - RNA, 19 nt, Human
cauaaacaggcacugccac

SEQ ID NO: 1334832 - RNA, 21 nt, Human
cauaaacaggcacugccaccu

SEQ ID NO: 1334833 - RNA, 21 nt, Human
ccauggcacuuucaugaccgc

SEQ ID NO: 1334834 - RNA, 19 nt, Human
ccgcgggaagcuccucccc

SEQ ID NO: 1334835 - RNA, 22 nt, Human
ccuaugauuagaagucugaagc

SEQ ID NO: 1334836 - RNA, 22 nt, Human
cuccaauaaauauucuaauauu

SEQ ID NO: 1334837 - RNA, 26 nt, Human
cuccaguguucauccauggcacuuuc

SEQ ID NO: 1334838 - RNA, 21 nt, Human
cuuccuguucuguggcuucuu

SEQ ID NO: 1334839 - RNA, 21 nt, Human
gaccaacaauggcaaaacaca

SEQ ID NO: 1334840 - RNA, 23 nt, Human
gagcaggccgcgggaagcuccuc

SEQ ID NO: 1334841 - RNA, 22 nt, Human
ggcuucuuuuagugcccaaguu

SEQ ID NO: 1334842 - RNA, 20 nt, Human
uaaggcagcaauuucaucug

SEQ ID NO: 1334843 - RNA, 23 nt, Human
uacaagccuaugauuagaagucu

SEQ ID NO: 1334844 - RNA, 19 nt, Human
uacaauaaaggucucaaga

SEQ ID NO: 1334845 - RNA, 19 nt, Human
uacaaugaaauggaaaaau

SEQ ID NO: 1334846 - RNA, 24 nt, Human
uaguacauuuucuuuucuggauuc

SEQ ID NO: 1334847 - RNA, 22 nt, Human
uagugcccaaguuguaucacau

SEQ ID NO: 1334848 - RNA, 20 nt, Human
ucagacaauugaaaacaaac

SEQ ID NO: 1334849 - RNA, 19 nt, Human
ucuagggaaaucaacagac

SEQ ID NO: 1334850 - RNA, 19 nt, Human
ugaaaacaaacagacucac

SEQ ID NO: 1334851 - RNA, 25 nt, Human
ugacaaaaaguauugggaagagggg

SEQ ID NO: 1334852 - RNA, 20 nt, Human
uggcaaaacacaauacaaug

SEQ ID NO: 1334853 - RNA, 23 nt, Human
uggcaaaacacaauacaaugaaa

SEQ ID NO: 1334854 - RNA, 21 nt, Human
uguggcuucuuuuagugccca

SEQ ID NO: 1334855 - RNA, 25 nt, Human
uuacaauaaaggucucaagauuuau

SEQ ID NO: 1334856 - RNA, 18 nt, Human
uuccuguucuguggcuuc

SEQ ID NO: 1334857 - RNA, 20 nt, Human
acuacagucuacugugccac

SEQ ID NO: 1334858 - RNA, 20 nt, Human
agcacaugauggggcugaag

SEQ ID NO: 1334859 - RNA, 21 nt, Human
caaagcacaugauggggcuga

SEQ ID NO: 1334860 - RNA, 19 nt, Human
cuccauggcccaguggcag

SEQ ID NO: 1334861 - RNA, 19 nt, Human
cugcccccgcgagccucac

SEQ ID NO: 1334862 - RNA, 19 nt, Human
gagaacagggaaaggacag

SEQ ID NO: 1334863 - RNA, 19 nt, Human
gcacaugauggggcugaag

SEQ ID NO: 1334864 - RNA, 20 nt, Human
guuuuauuuacacucauccc

SEQ ID NO: 1334865 - RNA, 20 nt, Human
ucuccauggcccaguggcag

SEQ ID NO: 1334866 - RNA, 20 nt, Human
uggcccaguggcaggggcgg

SEQ ID NO: 1334867 - RNA, 22 nt, Human
aaaacugaaaacugcuccagcc

SEQ ID NO: 1334868 - RNA, 19 nt, Human
aaaauaaaauaagcuguaa

SEQ ID NO: 1334869 - RNA, 20 nt, Human
aaacaaauaauaagccacuu

SEQ ID NO: 1334870 - RNA, 19 nt, Human
aaacaggcaccacaguucu

SEQ ID NO: 1334871 - RNA, 24 nt, Human
aaacaggcaccacaguucucuaag

SEQ ID NO: 1334872 - RNA, 18 nt, Human
aacauggauuucaccucu

SEQ ID NO: 1334873 - RNA, 20 nt, Human
aaccauagucaguuuauuac

SEQ ID NO: 1334874 - RNA, 18 nt, Human
aagaaagaaacaauagga

SEQ ID NO: 1334875 - RNA, 25 nt, Human
aagaagaaagaaaaauuacaucaug

SEQ ID NO: 1334876 - RNA, 18 nt, Human
aagaaguaugagacuuuc

SEQ ID NO: 1334877 - RNA, 20 nt, Human
aagguagaauuaucaagaca

SEQ ID NO: 1334878 - RNA, 23 nt, Human
acacaauccaaucgaauucaugc

SEQ ID NO: 1334879 - RNA, 23 nt, Human
accaucacacuauacaccaaguc

SEQ ID NO: 1334880 - RNA, 18 nt, Human
aggcagucccaaacucac

SEQ ID NO: 1334881 - RNA, 22 nt, Human
agugguggggacagcggcgaaa

SEQ ID NO: 1334882 - RNA, 19 nt, Human
auagaaauucaugucuaca

SEQ ID NO: 1334883 - RNA, 23 nt, Human
auagugcaaucagugguaaaaca

SEQ ID NO: 1334884 - RNA, 20 nt, Human
auccauuugguuugcaucau

SEQ ID NO: 1334885 - RNA, 21 nt, Human
auguugccaggcagucccaaa

SEQ ID NO: 1334886 - RNA, 21 nt, Human
auucauggucaagaaugcuuu

SEQ ID NO: 1334887 - RNA, 27 nt, Human
caaaaaaaaguaauccauacaucaaaa

SEQ ID NO: 1334888 - RNA, 27 nt, Human
cacuucuaaaaagcaaaugccuaugga

SEQ ID NO: 1334889 - RNA, 23 nt, Human
cagcaguauuucaggaauuacaa

SEQ ID NO: 1334890 - RNA, 21 nt, Human
cagugguaaaacaaauaguac

SEQ ID NO: 1334891 - RNA, 20 nt, Human
caguuugcuugcugacuucu

SEQ ID NO: 1334892 - RNA, 20 nt, Human
caugacauggaaaaaaucca

SEQ ID NO: 1334893 - RNA, 22 nt, Human
caugcaucacuuccagagauac

SEQ ID NO: 1334894 - RNA, 20 nt, Human
ccauaaguuuaaccuuuuaa

SEQ ID NO: 1334895 - RNA, 18 nt, Human
ccauuugucaauaucauc

SEQ ID NO: 1334896 - RNA, 21 nt, Human
cgaaagcaccucggaaagccc

SEQ ID NO: 1334897 - RNA, 24 nt, Human
cuucuuugcuaauuugcugcuggu

SEQ ID NO: 1334898 - RNA, 20 nt, Human
gaaaagaaaaacauuccaaa

SEQ ID NO: 1334899 - RNA, 20 nt, Human
gaaagaaacaauaggaugua

SEQ ID NO: 1334900 - RNA, 23 nt, Human
gagacaagcuaugaaacaaacua

SEQ ID NO: 1334901 - RNA, 24 nt, Human
gauucagaagaaccacaaaaguuu

SEQ ID NO: 1334902 - RNA, 18 nt, Human
gcaccucggaaagcccag

SEQ ID NO: 1334903 - RNA, 23 nt, Human
gcagcaguauuucaggaauuaca

SEQ ID NO: 1334904 - RNA, 19 nt, Human
gcaucacuuccagagauac

SEQ ID NO: 1334905 - RNA, 25 nt, Human
gggaaaagaaaaacauuccaaauau

SEQ ID NO: 1334906 - RNA, 23 nt, Human
guacauuuuuguuacagacagaa

SEQ ID NO: 1334907 - RNA, 19 nt, Human
gugaaaugacuuuagcacg

SEQ ID NO: 1334908 - RNA, 20 nt, Human
gugaaaugacuuuagcacgu

SEQ ID NO: 1334909 - RNA, 24 nt, Human
guuacagaaaauacacuugaacaa

SEQ ID NO: 1334910 - RNA, 20 nt, Human
uaaaaaaacaaaauagugca

SEQ ID NO: 1334911 - RNA, 22 nt, Human
uaaaguacauuuuuguuacaga

SEQ ID NO: 1334912 - RNA, 20 nt, Human
uaaauacagaugucccuuag

SEQ ID NO: 1334913 - RNA, 23 nt, Human
uaaauacuuacacguaaugaaug

SEQ ID NO: 1334914 - RNA, 20 nt, Human
uaacauggauuucaccucuc

SEQ ID NO: 1334915 - RNA, 25 nt, Human
uaagaaauauaaauguugccaggca

SEQ ID NO: 1334916 - RNA, 23 nt, Human
uaagacuaaaccaucacacuaua

SEQ ID NO: 1334917 - RNA, 23 nt, Human
uaagauuauugaaaaaaggaauc

SEQ ID NO: 1334918 - RNA, 18 nt, Human
uaagucaaaugcaaguac

SEQ ID NO: 1334919 - RNA, 18 nt, Human
uacaccaagucuuuccuu

SEQ ID NO: 1334920 - RNA, 25 nt, Human
uacaucaaaauugggguuuccuugg

SEQ ID NO: 1334921 - RNA, 27 nt, Human
uacaucaaaauugggguuuccuugguu

SEQ ID NO: 1334922 - RNA, 18 nt, Human
uacuauggcuguugaaau

SEQ ID NO: 1334923 - RNA, 23 nt, Human
uagacagauacuuaggagggcag

SEQ ID NO: 1334924 - RNA, 18 nt, Human
uaggagggcagacucccc

SEQ ID NO: 1334925 - RNA, 22 nt, Human
uaguucacuugaguagaagccu

SEQ ID NO: 1334926 - RNA, 21 nt, Human
uauauaaagucaauccucaaa

SEQ ID NO: 1334927 - RNA, 22 nt, Human
uaucuucaauaauacuauucaa

SEQ ID NO: 1334928 - RNA, 24 nt, Human
ucacagauacaucguaagucaaau

SEQ ID NO: 1334929 - RNA, 20 nt, Human
uccaagugaggauauuacuu

SEQ ID NO: 1334930 - RNA, 20 nt, Human
uccauacaucaaaauugggg

SEQ ID NO: 1334931 - RNA, 20 nt, Human
ugaaaaacaaauaauaagcc

SEQ ID NO: 1334932 - RNA, 21 nt, Human
ugaacaaugacagaaacacuu

SEQ ID NO: 1334933 - RNA, 24 nt, Human
ugaauagcccuuuaaaaacagccc

SEQ ID NO: 1334934 - RNA, 23 nt, Human
ugcaaagaacauuuugauagaaa

SEQ ID NO: 1334935 - RNA, 18 nt, Human
ugcaacuguuaaaaaaac

SEQ ID NO: 1334936 - RNA, 30 nt, Human
ugcagugguggggacagcggcgaaagcacc

SEQ ID NO: 1334937 - RNA, 21 nt, Human
ugccauugcaguggacacuuc

SEQ ID NO: 1334938 - RNA, 18 nt, Human
uggggacagcggcgaaag

SEQ ID NO: 1334939 - RNA, 21 nt, Human
uguaaagaacauuacaagcua

SEQ ID NO: 1334940 - RNA, 21 nt, Human
uuaaaaauagucucaucaagg

SEQ ID NO: 1334941 - RNA, 23 nt, Human
uuacagaaaauacacuugaacaa

SEQ ID NO: 1334942 - RNA, 21 nt, Human
uuacagugaaaugacuuuagc

SEQ ID NO: 1334943 - RNA, 20 nt, Human
uuagaugagcaagauuggga

SEQ ID NO: 1334944 - RNA, 23 nt, Human
uucaaaauaaaaagaaaagaaac

SEQ ID NO: 1334945 - RNA, 18 nt, Human
uucacugcuucuuugcua

SEQ ID NO: 1334946 - RNA, 24 nt, Human
uucuaaaaagcaaaugccuaugga

SEQ ID NO: 1334947 - RNA, 24 nt, Human
uuguaaaacuaaagaaaacagcua

SEQ ID NO: 1334948 - RNA, 20 nt, Human
uuuguagacauguuuguaaa

SEQ ID NO: 1334949 - RNA, 18 nt, Human
uuugugcugaauauucuu

SEQ ID NO: 1334950 - RNA, 20 nt, Human
uuuugugcugaauauucuuc

SEQ ID NO: 1334951 - RNA, 18 nt, Human
uuuuuuuuuuuuuuuuug

SEQ ID NO: 1334952 - RNA, 22 nt, Human
uuuuuuuuuuuuuuuuugauag

SEQ ID NO: 1334953 - RNA, 18 nt, Human
aacauccgggcugcccuu

SEQ ID NO: 1334954 - RNA, 25 nt, Human
aauuucuuuuaauguauaggauugu

SEQ ID NO: 1334955 - RNA, 21 nt, Human
acagaauggggcccagggguc

SEQ ID NO: 1334956 - RNA, 21 nt, Human
agugauucuucucuuuucucg

SEQ ID NO: 1334957 - RNA, 25 nt, Human
cagaauggggcccaggggucuucau

SEQ ID NO: 1334958 - RNA, 18 nt, Human
ccagagacucagacgcca

SEQ ID NO: 1334959 - RNA, 22 nt, Human
ccccaacagaauggggcccagg

SEQ ID NO: 1334960 - RNA, 22 nt, Human
gcaguagugagugauucuucuc

SEQ ID NO: 1334961 - RNA, 22 nt, Human
gcuacgccagagacucagacgc

SEQ ID NO: 1334962 - RNA, 18 nt, Human
gugagugauucuucucuu

SEQ ID NO: 1334963 - RNA, 20 nt, Human
ucacccagcccauucggauc

SEQ ID NO: 1334964 - RNA, 21 nt, Human
ucucggguucacuuugaccug

SEQ ID NO: 1334965 - RNA, 18 nt, Human
ugagugauucuucucuuu

SEQ ID NO: 1334966 - RNA, 22 nt, Human
ugauucuucucuuuucucgggu

SEQ ID NO: 1334967 - RNA, 21 nt, Human
uggggcccaggggucuucauc

SEQ ID NO: 1334968 - RNA, 23 nt, Human
aaaaaaaacaaagagaaaccuag

SEQ ID NO: 1334969 - RNA, 24 nt, Human
aaaaaaaacaaagagaaaccuaga

SEQ ID NO: 1334970 - RNA, 23 nt, Human
aaaaacaaagagaaaccuagaua

SEQ ID NO: 1334971 - RNA, 24 nt, Human
aaaaaggauuuuaaauacaaaacc

SEQ ID NO: 1334972 - RNA, 21 nt, Human
aaaauccacuauauuccaagu

SEQ ID NO: 1334973 - RNA, 19 nt, Human
aagguauuuuauuugguau

SEQ ID NO: 1334974 - RNA, 23 nt, Human
acuuuaaaaaaaacaaagagaaa

SEQ ID NO: 1334975 - RNA, 19 nt, Human
agauagaauauauauaaau

SEQ ID NO: 1334976 - RNA, 19 nt, Human
agcauauggacaaaaagga

SEQ ID NO: 1334977 - RNA, 23 nt, Human
agcauuuggaaaaaccaaaaaug

SEQ ID NO: 1334978 - RNA, 19 nt, Human
auauuccaaguuaaacucu

SEQ ID NO: 1334979 - RNA, 18 nt, Human
aucacuuuaaaaaaaaca

SEQ ID NO: 1334980 - RNA, 21 nt, Human
aucaucacuuuaaaaaaaaca

SEQ ID NO: 1334981 - RNA, 22 nt, Human
aucaucacuuuaaaaaaaacaa

SEQ ID NO: 1334982 - RNA, 21 nt, Human
augucauacaaccucuacaug

SEQ ID NO: 1334983 - RNA, 21 nt, Human
auuuggggagaaauuaaaaga

SEQ ID NO: 1334984 - RNA, 22 nt, Human
caacauugucaugugcaaucag

SEQ ID NO: 1334985 - RNA, 24 nt, Human
cacuuuaaaaaaaacaaagagaaa

SEQ ID NO: 1334986 - RNA, 31 nt, Human
cacuuuaaaaaaaacaaagagaaaccuagag

SEQ ID NO: 1334987 - RNA, 22 nt, Human
cagcauuuggaaaaaccaaaaa

SEQ ID NO: 1334988 - RNA, 18 nt, Human
ccaguccaugaaaucauc

SEQ ID NO: 1334989 - RNA, 18 nt, Human
cuuuuaaaugcccagucc

SEQ ID NO: 1334990 - RNA, 20 nt, Human
gcuucuaaaagcccugggga

SEQ ID NO: 1334991 - RNA, 19 nt, Human
ggaaaaaccaaaaauggac

SEQ ID NO: 1334992 - RNA, 21 nt, Human
ggggaggagccucauauagca

SEQ ID NO: 1334993 - RNA, 24 nt, Human
uaaaaugauuagauuugaggauca

SEQ ID NO: 1334994 - RNA, 23 nt, Human
uaaauucucaauugaucgggguu

SEQ ID NO: 1334995 - RNA, 22 nt, Human
uagcucaaugucauacaaccuc

SEQ ID NO: 1334996 - RNA, 23 nt, Human
uauuccaaguuaaacucugaggg

SEQ ID NO: 1334997 - RNA, 23 nt, Human
uauucucugcaaaacuaaauucc

SEQ ID NO: 1334998 - RNA, 22 nt, Human
ucugaggguucugcacuauagc

SEQ ID NO: 1334999 - RNA, 24 nt, Human
uggaccauauuuggggagaaauua

SEQ ID NO: 1335000 - RNA, 19 nt, Human
uggggagaaauuaaaagag

SEQ ID NO: 1335001 - RNA, 21 nt, Human
ugugcaaucagugaauuucag

SEQ ID NO: 1335002 - RNA, 23 nt, Human
ugugcaaucagugaauuucaguu

SEQ ID NO: 1335003 - RNA, 20 nt, Human
uuaaaaaaaacaaagagaaa

SEQ ID NO: 1335004 - RNA, 18 nt, Human
uucauauuggcauucacu

SEQ ID NO: 1335005 - RNA, 22 nt, Human
uuuacauugcacugugaaguuc

SEQ ID NO: 1335006 - RNA, 21 nt, Human
aaacagaagaaauaaauccag

SEQ ID NO: 1335007 - RNA, 20 nt, Human
aaguauacaaagauuaccug

SEQ ID NO: 1335008 - RNA, 24 nt, Human
acaaauauaauccugagcugaaaa

SEQ ID NO: 1335009 - RNA, 24 nt, Human
acauaacuuaacagagcuuguaua

SEQ ID NO: 1335010 - RNA, 25 nt, Human
caagauacuguaaacauaacuuaac

SEQ ID NO: 1335011 - RNA, 18 nt, Human
caggugauggugacuaua

SEQ ID NO: 1335012 - RNA, 26 nt, Human
ccgccgccucguccucaagccgcucc

SEQ ID NO: 1335013 - RNA, 20 nt, Human
ccgccucguccucaagccgc

SEQ ID NO: 1335014 - RNA, 22 nt, Human
ccgccucguccucaagccgcuc

SEQ ID NO: 1335015 - RNA, 22 nt, Human
ccgcggccgccgccucguccuc

SEQ ID NO: 1335016 - RNA, 22 nt, Human
ccugcgccaagugauuuuuuuu

SEQ ID NO: 1335017 - RNA, 22 nt, Human
cuccccgcggccgccgccucgu

SEQ ID NO: 1335018 - RNA, 23 nt, Human
gaguggauaaaaaaaacauaggg

SEQ ID NO: 1335019 - RNA, 22 nt, Human
gcugaaaaacugggauuugggg

SEQ ID NO: 1335020 - RNA, 23 nt, Human
gcugaaaaacugggauuuggggg

SEQ ID NO: 1335021 - RNA, 20 nt, Human
gggggagagccaucuuugca

SEQ ID NO: 1335022 - RNA, 22 nt, Human
guaaacauaacuuaacagagcu

SEQ ID NO: 1335023 - RNA, 21 nt, Human
ucuaaaggaugcuucucuguu

SEQ ID NO: 1335024 - RNA, 21 nt, Human
ugauauucgacugccagagac

SEQ ID NO: 1335025 - RNA, 21 nt, Human
ugauuacaaauauaauccuga

SEQ ID NO: 1335026 - RNA, 20 nt, Human
uugggggagagccaucuuug

SEQ ID NO: 1335027 - RNA, 18 nt, Human
uuucuucuuucacugugg

SEQ ID NO: 1335028 - RNA, 19 nt, Human
aaucuagcuacccuuucug

SEQ ID NO: 1335029 - RNA, 22 nt, Human
acaccacagaacaaaucuugac

SEQ ID NO: 1335030 - RNA, 23 nt, Human
acauggacuaagcucuaaaaggu

SEQ ID NO: 1335031 - RNA, 22 nt, Human
accacagaacaaaucuugacaa

SEQ ID NO: 1335032 - RNA, 19 nt, Human
acugaagagcuuucaaucu

SEQ ID NO: 1335033 - RNA, 26 nt, Human
agaaaaaaauagauucagaaaauaaa

SEQ ID NO: 1335034 - RNA, 21 nt, Human
agacagacuaagaacauccuc

SEQ ID NO: 1335035 - RNA, 22 nt, Human
agcaagaaaaaaauagauucag

SEQ ID NO: 1335036 - RNA, 23 nt, Human
aggaagucugaucaucuccagug

SEQ ID NO: 1335037 - RNA, 24 nt, Human
aggcauuuauuaugccaaguaacg

SEQ ID NO: 1335038 - RNA, 21 nt, Human
aggggcggggcgagcgggggc

SEQ ID NO: 1335039 - RNA, 23 nt, Human
agguauuggggccacacugggcu

SEQ ID NO: 1335040 - RNA, 18 nt, Human
aguggaaaaacaaagcca

SEQ ID NO: 1335041 - RNA, 19 nt, Human
auaagcccaaagugccuca

SEQ ID NO: 1335042 - RNA, 20 nt, Human
auggaaugugcauaccuaca

SEQ ID NO: 1335043 - RNA, 22 nt, Human
auuuacaguuacauagauugcu

SEQ ID NO: 1335044 - RNA, 23 nt, Human
caccuucaaagcuaucacuccaa

SEQ ID NO: 1335045 - RNA, 22 nt, Human
cacugggcucuaaguggaaagc

SEQ ID NO: 1335046 - RNA, 25 nt, Human
cagaaaauaaaaugucuuuuaggca

SEQ ID NO: 1335047 - RNA, 22 nt, Human
cagcgcagcagcguacgggucc

SEQ ID NO: 1335048 - RNA, 21 nt, Human
caugagaauaaugcucuuuua

SEQ ID NO: 1335049 - RNA, 22 nt, Human
cauggacuaagcucuaaaaggu

SEQ ID NO: 1335050 - RNA, 18 nt, Human
cauggccgugugcauacc

SEQ ID NO: 1335051 - RNA, 21 nt, Human
ccagcccuacuuccgggagcc

SEQ ID NO: 1335052 - RNA, 23 nt, Human
ccaggggcggggcgagcgggggc

SEQ ID NO: 1335053 - RNA, 21 nt, Human
cccuacgccagcccuacuucc

SEQ ID NO: 1335054 - RNA, 22 nt, Human
cgaagugcauauuaaaaacuaa

SEQ ID NO: 1335055 - RNA, 21 nt, Human
cgacccgucaccaagggccag

SEQ ID NO: 1335056 - RNA, 21 nt, Human
cgggagccacgucagcgcagc

SEQ ID NO: 1335057 - RNA, 22 nt, Human
cucagcccggccucacuucagc

SEQ ID NO: 1335058 - RNA, 26 nt, Human
cuucuuacaaacaaaaauaaaauuuu

SEQ ID NO: 1335059 - RNA, 24 nt, Human
gaaauuuccccacgaagugcauau

SEQ ID NO: 1335060 - RNA, 18 nt, Human
gaagugcauauuaaaaac

SEQ ID NO: 1335061 - RNA, 18 nt, Human
gggcggggcgagcggggg

SEQ ID NO: 1335062 - RNA, 20 nt, Human
gggcggggcgagcgggggcc

SEQ ID NO: 1335063 - RNA, 26 nt, Human
gugugcauaccuauggaaugugcaua

SEQ ID NO: 1335064 - RNA, 24 nt, Human
uaaaugaacacuuucauuaacuug

SEQ ID NO: 1335065 - RNA, 18 nt, Human
uaagagccucagcccggc

SEQ ID NO: 1335066 - RNA, 22 nt, Human
uaagcucuaaaagguugaguca

SEQ ID NO: 1335067 - RNA, 21 nt, Human
uaccacuggcccuaauuguuu

SEQ ID NO: 1335068 - RNA, 21 nt, Human
uacuuuuccuuuuuauaaaua

SEQ ID NO: 1335069 - RNA, 24 nt, Human
uagaacagcagcaaucucugggua

SEQ ID NO: 1335070 - RNA, 24 nt, Human
uagcaagaaaaaaauagauucaga

SEQ ID NO: 1335071 - RNA, 25 nt, Human
uaguuaauaccacuggcccuaauug

SEQ ID NO: 1335072 - RNA, 19 nt, Human
uaugaaaacuacuuuuccu

SEQ ID NO: 1335073 - RNA, 21 nt, Human
uauuacauggccgugugcaua

SEQ ID NO: 1335074 - RNA, 20 nt, Human
uauuggggccacacugggcu

SEQ ID NO: 1335075 - RNA, 25 nt, Human
ucaagaaucucuucaguuguucccc

SEQ ID NO: 1335076 - RNA, 26 nt, Human
ucagcccggccucacuucagcuuuga

SEQ ID NO: 1335077 - RNA, 23 nt, Human
ucagcgcagcagcguacgggucc

SEQ ID NO: 1335078 - RNA, 21 nt, Human
ucaucuccaguguuuugucuu

SEQ ID NO: 1335079 - RNA, 21 nt, Human
uccauuaccuauguaaaugaa

SEQ ID NO: 1335080 - RNA, 20 nt, Human
uccccauuauagcaagaaaa

SEQ ID NO: 1335081 - RNA, 21 nt, Human
ucuagcuacccuuucuguaaa

SEQ ID NO: 1335082 - RNA, 21 nt, Human
ucuguaaaauaaauagaacag

SEQ ID NO: 1335083 - RNA, 19 nt, Human
ucuucaguuguuccccaau

SEQ ID NO: 1335084 - RNA, 18 nt, Human
ugacaugagaauaaugcu

SEQ ID NO: 1335085 - RNA, 19 nt, Human
uggcacgcaggagcgacaa

SEQ ID NO: 1335086 - RNA, 24 nt, Human
ugguuuaauuuacaguuacauaga

SEQ ID NO: 1335087 - RNA, 24 nt, Human
uguaaauaguagaauuuuauacaa

SEQ ID NO: 1335088 - RNA, 21 nt, Human
ugugcauaccuacaccacaga

SEQ ID NO: 1335089 - RNA, 23 nt, Human
ugugcauaccuacaccacagaac

SEQ ID NO: 1335090 - RNA, 21 nt, Human
uuaaguggaaaaacaaagcca

SEQ ID NO: 1335091 - RNA, 18 nt, Human
uucagaaaauaaaauguc

SEQ ID NO: 1335092 - RNA, 25 nt, Human
uuugucuuaaaaacugcuuuccaaa

SEQ ID NO: 1335093 - RNA, 21 nt, Human
aaaaccugccagaauaagaca

SEQ ID NO: 1335094 - RNA, 20 nt, Human
aaacaaaacuacaagaaaac

SEQ ID NO: 1335095 - RNA, 21 nt, Human
aaacaaaauauauacacagaa

SEQ ID NO: 1335096 - RNA, 19 nt, Human
aaacaaaucagaagagcau

SEQ ID NO: 1335097 - RNA, 25 nt, Human
aaccaaacaaaacuacaagaaaaca

SEQ ID NO: 1335098 - RNA, 19 nt, Human
aaccuauuuguuguuuaga

SEQ ID NO: 1335099 - RNA, 21 nt, Human
aagacaauagaagagcguauc

SEQ ID NO: 1335100 - RNA, 19 nt, Human
aaugugaaagcaaguaaga

SEQ ID NO: 1335101 - RNA, 20 nt, Human
acaaaucugcacuacccaag

SEQ ID NO: 1335102 - RNA, 21 nt, Human
acagaaagaagcucgcacaga

SEQ ID NO: 1335103 - RNA, 24 nt, Human
acagagcaagacucagucucaaaa

SEQ ID NO: 1335104 - RNA, 24 nt, Human
acucauuccuuucuguuuccucug

SEQ ID NO: 1335105 - RNA, 23 nt, Human
acugcacuccagccugaugacag

SEQ ID NO: 1335106 - RNA, 25 nt, Human
acugcacuccagccugaugacagag

SEQ ID NO: 1335107 - RNA, 26 nt, Human
agaaccaaacaaaacuacaagaaaac

SEQ ID NO: 1335108 - RNA, 25 nt, Human
agguaacccuaacuauccgcaaucc

SEQ ID NO: 1335109 - RNA, 24 nt, Human
agugagccacugcacuccagccug

SEQ ID NO: 1335110 - RNA, 19 nt, Human
auaaaacaaaauauauaca

SEQ ID NO: 1335111 - RNA, 22 nt, Human
aucuuuuuuuuuuuuuugucuu

SEQ ID NO: 1335112 - RNA, 22 nt, Human
caaacaaaacuacaagaaaaca

SEQ ID NO: 1335113 - RNA, 24 nt, Human
caaaucugcacuacccaagccucc

SEQ ID NO: 1335114 - RNA, 20 nt, Human
caacaguguagauuacagca

SEQ ID NO: 1335115 - RNA, 21 nt, Human
caagaaaacauuuucaaaacc

SEQ ID NO: 1335116 - RNA, 20 nt, Human
cacggaaaaaaauaaaacaa

SEQ ID NO: 1335117 - RNA, 22 nt, Human
cacuacccaagccuccuugccu

SEQ ID NO: 1335118 - RNA, 22 nt, Human
cacuccagccugaugacagagc

SEQ ID NO: 1335119 - RNA, 18 nt, Human
cacugcacuccagccuga

SEQ ID NO: 1335120 - RNA, 18 nt, Human
cacugcacuccagccuga

SEQ ID NO: 1335121 - RNA, 23 nt, Human
cacugcacuccagccugaugaca

SEQ ID NO: 1335122 - RNA, 24 nt, Human
cacugcacuccagccugaugacag

SEQ ID NO: 1335123 - RNA, 25 nt, Human
cagcaggcguucucuaccuggacuc

SEQ ID NO: 1335124 - RNA, 23 nt, Human
cauuuucaaaaccuuuuuuuuca

SEQ ID NO: 1335125 - RNA, 23 nt, Human
ccaaacaaaacuacaagaaaaca

SEQ ID NO: 1335126 - RNA, 18 nt, Human
ccacugcacuccagccug

SEQ ID NO: 1335127 - RNA, 19 nt, Human
ccacugcacuccagccuga

SEQ ID NO: 1335128 - RNA, 20 nt, Human
ccacugcacuccagccugau

SEQ ID NO: 1335129 - RNA, 23 nt, Human
ccacugcacuccagccugaugac

SEQ ID NO: 1335130 - RNA, 19 nt, Human
ccucacaggugcugggcag

SEQ ID NO: 1335131 - RNA, 21 nt, Human
ccugaugacagagcaagacuc

SEQ ID NO: 1335132 - RNA, 19 nt, Human
ccuuucuguuuccucugga

SEQ ID NO: 1335133 - RNA, 18 nt, Human
ccuuuuuuuucaggcuga

SEQ ID NO: 1335134 - RNA, 21 nt, Human
cgucaggcgcugggaauggca

SEQ ID NO: 1335135 - RNA, 24 nt, Human
cucaaaaugugaaagcaaguaaga

SEQ ID NO: 1335136 - RNA, 18 nt, Human
gaacugacacgucaggcc

SEQ ID NO: 1335137 - RNA, 21 nt, Human
gaagagcauuuauugggaacu

SEQ ID NO: 1335138 - RNA, 18 nt, Human
gacagagcaagacucagu

SEQ ID NO: 1335139 - RNA, 20 nt, Human
gagcaagacucagucucaaa

SEQ ID NO: 1335140 - RNA, 23 nt, Human
gcacuccagccugaugacagagc

SEQ ID NO: 1335141 - RNA, 20 nt, Human
gggaaacaaaucagaagagc

SEQ ID NO: 1335142 - RNA, 19 nt, Human
gguugcagugagccacugc

SEQ ID NO: 1335143 - RNA, 23 nt, Human
uaccuggacucaugauuggauuu

SEQ ID NO: 1335144 - RNA, 21 nt, Human
uagaagagcguaucgucaggc

SEQ ID NO: 1335145 - RNA, 21 nt, Human
uauacacagaaagaagcucgc

SEQ ID NO: 1335146 - RNA, 23 nt, Human
uauacacggaaaaaaauaaaaca

SEQ ID NO: 1335147 - RNA, 21 nt, Human
uauauacacagaaagaagcuc

SEQ ID NO: 1335148 - RNA, 26 nt, Human
uauauacacagaaagaagcucgcaca

SEQ ID NO: 1335149 - RNA, 26 nt, Human
uaucgucaggcgcugggaauggcacc

SEQ ID NO: 1335150 - RNA, 22 nt, Human
ucaaagauugaaauacacaaau

SEQ ID NO: 1335151 - RNA, 18 nt, Human
uccaaggaauaaaauuuc

SEQ ID NO: 1335152 - RNA, 19 nt, Human
ucgagugauuaaaaccuau

SEQ ID NO: 1335153 - RNA, 21 nt, Human
ucgcacagagucaggcgugca

SEQ ID NO: 1335154 - RNA, 24 nt, Human
ucucauaaaagcuacacgauucag

SEQ ID NO: 1335155 - RNA, 19 nt, Human
ucugucacccagguugcag

SEQ ID NO: 1335156 - RNA, 19 nt, Human
ucuuguucugucacccagg

SEQ ID NO: 1335157 - RNA, 19 nt, Human
ucuuguucugucacccagg

SEQ ID NO: 1335158 - RNA, 22 nt, Human
ucuuguucugucacccagguug

SEQ ID NO: 1335159 - RNA, 21 nt, Human
ucuuuuuuuuuuuuuugucuu

SEQ ID NO: 1335160 - RNA, 21 nt, Human
ugaaagcaaguaagagggggg

SEQ ID NO: 1335161 - RNA, 21 nt, Human
ugaaagcaaguaagagggggg

SEQ ID NO: 1335162 - RNA, 21 nt, Human
ugaaagcaaguaagagggggg

SEQ ID NO: 1335163 - RNA, 23 nt, Human
ugaaagcaaguaagaggggggug

SEQ ID NO: 1335164 - RNA, 19 nt, Human
ugcagcaacgucacacacu

SEQ ID NO: 1335165 - RNA, 19 nt, Human
uucaggcugaagaaaucgu

SEQ ID NO: 1335166 - RNA, 18 nt, Human
uugcagugagccacugca

SEQ ID NO: 1335167 - RNA, 22 nt, Human
uuuucaaaaccuuuuuuuucag

SEQ ID NO: 1335168 - RNA, 26 nt, Human
auuauuuuccuucugugaccuuucca

SEQ ID NO: 1335169 - RNA, 19 nt, Human
caagucugaaacaguccca

SEQ ID NO: 1335170 - RNA, 18 nt, Human
ugugaccuuuccaagucg

SEQ ID NO: 1335171 - RNA, 19 nt, Human
ugugaccuuuccaagucug

SEQ ID NO: 1335172 - RNA, 23 nt, Human
aaacaggcuugaaccacaaggau

SEQ ID NO: 1335173 - RNA, 20 nt, Human
aagauggaagaaaacaggcu

SEQ ID NO: 1335174 - RNA, 22 nt, Human
acaaaggcccucagcugggaca

SEQ ID NO: 1335175 - RNA, 24 nt, Human
acagcagaaggcacgaguccugaa

SEQ ID NO: 1335176 - RNA, 18 nt, Human
agaaggagggcgggaagg

SEQ ID NO: 1335177 - RNA, 18 nt, Human
aggaaggagaugucagug

SEQ ID NO: 1335178 - RNA, 23 nt, Human
aggaaggagaugucagugcuuua

SEQ ID NO: 1335179 - RNA, 21 nt, Human
augaaggggucacagagggac

SEQ ID NO: 1335180 - RNA, 19 nt, Human
cacgaguccugaagaugga

SEQ ID NO: 1335181 - RNA, 23 nt, Human
cccgcccucgacacccgccgacg

SEQ ID NO: 1335182 - RNA, 24 nt, Human
cgaggcaacccgcccucgacaccc

SEQ ID NO: 1335183 - RNA, 24 nt, Human
cgcucgcucucucacccggcucua

SEQ ID NO: 1335184 - RNA, 19 nt, Human
cggggaccuggugugugac

SEQ ID NO: 1335185 - RNA, 22 nt, Human
gaagaaaacaggcuugaaccac

SEQ ID NO: 1335186 - RNA, 23 nt, Human
gaagaaaacaggcuugaaccaca

SEQ ID NO: 1335187 - RNA, 20 nt, Human
gaagauggaagaaaacaggc

SEQ ID NO: 1335188 - RNA, 25 nt, Human
gagaacagcagaaggcaccgguacc

SEQ ID NO: 1335189 - RNA, 21 nt, Human
gagaacagcagaaggcacgag

SEQ ID NO: 1335190 - RNA, 21 nt, Human
gaugaaggggucacagaggga

SEQ ID NO: 1335191 - RNA, 22 nt, Human
gccacaaugagaacagcagaag

SEQ ID NO: 1335192 - RNA, 25 nt, Human
gcgaggcaacccgcccucgacaccc

SEQ ID NO: 1335193 - RNA, 20 nt, Human
gcgccgacaccgcggcuucc

SEQ ID NO: 1335194 - RNA, 23 nt, Human
gugacgagaaggagggcgggaag

SEQ ID NO: 1335195 - RNA, 18 nt, Human
uaggaaggagaugucagu

SEQ ID NO: 1335196 - RNA, 22 nt, Human
uaucaaagaugaaggggucaca

SEQ ID NO: 1335197 - RNA, 24 nt, Human
ucagcugggacauuucuuggccac

SEQ ID NO: 1335198 - RNA, 21 nt, Human
ucccaaaauuccuggccuugc

SEQ ID NO: 1335199 - RNA, 24 nt, Human
ugacgagaaggagggcgggaaggg

SEQ ID NO: 1335200 - RNA, 19 nt, Human
uggaagaaaacaggcuuga

SEQ ID NO: 1335201 - RNA, 25 nt, Human
uggaagaaaacaggcuugaaccaca

SEQ ID NO: 1335202 - RNA, 23 nt, Human
uggccacaaugagaacagcagaa

SEQ ID NO: 1335203 - RNA, 19 nt, Human
uggugugugacgagaagga

SEQ ID NO: 1335204 - RNA, 26 nt, Human
ugugacgagaaggagggcgggaaggg

SEQ ID NO: 1335205 - RNA, 18 nt, Human
uuccuggccuugcaccau

SEQ ID NO: 1335206 - RNA, 21 nt, Human
uuuuuuuuuuuuacagaacuc

SEQ ID NO: 1335207 - RNA, 23 nt, Human
uuuuuuuuuuuuuuuuuuuacag

SEQ ID NO: 1335208 - RNA, 18 nt, Human
aaaauccucuccagguuc

SEQ ID NO: 1335209 - RNA, 22 nt, Human
aaacacacagccacacagaaaa

SEQ ID NO: 1335210 - RNA, 19 nt, Human
aacacacagccacacagaa

SEQ ID NO: 1335211 - RNA, 22 nt, Human
acuuugaaaaauccucuccagg

SEQ ID NO: 1335212 - RNA, 23 nt, Human
agacagccagagaggcaggcagc

SEQ ID NO: 1335213 - RNA, 22 nt, Human
agcucacuuccuacuacuucug

SEQ ID NO: 1335214 - RNA, 20 nt, Human
caaacacacagccacacaga

SEQ ID NO: 1335215 - RNA, 25 nt, Human
caaaugacccaacuagucugacauc

SEQ ID NO: 1335216 - RNA, 21 nt, Human
caacuagucugacaucaccaa

SEQ ID NO: 1335217 - RNA, 22 nt, Human
cacagccacacagaaaaugaga

SEQ ID NO: 1335218 - RNA, 19 nt, Human
cacguugagcaccaacuuc

SEQ ID NO: 1335219 - RNA, 18 nt, Human
cagacagccagagaggca

SEQ ID NO: 1335220 - RNA, 19 nt, Human
cagacagccagagaggcag

SEQ ID NO: 1335221 - RNA, 20 nt, Human
caggcagcgagcgcacaagc

SEQ ID NO: 1335222 - RNA, 27 nt, Human
cccaaacacacagccacacagaaaaug

SEQ ID NO: 1335223 - RNA, 23 nt, Human
ccuaccccgacggugcccagaca

SEQ ID NO: 1335224 - RNA, 23 nt, Human
ccuucaaaugacccaacuagucu

SEQ ID NO: 1335225 - RNA, 22 nt, Human
ccuuuggcaaagaauagacccu

SEQ ID NO: 1335226 - RNA, 21 nt, Human
cgagcgcacaagccggcguuu

SEQ ID NO: 1335227 - RNA, 22 nt, Human
cgcguucucggcaucccagucc

SEQ ID NO: 1335228 - RNA, 22 nt, Human
cgcucgcguucucggcauccca

SEQ ID NO: 1335229 - RNA, 22 nt, Human
cucacuuccuacuacuucuguc

SEQ ID NO: 1335230 - RNA, 19 nt, Human
cugcuccuggcucacguug

SEQ ID NO: 1335231 - RNA, 24 nt, Human
cugguccccccuuugguccccugg

SEQ ID NO: 1335232 - RNA, 22 nt, Human
gaaaaauccucuccagguucua

SEQ ID NO: 1335233 - RNA, 18 nt, Human
gaggagccgggacgcugc

SEQ ID NO: 1335234 - RNA, 18 nt, Human
ucccaaacacacagccac

SEQ ID NO: 1335235 - RNA, 22 nt, Human
ucccaguccucaaacagcucgc

SEQ ID NO: 1335236 - RNA, 18 nt, Human
ugagcaggggaggagccg

SEQ ID NO: 1335237 - RNA, 23 nt, Human
ugcccagacaaacccugcucgga

SEQ ID NO: 1335238 - RNA, 21 nt, Human
uuugaaaaauccucuccaggu

SEQ ID NO: 1335239 - RNA, 20 nt, Human
aaggggccaggagcagguca

SEQ ID NO: 1335240 - RNA, 21 nt, Human
aggggccaggagcaggucagg

SEQ ID NO: 1335241 - RNA, 21 nt, Human
caaacccagaggcaaaagggg

SEQ ID NO: 1335242 - RNA, 24 nt, Human
caccaagaagaggcccuccgcucc

SEQ ID NO: 1335243 - RNA, 20 nt, Human
cacgcucccucccagccuag

SEQ ID NO: 1335244 - RNA, 20 nt, Human
cagggcaccaagaagaggcc

SEQ ID NO: 1335245 - RNA, 27 nt, Human
cccauggccagaaacagcccggccagc

SEQ ID NO: 1335246 - RNA, 20 nt, Human
ccggccagccaaggggccag

SEQ ID NO: 1335247 - RNA, 24 nt, Human
ccggccagccaaggggccaggagc

SEQ ID NO: 1335248 - RNA, 23 nt, Human
cgacccauggccagaaacagccc

SEQ ID NO: 1335249 - RNA, 21 nt, Human
cggcgggagcgacccauggcc

SEQ ID NO: 1335250 - RNA, 24 nt, Human
ggcgggagcgacccauggccagaa

SEQ ID NO: 1335251 - RNA, 21 nt, Human
ucccagccuaguccuugcguc

SEQ ID NO: 1335252 - RNA, 24 nt, Human
uccccaaacccagaggcaaaaggg

SEQ ID NO: 1335253 - RNA, 23 nt, Human
uccuugcgucacuguccaugggc

SEQ ID NO: 1335254 - RNA, 21 nt, Human
uggccagaaacagcccggcca

SEQ ID NO: 1335255 - RNA, 24 nt, Human
uugggggcagggcaccaagaagag

SEQ ID NO: 1335256 - RNA, 18 nt, Human
uuuuuuuuuuucucuuug

SEQ ID NO: 1335257 - RNA, 20 nt, Human
uuuuuuuuuuuuuuuucucu

SEQ ID NO: 1335258 - RNA, 23 nt, Human
uuuuuuuuuuuuuuuuucucuuu

SEQ ID NO: 1335259 - RNA, 22 nt, Human
aaaagggagaguuuaaagagaa

SEQ ID NO: 1335260 - RNA, 21 nt, Human
aagggagaguuuaaagagaaa

SEQ ID NO: 1335261 - RNA, 20 nt, Human
acaauggcuaaucuaugagg

SEQ ID NO: 1335262 - RNA, 19 nt, Human
acacacaggcugacggcug

SEQ ID NO: 1335263 - RNA, 22 nt, Human
agcaacggcgacagcaacggaa

SEQ ID NO: 1335264 - RNA, 21 nt, Human
caacuaaugcuaaaauuauaa

SEQ ID NO: 1335265 - RNA, 18 nt, Human
cacacaggcugacggcug

SEQ ID NO: 1335266 - RNA, 23 nt, Human
cauaugcaaagguacacacagug

SEQ ID NO: 1335267 - RNA, 23 nt, Human
caugacuaaaucaacauuuucuc

SEQ ID NO: 1335268 - RNA, 23 nt, Human
ccuuuuauuuugaagcauucacu

SEQ ID NO: 1335269 - RNA, 21 nt, Human
cgacagcaacggcgacagcaa

SEQ ID NO: 1335270 - RNA, 23 nt, Human
cuagaaaauaguuggaaaaauag

SEQ ID NO: 1335271 - RNA, 20 nt, Human
gcccccacaguacaagggcu

SEQ ID NO: 1335272 - RNA, 24 nt, Human
uaaaaugcucuauuuugcuuugag

SEQ ID NO: 1335273 - RNA, 20 nt, Human
uaguaaacaaaaaccaauuu

SEQ ID NO: 1335274 - RNA, 25 nt, Human
uauaacuagaaaauaguuggaaaaa

SEQ ID NO: 1335275 - RNA, 27 nt, Human
ucacaaagcaggccugugccaaggcaa

SEQ ID NO: 1335276 - RNA, 18 nt, Human
uccuccagugaaaagccc

SEQ ID NO: 1335277 - RNA, 27 nt, Human
ucgacagcaacggcgacagcaacggaa

SEQ ID NO: 1335278 - RNA, 19 nt, Human
ugaaggaaauacaccaaaa

SEQ ID NO: 1335279 - RNA, 22 nt, Human
uggaaagcaauugugcaugcaa

SEQ ID NO: 1335280 - RNA, 19 nt, Human
ugugccaaggcaaaaacuc

SEQ ID NO: 1335281 - RNA, 21 nt, Human
uguuuagucuaccuuuuucuc

SEQ ID NO: 1335282 - RNA, 23 nt, Human
uucuauaguauuuauguauugcu

SEQ ID NO: 1335283 - RNA, 24 nt, Human
uucucauaguaaacaaaaaccaau

SEQ ID NO: 1335284 - RNA, 22 nt, Human
uugaaaauaguuggaaaaauag

SEQ ID NO: 1335285 - RNA, 23 nt, Human
uuuuaaaaauuccuuucugcauu

SEQ ID NO: 1335286 - RNA, 23 nt, Human
agccuuggcugaucccagggcca

SEQ ID NO: 1335287 - RNA, 19 nt, Human
aucgcacuacucccucugc

SEQ ID NO: 1335288 - RNA, 24 nt, Human
cacuuuauucccugaaguuaggag

SEQ ID NO: 1335289 - RNA, 20 nt, Human
cagcaaacucuuuauccuuc

SEQ ID NO: 1335290 - RNA, 18 nt, Human
ccagggcucggggccuuc

SEQ ID NO: 1335291 - RNA, 26 nt, Human
cccccgcgcgcaggaucgcacuacuc

SEQ ID NO: 1335292 - RNA, 29 nt, Human
cccgccuugcccuccagcuaguucccccu

SEQ ID NO: 1335293 - RNA, 18 nt, Human
ccuuggcugaucccaggg

SEQ ID NO: 1335294 - RNA, 19 nt, Human
cuuucaggcacacuucugg

SEQ ID NO: 1335295 - RNA, 23 nt, Human
gccauuuguaugcucccuuugca

SEQ ID NO: 1335296 - RNA, 22 nt, Human
gucugggcuuccagggcucggg

SEQ ID NO: 1335297 - RNA, 23 nt, Human
uaggacaauauuccccaccuguu

SEQ ID NO: 1335298 - RNA, 18 nt, Human
ucacagacugccauuugu

SEQ ID NO: 1335299 - RNA, 19 nt, Human
ucccagggccaccagccgc

SEQ ID NO: 1335300 - RNA, 19 nt, Human
ucccccgcgcgcaggaucg

SEQ ID NO: 1335301 - RNA, 23 nt, Human
ucgcacuacucccucugcagucu

SEQ ID NO: 1335302 - RNA, 19 nt, Human
ugcccagcagccaucauac

SEQ ID NO: 1335303 - RNA, 18 nt, Human
uggcccccugggcccacu

SEQ ID NO: 1335304 - RNA, 19 nt, Human
uggcccccugggcccacuu

SEQ ID NO: 1335305 - RNA, 18 nt, Human
uguucccgccuugcccuc

SEQ ID NO: 1335306 - RNA, 23 nt, Human
uucaguguuuucagcaaacucuu

SEQ ID NO: 1335307 - RNA, 20 nt, Human
uuccagggcucggggccuuc

SEQ ID NO: 1335308 - RNA, 18 nt, Human
uuguaugcucccuuugca

SEQ ID NO: 1335309 - RNA, 22 nt, Human
uuguaugcucccuuugcaaccu

SEQ ID NO: 1335310 - RNA, 22 nt, Human
aaaaauaugcuuucuuuuauuc

SEQ ID NO: 1335311 - RNA, 27 nt, Human
aguuuccauuccccuuuccuagauggc

SEQ ID NO: 1335312 - RNA, 18 nt, Human
cagggccaaagugccagc

SEQ ID NO: 1335313 - RNA, 22 nt, Human
ccgaugccugcuugcggccaaa

SEQ ID NO: 1335314 - RNA, 23 nt, Human
ccugaaauuuaaacaguaaccau

SEQ ID NO: 1335315 - RNA, 22 nt, Human
cugaaauuuaaacaguaaccau

SEQ ID NO: 1335316 - RNA, 19 nt, Human
cugugcgcugcuuuguccu

SEQ ID NO: 1335317 - RNA, 18 nt, Human
gcggccaaagcuccuuuc

SEQ ID NO: 1335318 - RNA, 21 nt, Human
gggaaggaagccugugcaauu

SEQ ID NO: 1335319 - RNA, 19 nt, Human
gggaauguauucugccuug

SEQ ID NO: 1335320 - RNA, 25 nt, Human
uaaagaugagccccgcauucucucc

SEQ ID NO: 1335321 - RNA, 22 nt, Human
uaggcccaguucuguuaaagau

SEQ ID NO: 1335322 - RNA, 23 nt, Human
ucagaugggacccgaugccugcu

SEQ ID NO: 1335323 - RNA, 25 nt, Human
ucaguuaguuuacuuguccugaaau

SEQ ID NO: 1335324 - RNA, 26 nt, Human
ucaguuaguuuacuuguccugaaauu

SEQ ID NO: 1335325 - RNA, 18 nt, Human
ucauuggcagggccaaag

SEQ ID NO: 1335326 - RNA, 21 nt, Human
ucucaguuuccauuccccuuu

SEQ ID NO: 1335327 - RNA, 21 nt, Human
ucuccaaaugacaccaggccc

SEQ ID NO: 1335328 - RNA, 19 nt, Human
ugagcuguaaagagauugg

SEQ ID NO: 1335329 - RNA, 21 nt, Human
ugaugucagaggaauauguuc

SEQ ID NO: 1335330 - RNA, 19 nt, Human
uggcgaucacgcugguguc

SEQ ID NO: 1335331 - RNA, 19 nt, Human
ugggaauguauucugccuu

SEQ ID NO: 1335332 - RNA, 21 nt, Human
uguccuggggaaggaagccug

SEQ ID NO: 1335333 - RNA, 18 nt, Human
ccgccgccgccgccucgg

SEQ ID NO: 1335334 - RNA, 26 nt, Human
uaccgccgccgccgccucgggccccu

SEQ ID NO: 1335335 - RNA, 21 nt, Human
ucccaauguacaauuuucacc

SEQ ID NO: 1335336 - RNA, 26 nt, Human
ucgccggcuuuauaccgccgccgccg

SEQ ID NO: 1335337 - RNA, 25 nt, Human
aaggccagaggcugcacuggaggcc

SEQ ID NO: 1335338 - RNA, 18 nt, Human
aaguggccuccaggaggg

SEQ ID NO: 1335339 - RNA, 23 nt, Human
accuggggccagcugugggcacu

SEQ ID NO: 1335340 - RNA, 21 nt, Human
acuuguggccauggccuccuc

SEQ ID NO: 1335341 - RNA, 18 nt, Human
aggaggagacgggauuga

SEQ ID NO: 1335342 - RNA, 20 nt, Human
aggaggagacgggauugaug

SEQ ID NO: 1335343 - RNA, 22 nt, Human
aggcaggaggagacgggauuga

SEQ ID NO: 1335344 - RNA, 19 nt, Human
auccagcagccucccagca

SEQ ID NO: 1335345 - RNA, 21 nt, Human
cacaggcugggaggcgcugga

SEQ ID NO: 1335346 - RNA, 18 nt, Human
cagugggguucaguuugg

SEQ ID NO: 1335347 - RNA, 18 nt, Human
ccagcagccucccagcag

SEQ ID NO: 1335348 - RNA, 22 nt, Human
ccagcagccucccagcagcucc

SEQ ID NO: 1335349 - RNA, 19 nt, Human
cccgaagaaccuccucuuc

SEQ ID NO: 1335350 - RNA, 26 nt, Human
cccgaagaaccuccucuuccgcagcc

SEQ ID NO: 1335351 - RNA, 21 nt, Human
cccgcuuuucuucugcacggg

SEQ ID NO: 1335352 - RNA, 21 nt, Human
cccuggugagaccaaaggcuc

SEQ ID NO: 1335353 - RNA, 23 nt, Human
ccguucccucccgcuuuucuucu

SEQ ID NO: 1335354 - RNA, 24 nt, Human
ccugccagcaacaggaagcccugg

SEQ ID NO: 1335355 - RNA, 19 nt, Human
cgcugggugucccuaugca

SEQ ID NO: 1335356 - RNA, 25 nt, Human
cggagauuauucugccuuggucugg

SEQ ID NO: 1335357 - RNA, 20 nt, Human
cugugguuggccugguguuu

SEQ ID NO: 1335358 - RNA, 23 nt, Human
gagcccacuggugagcuucacug

SEQ ID NO: 1335359 - RNA, 23 nt, Human
gagcuucacugucaccuggcccu

SEQ ID NO: 1335360 - RNA, 21 nt, Human
gauugcaggagaggaggcagg

SEQ ID NO: 1335361 - RNA, 20 nt, Human
gcagccucccagcagcuccg

SEQ ID NO: 1335362 - RNA, 22 nt, Human
gcaggaggagacgggaggucgc

SEQ ID NO: 1335363 - RNA, 22 nt, Human
gccuggggcugguggcggcuuc

SEQ ID NO: 1335364 - RNA, 22 nt, Human
ggccagaggcugcacuggaggc

SEQ ID NO: 1335365 - RNA, 20 nt, Human
ggccauggccuccucggggc

SEQ ID NO: 1335366 - RNA, 22 nt, Human
ggcuguagcgacgcuggcaacc

SEQ ID NO: 1335367 - RNA, 18 nt, Human
gggcacaggcugggaggc

SEQ ID NO: 1335368 - RNA, 22 nt, Human
gggcuuccauugucuacugggu

SEQ ID NO: 1335369 - RNA, 18 nt, Human
gggggccuggggcuggug

SEQ ID NO: 1335370 - RNA, 21 nt, Human
gucccgaagaaccuccucuuc

SEQ ID NO: 1335371 - RNA, 20 nt, Human
uaaaaauccccuucugauau

SEQ ID NO: 1335372 - RNA, 21 nt, Human
uaaaaauccccuucugauaug

SEQ ID NO: 1335373 - RNA, 18 nt, Human
uaaaauaaggccagaggc

SEQ ID NO: 1335374 - RNA, 19 nt, Human
uaaaauaaggccagaggcu

SEQ ID NO: 1335375 - RNA, 22 nt, Human
uaaaauaaggccagaggcugca

SEQ ID NO: 1335376 - RNA, 18 nt, Human
uaaaggagcccacuggug

SEQ ID NO: 1335377 - RNA, 18 nt, Human
ucaccuggcccugcuggc

SEQ ID NO: 1335378 - RNA, 19 nt, Human
ucauccggagauuauucug

SEQ ID NO: 1335379 - RNA, 25 nt, Human
ucuacugggucuguccacaccccag

SEQ ID NO: 1335380 - RNA, 21 nt, Human
ucuccaaguggccuccaggaa

SEQ ID NO: 1335381 - RNA, 19 nt, Human
ucugccuuggucugggcug

SEQ ID NO: 1335382 - RNA, 19 nt, Human
ugagcaagcagugggguuc

SEQ ID NO: 1335383 - RNA, 21 nt, Human
ugccuuggucugggcuguagc

SEQ ID NO: 1335384 - RNA, 20 nt, Human
ugccuugugguccuuucccc

SEQ ID NO: 1335385 - RNA, 24 nt, Human
ugccuugugguccuuuccccuggc

SEQ ID NO: 1335386 - RNA, 21 nt, Human
uggcaaccuggggccagcugu

SEQ ID NO: 1335387 - RNA, 18 nt, Human
ugggaccaaguagugcca

SEQ ID NO: 1335388 - RNA, 18 nt, Human
ugggaggcgcuggacggc

SEQ ID NO: 1335389 - RNA, 19 nt, Human
ugggaggcgcuggacggca

SEQ ID NO: 1335390 - RNA, 24 nt, Human
ugggcacuuguggccauggccucc

SEQ ID NO: 1335391 - RNA, 20 nt, Human
ugggguucaguuugggacca

SEQ ID NO: 1335392 - RNA, 21 nt, Human
uuuuaaaaauccccuucugau

SEQ ID NO: 1335393 - RNA, 18 nt, Human
agacagacagcucccagg

SEQ ID NO: 1335394 - RNA, 21 nt, Human
caguggcagcaggagcuccuu

SEQ ID NO: 1335395 - RNA, 24 nt, Human
ccagugccuuaugguggagccaag

SEQ ID NO: 1335396 - RNA, 20 nt, Human
cuaaugguggacgucuuccu

SEQ ID NO: 1335397 - RNA, 21 nt, Human
cucugaaaggcacuugugagg

SEQ ID NO: 1335398 - RNA, 24 nt, Human
gcaguggcagcaggagcuccuuuu

SEQ ID NO: 1335399 - RNA, 22 nt, Human
ggaaagacagacagcucccagg

SEQ ID NO: 1335400 - RNA, 25 nt, Human
ugauggcauuagguuuauuuugugg

SEQ ID NO: 1335401 - RNA, 23 nt, Human
uggagccaaggguuaagcagaug

SEQ ID NO: 1335402 - RNA, 21 nt, Human
uggcuaaugguggacgucuuc

SEQ ID NO: 1335403 - RNA, 22 nt, Human
ugggaaagcagaauuggggcuc

SEQ ID NO: 1335404 - RNA, 18 nt, Human
uuuuuuuuuuuuuuuuug

SEQ ID NO: 1335405 - RNA, 21 nt, Human
uuuuuuuuuuuuuuuuugccu

SEQ ID NO: 1335406 - RNA, 24 nt, Human
uuuuuuuuuuuuuuuuuugccuga

SEQ ID NO: 1335407 - RNA, 19 nt, Human
agaauaucuguccucugcc

SEQ ID NO: 1335408 - RNA, 22 nt, Human
agucauggauuccaccagagga

SEQ ID NO: 1335409 - RNA, 18 nt, Human
caccacaccccuccaucc

SEQ ID NO: 1335410 - RNA, 21 nt, Human
caugccaggguuuguauguga

SEQ ID NO: 1335411 - RNA, 22 nt, Human
cccuggggccuccaaagguggg

SEQ ID NO: 1335412 - RNA, 27 nt, Human
ccuuugcuccuggggccucccuggggc

SEQ ID NO: 1335413 - RNA, 24 nt, Human
cuccuguguuccaggaacgagggc

SEQ ID NO: 1335414 - RNA, 22 nt, Human
gaagaagccagucauagcuggg

SEQ ID NO: 1335415 - RNA, 22 nt, Human
gaggagcuguauaagggguugg

SEQ ID NO: 1335416 - RNA, 20 nt, Human
gcuccuggggccucccuggg

SEQ ID NO: 1335417 - RNA, 21 nt, Human
ggaccuuugcuccuggggccu

SEQ ID NO: 1335418 - RNA, 23 nt, Human
gggcagucucuccaggagcucug

SEQ ID NO: 1335419 - RNA, 19 nt, Human
uccaggagcucuguggggg

SEQ ID NO: 1335420 - RNA, 23 nt, Human
uccaggagcucuguggggggcgc

SEQ ID NO: 1335421 - RNA, 22 nt, Human
ucccuggggccuccaaaggugg

SEQ ID NO: 1335422 - RNA, 24 nt, Human
uccucugcccccuugaagaagcca

SEQ ID NO: 1335423 - RNA, 23 nt, Human
uggcaaacgugaauggcaggcuc

SEQ ID NO: 1335424 - RNA, 23 nt, Human
uggcaggcucuggggacagccau

SEQ ID NO: 1335425 - RNA, 21 nt, Human
uguccucugcccccuugaaga

SEQ ID NO: 1335426 - RNA, 18 nt, Human
uugaagaagccagucaua

SEQ ID NO: 1335427 - RNA, 26 nt, Human
uugauagaugauaagcugguuuuucu

SEQ ID NO: 1335428 - RNA, 23 nt, Human
uuguagguuaaacauaugaguca

SEQ ID NO: 1335429 - RNA, 18 nt, Human
agaggucuugagaaugaa

SEQ ID NO: 1335430 - RNA, 23 nt, Human
augguaaucaagcuuuguacauc

SEQ ID NO: 1335431 - RNA, 21 nt, Human
caaaugaugaccuaaauuucc

SEQ ID NO: 1335432 - RNA, 23 nt, Human
cacuacaaaaaggagagcaggaa

SEQ ID NO: 1335433 - RNA, 19 nt, Human
cagaaaauaaaacauccca

SEQ ID NO: 1335434 - RNA, 21 nt, Human
caucagaaaauaaaacauccc

SEQ ID NO: 1335435 - RNA, 22 nt, Human
cucaucacuacaaaaaggagag

SEQ ID NO: 1335436 - RNA, 23 nt, Human
uaaaaagagauuaacccugaaaa

SEQ ID NO: 1335437 - RNA, 21 nt, Human
uaagguacacucucuaaagug

SEQ ID NO: 1335438 - RNA, 19 nt, Human
uacaguaguaauuaaggua

SEQ ID NO: 1335439 - RNA, 20 nt, Human
uacaguaguaauuaagguac

SEQ ID NO: 1335440 - RNA, 18 nt, Human
uagaaagacuugguaaug

SEQ ID NO: 1335441 - RNA, 22 nt, Human
uaguaauuaagguacacucucu

SEQ ID NO: 1335442 - RNA, 28 nt, Human
uccgaaaaucaaaugaugaccuaaauuu

SEQ ID NO: 1335443 - RNA, 20 nt, Human
ugaccuaaauuucccuuaau

SEQ ID NO: 1335444 - RNA, 24 nt, Human
ugaccuaaauuucccuuaauuugc

SEQ ID NO: 1335445 - RNA, 22 nt, Human
ugaguccuaguccauucuguuu

SEQ ID NO: 1335446 - RNA, 21 nt, Human
ugaugaccuaaauuucccuua

SEQ ID NO: 1335447 - RNA, 24 nt, Human
ugcccagccucacaauuccuuaca

SEQ ID NO: 1335448 - RNA, 25 nt, Human
uugguaaugauggucaguuccuuuu

SEQ ID NO: 1335449 - RNA, 18 nt, Human
aaaaacaacaaaagaaca

SEQ ID NO: 1335450 - RNA, 20 nt, Human
aaaaagauugacuugccucc

SEQ ID NO: 1335451 - RNA, 20 nt, Human
aaacagucuacaacaucuca

SEQ ID NO: 1335452 - RNA, 26 nt, Human
aaacccgcaacaaaauagaccccggg

SEQ ID NO: 1335453 - RNA, 23 nt, Human
aaacuggcaaaaacaacaaaaga

SEQ ID NO: 1335454 - RNA, 19 nt, Human
aaagcagcauuuuugaugu

SEQ ID NO: 1335455 - RNA, 21 nt, Human
aaagcagcauuuuugaugugg

SEQ ID NO: 1335456 - RNA, 24 nt, Human
aacccgcaacaaaauagaggaaag

SEQ ID NO: 1335457 - RNA, 23 nt, Human
aacccuaauuucccuaccucaac

SEQ ID NO: 1335458 - RNA, 25 nt, Human
aaccucaaagcuauccaucuguuuu

SEQ ID NO: 1335459 - RNA, 21 nt, Human
aacuuauagagagaaaauucc

SEQ ID NO: 1335460 - RNA, 23 nt, Human
aaugacagaaacuuauagagaga

SEQ ID NO: 1335461 - RNA, 18 nt, Human
aauugccaaaaaucaaua

SEQ ID NO: 1335462 - RNA, 21 nt, Human
acccgcaacaaaauagacccc

SEQ ID NO: 1335463 - RNA, 24 nt, Human
acccgcaacaaaauagaccccggc

SEQ ID NO: 1335464 - RNA, 20 nt, Human
acugcccuaaacuggcaaaa

SEQ ID NO: 1335465 - RNA, 18 nt, Human
agccauuaucuucaugcu

SEQ ID NO: 1335466 - RNA, 19 nt, Human
auccaucuguuuuaguggu

SEQ ID NO: 1335467 - RNA, 25 nt, Human
caaaauagaccccggcugucccguc

SEQ ID NO: 1335468 - RNA, 19 nt, Human
caacaaaauagaccccggc

SEQ ID NO: 1335469 - RNA, 20 nt, Human
ccaacuucuuaagcccaugu

SEQ ID NO: 1335470 - RNA, 23 nt, Human
cccauguauggaaacagucuaca

SEQ ID NO: 1335471 - RNA, 27 nt, Human
cccgucagcugccaaccuggcugucuc

SEQ ID NO: 1335472 - RNA, 21 nt, Human
cccuggauuugcugaaaaccc

SEQ ID NO: 1335473 - RNA, 22 nt, Human
ccgcaacaaaauagaccccggc

SEQ ID NO: 1335474 - RNA, 20 nt, Human
ccgucagcugccaaccuggc

SEQ ID NO: 1335475 - RNA, 20 nt, Human
ccuccagaccagcccuggau

SEQ ID NO: 1335476 - RNA, 22 nt, Human
ccucuugaaaucuggaggcaaa

SEQ ID NO: 1335477 - RNA, 25 nt, Human
cuaauauucuuuuuaauggugaucu

SEQ ID NO: 1335478 - RNA, 23 nt, Human
cuccagaccagcccuggauuugc

SEQ ID NO: 1335479 - RNA, 24 nt, Human
cuguccaacuucuuaagcccaugu

SEQ ID NO: 1335480 - RNA, 20 nt, Human
gacacuuaagguaacucugu

SEQ ID NO: 1335481 - RNA, 23 nt, Human
gccaaccuggcugucuccgccac

SEQ ID NO: 1335482 - RNA, 18 nt, Human
ggcaaaaacaacaaaaga

SEQ ID NO: 1335483 - RNA, 25 nt, Human
uaaaauuccaaauguaaaauugcca

SEQ ID NO: 1335484 - RNA, 22 nt, Human
uagagagaaaauuccuucucaa

SEQ ID NO: 1335485 - RNA, 19 nt, Human
uagugguuugagugagcac

SEQ ID NO: 1335486 - RNA, 22 nt, Human
uauuagccauuaucuucaugcu

SEQ ID NO: 1335487 - RNA, 21 nt, Human
ucauucucagaauacuucaaa

SEQ ID NO: 1335488 - RNA, 19 nt, Human
uccaacuucuuaagcccau

SEQ ID NO: 1335489 - RNA, 18 nt, Human
uccagugauaaacugagg

SEQ ID NO: 1335490 - RNA, 22 nt, Human
ucuaaaaccucaaagcuaucca

SEQ ID NO: 1335491 - RNA, 18 nt, Human
ucuuaagcccauguaugg

SEQ ID NO: 1335492 - RNA, 26 nt, Human
ugaaaacccgcaacaaaauagacccc

SEQ ID NO: 1335493 - RNA, 20 nt, Human
ugaaaauacuacagugccuc

SEQ ID NO: 1335494 - RNA, 18 nt, Human
ugauaaacugaacccuaa

SEQ ID NO: 1335495 - RNA, 23 nt, Human
ugauaaacugaacccuaauuucc

SEQ ID NO: 1335496 - RNA, 19 nt, Human
ugccaaaaaucaauaacaa

SEQ ID NO: 1335497 - RNA, 22 nt, Human
ugcccuaaacuggcaaaaacaa

SEQ ID NO: 1335498 - RNA, 24 nt, Human
uggcaaaaacaacaaaagaacaaa

SEQ ID NO: 1335499 - RNA, 22 nt, Human
uguccagugauaaacugaaccc

SEQ ID NO: 1335500 - RNA, 24 nt, Human
uguccagugauaaacugaacccua

SEQ ID NO: 1335501 - RNA, 25 nt, Human
ugugguaggaagauauuuaugacaa

SEQ ID NO: 1335502 - RNA, 20 nt, Human
uuaaaacuaaauuucuccuc

SEQ ID NO: 1335503 - RNA, 20 nt, Human
uucucagaauacuucaaaac

SEQ ID NO: 1335504 - RNA, 18 nt, Human
uuugaugugguaggaaga

SEQ ID NO: 1335505 - RNA, 24 nt, Human
uuuuuuuuuuuuuuugcacuugau

SEQ ID NO: 1335506 - RNA, 18 nt, Human
uuuuuuuuuuuuuuuuug

SEQ ID NO: 1335507 - RNA, 23 nt, Human
uuuuuuuuuuuuuuuuugcacuu

SEQ ID NO: 1335508 - RNA, 18 nt, Human
aaaagcgccuauccacgg

SEQ ID NO: 1335509 - RNA, 22 nt, Human
aacauugucguaaagaacuuuu

SEQ ID NO: 1335510 - RNA, 29 nt, Human
aagaucauuucagaugugccugaaaugag

SEQ ID NO: 1335511 - RNA, 23 nt, Human
aaugauauucaucguuguauaug

SEQ ID NO: 1335512 - RNA, 21 nt, Human
gaucauuucagaugugccuga

SEQ ID NO: 1335513 - RNA, 20 nt, Human
uaaagaacuuuucuggaacu

SEQ ID NO: 1335514 - RNA, 18 nt, Human
uaagaucauuucagaugu

SEQ ID NO: 1335515 - RNA, 19 nt, Human
uacagcagcgcuugcgaga

SEQ ID NO: 1335516 - RNA, 27 nt, Human
uacguagaaaaauaauuuuuaaacauu

SEQ ID NO: 1335517 - RNA, 22 nt, Human
uaggacaacaauuaauaaaagc

SEQ ID NO: 1335518 - RNA, 28 nt, Human
uaggacaacaauuaauaaaaggucaucc

SEQ ID NO: 1335519 - RNA, 20 nt, Human
uccacggcaaaaaugaaaga

SEQ ID NO: 1335520 - RNA, 22 nt, Human
ucugcuagggcacacugcuugg

SEQ ID NO: 1335521 - RNA, 21 nt, Human
ugaagucguuacagcagcgcu

SEQ ID NO: 1335522 - RNA, 19 nt, Human
ugacaaugucagaaauuuc

SEQ ID NO: 1335523 - RNA, 24 nt, Human
ugcugaaucagugacuccugaagu

SEQ ID NO: 1335524 - RNA, 23 nt, Human
uggaugaguuugcuuuuuccauu

SEQ ID NO: 1335525 - RNA, 22 nt, Human
uucacaaaguuaauagugcaga

SEQ ID NO: 1335526 - RNA, 21 nt, Human
uuguauaugacaaugucagaa

SEQ ID NO: 1335527 - RNA, 22 nt, Human
aacaaucaccacaaacuccggc

SEQ ID NO: 1335528 - RNA, 24 nt, Human
aaugugcagguggcaucccugagg

SEQ ID NO: 1335529 - RNA, 21 nt, Human
accacaaacuccggcgaccgc

SEQ ID NO: 1335530 - RNA, 20 nt, Human
acuaaaauagaagguaucug

SEQ ID NO: 1335531 - RNA, 23 nt, Human
acuacaccuacuagaaaaaaaga

SEQ ID NO: 1335532 - RNA, 22 nt, Human
agaauccccccaaaccaggacc

SEQ ID NO: 1335533 - RNA, 27 nt, Human
agaauccccccaaaccaggaccaguau

SEQ ID NO: 1335534 - RNA, 24 nt, Human
agcccuggccccggcccccggcgu

SEQ ID NO: 1335535 - RNA, 20 nt, Human
aggaggagauggcagccggg

SEQ ID NO: 1335536 - RNA, 18 nt, Human
aggaggaggaggaagagg

SEQ ID NO: 1335537 - RNA, 20 nt, Human
aggaggaggaggaagaggag

SEQ ID NO: 1335538 - RNA, 21 nt, Human
aggaggaggcggcggcccagg

SEQ ID NO: 1335539 - RNA, 22 nt, Human
aggaggaggcggcggcccagga

SEQ ID NO: 1335540 - RNA, 21 nt, Human
aggaggcggcggcccaggagg

SEQ ID NO: 1335541 - RNA, 21 nt, Human
aggaggcggcggcggcggcgg

SEQ ID NO: 1335542 - RNA, 19 nt, Human
aggcggcggcggcggcggc

SEQ ID NO: 1335543 - RNA, 19 nt, Human
aucgugguaaaggcuaggc

SEQ ID NO: 1335544 - RNA, 27 nt, Human
augaggaggcggcggcggcggcggcaa

SEQ ID NO: 1335545 - RNA, 23 nt, Human
augcaauuucuuuauuaaaaagc

SEQ ID NO: 1335546 - RNA, 31 nt, Human
auggcagccggggcgguggcggcggcagcaa

SEQ ID NO: 1335547 - RNA, 19 nt, Human
caacauggguaguaauuga

SEQ ID NO: 1335548 - RNA, 21 nt, Human
cagaauccccccaaaccagga

SEQ ID NO: 1335549 - RNA, 21 nt, Human
cagcccaggaggaggcggcag

SEQ ID NO: 1335550 - RNA, 21 nt, Human
cagccggggcgguggcggcgg

SEQ ID NO: 1335551 - RNA, 19 nt, Human
ccaggaggaggagauggca

SEQ ID NO: 1335552 - RNA, 21 nt, Human
cccacggcggccucaccgaag

SEQ ID NO: 1335553 - RNA, 22 nt, Human
cccacggcggccucaccgaagc

SEQ ID NO: 1335554 - RNA, 25 nt, Human
cccagccggggcugggagguccucc

SEQ ID NO: 1335555 - RNA, 18 nt, Human
cccagccggggcugguuc

SEQ ID NO: 1335556 - RNA, 18 nt, Human
ccccacggcccccucccc

SEQ ID NO: 1335557 - RNA, 21 nt, Human
cccccacggcccccuccccuc

SEQ ID NO: 1335558 - RNA, 24 nt, Human
ccccggcguccccgcugcugccca

SEQ ID NO: 1335559 - RNA, 18 nt, Human
cccggaaagcccuggccc

SEQ ID NO: 1335560 - RNA, 19 nt, Human
cccggaaagcccuggcccc

SEQ ID NO: 1335561 - RNA, 22 nt, Human
cccggaaagcccuggccccggc

SEQ ID NO: 1335562 - RNA, 18 nt, Human
cccggacagaguaugaga

SEQ ID NO: 1335563 - RNA, 19 nt, Human
cccuggccccggcccccgg

SEQ ID NO: 1335564 - RNA, 21 nt, Human
ccgagccgcccccacggcccc

SEQ ID NO: 1335565 - RNA, 23 nt, Human
ccgccggaagauggggcccacgg

SEQ ID NO: 1335566 - RNA, 21 nt, Human
ccgccuauggugcacgaggau

SEQ ID NO: 1335567 - RNA, 22 nt, Human
ccggcgaccgccggaagauggg

SEQ ID NO: 1335568 - RNA, 21 nt, Human
ccggggcgguggcggcggcuu

SEQ ID NO: 1335569 - RNA, 18 nt, Human
ccucccagcuggccuccc

SEQ ID NO: 1335570 - RNA, 19 nt, Human
ccugugccgccuauggugc

SEQ ID NO: 1335571 - RNA, 19 nt, Human
cgcugcugcccagccgggg

SEQ ID NO: 1335572 - RNA, 24 nt, Human
cggcccaggaggaggagauggcag

SEQ ID NO: 1335573 - RNA, 25 nt, Human
cggcggcagcaacaaucaccacaaa

SEQ ID NO: 1335574 - RNA, 22 nt, Human
cguccccgcugcugcccagccg

SEQ ID NO: 1335575 - RNA, 22 nt, Human
cugcugcccagccggggcugga

SEQ ID NO: 1335576 - RNA, 24 nt, Human
cuuuacauugucaucuuuuuugau

SEQ ID NO: 1335577 - RNA, 25 nt, Human
cuuuauuagcaacuaaaauagaagg

SEQ ID NO: 1335578 - RNA, 24 nt, Human
gaagaggaggaggcggcggcccag

SEQ ID NO: 1335579 - RNA, 21 nt, Human
gcccuggccccggcccccggc

SEQ ID NO: 1335580 - RNA, 18 nt, Human
gcggcagcggggagggga

SEQ ID NO: 1335581 - RNA, 21 nt, Human
gcggcagcggggaggggauca

SEQ ID NO: 1335582 - RNA, 18 nt, Human
gcggcggcccaggaggag

SEQ ID NO: 1335583 - RNA, 20 nt, Human
gcggcggcggcggcaggagc

SEQ ID NO: 1335584 - RNA, 23 nt, Human
gcggcggcggcggcggcaggagc

SEQ ID NO: 1335585 - RNA, 19 nt, Human
ggaaagcccuggccccggc

SEQ ID NO: 1335586 - RNA, 23 nt, Human
ggaaagcccuggccccggccccc

SEQ ID NO: 1335587 - RNA, 18 nt, Human
ggaagauggggcccacgg

SEQ ID NO: 1335588 - RNA, 18 nt, Human
ggaggaggaagaggagga

SEQ ID NO: 1335589 - RNA, 18 nt, Human
ggaggaggaggaagagga

SEQ ID NO: 1335590 - RNA, 18 nt, Human
ggaggcggcggcggcggc

SEQ ID NO: 1335591 - RNA, 23 nt, Human
uaggcugggaccccggacagagu

SEQ ID NO: 1335592 - RNA, 21 nt, Human
ucaaaaaacugucugccacaa

SEQ ID NO: 1335593 - RNA, 18 nt, Human
uccgccgagccgccccca

SEQ ID NO: 1335594 - RNA, 24 nt, Human
ucgugguaaaggcuaggcugggac

SEQ ID NO: 1335595 - RNA, 28 nt, Human
ugcccagccggggcugguuucgaggccg

SEQ ID NO: 1335596 - RNA, 19 nt, Human
uggcagccggggcgguggc

SEQ ID NO: 1335597 - RNA, 22 nt, Human
uggcagccggggcgguggcggc

SEQ ID NO: 1335598 - RNA, 24 nt, Human
uuuuuuuuuuuuuuuuuuuuuggg

SEQ ID NO: 1335599 - RNA, 24 nt, Human
aagcaaauaacauccaaugucaga

SEQ ID NO: 1335600 - RNA, 19 nt, Human
agggacccgcgcggccucc

SEQ ID NO: 1335601 - RNA, 22 nt, Human
auaagcaaauaacauccaaugu

SEQ ID NO: 1335602 - RNA, 25 nt, Human
caccaacauuaaaacaagagaaugc

SEQ ID NO: 1335603 - RNA, 22 nt, Human
cauauuuauuuucugacaccaa

SEQ ID NO: 1335604 - RNA, 19 nt, Human
cauuucacugugcccucau

SEQ ID NO: 1335605 - RNA, 19 nt, Human
cuuuaaaaauuaagaggaa

SEQ ID NO: 1335606 - RNA, 18 nt, Human
uaaaaaagaaauuaaagg

SEQ ID NO: 1335607 - RNA, 27 nt, Human
uaaaacaagagaaugcucauuccacaa

SEQ ID NO: 1335608 - RNA, 21 nt, Human
ucaccagcaucuuuaaaaauu

SEQ ID NO: 1335609 - RNA, 23 nt, Human
ucggcgcggcgcuuagccuggga

SEQ ID NO: 1335610 - RNA, 24 nt, Human
ucugacaccaacauuaaaacaaga

SEQ ID NO: 1335611 - RNA, 20 nt, Human
ugaggaaauuuucuaaugaa

SEQ ID NO: 1335612 - RNA, 18 nt, Human
aaacgaagccagaagggc

SEQ ID NO: 1335613 - RNA, 23 nt, Human
aaacgaagccagaagggcuugag

SEQ ID NO: 1335614 - RNA, 21 nt, Human
aacuggguguggggaguaugu

SEQ ID NO: 1335615 - RNA, 23 nt, Human
aagaccauaaacgaagccagaag

SEQ ID NO: 1335616 - RNA, 18 nt, Human
aagccucuauucaccccu

SEQ ID NO: 1335617 - RNA, 19 nt, Human
aagggcuugaggaagcaag

SEQ ID NO: 1335618 - RNA, 21 nt, Human
acagaguuucauggagaaacc

SEQ ID NO: 1335619 - RNA, 21 nt, Human
acaggagaggaagcacugcca

SEQ ID NO: 1335620 - RNA, 21 nt, Human
agaagggcuugaggaagcaag

SEQ ID NO: 1335621 - RNA, 22 nt, Human
agccaaagggaaaacauaaaua

SEQ ID NO: 1335622 - RNA, 19 nt, Human
agccucuauucaccccuuc

SEQ ID NO: 1335623 - RNA, 18 nt, Human
aggaagcaagaguccuug

SEQ ID NO: 1335624 - RNA, 18 nt, Human
aucucuuucuuugcucca

SEQ ID NO: 1335625 - RNA, 18 nt, Human
augcugccccacccaguc

SEQ ID NO: 1335626 - RNA, 23 nt, Human
cacaagcauggcaggccuuccug

SEQ ID NO: 1335627 - RNA, 23 nt, Human
caggggauuucuccuccaagucc

SEQ ID NO: 1335628 - RNA, 18 nt, Human
ccagucacagccaaaggg

SEQ ID NO: 1335629 - RNA, 21 nt, Human
ccccacccagucacagccaaa

SEQ ID NO: 1335630 - RNA, 22 nt, Human
ccuugggggaaaauucuuagcg

SEQ ID NO: 1335631 - RNA, 18 nt, Human
cucuauucaccccuucuc

SEQ ID NO: 1335632 - RNA, 19 nt, Human
ggaaaaccauuuucccccu

SEQ ID NO: 1335633 - RNA, 23 nt, Human
ggggaguaugucagaggguuagu

SEQ ID NO: 1335634 - RNA, 21 nt, Human
guccuaugagaucucuuucuu

SEQ ID NO: 1335635 - RNA, 19 nt, Human
uaccccagcaucuuaccuu

SEQ ID NO: 1335636 - RNA, 24 nt, Human
uagaugccucuuuaaaaucagaag

SEQ ID NO: 1335637 - RNA, 22 nt, Human
uaggucuaaccaagcugugcag

SEQ ID NO: 1335638 - RNA, 19 nt, Human
ucaccccuucucaaucccc

SEQ ID NO: 1335639 - RNA, 27 nt, Human
uccuaugagaucucuuucuuugcuccc

SEQ ID NO: 1335640 - RNA, 20 nt, Human
ucucaagccucuauucaccc

SEQ ID NO: 1335641 - RNA, 21 nt, Human
ucucaagccucuauucacccc

SEQ ID NO: 1335642 - RNA, 21 nt, Human
ugccccacccagucacagcca

SEQ ID NO: 1335643 - RNA, 22 nt, Human
uggaaagagccuggaauugaca

SEQ ID NO: 1335644 - RNA, 18 nt, Human
ugugguuauggaaagagc

SEQ ID NO: 1335645 - RNA, 24 nt, Human
uuaaagguuucuccuuaggacuag

SEQ ID NO: 1335646 - RNA, 21 nt, Human
uucaccccuucucaaucccca

SEQ ID NO: 1335647 - RNA, 18 nt, Human
uugacaggagaggaagca

SEQ ID NO: 1335648 - RNA, 21 nt, Human
uuguucaauauugucuucaau

SEQ ID NO: 1335649 - RNA, 18 nt, Human
aagaagcacagaccagcu

SEQ ID NO: 1335650 - RNA, 19 nt, Human
aagauugcgacuguccugg

SEQ ID NO: 1335651 - RNA, 27 nt, Human
auccugugauauccaugucucucagag

SEQ ID NO: 1335652 - RNA, 22 nt, Human
caaaauacugcuuugaauugac

SEQ ID NO: 1335653 - RNA, 19 nt, Human
cacugaaaacagacuaagc

SEQ ID NO: 1335654 - RNA, 22 nt, Human
cagcuaagaagcgcgucaacac

SEQ ID NO: 1335655 - RNA, 24 nt, Human
ccuuaagucacacucugaauucau

SEQ ID NO: 1335656 - RNA, 19 nt, Human
cuccauggccaugugaaac

SEQ ID NO: 1335657 - RNA, 23 nt, Human
cugguaagacuaagcaaaggaag

SEQ ID NO: 1335658 - RNA, 23 nt, Human
cuuuuucuucuugggcacauucu

SEQ ID NO: 1335659 - RNA, 20 nt, Human
uauggaagaagcacagacca

SEQ ID NO: 1335660 - RNA, 21 nt, Human
uccacugaaaacagacuaagc

SEQ ID NO: 1335661 - RNA, 24 nt, Human
uccauggccaugugaaaccggggc

SEQ ID NO: 1335662 - RNA, 24 nt, Human
uccauggccaugugaaacuuaaaa

SEQ ID NO: 1335663 - RNA, 22 nt, Human
ucuccauggccaugugaaacuu

SEQ ID NO: 1335664 - RNA, 25 nt, Human
ugaaacuuaaaacaaagauugcgac

SEQ ID NO: 1335665 - RNA, 19 nt, Human
uuaaaacaaagauugcgac

SEQ ID NO: 1335666 - RNA, 18 nt, Human
uuaauaguggaaauuuuu

SEQ ID NO: 1335667 - RNA, 23 nt, Human
uucccaguucaucaauuaauucc

SEQ ID NO: 1335668 - RNA, 21 nt, Human
uugggcacauucuccauggcc

SEQ ID NO: 1335669 - RNA, 22 nt, Human
uuuaaccaugaugacaaucacu

SEQ ID NO: 1335670 - RNA, 22 nt, Human
aaaacauauucuuccugucuga

SEQ ID NO: 1335671 - RNA, 19 nt, Human
aagaaaggcagaggaacug

SEQ ID NO: 1335672 - RNA, 22 nt, Human
acucaaaaaaagcauaaaacaa

SEQ ID NO: 1335673 - RNA, 21 nt, Human
agaacaucaauuuugaaaugu

SEQ ID NO: 1335674 - RNA, 20 nt, Human
auggaauaguuaaaucaagc

SEQ ID NO: 1335675 - RNA, 23 nt, Human
auguauggguuacaaagugauau

SEQ ID NO: 1335676 - RNA, 18 nt, Human
caagcuaguuaacauaug

SEQ ID NO: 1335677 - RNA, 18 nt, Human
cacacuguacaacagaac

SEQ ID NO: 1335678 - RNA, 22 nt, Human
cacuguacaacagaacucaaaa

SEQ ID NO: 1335679 - RNA, 25 nt, Human
cauaaaacauauucuuccugucuga

SEQ ID NO: 1335680 - RNA, 19 nt, Human
gucucucugauuccuuaaa

SEQ ID NO: 1335681 - RNA, 24 nt, Human
ucauuaauuuuuuuuuuuuuuuuu

SEQ ID NO: 1335682 - RNA, 20 nt, Human
ugagaacaucaauuuugaaa

SEQ ID NO: 1335683 - RNA, 22 nt, Human
ugaugagaacaucaauuuugaa

SEQ ID NO: 1335684 - RNA, 26 nt, Human
uguauaaauguauggguuacaaagug

SEQ ID NO: 1335685 - RNA, 20 nt, Human
uuaaguauaggcaccacacu

SEQ ID NO: 1335686 - RNA, 27 nt, Human
uuguaaauugacaauuuauaauuguau

SEQ ID NO: 1335687 - RNA, 18 nt, Human
uuuuuuuuuuuuuuuuug

SEQ ID NO: 1335688 - RNA, 20 nt, Human
aaauaaaagagggaauuuau

SEQ ID NO: 1335689 - RNA, 22 nt, Human
acagaguaugcuguaaccacaa

SEQ ID NO: 1335690 - RNA, 18 nt, Human
aggaagagaauauccuac

SEQ ID NO: 1335691 - RNA, 19 nt, Human
agguggugcuggcggaucg

SEQ ID NO: 1335692 - RNA, 21 nt, Human
cacgccuuucugaaggacaga

SEQ ID NO: 1335693 - RNA, 21 nt, Human
cagagguucuugcagagauuc

SEQ ID NO: 1335694 - RNA, 23 nt, Human
cccauagcgcgaggcgcggaggc

SEQ ID NO: 1335695 - RNA, 30 nt, Human
cugaaggacagaguaugcuguaaccacaaa

SEQ ID NO: 1335696 - RNA, 18 nt, Human
gcuagaaucacgccuuuc

SEQ ID NO: 1335697 - RNA, 24 nt, Human
ggcgcggaggcgaagcaggaagga

SEQ ID NO: 1335698 - RNA, 21 nt, Human
aaaacaaaugaaaaacaaaaa

SEQ ID NO: 1335699 - RNA, 19 nt, Human
aaacaaaaaucuagcagag

SEQ ID NO: 1335700 - RNA, 20 nt, Human
aaacccagaaucagggacaa

SEQ ID NO: 1335701 - RNA, 26 nt, Human
aaaugaaaaacaaaaaucuagcagag

SEQ ID NO: 1335702 - RNA, 24 nt, Human
aagcauuuaaaacugucagacuuu

SEQ ID NO: 1335703 - RNA, 19 nt, Human
agcagagucccucugcccc

SEQ ID NO: 1335704 - RNA, 21 nt, Human
agcagagucccucugccccuu

SEQ ID NO: 1335705 - RNA, 19 nt, Human
aggaaaagucaccccagcu

SEQ ID NO: 1335706 - RNA, 24 nt, Human
augaaaaacaaaaaucuagcagag

SEQ ID NO: 1335707 - RNA, 19 nt, Human
augaacaccaccuuuucca

SEQ ID NO: 1335708 - RNA, 24 nt, Human
caaaauuaaaaacaaaugaaaaac

SEQ ID NO: 1335709 - RNA, 24 nt, Human
caccccagcuuuucucccagaggc

SEQ ID NO: 1335710 - RNA, 23 nt, Human
ccagaggcuccacugggcuccaa

SEQ ID NO: 1335711 - RNA, 24 nt, Human
ccccuuguaggaaaagucacccca

SEQ ID NO: 1335712 - RNA, 25 nt, Human
cccucugccccuuguaggaaaaguc

SEQ ID NO: 1335713 - RNA, 21 nt, Human
guaaugauuuaacucccacag

SEQ ID NO: 1335714 - RNA, 18 nt, Human
uaaacccagaaucaggga

SEQ ID NO: 1335715 - RNA, 24 nt, Human
uaaugaacaccaccuuuuccagac

SEQ ID NO: 1335716 - RNA, 22 nt, Human
uagcagagucccucugccccuu

SEQ ID NO: 1335717 - RNA, 21 nt, Human
ucuagcagagucccucugccc

SEQ ID NO: 1335718 - RNA, 21 nt, Human
ugaaaaacaaaaaucuagcag

SEQ ID NO: 1335719 - RNA, 23 nt, Human
uuguaggaaaagucaccccagcu

SEQ ID NO: 1335720 - RNA, 21 nt, Human
aguuucuuccuuucuccaggg

SEQ ID NO: 1335721 - RNA, 18 nt, Human
auauuauuccuuaggcac

SEQ ID NO: 1335722 - RNA, 18 nt, Human
caaacacaagucuacaua

SEQ ID NO: 1335723 - RNA, 19 nt, Human
cacaaauccaaagccugcu

SEQ ID NO: 1335724 - RNA, 23 nt, Human
cacaaauccaaagccugcuaaua

SEQ ID NO: 1335725 - RNA, 18 nt, Human
uaagaaauaaacccauag

SEQ ID NO: 1335726 - RNA, 22 nt, Human
ucaccaaagaaucuuuaaucac

SEQ ID NO: 1335727 - RNA, 21 nt, Human
ucuacauaauucagcccagga

SEQ ID NO: 1335728 - RNA, 21 nt, Human
ugccgugguuggaaucguuga

SEQ ID NO: 1335729 - RNA, 18 nt, Human
ugucaaacacaagucuac

SEQ ID NO: 1335730 - RNA, 23 nt, Human
ugucuugguucuuuugcauauua

SEQ ID NO: 1335731 - RNA, 23 nt, Human
uguucuaagaaauaaacccauag

SEQ ID NO: 1335732 - RNA, 22 nt, Human
uuaucuguccaccacagacuua

SEQ ID NO: 1335733 - RNA, 20 nt, Human
uucuuuugcauauuauuccu

SEQ ID NO: 1335734 - RNA, 18 nt, Human
aaaaaagaaaaagcaaaa

SEQ ID NO: 1335735 - RNA, 19 nt, Human
aaaaagcaaaaggcugcug

SEQ ID NO: 1335736 - RNA, 18 nt, Human
aagaaaagcaaccaggag

SEQ ID NO: 1335737 - RNA, 24 nt, Human
aagcaaccaggaggagguaagagc

SEQ ID NO: 1335738 - RNA, 21 nt, Human
aaggaaaaggugaaaagcugg

SEQ ID NO: 1335739 - RNA, 21 nt, Human
aaggggagggaagaaaaaaga

SEQ ID NO: 1335740 - RNA, 18 nt, Human
aaggugaaaagcuggugu

SEQ ID NO: 1335741 - RNA, 21 nt, Human
acccuugauaaggggagggaa

SEQ ID NO: 1335742 - RNA, 21 nt, Human
accgccccggccccucccccc

SEQ ID NO: 1335743 - RNA, 21 nt, Human
agccgccaccgccccggcccc

SEQ ID NO: 1335744 - RNA, 18 nt, Human
agcuggcugguuccuucu

SEQ ID NO: 1335745 - RNA, 18 nt, Human
cagccgccaccgccccgg

SEQ ID NO: 1335746 - RNA, 21 nt, Human
cagccgccaccgccccggccc

SEQ ID NO: 1335747 - RNA, 21 nt, Human
cagguggcacaugacagauca

SEQ ID NO: 1335748 - RNA, 19 nt, Human
cauuuggaaaaacuggcag

SEQ ID NO: 1335749 - RNA, 22 nt, Human
cgccccggccccuccccccggc

SEQ ID NO: 1335750 - RNA, 25 nt, Human
cugaacaguaaggauggcucccuuc

SEQ ID NO: 1335751 - RNA, 20 nt, Human
gcagauaccagauggcagcu

SEQ ID NO: 1335752 - RNA, 21 nt, Human
gcugguuccuucucagccuga

SEQ ID NO: 1335753 - RNA, 23 nt, Human
ggcaagaaaagcaaccaggagga

SEQ ID NO: 1335754 - RNA, 27 nt, Human
ggcaagaaaagcaaccaggaggaggua

SEQ ID NO: 1335755 - RNA, 22 nt, Human
gggaagaaaaaagaaaaagcaa

SEQ ID NO: 1335756 - RNA, 28 nt, Human
guugcugucucugaacaguaaggauggc

SEQ ID NO: 1335757 - RNA, 19 nt, Human
uaaacuuggggugggggca

SEQ ID NO: 1335758 - RNA, 20 nt, Human
uccaguaccggccacagccg

SEQ ID NO: 1335759 - RNA, 22 nt, Human
uccugagucucaaggaaaaggu

SEQ ID NO: 1335760 - RNA, 26 nt, Human
uggcagcucuggguguccuuugaguu

SEQ ID NO: 1335761 - RNA, 18 nt, Human
uggccuguuuuuguuuuu

SEQ ID NO: 1335762 - RNA, 19 nt, Human
uggguaggguacaggucau

SEQ ID NO: 1335763 - RNA, 22 nt, Human
uuuuuuggccuguuuuuguuuu

SEQ ID NO: 1335764 - RNA, 23 nt, Human
uuuuuuuuggccuguuuuuguuu

SEQ ID NO: 1335765 - RNA, 26 nt, Human
uuuuuuuuuuuuuuuggccuguuuuu

SEQ ID NO: 1335766 - RNA, 21 nt, Human
aagcagaggccccgccugagc

SEQ ID NO: 1335767 - RNA, 28 nt, Human
acacauucccauccccaaagcagaggcc

SEQ ID NO: 1335768 - RNA, 22 nt, Human
acccaccucaucucccagcccu

SEQ ID NO: 1335769 - RNA, 22 nt, Human
agaaaaacacauucccaucccc

SEQ ID NO: 1335770 - RNA, 24 nt, Human
agaaaaacacauucccauccccaa

SEQ ID NO: 1335771 - RNA, 20 nt, Human
agaaggaggcagcugcuacc

SEQ ID NO: 1335772 - RNA, 20 nt, Human
agcacaucccuuccugaagc

SEQ ID NO: 1335773 - RNA, 23 nt, Human
agcauggagacgcucugagaaaa

SEQ ID NO: 1335774 - RNA, 23 nt, Human
agcggugguggcggcggcggcgg

SEQ ID NO: 1335775 - RNA, 26 nt, Human
agcuauaaaaacaaguuugggagaaa

SEQ ID NO: 1335776 - RNA, 26 nt, Human
agggcggcaguggcagcggugguggc

SEQ ID NO: 1335777 - RNA, 25 nt, Human
aguggcagcggugguggcggcggcg

SEQ ID NO: 1335778 - RNA, 21 nt, Human
cacaucccuuccugaagcccc

SEQ ID NO: 1335779 - RNA, 18 nt, Human
cauccagugucagcuaac

SEQ ID NO: 1335780 - RNA, 23 nt, Human
cauucccauccccaaagcagagg

SEQ ID NO: 1335781 - RNA, 19 nt, Human
ccagacccaccucaucucc

SEQ ID NO: 1335782 - RNA, 18 nt, Human
ccagggugcccagagcug

SEQ ID NO: 1335783 - RNA, 21 nt, Human
cccauccccaaagcagaggcc

SEQ ID NO: 1335784 - RNA, 25 nt, Human
ccugaagccccuuucuaaguauccu

SEQ ID NO: 1335785 - RNA, 19 nt, Human
cgaaggggauccaaggacc

SEQ ID NO: 1335786 - RNA, 21 nt, Human
cgcucugagaaaagauccaga

SEQ ID NO: 1335787 - RNA, 21 nt, Human
cggcggcggcggcgacaggag

SEQ ID NO: 1335788 - RNA, 23 nt, Human
cuaacacagaacuugccugaaga

SEQ ID NO: 1335789 - RNA, 19 nt, Human
cucaucucccagcccuuca

SEQ ID NO: 1335790 - RNA, 20 nt, Human
cugagaaaagauccagaccc

SEQ ID NO: 1335791 - RNA, 22 nt, Human
cuuccugaagccccuuucuaag

SEQ ID NO: 1335792 - RNA, 23 nt, Human
gaaaaacacauucccauccccaa

SEQ ID NO: 1335793 - RNA, 20 nt, Human
gaccaggguggccagggugc

SEQ ID NO: 1335794 - RNA, 22 nt, Human
gcagcggugguggcggcggcuu

SEQ ID NO: 1335795 - RNA, 20 nt, Human
gccccgccugagcuccccca

SEQ ID NO: 1335796 - RNA, 19 nt, Human
gcggcggcggcgacaggag

SEQ ID NO: 1335797 - RNA, 20 nt, Human
gcggugguggcggcggcggc

SEQ ID NO: 1335798 - RNA, 24 nt, Human
gcucacagagaaggaggcagcugc

SEQ ID NO: 1335799 - RNA, 21 nt, Human
ggaccaggguggccagggugc

SEQ ID NO: 1335800 - RNA, 23 nt, Human
ggcagcggugguggcggcggcgg

SEQ ID NO: 1335801 - RNA, 23 nt, Human
ggcggcgacaggagacaggacac

SEQ ID NO: 1335802 - RNA, 21 nt, Human
gguggccagggugcccagagc

SEQ ID NO: 1335803 - RNA, 19 nt, Human
gguuauuguaugcaaauuc

SEQ ID NO: 1335804 - RNA, 27 nt, Human
guggcagcggugguggcggcggcggcg

SEQ ID NO: 1335805 - RNA, 20 nt, Human
guggcggcggcggcggcgac

SEQ ID NO: 1335806 - RNA, 21 nt, Human
guggcggcggcggcggcgaca

SEQ ID NO: 1335807 - RNA, 20 nt, Human
gugguggcggcggcggcggc

SEQ ID NO: 1335808 - RNA, 20 nt, Human
gugguggcggcggcggcggc

SEQ ID NO: 1335809 - RNA, 26 nt, Human
uagaaaacggaaaugcaaccauagca

SEQ ID NO: 1335810 - RNA, 19 nt, Human
ucagcucacagagaaggag

SEQ ID NO: 1335811 - RNA, 20 nt, Human
uccuagagcgaggcuaggac

SEQ ID NO: 1335812 - RNA, 22 nt, Human
ugagaaaagauccagacccacc

SEQ ID NO: 1335813 - RNA, 23 nt, Human
ugagcucccccauccucagcauc

SEQ ID NO: 1335814 - RNA, 25 nt, Human
ugcccagagcuggggcaauucuuug

SEQ ID NO: 1335815 - RNA, 19 nt, Human
uggcggcggcggcggcgac

SEQ ID NO: 1335816 - RNA, 22 nt, Human
uggcggcggcggcggcgacagg

SEQ ID NO: 1335817 - RNA, 18 nt, Human
ugggagaaaaacacauuc

SEQ ID NO: 1335818 - RNA, 22 nt, Human
ugggagaaaaacacauucccau

SEQ ID NO: 1335819 - RNA, 18 nt, Human
ugguggcggcggcggcgg

SEQ ID NO: 1335820 - RNA, 19 nt, Human
ugguugguuauuguaugca

SEQ ID NO: 1335821 - RNA, 24 nt, Human
uucaagcagagcuauaaaaacaag

SEQ ID NO: 1335822 - RNA, 20 nt, Human
uuuguaaacuucaagguuuc

SEQ ID NO: 1335823 - RNA, 21 nt, Human
aaaggggaugaaacugaagga

SEQ ID NO: 1335824 - RNA, 24 nt, Human
aaggaaccaggacucuggaggaug

SEQ ID NO: 1335825 - RNA, 24 nt, Human
acccacgccgcccccuccuccgcc

SEQ ID NO: 1335826 - RNA, 18 nt, Human
aggaagaguuuugggucc

SEQ ID NO: 1335827 - RNA, 18 nt, Human
caacucugcaggcagaac

SEQ ID NO: 1335828 - RNA, 20 nt, Human
caggaagaguuuugggucca

SEQ ID NO: 1335829 - RNA, 23 nt, Human
cagggucaguacuacgcgggucc

SEQ ID NO: 1335830 - RNA, 21 nt, Human
ccccacccacgccgcccccuc

SEQ ID NO: 1335831 - RNA, 20 nt, Human
ccccuugccguacacuccuc

SEQ ID NO: 1335832 - RNA, 20 nt, Human
cccgcccccacccacgccgc

SEQ ID NO: 1335833 - RNA, 21 nt, Human
cccgcccccgcccccacccac

SEQ ID NO: 1335834 - RNA, 18 nt, Human
cccgcgcgccugccuucc

SEQ ID NO: 1335835 - RNA, 26 nt, Human
cccuccuccgccgccaccacccgagg

SEQ ID NO: 1335836 - RNA, 24 nt, Human
ccgaccucuggcgcguucuaaccc

SEQ ID NO: 1335837 - RNA, 18 nt, Human
ccgggguccagcagggag

SEQ ID NO: 1335838 - RNA, 22 nt, Human
ccgguuuaucgcggccuuccca

SEQ ID NO: 1335839 - RNA, 18 nt, Human
ccucacuaccuggguucg

SEQ ID NO: 1335840 - RNA, 21 nt, Human
ccuccgccgccacugccgcuc

SEQ ID NO: 1335841 - RNA, 18 nt, Human
ccucuuacggaagugaag

SEQ ID NO: 1335842 - RNA, 21 nt, Human
cgcccccgcccccacccacgc

SEQ ID NO: 1335843 - RNA, 20 nt, Human
cggggagcgagaacgcagug

SEQ ID NO: 1335844 - RNA, 21 nt, Human
cuccuccgccgccacugccgc

SEQ ID NO: 1335845 - RNA, 20 nt, Human
cugccacugugcucucuggg

SEQ ID NO: 1335846 - RNA, 18 nt, Human
gaagugaagccggaggug

SEQ ID NO: 1335847 - RNA, 25 nt, Human
gagaacgcagugaacagcaggaacu

SEQ ID NO: 1335848 - RNA, 21 nt, Human
gagcucagcucacaacgaggc

SEQ ID NO: 1335849 - RNA, 25 nt, Human
gcaucccgcccccgcccccacccac

SEQ ID NO: 1335850 - RNA, 19 nt, Human
gcgccccccagacgucaca

SEQ ID NO: 1335851 - RNA, 18 nt, Human
gcgcgcgccgaccucugg

SEQ ID NO: 1335852 - RNA, 18 nt, Human
ggaaggagagaaagggga

SEQ ID NO: 1335853 - RNA, 18 nt, Human
ggaaucacuggccucacu

SEQ ID NO: 1335854 - RNA, 18 nt, Human
ggggagcgagaacgcagu

SEQ ID NO: 1335855 - RNA, 18 nt, Human
guuuaucgcggccuuccc

SEQ ID NO: 1335856 - RNA, 24 nt, Human
uacacuccucuccucuuacggaag

SEQ ID NO: 1335857 - RNA, 24 nt, Human
ucagauauccaauuuuuaauuaau

SEQ ID NO: 1335858 - RNA, 24 nt, Human
uccauggaaggagagaaaggggau

SEQ ID NO: 1335859 - RNA, 21 nt, Human
uccgacgcugccuuuccggga

SEQ ID NO: 1335860 - RNA, 24 nt, Human
uccgccgccacugccgcuccucac

SEQ ID NO: 1335861 - RNA, 20 nt, Human
uccucuuacggaagugaagc

SEQ ID NO: 1335862 - RNA, 19 nt, Human
ucggggcggugcgggugug

SEQ ID NO: 1335863 - RNA, 18 nt, Human
ugaaacugaaggaaccag

SEQ ID NO: 1335864 - RNA, 20 nt, Human
ugacgccacaaaagcgugcc

SEQ ID NO: 1335865 - RNA, 18 nt, Human
ugccacugugcucucugg

SEQ ID NO: 1335866 - RNA, 20 nt, Human
ugccacugugcucucugggg

SEQ ID NO: 1335867 - RNA, 21 nt, Human
uggaagauuugaggcgccccc

SEQ ID NO: 1335868 - RNA, 21 nt, Human
uuacggaagugaagccggagg

SEQ ID NO: 1335869 - RNA, 26 nt, Human
aaaaaaaaaaauuaaaacucaaguua

SEQ ID NO: 1335870 - RNA, 18 nt, Human
aaaaugguuggaggagag

SEQ ID NO: 1335871 - RNA, 23 nt, Human
aagaaaagacagaauuucugaaa

SEQ ID NO: 1335872 - RNA, 19 nt, Human
aaguacugucucugugagg

SEQ ID NO: 1335873 - RNA, 19 nt, Human
aaguugguggcuuuauucu

SEQ ID NO: 1335874 - RNA, 20 nt, Human
agcacuugggaaguuccucc

SEQ ID NO: 1335875 - RNA, 21 nt, Human
aggauggggguaagggaggga

SEQ ID NO: 1335876 - RNA, 22 nt, Human
agguaaaaguugguggcuuuau

SEQ ID NO: 1335877 - RNA, 20 nt, Human
augguagacaagccgggcag

SEQ ID NO: 1335878 - RNA, 22 nt, Human
caaaaugguuggaggagagggu

SEQ ID NO: 1335879 - RNA, 20 nt, Human
cagauccaggcccuagaaaa

SEQ ID NO: 1335880 - RNA, 21 nt, Human
cagggggcagagaucucccuc

SEQ ID NO: 1335881 - RNA, 23 nt, Human
caugccccauccccagcuaggag

SEQ ID NO: 1335882 - RNA, 19 nt, Human
cccccgcgcuacaucccgc

SEQ ID NO: 1335883 - RNA, 18 nt, Human
ccucaauacccugcagcu

SEQ ID NO: 1335884 - RNA, 20 nt, Human
ccugcggccgagcggccccg

SEQ ID NO: 1335885 - RNA, 21 nt, Human
cuaggagaauggaaauggaaa

SEQ ID NO: 1335886 - RNA, 22 nt, Human
cucugccaagaaaaaaaaaaaa

SEQ ID NO: 1335887 - RNA, 24 nt, Human
gcaggcgggcucugcugggggccg

SEQ ID NO: 1335888 - RNA, 20 nt, Human
gcuagguaaaaguugguggc

SEQ ID NO: 1335889 - RNA, 19 nt, Human
ggauggggguaagggaggg

SEQ ID NO: 1335890 - RNA, 23 nt, Human
ggccugcggccgagcggccccga

SEQ ID NO: 1335891 - RNA, 26 nt, Human
uaaauaucuuuccccauuuaaauuuu

SEQ ID NO: 1335892 - RNA, 20 nt, Human
uacaaaguuaaggaugggga

SEQ ID NO: 1335893 - RNA, 22 nt, Human
uacugaauucucuaagagguuu

SEQ ID NO: 1335894 - RNA, 18 nt, Human
uagaaagaugggaccagg

SEQ ID NO: 1335895 - RNA, 19 nt, Human
uccagaagaaaagacagaa

SEQ ID NO: 1335896 - RNA, 23 nt, Human
uccccagcuaggagaauggaaau

SEQ ID NO: 1335897 - RNA, 29 nt, Human
ucucuaagagguuucuucuagaaacagag

SEQ ID NO: 1335898 - RNA, 23 nt, Human
ucuuugaaugccaagucucuucu

SEQ ID NO: 1335899 - RNA, 18 nt, Human
ugcaucaagauacauagc

SEQ ID NO: 1335900 - RNA, 26 nt, Human
ugccaagaaaaaaaaaaaauuaaaac

SEQ ID NO: 1335901 - RNA, 19 nt, Human
uggaaauggaaaguuuauu

SEQ ID NO: 1335902 - RNA, 25 nt, Human
uggaaauggaaaguuuauugcccag

SEQ ID NO: 1335903 - RNA, 24 nt, Human
ugugaaagugggcugaagcuuggu

SEQ ID NO: 1335904 - RNA, 22 nt, Human
uuagccgggcuagguaaaaguu

SEQ ID NO: 1335905 - RNA, 23 nt, Human
uugguggcuuuauucuuccugcu

SEQ ID NO: 1335906 - RNA, 27 nt, Human
uuuuuuuuuuuuuuuuuuuuuuugggg

SEQ ID NO: 1335907 - RNA, 18 nt, Human
aaacaaaagcugccacau

SEQ ID NO: 1335908 - RNA, 20 nt, Human
aagacauuacuggcucuuaa

SEQ ID NO: 1335909 - RNA, 25 nt, Human
aagcugccacauguuuauuaagaca

SEQ ID NO: 1335910 - RNA, 19 nt, Human
caaacaaaagcugccacau

SEQ ID NO: 1335911 - RNA, 22 nt, Human
caaauagucucuuuagaagucu

SEQ ID NO: 1335912 - RNA, 26 nt, Human
cgcuccgguucuccgguccaguuuca

SEQ ID NO: 1335913 - RNA, 18 nt, Human
uggacuucaaauagucuc

SEQ ID NO: 1335914 - RNA, 22 nt, Human
uggaucuauaaaucauuuucca

SEQ ID NO: 1335915 - RNA, 19 nt, Human
ugugacucaacuggacuuc

SEQ ID NO: 1335916 - RNA, 25 nt, Human
aaaaacagcaaaaagugccgguacc

SEQ ID NO: 1335917 - RNA, 19 nt, Human
aacacagacugggacgccg

SEQ ID NO: 1335918 - RNA, 21 nt, Human
acaguaacgauggugugcgca

SEQ ID NO: 1335919 - RNA, 22 nt, Human
aggaacacaucaaugaaaaaaa

SEQ ID NO: 1335920 - RNA, 21 nt, Human
agguagugaaaauugauagca

SEQ ID NO: 1335921 - RNA, 27 nt, Human
auacaaaaaguaaauuagaggggaccc

SEQ ID NO: 1335922 - RNA, 26 nt, Human
caaggcaagcggcaguuacugccccc

SEQ ID NO: 1335923 - RNA, 21 nt, Human
ccaaaaucaguguagauuggc

SEQ ID NO: 1335924 - RNA, 24 nt, Human
cgaaaaacuaggcaaaaacagcaa

SEQ ID NO: 1335925 - RNA, 21 nt, Human
cuacugcggcaaggcaagcgg

SEQ ID NO: 1335926 - RNA, 18 nt, Human
cuagucacagauauagaa

SEQ ID NO: 1335927 - RNA, 21 nt, Human
cuuccauguaaaaccuaguua

SEQ ID NO: 1335928 - RNA, 19 nt, Human
gaaaaacuaggcaaaaaca

SEQ ID NO: 1335929 - RNA, 27 nt, Human
gaaaaacuaggcaaaaacagcaaaaag

SEQ ID NO: 1335930 - RNA, 19 nt, Human
gaacacaucaaugaaaaaa

SEQ ID NO: 1335931 - RNA, 22 nt, Human
ggcgaaaaacuaggcaaaaaca

SEQ ID NO: 1335932 - RNA, 21 nt, Human
ggcuuccauguaaaaccuagu

SEQ ID NO: 1335933 - RNA, 22 nt, Human
guccaacauuaaccaccauucg

SEQ ID NO: 1335934 - RNA, 18 nt, Human
uaagccuacuuauuggca

SEQ ID NO: 1335935 - RNA, 23 nt, Human
uaggacaauuuccuacuuuuuaa

SEQ ID NO: 1335936 - RNA, 23 nt, Human
uaggcaaaaacagcaaaaagugc

SEQ ID NO: 1335937 - RNA, 25 nt, Human
uauaagcaauaaaaucacaaaauca

SEQ ID NO: 1335938 - RNA, 22 nt, Human
uauuggcaagaaacagguuagg

SEQ ID NO: 1335939 - RNA, 22 nt, Human
ucacgcacguuaugacuucagu

SEQ ID NO: 1335940 - RNA, 23 nt, Human
uccaacauuaaccaccauucgau

SEQ ID NO: 1335941 - RNA, 20 nt, Human
ugagaaugcugcugcaacac

SEQ ID NO: 1335942 - RNA, 18 nt, Human
ugauagcaacuuauaagc

SEQ ID NO: 1335943 - RNA, 20 nt, Human
ugcggcaaggcaagcggcag

SEQ ID NO: 1335944 - RNA, 24 nt, Human
ugucaaauaugaguucucuguuau

SEQ ID NO: 1335945 - RNA, 19 nt, Human
uuauaagcaauaaaaucac

SEQ ID NO: 1335946 - RNA, 22 nt, Human
aaauaaccuuuuauuuaaaggu

SEQ ID NO: 1335947 - RNA, 18 nt, Human
aagaaggcugccugguug

SEQ ID NO: 1335948 - RNA, 22 nt, Human
aagaaggcugccugguugugug

SEQ ID NO: 1335949 - RNA, 25 nt, Human
caacuauaucagucaccagguuuuc

SEQ ID NO: 1335950 - RNA, 24 nt, Human
caccagguuuucccaucagagcuu

SEQ ID NO: 1335951 - RNA, 21 nt, Human
gucaagaaggcugccugguug

SEQ ID NO: 1335952 - RNA, 20 nt, Human
ucagagggacaaauaaccuu

SEQ ID NO: 1335953 - RNA, 20 nt, Human
ugaauuccuaaagaaaacau

SEQ ID NO: 1335954 - RNA, 21 nt, Human
uguguguuguauucacuacuc

SEQ ID NO: 1335955 - RNA, 18 nt, Human
uguuguauucacuacucu

SEQ ID NO: 1335956 - RNA, 19 nt, Human
uuagagacuuguauauuuc

SEQ ID NO: 1335957 - RNA, 20 nt, Human
uuagagacuuguauauuuca

SEQ ID NO: 1335958 - RNA, 19 nt, Human
caaaauuaacuggaaaugg

SEQ ID NO: 1335959 - RNA, 22 nt, Human
cagcaauaaucauaaacucuga

SEQ ID NO: 1335960 - RNA, 19 nt, Human
cauaaacucugaacuuggc

SEQ ID NO: 1335961 - RNA, 19 nt, Human
cauuauauagccaaaagau

SEQ ID NO: 1335962 - RNA, 19 nt, Human
cuagcuguccaagcagcaa

SEQ ID NO: 1335963 - RNA, 18 nt, Human
cuccucgagcucagcgag

SEQ ID NO: 1335964 - RNA, 21 nt, Human
gagacuccuucaccagcgccc

SEQ ID NO: 1335965 - RNA, 21 nt, Human
uauauacaguauauguacaca

SEQ ID NO: 1335966 - RNA, 28 nt, Human
uauguacacauauaaacauacacacagu

SEQ ID NO: 1335967 - RNA, 24 nt, Human
uccaagcagcaauaaucauaaacu

SEQ ID NO: 1335968 - RNA, 22 nt, Human
uuagcacaaacuaacuagagga

SEQ ID NO: 1335969 - RNA, 18 nt, Human
aggaagaggcagugagga

SEQ ID NO: 1335970 - RNA, 22 nt, Human
cagccccucagauccgccuccc

SEQ ID NO: 1335971 - RNA, 23 nt, Human
ccagccccucagauccgccuccc

SEQ ID NO: 1335972 - RNA, 19 nt, Human
ccccucagauccgccuccc

SEQ ID NO: 1335973 - RNA, 22 nt, Human
ccccucagauccgccuccccuc

SEQ ID NO: 1335974 - RNA, 18 nt, Human
ccucccaugucacuccag

SEQ ID NO: 1335975 - RNA, 20 nt, Human
cgccuccccucccaugucac

SEQ ID NO: 1335976 - RNA, 19 nt, Human
gccccaacugaggggccug

SEQ ID NO: 1335977 - RNA, 18 nt, Human
gccugcacccagccccuc

SEQ ID NO: 1335978 - RNA, 18 nt, Human
uccccucccaugucacuc

SEQ ID NO: 1335979 - RNA, 19 nt, Human
ugaggagaacaguagucug

SEQ ID NO: 1335980 - RNA, 20 nt, Human
uggaagggagaguucagacu

SEQ ID NO: 1335981 - RNA, 21 nt, Human
aaacaaaacuaccauaugauc

SEQ ID NO: 1335982 - RNA, 22 nt, Human
aagaagcuucagcaaauagccc

SEQ ID NO: 1335983 - RNA, 23 nt, Human
aguaaaacaaaacuaccauauga

SEQ ID NO: 1335984 - RNA, 22 nt, Human
ccaauucuaccaugugccagaa

SEQ ID NO: 1335985 - RNA, 21 nt, Human
ccuccggaggcuagacgguuc

SEQ ID NO: 1335986 - RNA, 21 nt, Human
cgccgcgcuggggaggccccc

SEQ ID NO: 1335987 - RNA, 24 nt, Human
cgccgcgcuggggaggcccccucc

SEQ ID NO: 1335988 - RNA, 22 nt, Human
cggccuggccuccggaggcuag

SEQ ID NO: 1335989 - RNA, 22 nt, Human
gcacucacggccuggccuccgg

SEQ ID NO: 1335990 - RNA, 23 nt, Human
gggccaccaagaagcuucagcaa

SEQ ID NO: 1335991 - RNA, 21 nt, Human
ggggaggcccccucaacccuc

SEQ ID NO: 1335992 - RNA, 23 nt, Human
uaaaacaaaacuaccauaugauc

SEQ ID NO: 1335993 - RNA, 18 nt, Human
uaccaugugccagaaacu

SEQ ID NO: 1335994 - RNA, 24 nt, Human
uauaccucccgcacucacggccug

SEQ ID NO: 1335995 - RNA, 20 nt, Human
uauagagacgaagaaacuga

SEQ ID NO: 1335996 - RNA, 18 nt, Human
ucacacagguagugagug

SEQ ID NO: 1335997 - RNA, 23 nt, Human
ucuaaguguuucacugacggcuc

SEQ ID NO: 1335998 - RNA, 22 nt, Human
ucugucgccuccccacacccgg

SEQ ID NO: 1335999 - RNA, 24 nt, Human
uggccuccggaggcuagacgguuc

SEQ ID NO: 1336000 - RNA, 20 nt, Human
uucacugacggcucacaaca

SEQ ID NO: 1336001 - RNA, 22 nt, Human
uucacugacggcucacaacaau

SEQ ID NO: 1336002 - RNA, 21 nt, Human
uuggcguauaccucccgcacu

SEQ ID NO: 1336003 - RNA, 22 nt, Human
caccugagcggcccgggccgaa

SEQ ID NO: 1336004 - RNA, 24 nt, Human
ccccaggggccccgcucacgcucc

SEQ ID NO: 1336005 - RNA, 19 nt, Human
ccccgcucacgcucccgag

SEQ ID NO: 1336006 - RNA, 21 nt, Human
ccggcccugcuccuccacaag

SEQ ID NO: 1336007 - RNA, 21 nt, Human
ccggcgccggggcgaagaagg

SEQ ID NO: 1336008 - RNA, 22 nt, Human
ccucgcgccggcccugcuccuc

SEQ ID NO: 1336009 - RNA, 22 nt, Human
cgacagaggagcggggaccagg

SEQ ID NO: 1336010 - RNA, 20 nt, Human
cgccggcccugcuccuccac

SEQ ID NO: 1336011 - RNA, 23 nt, Human
cggcccgggccgaagcgccgggc

SEQ ID NO: 1336012 - RNA, 24 nt, Human
cggcccgggccgaagcgccgggca

SEQ ID NO: 1336013 - RNA, 19 nt, Human
cucugcaccugagcggccc

SEQ ID NO: 1336014 - RNA, 19 nt, Human
gagucucgccucgcgccgg

SEQ ID NO: 1336015 - RNA, 20 nt, Human
gccccaggggccccgcucac

SEQ ID NO: 1336016 - RNA, 19 nt, Human
ggcgccggggcgaagaagg

SEQ ID NO: 1336017 - RNA, 24 nt, Human
uaaguuugguaaagagaagauaau

SEQ ID NO: 1336018 - RNA, 26 nt, Human
ucuccgccugcagacuggcccgacag

SEQ ID NO: 1336019 - RNA, 19 nt, Human
uggcccgacagaggagcgg

SEQ ID NO: 1336020 - RNA, 20 nt, Human
ugguaaagagaagauaaugg

SEQ ID NO: 1336021 - RNA, 23 nt, Human
aacugaauuacuccaucauaaaa

SEQ ID NO: 1336022 - RNA, 20 nt, Human
aaguauucuccauccaguuc

SEQ ID NO: 1336023 - RNA, 18 nt, Human
cuaaaagauaaaagugaa

SEQ ID NO: 1336024 - RNA, 23 nt, Human
cucucuucucucuucuuuccuua

SEQ ID NO: 1336025 - RNA, 19 nt, Human
guagugaucuuugucucuc

SEQ ID NO: 1336026 - RNA, 21 nt, Human
uaaccuaaaagcagcauuuau

SEQ ID NO: 1336027 - RNA, 23 nt, Human
ucaguaccagaggugccucuucu

SEQ ID NO: 1336028 - RNA, 27 nt, Human
ucucucuucucucuucuuuccuccugg

SEQ ID NO: 1336029 - RNA, 23 nt, Human
ucucuuaccuaaaagauaaaagu

SEQ ID NO: 1336030 - RNA, 24 nt, Human
ucuguagugaucuuugucucucuu

SEQ ID NO: 1336031 - RNA, 21 nt, Human
ucuucaguaccagaggugccu

SEQ ID NO: 1336032 - RNA, 18 nt, Human
ugauccugaguuguuccu

SEQ ID NO: 1336033 - RNA, 20 nt, Human
uuagccaccuuacccaugcc

SEQ ID NO: 1336034 - RNA, 20 nt, Human
uucucucuucuuuccuuauc

SEQ ID NO: 1336035 - RNA, 21 nt, Human
aaaaaaaggcaguuuagggua

SEQ ID NO: 1336036 - RNA, 19 nt, Human
aaaaaaucuccccuccuuc

SEQ ID NO: 1336037 - RNA, 24 nt, Human
aaaagaccaagauguccagucuug

SEQ ID NO: 1336038 - RNA, 23 nt, Human
aaagaaaaaaaggcaguuuaggg

SEQ ID NO: 1336039 - RNA, 20 nt, Human
aaucacaaucaccuugauua

SEQ ID NO: 1336040 - RNA, 21 nt, Human
acaccccaauuaaaaacuaca

SEQ ID NO: 1336041 - RNA, 22 nt, Human
acacuccacccucagcagaaaa

SEQ ID NO: 1336042 - RNA, 18 nt, Human
acccuggagguagugggg

SEQ ID NO: 1336043 - RNA, 18 nt, Human
accuccucccucccccca

SEQ ID NO: 1336044 - RNA, 19 nt, Human
agaaaaccuccccgccccu

SEQ ID NO: 1336045 - RNA, 24 nt, Human
agagcacugacacagggggagucc

SEQ ID NO: 1336046 - RNA, 21 nt, Human
aggcaggugggaucugucagg

SEQ ID NO: 1336047 - RNA, 21 nt, Human
aggcugcuccugguaaagcuu

SEQ ID NO: 1336048 - RNA, 22 nt, Human
agggaggugagucuugggcagg

SEQ ID NO: 1336049 - RNA, 27 nt, Human
agggaguacugagaaacucagagcuca

SEQ ID NO: 1336050 - RNA, 20 nt, Human
agggcaauggcuaaacuagg

SEQ ID NO: 1336051 - RNA, 23 nt, Human
aggugguggggauaagugcagau

SEQ ID NO: 1336052 - RNA, 19 nt, Human
auaccuccucccucccccc

SEQ ID NO: 1336053 - RNA, 18 nt, Human
aucuccccuccuucccua

SEQ ID NO: 1336054 - RNA, 26 nt, Human
augugggcaauggaccccgggcuggg

SEQ ID NO: 1336055 - RNA, 19 nt, Human
caaaaaagaaaaaaaggca

SEQ ID NO: 1336056 - RNA, 26 nt, Human
caaagcaaaacccuggagguaguggg

SEQ ID NO: 1336057 - RNA, 22 nt, Human
caauauaccuccucccuccccc

SEQ ID NO: 1336058 - RNA, 19 nt, Human
cacaacaagggggucccca

SEQ ID NO: 1336059 - RNA, 23 nt, Human
caccaaaaaugguucccccucag

SEQ ID NO: 1336060 - RNA, 23 nt, Human
caccaucacccgacuguccuccu

SEQ ID NO: 1336061 - RNA, 24 nt, Human
caccaucacccgacuguccuccug

SEQ ID NO: 1336062 - RNA, 23 nt, Human
cacccuccacuucaccuugggga

SEQ ID NO: 1336063 - RNA, 20 nt, Human
caccucaaaaaagaaaaaaa

SEQ ID NO: 1336064 - RNA, 25 nt, Human
cacuccacccucagcagaaaaugau

SEQ ID NO: 1336065 - RNA, 25 nt, Human
cagaauacaccaucacccgacuguc

SEQ ID NO: 1336066 - RNA, 18 nt, Human
cagagaaugugggcaaug

SEQ ID NO: 1336067 - RNA, 19 nt, Human
cagggguccccccuagguu

SEQ ID NO: 1336068 - RNA, 21 nt, Human
ccacaccccaauuaaaaacua

SEQ ID NO: 1336069 - RNA, 21 nt, Human
ccaguaaugccaguucccaaa

SEQ ID NO: 1336070 - RNA, 21 nt, Human
ccauuaauuucaucuccaggg

SEQ ID NO: 1336071 - RNA, 20 nt, Human
cccaaacaugcacuuccuuc

SEQ ID NO: 1336072 - RNA, 19 nt, Human
cccaccagucacugacugg

SEQ ID NO: 1336073 - RNA, 24 nt, Human
ccccaccucaaaaaagaaaaaaag

SEQ ID NO: 1336074 - RNA, 19 nt, Human
ccccaggcccagggguccc

SEQ ID NO: 1336075 - RNA, 23 nt, Human
ccccaggugguggggauaagugc

SEQ ID NO: 1336076 - RNA, 18 nt, Human
cccgccccucccacaccc

SEQ ID NO: 1336077 - RNA, 21 nt, Human
cccuccacuucaccuugggga

SEQ ID NO: 1336078 - RNA, 19 nt, Human
ccucaaaaaagaaaaaaag

SEQ ID NO: 1336079 - RNA, 21 nt, Human
ccucaaaaaagaaaaaaaggc

SEQ ID NO: 1336080 - RNA, 21 nt, Human
ccucccuccccccaccucaaa

SEQ ID NO: 1336081 - RNA, 18 nt, Human
cgacgagaaggagacaga

SEQ ID NO: 1336082 - RNA, 20 nt, Human
cgccccucccacaccccaau

SEQ ID NO: 1336083 - RNA, 28 nt, Human
cgccccucccacaccccaauuaaaaacu

SEQ ID NO: 1336084 - RNA, 24 nt, Human
cgcgccagcuggggaguccgcgug

SEQ ID NO: 1336085 - RNA, 24 nt, Human
cuacaaaaaaaucuccccuccuuc

SEQ ID NO: 1336086 - RNA, 19 nt, Human
cucaccacagcacccucca

SEQ ID NO: 1336087 - RNA, 19 nt, Human
cucccuccccccaccucaa

SEQ ID NO: 1336088 - RNA, 18 nt, Human
cuccugccgucggccugc

SEQ ID NO: 1336089 - RNA, 19 nt, Human
cugacacagggggaguccu

SEQ ID NO: 1336090 - RNA, 20 nt, Human
cuggucaggugggaaggggg

SEQ ID NO: 1336091 - RNA, 23 nt, Human
gaagggaggugagucuugggcag

SEQ ID NO: 1336092 - RNA, 19 nt, Human
gacaggcaggugggaucug

SEQ ID NO: 1336093 - RNA, 19 nt, Human
gagaaggagacagagaaug

SEQ ID NO: 1336094 - RNA, 20 nt, Human
gagaaggagacagagaaugu

SEQ ID NO: 1336095 - RNA, 21 nt, Human
gagggcaccccaggcccaggg

SEQ ID NO: 1336096 - RNA, 22 nt, Human
gagggcaccccaggcccagggg

SEQ ID NO: 1336097 - RNA, 20 nt, Human
gaguacugagaaacucagaa

SEQ ID NO: 1336098 - RNA, 21 nt, Human
gcugcuccugguaaagcuuag

SEQ ID NO: 1336099 - RNA, 18 nt, Human
ggacaggcaggugggauc

SEQ ID NO: 1336100 - RNA, 21 nt, Human
ggagagaaaauauagcccaag

SEQ ID NO: 1336101 - RNA, 24 nt, Human
guagugggguagaccgacgagaag

SEQ ID NO: 1336102 - RNA, 26 nt, Human
uaaaaacuacaaaaaaaucuccccuc

SEQ ID NO: 1336103 - RNA, 18 nt, Human
uaccuccucccucccccc

SEQ ID NO: 1336104 - RNA, 18 nt, Human
uagaaaaccuccccgccc

SEQ ID NO: 1336105 - RNA, 21 nt, Human
uagaaaaccuccccgccccuc

SEQ ID NO: 1336106 - RNA, 22 nt, Human
uagaaaaccuccccgccccucc

SEQ ID NO: 1336107 - RNA, 21 nt, Human
uauaccuccucccucccccca

SEQ ID NO: 1336108 - RNA, 23 nt, Human
uaucacaccaaaaaugguucccc

SEQ ID NO: 1336109 - RNA, 22 nt, Human
uauuagucaaaaucacaaucac

SEQ ID NO: 1336110 - RNA, 19 nt, Human
ucaaacccaccagucacug

SEQ ID NO: 1336111 - RNA, 22 nt, Human
ucaaacccaccagucacugacu

SEQ ID NO: 1336112 - RNA, 21 nt, Human
ucaggugggaagggggguggg

SEQ ID NO: 1336113 - RNA, 23 nt, Human
ucagucaugggcaguggacaggc

SEQ ID NO: 1336114 - RNA, 18 nt, Human
ucaugggcaguggacagg

SEQ ID NO: 1336115 - RNA, 30 nt, Human
uccaauauaccuccucccuccccccaccuu

SEQ ID NO: 1336116 - RNA, 21 nt, Human
uccagaacuggagauggagaa

SEQ ID NO: 1336117 - RNA, 24 nt, Human
uccagaacuggagauggagaaaua

SEQ ID NO: 1336118 - RNA, 25 nt, Human
uccagggcaauggcuaaacuagguc

SEQ ID NO: 1336119 - RNA, 21 nt, Human
uccccgccccucccacacccc

SEQ ID NO: 1336120 - RNA, 18 nt, Human
ucgggugggaugcgcagg

SEQ ID NO: 1336121 - RNA, 23 nt, Human
ucugggaccaaggagaaagggac

SEQ ID NO: 1336122 - RNA, 22 nt, Human
uggacaggcaggugggaucugu

SEQ ID NO: 1336123 - RNA, 23 nt, Human
uggacaggcaggugggaucuguc

SEQ ID NO: 1336124 - RNA, 22 nt, Human
ugggaccaaggagaaagggacc

SEQ ID NO: 1336125 - RNA, 20 nt, Human
ugggaggggcgcgccagcug

SEQ ID NO: 1336126 - RNA, 21 nt, Human
ugggaggggcgcgccagcugg

SEQ ID NO: 1336127 - RNA, 20 nt, Human
ugggguagaccgacgagaag

SEQ ID NO: 1336128 - RNA, 20 nt, Human
ugguagucugacuccuccag

SEQ ID NO: 1336129 - RNA, 21 nt, Human
ugugggcaauggaccccgggc

SEQ ID NO: 1336130 - RNA, 18 nt, Human
uuccaguaaugccaguuc

SEQ ID NO: 1336131 - RNA, 23 nt, Human
uuggggagaggagggaugcuggu

SEQ ID NO: 1336132 - RNA, 23 nt, Human
uuuauagaaaaccuccccgcccc

SEQ ID NO: 1336133 - RNA, 18 nt, Human
aaagcaaaauaaaacaaa

SEQ ID NO: 1336134 - RNA, 26 nt, Human
aacauaccauucucucaaagcaaaau

SEQ ID NO: 1336135 - RNA, 23 nt, Human
aagacaaagcaauuauguacaga

SEQ ID NO: 1336136 - RNA, 22 nt, Human
aauaaaacaaagcuuucuuuaa

SEQ ID NO: 1336137 - RNA, 25 nt, Human
acauaccauucucucaaagcaaaau

SEQ ID NO: 1336138 - RNA, 22 nt, Human
agaaaacaguauaacugaucac

SEQ ID NO: 1336139 - RNA, 22 nt, Human
agaagacaagguuagagaaaua

SEQ ID NO: 1336140 - RNA, 22 nt, Human
agagacaaggguugaggaaaga

SEQ ID NO: 1336141 - RNA, 18 nt, Human
agaguuauggaaccaaua

SEQ ID NO: 1336142 - RNA, 22 nt, Human
aggaaagaguaaaggugcauag

SEQ ID NO: 1336143 - RNA, 20 nt, Human
aguaaaggugcauagaaauc

SEQ ID NO: 1336144 - RNA, 27 nt, Human
caaagcaauuauguacagauagagacc

SEQ ID NO: 1336145 - RNA, 22 nt, Human
caaagcuuucuuuaaucugaaa

SEQ ID NO: 1336146 - RNA, 23 nt, Human
caagguuagagaaauaaccuauc

SEQ ID NO: 1336147 - RNA, 21 nt, Human
caucaagacaaagcaauuaug

SEQ ID NO: 1336148 - RNA, 20 nt, Human
cuauaguuaagaaaacauac

SEQ ID NO: 1336149 - RNA, 22 nt, Human
uaaaguagcuauagaaaacagu

SEQ ID NO: 1336150 - RNA, 18 nt, Human
uaauagauaacuaacggc

SEQ ID NO: 1336151 - RNA, 22 nt, Human
uacagaguuauggaaccaauag

SEQ ID NO: 1336152 - RNA, 19 nt, Human
uaccagaauaagaaaauac

SEQ ID NO: 1336153 - RNA, 19 nt, Human
uauagaaaacaguauaacu

SEQ ID NO: 1336154 - RNA, 24 nt, Human
uauggaaccaauagauagucauga

SEQ ID NO: 1336155 - RNA, 21 nt, Human
ucucucaaagcaaaauaaaac

SEQ ID NO: 1336156 - RNA, 19 nt, Human
ugaggaaagaguaaaggug

SEQ ID NO: 1336157 - RNA, 24 nt, Human
uggaaccaauagauagucaugaua

SEQ ID NO: 1336158 - RNA, 22 nt, Human
uuuuugguaaaacguuagaaga

SEQ ID NO: 1336159 - RNA, 19 nt, Human
aaccccugcuccuccggag

SEQ ID NO: 1336160 - RNA, 23 nt, Human
aaccugaggcccggcauggugag

SEQ ID NO: 1336161 - RNA, 21 nt, Human
aacucaucuccgccaagaucg

SEQ ID NO: 1336162 - RNA, 21 nt, Human
acacaguuucaaagacccggg

SEQ ID NO: 1336163 - RNA, 18 nt, Human
acucccugcaaacacugc

SEQ ID NO: 1336164 - RNA, 18 nt, Human
aggcgggcuggcgggggc

SEQ ID NO: 1336165 - RNA, 19 nt, Human
aggcuggggcugggcugca

SEQ ID NO: 1336166 - RNA, 21 nt, Human
aggggaggcgggcuggcgggg

SEQ ID NO: 1336167 - RNA, 23 nt, Human
aggggggugcggggccuccgggg

SEQ ID NO: 1336168 - RNA, 23 nt, Human
caccgggaccggcuccgcaacgg

SEQ ID NO: 1336169 - RNA, 22 nt, Human
caccugcggccgugaccaaggu

SEQ ID NO: 1336170 - RNA, 19 nt, Human
cagagaugaggacgcucuc

SEQ ID NO: 1336171 - RNA, 24 nt, Human
ccccggaggcugggggcgcgcgcu

SEQ ID NO: 1336172 - RNA, 21 nt, Human
cccugcaaacacugccuggau

SEQ ID NO: 1336173 - RNA, 19 nt, Human
cccuggauguugucgaacc

SEQ ID NO: 1336174 - RNA, 21 nt, Human
ccgcguccucgggggcacagu

SEQ ID NO: 1336175 - RNA, 18 nt, Human
ccgggggcgcagcugccu

SEQ ID NO: 1336176 - RNA, 20 nt, Human
ccuccaugacccugccaccc

SEQ ID NO: 1336177 - RNA, 24 nt, Human
ccuggccgaggccucgcuggcgcc

SEQ ID NO: 1336178 - RNA, 22 nt, Human
cgaagccguccccggaggcugg

SEQ ID NO: 1336179 - RNA, 21 nt, Human
cucaugcucagggcgguggca

SEQ ID NO: 1336180 - RNA, 19 nt, Human
cuccgcaacgggaggcucc

SEQ ID NO: 1336181 - RNA, 18 nt, Human
cuccgggccugggucgcc

SEQ ID NO: 1336182 - RNA, 22 nt, Human
cuccggggccggggucuccucg

SEQ ID NO: 1336183 - RNA, 23 nt, Human
cucuucggauccaaacucaucuc

SEQ ID NO: 1336184 - RNA, 19 nt, Human
gaaaggcucuggcgacgcc

SEQ ID NO: 1336185 - RNA, 19 nt, Human
gaggcuccugcuccgggcc

SEQ ID NO: 1336186 - RNA, 19 nt, Human
gagucgaagaaguccgagg

SEQ ID NO: 1336187 - RNA, 18 nt, Human
gccgccagcguccuccau

SEQ ID NO: 1336188 - RNA, 21 nt, Human
gcggggccuccggggccgggg

SEQ ID NO: 1336189 - RNA, 21 nt, Human
gcgggggccggggagcccgcg

SEQ ID NO: 1336190 - RNA, 23 nt, Human
ggagucagagaugaggacgcucu

SEQ ID NO: 1336191 - RNA, 23 nt, Human
ggauccaaacucaucuccgccaa

SEQ ID NO: 1336192 - RNA, 22 nt, Human
ggccacggguucggggcgcccc

SEQ ID NO: 1336193 - RNA, 19 nt, Human
ggcccaggucgcccgcguc

SEQ ID NO: 1336194 - RNA, 20 nt, Human
ggcugggggcgcgcgcuggc

SEQ ID NO: 1336195 - RNA, 24 nt, Human
gggagucagagaugaggacgcucu

SEQ ID NO: 1336196 - RNA, 27 nt, Human
gggcacagcgaggggaggccgguaccc

SEQ ID NO: 1336197 - RNA, 22 nt, Human
ggucucguucucuucggaucca

SEQ ID NO: 1336198 - RNA, 21 nt, Human
ggugcccgcgggcuccgggcc

SEQ ID NO: 1336199 - RNA, 19 nt, Human
gguguccuggccgaggccu

SEQ ID NO: 1336200 - RNA, 22 nt, Human
gugaccaagguccgugaggaag

SEQ ID NO: 1336201 - RNA, 20 nt, Human
gugcccgcgggcuccgggcc

SEQ ID NO: 1336202 - RNA, 24 nt, Human
uaaggggucaccugcggccggggc

SEQ ID NO: 1336203 - RNA, 19 nt, Human
uccaaacucaucuccgcca

SEQ ID NO: 1336204 - RNA, 19 nt, Human
uccacgaacacggcgccgc

SEQ ID NO: 1336205 - RNA, 20 nt, Human
ucccgggcacagcgagggga

SEQ ID NO: 1336206 - RNA, 21 nt, Human
ucgcugccugggaccucgcgg

SEQ ID NO: 1336207 - RNA, 19 nt, Human
ucuggcgacgccgggggcg

SEQ ID NO: 1336208 - RNA, 25 nt, Human
ugacggaaaugaaggcggagguagu

SEQ ID NO: 1336209 - RNA, 20 nt, Human
ugaggaaggugacagaagcc

SEQ ID NO: 1336210 - RNA, 19 nt, Human
ugaggcccggcauggugag

SEQ ID NO: 1336211 - RNA, 21 nt, Human
ugaguuccuccaugucacauu

SEQ ID NO: 1336212 - RNA, 19 nt, Human
ugccucggggccccuccgc

SEQ ID NO: 1336213 - RNA, 19 nt, Human
ugccucggggccccuccgc

SEQ ID NO: 1336214 - RNA, 19 nt, Human
ugccugggaccucgcgggc

SEQ ID NO: 1336215 - RNA, 21 nt, Human
ugcggggccuccggggccggg

SEQ ID NO: 1336216 - RNA, 18 nt, Human
ugcucagggcgguggcaa

SEQ ID NO: 1336217 - RNA, 18 nt, Human
uggcaaaggggucgucac

SEQ ID NO: 1336218 - RNA, 23 nt, Human
uggcaaaggggucgucacucccu

SEQ ID NO: 1336219 - RNA, 24 nt, Human
uggcugaagauggugcacaccggg

SEQ ID NO: 1336220 - RNA, 23 nt, Human
uuuuuuuuuuugaagcaggaguu

SEQ ID NO: 1336221 - RNA, 23 nt, Human
uuuuuuuuuuuugaagcaggagu

SEQ ID NO: 1336222 - RNA, 27 nt, Human
uuuuuuuuuuuuuuuuuuuuuuugggg

SEQ ID NO: 1336223 - RNA, 23 nt, Human
aaccgauucugacggcgucuacg

SEQ ID NO: 1336224 - RNA, 27 nt, Human
aagaagaggaacaaagguagucaaggg

SEQ ID NO: 1336225 - RNA, 22 nt, Human
aaggacacgcaaccacgcucac

SEQ ID NO: 1336226 - RNA, 19 nt, Human
aagggagcccucugccucc

SEQ ID NO: 1336227 - RNA, 19 nt, Human
acacucgccucccccucca

SEQ ID NO: 1336228 - RNA, 18 nt, Human
acccagccuggcccccag

SEQ ID NO: 1336229 - RNA, 20 nt, Human
acccagccuggcccccagca

SEQ ID NO: 1336230 - RNA, 18 nt, Human
acucgccucccccuccac

SEQ ID NO: 1336231 - RNA, 18 nt, Human
aggccaaguaggcgaagg

SEQ ID NO: 1336232 - RNA, 23 nt, Human
caaaggacacgcaaccacgcuca

SEQ ID NO: 1336233 - RNA, 25 nt, Human
caagggaagcaggggaugggggagg

SEQ ID NO: 1336234 - RNA, 20 nt, Human
cacacucgccucccccucca

SEQ ID NO: 1336235 - RNA, 23 nt, Human
cacugcacaaucccagcaugagc

SEQ ID NO: 1336236 - RNA, 26 nt, Human
cagcaugagcccagacgacugauacu

SEQ ID NO: 1336237 - RNA, 18 nt, Human
ccccagcaaaccuggcug

SEQ ID NO: 1336238 - RNA, 20 nt, Human
ccccagcaaaccuggcuggc

SEQ ID NO: 1336239 - RNA, 20 nt, Human
cccccuccacuucucucuuc

SEQ ID NO: 1336240 - RNA, 23 nt, Human
cccccuccacuucucucuucuca

SEQ ID NO: 1336241 - RNA, 21 nt, Human
cccuccacuucucucuucuca

SEQ ID NO: 1336242 - RNA, 28 nt, Human
ccuccacuucucucuucucaggcuuuug

SEQ ID NO: 1336243 - RNA, 22 nt, Human
ccucccccuccacuucucucuu

SEQ ID NO: 1336244 - RNA, 19 nt, Human
ccugugaggacacccagcc

SEQ ID NO: 1336245 - RNA, 23 nt, Human
cgccgcgauucugucagagacgg

SEQ ID NO: 1336246 - RNA, 24 nt, Human
cgggcccuauuuccuucuccacag

SEQ ID NO: 1336247 - RNA, 21 nt, Human
cucagcgccgggcccuauuuc

SEQ ID NO: 1336248 - RNA, 25 nt, Human
cucagcgccgggcccuauuuccuuc

SEQ ID NO: 1336249 - RNA, 23 nt, Human
cucccccuccacuucucucuucu

SEQ ID NO: 1336250 - RNA, 20 nt, Human
cucucuucucaggcuuuugg

SEQ ID NO: 1336251 - RNA, 19 nt, Human
gccaugucaccucgcccca

SEQ ID NO: 1336252 - RNA, 20 nt, Human
gcccuauuuccuucuccaca

SEQ ID NO: 1336253 - RNA, 18 nt, Human
gcggaggaugggcgggua

SEQ ID NO: 1336254 - RNA, 18 nt, Human
gcugcuggucccccuggg

SEQ ID NO: 1336255 - RNA, 22 nt, Human
ggcccuauuuccuucuccacag

SEQ ID NO: 1336256 - RNA, 19 nt, Human
uagcugcuggucccccugg

SEQ ID NO: 1336257 - RNA, 22 nt, Human
ucacacacucgccucccccucc

SEQ ID NO: 1336258 - RNA, 23 nt, Human
ucacacacucgccucccccucca

SEQ ID NO: 1336259 - RNA, 23 nt, Human
ucagagacggagcgucggagggg

SEQ ID NO: 1336260 - RNA, 24 nt, Human
ucagcgccgggcccuauuuccuuc

SEQ ID NO: 1336261 - RNA, 21 nt, Human
ucaguguucaaagaagaggaa

SEQ ID NO: 1336262 - RNA, 19 nt, Human
ucaugcaugguucuccuug

SEQ ID NO: 1336263 - RNA, 21 nt, Human
ucccagcaugagcccagacga

SEQ ID NO: 1336264 - RNA, 18 nt, Human
ucccccuccacuucucuc

SEQ ID NO: 1336265 - RNA, 19 nt, Human
ucucaggcuuuuggaauug

SEQ ID NO: 1336266 - RNA, 21 nt, Human
ucucucuucucaggcuuuugg

SEQ ID NO: 1336267 - RNA, 19 nt, Human
ugcuggucccccugggaau

SEQ ID NO: 1336268 - RNA, 20 nt, Human
uggcccccagcaaaccuggc

SEQ ID NO: 1336269 - RNA, 19 nt, Human
ugggaaugccacuguacug

SEQ ID NO: 1336270 - RNA, 19 nt, Human
uggguagcugcuggucccc

SEQ ID NO: 1336271 - RNA, 18 nt, Human
uucuccuuggguagcugc

SEQ ID NO: 1336272 - RNA, 19 nt, Human
uugcucccugcgggguucg

SEQ ID NO: 1336273 - RNA, 20 nt, Human
aaccagggcugacccgcgcc

SEQ ID NO: 1336274 - RNA, 23 nt, Human
accagcgccucgcgguaacgacc

SEQ ID NO: 1336275 - RNA, 21 nt, Human
agacccagaagccggcgaacc

SEQ ID NO: 1336276 - RNA, 21 nt, Human
aggcagccgucacaguguguc

SEQ ID NO: 1336277 - RNA, 23 nt, Human
caaagacccagaagccggcgaac

SEQ ID NO: 1336278 - RNA, 18 nt, Human
caaccaccagugcgcggc

SEQ ID NO: 1336279 - RNA, 20 nt, Human
cagaagccggcgaaccaggg

SEQ ID NO: 1336280 - RNA, 23 nt, Human
cagcgccucgcgguaacgaccga

SEQ ID NO: 1336281 - RNA, 23 nt, Human
ccaccagugcgcggcgccgcgac

SEQ ID NO: 1336282 - RNA, 19 nt, Human
gcggcacugacccaaccac

SEQ ID NO: 1336283 - RNA, 22 nt, Human
gcuucaggcagccgucacagug

SEQ ID NO: 1336284 - RNA, 19 nt, Human
uguucaaagacccagaagc

SEQ ID NO: 1336285 - RNA, 19 nt, Human
aaagugcugggauaacugg

SEQ ID NO: 1336286 - RNA, 24 nt, Human
aaagugcugggauaacuggcauga

SEQ ID NO: 1336287 - RNA, 22 nt, Human
acugaggaauacuauguauuua

SEQ ID NO: 1336288 - RNA, 25 nt, Human
acugcacccagcuuagcuucugauu

SEQ ID NO: 1336289 - RNA, 18 nt, Human
aguagagaugggguuuca

SEQ ID NO: 1336290 - RNA, 22 nt, Human
aguagagaugggguuucaccau

SEQ ID NO: 1336291 - RNA, 23 nt, Human
aguagagaugggguuucaccaug

SEQ ID NO: 1336292 - RNA, 24 nt, Human
augaauuaaaaccuuaaaacuggu

SEQ ID NO: 1336293 - RNA, 24 nt, Human
augauuugcccaccucggccuccc

SEQ ID NO: 1336294 - RNA, 18 nt, Human
augggguuucaccauguu

SEQ ID NO: 1336295 - RNA, 20 nt, Human
augggguuucaccauguuag

SEQ ID NO: 1336296 - RNA, 24 nt, Human
augggguuucaccauguuagccag

SEQ ID NO: 1336297 - RNA, 24 nt, Human
caaagugcugggauaacuggcaug

SEQ ID NO: 1336298 - RNA, 21 nt, Human
caccauguuagccaggaaggu

SEQ ID NO: 1336299 - RNA, 22 nt, Human
caccauguuagccaggaagguc

SEQ ID NO: 1336300 - RNA, 24 nt, Human
caccauguuagccaggaaggucuc

SEQ ID NO: 1336301 - RNA, 24 nt, Human
caccucggccucccaaagugcugg

SEQ ID NO: 1336302 - RNA, 19 nt, Human
ccaaagugcugggauaacu

SEQ ID NO: 1336303 - RNA, 24 nt, Human
ccaaagugcugggauaacuggcau

SEQ ID NO: 1336304 - RNA, 18 nt, Human
ccacugcacccagcuuag

SEQ ID NO: 1336305 - RNA, 18 nt, Human
ccacugcacccagcuuag

SEQ ID NO: 1336306 - RNA, 19 nt, Human
ccacugcacccagcuuagc

SEQ ID NO: 1336307 - RNA, 20 nt, Human
cuccugaccucaugauuugc

SEQ ID NO: 1336308 - RNA, 22 nt, Human
gaccucaugauuugcccaccuc

SEQ ID NO: 1336309 - RNA, 18 nt, Human
gagaugggguuucaccau

SEQ ID NO: 1336310 - RNA, 24 nt, Human
gagaugggguuucaccauguuagc

SEQ ID NO: 1336311 - RNA, 23 nt, Human
gauaacuggcaugagccacugca

SEQ ID NO: 1336312 - RNA, 20 nt, Human
ggcaugagccacugcaccca

SEQ ID NO: 1336313 - RNA, 22 nt, Human
gggguuucaccauguuagccag

SEQ ID NO: 1336314 - RNA, 21 nt, Human
guagagaugggguuucaccau

SEQ ID NO: 1336315 - RNA, 23 nt, Human
guagagaugggguuucaccaugu

SEQ ID NO: 1336316 - RNA, 22 nt, Human
uaauuuugaaaaguaauugcug

SEQ ID NO: 1336317 - RNA, 22 nt, Human
uagagaugggguuucaccaugu

SEQ ID NO: 1336318 - RNA, 24 nt, Human
ucccaaagugcugggauaacuggc

SEQ ID NO: 1336319 - RNA, 18 nt, Human
ucggccucccaaagugcu

SEQ ID NO: 1336320 - RNA, 24 nt, Human
ugauuugcccaccucggccuccca

SEQ ID NO: 1336321 - RNA, 19 nt, Human
ugggauaacuggcaugagc

SEQ ID NO: 1336322 - RNA, 22 nt, Human
ugggauaacuggcaugagccac

SEQ ID NO: 1336323 - RNA, 24 nt, Human
ugggauaacuggcaugagccacug

SEQ ID NO: 1336324 - RNA, 24 nt, Human
ugggguuucaccauguuagccagg

SEQ ID NO: 1336325 - RNA, 19 nt, Human
uuucaccauguuagccagg

SEQ ID NO: 1336326 - RNA, 18 nt, Human
aagcccaagagggaacag

SEQ ID NO: 1336327 - RNA, 18 nt, Human
agggaacagcauaaaaau

SEQ ID NO: 1336328 - RNA, 23 nt, Human
cacagaauugucuuugcaugaag

SEQ ID NO: 1336329 - RNA, 20 nt, Human
caguagaagagucaaaggug

SEQ ID NO: 1336330 - RNA, 22 nt, Human
cagugcagcgcgagagggccgg

SEQ ID NO: 1336331 - RNA, 18 nt, Human
cgggagaggacgccggag

SEQ ID NO: 1336332 - RNA, 20 nt, Human
gaacaucaauauaauuacaa

SEQ ID NO: 1336333 - RNA, 18 nt, Human
gaagggggagcgcgccca

SEQ ID NO: 1336334 - RNA, 23 nt, Human
gagacagugcagcgcgagagggc

SEQ ID NO: 1336335 - RNA, 21 nt, Human
gccgggacagucuugcgucgg

SEQ ID NO: 1336336 - RNA, 21 nt, Human
ggaagggggagcgcgcccagc

SEQ ID NO: 1336337 - RNA, 22 nt, Human
ggccgggacagucuugcgucgg

SEQ ID NO: 1336338 - RNA, 23 nt, Human
gggccuccuccacccgcucagga

SEQ ID NO: 1336339 - RNA, 21 nt, Human
uccgggccgggacagucuugc

SEQ ID NO: 1336340 - RNA, 20 nt, Human
ugggccuccuccacccgcuc

SEQ ID NO: 1336341 - RNA, 19 nt, Human
uuuacacaauaugaacauc

SEQ ID NO: 1336342 - RNA, 22 nt, Human
uuuguuagaaaagcagcugcag

SEQ ID NO: 1336343 - RNA, 21 nt, Human
aaaagcagagcuacaaauaug

SEQ ID NO: 1336344 - RNA, 23 nt, Human
aaauacagcgcucucaaacccca

SEQ ID NO: 1336345 - RNA, 19 nt, Human
aauacuguauaugagaaaa

SEQ ID NO: 1336346 - RNA, 22 nt, Human
aauccaguauuagcaccuacaa

SEQ ID NO: 1336347 - RNA, 19 nt, Human
aaugacuaacagacccaua

SEQ ID NO: 1336348 - RNA, 20 nt, Human
acaggacaccccgcgccgcc

SEQ ID NO: 1336349 - RNA, 19 nt, Human
acaggcuguaaaguaacaa

SEQ ID NO: 1336350 - RNA, 21 nt, Human
accccgcgccgccuccucugc

SEQ ID NO: 1336351 - RNA, 19 nt, Human
acccucaccaaaauccugg

SEQ ID NO: 1336352 - RNA, 21 nt, Human
agagcuacaaauauggacuca

SEQ ID NO: 1336353 - RNA, 19 nt, Human
agccaaaagcagagcuaca

SEQ ID NO: 1336354 - RNA, 21 nt, Human
agccaaaagcagagcuacaaa

SEQ ID NO: 1336355 - RNA, 22 nt, Human
agccacagccaacccucaccaa

SEQ ID NO: 1336356 - RNA, 20 nt, Human
agcgacuagaggucacucca

SEQ ID NO: 1336357 - RNA, 23 nt, Human
auggcgaggacaggacaccccgc

SEQ ID NO: 1336358 - RNA, 23 nt, Human
caaaccccaaggauaaacgaaag

SEQ ID NO: 1336359 - RNA, 23 nt, Human
caacagguugaaaaugcagacac

SEQ ID NO: 1336360 - RNA, 22 nt, Human
caagauagaacacuggugaaga

SEQ ID NO: 1336361 - RNA, 24 nt, Human
caagcuuugcacugggcugaccaa

SEQ ID NO: 1336362 - RNA, 22 nt, Human
caaggaaugaagagaaccaaug

SEQ ID NO: 1336363 - RNA, 22 nt, Human
cacagccaacccucaccaaaau

SEQ ID NO: 1336364 - RNA, 23 nt, Human
caccccgcgccgccuccucugcc

SEQ ID NO: 1336365 - RNA, 19 nt, Human
caccuacaauaucucugac

SEQ ID NO: 1336366 - RNA, 25 nt, Human
cagcacguaucauaucuuuccaaca

SEQ ID NO: 1336367 - RNA, 21 nt, Human
cagcagauagaaaggaaugau

SEQ ID NO: 1336368 - RNA, 25 nt, Human
cagccaaaagcagagcuacaaauau

SEQ ID NO: 1336369 - RNA, 24 nt, Human
cauuguguuuucucagaaacuaau

SEQ ID NO: 1336370 - RNA, 19 nt, Human
ccaaaagcagagcuacaaa

SEQ ID NO: 1336371 - RNA, 24 nt, Human
ccaaauacagcgcucucaaacccc

SEQ ID NO: 1336372 - RNA, 26 nt, Human
ccaacccucaccaaaauccuggagaa

SEQ ID NO: 1336373 - RNA, 19 nt, Human
ccaaggaaugaagagaacc

SEQ ID NO: 1336374 - RNA, 22 nt, Human
ccacagccaacccucaccaaaa

SEQ ID NO: 1336375 - RNA, 20 nt, Human
cccaaggaaugaagagaacc

SEQ ID NO: 1336376 - RNA, 25 nt, Human
ccccgcgccgccuccucugcccucc

SEQ ID NO: 1336377 - RNA, 19 nt, Human
cccgcgccgccuccucugc

SEQ ID NO: 1336378 - RNA, 19 nt, Human
cccggcuggaagugggauc

SEQ ID NO: 1336379 - RNA, 18 nt, Human
ccgcgccgccuccucugc

SEQ ID NO: 1336380 - RNA, 21 nt, Human
ccgcgccgccuccucugcccu

SEQ ID NO: 1336381 - RNA, 19 nt, Human
ccggcgccugcugcggccu

SEQ ID NO: 1336382 - RNA, 20 nt, Human
cggccaguggauacaugagg

SEQ ID NO: 1336383 - RNA, 27 nt, Human
cucaaaccccaaggauaaacgaaaggc

SEQ ID NO: 1336384 - RNA, 24 nt, Human
cucaccaaaauccuggagaaaaac

SEQ ID NO: 1336385 - RNA, 22 nt, Human
cucucccaaauacagcgcucuc

SEQ ID NO: 1336386 - RNA, 19 nt, Human
cuuacugauuuuugugaug

SEQ ID NO: 1336387 - RNA, 21 nt, Human
gaacuuggucuggaacuggca

SEQ ID NO: 1336388 - RNA, 23 nt, Human
gauagaacacuggugaagauacg

SEQ ID NO: 1336389 - RNA, 18 nt, Human
ggacaccggcgccugcug

SEQ ID NO: 1336390 - RNA, 18 nt, Human
ggcuggaagugggaucuu

SEQ ID NO: 1336391 - RNA, 18 nt, Human
guacagccaaaagcagag

SEQ ID NO: 1336392 - RNA, 22 nt, Human
gugaaacuuuuaaugguuucuc

SEQ ID NO: 1336393 - RNA, 22 nt, Human
uaaacgaaaggcauaagcagcc

SEQ ID NO: 1336394 - RNA, 23 nt, Human
uaacuggaaauugcauuaaauac

SEQ ID NO: 1336395 - RNA, 23 nt, Human
uaagcagccccgauccuaggaac

SEQ ID NO: 1336396 - RNA, 22 nt, Human
uaauugcuauaauaaaacaaau

SEQ ID NO: 1336397 - RNA, 22 nt, Human
uacaugaggggcccggcuggaa

SEQ ID NO: 1336398 - RNA, 25 nt, Human
uacuguacuugagccaaucauaaga

SEQ ID NO: 1336399 - RNA, 24 nt, Human
uaggggaacaagauagaacacugg

SEQ ID NO: 1336400 - RNA, 19 nt, Human
uccuuggaguaaauggcac

SEQ ID NO: 1336401 - RNA, 20 nt, Human
ucggccaguggauacaugag

SEQ ID NO: 1336402 - RNA, 20 nt, Human
ugaacaagcagcacguauca

SEQ ID NO: 1336403 - RNA, 21 nt, Human
ugaagauacggcuuguugagg

SEQ ID NO: 1336404 - RNA, 23 nt, Human
ugcaaaacgacagccacagccaa

SEQ ID NO: 1336405 - RNA, 23 nt, Human
ugcacugggcugaccaacugugu

SEQ ID NO: 1336406 - RNA, 21 nt, Human
uggaauuuuagaaagugaguc

SEQ ID NO: 1336407 - RNA, 22 nt, Human
uggagaggagguagggacacuc

SEQ ID NO: 1336408 - RNA, 19 nt, Human
uggcagcgugugccacugc

SEQ ID NO: 1336409 - RNA, 20 nt, Human
uguauaugagaaaauucugu

SEQ ID NO: 1336410 - RNA, 19 nt, Human
ugugcacugaauacuguau

SEQ ID NO: 1336411 - RNA, 22 nt, Human
ugugcacugaauacuguauaug

SEQ ID NO: 1336412 - RNA, 18 nt, Human
uuaacacauacuuauggg

SEQ ID NO: 1336413 - RNA, 20 nt, Human
uuaggggaacaagauagaac

SEQ ID NO: 1336414 - RNA, 21 nt, Human
uuuucucagaaacuaaucaaa

SEQ ID NO: 1336415 - RNA, 18 nt, Human
uuuuuuuuuuuuuuuuug

SEQ ID NO: 1336416 - RNA, 22 nt, Human
uuuuuuuuuuuuuuuuuuguuu

SEQ ID NO: 1336417 - RNA, 21 nt, Human
auaaucuaaaaaacaucuguu

SEQ ID NO: 1336418 - RNA, 20 nt, Human
caaauggcgcuggggugaug

SEQ ID NO: 1336419 - RNA, 18 nt, Human
cgcuggggugaugucaga

SEQ ID NO: 1336420 - RNA, 19 nt, Human
cuauugaauucaaguuaug

SEQ ID NO: 1336421 - RNA, 19 nt, Human
gcaaagcgcgauggcuacc

SEQ ID NO: 1336422 - RNA, 19 nt, Human
guacugcuggaaaguugcu

SEQ ID NO: 1336423 - RNA, 18 nt, Human
uagaaagcuaacauugug

SEQ ID NO: 1336424 - RNA, 23 nt, Human
uauggaauuagaaagcuaacauu

SEQ ID NO: 1336425 - RNA, 21 nt, Human
ucccccuucugucgucuucuc

SEQ ID NO: 1336426 - RNA, 20 nt, Human
uggccccaguucgcaucagc

SEQ ID NO: 1336427 - RNA, 20 nt, Human
uucaaauuaaguugauuuaa

SEQ ID NO: 1336428 - RNA, 19 nt, Human
uuugccaaacauuagaguu

SEQ ID NO: 1336429 - RNA, 23 nt, Human
aaaaaacacaagagugugcaaag

SEQ ID NO: 1336430 - RNA, 24 nt, Human
aaaaagugcacucccgauuucuuc

SEQ ID NO: 1336431 - RNA, 25 nt, Human
aagaacagggaagagcugcugaggc

SEQ ID NO: 1336432 - RNA, 21 nt, Human
aagagcugcugaggccaagag

SEQ ID NO: 1336433 - RNA, 19 nt, Human
acuaggugcugggagugug

SEQ ID NO: 1336434 - RNA, 19 nt, Human
agagcugcugaggccaaga

SEQ ID NO: 1336435 - RNA, 19 nt, Human
agaggcuaucaugggcugu

SEQ ID NO: 1336436 - RNA, 18 nt, Human
agcugcugaggccaagag

SEQ ID NO: 1336437 - RNA, 21 nt, Human
augaaugaaauauccaacuga

SEQ ID NO: 1336438 - RNA, 23 nt, Human
caaaaaacacaagagugugcaaa

SEQ ID NO: 1336439 - RNA, 18 nt, Human
caaaaagugcacucccga

SEQ ID NO: 1336440 - RNA, 19 nt, Human
cgaacaaucuacagucaaa

SEQ ID NO: 1336441 - RNA, 24 nt, Human
cuuacaguccauauguauaccaau

SEQ ID NO: 1336442 - RNA, 19 nt, Human
gaucaaaaugucaaccagu

SEQ ID NO: 1336443 - RNA, 18 nt, Human
guaugauguuuacgugug

SEQ ID NO: 1336444 - RNA, 21 nt, Human
guuuguuuuaaguccugaagu

SEQ ID NO: 1336445 - RNA, 22 nt, Human
uacaguccauauguauaccaau

SEQ ID NO: 1336446 - RNA, 22 nt, Human
uagaaucaaagguuaagaacau

SEQ ID NO: 1336447 - RNA, 20 nt, Human
uauuccacaaacauuuacug

SEQ ID NO: 1336448 - RNA, 23 nt, Human
uauuccacaaacauuuacugagc

SEQ ID NO: 1336449 - RNA, 18 nt, Human
ucaacugcugccaccuuu

SEQ ID NO: 1336450 - RNA, 20 nt, Human
ucccuaauaagacagggauu

SEQ ID NO: 1336451 - RNA, 28 nt, Human
uccuucaacugcugccaccuuuguugag

SEQ ID NO: 1336452 - RNA, 22 nt, Human
ucucuauuuucuugaaaagagc

SEQ ID NO: 1336453 - RNA, 21 nt, Human
ugaaagacaccuuacagucca

SEQ ID NO: 1336454 - RNA, 24 nt, Human
ugagcaaaaaacacaagagugugc

SEQ ID NO: 1336455 - RNA, 24 nt, Human
ugagcaaaaaacacaagagugugc

SEQ ID NO: 1336456 - RNA, 20 nt, Human
ugcuugaaaauuuacaaaug

SEQ ID NO: 1336457 - RNA, 23 nt, Human
ugggcuguaaguagaaucaaagg

SEQ ID NO: 1336458 - RNA, 20 nt, Human
ugguuuugagccugauugca

SEQ ID NO: 1336459 - RNA, 18 nt, Human
uguauaccaaugaaugaa

SEQ ID NO: 1336460 - RNA, 24 nt, Human
uucugcaaccugaaagacaccuua

SEQ ID NO: 1336461 - RNA, 23 nt, Human
uuuucugcaaccugaaagacacc

SEQ ID NO: 1336462 - RNA, 25 nt, Human
aaaaaaacaugguggcuccugaaac

SEQ ID NO: 1336463 - RNA, 25 nt, Human
aaaaccuuuaacccaaaauucagaa

SEQ ID NO: 1336464 - RNA, 18 nt, Human
aaacaagacagguuagca

SEQ ID NO: 1336465 - RNA, 21 nt, Human
aacaagacagguuagcaacug

SEQ ID NO: 1336466 - RNA, 21 nt, Human
aagcaauuugcuuugccccag

SEQ ID NO: 1336467 - RNA, 21 nt, Human
aaguguugggagaccaaguuc

SEQ ID NO: 1336468 - RNA, 25 nt, Human
aauuaaaugaaaaaaaauuguacaa

SEQ ID NO: 1336469 - RNA, 23 nt, Human
aauuacccuauuuguagaaaccu

SEQ ID NO: 1336470 - RNA, 24 nt, Human
aauucaaaauacauucaaauucac

SEQ ID NO: 1336471 - RNA, 20 nt, Human
acaauaaguguugggagacc

SEQ ID NO: 1336472 - RNA, 21 nt, Human
acaauaaguguugggagacca

SEQ ID NO: 1336473 - RNA, 18 nt, Human
acugaaaaaaaaacaugg

SEQ ID NO: 1336474 - RNA, 19 nt, Human
acugaaagcuuaaucugcu

SEQ ID NO: 1336475 - RNA, 18 nt, Human
agacagguuagcaacugg

SEQ ID NO: 1336476 - RNA, 18 nt, Human
agcggggcggcggcggcg

SEQ ID NO: 1336477 - RNA, 21 nt, Human
aggcagaaggaauuuagccca

SEQ ID NO: 1336478 - RNA, 19 nt, Human
aggcaucacaacugaaaau

SEQ ID NO: 1336479 - RNA, 18 nt, Human
auagcaccucaucaaaua

SEQ ID NO: 1336480 - RNA, 26 nt, Human
auuucaacuucacucacuuauauuuc

SEQ ID NO: 1336481 - RNA, 19 nt, Human
caaaaugcucccaaguaga

SEQ ID NO: 1336482 - RNA, 25 nt, Human
cacaaacauagcaccucaucaaaua

SEQ ID NO: 1336483 - RNA, 21 nt, Human
cacacagacacacacacauaa

SEQ ID NO: 1336484 - RNA, 22 nt, Human
cacacagacacacacacauaac

SEQ ID NO: 1336485 - RNA, 24 nt, Human
cacacagacacacacacauaacca

SEQ ID NO: 1336486 - RNA, 26 nt, Human
cacauaaccauaaaaugaaggucauc

SEQ ID NO: 1336487 - RNA, 18 nt, Human
cagaaaaugacgcacgac

SEQ ID NO: 1336488 - RNA, 19 nt, Human
cagaaaaugacgcacgacu

SEQ ID NO: 1336489 - RNA, 19 nt, Human
cagggccagcggggcggcg

SEQ ID NO: 1336490 - RNA, 22 nt, Human
cauaaccauaaaaugaagguca

SEQ ID NO: 1336491 - RNA, 23 nt, Human
ccaaagacacacagacacacaca

SEQ ID NO: 1336492 - RNA, 19 nt, Human
ccuccuuccccagccggga

SEQ ID NO: 1336493 - RNA, 26 nt, Human
cggcacgagguuuuuuuuuuuuuuuu

SEQ ID NO: 1336494 - RNA, 22 nt, Human
cuaaaagacuuacuacauagug

SEQ ID NO: 1336495 - RNA, 22 nt, Human
cuaaaugaaguccaauuuuauc

SEQ ID NO: 1336496 - RNA, 19 nt, Human
cuacaagugaacaaacuag

SEQ ID NO: 1336497 - RNA, 18 nt, Human
cucaguuucccuauaagg

SEQ ID NO: 1336498 - RNA, 20 nt, Human
cucccaaguagaaaugacag

SEQ ID NO: 1336499 - RNA, 19 nt, Human
cucgccgcccuccuucccc

SEQ ID NO: 1336500 - RNA, 19 nt, Human
cugaaaaaaaaacauggug

SEQ ID NO: 1336501 - RNA, 20 nt, Human
cuuaguuaaggcaucacaac

SEQ ID NO: 1336502 - RNA, 19 nt, Human
gaaaggauuuuugaauucu

SEQ ID NO: 1336503 - RNA, 22 nt, Human
gacacacagacacacacacaua

SEQ ID NO: 1336504 - RNA, 19 nt, Human
gaccaaguuccaaagacaa

SEQ ID NO: 1336505 - RNA, 20 nt, Human
gauauauacauuauucacca

SEQ ID NO: 1336506 - RNA, 23 nt, Human
gccagcggggcggcggcggccgg

SEQ ID NO: 1336507 - RNA, 20 nt, Human
gcugcagggccagcggggcg

SEQ ID NO: 1336508 - RNA, 22 nt, Human
gcugcagggccagcggggcggc

SEQ ID NO: 1336509 - RNA, 21 nt, Human
gcugguucccaugaucuaaag

SEQ ID NO: 1336510 - RNA, 20 nt, Human
gcuuccccucgugccgaauu

SEQ ID NO: 1336511 - RNA, 18 nt, Human
ggcggcggcggccggagg

SEQ ID NO: 1336512 - RNA, 19 nt, Human
ggcggggggugcacggggc

SEQ ID NO: 1336513 - RNA, 18 nt, Human
gucacaguaacuauaugu

SEQ ID NO: 1336514 - RNA, 23 nt, Human
uaaaaaaauuuccaaaaugucaa

SEQ ID NO: 1336515 - RNA, 23 nt, Human
uaaaaagauacuaaaugaagucc

SEQ ID NO: 1336516 - RNA, 22 nt, Human
uaaaaucauccuaaaagacuua

SEQ ID NO: 1336517 - RNA, 25 nt, Human
uaaaauuaaaaaaauuuccaaaaug

SEQ ID NO: 1336518 - RNA, 18 nt, Human
uaaaguuuaacuuucauc

SEQ ID NO: 1336519 - RNA, 25 nt, Human
uaaauguaaccgaaacaacuauuca

SEQ ID NO: 1336520 - RNA, 22 nt, Human
uaacacugaaaaaaaaacaugg

SEQ ID NO: 1336521 - RNA, 22 nt, Human
uaacauuguaagacaagucuca

SEQ ID NO: 1336522 - RNA, 22 nt, Human
uaagaaaaguuuccaucaggua

SEQ ID NO: 1336523 - RNA, 21 nt, Human
uagaauauauauucugcagca

SEQ ID NO: 1336524 - RNA, 18 nt, Human
uagcaacugguacagcuu

SEQ ID NO: 1336525 - RNA, 20 nt, Human
uagcccgaggcagcggcgac

SEQ ID NO: 1336526 - RNA, 18 nt, Human
uauaaggguaagaaaagu

SEQ ID NO: 1336527 - RNA, 22 nt, Human
uauuucaacuucacucacuuau

SEQ ID NO: 1336528 - RNA, 22 nt, Human
ucaaaaucccuuucuaaagccc

SEQ ID NO: 1336529 - RNA, 27 nt, Human
ucaaauaucugguaaacacuuugcaau

SEQ ID NO: 1336530 - RNA, 19 nt, Human
ucaauaucaauaguguuuu

SEQ ID NO: 1336531 - RNA, 22 nt, Human
ucacaauaaguguugggagacc

SEQ ID NO: 1336532 - RNA, 23 nt, Human
ucacauucuuacagcagccaaaa

SEQ ID NO: 1336533 - RNA, 26 nt, Human
uccaaagacacacagacacacacaca

SEQ ID NO: 1336534 - RNA, 23 nt, Human
uccaaguaauucuguuaaaaaga

SEQ ID NO: 1336535 - RNA, 30 nt, Human
uccccagccgggaccgccgagcccggggcc

SEQ ID NO: 1336536 - RNA, 20 nt, Human
ucccuauaaggguaagaaaa

SEQ ID NO: 1336537 - RNA, 20 nt, Human
ugaaaaaaaauuguacaaaa

SEQ ID NO: 1336538 - RNA, 21 nt, Human
ugaauucugaacuagcagucu

SEQ ID NO: 1336539 - RNA, 22 nt, Human
ugauauguuuuucacaaacaua

SEQ ID NO: 1336540 - RNA, 21 nt, Human
ugccgaauucggcacgagguu

SEQ ID NO: 1336541 - RNA, 19 nt, Human
uucacaaacauagcaccuc

SEQ ID NO: 1336542 - RNA, 20 nt, Human
uugaauuacaugauauguuu

SEQ ID NO: 1336543 - RNA, 24 nt, Human
uugggagaccaaguuccaaagaca

SEQ ID NO: 1336544 - RNA, 25 nt, Human
uuguuuuuuguuuuguuuuuuuuuu

SEQ ID NO: 1336545 - RNA, 22 nt, Human
uuucaggcuaacaauuggcuuc

SEQ ID NO: 1336546 - RNA, 18 nt, Human
uuugaauucugaacuagc

SEQ ID NO: 1336547 - RNA, 23 nt, Human
uuuuguuuguuuuuuuuugcagc

SEQ ID NO: 1336548 - RNA, 27 nt, Human
uuuuuuuuuuuguuuuuuguuuuguuu

SEQ ID NO: 1336549 - RNA, 18 nt, Human
uuuuuuuuuuuuuuuuug

SEQ ID NO: 1336550 - RNA, 25 nt, Human
uuuuuuuuuuuuuuuuuuguuuuuu

SEQ ID NO: 1336551 - RNA, 18 nt, Human
aaaugccacagguuaaaa

SEQ ID NO: 1336552 - RNA, 20 nt, Human
aaaugccacagguuaaaaug

SEQ ID NO: 1336553 - RNA, 18 nt, Human
aagauguguauggacccu

SEQ ID NO: 1336554 - RNA, 23 nt, Human
acaauacagcauguaguagguac

SEQ ID NO: 1336555 - RNA, 19 nt, Human
acaccuccacagcuccaac

SEQ ID NO: 1336556 - RNA, 18 nt, Human
acaguaaaaaguaucuaa

SEQ ID NO: 1336557 - RNA, 18 nt, Human
accacaggcacccacuca

SEQ ID NO: 1336558 - RNA, 21 nt, Human
acccuguuauggccaagcauc

SEQ ID NO: 1336559 - RNA, 19 nt, Human
accgcaguucuggccgcgc

SEQ ID NO: 1336560 - RNA, 24 nt, Human
acgcacgcacgcuccuugcaaccc

SEQ ID NO: 1336561 - RNA, 21 nt, Human
acucaaaaugccaaaaaaaaa

SEQ ID NO: 1336562 - RNA, 22 nt, Human
caacaaaguaaaaauuuuaaaa

SEQ ID NO: 1336563 - RNA, 25 nt, Human
caagcaggagcugaaguuuuuccug

SEQ ID NO: 1336564 - RNA, 24 nt, Human
caaggguauuucccacuccuuucu

SEQ ID NO: 1336565 - RNA, 19 nt, Human
cacggaaaacuuaagugac

SEQ ID NO: 1336566 - RNA, 21 nt, Human
cacggaaaacuuaagugaccg

SEQ ID NO: 1336567 - RNA, 22 nt, Human
cacggaaaacuuaagugaccgc

SEQ ID NO: 1336568 - RNA, 18 nt, Human
cagaagauguguauggac

SEQ ID NO: 1336569 - RNA, 23 nt, Human
cagacgcacgcacgcuccuugca

SEQ ID NO: 1336570 - RNA, 19 nt, Human
cauacaauacagcauguag

SEQ ID NO: 1336571 - RNA, 20 nt, Human
ccaagcaucucaaagaugaa

SEQ ID NO: 1336572 - RNA, 28 nt, Human
ccagacgcacgcacgcuccuugcaaccc

SEQ ID NO: 1336573 - RNA, 23 nt, Human
ccaggaggaaaauuauugggaaa

SEQ ID NO: 1336574 - RNA, 26 nt, Human
cccuauaccagacgcacgcacgcucc

SEQ ID NO: 1336575 - RNA, 26 nt, Human
ccucuuaguucuucaagcaggagcug

SEQ ID NO: 1336576 - RNA, 20 nt, Human
cuccacagcuccaaccacag

SEQ ID NO: 1336577 - RNA, 21 nt, Human
cuccugcauaugaggaggaaa

SEQ ID NO: 1336578 - RNA, 24 nt, Human
cuccugcauaugaggaggaaaugg

SEQ ID NO: 1336579 - RNA, 20 nt, Human
cuucuagucuuuugcgaagu

SEQ ID NO: 1336580 - RNA, 22 nt, Human
gacaccuccacagcuccaacca

SEQ ID NO: 1336581 - RNA, 22 nt, Human
ggaggcauguuaggaaccaaaa

SEQ ID NO: 1336582 - RNA, 22 nt, Human
ggcucuuagcaauuccaauuuu

SEQ ID NO: 1336583 - RNA, 23 nt, Human
gucuccaccaggaggaaaauuau

SEQ ID NO: 1336584 - RNA, 22 nt, Human
uaaggcagaaucucaggaagcc

SEQ ID NO: 1336585 - RNA, 23 nt, Human
uacauguucauucugcaaccuug

SEQ ID NO: 1336586 - RNA, 21 nt, Human
uaccagacgcacgcacgcucc

SEQ ID NO: 1336587 - RNA, 18 nt, Human
uaguagguaccuuuucuu

SEQ ID NO: 1336588 - RNA, 19 nt, Human
uauaccagacgcacgcacg

SEQ ID NO: 1336589 - RNA, 22 nt, Human
ucaaaaugccaaaaaaaaaaau

SEQ ID NO: 1336590 - RNA, 18 nt, Human
ucaaagaugaagagagaa

SEQ ID NO: 1336591 - RNA, 19 nt, Human
ucaauccacugucuccacc

SEQ ID NO: 1336592 - RNA, 20 nt, Human
ucaucuuuuuucaacuacag

SEQ ID NO: 1336593 - RNA, 26 nt, Human
uccacagcuccaaccacaggcaccca

SEQ ID NO: 1336594 - RNA, 28 nt, Human
uccacagcuccaaccacaggcacccacu

SEQ ID NO: 1336595 - RNA, 30 nt, Human
ucguaaccuuucaucaauuaacauuuucuu

SEQ ID NO: 1336596 - RNA, 24 nt, Human
ucuaguuguuuucuuuguguuguu

SEQ ID NO: 1336597 - RNA, 19 nt, Human
ucucaaagaugaagagaga

SEQ ID NO: 1336598 - RNA, 25 nt, Human
ucugagaauuucucuuuuaaugcuu

SEQ ID NO: 1336599 - RNA, 21 nt, Human
ugaccgcaguucuggccgcgc

SEQ ID NO: 1336600 - RNA, 23 nt, Human
ugccaaaaaaaaaaauucaacaa

SEQ ID NO: 1336601 - RNA, 20 nt, Human
ugccacagguuaaaauguca

SEQ ID NO: 1336602 - RNA, 24 nt, Human
ugccacagguuaaaaugucaaguu

SEQ ID NO: 1336603 - RNA, 18 nt, Human
ugcuuggaaccauggcug

SEQ ID NO: 1336604 - RNA, 24 nt, Human
uggcaaacaguaaaaaguaucuaa

SEQ ID NO: 1336605 - RNA, 18 nt, Human
uggcuuucuuacuguuuu

SEQ ID NO: 1336606 - RNA, 23 nt, Human
ugggcucuuagcaauuccaauuu

SEQ ID NO: 1336607 - RNA, 27 nt, Human
ugguaguuccaugcuuggaaccauggc

SEQ ID NO: 1336608 - RNA, 20 nt, Human
uuagaaaagguagccuuuug

SEQ ID NO: 1336609 - RNA, 21 nt, Human
uuugggcucuuagcaauucca

SEQ ID NO: 1336610 - RNA, 27 nt, Human
uuuuaaauugucaucuuuuuucaacua

SEQ ID NO: 1336611 - RNA, 20 nt, Human
uuuuugggaguuaauaucug

SEQ ID NO: 1336612 - RNA, 20 nt, Human
aaaccccgcaagcucuucuc

SEQ ID NO: 1336613 - RNA, 21 nt, Human
aaaguucucagaugcccaaaa

SEQ ID NO: 1336614 - RNA, 28 nt, Human
aaauauucuuuauucugaaaacaauguc

SEQ ID NO: 1336615 - RNA, 19 nt, Human
aaccccgcaagcucuucuc

SEQ ID NO: 1336616 - RNA, 25 nt, Human
aaccccgcaagcucuucucucagcc

SEQ ID NO: 1336617 - RNA, 23 nt, Human
agcaguaucccaagacuccaucu

SEQ ID NO: 1336618 - RNA, 22 nt, Human
caagaacagcggcauacaccgc

SEQ ID NO: 1336619 - RNA, 19 nt, Human
caccgccuccagcccuuca

SEQ ID NO: 1336620 - RNA, 18 nt, Human
cacuccauaacuugguug

SEQ ID NO: 1336621 - RNA, 18 nt, Human
ccaaaaaauuccaaaagu

SEQ ID NO: 1336622 - RNA, 23 nt, Human
ccaaaaaauuccaaaaguuuuaa

SEQ ID NO: 1336623 - RNA, 23 nt, Human
ccaucuggaaacauuuuucuggu

SEQ ID NO: 1336624 - RNA, 19 nt, Human
ccgcaaaccccgcaagcuc

SEQ ID NO: 1336625 - RNA, 21 nt, Human
ccgcaagcucuucucucagcc

SEQ ID NO: 1336626 - RNA, 25 nt, Human
ccuacauucuaaaaccaucuggaaa

SEQ ID NO: 1336627 - RNA, 19 nt, Human
ccuccagcccuucagucgg

SEQ ID NO: 1336628 - RNA, 20 nt, Human
ccuccagcccuucagucggg

SEQ ID NO: 1336629 - RNA, 26 nt, Human
ccucucaugaccagaagcggacggag

SEQ ID NO: 1336630 - RNA, 25 nt, Human
cgcaaaccccgcaagcucuucucuc

SEQ ID NO: 1336631 - RNA, 20 nt, Human
cggcauacaccgccuccagc

SEQ ID NO: 1336632 - RNA, 20 nt, Human
cugaaaguucucagaugccc

SEQ ID NO: 1336633 - RNA, 22 nt, Human
gaaaguucucagaugcccaaaa

SEQ ID NO: 1336634 - RNA, 20 nt, Human
gagguagaguaaagccagca

SEQ ID NO: 1336635 - RNA, 22 nt, Human
gcaagaacagcggcauacaccg

SEQ ID NO: 1336636 - RNA, 23 nt, Human
gcggcauacaccgccuccagccc

SEQ ID NO: 1336637 - RNA, 24 nt, Human
gcuucaggccucugucuccucuca

SEQ ID NO: 1336638 - RNA, 19 nt, Human
guaaaaccugucugaaagu

SEQ ID NO: 1336639 - RNA, 21 nt, Human
gucggggccaucaaccgcaaa

SEQ ID NO: 1336640 - RNA, 18 nt, Human
uaaagccagcaguauccc

SEQ ID NO: 1336641 - RNA, 18 nt, Human
uaauguaucauccucagu

SEQ ID NO: 1336642 - RNA, 22 nt, Human
uaccugaguucucuaaaaccac

SEQ ID NO: 1336643 - RNA, 22 nt, Human
uaucaguagucauuaugaccaa

SEQ ID NO: 1336644 - RNA, 23 nt, Human
uauuaagaauuuuuaggauggga

SEQ ID NO: 1336645 - RNA, 22 nt, Human
ucagaugcccaaaaaauuccaa

SEQ ID NO: 1336646 - RNA, 21 nt, Human
ucauaaguccuacauucuaaa

SEQ ID NO: 1336647 - RNA, 26 nt, Human
ugaaaaauauucuuuauucugaaaac

SEQ ID NO: 1336648 - RNA, 20 nt, Human
ugaaaguucucagaugccca

SEQ ID NO: 1336649 - RNA, 18 nt, Human
ugaaaucacaguucugca

SEQ ID NO: 1336650 - RNA, 23 nt, Human
ugaacaaaauucuacuuuuagau

SEQ ID NO: 1336651 - RNA, 19 nt, Human
ugaacaaauaucauccaca

SEQ ID NO: 1336652 - RNA, 21 nt, Human
ugacccagaugucuuugcuuc

SEQ ID NO: 1336653 - RNA, 21 nt, Human
ugcccaaaaaauuccaaaagu

SEQ ID NO: 1336654 - RNA, 26 nt, Human
ugcccaaaaaauuccaaaaguuuuaa

SEQ ID NO: 1336655 - RNA, 24 nt, Human
uggugaauuggaucauaaguccua

SEQ ID NO: 1336656 - RNA, 23 nt, Human
ugucugaaaguucucagaugccc

SEQ ID NO: 1336657 - RNA, 20 nt, Human
uuuauauggucugaaaucac

SEQ ID NO: 1336658 - RNA, 23 nt, Human
uuuuuuuuuuuuuuugaauuuaa

SEQ ID NO: 1336659 - RNA, 24 nt, Human
uuuuuuuuuuuuuuuuuugaauuu

SEQ ID NO: 1336660 - RNA, 27 nt, Human
uuuuuuuuuuuuuuuuuuuuuuugggg

SEQ ID NO: 1336661 - RNA, 25 nt, Human
aaaaaaaauggaaaggcuucccagc

SEQ ID NO: 1336662 - RNA, 25 nt, Human
aaaaauuagcuaagaauauguuuaa

SEQ ID NO: 1336663 - RNA, 25 nt, Human
aaaacacuccaaacucuaugaaaca

SEQ ID NO: 1336664 - RNA, 23 nt, Human
aaacagacuugaacuauucacua

SEQ ID NO: 1336665 - RNA, 18 nt, Human
aaagcauggccacaugca

SEQ ID NO: 1336666 - RNA, 22 nt, Human
aacacuuuuuaauguaguacau

SEQ ID NO: 1336667 - RNA, 22 nt, Human
aauguaguacauauauaucuua

SEQ ID NO: 1336668 - RNA, 22 nt, Human
acaccccagaguacucagaaga

SEQ ID NO: 1336669 - RNA, 18 nt, Human
acaccuucagccugaaaa

SEQ ID NO: 1336670 - RNA, 27 nt, Human
acagaacccaauagaagacagaaccca

SEQ ID NO: 1336671 - RNA, 22 nt, Human
acagauugcaguaauaugugug

SEQ ID NO: 1336672 - RNA, 21 nt, Human
acaggaacaauaucuuggcac

SEQ ID NO: 1336673 - RNA, 24 nt, Human
acucacuccaacacacacgugugc

SEQ ID NO: 1336674 - RNA, 21 nt, Human
agaaaaauaaaaaggcacaac

SEQ ID NO: 1336675 - RNA, 29 nt, Human
agacacauucucucacucacuccaacacu

SEQ ID NO: 1336676 - RNA, 22 nt, Human
agacuugaacuauucacuaaug

SEQ ID NO: 1336677 - RNA, 22 nt, Human
agaucuuuaacaugcagagaau

SEQ ID NO: 1336678 - RNA, 19 nt, Human
auauguguguguguauaua

SEQ ID NO: 1336679 - RNA, 29 nt, Human
auguguguguguauauauauauuuaaugu

SEQ ID NO: 1336680 - RNA, 18 nt, Human
caaaagauauuuuuugcc

SEQ ID NO: 1336681 - RNA, 22 nt, Human
caacgagucauaugacugaacc

SEQ ID NO: 1336682 - RNA, 19 nt, Human
caacgguaccacaucuugu

SEQ ID NO: 1336683 - RNA, 23 nt, Human
caacugccaccaauuucaaaaac

SEQ ID NO: 1336684 - RNA, 22 nt, Human
caauagaagacagaacccaaca

SEQ ID NO: 1336685 - RNA, 21 nt, Human
caauaugaaauccucuuagga

SEQ ID NO: 1336686 - RNA, 22 nt, Human
cacaacaguaagcuaaagagaa

SEQ ID NO: 1336687 - RNA, 23 nt, Human
cacagaacccaauagaagacaga

SEQ ID NO: 1336688 - RNA, 19 nt, Human
cacauucucucacucacuc

SEQ ID NO: 1336689 - RNA, 20 nt, Human
caccuucagccugaaaacau

SEQ ID NO: 1336690 - RNA, 22 nt, Human
cacuaagucuacaaauuguuca

SEQ ID NO: 1336691 - RNA, 28 nt, Human
cacucacuccaacacacacgugugcaca

SEQ ID NO: 1336692 - RNA, 21 nt, Human
cacuuugcacuuuugugacac

SEQ ID NO: 1336693 - RNA, 24 nt, Human
cagaaagccguuaaaaaaaaaaaa

SEQ ID NO: 1336694 - RNA, 19 nt, Human
cagcccccguacccccuac

SEQ ID NO: 1336695 - RNA, 23 nt, Human
cagcccccguacccccuaccgcc

SEQ ID NO: 1336696 - RNA, 19 nt, Human
caguaaaaccugucaaaac

SEQ ID NO: 1336697 - RNA, 23 nt, Human
caucucaauacacucuuaaacag

SEQ ID NO: 1336698 - RNA, 20 nt, Human
ccaaaacaauuuaaugcuga

SEQ ID NO: 1336699 - RNA, 23 nt, Human
ccaacacacacgugugcacacag

SEQ ID NO: 1336700 - RNA, 18 nt, Human
ccaauagaagacagaacc

SEQ ID NO: 1336701 - RNA, 19 nt, Human
ccagaaaucccccgccucc

SEQ ID NO: 1336702 - RNA, 21 nt, Human
cccccguacccccuaccgccu

SEQ ID NO: 1336703 - RNA, 23 nt, Human
ccgccucuuccuccuccacuccc

SEQ ID NO: 1336704 - RNA, 19 nt, Human
ccguacccccuaccgccuc

SEQ ID NO: 1336705 - RNA, 23 nt, Human
ccguuaaaaaaaaaaaaauggaa

SEQ ID NO: 1336706 - RNA, 21 nt, Human
ccuguaucaaaacacuccaaa

SEQ ID NO: 1336707 - RNA, 22 nt, Human
cgauaguuaagauuguguacac

SEQ ID NO: 1336708 - RNA, 24 nt, Human
cgcuucaacgguaccacaucuugu

SEQ ID NO: 1336709 - RNA, 25 nt, Human
cuaaaguaggaccuaccagaaaucc

SEQ ID NO: 1336710 - RNA, 18 nt, Human
cucacuccaacacacacg

SEQ ID NO: 1336711 - RNA, 24 nt, Human
cucauaacucauacugcugugauu

SEQ ID NO: 1336712 - RNA, 19 nt, Human
cucucacucacuccaacac

SEQ ID NO: 1336713 - RNA, 19 nt, Human
cuuccaguaaaaccuguca

SEQ ID NO: 1336714 - RNA, 21 nt, Human
cuucugggaccagcccccgua

SEQ ID NO: 1336715 - RNA, 24 nt, Human
gaaauuauguauucauccaccccc

SEQ ID NO: 1336716 - RNA, 21 nt, Human
gagaaaauaccagcuccccau

SEQ ID NO: 1336717 - RNA, 24 nt, Human
ggccacaugcacagacacauucuc

SEQ ID NO: 1336718 - RNA, 18 nt, Human
guaauugcuuuaaaacuc

SEQ ID NO: 1336719 - RNA, 25 nt, Human
gugugcacacauacucacaccccag

SEQ ID NO: 1336720 - RNA, 25 nt, Human
uaaaguaggaccuaccagaaauccc

SEQ ID NO: 1336721 - RNA, 25 nt, Human
uaaauuagaaacuaaccacaaauua

SEQ ID NO: 1336722 - RNA, 22 nt, Human
uaacagcaauuuuuaaaguaaa

SEQ ID NO: 1336723 - RNA, 22 nt, Human
uaacaugcagagaaugccaucu

SEQ ID NO: 1336724 - RNA, 19 nt, Human
uaagaugaaaaaccuaggc

SEQ ID NO: 1336725 - RNA, 20 nt, Human
uaagaugaaaaaccuaggca

SEQ ID NO: 1336726 - RNA, 20 nt, Human
uaauguaguacauauauauc

SEQ ID NO: 1336727 - RNA, 19 nt, Human
uacaacugauuuacagaug

SEQ ID NO: 1336728 - RNA, 24 nt, Human
uacaugagaaauuauguauucauc

SEQ ID NO: 1336729 - RNA, 20 nt, Human
uaccacaucuuguccuaaag

SEQ ID NO: 1336730 - RNA, 24 nt, Human
uaccacaucuuguccuaaaguagg

SEQ ID NO: 1336731 - RNA, 21 nt, Human
uagaaaaauaaaaaggcacaa

SEQ ID NO: 1336732 - RNA, 24 nt, Human
uagaaacuaaccacaaauuagggc

SEQ ID NO: 1336733 - RNA, 20 nt, Human
uagaaccaaaacaauuuaau

SEQ ID NO: 1336734 - RNA, 24 nt, Human
uagaaccaaaacaauuuaaugcug

SEQ ID NO: 1336735 - RNA, 22 nt, Human
uaguaguauguuuuccaccacg

SEQ ID NO: 1336736 - RNA, 20 nt, Human
uauaauaauaaauuauagua

SEQ ID NO: 1336737 - RNA, 21 nt, Human
uauauacacacacgccaauca

SEQ ID NO: 1336738 - RNA, 24 nt, Human
uauauauuuauccauauauacaca

SEQ ID NO: 1336739 - RNA, 22 nt, Human
uaugacugaacccagcuaaagc

SEQ ID NO: 1336740 - RNA, 18 nt, Human
uauguauucauccacccc

SEQ ID NO: 1336741 - RNA, 21 nt, Human
ucaaaacacuccaaacucuau

SEQ ID NO: 1336742 - RNA, 22 nt, Human
ucaaaacacuccaaacucuaug

SEQ ID NO: 1336743 - RNA, 26 nt, Human
ucccccgccuccgccaucuucuggga

SEQ ID NO: 1336744 - RNA, 23 nt, Human
ucuaccauuucacauccuuuuca

SEQ ID NO: 1336745 - RNA, 24 nt, Human
ucuucugcucaucacauauacuuc

SEQ ID NO: 1336746 - RNA, 23 nt, Human
ugaaaaaccuaggcauuccacca

SEQ ID NO: 1336747 - RNA, 18 nt, Human
ugcacacauacucacacc

SEQ ID NO: 1336748 - RNA, 26 nt, Human
ugcaguaauauguguguguguauaua

SEQ ID NO: 1336749 - RNA, 19 nt, Human
ugcuuacaaaguugauucu

SEQ ID NO: 1336750 - RNA, 21 nt, Human
uggaguuuccuauaugcucca

SEQ ID NO: 1336751 - RNA, 20 nt, Human
ugggaccagcccccguaccc

SEQ ID NO: 1336752 - RNA, 23 nt, Human
uguauucauccacccccaagacu

SEQ ID NO: 1336753 - RNA, 19 nt, Human
ugugcaaaagcaaugagau

SEQ ID NO: 1336754 - RNA, 21 nt, Human
ugugcaaaagcaaugagauuc

SEQ ID NO: 1336755 - RNA, 22 nt, Human
ugugcacacauacucacacccc

SEQ ID NO: 1336756 - RNA, 20 nt, Human
uguguacacauauucaauau

SEQ ID NO: 1336757 - RNA, 21 nt, Human
uguguacacauauucaauaug

SEQ ID NO: 1336758 - RNA, 26 nt, Human
uguguauauauauauuuauccauaua

SEQ ID NO: 1336759 - RNA, 18 nt, Human
uguguguguauauauaua

SEQ ID NO: 1336760 - RNA, 18 nt, Human
uguguguguauauauaua

SEQ ID NO: 1336761 - RNA, 19 nt, Human
uguguguguauauauauau

SEQ ID NO: 1336762 - RNA, 21 nt, Human
uguuuguuuuuggcuuuccuc

SEQ ID NO: 1336763 - RNA, 21 nt, Human
uuaaaaaaaaaaaaauggaaa

SEQ ID NO: 1336764 - RNA, 23 nt, Human
uuaaaguaaacacaucauagacc

SEQ ID NO: 1336765 - RNA, 27 nt, Human
uuacaaaguugauucuaaaaaauauac

SEQ ID NO: 1336766 - RNA, 23 nt, Human
uuacauauuuaauacguguugcu

SEQ ID NO: 1336767 - RNA, 21 nt, Human
uucauccacccccaagacugc

SEQ ID NO: 1336768 - RNA, 22 nt, Human
uucugggaccagcccccguacc

SEQ ID NO: 1336769 - RNA, 22 nt, Human
uugaaaccagaaguucauuuuc

SEQ ID NO: 1336770 - RNA, 23 nt, Human
uuguuuuuggcuuuccucuuauu

SEQ ID NO: 1336771 - RNA, 20 nt, Human
uuuuuguuuguuuguuuuuu

SEQ ID NO: 1336772 - RNA, 19 nt, Human
aaccaccgaagagcuaagc

SEQ ID NO: 1336773 - RNA, 24 nt, Human
aauaaaaucauaacauaacagcua

SEQ ID NO: 1336774 - RNA, 22 nt, Human
aaugacaggagagguuuaacug

SEQ ID NO: 1336775 - RNA, 29 nt, Human
acaaagaauaaaaucauaacauaacagcu

SEQ ID NO: 1336776 - RNA, 19 nt, Human
caccgaagagcuaagcgac

SEQ ID NO: 1336777 - RNA, 20 nt, Human
caggagagguuuaacugaug

SEQ ID NO: 1336778 - RNA, 23 nt, Human
ccacuuccauuucaauucugaag

SEQ ID NO: 1336779 - RNA, 24 nt, Human
cuaagcgacuuggcccagcugcag

SEQ ID NO: 1336780 - RNA, 22 nt, Human
cuuuauucuaauuaacucacaa

SEQ ID NO: 1336781 - RNA, 21 nt, Human
gacuuggcccagcugcagugg

SEQ ID NO: 1336782 - RNA, 18 nt, Human
uaaggaggccacacaaac

SEQ ID NO: 1336783 - RNA, 25 nt, Human
uagggacacccccacuuccauuuca

SEQ ID NO: 1336784 - RNA, 21 nt, Human
uccggacgugugacaaccacc

SEQ ID NO: 1336785 - RNA, 21 nt, Human
uuggcccagcugcagugguug

SEQ ID NO: 1336786 - RNA, 22 nt, Human
uuuccaucucuccagguugaac

SEQ ID NO: 1336787 - RNA, 18 nt, Human
uuuuuuuuuuuuuuuuug

SEQ ID NO: 1336788 - RNA, 19 nt, Human
uuuuuuuuuuuuuuuuugu

SEQ ID NO: 1336789 - RNA, 19 nt, Human
aaaaaacccaaucaaugac

SEQ ID NO: 1336790 - RNA, 19 nt, Human
aaaaaacccaaucaaugag

SEQ ID NO: 1336791 - RNA, 30 nt, Human
aaaacaaauuaagaauaaagaaaaaacccc

SEQ ID NO: 1336792 - RNA, 24 nt, Human
aaagagacuuuuccgaaccaccga

SEQ ID NO: 1336793 - RNA, 24 nt, Human
aaaguucugagauuacaggcauga

SEQ ID NO: 1336794 - RNA, 20 nt, Human
aacaaagagacuuuuccgaa

SEQ ID NO: 1336795 - RNA, 18 nt, Human
aacuugacauaucaaugg

SEQ ID NO: 1336796 - RNA, 30 nt, Human
aagaauaaagaaaaaacccaaucaaugacc

SEQ ID NO: 1336797 - RNA, 19 nt, Human
aaguaacccauaauggggg

SEQ ID NO: 1336798 - RNA, 18 nt, Human
accauguuggccaggcug

SEQ ID NO: 1336799 - RNA, 22 nt, Human
accccccgcucccaugacugcc

SEQ ID NO: 1336800 - RNA, 24 nt, Human
accuugugauccaccugccucggc

SEQ ID NO: 1336801 - RNA, 27 nt, Human
acucugucgcccaggcuggaggggagu

SEQ ID NO: 1336802 - RNA, 22 nt, Human
agauuacaggcaugagccaccg

SEQ ID NO: 1336803 - RNA, 18 nt, Human
aggcgccugccaccaagc

SEQ ID NO: 1336804 - RNA, 23 nt, Human
aggcuggucucaacuccugaccu

SEQ ID NO: 1336805 - RNA, 19 nt, Human
aguagcugggauuacaggc

SEQ ID NO: 1336806 - RNA, 24 nt, Human
agugauucuccugccucagccucc

SEQ ID NO: 1336807 - RNA, 23 nt, Human
auaaugggggcuucaaagaagaa

SEQ ID NO: 1336808 - RNA, 21 nt, Human
augaaggaaagaaccuggaac

SEQ ID NO: 1336809 - RNA, 22 nt, Human
augggguuucaccauguuggcc

SEQ ID NO: 1336810 - RNA, 22 nt, Human
auuacaggcgccugccaccaag

SEQ ID NO: 1336811 - RNA, 18 nt, Human
auucuccugccucagccu

SEQ ID NO: 1336812 - RNA, 24 nt, Human
caaaguucugagauuacaggcaug

SEQ ID NO: 1336813 - RNA, 18 nt, Human
caacauuaaaugacucgu

SEQ ID NO: 1336814 - RNA, 23 nt, Human
caaccuccaccuccuggguacaa

SEQ ID NO: 1336815 - RNA, 22 nt, Human
caagugaaauccagucucuucc

SEQ ID NO: 1336816 - RNA, 18 nt, Human
caagugauucuccugccu

SEQ ID NO: 1336817 - RNA, 24 nt, Human
caaugaaucuaaaaucgggaacac

SEQ ID NO: 1336818 - RNA, 24 nt, Human
cacaaccccccgcucccaugacug

SEQ ID NO: 1336819 - RNA, 25 nt, Human
caccaagcccagcuaauuuuuugua

SEQ ID NO: 1336820 - RNA, 21 nt, Human
caccauguuggccaggcuggu

SEQ ID NO: 1336821 - RNA, 24 nt, Human
caccauguuggccaggcuggucuc

SEQ ID NO: 1336822 - RNA, 27 nt, Human
caccauguuggccaggcuggucucaac

SEQ ID NO: 1336823 - RNA, 21 nt, Human
caccgcaaccuccaccuccug

SEQ ID NO: 1336824 - RNA, 23 nt, Human
caccgcaaccuccaccuccuggg

SEQ ID NO: 1336825 - RNA, 23 nt, Human
caccugccucggccucccaaagu

SEQ ID NO: 1336826 - RNA, 22 nt, Human
cacucugucgcccaggcuggag

SEQ ID NO: 1336827 - RNA, 21 nt, Human
cagagaggaguccuaauagug

SEQ ID NO: 1336828 - RNA, 20 nt, Human
cagccuccugaguagcuggg

SEQ ID NO: 1336829 - RNA, 21 nt, Human
caggagucggggugcgggcac

SEQ ID NO: 1336830 - RNA, 22 nt, Human
caucgaauagcaaacgcugcca

SEQ ID NO: 1336831 - RNA, 23 nt, Human
cauguuggccaggcuggucucaa

SEQ ID NO: 1336832 - RNA, 24 nt, Human
ccaaaguucugagauuacaggcau

SEQ ID NO: 1336833 - RNA, 19 nt, Human
ccaccgaaccaaaggacuc

SEQ ID NO: 1336834 - RNA, 20 nt, Human
ccaccgaaccaaaggacucc

SEQ ID NO: 1336835 - RNA, 18 nt, Human
ccgcaaccuccaccuccu

SEQ ID NO: 1336836 - RNA, 22 nt, Human
ccgcaaccuccaccuccugggu

SEQ ID NO: 1336837 - RNA, 20 nt, Human
ccgcucccaugacugccaaa

SEQ ID NO: 1336838 - RNA, 24 nt, Human
ccuccuggguacaagugauucucc

SEQ ID NO: 1336839 - RNA, 19 nt, Human
ccugaccuugugauccacc

SEQ ID NO: 1336840 - RNA, 21 nt, Human
ccugaccuugugauccaccug

SEQ ID NO: 1336841 - RNA, 23 nt, Human
ccugaguagcugggauuacaggc

SEQ ID NO: 1336842 - RNA, 24 nt, Human
ccugaguagcugggauuacaggcg

SEQ ID NO: 1336843 - RNA, 23 nt, Human
ccugccucagccuccugaguagc

SEQ ID NO: 1336844 - RNA, 24 nt, Human
ccugccucagccuccugaguagcu

SEQ ID NO: 1336845 - RNA, 23 nt, Human
ccuggguacaagugauucuccuc

SEQ ID NO: 1336846 - RNA, 20 nt, Human
ccuuuuggcaaaaaugcuua

SEQ ID NO: 1336847 - RNA, 19 nt, Human
cgggaacacacauugcagc

SEQ ID NO: 1336848 - RNA, 20 nt, Human
cggggggcuaggacgcgacg

SEQ ID NO: 1336849 - RNA, 19 nt, Human
cuacauuaaacccugcaga

SEQ ID NO: 1336850 - RNA, 24 nt, Human
cucacucugucgcccaggcuggag

SEQ ID NO: 1336851 - RNA, 24 nt, Human
cucagccuccugaguagcugggau

SEQ ID NO: 1336852 - RNA, 21 nt, Human
cucccaaaguucugagauuac

SEQ ID NO: 1336853 - RNA, 24 nt, Human
cuccugaccuugugauccaccugc

SEQ ID NO: 1336854 - RNA, 25 nt, Human
cucggccucccaaaguucugagauu

SEQ ID NO: 1336855 - RNA, 22 nt, Human
cugaguagcugggauuacaggc

SEQ ID NO: 1336856 - RNA, 20 nt, Human
cugccucggccucccaaagu

SEQ ID NO: 1336857 - RNA, 18 nt, Human
cugcuucauuccaagaau

SEQ ID NO: 1336858 - RNA, 22 nt, Human
cuggaggggaguggcacaaucu

SEQ ID NO: 1336859 - RNA, 23 nt, Human
gaauagcaaacgcugccaaagga

SEQ ID NO: 1336860 - RNA, 22 nt, Human
gaccuugugauccaccugccuc

SEQ ID NO: 1336861 - RNA, 22 nt, Human
gaccuugugauccaccugccuc

SEQ ID NO: 1336862 - RNA, 24 nt, Human
gaccuugugauccaccugccucgg

SEQ ID NO: 1336863 - RNA, 20 nt, Human
gacucgcuucucucugacac

SEQ ID NO: 1336864 - RNA, 28 nt, Human
gagaauuaugaaagguugaccgguaccc

SEQ ID NO: 1336865 - RNA, 18 nt, Human
gagaugggguuucaccau

SEQ ID NO: 1336866 - RNA, 24 nt, Human
gagaugggguuucaccauguuggc

SEQ ID NO: 1336867 - RNA, 18 nt, Human
gagggcagagaggagucc

SEQ ID NO: 1336868 - RNA, 26 nt, Human
gaguagcugggauuacaggcgccugc

SEQ ID NO: 1336869 - RNA, 22 nt, Human
gaguugcagaguguguaaagug

SEQ ID NO: 1336870 - RNA, 18 nt, Human
gauuacaggcaugagcca

SEQ ID NO: 1336871 - RNA, 23 nt, Human
gauuacaggcaugagccaccggc

SEQ ID NO: 1336872 - RNA, 18 nt, Human
gauuacaggcgccugcca

SEQ ID NO: 1336873 - RNA, 23 nt, Human
gcccagcuaauuuuuuguauuuu

SEQ ID NO: 1336874 - RNA, 22 nt, Human
ggaacucccuccucagcagcug

SEQ ID NO: 1336875 - RNA, 21 nt, Human
gggaacacacauugcagcccc

SEQ ID NO: 1336876 - RNA, 22 nt, Human
gggguuucaccauguuggccag

SEQ ID NO: 1336877 - RNA, 22 nt, Human
ggguacaagugauucuccugcc

SEQ ID NO: 1336878 - RNA, 18 nt, Human
ggguuucaccauguuggc

SEQ ID NO: 1336879 - RNA, 19 nt, Human
ggucucaacuccugaccuu

SEQ ID NO: 1336880 - RNA, 23 nt, Human
guagagaugggguuucaccaugu

SEQ ID NO: 1336881 - RNA, 18 nt, Human
guagcugggauuacaggc

SEQ ID NO: 1336882 - RNA, 21 nt, Human
guccuacauuaaacccugcag

SEQ ID NO: 1336883 - RNA, 24 nt, Human
gugauccaccugccucggccuccc

SEQ ID NO: 1336884 - RNA, 23 nt, Human
gugauucuccugccucagccucc

SEQ ID NO: 1336885 - RNA, 18 nt, Human
uaaguaagcagaguggau

SEQ ID NO: 1336886 - RNA, 22 nt, Human
uaauuagccucauccucaugac

SEQ ID NO: 1336887 - RNA, 24 nt, Human
uaauuuuuuguauuuuuaguagag

SEQ ID NO: 1336888 - RNA, 23 nt, Human
uacaagugauucuccugccucag

SEQ ID NO: 1336889 - RNA, 24 nt, Human
uacaagugauucuccugccucagc

SEQ ID NO: 1336890 - RNA, 21 nt, Human
uacaggcaugagccaccggcc

SEQ ID NO: 1336891 - RNA, 20 nt, Human
uagaaggagggcagagagga

SEQ ID NO: 1336892 - RNA, 22 nt, Human
uagagaugggguuucaccaugu

SEQ ID NO: 1336893 - RNA, 24 nt, Human
uaguagagaugggguuucaccaug

SEQ ID NO: 1336894 - RNA, 26 nt, Human
uaguagagaugggguuucaccauguu

SEQ ID NO: 1336895 - RNA, 23 nt, Human
uagugagucacaggauuauugaa

SEQ ID NO: 1336896 - RNA, 24 nt, Human
ucaccgcaaccuccaccuccuggg

SEQ ID NO: 1336897 - RNA, 26 nt, Human
ucaccgcaaccuccaccuccugggua

SEQ ID NO: 1336898 - RNA, 20 nt, Human
ucagccuccugaguagcugg

SEQ ID NO: 1336899 - RNA, 24 nt, Human
ucccaaaguucugagauuacaggc

SEQ ID NO: 1336900 - RNA, 24 nt, Human
uccugaguagcugggauuacaggc

SEQ ID NO: 1336901 - RNA, 24 nt, Human
uccuggguacaagugauucuccug

SEQ ID NO: 1336902 - RNA, 21 nt, Human
ucgcccaggcuggaggggagu

SEQ ID NO: 1336903 - RNA, 23 nt, Human
ucucacucugucgcccaggcugg

SEQ ID NO: 1336904 - RNA, 24 nt, Human
ucucacucugucgcccaggcugga

SEQ ID NO: 1336905 - RNA, 26 nt, Human
ucucacucugucgcccaggcuggagg

SEQ ID NO: 1336906 - RNA, 27 nt, Human
ucucacucugucgcccaggcuggaggg

SEQ ID NO: 1336907 - RNA, 24 nt, Human
ucuccugccucagccuccugagua

SEQ ID NO: 1336908 - RNA, 18 nt, Human
ucugucgcccaggcugga

SEQ ID NO: 1336909 - RNA, 20 nt, Human
ugaaggaaagaaccuggaac

SEQ ID NO: 1336910 - RNA, 23 nt, Human
ugaaggaaagaaccuggaaccga

SEQ ID NO: 1336911 - RNA, 23 nt, Human
ugaaggcacuuucccuccuccca

SEQ ID NO: 1336912 - RNA, 19 nt, Human
ugacucguggugauggggu

SEQ ID NO: 1336913 - RNA, 21 nt, Human
ugagauuacaggcaugagcca

SEQ ID NO: 1336914 - RNA, 22 nt, Human
ugagauuacaggcaugagccac

SEQ ID NO: 1336915 - RNA, 23 nt, Human
ugagauuacaggcaugagccacc

SEQ ID NO: 1336916 - RNA, 24 nt, Human
ugagauuacaggcaugagccaccg

SEQ ID NO: 1336917 - RNA, 26 nt, Human
ugagauuacaggcaugagccaccggc

SEQ ID NO: 1336918 - RNA, 23 nt, Human
ugaguuuggagaaggaacaaaga

SEQ ID NO: 1336919 - RNA, 21 nt, Human
ugcagccccuguuugggaaau

SEQ ID NO: 1336920 - RNA, 23 nt, Human
ugccaaaggaguagucccuggau

SEQ ID NO: 1336921 - RNA, 24 nt, Human
ugccucagccuccugaguagcugg

SEQ ID NO: 1336922 - RNA, 24 nt, Human
ugccucggccucccaaaguucuga

SEQ ID NO: 1336923 - RNA, 19 nt, Human
ugcuuugcuuacauaacuc

SEQ ID NO: 1336924 - RNA, 21 nt, Human
uggaaccgaguagccugcuuc

SEQ ID NO: 1336925 - RNA, 21 nt, Human
uggagcaggagucggggugcg

SEQ ID NO: 1336926 - RNA, 24 nt, Human
uggcacaaucucaguucaccgcaa

SEQ ID NO: 1336927 - RNA, 23 nt, Human
uggccaggcuggucucaacuccu

SEQ ID NO: 1336928 - RNA, 21 nt, Human
ugggauuacaggcgccugcca

SEQ ID NO: 1336929 - RNA, 22 nt, Human
ugggauuacaggcgccugccac

SEQ ID NO: 1336930 - RNA, 24 nt, Human
ugggauuacaggcgccugccacca

SEQ ID NO: 1336931 - RNA, 24 nt, Human
ugggguuucaccauguuggccagg

SEQ ID NO: 1336932 - RNA, 24 nt, Human
uguagguagaauucaauggaagaa

SEQ ID NO: 1336933 - RNA, 21 nt, Human
uuagcuauuagcuuugcagug

SEQ ID NO: 1336934 - RNA, 18 nt, Human
uuaguagagaugggguuu

SEQ ID NO: 1336935 - RNA, 22 nt, Human
uuaguagagaugggguuucacc

SEQ ID NO: 1336936 - RNA, 24 nt, Human
uuaguagagaugggguuucaccau

SEQ ID NO: 1336937 - RNA, 21 nt, Human
uucuuuggagguaaguaagca

SEQ ID NO: 1336938 - RNA, 18 nt, Human
uuggaaacuugacauauc

SEQ ID NO: 1336939 - RNA, 24 nt, Human
uuggugacagcuuuaaaaaacaaa

SEQ ID NO: 1336940 - RNA, 23 nt, Human
uuguauuuuuaguagagaugggg

SEQ ID NO: 1336941 - RNA, 23 nt, Human
uuuacauuuuuauauauguugcu

SEQ ID NO: 1336942 - RNA, 24 nt, Human
uuucaccauguuggccaggcuggu

SEQ ID NO: 1336943 - RNA, 24 nt, Human
uuuuuaguagagaugggguuucac

SEQ ID NO: 1336944 - RNA, 21 nt, Human
uuuuuguauuuuuaguagaga

SEQ ID NO: 1336945 - RNA, 24 nt, Human
uuuuuuguauuuuuaguagagaug

SEQ ID NO: 1336946 - RNA, 20 nt, Human
uuuuuuuuuuuuaaaagaag

SEQ ID NO: 1336947 - RNA, 26 nt, Human
uuuuuuuuuuuuuaaaagaagucuca

SEQ ID NO: 1336948 - RNA, 23 nt, Human
uuuuuuuuuuuuuuuuuuaaaag

SEQ ID NO: 1336949 - RNA, 21 nt, Human
aauacaaaacagugaaucaga

SEQ ID NO: 1336950 - RNA, 20 nt, Human
acacugcagcagcagcaaac

SEQ ID NO: 1336951 - RNA, 19 nt, Human
caaaacagugaaucagagc

SEQ ID NO: 1336952 - RNA, 25 nt, Human
cagcagcagcaaacgaguguuagcu

SEQ ID NO: 1336953 - RNA, 18 nt, Human
ccagccugcuccugcagu

SEQ ID NO: 1336954 - RNA, 21 nt, Human
cucugugccagccugcuccug

SEQ ID NO: 1336955 - RNA, 23 nt, Human
cucugugccagccugcuccugca

SEQ ID NO: 1336956 - RNA, 25 nt, Human
cugcagcagcagcaaacgaguguua

SEQ ID NO: 1336957 - RNA, 19 nt, Human
uacaaaacagugaaucaga

SEQ ID NO: 1336958 - RNA, 26 nt, Human
uagcucuaaccaaggagaacacagau

SEQ ID NO: 1336959 - RNA, 23 nt, Human
uauaacccuuuuagaaaauacaa

SEQ ID NO: 1336960 - RNA, 22 nt, Human
ucagagccuaacuucuagcugc

SEQ ID NO: 1336961 - RNA, 20 nt, Human
uccacacugcagcagcagca

SEQ ID NO: 1336962 - RNA, 21 nt, Human
uccucuucucugugccagccu

SEQ ID NO: 1336963 - RNA, 24 nt, Human
ucuaaccaaggagaacacagaucu

SEQ ID NO: 1336964 - RNA, 18 nt, Human
ucucugugccagccugcu

SEQ ID NO: 1336965 - RNA, 23 nt, Human
ugaaucagagccuaacuucuagc

SEQ ID NO: 1336966 - RNA, 22 nt, Human
ugccagccugcuccugcagugc

SEQ ID NO: 1336967 - RNA, 28 nt, Human
ugccagccugcuccugcagugcuuuccc

SEQ ID NO: 1336968 - RNA, 24 nt, Human
uuccacacugcagcagcagcaaac

SEQ ID NO: 1336969 - RNA, 23 nt, Human
uuuuuuuuuuccauuuccacacu

SEQ ID NO: 1336970 - RNA, 22 nt, Human
uuuuuuuuuuuuuuuuccauuu

SEQ ID NO: 1336971 - RNA, 26 nt, Human
uuuuuuuuuuuuuuuuuuuuccauuu

SEQ ID NO: 1336972 - RNA, 24 nt, Human
uuuuuuuuuuuuuuuuuuuuuccu

SEQ ID NO: 1336973 - RNA, 18 nt, Human
caggcgaccucagagcca

SEQ ID NO: 1336974 - RNA, 19 nt, Human
ccagccugucccuucuggg

SEQ ID NO: 1336975 - RNA, 21 nt, Human
cccgcuccacuuccuuuuucu

SEQ ID NO: 1336976 - RNA, 20 nt, Human
ccuccauuuuggaugaaggc

SEQ ID NO: 1336977 - RNA, 20 nt, Human
cgggggccuggcuccuccau

SEQ ID NO: 1336978 - RNA, 21 nt, Human
uaucuuuaaaagugccuuagg

SEQ ID NO: 1336979 - RNA, 19 nt, Human
uccugcacgccacggcugc

SEQ ID NO: 1336980 - RNA, 20 nt, Human
uccugcacgccacggcugca

SEQ ID NO: 1336981 - RNA, 22 nt, Human
uccugcacgccacggcugcacg

SEQ ID NO: 1336982 - RNA, 18 nt, Human
ucuugacugaagcggggg

SEQ ID NO: 1336983 - RNA, 18 nt, Human
ugaagcgggggccuggcu

SEQ ID NO: 1336984 - RNA, 21 nt, Human
ugccuuaggggaacccugucc

SEQ ID NO: 1336985 - RNA, 18 nt, Human
uuuuuuuuuuuuuuuuug

SEQ ID NO: 1336986 - RNA, 21 nt, Human
aggcucuaaugcucuaaggug

SEQ ID NO: 1336987 - RNA, 22 nt, Human
gggagcaccuauagaggcucua

SEQ ID NO: 1336988 - RNA, 19 nt, Human
uaaggugacagugaugagg

SEQ ID NO: 1336989 - RNA, 19 nt, Human
uggggagggcagagauugg

SEQ ID NO: 1336990 - RNA, 21 nt, Human
uggggagggcagagauugggg

SEQ ID NO: 1336991 - RNA, 19 nt, Human
accaccugccacuccuccu

SEQ ID NO: 1336992 - RNA, 22 nt, Human
acccaucgucuuacuacaucua

SEQ ID NO: 1336993 - RNA, 25 nt, Human
acgggcagggcagcacaggccgggu

SEQ ID NO: 1336994 - RNA, 19 nt, Human
acuaacccaauuccccaca

SEQ ID NO: 1336995 - RNA, 22 nt, Human
agagccccacuaacccaauucc

SEQ ID NO: 1336996 - RNA, 21 nt, Human
aggcccagggaggggcaacga

SEQ ID NO: 1336997 - RNA, 18 nt, Human
aggcccaggguaaggcag

SEQ ID NO: 1336998 - RNA, 23 nt, Human
agggggugugugugggagugagu

SEQ ID NO: 1336999 - RNA, 19 nt, Human
aguggcagcugggagcggc

SEQ ID NO: 1337000 - RNA, 26 nt, Human
auacaccccaaaauggcucaaaugcc

SEQ ID NO: 1337001 - RNA, 20 nt, Human
auggaaagcauccccacuau

SEQ ID NO: 1337002 - RNA, 23 nt, Human
caaaauaaaaacugugacuccag

SEQ ID NO: 1337003 - RNA, 22 nt, Human
caaaauggcucaaaugccuucc

SEQ ID NO: 1337004 - RNA, 18 nt, Human
caacugagcucugcaaaa

SEQ ID NO: 1337005 - RNA, 27 nt, Human
caccccagcagacaaucaaucccuaaa

SEQ ID NO: 1337006 - RNA, 22 nt, Human
caccgcuccagagagcagaaaa

SEQ ID NO: 1337007 - RNA, 20 nt, Human
caccggcccccguaucggcc

SEQ ID NO: 1337008 - RNA, 18 nt, Human
cacuacaugccgcagggc

SEQ ID NO: 1337009 - RNA, 20 nt, Human
cagacaaccaccgguucacc

SEQ ID NO: 1337010 - RNA, 24 nt, Human
cagacaaccaccgguucaccgcuc

SEQ ID NO: 1337011 - RNA, 19 nt, Human
cagagccccacuaacccaa

SEQ ID NO: 1337012 - RNA, 23 nt, Human
cagcagacaaucaaucccuaaau

SEQ ID NO: 1337013 - RNA, 22 nt, Human
cauccccacuaucacugcuugu

SEQ ID NO: 1337014 - RNA, 22 nt, Human
ccaccaccugccacuccuccug

SEQ ID NO: 1337015 - RNA, 25 nt, Human
ccaccggcccccguaucggccuccu

SEQ ID NO: 1337016 - RNA, 18 nt, Human
ccagagccccacuaaccc

SEQ ID NO: 1337017 - RNA, 18 nt, Human
cccagagccccacuaacc

SEQ ID NO: 1337018 - RNA, 19 nt, Human
cccagagccccacuaaccc

SEQ ID NO: 1337019 - RNA, 20 nt, Human
ccccacuaacccaauucccc

SEQ ID NO: 1337020 - RNA, 18 nt, Human
cccccuacccccccaccg

SEQ ID NO: 1337021 - RNA, 21 nt, Human
ccccgccaccaccugccacuc

SEQ ID NO: 1337022 - RNA, 23 nt, Human
ccccgccaccaccugccacuccu

SEQ ID NO: 1337023 - RNA, 22 nt, Human
ccccuacccccccaccggcccc

SEQ ID NO: 1337024 - RNA, 23 nt, Human
ccccuacccccccaccggccccc

SEQ ID NO: 1337025 - RNA, 20 nt, Human
cccuuuucuccucucaaccc

SEQ ID NO: 1337026 - RNA, 21 nt, Human
ccgcagacaaccaccgguuca

SEQ ID NO: 1337027 - RNA, 19 nt, Human
ccuccaacugagcucugca

SEQ ID NO: 1337028 - RNA, 22 nt, Human
ccucuccccacuacggaaccca

SEQ ID NO: 1337029 - RNA, 19 nt, Human
cgacugguucccaggccca

SEQ ID NO: 1337030 - RNA, 24 nt, Human
cgccacugacuaccucccuagcaa

SEQ ID NO: 1337031 - RNA, 21 nt, Human
cggcccccguaucggccuccu

SEQ ID NO: 1337032 - RNA, 18 nt, Human
cggccuccuggcccuccg

SEQ ID NO: 1337033 - RNA, 22 nt, Human
cggccuccuggcccuccguccc

SEQ ID NO: 1337034 - RNA, 20 nt, Human
cuaaaauggaaagcaucccc

SEQ ID NO: 1337035 - RNA, 21 nt, Human
cuaaaauggaaagcaucccca

SEQ ID NO: 1337036 - RNA, 24 nt, Human
cucaacccaccccagcagacaauc

SEQ ID NO: 1337037 - RNA, 20 nt, Human
cucuccccacuacggaaccc

SEQ ID NO: 1337038 - RNA, 22 nt, Human
cucugcaaaaccccgccaccac

SEQ ID NO: 1337039 - RNA, 25 nt, Human
cuggguccaccucucaccacucagg

SEQ ID NO: 1337040 - RNA, 30 nt, Human
cuuagaccccgggccuccugaccgccgagg

SEQ ID NO: 1337041 - RNA, 21 nt, Human
cuuugccgcccccuacccccc

SEQ ID NO: 1337042 - RNA, 25 nt, Human
gaagguggggcugaggcccagggua

SEQ ID NO: 1337043 - RNA, 23 nt, Human
gagaggucaugucacuugcacag

SEQ ID NO: 1337044 - RNA, 21 nt, Human
gagcucugcaaaaccccgcca

SEQ ID NO: 1337045 - RNA, 23 nt, Human
gcccugagacgggcagggcagca

SEQ ID NO: 1337046 - RNA, 21 nt, Human
ggaaaaguuuccuaaaaugga

SEQ ID NO: 1337047 - RNA, 23 nt, Human
gggcaacgacuuuggucuacauc

SEQ ID NO: 1337048 - RNA, 20 nt, Human
gguucccaggcccagggagg

SEQ ID NO: 1337049 - RNA, 18 nt, Human
guaccuccccagagcccc

SEQ ID NO: 1337050 - RNA, 22 nt, Human
gucaccucuccccacuacggaa

SEQ ID NO: 1337051 - RNA, 24 nt, Human
gucaccucuccccacuacggaacc

SEQ ID NO: 1337052 - RNA, 20 nt, Human
guccaccucucaccacucag

SEQ ID NO: 1337053 - RNA, 18 nt, Human
uaaaauggaaagcauccc

SEQ ID NO: 1337054 - RNA, 24 nt, Human
uaaggaaggaaugaugcuccuccc

SEQ ID NO: 1337055 - RNA, 22 nt, Human
uaaggcaguaaccucagcagag

SEQ ID NO: 1337056 - RNA, 21 nt, Human
uacaccccaaaauggcucaaa

SEQ ID NO: 1337057 - RNA, 20 nt, Human
uacaucuauacaccccaaaa

SEQ ID NO: 1337058 - RNA, 18 nt, Human
ucaucucuuccccgcaga

SEQ ID NO: 1337059 - RNA, 19 nt, Human
uccaccucucaccacucag

SEQ ID NO: 1337060 - RNA, 23 nt, Human
uccagagagcagaaaaccaaggu

SEQ ID NO: 1337061 - RNA, 20 nt, Human
ucccaggcccagggaggggc

SEQ ID NO: 1337062 - RNA, 25 nt, Human
uccccacuaucacugcuuguuaccc

SEQ ID NO: 1337063 - RNA, 18 nt, Human
ucccuuugccgcccccua

SEQ ID NO: 1337064 - RNA, 22 nt, Human
uccguggccucccucacuuccu

SEQ ID NO: 1337065 - RNA, 21 nt, Human
ucugcaaaaccccgccaccac

SEQ ID NO: 1337066 - RNA, 23 nt, Human
ugucacuugcacaggcucacaca

SEQ ID NO: 1337067 - RNA, 18 nt, Human
ugugggagugagugacgc

SEQ ID NO: 1337068 - RNA, 18 nt, Human
uguuuauugagcaaaggg

SEQ ID NO: 1337069 - RNA, 22 nt, Human
uucccuuuucuccucucaaccc

SEQ ID NO: 1337070 - RNA, 18 nt, Human
uuccuguugcccagcccc

SEQ ID NO: 1337071 - RNA, 23 nt, Human
uuggaagguggggcugaggccca

SEQ ID NO: 1337072 - RNA, 25 nt, Human
uuuaucaucucuuccccgcagacaa

SEQ ID NO: 1337073 - RNA, 21 nt, Human
uuucucuaaucugugguuucu

SEQ ID NO: 1337074 - RNA, 22 nt, Human
uuuuuuuuuuuuuuuuuggagu

SEQ ID NO: 1337075 - RNA, 25 nt, Human
uuuuuuuuuuuuuuuuuuuuugggg

SEQ ID NO: 1337076 - RNA, 20 nt, Human
aacauggugaaaucccgucu

SEQ ID NO: 1337077 - RNA, 21 nt, Human
aacauggugaaaucccgucuc

SEQ ID NO: 1337078 - RNA, 22 nt, Human
aaugcuuaugccuguaauccca

SEQ ID NO: 1337079 - RNA, 21 nt, Human
acccauugauccuugauuagu

SEQ ID NO: 1337080 - RNA, 22 nt, Human
aggcagaucacgaggucaggag

SEQ ID NO: 1337081 - RNA, 24 nt, Human
aggcaggcagaucacgaggucagg

SEQ ID NO: 1337082 - RNA, 26 nt, Human
aggcaggcagaucacgaggucaggag

SEQ ID NO: 1337083 - RNA, 22 nt, Human
auccuggccaacauggugaaau

SEQ ID NO: 1337084 - RNA, 25 nt, Human
caacacuuugggagggccaaggcag

SEQ ID NO: 1337085 - RNA, 24 nt, Human
caacauggugaaaucccgucucua

SEQ ID NO: 1337086 - RNA, 24 nt, Human
caaggcaggcagaucacgagguca

SEQ ID NO: 1337087 - RNA, 22 nt, Human
cacccauugauccuugauuagu

SEQ ID NO: 1337088 - RNA, 22 nt, Human
caucuguagucccagcuacucg

SEQ ID NO: 1337089 - RNA, 21 nt, Human
cccgucucuacuaaaauacaa

SEQ ID NO: 1337090 - RNA, 22 nt, Human
ccuggccaacauggugaaaucc

SEQ ID NO: 1337091 - RNA, 23 nt, Human
ccuggccaacauggugaaauccc

SEQ ID NO: 1337092 - RNA, 24 nt, Human
ccuggccaacauggugaaaucccg

SEQ ID NO: 1337093 - RNA, 20 nt, Human
ccuguaaucccaacacuuug

SEQ ID NO: 1337094 - RNA, 18 nt, Human
cuguagucccagcuacuc

SEQ ID NO: 1337095 - RNA, 23 nt, Human
gagaccauccuggccaacauggu

SEQ ID NO: 1337096 - RNA, 19 nt, Human
gcagaucacgaggucagga

SEQ ID NO: 1337097 - RNA, 24 nt, Human
gccaacauggugaaaucccgucuc

SEQ ID NO: 1337098 - RNA, 19 nt, Human
gccuguaaucccaacacuu

SEQ ID NO: 1337099 - RNA, 19 nt, Human
gcuuaugccuguaauccca

SEQ ID NO: 1337100 - RNA, 22 nt, Human
gcuuaugccuguaaucccaaca

SEQ ID NO: 1337101 - RNA, 22 nt, Human
ggagggccaaggcaggcagauc

SEQ ID NO: 1337102 - RNA, 22 nt, Human
ggcgcaaugcuuaugccuguaa

SEQ ID NO: 1337103 - RNA, 23 nt, Human
gggccaaggcaggcagaucacga

SEQ ID NO: 1337104 - RNA, 24 nt, Human
uagcaugauaucaugucacccauu

SEQ ID NO: 1337105 - RNA, 20 nt, Human
uaugccuguaaucccaacac

SEQ ID NO: 1337106 - RNA, 24 nt, Human
ucacgaggucaggagacggagacc

SEQ ID NO: 1337107 - RNA, 22 nt, Human
ucuguagucccagcuacucgag

SEQ ID NO: 1337108 - RNA, 23 nt, Human
ugccuguaaucccaacacuuugg

SEQ ID NO: 1337109 - RNA, 23 nt, Human
ugccuguaaucccaacacuuugg

SEQ ID NO: 1337110 - RNA, 24 nt, Human
ugccuguaaucccaacacuuuggg

SEQ ID NO: 1337111 - RNA, 23 nt, Human
ugcuuaugccuguaaucccaaca

SEQ ID NO: 1337112 - RNA, 24 nt, Human
uggccaacauggugaaaucccguc

SEQ ID NO: 1337113 - RNA, 24 nt, Human
uucuuuauuucuguugacucuaau

SEQ ID NO: 1337114 - RNA, 22 nt, Human
uugaagccaauuuuuuuuauug

SEQ ID NO: 1337115 - RNA, 26 nt, Human
uuucccagacuuacugaguuauaauu

SEQ ID NO: 1337116 - RNA, 19 nt, Human
uuuucuuuauuucuguuga

SEQ ID NO: 1337117 - RNA, 28 nt, Human
uuuuuuauuguugguguaauuuguuuaa

SEQ ID NO: 1337118 - RNA, 20 nt, Human
uuuuuuuuuuuuuuuuuugg

SEQ ID NO: 1337119 - RNA, 20 nt, Human
aacagcuaggaccuggcuca

SEQ ID NO: 1337120 - RNA, 18 nt, Human
aacaucuucauuacaucu

SEQ ID NO: 1337121 - RNA, 21 nt, Human
aaccuccccuuuccuccccca

SEQ ID NO: 1337122 - RNA, 19 nt, Human
aaccugcccacucacuccu

SEQ ID NO: 1337123 - RNA, 18 nt, Human
aacuauaucugaggacca

SEQ ID NO: 1337124 - RNA, 19 nt, Human
aagggagcccccugccuuc

SEQ ID NO: 1337125 - RNA, 21 nt, Human
accuccccuuuccucccccaa

SEQ ID NO: 1337126 - RNA, 18 nt, Human
agaagcaggugagcccag

SEQ ID NO: 1337127 - RNA, 18 nt, Human
agaagcaggugagcccag

SEQ ID NO: 1337128 - RNA, 20 nt, Human
agcggacagugacgguggag

SEQ ID NO: 1337129 - RNA, 21 nt, Human
agcggacagugacgguggaga

SEQ ID NO: 1337130 - RNA, 22 nt, Human
agggaguggggagcucuguagg

SEQ ID NO: 1337131 - RNA, 20 nt, Human
agugcagggacccaucuccc

SEQ ID NO: 1337132 - RNA, 20 nt, Human
auaacagaugcugcccuacc

SEQ ID NO: 1337133 - RNA, 21 nt, Human
auacacuaccccugcaucccc

SEQ ID NO: 1337134 - RNA, 18 nt, Human
auacuggacaguuucagc

SEQ ID NO: 1337135 - RNA, 22 nt, Human
aucagcccugacccuccaaggc

SEQ ID NO: 1337136 - RNA, 24 nt, Human
auuccccuacuuccuucccccuca

SEQ ID NO: 1337137 - RNA, 24 nt, Human
caaaaaacaggucucucccuaaca

SEQ ID NO: 1337138 - RNA, 18 nt, Human
caccagagcuugugaccu

SEQ ID NO: 1337139 - RNA, 26 nt, Human
caccugugguggccaccugcacagcc

SEQ ID NO: 1337140 - RNA, 19 nt, Human
cacuaccccugcauccccu

SEQ ID NO: 1337141 - RNA, 24 nt, Human
cacuccugacuccggagugcccca

SEQ ID NO: 1337142 - RNA, 25 nt, Human
cacuccugacuccggagugccccag

SEQ ID NO: 1337143 - RNA, 21 nt, Human
cagaccaacagccucucccaa

SEQ ID NO: 1337144 - RNA, 18 nt, Human
cagcagcggacagugacg

SEQ ID NO: 1337145 - RNA, 19 nt, Human
cagcguaaaaaaaugcccu

SEQ ID NO: 1337146 - RNA, 21 nt, Human
caggaccccugguaucagccc

SEQ ID NO: 1337147 - RNA, 22 nt, Human
caggagaagucaguggucagaa

SEQ ID NO: 1337148 - RNA, 18 nt, Human
cagucccugaagauugaa

SEQ ID NO: 1337149 - RNA, 21 nt, Human
cauaacagaugcugcccuacc

SEQ ID NO: 1337150 - RNA, 21 nt, Human
cauccugaauuccuggcagcc

SEQ ID NO: 1337151 - RNA, 23 nt, Human
caucuccccacucucuaaacacu

SEQ ID NO: 1337152 - RNA, 25 nt, Human
ccagccugugguuccugccaccugu

SEQ ID NO: 1337153 - RNA, 26 nt, Human
ccagccugugguuccugccaccugug

SEQ ID NO: 1337154 - RNA, 22 nt, Human
ccagugaaacaaugcaguggag

SEQ ID NO: 1337155 - RNA, 21 nt, Human
cccaugggggcuuccuaggcc

SEQ ID NO: 1337156 - RNA, 18 nt, Human
ccccaaucccucccacuc

SEQ ID NO: 1337157 - RNA, 26 nt, Human
ccccaaucccucccacuccguaucuc

SEQ ID NO: 1337158 - RNA, 21 nt, Human
ccccacucucuaaacacugaa

SEQ ID NO: 1337159 - RNA, 22 nt, Human
ccccagauccucauuagagccc

SEQ ID NO: 1337160 - RNA, 22 nt, Human
cccccaaucccucccacuccgu

SEQ ID NO: 1337161 - RNA, 24 nt, Human
cccccucagcucccauccuagcuu

SEQ ID NO: 1337162 - RNA, 20 nt, Human
ccccugcauccccuccagcc

SEQ ID NO: 1337163 - RNA, 19 nt, Human
ccccuuuccucccccaauc

SEQ ID NO: 1337164 - RNA, 21 nt, Human
ccccuuuccucccccaauccc

SEQ ID NO: 1337165 - RNA, 22 nt, Human
ccuaggccuuucccuccugaca

SEQ ID NO: 1337166 - RNA, 21 nt, Human
ccucagaccaacagccucucc

SEQ ID NO: 1337167 - RNA, 20 nt, Human
ccucuccccaccccagagga

SEQ ID NO: 1337168 - RNA, 21 nt, Human
ccucucggcaggucugggggg

SEQ ID NO: 1337169 - RNA, 22 nt, Human
ccugacuccggagugccccagc

SEQ ID NO: 1337170 - RNA, 18 nt, Human
ccugggugcugcuuuccu

SEQ ID NO: 1337171 - RNA, 18 nt, Human
ccugggugcugcuuuccu

SEQ ID NO: 1337172 - RNA, 18 nt, Human
ccuucccccucagcuccc

SEQ ID NO: 1337173 - RNA, 19 nt, Human
ccuugcauacuggacaguu

SEQ ID NO: 1337174 - RNA, 25 nt, Human
cuccagauuccaaaaaacaggucuc

SEQ ID NO: 1337175 - RNA, 23 nt, Human
cucccucauuuccuccacauuag

SEQ ID NO: 1337176 - RNA, 24 nt, Human
cucuggguuaaauuacagcuguau

SEQ ID NO: 1337177 - RNA, 18 nt, Human
cucugugccagggcccuc

SEQ ID NO: 1337178 - RNA, 21 nt, Human
cugacuccggagugccccagc

SEQ ID NO: 1337179 - RNA, 23 nt, Human
cugccaccugugguggccaccug

SEQ ID NO: 1337180 - RNA, 24 nt, Human
cugcuuuccugguuccucucacuc

SEQ ID NO: 1337181 - RNA, 22 nt, Human
cugugcgugcuucccucuuccc

SEQ ID NO: 1337182 - RNA, 24 nt, Human
cuugaccuucucagcaugagggau

SEQ ID NO: 1337183 - RNA, 21 nt, Human
gacccaucuccccacucucua

SEQ ID NO: 1337184 - RNA, 22 nt, Human
gagaacagcuaggaccuggcuc

SEQ ID NO: 1337185 - RNA, 18 nt, Human
gagaggaaccgugcugug

SEQ ID NO: 1337186 - RNA, 21 nt, Human
gaugccagucaaccugcccac

SEQ ID NO: 1337187 - RNA, 19 nt, Human
gcaccagagcuugugaccu

SEQ ID NO: 1337188 - RNA, 23 nt, Human
gccaagugcagggacccaucucc

SEQ ID NO: 1337189 - RNA, 19 nt, Human
gcugggagaccuccuggac

SEQ ID NO: 1337190 - RNA, 18 nt, Human
gguggagaggcugggcac

SEQ ID NO: 1337191 - RNA, 21 nt, Human
guggccaccugcacagccacc

SEQ ID NO: 1337192 - RNA, 19 nt, Human
uaaaaaaaugcccugcucu

SEQ ID NO: 1337193 - RNA, 19 nt, Human
uaaauccagaaccuucccc

SEQ ID NO: 1337194 - RNA, 23 nt, Human
uaacugcccccucuagccugcag

SEQ ID NO: 1337195 - RNA, 23 nt, Human
uacuuccuucccccucagcuccc

SEQ ID NO: 1337196 - RNA, 18 nt, Human
uagagcccaagacaggga

SEQ ID NO: 1337197 - RNA, 19 nt, Human
uagagcccaagacagggag

SEQ ID NO: 1337198 - RNA, 21 nt, Human
uagagcccaagacagggagcc

SEQ ID NO: 1337199 - RNA, 18 nt, Human
uaggaccuggcucagccc

SEQ ID NO: 1337200 - RNA, 19 nt, Human
ucaaccugcccacucacuc

SEQ ID NO: 1337201 - RNA, 20 nt, Human
ucaggagaagucagugguca

SEQ ID NO: 1337202 - RNA, 21 nt, Human
ucaggagaagucaguggucag

SEQ ID NO: 1337203 - RNA, 18 nt, Human
uccaaggcuuauggagag

SEQ ID NO: 1337204 - RNA, 27 nt, Human
ucccaaccccagauccucauuagagcc

SEQ ID NO: 1337205 - RNA, 21 nt, Human
ucccacuccguaucucccuca

SEQ ID NO: 1337206 - RNA, 21 nt, Human
uccucuccccaccccagagga

SEQ ID NO: 1337207 - RNA, 19 nt, Human
uccuuggauaaagggagcc

SEQ ID NO: 1337208 - RNA, 19 nt, Human
ucuaaagucagcagguggg

SEQ ID NO: 1337209 - RNA, 21 nt, Human
ucucuaaacacugaacggcuc

SEQ ID NO: 1337210 - RNA, 23 nt, Human
ucugaagugcaaucccucaccca

SEQ ID NO: 1337211 - RNA, 25 nt, Human
ucugcauacacuaccccugcauccc

SEQ ID NO: 1337212 - RNA, 28 nt, Human
ucugugcaugcuugugugcauauguaug

SEQ ID NO: 1337213 - RNA, 22 nt, Human
ugacgguggagaggcugggcac

SEQ ID NO: 1337214 - RNA, 18 nt, Human
ugaugugagggaucugga

SEQ ID NO: 1337215 - RNA, 23 nt, Human
ugcauacacuaccccugcauccc

SEQ ID NO: 1337216 - RNA, 24 nt, Human
ugcauacacuaccccugcaucccc

SEQ ID NO: 1337217 - RNA, 20 nt, Human
ugccaaggauggguggcugg

SEQ ID NO: 1337218 - RNA, 22 nt, Human
ugccaaggauggguggcuggga

SEQ ID NO: 1337219 - RNA, 23 nt, Human
ugcccagcguaaaaaaaugcccu

SEQ ID NO: 1337220 - RNA, 19 nt, Human
ugcccucagaccaacagcc

SEQ ID NO: 1337221 - RNA, 24 nt, Human
ugcggagagggcccuggcugagag

SEQ ID NO: 1337222 - RNA, 24 nt, Human
uggagaacagcuaggaccuggcuc

SEQ ID NO: 1337223 - RNA, 23 nt, Human
uggcauuugcccaguggaagguc

SEQ ID NO: 1337224 - RNA, 18 nt, Human
ugggauggagguggggaa

SEQ ID NO: 1337225 - RNA, 24 nt, Human
ugggcacacucaugcacaugcaug

SEQ ID NO: 1337226 - RNA, 19 nt, Human
ugggguagaggucgacuug

SEQ ID NO: 1337227 - RNA, 19 nt, Human
ugggucucuaucagaaguc

SEQ ID NO: 1337228 - RNA, 24 nt, Human
uggguggcugggagaccuccugga

SEQ ID NO: 1337229 - RNA, 20 nt, Human
ugguuccucucacucccagg

SEQ ID NO: 1337230 - RNA, 26 nt, Human
ugguugccaaggauggguggcuggga

SEQ ID NO: 1337231 - RNA, 20 nt, Human
uguaugcauccugaauuccu

SEQ ID NO: 1337232 - RNA, 22 nt, Human
uguaugcccagcguaaaaaaau

SEQ ID NO: 1337233 - RNA, 21 nt, Human
ugugagggaucuggacagggg

SEQ ID NO: 1337234 - RNA, 21 nt, Human
ugugcauauguaugcccagcg

SEQ ID NO: 1337235 - RNA, 19 nt, Human
ugugugcauauguaugccc

SEQ ID NO: 1337236 - RNA, 20 nt, Human
ugugugcauauguaugccca

SEQ ID NO: 1337237 - RNA, 22 nt, Human
ugugugcauauguaugcccagc

SEQ ID NO: 1337238 - RNA, 18 nt, Human
uucccucuucccugcagu

SEQ ID NO: 1337239 - RNA, 18 nt, Human
uuccuaggccuuucccuc

SEQ ID NO: 1337240 - RNA, 21 nt, Human
uuccugggugcugcuuuccug

SEQ ID NO: 1337241 - RNA, 20 nt, Human
uuccugguuccucucacucc

SEQ ID NO: 1337242 - RNA, 19 nt, Human
uuccuucccccucagcucc

SEQ ID NO: 1337243 - RNA, 24 nt, Human
uuucagcuccaucucugggcuucu

SEQ ID NO: 1337244 - RNA, 22 nt, Human
uuucaggcagucauaacugccc

SEQ ID NO: 1337245 - RNA, 20 nt, Human
uuuucagaagcaggugagcc

SEQ ID NO: 1337246 - RNA, 24 nt, Human
agcccccacugaggccccacccag

SEQ ID NO: 1337247 - RNA, 21 nt, Human
agccuccgggcugccuggccu

SEQ ID NO: 1337248 - RNA, 22 nt, Human
aggaaggggaggaggaagagga

SEQ ID NO: 1337249 - RNA, 19 nt, Human
aggggcaggagcugcuccu

SEQ ID NO: 1337250 - RNA, 21 nt, Human
aggggcaugggggcugcaggg

SEQ ID NO: 1337251 - RNA, 18 nt, Human
aggguggggguagccagg

SEQ ID NO: 1337252 - RNA, 21 nt, Human
auugugcugggggucaggcag

SEQ ID NO: 1337253 - RNA, 22 nt, Human
caccugccuggccuguccacag

SEQ ID NO: 1337254 - RNA, 21 nt, Human
cacuggccgccuggaggcacc

SEQ ID NO: 1337255 - RNA, 21 nt, Human
cagcagcccccacugaggccc

SEQ ID NO: 1337256 - RNA, 25 nt, Human
cagcagggagcucguaccuucccuc

SEQ ID NO: 1337257 - RNA, 19 nt, Human
cagcauguugggcaggggc

SEQ ID NO: 1337258 - RNA, 18 nt, Human
cagcccccacugaggccc

SEQ ID NO: 1337259 - RNA, 23 nt, Human
cagcccccacugaggccccaccc

SEQ ID NO: 1337260 - RNA, 22 nt, Human
cagccuccgggcugccuggccu

SEQ ID NO: 1337261 - RNA, 26 nt, Human
caggcagcagcccccacugaggcccc

SEQ ID NO: 1337262 - RNA, 20 nt, Human
cauuuuuauugugcuggggg

SEQ ID NO: 1337263 - RNA, 22 nt, Human
ccacugaggccccacccagccu

SEQ ID NO: 1337264 - RNA, 18 nt, Human
ccagcccaucccaugcca

SEQ ID NO: 1337265 - RNA, 25 nt, Human
ccagccuccgggcugccuggccugu

SEQ ID NO: 1337266 - RNA, 26 nt, Human
ccagccuccgggcugccuggccugug

SEQ ID NO: 1337267 - RNA, 21 nt, Human
ccaggcgggguggccuucucc

SEQ ID NO: 1337268 - RNA, 20 nt, Human
ccccacccagccuccgggcu

SEQ ID NO: 1337269 - RNA, 25 nt, Human
cccccagcauguugggcaggggcug

SEQ ID NO: 1337270 - RNA, 26 nt, Human
cccccagcauguugggcaggggcugg

SEQ ID NO: 1337271 - RNA, 18 nt, Human
cccccggacaggggcagg

SEQ ID NO: 1337272 - RNA, 23 nt, Human
ccccgagguggcuucuggacccc

SEQ ID NO: 1337273 - RNA, 23 nt, Human
ccccgaggugguuucuggacccc

SEQ ID NO: 1337274 - RNA, 28 nt, Human
ccgccuggaggcaccuccugaggcccac

SEQ ID NO: 1337275 - RNA, 18 nt, Human
ccugaggcccaccugccu

SEQ ID NO: 1337276 - RNA, 20 nt, Human
ccugugccaugggucccagg

SEQ ID NO: 1337277 - RNA, 18 nt, Human
cgaggaaggggaggagga

SEQ ID NO: 1337278 - RNA, 24 nt, Human
cgggcugccuggccugugccaugg

SEQ ID NO: 1337279 - RNA, 21 nt, Human
cuccagcagggagcucguacc

SEQ ID NO: 1337280 - RNA, 18 nt, Human
cuccggguggugggggcc

SEQ ID NO: 1337281 - RNA, 28 nt, Human
cucguaccuucccucagcugagggccca

SEQ ID NO: 1337282 - RNA, 18 nt, Human
cugaggccccacccagcc

SEQ ID NO: 1337283 - RNA, 19 nt, Human
cugccuggccuguccacag

SEQ ID NO: 1337284 - RNA, 21 nt, Human
cugccuggccugugccauggg

SEQ ID NO: 1337285 - RNA, 20 nt, Human
cugcuggagcccaggcgugg

SEQ ID NO: 1337286 - RNA, 21 nt, Human
cuggcggaggagaaucaguca

SEQ ID NO: 1337287 - RNA, 19 nt, Human
cuggguggccuggcggagg

SEQ ID NO: 1337288 - RNA, 21 nt, Human
cugugccaugggucccaggcu

SEQ ID NO: 1337289 - RNA, 21 nt, Human
cuugcagccgugcagggccag

SEQ ID NO: 1337290 - RNA, 21 nt, Human
cuugcuggggccucaggccca

SEQ ID NO: 1337291 - RNA, 23 nt, Human
gaggaaggggaggaggaagagga

SEQ ID NO: 1337292 - RNA, 18 nt, Human
gaggggcucaguccagcc

SEQ ID NO: 1337293 - RNA, 23 nt, Human
gcagggagcucguaccuucccuc

SEQ ID NO: 1337294 - RNA, 20 nt, Human
gccuucuccucuggguggcc

SEQ ID NO: 1337295 - RNA, 22 nt, Human
gcuccagcagggagcucguacc

SEQ ID NO: 1337296 - RNA, 18 nt, Human
gcugccuggccugugcca

SEQ ID NO: 1337297 - RNA, 21 nt, Human
gcugcugaugcugcuggagcc

SEQ ID NO: 1337298 - RNA, 21 nt, Human
ggaaggggaggaggaagagga

SEQ ID NO: 1337299 - RNA, 20 nt, Human
ggccgcugcuguguccuggg

SEQ ID NO: 1337300 - RNA, 21 nt, Human
gggcugccuggccugugccau

SEQ ID NO: 1337301 - RNA, 25 nt, Human
gggcugccuggccugugccaugggu

SEQ ID NO: 1337302 - RNA, 20 nt, Human
ggggaggaggaagaggagga

SEQ ID NO: 1337303 - RNA, 22 nt, Human
ggugggggccaccugugccucc

SEQ ID NO: 1337304 - RNA, 22 nt, Human
uauugugcugggggucaggcag

SEQ ID NO: 1337305 - RNA, 25 nt, Human
ucaucccccggacaggggcaggagc

SEQ ID NO: 1337306 - RNA, 22 nt, Human
uccacaggagccucccuugcag

SEQ ID NO: 1337307 - RNA, 23 nt, Human
ucccaggcuccagcagggagcuc

SEQ ID NO: 1337308 - RNA, 19 nt, Human
ucccccggacaggggcagg

SEQ ID NO: 1337309 - RNA, 18 nt, Human
ucccucagcugagggccc

SEQ ID NO: 1337310 - RNA, 19 nt, Human
uccggguggugggggccac

SEQ ID NO: 1337311 - RNA, 22 nt, Human
uccggguggugggggccaccug

SEQ ID NO: 1337312 - RNA, 23 nt, Human
uccugggacuggagauggacccu

SEQ ID NO: 1337313 - RNA, 18 nt, Human
ugaggccccacccagccu

SEQ ID NO: 1337314 - RNA, 19 nt, Human
ugaggccccacccagccuc

SEQ ID NO: 1337315 - RNA, 22 nt, Human
ugccagggucuggggagccucc

SEQ ID NO: 1337316 - RNA, 24 nt, Human
ugccaugggucccaggcuccagcc

SEQ ID NO: 1337317 - RNA, 23 nt, Human
ugccguugggguaaccagggugg

SEQ ID NO: 1337318 - RNA, 22 nt, Human
ugcugaugcugcuggagcccag

SEQ ID NO: 1337319 - RNA, 20 nt, Human
uggagauggacccuagcccu

SEQ ID NO: 1337320 - RNA, 20 nt, Human
uggccaugguggccgcugcu

SEQ ID NO: 1337321 - RNA, 19 nt, Human
uggccuggcggaggagaau

SEQ ID NO: 1337322 - RNA, 23 nt, Human
uggccuucuccucuggguggccu

SEQ ID NO: 1337323 - RNA, 20 nt, Human
uggcggaggagaaucaguca

SEQ ID NO: 1337324 - RNA, 19 nt, Human
ugggaugccguugggguaa

SEQ ID NO: 1337325 - RNA, 24 nt, Human
ugggggccaccugugccuccccgg

SEQ ID NO: 1337326 - RNA, 24 nt, Human
ugggggcugcugaugcugcuggag

SEQ ID NO: 1337327 - RNA, 18 nt, Human
ugggguagccaggguggg

SEQ ID NO: 1337328 - RNA, 21 nt, Human
ugggguagccagggugggggu

SEQ ID NO: 1337329 - RNA, 20 nt, Human
uguccacaggagccucccuu

SEQ ID NO: 1337330 - RNA, 18 nt, Human
uguugggcaggggcaugg

SEQ ID NO: 1337331 - RNA, 21 nt, Human
uucacagagaagaucccagcc

SEQ ID NO: 1337332 - RNA, 18 nt, Human
uugcagccgugcagggcc

SEQ ID NO: 1337333 - RNA, 22 nt, Human
uuuuuuuuuuuuuuucacguuu

SEQ ID NO: 1337334 - RNA, 21 nt, Human
uuuuuuuuuuuuuuuuucacg

SEQ ID NO: 1337335 - RNA, 22 nt, Human
aaacagaaguucaaacauuaaa

SEQ ID NO: 1337336 - RNA, 23 nt, Human
aaacagaguggcaauggguagga

SEQ ID NO: 1337337 - RNA, 19 nt, Human
agaguggcaauggguagga

SEQ ID NO: 1337338 - RNA, 21 nt, Human
agugcaaucaaaaauaaaaau

SEQ ID NO: 1337339 - RNA, 19 nt, Human
aguucaaacauuaaaauuc

SEQ ID NO: 1337340 - RNA, 21 nt, Human
auccuccugcuucucccguua

SEQ ID NO: 1337341 - RNA, 21 nt, Human
caaagccucaaaaaugauauu

SEQ ID NO: 1337342 - RNA, 21 nt, Human
caaccuaaaccugguaaauca

SEQ ID NO: 1337343 - RNA, 24 nt, Human
ccagaaagaguaggggcgagagca

SEQ ID NO: 1337344 - RNA, 23 nt, Human
cccguuacugauuuucuccucuu

SEQ ID NO: 1337345 - RNA, 20 nt, Human
cuccuuaaaucccccaguga

SEQ ID NO: 1337346 - RNA, 19 nt, Human
gaacagaaaaagaaacaca

SEQ ID NO: 1337347 - RNA, 19 nt, Human
gguguguuuuuuuuuuuuu

SEQ ID NO: 1337348 - RNA, 21 nt, Human
guucuuuuucuucauuuuccu

SEQ ID NO: 1337349 - RNA, 21 nt, Human
uaagugcaaucaaaaauaaaa

SEQ ID NO: 1337350 - RNA, 20 nt, Human
uaggaugaaaccuacccauu

SEQ ID NO: 1337351 - RNA, 22 nt, Human
uaucauauguaaucagcuuuug

SEQ ID NO: 1337352 - RNA, 22 nt, Human
ucaauucuccuuaaauccccca

SEQ ID NO: 1337353 - RNA, 21 nt, Human
uccauuuauuauugcugccau

SEQ ID NO: 1337354 - RNA, 18 nt, Human
ucccccagugaugcuuuu

SEQ ID NO: 1337355 - RNA, 19 nt, Human
ucuuaggaauaaaaagcuc

SEQ ID NO: 1337356 - RNA, 20 nt, Human
ugaaauaccacuagauauag

SEQ ID NO: 1337357 - RNA, 19 nt, Human
ugagguaucucucaggaaa

SEQ ID NO: 1337358 - RNA, 18 nt, Human
uggacauccuccugcuuc

SEQ ID NO: 1337359 - RNA, 26 nt, Human
uggcaauggguaggaugaaaccuacc

SEQ ID NO: 1337360 - RNA, 20 nt, Human
uguagaacagaaaaagaaac

SEQ ID NO: 1337361 - RNA, 22 nt, Human
uguagaacagaaaaagaaacac

SEQ ID NO: 1337362 - RNA, 18 nt, Human
uguggcugcgagcguuug

SEQ ID NO: 1337363 - RNA, 19 nt, Human
uucuccuuaaaucccccag

SEQ ID NO: 1337364 - RNA, 26 nt, Human
uugagaguucaugauauucauuguga

SEQ ID NO: 1337365 - RNA, 26 nt, Human
uuuauuauugcugccauuugugggua

SEQ ID NO: 1337366 - RNA, 24 nt, Human
ccucaauagaggcuggacuuccag

SEQ ID NO: 1337367 - RNA, 26 nt, Human
cucuacucugggccucuuucaccucc

SEQ ID NO: 1337368 - RNA, 22 nt, Human
gcuggacuuccagcggaauuca

SEQ ID NO: 1337369 - RNA, 18 nt, Human
ucucuacucugggccucu

SEQ ID NO: 1337370 - RNA, 18 nt, Human
ucucucucucucuacucu

SEQ ID NO: 1337371 - RNA, 26 nt, Human
ugggccucuuucaccuccaaagcccc

SEQ ID NO: 1337372 - RNA, 28 nt, Human
uucaccuccaaagccccgugaggccguc

SEQ ID NO: 1337373 - RNA, 19 nt, Human
aaacaggucuguaaacaug

SEQ ID NO: 1337374 - RNA, 20 nt, Human
aaacaugaucucaucccccc

SEQ ID NO: 1337375 - RNA, 23 nt, Human
aacaugaucucauccccccaucc

SEQ ID NO: 1337376 - RNA, 21 nt, Human
acccagaugguccacgccagu

SEQ ID NO: 1337377 - RNA, 20 nt, Human
agccaggggugcuggccagg

SEQ ID NO: 1337378 - RNA, 21 nt, Human
aggccagaagcaggcagcuga

SEQ ID NO: 1337379 - RNA, 20 nt, Human
aggggcugaggacacccaga

SEQ ID NO: 1337380 - RNA, 24 nt, Human
aucucauccccccaucccuucuuc

SEQ ID NO: 1337381 - RNA, 21 nt, Human
augacaaaacaggucuguaaa

SEQ ID NO: 1337382 - RNA, 18 nt, Human
caaaacaggucuguaaac

SEQ ID NO: 1337383 - RNA, 24 nt, Human
caagugauuaaaaaacuucuuggc

SEQ ID NO: 1337384 - RNA, 23 nt, Human
cagcagacacaggcaggccagaa

SEQ ID NO: 1337385 - RNA, 22 nt, Human
caggaaggcagacucgucccuu

SEQ ID NO: 1337386 - RNA, 22 nt, Human
caggccagaagcaggcagcuga

SEQ ID NO: 1337387 - RNA, 25 nt, Human
caucccuucuuccaaggagcuuccu

SEQ ID NO: 1337388 - RNA, 23 nt, Human
ccaggugaggggcugaggcacaa

SEQ ID NO: 1337389 - RNA, 21 nt, Human
ccaguggccuugaaauuuccc

SEQ ID NO: 1337390 - RNA, 19 nt, Human
ccccaggaggagggagacu

SEQ ID NO: 1337391 - RNA, 24 nt, Human
cugguucguuggcagccccuuccc

SEQ ID NO: 1337392 - RNA, 19 nt, Human
gacucgucccuuuaaccca

SEQ ID NO: 1337393 - RNA, 18 nt, Human
gaggggcugaggcacaag

SEQ ID NO: 1337394 - RNA, 23 nt, Human
ggaggagggagacucuuuggcag

SEQ ID NO: 1337395 - RNA, 19 nt, Human
ggcagccccuuccccagga

SEQ ID NO: 1337396 - RNA, 22 nt, Human
gucugguucguuggcagccccu

SEQ ID NO: 1337397 - RNA, 23 nt, Human
ucacugagucugguucguuggca

SEQ ID NO: 1337398 - RNA, 23 nt, Human
uccacacaccaccugguggcucc

SEQ ID NO: 1337399 - RNA, 18 nt, Human
uccccugcagaagccaga

SEQ ID NO: 1337400 - RNA, 19 nt, Human
ucugucaugacguggucac

SEQ ID NO: 1337401 - RNA, 21 nt, Human
ugaggacacccagauggucca

SEQ ID NO: 1337402 - RNA, 27 nt, Human
ugaggggcugaggcacaagugcuauca

SEQ ID NO: 1337403 - RNA, 23 nt, Human
ugaggucuguagaaaaggggucc

SEQ ID NO: 1337404 - RNA, 19 nt, Human
ugccccacaggggcugagg

SEQ ID NO: 1337405 - RNA, 24 nt, Human
ugcccuggcagguggccaggugag

SEQ ID NO: 1337406 - RNA, 23 nt, Human
ugcggcagcccucccgggggcac

SEQ ID NO: 1337407 - RNA, 24 nt, Human
ugcggcagcccucccgggggcacg

SEQ ID NO: 1337408 - RNA, 22 nt, Human
ugcuaggguugcaggugcccug

SEQ ID NO: 1337409 - RNA, 21 nt, Human
uggcagcaggaugacaaaaga

SEQ ID NO: 1337410 - RNA, 19 nt, Human
uguaaacaugaucucaucc

SEQ ID NO: 1337411 - RNA, 21 nt, Human
uucuuggcagcaggaugacaa

SEQ ID NO: 1337412 - RNA, 21 nt, Human
uugcaggugcccuggcaggug

SEQ ID NO: 1337413 - RNA, 23 nt, Human
aaacagaaaggucagaaaaaaca

SEQ ID NO: 1337414 - RNA, 21 nt, Human
aaauacauguuaaguguacaa

SEQ ID NO: 1337415 - RNA, 22 nt, Human
aagauuuuuauugaagacacau

SEQ ID NO: 1337416 - RNA, 21 nt, Human
acaaaaauguugaaacagaaa

SEQ ID NO: 1337417 - RNA, 19 nt, Human
agaaagcaauuauuuaaaa

SEQ ID NO: 1337418 - RNA, 19 nt, Human
agaaauguuugaaguuaag

SEQ ID NO: 1337419 - RNA, 24 nt, Human
uaaagaaucaggauaacuuaaaua

SEQ ID NO: 1337420 - RNA, 25 nt, Human
uccaaauuacaaaaauguugaaaca

SEQ ID NO: 1337421 - RNA, 18 nt, Human
ugaaacagaaaggucaga

SEQ ID NO: 1337422 - RNA, 21 nt, Human
ugaaacagaaaggucagaaaa

SEQ ID NO: 1337423 - RNA, 26 nt, Human
ugaaacagaaaggucagaaaaaacaa

SEQ ID NO: 1337424 - RNA, 21 nt, Human
uuuuaaagaaucaggauaacu

SEQ ID NO: 1337425 - RNA, 24 nt, Human
uuuuaaagaaucaggauaacuuaa

SEQ ID NO: 1337426 - RNA, 20 nt, Human
aaaaagcuuuauccagcaac

SEQ ID NO: 1337427 - RNA, 25 nt, Human
cacacacacgcacgcccgcuccccg

SEQ ID NO: 1337428 - RNA, 29 nt, Human
ccaacccgacaaguuccagaccccacccc

SEQ ID NO: 1337429 - RNA, 22 nt, Human
ccacgcggcccgggucccccuc

SEQ ID NO: 1337430 - RNA, 21 nt, Human
ccccgccccuuggcgcccucc

SEQ ID NO: 1337431 - RNA, 20 nt, Human
ccccggagccgccgcuccuc

SEQ ID NO: 1337432 - RNA, 23 nt, Human
ccccggagccgccgcuccucccu

SEQ ID NO: 1337433 - RNA, 22 nt, Human
cccgccccuuggcgcccuccau

SEQ ID NO: 1337434 - RNA, 22 nt, Human
ccgccgcuccucccucgcgccc

SEQ ID NO: 1337435 - RNA, 23 nt, Human
ccgccgcuccucccucgcgcccu

SEQ ID NO: 1337436 - RNA, 20 nt, Human
ccgcucccggacucuccccu

SEQ ID NO: 1337437 - RNA, 22 nt, Human
ccgcuccucccucgcgcccucc

SEQ ID NO: 1337438 - RNA, 21 nt, Human
ccucccgcucccggacucucc

SEQ ID NO: 1337439 - RNA, 18 nt, Human
ccucccucgcgcccuccc

SEQ ID NO: 1337440 - RNA, 24 nt, Human
ccucgcgcccucccgcucccggac

SEQ ID NO: 1337441 - RNA, 20 nt, Human
cgacaaguuccagaccccac

SEQ ID NO: 1337442 - RNA, 20 nt, Human
cgcacacacacgcacgcccg

SEQ ID NO: 1337443 - RNA, 28 nt, Human
cgcauucgcacucgcacacacacgcacg

SEQ ID NO: 1337444 - RNA, 19 nt, Human
cgggcgcgggcgcggggcg

SEQ ID NO: 1337445 - RNA, 25 nt, Human
gagccgccgcuccucccucgcgccc

SEQ ID NO: 1337446 - RNA, 20 nt, Human
gccccggagccgccgcuccu

SEQ ID NO: 1337447 - RNA, 18 nt, Human
gcccgcuccccgccccuu

SEQ ID NO: 1337448 - RNA, 18 nt, Human
gcgcccacgcggcccggg

SEQ ID NO: 1337449 - RNA, 21 nt, Human
gcgcgggcgcggggcggcgag

SEQ ID NO: 1337450 - RNA, 20 nt, Human
gggcgcgggcgcggggcggc

SEQ ID NO: 1337451 - RNA, 21 nt, Human
gggggcuccuuccccgcggga

SEQ ID NO: 1337452 - RNA, 18 nt, Human
guagcuccgguuucacuc

SEQ ID NO: 1337453 - RNA, 21 nt, Human
uccccgccccuuggcgcccuc

SEQ ID NO: 1337454 - RNA, 20 nt, Human
ucccggcgcccacgcggccc

SEQ ID NO: 1337455 - RNA, 26 nt, Human
ucggcggcaccgcgggggcuccuucc

SEQ ID NO: 1337456 - RNA, 24 nt, Human
uuggcgcccuccaucccggcgccc

SEQ ID NO: 1337457 - RNA, 19 nt, Human
uuuguagcuccgguuucac

SEQ ID NO: 1337458 - RNA, 24 nt, Human
uuuuuuuuuuuucauuuuuguuuu

SEQ ID NO: 1337459 - RNA, 21 nt, Human
uuuuuuuuuuuuuucauuuuu

SEQ ID NO: 1337460 - RNA, 20 nt, Human
aggcagcagggacggcagcg

SEQ ID NO: 1337461 - RNA, 18 nt, Human
agggacggcagcggcagg

SEQ ID NO: 1337462 - RNA, 23 nt, Human
caaacaccacuuauacacaaaac

SEQ ID NO: 1337463 - RNA, 19 nt, Human
caacagcaacagcuaccgg

SEQ ID NO: 1337464 - RNA, 20 nt, Human
cagcggcaggaaugaggggg

SEQ ID NO: 1337465 - RNA, 27 nt, Human
uacaaacaccacuuauacacaaaacca

SEQ ID NO: 1337466 - RNA, 19 nt, Human
ugauauucuuguuuuuaaa

SEQ ID NO: 1337467 - RNA, 24 nt, Human
uucuuguuuuuaaaaauucuugau

SEQ ID NO: 1337468 - RNA, 19 nt, Human
uuuuuuuuuuuuacugaua

SEQ ID NO: 1337469 - RNA, 21 nt, Human
aauacaaaaagugaaaauaag

SEQ ID NO: 1337470 - RNA, 27 nt, Human
aauacaaaaagugaaaauaaguuuaga

SEQ ID NO: 1337471 - RNA, 25 nt, Human
accagccuuaaccuuagcucaggug

SEQ ID NO: 1337472 - RNA, 25 nt, Human
aggaaaaugggaagauaccgguacc

SEQ ID NO: 1337473 - RNA, 22 nt, Human
auacacauacauaucucaaaac

SEQ ID NO: 1337474 - RNA, 23 nt, Human
auacauuuucaauauaggaaaau

SEQ ID NO: 1337475 - RNA, 19 nt, Human
ccacaagcucuuuagaugg

SEQ ID NO: 1337476 - RNA, 22 nt, Human
ccacacucccuuagccuucgcc

SEQ ID NO: 1337477 - RNA, 24 nt, Human
guuuagaccagccuuaaccuuagc

SEQ ID NO: 1337478 - RNA, 18 nt, Human
uauauauacacauacaua

SEQ ID NO: 1337479 - RNA, 19 nt, Human
uauauauacacauacauau

SEQ ID NO: 1337480 - RNA, 26 nt, Human
uauauauacacauacauaucucaaaa

SEQ ID NO: 1337481 - RNA, 18 nt, Human
uggcucccggagccgccc

SEQ ID NO: 1337482 - RNA, 23 nt, Human
uucaauauaggaaaaugggaaga

SEQ ID NO: 1337483 - RNA, 23 nt, Human
uucagaauaauuaaaaauuugau

SEQ ID NO: 1337484 - RNA, 21 nt, Human
uuuggccacaagcucuuuaga

SEQ ID NO: 1337485 - RNA, 18 nt, Human
agaaacugcaacccucca

SEQ ID NO: 1337486 - RNA, 20 nt, Human
agacauaucagauuccacag

SEQ ID NO: 1337487 - RNA, 24 nt, Human
agaucuuacacugggcaacagucc

SEQ ID NO: 1337488 - RNA, 26 nt, Human
caacagagcagaucgcguuaagcccc

SEQ ID NO: 1337489 - RNA, 27 nt, Human
caacagagcagaucgcguuaagcccca

SEQ ID NO: 1337490 - RNA, 24 nt, Human
cuaucacaucuguuuacaagcaaa

SEQ ID NO: 1337491 - RNA, 20 nt, Human
cuuagaaacugcaacccucc

SEQ ID NO: 1337492 - RNA, 22 nt, Human
cuucccauccaauaugggcuug

SEQ ID NO: 1337493 - RNA, 23 nt, Human
ggugacaugucuuuuuugguggc

SEQ ID NO: 1337494 - RNA, 21 nt, Human
uacaagcaaaguauuacuuug

SEQ ID NO: 1337495 - RNA, 21 nt, Human
uagaaacugcaacccuccaag

SEQ ID NO: 1337496 - RNA, 19 nt, Human
uagguauguaucagaggca

SEQ ID NO: 1337497 - RNA, 24 nt, Human
uaucacaucuguuuacaagcaaag

SEQ ID NO: 1337498 - RNA, 21 nt, Human
ucagaggcaauaauuuccaaa

SEQ ID NO: 1337499 - RNA, 21 nt, Human
uccaaagaugucuucaugucc

SEQ ID NO: 1337500 - RNA, 21 nt, Human
ucuuacacugggcaacagucc

SEQ ID NO: 1337501 - RNA, 18 nt, Human
ugacaugucuuuuuuggu

SEQ ID NO: 1337502 - RNA, 19 nt, Human
uggcaccaagcuacccaag

SEQ ID NO: 1337503 - RNA, 21 nt, Human
uugaggugacaugucuuuuuu

SEQ ID NO: 1337504 - RNA, 20 nt, Human
uugguggccguaaacuuccc

SEQ ID NO: 1337505 - RNA, 26 nt, Human
aacaaugagaugcagauaacaagaga

SEQ ID NO: 1337506 - RNA, 20 nt, Human
aaccucuuuuuuacaaaugu

SEQ ID NO: 1337507 - RNA, 19 nt, Human
aagcaaaaggagaaaaagg

SEQ ID NO: 1337508 - RNA, 19 nt, Human
accucucuuccuuccuucu

SEQ ID NO: 1337509 - RNA, 24 nt, Human
caaaauacaauaaacaaugagaug

SEQ ID NO: 1337510 - RNA, 28 nt, Human
caaaauucccgcaaguuugacuccuucc

SEQ ID NO: 1337511 - RNA, 22 nt, Human
caagagauacaucuaaaaccau

SEQ ID NO: 1337512 - RNA, 19 nt, Human
cauucauaaucccaccacc

SEQ ID NO: 1337513 - RNA, 19 nt, Human
ccucagggaccgaccgccu

SEQ ID NO: 1337514 - RNA, 18 nt, Human
ccuuccuucuuuucuuuc

SEQ ID NO: 1337515 - RNA, 19 nt, Human
ccuuccuucuuuucuuucu

SEQ ID NO: 1337516 - RNA, 18 nt, Human
cgccugcgcugcugaagg

SEQ ID NO: 1337517 - RNA, 19 nt, Human
cuaccucucuuccuuccuu

SEQ ID NO: 1337518 - RNA, 18 nt, Human
cucucuuccuuccuucuu

SEQ ID NO: 1337519 - RNA, 27 nt, Human
cuggcacugaucgggucaguuucuucc

SEQ ID NO: 1337520 - RNA, 22 nt, Human
gaaaaaucauucauaaucccac

SEQ ID NO: 1337521 - RNA, 23 nt, Human
gaacaaggaccagauuaccagga

SEQ ID NO: 1337522 - RNA, 24 nt, Human
ggacaaaggaauaucaggaaaugc

SEQ ID NO: 1337523 - RNA, 18 nt, Human
guucaaaauacaauaaac

SEQ ID NO: 1337524 - RNA, 21 nt, Human
uaaaaagcaagcuauauggua

SEQ ID NO: 1337525 - RNA, 18 nt, Human
uaaaagacagagacuugu

SEQ ID NO: 1337526 - RNA, 19 nt, Human
uaccucucuuccuuccuuc

SEQ ID NO: 1337527 - RNA, 25 nt, Human
uauauguaauauacaaauguacuuu

SEQ ID NO: 1337528 - RNA, 21 nt, Human
uauccagacgggaacaaggac

SEQ ID NO: 1337529 - RNA, 22 nt, Human
uauccagacgggaacaaggacc

SEQ ID NO: 1337530 - RNA, 28 nt, Human
ucaaaauacaauaaacaaugagaugcag

SEQ ID NO: 1337531 - RNA, 22 nt, Human
ucagggaccgaccgccugcgcu

SEQ ID NO: 1337532 - RNA, 20 nt, Human
ucaguuucuuccuccuccuu

SEQ ID NO: 1337533 - RNA, 19 nt, Human
uccuuccuucuuuucuuuc

SEQ ID NO: 1337534 - RNA, 29 nt, Human
ucuaccucucuuccuuccuucuuuucuuu

SEQ ID NO: 1337535 - RNA, 19 nt, Human
ucuuccuccuccuuuucua

SEQ ID NO: 1337536 - RNA, 19 nt, Human
ucuuucuugcuuauucuuc

SEQ ID NO: 1337537 - RNA, 20 nt, Human
ugacuccuuccacgggccuc

SEQ ID NO: 1337538 - RNA, 25 nt, Human
ugggucuugcuggaaacaacagccc

SEQ ID NO: 1337539 - RNA, 20 nt, Human
uguaucugucuaccucucuu

SEQ ID NO: 1337540 - RNA, 19 nt, Human
uuccuuccuucuuuucuuu

SEQ ID NO: 1337541 - RNA, 25 nt, Human
uucuuccuccuccuuuucuagcuuu

SEQ ID NO: 1337542 - RNA, 18 nt, Human
uuuagaauauagaaaaua

SEQ ID NO: 1337543 - RNA, 24 nt, Human
uuucuuccuccuccuuuucuagcu

SEQ ID NO: 1337544 - RNA, 22 nt, Human
uuucuuucuugcuuauucuucu

SEQ ID NO: 1337545 - RNA, 24 nt, Human
agacaaauauuaguuaaaccagaa

SEQ ID NO: 1337546 - RNA, 22 nt, Human
agcugcaccucuggcgucucug

SEQ ID NO: 1337547 - RNA, 20 nt, Human
cgucucugccgcagcaagca

SEQ ID NO: 1337548 - RNA, 24 nt, Human
cugcaccucuggcgucucugccgc

SEQ ID NO: 1337549 - RNA, 22 nt, Human
gcuggagcugcaccucuggcgu

SEQ ID NO: 1337550 - RNA, 23 nt, Human
ggagcugcaccucuggcgucucu

SEQ ID NO: 1337551 - RNA, 24 nt, Human
uuuuuuuuuuuuuuuuuucacuga

SEQ ID NO: 1337552 - RNA, 24 nt, Human
uuuuuuuuuuuuuuuuuuucacug

SEQ ID NO: 1337553 - RNA, 24 nt, Human
aaacaaaacaaaguagagaaacaa

SEQ ID NO: 1337554 - RNA, 26 nt, Human
aaacaaaguagagaaacaacaacaac

SEQ ID NO: 1337555 - RNA, 25 nt, Human
aaacaacaacaacaacaacaacaac

SEQ ID NO: 1337556 - RNA, 27 nt, Human
aaacccucuucuucaucccucuuuccu

SEQ ID NO: 1337557 - RNA, 28 nt, Human
aacaaaguagagaaacaacaacaacaac

SEQ ID NO: 1337558 - RNA, 27 nt, Human
aacaacaacaacaacaacaacaacaac

SEQ ID NO: 1337559 - RNA, 24 nt, Human
aacaacaacaacgauaacaacaac

SEQ ID NO: 1337560 - RNA, 22 nt, Human
aaggcuguuggacaagcaagcu

SEQ ID NO: 1337561 - RNA, 26 nt, Human
acaaaacaaaguagagaaacaacaac

SEQ ID NO: 1337562 - RNA, 19 nt, Human
acaacaacaacaacaacaa

SEQ ID NO: 1337563 - RNA, 19 nt, Human
acaacaacaacaacaacaa

SEQ ID NO: 1337564 - RNA, 19 nt, Human
acaacaacaacaacaacaa

SEQ ID NO: 1337565 - RNA, 19 nt, Human
acaacaacaacaacaacaa

SEQ ID NO: 1337566 - RNA, 26 nt, Human
acaacaacaacaacaacaacgauaac

SEQ ID NO: 1337567 - RNA, 30 nt, Human
acaacaacaacaacgauaacaacaacaaaa

SEQ ID NO: 1337568 - RNA, 25 nt, Human
agacagaaaugaaaaaccauggcuu

SEQ ID NO: 1337569 - RNA, 20 nt, Human
agagaaacaacaacaacaac

SEQ ID NO: 1337570 - RNA, 20 nt, Human
aggcugcuaaaagccuaaaa

SEQ ID NO: 1337571 - RNA, 21 nt, Human
aggcugcuaaaagccuaaaac

SEQ ID NO: 1337572 - RNA, 22 nt, Human
aucccucuuuccugcuuaucac

SEQ ID NO: 1337573 - RNA, 23 nt, Human
caaaagagguaaggaauaugaug

SEQ ID NO: 1337574 - RNA, 18 nt, Human
caacaacaacaacaacaa

SEQ ID NO: 1337575 - RNA, 23 nt, Human
caacaacaacaacaacaacaaca

SEQ ID NO: 1337576 - RNA, 27 nt, Human
caacaacaacaacaacaacaacgauaa

SEQ ID NO: 1337577 - RNA, 22 nt, Human
cacuagagacagaaaugaaaaa

SEQ ID NO: 1337578 - RNA, 23 nt, Human
cccucuucuucaucccucuuucc

SEQ ID NO: 1337579 - RNA, 18 nt, Human
cuaaaacaaaacaaagua

SEQ ID NO: 1337580 - RNA, 20 nt, Human
cuaaccggccaguaaacccu

SEQ ID NO: 1337581 - RNA, 24 nt, Human
cugcagagcgggaaccagcugcgc

SEQ ID NO: 1337582 - RNA, 21 nt, Human
cuggucccgggacugagcgcg

SEQ ID NO: 1337583 - RNA, 19 nt, Human
gcgagaggagagaacgccu

SEQ ID NO: 1337584 - RNA, 24 nt, Human
gucccaggcccagaggcgagagga

SEQ ID NO: 1337585 - RNA, 22 nt, Human
uaaaagccuaaaacaaaacaaa

SEQ ID NO: 1337586 - RNA, 25 nt, Human
uagagacagaaaugaaaaaccaugg

SEQ ID NO: 1337587 - RNA, 19 nt, Human
ucccaggcccagaggcgag

SEQ ID NO: 1337588 - RNA, 26 nt, Human
uuuuuuuuuuucuuuuuuuaguuuuu

SEQ ID NO: 1337589 - RNA, 25 nt, Human
uuuuuuuuuuuuuuuuuuucuuuuu

SEQ ID NO: 1337590 - RNA, 22 nt, Human
aaaaacagacugccaugaaaac

SEQ ID NO: 1337591 - RNA, 26 nt, Human
aaaauaccacauuaaagauauauuua

SEQ ID NO: 1337592 - RNA, 23 nt, Human
aaacaggaugacagucaccaaga

SEQ ID NO: 1337593 - RNA, 21 nt, Human
aacagaaaaugaaacaucaag

SEQ ID NO: 1337594 - RNA, 20 nt, Human
aacauagcgagaucucaucu

SEQ ID NO: 1337595 - RNA, 20 nt, Human
aacauggggaaaccccgucu

SEQ ID NO: 1337596 - RNA, 21 nt, Human
aacauggggaaaccccgucuc

SEQ ID NO: 1337597 - RNA, 19 nt, Human
aaccccuaucucccagauc

SEQ ID NO: 1337598 - RNA, 24 nt, Human
aauggcucaugccuauaaucccag

SEQ ID NO: 1337599 - RNA, 21 nt, Human
acagaacgagaccaucucuaa

SEQ ID NO: 1337600 - RNA, 20 nt, Human
acaucacuguccuccagccu

SEQ ID NO: 1337601 - RNA, 24 nt, Human
accccgucucgacugaaaauacaa

SEQ ID NO: 1337602 - RNA, 20 nt, Human
acgcaauugaaaauaccaca

SEQ ID NO: 1337603 - RNA, 23 nt, Human
acugaaaauacaaaauuagccgg

SEQ ID NO: 1337604 - RNA, 24 nt, Human
acugcacuccauccuggacaacag

SEQ ID NO: 1337605 - RNA, 26 nt, Human
acuguagcucacuucuucaauacauu

SEQ ID NO: 1337606 - RNA, 24 nt, Human
acuguccuccagccuggguaacag

SEQ ID NO: 1337607 - RNA, 20 nt, Human
agaaaaaaauauuaagucug

SEQ ID NO: 1337608 - RNA, 19 nt, Human
agacugccaugaaaaccaa

SEQ ID NO: 1337609 - RNA, 23 nt, Human
agccgggcgugguggcacaugcc

SEQ ID NO: 1337610 - RNA, 22 nt, Human
agcgggcauggugccacaugcc

SEQ ID NO: 1337611 - RNA, 22 nt, Human
aggaaggaaaacuguagcucac

SEQ ID NO: 1337612 - RNA, 24 nt, Human
aggauugcuugaguccaggaguuu

SEQ ID NO: 1337613 - RNA, 21 nt, Human
aggcauaauggcucaugccua

SEQ ID NO: 1337614 - RNA, 18 nt, Human
aggcaugagaaucgccug

SEQ ID NO: 1337615 - RNA, 24 nt, Human
aggcaugagaaucgccugaauccg

SEQ ID NO: 1337616 - RNA, 21 nt, Human
aggccaaggugggaggauugc

SEQ ID NO: 1337617 - RNA, 24 nt, Human
aggccaaggugggaggauugcuug

SEQ ID NO: 1337618 - RNA, 22 nt, Human
aggcgaacagaucaccugaggg

SEQ ID NO: 1337619 - RNA, 22 nt, Human
aggcgaacagaucaccugaggu

SEQ ID NO: 1337620 - RNA, 21 nt, Human
aggcggagguuguggugaccc

SEQ ID NO: 1337621 - RNA, 22 nt, Human
aggugggaggauugcuugaguc

SEQ ID NO: 1337622 - RNA, 23 nt, Human
aggugggaggauugcuugagucc

SEQ ID NO: 1337623 - RNA, 24 nt, Human
agugguucacgccuguaaucccag

SEQ ID NO: 1337624 - RNA, 24 nt, Human
aucacaucacuguccuccagccug

SEQ ID NO: 1337625 - RNA, 22 nt, Human
augaaacaucaaguuaugaaug

SEQ ID NO: 1337626 - RNA, 18 nt, Human
augaauuacaauaaguuu

SEQ ID NO: 1337627 - RNA, 24 nt, Human
augaauuuauuauuuuaaacuaac

SEQ ID NO: 1337628 - RNA, 21 nt, Human
augacagucaccaagaguggu

SEQ ID NO: 1337629 - RNA, 22 nt, Human
caacagaaaaugaaacaucaag

SEQ ID NO: 1337630 - RNA, 21 nt, Human
caaccacugcacuccauccug

SEQ ID NO: 1337631 - RNA, 23 nt, Human
caaccacugcacuccauccugga

SEQ ID NO: 1337632 - RNA, 18 nt, Human
caaccccuaucucccaga

SEQ ID NO: 1337633 - RNA, 26 nt, Human
caaccccuaucucccagaucuuccua

SEQ ID NO: 1337634 - RNA, 21 nt, Human
cacaucacuguccuccagccu

SEQ ID NO: 1337635 - RNA, 24 nt, Human
cacgccuguaaucccagcacuuug

SEQ ID NO: 1337636 - RNA, 23 nt, Human
cacuccauccuggacaacagaac

SEQ ID NO: 1337637 - RNA, 21 nt, Human
cacugcacuccauccuggaca

SEQ ID NO: 1337638 - RNA, 24 nt, Human
cacugcacuccauccuggacaaca

SEQ ID NO: 1337639 - RNA, 19 nt, Human
cacuguccuccagccuggg

SEQ ID NO: 1337640 - RNA, 23 nt, Human
cacuguccuccagccuggguaac

SEQ ID NO: 1337641 - RNA, 24 nt, Human
cagaucaccugaggucgggaauuc

SEQ ID NO: 1337642 - RNA, 22 nt, Human
cagcacuuugggaggccgaggc

SEQ ID NO: 1337643 - RNA, 23 nt, Human
cagcacuuugggaggccgaggcg

SEQ ID NO: 1337644 - RNA, 25 nt, Human
cagcaucgacgccugcucuccgcgg

SEQ ID NO: 1337645 - RNA, 24 nt, Human
cagccugaccaacauggggaaacc

SEQ ID NO: 1337646 - RNA, 24 nt, Human
cagugauuuggaaggccaaggugg

SEQ ID NO: 1337647 - RNA, 25 nt, Human
cauagcgagaucucaucucuacaag

SEQ ID NO: 1337648 - RNA, 24 nt, Human
caugaaaaccaaauccgucagaga

SEQ ID NO: 1337649 - RNA, 25 nt, Human
caugccagcaaccccuaucucccag

SEQ ID NO: 1337650 - RNA, 24 nt, Human
caugccuauaaucccagugauuug

SEQ ID NO: 1337651 - RNA, 18 nt, Human
caugccuguaguccuagc

SEQ ID NO: 1337652 - RNA, 19 nt, Human
ccacugcacuccauccugg

SEQ ID NO: 1337653 - RNA, 19 nt, Human
ccacugcacuccauccugg

SEQ ID NO: 1337654 - RNA, 20 nt, Human
ccacugcacuccauccugga

SEQ ID NO: 1337655 - RNA, 21 nt, Human
ccacugcacuccauccuggac

SEQ ID NO: 1337656 - RNA, 24 nt, Human
ccacugcacuccauccuggacaac

SEQ ID NO: 1337657 - RNA, 19 nt, Human
cccaugguuaaggaaggaa

SEQ ID NO: 1337658 - RNA, 21 nt, Human
cccgagaucacaucacugucc

SEQ ID NO: 1337659 - RNA, 23 nt, Human
ccugaccaacauggggaaacccc

SEQ ID NO: 1337660 - RNA, 24 nt, Human
ccugaccaacauggggaaaccccg

SEQ ID NO: 1337661 - RNA, 24 nt, Human
ccugggcaacauagcgagaucuca

SEQ ID NO: 1337662 - RNA, 22 nt, Human
ccuguaaucccagcacuuuggg

SEQ ID NO: 1337663 - RNA, 22 nt, Human
ccuguaaucugagcuacucggg

SEQ ID NO: 1337664 - RNA, 20 nt, Human
ccuuauuaguuccucccuca

SEQ ID NO: 1337665 - RNA, 24 nt, Human
cgaacagaucaccugaggucggga

SEQ ID NO: 1337666 - RNA, 20 nt, Human
cgaggcgaacagaucaccug

SEQ ID NO: 1337667 - RNA, 25 nt, Human
cucaugccuauaaucccagugauuu

SEQ ID NO: 1337668 - RNA, 21 nt, Human
cuccagccuggguaacaggag

SEQ ID NO: 1337669 - RNA, 21 nt, Human
cuccagccuggguaacaggag

SEQ ID NO: 1337670 - RNA, 21 nt, Human
cucccucaucccaucuuaaaa

SEQ ID NO: 1337671 - RNA, 22 nt, Human
cucuccgcggcuacaacucguu

SEQ ID NO: 1337672 - RNA, 24 nt, Human
cugaauccgggaggcggagguugu

SEQ ID NO: 1337673 - RNA, 25 nt, Human
gagaauauggaagaaacaggaugac

SEQ ID NO: 1337674 - RNA, 20 nt, Human
gaggcggagguuguggugac

SEQ ID NO: 1337675 - RNA, 22 nt, Human
gagucaggcauaauggcucaug

SEQ ID NO: 1337676 - RNA, 18 nt, Human
gaucaccugaggucggga

SEQ ID NO: 1337677 - RNA, 24 nt, Human
gaucaccugaggucgggaauucaa

SEQ ID NO: 1337678 - RNA, 18 nt, Human
gauugcucgagccuggga

SEQ ID NO: 1337679 - RNA, 22 nt, Human
gauugcuugaguccaggaguuu

SEQ ID NO: 1337680 - RNA, 24 nt, Human
gauugcuugaguccaggaguuuga

SEQ ID NO: 1337681 - RNA, 19 nt, Human
gcagauuucauaaguugug

SEQ ID NO: 1337682 - RNA, 18 nt, Human
gcagugguucacgccugu

SEQ ID NO: 1337683 - RNA, 18 nt, Human
gccugggcaacauagcga

SEQ ID NO: 1337684 - RNA, 20 nt, Human
gccugggcaacauagcgaga

SEQ ID NO: 1337685 - RNA, 23 nt, Human
gccugggcaacauagcgagaucu

SEQ ID NO: 1337686 - RNA, 18 nt, Human
ggagguuguggugacccg

SEQ ID NO: 1337687 - RNA, 24 nt, Human
ggagguuguggugacccgagauca

SEQ ID NO: 1337688 - RNA, 20 nt, Human
ggaugaauuuauuauuuuaa

SEQ ID NO: 1337689 - RNA, 22 nt, Human
ggauugcuugaguccaggaguu

SEQ ID NO: 1337690 - RNA, 18 nt, Human
ggccgaggcgaacagauc

SEQ ID NO: 1337691 - RNA, 23 nt, Human
ggcgugguggcacaugccuguaa

SEQ ID NO: 1337692 - RNA, 24 nt, Human
gggugcagugguucacgccuguaa

SEQ ID NO: 1337693 - RNA, 20 nt, Human
uaaaaaaacagacugccaug

SEQ ID NO: 1337694 - RNA, 25 nt, Human
uaaaaaaacagacugccaugaaaac

SEQ ID NO: 1337695 - RNA, 19 nt, Human
uacuucaguggguuuucug

SEQ ID NO: 1337696 - RNA, 22 nt, Human
uagccgggcgugguggcacaug

SEQ ID NO: 1337697 - RNA, 23 nt, Human
uauacagaaaauggagcaaugcc

SEQ ID NO: 1337698 - RNA, 23 nt, Human
ucaacaauagauaguggcucaaa

SEQ ID NO: 1337699 - RNA, 23 nt, Human
ucacaucacuguccuccagccug

SEQ ID NO: 1337700 - RNA, 23 nt, Human
ucacgccuguaaucccagcacuu

SEQ ID NO: 1337701 - RNA, 20 nt, Human
ucacuguccuccagccuggg

SEQ ID NO: 1337702 - RNA, 21 nt, Human
ucacuguccuccagccugggu

SEQ ID NO: 1337703 - RNA, 24 nt, Human
ucacuguccuccagccuggguaac

SEQ ID NO: 1337704 - RNA, 21 nt, Human
ucaggcauaauggcucaugcc

SEQ ID NO: 1337705 - RNA, 26 nt, Human
uccauccuggacaacagaacgagacc

SEQ ID NO: 1337706 - RNA, 22 nt, Human
ucccaucuuaaaauauucaaca

SEQ ID NO: 1337707 - RNA, 18 nt, Human
uccgggaggcggagguug

SEQ ID NO: 1337708 - RNA, 25 nt, Human
uccuccagccuggguaacaggagug

SEQ ID NO: 1337709 - RNA, 24 nt, Human
ucgccugaauccgggaggcggagg

SEQ ID NO: 1337710 - RNA, 24 nt, Human
ucgggaggcugaggcaugagaauc

SEQ ID NO: 1337711 - RNA, 19 nt, Human
ucuccaaaaaaaggaugaa

SEQ ID NO: 1337712 - RNA, 22 nt, Human
ugaaaaccaaaucuuuucuucc

SEQ ID NO: 1337713 - RNA, 23 nt, Human
ugaaaaccaaaucuuuucuuccu

SEQ ID NO: 1337714 - RNA, 22 nt, Human
ugaaaauacaaaauuagccggg

SEQ ID NO: 1337715 - RNA, 23 nt, Human
ugaaaauacaaaauuagccgggc

SEQ ID NO: 1337716 - RNA, 18 nt, Human
ugaagugggaggauugcu

SEQ ID NO: 1337717 - RNA, 24 nt, Human
ugaagugggaggauugcucgagcc

SEQ ID NO: 1337718 - RNA, 19 nt, Human
ugcaggagggugaaguggg

SEQ ID NO: 1337719 - RNA, 23 nt, Human
ugccuguaaucugagcuacucgg

SEQ ID NO: 1337720 - RNA, 24 nt, Human
ugccuguaaucugagcuacucggg

SEQ ID NO: 1337721 - RNA, 24 nt, Human
ugccuguaguccuagcuaugcagg

SEQ ID NO: 1337722 - RNA, 22 nt, Human
uggaagaaacaggaugacaguc

SEQ ID NO: 1337723 - RNA, 22 nt, Human
uggaaggccaaggugggaggau

SEQ ID NO: 1337724 - RNA, 20 nt, Human
uggcacaugccuguaaucug

SEQ ID NO: 1337725 - RNA, 21 nt, Human
uggcucaugccuauaauccca

SEQ ID NO: 1337726 - RNA, 24 nt, Human
uggcucaugccuauaaucccagug

SEQ ID NO: 1337727 - RNA, 24 nt, Human
ugggaggccgaggcgaacagauca

SEQ ID NO: 1337728 - RNA, 25 nt, Human
uggguuuucugucaaugaacaauuu

SEQ ID NO: 1337729 - RNA, 22 nt, Human
uggugccacaugccuguagucc

SEQ ID NO: 1337730 - RNA, 21 nt, Human
ugguggcacaugccuguaauc

SEQ ID NO: 1337731 - RNA, 19 nt, Human
ugguuaaggaaggaaaacu

SEQ ID NO: 1337732 - RNA, 22 nt, Human
ugguucacgccuguaaucccag

SEQ ID NO: 1337733 - RNA, 24 nt, Human
ugguucacgccuguaaucccagca

SEQ ID NO: 1337734 - RNA, 18 nt, Human
uuagccgggcgugguggc

SEQ ID NO: 1337735 - RNA, 20 nt, Human
uuagccgggcgugguggcac

SEQ ID NO: 1337736 - RNA, 24 nt, Human
uuagccgggcgugguggcacaugc

SEQ ID NO: 1337737 - RNA, 23 nt, Human
uuagcgggcauggugccacaugc

SEQ ID NO: 1337738 - RNA, 23 nt, Human
uucaugaaaucagagaauaugga

SEQ ID NO: 1337739 - RNA, 24 nt, Human
uugcucgagccugggagacuacgg

SEQ ID NO: 1337740 - RNA, 21 nt, Human
uugcuugaguccaggaguuug

SEQ ID NO: 1337741 - RNA, 25 nt, Human
uugggaggccgaggcgaacagauca

SEQ ID NO: 1337742 - RNA, 18 nt, Human
uuguaaguuauacauuuu

SEQ ID NO: 1337743 - RNA, 20 nt, Human
uuguggugacccgagaucac

SEQ ID NO: 1337744 - RNA, 22 nt, Human
uuuucugucaaugaacaauuug

SEQ ID NO: 1337745 - RNA, 21 nt, Human
aaaaugccuuuacuaauuucu

SEQ ID NO: 1337746 - RNA, 22 nt, Human
aaacggcaggcuggguuacuca

SEQ ID NO: 1337747 - RNA, 21 nt, Human
aaauaacucccuugcaagaua

SEQ ID NO: 1337748 - RNA, 22 nt, Human
acaucaaauauccccauacagu

SEQ ID NO: 1337749 - RNA, 18 nt, Human
acuacaguaccacacguu

SEQ ID NO: 1337750 - RNA, 20 nt, Human
agcacaggugggacugggag

SEQ ID NO: 1337751 - RNA, 20 nt, Human
agcuuugucauuuuucaaac

SEQ ID NO: 1337752 - RNA, 22 nt, Human
aggaguaacaaaggaacuagga

SEQ ID NO: 1337753 - RNA, 19 nt, Human
aguaacaaaggaacuagga

SEQ ID NO: 1337754 - RNA, 27 nt, Human
aguuccaucagaguacuaguaauccua

SEQ ID NO: 1337755 - RNA, 19 nt, Human
aucaaauauccccauacag

SEQ ID NO: 1337756 - RNA, 24 nt, Human
auccccauacaguuuggguuccac

SEQ ID NO: 1337757 - RNA, 24 nt, Human
auccucccagguauaccccuauua

SEQ ID NO: 1337758 - RNA, 23 nt, Human
caaauauuaagagcacauaauua

SEQ ID NO: 1337759 - RNA, 22 nt, Human
cacgccgccgccuacugaugcc

SEQ ID NO: 1337760 - RNA, 18 nt, Human
cagcacaggugggacugg

SEQ ID NO: 1337761 - RNA, 18 nt, Human
caguuuggguuccacagc

SEQ ID NO: 1337762 - RNA, 22 nt, Human
ccacgcugccagaccccacgcc

SEQ ID NO: 1337763 - RNA, 22 nt, Human
ccccacgccgccgccuacugau

SEQ ID NO: 1337764 - RNA, 18 nt, Human
ccccacgcugccagaccc

SEQ ID NO: 1337765 - RNA, 19 nt, Human
ccucccgcucccacuuccc

SEQ ID NO: 1337766 - RNA, 22 nt, Human
ccugcacugaggaaccugagaa

SEQ ID NO: 1337767 - RNA, 23 nt, Human
cgcccaguucuucucggugcuca

SEQ ID NO: 1337768 - RNA, 22 nt, Human
cucacaggaguaacaaaggaac

SEQ ID NO: 1337769 - RNA, 19 nt, Human
cuccuuuuccccuuuuuau

SEQ ID NO: 1337770 - RNA, 24 nt, Human
cucucacauacaaacggcaggcug

SEQ ID NO: 1337771 - RNA, 22 nt, Human
cugaaaacaucaaauaucccca

SEQ ID NO: 1337772 - RNA, 20 nt, Human
gaaaacaucaaauaucccca

SEQ ID NO: 1337773 - RNA, 23 nt, Human
gaaaacaucaaauauccccauac

SEQ ID NO: 1337774 - RNA, 19 nt, Human
gaccauauuuucuuccucu

SEQ ID NO: 1337775 - RNA, 22 nt, Human
gcucccacuucccaacacgaag

SEQ ID NO: 1337776 - RNA, 22 nt, Human
ggaaaaaaaaagaaaaaaaugc

SEQ ID NO: 1337777 - RNA, 21 nt, Human
ggcccucccgcucccacuucc

SEQ ID NO: 1337778 - RNA, 18 nt, Human
gucuuugcuuauuuucau

SEQ ID NO: 1337779 - RNA, 19 nt, Human
uaaaagauaaaguuucuuc

SEQ ID NO: 1337780 - RNA, 18 nt, Human
uaaguacuaaacagucug

SEQ ID NO: 1337781 - RNA, 18 nt, Human
uagcuuaaaaaaaggaua

SEQ ID NO: 1337782 - RNA, 24 nt, Human
uaguuccaucagaguacuaguaau

SEQ ID NO: 1337783 - RNA, 21 nt, Human
ucacaggaguaacaaaggaac

SEQ ID NO: 1337784 - RNA, 19 nt, Human
uccaucagaguacuaguaa

SEQ ID NO: 1337785 - RNA, 22 nt, Human
ucccaacacgaaguggcgucgg

SEQ ID NO: 1337786 - RNA, 18 nt, Human
ucucacauacaaacggca

SEQ ID NO: 1337787 - RNA, 20 nt, Human
ugaaaacaucaaauaucccc

SEQ ID NO: 1337788 - RNA, 21 nt, Human
ugaaaacaucaaauaucccca

SEQ ID NO: 1337789 - RNA, 25 nt, Human
ugagaaggguaaguacuaaacagug

SEQ ID NO: 1337790 - RNA, 19 nt, Human
ugaggaaccugagaagggu

SEQ ID NO: 1337791 - RNA, 18 nt, Human
ugaggaauagguuuguga

SEQ ID NO: 1337792 - RNA, 19 nt, Human
ugcagaaaaacaucucagg

SEQ ID NO: 1337793 - RNA, 23 nt, Human
uggaccauauuuucuuccucuuu

SEQ ID NO: 1337794 - RNA, 21 nt, Human
uguaguuucauuagcuuaaaa

SEQ ID NO: 1337795 - RNA, 24 nt, Human
uguggucuuugcuuauuuucauga

SEQ ID NO: 1337796 - RNA, 24 nt, Human
uuaguuaugcaggauuuacauuua

SEQ ID NO: 1337797 - RNA, 21 nt, Human
uugcccggcccucccgcuccc

SEQ ID NO: 1337798 - RNA, 20 nt, Human
uugucauuuuucaaaccugu

SEQ ID NO: 1337799 - RNA, 21 nt, Human
uuugucauuuuucaaaccugu

SEQ ID NO: 1337800 - RNA, 25 nt, Human
uuuuuuuuucuccuuuuccccuuuu

SEQ ID NO: 1337801 - RNA, 18 nt, Human
aaaaauauauacacccuc

SEQ ID NO: 1337802 - RNA, 24 nt, Human
aaagguaauaaaggccuugccaga

SEQ ID NO: 1337803 - RNA, 19 nt, Human
aaaguacugguguagcucc

SEQ ID NO: 1337804 - RNA, 22 nt, Human
aaaguacugguguagcuccugg

SEQ ID NO: 1337805 - RNA, 21 nt, Human
aaccccucccaccugcugcua

SEQ ID NO: 1337806 - RNA, 22 nt, Human
aagcaccccgcaccauccaggg

SEQ ID NO: 1337807 - RNA, 19 nt, Human
aagcaggagugugggcagc

SEQ ID NO: 1337808 - RNA, 21 nt, Human
aagcugcagggcaacgggagg

SEQ ID NO: 1337809 - RNA, 20 nt, Human
aagguaauaaaggccuugcc

SEQ ID NO: 1337810 - RNA, 18 nt, Human
aauauauacacccucaua

SEQ ID NO: 1337811 - RNA, 23 nt, Human
acacacacacacacacacacaca

SEQ ID NO: 1337812 - RNA, 23 nt, Human
acacacacacacacacacacaca

SEQ ID NO: 1337813 - RNA, 23 nt, Human
acacacacacacacacacacaca

SEQ ID NO: 1337814 - RNA, 24 nt, Human
acacacacacacacacacacacag

SEQ ID NO: 1337815 - RNA, 23 nt, Human
acacacacacacacacacacacg

SEQ ID NO: 1337816 - RNA, 30 nt, Human
acacacacacacacacacacacggcaacau

SEQ ID NO: 1337817 - RNA, 21 nt, Human
acacacacacacacacacggc

SEQ ID NO: 1337818 - RNA, 19 nt, Human
accccuccccagcacacac

SEQ ID NO: 1337819 - RNA, 22 nt, Human
accccuccccagcacacacaac

SEQ ID NO: 1337820 - RNA, 22 nt, Human
acuuuaucggcuucuucuccac

SEQ ID NO: 1337821 - RNA, 31 nt, Human
agaagacacacacacacacacacacacacag

SEQ ID NO: 1337822 - RNA, 22 nt, Human
agaugucagauguugguugaga

SEQ ID NO: 1337823 - RNA, 21 nt, Human
agcagcugcuuuugcuacggc

SEQ ID NO: 1337824 - RNA, 18 nt, Human
agcagggagggggcaggg

SEQ ID NO: 1337825 - RNA, 22 nt, Human
agcaguagcagggagggggcag

SEQ ID NO: 1337826 - RNA, 19 nt, Human
agccaagacugggccagug

SEQ ID NO: 1337827 - RNA, 21 nt, Human
agcugaggccuguguuucccu

SEQ ID NO: 1337828 - RNA, 26 nt, Human
aggagcaauggggaggggacuucagc

SEQ ID NO: 1337829 - RNA, 21 nt, Human
aggagcugagcagggagugug

SEQ ID NO: 1337830 - RNA, 23 nt, Human
aggcagggggaggguccucuagg

SEQ ID NO: 1337831 - RNA, 20 nt, Human
aggccugagugggggacugc

SEQ ID NO: 1337832 - RNA, 22 nt, Human
aggcugggaagccaggggcugc

SEQ ID NO: 1337833 - RNA, 19 nt, Human
agggagcagaagggggccc

SEQ ID NO: 1337834 - RNA, 24 nt, Human
agggagcagaagggggcccauggg

SEQ ID NO: 1337835 - RNA, 18 nt, Human
aggggcugcagggagagg

SEQ ID NO: 1337836 - RNA, 18 nt, Human
aggggucaggaggaaggc

SEQ ID NO: 1337837 - RNA, 23 nt, Human
agggugguggcagcuggaguucc

SEQ ID NO: 1337838 - RNA, 21 nt, Human
aucagcaguagcagggagggg

SEQ ID NO: 1337839 - RNA, 21 nt, Human
augggagagggagggaguaaa

SEQ ID NO: 1337840 - RNA, 18 nt, Human
caagacagaagggugagc

SEQ ID NO: 1337841 - RNA, 24 nt, Human
cacaaucccacucugcaagacaga

SEQ ID NO: 1337842 - RNA, 20 nt, Human
cacacaacauccacccucaa

SEQ ID NO: 1337843 - RNA, 25 nt, Human
cacacaacauccacccucaauuacc

SEQ ID NO: 1337844 - RNA, 19 nt, Human
cacacacaacauccacccu

SEQ ID NO: 1337845 - RNA, 20 nt, Human
cacacacacacacacacaca

SEQ ID NO: 1337846 - RNA, 20 nt, Human
cacacacacacacacacaca

SEQ ID NO: 1337847 - RNA, 20 nt, Human
cacacacacacacacacaca

SEQ ID NO: 1337848 - RNA, 20 nt, Human
cacacacacacacacacaca

SEQ ID NO: 1337849 - RNA, 20 nt, Human
cacacacacacacacacaca

SEQ ID NO: 1337850 - RNA, 20 nt, Human
cacacacacacacacacaca

SEQ ID NO: 1337851 - RNA, 20 nt, Human
cacacacacacacacacaca

SEQ ID NO: 1337852 - RNA, 20 nt, Human
cacacacacacacacacaca

SEQ ID NO: 1337853 - RNA, 20 nt, Human
cacacacacacacacacaca

SEQ ID NO: 1337854 - RNA, 20 nt, Human
cacacacacacacacacaca

SEQ ID NO: 1337855 - RNA, 20 nt, Human
cacacacacacacacacaca

SEQ ID NO: 1337856 - RNA, 20 nt, Human
cacacacacacacacacaca

SEQ ID NO: 1337857 - RNA, 22 nt, Human
cacacacacacacacacacaca

SEQ ID NO: 1337858 - RNA, 22 nt, Human
cacacacacacacacacacaca

SEQ ID NO: 1337859 - RNA, 22 nt, Human
cacacacacacacacacacaca

SEQ ID NO: 1337860 - RNA, 22 nt, Human
cacacacacacacacacacaca

SEQ ID NO: 1337861 - RNA, 22 nt, Human
cacacacacacacacacacaca

SEQ ID NO: 1337862 - RNA, 22 nt, Human
cacacacacacacacacacaca

SEQ ID NO: 1337863 - RNA, 22 nt, Human
cacacacacacacacacacaca

SEQ ID NO: 1337864 - RNA, 22 nt, Human
cacacacacacacacacacaca

SEQ ID NO: 1337865 - RNA, 26 nt, Human
cacacacacacacacacacacacaca

SEQ ID NO: 1337866 - RNA, 26 nt, Human
cacacacacacacacacacacacaca

SEQ ID NO: 1337867 - RNA, 26 nt, Human
cacacacacacacacacacacacaca

SEQ ID NO: 1337868 - RNA, 26 nt, Human
cacacacacacacacacacacacaca

SEQ ID NO: 1337869 - RNA, 26 nt, Human
cacacacacacacacacacacacaca

SEQ ID NO: 1337870 - RNA, 26 nt, Human
cacacacacacacacacacacacaca

SEQ ID NO: 1337871 - RNA, 26 nt, Human
cacacacacacacacacacacacaca

SEQ ID NO: 1337872 - RNA, 26 nt, Human
cacacacacacacacacacacacaca

SEQ ID NO: 1337873 - RNA, 26 nt, Human
cacacacacacacacacacacacggc

SEQ ID NO: 1337874 - RNA, 19 nt, Human
cacacggcaacauaauauu

SEQ ID NO: 1337875 - RNA, 26 nt, Human
caccaaacagaaggaccccuccccag

SEQ ID NO: 1337876 - RNA, 19 nt, Human
caccauccaggggcagagu

SEQ ID NO: 1337877 - RNA, 19 nt, Human
caccccucaggccuugagg

SEQ ID NO: 1337878 - RNA, 24 nt, Human
cagaaagaagggugagucugugcc

SEQ ID NO: 1337879 - RNA, 23 nt, Human
cagaagggggcccaugggacacu

SEQ ID NO: 1337880 - RNA, 23 nt, Human
cagagcccaucccuggaccuucc

SEQ ID NO: 1337881 - RNA, 18 nt, Human
cagagggugguggcagcu

SEQ ID NO: 1337882 - RNA, 22 nt, Human
cagcacacacaacauccacccu

SEQ ID NO: 1337883 - RNA, 19 nt, Human
cagcagacaacccuagcuc

SEQ ID NO: 1337884 - RNA, 21 nt, Human
cagcagacaacccuagcuccu

SEQ ID NO: 1337885 - RNA, 22 nt, Human
cagcagacaacccuagcuccug

SEQ ID NO: 1337886 - RNA, 21 nt, Human
cagcagccaagacugggccag

SEQ ID NO: 1337887 - RNA, 21 nt, Human
cagcagccaagacugggccag

SEQ ID NO: 1337888 - RNA, 19 nt, Human
cagcaguagcagggagggg

SEQ ID NO: 1337889 - RNA, 23 nt, Human
cagcaguagcagggagggggcag

SEQ ID NO: 1337890 - RNA, 18 nt, Human
cagcauucuuuccugcug

SEQ ID NO: 1337891 - RNA, 19 nt, Human
caggggcagaguagacaag

SEQ ID NO: 1337892 - RNA, 22 nt, Human
caguagcagggagggggcaggg

SEQ ID NO: 1337893 - RNA, 25 nt, Human
ccaaacagaaggaccccuccccagc

SEQ ID NO: 1337894 - RNA, 19 nt, Human
ccacccagcgguuucugca

SEQ ID NO: 1337895 - RNA, 22 nt, Human
ccaggagccccugcaccccuca

SEQ ID NO: 1337896 - RNA, 23 nt, Human
ccaguggcgccuuuacagucucu

SEQ ID NO: 1337897 - RNA, 22 nt, Human
cccaaaaagcaccuuggcucac

SEQ ID NO: 1337898 - RNA, 23 nt, Human
cccaaaaagcaccuuggcucaca

SEQ ID NO: 1337899 - RNA, 19 nt, Human
cccacaaucccacucugca

SEQ ID NO: 1337900 - RNA, 24 nt, Human
cccaccugcugcuacucccugccc

SEQ ID NO: 1337901 - RNA, 22 nt, Human
ccccaaaaagcaccuuggcuca

SEQ ID NO: 1337902 - RNA, 19 nt, Human
ccccugcaccccucaggcc

SEQ ID NO: 1337903 - RNA, 23 nt, Human
cccucaauuaccagaugcacucc

SEQ ID NO: 1337904 - RNA, 23 nt, Human
ccucauagcaggagcagcagcug

SEQ ID NO: 1337905 - RNA, 21 nt, Human
cgcaccauccaggggcagagu

SEQ ID NO: 1337906 - RNA, 23 nt, Human
cggagaccauguuguugguguca

SEQ ID NO: 1337907 - RNA, 21 nt, Human
cuccacgggaaagaugucaac

SEQ ID NO: 1337908 - RNA, 26 nt, Human
cuccccagcacacacaacauccaccc

SEQ ID NO: 1337909 - RNA, 18 nt, Human
cugaggcggcgcugucuc

SEQ ID NO: 1337910 - RNA, 21 nt, Human
cugauacugcucuacccgagc

SEQ ID NO: 1337911 - RNA, 20 nt, Human
cuggcgggucugacuggagc

SEQ ID NO: 1337912 - RNA, 24 nt, Human
gacaaagggagagucuaagagaga

SEQ ID NO: 1337913 - RNA, 18 nt, Human
gacacugucagggcaaga

SEQ ID NO: 1337914 - RNA, 20 nt, Human
gacagaagggugagcagcau

SEQ ID NO: 1337915 - RNA, 18 nt, Human
gagcagggaguguggggg

SEQ ID NO: 1337916 - RNA, 24 nt, Human
gagggugguggcagcuggaguucc

SEQ ID NO: 1337917 - RNA, 18 nt, Human
gcaaagugcuugagugcc

SEQ ID NO: 1337918 - RNA, 18 nt, Human
gcaacgggagggggcugg

SEQ ID NO: 1337919 - RNA, 26 nt, Human
gcaagaaggcaugggaccuccccugg

SEQ ID NO: 1337920 - RNA, 19 nt, Human
gcaccaaacagaaggaccc

SEQ ID NO: 1337921 - RNA, 18 nt, Human
gccugggcaugcagggca

SEQ ID NO: 1337922 - RNA, 19 nt, Human
gcugggggucccugggcag

SEQ ID NO: 1337923 - RNA, 18 nt, Human
gcuugaaggagcaauggg

SEQ ID NO: 1337924 - RNA, 18 nt, Human
ggaggaagagagaauggg

SEQ ID NO: 1337925 - RNA, 23 nt, Human
ggaggacaaagggagagucuaag

SEQ ID NO: 1337926 - RNA, 20 nt, Human
ggagggggcagggagcagaa

SEQ ID NO: 1337927 - RNA, 19 nt, Human
ggagggggcuggggguccc

SEQ ID NO: 1337928 - RNA, 19 nt, Human
ggcaacgggagggggcugg

SEQ ID NO: 1337929 - RNA, 18 nt, Human
ggcaugggacacagcacc

SEQ ID NO: 1337930 - RNA, 19 nt, Human
ggcugcagggagaggacag

SEQ ID NO: 1337931 - RNA, 20 nt, Human
ggcugcagggagaggacagg

SEQ ID NO: 1337932 - RNA, 21 nt, Human
gggaaagaguggugccagaaa

SEQ ID NO: 1337933 - RNA, 20 nt, Human
gggcagaguagacaagggua

SEQ ID NO: 1337934 - RNA, 19 nt, Human
gggcagcacgaggagcuga

SEQ ID NO: 1337935 - RNA, 22 nt, Human
gggcccaugggacacugucagg

SEQ ID NO: 1337936 - RNA, 23 nt, Human
ggguagcaccaaacagaaggacc

SEQ ID NO: 1337937 - RNA, 19 nt, Human
ggugaugggagagggaggg

SEQ ID NO: 1337938 - RNA, 20 nt, Human
ggugaugggagagggaggga

SEQ ID NO: 1337939 - RNA, 23 nt, Human
gucucugccaucccccuccccca

SEQ ID NO: 1337940 - RNA, 26 nt, Human
uaaaaaauauauacacccucauagca

SEQ ID NO: 1337941 - RNA, 31 nt, Human
uaaaagaagacacacacacacacacacacag

SEQ ID NO: 1337942 - RNA, 19 nt, Human
uaaccccucccaccugcug

SEQ ID NO: 1337943 - RNA, 20 nt, Human
uaagagagagggacggagac

SEQ ID NO: 1337944 - RNA, 20 nt, Human
uacagucucugccauccccc

SEQ ID NO: 1337945 - RNA, 21 nt, Human
uaccagaugcacuccugcucc

SEQ ID NO: 1337946 - RNA, 21 nt, Human
uagcaccaaacagaaggaccc

SEQ ID NO: 1337947 - RNA, 19 nt, Human
uagcagggagggggcaggg

SEQ ID NO: 1337948 - RNA, 23 nt, Human
uagcagggagggggcagggagca

SEQ ID NO: 1337949 - RNA, 23 nt, Human
uagcuccugauacugcucuaccc

SEQ ID NO: 1337950 - RNA, 25 nt, Human
uauagggauccaccccaccccagcu

SEQ ID NO: 1337951 - RNA, 24 nt, Human
uccacccagcgguuucugcaauga

SEQ ID NO: 1337952 - RNA, 21 nt, Human
ucccaccugcugcuacucccc

SEQ ID NO: 1337953 - RNA, 18 nt, Human
ucccaguguccgacccag

SEQ ID NO: 1337954 - RNA, 22 nt, Human
ucccccucccccacuuuggggc

SEQ ID NO: 1337955 - RNA, 22 nt, Human
ucccguggagcaggaaguugcu

SEQ ID NO: 1337956 - RNA, 19 nt, Human
uccugggggucccagcccu

SEQ ID NO: 1337957 - RNA, 23 nt, Human
uccugggggucccagcccugacc

SEQ ID NO: 1337958 - RNA, 21 nt, Human
ucuauggggaggacaaaggga

SEQ ID NO: 1337959 - RNA, 22 nt, Human
ugaacagacuuauggguccagg

SEQ ID NO: 1337960 - RNA, 20 nt, Human
ugagcaucuuuuacccucuc

SEQ ID NO: 1337961 - RNA, 18 nt, Human
ugagugccaggugcccaa

SEQ ID NO: 1337962 - RNA, 22 nt, Human
ugagugggggacuugcaagggc

SEQ ID NO: 1337963 - RNA, 22 nt, Human
ugcaagacagaagggugagcag

SEQ ID NO: 1337964 - RNA, 19 nt, Human
ugccagaaagaagggugag

SEQ ID NO: 1337965 - RNA, 22 nt, Human
ugccagaaagaagggugagucu

SEQ ID NO: 1337966 - RNA, 21 nt, Human
ugccaggagccccugcacccc

SEQ ID NO: 1337967 - RNA, 21 nt, Human
ugccccaguauagggauccac

SEQ ID NO: 1337968 - RNA, 19 nt, Human
ugccugccccaguauaggg

SEQ ID NO: 1337969 - RNA, 21 nt, Human
uggacaggugguggagaagaa

SEQ ID NO: 1337970 - RNA, 24 nt, Human
uggacaggugguggagaagaaggc

SEQ ID NO: 1337971 - RNA, 20 nt, Human
uggcuugaaggagcaauggg

SEQ ID NO: 1337972 - RNA, 20 nt, Human
ugggaggacauagaggaagg

SEQ ID NO: 1337973 - RNA, 21 nt, Human
ugggcagcagacaacccuagc

SEQ ID NO: 1337974 - RNA, 20 nt, Human
ugggggacuugcaagggcug

SEQ ID NO: 1337975 - RNA, 24 nt, Human
uggugccagaaagaagggugaguc

SEQ ID NO: 1337976 - RNA, 24 nt, Human
uguccauagaggauuuuugcugca

SEQ ID NO: 1337977 - RNA, 20 nt, Human
uugaaggagcaauggggagg

SEQ ID NO: 1337978 - RNA, 20 nt, Human
uuucccguggagcaggaagu

SEQ ID NO: 1337979 - RNA, 20 nt, Human
acacgccacauaacauaaaa

SEQ ID NO: 1337980 - RNA, 25 nt, Human
auaucgauagacucgagacuggcac

SEQ ID NO: 1337981 - RNA, 25 nt, Human
auggaagacagcaucguuucugaca

SEQ ID NO: 1337982 - RNA, 23 nt, Human
cauaaaacccucgugccgaauuc

SEQ ID NO: 1337983 - RNA, 26 nt, Human
cauaucgauagacucgagacuggcac

SEQ ID NO: 1337984 - RNA, 23 nt, Human
caucuggagauccguauuuaucc

SEQ ID NO: 1337985 - RNA, 24 nt, Human
guauuuauccggcuuccccuucca

SEQ ID NO: 1337986 - RNA, 20 nt, Human
uagacaucuaacacuauuua

SEQ ID NO: 1337987 - RNA, 26 nt, Human
uauuacaacaauuucaucgcauggaa

SEQ ID NO: 1337988 - RNA, 23 nt, Human
ugaauagaaacucuagggggacc

SEQ ID NO: 1337989 - RNA, 27 nt, Human
uggagcacugcaccucuauuuuuuuuu

SEQ ID NO: 1337990 - RNA, 22 nt, Human
aaaaaaaaaaaacaggagagga

SEQ ID NO: 1337991 - RNA, 19 nt, Human
aaaaaaaacaggagaggag

SEQ ID NO: 1337992 - RNA, 23 nt, Human
aaaaaacaaaaacaaacaacccc

SEQ ID NO: 1337993 - RNA, 19 nt, Human
aaaaacagcaggaccaaaa

SEQ ID NO: 1337994 - RNA, 21 nt, Human
aaaacaaaaacaaacaacccc

SEQ ID NO: 1337995 - RNA, 25 nt, Human
aaaacaaaaacaaacaaccccccaa

SEQ ID NO: 1337996 - RNA, 26 nt, Human
aaacaaaaacaaacaaccccccaaag

SEQ ID NO: 1337997 - RNA, 24 nt, Human
aaacagcaggaccaaaauugagca

SEQ ID NO: 1337998 - RNA, 19 nt, Human
aaacaggagaggagggagg

SEQ ID NO: 1337999 - RNA, 19 nt, Human
aaagcaaaaaacaaaaaca

SEQ ID NO: 1338000 - RNA, 28 nt, Human
aaagcaaaaaacaaaaacaaagggaccc

SEQ ID NO: 1338001 - RNA, 23 nt, Human
aagcaaaaaacaaaaacaaacaa

SEQ ID NO: 1338002 - RNA, 24 nt, Human
aagcacacaccaaaugcuguacaa

SEQ ID NO: 1338003 - RNA, 22 nt, Human
aaguggugucucccacagugcc

SEQ ID NO: 1338004 - RNA, 18 nt, Human
aauuagccaggcauggug

SEQ ID NO: 1338005 - RNA, 21 nt, Human
aauucuugcucuacuuaggaa

SEQ ID NO: 1338006 - RNA, 20 nt, Human
aauugcuugaacccaggagg

SEQ ID NO: 1338007 - RNA, 24 nt, Human
aauugcuugaacccaggaggcaga

SEQ ID NO: 1338008 - RNA, 23 nt, Human
acaaaaggcucaucaaaaacagc

SEQ ID NO: 1338009 - RNA, 23 nt, Human
acaaaccaggacaaggaaacaca

SEQ ID NO: 1338010 - RNA, 23 nt, Human
acacaaaccaggacaaggaaaca

SEQ ID NO: 1338011 - RNA, 33 nt, Human
acacacaaacacacacacacacacacacacagu

SEQ ID NO: 1338012 - RNA, 33 nt, Human
acacacacaaacacacacacacacacacacagu

SEQ ID NO: 1338013 - RNA, 28 nt, Human
acacacacacacaaacacacacacacac

SEQ ID NO: 1338014 - RNA, 31 nt, Human; identical to SEQ ID NO: 755644

SEQ ID NO: 1338015 - RNA, 25 nt, Human
acacacacacacacacacaaaccag

SEQ ID NO: 1338016 - RNA, 23 nt, Human
acacacacacacacacacacaca

SEQ ID NO: 1338017 - RNA, 23 nt, Human
acacacacacacacacacacaca

SEQ ID NO: 1338018 - RNA, 23 nt, Human
acacacacacacacacacacaca

SEQ ID NO: 1338019 - RNA, 23 nt, Human
acacacacacacacacacacaca

SEQ ID NO: 1338020 - RNA, 23 nt, Human
acacacacacacacacacacaca

SEQ ID NO: 1338021 - RNA, 25 nt, Human
acacacacacacacacacacacaaa

SEQ ID NO: 1338022 - RNA, 20 nt, Human
acacagauccccucccgccc

SEQ ID NO: 1338023 - RNA, 25 nt, Human
acaccgccaggacacacgacuccag

SEQ ID NO: 1338024 - RNA, 18 nt, Human
acacgacuccagggagcu

SEQ ID NO: 1338025 - RNA, 20 nt, Human
acacugaauaacaaagggaa

SEQ ID NO: 1338026 - RNA, 21 nt, Human
acagacacacacacacaaaca

SEQ ID NO: 1338027 - RNA, 18 nt, Human
acagugacacagaucccc

SEQ ID NO: 1338028 - RNA, 26 nt, Human
acauuuugguuaaagcaaaaaacaaa

SEQ ID NO: 1338029 - RNA, 18 nt, Human
accaaaugcuguacaaau

SEQ ID NO: 1338030 - RNA, 24 nt, Human
accaacauggagaaacccugucuc

SEQ ID NO: 1338031 - RNA, 19 nt, Human
accaggacaaggaaacaca

SEQ ID NO: 1338032 - RNA, 24 nt, Human
acccaggaggcagagguuguggug

SEQ ID NO: 1338033 - RNA, 24 nt, Human
acccugucucuacuaaaaacacaa

SEQ ID NO: 1338034 - RNA, 22 nt, Human
acuucacccagccuuccugggc

SEQ ID NO: 1338035 - RNA, 18 nt, Human
acuuuguauucaggccua

SEQ ID NO: 1338036 - RNA, 22 nt, Human
agaauugcuugaacccaggagg

SEQ ID NO: 1338037 - RNA, 18 nt, Human
agacacacacacacaaac

SEQ ID NO: 1338038 - RNA, 19 nt, Human
agacacacacacacaaaca

SEQ ID NO: 1338039 - RNA, 19 nt, Human
agacagacacacacacaca

SEQ ID NO: 1338040 - RNA, 22 nt, Human
agacagacacacacacacaaac

SEQ ID NO: 1338041 - RNA, 24 nt, Human
agagguuguggugagccaagaucg

SEQ ID NO: 1338042 - RNA, 22 nt, Human
agaucaccugagguugggaguu

SEQ ID NO: 1338043 - RNA, 23 nt, Human
agaucaccugagguugggaguuu

SEQ ID NO: 1338044 - RNA, 22 nt, Human
agcaaaaaacaaaaacaaacaa

SEQ ID NO: 1338045 - RNA, 23 nt, Human
agccaggcaugguggcaugcgcc

SEQ ID NO: 1338046 - RNA, 19 nt, Human
aggacagauggggauaauu

SEQ ID NO: 1338047 - RNA, 19 nt, Human
aggagggagggagagaccu

SEQ ID NO: 1338048 - RNA, 26 nt, Human
aggagggcagaucaccugagguuggg

SEQ ID NO: 1338049 - RNA, 24 nt, Human
aggcagagguuguggugagccaag

SEQ ID NO: 1338050 - RNA, 23 nt, Human
aggcaggagaauugcuugaaccc

SEQ ID NO: 1338051 - RNA, 24 nt, Human
aggcaggagaauugcuugaaccca

SEQ ID NO: 1338052 - RNA, 24 nt, Human
aggcaugguggcaugcgccuauaa

SEQ ID NO: 1338053 - RNA, 20 nt, Human
aggcucaucaaaaacagcag

SEQ ID NO: 1338054 - RNA, 21 nt, Human
aggcugaggcaggagaauugc

SEQ ID NO: 1338055 - RNA, 24 nt, Human
aggcugaggcaggagaauugcuug

SEQ ID NO: 1338056 - RNA, 19 nt, Human
agggaagagaggaguaaga

SEQ ID NO: 1338057 - RNA, 21 nt, Human
agggagagaccuucacugaua

SEQ ID NO: 1338058 - RNA, 23 nt, Human
aguggcucccccuguaaucccag

SEQ ID NO: 1338059 - RNA, 24 nt, Human
auagacagacacacacacacaaac

SEQ ID NO: 1338060 - RNA, 18 nt, Human
aucacacuccagccuggg

SEQ ID NO: 1338061 - RNA, 20 nt, Human
aucaccugagguugggaguu

SEQ ID NO: 1338062 - RNA, 22 nt, Human
aucccagcacucugggaggcca

SEQ ID NO: 1338063 - RNA, 22 nt, Human
augcugagugcagccgcccagc

SEQ ID NO: 1338064 - RNA, 20 nt, Human
caaaaaaaaaaaacaggaga

SEQ ID NO: 1338065 - RNA, 23 nt, Human
caaaaaacaaaaacaaacaaccc

SEQ ID NO: 1338066 - RNA, 20 nt, Human
caaaauagacagacacacac

SEQ ID NO: 1338067 - RNA, 21 nt, Human
caaaauagacagacacacaca

SEQ ID NO: 1338068 - RNA, 18 nt, Human
caaacaaccccccaaagg

SEQ ID NO: 1338069 - RNA, 20 nt, Human
caaaggucacuggcuuggcu

SEQ ID NO: 1338070 - RNA, 24 nt, Human
caacauggagaaacccugucucua

SEQ ID NO: 1338071 - RNA, 24 nt, Human
caaggagggcagaucaccugaggu

SEQ ID NO: 1338072 - RNA, 31 nt, Human; identical to SEQ ID NO: 406582

SEQ ID NO: 1338073 - RNA, 23 nt, Human
cacaaaccaggacaaggaaacac

SEQ ID NO: 1338074 - RNA, 19 nt, Human
cacacaaacacacacacac

SEQ ID NO: 1338075 - RNA, 26 nt, Human
cacacacaaacacacacacacacaca

SEQ ID NO: 1338076 - RNA, 28 nt, Human
cacacacaaaccaggacaaggaaacacc

SEQ ID NO: 1338077 - RNA, 21 nt, Human
cacacacacaaaccaggacaa

SEQ ID NO: 1338078 - RNA, 24 nt, Human
cacacacacacaaacacacacaca

SEQ ID NO: 1338079 - RNA, 20 nt, Human
cacacacacacacacacaca

SEQ ID NO: 1338080 - RNA, 20 nt, Human
cacacacacacacacacaca

SEQ ID NO: 1338081 - RNA, 20 nt, Human
cacacacacacacacacaca

SEQ ID NO: 1338082 - RNA, 20 nt, Human
cacacacacacacacacaca

SEQ ID NO: 1338083 - RNA, 20 nt, Human
cacacacacacacacacaca

SEQ ID NO: 1338084 - RNA, 20 nt, Human
cacacacacacacacacaca

SEQ ID NO: 1338085 - RNA, 20 nt, Human
cacacacacacacacacaca

SEQ ID NO: 1338086 - RNA, 20 nt, Human
cacacacacacacacacaca

SEQ ID NO: 1338087 - RNA, 20 nt, Human
cacacacacacacacacaca

SEQ ID NO: 1338088 - RNA, 20 nt, Human
cacacacacacacacacaca

SEQ ID NO: 1338089 - RNA, 22 nt, Human
cacacacacacacacacacaca

SEQ ID NO: 1338090 - RNA, 22 nt, Human
cacacacacacacacacacaca

SEQ ID NO: 1338091 - RNA, 22 nt, Human
cacacacacacacacacacaca

SEQ ID NO: 1338092 - RNA, 22 nt, Human
cacacacacacacacacacaca

SEQ ID NO: 1338093 - RNA, 26 nt, Human
cacacacacacacacacacacacaca

SEQ ID NO: 1338094 - RNA, 26 nt, Human
cacacacacacacacacacacacaca

SEQ ID NO: 1338095 - RNA, 26 nt, Human
cacacacacacacacacacacacaca

SEQ ID NO: 1338096 - RNA, 26 nt, Human
cacacacacacacacacacacacaca

SEQ ID NO: 1338097 - RNA, 26 nt, Human
cacacacacacacacacacacacaca

SEQ ID NO: 1338098 - RNA, 26 nt, Human
cacacacacacacacacacacacaca

SEQ ID NO: 1338099 - RNA, 26 nt, Human
cacacacacacacacacacacacaca

SEQ ID NO: 1338100 - RNA, 22 nt, Human
cacacugaauaacaaagggaag

SEQ ID NO: 1338101 - RNA, 23 nt, Human
cacaguaccuacagugacacaga

SEQ ID NO: 1338102 - RNA, 18 nt, Human
cacagugaaggaaaguga

SEQ ID NO: 1338103 - RNA, 18 nt, Human
cacaguggcucccccugu

SEQ ID NO: 1338104 - RNA, 21 nt, Human
cacccaggaaggggugaugcu

SEQ ID NO: 1338105 - RNA, 24 nt, Human
cacuccagccugggcaacaagagc

SEQ ID NO: 1338106 - RNA, 28 nt, Human
cagacacacacacacaaacacacacaca

SEQ ID NO: 1338107 - RNA, 20 nt, Human
cagcacucugggaggccaag

SEQ ID NO: 1338108 - RNA, 21 nt, Human
cagcacucugggaggccaagg

SEQ ID NO: 1338109 - RNA, 21 nt, Human
cagccgcccagccagcagggu

SEQ ID NO: 1338110 - RNA, 24 nt, Human
cagccugaccaacauggagaaacc

SEQ ID NO: 1338111 - RNA, 22 nt, Human
caggaaggggugaugcugagug

SEQ ID NO: 1338112 - RNA, 24 nt, Human
caggaccaaaauugagcaggcugg

SEQ ID NO: 1338113 - RNA, 24 nt, Human
caguggcucccccuguaaucccag

SEQ ID NO: 1338114 - RNA, 24 nt, Human
caucacacuccagccugggcaaca

SEQ ID NO: 1338115 - RNA, 19 nt, Human
caucuuugaagugaguuca

SEQ ID NO: 1338116 - RNA, 18 nt, Human
ccacccaggaagggguga

SEQ ID NO: 1338117 - RNA, 23 nt, Human
cccaucacacuccagccugggca

SEQ ID NO: 1338118 - RNA, 24 nt, Human
ccccaaaggacgaugguacgugcu

SEQ ID NO: 1338119 - RNA, 19 nt, Human
ccccuguaaucccagcacu

SEQ ID NO: 1338120 - RNA, 24 nt, Human
ccccuguaaucccagcacucuggg

SEQ ID NO: 1338121 - RNA, 22 nt, Human
ccuacagugacacagauccccu

SEQ ID NO: 1338122 - RNA, 18 nt, Human
ccucaaaaaaaaaaaaca

SEQ ID NO: 1338123 - RNA, 21 nt, Human
ccucaaaaaaaaaaaacagga

SEQ ID NO: 1338124 - RNA, 22 nt, Human
ccugaccaacauggagaaaccc

SEQ ID NO: 1338125 - RNA, 24 nt, Human
ccugaccaacauggagaaacccug

SEQ ID NO: 1338126 - RNA, 22 nt, Human
ccugagguugggaguuugagac

SEQ ID NO: 1338127 - RNA, 18 nt, Human
ccugcaauuuagaugggg

SEQ ID NO: 1338128 - RNA, 18 nt, Human
ccuguaaucccagcacuc

SEQ ID NO: 1338129 - RNA, 21 nt, Human
cgccaggacacacgacuccag

SEQ ID NO: 1338130 - RNA, 23 nt, Human
cggcacaguggcucccccuguaa

SEQ ID NO: 1338131 - RNA, 24 nt, Human
cuacuuaggaacuugggccggauc

SEQ ID NO: 1338132 - RNA, 24 nt, Human
cucuacuuaggaacuugggccgga

SEQ ID NO: 1338133 - RNA, 19 nt, Human
cucugccucaaaaaaaaaa

SEQ ID NO: 1338134 - RNA, 25 nt, Human
gaaacagacaaaaggcucaucaaaa

SEQ ID NO: 1338135 - RNA, 21 nt, Human
gaacuguaguaucuagaaauu

SEQ ID NO: 1338136 - RNA, 20 nt, Human
gaaucaucucagauguucuu

SEQ ID NO: 1338137 - RNA, 22 nt, Human
gacaaaaggcucaucaaaaaca

SEQ ID NO: 1338138 - RNA, 28 nt, Human
gacacacacacacaaacacacacacaca

SEQ ID NO: 1338139 - RNA, 24 nt, Human
gagaaacagacaaaaggcucauca

SEQ ID NO: 1338140 - RNA, 21 nt, Human
gagaaacccugucucuacuaa

SEQ ID NO: 1338141 - RNA, 19 nt, Human
gagcccaucacacuccagc

SEQ ID NO: 1338142 - RNA, 21 nt, Human
gaggcugaggcaggagaauug

SEQ ID NO: 1338143 - RNA, 24 nt, Human
gaucaccugagguugggaguuuga

SEQ ID NO: 1338144 - RNA, 19 nt, Human
gcacaguaccuacagugac

SEQ ID NO: 1338145 - RNA, 22 nt, Human
gcaggagaauugcuugaaccca

SEQ ID NO: 1338146 - RNA, 23 nt, Human
gcuuggcuagaugugaaugaggg

SEQ ID NO: 1338147 - RNA, 20 nt, Human
ggaaagagcuccuuuaacaa

SEQ ID NO: 1338148 - RNA, 19 nt, Human
ggaaggagaaacagacaaa

SEQ ID NO: 1338149 - RNA, 22 nt, Human
ggaggcagagguuguggugagc

SEQ ID NO: 1338150 - RNA, 21 nt, Human
ggagggcagaucaccugaggu

SEQ ID NO: 1338151 - RNA, 19 nt, Human
ggaguuugagaccagccug

SEQ ID NO: 1338152 - RNA, 18 nt, Human
ggccaaggagggcagauc

SEQ ID NO: 1338153 - RNA, 26 nt, Human
gggcagaucaccugagguugggaguu

SEQ ID NO: 1338154 - RNA, 19 nt, Human
gguugggaguuugagacca

SEQ ID NO: 1338155 - RNA, 24 nt, Human
gugaguucaaaaggcaaagaggag

SEQ ID NO: 1338156 - RNA, 24 nt, Human
guggcucccccuguaaucccagca

SEQ ID NO: 1338157 - RNA, 21 nt, Human
guucuaaaaaugagguagaga

SEQ ID NO: 1338158 - RNA, 20 nt, Human
uaaaaacacaaaauuagcca

SEQ ID NO: 1338159 - RNA, 22 nt, Human
uaaaaacacaaaauuagccagg

SEQ ID NO: 1338160 - RNA, 23 nt, Human
uaaaaacacaaaauuagccaggc

SEQ ID NO: 1338161 - RNA, 25 nt, Human
uaaagcaaaaaacaaaaacaaacaa

SEQ ID NO: 1338162 - RNA, 21 nt, Human
uaagcacacaccaaaugcugu

SEQ ID NO: 1338163 - RNA, 19 nt, Human
uaccccagcacaaauggga

SEQ ID NO: 1338164 - RNA, 24 nt, Human
uagacagacacacacacacaaaca

SEQ ID NO: 1338165 - RNA, 18 nt, Human
ucaaaaaaaaaaaacagg

SEQ ID NO: 1338166 - RNA, 18 nt, Human
ucaaaaacagcaggacca

SEQ ID NO: 1338167 - RNA, 24 nt, Human
ucaaaauagacagacacacacaca

SEQ ID NO: 1338168 - RNA, 19 nt, Human
ucagcacagugaaggaaag

SEQ ID NO: 1338169 - RNA, 20 nt, Human
uccacaaacccagagggcuc

SEQ ID NO: 1338170 - RNA, 19 nt, Human
uccagggagcuggcuggag

SEQ ID NO: 1338171 - RNA, 21 nt, Human
ucccgcccauccuggucacac

SEQ ID NO: 1338172 - RNA, 21 nt, Human
ucccuacaagauuugcugcuc

SEQ ID NO: 1338173 - RNA, 20 nt, Human
uccuuuaacaauggccucag

SEQ ID NO: 1338174 - RNA, 28 nt, Human
ucucccacagugccaccagagcaaaggu

SEQ ID NO: 1338175 - RNA, 20 nt, Human
ucucuacuaaaaacacaaaa

SEQ ID NO: 1338176 - RNA, 18 nt, Human
ugacacagauccccuccc

SEQ ID NO: 1338177 - RNA, 23 nt, Human
ugacacagauccccucccgcccc

SEQ ID NO: 1338178 - RNA, 24 nt, Human
ugaccaacauggagaaacccuguc

SEQ ID NO: 1338179 - RNA, 24 nt, Human
ugagaccagccugaccaacaugga

SEQ ID NO: 1338180 - RNA, 24 nt, Human
ugaggcaggagaauugcuugaacc

SEQ ID NO: 1338181 - RNA, 25 nt, Human
ugaggcaggagaauugcuugaaccc

SEQ ID NO: 1338182 - RNA, 23 nt, Human
ugagguagagagagacaugccac

SEQ ID NO: 1338183 - RNA, 20 nt, Human
ugccucaaaaaaaaaaaaca

SEQ ID NO: 1338184 - RNA, 25 nt, Human
ugcgugcacguguggguacaaauaa

SEQ ID NO: 1338185 - RNA, 21 nt, Human
uggcucccccuguaaucccag

SEQ ID NO: 1338186 - RNA, 19 nt, Human
uggcuuauaagcacacacc

SEQ ID NO: 1338187 - RNA, 24 nt, Human
ugggaggccaaggagggcagauca

SEQ ID NO: 1338188 - RNA, 23 nt, Human
uggguacaaauaaauguagacag

SEQ ID NO: 1338189 - RNA, 25 nt, Human
uguaagaugaggccuacaucuuuga

SEQ ID NO: 1338190 - RNA, 22 nt, Human
ugugcuccacaaacccagaggg

SEQ ID NO: 1338191 - RNA, 20 nt, Human
uuaaagcaaaaaacaaaaac

SEQ ID NO: 1338192 - RNA, 20 nt, Human
uucaggccuaaaaaaggagg

SEQ ID NO: 1338193 - RNA, 24 nt, Human
uugcuugaacccaggaggcagagg

SEQ ID NO: 1338194 - RNA, 18 nt, Human
uuguggugagccaagauc

SEQ ID NO: 1338195 - RNA, 23 nt, Human
uuuuuuggaacucacauugaaua

SEQ ID NO: 1338196 - RNA, 18 nt, Human
uuuuuuuuuuuuuuuuug

SEQ ID NO: 1338197 - RNA, 18 nt, Human
uuuuuuuuuuuuuuuuug

SEQ ID NO: 1338198 - RNA, 21 nt, Human
aagaacaguaacagucuugac

SEQ ID NO: 1338199 - RNA, 18 nt, Human
aagaauacugaauuagcu

SEQ ID NO: 1338200 - RNA, 19 nt, Human
acagaacagcagaacucga

SEQ ID NO: 1338201 - RNA, 20 nt, Human
auucuggacacaauucugac

SEQ ID NO: 1338202 - RNA, 23 nt, Human
ccagaauggggaagaauacugaa

SEQ ID NO: 1338203 - RNA, 18 nt, Human
cugcaguaaacuccaacc

SEQ ID NO: 1338204 - RNA, 20 nt, Human
gacuugcagcuaaaaaaggc

SEQ ID NO: 1338205 - RNA, 22 nt, Human
gugacagaagagcacacccuac

SEQ ID NO: 1338206 - RNA, 22 nt, Human
uaaaaaaggcaaaaggucugug

SEQ ID NO: 1338207 - RNA, 20 nt, Human
uacagaacagcagaacucga

SEQ ID NO: 1338208 - RNA, 21 nt, Human
uacucugcaguaaacuccaac

SEQ ID NO: 1338209 - RNA, 24 nt, Human
ucgaagaacaguaacagucuugaa

SEQ ID NO: 1338210 - RNA, 19 nt, Human
ugaagugacagaagagcac

SEQ ID NO: 1338211 - RNA, 21 nt, Human
ugaauaaagcacaagccaaga

SEQ ID NO: 1338212 - RNA, 20 nt, Human
ugagcacauucuggacacaa

SEQ ID NO: 1338213 - RNA, 22 nt, Human
ugcagcuaaaaaaggcaaaagg

SEQ ID NO: 1338214 - RNA, 23 nt, Human
ugucaugagcaaggaaucaaagu

SEQ ID NO: 1338215 - RNA, 22 nt, Human
uuggagcagguuucauucucca

SEQ ID NO: 1338216 - RNA, 24 nt, Human
uuuuuuuuuuuuuuuuuuucuuuu

SEQ ID NO: 1338217 - RNA, 27 nt, Human
uuuuuuuuuuuuuuuuuuuucuuuuaa

SEQ ID NO: 1338218 - RNA, 19 nt, Human
aaagcucauucagaagucu

SEQ ID NO: 1338219 - RNA, 19 nt, Human
aagccugugugcuggaaug

SEQ ID NO: 1338220 - RNA, 19 nt, Human
aaggaacucacccgaauug

SEQ ID NO: 1338221 - RNA, 20 nt, Human
acugcaacauauuggcaccu

SEQ ID NO: 1338222 - RNA, 20 nt, Human
acugcaacauauuggcaccu

SEQ ID NO: 1338223 - RNA, 19 nt, Human
acuuguucuucccugcccc

SEQ ID NO: 1338224 - RNA, 18 nt, Human
auccaggaggaugcaaaa

SEQ ID NO: 1338225 - RNA, 26 nt, Human
cagaagccugugugcuggaaugggcu

SEQ ID NO: 1338226 - RNA, 18 nt, Human
cagcagcagagcugacaa

SEQ ID NO: 1338227 - RNA, 22 nt, Human
caggaggaugcaaaaaccuggu

SEQ ID NO: 1338228 - RNA, 20 nt, Human
cauccagauggcucugagac

SEQ ID NO: 1338229 - RNA, 27 nt, Human
caucccaacuuguucuucccugcccau

SEQ ID NO: 1338230 - RNA, 21 nt, Human
cauguucuagaacauucaugu

SEQ ID NO: 1338231 - RNA, 24 nt, Human
cauucuuagcucugcuucuggaga

SEQ ID NO: 1338232 - RNA, 22 nt, Human
cauuuuccagacgagccaaggg

SEQ ID NO: 1338233 - RNA, 23 nt, Human
ccaacaucagagucugaccagcu

SEQ ID NO: 1338234 - RNA, 19 nt, Human
cccacagaggccagcuacc

SEQ ID NO: 1338235 - RNA, 26 nt, Human
cccccauuuaucaaaucccugucaua

SEQ ID NO: 1338236 - RNA, 22 nt, Human
cccucagagauugcugcagaag

SEQ ID NO: 1338237 - RNA, 21 nt, Human
cccugcccauucuuccucuuc

SEQ ID NO: 1338238 - RNA, 24 nt, Human
ccucagagauugcugcagaagccu

SEQ ID NO: 1338239 - RNA, 21 nt, Human
ccucccaccggcuuuacccuc

SEQ ID NO: 1338240 - RNA, 19 nt, Human
cgccucagggcacuuacaa

SEQ ID NO: 1338241 - RNA, 20 nt, Human
cuuacaauccccacagaggc

SEQ ID NO: 1338242 - RNA, 19 nt, Human
gcccauucuuccucuuccu

SEQ ID NO: 1338243 - RNA, 19 nt, Human
gccuuuuagccagcagaau

SEQ ID NO: 1338244 - RNA, 19 nt, Human
gcucugagacagcagcaga

SEQ ID NO: 1338245 - RNA, 20 nt, Human
gcucugcuucuggagauaag

SEQ ID NO: 1338246 - RNA, 20 nt, Human
gcuucaaggucgcaaguccu

SEQ ID NO: 1338247 - RNA, 20 nt, Human
gggugucgggacacucaucc

SEQ ID NO: 1338248 - RNA, 22 nt, Human
gucugaccagcugggugguccu

SEQ ID NO: 1338249 - RNA, 21 nt, Human
guugcagcaaaagcucauuca

SEQ ID NO: 1338250 - RNA, 20 nt, Human
uaccuacgaugaaucacauc

SEQ ID NO: 1338251 - RNA, 28 nt, Human
uacgaugaaucacaucagugucggggcc

SEQ ID NO: 1338252 - RNA, 22 nt, Human
uacugcaacauauuggcaccuc

SEQ ID NO: 1338253 - RNA, 19 nt, Human
uagaacauucaugucugcc

SEQ ID NO: 1338254 - RNA, 21 nt, Human
ucaaaaugauccaaaguuuuu

SEQ ID NO: 1338255 - RNA, 22 nt, Human
ucagugucggggccgggaaggu

SEQ ID NO: 1338256 - RNA, 24 nt, Human
ucauccaggaggaugcaaaaaccu

SEQ ID NO: 1338257 - RNA, 19 nt, Human
uccaggaggaugcaaaaac

SEQ ID NO: 1338258 - RNA, 22 nt, Human
uccccacagaggccagcuaccc

SEQ ID NO: 1338259 - RNA, 18 nt, Human
uccgggaucgccauguuc

SEQ ID NO: 1338260 - RNA, 20 nt, Human
uccucuuccugccuucacug

SEQ ID NO: 1338261 - RNA, 20 nt, Human
ucucacauccacaaugggac

SEQ ID NO: 1338262 - RNA, 22 nt, Human
ucugccuuuuagccagcagaau

SEQ ID NO: 1338263 - RNA, 24 nt, Human
ugcaaaaaccugguguuuuucuuu

SEQ ID NO: 1338264 - RNA, 19 nt, Human
ugcagcaaaagcucauuca

SEQ ID NO: 1338265 - RNA, 21 nt, Human
ugccaaggcuccgugggcauu

SEQ ID NO: 1338266 - RNA, 23 nt, Human
ugccaaggcuccgugggcauucu

SEQ ID NO: 1338267 - RNA, 23 nt, Human
ugguguuuuucuuuuuuuuuuuu

SEQ ID NO: 1338268 - RNA, 19 nt, Human
ugucaugugccaaggcucc

SEQ ID NO: 1338269 - RNA, 19 nt, Human
ugugcuggaaugggcugcc

SEQ ID NO: 1338270 - RNA, 21 nt, Human
uucucacauccacaaugggac

SEQ ID NO: 1338271 - RNA, 19 nt, Human
uucuuagcucugcuucugg

SEQ ID NO: 1338272 - RNA, 18 nt, Human
uucuuuuuuuuuuuuuug

SEQ ID NO: 1338273 - RNA, 19 nt, Human
uugggccuccuggccugcu

SEQ ID NO: 1338274 - RNA, 18 nt, Human
uuuauaucccucauccag

SEQ ID NO: 1338275 - RNA, 26 nt, Human
uuuucuuuuuuuuuuuuuugcauuuu

SEQ ID NO: 1338276 - RNA, 21 nt, Human
uuuuuuuuuugcagcaaccaa

SEQ ID NO: 1338277 - RNA, 21 nt, Human
uuuuuuuuuuuuuuuuugcag

SEQ ID NO: 1338278 - RNA, 20 nt, Human
uuuuuuuuuuuuuuuuuugg

SEQ ID NO: 1338279 - RNA, 19 nt, Human
aacaagagguggcagcagc

SEQ ID NO: 1338280 - RNA, 21 nt, Human
aagcagggaccgcugugccuc

SEQ ID NO: 1338281 - RNA, 22 nt, Human
agcaagcagggaccgcugugcc

SEQ ID NO: 1338282 - RNA, 21 nt, Human
aucuuuugcccgacgaggaac

SEQ ID NO: 1338283 - RNA, 23 nt, Human
cacucuugaaggaacaggagcug

SEQ ID NO: 1338284 - RNA, 20 nt, Human
caggagccggcccugaguuc

SEQ ID NO: 1338285 - RNA, 20 nt, Human
cagggaccgcugugccuccc

SEQ ID NO: 1338286 - RNA, 23 nt, Human
cccccaaguccgcgggaaccugc

SEQ ID NO: 1338287 - RNA, 22 nt, Human
ccccucagcaagcagggaccgc

SEQ ID NO: 1338288 - RNA, 21 nt, Human
cgggucgggguuggucgcucc

SEQ ID NO: 1338289 - RNA, 22 nt, Human
cucccggcccugagggagaccc

SEQ ID NO: 1338290 - RNA, 25 nt, Human
cuccugcugcacaccgggccggggg

SEQ ID NO: 1338291 - RNA, 18 nt, Human
gcagcgaagagucccugg

SEQ ID NO: 1338292 - RNA, 20 nt, Human
gcgccggggcucagcgggcg

SEQ ID NO: 1338293 - RNA, 24 nt, Human
gcugcaggaggcaaacacaagucu

SEQ ID NO: 1338294 - RNA, 21 nt, Human
ggccuccagcacucuugaagg

SEQ ID NO: 1338295 - RNA, 23 nt, Human
gggcgcccccaaguccgcgggaa

SEQ ID NO: 1338296 - RNA, 21 nt, Human
uaacccgggucgggguugguc

SEQ ID NO: 1338297 - RNA, 19 nt, Human
uaagcaagcuccuacccac

SEQ ID NO: 1338298 - RNA, 19 nt, Human
uaggcccucgcugcccucc

SEQ ID NO: 1338299 - RNA, 18 nt, Human
ucccuggcggcagcggcu

SEQ ID NO: 1338300 - RNA, 21 nt, Human
ucccuggcggcagcggcuccc

SEQ ID NO: 1338301 - RNA, 26 nt, Human
ucccugggaguuuuaacccgggucgg

SEQ ID NO: 1338302 - RNA, 23 nt, Human
uccggguugaggcugcaggaggc

SEQ ID NO: 1338303 - RNA, 21 nt, Human
uggcagcagcgaagagucccu

SEQ ID NO: 1338304 - RNA, 26 nt, Human
uggcagcagcgaagagucccugggag

SEQ ID NO: 1338305 - RNA, 20 nt, Human
ugggaacgggggagagaaca

SEQ ID NO: 1338306 - RNA, 23 nt, Human
ugguaggcccucgcugcccuccg

SEQ ID NO: 1338307 - RNA, 18 nt, Human
uuuuuuuuuuuuuuuuug

SEQ ID NO: 1338308 - RNA, 23 nt, Human
uuuuuuuuuuuuuuuuuggcauu

SEQ ID NO: 1338309 - RNA, 24 nt, Human
uuuuuuuuuuuuuuuuuggcauug

SEQ ID NO: 1338310 - RNA, 22 nt, Human
uuuuuuuuuuuuuuuuuuuggc

SEQ ID NO: 1338311 - RNA, 23 nt, Human
aagaggucaccacccagcuaucc

SEQ ID NO: 1338312 - RNA, 18 nt, Human
cacuagaaacagcagagc

SEQ ID NO: 1338313 - RNA, 27 nt, Human
cagccgccugucuccgcaaggggccgc

SEQ ID NO: 1338314 - RNA, 20 nt, Human
cagggccaggcugguggggu

SEQ ID NO: 1338315 - RNA, 19 nt, Human
ccucugccucagcccccac

SEQ ID NO: 1338316 - RNA, 18 nt, Human
ccugcuguucccagggcc

SEQ ID NO: 1338317 - RNA, 23 nt, Human
cgugcugccggcuuucagccgcc

SEQ ID NO: 1338318 - RNA, 19 nt, Human
cugccucagcccccacuug

SEQ ID NO: 1338319 - RNA, 24 nt, Human
cugcuguucccagggccaggcugg

SEQ ID NO: 1338320 - RNA, 23 nt, Human
ggacugaacucacuuuugcauaa

SEQ ID NO: 1338321 - RNA, 22 nt, Human
ggagcuccuccagcuccaggau

SEQ ID NO: 1338322 - RNA, 23 nt, Human
gggaguaucuggcccaggcugug

SEQ ID NO: 1338323 - RNA, 19 nt, Human
gggauccuggcugccugcc

SEQ ID NO: 1338324 - RNA, 19 nt, Human
gggccaaacuucguccaca

SEQ ID NO: 1338325 - RNA, 19 nt, Human
ggugggguugggccaaggg

SEQ ID NO: 1338326 - RNA, 19 nt, Human
uaagaggucaccacccagc

SEQ ID NO: 1338327 - RNA, 23 nt, Human
ucgugcugccggcuuucagccgc

SEQ ID NO: 1338328 - RNA, 26 nt, Human
ucucagggucacuagaaacagccgua

SEQ ID NO: 1338329 - RNA, 21 nt, Human
ucuccuaugaaaagguugggc

SEQ ID NO: 1338330 - RNA, 18 nt, Human
ucuggcccaggcugugca

SEQ ID NO: 1338331 - RNA, 24 nt, Human
ugaauugggucagggaaauccacc

SEQ ID NO: 1338332 - RNA, 25 nt, Human
ugggccaagggucagggauccuggc

SEQ ID NO: 1338333 - RNA, 21 nt, Human
uggugggguugggccaagggu

SEQ ID NO: 1338334 - RNA, 18 nt, Human
uuuuuuuuuuuuuuuuug

SEQ ID NO: 1338335 - RNA, 21 nt, Human
uuuuuuuuuuuuuuuuugcga

SEQ ID NO: 1338336 - RNA, 24 nt, Human
aaagugcugggaugauaggcauga

SEQ ID NO: 1338337 - RNA, 23 nt, Human
aacuccuaggcucaagggauccu

SEQ ID NO: 1338338 - RNA, 19 nt, Human
aagugcugggaugauaggc

SEQ ID NO: 1338339 - RNA, 24 nt, Human
aauguugcccaggcuggucuuaaa

SEQ ID NO: 1338340 - RNA, 20 nt, Human
acagcccaucuaauacuguu

SEQ ID NO: 1338341 - RNA, 19 nt, Human
acccaggcuggagugcagu

SEQ ID NO: 1338342 - RNA, 23 nt, Human
acccaggcuggagugcaguggug

SEQ ID NO: 1338343 - RNA, 18 nt, Human
acugcaagcucugccucc

SEQ ID NO: 1338344 - RNA, 25 nt, Human
aggcuggagugcaguggugcgaucu

SEQ ID NO: 1338345 - RNA, 19 nt, Human
aguagcugggacuacgggc

SEQ ID NO: 1338346 - RNA, 19 nt, Human
aguagcugggacuacgggc

SEQ ID NO: 1338347 - RNA, 23 nt, Human
agugcaguggugcgaucuuggcu

SEQ ID NO: 1338348 - RNA, 24 nt, Human
agugcaguggugcgaucuuggcuc

SEQ ID NO: 1338349 - RNA, 20 nt, Human
augguguuauaauucuccuu

SEQ ID NO: 1338350 - RNA, 19 nt, Human
auguugcccaggcuggucu

SEQ ID NO: 1338351 - RNA, 23 nt, Human
auguugcccaggcuggucuuaaa

SEQ ID NO: 1338352 - RNA, 24 nt, Human
caaagugcugggaugauaggcaug

SEQ ID NO: 1338353 - RNA, 24 nt, Human
caagggauccucccagcugggccu

SEQ ID NO: 1338354 - RNA, 21 nt, Human
caauguugcccaggcuggucu

SEQ ID NO: 1338355 - RNA, 22 nt, Human
cacaccacucuccugccucagc

SEQ ID NO: 1338356 - RNA, 24 nt, Human
cacccaggcuggagugcaguggug

SEQ ID NO: 1338357 - RNA, 23 nt, Human
cacugcaagcucugccucccggg

SEQ ID NO: 1338358 - RNA, 20 nt, Human
cagccuccugaguagcuggg

SEQ ID NO: 1338359 - RNA, 19 nt, Human
caguggugcgaucuuggcu

SEQ ID NO: 1338360 - RNA, 18 nt, Human
ccaaagugcugggaugau

SEQ ID NO: 1338361 - RNA, 24 nt, Human
ccaaagugcugggaugauaggcau

SEQ ID NO: 1338362 - RNA, 23 nt, Human
cccagcccauuuccuuuuucccu

SEQ ID NO: 1338363 - RNA, 18 nt, Human
cccggguucacaccacuc

SEQ ID NO: 1338364 - RNA, 20 nt, Human
ccuaggcucaagggauccuc

SEQ ID NO: 1338365 - RNA, 23 nt, Human
ccuaggcucaagggauccuccca

SEQ ID NO: 1338366 - RNA, 19 nt, Human
ccucccagcugggccuccc

SEQ ID NO: 1338367 - RNA, 22 nt, Human
ccucccggguucacaccacucu

SEQ ID NO: 1338368 - RNA, 24 nt, Human
ccugaguagcugggacuacgggcu

SEQ ID NO: 1338369 - RNA, 23 nt, Human
ccugccucagccuccugaguagc

SEQ ID NO: 1338370 - RNA, 24 nt, Human
cucacugcaagcucugccucccgg

SEQ ID NO: 1338371 - RNA, 24 nt, Human
cucagccuccugaguagcugggac

SEQ ID NO: 1338372 - RNA, 26 nt, Human
cucuccugccucagccuccugaguag

SEQ ID NO: 1338373 - RNA, 20 nt, Human
cucugucacccaggcuggag

SEQ ID NO: 1338374 - RNA, 23 nt, Human
cucugucacccaggcuggagugc

SEQ ID NO: 1338375 - RNA, 23 nt, Human
cugccucagccuccugaguagcu

SEQ ID NO: 1338376 - RNA, 21 nt, Human
cugggccucccaaagugcugg

SEQ ID NO: 1338377 - RNA, 24 nt, Human
cuugcucugucacccaggcuggag

SEQ ID NO: 1338378 - RNA, 20 nt, Human
gaguagcugggacuacgggc

SEQ ID NO: 1338379 - RNA, 21 nt, Human
gcacaguaccagauauauggu

SEQ ID NO: 1338380 - RNA, 21 nt, Human
gcucacugcaagcucugccuc

SEQ ID NO: 1338381 - RNA, 23 nt, Human
ggagucucccaauguugcccagg

SEQ ID NO: 1338382 - RNA, 22 nt, Human
ggaugauaggcaugaaccacca

SEQ ID NO: 1338383 - RNA, 18 nt, Human
gggcuccugccaccaguu

SEQ ID NO: 1338384 - RNA, 20 nt, Human
uaggcaugaaccaccauucc

SEQ ID NO: 1338385 - RNA, 21 nt, Human
ucacaccacucuccugccuca

SEQ ID NO: 1338386 - RNA, 24 nt, Human
ucacccaggcuggagugcaguggu

SEQ ID NO: 1338387 - RNA, 18 nt, Human
ucacugcaagcucugccu

SEQ ID NO: 1338388 - RNA, 18 nt, Human
ucacugcaagcucugccu

SEQ ID NO: 1338389 - RNA, 24 nt, Human
ucacugcaagcucugccucccggg

SEQ ID NO: 1338390 - RNA, 23 nt, Human
ucagccuccugaguagcugggac

SEQ ID NO: 1338391 - RNA, 24 nt, Human
ucccaaagugcugggaugauaggc

SEQ ID NO: 1338392 - RNA, 21 nt, Human
ucccggguucacaccacucuc

SEQ ID NO: 1338393 - RNA, 24 nt, Human
ucccggguucacaccacucuccug

SEQ ID NO: 1338394 - RNA, 18 nt, Human
uccuaggcucaagggauc

SEQ ID NO: 1338395 - RNA, 24 nt, Human
uccugaguagcugggacuacgggc

SEQ ID NO: 1338396 - RNA, 23 nt, Human
ucucccaauguugcccaggcugg

SEQ ID NO: 1338397 - RNA, 24 nt, Human
ucugucacccaggcuggagugcag

SEQ ID NO: 1338398 - RNA, 23 nt, Human
ucuugcucugucacccaggcugg

SEQ ID NO: 1338399 - RNA, 24 nt, Human
ucuugcucugucacccaggcugga

SEQ ID NO: 1338400 - RNA, 21 nt, Human
ugaaccaccauucccagccca

SEQ ID NO: 1338401 - RNA, 22 nt, Human
ugcaguggugcgaucuuggcuc

SEQ ID NO: 1338402 - RNA, 24 nt, Human
ugcccaggcuggucuuaaacuccu

SEQ ID NO: 1338403 - RNA, 24 nt, Human
ugccucagccuccugaguagcugg

SEQ ID NO: 1338404 - RNA, 19 nt, Human
ugccucccggguucacacc

SEQ ID NO: 1338405 - RNA, 24 nt, Human
uggagucucccaauguugcccagg

SEQ ID NO: 1338406 - RNA, 23 nt, Human
uggagugcaguggugcgaucuug

SEQ ID NO: 1338407 - RNA, 24 nt, Human
uggagugcaguggugcgaucuugg

SEQ ID NO: 1338408 - RNA, 19 nt, Human
uggcucacugcaagcucug

SEQ ID NO: 1338409 - RNA, 22 nt, Human
ugggacuacgggcuccugccac

SEQ ID NO: 1338410 - RNA, 24 nt, Human
ugggacuacgggcuccugccacca

SEQ ID NO: 1338411 - RNA, 24 nt, Human
ugggaugauaggcaugaaccacca

SEQ ID NO: 1338412 - RNA, 23 nt, Human
ugguguuauaauucuccuuugca

SEQ ID NO: 1338413 - RNA, 24 nt, Human
uguagagauggagucucccaaugu

SEQ ID NO: 1338414 - RNA, 24 nt, Human
uucuugcucugucacccaggcugg

SEQ ID NO: 1338415 - RNA, 24 nt, Human
uugcucugucacccaggcuggagu

SEQ ID NO: 1338416 - RNA, 23 nt, Human
uuguagagauggagucucccaau

SEQ ID NO: 1338417 - RNA, 27 nt, Human
uuuuuuauuuuuguagagauggagucu

SEQ ID NO: 1338418 - RNA, 23 nt, Human
aagcagaccuaccgggaacaacu

SEQ ID NO: 1338419 - RNA, 24 nt, Human
aagcagaccuaccgggaacaacuu

SEQ ID NO: 1338420 - RNA, 24 nt, Human
acuuaaugggacaucuuggguaac

SEQ ID NO: 1338421 - RNA, 24 nt, Human
agggaaagcagaccuaccgggaaa

SEQ ID NO: 1338422 - RNA, 21 nt, Human
aggggcacuggacacuaaguc

SEQ ID NO: 1338423 - RNA, 19 nt, Human
agucaaguuggaacgucca

SEQ ID NO: 1338424 - RNA, 24 nt, Human
auaaggcaacagugaauauauaaa

SEQ ID NO: 1338425 - RNA, 19 nt, Human
aucuuggguaacuggauga

SEQ ID NO: 1338426 - RNA, 22 nt, Human
auggcuuaggaaggagacacaa

SEQ ID NO: 1338427 - RNA, 21 nt, Human
caacaaauacauauuuagcca

SEQ ID NO: 1338428 - RNA, 27 nt, Human
caacaaauacauauuuagccauuagaa

SEQ ID NO: 1338429 - RNA, 19 nt, Human
cagaccuaccgggaacaac

SEQ ID NO: 1338430 - RNA, 23 nt, Human
cagcugcccaaagauacaucuac

SEQ ID NO: 1338431 - RNA, 22 nt, Human
ccuaccagguuggaauguccaa

SEQ ID NO: 1338432 - RNA, 24 nt, Human
cuauguauguauuaccuccauucu

SEQ ID NO: 1338433 - RNA, 22 nt, Human
cugcaguuaacauaucuugugu

SEQ ID NO: 1338434 - RNA, 24 nt, Human
cuuaggaaggagacacaaaagaga

SEQ ID NO: 1338435 - RNA, 22 nt, Human
gcaguuaguuguuagauuagcu

SEQ ID NO: 1338436 - RNA, 22 nt, Human
ggaaagcagaaaaguucagcug

SEQ ID NO: 1338437 - RNA, 21 nt, Human
uacauacggcucuuccaggga

SEQ ID NO: 1338438 - RNA, 24 nt, Human
uauugauacuauguauguauuacc

SEQ ID NO: 1338439 - RNA, 18 nt, Human
uccacagaauucaacaca

SEQ ID NO: 1338440 - RNA, 19 nt, Human
uccacagaauucaacacau

SEQ ID NO: 1338441 - RNA, 20 nt, Human
ugaggaaagcagaaaaguuc

SEQ ID NO: 1338442 - RNA, 20 nt, Human
ugcauagaauauauccucuc

SEQ ID NO: 1338443 - RNA, 19 nt, Human
uuaaugggacaucuugggu

SEQ ID NO: 1338444 - RNA, 24 nt, Human
uucagcugcccaaagauacaucua

SEQ ID NO: 1338445 - RNA, 22 nt, Human
uuccagggaaagcagaccuacc

SEQ ID NO: 1338446 - RNA, 24 nt, Human
uuggcaguuaguuguuagauuagc

SEQ ID NO: 1338447 - RNA, 25 nt, Human
uuggcaguuaguuguuagauuagcu

SEQ ID NO: 1338448 - RNA, 19 nt, Human
uuugaggaaagcagaaaag

SEQ ID NO: 1338449 - RNA, 23 nt, Human
uuuuuuuuuuaaaacuaaaacuu

SEQ ID NO: 1338450 - RNA, 19 nt, Human
aagaaugaauuuuguuuac

SEQ ID NO: 1338451 - RNA, 21 nt, Human
acagcaauaucauaauacagc

SEQ ID NO: 1338452 - RNA, 18 nt, Human
auaaaauauucuuagccc

SEQ ID NO: 1338453 - RNA, 22 nt, Human
augaauaaugauuccaaagcuc

SEQ ID NO: 1338454 - RNA, 18 nt, Human
caacucaggcaugcacag

SEQ ID NO: 1338455 - RNA, 20 nt, Human
cauugagguacacuugcggg

SEQ ID NO: 1338456 - RNA, 21 nt, Human
ccaaguccccauucuggugca

SEQ ID NO: 1338457 - RNA, 18 nt, Human
ccccauucuggugcaucu

SEQ ID NO: 1338458 - RNA, 21 nt, Human
cccuacaaacucgccauugag

SEQ ID NO: 1338459 - RNA, 18 nt, Human
gaagaaugucacagcccc

SEQ ID NO: 1338460 - RNA, 21 nt, Human
gcccgaacaccagaccaacua

SEQ ID NO: 1338461 - RNA, 18 nt, Human
uaacaaaagaagcuacac

SEQ ID NO: 1338462 - RNA, 25 nt, Human
uacaaacucgccauugagguacacu

SEQ ID NO: 1338463 - RNA, 23 nt, Human
uccuauuuaacuucugaaucagg

SEQ ID NO: 1338464 - RNA, 22 nt, Human
ucuuuuuuuguccaccauuuuu

SEQ ID NO: 1338465 - RNA, 23 nt, Human
uggauccccagcuuuuucaguuc

SEQ ID NO: 1338466 - RNA, 21 nt, Human
ugguuguaauuaaguccacaa

SEQ ID NO: 1338467 - RNA, 21 nt, Human
uuagcccgaacaccagaccaa

SEQ ID NO: 1338468 - RNA, 24 nt, Human
uuccaaagcuccuauuuaacuucu

SEQ ID NO: 1338469 - RNA, 18 nt, Human
uucuuagcccgaacacca

SEQ ID NO: 1338470 - RNA, 18 nt, Human
uuuuuuuuuuucggaauc

SEQ ID NO: 1338471 - RNA, 23 nt, Human
uuuuuuuuuuuuuuuuucggaau

SEQ ID NO: 1338472 - RNA, 23 nt, Human
uuuuuuuuuuuuuuuuuuuucgg

SEQ ID NO: 1338473 - RNA, 19 nt, Human
aaaaaaaaaaaaaaaagga

SEQ ID NO: 1338474 - RNA, 24 nt, Human
aaaaaaaaaaaaaaaaggaugcag

SEQ ID NO: 1338475 - RNA, 19 nt, Human
aaaaaaagagagggaaaga

SEQ ID NO: 1338476 - RNA, 20 nt, Human
aaaauuacaagacacagcca

SEQ ID NO: 1338477 - RNA, 18 nt, Human
aaacaaagcccgacagcg

SEQ ID NO: 1338478 - RNA, 18 nt, Human
aaacaccagccagcuccc

SEQ ID NO: 1338479 - RNA, 23 nt, Human
aaaccaccauaugcucccaccug

SEQ ID NO: 1338480 - RNA, 23 nt, Human
aaccaccauaugcucccaccugc

SEQ ID NO: 1338481 - RNA, 22 nt, Human
aacgcugcucccuccaggggug

SEQ ID NO: 1338482 - RNA, 20 nt, Human
aagaaggaaacaaagcccga

SEQ ID NO: 1338483 - RNA, 24 nt, Human
aagcgcgguggcucaugccuguaa

SEQ ID NO: 1338484 - RNA, 24 nt, Human
aauugcuugaauccgggaggcgga

SEQ ID NO: 1338485 - RNA, 19 nt, Human
acauggagaaaccccgucu

SEQ ID NO: 1338486 - RNA, 20 nt, Human
acauggagaaaccccgucuc

SEQ ID NO: 1338487 - RNA, 21 nt, Human
accagucugugaaaaccaggc

SEQ ID NO: 1338488 - RNA, 24 nt, Human
accccgucuccacuaaaaauacaa

SEQ ID NO: 1338489 - RNA, 24 nt, Human
acuuugggaggccgaggugggcag

SEQ ID NO: 1338490 - RNA, 21 nt, Human
agaaggaaacaaagcccgaca

SEQ ID NO: 1338491 - RNA, 23 nt, Human
agaucaccugaggucgggaguuc

SEQ ID NO: 1338492 - RNA, 24 nt, Human
agcacuuugggaggccgagguggg

SEQ ID NO: 1338493 - RNA, 21 nt, Human
aggccgaggugggcagaucac

SEQ ID NO: 1338494 - RNA, 21 nt, Human
aggcggagguugcggugagcc

SEQ ID NO: 1338495 - RNA, 24 nt, Human
aggcggagguugcggugagccgag

SEQ ID NO: 1338496 - RNA, 21 nt, Human
aggcugaggcgggagaauugc

SEQ ID NO: 1338497 - RNA, 24 nt, Human
aggcugaggcgggagaauugcuug

SEQ ID NO: 1338498 - RNA, 22 nt, Human
agggucacugggccaggcuguc

SEQ ID NO: 1338499 - RNA, 22 nt, Human
aggugggcagaucaccugaggu

SEQ ID NO: 1338500 - RNA, 26 nt, Human
aggugggcagaucaccugaggucggg

SEQ ID NO: 1338501 - RNA, 24 nt, Human
aucacgccauugcacuccagccug

SEQ ID NO: 1338502 - RNA, 19 nt, Human
augccuguaaucccagcac

SEQ ID NO: 1338503 - RNA, 20 nt, Human
auggagaaaccccgucucca

SEQ ID NO: 1338504 - RNA, 23 nt, Human
auugcacuccagccugggcgaca

SEQ ID NO: 1338505 - RNA, 24 nt, Human
auugcacuccagccugggcgacaa

SEQ ID NO: 1338506 - RNA, 21 nt, Human
caaaauuacaagacacagcca

SEQ ID NO: 1338507 - RNA, 25 nt, Human
cacagcucaaacaccagccagcucc

SEQ ID NO: 1338508 - RNA, 24 nt, Human
cagaucaccugaggucgggaguuc

SEQ ID NO: 1338509 - RNA, 24 nt, Human
cagcacuuugggaggccgaggugg

SEQ ID NO: 1338510 - RNA, 24 nt, Human
cagccugaccgacauggagaaacc

SEQ ID NO: 1338511 - RNA, 18 nt, Human
cagccugcucccuggagc

SEQ ID NO: 1338512 - RNA, 24 nt, Human
cagcuacucgggaggcugaggcgg

SEQ ID NO: 1338513 - RNA, 18 nt, Human
caggaggaaaguaacucc

SEQ ID NO: 1338514 - RNA, 18 nt, Human
caggugcuucugccacag

SEQ ID NO: 1338515 - RNA, 21 nt, Human
cagugaggaacacuuagacac

SEQ ID NO: 1338516 - RNA, 20 nt, Human
caugccuguaaucccagcac

SEQ ID NO: 1338517 - RNA, 24 nt, Human
caugccuguaaucccagcacuuug

SEQ ID NO: 1338518 - RNA, 19 nt, Human
cauugcacuccagccuggg

SEQ ID NO: 1338519 - RNA, 20 nt, Human
cauugcacuccagccugggc

SEQ ID NO: 1338520 - RNA, 21 nt, Human
cauugcacuccagccugggcg

SEQ ID NO: 1338521 - RNA, 22 nt, Human
cauugcacuccagccugggcga

SEQ ID NO: 1338522 - RNA, 24 nt, Human
cauugcacuccagccugggcgaca

SEQ ID NO: 1338523 - RNA, 20 nt, Human
cauuuaaguuauaaucguuc

SEQ ID NO: 1338524 - RNA, 22 nt, Human
ccaacgcugcucccuccagggg

SEQ ID NO: 1338525 - RNA, 26 nt, Human
ccaccugcagccauuguuaaagaaca

SEQ ID NO: 1338526 - RNA, 20 nt, Human
ccauugcacuccagccuggg

SEQ ID NO: 1338527 - RNA, 21 nt, Human
ccauugcacuccagccugggc

SEQ ID NO: 1338528 - RNA, 22 nt, Human
ccauugcacuccagccugggcg

SEQ ID NO: 1338529 - RNA, 24 nt, Human
ccauugcacuccagccugggcgac

SEQ ID NO: 1338530 - RNA, 21 nt, Human
cccgucuccacuaaaaauaca

SEQ ID NO: 1338531 - RNA, 23 nt, Human
ccugaccgacauggagaaacccc

SEQ ID NO: 1338532 - RNA, 24 nt, Human
ccugaccgacauggagaaaccccg

SEQ ID NO: 1338533 - RNA, 22 nt, Human
ccugaggucgggaguucgagac

SEQ ID NO: 1338534 - RNA, 22 nt, Human
ccuguaaucccagcacuuuggg

SEQ ID NO: 1338535 - RNA, 21 nt, Human
ccuguaaucccagcuacucgg

SEQ ID NO: 1338536 - RNA, 22 nt, Human
ccuguaaucccagcuacucggg

SEQ ID NO: 1338537 - RNA, 18 nt, Human
cgacaaaggcaaaaacuc

SEQ ID NO: 1338538 - RNA, 21 nt, Human
cgacaaaggcaaaaacuccgu

SEQ ID NO: 1338539 - RNA, 22 nt, Human
cgacauggagaaaccccgucuc

SEQ ID NO: 1338540 - RNA, 20 nt, Human
cgaggugggcagaucaccug

SEQ ID NO: 1338541 - RNA, 24 nt, Human
cgaggugggcagaucaccugaggu

SEQ ID NO: 1338542 - RNA, 26 nt, Human
cgccauugcacuccagccugggcgac

SEQ ID NO: 1338543 - RNA, 24 nt, Human
cgggaggcggagguugcggugagc

SEQ ID NO: 1338544 - RNA, 18 nt, Human
cucaaaaaaaaaaaaaaa

SEQ ID NO: 1338545 - RNA, 24 nt, Human
cucaaaaaaaaaaaaaaaaggaug

SEQ ID NO: 1338546 - RNA, 24 nt, Human
cucaugccuguaaucccagcacuu

SEQ ID NO: 1338547 - RNA, 20 nt, Human
cuccagggguggugaggccc

SEQ ID NO: 1338548 - RNA, 23 nt, Human
cucccugccaacgcugcucccuc

SEQ ID NO: 1338549 - RNA, 22 nt, Human
cucccuugaggccgcguggcuu

SEQ ID NO: 1338550 - RNA, 19 nt, Human
cuccgucucaaaaaaaaaa

SEQ ID NO: 1338551 - RNA, 25 nt, Human
cugaggcccauccuccucuccaccu

SEQ ID NO: 1338552 - RNA, 23 nt, Human
cugcucccuggagccccaggugc

SEQ ID NO: 1338553 - RNA, 21 nt, Human
cugggcuuuugacaaaaaaag

SEQ ID NO: 1338554 - RNA, 21 nt, Human
cuggggcuugagaugcuccug

SEQ ID NO: 1338555 - RNA, 21 nt, Human
gaacaaauuuacaggucagga

SEQ ID NO: 1338556 - RNA, 20 nt, Human
gaaccagucugugaaaaccg

SEQ ID NO: 1338557 - RNA, 22 nt, Human
gacaaaggcaaaaacuccgucu

SEQ ID NO: 1338558 - RNA, 21 nt, Human
gagaaaccccgucuccacuaa

SEQ ID NO: 1338559 - RNA, 23 nt, Human
gagaccagccugaccgacaugga

SEQ ID NO: 1338560 - RNA, 23 nt, Human
gagaucacgccauugcacuccag

SEQ ID NO: 1338561 - RNA, 24 nt, Human
gaggcgggagaauugcuugaaucc

SEQ ID NO: 1338562 - RNA, 23 nt, Human
gaggugggcagaucaccugaggu

SEQ ID NO: 1338563 - RNA, 22 nt, Human
gagguugcggugagccgagauc

SEQ ID NO: 1338564 - RNA, 24 nt, Human
gaucaccugaggucgggaguucga

SEQ ID NO: 1338565 - RNA, 22 nt, Human
gccauugcacuccagccugggc

SEQ ID NO: 1338566 - RNA, 24 nt, Human
gccauugcacuccagccugggcga

SEQ ID NO: 1338567 - RNA, 19 nt, Human
ggaggcaccucaguauucc

SEQ ID NO: 1338568 - RNA, 24 nt, Human
ggaggggcuggcuugggcccaggg

SEQ ID NO: 1338569 - RNA, 24 nt, Human
ggaggugcgugccuguaaucccag

SEQ ID NO: 1338570 - RNA, 20 nt, Human
ggagguugcggugagccgag

SEQ ID NO: 1338571 - RNA, 22 nt, Human
ggagguugcggugagccgagau

SEQ ID NO: 1338572 - RNA, 23 nt, Human
ggagguugcggugagccgagauc

SEQ ID NO: 1338573 - RNA, 24 nt, Human
ggagguugcggugagccgagauca

SEQ ID NO: 1338574 - RNA, 24 nt, Human
ggcaucucuuucuuucuuucuccu

SEQ ID NO: 1338575 - RNA, 22 nt, Human
ggccaagcgcgguggcucaugg

SEQ ID NO: 1338576 - RNA, 21 nt, Human
ggcucaugccuguaaucccag

SEQ ID NO: 1338577 - RNA, 26 nt, Human
gggcagaucaccugaggucgggaguu

SEQ ID NO: 1338578 - RNA, 23 nt, Human
ggguggugaggccccacccuguc

SEQ ID NO: 1338579 - RNA, 22 nt, Human
ggugaggccccacccugucagu

SEQ ID NO: 1338580 - RNA, 21 nt, Human
ggugcgugccuguaaucccag

SEQ ID NO: 1338581 - RNA, 23 nt, Human
gguggcucaugccuguaauccca

SEQ ID NO: 1338582 - RNA, 24 nt, Human
gguggcucaugccuguaaucccag

SEQ ID NO: 1338583 - RNA, 19 nt, Human
guugcggugagccgagauc

SEQ ID NO: 1338584 - RNA, 22 nt, Human
uaaaaauacaaaauuagccgga

SEQ ID NO: 1338585 - RNA, 23 nt, Human
uaaaaauacaaaauuagccggac

SEQ ID NO: 1338586 - RNA, 19 nt, Human
uaaguuauaaucguucccc

SEQ ID NO: 1338587 - RNA, 21 nt, Human
ucaaaaaaaaaaaaaaaagga

SEQ ID NO: 1338588 - RNA, 23 nt, Human
ucacgccauugcacuccagccug

SEQ ID NO: 1338589 - RNA, 22 nt, Human
ucaugccuguaaucccagcacu

SEQ ID NO: 1338590 - RNA, 20 nt, Human
uccagccugggcgacaaagg

SEQ ID NO: 1338591 - RNA, 24 nt, Human
ucccaggcccuaaaauguucgcuu

SEQ ID NO: 1338592 - RNA, 19 nt, Human
ucccuggagccccaggugc

SEQ ID NO: 1338593 - RNA, 22 nt, Human
ucccuggagccccaggugcuuc

SEQ ID NO: 1338594 - RNA, 19 nt, Human
uccgggaggcggagguugc

SEQ ID NO: 1338595 - RNA, 23 nt, Human
uccgucucaaaaaaaaaaaaaaa

SEQ ID NO: 1338596 - RNA, 24 nt, Human
uccgucucaaaaaaaaaaaaaaaa

SEQ ID NO: 1338597 - RNA, 23 nt, Human
ucgggaggcugaggcgggagaau

SEQ ID NO: 1338598 - RNA, 18 nt, Human
ucucaaaaaaaaaaaaaa

SEQ ID NO: 1338599 - RNA, 22 nt, Human
ucuggcccugauaggaggcagg

SEQ ID NO: 1338600 - RNA, 19 nt, Human
ucuuucuuucuuucucccc

SEQ ID NO: 1338601 - RNA, 21 nt, Human
ugaaaauggauggcgcuuccc

SEQ ID NO: 1338602 - RNA, 18 nt, Human
ugaaagcccuggaggggc

SEQ ID NO: 1338603 - RNA, 21 nt, Human
ugaaagcccuggaggggcugg

SEQ ID NO: 1338604 - RNA, 21 nt, Human
ugacaaaaaaagagagggaaa

SEQ ID NO: 1338605 - RNA, 22 nt, Human
ugagccgagaucacgccauugc

SEQ ID NO: 1338606 - RNA, 21 nt, Human
ugaggaacacuuagacacugc

SEQ ID NO: 1338607 - RNA, 21 nt, Human
ugauaggaggcaggacucggg

SEQ ID NO: 1338608 - RNA, 23 nt, Human
ugccuguaaucccagcacuuugg

SEQ ID NO: 1338609 - RNA, 23 nt, Human
ugccuguaaucccagcuacucgg

SEQ ID NO: 1338610 - RNA, 24 nt, Human
ugccuguaaucccagcuacucggg

SEQ ID NO: 1338611 - RNA, 21 nt, Human
ugcucuuugggcuugagacuu

SEQ ID NO: 1338612 - RNA, 18 nt, Human
ugcuugaauccgggaggc

SEQ ID NO: 1338613 - RNA, 20 nt, Human
uggaggggcuggcuugggcc

SEQ ID NO: 1338614 - RNA, 24 nt, Human
uggaggugcgugccuguaauccca

SEQ ID NO: 1338615 - RNA, 24 nt, Human
uggccaagcgcgguggcucaugcc

SEQ ID NO: 1338616 - RNA, 22 nt, Human
uggcucaugccuguaaucccag

SEQ ID NO: 1338617 - RNA, 24 nt, Human
uggcucaugccuguaaucccagca

SEQ ID NO: 1338618 - RNA, 20 nt, Human
ugggaggccgaggugggcag

SEQ ID NO: 1338619 - RNA, 24 nt, Human
ugggaggccgaggugggcagauca

SEQ ID NO: 1338620 - RNA, 24 nt, Human
ugggcagaucaccugaggucggga

SEQ ID NO: 1338621 - RNA, 21 nt, Human
ugggccaggcugucucccugc

SEQ ID NO: 1338622 - RNA, 22 nt, Human
uggugaggccccacccugucag

SEQ ID NO: 1338623 - RNA, 24 nt, Human
uugaauccgggaggcggagguugc

SEQ ID NO: 1338624 - RNA, 22 nt, Human
uugacaaaaaaagagagggaaa

SEQ ID NO: 1338625 - RNA, 24 nt, Human
uugagaugcuccugaggcccaucc

SEQ ID NO: 1338626 - RNA, 18 nt, Human
uugcggugagccgagauc

SEQ ID NO: 1338627 - RNA, 20 nt, Human
uugcggugagccgagaucac

SEQ ID NO: 1338628 - RNA, 21 nt, Human
uugcggugagccgagaucacg

SEQ ID NO: 1338629 - RNA, 24 nt, Human
uugcuugaauccgggaggcggagg

SEQ ID NO: 1338630 - RNA, 25 nt, Human
uugggaggccgaggugggcagauca

SEQ ID NO: 1338631 - RNA, 24 nt, Human
uuuuuuuuuuuuuuuauuuuccag

SEQ ID NO: 1338632 - RNA, 24 nt, Human
uuuuuuuuuuuuuuuuuuuauuuu

SEQ ID NO: 1338633 - RNA, 26 nt, Human
aagcagguuuauuagggcccuggggc

SEQ ID NO: 1338634 - RNA, 18 nt, Human
aaggccagggccgugaga

SEQ ID NO: 1338635 - RNA, 18 nt, Human
aggccagggccgugagaa

SEQ ID NO: 1338636 - RNA, 21 nt, Human
agggaccuggggauacagagg

SEQ ID NO: 1338637 - RNA, 22 nt, Human
agggaccuggggauacagaggg

SEQ ID NO: 1338638 - RNA, 19 nt, Human
cagaagcccuggcuggaga

SEQ ID NO: 1338639 - RNA, 23 nt, Human
cagguuuauuagggcccuggggc

SEQ ID NO: 1338640 - RNA, 20 nt, Human
caucucagaagcccuggcug

SEQ ID NO: 1338641 - RNA, 22 nt, Human
cccuggcuggagaccuuaggag

SEQ ID NO: 1338642 - RNA, 21 nt, Human
ccuuaggagucaguucuggga

SEQ ID NO: 1338643 - RNA, 23 nt, Human
gagggaccuggggauacagaggg

SEQ ID NO: 1338644 - RNA, 22 nt, Human
gaucuuugggcuuuugccagga

SEQ ID NO: 1338645 - RNA, 24 nt, Human
ggaaauggucuggggggcagggag

SEQ ID NO: 1338646 - RNA, 22 nt, Human
gggcccuggggccaggaaugcc

SEQ ID NO: 1338647 - RNA, 24 nt, Human
gggccgugagaaaaggugacucuc

SEQ ID NO: 1338648 - RNA, 20 nt, Human
guucugggagggaccugggg

SEQ ID NO: 1338649 - RNA, 28 nt, Human
ucucagaagcccuggcuggagaccuuag

SEQ ID NO: 1338650 - RNA, 20 nt, Human
ucuggggggcagggagccuu

SEQ ID NO: 1338651 - RNA, 23 nt, Human
ugagaaaaggugacucuccugag

SEQ ID NO: 1338652 - RNA, 18 nt, Human
uggagaccuuaggaguca

SEQ ID NO: 1338653 - RNA, 24 nt, Human
ugggagggaccuggggauacagag

SEQ ID NO: 1338654 - RNA, 22 nt, Human
uuggggaaauggucuggggaaa

SEQ ID NO: 1338655 - RNA, 19 nt, Human
aaacagcaggccuugaguc

SEQ ID NO: 1338656 - RNA, 22 nt, Human
acauugcuucauuuuuuuuucu

SEQ ID NO: 1338657 - RNA, 18 nt, Human
acuggguuggaaacucca

SEQ ID NO: 1338658 - RNA, 21 nt, Human
auuccagggcuuguucuagaa

SEQ ID NO: 1338659 - RNA, 23 nt, Human
cacauugcuucauuuuuuuuucu

SEQ ID NO: 1338660 - RNA, 22 nt, Human
cccuuggauuuacuggguugga

SEQ ID NO: 1338661 - RNA, 20 nt, Human
ccugugggccggcccaaccc

SEQ ID NO: 1338662 - RNA, 19 nt, Human
gcccuccggaggcuaauca

SEQ ID NO: 1338663 - RNA, 21 nt, Human
gcugaagggcaggccaccaag

SEQ ID NO: 1338664 - RNA, 23 nt, Human
ggaaacuggggcccuccggaggc

SEQ ID NO: 1338665 - RNA, 22 nt, Human
ggacuggggugggauucugggc

SEQ ID NO: 1338666 - RNA, 20 nt, Human
ggcuuguucuagaagcuuau

SEQ ID NO: 1338667 - RNA, 22 nt, Human
gggcaggccaccaagaugggga

SEQ ID NO: 1338668 - RNA, 23 nt, Human
uaaaacaauuuauuaccaaagca

SEQ ID NO: 1338669 - RNA, 24 nt, Human
ucaaggguaggagggguccccccu

SEQ ID NO: 1338670 - RNA, 19 nt, Human
ugcaaauggaaaguucugg

SEQ ID NO: 1338671 - RNA, 25 nt, Human
ugcaaauggaaaguucuggauucca

SEQ ID NO: 1338672 - RNA, 24 nt, Human
uggauuuacuggguuggaaacucc

SEQ ID NO: 1338673 - RNA, 18 nt, Human
uggcaggaaugcacauuc

SEQ ID NO: 1338674 - RNA, 21 nt, Human
uggcaggaaugcacauuccag

SEQ ID NO: 1338675 - RNA, 20 nt, Human
ugggcuucugcagccugacc

SEQ ID NO: 1338676 - RNA, 24 nt, Human
uuccagggcuuguucuagaagcuu

SEQ ID NO: 1338677 - RNA, 22 nt, Human
aaacugccaucaaagagcacag

SEQ ID NO: 1338678 - RNA, 18 nt, Human
aagcagccugaccccagg

SEQ ID NO: 1338679 - RNA, 22 nt, Human
accuuaagagauggaagaaaaa

SEQ ID NO: 1338680 - RNA, 25 nt, Human
caugacaagcacccaaaggugcaaa

SEQ ID NO: 1338681 - RNA, 23 nt, Human
ccaccucccaaacuagcuggucu

SEQ ID NO: 1338682 - RNA, 23 nt, Human
cccaaacuagcuggucuaugagg

SEQ ID NO: 1338683 - RNA, 24 nt, Human
ccugaccccaggcagaucuggguc

SEQ ID NO: 1338684 - RNA, 22 nt, Human
cucucccuuuucuagaucaaaa

SEQ ID NO: 1338685 - RNA, 18 nt, Human
gcuggucuaugaggucag

SEQ ID NO: 1338686 - RNA, 19 nt, Human
gcuggucuaugaggucagg

SEQ ID NO: 1338687 - RNA, 23 nt, Human
ggucagggaccugcugucuucuu

SEQ ID NO: 1338688 - RNA, 21 nt, Human
uaaacgaacaugacaagcacc

SEQ ID NO: 1338689 - RNA, 23 nt, Human
uaaauaaaauuuacaaaaaauaa

SEQ ID NO: 1338690 - RNA, 22 nt, Human
uauucugccgccaccucccaaa

SEQ ID NO: 1338691 - RNA, 28 nt, Human
ucagcccuuauucugccgccaccuccca

SEQ ID NO: 1338692 - RNA, 19 nt, Human
ucagggaccugcugucuuc

SEQ ID NO: 1338693 - RNA, 26 nt, Human
ucccaaacuagcuggucuaugagguc

SEQ ID NO: 1338694 - RNA, 19 nt, Human
ucuccaugccucuccacuc

SEQ ID NO: 1338695 - RNA, 23 nt, Human
ugaaaaauaaacgaacaugacaa

SEQ ID NO: 1338696 - RNA, 18 nt, Human
ugaggcuagagaauggga

SEQ ID NO: 1338697 - RNA, 20 nt, Human
ugccaucaaagagcacaguu

SEQ ID NO: 1338698 - RNA, 19 nt, Human
ugcugcccuagcagccaca

SEQ ID NO: 1338699 - RNA, 19 nt, Human
uggaagaaaaacaaucuga

SEQ ID NO: 1338700 - RNA, 22 nt, Human
uguugcccaggcuccaucuaaa

SEQ ID NO: 1338701 - RNA, 23 nt, Human
uuauucugccgccaccucccaaa

SEQ ID NO: 1338702 - RNA, 20 nt, Human
uucagcgaaauuguaacugu

SEQ ID NO: 1338703 - RNA, 23 nt, Human
uuguugcccaggcuccaucuaaa

SEQ ID NO: 1338704 - RNA, 20 nt, Human
uuucgcucuuguugcccagg

SEQ ID NO: 1338705 - RNA, 23 nt, Human
uuucgcucuuguugcccaggcuc

SEQ ID NO: 1338706 - RNA, 25 nt, Human
uuuuuuuuuuuugagacggaguuuc

SEQ ID NO: 1338707 - RNA, 19 nt, Human
aaaggggacccuggagcug

SEQ ID NO: 1338708 - RNA, 22 nt, Human
aaagugccuccaauccuuacug

SEQ ID NO: 1338709 - RNA, 19 nt, Human
aagagcacagucucugaac

SEQ ID NO: 1338710 - RNA, 22 nt, Human
aagagguggcagugaggucagg

SEQ ID NO: 1338711 - RNA, 21 nt, Human
acagcaggagaccauagggga

SEQ ID NO: 1338712 - RNA, 21 nt, Human
acccaagccacagcaggagac

SEQ ID NO: 1338713 - RNA, 18 nt, Human
agaaggccagggaggagu

SEQ ID NO: 1338714 - RNA, 21 nt, Human
agagcacagucucugaacaag

SEQ ID NO: 1338715 - RNA, 18 nt, Human
agagcugcagggagugag

SEQ ID NO: 1338716 - RNA, 21 nt, Human
agcacccacucaaucugagac

SEQ ID NO: 1338717 - RNA, 22 nt, Human
agcaggggccagcccucaggau

SEQ ID NO: 1338718 - RNA, 19 nt, Human
aggaagacuuagggagcug

SEQ ID NO: 1338719 - RNA, 19 nt, Human
agggaaguguggcaagagc

SEQ ID NO: 1338720 - RNA, 20 nt, Human
agggagcugagagcugcagg

SEQ ID NO: 1338721 - RNA, 24 nt, Human
agggagcugagagcugcagggagu

SEQ ID NO: 1338722 - RNA, 19 nt, Human
aggggacccuggagcuggu

SEQ ID NO: 1338723 - RNA, 21 nt, Human
aggggcagaggguggcugggg

SEQ ID NO: 1338724 - RNA, 19 nt, Human
aggguggcugggggagaag

SEQ ID NO: 1338725 - RNA, 21 nt, Human
aggguggcugggggagaagcu

SEQ ID NO: 1338726 - RNA, 19 nt, Human
aggucaggucagcucagga

SEQ ID NO: 1338727 - RNA, 24 nt, Human
aguggcccaggcucaaggaagcug

SEQ ID NO: 1338728 - RNA, 20 nt, Human
caagaagacaagcuaagcuc

SEQ ID NO: 1338729 - RNA, 23 nt, Human
caagagccaccaugacagccugu

SEQ ID NO: 1338730 - RNA, 19 nt, Human
cacaggcagccgagucacg

SEQ ID NO: 1338731 - RNA, 22 nt, Human
cacccaagccacagcaggagac

SEQ ID NO: 1338732 - RNA, 27 nt, Human
caccuccaccuucugcacaggcagccg

SEQ ID NO: 1338733 - RNA, 20 nt, Human
cacucugcugccacccgacc

SEQ ID NO: 1338734 - RNA, 21 nt, Human
cacugcacagggcuggaaagu

SEQ ID NO: 1338735 - RNA, 23 nt, Human
cagcccucaggaucccaaugcaa

SEQ ID NO: 1338736 - RNA, 19 nt, Human
cagcuggcuccuuggggcu

SEQ ID NO: 1338737 - RNA, 18 nt, Human
caggaagggaaguguggc

SEQ ID NO: 1338738 - RNA, 19 nt, Human
caggaagggaaguguggca

SEQ ID NO: 1338739 - RNA, 20 nt, Human
caggggccagcccucaggau

SEQ ID NO: 1338740 - RNA, 18 nt, Human
caggucagcucaggaagg

SEQ ID NO: 1338741 - RNA, 21 nt, Human
caguccuagaaagaccccagg

SEQ ID NO: 1338742 - RNA, 21 nt, Human
cagugguuuucuguccagucc

SEQ ID NO: 1338743 - RNA, 18 nt, Human
ccagggaggaguggccca

SEQ ID NO: 1338744 - RNA, 20 nt, Human
cccaggaucuacguauggcu

SEQ ID NO: 1338745 - RNA, 18 nt, Human
ccugcagacagcugcagg

SEQ ID NO: 1338746 - RNA, 23 nt, Human
ccuggaggcgggagacgcccggc

SEQ ID NO: 1338747 - RNA, 18 nt, Human
cuaccacaggggcagagg

SEQ ID NO: 1338748 - RNA, 20 nt, Human
cuaugcgcccaccucugccc

SEQ ID NO: 1338749 - RNA, 18 nt, Human
cucagggaacagggagcu

SEQ ID NO: 1338750 - RNA, 20 nt, Human
cuccuuggggcuugcagugg

SEQ ID NO: 1338751 - RNA, 19 nt, Human
cugcagugcccuggggauu

SEQ ID NO: 1338752 - RNA, 23 nt, Human
cuggaaagugccuccaauccuua

SEQ ID NO: 1338753 - RNA, 22 nt, Human
cuggagcauaggucaagcaggg

SEQ ID NO: 1338754 - RNA, 21 nt, Human
cuucaccagggcuugacgggc

SEQ ID NO: 1338755 - RNA, 22 nt, Human
gagaggagauccuggaggcggg

SEQ ID NO: 1338756 - RNA, 20 nt, Human
gagauccuggaggcgggaga

SEQ ID NO: 1338757 - RNA, 22 nt, Human
gagcacagucucugaacaaggg

SEQ ID NO: 1338758 - RNA, 19 nt, Human
gagcuuuaaugggggcagg

SEQ ID NO: 1338759 - RNA, 20 nt, Human
gcacaguccuagaaagaccc

SEQ ID NO: 1338760 - RNA, 18 nt, Human
gcagaggguggcuggggg

SEQ ID NO: 1338761 - RNA, 25 nt, Human
gcccaccucugcccagacucugcag

SEQ ID NO: 1338762 - RNA, 20 nt, Human
gcccagacucugcagugccc

SEQ ID NO: 1338763 - RNA, 19 nt, Human
gcugccacccgaccggugc

SEQ ID NO: 1338764 - RNA, 18 nt, Human
gcuucucagaagagcaca

SEQ ID NO: 1338765 - RNA, 18 nt, Human
ggaaacaggaagacuuag

SEQ ID NO: 1338766 - RNA, 21 nt, Human
ggcacaguccuagaaagaccc

SEQ ID NO: 1338767 - RNA, 19 nt, Human
ggcagggacuaggcugcag

SEQ ID NO: 1338768 - RNA, 19 nt, Human
gggaaacaggaagacuuag

SEQ ID NO: 1338769 - RNA, 19 nt, Human
ggucagcccuuugaggcca

SEQ ID NO: 1338770 - RNA, 22 nt, Human
ggucagcccuuugaggccaggu

SEQ ID NO: 1338771 - RNA, 24 nt, Human
guggcagugaggucaggucagcuc

SEQ ID NO: 1338772 - RNA, 19 nt, Human
uccccacgccgugcccagg

SEQ ID NO: 1338773 - RNA, 21 nt, Human
uccccacgccgugcccaggaa

SEQ ID NO: 1338774 - RNA, 23 nt, Human
uccccacgccgugcccaggaaga

SEQ ID NO: 1338775 - RNA, 24 nt, Human
ucccuggccauccgccugccaccu

SEQ ID NO: 1338776 - RNA, 19 nt, Human
uccgccugccaccuccacc

SEQ ID NO: 1338777 - RNA, 19 nt, Human
uccuuggggcuugcagugg

SEQ ID NO: 1338778 - RNA, 28 nt, Human
uccuuggggcuugcagugguuuucuguc

SEQ ID NO: 1338779 - RNA, 22 nt, Human
ugacaaggguugagggcagggu

SEQ ID NO: 1338780 - RNA, 18 nt, Human
ugaccagggagacggccu

SEQ ID NO: 1338781 - RNA, 19 nt, Human
ugaccagggagacggccua

SEQ ID NO: 1338782 - RNA, 21 nt, Human
ugcaggaaggccuggucugag

SEQ ID NO: 1338783 - RNA, 19 nt, Human
ugccaagaagacaagcuaa

SEQ ID NO: 1338784 - RNA, 24 nt, Human
ugccaagaagacaagcuaagcucc

SEQ ID NO: 1338785 - RNA, 25 nt, Human
ugccaagaagacaagcuaagcuccu

SEQ ID NO: 1338786 - RNA, 25 nt, Human
ugccuccaauccuuacuggagccuu

SEQ ID NO: 1338787 - RNA, 19 nt, Human
ugcgcccaccucugcccag

SEQ ID NO: 1338788 - RNA, 19 nt, Human
uggaggcucuuggcagagg

SEQ ID NO: 1338789 - RNA, 18 nt, Human
uggcaaaggggacccugg

SEQ ID NO: 1338790 - RNA, 20 nt, Human
uggcaagagccaccaugaca

SEQ ID NO: 1338791 - RNA, 21 nt, Human
uggcagccacauaacuggcag

SEQ ID NO: 1338792 - RNA, 21 nt, Human
uggcucccuggccauccgccu

SEQ ID NO: 1338793 - RNA, 19 nt, Human
uggcugggggagaagcuug

SEQ ID NO: 1338794 - RNA, 22 nt, Human
uggcugggggagaagcuugggc

SEQ ID NO: 1338795 - RNA, 20 nt, Human
ugggcagggacuaggcugca

SEQ ID NO: 1338796 - RNA, 24 nt, Human
ugggggcaggugagaggagauccu

SEQ ID NO: 1338797 - RNA, 23 nt, Human
ugguagcaacacugcacagggcu

SEQ ID NO: 1338798 - RNA, 24 nt, Human
uuuuuuuuuuugaguggcagagcu

SEQ ID NO: 1338799 - RNA, 22 nt, Human
uuuuuuuuuuuuuuuugagugg

SEQ ID NO: 1338800 - RNA, 27 nt, Human
uuuuuuuuuuuuuuuuuuuuuuugggg

SEQ ID NO: 1338801 - RNA, 22 nt, Human
aaaaggaaaaaagaaucagcag

SEQ ID NO: 1338802 - RNA, 24 nt, Human
aaaucagaaugaaauaucaaaaug

SEQ ID NO: 1338803 - RNA, 22 nt, Human
aaaucucagcagcucacgcucu

SEQ ID NO: 1338804 - RNA, 23 nt, Human
agacucccaaaucucagcagcuc

SEQ ID NO: 1338805 - RNA, 21 nt, Human
agugaacucuuccaucggcuc

SEQ ID NO: 1338806 - RNA, 22 nt, Human
auaaaaaccuguacaugaccuu

SEQ ID NO: 1338807 - RNA, 19 nt, Human
caagacgaguacccccuuc

SEQ ID NO: 1338808 - RNA, 19 nt, Human
ccaaaucucagcagcucac

SEQ ID NO: 1338809 - RNA, 23 nt, Human
ccacagauggaauagcugggaag

SEQ ID NO: 1338810 - RNA, 19 nt, Human
cccagacccuacugucccu

SEQ ID NO: 1338811 - RNA, 18 nt, Human
ccccuucugucgucuucu

SEQ ID NO: 1338812 - RNA, 20 nt, Human
cggcucagaacuccaagcgg

SEQ ID NO: 1338813 - RNA, 18 nt, Human
cguggccaacauuguuac

SEQ ID NO: 1338814 - RNA, 25 nt, Human
cucuuccaucggcucagaacuccaa

SEQ ID NO: 1338815 - RNA, 20 nt, Human
uaaaauauacguggccaaca

SEQ ID NO: 1338816 - RNA, 20 nt, Human
uauauauuaggaaguccagu

SEQ ID NO: 1338817 - RNA, 22 nt, Human
uauuaggaaguccaguuaauag

SEQ ID NO: 1338818 - RNA, 18 nt, Human
ucaccaagacgaguaccc

SEQ ID NO: 1338819 - RNA, 19 nt, Human
ucccaaaucucagcagcuc

SEQ ID NO: 1338820 - RNA, 23 nt, Human
uggaucccagacccuacuguccc

SEQ ID NO: 1338821 - RNA, 20 nt, Human
uguggguaguuggagagugg

SEQ ID NO: 1338822 - RNA, 25 nt, Human
uuaaaaaaaaaaaaaaggaaaaaag

SEQ ID NO: 1338823 - RNA, 23 nt, Human
uuuaaaaaaaaaaaaaaggaaaa

SEQ ID NO: 1338824 - RNA, 21 nt, Human
uuuggaucccagacccuacug

SEQ ID NO: 1338825 - RNA, 27 nt, Human
aaaaugaaaacacugcagggaagagaa

SEQ ID NO: 1338826 - RNA, 25 nt, Human
aaacaaguguacagacccuagacuc

SEQ ID NO: 1338827 - RNA, 19 nt, Human
aaacagaaaacaggcaaaa

SEQ ID NO: 1338828 - RNA, 23 nt, Human
aaugaaaacacugcagggaagag

SEQ ID NO: 1338829 - RNA, 18 nt, Human
aauuucccuccacaaccc

SEQ ID NO: 1338830 - RNA, 23 nt, Human
acacacagcacacauggggcgua

SEQ ID NO: 1338831 - RNA, 19 nt, Human
acacugcagggaagagaac

SEQ ID NO: 1338832 - RNA, 23 nt, Human
acaggcaggacacacacagcaca

SEQ ID NO: 1338833 - RNA, 21 nt, Human
acaggcuccagggagcaaugg

SEQ ID NO: 1338834 - RNA, 18 nt, Human
accaggacacaucugcau

SEQ ID NO: 1338835 - RNA, 21 nt, Human
acccccaacuccggggacgag

SEQ ID NO: 1338836 - RNA, 18 nt, Human
agagaacaaagucugguc

SEQ ID NO: 1338837 - RNA, 20 nt, Human
agagaacaaagucugguccc

SEQ ID NO: 1338838 - RNA, 21 nt, Human
aggaagaaagggggcagcagc

SEQ ID NO: 1338839 - RNA, 26 nt, Human
aggaagaaagggggcagcagcuccaa

SEQ ID NO: 1338840 - RNA, 20 nt, Human
aggaagagaacaaagucugg

SEQ ID NO: 1338841 - RNA, 20 nt, Human
aggcaggacacacacagcaa

SEQ ID NO: 1338842 - RNA, 19 nt, Human
agggccccacaccccaccu

SEQ ID NO: 1338843 - RNA, 20 nt, Human
aguaauagagggaggaggaa

SEQ ID NO: 1338844 - RNA, 20 nt, Human
aguagggcucugccugaggu

SEQ ID NO: 1338845 - RNA, 23 nt, Human
caaguggcagccagagaggccag

SEQ ID NO: 1338846 - RNA, 24 nt, Human
cacaacagauuugagcuaagacag

SEQ ID NO: 1338847 - RNA, 24 nt, Human
cacacacagcacacauggggcgua

SEQ ID NO: 1338848 - RNA, 23 nt, Human
cacagcacacauggggcguaagg

SEQ ID NO: 1338849 - RNA, 23 nt, Human
cacagcacacauggggcguaagg

SEQ ID NO: 1338850 - RNA, 23 nt, Human
caccacucacgcacacacacaac

SEQ ID NO: 1338851 - RNA, 22 nt, Human
caccugugggaagggcagggcc

SEQ ID NO: 1338852 - RNA, 21 nt, Human
caccuuugguccagauggccc

SEQ ID NO: 1338853 - RNA, 23 nt, Human
cacgcacacacacaacauaacca

SEQ ID NO: 1338854 - RNA, 27 nt, Human
cacgcacacacacaacauaaccaagug

SEQ ID NO: 1338855 - RNA, 18 nt, Human
cagccgaggccaggaaga

SEQ ID NO: 1338856 - RNA, 21 nt, Human
cagcugaguagggcucugccu

SEQ ID NO: 1338857 - RNA, 21 nt, Human
cagguacagcugaguagggcu

SEQ ID NO: 1338858 - RNA, 18 nt, Human
ccaacaggcaugacaggc

SEQ ID NO: 1338859 - RNA, 23 nt, Human
ccacaccccaccuuugguccaga

SEQ ID NO: 1338860 - RNA, 25 nt, Human
ccacaccccaccuuugguccagaug

SEQ ID NO: 1338861 - RNA, 26 nt, Human
ccacauauacaggcaggacacacaca

SEQ ID NO: 1338862 - RNA, 22 nt, Human
ccaccuuugguccagauggccc

SEQ ID NO: 1338863 - RNA, 24 nt, Human
ccacucacgcacacacacaacaua

SEQ ID NO: 1338864 - RNA, 26 nt, Human
ccagaacaccguggacugggguacag

SEQ ID NO: 1338865 - RNA, 19 nt, Human
ccaggacacaucugcauca

SEQ ID NO: 1338866 - RNA, 21 nt, Human
ccauccagggccccacacccc

SEQ ID NO: 1338867 - RNA, 18 nt, Human
cccaaaggaucaaagucc

SEQ ID NO: 1338868 - RNA, 19 nt, Human
cccaaaggaucaaagucca

SEQ ID NO: 1338869 - RNA, 18 nt, Human
cccaggggagaugcgggg

SEQ ID NO: 1338870 - RNA, 22 nt, Human
cccccaccaccccauucuuuga

SEQ ID NO: 1338871 - RNA, 20 nt, Human
cccugggggcagcuaggcug

SEQ ID NO: 1338872 - RNA, 21 nt, Human
cccuggugugacaggcccuac

SEQ ID NO: 1338873 - RNA, 19 nt, Human
ccucgccccgccccgcccc

SEQ ID NO: 1338874 - RNA, 23 nt, Human
ccugcugccagaacaccguggac

SEQ ID NO: 1338875 - RNA, 23 nt, Human
cgagccauggccucaagcagcag

SEQ ID NO: 1338876 - RNA, 19 nt, Human
cgccccggcccggcugguu

SEQ ID NO: 1338877 - RNA, 30 nt, Human
cgccugcacaccacucacgcacacacacag

SEQ ID NO: 1338878 - RNA, 18 nt, Human
cgcgccugcacaccacuc

SEQ ID NO: 1338879 - RNA, 19 nt, Human
cucccucgccccgccccgc

SEQ ID NO: 1338880 - RNA, 18 nt, Human
cugauccccaacaggcau

SEQ ID NO: 1338881 - RNA, 21 nt, Human
cugcaacggguacccccaacu

SEQ ID NO: 1338882 - RNA, 23 nt, Human
cugcaacggguacccccaacucc

SEQ ID NO: 1338883 - RNA, 24 nt, Human
cugcaucacacagaaagcugcgcc

SEQ ID NO: 1338884 - RNA, 18 nt, Human
cuggcaucaggaggcugc

SEQ ID NO: 1338885 - RNA, 22 nt, Human
gaaaacacugcagggaagagaa

SEQ ID NO: 1338886 - RNA, 18 nt, Human
gaagagaacugagugugc

SEQ ID NO: 1338887 - RNA, 19 nt, Human
gacacaucugcaucacaca

SEQ ID NO: 1338888 - RNA, 22 nt, Human
gagaacugagugugcuggugga

SEQ ID NO: 1338889 - RNA, 22 nt, Human
gagcucccugggggcagcuagg

SEQ ID NO: 1338890 - RNA, 23 nt, Human
gcagcagagcucccugggggcag

SEQ ID NO: 1338891 - RNA, 22 nt, Human
gcccccaccucucaggggccac

SEQ ID NO: 1338892 - RNA, 21 nt, Human
gccgaaaccaggacacaucug

SEQ ID NO: 1338893 - RNA, 18 nt, Human
gcucaccugugggaaggg

SEQ ID NO: 1338894 - RNA, 20 nt, Human
gcugguggacaggagcccug

SEQ ID NO: 1338895 - RNA, 25 nt, Human
gggcagcagagcucccugggggcag

SEQ ID NO: 1338896 - RNA, 20 nt, Human
uaagcuggagaagaacucca

SEQ ID NO: 1338897 - RNA, 24 nt, Human
uacagacccuagacucagaaacac

SEQ ID NO: 1338898 - RNA, 24 nt, Human
uacccccaacuccggggacgagcc

SEQ ID NO: 1338899 - RNA, 23 nt, Human
uagacucagaaacacaacagauu

SEQ ID NO: 1338900 - RNA, 19 nt, Human
uagggcucugccugaggug

SEQ ID NO: 1338901 - RNA, 21 nt, Human
uccaacuuggccagaucccaa

SEQ ID NO: 1338902 - RNA, 21 nt, Human
uccacaacccagggguuucag

SEQ ID NO: 1338903 - RNA, 19 nt, Human
ucccuccacaacccagggg

SEQ ID NO: 1338904 - RNA, 24 nt, Human
ucccugcugccagaacaccgugga

SEQ ID NO: 1338905 - RNA, 19 nt, Human
ucccugggggcagcuaggc

SEQ ID NO: 1338906 - RNA, 26 nt, Human
ucugggccagagcugccauccagggc

SEQ ID NO: 1338907 - RNA, 26 nt, Human
ugaaaacacugcagggaagagaacug

SEQ ID NO: 1338908 - RNA, 22 nt, Human
ugaaacagaaaacaggcaaaau

SEQ ID NO: 1338909 - RNA, 24 nt, Human
ugaaacagaaaacaggcaaaaugg

SEQ ID NO: 1338910 - RNA, 19 nt, Human
ugacaggcuccagggagca

SEQ ID NO: 1338911 - RNA, 21 nt, Human
ugagauuuuaggaagcauaau

SEQ ID NO: 1338912 - RNA, 20 nt, Human
ugaggcuggugucgggaagc

SEQ ID NO: 1338913 - RNA, 23 nt, Human
ugaggcuggugucgggaagcagg

SEQ ID NO: 1338914 - RNA, 21 nt, Human
ugaguagggcucugccugagg

SEQ ID NO: 1338915 - RNA, 24 nt, Human
ugaguagggcucugccugaggugu

SEQ ID NO: 1338916 - RNA, 21 nt, Human
ugauccgcgcggccgccccuc

SEQ ID NO: 1338917 - RNA, 18 nt, Human
ugccagaacaccguggac

SEQ ID NO: 1338918 - RNA, 21 nt, Human
ugccugauccccaacaggcau

SEQ ID NO: 1338919 - RNA, 21 nt, Human
uggacacacacagcacacaug

SEQ ID NO: 1338920 - RNA, 22 nt, Human
uggcaaggauuguuccccaccu

SEQ ID NO: 1338921 - RNA, 18 nt, Human
uggcagccagagaggcca

SEQ ID NO: 1338922 - RNA, 23 nt, Human
uggcagccagagaggccagggaa

SEQ ID NO: 1338923 - RNA, 18 nt, Human
uggcccaggugucccugc

SEQ ID NO: 1338924 - RNA, 19 nt, Human
uggcccauuggcccaggug

SEQ ID NO: 1338925 - RNA, 21 nt, Human
ugggcgggcggacgggcggac

SEQ ID NO: 1338926 - RNA, 21 nt, Human
uucuuugaguuuggcuugaga

SEQ ID NO: 1338927 - RNA, 23 nt, Human
uugagcuaagacagcucugguga

SEQ ID NO: 1338928 - RNA, 18 nt, Human
uuuggcuaaaauaaaaug

SEQ ID NO: 1338929 - RNA, 21 nt, Human
aguacugcaacugagcucaga

SEQ ID NO: 1338930 - RNA, 19 nt, Human
uucccgaguacugcaacug

SEQ ID NO: 1338931 - RNA, 21 nt, Human
aacaggaaacacgagaaccca

SEQ ID NO: 1338932 - RNA, 24 nt, Human
aacugaaacaaacaaaaagaauuc

SEQ ID NO: 1338933 - RNA, 21 nt, Human
aaguguaaggaagacaugaaa

SEQ ID NO: 1338934 - RNA, 18 nt, Human
acauugagaagaaagaga

SEQ ID NO: 1338935 - RNA, 19 nt, Human
agaaggcagaugacauuau

SEQ ID NO: 1338936 - RNA, 24 nt, Human
agagcuaaaaguuaucucuaagcc

SEQ ID NO: 1338937 - RNA, 22 nt, Human
auggguuucugagguugguugg

SEQ ID NO: 1338938 - RNA, 21 nt, Human
cagaaaugcuggugauccuga

SEQ ID NO: 1338939 - RNA, 20 nt, Human
ccugaacaggaaacacgaga

SEQ ID NO: 1338940 - RNA, 19 nt, Human
ccugggagaaauuccuaug

SEQ ID NO: 1338941 - RNA, 18 nt, Human
cggcauggacaaggcaga

SEQ ID NO: 1338942 - RNA, 19 nt, Human
cuacagcggugagagugaa

SEQ ID NO: 1338943 - RNA, 24 nt, Human
cugaaacaaacaaaaagaauuccu

SEQ ID NO: 1338944 - RNA, 26 nt, Human
cugaacaggaaacacgagaacccauu

SEQ ID NO: 1338945 - RNA, 23 nt, Human
gaacugaaacuauuacaggugca

SEQ ID NO: 1338946 - RNA, 21 nt, Human
gaagggaauaucggggacggu

SEQ ID NO: 1338947 - RNA, 22 nt, Human
gacuaguaugaacugaaacaaa

SEQ ID NO: 1338948 - RNA, 24 nt, Human
ggaggggagacaauuaucagaguc

SEQ ID NO: 1338949 - RNA, 20 nt, Human
ggguuucugagguugguugg

SEQ ID NO: 1338950 - RNA, 19 nt, Human
uacugugagcuaguucagg

SEQ ID NO: 1338951 - RNA, 21 nt, Human
uauggaggggagacaauuauc

SEQ ID NO: 1338952 - RNA, 26 nt, Human
uauuauuaaaucuucaguaccugaaa

SEQ ID NO: 1338953 - RNA, 21 nt, Human
ugaacaggaaacacgagaacc

SEQ ID NO: 1338954 - RNA, 18 nt, Human
ugacugucagagaaaagg

SEQ ID NO: 1338955 - RNA, 22 nt, Human
ugagaagaaagagagcuaaaag

SEQ ID NO: 1338956 - RNA, 18 nt, Human
ugcccugggcccccgggc

SEQ ID NO: 1338957 - RNA, 19 nt, Human
ugucucaacuagcccuugc

SEQ ID NO: 1338958 - RNA, 22 nt, Human
uguuccauuucccaaugucuca

SEQ ID NO: 1338959 - RNA, 18 nt, Human
uuccuacagcggugagag

SEQ ID NO: 1338960 - RNA, 18 nt, Human
uuccugggagaaauuccu

SEQ ID NO: 1338961 - RNA, 24 nt, Human
uuccuuguguauuugcugguacaa

SEQ ID NO: 1338962 - RNA, 22 nt, Human
aaaaacaauucuuccaggccga

SEQ ID NO: 1338963 - RNA, 19 nt, Human
aaaagaaacagaaaaccuc

SEQ ID NO: 1338964 - RNA, 22 nt, Human
aaagaaacagaaaaccucacau

SEQ ID NO: 1338965 - RNA, 23 nt, Human
aaauagaaaaugaaaacacaaaa

SEQ ID NO: 1338966 - RNA, 24 nt, Human
aacagaaaaccucacauuaaaaaa

SEQ ID NO: 1338967 - RNA, 20 nt, Human
acugguaucaaaacacacau

SEQ ID NO: 1338968 - RNA, 18 nt, Human
aggcaaaaaagaaacaga

SEQ ID NO: 1338969 - RNA, 23 nt, Human
aggcaaaaaagaaacagaaaacc

SEQ ID NO: 1338970 - RNA, 20 nt, Human
aggugcauaucuaaauucua

SEQ ID NO: 1338971 - RNA, 21 nt, Human
augaaguacaauuucuucagu

SEQ ID NO: 1338972 - RNA, 24 nt, Human
auuaaaaaaaaaaaaaaaguuucu

SEQ ID NO: 1338973 - RNA, 19 nt, Human
caaaacacacaucaacagc

SEQ ID NO: 1338974 - RNA, 23 nt, Human
ccaggccgaguguagggcugccg

SEQ ID NO: 1338975 - RNA, 21 nt, Human
ccugaagcugaaucuuaaggc

SEQ ID NO: 1338976 - RNA, 22 nt, Human
cuaaauguuuuccugaagcuga

SEQ ID NO: 1338977 - RNA, 23 nt, Human
gaagaaaaacaauucuuccaggc

SEQ ID NO: 1338978 - RNA, 18 nt, Human
uaaaaaguaaauaaagaa

SEQ ID NO: 1338979 - RNA, 24 nt, Human
uaaacucaggaaaaacuguuaagg

SEQ ID NO: 1338980 - RNA, 22 nt, Human
ucacauuaaaaaaaaaaaaaaa

SEQ ID NO: 1338981 - RNA, 22 nt, Human
ucacauuaaaaaaaaaaaaaaa

SEQ ID NO: 1338982 - RNA, 24 nt, Human
ucacauuaaaaaaaaaaaaaaagu

SEQ ID NO: 1338983 - RNA, 23 nt, Human
ucaggaaaaacuguuaaggggca

SEQ ID NO: 1338984 - RNA, 23 nt, Human
ucuauagcuuaccaauaucuucu

SEQ ID NO: 1338985 - RNA, 23 nt, Human
ugaaguacaauuucuucaguaaa

SEQ ID NO: 1338986 - RNA, 24 nt, Human
aaucacuugaacucagggguugga

SEQ ID NO: 1338987 - RNA, 24 nt, Human
aaucacuugaacucagggguugga

SEQ ID NO: 1338988 - RNA, 22 nt, Human
acuuugaggaaugcaguguagg

SEQ ID NO: 1338989 - RNA, 26 nt, Human
agacaaauaagucuccacuccaauau

SEQ ID NO: 1338990 - RNA, 24 nt, Human
aggcacgguggcucacgccuguaa

SEQ ID NO: 1338991 - RNA, 21 nt, Human
aguacuuugggaggccaaggg

SEQ ID NO: 1338992 - RNA, 19 nt, Human
caaguuuuucacucacuca

SEQ ID NO: 1338993 - RNA, 24 nt, Human
cacgccuguaaucccaguacuuug

SEQ ID NO: 1338994 - RNA, 20 nt, Human
caguacuuugggaggccaag

SEQ ID NO: 1338995 - RNA, 22 nt, Human
caguacuuugggaggccaaggg

SEQ ID NO: 1338996 - RNA, 25 nt, Human
ccuccaaaauaugucuuaaauccau

SEQ ID NO: 1338997 - RNA, 22 nt, Human
ccuuccacaucuaauccuucag

SEQ ID NO: 1338998 - RNA, 23 nt, Human
cgccuguaaucccaguacuuugg

SEQ ID NO: 1338999 - RNA, 24 nt, Human
cgccuguaaucccaguacuuuggg

SEQ ID NO: 1339000 - RNA, 22 nt, Human
cucacgccuguaaucccaguac

SEQ ID NO: 1339001 - RNA, 24 nt, Human
cucacgccuguaaucccaguacuu

SEQ ID NO: 1339002 - RNA, 24 nt, Human
gaggugaaucacuugaacucaggg

SEQ ID NO: 1339003 - RNA, 23 nt, Human
gguggcucacgccuguaauccca

SEQ ID NO: 1339004 - RNA, 24 nt, Human
gguggcucacgccuguaaucccag

SEQ ID NO: 1339005 - RNA, 22 nt, Human
gguguauguccgacaaagaaaa

SEQ ID NO: 1339006 - RNA, 22 nt, Human
ucacgccuguaaucccaguacu

SEQ ID NO: 1339007 - RNA, 23 nt, Human
ucagccaggcacgguggcucacg

SEQ ID NO: 1339008 - RNA, 23 nt, Human
ucagggguuggagagcagccggg

SEQ ID NO: 1339009 - RNA, 23 nt, Human
uccugacaauguuaccuccaaaa

SEQ ID NO: 1339010 - RNA, 23 nt, Human
ugaaucacuugaacucagggguu

SEQ ID NO: 1339011 - RNA, 22 nt, Human
uggcucacgccuguaaucccag

SEQ ID NO: 1339012 - RNA, 22 nt, Human
uggcucacgccuguaaucccag

SEQ ID NO: 1339013 - RNA, 24 nt, Human
uggcucacgccuguaaucccagua

SEQ ID NO: 1339014 - RNA, 24 nt, Human
ugggaggccaagggaggugaauca

SEQ ID NO: 1339015 - RNA, 21 nt, Human
uguggagagacccaaucucuc

SEQ ID NO: 1339016 - RNA, 18 nt, Human
uuuuuuuuuuuuuuuuug

SEQ ID NO: 1339017 - RNA, 20 nt, Human
uuuuuuuuuuuuuuuuuggu

SEQ ID NO: 1339018 - RNA, 21 nt, Human
aaaaaagaaaaagugaaaggg

SEQ ID NO: 1339019 - RNA, 21 nt, Human
aagcaauccuccugucucagc

SEQ ID NO: 1339020 - RNA, 25 nt, Human
aagcaauccuccugucucagccucc

SEQ ID NO: 1339021 - RNA, 19 nt, Human
aaugaaaagagcagugaga

SEQ ID NO: 1339022 - RNA, 18 nt, Human
agacaagaucuuacuaug

SEQ ID NO: 1339023 - RNA, 22 nt, Human
agaggaacagagugaauaucau

SEQ ID NO: 1339024 - RNA, 22 nt, Human
agcagugagauucugggaagga

SEQ ID NO: 1339025 - RNA, 23 nt, Human
agcguggggagccgggggaggga

SEQ ID NO: 1339026 - RNA, 21 nt, Human
agcugacgaaugagaaaaaaa

SEQ ID NO: 1339027 - RNA, 23 nt, Human
agggacaggauaggcagcagcca

SEQ ID NO: 1339028 - RNA, 18 nt, Human
aguagcugggacuacagg

SEQ ID NO: 1339029 - RNA, 19 nt, Human
aguagcugggacuacaggc

SEQ ID NO: 1339030 - RNA, 20 nt, Human
auccuccugucucagccucc

SEQ ID NO: 1339031 - RNA, 24 nt, Human
augaauuccguaaaaaagaaaaag

SEQ ID NO: 1339032 - RNA, 22 nt, Human
augcucaauucagaacuguauc

SEQ ID NO: 1339033 - RNA, 21 nt, Human
caaacucccaaagggcugcca

SEQ ID NO: 1339034 - RNA, 24 nt, Human
caagaucuuacuauguugcccagg

SEQ ID NO: 1339035 - RNA, 19 nt, Human
caccgcuggcccgucccuc

SEQ ID NO: 1339036 - RNA, 20 nt, Human
cagcaggcgcgggcgguugg

SEQ ID NO: 1339037 - RNA, 20 nt, Human
cagccuccugaguagcuggg

SEQ ID NO: 1339038 - RNA, 19 nt, Human
cagcuggcuccuccaagua

SEQ ID NO: 1339039 - RNA, 24 nt, Human
cagggacaggauaggcagcagcca

SEQ ID NO: 1339040 - RNA, 19 nt, Human
caguguaccuagaauuugu

SEQ ID NO: 1339041 - RNA, 19 nt, Human
cauguggcuuuuuucugua

SEQ ID NO: 1339042 - RNA, 18 nt, Human
cauuugagucccacaugu

SEQ ID NO: 1339043 - RNA, 25 nt, Human
cauuuuuguuauuuucuucucugau

SEQ ID NO: 1339044 - RNA, 19 nt, Human
ccauccccgccgcugccug

SEQ ID NO: 1339045 - RNA, 18 nt, Human
ccgccucgccuccgcugc

SEQ ID NO: 1339046 - RNA, 19 nt, Human
ccucagauccagggacagg

SEQ ID NO: 1339047 - RNA, 27 nt, Human
ccucuuguccucucuucccuccuccag

SEQ ID NO: 1339048 - RNA, 23 nt, Human
ccugaguagcugggacuacaggc

SEQ ID NO: 1339049 - RNA, 24 nt, Human
ccugaguagcugggacuacaggcg

SEQ ID NO: 1339050 - RNA, 23 nt, Human
ccugauuccucauucccaggugc

SEQ ID NO: 1339051 - RNA, 19 nt, Human
cgccauccccgccgcugcc

SEQ ID NO: 1339052 - RNA, 19 nt, Human
cggucucuucuugugcacc

SEQ ID NO: 1339053 - RNA, 24 nt, Human
cucagccuccugaguagcugggac

SEQ ID NO: 1339054 - RNA, 23 nt, Human
cuccugggcuuaagcaauccucc

SEQ ID NO: 1339055 - RNA, 22 nt, Human
cucgccauccccgccgcugccu

SEQ ID NO: 1339056 - RNA, 23 nt, Human
cugucucagccuccugaguagcu

SEQ ID NO: 1339057 - RNA, 23 nt, Human
gacuacaggcggauacuacugca

SEQ ID NO: 1339058 - RNA, 21 nt, Human
gagcguggggagccgggggag

SEQ ID NO: 1339059 - RNA, 25 nt, Human
gaguagcugggacuacaggcggaua

SEQ ID NO: 1339060 - RNA, 20 nt, Human
gagucccacauguggcuuuu

SEQ ID NO: 1339061 - RNA, 23 nt, Human
gaugaugaauuccguaaaaaaga

SEQ ID NO: 1339062 - RNA, 20 nt, Human
gauucugggaaggaaaacuc

SEQ ID NO: 1339063 - RNA, 19 nt, Human
gcaagggaaaggccucaga

SEQ ID NO: 1339064 - RNA, 18 nt, Human
gcuccuccaaguacuucu

SEQ ID NO: 1339065 - RNA, 19 nt, Human
gcuggcccgucccucaggc

SEQ ID NO: 1339066 - RNA, 20 nt, Human
ggacuggcuugucucuccca

SEQ ID NO: 1339067 - RNA, 19 nt, Human
gggcuuaagcaauccuccu

SEQ ID NO: 1339068 - RNA, 22 nt, Human
guaaaaaagaaaaagugaaagg

SEQ ID NO: 1339069 - RNA, 27 nt, Human
uaagcaauccuccugucucagccuccu

SEQ ID NO: 1339070 - RNA, 19 nt, Human
uaagugauacuauaauuac

SEQ ID NO: 1339071 - RNA, 24 nt, Human
uaauuacagagcugacgaaugaga

SEQ ID NO: 1339072 - RNA, 23 nt, Human
uacuauguugcccaggugggacu

SEQ ID NO: 1339073 - RNA, 25 nt, Human
uacuauguugcccaggugggacuug

SEQ ID NO: 1339074 - RNA, 20 nt, Human
uauguugcccaggugggacu

SEQ ID NO: 1339075 - RNA, 23 nt, Human
ucagccuccugaguagcugggac

SEQ ID NO: 1339076 - RNA, 24 nt, Human
uccauuuuuguuauuuucuucucu

SEQ ID NO: 1339077 - RNA, 18 nt, Human
ucccaaagggcugccaag

SEQ ID NO: 1339078 - RNA, 21 nt, Human
ucccaggugcacagugcucuc

SEQ ID NO: 1339079 - RNA, 26 nt, Human
uccuccugucucagccuccugaguag

SEQ ID NO: 1339080 - RNA, 24 nt, Human
uccugaguagcugggacuacaggc

SEQ ID NO: 1339081 - RNA, 18 nt, Human
uccugggcuuaagcaauc

SEQ ID NO: 1339082 - RNA, 24 nt, Human
uccugggcuuaagcaauccuccug

SEQ ID NO: 1339083 - RNA, 18 nt, Human
ucuauggcaagggaaagg

SEQ ID NO: 1339084 - RNA, 18 nt, Human
ucugucuuggggccugau

SEQ ID NO: 1339085 - RNA, 19 nt, Human
ucuuacuauguugcccagg

SEQ ID NO: 1339086 - RNA, 22 nt, Human
ucuuacuauguugcccaggugg

SEQ ID NO: 1339087 - RNA, 23 nt, Human
ucuuacuauguugcccagguggg

SEQ ID NO: 1339088 - RNA, 24 nt, Human
ucuuguccucucuucccuccucca

SEQ ID NO: 1339089 - RNA, 18 nt, Human
ugagaaaaaaauucagaa

SEQ ID NO: 1339090 - RNA, 19 nt, Human
ugagaaaaaaauucagaau

SEQ ID NO: 1339091 - RNA, 28 nt, Human
ugagaaaaaaauucagaauuaucuagaa

SEQ ID NO: 1339092 - RNA, 24 nt, Human
ugagcuccugggcuuaagcaaucc

SEQ ID NO: 1339093 - RNA, 19 nt, Human
uggcagcaggcgcgggcgg

SEQ ID NO: 1339094 - RNA, 19 nt, Human
uggcagcaggcgcgggcgg

SEQ ID NO: 1339095 - RNA, 21 nt, Human
uggcuugucucucccacuggu

SEQ ID NO: 1339096 - RNA, 19 nt, Human
ugggacuacaggcggauac

SEQ ID NO: 1339097 - RNA, 21 nt, Human
ugggacuacaggcggauacua

SEQ ID NO: 1339098 - RNA, 24 nt, Human
ugggacuacaggcggauacuacug

SEQ ID NO: 1339099 - RNA, 24 nt, Human
ugucucagccuccugaguagcugg

SEQ ID NO: 1339100 - RNA, 24 nt, Human
uguggauuuccccaagugaaaugu

SEQ ID NO: 1339101 - RNA, 18 nt, Human
uucccaggugcacagugc

SEQ ID NO: 1339102 - RNA, 18 nt, Human
uucugggaaggaaaacuc

SEQ ID NO: 1339103 - RNA, 23 nt, Human
uugagucccacauguggcuuuuu

SEQ ID NO: 1339104 - RNA, 23 nt, Human
uuguggcugccaccaccuuuucu

SEQ ID NO: 1339105 - RNA, 23 nt, Human
uuuacaaacucccaaagggcugc

SEQ ID NO: 1339106 - RNA, 24 nt, Human
aaacagccaaaaucuuaucaagac

SEQ ID NO: 1339107 - RNA, 26 nt, Human
aaauaagcaaaauaaaauaaaaacau

SEQ ID NO: 1339108 - RNA, 22 nt, Human
aacaaauuaccucucuucucuc

SEQ ID NO: 1339109 - RNA, 19 nt, Human
aacaaauuuuagccaauag

SEQ ID NO: 1339110 - RNA, 24 nt, Human
aaccccccacccccaaccccuacc

SEQ ID NO: 1339111 - RNA, 21 nt, Human
aaccccuuccuccauacucua

SEQ ID NO: 1339112 - RNA, 23 nt, Human
aacuccugggcucaagcgauccu

SEQ ID NO: 1339113 - RNA, 21 nt, Human
aagagcacagucucugcaguc

SEQ ID NO: 1339114 - RNA, 21 nt, Human
aagcaccuggcauauagagga

SEQ ID NO: 1339115 - RNA, 23 nt, Human
aagcaccuggcauauagaggaca

SEQ ID NO: 1339116 - RNA, 18 nt, Human
aagcugugucaacagaug

SEQ ID NO: 1339117 - RNA, 19 nt, Human
aaggcgaaaguuguugaga

SEQ ID NO: 1339118 - RNA, 24 nt, Human
aagguguugggauuacaggcguga

SEQ ID NO: 1339119 - RNA, 21 nt, Human
acagaugaaguaggggaaggu

SEQ ID NO: 1339120 - RNA, 18 nt, Human
acagucucugcagucaca

SEQ ID NO: 1339121 - RNA, 22 nt, Human
accccccacccccaaccccuac

SEQ ID NO: 1339122 - RNA, 25 nt, Human
agagaauaguggaaaaccaaacagc

SEQ ID NO: 1339123 - RNA, 25 nt, Human
agcgauccucuugcaucagccuccu

SEQ ID NO: 1339124 - RNA, 21 nt, Human
agcgggugacacagcagguua

SEQ ID NO: 1339125 - RNA, 24 nt, Human
aggaauucccagggagggaaaaug

SEQ ID NO: 1339126 - RNA, 25 nt, Human
aggcuggagugcaguggcgugaucu

SEQ ID NO: 1339127 - RNA, 26 nt, Human
agguguugggauuacaggcgugagcc

SEQ ID NO: 1339128 - RNA, 21 nt, Human
agguucaagugauucuccugc

SEQ ID NO: 1339129 - RNA, 22 nt, Human
agguucaagugauucuccugcc

SEQ ID NO: 1339130 - RNA, 23 nt, Human
agguucaagugauucuccugccu

SEQ ID NO: 1339131 - RNA, 23 nt, Human
aguagcugggacuacaggcacgu

SEQ ID NO: 1339132 - RNA, 24 nt, Human
agugauucuccugccucagccucc

SEQ ID NO: 1339133 - RNA, 19 nt, Human
agugcaguggcgugaucuu

SEQ ID NO: 1339134 - RNA, 21 nt, Human
agugcaguggcgugaucuuag

SEQ ID NO: 1339135 - RNA, 23 nt, Human
agugcaguggcgugaucuuagcu

SEQ ID NO: 1339136 - RNA, 24 nt, Human
agugcaguggcgugaucuuagcuc

SEQ ID NO: 1339137 - RNA, 20 nt, Human
aguuuccucauuugucacac

SEQ ID NO: 1339138 - RNA, 19 nt, Human
auaggauuucccugccucc

SEQ ID NO: 1339139 - RNA, 22 nt, Human
augggguuucaccauguuggcc

SEQ ID NO: 1339140 - RNA, 23 nt, Human
augggguuucaccauguuggcca

SEQ ID NO: 1339141 - RNA, 24 nt, Human
augggguuucaccauguuggccag

SEQ ID NO: 1339142 - RNA, 18 nt, Human
augggguuucacuauguu

SEQ ID NO: 1339143 - RNA, 24 nt, Human
augggguuucacuauguugcuuag

SEQ ID NO: 1339144 - RNA, 18 nt, Human
auucuccugccucagccu

SEQ ID NO: 1339145 - RNA, 24 nt, Human
auuuuuguauuuuuaguagagaug

SEQ ID NO: 1339146 - RNA, 21 nt, Human
caaccccccacccccaacccc

SEQ ID NO: 1339147 - RNA, 25 nt, Human
caaccccccacccccaaccccuacc

SEQ ID NO: 1339148 - RNA, 20 nt, Human
caagugauucuccugccuca

SEQ ID NO: 1339149 - RNA, 22 nt, Human
caagugauucuccugccucagc

SEQ ID NO: 1339150 - RNA, 19 nt, Human
caaucuuuuuuuuuugggg

SEQ ID NO: 1339151 - RNA, 19 nt, Human
caccacgcccggcuaauuu

SEQ ID NO: 1339152 - RNA, 24 nt, Human
caccacgcccggcuaauuuuugua

SEQ ID NO: 1339153 - RNA, 18 nt, Human
caccauguuggccaggau

SEQ ID NO: 1339154 - RNA, 22 nt, Human
caccauguuggccaggaugggc

SEQ ID NO: 1339155 - RNA, 26 nt, Human
caccuccaaucuuuuuuuuuuggggg

SEQ ID NO: 1339156 - RNA, 18 nt, Human
caccucggacuccuaagg

SEQ ID NO: 1339157 - RNA, 24 nt, Human
caccucuguuuaguauuuugagag

SEQ ID NO: 1339158 - RNA, 21 nt, Human
cacugcaaccuccgccuccca

SEQ ID NO: 1339159 - RNA, 18 nt, Human
cagaagcaggaauuccca

SEQ ID NO: 1339160 - RNA, 25 nt, Human
cagccaaaaucuuaucaauaaaacc

SEQ ID NO: 1339161 - RNA, 22 nt, Human
cagccuccugaguggcuggggg

SEQ ID NO: 1339162 - RNA, 22 nt, Human
ccaaccccccacccccaacccc

SEQ ID NO: 1339163 - RNA, 23 nt, Human
ccacugcgcccggcccaucaccu

SEQ ID NO: 1339164 - RNA, 19 nt, Human
ccagcugugggacuugggc

SEQ ID NO: 1339165 - RNA, 20 nt, Human
ccagcugugggacuugggcc

SEQ ID NO: 1339166 - RNA, 18 nt, Human
cccacccccaaccccuac

SEQ ID NO: 1339167 - RNA, 23 nt, Human
cccagguucaagugauucuccuc

SEQ ID NO: 1339168 - RNA, 23 nt, Human
cccagguucaagugauucuccug

SEQ ID NO: 1339169 - RNA, 20 nt, Human
ccccaaccccccacccccaa

SEQ ID NO: 1339170 - RNA, 21 nt, Human
ccccaaccccccacccccaac

SEQ ID NO: 1339171 - RNA, 22 nt, Human
ccccaaccccccacccccaacc

SEQ ID NO: 1339172 - RNA, 23 nt, Human
ccccaaccccccacccccaaccc

SEQ ID NO: 1339173 - RNA, 22 nt, Human
ccccaaccccuaccccaguguu

SEQ ID NO: 1339174 - RNA, 20 nt, Human
ccccacccccaaccccuacc

SEQ ID NO: 1339175 - RNA, 24 nt, Human
cccccaaccccccacccccaaccc

SEQ ID NO: 1339176 - RNA, 21 nt, Human
ccccccacccccaaccccuac

SEQ ID NO: 1339177 - RNA, 24 nt, Human
ccccugagccucaguuuccucauu

SEQ ID NO: 1339178 - RNA, 23 nt, Human
cccgaguagcugggacuacaggc

SEQ ID NO: 1339179 - RNA, 24 nt, Human
cccgaguagcugggacuacaggca

SEQ ID NO: 1339180 - RNA, 18 nt, Human
cccugccucccccaaccc

SEQ ID NO: 1339181 - RNA, 22 nt, Human
ccgcaggcuggagugcaguggc

SEQ ID NO: 1339182 - RNA, 24 nt, Human
ccgccucccagguucaagugauuc

SEQ ID NO: 1339183 - RNA, 24 nt, Human
ccucccagguucaagugauucucc

SEQ ID NO: 1339184 - RNA, 22 nt, Human
ccugaccucgugauccacccac

SEQ ID NO: 1339185 - RNA, 19 nt, Human
ccugggcucaagcgauccu

SEQ ID NO: 1339186 - RNA, 20 nt, Human
ccugggcucaagcgauccuc

SEQ ID NO: 1339187 - RNA, 22 nt, Human
cgccucccagguucaagugauu

SEQ ID NO: 1339188 - RNA, 22 nt, Human
cuaagguguugggauuacaggc

SEQ ID NO: 1339189 - RNA, 24 nt, Human
cuaagguguugggauuacaggcgu

SEQ ID NO: 1339190 - RNA, 24 nt, Human
cucacugcaaccuccgccucccag

SEQ ID NO: 1339191 - RNA, 24 nt, Human
cucagccucccgaguagcugggac

SEQ ID NO: 1339192 - RNA, 19 nt, Human
cucccagguucaagugauu

SEQ ID NO: 1339193 - RNA, 20 nt, Human
cucccccaaccccccacccc

SEQ ID NO: 1339194 - RNA, 26 nt, Human
cucccccaaccccccacccccaaccc

SEQ ID NO: 1339195 - RNA, 18 nt, Human
cuccugaccucgugaucc

SEQ ID NO: 1339196 - RNA, 25 nt, Human
cuccugaccucgugauccacccacc

SEQ ID NO: 1339197 - RNA, 23 nt, Human
cuccugggcucaagcgauccucu

SEQ ID NO: 1339198 - RNA, 20 nt, Human
cugagccucaguuuccucau

SEQ ID NO: 1339199 - RNA, 19 nt, Human
cugaugauaggggcacagg

SEQ ID NO: 1339200 - RNA, 23 nt, Human
cugcaaccuccgccucccagguu

SEQ ID NO: 1339201 - RNA, 24 nt, Human
cugcaaccuccgccucccagguuc

SEQ ID NO: 1339202 - RNA, 23 nt, Human
cugccucagccucccgaguagcu

SEQ ID NO: 1339203 - RNA, 24 nt, Human
cuugcaucagccuccugaguggcu

SEQ ID NO: 1339204 - RNA, 22 nt, Human
gaccucgugauccacccaccuc

SEQ ID NO: 1339205 - RNA, 24 nt, Human
gaccucgugauccacccaccucgg

SEQ ID NO: 1339206 - RNA, 24 nt, Human
gaccucgugauccacccaccucgg

SEQ ID NO: 1339207 - RNA, 20 nt, Human
gagaugggguuucaccaugu

SEQ ID NO: 1339208 - RNA, 24 nt, Human
gagaugggguuucaccauguuggc

SEQ ID NO: 1339209 - RNA, 21 nt, Human
gagccucaguuuccucauuug

SEQ ID NO: 1339210 - RNA, 20 nt, Human
gaguagcugggacuacaggc

SEQ ID NO: 1339211 - RNA, 27 nt, Human
gaguagcugggacuacaggcacguguc

SEQ ID NO: 1339212 - RNA, 19 nt, Human
gaugugggggcugggaggg

SEQ ID NO: 1339213 - RNA, 18 nt, Human
gauuacaggcgugagcca

SEQ ID NO: 1339214 - RNA, 19 nt, Human
gauuacaggcgugagccac

SEQ ID NO: 1339215 - RNA, 22 nt, Human
gauuacaggcgugagccacugc

SEQ ID NO: 1339216 - RNA, 22 nt, Human
gcaaccuccgccucccagguuc

SEQ ID NO: 1339217 - RNA, 23 nt, Human
gcaccuggcauauagaggacaua

SEQ ID NO: 1339218 - RNA, 20 nt, Human
gcaucagccuccugaguggc

SEQ ID NO: 1339219 - RNA, 24 nt, Human
gcaucagccuccugaguggcuggg

SEQ ID NO: 1339220 - RNA, 22 nt, Human
gcccggcuaauuuuuguauuuu

SEQ ID NO: 1339221 - RNA, 20 nt, Human
gccucagccucccgaguagc

SEQ ID NO: 1339222 - RNA, 19 nt, Human
gcuggagugcaguggcgug

SEQ ID NO: 1339223 - RNA, 20 nt, Human
ggaagagcacagucucugca

SEQ ID NO: 1339224 - RNA, 24 nt, Human
ggaagagcacagucucugcaguca

SEQ ID NO: 1339225 - RNA, 21 nt, Human
ggagcggucugugggacucug

SEQ ID NO: 1339226 - RNA, 22 nt, Human
ggcuggagugcaguggcgugau

SEQ ID NO: 1339227 - RNA, 20 nt, Human
ggcugggagggaaagcgggu

SEQ ID NO: 1339228 - RNA, 19 nt, Human
gggaaagcgggugacacag

SEQ ID NO: 1339229 - RNA, 24 nt, Human
gggaaagcgggugacacagcaggu

SEQ ID NO: 1339230 - RNA, 22 nt, Human
gggauggggcgggcuugccggg

SEQ ID NO: 1339231 - RNA, 23 nt, Human
gggcgggcuugccgggugggggu

SEQ ID NO: 1339232 - RNA, 22 nt, Human
ggggaugaagucuuggucuguc

SEQ ID NO: 1339233 - RNA, 22 nt, Human
gggguuucaccauguuggccag

SEQ ID NO: 1339234 - RNA, 23 nt, Human
gggguuucacuauguugcuuagg

SEQ ID NO: 1339235 - RNA, 22 nt, Human
ggguuucacuauguugcuuagg

SEQ ID NO: 1339236 - RNA, 18 nt, Human
gguagagggugaggagga

SEQ ID NO: 1339237 - RNA, 20 nt, Human
gguagagggugaggaggagc

SEQ ID NO: 1339238 - RNA, 24 nt, Human
gguuucaccauguuggccaggaug

SEQ ID NO: 1339239 - RNA, 23 nt, Human
guagagaugggguuucaccaugu

SEQ ID NO: 1339240 - RNA, 21 nt, Human
gugaauaggauuucccugccu

SEQ ID NO: 1339241 - RNA, 23 nt, Human
gugauccacccaccucggacucc

SEQ ID NO: 1339242 - RNA, 24 nt, Human
gugauucuccugccucagccuccc

SEQ ID NO: 1339243 - RNA, 19 nt, Human
guguugggauuacaggcgu

SEQ ID NO: 1339244 - RNA, 21 nt, Human
guguugggauuacaggcguga

SEQ ID NO: 1339245 - RNA, 20 nt, Human
uaaagggucuuaggaauguu

SEQ ID NO: 1339246 - RNA, 18 nt, Human
uaacaaauuaccucucuu

SEQ ID NO: 1339247 - RNA, 20 nt, Human
uaaggacauucaaggcgaaa

SEQ ID NO: 1339248 - RNA, 21 nt, Human
uaagguguugggauuacaggc

SEQ ID NO: 1339249 - RNA, 24 nt, Human
uaauuuuuguauuuuuaguagaga

SEQ ID NO: 1339250 - RNA, 23 nt, Human
uacaggcacgugucaccacgccc

SEQ ID NO: 1339251 - RNA, 19 nt, Human
uacaggcgugagccacugc

SEQ ID NO: 1339252 - RNA, 23 nt, Human
uacaggcgugagccacugcgccc

SEQ ID NO: 1339253 - RNA, 20 nt, Human
uacuaaaaauuaaagaguug

SEQ ID NO: 1339254 - RNA, 22 nt, Human
uagagaugggguuucaccaugu

SEQ ID NO: 1339255 - RNA, 22 nt, Human
uagagggugaggaggagcgguc

SEQ ID NO: 1339256 - RNA, 24 nt, Human
uaguagagaugggguuucaccaug

SEQ ID NO: 1339257 - RNA, 25 nt, Human
uaguagagaugggguuucaccaugu

SEQ ID NO: 1339258 - RNA, 18 nt, Human
uauagguauauauauaua

SEQ ID NO: 1339259 - RNA, 23 nt, Human
uauccccugagccucaguuuccu

SEQ ID NO: 1339260 - RNA, 18 nt, Human
uauguugcuuaggcugga

SEQ ID NO: 1339261 - RNA, 25 nt, Human
uauuauauuuuuggagaugggguuu

SEQ ID NO: 1339262 - RNA, 23 nt, Human
uauuuuuggagaugggguuucac

SEQ ID NO: 1339263 - RNA, 19 nt, Human
ucaagugauucuccugccu

SEQ ID NO: 1339264 - RNA, 22 nt, Human
ucacuauguugcuuaggcugga

SEQ ID NO: 1339265 - RNA, 25 nt, Human
ucacuccaggcccucuguugccugg

SEQ ID NO: 1339266 - RNA, 19 nt, Human
ucacugcaaccuccgccuc

SEQ ID NO: 1339267 - RNA, 23 nt, Human
ucacugcaaccuccgccucccag

SEQ ID NO: 1339268 - RNA, 24 nt, Human
ucacugcaaccuccgccucccagg

SEQ ID NO: 1339269 - RNA, 27 nt, Human
ucacugcaaccuccgccucccagguuc

SEQ ID NO: 1339270 - RNA, 23 nt, Human
ucagccucccgaguagcugggac

SEQ ID NO: 1339271 - RNA, 20 nt, Human
ucagccuccugaguggcugg

SEQ ID NO: 1339272 - RNA, 20 nt, Human
ucaguccucacuccaggccc

SEQ ID NO: 1339273 - RNA, 23 nt, Human
ucauaucauuuuuugcaaucaua

SEQ ID NO: 1339274 - RNA, 20 nt, Human
ucauugcaccugccuuuugg

SEQ ID NO: 1339275 - RNA, 25 nt, Human
ucauuugucacacauagauaauaac

SEQ ID NO: 1339276 - RNA, 21 nt, Human
uccagugcugggcucaccugg

SEQ ID NO: 1339277 - RNA, 21 nt, Human
ucccagguucaagugauucuc

SEQ ID NO: 1339278 - RNA, 24 nt, Human
ucccagguucaagugauucuccug

SEQ ID NO: 1339279 - RNA, 20 nt, Human
ucccccaaccccccaccccc

SEQ ID NO: 1339280 - RNA, 22 nt, Human
ucccccaaccccccacccccaa

SEQ ID NO: 1339281 - RNA, 24 nt, Human
ucccgaguagcugggacuacaggc

SEQ ID NO: 1339282 - RNA, 27 nt, Human
ucccugccucccccaaccccccacccc

SEQ ID NO: 1339283 - RNA, 20 nt, Human
ucccuuuauccccugagccu

SEQ ID NO: 1339284 - RNA, 24 nt, Human
ucccuuuauccccugagccucagu

SEQ ID NO: 1339285 - RNA, 24 nt, Human
uccgcaggcuggagugcaguggcg

SEQ ID NO: 1339286 - RNA, 24 nt, Human
uccuaagguguugggauuacaggc

SEQ ID NO: 1339287 - RNA, 21 nt, Human
uccugggcucaagcgauccuc

SEQ ID NO: 1339288 - RNA, 21 nt, Human
uccugggcucaagcgauccuc

SEQ ID NO: 1339289 - RNA, 24 nt, Human
uccugggcucaagcgauccucuug

SEQ ID NO: 1339290 - RNA, 21 nt, Human
ucuaaggacauucaaggcgaa

SEQ ID NO: 1339291 - RNA, 21 nt, Human
ucuauaauugcaucuuggagc

SEQ ID NO: 1339292 - RNA, 24 nt, Human
ucuccugccucagccucccgagua

SEQ ID NO: 1339293 - RNA, 23 nt, Human
ucuguccgcaggcuggagugcag

SEQ ID NO: 1339294 - RNA, 23 nt, Human
ucuuggucuguccgcaggcugga

SEQ ID NO: 1339295 - RNA, 18 nt, Human
ucuuuuuuuuuugggggg

SEQ ID NO: 1339296 - RNA, 23 nt, Human
ugaccucgugauccacccaccuc

SEQ ID NO: 1339297 - RNA, 21 nt, Human
ugagauguacaggcuucccgg

SEQ ID NO: 1339298 - RNA, 20 nt, Human
ugaguauaaaagcugugucc

SEQ ID NO: 1339299 - RNA, 18 nt, Human
ugcaggagauggggccau

SEQ ID NO: 1339300 - RNA, 22 nt, Human
ugcaguggcgugaucuuagcuc

SEQ ID NO: 1339301 - RNA, 24 nt, Human
ugcaucagccuccugaguggcugg

SEQ ID NO: 1339302 - RNA, 24 nt, Human
ugccucagccucccgaguagcugg

SEQ ID NO: 1339303 - RNA, 18 nt, Human
ugccuggggccuccacug

SEQ ID NO: 1339304 - RNA, 21 nt, Human
ugccuggggccuccacugugc

SEQ ID NO: 1339305 - RNA, 21 nt, Human
ugccuggggccuccacugugc

SEQ ID NO: 1339306 - RNA, 19 nt, Human
ugccuuggcagggagaaac

SEQ ID NO: 1339307 - RNA, 21 nt, Human
uggagaugggguuucacuaug

SEQ ID NO: 1339308 - RNA, 19 nt, Human
uggagugcaguggcgugau

SEQ ID NO: 1339309 - RNA, 23 nt, Human
uggagugcaguggcgugaucuua

SEQ ID NO: 1339310 - RNA, 24 nt, Human
uggagugcaguggcgugaucuuag

SEQ ID NO: 1339311 - RNA, 24 nt, Human
uggcgugaucuuagcucacugcaa

SEQ ID NO: 1339312 - RNA, 22 nt, Human
ugggacuacaggcacgugucac

SEQ ID NO: 1339313 - RNA, 24 nt, Human
ugggacuacaggcacgugucacca

SEQ ID NO: 1339314 - RNA, 18 nt, Human
ugggacuugggcaagucc

SEQ ID NO: 1339315 - RNA, 18 nt, Human
ugggauuacaggcgugag

SEQ ID NO: 1339316 - RNA, 19 nt, Human
ugggauuacaggcgugagc

SEQ ID NO: 1339317 - RNA, 21 nt, Human
ugggauuacaggcgugagcca

SEQ ID NO: 1339318 - RNA, 22 nt, Human
ugggauuacaggcgugagccac

SEQ ID NO: 1339319 - RNA, 22 nt, Human
ugggauuacaggcgugagccac

SEQ ID NO: 1339320 - RNA, 24 nt, Human
ugggauuacaggcgugagccacug

SEQ ID NO: 1339321 - RNA, 26 nt, Human
ugggauuacaggcgugagccacugcg

SEQ ID NO: 1339322 - RNA, 19 nt, Human
ugggcucaagcgauccucu

SEQ ID NO: 1339323 - RNA, 23 nt, Human
ugggggcugggagggaaagcggg

SEQ ID NO: 1339324 - RNA, 24 nt, Human
ugggguuucaccauguuggccagg

SEQ ID NO: 1339325 - RNA, 24 nt, Human
ugggguuucacuauguugcuuagg

SEQ ID NO: 1339326 - RNA, 21 nt, Human
ugguaaggaugugggggcugg

SEQ ID NO: 1339327 - RNA, 22 nt, Human
ugugggacuugggcaagucccu

SEQ ID NO: 1339328 - RNA, 20 nt, Human
ugugucuuucacuguaaauc

SEQ ID NO: 1339329 - RNA, 27 nt, Human
uuagcucacugcaaccuccgccuccca

SEQ ID NO: 1339330 - RNA, 18 nt, Human
uuaguagagaugggguuu

SEQ ID NO: 1339331 - RNA, 22 nt, Human
uuaguagagaugggguuucacc

SEQ ID NO: 1339332 - RNA, 24 nt, Human
uuaguagagaugggguuucaccau

SEQ ID NO: 1339333 - RNA, 21 nt, Human
uucaagugauucuccugccuc

SEQ ID NO: 1339334 - RNA, 23 nt, Human
uucaagugauucuccugccucag

SEQ ID NO: 1339335 - RNA, 24 nt, Human
uucaagugauucuccugccucagc

SEQ ID NO: 1339336 - RNA, 23 nt, Human
uuccuccauacucuaauagcggg

SEQ ID NO: 1339337 - RNA, 23 nt, Human
uucuauaauugcaucuuggagcu

SEQ ID NO: 1339338 - RNA, 21 nt, Human
uuggccaggaugggcuggauc

SEQ ID NO: 1339339 - RNA, 23 nt, Human
uuguauuuuuaguagagaugggg

SEQ ID NO: 1339340 - RNA, 21 nt, Human
uuuauagguauauauauauau

SEQ ID NO: 1339341 - RNA, 19 nt, Human
uuucaccauguuggccagg

SEQ ID NO: 1339342 - RNA, 20 nt, Human
uuucaccauguuggccagga

SEQ ID NO: 1339343 - RNA, 24 nt, Human
uuucacuauguugcuuaggcugga

SEQ ID NO: 1339344 - RNA, 18 nt, Human
uuugccuuggcagggaga

SEQ ID NO: 1339345 - RNA, 22 nt, Human
uuuuauagguauauauauauau

SEQ ID NO: 1339346 - RNA, 31 nt, Human
uuuuauagguauauauauauauuuuuugccu

SEQ ID NO: 1339347 - RNA, 23 nt, Human
uuuuggagaugggguuucacuau

SEQ ID NO: 1339348 - RNA, 24 nt, Human
uuuuggagaugggguuucacuaug

SEQ ID NO: 1339349 - RNA, 24 nt, Human
uuuuuaguagagaugggguuucac

SEQ ID NO: 1339350 - RNA, 24 nt, Human
uuuuuggagaugggguuucacuau

SEQ ID NO: 1339351 - RNA, 20 nt, Human
uuuuuguauuuuuaguagag

SEQ ID NO: 1339352 - RNA, 28 nt, Human
uuuuuuuuuuauagguauauauauauau

SEQ ID NO: 1339353 - RNA, 23 nt, Human
uuuuuuuuuuuuuuuuuuauagg

SEQ ID NO: 1339354 - RNA, 19 nt, Human
aaacaucccaagcaagacu

SEQ ID NO: 1339355 - RNA, 20 nt, Human
aagggagacacugcuacaaa

SEQ ID NO: 1339356 - RNA, 21 nt, Human
acugcagccaccgcggacgcc

SEQ ID NO: 1339357 - RNA, 23 nt, Human
acugcagccaccgcggacgcccg

SEQ ID NO: 1339358 - RNA, 18 nt, Human
agacucgaagagcucgcg

SEQ ID NO: 1339359 - RNA, 24 nt, Human
agcagggagaccgacgggacugca

SEQ ID NO: 1339360 - RNA, 23 nt, Human
auccugccacuccugcacacccu

SEQ ID NO: 1339361 - RNA, 20 nt, Human
augaccccaaaggugcagaa

SEQ ID NO: 1339362 - RNA, 22 nt, Human
caaaaucaccccguggggccaa

SEQ ID NO: 1339363 - RNA, 19 nt, Human
cacacaguccuggguccuc

SEQ ID NO: 1339364 - RNA, 25 nt, Human
cacugcuacaaagcaugaccccaaa

SEQ ID NO: 1339365 - RNA, 22 nt, Human
caggggcugcugaaacauccca

SEQ ID NO: 1339366 - RNA, 19 nt, Human
cauccugccacuccugcac

SEQ ID NO: 1339367 - RNA, 24 nt, Human
cauccugccacuccugcacacccu

SEQ ID NO: 1339368 - RNA, 19 nt, Human
caugaccccaaaggugcag

SEQ ID NO: 1339369 - RNA, 18 nt, Human
ccaagcaagacucgaaga

SEQ ID NO: 1339370 - RNA, 24 nt, Human
cgagcuggauguaggacucccuca

SEQ ID NO: 1339371 - RNA, 22 nt, Human
cgccggacagcagggagaccga

SEQ ID NO: 1339372 - RNA, 22 nt, Human
cucaggcagguaagaaacccac

SEQ ID NO: 1339373 - RNA, 18 nt, Human
cucagguccugcgcccuc

SEQ ID NO: 1339374 - RNA, 22 nt, Human
cuccucuuccuucucaggggcu

SEQ ID NO: 1339375 - RNA, 23 nt, Human
gccggacagcagggagaccgacg

SEQ ID NO: 1339376 - RNA, 23 nt, Human
ucagcgggcccucagcuuccucc

SEQ ID NO: 1339377 - RNA, 22 nt, Human
ucaggcagguaagaaacccaca

SEQ ID NO: 1339378 - RNA, 20 nt, Human
ucccucagguccugcgcccu

SEQ ID NO: 1339379 - RNA, 19 nt, Human
ucccugagguggcucaggc

SEQ ID NO: 1339380 - RNA, 21 nt, Human
ucccugagguggcucaggcag

SEQ ID NO: 1339381 - RNA, 19 nt, Human
uccugcacacccuggacga

SEQ ID NO: 1339382 - RNA, 19 nt, Human
uccugcgcccucagcgggc

SEQ ID NO: 1339383 - RNA, 23 nt, Human
ucuuccuucucaggggcugcuga

SEQ ID NO: 1339384 - RNA, 19 nt, Human
ugaccccaaaggugcagaa

SEQ ID NO: 1339385 - RNA, 18 nt, Human
uuccuccucuuccuucuc

SEQ ID NO: 1339386 - RNA, 23 nt, Human
aagcugcggugacaccaccaaau

SEQ ID NO: 1339387 - RNA, 19 nt, Human
aaguggccuggagcaaaag

SEQ ID NO: 1339388 - RNA, 22 nt, Human
aaguguuggaaauaccccuucc

SEQ ID NO: 1339389 - RNA, 24 nt, Human
acacacacaaguggccuggagcaa

SEQ ID NO: 1339390 - RNA, 24 nt, Human
acaccaccaaauaacauaagcaaa

SEQ ID NO: 1339391 - RNA, 21 nt, Human
acacugccugccuuggacagc

SEQ ID NO: 1339392 - RNA, 20 nt, Human
accaaauaacauaagcaaaa

SEQ ID NO: 1339393 - RNA, 21 nt, Human
acgcaggucugcggccggugg

SEQ ID NO: 1339394 - RNA, 22 nt, Human
acuagauuuuccuugauaaacu

SEQ ID NO: 1339395 - RNA, 19 nt, Human
agaauccccuucccaaucc

SEQ ID NO: 1339396 - RNA, 19 nt, Human
agaccaaggccuggaggga

SEQ ID NO: 1339397 - RNA, 21 nt, Human
agacgccaaguguuggaaaua

SEQ ID NO: 1339398 - RNA, 24 nt, Human
agagccauccacccagaccaucca

SEQ ID NO: 1339399 - RNA, 18 nt, Human
agcaaaagugcaaaaucc

SEQ ID NO: 1339400 - RNA, 18 nt, Human
agcuugagggagcugaug

SEQ ID NO: 1339401 - RNA, 24 nt, Human
aggcuuccaggcccagaauccccu

SEQ ID NO: 1339402 - RNA, 22 nt, Human
agggagcugaugcugagguucu

SEQ ID NO: 1339403 - RNA, 21 nt, Human
agguguguccugaucccaugu

SEQ ID NO: 1339404 - RNA, 19 nt, Human
aguggcuguuucccucuac

SEQ ID NO: 1339405 - RNA, 32 nt, Human
auaagcaaaauuuugcuuuauuaacccaaaga

SEQ ID NO: 1339406 - RNA, 31 nt, Human
auggcagugguacacacacacauacacacag

SEQ ID NO: 1339407 - RNA, 21 nt, Human
caacaguaguccugagacggc

SEQ ID NO: 1339408 - RNA, 23 nt, Human
caauccaacaguaguccugagac

SEQ ID NO: 1339409 - RNA, 20 nt, Human
cacacacacauacacacaca

SEQ ID NO: 1339410 - RNA, 27 nt, Human
cacacacauacacacacaaguggccug

SEQ ID NO: 1339411 - RNA, 23 nt, Human
cacagccccccucugaccucagc

SEQ ID NO: 1339412 - RNA, 23 nt, Human
caccaggacccucucuuuucccu

SEQ ID NO: 1339413 - RNA, 23 nt, Human
cacugcaauuucuuccuacuuaa

SEQ ID NO: 1339414 - RNA, 21 nt, Human
caggaagggcugauggcagca

SEQ ID NO: 1339415 - RNA, 23 nt, Human
caggcccagaauccccuucccaa

SEQ ID NO: 1339416 - RNA, 18 nt, Human
caguaguccugagacggc

SEQ ID NO: 1339417 - RNA, 20 nt, Human
caguggcuguuucccucuac

SEQ ID NO: 1339418 - RNA, 24 nt, Human
cauggugucuugguauaagcugcc

SEQ ID NO: 1339419 - RNA, 19 nt, Human
cauuccgcaggcuguucuc

SEQ ID NO: 1339420 - RNA, 18 nt, Human
ccaaaccagaugacaaac

SEQ ID NO: 1339421 - RNA, 26 nt, Human
ccaaaccagaugacaaacggguauac

SEQ ID NO: 1339422 - RNA, 24 nt, Human
ccaaguguuggaaauaccccuucc

SEQ ID NO: 1339423 - RNA, 19 nt, Human
ccacgcaggucugcggccg

SEQ ID NO: 1339424 - RNA, 20 nt, Human
ccagaccauccacuaaggcc

SEQ ID NO: 1339425 - RNA, 18 nt, Human
cccguccaccagguggca

SEQ ID NO: 1339426 - RNA, 18 nt, Human
cccucugaccucagcucc

SEQ ID NO: 1339427 - RNA, 22 nt, Human
cccuggacggccacgcaggucu

SEQ ID NO: 1339428 - RNA, 20 nt, Human
ccucugaaacugcagccgcc

SEQ ID NO: 1339429 - RNA, 26 nt, Human
ccugugggucgggaagccuguaggac

SEQ ID NO: 1339430 - RNA, 22 nt, Human
cgccaaguguuggaaauacccc

SEQ ID NO: 1339431 - RNA, 20 nt, Human
cggugacaccaccaaauaac

SEQ ID NO: 1339432 - RNA, 19 nt, Human
cuaaggccacagcuggccc

SEQ ID NO: 1339433 - RNA, 28 nt, Human
cucuacggccacagacgcggugguuacc

SEQ ID NO: 1339434 - RNA, 18 nt, Human
cugaaacugcagccgccu

SEQ ID NO: 1339435 - RNA, 18 nt, Human
cugaaacugcagccgccu

SEQ ID NO: 1339436 - RNA, 21 nt, Human
cugcuggugaaagaacucugg

SEQ ID NO: 1339437 - RNA, 19 nt, Human
cuggacaaccuacaguccc

SEQ ID NO: 1339438 - RNA, 21 nt, Human
cuggaugggucugaugcugcu

SEQ ID NO: 1339439 - RNA, 22 nt, Human
cuguagcuggagcaggaagggc

SEQ ID NO: 1339440 - RNA, 21 nt, Human
cugugggcucccuggagcccu

SEQ ID NO: 1339441 - RNA, 18 nt, Human
cuuccacccaccaggacc

SEQ ID NO: 1339442 - RNA, 20 nt, Human
cuucccaauccuuccaccca

SEQ ID NO: 1339443 - RNA, 18 nt, Human
gagcaggaagggcugaug

SEQ ID NO: 1339444 - RNA, 27 nt, Human
gcaaaauuuugcuuuauuaacccaaaa

SEQ ID NO: 1339445 - RNA, 19 nt, Human
gcccaacuguagcuggagc

SEQ ID NO: 1339446 - RNA, 18 nt, Human
gccuuucccguccaccag

SEQ ID NO: 1339447 - RNA, 19 nt, Human
ggacagccuuuucuugcua

SEQ ID NO: 1339448 - RNA, 22 nt, Human
ggacccucucuuuucccugcuu

SEQ ID NO: 1339449 - RNA, 23 nt, Human
ggaggcggggucugcuguccauc

SEQ ID NO: 1339450 - RNA, 25 nt, Human
ggcccagaauccccuucccaauccu

SEQ ID NO: 1339451 - RNA, 18 nt, Human
ggccucugaaacugcagc

SEQ ID NO: 1339452 - RNA, 19 nt, Human
gggcucccuggagcccugg

SEQ ID NO: 1339453 - RNA, 21 nt, Human
guaaacaaaaucagacaacua

SEQ ID NO: 1339454 - RNA, 18 nt, Human
guagccugggccuucugu

SEQ ID NO: 1339455 - RNA, 20 nt, Human
gucagcagaugacaggaggg

SEQ ID NO: 1339456 - RNA, 19 nt, Human
gugguacacacacacauac

SEQ ID NO: 1339457 - RNA, 20 nt, Human
uaaaaugcuccuggaaggga

SEQ ID NO: 1339458 - RNA, 22 nt, Human
uaaaaugcuccuggaagggagc

SEQ ID NO: 1339459 - RNA, 22 nt, Human
uaaacaaaaucagacaacuacc

SEQ ID NO: 1339460 - RNA, 19 nt, Human
uaacucacuggagugacaa

SEQ ID NO: 1339461 - RNA, 20 nt, Human
uaccccuuccuggggcuucu

SEQ ID NO: 1339462 - RNA, 23 nt, Human
uauaagcugcggugacaccacca

SEQ ID NO: 1339463 - RNA, 23 nt, Human
ucauuccgcaggcuguucucggg

SEQ ID NO: 1339464 - RNA, 19 nt, Human
uccaacaguaguccugaga

SEQ ID NO: 1339465 - RNA, 22 nt, Human
uccaucagacggaaaggcuggu

SEQ ID NO: 1339466 - RNA, 21 nt, Human
ucccugcuugucugcuaagag

SEQ ID NO: 1339467 - RNA, 21 nt, Human
ucccugggaccuggcgugugg

SEQ ID NO: 1339468 - RNA, 22 nt, Human
uccuggggcuucuguccauugg

SEQ ID NO: 1339469 - RNA, 20 nt, Human
ucucuggguugucacagucg

SEQ ID NO: 1339470 - RNA, 24 nt, Human
ucucuggguugucacagucgacuu

SEQ ID NO: 1339471 - RNA, 19 nt, Human
ugacaacuuucuucugcag

SEQ ID NO: 1339472 - RNA, 18 nt, Human
ugagacgccaaguguugg

SEQ ID NO: 1339473 - RNA, 24 nt, Human
ugagaggggaaggagcaggcuucc

SEQ ID NO: 1339474 - RNA, 23 nt, Human
ugcaagacuucccugggaccuuu

SEQ ID NO: 1339475 - RNA, 20 nt, Human
ugcugcaguccuguccagcc

SEQ ID NO: 1339476 - RNA, 22 nt, Human
ugcuggaggcggggucugcugu

SEQ ID NO: 1339477 - RNA, 19 nt, Human
uggaagggagcagguggua

SEQ ID NO: 1339478 - RNA, 20 nt, Human
uggagcaggaagggcugaug

SEQ ID NO: 1339479 - RNA, 20 nt, Human
uggagggaacagaagcagca

SEQ ID NO: 1339480 - RNA, 21 nt, Human
uggccuggagcaaaagugcaa

SEQ ID NO: 1339481 - RNA, 20 nt, Human
ugggcuuugaacacucagac

SEQ ID NO: 1339482 - RNA, 23 nt, Human
uggugcuggaggcggggucugcu

SEQ ID NO: 1339483 - RNA, 23 nt, Human
uguagggacacugcuuggugcug

SEQ ID NO: 1339484 - RNA, 22 nt, Human
uguccugcugcaguccugucca

SEQ ID NO: 1339485 - RNA, 18 nt, Human
ugugaagucagcagauga

SEQ ID NO: 1339486 - RNA, 24 nt, Human
ugugaagucagcagaugacaggag

SEQ ID NO: 1339487 - RNA, 24 nt, Human
ugugggguuuguagccugggccuu

SEQ ID NO: 1339488 - RNA, 22 nt, Human
uugcuaacagugggaucucaaa

SEQ ID NO: 1339489 - RNA, 23 nt, Human
uuggauuauuuuaacuagauuuu

SEQ ID NO: 1339490 - RNA, 19 nt, Human
uuucuuccuacuuaaggcu

SEQ ID NO: 1339491 - RNA, 19 nt, Human
uuucuucugcagccuggau

SEQ ID NO: 1339492 - RNA, 22 nt, Human
uuuuuuuuuuuuuuuuucuguu

SEQ ID NO: 1339493 - RNA, 27 nt, Human
uuuuuuuuuuuuuuuuuuuuucugggg

SEQ ID NO: 1339494 - RNA, 21 nt, Human
aaauacugguggaacaagaca

SEQ ID NO: 1339495 - RNA, 20 nt, Human
acucuaagcuugaagacaga

SEQ ID NO: 1339496 - RNA, 21 nt, Human
acugaccagacugcaccauuu

SEQ ID NO: 1339497 - RNA, 24 nt, Human
agcacugaccagacugcaccauuu

SEQ ID NO: 1339498 - RNA, 20 nt, Human
cagacugcaccauuuagccu

SEQ ID NO: 1339499 - RNA, 21 nt, Human
cagauccaaaaacucucccca

SEQ ID NO: 1339500 - RNA, 18 nt, Human
caucucaguacuuggcac

SEQ ID NO: 1339501 - RNA, 22 nt, Human
cauguccaaacccauggcucuc

SEQ ID NO: 1339502 - RNA, 21 nt, Human
ccagauccaaaaacucucccc

SEQ ID NO: 1339503 - RNA, 18 nt, Human
cuaaauuauaaauagcac

SEQ ID NO: 1339504 - RNA, 18 nt, Human
gacagcugagaauguaug

SEQ ID NO: 1339505 - RNA, 19 nt, Human
ggggauaggugguuugggg

SEQ ID NO: 1339506 - RNA, 19 nt, Human
gugggagacucuaagcuug

SEQ ID NO: 1339507 - RNA, 20 nt, Human
uagaccucccacaccagcau

SEQ ID NO: 1339508 - RNA, 22 nt, Human
uagaccucccacaccagcauuu

SEQ ID NO: 1339509 - RNA, 24 nt, Human
uccccauguuuuagaccucccaca

SEQ ID NO: 1339510 - RNA, 22 nt, Human
ucucccgugggagacucuaagc

SEQ ID NO: 1339511 - RNA, 20 nt, Human
aacgcagacuuccccucucc

SEQ ID NO: 1339512 - RNA, 19 nt, Human
agcccguaaggcaagcacu

SEQ ID NO: 1339513 - RNA, 23 nt, Human
caaagcagcuacugaagagagag

SEQ ID NO: 1339514 - RNA, 24 nt, Human
ccaccuugccccgacggcgcgccc

SEQ ID NO: 1339515 - RNA, 22 nt, Human
cccuccuucauccuuucaccuc

SEQ ID NO: 1339516 - RNA, 25 nt, Human
cgcagguaccucuaggucauguucu

SEQ ID NO: 1339517 - RNA, 18 nt, Human
cuuccccucuccgugucc

SEQ ID NO: 1339518 - RNA, 23 nt, Human
gcagacuuccccucuccgugucc

SEQ ID NO: 1339519 - RNA, 23 nt, Human
gcccuggacgcaggaguugagcu

SEQ ID NO: 1339520 - RNA, 18 nt, Human
gcccugggccugaggccc

SEQ ID NO: 1339521 - RNA, 21 nt, Human
guccaaggguucucaggccaa

SEQ ID NO: 1339522 - RNA, 18 nt, Human
ucucaggccaagcucgga

SEQ ID NO: 1339523 - RNA, 18 nt, Human
ugcgggacgugcguggga

SEQ ID NO: 1339524 - RNA, 18 nt, Human
ugggagcuuucaaagcag

SEQ ID NO: 1339525 - RNA, 24 nt, Human
ugggagcuuucaaagcagcuacug

SEQ ID NO: 1339526 - RNA, 20 nt, Human
uucaaagcagcuacugaaga

SEQ ID NO: 1339527 - RNA, 22 nt, Human
aaccuuccucuuccuucauaua

SEQ ID NO: 1339528 - RNA, 20 nt, Human
accgccauguuucacagaag

SEQ ID NO: 1339529 - RNA, 25 nt, Human
aggcaaaaaguuuuucuccuucaau

SEQ ID NO: 1339530 - RNA, 23 nt, Human
cccagccuaccgccauguuucac

SEQ ID NO: 1339531 - RNA, 22 nt, Human
uguuauggucccagccuaccgc

SEQ ID NO: 1339532 - RNA, 21 nt, Human
aaccaaaguagcaaaagcacc

SEQ ID NO: 1339533 - RNA, 24 nt, Human
aaccaaaguagcaaaagcaccccu

SEQ ID NO: 1339534 - RNA, 20 nt, Human
aagcaccccugucccaggug

SEQ ID NO: 1339535 - RNA, 18 nt, Human
aaucugggccucuuccuu

SEQ ID NO: 1339536 - RNA, 18 nt, Human
acacaguuuauuagaggc

SEQ ID NO: 1339537 - RNA, 22 nt, Human
acacaguuuauuagaggccauc

SEQ ID NO: 1339538 - RNA, 21 nt, Human
accaaaguagcaaaagcaccc

SEQ ID NO: 1339539 - RNA, 24 nt, Human
accaaaguagcaaaagcaccccug

SEQ ID NO: 1339540 - RNA, 23 nt, Human
acugacccugaguauugacccug

SEQ ID NO: 1339541 - RNA, 20 nt, Human
agcaccccugucccaggugu

SEQ ID NO: 1339542 - RNA, 20 nt, Human
agcccgaguggcccugaugc

SEQ ID NO: 1339543 - RNA, 24 nt, Human
aggugucagagacuaggguggacc

SEQ ID NO: 1339544 - RNA, 18 nt, Human
aguauugacccugaguga

SEQ ID NO: 1339545 - RNA, 19 nt, Human
agugaccucugagcccgag

SEQ ID NO: 1339546 - RNA, 23 nt, Human
caaaaggguuuuaggccuccccu

SEQ ID NO: 1339547 - RNA, 19 nt, Human
caaccaaaguagcaaaagc

SEQ ID NO: 1339548 - RNA, 22 nt, Human
caaccaaaguagcaaaagcacc

SEQ ID NO: 1339549 - RNA, 24 nt, Human
caccccugucccaggugucagaga

SEQ ID NO: 1339550 - RNA, 21 nt, Human
cccucuggaccucucccagca

SEQ ID NO: 1339551 - RNA, 21 nt, Human
cccugagugaccucugagccc

SEQ ID NO: 1339552 - RNA, 22 nt, Human
cgaguggcccugaugcuuggca

SEQ ID NO: 1339553 - RNA, 26 nt, Human
ggaaggucacuucgaguccgugaagg

SEQ ID NO: 1339554 - RNA, 20 nt, Human
ggauggggucgcgcgccggc

SEQ ID NO: 1339555 - RNA, 18 nt, Human
gggauggggucgcgcgcc

SEQ ID NO: 1339556 - RNA, 25 nt, Human
gugaccucugagcccgaguggcccu

SEQ ID NO: 1339557 - RNA, 20 nt, Human
uaggguggaccccaaggauc

SEQ ID NO: 1339558 - RNA, 20 nt, Human
uaguggggggacucugggac

SEQ ID NO: 1339559 - RNA, 20 nt, Human
ucagaccucaggcaccacca

SEQ ID NO: 1339560 - RNA, 18 nt, Human
ucccaggugucagagacu

SEQ ID NO: 1339561 - RNA, 22 nt, Human
uccguguucacaaucugggccu

SEQ ID NO: 1339562 - RNA, 18 nt, Human
ucucccagcauugaacuc

SEQ ID NO: 1339563 - RNA, 21 nt, Human
ucucccagcauugaacuccug

SEQ ID NO: 1339564 - RNA, 22 nt, Human
ucucccagcauugaacuccugg

SEQ ID NO: 1339565 - RNA, 20 nt, Human
ugaaggaggcaggcaggugu

SEQ ID NO: 1339566 - RNA, 20 nt, Human
ugacccugaguauugacccu

SEQ ID NO: 1339567 - RNA, 19 nt, Human
uggcgggguguuuggccac

SEQ ID NO: 1339568 - RNA, 22 nt, Human
uggcgggguguuuggccacuag

SEQ ID NO: 1339569 - RNA, 20 nt, Human
ugggagguagggauauaugg

SEQ ID NO: 1339570 - RNA, 20 nt, Human
uuccuuauaggaacccucug

SEQ ID NO: 1339571 - RNA, 26 nt, Human
uuggccacuagguggugggagguagg

SEQ ID NO: 1339572 - RNA, 21 nt, Human
aaggguugugagagacccuga

SEQ ID NO: 1339573 - RNA, 20 nt, Human
caaugagcucucucuuuauu

SEQ ID NO: 1339574 - RNA, 25 nt, Human
caucuuuuccuuuuaauaaucuuca

SEQ ID NO: 1339575 - RNA, 19 nt, Human
caugguagaguacuggugc

SEQ ID NO: 1339576 - RNA, 23 nt, Human
ccaaggccauguaaaagauuuau

SEQ ID NO: 1339577 - RNA, 20 nt, Human
ccccgcuacacuuccuucuu

SEQ ID NO: 1339578 - RNA, 25 nt, Human
cccguggcugcgauuacccuagggc

SEQ ID NO: 1339579 - RNA, 19 nt, Human
ccucuagaccaaggccaug

SEQ ID NO: 1339580 - RNA, 25 nt, Human
ccuuaccccgcuacacuuccuucuu

SEQ ID NO: 1339581 - RNA, 23 nt, Human
gagagacccugacggugcauucc

SEQ ID NO: 1339582 - RNA, 19 nt, Human
gagcaauggggcaagaggg

SEQ ID NO: 1339583 - RNA, 18 nt, Human
gaggagagcugggaaagg

SEQ ID NO: 1339584 - RNA, 18 nt, Human
gaggguagaacugcucag

SEQ ID NO: 1339585 - RNA, 19 nt, Human
ggcuggaaggcaggaaguc

SEQ ID NO: 1339586 - RNA, 18 nt, Human
ggggaggagagcugggaa

SEQ ID NO: 1339587 - RNA, 24 nt, Human
gugagacaacaggaaaugacaaag

SEQ ID NO: 1339588 - RNA, 24 nt, Human
uaacaaaacaugauucuaaaagcc

SEQ ID NO: 1339589 - RNA, 24 nt, Human
uacacuuccuucuucuaccccugc

SEQ ID NO: 1339590 - RNA, 22 nt, Human
uagaccaaggccauguaaaaga

SEQ ID NO: 1339591 - RNA, 23 nt, Human
uagagaaguacagaguuacugca

SEQ ID NO: 1339592 - RNA, 18 nt, Human
uccccagugagugccuug

SEQ ID NO: 1339593 - RNA, 18 nt, Human
ucgggcaaaggccgaagu

SEQ ID NO: 1339594 - RNA, 19 nt, Human
ucgggguagcgaugaaucu

SEQ ID NO: 1339595 - RNA, 19 nt, Human
ucuaaaagccugccuccuc

SEQ ID NO: 1339596 - RNA, 19 nt, Human
ugggaugccccaugguaga

SEQ ID NO: 1339597 - RNA, 18 nt, Human
uggggaggagagcuggga

SEQ ID NO: 1339598 - RNA, 22 nt, Human
ugugcagauagagaaguacaga

SEQ ID NO: 1339599 - RNA, 24 nt, Human
uguggaaggucgggcaaaggccgg

SEQ ID NO: 1339600 - RNA, 18 nt, Human
uguguuggguccccagau

SEQ ID NO: 1339601 - RNA, 19 nt, Human
uguuggggaggagagcugg

SEQ ID NO: 1339602 - RNA, 20 nt, Human
uguuggggaggagagcuggg

SEQ ID NO: 1339603 - RNA, 19 nt, Human
uucccauuugauuuucuug

SEQ ID NO: 1339604 - RNA, 18 nt, Human
uugggaggguagaacugc

SEQ ID NO: 1339605 - RNA, 21 nt, Human
uuugcuuccuugcuuccuccc

SEQ ID NO: 1339606 - RNA, 20 nt, Human
uuuguuggggaggagagcug

SEQ ID NO: 1339607 - RNA, 22 nt, Human
uuuuuuuuuuuuuuuuuuacag

SEQ ID NO: 1339608 - RNA, 23 nt, Human
acaaccaacagcgcucccgcccc

SEQ ID NO: 1339609 - RNA, 18 nt, Human
acagcgcucccgccccuu

SEQ ID NO: 1339610 - RNA, 22 nt, Human
acagcgcucccgccccuuuuua

SEQ ID NO: 1339611 - RNA, 23 nt, Human
aggcgccugcagauucuggaggg

SEQ ID NO: 1339612 - RNA, 18 nt, Human
cacagcccgugcccucgc

SEQ ID NO: 1339613 - RNA, 24 nt, Human
cacgcggccagccgcggacuccag

SEQ ID NO: 1339614 - RNA, 23 nt, Human
cagcgcucccgccccuuuuuauu

SEQ ID NO: 1339615 - RNA, 18 nt, Human
cucaugccuucaguccac

SEQ ID NO: 1339616 - RNA, 24 nt, Human
gccauacugcuagagaugagggaa

SEQ ID NO: 1339617 - RNA, 21 nt, Human
ggacuccaggccagcucuguc

SEQ ID NO: 1339618 - RNA, 20 nt, Human
ggccacagcccgugcccucg

SEQ ID NO: 1339619 - RNA, 21 nt, Human
ucaaagggcaucucaugccuu

SEQ ID NO: 1339620 - RNA, 18 nt, Human
ucaguccaccgccuccuc

SEQ ID NO: 1339621 - RNA, 23 nt, Human
uccaccgccuccucgggccacag

SEQ ID NO: 1339622 - RNA, 18 nt, Human
ugagggaagagagcccca

SEQ ID NO: 1339623 - RNA, 19 nt, Human
ugagggaagagagccccaa

SEQ ID NO: 1339624 - RNA, 29 nt, Human
ugcgcacaaccaacagcgcucccgccccu

SEQ ID NO: 1339625 - RNA, 18 nt, Human
uggcagcccgagauccug

SEQ ID NO: 1339626 - RNA, 22 nt, Human
ugucagacaaucaccuacucac

SEQ ID NO: 1339627 - RNA, 21 nt, Human
uuugcuguacacucaaagggc

SEQ ID NO: 1339628 - RNA, 23 nt, Human
uuugcuguacacucaaagggcau

SEQ ID NO: 1339629 - RNA, 27 nt, Human
uuuuuuuuuuuuuuuuuuuuuuugggg

SEQ ID NO: 1339630 - RNA, 23 nt, Human
aaaaaaccuagccaacugcaggc

SEQ ID NO: 1339631 - RNA, 19 nt, Human
aaacauccuugaacagugc

SEQ ID NO: 1339632 - RNA, 21 nt, Human
aagauaccgagguugcuauga

SEQ ID NO: 1339633 - RNA, 25 nt, Human
aagcaaaaacaaauauuaaaaaaac

SEQ ID NO: 1339634 - RNA, 25 nt, Human
aaugaaacaagguuuuuacccuuga

SEQ ID NO: 1339635 - RNA, 22 nt, Human
aaugcauuuuaaagaaacaguu

SEQ ID NO: 1339636 - RNA, 23 nt, Human
acaaauauuaaaaaaaccuagcc

SEQ ID NO: 1339637 - RNA, 21 nt, Human
accuuaaaucuggauuccagu

SEQ ID NO: 1339638 - RNA, 20 nt, Human
agaacuuaaagauaccgagg

SEQ ID NO: 1339639 - RNA, 22 nt, Human
agagaacuggaugucaucaaca

SEQ ID NO: 1339640 - RNA, 23 nt, Human
agagacaaguggaguguugguca

SEQ ID NO: 1339641 - RNA, 24 nt, Human
agagacuguaaaauguauagauaa

SEQ ID NO: 1339642 - RNA, 19 nt, Human
agaggucuagagaacugga

SEQ ID NO: 1339643 - RNA, 23 nt, Human
aggaaaauuagcuuuuuucucuc

SEQ ID NO: 1339644 - RNA, 22 nt, Human
aguuggacaguugccagagaag

SEQ ID NO: 1339645 - RNA, 19 nt, Human
auacaaauuaauuuagaaa

SEQ ID NO: 1339646 - RNA, 21 nt, Human
aucaccuuaaaucuggauucc

SEQ ID NO: 1339647 - RNA, 19 nt, Human
auuugaggagggauugcuc

SEQ ID NO: 1339648 - RNA, 18 nt, Human
caaaggacucaccuaagg

SEQ ID NO: 1339649 - RNA, 19 nt, Human
caaaggagcuaugcuaagu

SEQ ID NO: 1339650 - RNA, 21 nt, Human
caacagucuccucaacccuga

SEQ ID NO: 1339651 - RNA, 26 nt, Human
caaccuuuucaagaaaguuuagugac

SEQ ID NO: 1339652 - RNA, 21 nt, Human
caagacagaaaaucucucaaa

SEQ ID NO: 1339653 - RNA, 18 nt, Human
caagagguucccuacagu

SEQ ID NO: 1339654 - RNA, 20 nt, Human
caaggaaagcccagggaacc

SEQ ID NO: 1339655 - RNA, 22 nt, Human
caccaaaaggcagauuaugcuu

SEQ ID NO: 1339656 - RNA, 20 nt, Human
cacccccuuccuuaacuuuc

SEQ ID NO: 1339657 - RNA, 18 nt, Human
cacuacucugaaaugggu

SEQ ID NO: 1339658 - RNA, 22 nt, Human
caggcaagacagaaaaucucuc

SEQ ID NO: 1339659 - RNA, 26 nt, Human
caggcaagacagaaaaucucucaaac

SEQ ID NO: 1339660 - RNA, 22 nt, Human
caguuuuaaauguacccacccu

SEQ ID NO: 1339661 - RNA, 25 nt, Human
cauuucugcuuagcauauuugagga

SEQ ID NO: 1339662 - RNA, 21 nt, Human
ccaaaggagcuaugcuaagua

SEQ ID NO: 1339663 - RNA, 24 nt, Human
ccaacagucuccucaacccugaau

SEQ ID NO: 1339664 - RNA, 19 nt, Human
ccaacccacauccucaccc

SEQ ID NO: 1339665 - RNA, 25 nt, Human
ccaacccacauccucacccccuucc

SEQ ID NO: 1339666 - RNA, 26 nt, Human
ccacauccucacccccuuccuuaacu

SEQ ID NO: 1339667 - RNA, 26 nt, Human
ccauuuaucaggcacccucuuauuuc

SEQ ID NO: 1339668 - RNA, 21 nt, Human
cccaacagucuccucaacccu

SEQ ID NO: 1339669 - RNA, 21 nt, Human
cccaacccacauccucacccc

SEQ ID NO: 1339670 - RNA, 21 nt, Human
ccccccaacagucuccucaac

SEQ ID NO: 1339671 - RNA, 20 nt, Human
cccucuuauuuccauccuga

SEQ ID NO: 1339672 - RNA, 24 nt, Human
cuccucugcucugaugguuaagga

SEQ ID NO: 1339673 - RNA, 28 nt, Human
cucugguuugggcagaggucggaaagcc

SEQ ID NO: 1339674 - RNA, 20 nt, Human
cugaauugaccaaguaaugc

SEQ ID NO: 1339675 - RNA, 23 nt, Human
cuuucauacauuauaaaugcccc

SEQ ID NO: 1339676 - RNA, 24 nt, Human
gaaaaagacugcaagaaacuuaga

SEQ ID NO: 1339677 - RNA, 22 nt, Human
gagaacuuaaagauaccgaggu

SEQ ID NO: 1339678 - RNA, 21 nt, Human
gauugcucugguuugggcaga

SEQ ID NO: 1339679 - RNA, 20 nt, Human
gcacccucuuauuuccaucc

SEQ ID NO: 1339680 - RNA, 19 nt, Human
gccccccaacagucuccuc

SEQ ID NO: 1339681 - RNA, 22 nt, Human
gcugccccaaagaugaaugaaa

SEQ ID NO: 1339682 - RNA, 20 nt, Human
ggcuuaauguucuggugugu

SEQ ID NO: 1339683 - RNA, 18 nt, Human
ggugguuuucucaagugu

SEQ ID NO: 1339684 - RNA, 25 nt, Human
guagugagucuuuccuccucugcuc

SEQ ID NO: 1339685 - RNA, 21 nt, Human
guggagaacuuaaagauaccg

SEQ ID NO: 1339686 - RNA, 22 nt, Human
gugugcaaagucaagcacaaga

SEQ ID NO: 1339687 - RNA, 19 nt, Human
uaaaaaaaccuagccaacu

SEQ ID NO: 1339688 - RNA, 28 nt, Human
uaaaauguauagauaacaaaauugggua

SEQ ID NO: 1339689 - RNA, 20 nt, Human
uaaacuccuaaaauauaaau

SEQ ID NO: 1339690 - RNA, 19 nt, Human
uaaagauaccgagguugcu

SEQ ID NO: 1339691 - RNA, 21 nt, Human
uaaaugccccccaacagucuc

SEQ ID NO: 1339692 - RNA, 20 nt, Human
uaagaggagaaagaaauaau

SEQ ID NO: 1339693 - RNA, 18 nt, Human
uaagcugagaaaaagacu

SEQ ID NO: 1339694 - RNA, 18 nt, Human
uacaagcaaaaacaaaua

SEQ ID NO: 1339695 - RNA, 23 nt, Human
uagaaaguauuccauuguaaaga

SEQ ID NO: 1339696 - RNA, 24 nt, Human
uagccaacugcaggcuaauaacau

SEQ ID NO: 1339697 - RNA, 19 nt, Human
uaugaucagacgauuacca

SEQ ID NO: 1339698 - RNA, 20 nt, Human
uaugaucagacgauuaccac

SEQ ID NO: 1339699 - RNA, 22 nt, Human
uauucaauuccacacugacucc

SEQ ID NO: 1339700 - RNA, 20 nt, Human
ucaaaagcuucuucaguaga

SEQ ID NO: 1339701 - RNA, 18 nt, Human
ucaguuuauccaaaaucu

SEQ ID NO: 1339702 - RNA, 27 nt, Human
ucauugggugguuuucucaaguguggg

SEQ ID NO: 1339703 - RNA, 23 nt, Human
uccacacaacagaauuauaauga

SEQ ID NO: 1339704 - RNA, 19 nt, Human
uccagaaauaaggaaaugg

SEQ ID NO: 1339705 - RNA, 22 nt, Human
uccagaaauaaggaaauggaau

SEQ ID NO: 1339706 - RNA, 22 nt, Human
ucccaacccacauccucacccc

SEQ ID NO: 1339707 - RNA, 20 nt, Human
uccucugcucugaugguuaa

SEQ ID NO: 1339708 - RNA, 23 nt, Human
ucucaaguguggguuuuagaaaa

SEQ ID NO: 1339709 - RNA, 22 nt, Human
ucuugcuguguccuuaggaaaa

SEQ ID NO: 1339710 - RNA, 24 nt, Human
ugaaaugggugguuuauaugauca

SEQ ID NO: 1339711 - RNA, 22 nt, Human
ugaauugaccaaguaaugcacc

SEQ ID NO: 1339712 - RNA, 21 nt, Human
ugagaaaaagacugcaagaaa

SEQ ID NO: 1339713 - RNA, 18 nt, Human
ugagauuacaagcaaaaa

SEQ ID NO: 1339714 - RNA, 19 nt, Human
ugagauuacaagcaaaaac

SEQ ID NO: 1339715 - RNA, 18 nt, Human
uggcaagcaggaaauugg

SEQ ID NO: 1339716 - RNA, 24 nt, Human
ugggaggacugaguuuaaacagua

SEQ ID NO: 1339717 - RNA, 23 nt, Human
ugguuugggcagaggucuagaga

SEQ ID NO: 1339718 - RNA, 23 nt, Human
uguauagauaacaaaauugggua

SEQ ID NO: 1339719 - RNA, 20 nt, Human
ugucccaacccacauccuca

SEQ ID NO: 1339720 - RNA, 21 nt, Human
ugucccaacccacauccucac

SEQ ID NO: 1339721 - RNA, 21 nt, Human
uguggguuuuagaaaauaucc

SEQ ID NO: 1339722 - RNA, 25 nt, Human
uguggguuuuagaaaauauccuuaa

SEQ ID NO: 1339723 - RNA, 26 nt, Human
uuacaagcaaaaacaaauauuaaaaa

SEQ ID NO: 1339724 - RNA, 19 nt, Human
uuagcccuuaaaauaaaaa

SEQ ID NO: 1339725 - RNA, 27 nt, Human
uuaucaggcacccucuuauuuccaucc

SEQ ID NO: 1339726 - RNA, 21 nt, Human
uucaagaaaguuuagugacuc

SEQ ID NO: 1339727 - RNA, 19 nt, Human
uuccacacugacuccauuu

SEQ ID NO: 1339728 - RNA, 19 nt, Human
uuccaguuggacaguugcc

SEQ ID NO: 1339729 - RNA, 20 nt, Human
uuccuuaacuuucauacauu

SEQ ID NO: 1339730 - RNA, 19 nt, Human
uucuucaguagaauccuga

SEQ ID NO: 1339731 - RNA, 21 nt, Human
uuucacacaaccuuuucaaga

SEQ ID NO: 1339732 - RNA, 20 nt, Human
uuucugcuuagcauauuuga

SEQ ID NO: 1339733 - RNA, 22 nt, Human
aaaccaaggcgagcaguggaaa

SEQ ID NO: 1339734 - RNA, 20 nt, Human
aacauguggcacucagcccc

SEQ ID NO: 1339735 - RNA, 19 nt, Human
acacagcccuggacccccc

SEQ ID NO: 1339736 - RNA, 21 nt, Human
acccaaacuaccccgagcccu

SEQ ID NO: 1339737 - RNA, 27 nt, Human
acccagaaagacacacucacacagccc

SEQ ID NO: 1339738 - RNA, 19 nt, Human
acgguggcaauggggugac

SEQ ID NO: 1339739 - RNA, 22 nt, Human
acugcuggagggacaguccuug

SEQ ID NO: 1339740 - RNA, 23 nt, Human
acuguggggcucagggugggagg

SEQ ID NO: 1339741 - RNA, 19 nt, Human
agaggggauggaccccagg

SEQ ID NO: 1339742 - RNA, 20 nt, Human
agcaggggugggcccugagg

SEQ ID NO: 1339743 - RNA, 20 nt, Human
agcaggggugggcccugagg

SEQ ID NO: 1339744 - RNA, 19 nt, Human
agcaggugagaggcccccc

SEQ ID NO: 1339745 - RNA, 23 nt, Human
agcugggccuccuuccucuuuuc

SEQ ID NO: 1339746 - RNA, 19 nt, Human
aggcgagcaguggaaacac

SEQ ID NO: 1339747 - RNA, 22 nt, Human
agggagcaaggucauaggagca

SEQ ID NO: 1339748 - RNA, 25 nt, Human
agggagcaaggucauaggagcagga

SEQ ID NO: 1339749 - RNA, 22 nt, Human
aggggcagaggagaggggccca

SEQ ID NO: 1339750 - RNA, 22 nt, Human
aguccccaccuccuuggguggc

SEQ ID NO: 1339751 - RNA, 20 nt, Human
caaaccaaggcgagcagugg

SEQ ID NO: 1339752 - RNA, 24 nt, Human
caaugggcacccucuucccaagga

SEQ ID NO: 1339753 - RNA, 26 nt, Human
cacagcugggccuccuuccucuuuuc

SEQ ID NO: 1339754 - RNA, 21 nt, Human
cacccaggguccccaacgucc

SEQ ID NO: 1339755 - RNA, 18 nt, Human
cacccucuucccaaggaa

SEQ ID NO: 1339756 - RNA, 25 nt, Human
caccuggaggccccacccagggucc

SEQ ID NO: 1339757 - RNA, 23 nt, Human
cacguuuuuugucuucacggccu

SEQ ID NO: 1339758 - RNA, 20 nt, Human
cacuggguggguggggcagg

SEQ ID NO: 1339759 - RNA, 20 nt, Human
cagaagccucuguccgggaa

SEQ ID NO: 1339760 - RNA, 20 nt, Human
cagcccaggggcacgguggc

SEQ ID NO: 1339761 - RNA, 20 nt, Human
cagcccuggaccccccuuuu

SEQ ID NO: 1339762 - RNA, 20 nt, Human
cagccugcggggguggaggg

SEQ ID NO: 1339763 - RNA, 18 nt, Human
cagcggaacagcggugga

SEQ ID NO: 1339764 - RNA, 22 nt, Human
cagcggaacagcgguggaggcc

SEQ ID NO: 1339765 - RNA, 21 nt, Human
cagcucuggccuggccauccu

SEQ ID NO: 1339766 - RNA, 19 nt, Human
caggauggggacccugggc

SEQ ID NO: 1339767 - RNA, 20 nt, Human
caggauggggacccugggca

SEQ ID NO: 1339768 - RNA, 20 nt, Human
caguggcucagcuuugggcc

SEQ ID NO: 1339769 - RNA, 18 nt, Human
ccaaugggcacccucuuc

SEQ ID NO: 1339770 - RNA, 22 nt, Human
ccacugggcaggcaccggaaau

SEQ ID NO: 1339771 - RNA, 24 nt, Human
ccagaggucuucuucuugggccgg

SEQ ID NO: 1339772 - RNA, 18 nt, Human
ccaggguccccaacgucc

SEQ ID NO: 1339773 - RNA, 24 nt, Human
cccaaaccaaggcgagcaguggaa

SEQ ID NO: 1339774 - RNA, 23 nt, Human
cccacagcugggccuccuuccuc

SEQ ID NO: 1339775 - RNA, 18 nt, Human
ccccacccagggucccca

SEQ ID NO: 1339776 - RNA, 22 nt, Human
ccccaggggcagaggagagggg

SEQ ID NO: 1339777 - RNA, 21 nt, Human
ccccaugugccuucaggcccg

SEQ ID NO: 1339778 - RNA, 21 nt, Human
ccccccagauccccguucucu

SEQ ID NO: 1339779 - RNA, 21 nt, Human
cccccgccagaggucuucuuc

SEQ ID NO: 1339780 - RNA, 19 nt, Human
cccccucccugcucccaaa

SEQ ID NO: 1339781 - RNA, 24 nt, Human
cccccucccugcucccaaaccaag

SEQ ID NO: 1339782 - RNA, 23 nt, Human
ccccgccagaggucuucuucuug

SEQ ID NO: 1339783 - RNA, 21 nt, Human
ccccguucucucaugggcugg

SEQ ID NO: 1339784 - RNA, 19 nt, Human
cccgagcccuagacccaga

SEQ ID NO: 1339785 - RNA, 19 nt, Human
cccgagcccuagacccaga

SEQ ID NO: 1339786 - RNA, 21 nt, Human
cccgagcccuagacccagaaa

SEQ ID NO: 1339787 - RNA, 22 nt, Human
cccuagacccagaaagacacac

SEQ ID NO: 1339788 - RNA, 25 nt, Human
cccugggcaagaggggauggacccc

SEQ ID NO: 1339789 - RNA, 20 nt, Human
ccgccagaggucuucuucuu

SEQ ID NO: 1339790 - RNA, 22 nt, Human
ccggaaauggccaucugcgggg

SEQ ID NO: 1339791 - RNA, 18 nt, Human
ccucagaagccucugucc

SEQ ID NO: 1339792 - RNA, 18 nt, Human
ccuccuuccucuuuucca

SEQ ID NO: 1339793 - RNA, 22 nt, Human
ccugagacaccuaggcuacugg

SEQ ID NO: 1339794 - RNA, 22 nt, Human
ccuguaccagacagagcagggg

SEQ ID NO: 1339795 - RNA, 21 nt, Human
cgagcccuagacccagaaaga

SEQ ID NO: 1339796 - RNA, 21 nt, Human
cgggagccccgcggcuccugc

SEQ ID NO: 1339797 - RNA, 21 nt, Human
cggggcugcagcggaacagcg

SEQ ID NO: 1339798 - RNA, 28 nt, Human
cggguuugugcuggaccuuagacucagg

SEQ ID NO: 1339799 - RNA, 22 nt, Human
cuagacccagaaagacacacuc

SEQ ID NO: 1339800 - RNA, 23 nt, Human
cuagacccagaaagacacacuca

SEQ ID NO: 1339801 - RNA, 19 nt, Human
cugaagccguggcagaagc

SEQ ID NO: 1339802 - RNA, 20 nt, Human
cugaggcuucauccuugcuc

SEQ ID NO: 1339803 - RNA, 25 nt, Human
cugaggcuucauccuugcucugcaa

SEQ ID NO: 1339804 - RNA, 21 nt, Human
cugcagccugcggggguggag

SEQ ID NO: 1339805 - RNA, 22 nt, Human
cugcggggcccaggggccugag

SEQ ID NO: 1339806 - RNA, 21 nt, Human
cuggguccucugaggcucaga

SEQ ID NO: 1339807 - RNA, 21 nt, Human
cuguggggcucagggugggag

SEQ ID NO: 1339808 - RNA, 23 nt, Human
cuucccaaggaaccgggagcccc

SEQ ID NO: 1339809 - RNA, 22 nt, Human
cuuugggcgcuuuuuugauggg

SEQ ID NO: 1339810 - RNA, 23 nt, Human
gacuguggggcucagggugggag

SEQ ID NO: 1339811 - RNA, 19 nt, Human
gagaggggcccacucagca

SEQ ID NO: 1339812 - RNA, 20 nt, Human
gaggcuggguucugccaggg

SEQ ID NO: 1339813 - RNA, 23 nt, Human
gcacuggguggguggggcaggac

SEQ ID NO: 1339814 - RNA, 18 nt, Human
gcagcggaacagcggugg

SEQ ID NO: 1339815 - RNA, 18 nt, Human
gcccuggaccccccuuuu

SEQ ID NO: 1339816 - RNA, 19 nt, Human
gccgggucuucagugucuu

SEQ ID NO: 1339817 - RNA, 21 nt, Human
gcggaacagcgguggaggccg

SEQ ID NO: 1339818 - RNA, 20 nt, Human
gcuaugggcuucagcaaggc

SEQ ID NO: 1339819 - RNA, 21 nt, Human
gcuccugcauuucucuuucuc

SEQ ID NO: 1339820 - RNA, 19 nt, Human
ggacuucccccucccugcu

SEQ ID NO: 1339821 - RNA, 24 nt, Human
ggcaagaggggauggaccccaggg

SEQ ID NO: 1339822 - RNA, 24 nt, Human
ggcaauggggugaccuaaaaggga

SEQ ID NO: 1339823 - RNA, 19 nt, Human
ggcacucagccccacccaa

SEQ ID NO: 1339824 - RNA, 22 nt, Human
ggcccaggggccugagacaccu

SEQ ID NO: 1339825 - RNA, 18 nt, Human
ggcucagcuuugggcgcu

SEQ ID NO: 1339826 - RNA, 18 nt, Human
gggacccugggcaagagg

SEQ ID NO: 1339827 - RNA, 22 nt, Human
gggccuguaccagacagagcag

SEQ ID NO: 1339828 - RNA, 18 nt, Human
ggggauggaccccagggg

SEQ ID NO: 1339829 - RNA, 18 nt, Human
ggguccucugaggcucag

SEQ ID NO: 1339830 - RNA, 23 nt, Human
gggugggcccugaggagcacggg

SEQ ID NO: 1339831 - RNA, 20 nt, Human
ggucauaggagcaggugaga

SEQ ID NO: 1339832 - RNA, 24 nt, Human
gguggguggggcagggcggggcug

SEQ ID NO: 1339833 - RNA, 26 nt, Human
guccacccucuacccucaacccccac

SEQ ID NO: 1339834 - RNA, 19 nt, Human
guggcacucagccccaccc

SEQ ID NO: 1339835 - RNA, 24 nt, Human
gugggcccugaggagcacgggagu

SEQ ID NO: 1339836 - RNA, 21 nt, Human
guggguggggcagggcggggc

SEQ ID NO: 1339837 - RNA, 22 nt, Human
guuugugcuggaccuuagacuc

SEQ ID NO: 1339838 - RNA, 21 nt, Human
uacagggugccaaagaugagc

SEQ ID NO: 1339839 - RNA, 23 nt, Human
uacagggugccaaagaugagcac

SEQ ID NO: 1339840 - RNA, 19 nt, Human
uacccucaacccccacagc

SEQ ID NO: 1339841 - RNA, 26 nt, Human
uacccucaacccccacagcugggccu

SEQ ID NO: 1339842 - RNA, 21 nt, Human
uacuggcacaguguggagcag

SEQ ID NO: 1339843 - RNA, 20 nt, Human
uagacccagaaagacacacu

SEQ ID NO: 1339844 - RNA, 18 nt, Human
ucaacccccacagcuggg

SEQ ID NO: 1339845 - RNA, 20 nt, Human
ucagagccuaggauggaggg

SEQ ID NO: 1339846 - RNA, 18 nt, Human
ucagcaggggccuguacc

SEQ ID NO: 1339847 - RNA, 22 nt, Human
ucagccccacccaaugaccagg

SEQ ID NO: 1339848 - RNA, 18 nt, Human
uccaagccccuuccagaa

SEQ ID NO: 1339849 - RNA, 24 nt, Human
uccacccucuacccucaaccccca

SEQ ID NO: 1339850 - RNA, 18 nt, Human
uccaucugggcuaggacu

SEQ ID NO: 1339851 - RNA, 19 nt, Human
ucccaaggaaccgggagcc

SEQ ID NO: 1339852 - RNA, 20 nt, Human
uccugcauuucucuuucucc

SEQ ID NO: 1339853 - RNA, 24 nt, Human
uccugcauuucucuuucuccuuca

SEQ ID NO: 1339854 - RNA, 26 nt, Human
uccuuggguggcucaguccucagccu

SEQ ID NO: 1339855 - RNA, 21 nt, Human
ucugccggguuugugcuggac

SEQ ID NO: 1339856 - RNA, 23 nt, Human
ucugcuugguacaggauggggac

SEQ ID NO: 1339857 - RNA, 23 nt, Human
ucugggcuaggacuucccccucc

SEQ ID NO: 1339858 - RNA, 23 nt, Human
ugacugaagccguggcagaagcu

SEQ ID NO: 1339859 - RNA, 20 nt, Human
ugagacaccuaggcuacugg

SEQ ID NO: 1339860 - RNA, 18 nt, Human
ugccaaagguccaauggg

SEQ ID NO: 1339861 - RNA, 24 nt, Human
ugccuucaggcccguccuuggucc

SEQ ID NO: 1339862 - RNA, 20 nt, Human
ugcuaugggcuucagcaagg

SEQ ID NO: 1339863 - RNA, 22 nt, Human
uggagggacaguccuugaccca

SEQ ID NO: 1339864 - RNA, 21 nt, Human
uggcagaagcuggggcgggug

SEQ ID NO: 1339865 - RNA, 21 nt, Human
uggccuggccauccuggucgc

SEQ ID NO: 1339866 - RNA, 22 nt, Human
uggcucagcuuugggcgcuuuu

SEQ ID NO: 1339867 - RNA, 24 nt, Human
uggcucaguccucagccucugguc

SEQ ID NO: 1339868 - RNA, 19 nt, Human
ugggaggaggcgacugcug

SEQ ID NO: 1339869 - RNA, 23 nt, Human
ugggaggaggcgacugcuggagg

SEQ ID NO: 1339870 - RNA, 18 nt, Human
uggguggggcagggcggg

SEQ ID NO: 1339871 - RNA, 24 nt, Human
uggguggguggggcagggcggggc

SEQ ID NO: 1339872 - RNA, 22 nt, Human
uguggagcaggggcugggucug

SEQ ID NO: 1339873 - RNA, 18 nt, Human
uguggggcucaggguggg

SEQ ID NO: 1339874 - RNA, 19 nt, Human
uucccccaugugccuucag

SEQ ID NO: 1339875 - RNA, 24 nt, Human
uugacccaaacuaccccgagcccu

SEQ ID NO: 1339876 - RNA, 28 nt, Human
uuuccaagccccuuccagaagaguggcc

SEQ ID NO: 1339877 - RNA, 25 nt, Human
aaaaaaaaaaaacugggcaagagaa

SEQ ID NO: 1339878 - RNA, 22 nt, Human
aaaaaaaaacugggcaagagaa

SEQ ID NO: 1339879 - RNA, 23 nt, Human
aaaaucugcauuuuguagauuuc

SEQ ID NO: 1339880 - RNA, 23 nt, Human
aaagcagaacaaauaucugcaaa

SEQ ID NO: 1339881 - RNA, 25 nt, Human
aaagcagaacaaauaucugcaaacc

SEQ ID NO: 1339882 - RNA, 28 nt, Human
aacaauaaaagccaaccccacuggagaa

SEQ ID NO: 1339883 - RNA, 25 nt, Human
aacugggcaagagaagaggaaauca

SEQ ID NO: 1339884 - RNA, 20 nt, Human
aagaaacaauaaaagccaac

SEQ ID NO: 1339885 - RNA, 24 nt, Human
aaguguuggugguucccagaaacc

SEQ ID NO: 1339886 - RNA, 20 nt, Human
acaaagcagaacaaauaucu

SEQ ID NO: 1339887 - RNA, 21 nt, Human
acacauuaacucacuuugccc

SEQ ID NO: 1339888 - RNA, 22 nt, Human
acccugaagugaugguggaaau

SEQ ID NO: 1339889 - RNA, 20 nt, Human
acggaacccaggacuuagcu

SEQ ID NO: 1339890 - RNA, 20 nt, Human
acuaccagcuccgcccaggu

SEQ ID NO: 1339891 - RNA, 24 nt, Human
agaaggcccccaaccccucggucc

SEQ ID NO: 1339892 - RNA, 20 nt, Human
agaguaaaaagagaggggga

SEQ ID NO: 1339893 - RNA, 21 nt, Human
agcagaacaaauaucugcaaa

SEQ ID NO: 1339894 - RNA, 20 nt, Human
agcagagggcccauaggcag

SEQ ID NO: 1339895 - RNA, 21 nt, Human
aggaaguuccuggaaccuaaa

SEQ ID NO: 1339896 - RNA, 23 nt, Human
aggaggcugcaggaggggagggg

SEQ ID NO: 1339897 - RNA, 26 nt, Human
aggcccccaaccccucgguccuccac

SEQ ID NO: 1339898 - RNA, 23 nt, Human
aggccuggcuucaagaaccagga

SEQ ID NO: 1339899 - RNA, 19 nt, Human
aggcuuuaaaaaaaaaaaa

SEQ ID NO: 1339900 - RNA, 21 nt, Human
agggaggaggcugccacagug

SEQ ID NO: 1339901 - RNA, 22 nt, Human
agggggaaaaaagaaaaucugg

SEQ ID NO: 1339902 - RNA, 23 nt, Human
agucaacccugggaaaaagcuaa

SEQ ID NO: 1339903 - RNA, 20 nt, Human
agugaagcagaaaagcuaca

SEQ ID NO: 1339904 - RNA, 21 nt, Human
auaaaagccaaccccacugga

SEQ ID NO: 1339905 - RNA, 26 nt, Human
aucccugcaaaacaaacuccagaaaa

SEQ ID NO: 1339906 - RNA, 23 nt, Human
caaaagaagggccccaaugucau

SEQ ID NO: 1339907 - RNA, 31 nt, Human
caaacccaaacaagaaacaauaaaagccaag

SEQ ID NO: 1339908 - RNA, 19 nt, Human
caaagcgacgggacugacc

SEQ ID NO: 1339909 - RNA, 23 nt, Human
caaccccucgguccuccacaccg

SEQ ID NO: 1339910 - RNA, 21 nt, Human
caagagaagaggaaaucagga

SEQ ID NO: 1339911 - RNA, 21 nt, Human
caauuuuuacaaagcagaaca

SEQ ID NO: 1339912 - RNA, 26 nt, Human
cacuaauggccaauuuuuacaaagcu

SEQ ID NO: 1339913 - RNA, 21 nt, Human
cacuuaugaccaagguugggu

SEQ ID NO: 1339914 - RNA, 19 nt, Human
cagcaaaagaagggcccca

SEQ ID NO: 1339915 - RNA, 22 nt, Human
cagccaggcacacuuaugacca

SEQ ID NO: 1339916 - RNA, 21 nt, Human
cagcuaucccugcaaaacaaa

SEQ ID NO: 1339917 - RNA, 18 nt, Human
caggaaguuccuggaacc

SEQ ID NO: 1339918 - RNA, 23 nt, Human
caguuucagcaaaagaagggccc

SEQ ID NO: 1339919 - RNA, 22 nt, Human
ccaaacaagaaacaauaaaagc

SEQ ID NO: 1339920 - RNA, 25 nt, Human
ccaaccccacuggagaggagaaaau

SEQ ID NO: 1339921 - RNA, 23 nt, Human
ccacacaccauggcuuuuuccac

SEQ ID NO: 1339922 - RNA, 28 nt, Human
ccaggcuuuaaaaaaaaaaaaaaaaaaa

SEQ ID NO: 1339923 - RNA, 26 nt, Human
ccauacucccagcuaucccugcaaaa

SEQ ID NO: 1339924 - RNA, 22 nt, Human
ccauaggcagcacccugcaaaa

SEQ ID NO: 1339925 - RNA, 23 nt, Human
cccauaggcagcacccugcaaaa

SEQ ID NO: 1339926 - RNA, 20 nt, Human
ccccaaccccucgguccucc

SEQ ID NO: 1339927 - RNA, 20 nt, Human
cccccaaccccucgguccuc

SEQ ID NO: 1339928 - RNA, 24 nt, Human
ccccggccagcccgccugagauga

SEQ ID NO: 1339929 - RNA, 19 nt, Human
ccccuucccaaguccuucc

SEQ ID NO: 1339930 - RNA, 21 nt, Human
cccugggaaaaagcuaaaccu

SEQ ID NO: 1339931 - RNA, 22 nt, Human
ccguccggaugcagcugauugc

SEQ ID NO: 1339932 - RNA, 21 nt, Human
ccuggcuucaagaaccaggaa

SEQ ID NO: 1339933 - RNA, 19 nt, Human
ccuguccaccaccaccucg

SEQ ID NO: 1339934 - RNA, 25 nt, Human
ccuguccaccaccaccucggauguc

SEQ ID NO: 1339935 - RNA, 19 nt, Human
ccuucccaaguccuuccug

SEQ ID NO: 1339936 - RNA, 20 nt, Human
cgagggccccggccagcccg

SEQ ID NO: 1339937 - RNA, 21 nt, Human
cgcaucguggagcaggguggc

SEQ ID NO: 1339938 - RNA, 23 nt, Human
cggauguccccgcacacagccuu

SEQ ID NO: 1339939 - RNA, 24 nt, Human
cggccagcccgccugagaugaugu

SEQ ID NO: 1339940 - RNA, 22 nt, Human
cgugugaggagagggcaagggg

SEQ ID NO: 1339941 - RNA, 19 nt, Human
cucaaccacauuuuaaucu

SEQ ID NO: 1339942 - RNA, 23 nt, Human
gaagcaaaauguacuaccagcuc

SEQ ID NO: 1339943 - RNA, 22 nt, Human
gaagcagaaaagcuacauucug

SEQ ID NO: 1339944 - RNA, 23 nt, Human
gaaggcccccaaccccucggucc

SEQ ID NO: 1339945 - RNA, 20 nt, Human
gaggagagaugcuuuuugag

SEQ ID NO: 1339946 - RNA, 21 nt, Human
gaggagagggcaaggggcugg

SEQ ID NO: 1339947 - RNA, 18 nt, Human
gagggccccggccagccc

SEQ ID NO: 1339948 - RNA, 27 nt, Human
gcaaaauguacuaccagcuccgccccc

SEQ ID NO: 1339949 - RNA, 22 nt, Human
gcaucguggagcaggguggcca

SEQ ID NO: 1339950 - RNA, 24 nt, Human
gcccccaaccccucgguccuccac

SEQ ID NO: 1339951 - RNA, 18 nt, Human
gccugagaugauguggga

SEQ ID NO: 1339952 - RNA, 21 nt, Human
ggaaaaagcuaaaccugcaag

SEQ ID NO: 1339953 - RNA, 26 nt, Human
ggacuggaaggggauguucaugguca

SEQ ID NO: 1339954 - RNA, 19 nt, Human
ggagcagagggcccauagg

SEQ ID NO: 1339955 - RNA, 23 nt, Human
ggcaagagaagaggaaaucagga

SEQ ID NO: 1339956 - RNA, 18 nt, Human
gggauguucauggucagc

SEQ ID NO: 1339957 - RNA, 20 nt, Human
gguagaaggcccccaacccc

SEQ ID NO: 1339958 - RNA, 23 nt, Human
guccgguggggguugaccugcuc

SEQ ID NO: 1339959 - RNA, 19 nt, Human
gugaagcagaaaagcuaca

SEQ ID NO: 1339960 - RNA, 19 nt, Human
gugggucaaaucuaugucu

SEQ ID NO: 1339961 - RNA, 19 nt, Human
uaaaacccugaagugaugg

SEQ ID NO: 1339962 - RNA, 18 nt, Human
uacaaagcagaacaaaua

SEQ ID NO: 1339963 - RNA, 25 nt, Human
uacaaagcagaacaaauaucugcaa

SEQ ID NO: 1339964 - RNA, 22 nt, Human
uacgugugaggagagggcaagg

SEQ ID NO: 1339965 - RNA, 18 nt, Human
uagaaggcccccaacccc

SEQ ID NO: 1339966 - RNA, 25 nt, Human
uagcuccgguagaaggcccccaacc

SEQ ID NO: 1339967 - RNA, 21 nt, Human
uagcuuucuaagaagcaaaau

SEQ ID NO: 1339968 - RNA, 21 nt, Human
ucagggcauagcucuuuagag

SEQ ID NO: 1339969 - RNA, 26 nt, Human
uccaaacccaaacaagaaacaauaaa

SEQ ID NO: 1339970 - RNA, 18 nt, Human
ucccugcaaaacaaacuc

SEQ ID NO: 1339971 - RNA, 22 nt, Human
uccucugggaucuaaggaucca

SEQ ID NO: 1339972 - RNA, 22 nt, Human
ucugcaagcgcugcuucaccac

SEQ ID NO: 1339973 - RNA, 19 nt, Human
ucuuguagucaacccuggg

SEQ ID NO: 1339974 - RNA, 22 nt, Human
ugaauuuugucaaaauaaaagu

SEQ ID NO: 1339975 - RNA, 22 nt, Human
ugagaagggggaaaaaagaaaa

SEQ ID NO: 1339976 - RNA, 22 nt, Human
ugagaugaugugggacugcggg

SEQ ID NO: 1339977 - RNA, 19 nt, Human
ugagcagaguaaaaagaga

SEQ ID NO: 1339978 - RNA, 25 nt, Human
ugagcagaguaaaaagagaggggga

SEQ ID NO: 1339979 - RNA, 23 nt, Human
ugaggagagggcaaggggcugga

SEQ ID NO: 1339980 - RNA, 18 nt, Human
uggaaggggauguucaug

SEQ ID NO: 1339981 - RNA, 19 nt, Human
ugggaaaaagcuaaaccug

SEQ ID NO: 1339982 - RNA, 22 nt, Human
ugggaaaaagcuaaaccugcaa

SEQ ID NO: 1339983 - RNA, 24 nt, Human
ugggaaaaagcuaaaccugcaagu

SEQ ID NO: 1339984 - RNA, 21 nt, Human
ugggaucuaaggauccaggga

SEQ ID NO: 1339985 - RNA, 22 nt, Human
ugggaucuaaggauccagggag

SEQ ID NO: 1339986 - RNA, 21 nt, Human
ugggucaaaucuaugucucca

SEQ ID NO: 1339987 - RNA, 20 nt, Human
uuaaaaaaaaaaaaaaaaaa

SEQ ID NO: 1339988 - RNA, 19 nt, Human
uuaaucuugcaaaaacaug

SEQ ID NO: 1339989 - RNA, 20 nt, Human
uuaaucuugcaaaaacaugg

SEQ ID NO: 1339990 - RNA, 21 nt, Human
uuccaaacccaaacaagaaac

SEQ ID NO: 1339991 - RNA, 18 nt, Human
uuccagggucagucugca

SEQ ID NO: 1339992 - RNA, 18 nt, Human
uucccagaaaccacacac

SEQ ID NO: 1339993 - RNA, 20 nt, Human
uugcaaaaacaugguuuucu

SEQ ID NO: 1339994 - RNA, 24 nt, Human
uuuucagucacugcaaauuuucuu

SEQ ID NO: 1339995 - RNA, 24 nt, Human
uuuuuuuuuuuuuuuuacuguuuu

SEQ ID NO: 1339996 - RNA, 19 nt, Human
aaaagccuguuaguccuac

SEQ ID NO: 1339997 - RNA, 21 nt, Human
aaaauaaaaagcacauaucuu

SEQ ID NO: 1339998 - RNA, 22 nt, Human
aaacacaauccaacaaaauucu

SEQ ID NO: 1339999 - RNA, 24 nt, Human
aaauaaaaagcacauaucuuuaau

SEQ ID NO: 1340000 - RNA, 18 nt, Human
aacacccuagccagaaga

SEQ ID NO: 1340001 - RNA, 22 nt, Human
aagauaauccaaagcucaacug

SEQ ID NO: 1340002 - RNA, 23 nt, Human
aagcaaaugaacucaucugcaaa

SEQ ID NO: 1340003 - RNA, 20 nt, Human
aauaucugggcaguaaccau

SEQ ID NO: 1340004 - RNA, 23 nt, Human
acaaaaccaaaaaugcauaaaua

SEQ ID NO: 1340005 - RNA, 29 nt, Human
accaaaaaugcauaaauauaucuaacacc

SEQ ID NO: 1340006 - RNA, 20 nt, Human
accaggcugcccaacagcaa

SEQ ID NO: 1340007 - RNA, 23 nt, Human
agagaagaaaaggaucuuaaaaa

SEQ ID NO: 1340008 - RNA, 18 nt, Human
agaggacacaggccggag

SEQ ID NO: 1340009 - RNA, 20 nt, Human
agcaacagaaaaacgucaag

SEQ ID NO: 1340010 - RNA, 23 nt, Human
agcggagcacagcgccaggugcg

SEQ ID NO: 1340011 - RNA, 23 nt, Human
aggauuccagucuccaaacuuuu

SEQ ID NO: 1340012 - RNA, 20 nt, Human
auaaacaaauauuucucaag

SEQ ID NO: 1340013 - RNA, 22 nt, Human
auacaaauuggaccaaaauaga

SEQ ID NO: 1340014 - RNA, 18 nt, Human
augguaaaaaaaaaaaaa

SEQ ID NO: 1340015 - RNA, 18 nt, Human
auucuugacucucuuucu

SEQ ID NO: 1340016 - RNA, 21 nt, Human
auuugaggcuuaauauugucc

SEQ ID NO: 1340017 - RNA, 22 nt, Human
caacaaaauucuugacucucuu

SEQ ID NO: 1340018 - RNA, 22 nt, Human
cacagcgccaggugcgcccccc

SEQ ID NO: 1340019 - RNA, 24 nt, Human
caccagcaaacgggcuccgcuccu

SEQ ID NO: 1340020 - RNA, 19 nt, Human
caccuugguaagacaggau

SEQ ID NO: 1340021 - RNA, 21 nt, Human
cagcaaacgggcuccgcuccu

SEQ ID NO: 1340022 - RNA, 18 nt, Human
cagcaauaacagacguaa

SEQ ID NO: 1340023 - RNA, 22 nt, Human
caggggcuagggccacagcgga

SEQ ID NO: 1340024 - RNA, 20 nt, Human
caguaaccauuaaaucaaau

SEQ ID NO: 1340025 - RNA, 21 nt, Human
cauagcaugauguuagagaaa

SEQ ID NO: 1340026 - RNA, 19 nt, Human
cauuauagcuacuugguua

SEQ ID NO: 1340027 - RNA, 24 nt, Human
ccacuagauacaaauuggaccaaa

SEQ ID NO: 1340028 - RNA, 18 nt, Human
ccagcaccagcaaacggg

SEQ ID NO: 1340029 - RNA, 18 nt, Human
ccaggugcgccccccucc

SEQ ID NO: 1340030 - RNA, 21 nt, Human
ccccccuccagcaccagcaaa

SEQ ID NO: 1340031 - RNA, 27 nt, Human
cucaaaagagccaaggaguacuauaaa

SEQ ID NO: 1340032 - RNA, 22 nt, Human
cuccagcaccagcaaacgggcu

SEQ ID NO: 1340033 - RNA, 21 nt, Human
cugauuuaaaaaguguuagaa

SEQ ID NO: 1340034 - RNA, 22 nt, Human
cugcuaagguaaauuauuauau

SEQ ID NO: 1340035 - RNA, 21 nt, Human
cugggccuuucauuuaauaag

SEQ ID NO: 1340036 - RNA, 21 nt, Human
gaaaagacaggagagaaugua

SEQ ID NO: 1340037 - RNA, 18 nt, Human
gaacagucaaaacggcac

SEQ ID NO: 1340038 - RNA, 18 nt, Human
gcaacagaaaaacgucaa

SEQ ID NO: 1340039 - RNA, 20 nt, Human
gcaacagaaaaacgucaaga

SEQ ID NO: 1340040 - RNA, 21 nt, Human
gcacagcgccaggugcgcccc

SEQ ID NO: 1340041 - RNA, 18 nt, Human
gcauuugaaaugcacaga

SEQ ID NO: 1340042 - RNA, 20 nt, Human
gcuaagucccauuauagcua

SEQ ID NO: 1340043 - RNA, 19 nt, Human
ggaagguaaugguaaucua

SEQ ID NO: 1340044 - RNA, 18 nt, Human
gggaaaauugaagaggaa

SEQ ID NO: 1340045 - RNA, 18 nt, Human
guaaaaaugcaaauaugc

SEQ ID NO: 1340046 - RNA, 21 nt, Human
uaaaaacaaaaccaaaaaugc

SEQ ID NO: 1340047 - RNA, 27 nt, Human
uaaaaagcacauaucuuuaauuucuaa

SEQ ID NO: 1340048 - RNA, 22 nt, Human
uaaaaaugcaaauaugccaccu

SEQ ID NO: 1340049 - RNA, 22 nt, Human
uaaauaaaucuacaucuaggua

SEQ ID NO: 1340050 - RNA, 24 nt, Human
uaaaucuguagaagcagagggaga

SEQ ID NO: 1340051 - RNA, 21 nt, Human
uaacagacguaaccgugaaaa

SEQ ID NO: 1340052 - RNA, 19 nt, Human
uaacuggaggcaaauaaac

SEQ ID NO: 1340053 - RNA, 24 nt, Human
uaauauuguccaaauuuacuguuu

SEQ ID NO: 1340054 - RNA, 27 nt, Human
uacaaaagcaaaugaacucaucugcaa

SEQ ID NO: 1340055 - RNA, 19 nt, Human
uaccauaugugaugaucuu

SEQ ID NO: 1340056 - RNA, 24 nt, Human
uagaagcagagggagacacucggg

SEQ ID NO: 1340057 - RNA, 21 nt, Human
uagagaaaaauauaaacaaau

SEQ ID NO: 1340058 - RNA, 23 nt, Human
uauaaacaaauauuucucaagua

SEQ ID NO: 1340059 - RNA, 24 nt, Human
uauaaacauucucaaauuguauuu

SEQ ID NO: 1340060 - RNA, 19 nt, Human
uauuuugcucauauuacuc

SEQ ID NO: 1340061 - RNA, 23 nt, Human
ucaaaugaucucucucuccuugg

SEQ ID NO: 1340062 - RNA, 24 nt, Human
ucaaaugaucucucucuccuuggu

SEQ ID NO: 1340063 - RNA, 22 nt, Human
ucauuguuucaauaagacaaaa

SEQ ID NO: 1340064 - RNA, 21 nt, Human
uccagcaccagcaaacgggcu

SEQ ID NO: 1340065 - RNA, 23 nt, Human
ucuacaaaagcaaaugaacucau

SEQ ID NO: 1340066 - RNA, 22 nt, Human
ucucuccuugguccaucuucuc

SEQ ID NO: 1340067 - RNA, 18 nt, Human
ucuguugucagauguuca

SEQ ID NO: 1340068 - RNA, 21 nt, Human
ugaaaacacaucuacaaaagc

SEQ ID NO: 1340069 - RNA, 22 nt, Human
ugaaaacacaucuacaaaagca

SEQ ID NO: 1340070 - RNA, 22 nt, Human
ugaaaagacaggagagaaugua

SEQ ID NO: 1340071 - RNA, 22 nt, Human
ugaaauuucuguugucagaugu

SEQ ID NO: 1340072 - RNA, 25 nt, Human
ugaauaaaaccacagcauaaucgga

SEQ ID NO: 1340073 - RNA, 18 nt, Human
ugagaagcccacaggggc

SEQ ID NO: 1340074 - RNA, 28 nt, Human
ugauuuaaaaaguguuagaaggagaaaa

SEQ ID NO: 1340075 - RNA, 20 nt, Human
uggagacucaaaagagccaa

SEQ ID NO: 1340076 - RNA, 26 nt, Human
ugguaaaaaaaaaaaaauguuuuaag

SEQ ID NO: 1340077 - RNA, 21 nt, Human
uggucagaacagucaaaacgg

SEQ ID NO: 1340078 - RNA, 24 nt, Human
uggucagaacagucaaaacggcac

SEQ ID NO: 1340079 - RNA, 21 nt, Human
uguaagccucaguguuccaau

SEQ ID NO: 1340080 - RNA, 22 nt, Human
ugugaauaaaaccacagcauaa

SEQ ID NO: 1340081 - RNA, 23 nt, Human
uuagaucuauagauuuuuuuuuu

SEQ ID NO: 1340082 - RNA, 22 nt, Human
uuaguucuagucaugaggaaaa

SEQ ID NO: 1340083 - RNA, 20 nt, Human
uucaggaaaugaaaagucac

SEQ ID NO: 1340084 - RNA, 21 nt, Human
uugaccagaacaaagaaaaug

SEQ ID NO: 1340085 - RNA, 22 nt, Human
uugcaaauaaaccagcauuucu

SEQ ID NO: 1340086 - RNA, 21 nt, Human
uuuaagcaguaaaaaugcaaa

SEQ ID NO: 1340087 - RNA, 21 nt, Human
uuucaggaaaugaaaagucac

SEQ ID NO: 1340088 - RNA, 22 nt, Human
aggaaggaacaggcccagagga

SEQ ID NO: 1340089 - RNA, 26 nt, Human
aggaaggaacaggcccagaggaucua

SEQ ID NO: 1340090 - RNA, 22 nt, Human
caaaacagguccuccucuaagc

SEQ ID NO: 1340091 - RNA, 22 nt, Human
cauuuuuauuguuauuaugcau

SEQ ID NO: 1340092 - RNA, 26 nt, Human
ccauucauuuuuguaucuugaguuuu

SEQ ID NO: 1340093 - RNA, 22 nt, Human
ggacguuuaaagaaaaggaagg

SEQ ID NO: 1340094 - RNA, 20 nt, Human
aaaccaagcucucaccuauu

SEQ ID NO: 1340095 - RNA, 22 nt, Human
aaauaaccucccaacagaaaau

SEQ ID NO: 1340096 - RNA, 18 nt, Human
aaauacccaacucaaaac

SEQ ID NO: 1340097 - RNA, 19 nt, Human
aacuacugucccccgcccc

SEQ ID NO: 1340098 - RNA, 30 nt, Human
aauaaccucccaacagaaaauauuuccacu

SEQ ID NO: 1340099 - RNA, 21 nt, Human
acacuauauguucaaaaaaug

SEQ ID NO: 1340100 - RNA, 18 nt, Human
acagagaaaaaccaauga

SEQ ID NO: 1340101 - RNA, 25 nt, Human
acagagaaaaaccaaugaacauaaa

SEQ ID NO: 1340102 - RNA, 19 nt, Human
acucaguuuuucagcauga

SEQ ID NO: 1340103 - RNA, 21 nt, Human
aggcaggggcgggcgucuaca

SEQ ID NO: 1340104 - RNA, 24 nt, Human
auuuuuucaauuuaacuuugggag

SEQ ID NO: 1340105 - RNA, 21 nt, Human
caaacccaaucaagaaacaga

SEQ ID NO: 1340106 - RNA, 19 nt, Human
caacuacugucccccgccc

SEQ ID NO: 1340107 - RNA, 21 nt, Human
caacuacugucccccgccccg

SEQ ID NO: 1340108 - RNA, 24 nt, Human
cacaauaacuggugagcuaaaaac

SEQ ID NO: 1340109 - RNA, 24 nt, Human
ccaacucaaaacuauaacaaaccc

SEQ ID NO: 1340110 - RNA, 19 nt, Human
cccccgccccgccaacgcc

SEQ ID NO: 1340111 - RNA, 18 nt, Human
cuacugucccccgccccg

SEQ ID NO: 1340112 - RNA, 19 nt, Human
gagaaaaaccaaugaacau

SEQ ID NO: 1340113 - RNA, 19 nt, Human
gcaggggcgggcgucuaca

SEQ ID NO: 1340114 - RNA, 19 nt, Human
ggagguggcggagaggcag

SEQ ID NO: 1340115 - RNA, 24 nt, Human
uaaaaaccacaauucagagaucaa

SEQ ID NO: 1340116 - RNA, 26 nt, Human
uaaaauacccaacucaaaacuauaag

SEQ ID NO: 1340117 - RNA, 24 nt, Human
uaaauaaccucccaacagaaaaua

SEQ ID NO: 1340118 - RNA, 22 nt, Human
uacacaauaacuggugagcuaa

SEQ ID NO: 1340119 - RNA, 20 nt, Human
uagaaacuuuauguaaccua

SEQ ID NO: 1340120 - RNA, 19 nt, Human
uagaaguuaaagaaccuau

SEQ ID NO: 1340121 - RNA, 23 nt, Human
ucaaaacuauaacaaacccaauc

SEQ ID NO: 1340122 - RNA, 18 nt, Human
ucacauaagaaaaguggu

SEQ ID NO: 1340123 - RNA, 26 nt, Human
uccaccaucaaagcaauuugaugaau

SEQ ID NO: 1340124 - RNA, 23 nt, Human
ucuacaacuacugucccccgccc

SEQ ID NO: 1340125 - RNA, 20 nt, Human
ucucauaaugcaaaauccuu

SEQ ID NO: 1340126 - RNA, 19 nt, Human
ucucugaggcaggggcggg

SEQ ID NO: 1340127 - RNA, 19 nt, Human
uggagguggcggagaggca

SEQ ID NO: 1340128 - RNA, 20 nt, Human
uggagguggcggagaggcag

SEQ ID NO: 1340129 - RNA, 18 nt, Human
uguaaacaaaguucaguc

SEQ ID NO: 1340130 - RNA, 23 nt, Human
uuagaucuaauaaaggagaaaaa

SEQ ID NO: 1340131 - RNA, 18 nt, Human
uucacagagaaaaaccaa

SEQ ID NO: 1340132 - RNA, 27 nt, Human
uuguccaauucuccacucucacucauc

SEQ ID NO: 1340133 - RNA, 23 nt, Human
uuuaaaauaaauaaccucccaac

SEQ ID NO: 1340134 - RNA, 20 nt, Human
uuuguuuacuaggccuuugu

SEQ ID NO: 1340135 - RNA, 24 nt, Human
aaaaauuugauuuuuuucaugcca

SEQ ID NO: 1340136 - RNA, 22 nt, Human
aaacaagguuccgagcaggaaa

SEQ ID NO: 1340137 - RNA, 20 nt, Human
aaagauggugaagaacucaa

SEQ ID NO: 1340138 - RNA, 22 nt, Human
aagaggugucugcugaauuuug

SEQ ID NO: 1340139 - RNA, 22 nt, Human
agccaggaaauucgaauucgau

SEQ ID NO: 1340140 - RNA, 21 nt, Human
augaaagcaaggagaaacuaa

SEQ ID NO: 1340141 - RNA, 18 nt, Human
ggccugggagagaaucuc

SEQ ID NO: 1340142 - RNA, 18 nt, Human
guaaaauauuucauuugg

SEQ ID NO: 1340143 - RNA, 20 nt, Human
gugcagggccuuaaaagcag

SEQ ID NO: 1340144 - RNA, 22 nt, Human
uagcuaaguucagggacaacau

SEQ ID NO: 1340145 - RNA, 21 nt, Human
ucagggacaacauucauuuau

SEQ ID NO: 1340146 - RNA, 22 nt, Human
ucaguugcaaaagauggugaag

SEQ ID NO: 1340147 - RNA, 22 nt, Human
ugcaaaagauggugaagaacuc

SEQ ID NO: 1340148 - RNA, 19 nt, Human
uggugaagaacucaagcug

SEQ ID NO: 1340149 - RNA, 23 nt, Human
uucagggacaacauucauuuaua

SEQ ID NO: 1340150 - RNA, 24 nt, Human
agcagcuucaagaaccagcuguag

SEQ ID NO: 1340151 - RNA, 24 nt, Human
cagcuucaagaaccagcuguaguc

SEQ ID NO: 1340152 - RNA, 20 nt, Human
cucacaccucccguugacgu

SEQ ID NO: 1340153 - RNA, 20 nt, Human
cuucaagaaccagcuguagg

SEQ ID NO: 1340154 - RNA, 22 nt, Human
gaucagggcgccgccggcgucc

SEQ ID NO: 1340155 - RNA, 21 nt, Human
gcuguagucuggcuuuggccu

SEQ ID NO: 1340156 - RNA, 22 nt, Human
ugcagcagcuucaagaaccagc

SEQ ID NO: 1340157 - RNA, 22 nt, Human
aaaccuguuuugucaaaacugg

SEQ ID NO: 1340158 - RNA, 27 nt, Human
aaauaaaucuuuccuugugauuggaaa

SEQ ID NO: 1340159 - RNA, 24 nt, Human
aacucuucaaguggaaauaaaaaa

SEQ ID NO: 1340160 - RNA, 18 nt, Human
aaggauacucccaaagcc

SEQ ID NO: 1340161 - RNA, 24 nt, Human
aauauggauugaacauaaaauguu

SEQ ID NO: 1340162 - RNA, 21 nt, Human
aauuacuaaaaaauaaaaaua

SEQ ID NO: 1340163 - RNA, 24 nt, Human
agaaaaacccacuaguauaauguu

SEQ ID NO: 1340164 - RNA, 18 nt, Human
agaaggauacucccaaag

SEQ ID NO: 1340165 - RNA, 24 nt, Human
auauaguauuuauguauauauaua

SEQ ID NO: 1340166 - RNA, 20 nt, Human
auuuugaucuauagucuaaa

SEQ ID NO: 1340167 - RNA, 21 nt, Human
caaugccagcacagauuuggg

SEQ ID NO: 1340168 - RNA, 22 nt, Human
cacuuuuucauaggcucacaca

SEQ ID NO: 1340169 - RNA, 24 nt, Human
cagccuuuuauaaguuuacuaaca

SEQ ID NO: 1340170 - RNA, 22 nt, Human
caguacacgcaccuaauauaug

SEQ ID NO: 1340171 - RNA, 23 nt, Human
cauauacauaacaaaagagugua

SEQ ID NO: 1340172 - RNA, 22 nt, Human
caugccuuuacgaguccauaua

SEQ ID NO: 1340173 - RNA, 23 nt, Human
cauuauaccgagaaaaaagcucu

SEQ ID NO: 1340174 - RNA, 25 nt, Human
ccccuaaauuacuaaaaaauaaaaa

SEQ ID NO: 1340175 - RNA, 18 nt, Human
cccuaaauuacuaaaaaa

SEQ ID NO: 1340176 - RNA, 21 nt, Human
ccuuucucccuccucccuccc

SEQ ID NO: 1340177 - RNA, 22 nt, Human
cucacacaaccuaugauuaucu

SEQ ID NO: 1340178 - RNA, 22 nt, Human
cucccaaagccacgagaauggg

SEQ ID NO: 1340179 - RNA, 23 nt, Human
cuugacacucugggcgagaugaa

SEQ ID NO: 1340180 - RNA, 23 nt, Human
gaaaacccagguggccauuucca

SEQ ID NO: 1340181 - RNA, 28 nt, Human
gccaaguacccuccauaaacucuuaaag

SEQ ID NO: 1340182 - RNA, 22 nt, Human
gccuuuuauaaguuuacuaaca

SEQ ID NO: 1340183 - RNA, 21 nt, Human
ggaaauaguuuugaaaugaag

SEQ ID NO: 1340184 - RNA, 19 nt, Human
guaaugccaaguacccucc

SEQ ID NO: 1340185 - RNA, 18 nt, Human
gugguuuuuagaaacagu

SEQ ID NO: 1340186 - RNA, 24 nt, Human
guuucaauacugaccauuuacuau

SEQ ID NO: 1340187 - RNA, 26 nt, Human
uaaaaaacaaaccuguuuugucaaaa

SEQ ID NO: 1340188 - RNA, 24 nt, Human
uaaguaacuuuuaauaucagaaaa

SEQ ID NO: 1340189 - RNA, 19 nt, Human
uaaucccuaugacuucccu

SEQ ID NO: 1340190 - RNA, 20 nt, Human
uacaaaauacaugcuuggug

SEQ ID NO: 1340191 - RNA, 24 nt, Human
uacauauacauaacaaaagagugu

SEQ ID NO: 1340192 - RNA, 21 nt, Human
uaggugcuaucccaaagcccu

SEQ ID NO: 1340193 - RNA, 20 nt, Human
uaguauuuauguauauauau

SEQ ID NO: 1340194 - RNA, 27 nt, Human
uagucuaaaaauuaacagcucgaucac

SEQ ID NO: 1340195 - RNA, 21 nt, Human
uauaauguuuuguccuuucaa

SEQ ID NO: 1340196 - RNA, 19 nt, Human
uaucagaaaaauaaaacuc

SEQ ID NO: 1340197 - RNA, 22 nt, Human
uaugggaaaacccagguggcca

SEQ ID NO: 1340198 - RNA, 20 nt, Human
uccacaggugaaauguacga

SEQ ID NO: 1340199 - RNA, 19 nt, Human
uccugauaugggaaaaccc

SEQ ID NO: 1340200 - RNA, 21 nt, Human
uccuuggcuuauuaguugcag

SEQ ID NO: 1340201 - RNA, 23 nt, Human
uccuuggcuuauuaguugcagga

SEQ ID NO: 1340202 - RNA, 24 nt, Human
ucuaaaaauuaacagcucgaucac

SEQ ID NO: 1340203 - RNA, 21 nt, Human
ugauaugggaaaacccaggug

SEQ ID NO: 1340204 - RNA, 21 nt, Human
ugauggaauguuugcauccuc

SEQ ID NO: 1340205 - RNA, 18 nt, Human
ugccaagggcaucauuau

SEQ ID NO: 1340206 - RNA, 24 nt, Human
ugccaaguacccuccauaaacucu

SEQ ID NO: 1340207 - RNA, 18 nt, Human
uggaauguuugcauccuc

SEQ ID NO: 1340208 - RNA, 19 nt, Human
ugggaaaacccagguggcc

SEQ ID NO: 1340209 - RNA, 21 nt, Human
uguaaagaaggcagcacugga

SEQ ID NO: 1340210 - RNA, 19 nt, Human
uguaaugccaaguacccuc

SEQ ID NO: 1340211 - RNA, 19 nt, Human
uguguugggaaaauaaugc

SEQ ID NO: 1340212 - RNA, 20 nt, Human
uguguugggaaaauaaugcu

SEQ ID NO: 1340213 - RNA, 20 nt, Human
uuacuugcaauccugcagaa

SEQ ID NO: 1340214 - RNA, 27 nt, Human
uucaaaccaaacuaauagacaagagac

SEQ ID NO: 1340215 - RNA, 23 nt, Human
uuccuugugauuggaaauaguuu

SEQ ID NO: 1340216 - RNA, 20 nt, Human
uucguucauaucuacaagac

SEQ ID NO: 1340217 - RNA, 24 nt, Human
uuuuuuuuuuuuuuuuuuuucaag

SEQ ID NO: 1340218 - RNA, 25 nt, Human
agcaucuacuuucucauacugugac

SEQ ID NO: 1340219 - RNA, 18 nt, Human
aggaaggaaggcucccau

SEQ ID NO: 1340220 - RNA, 21 nt, Human
auucuucacugauaauucugg

SEQ ID NO: 1340221 - RNA, 27 nt, Human
cacaagaucaguaguuuauuccaauga

SEQ ID NO: 1340222 - RNA, 21 nt, Human
cagcacccgcgaaccgcccug

SEQ ID NO: 1340223 - RNA, 20 nt, Human
ccuggcuaggggccccggcc

SEQ ID NO: 1340224 - RNA, 22 nt, Human
cuuacaaggacggacaugucug

SEQ ID NO: 1340225 - RNA, 18 nt, Human
ggaacaucuuguuacaga

SEQ ID NO: 1340226 - RNA, 24 nt, Human
guuugucuggagaggguaucuuuc

SEQ ID NO: 1340227 - RNA, 18 nt, Human
uaccguacuauuugcauc

SEQ ID NO: 1340228 - RNA, 20 nt, Human
uaggaaggaaggcucccaug

SEQ ID NO: 1340229 - RNA, 23 nt, Human
ucagggugggaggugauccaauc

SEQ ID NO: 1340230 - RNA, 19 nt, Human
ucuugauuaggaaggaagg

SEQ ID NO: 1340231 - RNA, 26 nt, Human
ugacagcacccgcgaaccgcccugac

SEQ ID NO: 1340232 - RNA, 23 nt, Human
uggaagcuuuuaacuuacaagga

SEQ ID NO: 1340233 - RNA, 21 nt, Human
ugucugggccuggcuaggggc

SEQ ID NO: 1340234 - RNA, 22 nt, Human
ugugacacaagcacuggauucu

SEQ ID NO: 1340235 - RNA, 24 nt, Human
ugugacacaagcacuggauucuuu

SEQ ID NO: 1340236 - RNA, 19 nt, Human
uuacucucaagcgauagaa

SEQ ID NO: 1340237 - RNA, 21 nt, Human
uuccccagcaucuacuuucuc

SEQ ID NO: 1340238 - RNA, 21 nt, Human
aaaagcuuaauucagggagac

SEQ ID NO: 1340239 - RNA, 19 nt, Human
agacaaaauagaaaggucu

SEQ ID NO: 1340240 - RNA, 21 nt, Human
agacaaaauagaaaggucuag

SEQ ID NO: 1340241 - RNA, 22 nt, Human
caacagagggcacugggccaaa

SEQ ID NO: 1340242 - RNA, 18 nt, Human
ggaguggaaagaaaaagc

SEQ ID NO: 1340243 - RNA, 21 nt, Human
uacaacaccgccgacuccgcg

SEQ ID NO: 1340244 - RNA, 24 nt, Human
uaggauguuucaacagagggcacu

SEQ ID NO: 1340245 - RNA, 20 nt, Human
uauguaaaguguccaaaagg

SEQ ID NO: 1340246 - RNA, 19 nt, Human
ucaacagagggcacugggc

SEQ ID NO: 1340247 - RNA, 23 nt, Human
uccauauguaaaguguccaaaag

SEQ ID NO: 1340248 - RNA, 24 nt, Human
ugaggugugaaggggccaaaucag

SEQ ID NO: 1340249 - RNA, 19 nt, Human
uguaauaggaguggaaaga

SEQ ID NO: 1340250 - RNA, 24 nt, Human
uguccaaaaggaaaagcuuaauuc

SEQ ID NO: 1340251 - RNA, 21 nt, Human
uucagggagacaaaauagaaa

SEQ ID NO: 1340252 - RNA, 22 nt, Human
uuguugauaaugauaagcuuuu

SEQ ID NO: 1340253 - RNA, 21 nt, Human
uuuagaauccauauguaaagu

SEQ ID NO: 1340254 - RNA, 18 nt, Human
uuuuuuuuuuuuuuuuug

SEQ ID NO: 1340255 - RNA, 25 nt, Human
aaagugcuggagauuacaggcauga

SEQ ID NO: 1340256 - RNA, 24 nt, Human
aaagugcugggauuacaggcguga

SEQ ID NO: 1340257 - RNA, 27 nt, Human
aagugcuggagauuacaggcaugagcu

SEQ ID NO: 1340258 - RNA, 19 nt, Human
aagugcugggauuacaggc

SEQ ID NO: 1340259 - RNA, 19 nt, Human
aagugcugggauuacaggc

SEQ ID NO: 1340260 - RNA, 18 nt, Human
aauguagugauguggggu

SEQ ID NO: 1340261 - RNA, 24 nt, Human
accauguuggccaggcugguaucg

SEQ ID NO: 1340262 - RNA, 24 nt, Human
acccaguuaauuuuuguauuuuua

SEQ ID NO: 1340263 - RNA, 18 nt, Human
accggguuucaccauguu

SEQ ID NO: 1340264 - RNA, 24 nt, Human
accggguuucaccauguuggccag

SEQ ID NO: 1340265 - RNA, 20 nt, Human
agacccggaggccggggcga

SEQ ID NO: 1340266 - RNA, 19 nt, Human
agauuacaggcaugagcug

SEQ ID NO: 1340267 - RNA, 20 nt, Human
agauuacaggcaugagcugc

SEQ ID NO: 1340268 - RNA, 20 nt, Human
aggaggagccuggguuagug

SEQ ID NO: 1340269 - RNA, 21 nt, Human
aggcaugagcugcuaggucca

SEQ ID NO: 1340270 - RNA, 19 nt, Human
aggccggggcgaggaggag

SEQ ID NO: 1340271 - RNA, 18 nt, Human
aggcgugagucacugugc

SEQ ID NO: 1340272 - RNA, 18 nt, Human
aguagcugggauuacagg

SEQ ID NO: 1340273 - RNA, 19 nt, Human
aguagcugggauuacaggc

SEQ ID NO: 1340274 - RNA, 24 nt, Human
agugcaauggcacuaucucgguuc

SEQ ID NO: 1340275 - RNA, 18 nt, Human
agugcugggauuacaggc

SEQ ID NO: 1340276 - RNA, 22 nt, Human
augccucagcccccucaguagc

SEQ ID NO: 1340277 - RNA, 25 nt, Human
caaagugcuggagauuacaggcaug

SEQ ID NO: 1340278 - RNA, 24 nt, Human
caaagugcugggauuacaggcgug

SEQ ID NO: 1340279 - RNA, 22 nt, Human
caagugauucucaugccucagc

SEQ ID NO: 1340280 - RNA, 28 nt, Human
caagugauucucaugccucagcccccuc

SEQ ID NO: 1340281 - RNA, 22 nt, Human
cacaaaccgaggugccgggaac

SEQ ID NO: 1340282 - RNA, 24 nt, Human
caccacacccaguuaauuuuugua

SEQ ID NO: 1340283 - RNA, 18 nt, Human
caccauguuggccaggcu

SEQ ID NO: 1340284 - RNA, 21 nt, Human
caccauguuggccaggcuggu

SEQ ID NO: 1340285 - RNA, 24 nt, Human
caccauguuggccaggcugguauc

SEQ ID NO: 1340286 - RNA, 31 nt, Human
caccauguuggccaggcugguaucgaacucc

SEQ ID NO: 1340287 - RNA, 20 nt, Human
caccugagccuggagaaccc

SEQ ID NO: 1340288 - RNA, 21 nt, Human
cacgggccgagggaauguagu

SEQ ID NO: 1340289 - RNA, 20 nt, Human
cacugugcgccgggcugggu

SEQ ID NO: 1340290 - RNA, 25 nt, Human
cacuuuguucuccaggcugaucuca

SEQ ID NO: 1340291 - RNA, 21 nt, Human
cagccgggccugccguccccu

SEQ ID NO: 1340292 - RNA, 18 nt, Human
cagcgcgccccuccgcag

SEQ ID NO: 1340293 - RNA, 21 nt, Human
cagcgcgccccuccgcagccc

SEQ ID NO: 1340294 - RNA, 26 nt, Human
caggcacggguggggugaggggacuc

SEQ ID NO: 1340295 - RNA, 21 nt, Human
caggcgcccgccaccacaccc

SEQ ID NO: 1340296 - RNA, 21 nt, Human
caggcugaucucaaacucuug

SEQ ID NO: 1340297 - RNA, 20 nt, Human
caguagcugggauuacaggc

SEQ ID NO: 1340298 - RNA, 25 nt, Human
caguagcugggauuacaggcgcccg

SEQ ID NO: 1340299 - RNA, 23 nt, Human
caguuccagggcagccgggccug

SEQ ID NO: 1340300 - RNA, 24 nt, Human
cauguuggccaggcugguaucgaa

SEQ ID NO: 1340301 - RNA, 25 nt, Human
ccaaagugcuggagauuacaggcau

SEQ ID NO: 1340302 - RNA, 22 nt, Human
ccaaagugcugggauuacaggc

SEQ ID NO: 1340303 - RNA, 22 nt, Human
ccaaagugcugggauuacaggc

SEQ ID NO: 1340304 - RNA, 24 nt, Human
ccaaagugcugggauuacaggcgu

SEQ ID NO: 1340305 - RNA, 25 nt, Human
ccaacacaaaccgaggugccgggaa

SEQ ID NO: 1340306 - RNA, 24 nt, Human
ccaacuuucuuccucucccaccca

SEQ ID NO: 1340307 - RNA, 24 nt, Human
ccaggccggagugcaauggcacua

SEQ ID NO: 1340308 - RNA, 26 nt, Human
cccaacuuucuuccucucccacccac

SEQ ID NO: 1340309 - RNA, 20 nt, Human
cccagguucaagugauucuc

SEQ ID NO: 1340310 - RNA, 23 nt, Human
cccagguucaagugauucucaug

SEQ ID NO: 1340311 - RNA, 20 nt, Human
ccccaacuuucuuccucucc

SEQ ID NO: 1340312 - RNA, 24 nt, Human
cccucaguagcugggauuacaggc

SEQ ID NO: 1340313 - RNA, 24 nt, Human
ccggguuucaccauguuggccagg

SEQ ID NO: 1340314 - RNA, 19 nt, Human
ccuaaccucaagugaucug

SEQ ID NO: 1340315 - RNA, 23 nt, Human
ccucaguagcugggauuacaggc

SEQ ID NO: 1340316 - RNA, 19 nt, Human
ccucccaaagugcuggaga

SEQ ID NO: 1340317 - RNA, 22 nt, Human
ccuccugccuccgccucccaaa

SEQ ID NO: 1340318 - RNA, 26 nt, Human
ccuccugccuccgccucccaaagugc

SEQ ID NO: 1340319 - RNA, 18 nt, Human
ccucuguugcccaggccg

SEQ ID NO: 1340320 - RNA, 27 nt, Human
ccucuguugcccaggccggagugcaau

SEQ ID NO: 1340321 - RNA, 22 nt, Human
ccugagccuggagaaccccaac

SEQ ID NO: 1340322 - RNA, 19 nt, Human
ccugucucccaguuccagg

SEQ ID NO: 1340323 - RNA, 18 nt, Human
cgcccgccaccacaccca

SEQ ID NO: 1340324 - RNA, 18 nt, Human
cgcgccccuccgcagccc

SEQ ID NO: 1340325 - RNA, 22 nt, Human
cggguuucaccauguuggccag

SEQ ID NO: 1340326 - RNA, 23 nt, Human
cggguuucaccauguuggccagg

SEQ ID NO: 1340327 - RNA, 23 nt, Human
cucagcccccucaguagcuggga

SEQ ID NO: 1340328 - RNA, 18 nt, Human
cucccacccaccucacuc

SEQ ID NO: 1340329 - RNA, 19 nt, Human
cucccagguucaagugauu

SEQ ID NO: 1340330 - RNA, 21 nt, Human
cuccugccuccgccucccaaa

SEQ ID NO: 1340331 - RNA, 24 nt, Human
cugccuccgccucccaaagugcug

SEQ ID NO: 1340332 - RNA, 20 nt, Human
gaagccccagcgcgccccuc

SEQ ID NO: 1340333 - RNA, 18 nt, Human
gagauuacaggcaugagc

SEQ ID NO: 1340334 - RNA, 19 nt, Human
gauuacaggcaugagcugc

SEQ ID NO: 1340335 - RNA, 18 nt, Human
gauuacaggcgcccgcca

SEQ ID NO: 1340336 - RNA, 18 nt, Human
gauuacaggcgugaguca

SEQ ID NO: 1340337 - RNA, 21 nt, Human
gauuacaggcgugagucacug

SEQ ID NO: 1340338 - RNA, 24 nt, Human
gauuacaggcgugagucacugugc

SEQ ID NO: 1340339 - RNA, 22 nt, Human
gcaaccucugucucccagguuc

SEQ ID NO: 1340340 - RNA, 20 nt, Human
gccggagugcaauggcacua

SEQ ID NO: 1340341 - RNA, 23 nt, Human
gcugguaucgaacuccuaaccuc

SEQ ID NO: 1340342 - RNA, 21 nt, Human
ggagcucugccgaaugcagug

SEQ ID NO: 1340343 - RNA, 19 nt, Human
ggcgaggaggagccugggu

SEQ ID NO: 1340344 - RNA, 18 nt, Human
gugcuggagauuacaggc

SEQ ID NO: 1340345 - RNA, 24 nt, Human
uaacaaagcaguuaaaaccuuuaa

SEQ ID NO: 1340346 - RNA, 18 nt, Human
uaaccucaagugaucugc

SEQ ID NO: 1340347 - RNA, 24 nt, Human
uaauuuuuguauuuuuaguagaga

SEQ ID NO: 1340348 - RNA, 24 nt, Human
uacaggcaugagcugcuaggucca

SEQ ID NO: 1340349 - RNA, 24 nt, Human
uacaggcgcccgccaccacaccca

SEQ ID NO: 1340350 - RNA, 22 nt, Human
uagagaccggguuucaccaugu

SEQ ID NO: 1340351 - RNA, 24 nt, Human
uagccucgcccucccaaagugcug

SEQ ID NO: 1340352 - RNA, 24 nt, Human
uaguagagaccggguuucaccaug

SEQ ID NO: 1340353 - RNA, 27 nt, Human
ucacucacaggcacggguggggugagg

SEQ ID NO: 1340354 - RNA, 18 nt, Human
ucagcccccucaguagcu

SEQ ID NO: 1340355 - RNA, 20 nt, Human
ucagcccccucaguagcugg

SEQ ID NO: 1340356 - RNA, 20 nt, Human
ucaguagcugggauuacagg

SEQ ID NO: 1340357 - RNA, 19 nt, Human
ucauugcaaccucugucuc

SEQ ID NO: 1340358 - RNA, 23 nt, Human
ucauugcaaccucugucucccag

SEQ ID NO: 1340359 - RNA, 24 nt, Human
ucauugcaaccucugucucccagg

SEQ ID NO: 1340360 - RNA, 21 nt, Human
uccagggcagccgggccugcc

SEQ ID NO: 1340361 - RNA, 25 nt, Human
ucccaaagugcuggagauuacaggc

SEQ ID NO: 1340362 - RNA, 24 nt, Human
ucccaaagugcugggauuacaggc

SEQ ID NO: 1340363 - RNA, 21 nt, Human
ucccacccaccucacucacag

SEQ ID NO: 1340364 - RNA, 21 nt, Human
ucccagguucaagugauucuc

SEQ ID NO: 1340365 - RNA, 24 nt, Human
ucccagguucaagugauucucaug

SEQ ID NO: 1340366 - RNA, 24 nt, Human
uccucuguugcccaggccggagug

SEQ ID NO: 1340367 - RNA, 19 nt, Human
ucucacuuuguucuccagg

SEQ ID NO: 1340368 - RNA, 20 nt, Human
ucucaugccucagcccccuc

SEQ ID NO: 1340369 - RNA, 22 nt, Human
ucucccacccaccucacucaca

SEQ ID NO: 1340370 - RNA, 22 nt, Human
ucucccagguucaagugauucu

SEQ ID NO: 1340371 - RNA, 18 nt, Human
ucuguugcccaggccgga

SEQ ID NO: 1340372 - RNA, 24 nt, Human
ucuguugcccaggccggagugcaa

SEQ ID NO: 1340373 - RNA, 24 nt, Human
ucuuccucuguugcccaggccgga

SEQ ID NO: 1340374 - RNA, 19 nt, Human
ucuugaguuucaccaccuc

SEQ ID NO: 1340375 - RNA, 21 nt, Human
ugacuucaagagauccuccug

SEQ ID NO: 1340376 - RNA, 24 nt, Human
ugacuucaagagauccuccugccu

SEQ ID NO: 1340377 - RNA, 18 nt, Human
ugagccuggagaacccca

SEQ ID NO: 1340378 - RNA, 24 nt, Human
ugcccaggccggagugcaauggca

SEQ ID NO: 1340379 - RNA, 24 nt, Human
ugccucagcccccucaguagcugg

SEQ ID NO: 1340380 - RNA, 24 nt, Human
ugccuccgccucccaaagugcugg

SEQ ID NO: 1340381 - RNA, 23 nt, Human
ugccuugcucacuggagcucugc

SEQ ID NO: 1340382 - RNA, 24 nt, Human
ugcugggauuacaggcgugaguca

SEQ ID NO: 1340383 - RNA, 24 nt, Human
uggccaggcugguaucgaacuccu

SEQ ID NO: 1340384 - RNA, 21 nt, Human
ugggauuacaggcgcccgcca

SEQ ID NO: 1340385 - RNA, 22 nt, Human
ugggauuacaggcgcccgccac

SEQ ID NO: 1340386 - RNA, 24 nt, Human
ugggauuacaggcgcccgccacca

SEQ ID NO: 1340387 - RNA, 18 nt, Human
ugggauuacaggcgugag

SEQ ID NO: 1340388 - RNA, 21 nt, Human
ugggauuacaggcgugaguca

SEQ ID NO: 1340389 - RNA, 22 nt, Human
ugggauuacaggcgugagucac

SEQ ID NO: 1340390 - RNA, 22 nt, Human
ugggauuacaggcgugagucac

SEQ ID NO: 1340391 - RNA, 22 nt, Human
ugggauuacaggcgugagucac

SEQ ID NO: 1340392 - RNA, 24 nt, Human
ugggauuacaggcgugagucacug

SEQ ID NO: 1340393 - RNA, 22 nt, Human
uguagugauguggggugggcac

SEQ ID NO: 1340394 - RNA, 23 nt, Human
ugugcgccgggcuggguaagcuu

SEQ ID NO: 1340395 - RNA, 20 nt, Human
uguugcccaggccggagugc

SEQ ID NO: 1340396 - RNA, 23 nt, Human
uuaauuuuuguauuuuuaguaga

SEQ ID NO: 1340397 - RNA, 24 nt, Human
uuaguagagaccggguuucaccau

SEQ ID NO: 1340398 - RNA, 24 nt, Human
uucaagagauccuccugccuccgc

SEQ ID NO: 1340399 - RNA, 23 nt, Human
uucaagugauucucaugccucag

SEQ ID NO: 1340400 - RNA, 26 nt, Human
uucauugcaaccucugucugguucuc

SEQ ID NO: 1340401 - RNA, 18 nt, Human
uuccagggaccccggcag

SEQ ID NO: 1340402 - RNA, 23 nt, Human
uugaggcagucuuccucuguugc

SEQ ID NO: 1340403 - RNA, 24 nt, Human
uugaggcagucuuccucuguugcc

SEQ ID NO: 1340404 - RNA, 23 nt, Human
uugcaaccucugucucccagguu

SEQ ID NO: 1340405 - RNA, 24 nt, Human
uugcaaccucugucucccagguuc

SEQ ID NO: 1340406 - RNA, 18 nt, Human
uugcccaggccggagugc

SEQ ID NO: 1340407 - RNA, 24 nt, Human
uugguuccuugacaacucacuugg

SEQ ID NO: 1340408 - RNA, 24 nt, Human
uuucaccauguuggccaggcuggu

SEQ ID NO: 1340409 - RNA, 24 nt, Human
uuuuuaguagagaccggguuucac

SEQ ID NO: 1340410 - RNA, 20 nt, Human
uuuuuguauuuuuaguagag

SEQ ID NO: 1340411 - RNA, 30 nt, Human
uuuuuuuuuuuuaauagaugggggucucaa

SEQ ID NO: 1340412 - RNA, 28 nt, Human
uuuuuuuuuuuuuuuuuuaauagauggg

SEQ ID NO: 1340413 - RNA, 20 nt, Human
aaaaacuagugacaaacauc

SEQ ID NO: 1340414 - RNA, 21 nt, Human
aaaaacuagugacaaacaucu

SEQ ID NO: 1340415 - RNA, 26 nt, Human
aacagagugggacuucaucuccuuaa

SEQ ID NO: 1340416 - RNA, 24 nt, Human
acucuagccugggcaacagagugg

SEQ ID NO: 1340417 - RNA, 22 nt, Human
agccugggcaacagagugggac

SEQ ID NO: 1340418 - RNA, 24 nt, Human
agccugggcaacagagugggacuu

SEQ ID NO: 1340419 - RNA, 23 nt, Human
agcucuuauaguaaaucaaaaua

SEQ ID NO: 1340420 - RNA, 25 nt, Human
auaaaauaguccuucaguauuaaaa

SEQ ID NO: 1340421 - RNA, 25 nt, Human
auaaugcauacccaggauauaagca

SEQ ID NO: 1340422 - RNA, 20 nt, Human
auaguccuucaguauuaaaa

SEQ ID NO: 1340423 - RNA, 26 nt, Human
caacagagugggacuucaucuccuua

SEQ ID NO: 1340424 - RNA, 24 nt, Human
caagcgaggcaggucaggacaggc

SEQ ID NO: 1340425 - RNA, 21 nt, Human
cacaucuugggcgcucccugg

SEQ ID NO: 1340426 - RNA, 18 nt, Human
cacucuagccugggcaac

SEQ ID NO: 1340427 - RNA, 22 nt, Human
cacucuagccugggcaacagag

SEQ ID NO: 1340428 - RNA, 24 nt, Human
cacucuagccugggcaacagagug

SEQ ID NO: 1340429 - RNA, 21 nt, Human
cagagugggacuucaucuccu

SEQ ID NO: 1340430 - RNA, 27 nt, Human
cccccacaucuugggcgcucccugggc

SEQ ID NO: 1340431 - RNA, 25 nt, Human
cccucggcuggacaggaccgggguc

SEQ ID NO: 1340432 - RNA, 21 nt, Human
ccuccacgaugaucuugaucu

SEQ ID NO: 1340433 - RNA, 21 nt, Human
ccugggcaacagagugggacu

SEQ ID NO: 1340434 - RNA, 19 nt, Human
cugcugcgugcccccgucc

SEQ ID NO: 1340435 - RNA, 24 nt, Human
gcacucuagccugggcaacagagu

SEQ ID NO: 1340436 - RNA, 24 nt, Human
ggacgaggagggguuccccuuggu

SEQ ID NO: 1340437 - RNA, 22 nt, Human
ggacuuggcugacauucuuugg

SEQ ID NO: 1340438 - RNA, 20 nt, Human
ggcaagcgaggcaggucagg

SEQ ID NO: 1340439 - RNA, 20 nt, Human
ggcgaguggcugcgcuccgc

SEQ ID NO: 1340440 - RNA, 22 nt, Human
uaccaggugauuuuuaugccac

SEQ ID NO: 1340441 - RNA, 26 nt, Human
uaggucaauugcaaaaacaaugcauc

SEQ ID NO: 1340442 - RNA, 25 nt, Human
uauuuuauuacauauauagcugagc

SEQ ID NO: 1340443 - RNA, 21 nt, Human
ucccuggcgcugcuacggccg

SEQ ID NO: 1340444 - RNA, 24 nt, Human
ucuagccugggcaacagaguggga

SEQ ID NO: 1340445 - RNA, 28 nt, Human
ucuuugggggcaagcgaggcaggucagg

SEQ ID NO: 1340446 - RNA, 22 nt, Human
ugacaaacaucuuuagaaaaaa

SEQ ID NO: 1340447 - RNA, 18 nt, Human
ugcacucuagccugggca

SEQ ID NO: 1340448 - RNA, 22 nt, Human
ugcacucuagccugggcaacag

SEQ ID NO: 1340449 - RNA, 19 nt, Human
uggcugcgcuccgcgcucg

SEQ ID NO: 1340450 - RNA, 19 nt, Human
uuaccaggugauuuuuaug

SEQ ID NO: 1340451 - RNA, 19 nt, Human
uucaccuugguuuuggagg

SEQ ID NO: 1340452 - RNA, 23 nt, Human
uucaccuugguuuuggaggcugc

SEQ ID NO: 1340453 - RNA, 21 nt, Human
uuccuuggccacguccuucag

SEQ ID NO: 1340454 - RNA, 22 nt, Human
uucuuugggggcaagcgaggca

SEQ ID NO: 1340455 - RNA, 21 nt, Human
uuggaggcugccggcgguccc

SEQ ID NO: 1340456 - RNA, 22 nt, Human
uuuuuuuuuuuuuuuuccacag

SEQ ID NO: 1340457 - RNA, 24 nt, Human
aaaaagacuugaaacuuucaccug

SEQ ID NO: 1340458 - RNA, 21 nt, Human
aaacaggaugcugacauucuc

SEQ ID NO: 1340459 - RNA, 20 nt, Human
aaauacucuauguuccacuu

SEQ ID NO: 1340460 - RNA, 22 nt, Human
aaauuacaggugugagccacca

SEQ ID NO: 1340461 - RNA, 19 nt, Human
aaauuuuauaaggauugua

SEQ ID NO: 1340462 - RNA, 19 nt, Human
aacaaagcaaaaugaaugu

SEQ ID NO: 1340463 - RNA, 19 nt, Human
aacagagugagacccuguc

SEQ ID NO: 1340464 - RNA, 21 nt, Human
aacagagugagacccugucuc

SEQ ID NO: 1340465 - RNA, 20 nt, Human
aaccuccaccucccagguuc

SEQ ID NO: 1340466 - RNA, 24 nt, Human
aaggugcugaaauuacagguguga

SEQ ID NO: 1340467 - RNA, 24 nt, Human
aagugauccgccugccucggccuc

SEQ ID NO: 1340468 - RNA, 24 nt, Human
aauccuucucaaagguuuuuccac

SEQ ID NO: 1340469 - RNA, 18 nt, Human
aauuacaggugugagcca

SEQ ID NO: 1340470 - RNA, 24 nt, Human
aauuacaggugugagccaccaugc

SEQ ID NO: 1340471 - RNA, 22 nt, Human
acaaagcaaaaugaauguacuu

SEQ ID NO: 1340472 - RNA, 18 nt, Human
acagacaccagccaccau

SEQ ID NO: 1340473 - RNA, 21 nt, Human
acagacaccagccaccaugcc

SEQ ID NO: 1340474 - RNA, 20 nt, Human
acagagugagacccugucuc

SEQ ID NO: 1340475 - RNA, 23 nt, Human
acaggaugcugacauucucucca

SEQ ID NO: 1340476 - RNA, 23 nt, Human
accaaaugauucauguucucuac

SEQ ID NO: 1340477 - RNA, 22 nt, Human
accaucuuggccaggcuggucu

SEQ ID NO: 1340478 - RNA, 20 nt, Human
acgcugucacccaggcugga

SEQ ID NO: 1340479 - RNA, 21 nt, Human
acgcugucacccaggcuggag

SEQ ID NO: 1340480 - RNA, 24 nt, Human
acgcugucacccaggcuggaguga

SEQ ID NO: 1340481 - RNA, 24 nt, Human
acuccagccuggguaacagaguga

SEQ ID NO: 1340482 - RNA, 24 nt, Human
agaaaguaggauggugguugccag

SEQ ID NO: 1340483 - RNA, 22 nt, Human
agaccaaaagaaguaacugaua

SEQ ID NO: 1340484 - RNA, 22 nt, Human
agaccaaaugauucauguucuc

SEQ ID NO: 1340485 - RNA, 22 nt, Human
agccuggguaacagagugagac

SEQ ID NO: 1340486 - RNA, 22 nt, Human
agcugggauuacagacaccagc

SEQ ID NO: 1340487 - RNA, 20 nt, Human
aggagaagacucuagaccaa

SEQ ID NO: 1340488 - RNA, 24 nt, Human
aggaggagaagacucuagaccaaa

SEQ ID NO: 1340489 - RNA, 24 nt, Human
aggaucacuugagcccagaaguuc

SEQ ID NO: 1340490 - RNA, 20 nt, Human
aggcaggguuccaccaucuu

SEQ ID NO: 1340491 - RNA, 18 nt, Human
aggugagaggaucacuug

SEQ ID NO: 1340492 - RNA, 26 nt, Human
aggugcugaaauuacaggugugagcc

SEQ ID NO: 1340493 - RNA, 21 nt, Human
agguucaagugauucuccugc

SEQ ID NO: 1340494 - RNA, 22 nt, Human
agguucaagugauucuccugcc

SEQ ID NO: 1340495 - RNA, 23 nt, Human
agguucaagugauucuccugccu

SEQ ID NO: 1340496 - RNA, 22 nt, Human
agucacaaaaaagggcaaauac

SEQ ID NO: 1340497 - RNA, 25 nt, Human
auaguaacaaagcaaaaugaaugua

SEQ ID NO: 1340498 - RNA, 24 nt, Human
aucaaauuuggaaauuaugucuuu

SEQ ID NO: 1340499 - RNA, 24 nt, Human
aucacuccauugcacuccagccug

SEQ ID NO: 1340500 - RNA, 21 nt, Human
auucauuugcucagagcugau

SEQ ID NO: 1340501 - RNA, 18 nt, Human
auugcacuccagccuggg

SEQ ID NO: 1340502 - RNA, 24 nt, Human
auugcacuccagccuggguaacag

SEQ ID NO: 1340503 - RNA, 27 nt, Human
caaaaaaaaauacaaaaauccuucuca

SEQ ID NO: 1340504 - RNA, 20 nt, Human
caaauuuggaaauuaugucu

SEQ ID NO: 1340505 - RNA, 24 nt, Human
caaggugcugaaauuacaggugug

SEQ ID NO: 1340506 - RNA, 22 nt, Human
caagugauccgccugccucggc

SEQ ID NO: 1340507 - RNA, 22 nt, Human
caagugauucuccugccucaac

SEQ ID NO: 1340508 - RNA, 28 nt, Human
caagugauucuccugccucaaccuccca

SEQ ID NO: 1340509 - RNA, 19 nt, Human
cacaaaaaagggcaaauac

SEQ ID NO: 1340510 - RNA, 21 nt, Human
caccaucuuggccaggcuggu

SEQ ID NO: 1340511 - RNA, 23 nt, Human
caccaucuuggccaggcuggucu

SEQ ID NO: 1340512 - RNA, 24 nt, Human
caccaucuuggccaggcuggucuu

SEQ ID NO: 1340513 - RNA, 21 nt, Human
cacccccuccuggcucuggcc

SEQ ID NO: 1340514 - RNA, 22 nt, Human
cacuccagccuggguaacagag

SEQ ID NO: 1340515 - RNA, 22 nt, Human
cacuccagccuggguaacagag

SEQ ID NO: 1340516 - RNA, 24 nt, Human
cacuccagccuggguaacagagug

SEQ ID NO: 1340517 - RNA, 21 nt, Human
cagaagaaaucagugucaucc

SEQ ID NO: 1340518 - RNA, 25 nt, Human
cagaagaaaucagugucauccaagu

SEQ ID NO: 1340519 - RNA, 19 nt, Human
cagaccaaaugauucaugu

SEQ ID NO: 1340520 - RNA, 28 nt, Human
cagagcugauuuuuaaaauaauuuauua

SEQ ID NO: 1340521 - RNA, 19 nt, Human
caggaugcugacauucucu

SEQ ID NO: 1340522 - RNA, 24 nt, Human
caggguuccaccaucuuggccagg

SEQ ID NO: 1340523 - RNA, 20 nt, Human
caucuguagucccaccuacu

SEQ ID NO: 1340524 - RNA, 24 nt, Human
caucuguagucccaccuacucagg

SEQ ID NO: 1340525 - RNA, 18 nt, Human
cauugcacuccagccugg

SEQ ID NO: 1340526 - RNA, 19 nt, Human
cauugcacuccagccuggg

SEQ ID NO: 1340527 - RNA, 21 nt, Human
cauugcacuccagccugggua

SEQ ID NO: 1340528 - RNA, 22 nt, Human
cauugcacuccagccuggguaa

SEQ ID NO: 1340529 - RNA, 24 nt, Human
cauugcacuccagccuggguaaca

SEQ ID NO: 1340530 - RNA, 21 nt, Human
ccaaggugcugaaauuacagg

SEQ ID NO: 1340531 - RNA, 24 nt, Human
ccaaggugcugaaauuacaggugu

SEQ ID NO: 1340532 - RNA, 27 nt, Human
ccacagcugggauuacagacaccagcc

SEQ ID NO: 1340533 - RNA, 19 nt, Human
ccaccaugccuggcuuaaa

SEQ ID NO: 1340534 - RNA, 24 nt, Human
ccaccucccagguucaagugauuc

SEQ ID NO: 1340535 - RNA, 18 nt, Human
ccauugcacuccagccug

SEQ ID NO: 1340536 - RNA, 20 nt, Human
ccauugcacuccagccuggg

SEQ ID NO: 1340537 - RNA, 21 nt, Human
ccauugcacuccagccugggu

SEQ ID NO: 1340538 - RNA, 23 nt, Human
ccauugcacuccagccuggguaa

SEQ ID NO: 1340539 - RNA, 24 nt, Human
ccauugcacuccagccuggguaac

SEQ ID NO: 1340540 - RNA, 23 nt, Human
cccagguucaagugauucuccuc

SEQ ID NO: 1340541 - RNA, 23 nt, Human
cccagguucaagugauucuccug

SEQ ID NO: 1340542 - RNA, 23 nt, Human
ccccuccuggcucuggccagcaa

SEQ ID NO: 1340543 - RNA, 24 nt, Human
ccucccagguucaagugauucucc

SEQ ID NO: 1340544 - RNA, 18 nt, Human
ccugaccucaagugaucc

SEQ ID NO: 1340545 - RNA, 21 nt, Human
ccugaccucaagugauccgcc

SEQ ID NO: 1340546 - RNA, 23 nt, Human
ccugaccucaagugauccgccug

SEQ ID NO: 1340547 - RNA, 21 nt, Human
ccugccucaaccucccacagc

SEQ ID NO: 1340548 - RNA, 24 nt, Human
ccugccucggccucccaaggugcu

SEQ ID NO: 1340549 - RNA, 19 nt, Human
cuagaccaaaagaaguaac

SEQ ID NO: 1340550 - RNA, 23 nt, Human
cucaagugauccgccugccucgg

SEQ ID NO: 1340551 - RNA, 22 nt, Human
cucacugaaaccuccaccuccc

SEQ ID NO: 1340552 - RNA, 23 nt, Human
cucacugaaaccuccaccuccca

SEQ ID NO: 1340553 - RNA, 24 nt, Human
cucacugaaaccuccaccucccag

SEQ ID NO: 1340554 - RNA, 18 nt, Human
cucaggaagcugagguga

SEQ ID NO: 1340555 - RNA, 24 nt, Human
cuccauugcacuccagccugggua

SEQ ID NO: 1340556 - RNA, 26 nt, Human
cuccauugcacuccagccuggguaac

SEQ ID NO: 1340557 - RNA, 21 nt, Human
cucccaaggugcugaaauuac

SEQ ID NO: 1340558 - RNA, 19 nt, Human
cucccagguucaagugauu

SEQ ID NO: 1340559 - RNA, 26 nt, Human
cuccugaccucaagugauccgccugc

SEQ ID NO: 1340560 - RNA, 22 nt, Human
cuccugccucaaccucccacag

SEQ ID NO: 1340561 - RNA, 24 nt, Human
cugaaaccuccaccucccagguuc

SEQ ID NO: 1340562 - RNA, 28 nt, Human
cugaggagagagggauauaaggacuuau

SEQ ID NO: 1340563 - RNA, 23 nt, Human
cuucaugauucaucaaugcugcc

SEQ ID NO: 1340564 - RNA, 20 nt, Human
cuuccacccacuacuuauca

SEQ ID NO: 1340565 - RNA, 28 nt, Human
gaaauuccuuuacacccccuccuggcuc

SEQ ID NO: 1340566 - RNA, 24 nt, Human
gacacaguaucuagcaaugaucaa

SEQ ID NO: 1340567 - RNA, 24 nt, Human
gaccucaagugauccgccugccuc

SEQ ID NO: 1340568 - RNA, 20 nt, Human
gagcccagaaguucaaaggg

SEQ ID NO: 1340569 - RNA, 21 nt, Human
gagcugauuuuuaaaauaauu

SEQ ID NO: 1340570 - RNA, 21 nt, Human
gaggaaacugauuugcccagc

SEQ ID NO: 1340571 - RNA, 24 nt, Human
gaucacuugagcccagaaguucaa

SEQ ID NO: 1340572 - RNA, 18 nt, Human
gauuacagacaccagcca

SEQ ID NO: 1340573 - RNA, 24 nt, Human
gauuacagacaccagccaccaugc

SEQ ID NO: 1340574 - RNA, 24 nt, Human
gcacuccagccuggguaacagagu

SEQ ID NO: 1340575 - RNA, 23 nt, Human
gcuggucuugaacuccugaccuc

SEQ ID NO: 1340576 - RNA, 20 nt, Human
ggagaagacucuagaccaaa

SEQ ID NO: 1340577 - RNA, 20 nt, Human
ggauuacagacaccagccac

SEQ ID NO: 1340578 - RNA, 24 nt, Human
ggcuggucuugaacuccugaccuc

SEQ ID NO: 1340579 - RNA, 19 nt, Human
gggcugaggagagagggau

SEQ ID NO: 1340580 - RNA, 19 nt, Human
ggucuugaacuccugaccu

SEQ ID NO: 1340581 - RNA, 24 nt, Human
gugauucuccugccucaaccuccc

SEQ ID NO: 1340582 - RNA, 21 nt, Human
gugcugaaauuacagguguga

SEQ ID NO: 1340583 - RNA, 23 nt, Human
guucaaaggggcagugaucacuc

SEQ ID NO: 1340584 - RNA, 18 nt, Human
uaaacaggaugcugacau

SEQ ID NO: 1340585 - RNA, 22 nt, Human
uaaacaggaugcugacauucuc

SEQ ID NO: 1340586 - RNA, 22 nt, Human
uaacagagugagacccugucuc

SEQ ID NO: 1340587 - RNA, 24 nt, Human
uaagugaaauaagccagucacaaa

SEQ ID NO: 1340588 - RNA, 24 nt, Human
uacagaagaaaucagugucaucca

SEQ ID NO: 1340589 - RNA, 23 nt, Human
uacagacaccagccaccaugccc

SEQ ID NO: 1340590 - RNA, 22 nt, Human
uacaggugugagccaccaugcc

SEQ ID NO: 1340591 - RNA, 22 nt, Human
uacaggugugagccaccaugcc

SEQ ID NO: 1340592 - RNA, 23 nt, Human
uacaggugugagccaccaugccu

SEQ ID NO: 1340593 - RNA, 21 nt, Human
uagaccaaaagaaguaacuga

SEQ ID NO: 1340594 - RNA, 26 nt, Human
uaguagaggcaggguuccaccaucuu

SEQ ID NO: 1340595 - RNA, 22 nt, Human
uagucaaaaaaaaauacaaaaa

SEQ ID NO: 1340596 - RNA, 25 nt, Human
uaugccaagucuuaagcugcaaucc

SEQ ID NO: 1340597 - RNA, 21 nt, Human
ucaagugauccgccugccucg

SEQ ID NO: 1340598 - RNA, 19 nt, Human
ucaagugauucuccugccu

SEQ ID NO: 1340599 - RNA, 21 nt, Human
ucacccaggcuggagugaggu

SEQ ID NO: 1340600 - RNA, 24 nt, Human
ucacugaaaccuccaccucccagg

SEQ ID NO: 1340601 - RNA, 19 nt, Human
ucacugauuucaacagaau

SEQ ID NO: 1340602 - RNA, 18 nt, Human
ucagaccaaaugauucau

SEQ ID NO: 1340603 - RNA, 23 nt, Human
ucagccuaaaaaaaguuaaagaa

SEQ ID NO: 1340604 - RNA, 25 nt, Human
uccacccacuacuuaucaccacuuc

SEQ ID NO: 1340605 - RNA, 23 nt, Human
uccagccuggguaacagagugag

SEQ ID NO: 1340606 - RNA, 24 nt, Human
uccagccuggguaacagagugaga

SEQ ID NO: 1340607 - RNA, 20 nt, Human
uccauugcacuccagccugg

SEQ ID NO: 1340608 - RNA, 23 nt, Human
ucccaaggugcugaaauuacagg

SEQ ID NO: 1340609 - RNA, 21 nt, Human
ucccagguucaagugauucuc

SEQ ID NO: 1340610 - RNA, 24 nt, Human
ucccagguucaagugauucuccug

SEQ ID NO: 1340611 - RNA, 18 nt, Human
ucggccucccaaggugcu

SEQ ID NO: 1340612 - RNA, 27 nt, Human
ucuacaauuacaaaaagaacaguuauu

SEQ ID NO: 1340613 - RNA, 22 nt, Human
ucuagcaaugaucaaaauguga

SEQ ID NO: 1340614 - RNA, 27 nt, Human
ucuauaguuacaaaaagaccggggucc

SEQ ID NO: 1340615 - RNA, 24 nt, Human
ucuccugccucaaccucccacagc

SEQ ID NO: 1340616 - RNA, 19 nt, Human
ucucuccauucaaaauuuu

SEQ ID NO: 1340617 - RNA, 22 nt, Human
ucuuacgcugucacccaggcug

SEQ ID NO: 1340618 - RNA, 24 nt, Human
ucuuacgcugucacccaggcugga

SEQ ID NO: 1340619 - RNA, 21 nt, Human
ucuugaacuccugaccucaag

SEQ ID NO: 1340620 - RNA, 22 nt, Human
ucuuggccaggcuggucuugaa

SEQ ID NO: 1340621 - RNA, 19 nt, Human
ugaaaccuccaccucccag

SEQ ID NO: 1340622 - RNA, 22 nt, Human
ugaaauuacaggugugagccac

SEQ ID NO: 1340623 - RNA, 24 nt, Human
ugaaauuacaggugugagccacca

SEQ ID NO: 1340624 - RNA, 24 nt, Human
ugaaauuacaggugugagccacca

SEQ ID NO: 1340625 - RNA, 18 nt, Human
ugaccucaagugauccgc

SEQ ID NO: 1340626 - RNA, 24 nt, Human
ugaccucaagugauccgccugccu

SEQ ID NO: 1340627 - RNA, 21 nt, Human
ugacgcaugcuaacauauaug

SEQ ID NO: 1340628 - RNA, 24 nt, Human
ugaggagagagggauauaaggacu

SEQ ID NO: 1340629 - RNA, 23 nt, Human
ugaggugaaaugaucuuggcuca

SEQ ID NO: 1340630 - RNA, 19 nt, Human
ugaggugagaggaucacuu

SEQ ID NO: 1340631 - RNA, 19 nt, Human
ugaggugagaggaucacuu

SEQ ID NO: 1340632 - RNA, 21 nt, Human
ugaggugagaggaucacuuga

SEQ ID NO: 1340633 - RNA, 24 nt, Human
ugaggugagaggaucacuugagcc

SEQ ID NO: 1340634 - RNA, 24 nt, Human
ugcacuccagccuggguaacagag

SEQ ID NO: 1340635 - RNA, 21 nt, Human
ugccucggccucccaaggugc

SEQ ID NO: 1340636 - RNA, 24 nt, Human
ugccucggccucccaaggugcuga

SEQ ID NO: 1340637 - RNA, 24 nt, Human
ugcugaaauuacaggugugagcca

SEQ ID NO: 1340638 - RNA, 24 nt, Human
uggccaggcuggucuugaacuccu

SEQ ID NO: 1340639 - RNA, 21 nt, Human
uggcucuggccagcaagaacu

SEQ ID NO: 1340640 - RNA, 21 nt, Human
ugggauuacagacaccagcca

SEQ ID NO: 1340641 - RNA, 22 nt, Human
ugggauuacagacaccagccac

SEQ ID NO: 1340642 - RNA, 24 nt, Human
ugggauuacagacaccagccacca

SEQ ID NO: 1340643 - RNA, 21 nt, Human
uggguaacagagugagacccu

SEQ ID NO: 1340644 - RNA, 23 nt, Human
ugguggcacacaucuguaguccc

SEQ ID NO: 1340645 - RNA, 19 nt, Human
uguguuuuuaguagaggca

SEQ ID NO: 1340646 - RNA, 22 nt, Human
uuacaaaaccauuaaaggaggu

SEQ ID NO: 1340647 - RNA, 22 nt, Human
uuacgcugucacccaggcugga

SEQ ID NO: 1340648 - RNA, 24 nt, Human
uuacgcugucacccaggcuggagu

SEQ ID NO: 1340649 - RNA, 23 nt, Human
uuagacacaguaucuagcaauga

SEQ ID NO: 1340650 - RNA, 24 nt, Human
uuaguagaggcaggguuccaccau

SEQ ID NO: 1340651 - RNA, 21 nt, Human
uucaagugauucuccugccuc

SEQ ID NO: 1340652 - RNA, 24 nt, Human
uucaagugauucuccugccucaac

SEQ ID NO: 1340653 - RNA, 24 nt, Human
uuguguguguguuuuuaguagagg

SEQ ID NO: 1340654 - RNA, 18 nt, Human
uuucaccugaaugcaucu

SEQ ID NO: 1340655 - RNA, 21 nt, Human
uuucuuagaggacaauuuggg

SEQ ID NO: 1340656 - RNA, 23 nt, Human
uuuuuuuuuuuuugagagagucu

SEQ ID NO: 1340657 - RNA, 18 nt, Human
uuuuuuuuuuuuuuuuug

SEQ ID NO: 1340658 - RNA, 21 nt, Human
aacccuuuaauguugggcuuu

SEQ ID NO: 1340659 - RNA, 22 nt, Human
aagaacagcagugagggcgggc

SEQ ID NO: 1340660 - RNA, 20 nt, Human
aagcagugaccccugcaccc

SEQ ID NO: 1340661 - RNA, 18 nt, Human
acagggcccugagcugac

SEQ ID NO: 1340662 - RNA, 22 nt, Human
acccccacucuauucccuccaa

SEQ ID NO: 1340663 - RNA, 19 nt, Human
acccuuuaauguugggcuu

SEQ ID NO: 1340664 - RNA, 20 nt, Human
agcaaaugccucccuuccau

SEQ ID NO: 1340665 - RNA, 19 nt, Human
aggagaggcucugcuagcg

SEQ ID NO: 1340666 - RNA, 21 nt, Human
aggagccccugugccaccuag

SEQ ID NO: 1340667 - RNA, 22 nt, Human
aggaggaggcaaggccgacugc

SEQ ID NO: 1340668 - RNA, 18 nt, Human
aggcaagaacagcaguga

SEQ ID NO: 1340669 - RNA, 24 nt, Human
aggcagcggcaaggaggcaguucu

SEQ ID NO: 1340670 - RNA, 22 nt, Human
aggcaggaggggguggccccag

SEQ ID NO: 1340671 - RNA, 19 nt, Human
aggcagggccggcccagca

SEQ ID NO: 1340672 - RNA, 18 nt, Human
aggccucaguuuccccag

SEQ ID NO: 1340673 - RNA, 18 nt, Human
aggggcagcucuaagggg

SEQ ID NO: 1340674 - RNA, 25 nt, Human
caaaugccucccuuccaucugccuc

SEQ ID NO: 1340675 - RNA, 22 nt, Human
caaggacaccccugcagagucc

SEQ ID NO: 1340676 - RNA, 24 nt, Human
cacccccucucugggagcugaggg

SEQ ID NO: 1340677 - RNA, 21 nt, Human
caccucagcggaagccagagg

SEQ ID NO: 1340678 - RNA, 19 nt, Human
caccugaaucaggcccagg

SEQ ID NO: 1340679 - RNA, 22 nt, Human
cagcagcugacaaggaacaugc

SEQ ID NO: 1340680 - RNA, 20 nt, Human
cagcccaagucacagagcau

SEQ ID NO: 1340681 - RNA, 27 nt, Human
cagccccaacuuugccuuggugacucu

SEQ ID NO: 1340682 - RNA, 20 nt, Human
cagcggcaaggaggcaguuc

SEQ ID NO: 1340683 - RNA, 23 nt, Human
cagcuagauggggcacccccuuc

SEQ ID NO: 1340684 - RNA, 25 nt, Human
caggagccccugugccaccuagucg

SEQ ID NO: 1340685 - RNA, 23 nt, Human
caggcaccauccuccccuaccua

SEQ ID NO: 1340686 - RNA, 20 nt, Human
caggccagagaggggcagcc

SEQ ID NO: 1340687 - RNA, 20 nt, Human
caggcccaggcccuggagaa

SEQ ID NO: 1340688 - RNA, 20 nt, Human
cagggcccugagcugacaag

SEQ ID NO: 1340689 - RNA, 22 nt, Human
cagugaccccugcacccagcua

SEQ ID NO: 1340690 - RNA, 22 nt, Human
caucugugggcagcccccaggc

SEQ ID NO: 1340691 - RNA, 19 nt, Human
ccagaggggcugccuggca

SEQ ID NO: 1340692 - RNA, 19 nt, Human
ccagcuagauggggcaccc

SEQ ID NO: 1340693 - RNA, 19 nt, Human
ccauuccaggccucaguuu

SEQ ID NO: 1340694 - RNA, 25 nt, Human
cccacccccacucuauucccuccaa

SEQ ID NO: 1340695 - RNA, 22 nt, Human
cccaggcccuggagagcccagg

SEQ ID NO: 1340696 - RNA, 23 nt, Human
cccccaggcccaggaugguggcc

SEQ ID NO: 1340697 - RNA, 19 nt, Human
ccccuaccuaggcccacau

SEQ ID NO: 1340698 - RNA, 22 nt, Human
ccccugcagagucccaccccca

SEQ ID NO: 1340699 - RNA, 18 nt, Human
ccccugugccaccuaguc

SEQ ID NO: 1340700 - RNA, 18 nt, Human
ccccugugccaccuaguc

SEQ ID NO: 1340701 - RNA, 23 nt, Human
cccucucagccacaaggcuaccc

SEQ ID NO: 1340702 - RNA, 25 nt, Human
cccugagcugacaagcagugacccc

SEQ ID NO: 1340703 - RNA, 20 nt, Human
cccugcacccagcuagaugg

SEQ ID NO: 1340704 - RNA, 24 nt, Human
ccggccaggccagagaggggcagc

SEQ ID NO: 1340705 - RNA, 20 nt, Human
ccggugccgguguccgcggc

SEQ ID NO: 1340706 - RNA, 18 nt, Human
ccucccguccagccugac

SEQ ID NO: 1340707 - RNA, 24 nt, Human
ccuguggugcuguaggcccagaaa

SEQ ID NO: 1340708 - RNA, 22 nt, Human
ccuugcagugguccgagccagg

SEQ ID NO: 1340709 - RNA, 18 nt, Human
cggcccuugcaguggucc

SEQ ID NO: 1340710 - RNA, 19 nt, Human
cggcgcugguuacggugcc

SEQ ID NO: 1340711 - RNA, 23 nt, Human
cucagccacaaggcuacccuccc

SEQ ID NO: 1340712 - RNA, 23 nt, Human
cucccguccagccugacuggagg

SEQ ID NO: 1340713 - RNA, 21 nt, Human
cucuagccccggccucugacc

SEQ ID NO: 1340714 - RNA, 25 nt, Human
cucugccccaggccugcaaccaccu

SEQ ID NO: 1340715 - RNA, 21 nt, Human
cucugggccauuccaggccuc

SEQ ID NO: 1340716 - RNA, 18 nt, Human
cugcagagucccaccccc

SEQ ID NO: 1340717 - RNA, 28 nt, Human
cugcagagucccacccccacucuauucc

SEQ ID NO: 1340718 - RNA, 19 nt, Human
cugccaggagaggcucugc

SEQ ID NO: 1340719 - RNA, 20 nt, Human
cuggucuggcccugccucgg

SEQ ID NO: 1340720 - RNA, 18 nt, Human
cuugacucuggcucaagg

SEQ ID NO: 1340721 - RNA, 19 nt, Human
cuugugggucccucugcuc

SEQ ID NO: 1340722 - RNA, 18 nt, Human
cuuugcccauccaucccc

SEQ ID NO: 1340723 - RNA, 21 nt, Human
gaacagcagugagggcgggcg

SEQ ID NO: 1340724 - RNA, 21 nt, Human
gaagccugcugucuuuccagg

SEQ ID NO: 1340725 - RNA, 21 nt, Human
gaccccucucagccacaagga

SEQ ID NO: 1340726 - RNA, 18 nt, Human
gacucugggccauuccag

SEQ ID NO: 1340727 - RNA, 20 nt, Human
gacugcaguggggagcccgg

SEQ ID NO: 1340728 - RNA, 18 nt, Human
gagcauggcccugguggg

SEQ ID NO: 1340729 - RNA, 20 nt, Human
gagcauggcccuggugggcg

SEQ ID NO: 1340730 - RNA, 21 nt, Human
gcacagagggguaucaauaac

SEQ ID NO: 1340731 - RNA, 20 nt, Human
gcccaggcccuggagagccc

SEQ ID NO: 1340732 - RNA, 19 nt, Human
gccggugccgguguccgcg

SEQ ID NO: 1340733 - RNA, 24 nt, Human
gccucaguuuccccagcuguaagg

SEQ ID NO: 1340734 - RNA, 23 nt, Human
gcgcgggguccugcggaguccgu

SEQ ID NO: 1340735 - RNA, 21 nt, Human
gcggcggcggcgggcgcgggg

SEQ ID NO: 1340736 - RNA, 22 nt, Human
gcgggcgcgggguccugcggag

SEQ ID NO: 1340737 - RNA, 18 nt, Human
ggaagccagaggggcugc

SEQ ID NO: 1340738 - RNA, 19 nt, Human
ggagccucaggcugggacc

SEQ ID NO: 1340739 - RNA, 25 nt, Human
ggcaaggccgacugcaguggggagc

SEQ ID NO: 1340740 - RNA, 19 nt, Human
ggcaggacucuccuuugcc

SEQ ID NO: 1340741 - RNA, 26 nt, Human
ggcccagaaaggguggggaucagccc

SEQ ID NO: 1340742 - RNA, 18 nt, Human
ggccucaguuuccccagc

SEQ ID NO: 1340743 - RNA, 18 nt, Human
gggcacagggcccugagc

SEQ ID NO: 1340744 - RNA, 18 nt, Human
gggcccaguggguggagc

SEQ ID NO: 1340745 - RNA, 18 nt, Human
gggcggcgaggggugcga

SEQ ID NO: 1340746 - RNA, 21 nt, Human
ggggggcccaguggguggagc

SEQ ID NO: 1340747 - RNA, 22 nt, Human
gggguccugcggaguccguggc

SEQ ID NO: 1340748 - RNA, 21 nt, Human
ggguggccccagccagugucc

SEQ ID NO: 1340749 - RNA, 19 nt, Human
gguagaggaggaggaggag

SEQ ID NO: 1340750 - RNA, 24 nt, Human
ggucaggaggcuacuccagcugga

SEQ ID NO: 1340751 - RNA, 23 nt, Human
guggccccagccaguguccuagu

SEQ ID NO: 1340752 - RNA, 22 nt, Human
uaaauaaaacagaaagguugca

SEQ ID NO: 1340753 - RNA, 19 nt, Human
uacuccagcuggaacagag

SEQ ID NO: 1340754 - RNA, 20 nt, Human
uaucaauaacugggggggcc

SEQ ID NO: 1340755 - RNA, 18 nt, Human
ucagcaaaugccucccuu

SEQ ID NO: 1340756 - RNA, 21 nt, Human
ucccacccccacucuauuccc

SEQ ID NO: 1340757 - RNA, 19 nt, Human
ucuggcccugccucggccc

SEQ ID NO: 1340758 - RNA, 21 nt, Human
ugaccacccaggcucugcccc

SEQ ID NO: 1340759 - RNA, 31 nt, Human
ugagcugacaagcagugaccccugcacccaa

SEQ ID NO: 1340760 - RNA, 19 nt, Human
ugagggcagagcuggguca

SEQ ID NO: 1340761 - RNA, 19 nt, Human
ugagggcgggcguguucua

SEQ ID NO: 1340762 - RNA, 21 nt, Human
ugcagcuuucccaugguggcu

SEQ ID NO: 1340763 - RNA, 19 nt, Human
ugcaggcacagauguaggg

SEQ ID NO: 1340764 - RNA, 22 nt, Human
ugccccguccucugucagcaaa

SEQ ID NO: 1340765 - RNA, 23 nt, Human
ugccucggcccuugcaguggucc

SEQ ID NO: 1340766 - RNA, 18 nt, Human
ugccucuagccccggccu

SEQ ID NO: 1340767 - RNA, 24 nt, Human
ugccuuggugacucugggccauuc

SEQ ID NO: 1340768 - RNA, 23 nt, Human
ugcugcagcccuugacucuggcu

SEQ ID NO: 1340769 - RNA, 18 nt, Human
uggagccucaggcuggga

SEQ ID NO: 1340770 - RNA, 19 nt, Human
uggaggcagcggcaaggag

SEQ ID NO: 1340771 - RNA, 18 nt, Human
uggccagggcagacggug

SEQ ID NO: 1340772 - RNA, 18 nt, Human
ugggccaggcuggucagg

SEQ ID NO: 1340773 - RNA, 20 nt, Human
ugggggggcccagugggugg

SEQ ID NO: 1340774 - RNA, 19 nt, Human
ugggucaggaugccaaugc

SEQ ID NO: 1340775 - RNA, 20 nt, Human
uggucuggcccugccucggc

SEQ ID NO: 1340776 - RNA, 29 nt, Human
ugugcaggcacagauguagggggaacgcc

SEQ ID NO: 1340777 - RNA, 19 nt, Human
uuuuuuuuuuuuuuuuugc

SEQ ID NO: 1340778 - RNA, 25 nt, Human
uuuuuuuuuuuuuuuuuugcaauga

SEQ ID NO: 1340779 - RNA, 20 nt, Human
uuuuuuuuuuuuuuuuuugg

SEQ ID NO: 1340780 - RNA, 18 nt, Human
aaaacuugaacaucaaaa

SEQ ID NO: 1340781 - RNA, 21 nt, Human
aaacuuucuacaccaaugaug

SEQ ID NO: 1340782 - RNA, 20 nt, Human
aacagcccuuccacauagga

SEQ ID NO: 1340783 - RNA, 24 nt, Human
aaccgaauggggauacaucugaga

SEQ ID NO: 1340784 - RNA, 28 nt, Human
aacucacuaucaccaccauuaaaaccuc

SEQ ID NO: 1340785 - RNA, 24 nt, Human
acaaauauaaauccaaaaauucca

SEQ ID NO: 1340786 - RNA, 25 nt, Human
acaaauauaaauccaaaaauuccau

SEQ ID NO: 1340787 - RNA, 23 nt, Human
acacuauuguauguggugccccu

SEQ ID NO: 1340788 - RNA, 20 nt, Human
acuacauaaaaaaacuauag

SEQ ID NO: 1340789 - RNA, 28 nt, Human
acuugaacaucaaaaccuguaccuugcc

SEQ ID NO: 1340790 - RNA, 22 nt, Human
agaagaaaaaaaaacacacaaa

SEQ ID NO: 1340791 - RNA, 28 nt, Human
agaagaaaaaaaaacacacaaacuuucu

SEQ ID NO: 1340792 - RNA, 19 nt, Human
aggaaaacccucauggaga

SEQ ID NO: 1340793 - RNA, 22 nt, Human
aguauuauacaaaaaugaaaac

SEQ ID NO: 1340794 - RNA, 22 nt, Human
auaaaaaacagcuggugccaca

SEQ ID NO: 1340795 - RNA, 21 nt, Human
auagaauacaaugacugcccc

SEQ ID NO: 1340796 - RNA, 21 nt, Human
auccaaaaauuccauccaccu

SEQ ID NO: 1340797 - RNA, 21 nt, Human
auccuuuuaaggucccuaucg

SEQ ID NO: 1340798 - RNA, 20 nt, Human
auggggauacaucugagaaa

SEQ ID NO: 1340799 - RNA, 24 nt, Human
caaauuagggagggaaaagaaggc

SEQ ID NO: 1340800 - RNA, 21 nt, Human
caacuagggagaagaaaaaaa

SEQ ID NO: 1340801 - RNA, 21 nt, Human
caauacuguuuaccaaaaauu

SEQ ID NO: 1340802 - RNA, 27 nt, Human
cacaaugauauauaaaaacacauacug

SEQ ID NO: 1340803 - RNA, 25 nt, Human
caccaaguguggcaaaaguuuuugu

SEQ ID NO: 1340804 - RNA, 24 nt, Human
cacuaucaccaccauuaaaaccuu

SEQ ID NO: 1340805 - RNA, 27 nt, Human
cacugcccugaagacucaaggaacaaa

SEQ ID NO: 1340806 - RNA, 18 nt, Human
cagguguaaacaucuggu

SEQ ID NO: 1340807 - RNA, 18 nt, Human
caugcacaaaacaugcau

SEQ ID NO: 1340808 - RNA, 23 nt, Human
cauucccguuuuuagacaccaga

SEQ ID NO: 1340809 - RNA, 23 nt, Human
ccaauaaaacuugaacaucaaaa

SEQ ID NO: 1340810 - RNA, 23 nt, Human
ccucauggagacacugcccugaa

SEQ ID NO: 1340811 - RNA, 23 nt, Human
cuaguaacaguucugagaauaaa

SEQ ID NO: 1340812 - RNA, 22 nt, Human
cucaaggaacaaauauaaaucc

SEQ ID NO: 1340813 - RNA, 27 nt, Human
cucacuaucaccaccauuaaaaccuuc

SEQ ID NO: 1340814 - RNA, 24 nt, Human
cucaugcacaaaacaugcauauag

SEQ ID NO: 1340815 - RNA, 26 nt, Human
cuuaucccaauaaaacuugaacaucu

SEQ ID NO: 1340816 - RNA, 27 nt, Human
gaacaaauauaaauccaaaaauuccau

SEQ ID NO: 1340817 - RNA, 19 nt, Human
gaagaaaaaaaaacacaca

SEQ ID NO: 1340818 - RNA, 22 nt, Human
gagaagaaaaaaaaacacacaa

SEQ ID NO: 1340819 - RNA, 22 nt, Human
ggaaaagaaggcaucuaaaugu

SEQ ID NO: 1340820 - RNA, 19 nt, Human
gguuauuaggaacagggcc

SEQ ID NO: 1340821 - RNA, 20 nt, Human
uaaaaaacagcccuuccaca

SEQ ID NO: 1340822 - RNA, 28 nt, Human
uaaaauaaaaaacagcuggugccacaaa

SEQ ID NO: 1340823 - RNA, 21 nt, Human
uaaauccuccaaggaaugaaa

SEQ ID NO: 1340824 - RNA, 18 nt, Human
uaacagcaguaaaacaaa

SEQ ID NO: 1340825 - RNA, 23 nt, Human
uaacagcaguaaaacaaaugguu

SEQ ID NO: 1340826 - RNA, 19 nt, Human
uacaaaaaugaaaacacca

SEQ ID NO: 1340827 - RNA, 18 nt, Human
uacaaugacugccccuca

SEQ ID NO: 1340828 - RNA, 19 nt, Human
uacuucuaacuagcaaaac

SEQ ID NO: 1340829 - RNA, 19 nt, Human
uagggagaagaaaaaaaaa

SEQ ID NO: 1340830 - RNA, 19 nt, Human
uagugaaugucucugugcc

SEQ ID NO: 1340831 - RNA, 22 nt, Human
uccaaggaaugaaagguuggac

SEQ ID NO: 1340832 - RNA, 19 nt, Human
uccacauaggaucaaaggu

SEQ ID NO: 1340833 - RNA, 23 nt, Human
ucgguggcauagcgcucagugag

SEQ ID NO: 1340834 - RNA, 25 nt, Human
ucuaguaacaguucugagaauaaaa

SEQ ID NO: 1340835 - RNA, 24 nt, Human
ugggcucugcacagccacagcaug

SEQ ID NO: 1340836 - RNA, 25 nt, Human
uuaaaaccucaauauguacuucuaa

SEQ ID NO: 1340837 - RNA, 20 nt, Human
uuagacaccagaucacacug

SEQ ID NO: 1340838 - RNA, 19 nt, Human
uuccacauaggaucaaagg

SEQ ID NO: 1340839 - RNA, 21 nt, Human
uugaacaucaaaaccuguacc

SEQ ID NO: 1340840 - RNA, 21 nt, Human
uuguauguggugccccucaac

SEQ ID NO: 1340841 - RNA, 19 nt, Human
uuuuuaaaaagcauuccau

SEQ ID NO: 1340842 - RNA, 21 nt, Human
uuuuuuuuuuuuuuuuacagg

SEQ ID NO: 1340843 - RNA, 22 nt, Human
uuuuuuuuuuuuuuuuuacagg

SEQ ID NO: 1340844 - RNA, 20 nt, Human
aaaaaaaggcagagaaaaaa

SEQ ID NO: 1340845 - RNA, 22 nt, Human
aaaaaagaaaaaaaacaaaaaa

SEQ ID NO: 1340846 - RNA, 18 nt, Human
aaaaaccaaccaaccaac

SEQ ID NO: 1340847 - RNA, 21 nt, Human
aaaaagaaaacacagaaauaa

SEQ ID NO: 1340848 - RNA, 22 nt, Human
aaaacaaaaaaaaaaggcagag

SEQ ID NO: 1340849 - RNA, 26 nt, Human
aaaacaaaacaaaacaaaaaaacuaa

SEQ ID NO: 1340850 - RNA, 19 nt, Human
aaaaccugaacaaauccug

SEQ ID NO: 1340851 - RNA, 21 nt, Human
aaaaggcuugcuguaagagaa

SEQ ID NO: 1340852 - RNA, 19 nt, Human
aaaagucauaagacuucag

SEQ ID NO: 1340853 - RNA, 18 nt, Human
aaacaaaaaccaaccaac

SEQ ID NO: 1340854 - RNA, 19 nt, Human
aaacaaaacaaaacaaaaa

SEQ ID NO: 1340855 - RNA, 25 nt, Human
aaacaaaacaaaacaaaaaaacuaa

SEQ ID NO: 1340856 - RNA, 20 nt, Human
aaacaaaaccaaacaaaaac

SEQ ID NO: 1340857 - RNA, 19 nt, Human
aaacaauaaaacaaaacaa

SEQ ID NO: 1340858 - RNA, 20 nt, Human
aaacagcccagacaccagaa

SEQ ID NO: 1340859 - RNA, 23 nt, Human
aaacagcugaaaaacuugauuuc

SEQ ID NO: 1340860 - RNA, 20 nt, Human
aaaccuggaagaguaugaua

SEQ ID NO: 1340861 - RNA, 19 nt, Human
aaagauguuaggaagauau

SEQ ID NO: 1340862 - RNA, 18 nt, Human
aaaugaccuuccccuuga

SEQ ID NO: 1340863 - RNA, 21 nt, Human
aaaugaccuuccccuugaaac

SEQ ID NO: 1340864 - RNA, 20 nt, Human
aacaaaaaccaaccaaccaa

SEQ ID NO: 1340865 - RNA, 26 nt, Human
aacaaaaaccaaccaaccaaccaaca

SEQ ID NO: 1340866 - RNA, 18 nt, Human
aacaugccuuuaauugca

SEQ ID NO: 1340867 - RNA, 21 nt, Human
aaccaaacaaaaaccaaccaa

SEQ ID NO: 1340868 - RNA, 21 nt, Human
aaccaaacaaaggcauaaaca

SEQ ID NO: 1340869 - RNA, 26 nt, Human
aaccaugaaagaaaaaauguaagcag

SEQ ID NO: 1340870 - RNA, 22 nt, Human
aaccgcaauaacugauuuaacc

SEQ ID NO: 1340871 - RNA, 20 nt, Human
aacugcauagucaugagagc

SEQ ID NO: 1340872 - RNA, 25 nt, Human
aacuuacacaaaauacaaguuaugu

SEQ ID NO: 1340873 - RNA, 21 nt, Human
aagaaaaaaggcgauauagaa

SEQ ID NO: 1340874 - RNA, 19 nt, Human
aagaaagagacagugaaca

SEQ ID NO: 1340875 - RNA, 19 nt, Human
aagcaaggccaaccuacaa

SEQ ID NO: 1340876 - RNA, 19 nt, Human
aagcagcaccuggaacaug

SEQ ID NO: 1340877 - RNA, 18 nt, Human
aagcagcuacaaaagaac

SEQ ID NO: 1340878 - RNA, 22 nt, Human
aagcuacaaugacaaucauuca

SEQ ID NO: 1340879 - RNA, 18 nt, Human
aaggucaugaacuugaaa

SEQ ID NO: 1340880 - RNA, 21 nt, Human
aaguaaagauaauaaaacaug

SEQ ID NO: 1340881 - RNA, 18 nt, Human
aaguuccagccuuagacc

SEQ ID NO: 1340882 - RNA, 18 nt, Human
aauuaugguauaaacuug

SEQ ID NO: 1340883 - RNA, 22 nt, Human
acaaaacaaaaaaacuaaccag

SEQ ID NO: 1340884 - RNA, 20 nt, Human
acaaaaccaaacaaaaacca

SEQ ID NO: 1340885 - RNA, 24 nt, Human
acaaaaccaaacaaaaaccaacca

SEQ ID NO: 1340886 - RNA, 22 nt, Human
acaaaugaccuuccccuugaaa

SEQ ID NO: 1340887 - RNA, 22 nt, Human
acauuccaaguucaaauaaaau

SEQ ID NO: 1340888 - RNA, 21 nt, Human
accaaacaaaaaccaaccaac

SEQ ID NO: 1340889 - RNA, 22 nt, Human
accucaagaacauguuaaggua

SEQ ID NO: 1340890 - RNA, 20 nt, Human
acuauaccagaggacaaggu

SEQ ID NO: 1340891 - RNA, 18 nt, Human
agcaagcaaggccaaccu

SEQ ID NO: 1340892 - RNA, 18 nt, Human
agcacgguaaaaccggcg

SEQ ID NO: 1340893 - RNA, 27 nt, Human
agcuacaaaagaacuacugauaaacaa

SEQ ID NO: 1340894 - RNA, 24 nt, Human
aggagggggggaaaaaccugaaca

SEQ ID NO: 1340895 - RNA, 28 nt, Human
aggcuacccccuccaaccccccaaaaaa

SEQ ID NO: 1340896 - RNA, 20 nt, Human
agugagugaugaagacgcaa

SEQ ID NO: 1340897 - RNA, 23 nt, Human
aguggauuuucugguuagcauga

SEQ ID NO: 1340898 - RNA, 24 nt, Human
auauaucuuacuaacuauuuuguu

SEQ ID NO: 1340899 - RNA, 19 nt, Human
augacuccauagggaggaa

SEQ ID NO: 1340900 - RNA, 18 nt, Human
augcaggccuuugcaaga

SEQ ID NO: 1340901 - RNA, 24 nt, Human
auuaaaaacaauaaaacaaaacaa

SEQ ID NO: 1340902 - RNA, 21 nt, Human
caaaaaccaaccaaccaacca

SEQ ID NO: 1340903 - RNA, 25 nt, Human
caaaaaccaaccaaccaaccaacaa

SEQ ID NO: 1340904 - RNA, 18 nt, Human
caaaacaaaaaaacuaac

SEQ ID NO: 1340905 - RNA, 21 nt, Human
caaacaaaaaccaaccaacca

SEQ ID NO: 1340906 - RNA, 25 nt, Human
caaacaaaaaccaaccaaccaacca

SEQ ID NO: 1340907 - RNA, 23 nt, Human
caaacaaaggcauaaacaaaguu

SEQ ID NO: 1340908 - RNA, 18 nt, Human
caaagcagcaccuggaac

SEQ ID NO: 1340909 - RNA, 24 nt, Human
caaccaaccaacaaaacagcugaa

SEQ ID NO: 1340910 - RNA, 24 nt, Human
caaccuacaacccugaaugcacca

SEQ ID NO: 1340911 - RNA, 19 nt, Human
caaggccaaccuacaaccc

SEQ ID NO: 1340912 - RNA, 19 nt, Human
caagguguacuauaauacc

SEQ ID NO: 1340913 - RNA, 27 nt, Human
cacaacacaggggaaaauuaacaaaaa

SEQ ID NO: 1340914 - RNA, 21 nt, Human
cacagaaauaacuacccaacu

SEQ ID NO: 1340915 - RNA, 20 nt, Human
cacuguguaaugauuccugc

SEQ ID NO: 1340916 - RNA, 23 nt, Human
cacuuaccaaauuuccuuuuaau

SEQ ID NO: 1340917 - RNA, 22 nt, Human
cagauaaaccacaauaagucca

SEQ ID NO: 1340918 - RNA, 26 nt, Human
cagccacauuauuuacuucuuguccc

SEQ ID NO: 1340919 - RNA, 21 nt, Human
cagcuacaaaagaacuacuga

SEQ ID NO: 1340920 - RNA, 25 nt, Human
cagcugaaaaacuugauuuccaaua

SEQ ID NO: 1340921 - RNA, 18 nt, Human
cauguaugcaggcaaggc

SEQ ID NO: 1340922 - RNA, 25 nt, Human
ccaaaaauagguggggaaaaauccu

SEQ ID NO: 1340923 - RNA, 19 nt, Human
ccaaacaauuuugacucau

SEQ ID NO: 1340924 - RNA, 21 nt, Human
ccaaccaaccaacaaaacagc

SEQ ID NO: 1340925 - RNA, 23 nt, Human
ccaaccccccaaaaaaguaaaga

SEQ ID NO: 1340926 - RNA, 24 nt, Human
ccagaaagacaauguucugugggg

SEQ ID NO: 1340927 - RNA, 22 nt, Human
ccaguuugauugcagauaaguc

SEQ ID NO: 1340928 - RNA, 25 nt, Human
ccccucgcccuuuuaaauaauuuca

SEQ ID NO: 1340929 - RNA, 22 nt, Human
cccuuuaaacaaaaccaaacaa

SEQ ID NO: 1340930 - RNA, 25 nt, Human
ccuacaacccugaaugcaccaaagg

SEQ ID NO: 1340931 - RNA, 23 nt, Human
ccugaacaaauccuggaacacac

SEQ ID NO: 1340932 - RNA, 19 nt, Human
ccuggaacacaccuaugua

SEQ ID NO: 1340933 - RNA, 21 nt, Human
ccuguacuaaauguagcccaa

SEQ ID NO: 1340934 - RNA, 21 nt, Human
cuaaccauccaucccacauua

SEQ ID NO: 1340935 - RNA, 22 nt, Human
cucaagaacauguuaagguaag

SEQ ID NO: 1340936 - RNA, 20 nt, Human
cucugaacaaaagcacugug

SEQ ID NO: 1340937 - RNA, 20 nt, Human
cugcacucaagccguuugag

SEQ ID NO: 1340938 - RNA, 20 nt, Human
cuguggggaaacacuguagg

SEQ ID NO: 1340939 - RNA, 25 nt, Human
gaaaucacugggaacauuccaaguu

SEQ ID NO: 1340940 - RNA, 19 nt, Human
gaaccaaacaaaggcauaa

SEQ ID NO: 1340941 - RNA, 23 nt, Human
gaccuuccccuugaaaacugagg

SEQ ID NO: 1340942 - RNA, 18 nt, Human
gauauagaauaaaaugca

SEQ ID NO: 1340943 - RNA, 18 nt, Human
gauuugaagaaaaaaggc

SEQ ID NO: 1340944 - RNA, 19 nt, Human
gcagagaaaaaaaugaaaa

SEQ ID NO: 1340945 - RNA, 25 nt, Human
gcagagaaaaaaaugaaaacauaag

SEQ ID NO: 1340946 - RNA, 24 nt, Human
gcagcaccuggaacauguccaugc

SEQ ID NO: 1340947 - RNA, 24 nt, Human
gccaacaaggcagaaaauacccug

SEQ ID NO: 1340948 - RNA, 18 nt, Human
gcuaggcuacccccucca

SEQ ID NO: 1340949 - RNA, 23 nt, Human
ggaaaaaaagaaaaaaaacaaaa

SEQ ID NO: 1340950 - RNA, 22 nt, Human
ggaacauguccaugcucugaac

SEQ ID NO: 1340951 - RNA, 21 nt, Human
ggaggaauaacuacuacucag

SEQ ID NO: 1340952 - RNA, 24 nt, Human
ggcauaaacaaaguucaggaauaa

SEQ ID NO: 1340953 - RNA, 24 nt, Human
guacaagaaauaagcuaaaaugag

SEQ ID NO: 1340954 - RNA, 24 nt, Human
guggaggccacuuaccaaauuucc

SEQ ID NO: 1340955 - RNA, 27 nt, Human
gugguuccuguacuaaauguagcccaa

SEQ ID NO: 1340956 - RNA, 28 nt, Human
uaaaaacaauaaaacaaaacaaaacaaa

SEQ ID NO: 1340957 - RNA, 20 nt, Human
uaaaaagcuuacacaaucua

SEQ ID NO: 1340958 - RNA, 23 nt, Human
uaaaacaaaacaaaacaaaaaaa

SEQ ID NO: 1340959 - RNA, 24 nt, Human
uaaaauaaaccccuuaaggacuga

SEQ ID NO: 1340960 - RNA, 19 nt, Human
uaaaaugagauauaaaccu

SEQ ID NO: 1340961 - RNA, 18 nt, Human
uaaacaaaaccaaacaaa

SEQ ID NO: 1340962 - RNA, 22 nt, Human
uaaagcuuauacaauauacaag

SEQ ID NO: 1340963 - RNA, 19 nt, Human
uacaagauuaggagggggg

SEQ ID NO: 1340964 - RNA, 19 nt, Human
uacaguauaauauuucaau

SEQ ID NO: 1340965 - RNA, 18 nt, Human
uacagugcuugaaaacaa

SEQ ID NO: 1340966 - RNA, 18 nt, Human
uacauacauugcauguau

SEQ ID NO: 1340967 - RNA, 22 nt, Human
uagaaccucucagauaaaccac

SEQ ID NO: 1340968 - RNA, 18 nt, Human
uagaauaguaucaccugg

SEQ ID NO: 1340969 - RNA, 21 nt, Human
uagacguuuguuaaaaaaaca

SEQ ID NO: 1340970 - RNA, 21 nt, Human
uaggaaguuacaguuuugcau

SEQ ID NO: 1340971 - RNA, 23 nt, Human
uaucaaacaaguucgcgccaaua

SEQ ID NO: 1340972 - RNA, 19 nt, Human
uauggaacugagcagauuc

SEQ ID NO: 1340973 - RNA, 21 nt, Human
uauggaacugagcagauucuu

SEQ ID NO: 1340974 - RNA, 24 nt, Human
uauuucaauuaucuucggaaagaa

SEQ ID NO: 1340975 - RNA, 18 nt, Human
ucaaaaaagaaaagaaaa

SEQ ID NO: 1340976 - RNA, 24 nt, Human
ucaaaaacagcccagacaccagaa

SEQ ID NO: 1340977 - RNA, 24 nt, Human
ucaaauaucaaacaaguucgcgcc

SEQ ID NO: 1340978 - RNA, 21 nt, Human
ucaacgcugaaaucacucaaa

SEQ ID NO: 1340979 - RNA, 22 nt, Human
ucaacuuguauuccagccacau

SEQ ID NO: 1340980 - RNA, 22 nt, Human
ucagaagaaccaaacaaaggca

SEQ ID NO: 1340981 - RNA, 22 nt, Human
ucagcugaaaaaaaaagaaaaa

SEQ ID NO: 1340982 - RNA, 28 nt, Human
ucagcugaaaaaaaaagaaaaaaguucc

SEQ ID NO: 1340983 - RNA, 26 nt, Human
ucaguacuggaaaaaaagaaaaaaaa

SEQ ID NO: 1340984 - RNA, 23 nt, Human
uccaugccaugguaccucaagaa

SEQ ID NO: 1340985 - RNA, 22 nt, Human
uccaugcucugaacaaaagcac

SEQ ID NO: 1340986 - RNA, 19 nt, Human
ucccaauaaaccacaaaag

SEQ ID NO: 1340987 - RNA, 20 nt, Human
uccccaguggauuuucuggu

SEQ ID NO: 1340988 - RNA, 21 nt, Human
ucggaaagaaacuaucaaaau

SEQ ID NO: 1340989 - RNA, 24 nt, Human
ucucagauaaaccacaauaagucc

SEQ ID NO: 1340990 - RNA, 23 nt, Human
ucugugguaugagaauggccaaa

SEQ ID NO: 1340991 - RNA, 22 nt, Human
ucuuggacuuuucaaaaaagaa

SEQ ID NO: 1340992 - RNA, 19 nt, Human
ugaaaacaaagucauaagu

SEQ ID NO: 1340993 - RNA, 23 nt, Human
ugaaagaaaagaaacauuuucug

SEQ ID NO: 1340994 - RNA, 20 nt, Human
ugaaagcacagaugguacca

SEQ ID NO: 1340995 - RNA, 20 nt, Human
ugaacaaauccuggaacaca

SEQ ID NO: 1340996 - RNA, 21 nt, Human
ugagaagagagacuaaguuac

SEQ ID NO: 1340997 - RNA, 25 nt, Human
ugagagcauagauacauucuaaaca

SEQ ID NO: 1340998 - RNA, 21 nt, Human
ugagucugcugcaauuucaga

SEQ ID NO: 1340999 - RNA, 23 nt, Human
ugauaaacaauaagcuacaauga

SEQ ID NO: 1341000 - RNA, 18 nt, Human
ugauuccugccaugacuc

SEQ ID NO: 1341001 - RNA, 19 nt, Human
ugccaacaaggcagaaaau

SEQ ID NO: 1341002 - RNA, 21 nt, Human
uggaacauuucaaugcaccuc

SEQ ID NO: 1341003 - RNA, 21 nt, Human
uggaugauuggagcagauuuu

SEQ ID NO: 1341004 - RNA, 18 nt, Human
uggcacagaaaauuacac

SEQ ID NO: 1341005 - RNA, 23 nt, Human
uggccguuaaagcaaagcagcac

SEQ ID NO: 1341006 - RNA, 27 nt, Human
ugggggugauuaaaaaggcuugcugua

SEQ ID NO: 1341007 - RNA, 24 nt, Human
ugguagcaaauacuucccauauuu

SEQ ID NO: 1341008 - RNA, 18 nt, Human
ugguaugagaauggccaa

SEQ ID NO: 1341009 - RNA, 23 nt, Human
uguguaaugauuccugccaugac

SEQ ID NO: 1341010 - RNA, 24 nt, Human
uuaaaaacaauaaaacaaaacaaa

SEQ ID NO: 1341011 - RNA, 22 nt, Human
uuaaacaaaaccaaacaaaaac

SEQ ID NO: 1341012 - RNA, 21 nt, Human
uucaaaggaaccuccucccca

SEQ ID NO: 1341013 - RNA, 26 nt, Human
uugaucacugaaacagauuuaggugu

SEQ ID NO: 1341014 - RNA, 22 nt, Human
uugaucaucuaauaaaagcauu

SEQ ID NO: 1341015 - RNA, 23 nt, Human
uugcugcacucaagccguuugag

SEQ ID NO: 1341016 - RNA, 19 nt, Human
uuggagcagauuugaagaa

SEQ ID NO: 1341017 - RNA, 24 nt, Human
uuuaaacaaaaccaaacaaaaacc

SEQ ID NO: 1341018 - RNA, 23 nt, Human
uuuccuuuuuugucaacuuuuug

SEQ ID NO: 1341019 - RNA, 22 nt, Human
uuuuauggacaguaaaaagcuu

SEQ ID NO: 1341020 - RNA, 22 nt, Human
uuuuugugaaagcacagauggu

SEQ ID NO: 1341021 - RNA, 21 nt, Human
uuuuuugugaaagcacagaug

SEQ ID NO: 1341022 - RNA, 24 nt, Human
aaccaagcgaaccaguccaucagg

SEQ ID NO: 1341023 - RNA, 23 nt, Human
auggagaacaaucggcagauaca

SEQ ID NO: 1341024 - RNA, 20 nt, Human
caagcgaaccaguccaucag

SEQ ID NO: 1341025 - RNA, 22 nt, Human
caagcgaaccaguccaucaggg

SEQ ID NO: 1341026 - RNA, 22 nt, Human
cacagguauagaugcacucuag

SEQ ID NO: 1341027 - RNA, 19 nt, Human
caucagggagcaaaaaagg

SEQ ID NO: 1341028 - RNA, 24 nt, Human
ccuggacucaaagccggcccugac

SEQ ID NO: 1341029 - RNA, 20 nt, Human
cuuucuggcagacauucuag

SEQ ID NO: 1341030 - RNA, 21 nt, Human
ggagaacaaucggcagauaca

SEQ ID NO: 1341031 - RNA, 23 nt, Human
uaccaaaugccaguuuaucuguu

SEQ ID NO: 1341032 - RNA, 22 nt, Human
uagcaaagacagaguugaucag

SEQ ID NO: 1341033 - RNA, 20 nt, Human
uccaucagggagcaaaaaag

SEQ ID NO: 1341034 - RNA, 21 nt, Human
ucugucuuaucaccauauccu

SEQ ID NO: 1341035 - RNA, 22 nt, Human
ugaugauaaaggaugcaccaug

SEQ ID NO: 1341036 - RNA, 18 nt, Human
ugcaaguaccaaaugccg

SEQ ID NO: 1341037 - RNA, 22 nt, Human
ugcagugccuggacucaaagcc

SEQ ID NO: 1341038 - RNA, 19 nt, Human
ugccucuaggccucugcag

SEQ ID NO: 1341039 - RNA, 24 nt, Human
ugccuggacucaaagccggcccug

SEQ ID NO: 1341040 - RNA, 20 nt, Human
ugcuuucgugaugauaaagg

SEQ ID NO: 1341041 - RNA, 25 nt, Human
uguaccagauguauuggcguaaaag

SEQ ID NO: 1341042 - RNA, 22 nt, Human
uuggaaccauggagaacaaucg

SEQ ID NO: 1341043 - RNA, 20 nt, Human
uuuuuuuuuuuuuuuuucgg

SEQ ID NO: 1341044 - RNA, 22 nt, Human
uuuuuuuuuuuuuuuuucguuu

SEQ ID NO: 1341045 - RNA, 24 nt, Human
aaaauaaagcaaaagcucauuuca

SEQ ID NO: 1341046 - RNA, 19 nt, Human
aaacuuggaaaauaaagca

SEQ ID NO: 1341047 - RNA, 21 nt, Human
aaagacaggagcagagaggcc

SEQ ID NO: 1341048 - RNA, 22 nt, Human
aaggugagagagaaacuuggaa

SEQ ID NO: 1341049 - RNA, 22 nt, Human
accuggaagucagaaggcguug

SEQ ID NO: 1341050 - RNA, 21 nt, Human
agacaggagcagagaggccug

SEQ ID NO: 1341051 - RNA, 18 nt, Human
agcaggaggcgaauucga

SEQ ID NO: 1341052 - RNA, 21 nt, Human
agucagaaggcguugaaguau

SEQ ID NO: 1341053 - RNA, 18 nt, Human
auccucaggcucugcccu

SEQ ID NO: 1341054 - RNA, 23 nt, Human
auuacaccggggaagccuucgcc

SEQ ID NO: 1341055 - RNA, 23 nt, Human
cacccccgaagaaugccccugaa

SEQ ID NO: 1341056 - RNA, 19 nt, Human
caccuggaagucagaaggc

SEQ ID NO: 1341057 - RNA, 21 nt, Human
cagcccaggaaauuacaccgg

SEQ ID NO: 1341058 - RNA, 18 nt, Human
cagucaucaccuggaagu

SEQ ID NO: 1341059 - RNA, 20 nt, Human
ccaaacaaaagacaggagca

SEQ ID NO: 1341060 - RNA, 19 nt, Human
ccaggaaauuacaccgggg

SEQ ID NO: 1341061 - RNA, 28 nt, Human
cccccgaagaaugccccugaaggugagg

SEQ ID NO: 1341062 - RNA, 21 nt, Human
ccccgaagaaugccccugaag

SEQ ID NO: 1341063 - RNA, 18 nt, Human
ccccugaaggugagagag

SEQ ID NO: 1341064 - RNA, 19 nt, Human
cccgaagaaugccccugaa

SEQ ID NO: 1341065 - RNA, 19 nt, Human
cccugaaggugagagagaa

SEQ ID NO: 1341066 - RNA, 21 nt, Human
gaugcacccccgaagaaugcc

SEQ ID NO: 1341067 - RNA, 23 nt, Human
gccugagagcaggaggcgaauuc

SEQ ID NO: 1341068 - RNA, 21 nt, Human
ucugcccucccucugaugcac

SEQ ID NO: 1341069 - RNA, 21 nt, Human
ucuucaugaugagcaggaacu

SEQ ID NO: 1341070 - RNA, 21 nt, Human
ugaaguaucgcggggaucuuc

SEQ ID NO: 1341071 - RNA, 18 nt, Human
ugagagagaaacuuggaa

SEQ ID NO: 1341072 - RNA, 24 nt, Human
ugcacccccgaagaaugccccuga

SEQ ID NO: 1341073 - RNA, 19 nt, Human
ugccccugaaggugagaga

SEQ ID NO: 1341074 - RNA, 21 nt, Human
uuuuuuggcagagagacccaa

SEQ ID NO: 1341075 - RNA, 24 nt, Human
aaucgcuugaacccgggaggugga

SEQ ID NO: 1341076 - RNA, 24 nt, Human
aggcaggagaaucgcuugaacccg

SEQ ID NO: 1341077 - RNA, 20 nt, Human
aggcugaggcaggagaaucg

SEQ ID NO: 1341078 - RNA, 24 nt, Human
aggcugaggcaggagaaucgcuug

SEQ ID NO: 1341079 - RNA, 24 nt, Human
agguggagguuucagugggccgag

SEQ ID NO: 1341080 - RNA, 24 nt, Human
cagcuacucgggaggcugaggcag

SEQ ID NO: 1341081 - RNA, 18 nt, Human
ccccgagcaaccggcagg

SEQ ID NO: 1341082 - RNA, 21 nt, Human
ccccgagcaaccggcaggccu

SEQ ID NO: 1341083 - RNA, 22 nt, Human
ccccgagcaaccggcaggccuu

SEQ ID NO: 1341084 - RNA, 21 nt, Human
ccuguaaucucagcuacucgg

SEQ ID NO: 1341085 - RNA, 18 nt, Human
cgaccccgagcaaccggc

SEQ ID NO: 1341086 - RNA, 23 nt, Human
cgccuguaaucucagcuacucgg

SEQ ID NO: 1341087 - RNA, 24 nt, Human
cgccuguaaucucagcuacucggg

SEQ ID NO: 1341088 - RNA, 24 nt, Human
cgggagguggagguuucagugggc

SEQ ID NO: 1341089 - RNA, 21 nt, Human
cugggcaacagagcgagauuc

SEQ ID NO: 1341090 - RNA, 18 nt, Human
gaccccgagcaaccggca

SEQ ID NO: 1341091 - RNA, 19 nt, Human
gaccccgagcaaccggcag

SEQ ID NO: 1341092 - RNA, 23 nt, Human
gagaaucgcuugaacccgggagg

SEQ ID NO: 1341093 - RNA, 21 nt, Human
gagcaaccggcaggccuugcg

SEQ ID NO: 1341094 - RNA, 23 nt, Human
gccuguaaucucagcuacucggg

SEQ ID NO: 1341095 - RNA, 18 nt, Human
ggagguuucagugggccg

SEQ ID NO: 1341096 - RNA, 22 nt, Human
ggagguuucagugggccgagau

SEQ ID NO: 1341097 - RNA, 24 nt, Human
ggagguuucagugggccgagaugg

SEQ ID NO: 1341098 - RNA, 18 nt, Human
ggcgugguggcgggcgcc

SEQ ID NO: 1341099 - RNA, 23 nt, Human
ggcgugguggcgggcgccuguaa

SEQ ID NO: 1341100 - RNA, 24 nt, Human
gguggcgggcgccuguaaucucag

SEQ ID NO: 1341101 - RNA, 25 nt, Human
gucauacgaccccgagcaaccggca

SEQ ID NO: 1341102 - RNA, 19 nt, Human
gucugcggcuuccggucgu

SEQ ID NO: 1341103 - RNA, 23 nt, Human
uacccacggccucgugagggcuc

SEQ ID NO: 1341104 - RNA, 23 nt, Human
uacgaccccgagcaaccggcagg

SEQ ID NO: 1341105 - RNA, 24 nt, Human
ucgcuugaacccgggagguggagg

SEQ ID NO: 1341106 - RNA, 24 nt, Human
ucgggaggcugaggcaggagaauc

SEQ ID NO: 1341107 - RNA, 20 nt, Human
ugaggcaggagaaucgcuug

SEQ ID NO: 1341108 - RNA, 24 nt, Human
ugaggcaggagaaucgcuugaacc

SEQ ID NO: 1341109 - RNA, 25 nt, Human
ugaggcaggagaaucgcuugaaccc

SEQ ID NO: 1341110 - RNA, 20 nt, Human
ugggccgagaugggcugggc

SEQ ID NO: 1341111 - RNA, 24 nt, Human
ugguggcgggcgccuguaaucuca

SEQ ID NO: 1341112 - RNA, 21 nt, Human
uuucagugggccgagaugggc

SEQ ID NO: 1341113 - RNA, 24 nt, Human
aaacagcccuugggcuccccuccc

SEQ ID NO: 1341114 - RNA, 21 nt, Human
acucugaggagagcaaguggc

SEQ ID NO: 1341115 - RNA, 20 nt, Human
agagcaaguggcagaaacag

SEQ ID NO: 1341116 - RNA, 18 nt, Human
cacauuuggcucguggcu

SEQ ID NO: 1341117 - RNA, 21 nt, Human
cagcagccaccgaccacuuuu

SEQ ID NO: 1341118 - RNA, 21 nt, Human
cagcccuugggcuccccuccc

SEQ ID NO: 1341119 - RNA, 20 nt, Human
cagugcugccagccgaccuu

SEQ ID NO: 1341120 - RNA, 23 nt, Human
ccccaucaccuuggccagugcug

SEQ ID NO: 1341121 - RNA, 19 nt, Human
ccuugggcuccccucccca

SEQ ID NO: 1341122 - RNA, 23 nt, Human
cuguguagcacaccccaucaccu

SEQ ID NO: 1341123 - RNA, 19 nt, Human
cuugggcuccccuccccag

SEQ ID NO: 1341124 - RNA, 20 nt, Human
gaccacuuuugcuuauugag

SEQ ID NO: 1341125 - RNA, 22 nt, Human
ggcucguggcuccuguacugga

SEQ ID NO: 1341126 - RNA, 20 nt, Human
gugcuguccaauacagcagc

SEQ ID NO: 1341127 - RNA, 22 nt, Human
guggcagaaacagcccuugggc

SEQ ID NO: 1341128 - RNA, 20 nt, Human
uagcacaccccaucaccuug

SEQ ID NO: 1341129 - RNA, 22 nt, Human
uagcacaccccaucaccuuggc

SEQ ID NO: 1341130 - RNA, 24 nt, Human
uagcacaccccaucaccuuggcca

SEQ ID NO: 1341131 - RNA, 20 nt, Human
uaggcccugaccugguccag

SEQ ID NO: 1341132 - RNA, 20 nt, Human
uccauccacuacacagugac

SEQ ID NO: 1341133 - RNA, 21 nt, Human
uccauccacuacacagugaca

SEQ ID NO: 1341134 - RNA, 22 nt, Human
uccauccacuacacagugacau

SEQ ID NO: 1341135 - RNA, 19 nt, Human
ucguggcuccuguacugga

SEQ ID NO: 1341136 - RNA, 24 nt, Human
ucuguggugauggaaaucuuuuuc

SEQ ID NO: 1341137 - RNA, 18 nt, Human
ugagcaccucaauauaga

SEQ ID NO: 1341138 - RNA, 18 nt, Human
uggacaacacagcuguag

SEQ ID NO: 1341139 - RNA, 19 nt, Human
ugggcuccccuccccagag

SEQ ID NO: 1341140 - RNA, 25 nt, Human
uuuuuauuccacaaacaguaaacuc

SEQ ID NO: 1341141 - RNA, 24 nt, Human
aaacggguacauagacauguucuu

SEQ ID NO: 1341142 - RNA, 21 nt, Human
aacuguauaaugccugagaac

SEQ ID NO: 1341143 - RNA, 20 nt, Human
auauacuccuccuuccuaga

SEQ ID NO: 1341144 - RNA, 20 nt, Human
caaaaaaguacccuacuaaa

SEQ ID NO: 1341145 - RNA, 18 nt, Human
cacaaaaaagagcaguaa

SEQ ID NO: 1341146 - RNA, 22 nt, Human
cacaaaaaagagcaguaaaaua

SEQ ID NO: 1341147 - RNA, 20 nt, Human
cccuacuaaaccuuucuaug

SEQ ID NO: 1341148 - RNA, 19 nt, Human
ccuccuuccuagaaacggg

SEQ ID NO: 1341149 - RNA, 21 nt, Human
cggguacauagacauguucuu

SEQ ID NO: 1341150 - RNA, 23 nt, Human
gaaagaagguggacauuuuuggu

SEQ ID NO: 1341151 - RNA, 18 nt, Human
gaagguggacauuuuugg

SEQ ID NO: 1341152 - RNA, 18 nt, Human
gacagaccaaaugcaucu

SEQ ID NO: 1341153 - RNA, 18 nt, Human
gcaucugugucagaaaua

SEQ ID NO: 1341154 - RNA, 22 nt, Human
gcuccacggcgucccgccccuc

SEQ ID NO: 1341155 - RNA, 20 nt, Human
ggguacauagacauguucuu

SEQ ID NO: 1341156 - RNA, 18 nt, Human
gucccgccccuccuccuc

SEQ ID NO: 1341157 - RNA, 24 nt, Human
uaaaaccucagcauuucaaaaaag

SEQ ID NO: 1341158 - RNA, 23 nt, Human
uaaaauaaauacucagaacuuuc

SEQ ID NO: 1341159 - RNA, 23 nt, Human
uaaauacucagaacuuucccagg

SEQ ID NO: 1341160 - RNA, 20 nt, Human
uaugcacaaaaaagagcagu

SEQ ID NO: 1341161 - RNA, 20 nt, Human
ucagaaauagacaaaaggca

SEQ ID NO: 1341162 - RNA, 18 nt, Human
uccucgguugucgccacc

SEQ ID NO: 1341163 - RNA, 19 nt, Human
uccucgguugucgccaccg

SEQ ID NO: 1341164 - RNA, 22 nt, Human
ugcaaaaaaguacccuacuaaa

SEQ ID NO: 1341165 - RNA, 23 nt, Human
ugcaguuuugacagaccaaaugc

SEQ ID NO: 1341166 - RNA, 18 nt, Human
ugucagaaauagacaaaa

SEQ ID NO: 1341167 - RNA, 18 nt, Human
uucuuccaugaauugccc

SEQ ID NO: 1341168 - RNA, 19 nt, Human
uuguauuauuccacuuagc

SEQ ID NO: 1341169 - RNA, 22 nt, Human
uuuuuuuuuuuuuuuuuccuuu

SEQ ID NO: 1341170 - RNA, 23 nt, Human
uuuuuuuuuuuuuuuuuuccuuu

SEQ ID NO: 1341171 - RNA, 26 nt, Human
uuuuuuuuuuuuuuuuuuuccuuuaa

SEQ ID NO: 1341172 - RNA, 18 nt, Human
aaaaauagagcgucuccc

SEQ ID NO: 1341173 - RNA, 23 nt, Human
aaacccaaaauguuaggucgaaa

SEQ ID NO: 1341174 - RNA, 19 nt, Human
aagaaucaaucaucaccca

SEQ ID NO: 1341175 - RNA, 20 nt, Human
aaugaccccguguucaaaaa

SEQ ID NO: 1341176 - RNA, 24 nt, Human
acacagcugcaaguacccguaggc

SEQ ID NO: 1341177 - RNA, 22 nt, Human
accccguguucaaaaacagccg

SEQ ID NO: 1341178 - RNA, 20 nt, Human
acugcagaaugaccccgugu

SEQ ID NO: 1341179 - RNA, 24 nt, Human
agacacgcgccggcagcuucccag

SEQ ID NO: 1341180 - RNA, 18 nt, Human
caccgccagccucagggc

SEQ ID NO: 1341181 - RNA, 19 nt, Human
cagagucccacgguauccc

SEQ ID NO: 1341182 - RNA, 18 nt, Human
cagcacagugagcagcag

SEQ ID NO: 1341183 - RNA, 22 nt, Human
cagcagcguggcgcucacagag

SEQ ID NO: 1341184 - RNA, 20 nt, Human
cagguccgagggccagcacc

SEQ ID NO: 1341185 - RNA, 20 nt, Human
caucacccaauacaaauaaa

SEQ ID NO: 1341186 - RNA, 19 nt, Human
cauuuggaguagcaucuga

SEQ ID NO: 1341187 - RNA, 26 nt, Human
ccagcaccugcuuuggugacggaagc

SEQ ID NO: 1341188 - RNA, 23 nt, Human
cccaaaauguuaggucgaaagaa

SEQ ID NO: 1341189 - RNA, 19 nt, Human
cccaugcacaacugcguau

SEQ ID NO: 1341190 - RNA, 21 nt, Human
cccccgaggacgggccuccug

SEQ ID NO: 1341191 - RNA, 20 nt, Human
ccgaaaggacccagaacaaa

SEQ ID NO: 1341192 - RNA, 21 nt, Human
ccgucccgccgcacgcguccc

SEQ ID NO: 1341193 - RNA, 23 nt, Human
ccguguucaaaaacagccgcucc

SEQ ID NO: 1341194 - RNA, 18 nt, Human
ccuccaccgagcgugagg

SEQ ID NO: 1341195 - RNA, 21 nt, Human
ccucccgaaaggacccagaac

SEQ ID NO: 1341196 - RNA, 23 nt, Human
ccucccgaaaggacccagaacaa

SEQ ID NO: 1341197 - RNA, 22 nt, Human
ccuccugugcugcccaucagcc

SEQ ID NO: 1341198 - RNA, 24 nt, Human
ccucugaaacgucccuccagccgu

SEQ ID NO: 1341199 - RNA, 20 nt, Human
cgcacgcgucccuccaccga

SEQ ID NO: 1341200 - RNA, 18 nt, Human
cggccagcaggggcgacg

SEQ ID NO: 1341201 - RNA, 20 nt, Human
cucacagagaccagcagggc

SEQ ID NO: 1341202 - RNA, 23 nt, Human
gagaccagcagggcgcagcucug

SEQ ID NO: 1341203 - RNA, 19 nt, Human
gcagggcgcagcucuggga

SEQ ID NO: 1341204 - RNA, 18 nt, Human
gcccuggcugggcucuca

SEQ ID NO: 1341205 - RNA, 20 nt, Human
gcgccucccggcuuccgucc

SEQ ID NO: 1341206 - RNA, 21 nt, Human
ggccggcgcuccgcgcagggc

SEQ ID NO: 1341207 - RNA, 18 nt, Human
guggugucuccacguggc

SEQ ID NO: 1341208 - RNA, 26 nt, Human
uaaaacccaaaauguuaggucgaaag

SEQ ID NO: 1341209 - RNA, 24 nt, Human
uaacugugaaaaaauagagcgucu

SEQ ID NO: 1341210 - RNA, 24 nt, Human
uauuuaugcgcaacgguucacaca

SEQ ID NO: 1341211 - RNA, 23 nt, Human
ucacacaagccuuccugaaauuc

SEQ ID NO: 1341212 - RNA, 21 nt, Human
ucagcccucccgaaaggaccc

SEQ ID NO: 1341213 - RNA, 21 nt, Human
ucccgaaaggacccagaacaa

SEQ ID NO: 1341214 - RNA, 21 nt, Human
ucugggaugccacaugggaca

SEQ ID NO: 1341215 - RNA, 21 nt, Human
ugcuuuggugaccgcagcugu

SEQ ID NO: 1341216 - RNA, 22 nt, Human
uggcgcagggcacgugcacucc

SEQ ID NO: 1341217 - RNA, 22 nt, Human
ugggagagggugacgccgcggu

SEQ ID NO: 1341218 - RNA, 23 nt, Human
ugggagagggugacgccgcggua

SEQ ID NO: 1341219 - RNA, 18 nt, Human
ugggucccagcagcacag

SEQ ID NO: 1341220 - RNA, 21 nt, Human
uucaaaaacagccgcucccau

SEQ ID NO: 1341221 - RNA, 20 nt, Human
aauuaccuaccacaacaccu

SEQ ID NO: 1341222 - RNA, 19 nt, Human
aauuuucgacucacaguuc

SEQ ID NO: 1341223 - RNA, 21 nt, Human
accuaccacaacaccugggaa

SEQ ID NO: 1341224 - RNA, 21 nt, Human
acuaccaccuuuccgcagaag

SEQ ID NO: 1341225 - RNA, 25 nt, Human
aggagaagagagaccgcugagagaa

SEQ ID NO: 1341226 - RNA, 24 nt, Human
caagagugagaaugagagccagua

SEQ ID NO: 1341227 - RNA, 24 nt, Human
cacaaacaugcaugcauccaggua

SEQ ID NO: 1341228 - RNA, 22 nt, Human
cacaacaccugggaauuaugag

SEQ ID NO: 1341229 - RNA, 21 nt, Human
cagaagcaacugcaaaagcgc

SEQ ID NO: 1341230 - RNA, 24 nt, Human
ccaaaagaccuguuuguuacacaa

SEQ ID NO: 1341231 - RNA, 19 nt, Human
ccgcugagagaaucguagg

SEQ ID NO: 1341232 - RNA, 21 nt, Human
cuagauaagccaaaagaccug

SEQ ID NO: 1341233 - RNA, 28 nt, Human
gagaauagcaugagggaaaccgguaccc

SEQ ID NO: 1341234 - RNA, 18 nt, Human
gcaaaagcgccggcuccg

SEQ ID NO: 1341235 - RNA, 20 nt, Human
guggaaggcaccucuucaca

SEQ ID NO: 1341236 - RNA, 18 nt, Human
uacacaaacaugcaugca

SEQ ID NO: 1341237 - RNA, 23 nt, Human
uauaaaaccaucagaucucauga

SEQ ID NO: 1341238 - RNA, 21 nt, Human
uaucaugagaauagcaugagg

SEQ ID NO: 1341239 - RNA, 18 nt, Human
ucagaucucaugaaagcu

SEQ ID NO: 1341240 - RNA, 19 nt, Human
uccacauggcugggaaggc

SEQ ID NO: 1341241 - RNA, 22 nt, Human
ugaaagcucacuaucaugagaa

SEQ ID NO: 1341242 - RNA, 20 nt, Human
ugagaaugagagccaguagg

SEQ ID NO: 1341243 - RNA, 22 nt, Human
ugagagccaguaggggaaaugc

SEQ ID NO: 1341244 - RNA, 32 nt, Human
uuaacaaucacgguggaaggcaccucuucuuu

SEQ ID NO: 1341245 - RNA, 25 nt, Human
uuaauuuucgacucacaguuccaca

SEQ ID NO: 1341246 - RNA, 23 nt, Human
uucaaacuugaggagaagagaga

SEQ ID NO: 1341247 - RNA, 23 nt, Human
aaaggcaaaggguauguggugag

SEQ ID NO: 1341248 - RNA, 19 nt, Human
aacaaugguugcugauuug

SEQ ID NO: 1341249 - RNA, 23 nt, Human
aagagaccagcagacaaacugag

SEQ ID NO: 1341250 - RNA, 21 nt, Human
aagccguaauugcugaaaaug

SEQ ID NO: 1341251 - RNA, 24 nt, Human
acguuuaagagucucucucccucc

SEQ ID NO: 1341252 - RNA, 24 nt, Human
agagacgugcagggccuggccccc

SEQ ID NO: 1341253 - RNA, 23 nt, Human
agagagagagauuccagugucac

SEQ ID NO: 1341254 - RNA, 20 nt, Human
caagagaccagcagacaaac

SEQ ID NO: 1341255 - RNA, 20 nt, Human
caccauuugaggccggguag

SEQ ID NO: 1341256 - RNA, 21 nt, Human
caggaagacugcagaucauaa

SEQ ID NO: 1341257 - RNA, 21 nt, Human
cagugucucauguaaaaccuc

SEQ ID NO: 1341258 - RNA, 22 nt, Human
cccaagagaccagcagacaaac

SEQ ID NO: 1341259 - RNA, 19 nt, Human
cccggccggggcugccuga

SEQ ID NO: 1341260 - RNA, 20 nt, Human
cccugggcacccaggauggc

SEQ ID NO: 1341261 - RNA, 19 nt, Human
ccgcugccggcucagccgc

SEQ ID NO: 1341262 - RNA, 21 nt, Human
ccucucugccagcuucucuug

SEQ ID NO: 1341263 - RNA, 22 nt, Human
ccugaggcggcccgcugccggc

SEQ ID NO: 1341264 - RNA, 26 nt, Human
cgagaaaugccaccacguggcacugc

SEQ ID NO: 1341265 - RNA, 24 nt, Human
cggguaggagagacgugcagggcc

SEQ ID NO: 1341266 - RNA, 22 nt, Human
cucucugccagcuucucuugga

SEQ ID NO: 1341267 - RNA, 22 nt, Human
cugcagaucauaacaacaaugg

SEQ ID NO: 1341268 - RNA, 20 nt, Human
cugcaggaggagacuggugg

SEQ ID NO: 1341269 - RNA, 23 nt, Human
cugccggcucagccgccaccaag

SEQ ID NO: 1341270 - RNA, 18 nt, Human
cugccggggacccgggcg

SEQ ID NO: 1341271 - RNA, 19 nt, Human
cuggccccccaagagacca

SEQ ID NO: 1341272 - RNA, 21 nt, Human
gagagauuccagugucaccag

SEQ ID NO: 1341273 - RNA, 24 nt, Human
gaggcccuggugugguaccaucau

SEQ ID NO: 1341274 - RNA, 19 nt, Human
gaggugcgaacaaagccug

SEQ ID NO: 1341275 - RNA, 20 nt, Human
gcagacaaacugaggcggca

SEQ ID NO: 1341276 - RNA, 22 nt, Human
gccaacagcccaaaguuuuaag

SEQ ID NO: 1341277 - RNA, 20 nt, Human
ggaggagacugguggaagcc

SEQ ID NO: 1341278 - RNA, 22 nt, Human
ggcccggccggggcugccugag

SEQ ID NO: 1341279 - RNA, 21 nt, Human
ggccuggccccccaagagacc

SEQ ID NO: 1341280 - RNA, 23 nt, Human
guugcugauuuggcaucaaagag

SEQ ID NO: 1341281 - RNA, 19 nt, Human
uaagggaagaccucucugc

SEQ ID NO: 1341282 - RNA, 18 nt, Human
uaauugcugaaaauggca

SEQ ID NO: 1341283 - RNA, 23 nt, Human
uagagguuucauaauuuugcucu

SEQ ID NO: 1341284 - RNA, 22 nt, Human
uauguggugaggggccaggcug

SEQ ID NO: 1341285 - RNA, 19 nt, Human
ucaaagccguaauugcuga

SEQ ID NO: 1341286 - RNA, 23 nt, Human
ucucauguaaaaccuccaaggca

SEQ ID NO: 1341287 - RNA, 18 nt, Human
ucucccuccuuguguucu

SEQ ID NO: 1341288 - RNA, 23 nt, Human
ugaaaauggcaccaacaugcugc

SEQ ID NO: 1341289 - RNA, 18 nt, Human
ugccggggacccgggcgg

SEQ ID NO: 1341290 - RNA, 21 nt, Human
ugcugaaaauggcaccaacau

SEQ ID NO: 1341291 - RNA, 22 nt, Human
uggagagagugggugaccaaca

SEQ ID NO: 1341292 - RNA, 20 nt, Human
uggcaucaaagagguggcac

SEQ ID NO: 1341293 - RNA, 18 nt, Human
ugggaggagcgggcggua

SEQ ID NO: 1341294 - RNA, 19 nt, Human
uguggugaggggccaggcu

SEQ ID NO: 1341295 - RNA, 19 nt, Human
uguggugaggggccaggcu

SEQ ID NO: 1341296 - RNA, 22 nt, Human
uuggcaucaaagagguggcacu

SEQ ID NO: 1341297 - RNA, 18 nt, Human
aaaauuaaaacaucagcc

SEQ ID NO: 1341298 - RNA, 20 nt, Human
aacauagugagaccccccca

SEQ ID NO: 1341299 - RNA, 23 nt, Human
aacauagugagacccccccaucu

SEQ ID NO: 1341300 - RNA, 23 nt, Human
aagaagaaaaaguagagagacac

SEQ ID NO: 1341301 - RNA, 21 nt, Human
aagaagaagaaaaaguagaga

SEQ ID NO: 1341302 - RNA, 22 nt, Human
aagccucccacggcccgcccag

SEQ ID NO: 1341303 - RNA, 25 nt, Human
agaaaaaguagagagacacgaggac

SEQ ID NO: 1341304 - RNA, 21 nt, Human
agaagaagaaaaaguagagag

SEQ ID NO: 1341305 - RNA, 22 nt, Human
agacccccccaucucugcaaaa

SEQ ID NO: 1341306 - RNA, 21 nt, Human
agacucaacaccaaaccagaa

SEQ ID NO: 1341307 - RNA, 23 nt, Human
agcaagaagaagaaaaaguagag

SEQ ID NO: 1341308 - RNA, 25 nt, Human
agcaagaagaagaaaaaguagagag

SEQ ID NO: 1341309 - RNA, 22 nt, Human
agccugggcaacauagugagac

SEQ ID NO: 1341310 - RNA, 23 nt, Human
agccugggcaacauagugagacc

SEQ ID NO: 1341311 - RNA, 24 nt, Human
agccugggcaacauagugagaccc

SEQ ID NO: 1341312 - RNA, 20 nt, Human
agcuucuugggaggcugagg

SEQ ID NO: 1341313 - RNA, 24 nt, Human
agcuucuugggaggcugagguggg

SEQ ID NO: 1341314 - RNA, 24 nt, Human
aggcugaggugggaggauugcuug

SEQ ID NO: 1341315 - RNA, 22 nt, Human
aggugggaggauugcuugagcu

SEQ ID NO: 1341316 - RNA, 23 nt, Human
agguugaggcugcagugagccau

SEQ ID NO: 1341317 - RNA, 24 nt, Human
agugagccauugcauuccagccug

SEQ ID NO: 1341318 - RNA, 18 nt, Human
auacuggacccucccaag

SEQ ID NO: 1341319 - RNA, 18 nt, Human
augucaaaagaaugaaau

SEQ ID NO: 1341320 - RNA, 18 nt, Human
auugcauuccagccuggg

SEQ ID NO: 1341321 - RNA, 24 nt, Human
auugcauuccagccugggucacgg

SEQ ID NO: 1341322 - RNA, 19 nt, Human
auugcuugagcucaggagg

SEQ ID NO: 1341323 - RNA, 20 nt, Human
caaaauuaaaacaucagccg

SEQ ID NO: 1341324 - RNA, 22 nt, Human
caaaauuaaaacaucagccgac

SEQ ID NO: 1341325 - RNA, 23 nt, Human
caucuucaucuugagagaggaag

SEQ ID NO: 1341326 - RNA, 18 nt, Human
cauuccagccugggucac

SEQ ID NO: 1341327 - RNA, 23 nt, Human
cauuccagccugggucacggagc

SEQ ID NO: 1341328 - RNA, 18 nt, Human
cauugcauuccagccugg

SEQ ID NO: 1341329 - RNA, 19 nt, Human
cauugcauuccagccuggg

SEQ ID NO: 1341330 - RNA, 20 nt, Human
cauugcauuccagccugggu

SEQ ID NO: 1341331 - RNA, 22 nt, Human
cauugcauuccagccuggguca

SEQ ID NO: 1341332 - RNA, 20 nt, Human
ccauugcauuccagccuggg

SEQ ID NO: 1341333 - RNA, 21 nt, Human
ccauugcauuccagccugggu

SEQ ID NO: 1341334 - RNA, 22 nt, Human
ccauugcauuccagccuggguc

SEQ ID NO: 1341335 - RNA, 24 nt, Human
ccauugcauuccagccugggucac

SEQ ID NO: 1341336 - RNA, 22 nt, Human
cccggcccccaccucaggaagc

SEQ ID NO: 1341337 - RNA, 22 nt, Human
ccucauacuggacccucccaag

SEQ ID NO: 1341338 - RNA, 24 nt, Human
cgagaccagccugggcaacauagu

SEQ ID NO: 1341339 - RNA, 18 nt, Human
cugcagugagccauugca

SEQ ID NO: 1341340 - RNA, 21 nt, Human
cuggaagcaaggcugaacauc

SEQ ID NO: 1341341 - RNA, 21 nt, Human
cuuagcacugaacucgucaca

SEQ ID NO: 1341342 - RNA, 20 nt, Human
gaacaucuucaucuugagag

SEQ ID NO: 1341343 - RNA, 24 nt, Human
gaccguguccccauccagcaagac

SEQ ID NO: 1341344 - RNA, 24 nt, Human
gaggugggaggauugcuugagcuc

SEQ ID NO: 1341345 - RNA, 24 nt, Human
gcaggagagagacucaacaccaaa

SEQ ID NO: 1341346 - RNA, 24 nt, Human
gcauuccagccugggucacggagc

SEQ ID NO: 1341347 - RNA, 19 nt, Human
gccauugcauuccagccug

SEQ ID NO: 1341348 - RNA, 24 nt, Human
gcucaggagguugaggcugcagug

SEQ ID NO: 1341349 - RNA, 24 nt, Human
gcuugagcucaggagguugaggcu

SEQ ID NO: 1341350 - RNA, 22 nt, Human
ggaagccucccacggcccgccc

SEQ ID NO: 1341351 - RNA, 22 nt, Human
ggaggauugcuugagcucagga

SEQ ID NO: 1341352 - RNA, 27 nt, Human
gucauccucucaccucauacuggaccc

SEQ ID NO: 1341353 - RNA, 25 nt, Human
uaaaaaccucagaucagcagaccga

SEQ ID NO: 1341354 - RNA, 20 nt, Human
uaaaauauucacauaauguc

SEQ ID NO: 1341355 - RNA, 24 nt, Human
uagagagacacgaggacacacaca

SEQ ID NO: 1341356 - RNA, 23 nt, Human
uagcuucuugggaggcugaggug

SEQ ID NO: 1341357 - RNA, 24 nt, Human
uagcuucuugggaggcugaggugg

SEQ ID NO: 1341358 - RNA, 22 nt, Human
uagugagacccccccaucucug

SEQ ID NO: 1341359 - RNA, 19 nt, Human
ucacggagcugguggccag

SEQ ID NO: 1341360 - RNA, 19 nt, Human
ucccaaggaggaugugacc

SEQ ID NO: 1341361 - RNA, 21 nt, Human
ucucagguuuccuacauggcu

SEQ ID NO: 1341362 - RNA, 23 nt, Human
ugaaaugauagcgauauagccaa

SEQ ID NO: 1341363 - RNA, 23 nt, Human
ugaaugcaguccgucauaugacc

SEQ ID NO: 1341364 - RNA, 19 nt, Human
ugagagaggaagaggccca

SEQ ID NO: 1341365 - RNA, 20 nt, Human
ugaggugggaggauugcuug

SEQ ID NO: 1341366 - RNA, 23 nt, Human
ugaggugggaggauugcuugagc

SEQ ID NO: 1341367 - RNA, 23 nt, Human
ugaggugggaggauugcuugagc

SEQ ID NO: 1341368 - RNA, 24 nt, Human
ugaggugggaggauugcuugagcu

SEQ ID NO: 1341369 - RNA, 19 nt, Human
uggacaucacagugcuaaa

SEQ ID NO: 1341370 - RNA, 26 nt, Human
uggcccggcccccaccucaggaagcc

SEQ ID NO: 1341371 - RNA, 22 nt, Human
ugggaggcugaggugggaggau

SEQ ID NO: 1341372 - RNA, 24 nt, Human
ugggaggcugaggugggaggauug

SEQ ID NO: 1341373 - RNA, 20 nt, Human
uggugguguguacauguggu

SEQ ID NO: 1341374 - RNA, 21 nt, Human
uguccccauccagcaagacca

SEQ ID NO: 1341375 - RNA, 20 nt, Human
ugugaccaaauguuugcaga

SEQ ID NO: 1341376 - RNA, 24 nt, Human
uugcuugagcucaggagguugagg

SEQ ID NO: 1341377 - RNA, 20 nt, Human
uugggaggcugaggugggag

SEQ ID NO: 1341378 - RNA, 19 nt, Human
uuuaacauaccccuuggcc

SEQ ID NO: 1341379 - RNA, 24 nt, Human
uuuauuagucuuauuuuccaguaa

SEQ ID NO: 1341380 - RNA, 22 nt, Human
uuucaguggaacucaguuuguu

SEQ ID NO: 1341381 - RNA, 25 nt, Human
uuucucuuuuuaaacauugccaguu

SEQ ID NO: 1341382 - RNA, 22 nt, Human
aaaagaagaaauaaauauacaa

SEQ ID NO: 1341383 - RNA, 18 nt, Human
aggcucggaguagugacc

SEQ ID NO: 1341384 - RNA, 25 nt, Human
cacgugguucuacaauaauuuuucc

SEQ ID NO: 1341385 - RNA, 22 nt, Human
cgucacaggcucggaguaguga

SEQ ID NO: 1341386 - RNA, 24 nt, Human
cgugguucuacaauaauuuuuccu

SEQ ID NO: 1341387 - RNA, 21 nt, Human
cugccgcaaacgucacaggcu

SEQ ID NO: 1341388 - RNA, 20 nt, Human
ggaaaagaagaaauaaauau

SEQ ID NO: 1341389 - RNA, 23 nt, Human
uucacauauugccacaauaguua

SEQ ID NO: 1341390 - RNA, 18 nt, Human
aaacaagcccccucccuc

SEQ ID NO: 1341391 - RNA, 18 nt, Human
aaacaagcccccucccuc

SEQ ID NO: 1341392 - RNA, 20 nt, Human
aaacaagcccccucccucag

SEQ ID NO: 1341393 - RNA, 21 nt, Human
aaacacgaagggggcagcugg

SEQ ID NO: 1341394 - RNA, 23 nt, Human
aacaagcccccucccucagugcu

SEQ ID NO: 1341395 - RNA, 21 nt, Human
aagugcugggccgcccagagg

SEQ ID NO: 1341396 - RNA, 20 nt, Human
acacgaagggggcagcugga

SEQ ID NO: 1341397 - RNA, 22 nt, Human
agcaggaagaaguugugucuga

SEQ ID NO: 1341398 - RNA, 20 nt, Human
aggaagaaguugugucugag

SEQ ID NO: 1341399 - RNA, 19 nt, Human
agggaagggaaacaagccc

SEQ ID NO: 1341400 - RNA, 23 nt, Human
caccaggcugagggcuucuuggu

SEQ ID NO: 1341401 - RNA, 20 nt, Human
cagagggacagcccugcccu

SEQ ID NO: 1341402 - RNA, 23 nt, Human
cagggccaggcgggcccauuacg

SEQ ID NO: 1341403 - RNA, 23 nt, Human
cccagcuacagcaaacacaggga

SEQ ID NO: 1341404 - RNA, 19 nt, Human
ccccacgacuggagcagca

SEQ ID NO: 1341405 - RNA, 20 nt, Human
ccgggagggaagggaaacaa

SEQ ID NO: 1341406 - RNA, 18 nt, Human
ccuccugcccucucccca

SEQ ID NO: 1341407 - RNA, 18 nt, Human
ccugcccucuccccaucc

SEQ ID NO: 1341408 - RNA, 24 nt, Human
cuacagcaaacacagggaaacacg

SEQ ID NO: 1341409 - RNA, 19 nt, Human
cugcccuggagcuugucgc

SEQ ID NO: 1341410 - RNA, 24 nt, Human
gaagauuuggucuugaacuugggg

SEQ ID NO: 1341411 - RNA, 26 nt, Human
gaagggaaacaagcccccucccucaa

SEQ ID NO: 1341412 - RNA, 30 nt, Human
gaggaaaaggcacuuggcugggucuccccc

SEQ ID NO: 1341413 - RNA, 23 nt, Human
gagggcuucuugguuccuggaga

SEQ ID NO: 1341414 - RNA, 23 nt, Human
gcacuuggcugggucuccuccug

SEQ ID NO: 1341415 - RNA, 19 nt, Human
gcuacagcaaacacaggga

SEQ ID NO: 1341416 - RNA, 22 nt, Human
ggagcagcaggaagaaguugug

SEQ ID NO: 1341417 - RNA, 21 nt, Human
uacagcaaacacagggaaaca

SEQ ID NO: 1341418 - RNA, 22 nt, Human
uacagcaaacacagggaaacac

SEQ ID NO: 1341419 - RNA, 20 nt, Human
ucaguccuggcucuaggcuc

SEQ ID NO: 1341420 - RNA, 19 nt, Human
uccgcgcgcucgcagcgca

SEQ ID NO: 1341421 - RNA, 18 nt, Human
ugcccagcuacagcaaac

SEQ ID NO: 1341422 - RNA, 22 nt, Human
ugcccuggagcuugucgccggg

SEQ ID NO: 1341423 - RNA, 23 nt, Human
ugcccuggagcuugucgccggga

SEQ ID NO: 1341424 - RNA, 19 nt, Human
ugcggcgcggcgcccaggg

SEQ ID NO: 1341425 - RNA, 21 nt, Human
ugucugaggaagugcugggcc

SEQ ID NO: 1341426 - RNA, 20 nt, Human
uuggucuugaacuugggggg

SEQ ID NO: 1341427 - RNA, 25 nt, Human
aaaaaaucccaaggcaaguaacaca

SEQ ID NO: 1341428 - RNA, 26 nt, Human
aaaauaaaacaagugcuuauuacgaa

SEQ ID NO: 1341429 - RNA, 19 nt, Human
aaaaugcccaaagcugcag

SEQ ID NO: 1341430 - RNA, 23 nt, Human
aacacaauuuguucacuagcacu

SEQ ID NO: 1341431 - RNA, 21 nt, Human
aacagaacagaaaaaucaaga

SEQ ID NO: 1341432 - RNA, 22 nt, Human
aacauccugaacauagcaauuc

SEQ ID NO: 1341433 - RNA, 25 nt, Human
aagcaaaaguauguaaugcaacagc

SEQ ID NO: 1341434 - RNA, 18 nt, Human
aagcugcagcuguuugga

SEQ ID NO: 1341435 - RNA, 18 nt, Human
acaaagucagaggaagaa

SEQ ID NO: 1341436 - RNA, 19 nt, Human
acagaauagaggaaaugcc

SEQ ID NO: 1341437 - RNA, 21 nt, Human
acauauacuguuuuuauuugg

SEQ ID NO: 1341438 - RNA, 20 nt, Human
acuguuuuuauuuggguuug

SEQ ID NO: 1341439 - RNA, 21 nt, Human
agaacauccugaacauagcaa

SEQ ID NO: 1341440 - RNA, 18 nt, Human
agagucccugcccccacc

SEQ ID NO: 1341441 - RNA, 21 nt, Human
agcaaggggcccacaugaaca

SEQ ID NO: 1341442 - RNA, 18 nt, Human
agccuuagaauggaagcu

SEQ ID NO: 1341443 - RNA, 18 nt, Human
agcugcagcuguuuggac

SEQ ID NO: 1341444 - RNA, 21 nt, Human
aggaagaauaauuaaaaagaa

SEQ ID NO: 1341445 - RNA, 18 nt, Human
auagaggaaaugcccaca

SEQ ID NO: 1341446 - RNA, 21 nt, Human
auagaggaaaugcccacagca

SEQ ID NO: 1341447 - RNA, 22 nt, Human
auccugaacauagcaauucaac

SEQ ID NO: 1341448 - RNA, 22 nt, Human
caacagaacagaaaaaucaaga

SEQ ID NO: 1341449 - RNA, 22 nt, Human
caaguuagauacuguacaucua

SEQ ID NO: 1341450 - RNA, 24 nt, Human
cacacacaaaauaaaacaagugcc

SEQ ID NO: 1341451 - RNA, 20 nt, Human
cacagcaaauaguucuagug

SEQ ID NO: 1341452 - RNA, 22 nt, Human
cacccccuagaacauccugaaa

SEQ ID NO: 1341453 - RNA, 20 nt, Human
caucaaggaaaacagguuca

SEQ ID NO: 1341454 - RNA, 23 nt, Human
ccacacacacaaaauaaaacaag

SEQ ID NO: 1341455 - RNA, 22 nt, Human
cccugcccccuuucucuuacaa

SEQ ID NO: 1341456 - RNA, 21 nt, Human
cgaaaagagucccugccccca

SEQ ID NO: 1341457 - RNA, 18 nt, Human
cuagcacucuuacuugaa

SEQ ID NO: 1341458 - RNA, 25 nt, Human
cucacugucacccugaaagguuuuc

SEQ ID NO: 1341459 - RNA, 19 nt, Human
cuccguaggaagcuuaagg

SEQ ID NO: 1341460 - RNA, 21 nt, Human
cuggaauauagucagcaaggg

SEQ ID NO: 1341461 - RNA, 23 nt, Human
ggaaaugcccacagcaaauaguu

SEQ ID NO: 1341462 - RNA, 21 nt, Human
ggaaucuuugcaaguacguau

SEQ ID NO: 1341463 - RNA, 18 nt, Human
ggugguggugauuguuuc

SEQ ID NO: 1341464 - RNA, 21 nt, Human
gguuuguugaaugagaauaaa

SEQ ID NO: 1341465 - RNA, 19 nt, Human
guucaaaaaaucccaaggc

SEQ ID NO: 1341466 - RNA, 24 nt, Human
uaacagaauagaggaaaugcccac

SEQ ID NO: 1341467 - RNA, 21 nt, Human
uagaacauccugaacauagca

SEQ ID NO: 1341468 - RNA, 26 nt, Human
uaggcaccauuaaacaaaaaacccca

SEQ ID NO: 1341469 - RNA, 23 nt, Human
ucaacagaacagaaaaaucaaga

SEQ ID NO: 1341470 - RNA, 21 nt, Human
uccacacacacaaaauaaaac

SEQ ID NO: 1341471 - RNA, 19 nt, Human
ucuggaucugcucacuguc

SEQ ID NO: 1341472 - RNA, 21 nt, Human
ugaacauagcaauucaacaga

SEQ ID NO: 1341473 - RNA, 22 nt, Human
ugaaguggcuggaauauaguca

SEQ ID NO: 1341474 - RNA, 18 nt, Human
uuaaauuucuccagcaca

SEQ ID NO: 1341475 - RNA, 24 nt, Human
uuaggcaucaucaaggaaaacagg

SEQ ID NO: 1341476 - RNA, 21 nt, Human
uugcuucccugcccccuuucu

SEQ ID NO: 1341477 - RNA, 24 nt, Human
uugcuucccugcccccuuucucuu

SEQ ID NO: 1341478 - RNA, 18 nt, Human
uuggacuaggaagacagc

SEQ ID NO: 1341479 - RNA, 20 nt, Human
cagcacacuguauuaaaaca

SEQ ID NO: 1341480 - RNA, 22 nt, Human
aaaaaaguuuuaaugaaaaaga

SEQ ID NO: 1341481 - RNA, 22 nt, Human
aaaaagaaaagacauuaaaaag

SEQ ID NO: 1341482 - RNA, 19 nt, Human
aaaaauguggaaagaggcc

SEQ ID NO: 1341483 - RNA, 25 nt, Human
aacaaaaaaguuuuaaugaaaaaga

SEQ ID NO: 1341484 - RNA, 18 nt, Human
aaggaaaaaauguggaaa

SEQ ID NO: 1341485 - RNA, 26 nt, Human
aauaauaaauacauugcaaggaaaaa

SEQ ID NO: 1341486 - RNA, 24 nt, Human
aauguuuuggaacuagacagaggc

SEQ ID NO: 1341487 - RNA, 18 nt, Human
acucuaaauagucaaggg

SEQ ID NO: 1341488 - RNA, 18 nt, Human
agcuguugaaacugcagc

SEQ ID NO: 1341489 - RNA, 21 nt, Human
agcuguugaaacugcagcccu

SEQ ID NO: 1341490 - RNA, 20 nt, Human
aggauaucuagcuguugaaa

SEQ ID NO: 1341491 - RNA, 18 nt, Human
agggacagggaggaggga

SEQ ID NO: 1341492 - RNA, 22 nt, Human
agggaggagggaggaaacgggg

SEQ ID NO: 1341493 - RNA, 24 nt, Human
caacacuguggauguucaguacca

SEQ ID NO: 1341494 - RNA, 21 nt, Human
cacuggugguugcuagggaca

SEQ ID NO: 1341495 - RNA, 22 nt, Human
cauuaaaaaguucugcaaacag

SEQ ID NO: 1341496 - RNA, 24 nt, Human
cauuaaaaaguucugcaaacagga

SEQ ID NO: 1341497 - RNA, 23 nt, Human
ccaggauaucuagcuguugaaac

SEQ ID NO: 1341498 - RNA, 22 nt, Human
ccugaaaauuccaucuucaacu

SEQ ID NO: 1341499 - RNA, 23 nt, Human
cugaaaauuccaucuucaacugg

SEQ ID NO: 1341500 - RNA, 22 nt, Human
cugaauuguucccuuuaaaaug

SEQ ID NO: 1341501 - RNA, 24 nt, Human
cugaauuguucccuuuaaaauggu

SEQ ID NO: 1341502 - RNA, 22 nt, Human
cugcagcccucccaaugacucu

SEQ ID NO: 1341503 - RNA, 22 nt, Human
gaaagaggcauaucgaacaaaa

SEQ ID NO: 1341504 - RNA, 18 nt, Human
gacagggaggagggagga

SEQ ID NO: 1341505 - RNA, 18 nt, Human
gauacauacucugguaca

SEQ ID NO: 1341506 - RNA, 20 nt, Human
gcauggagcuggcugauuuu

SEQ ID NO: 1341507 - RNA, 23 nt, Human
gccacugaauuguucccuuuaaa

SEQ ID NO: 1341508 - RNA, 23 nt, Human
ggaagguuugggcauggagcugg

SEQ ID NO: 1341509 - RNA, 23 nt, Human
ggaggagggaggaaacggggagc

SEQ ID NO: 1341510 - RNA, 24 nt, Human
uaccaaaugccacugaauuguucc

SEQ ID NO: 1341511 - RNA, 23 nt, Human
uauaaacaucuaacacgaagacu

SEQ ID NO: 1341512 - RNA, 24 nt, Human
uaugaaagauccagaauaggcaaa

SEQ ID NO: 1341513 - RNA, 23 nt, Human
ucaggauacauacucugguacag

SEQ ID NO: 1341514 - RNA, 22 nt, Human
ucauuuugggaugauaaaaaaa

SEQ ID NO: 1341515 - RNA, 24 nt, Human
uccaggauaucuagcuguugaaac

SEQ ID NO: 1341516 - RNA, 19 nt, Human
ucuagcuguugaaacugca

SEQ ID NO: 1341517 - RNA, 18 nt, Human
ugaaacugcagcccuccc

SEQ ID NO: 1341518 - RNA, 20 nt, Human
ugcaaacaauauccaggaua

SEQ ID NO: 1341519 - RNA, 20 nt, Human
ugccacugaauuguucccuu

SEQ ID NO: 1341520 - RNA, 22 nt, Human
uggaaagaggcauaucgaacag

SEQ ID NO: 1341521 - RNA, 18 nt, Human
uggaaaggucccaagaug

SEQ ID NO: 1341522 - RNA, 20 nt, Human
uuaauggcuacaggguuuca

SEQ ID NO: 1341523 - RNA, 21 nt, Human
uucaagagccauauuuaugaa

SEQ ID NO: 1341524 - RNA, 23 nt, Human
uucacaucaagcuguccaaaccu

SEQ ID NO: 1341525 - RNA, 21 nt, Human
uucaccuaaauacaaauaaau

SEQ ID NO: 1341526 - RNA, 19 nt, Human
uugaaacugcagcccuccc

SEQ ID NO: 1341527 - RNA, 21 nt, Human
uuuaaaaauccuaucccauuc

SEQ ID NO: 1341528 - RNA, 21 nt, Human
uuuccugaaaauuccaucuuc

SEQ ID NO: 1341529 - RNA, 18 nt, Human
aagauugcuguuuucaug

SEQ ID NO: 1341530 - RNA, 21 nt, Human
agacggcccgcaccagagucg

SEQ ID NO: 1341531 - RNA, 21 nt, Human
aucacaaauuagucuuugauu

SEQ ID NO: 1341532 - RNA, 22 nt, Human
cagcucggggggaagaagacgg

SEQ ID NO: 1341533 - RNA, 19 nt, Human
ccauuucucccuccagugg

SEQ ID NO: 1341534 - RNA, 18 nt, Human
ccgcgcacgcccagcucg

SEQ ID NO: 1341535 - RNA, 19 nt, Human
cggggggaagaagacggcc

SEQ ID NO: 1341536 - RNA, 24 nt, Human
gcaaagucauaucuauuaaaaagu

SEQ ID NO: 1341537 - RNA, 21 nt, Human
ggaagcaaagucauaucuauu

SEQ ID NO: 1341538 - RNA, 19 nt, Human
ggcuugaaaaguacaggug

SEQ ID NO: 1341539 - RNA, 22 nt, Human
uaaaaaguaaaaucacaaauua

SEQ ID NO: 1341540 - RNA, 18 nt, Human
uaaaaucacaaauuaguc

SEQ ID NO: 1341541 - RNA, 20 nt, Human
ucagaagcauaagaagauug

SEQ ID NO: 1341542 - RNA, 20 nt, Human
ucuuugauuauucagaagca

SEQ ID NO: 1341543 - RNA, 21 nt, Human
ugaaaaguacaggugcucuuu

SEQ ID NO: 1341544 - RNA, 21 nt, Human
agaagcugaaguccucaagug

SEQ ID NO: 1341545 - RNA, 18 nt, Human
cccccgagaaugugacau

SEQ ID NO: 1341546 - RNA, 25 nt, Human
ccgaaaugacggcggccuucgccaa

SEQ ID NO: 1341547 - RNA, 24 nt, Human
ccuaaacuuuauuaaagaaaaaag

SEQ ID NO: 1341548 - RNA, 21 nt, Human
cgcaggcaccggcgacgcggc

SEQ ID NO: 1341549 - RNA, 19 nt, Human
cgggagagaagaagcgagg

SEQ ID NO: 1341550 - RNA, 22 nt, Human
gcaggcaccggcgacgcggcga

SEQ ID NO: 1341551 - RNA, 26 nt, Human
uaaacuuuauuaaagaaaaaagcaau

SEQ ID NO: 1341552 - RNA, 22 nt, Human
uaaaucucuagaacauacccaa

SEQ ID NO: 1341553 - RNA, 22 nt, Human
uaagcaauggugguaaaucucu

SEQ ID NO: 1341554 - RNA, 21 nt, Human
ucuagaacauacccaauuuuc

SEQ ID NO: 1341555 - RNA, 21 nt, Human
ucucuagaacauacccaauuu

SEQ ID NO: 1341556 - RNA, 22 nt, Human
ucugggcuuccucccccgagaa

SEQ ID NO: 1341557 - RNA, 18 nt, Human
aaggaaaaaaagguggua

SEQ ID NO: 1341558 - RNA, 19 nt, Human
aauuaaaaaggaaaaaaag

SEQ ID NO: 1341559 - RNA, 24 nt, Human
agauacugaaauuccuccggagcu

SEQ ID NO: 1341560 - RNA, 20 nt, Human
auacugaaauuccuccggaa

SEQ ID NO: 1341561 - RNA, 21 nt, Human
ccuccggagcucgcucggcuu

SEQ ID NO: 1341562 - RNA, 21 nt, Human
cuacuaaauugccggccgcgu

SEQ ID NO: 1341563 - RNA, 20 nt, Human
gaaauuccuccggagcucgc

SEQ ID NO: 1341564 - RNA, 26 nt, Human
gcaggucauuuugaaccucaaauaag

SEQ ID NO: 1341565 - RNA, 21 nt, Human
gcugacguagcagcccccuuc

SEQ ID NO: 1341566 - RNA, 24 nt, Human
ggauuuaguccaaaugaaaaugua

SEQ ID NO: 1341567 - RNA, 19 nt, Human
gguaaaaccgagccugagg

SEQ ID NO: 1341568 - RNA, 22 nt, Human
uagaugcaggacaucaacaucc

SEQ ID NO: 1341569 - RNA, 19 nt, Human
uaucaaaguuucaagcagg

SEQ ID NO: 1341570 - RNA, 20 nt, Human
uaucaaaguuucaagcaggu

SEQ ID NO: 1341571 - RNA, 20 nt, Human
ucaagcaggucauuuugaac

SEQ ID NO: 1341572 - RNA, 23 nt, Human
ucacaauauuuaguauuaauuaa

SEQ ID NO: 1341573 - RNA, 19 nt, Human
uccaaaugaaaauguagaa

SEQ ID NO: 1341574 - RNA, 18 nt, Human
uuccaauauguaucaaag

SEQ ID NO: 1341575 - RNA, 24 nt, Human
uugccggccgcgucgacuuuuuuu

SEQ ID NO: 1341576 - RNA, 18 nt, Human
aacagcaccccuaccggu

SEQ ID NO: 1341577 - RNA, 24 nt, Human
cuaaccgcaaccgccuccucccca

SEQ ID NO: 1341578 - RNA, 20 nt, Human
aaccacaaacagaauggaga

SEQ ID NO: 1341579 - RNA, 23 nt, Human
aacuauucccaaagccucuucca

SEQ ID NO: 1341580 - RNA, 18 nt, Human
aagaaggaauggaagaaa

SEQ ID NO: 1341581 - RNA, 21 nt, Human
aagaaggaauggaagaaaaca

SEQ ID NO: 1341582 - RNA, 19 nt, Human
aagagccaggaacagugag

SEQ ID NO: 1341583 - RNA, 20 nt, Human
aagcaccucucucagcgacc

SEQ ID NO: 1341584 - RNA, 25 nt, Human
aaucccuacccauccccgcccccac

SEQ ID NO: 1341585 - RNA, 19 nt, Human
acaaaccaggcaacgaucc

SEQ ID NO: 1341586 - RNA, 21 nt, Human
acagccuagaggcccaaguca

SEQ ID NO: 1341587 - RNA, 18 nt, Human
accaggcaacgaucccac

SEQ ID NO: 1341588 - RNA, 25 nt, Human
acccugagagcaucgauuggggaac

SEQ ID NO: 1341589 - RNA, 20 nt, Human
agaauucucuuucucucucc

SEQ ID NO: 1341590 - RNA, 22 nt, Human
agagacagccuagaggcccaag

SEQ ID NO: 1341591 - RNA, 20 nt, Human
agcacauucuuucuccuacu

SEQ ID NO: 1341592 - RNA, 20 nt, Human
agcaugugagcauaauccag

SEQ ID NO: 1341593 - RNA, 24 nt, Human
agcgacugcagacccacggcagag

SEQ ID NO: 1341594 - RNA, 21 nt, Human
aggacagggcaguaagaagga

SEQ ID NO: 1341595 - RNA, 19 nt, Human
aggcagagagaggguaggu

SEQ ID NO: 1341596 - RNA, 27 nt, Human
aggcccaagucauaaguuccacuccuu

SEQ ID NO: 1341597 - RNA, 18 nt, Human
aggcugaggcagagagag

SEQ ID NO: 1341598 - RNA, 23 nt, Human
aguagaaacuuuucuucccaaga

SEQ ID NO: 1341599 - RNA, 23 nt, Human
aguucugggucaaggggaaagau

SEQ ID NO: 1341600 - RNA, 24 nt, Human
caaaccccaaagguuuuaugaaga

SEQ ID NO: 1341601 - RNA, 27 nt, Human
caaaccccaaagguuuuaugaagaaaa

SEQ ID NO: 1341602 - RNA, 22 nt, Human
cagacccacggcagagaguaaa

SEQ ID NO: 1341603 - RNA, 21 nt, Human
cagcacauucuuucuccuacu

SEQ ID NO: 1341604 - RNA, 23 nt, Human
ccacagguaguaaggguggacag

SEQ ID NO: 1341605 - RNA, 18 nt, Human
ccacugcaguuuugaagc

SEQ ID NO: 1341606 - RNA, 23 nt, Human
ccacugcaguuuugaagcuauau

SEQ ID NO: 1341607 - RNA, 19 nt, Human
ccaggacacagagaagaca

SEQ ID NO: 1341608 - RNA, 18 nt, Human
ccagguagaggcaaaggg

SEQ ID NO: 1341609 - RNA, 20 nt, Human
ccagguagaggcaaagggag

SEQ ID NO: 1341610 - RNA, 18 nt, Human
ccagucuagaaagaaaga

SEQ ID NO: 1341611 - RNA, 28 nt, Human
ccccuugcugggcuguugggaugagggc

SEQ ID NO: 1341612 - RNA, 25 nt, Human
cccgcagcuggugccgacguggagc

SEQ ID NO: 1341613 - RNA, 19 nt, Human
ccuucccuaugaacuauuc

SEQ ID NO: 1341614 - RNA, 22 nt, Human
cucucagcgaccuagagacagg

SEQ ID NO: 1341615 - RNA, 20 nt, Human
cucuuucucucuccccuugc

SEQ ID NO: 1341616 - RNA, 24 nt, Human
gaaacuuuucuucccaagacuaga

SEQ ID NO: 1341617 - RNA, 23 nt, Human
gagcaguuuaugaaggugguuuu

SEQ ID NO: 1341618 - RNA, 18 nt, Human
gaggcagagagaggguag

SEQ ID NO: 1341619 - RNA, 22 nt, Human
ggaaaacacucagcacauucuu

SEQ ID NO: 1341620 - RNA, 19 nt, Human
ggaggaaaacacucagcac

SEQ ID NO: 1341621 - RNA, 20 nt, Human
ggcaguuaguaaguggggca

SEQ ID NO: 1341622 - RNA, 23 nt, Human
ggccagguagaggcaaagggagg

SEQ ID NO: 1341623 - RNA, 19 nt, Human
gggacagagacagccuaga

SEQ ID NO: 1341624 - RNA, 23 nt, Human
ggucaaggggaaagauuagaccc

SEQ ID NO: 1341625 - RNA, 23 nt, Human
gguguaggggagguugagggggc

SEQ ID NO: 1341626 - RNA, 22 nt, Human
guguaggggagguugagggggc

SEQ ID NO: 1341627 - RNA, 23 nt, Human
guuuuuaaaggcauuuuuguggg

SEQ ID NO: 1341628 - RNA, 19 nt, Human
uaaguuccacuccuucccc

SEQ ID NO: 1341629 - RNA, 23 nt, Human
uacccauccccgcccccacucgu

SEQ ID NO: 1341630 - RNA, 19 nt, Human
uagagacagggagagcaca

SEQ ID NO: 1341631 - RNA, 26 nt, Human
uaggaacuggcuuugcuccaggaaag

SEQ ID NO: 1341632 - RNA, 20 nt, Human
uaggaaggguguaggggagg

SEQ ID NO: 1341633 - RNA, 21 nt, Human
uauucccaaagccucuuccaa

SEQ ID NO: 1341634 - RNA, 22 nt, Human
uccaaggcagaggacagggcag

SEQ ID NO: 1341635 - RNA, 22 nt, Human
ucccacagguaguaagggugga

SEQ ID NO: 1341636 - RNA, 22 nt, Human
ucccagaacugcaagaagaaug

SEQ ID NO: 1341637 - RNA, 20 nt, Human
uccccaguucugaguagaac

SEQ ID NO: 1341638 - RNA, 22 nt, Human
uccccgagaugacccugagagc

SEQ ID NO: 1341639 - RNA, 21 nt, Human
uccccugcccuauuaucuaaa

SEQ ID NO: 1341640 - RNA, 18 nt, Human
ucucuccccuugcugggc

SEQ ID NO: 1341641 - RNA, 25 nt, Human
ucugaaguguagcuacagcaaaggg

SEQ ID NO: 1341642 - RNA, 18 nt, Human
ugaaaaagaauaggaagg

SEQ ID NO: 1341643 - RNA, 18 nt, Human
ugaaggugguuuucuccu

SEQ ID NO: 1341644 - RNA, 19 nt, Human
ugaggcagagagaggguag

SEQ ID NO: 1341645 - RNA, 22 nt, Human
ugaggcagagagaggguagguu

SEQ ID NO: 1341646 - RNA, 18 nt, Human
ugcagcgacugcagaccc

SEQ ID NO: 1341647 - RNA, 20 nt, Human
ugcccccuuaaauaugcccc

SEQ ID NO: 1341648 - RNA, 18 nt, Human
ugccccguuaucugcccc

SEQ ID NO: 1341649 - RNA, 21 nt, Human
ugcccuguucaauacaauuua

SEQ ID NO: 1341650 - RNA, 22 nt, Human
ugcuuggguguaaggcugaggc

SEQ ID NO: 1341651 - RNA, 22 nt, Human
uggaagaaaacacugaggucac

SEQ ID NO: 1341652 - RNA, 24 nt, Human
uggacaguuaagguagcuaacuaa

SEQ ID NO: 1341653 - RNA, 21 nt, Human
uggggaggaaguucuggguca

SEQ ID NO: 1341654 - RNA, 19 nt, Human
uggggcagaaugcuuaagu

SEQ ID NO: 1341655 - RNA, 22 nt, Human
uuaaaucgcuguuucuuccaug

SEQ ID NO: 1341656 - RNA, 19 nt, Human
uuaguuuuaggaacuggcu

SEQ ID NO: 1341657 - RNA, 19 nt, Human
uugcugggcuguugggaug

SEQ ID NO: 1341658 - RNA, 24 nt, Human
uugcugggcuguugggaugagggc

SEQ ID NO: 1341659 - RNA, 24 nt, Human
uuuuuguggggaggaaguucuggg

SEQ ID NO: 1341660 - RNA, 25 nt, Human
aacaacgguaacagcccuggcagga

SEQ ID NO: 1341661 - RNA, 20 nt, Human
aaccaccaccgcugauccua

SEQ ID NO: 1341662 - RNA, 22 nt, Human
caggcugaggggucaaaggcca

SEQ ID NO: 1341663 - RNA, 21 nt, Human
gaaccaccaccgcugauccua

SEQ ID NO: 1341664 - RNA, 23 nt, Human
uaacuuuauuacaaaaagcaaaa

SEQ ID NO: 1341665 - RNA, 19 nt, Human
ugauucaagaaaacaacgg

SEQ ID NO: 1341666 - RNA, 24 nt, Human
auuuucaucucaagaacauuuaag

SEQ ID NO: 1341667 - RNA, 21 nt, Human
ccucacucgcgccuucccuuc

SEQ ID NO: 1341668 - RNA, 22 nt, Human
ccucacucgcgccuucccuucu

SEQ ID NO: 1341669 - RNA, 21 nt, Human
ccuccuuuccucacucgcgcc

SEQ ID NO: 1341670 - RNA, 18 nt, Human
ccugggugacaaaguucc

SEQ ID NO: 1341671 - RNA, 22 nt, Human
gcuuuuguuguuagaaucugac

SEQ ID NO: 1341672 - RNA, 22 nt, Human
uccggaucaagaaucacaaagc

SEQ ID NO: 1341673 - RNA, 22 nt, Human
ucucaagaacauuuaaguuggg

SEQ ID NO: 1341674 - RNA, 22 nt, Human
ugggugaagaaauucagcuuuu

SEQ ID NO: 1341675 - RNA, 23 nt, Human
uuccugggugacaaaguuccgga

SEQ ID NO: 1341676 - RNA, 19 nt, Human
aaaagggacaggaccagaa

SEQ ID NO: 1341677 - RNA, 22 nt, Human
aaaccaaauauuccauguucuc

SEQ ID NO: 1341678 - RNA, 22 nt, Human
aaacuuggaaaccaccaagaag

SEQ ID NO: 1341679 - RNA, 21 nt, Human
aaagaagccagucugaaaagg

SEQ ID NO: 1341680 - RNA, 24 nt, Human
aaagagacaaacagaaccuucucc

SEQ ID NO: 1341681 - RNA, 20 nt, Human
aaagcacugggauuauaggc

SEQ ID NO: 1341682 - RNA, 22 nt, Human
aaagcacugggauuauaggcau

SEQ ID NO: 1341683 - RNA, 23 nt, Human
aaagcacugggauuauaggcaug

SEQ ID NO: 1341684 - RNA, 24 nt, Human
aaagcacugggauuauaggcauga

SEQ ID NO: 1341685 - RNA, 23 nt, Human
aagaagccagucugaaaaggcua

SEQ ID NO: 1341686 - RNA, 24 nt, Human
aagcccauacaauguacaacacca

SEQ ID NO: 1341687 - RNA, 20 nt, Human
aagugcuucaugagcagaug

SEQ ID NO: 1341688 - RNA, 24 nt, Human
aaucuacaauggggccaagugcua

SEQ ID NO: 1341689 - RNA, 19 nt, Human
acaagacaaccagcucgaa

SEQ ID NO: 1341690 - RNA, 24 nt, Human
acaguaaaaagugguugccaaaag

SEQ ID NO: 1341691 - RNA, 21 nt, Human
acauaaaauggcagcucuuga

SEQ ID NO: 1341692 - RNA, 21 nt, Human
accgcacccagccaagauugc

SEQ ID NO: 1341693 - RNA, 20 nt, Human
accuauauuuucagaagugc

SEQ ID NO: 1341694 - RNA, 18 nt, Human
agacaggaucuugcuaug

SEQ ID NO: 1341695 - RNA, 21 nt, Human
agagacaggaucuugcuaugu

SEQ ID NO: 1341696 - RNA, 19 nt, Human
agccaugaaaugacaugga

SEQ ID NO: 1341697 - RNA, 22 nt, Human
agcuuccaaaucccauaugccu

SEQ ID NO: 1341698 - RNA, 21 nt, Human
aggcaugaaccaccgcaccca

SEQ ID NO: 1341699 - RNA, 22 nt, Human
agggaagaaagggaugaaccag

SEQ ID NO: 1341700 - RNA, 19 nt, Human
aggguggagggugggaaaa

SEQ ID NO: 1341701 - RNA, 21 nt, Human
agugaaagaagccagucugaa

SEQ ID NO: 1341702 - RNA, 20 nt, Human
auaagaacaaucccuuugcg

SEQ ID NO: 1341703 - RNA, 23 nt, Human
aucugggugcaacuugcaauggg

SEQ ID NO: 1341704 - RNA, 23 nt, Human
augcccauagaaaaaccugcaca

SEQ ID NO: 1341705 - RNA, 19 nt, Human
auguugcccaggcuggucu

SEQ ID NO: 1341706 - RNA, 19 nt, Human
auguugcccaggcuggucu

SEQ ID NO: 1341707 - RNA, 18 nt, Human
caaauauuccauguucuc

SEQ ID NO: 1341708 - RNA, 24 nt, Human
caacagcuuuauucauaauugcca

SEQ ID NO: 1341709 - RNA, 22 nt, Human
caagagagccuccugccucagc

SEQ ID NO: 1341710 - RNA, 23 nt, Human
caagagagccuccugccucagcc

SEQ ID NO: 1341711 - RNA, 19 nt, Human
caauguacaacaccagagu

SEQ ID NO: 1341712 - RNA, 19 nt, Human
cacacccagcaaaugaagc

SEQ ID NO: 1341713 - RNA, 24 nt, Human
caccccaggacauaaugcagccac

SEQ ID NO: 1341714 - RNA, 19 nt, Human
caccgcacccagccaagau

SEQ ID NO: 1341715 - RNA, 24 nt, Human
caccuugaaaguuuacugcacagg

SEQ ID NO: 1341716 - RNA, 23 nt, Human
cacucugaagaugaaaucaagag

SEQ ID NO: 1341717 - RNA, 22 nt, Human
cagagcagaagucacuucugcu

SEQ ID NO: 1341718 - RNA, 19 nt, Human
cagccgacaccuugaaagu

SEQ ID NO: 1341719 - RNA, 21 nt, Human
cagcucgaagcagggacaggc

SEQ ID NO: 1341720 - RNA, 21 nt, Human
caggacaagcagcacaauucc

SEQ ID NO: 1341721 - RNA, 19 nt, Human
caggacauaaugcagccac

SEQ ID NO: 1341722 - RNA, 21 nt, Human
caggaccagaaaaguaacuau

SEQ ID NO: 1341723 - RNA, 24 nt, Human
caggaucuugcuauguugcccagg

SEQ ID NO: 1341724 - RNA, 18 nt, Human
cauacaauguacaacacc

SEQ ID NO: 1341725 - RNA, 21 nt, Human
cauagaaaaaccugcacaaag

SEQ ID NO: 1341726 - RNA, 21 nt, Human
ccaaaacuuggaaaccaccaa

SEQ ID NO: 1341727 - RNA, 20 nt, Human
ccacacccagcaaaugaagc

SEQ ID NO: 1341728 - RNA, 18 nt, Human
ccacaugcacaccccagg

SEQ ID NO: 1341729 - RNA, 19 nt, Human
ccagccaacaggacaagca

SEQ ID NO: 1341730 - RNA, 21 nt, Human
ccagccaacaggacaagcagc

SEQ ID NO: 1341731 - RNA, 23 nt, Human
ccagccaacaggacaagcagcac

SEQ ID NO: 1341732 - RNA, 20 nt, Human
ccagcucgaagcagggacag

SEQ ID NO: 1341733 - RNA, 19 nt, Human
cccacgcacaagacaacca

SEQ ID NO: 1341734 - RNA, 23 nt, Human
cccaucucugauacuucccaaac

SEQ ID NO: 1341735 - RNA, 21 nt, Human
ccccacaauaagauauaucug

SEQ ID NO: 1341736 - RNA, 18 nt, Human
cccuccccacaauaagau

SEQ ID NO: 1341737 - RNA, 24 nt, Human
ccuccugccucagccuuguaaagc

SEQ ID NO: 1341738 - RNA, 19 nt, Human
cuaaauagacccacaugca

SEQ ID NO: 1341739 - RNA, 27 nt, Human
cuaagcccauacaauguacaacaccag

SEQ ID NO: 1341740 - RNA, 20 nt, Human
cucaucugggugcaacuugc

SEQ ID NO: 1341741 - RNA, 23 nt, Human
cugcugaaaugauuuauaaaugu

SEQ ID NO: 1341742 - RNA, 21 nt, Human
cuucccaaacugagcuguuuu

SEQ ID NO: 1341743 - RNA, 19 nt, Human
cuucugcugagcuuccaaa

SEQ ID NO: 1341744 - RNA, 20 nt, Human
cuuggaccagaggaucuggg

SEQ ID NO: 1341745 - RNA, 23 nt, Human
gaaaagggacaggaccagaaaag

SEQ ID NO: 1341746 - RNA, 19 nt, Human
gacacauaaaauggcagcu

SEQ ID NO: 1341747 - RNA, 24 nt, Human
gacaguggcugggcuuuuuucccc

SEQ ID NO: 1341748 - RNA, 21 nt, Human
gaguuuaccugcacauguacc

SEQ ID NO: 1341749 - RNA, 23 nt, Human
gauuauaggcaugaaccaccgca

SEQ ID NO: 1341750 - RNA, 21 nt, Human
gcacacccagcgggguaggca

SEQ ID NO: 1341751 - RNA, 18 nt, Human
gcacugaagcucuuggua

SEQ ID NO: 1341752 - RNA, 19 nt, Human
gcacugggauuauaggcau

SEQ ID NO: 1341753 - RNA, 22 nt, Human
gccaaaacuuggaaaccaccaa

SEQ ID NO: 1341754 - RNA, 22 nt, Human
ggagagacaggaucuugcuaug

SEQ ID NO: 1341755 - RNA, 21 nt, Human
ggcaaugagaggugaaagaga

SEQ ID NO: 1341756 - RNA, 22 nt, Human
ggcuggucuugaacuccuauuc

SEQ ID NO: 1341757 - RNA, 21 nt, Human
gggagguuuuaggccagugaa

SEQ ID NO: 1341758 - RNA, 21 nt, Human
gggccucuggacucaaaaaug

SEQ ID NO: 1341759 - RNA, 23 nt, Human
guaaacucucaacacauacaaag

SEQ ID NO: 1341760 - RNA, 24 nt, Human
guaaagcacugggauuauaggcau

SEQ ID NO: 1341761 - RNA, 20 nt, Human
guuaagccuuggggagguuu

SEQ ID NO: 1341762 - RNA, 19 nt, Human
uaaaauucauuuauauagu

SEQ ID NO: 1341763 - RNA, 22 nt, Human
uaaauagacccacaugcacacc

SEQ ID NO: 1341764 - RNA, 23 nt, Human
uaaaugcacuauuaagccaugaa

SEQ ID NO: 1341765 - RNA, 22 nt, Human
uaaucuguauaacaaacccccu

SEQ ID NO: 1341766 - RNA, 23 nt, Human
uacaauggggccaagugcuaaag

SEQ ID NO: 1341767 - RNA, 18 nt, Human
uacaauguacaacaccag

SEQ ID NO: 1341768 - RNA, 19 nt, Human
uaccugaggguggagggug

SEQ ID NO: 1341769 - RNA, 20 nt, Human
uaccugaggguggagggugg

SEQ ID NO: 1341770 - RNA, 19 nt, Human
uagaaaaggaagaacuaug

SEQ ID NO: 1341771 - RNA, 23 nt, Human
uagacccacaugcacaccccagg

SEQ ID NO: 1341772 - RNA, 20 nt, Human
uaggcaugaaccaccgcacc

SEQ ID NO: 1341773 - RNA, 20 nt, Human
uauaacaaacccccuuguca

SEQ ID NO: 1341774 - RNA, 21 nt, Human
uauaacaaacccccuugucac

SEQ ID NO: 1341775 - RNA, 21 nt, Human
uaugacauucuagaaaaggaa

SEQ ID NO: 1341776 - RNA, 19 nt, Human
uauguugcccaggcugguc

SEQ ID NO: 1341777 - RNA, 20 nt, Human
uauguugcccaggcuggucu

SEQ ID NO: 1341778 - RNA, 23 nt, Human
uauguugcccaggcuggucuuga

SEQ ID NO: 1341779 - RNA, 24 nt, Human
uauguugcccaggcuggucuugaa

SEQ ID NO: 1341780 - RNA, 21 nt, Human
ucccaaacugagcuguuuucc

SEQ ID NO: 1341781 - RNA, 25 nt, Human
uccuuugcaggaacauggauggggc

SEQ ID NO: 1341782 - RNA, 26 nt, Human
ucuacaauggggccaagugcuaaagc

SEQ ID NO: 1341783 - RNA, 20 nt, Human
ucuguauaacaaacccccuu

SEQ ID NO: 1341784 - RNA, 18 nt, Human
ucuugcuauguugcccag

SEQ ID NO: 1341785 - RNA, 19 nt, Human
ucuugcuauguugcccagg

SEQ ID NO: 1341786 - RNA, 23 nt, Human
ucuugcuauguugcccaggcugg

SEQ ID NO: 1341787 - RNA, 24 nt, Human
ucuugcuauguugcccaggcuggu

SEQ ID NO: 1341788 - RNA, 21 nt, Human
ugaaaagagacaaacagaacc

SEQ ID NO: 1341789 - RNA, 22 nt, Human
ugaaagaagccagucugaaaag

SEQ ID NO: 1341790 - RNA, 19 nt, Human
ugaauuaaaaacaugccca

SEQ ID NO: 1341791 - RNA, 23 nt, Human
ugacauucuagaaaaggaagaac

SEQ ID NO: 1341792 - RNA, 18 nt, Human
ugaugcaugaccacaccu

SEQ ID NO: 1341793 - RNA, 22 nt, Human
ugcacauguacccccugaaccu

SEQ ID NO: 1341794 - RNA, 24 nt, Human
ugcccaggcuggucuugaacuccu

SEQ ID NO: 1341795 - RNA, 27 nt, Human
ugcuauguugcccaggcuggucuugaa

SEQ ID NO: 1341796 - RNA, 25 nt, Human
uggaaaccaccaagaagucuuucaa

SEQ ID NO: 1341797 - RNA, 24 nt, Human
uggagagacaggaucuugcuaugu

SEQ ID NO: 1341798 - RNA, 20 nt, Human
uggauggggcuggaggccau

SEQ ID NO: 1341799 - RNA, 18 nt, Human
uggauuucuuuccccucc

SEQ ID NO: 1341800 - RNA, 23 nt, Human
ugggaaggaagggacagaagcuc

SEQ ID NO: 1341801 - RNA, 20 nt, Human
ugggagugaaauaacaugga

SEQ ID NO: 1341802 - RNA, 21 nt, Human
ugggauuauaggcaugaacca

SEQ ID NO: 1341803 - RNA, 23 nt, Human
ugggauuauaggcaugaaccacc

SEQ ID NO: 1341804 - RNA, 24 nt, Human
ugggauuauaggcaugaaccaccg

SEQ ID NO: 1341805 - RNA, 18 nt, Human
ugggcagagaaugaaaag

SEQ ID NO: 1341806 - RNA, 25 nt, Human
ugucaaagagcucuguaaacucuca

SEQ ID NO: 1341807 - RNA, 24 nt, Human
ugucugugaaagccggggagcagc

SEQ ID NO: 1341808 - RNA, 25 nt, Human
ugugagggcaggggauauaugagaa

SEQ ID NO: 1341809 - RNA, 20 nt, Human
uucauaauugccaaaacuug

SEQ ID NO: 1341810 - RNA, 18 nt, Human
uucauguaaacuauggac

SEQ ID NO: 1341811 - RNA, 23 nt, Human
uuggagagacaggaucuugcuau

SEQ ID NO: 1341812 - RNA, 20 nt, Human
uuuguaaagacuaagaucgc

SEQ ID NO: 1341813 - RNA, 21 nt, Human
uuuuuuggagagacaggaucu

SEQ ID NO: 1341814 - RNA, 28 nt, Human
uuuuuuuuuuuuuuuuuuuuuuuggggg

SEQ ID NO: 1341815 - RNA, 24 nt, Human
aaaaugcccccaggugaggcucuu

SEQ ID NO: 1341816 - RNA, 18 nt, Human
caaaaugcccccagguga

SEQ ID NO: 1341817 - RNA, 21 nt, Human
ccuccacccacaaaaugcccc

SEQ ID NO: 1341818 - RNA, 23 nt, Human
uucaggcagcaaaggccuucucc

SEQ ID NO: 1341819 - RNA, 22 nt, Human
aaacagauguggaauugaagaa

SEQ ID NO: 1341820 - RNA, 23 nt, Human
aaacagauguggaauugaagaau

SEQ ID NO: 1341821 - RNA, 23 nt, Human
aaaguggggggaaaaagggcugg

SEQ ID NO: 1341822 - RNA, 19 nt, Human
aaccacgaguaccucauca

SEQ ID NO: 1341823 - RNA, 25 nt, Human
aacuuguuucuccaacaacauccug

SEQ ID NO: 1341824 - RNA, 22 nt, Human
aaguggggggaaaaagggcugg

SEQ ID NO: 1341825 - RNA, 20 nt, Human
aagugugacggcuuccaugc

SEQ ID NO: 1341826 - RNA, 24 nt, Human
accggucagcauuguuggcugcac

SEQ ID NO: 1341827 - RNA, 18 nt, Human
agagccucacggucuccu

SEQ ID NO: 1341828 - RNA, 18 nt, Human
agagccucacggucuccu

SEQ ID NO: 1341829 - RNA, 20 nt, Human
agggcuuagaggauaagcac

SEQ ID NO: 1341830 - RNA, 22 nt, Human
caagaagggguaaaaagccgug

SEQ ID NO: 1341831 - RNA, 18 nt, Human
cacaucccccagcaagcc

SEQ ID NO: 1341832 - RNA, 25 nt, Human
caccggucagcauuguuggcugcac

SEQ ID NO: 1341833 - RNA, 24 nt, Human
cagcaagccgccugcaccaggccu

SEQ ID NO: 1341834 - RNA, 23 nt, Human
cagcccaagaaaucaggaucaag

SEQ ID NO: 1341835 - RNA, 23 nt, Human
ccagaaccacgaguaccucauca

SEQ ID NO: 1341836 - RNA, 18 nt, Human
ccccagcaagccgccugc

SEQ ID NO: 1341837 - RNA, 21 nt, Human
ccccagcaagccgccugcacc

SEQ ID NO: 1341838 - RNA, 22 nt, Human
cccccagcaagccgccugcacc

SEQ ID NO: 1341839 - RNA, 21 nt, Human
ccugcuguaucuacaccuacc

SEQ ID NO: 1341840 - RNA, 21 nt, Human
cguggaccacauggccacucc

SEQ ID NO: 1341841 - RNA, 20 nt, Human
cucaucacguccugagcgcu

SEQ ID NO: 1341842 - RNA, 25 nt, Human
gagcgcucacaucccccagcaagcc

SEQ ID NO: 1341843 - RNA, 22 nt, Human
gucccggaggagacgccgcggc

SEQ ID NO: 1341844 - RNA, 23 nt, Human
gucccgggaggagacgccgccgg

SEQ ID NO: 1341845 - RNA, 19 nt, Human
uaccucaucacauccugag

SEQ ID NO: 1341846 - RNA, 19 nt, Human
uaccucaucacguccugag

SEQ ID NO: 1341847 - RNA, 24 nt, Human
uauuucucaaaaguggggggaaaa

SEQ ID NO: 1341848 - RNA, 24 nt, Human
ucagaaguguuucuagagcuccag

SEQ ID NO: 1341849 - RNA, 19 nt, Human
ucuagaaacagauguggaa

SEQ ID NO: 1341850 - RNA, 20 nt, Human
ucucaaaaguggggggaaaa

SEQ ID NO: 1341851 - RNA, 24 nt, Human
ucuccaacaacauccugaauccau

SEQ ID NO: 1341852 - RNA, 19 nt, Human
ucuccucgggccccucagc

SEQ ID NO: 1341853 - RNA, 19 nt, Human
ucuccucgggccccucagc

SEQ ID NO: 1341854 - RNA, 19 nt, Human
uggaccacauggccacucc

SEQ ID NO: 1341855 - RNA, 22 nt, Human
uguggaauugaagaauguccca

SEQ ID NO: 1341856 - RNA, 19 nt, Human
uucuccaacaacauccuga

SEQ ID NO: 1341857 - RNA, 22 nt, Human
aaacuggaccacccacacuuug

SEQ ID NO: 1341858 - RNA, 25 nt, Human
aaagaaaacccacaaaaaaccugga

SEQ ID NO: 1341859 - RNA, 25 nt, Human
aacaaagaaaacccacaaaaaaccu

SEQ ID NO: 1341860 - RNA, 22 nt, Human
aacaacaacaacaacaaagaaa

SEQ ID NO: 1341861 - RNA, 24 nt, Human
aagaacagaaagagcugcauuagc

SEQ ID NO: 1341862 - RNA, 19 nt, Human
aagccugacacucaaucuu

SEQ ID NO: 1341863 - RNA, 20 nt, Human
aagcugggcagauggagcca

SEQ ID NO: 1341864 - RNA, 19 nt, Human
aaguaagaacagaaagagc

SEQ ID NO: 1341865 - RNA, 20 nt, Human
acaacaaagaaaacccacaa

SEQ ID NO: 1341866 - RNA, 19 nt, Human
acaacaacaacaaagaaaa

SEQ ID NO: 1341867 - RNA, 18 nt, Human
acaacaacaacaacaaag

SEQ ID NO: 1341868 - RNA, 19 nt, Human
acaacaacaacaacaaaga

SEQ ID NO: 1341869 - RNA, 21 nt, Human
accuuccccaggaccccuguu

SEQ ID NO: 1341870 - RNA, 20 nt, Human
acuggcgucccaggcugaag

SEQ ID NO: 1341871 - RNA, 20 nt, Human
agaccugggaggcagaugga

SEQ ID NO: 1341872 - RNA, 24 nt, Human
agagauggcagcgugggaagcagg

SEQ ID NO: 1341873 - RNA, 22 nt, Human
agcacagagucuaaaaauauua

SEQ ID NO: 1341874 - RNA, 23 nt, Human
agcgugggaagcaggaaggucag

SEQ ID NO: 1341875 - RNA, 24 nt, Human
aggaacucccacugggcacacauc

SEQ ID NO: 1341876 - RNA, 27 nt, Human
aggaagacuuaaaggacgauuugaggg

SEQ ID NO: 1341877 - RNA, 24 nt, Human
aggcugaagccauuugcugcgacc

SEQ ID NO: 1341878 - RNA, 21 nt, Human
agggcagugggugcaggaggc

SEQ ID NO: 1341879 - RNA, 18 nt, Human
auaaaacacuggcguccc

SEQ ID NO: 1341880 - RNA, 18 nt, Human
caaagaaaacccacaaaa

SEQ ID NO: 1341881 - RNA, 20 nt, Human
caacaacaaagaaaacccac

SEQ ID NO: 1341882 - RNA, 24 nt, Human
caacaacaaagaaaacccacaaaa

SEQ ID NO: 1341883 - RNA, 20 nt, Human
caacaacaacaaagaaaacc

SEQ ID NO: 1341884 - RNA, 27 nt, Human
caacaacaacaacaaagaaaacccaca

SEQ ID NO: 1341885 - RNA, 27 nt, Human
caacaacaacaacaaagaaaacccaca

SEQ ID NO: 1341886 - RNA, 24 nt, Human
caagaagauucccaucaguccaaa

SEQ ID NO: 1341887 - RNA, 22 nt, Human
cacacaucuacagaggagugcg

SEQ ID NO: 1341888 - RNA, 24 nt, Human
cacccaaagaggacuuguaauuca

SEQ ID NO: 1341889 - RNA, 20 nt, Human
cacccccuccuacacccaaa

SEQ ID NO: 1341890 - RNA, 23 nt, Human
cacucaauccacucggcaccugg

SEQ ID NO: 1341891 - RNA, 19 nt, Human
cagagugcccggaugcggc

SEQ ID NO: 1341892 - RNA, 21 nt, Human
cagcggccgccguuuguuuuc

SEQ ID NO: 1341893 - RNA, 23 nt, Human
caucaguccaaacuggaccaccc

SEQ ID NO: 1341894 - RNA, 22 nt, Human
caucgguaucauccguuuaaaa

SEQ ID NO: 1341895 - RNA, 20 nt, Human
cauuagccuuuucauaauga

SEQ ID NO: 1341896 - RNA, 24 nt, Human
ccacaaaaaaccuggagaaaauau

SEQ ID NO: 1341897 - RNA, 23 nt, Human
ccacgccacucccgccgcgacca

SEQ ID NO: 1341898 - RNA, 24 nt, Human
cccacccccuccuacacccaaaga

SEQ ID NO: 1341899 - RNA, 26 nt, Human
ccccaggaccccuguucuacaggacc

SEQ ID NO: 1341900 - RNA, 24 nt, Human
ccccgagaccaugcaugaaggccc

SEQ ID NO: 1341901 - RNA, 25 nt, Human
ccccugcccacccccuccuacaccc

SEQ ID NO: 1341902 - RNA, 20 nt, Human
ccccuguuccuuccuguuuc

SEQ ID NO: 1341903 - RNA, 20 nt, Human
cccgccgcgaccagcagagu

SEQ ID NO: 1341904 - RNA, 27 nt, Human
cccuccuggacuuguccccugcccacc

SEQ ID NO: 1341905 - RNA, 23 nt, Human
cccugcccuggacaccuucccca

SEQ ID NO: 1341906 - RNA, 19 nt, Human
cccugcgccacgccacucc

SEQ ID NO: 1341907 - RNA, 18 nt, Human
cccugggaccccuccugg

SEQ ID NO: 1341908 - RNA, 23 nt, Human
ccucugucacauggcuagaacaa

SEQ ID NO: 1341909 - RNA, 19 nt, Human
ccugacacucaaucuugaa

SEQ ID NO: 1341910 - RNA, 18 nt, Human
ccuggggcuggaaggaac

SEQ ID NO: 1341911 - RNA, 24 nt, Human
cgacacacagcgaacuacauacuu

SEQ ID NO: 1341912 - RNA, 19 nt, Human
cgccaggccagaggaagcu

SEQ ID NO: 1341913 - RNA, 21 nt, Human
cucccacugggcacacaucua

SEQ ID NO: 1341914 - RNA, 23 nt, Human
cugcauuagccuuuucauaauga

SEQ ID NO: 1341915 - RNA, 24 nt, Human
cuggaagggagggaaagucuugga

SEQ ID NO: 1341916 - RNA, 18 nt, Human
gaaaacccacaaaaaacc

SEQ ID NO: 1341917 - RNA, 21 nt, Human
gaccccuguuccuuccuguuu

SEQ ID NO: 1341918 - RNA, 23 nt, Human
gagugcguggcgcagugaggacg

SEQ ID NO: 1341919 - RNA, 20 nt, Human
gcaggaggcaggcaagcugg

SEQ ID NO: 1341920 - RNA, 22 nt, Human
gccacgccacucccgccgcgac

SEQ ID NO: 1341921 - RNA, 25 nt, Human
gcccuggacaccuuccccaggaccc

SEQ ID NO: 1341922 - RNA, 20 nt, Human
gcugcgguccuggggcugga

SEQ ID NO: 1341923 - RNA, 28 nt, Human
gcugcgguccuggggcuggcggcucgcc

SEQ ID NO: 1341924 - RNA, 22 nt, Human
gcugcugcgguccuggggcugg

SEQ ID NO: 1341925 - RNA, 22 nt, Human
ggaagcaggaaggucagggcag

SEQ ID NO: 1341926 - RNA, 23 nt, Human
ggaaggaagacuuaaaggacgau

SEQ ID NO: 1341927 - RNA, 20 nt, Human
ggaagggagggaaagucuug

SEQ ID NO: 1341928 - RNA, 23 nt, Human
ggcguauuuuacugaacuaagag

SEQ ID NO: 1341929 - RNA, 21 nt, Human
ggcuagaacaacaacaacaac

SEQ ID NO: 1341930 - RNA, 30 nt, Human
gggaccccuccuggacuuguccccugcccu

SEQ ID NO: 1341931 - RNA, 21 nt, Human
ggggaaaggguggcacaggaa

SEQ ID NO: 1341932 - RNA, 18 nt, Human
gguccuggggcuggaagg

SEQ ID NO: 1341933 - RNA, 18 nt, Human
gucagggcagugggugca

SEQ ID NO: 1341934 - RNA, 19 nt, Human
gucgggacacccuucccag

SEQ ID NO: 1341935 - RNA, 18 nt, Human
uaaaaagaaugacaagaa

SEQ ID NO: 1341936 - RNA, 21 nt, Human
uaaaacacuggcgucccaggc

SEQ ID NO: 1341937 - RNA, 23 nt, Human
uaaaccuuucccauucaaggcac

SEQ ID NO: 1341938 - RNA, 23 nt, Human
uacugaacuaagagcauaaaaca

SEQ ID NO: 1341939 - RNA, 22 nt, Human
uagaacaacaacaacaacaaag

SEQ ID NO: 1341940 - RNA, 23 nt, Human
uagaacaacaacaacaacaaaga

SEQ ID NO: 1341941 - RNA, 24 nt, Human
uagaacaacaacaacaacaaagaa

SEQ ID NO: 1341942 - RNA, 21 nt, Human
uaugacagcacagagucuaaa

SEQ ID NO: 1341943 - RNA, 22 nt, Human
uaugacagcacagagucuaaaa

SEQ ID NO: 1341944 - RNA, 24 nt, Human
ucaaucuugaauuucgggggcgua

SEQ ID NO: 1341945 - RNA, 19 nt, Human
ucccaucaguccaaacugg

SEQ ID NO: 1341946 - RNA, 22 nt, Human
ucccaucaguccaaacuggacc

SEQ ID NO: 1341947 - RNA, 25 nt, Human
uccccgagaccaugcaugaaggccc

SEQ ID NO: 1341948 - RNA, 20 nt, Human
ugaggggcggggaaagggug

SEQ ID NO: 1341949 - RNA, 22 nt, Human
ugcaugaaggcccugggacccc

SEQ ID NO: 1341950 - RNA, 22 nt, Human
ugcccuggacaccuuccccagg

SEQ ID NO: 1341951 - RNA, 26 nt, Human
ugcggcagcggccgccguuuguuuuc

SEQ ID NO: 1341952 - RNA, 19 nt, Human
ugcugcgguccuggggcug

SEQ ID NO: 1341953 - RNA, 21 nt, Human
uggcacccuggcagagauggc

SEQ ID NO: 1341954 - RNA, 21 nt, Human
uggcagagauggcagcguggg

SEQ ID NO: 1341955 - RNA, 21 nt, Human
uggcccccaaggccagcgccu

SEQ ID NO: 1341956 - RNA, 22 nt, Human
ugggaccccuccuggacuugac

SEQ ID NO: 1341957 - RNA, 20 nt, Human
ugggcagauggagccacagc

SEQ ID NO: 1341958 - RNA, 24 nt, Human
uucaauagaagauuucuguaauga

SEQ ID NO: 1341959 - RNA, 19 nt, Human
uucccaccuuuuauuucca

SEQ ID NO: 1341960 - RNA, 18 nt, Human
uugaaaaaguuggagcau

SEQ ID NO: 1341961 - RNA, 19 nt, Human
uugaaaaaguuggagcauu

SEQ ID NO: 1341962 - RNA, 19 nt, Human
aaaaaaucaugcaagagca

SEQ ID NO: 1341963 - RNA, 19 nt, Human
aggaaagauuugagacuac

SEQ ID NO: 1341964 - RNA, 19 nt, Human
ccguuagcucugggcgccg

SEQ ID NO: 1341965 - RNA, 24 nt, Human
uaaaaaaucaugcaagagcauuuu

SEQ ID NO: 1341966 - RNA, 20 nt, Human
ugcacagaugcaaaaugauc

SEQ ID NO: 1341967 - RNA, 21 nt, Human
uuuuuuuuuuuuuuuuuuugg

SEQ ID NO: 1341968 - RNA, 20 nt, Human
acuguccccagguggacaga

SEQ ID NO: 1341969 - RNA, 18 nt, Human
agaggaggaggaaggggc

SEQ ID NO: 1341970 - RNA, 19 nt, Human
agcagcuuaaauaugaggc

SEQ ID NO: 1341971 - RNA, 21 nt, Human
agcaggaagaggaggaggaag

SEQ ID NO: 1341972 - RNA, 24 nt, Human
aggaggaggaaggggccgcagagc

SEQ ID NO: 1341973 - RNA, 25 nt, Human
agguccagcagggaggggaccagga

SEQ ID NO: 1341974 - RNA, 20 nt, Human
cagcagggaggggaccagga

SEQ ID NO: 1341975 - RNA, 21 nt, Human
cagcccagugggacuaggcag

SEQ ID NO: 1341976 - RNA, 21 nt, Human
ccccuuagacccaggccugag

SEQ ID NO: 1341977 - RNA, 20 nt, Human
gaagaggaggaggaaggggc

SEQ ID NO: 1341978 - RNA, 19 nt, Human
gacuaggcaggaagcucug

SEQ ID NO: 1341979 - RNA, 20 nt, Human
gagcaggaagaggaggagga

SEQ ID NO: 1341980 - RNA, 24 nt, Human
gagcaggaagaggaggaggaaggg

SEQ ID NO: 1341981 - RNA, 21 nt, Human
ggaaggacagaacgacgcagg

SEQ ID NO: 1341982 - RNA, 24 nt, Human
ggaccaggaucucuugcuccacgg

SEQ ID NO: 1341983 - RNA, 18 nt, Human
gggaccaggaucucuugc

SEQ ID NO: 1341984 - RNA, 20 nt, Human
gguccagcagggaggggacc

SEQ ID NO: 1341985 - RNA, 20 nt, Human
uaugaggcaagcagucaggg

SEQ ID NO: 1341986 - RNA, 19 nt, Human
uccccagguggacagaagu

SEQ ID NO: 1341987 - RNA, 19 nt, Human
ucggaaggacagaacgacg

SEQ ID NO: 1341988 - RNA, 18 nt, Human
ugagccucuggcaggggc

SEQ ID NO: 1341989 - RNA, 20 nt, Human
ugccuggggcuggguugggg

SEQ ID NO: 1341990 - RNA, 21 nt, Human
ugccuggggcuggguuggggu

SEQ ID NO: 1341991 - RNA, 22 nt, Human
ugccuggggcuggguugggguc

SEQ ID NO: 1341992 - RNA, 21 nt, Human
ugggucagaggccuggugggc

SEQ ID NO: 1341993 - RNA, 21 nt, Human
uggguggcagguccagcaggg

SEQ ID NO: 1341994 - RNA, 24 nt, Human
uucggaaggacagaacgacgcagg

SEQ ID NO: 1341995 - RNA, 18 nt, Human
uuggagcaggaagaggag

SEQ ID NO: 1341996 - RNA, 20 nt, Human
uuggagcaggaagaggagga

SEQ ID NO: 1341997 - RNA, 19 nt, Human
uuggcagggcggucuuccc

SEQ ID NO: 1341998 - RNA, 24 nt, Human
aaaauucaaccuauacaaaaagga

SEQ ID NO: 1341999 - RNA, 21 nt, Human
agaaaacaaaaauucaaccua

SEQ ID NO: 1342000 - RNA, 21 nt, Human
aggcgguacugcggugggagc

SEQ ID NO: 1342001 - RNA, 25 nt, Human
ccugcaccccccgcgcccccggcca

SEQ ID NO: 1342002 - RNA, 24 nt, Human
gagcagcagccaaguccgcgggaa

SEQ ID NO: 1342003 - RNA, 23 nt, Human
uauacaaaaaggagaaaugcuuc

SEQ ID NO: 1342004 - RNA, 24 nt, Human
ugggagcagcagccaaguccgcgg

SEQ ID NO: 1342005 - RNA, 20 nt, Human
uucaaccuauacaaaaagga

SEQ ID NO: 1342006 - RNA, 23 nt, Human
aaaaaagaaaccaagcuaccaaa

SEQ ID NO: 1342007 - RNA, 24 nt, Human
aaaaagaaaccaagcuaccaaacu

SEQ ID NO: 1342008 - RNA, 19 nt, Human
aaaaccuuguuagcauuuu

SEQ ID NO: 1342009 - RNA, 21 nt, Human
aaaagaaaccaagcuaccaaa

SEQ ID NO: 1342010 - RNA, 22 nt, Human
aaacuaccaccaguggaaucgg

SEQ ID NO: 1342011 - RNA, 22 nt, Human
aaagguuuuuuuuuucaauaaa

SEQ ID NO: 1342012 - RNA, 23 nt, Human
aaggagucaaaauccagugacac

SEQ ID NO: 1342013 - RNA, 20 nt, Human
aaguaucaaaaaguacuacu

SEQ ID NO: 1342014 - RNA, 23 nt, Human
aauguguucauauuacuuucaua

SEQ ID NO: 1342015 - RNA, 21 nt, Human
agaagcacuagcaaacuacca

SEQ ID NO: 1342016 - RNA, 20 nt, Human
agcggugccgacagcaagca

SEQ ID NO: 1342017 - RNA, 18 nt, Human
auaaauacuaaaguauca

SEQ ID NO: 1342018 - RNA, 27 nt, Human
caauucuuaaaaauuaaaaauugaaga

SEQ ID NO: 1342019 - RNA, 21 nt, Human
cagaaugcccauuauauuuuc

SEQ ID NO: 1342020 - RNA, 23 nt, Human
cagcggugccgacagcaagcaga

SEQ ID NO: 1342021 - RNA, 23 nt, Human
cagggaaagaaaacacauauauc

SEQ ID NO: 1342022 - RNA, 26 nt, Human
caucagggaaagaaaacacauauauc

SEQ ID NO: 1342023 - RNA, 20 nt, Human
caucucugucaauucuacca

SEQ ID NO: 1342024 - RNA, 22 nt, Human
ccuaaacaucagggaaagaaaa

SEQ ID NO: 1342025 - RNA, 21 nt, Human
cggugccgacagcaagcagaa

SEQ ID NO: 1342026 - RNA, 21 nt, Human
cuaaacaucagggaaagaaaa

SEQ ID NO: 1342027 - RNA, 21 nt, Human
cucucagugcuagggagcaac

SEQ ID NO: 1342028 - RNA, 20 nt, Human
gauacaaacuuagaguuuau

SEQ ID NO: 1342029 - RNA, 18 nt, Human
uaacuccagcaaagauuu

SEQ ID NO: 1342030 - RNA, 22 nt, Human
uaauaaaaaaaagaaaccaagc

SEQ ID NO: 1342031 - RNA, 22 nt, Human
uacagauguccaaguauguagu

SEQ ID NO: 1342032 - RNA, 23 nt, Human
uagcaaacuaccaccaguggaau

SEQ ID NO: 1342033 - RNA, 21 nt, Human
uaggcaaaaaaaaaagguuuu

SEQ ID NO: 1342034 - RNA, 22 nt, Human
ugacacacucauaaaaacucca

SEQ ID NO: 1342035 - RNA, 18 nt, Human
ugccgacagcaagcagaa

SEQ ID NO: 1342036 - RNA, 20 nt, Human
ugggccaaucuaucaaaacc

SEQ ID NO: 1342037 - RNA, 18 nt, Human
uuagaaauucuccaauuc

SEQ ID NO: 1342038 - RNA, 19 nt, Human
uuagcauuuuugcuuuucu

SEQ ID NO: 1342039 - RNA, 23 nt, Human
uuuaacauuagaaauucuccaau

SEQ ID NO: 1342040 - RNA, 22 nt, Human
uuuuaccuacccacaccucuca

SEQ ID NO: 1342041 - RNA, 20 nt, Human
uuuuucaaauauacugucug

SEQ ID NO: 1342042 - RNA, 18 nt, Human
uuuuuuuuuuuuuuuucg

SEQ ID NO: 1342043 - RNA, 21 nt, Human
uuuuuuuuuuuuuuuuucgau

SEQ ID NO: 1342044 - RNA, 23 nt, Human
aaccagaacagaccgacggcccc

SEQ ID NO: 1342045 - RNA, 18 nt, Human
caaccagaacagaccgac

SEQ ID NO: 1342046 - RNA, 20 nt, Human
caaccagaacagaccgacgg

SEQ ID NO: 1342047 - RNA, 24 nt, Human
caaccagaacagaccgacggcccc

SEQ ID NO: 1342048 - RNA, 23 nt, Human
cacgugacccgccgcuggucacc

SEQ ID NO: 1342049 - RNA, 21 nt, Human
cagaccgacggccccaccaca

SEQ ID NO: 1342050 - RNA, 21 nt, Human
ccaggcaccgcgucacgugac

SEQ ID NO: 1342051 - RNA, 22 nt, Human
cugcccugaaagccccaggcgu

SEQ ID NO: 1342052 - RNA, 19 nt, Human
gaacagaccgacggcccca

SEQ ID NO: 1342053 - RNA, 20 nt, Human
gaccgacggccccaccacag

SEQ ID NO: 1342054 - RNA, 23 nt, Human
gcccugaaagccccaggcguccc

SEQ ID NO: 1342055 - RNA, 21 nt, Human
gugcgcgggcuccucugcgau

SEQ ID NO: 1342056 - RNA, 18 nt, Human
ucgugcgcgggcuccucu

SEQ ID NO: 1342057 - RNA, 24 nt, Human
ugcacagcugccugcccugaaagc

SEQ ID NO: 1342058 - RNA, 20 nt, Human
uuccucucacaagaccuuua

SEQ ID NO: 1342059 - RNA, 18 nt, Human
uuuuuuuuccucucacaa

SEQ ID NO: 1342060 - RNA, 21 nt, Human
uuuuuuuuuccucucacaaga

SEQ ID NO: 1342061 - RNA, 19 nt, Human
aaaaggcaacauggaacac

SEQ ID NO: 1342062 - RNA, 21 nt, Human
aaacagaaacccucuaaaacc

SEQ ID NO: 1342063 - RNA, 27 nt, Human
aaacauggccauaagcaauuuugagga

SEQ ID NO: 1342064 - RNA, 23 nt, Human
aaaccacacacaauuccacaacc

SEQ ID NO: 1342065 - RNA, 22 nt, Human
aacaagaacacuuucuccucac

SEQ ID NO: 1342066 - RNA, 22 nt, Human
aacaccgaccuagaugcagcaa

SEQ ID NO: 1342067 - RNA, 22 nt, Human
aacagaaacccucuaaaaccac

SEQ ID NO: 1342068 - RNA, 20 nt, Human
aacauggugaaacgcugucu

SEQ ID NO: 1342069 - RNA, 21 nt, Human
aacauggugaaacgcugucuc

SEQ ID NO: 1342070 - RNA, 21 nt, Human
aaccaaaucauccaaacugaa

SEQ ID NO: 1342071 - RNA, 21 nt, Human
aaccaaaugaguaacauaaaa

SEQ ID NO: 1342072 - RNA, 23 nt, Human
aaccugacaccaaaugacacuuc

SEQ ID NO: 1342073 - RNA, 22 nt, Human
aacuucuugaacaaaaccuaga

SEQ ID NO: 1342074 - RNA, 20 nt, Human
aacuuggccaggcgcaguga

SEQ ID NO: 1342075 - RNA, 19 nt, Human
aagacaucuugacaagaaa

SEQ ID NO: 1342076 - RNA, 23 nt, Human
aagagugagacuccaucucaaaa

SEQ ID NO: 1342077 - RNA, 24 nt, Human
aaucgcuugaauccaggaggcaga

SEQ ID NO: 1342078 - RNA, 19 nt, Human
aauucaccccauccucccc

SEQ ID NO: 1342079 - RNA, 24 nt, Human
acaaaacagaaaagcaaacuggag

SEQ ID NO: 1342080 - RNA, 23 nt, Human
acaaaaccuagaaguuaaagggc

SEQ ID NO: 1342081 - RNA, 24 nt, Human
acagaauccuuacuuuagcaucga

SEQ ID NO: 1342082 - RNA, 19 nt, Human
acagggcaagggcagcccc

SEQ ID NO: 1342083 - RNA, 24 nt, Human
accccauccuccccaccaucuuaa

SEQ ID NO: 1342084 - RNA, 24 nt, Human
acuacugcacuccagccuggguga

SEQ ID NO: 1342085 - RNA, 25 nt, Human
acuccagccugggugacaagaguga

SEQ ID NO: 1342086 - RNA, 18 nt, Human
acugcacuccagccuggg

SEQ ID NO: 1342087 - RNA, 18 nt, Human
acugcacuccagccuggg

SEQ ID NO: 1342088 - RNA, 19 nt, Human
acugcacuccagccugggu

SEQ ID NO: 1342089 - RNA, 21 nt, Human
acugcacuccagccuggguga

SEQ ID NO: 1342090 - RNA, 22 nt, Human
acugcacuccagccugggugac

SEQ ID NO: 1342091 - RNA, 23 nt, Human
acugcacuccagccugggugaca

SEQ ID NO: 1342092 - RNA, 24 nt, Human
acugcacuccagccugggugacaa

SEQ ID NO: 1342093 - RNA, 25 nt, Human
acugcacuccagccugggugacaag

SEQ ID NO: 1342094 - RNA, 21 nt, Human
agaaagcuaugcuuacaaucc

SEQ ID NO: 1342095 - RNA, 22 nt, Human
agaccauccuagcuaacauggu

SEQ ID NO: 1342096 - RNA, 22 nt, Human
agagguugcagugagcugagau

SEQ ID NO: 1342097 - RNA, 24 nt, Human
agagguugcagugagcugagaucg

SEQ ID NO: 1342098 - RNA, 24 nt, Human
agcacuuugggaggccgaggcagg

SEQ ID NO: 1342099 - RNA, 23 nt, Human
agccgggugugguggcacgugcc

SEQ ID NO: 1342100 - RNA, 25 nt, Human
agccugggugacaagagugagacuc

SEQ ID NO: 1342101 - RNA, 19 nt, Human
agcuaacauggugaaacgc

SEQ ID NO: 1342102 - RNA, 20 nt, Human
aggcagagguugcagugagc

SEQ ID NO: 1342103 - RNA, 24 nt, Human
aggcagagguugcagugagcugag

SEQ ID NO: 1342104 - RNA, 22 nt, Human
aggcagaucacaaggucaggag

SEQ ID NO: 1342105 - RNA, 24 nt, Human
aggcaggcagaucacaaggucagg

SEQ ID NO: 1342106 - RNA, 26 nt, Human
aggcaggcagaucacaaggucaggag

SEQ ID NO: 1342107 - RNA, 24 nt, Human
aggcgcagugacucacgccuguaa

SEQ ID NO: 1342108 - RNA, 24 nt, Human
aggcugggacaggagaaucgcuug

SEQ ID NO: 1342109 - RNA, 23 nt, Human
agguuucacuauaaaauuuuagg

SEQ ID NO: 1342110 - RNA, 24 nt, Human
agugacucacgccuguaaucccag

SEQ ID NO: 1342111 - RNA, 27 nt, Human
aguuucuggaauuuuauuauuuuuaau

SEQ ID NO: 1342112 - RNA, 22 nt, Human
auaaaauguucacaucaacccc

SEQ ID NO: 1342113 - RNA, 20 nt, Human
auaaaucaucacugcccaaa

SEQ ID NO: 1342114 - RNA, 26 nt, Human
auagugauagaaacagcacuugugcc

SEQ ID NO: 1342115 - RNA, 23 nt, Human
aucagaaaaacaaauuggaucuc

SEQ ID NO: 1342116 - RNA, 21 nt, Human
aucauccuuuuucaucaacag

SEQ ID NO: 1342117 - RNA, 24 nt, Human
auccaggaggcagagguugcagug

SEQ ID NO: 1342118 - RNA, 22 nt, Human
auccuccccaccaucuuaaagc

SEQ ID NO: 1342119 - RNA, 24 nt, Human
aucgcacuacugcacuccagccug

SEQ ID NO: 1342120 - RNA, 22 nt, Human
auggaacacagcauacacuaca

SEQ ID NO: 1342121 - RNA, 19 nt, Human
auuacaguaaaaccucauc

SEQ ID NO: 1342122 - RNA, 19 nt, Human
auucaccccauccucccca

SEQ ID NO: 1342123 - RNA, 24 nt, Human
caaaacaucaaauacuucauauag

SEQ ID NO: 1342124 - RNA, 22 nt, Human
caaaagauauucccagauaugc

SEQ ID NO: 1342125 - RNA, 23 nt, Human
caaaagauauucccagauaugcu

SEQ ID NO: 1342126 - RNA, 22 nt, Human
caaacaaaacaucaaauacuuc

SEQ ID NO: 1342127 - RNA, 26 nt, Human
caaaccaaaucauccaaacugaaaga

SEQ ID NO: 1342128 - RNA, 22 nt, Human
caaacugaaagaugaaugauau

SEQ ID NO: 1342129 - RNA, 19 nt, Human
caaauuggaucucuugggu

SEQ ID NO: 1342130 - RNA, 21 nt, Human
caacaauauaaagcagguuuc

SEQ ID NO: 1342131 - RNA, 24 nt, Human
caagaacacuuucuccucacuucc

SEQ ID NO: 1342132 - RNA, 24 nt, Human
caauuacaguaaaaccucauccua

SEQ ID NO: 1342133 - RNA, 19 nt, Human
caauuccaaucaaaguauu

SEQ ID NO: 1342134 - RNA, 19 nt, Human
cacacaauuccacaaccaa

SEQ ID NO: 1342135 - RNA, 19 nt, Human
caccaucuuaaagcugcau

SEQ ID NO: 1342136 - RNA, 23 nt, Human
cacccaacuccccaacuucaugg

SEQ ID NO: 1342137 - RNA, 21 nt, Human
caccccauccuccccaccauc

SEQ ID NO: 1342138 - RNA, 23 nt, Human
caccccauccuccccaccaucuu

SEQ ID NO: 1342139 - RNA, 27 nt, Human
caccccauccuccccaccaucuuaaag

SEQ ID NO: 1342140 - RNA, 24 nt, Human
cacgccuguaaucccagcacuuug

SEQ ID NO: 1342141 - RNA, 23 nt, Human
cacuccagccugggugacaagag

SEQ ID NO: 1342142 - RNA, 24 nt, Human
cacuccagccugggugacaagagu

SEQ ID NO: 1342143 - RNA, 25 nt, Human
cacuccagccugggugacaagagug

SEQ ID NO: 1342144 - RNA, 19 nt, Human
cacucgggaaucaagacag

SEQ ID NO: 1342145 - RNA, 21 nt, Human
cacuucaacagugcaaccugu

SEQ ID NO: 1342146 - RNA, 21 nt, Human
cacuuuuuucccuucccucuu

SEQ ID NO: 1342147 - RNA, 18 nt, Human
cagacuguguauuaagca

SEQ ID NO: 1342148 - RNA, 24 nt, Human
cagcacuuugggaggccgaggcag

SEQ ID NO: 1342149 - RNA, 25 nt, Human
cagcacuuugggaggccgaggcagg

SEQ ID NO: 1342150 - RNA, 22 nt, Human
cagcaucauaaauauuuuacua

SEQ ID NO: 1342151 - RNA, 24 nt, Human
cagcaucauaaauauuuuacuauu

SEQ ID NO: 1342152 - RNA, 24 nt, Human
cagcugcuaccaggacacaaaaca

SEQ ID NO: 1342153 - RNA, 23 nt, Human
caggacacaaaacagaaaagcug

SEQ ID NO: 1342154 - RNA, 22 nt, Human
caggcagaucacaaggucagga

SEQ ID NO: 1342155 - RNA, 24 nt, Human
caguuaaaaaaaaaaaaaaaaaaa

SEQ ID NO: 1342156 - RNA, 23 nt, Human
cauacacuacacugacggcaguu

SEQ ID NO: 1342157 - RNA, 24 nt, Human
cauacugcuaugcauuaaaaucau

SEQ ID NO: 1342158 - RNA, 21 nt, Human
cauauaugcacaucauacaau

SEQ ID NO: 1342159 - RNA, 25 nt, Human
cauccaaacugaaagaugaaugaua

SEQ ID NO: 1342160 - RNA, 20 nt, Human
cauccuccccaccaucuuaa

SEQ ID NO: 1342161 - RNA, 24 nt, Human
cauccuggccgccgcgcccucucc

SEQ ID NO: 1342162 - RNA, 21 nt, Human
caucuaaaaaggcaacaugga

SEQ ID NO: 1342163 - RNA, 22 nt, Human
ccaagaguaaacuuuacccaau

SEQ ID NO: 1342164 - RNA, 18 nt, Human
ccauccuccccaccaucu

SEQ ID NO: 1342165 - RNA, 21 nt, Human
cccgagccggagggaaaaggc

SEQ ID NO: 1342166 - RNA, 19 nt, Human
ccgccgcgcccucuccggc

SEQ ID NO: 1342167 - RNA, 20 nt, Human
ccgccgcgcccucuccggcu

SEQ ID NO: 1342168 - RNA, 20 nt, Human
ccuagcuaacauggugaaac

SEQ ID NO: 1342169 - RNA, 21 nt, Human
ccuagcuaacauggugaaacg

SEQ ID NO: 1342170 - RNA, 21 nt, Human
ccuauagucccagcuaccugg

SEQ ID NO: 1342171 - RNA, 22 nt, Human
ccuauagucccagcuaccuggg

SEQ ID NO: 1342172 - RNA, 23 nt, Human
ccucacuuccuucccaaccucca

SEQ ID NO: 1342173 - RNA, 23 nt, Human
ccugggugacaagagugagacuc

SEQ ID NO: 1342174 - RNA, 18 nt, Human
cgagccggagggaaaagg

SEQ ID NO: 1342175 - RNA, 26 nt, Human
cgaggcaggcagaucacaaggucagg

SEQ ID NO: 1342176 - RNA, 21 nt, Human
cgcacuacugcacuccagccu

SEQ ID NO: 1342177 - RNA, 18 nt, Human
cgccgcgcccucuccggc

SEQ ID NO: 1342178 - RNA, 23 nt, Human
cgccuguaaucccagcacuuugg

SEQ ID NO: 1342179 - RNA, 24 nt, Human
cgccuguaaucccagcacuuuggg

SEQ ID NO: 1342180 - RNA, 19 nt, Human
cgcuugaauccaggaggca

SEQ ID NO: 1342181 - RNA, 18 nt, Human
cgucagcgaaggcggauc

SEQ ID NO: 1342182 - RNA, 21 nt, Human
cuacugaaccaaaggcuguau

SEQ ID NO: 1342183 - RNA, 21 nt, Human
cuacugcacuccagccugggu

SEQ ID NO: 1342184 - RNA, 24 nt, Human
cuacugcacuccagccugggugac

SEQ ID NO: 1342185 - RNA, 22 nt, Human
cucacgccuguaaucccagcac

SEQ ID NO: 1342186 - RNA, 24 nt, Human
cucacgccuguaaucccagcacuu

SEQ ID NO: 1342187 - RNA, 23 nt, Human
cugaaacucacgugcaauauugc

SEQ ID NO: 1342188 - RNA, 19 nt, Human
cuucaaauguaacaagaga

SEQ ID NO: 1342189 - RNA, 22 nt, Human
gaaaaaaagaacugaaacucac

SEQ ID NO: 1342190 - RNA, 19 nt, Human
gaaaagaaaaaccacacag

SEQ ID NO: 1342191 - RNA, 22 nt, Human
gacaggagaaucgcuugaaucc

SEQ ID NO: 1342192 - RNA, 23 nt, Human
gagaaucgcuugaauccaggagg

SEQ ID NO: 1342193 - RNA, 23 nt, Human
gagaucgcacuacugcacuccag

SEQ ID NO: 1342194 - RNA, 21 nt, Human
gaggcagagguugcagugagc

SEQ ID NO: 1342195 - RNA, 18 nt, Human
gaggcugggacaggagaa

SEQ ID NO: 1342196 - RNA, 25 nt, Human
gauaugcuucaugcucuuaugcuuu

SEQ ID NO: 1342197 - RNA, 20 nt, Human
gcacuacugcacuccagccu

SEQ ID NO: 1342198 - RNA, 24 nt, Human
gcuaacauggugaaacgcugucuc

SEQ ID NO: 1342199 - RNA, 22 nt, Human
ggaaagaacggagggcgcgagc

SEQ ID NO: 1342200 - RNA, 23 nt, Human
ggacaggagaaucgcuugaaucc

SEQ ID NO: 1342201 - RNA, 21 nt, Human
ggcacgugccuauagucccag

SEQ ID NO: 1342202 - RNA, 21 nt, Human
ggccaggcgcagugacucacg

SEQ ID NO: 1342203 - RNA, 19 nt, Human
gggcccggggcgcaagcga

SEQ ID NO: 1342204 - RNA, 19 nt, Human
gggcgcaagcgagacgcuc

SEQ ID NO: 1342205 - RNA, 23 nt, Human
guaagagugaaccccaacccagc

SEQ ID NO: 1342206 - RNA, 18 nt, Human
guaagaguuuccuuccaa

SEQ ID NO: 1342207 - RNA, 19 nt, Human
gucucuacuaaaaauacaa

SEQ ID NO: 1342208 - RNA, 21 nt, Human
gucuuaaaggcaaaagauauu

SEQ ID NO: 1342209 - RNA, 22 nt, Human
guuauaggucaguuuaccuaaa

SEQ ID NO: 1342210 - RNA, 21 nt, Human
guugcagugagcugagaucgc

SEQ ID NO: 1342211 - RNA, 19 nt, Human
uaaaaaggcaacauggaac

SEQ ID NO: 1342212 - RNA, 22 nt, Human
uaaaagauauguaauaaaguaa

SEQ ID NO: 1342213 - RNA, 22 nt, Human
uaaaauagcuauuacuaaagca

SEQ ID NO: 1342214 - RNA, 24 nt, Human
uaaaauagcuauuacuaaagcaaa

SEQ ID NO: 1342215 - RNA, 21 nt, Human
uaaaauguucacaucaacccc

SEQ ID NO: 1342216 - RNA, 22 nt, Human
uaaauucaccccauccucccca

SEQ ID NO: 1342217 - RNA, 22 nt, Human
uaacaagagaaugaagagguga

SEQ ID NO: 1342218 - RNA, 25 nt, Human
uaacauaaaauguucacaucaaccc

SEQ ID NO: 1342219 - RNA, 22 nt, Human
uaacauggugaaacgcugucuc

SEQ ID NO: 1342220 - RNA, 24 nt, Human
uaacauggugaaacgcugucucua

SEQ ID NO: 1342221 - RNA, 22 nt, Human
uaauacauacauuucacaaaca

SEQ ID NO: 1342222 - RNA, 20 nt, Human
uacagcuuugugcauuaaag

SEQ ID NO: 1342223 - RNA, 25 nt, Human
uaccaggacacaaaacagaaaagca

SEQ ID NO: 1342224 - RNA, 23 nt, Human
uacugcacuccagccugggugac

SEQ ID NO: 1342225 - RNA, 24 nt, Human
uacugcacuccagccugggugaca

SEQ ID NO: 1342226 - RNA, 25 nt, Human
uacugcacuccagccugggugacaa

SEQ ID NO: 1342227 - RNA, 21 nt, Human
uagaaaguuaacauuuuagua

SEQ ID NO: 1342228 - RNA, 18 nt, Human
uagccgcacggcccgugc

SEQ ID NO: 1342229 - RNA, 22 nt, Human
uagccgggugugguggcacgug

SEQ ID NO: 1342230 - RNA, 19 nt, Human
uagugauagaaacagcacu

SEQ ID NO: 1342231 - RNA, 21 nt, Human
uauaaaccaaaugaguaacau

SEQ ID NO: 1342232 - RNA, 18 nt, Human
uaucaagcucuuaguuua

SEQ ID NO: 1342233 - RNA, 19 nt, Human
uauccuaacuacaacaaaa

SEQ ID NO: 1342234 - RNA, 21 nt, Human
uauuagugaauaacauugguu

SEQ ID NO: 1342235 - RNA, 24 nt, Human
uauuuuuaauacauacauuucaca

SEQ ID NO: 1342236 - RNA, 20 nt, Human
ucaaauacuucauauagaac

SEQ ID NO: 1342237 - RNA, 22 nt, Human
ucaacagugcaaccuguaauaa

SEQ ID NO: 1342238 - RNA, 18 nt, Human
ucacaaggucaggagauc

SEQ ID NO: 1342239 - RNA, 24 nt, Human
ucacaaggucaggagaucuagacc

SEQ ID NO: 1342240 - RNA, 18 nt, Human
ucacuuccuucccaaccu

SEQ ID NO: 1342241 - RNA, 20 nt, Human
ucacuugucacauauuuuuc

SEQ ID NO: 1342242 - RNA, 22 nt, Human
ucaucagaaaaacaaauuggau

SEQ ID NO: 1342243 - RNA, 21 nt, Human
uccaaaacauacuuuuaaaag

SEQ ID NO: 1342244 - RNA, 26 nt, Human
uccaaaacauacuuuuaaaagaaaua

SEQ ID NO: 1342245 - RNA, 24 nt, Human
uccagccugggugacaagagugag

SEQ ID NO: 1342246 - RNA, 25 nt, Human
uccagccugggugacaagagugaga

SEQ ID NO: 1342247 - RNA, 22 nt, Human
uccaucucaaaaaaaagaaaaa

SEQ ID NO: 1342248 - RNA, 23 nt, Human
uccaucucaaaaaaaagaaaaaa

SEQ ID NO: 1342249 - RNA, 21 nt, Human
ucccaaccuccaaugaaaguu

SEQ ID NO: 1342250 - RNA, 23 nt, Human
ucgcacuacugcacuccagccug

SEQ ID NO: 1342251 - RNA, 22 nt, Human
ucucuacuaaaaauacaaaaaa

SEQ ID NO: 1342252 - RNA, 18 nt, Human
ucuggguacaggagagaa

SEQ ID NO: 1342253 - RNA, 21 nt, Human
ucuguggcugaaagauuuacc

SEQ ID NO: 1342254 - RNA, 18 nt, Human
ugaaaagaaaaaccacac

SEQ ID NO: 1342255 - RNA, 21 nt, Human
ugaaaagaaaaaccacacagu

SEQ ID NO: 1342256 - RNA, 18 nt, Human
ugaacaaaaccuagaagu

SEQ ID NO: 1342257 - RNA, 20 nt, Human
ugaacaaaaccuagaaguua

SEQ ID NO: 1342258 - RNA, 23 nt, Human
ugaaugauauuagugaauaacau

SEQ ID NO: 1342259 - RNA, 23 nt, Human
ugacaagaaaucuuuacugacaa

SEQ ID NO: 1342260 - RNA, 21 nt, Human
ugacucacgccuguaauccca

SEQ ID NO: 1342261 - RNA, 22 nt, Human
ugacucacgccuguaaucccag

SEQ ID NO: 1342262 - RNA, 24 nt, Human
ugacucacgccuguaaucccagca

SEQ ID NO: 1342263 - RNA, 22 nt, Human
ugagcugagaucgcacuacugc

SEQ ID NO: 1342264 - RNA, 22 nt, Human
ugaguaaacugccugcccaugu

SEQ ID NO: 1342265 - RNA, 24 nt, Human
ugcagaacacuaggcugagauaga

SEQ ID NO: 1342266 - RNA, 19 nt, Human
ugcauucuuuuagcauaua

SEQ ID NO: 1342267 - RNA, 23 nt, Human
ugccuauagucccagcuaccugg

SEQ ID NO: 1342268 - RNA, 24 nt, Human
ugccuauagucccagcuaccuggg

SEQ ID NO: 1342269 - RNA, 22 nt, Human
ugccugcccaugugugcugcag

SEQ ID NO: 1342270 - RNA, 20 nt, Human
ugggaggccgaggcaggcag

SEQ ID NO: 1342271 - RNA, 24 nt, Human
ugggaggccgaggcaggcagauca

SEQ ID NO: 1342272 - RNA, 23 nt, Human
ugggaggcugggacaggagaauc

SEQ ID NO: 1342273 - RNA, 19 nt, Human
ugggauaauucacccaacu

SEQ ID NO: 1342274 - RNA, 20 nt, Human
uggguacaggagagaaucaa

SEQ ID NO: 1342275 - RNA, 19 nt, Human
uggugaaacgcugucucua

SEQ ID NO: 1342276 - RNA, 24 nt, Human
ugguggcacgugccuauaguccca

SEQ ID NO: 1342277 - RNA, 18 nt, Human
uuaaggucaguagauuuc

SEQ ID NO: 1342278 - RNA, 19 nt, Human
uuaauacauacauuucaca

SEQ ID NO: 1342279 - RNA, 20 nt, Human
uuagccgggugugguggcac

SEQ ID NO: 1342280 - RNA, 20 nt, Human
uuagccgggugugguggcac

SEQ ID NO: 1342281 - RNA, 24 nt, Human
uuagccgggugugguggcacgugc

SEQ ID NO: 1342282 - RNA, 26 nt, Human
uucacaaacagaaacccucuaaaacc

SEQ ID NO: 1342283 - RNA, 19 nt, Human
uucaggggguagaaagcca

SEQ ID NO: 1342284 - RNA, 19 nt, Human
uucaggggguagaaagcca

SEQ ID NO: 1342285 - RNA, 21 nt, Human
uucaggggguagaaagccauc

SEQ ID NO: 1342286 - RNA, 21 nt, Human
uucauauagaacugaaacuug

SEQ ID NO: 1342287 - RNA, 22 nt, Human
uucauaugucuuacaauuugga

SEQ ID NO: 1342288 - RNA, 19 nt, Human
uucuaaauucaggagcuug

SEQ ID NO: 1342289 - RNA, 18 nt, Human
uucugccuucuugcauua

SEQ ID NO: 1342290 - RNA, 18 nt, Human
uugcagugagcugagauc

SEQ ID NO: 1342291 - RNA, 19 nt, Human
uugcagugagcugagaucg

SEQ ID NO: 1342292 - RNA, 22 nt, Human
uugcagugagcugagaucgcac

SEQ ID NO: 1342293 - RNA, 25 nt, Human
uugggaggccgaggcaggcagauca

SEQ ID NO: 1342294 - RNA, 18 nt, Human
uugggguauuaaggucag

SEQ ID NO: 1342295 - RNA, 24 nt, Human
uuuagcauauaugcacaucauaca

SEQ ID NO: 1342296 - RNA, 18 nt, Human
uuuaugcauuucuuccca

SEQ ID NO: 1342297 - RNA, 21 nt, Human
uuucucuuuaaguaacaucca

SEQ ID NO: 1342298 - RNA, 21 nt, Human
aaaguugccucuccuccaccu

SEQ ID NO: 1342299 - RNA, 21 nt, Human
aagguacauggcaaggcacuu

SEQ ID NO: 1342300 - RNA, 21 nt, Human
acagggaaaguugccucuccu

SEQ ID NO: 1342301 - RNA, 24 nt, Human
acggagaaagauacugaaauggag

SEQ ID NO: 1342302 - RNA, 23 nt, Human
acucugaaacagaugaaaaggga

SEQ ID NO: 1342303 - RNA, 23 nt, Human
agccccuugagcccuuuuuguua

SEQ ID NO: 1342304 - RNA, 21 nt, Human
aggaggccccagcagccaguc

SEQ ID NO: 1342305 - RNA, 21 nt, Human
caacacgagcacagugacccc

SEQ ID NO: 1342306 - RNA, 23 nt, Human
cacacccaaaagaggagaaccag

SEQ ID NO: 1342307 - RNA, 18 nt, Human
cacagugaccccagugac

SEQ ID NO: 1342308 - RNA, 22 nt, Human
caggagcagggacgggucccua

SEQ ID NO: 1342309 - RNA, 21 nt, Human
caugcaaauuugcugagcaca

SEQ ID NO: 1342310 - RNA, 24 nt, Human
cauggcaaggcacuuuugaaaaca

SEQ ID NO: 1342311 - RNA, 25 nt, Human
cauggcaaggcacuuuugaaaacau

SEQ ID NO: 1342312 - RNA, 22 nt, Human
ccacacccaaaagaggagaacc

SEQ ID NO: 1342313 - RNA, 19 nt, Human
ccacggagaaagauacuga

SEQ ID NO: 1342314 - RNA, 18 nt, Human
cccagugacggugauggu

SEQ ID NO: 1342315 - RNA, 19 nt, Human
ccccagugacggugauggu

SEQ ID NO: 1342316 - RNA, 23 nt, Human
ccgcccugcuccucucccaacuc

SEQ ID NO: 1342317 - RNA, 18 nt, Human
cgcccugcuccucuccca

SEQ ID NO: 1342318 - RNA, 18 nt, Human
gaaauggagcucuugcca

SEQ ID NO: 1342319 - RNA, 25 nt, Human
gccccagcagccagucuccagcccc

SEQ ID NO: 1342320 - RNA, 18 nt, Human
gcccugcuccucucccaa

SEQ ID NO: 1342321 - RNA, 22 nt, Human
gcccugcuccucucccaacuca

SEQ ID NO: 1342322 - RNA, 20 nt, Human
ggagcagggacgggucccua

SEQ ID NO: 1342323 - RNA, 26 nt, Human
ucccuacaaggccgcccugcuccucu

SEQ ID NO: 1342324 - RNA, 18 nt, Human
uuaggcccacacccaaaa

SEQ ID NO: 1342325 - RNA, 18 nt, Human
uuuuuuuugcuuuguacu

SEQ ID NO: 1342326 - RNA, 19 nt, Human
aaaacaaaacauaaaaccc

SEQ ID NO: 1342327 - RNA, 20 nt, Human
aaaacaaaacauaaaacccc

SEQ ID NO: 1342328 - RNA, 21 nt, Human
aaaagcacaaccacuuuacaa

SEQ ID NO: 1342329 - RNA, 24 nt, Human
aaaagucuaguaacauuucuaaau

SEQ ID NO: 1342330 - RNA, 23 nt, Human
aaacaaaacauaaaaccccaaac

SEQ ID NO: 1342331 - RNA, 25 nt, Human
aaacaaaaguuuagucucuccuagu

SEQ ID NO: 1342332 - RNA, 28 nt, Human
aaagaaaaacaaaacauaaaaccccaaa

SEQ ID NO: 1342333 - RNA, 20 nt, Human
aaccacucacuccaccucag

SEQ ID NO: 1342334 - RNA, 24 nt, Human
aagaaagagcagaaaaacuucuaa

SEQ ID NO: 1342335 - RNA, 23 nt, Human
accacuuuacaagauuaaaaguc

SEQ ID NO: 1342336 - RNA, 26 nt, Human
agaaaaacaaaacauaaaaccccaaa

SEQ ID NO: 1342337 - RNA, 24 nt, Human
agaaaagaaaaacaaaacauaaaa

SEQ ID NO: 1342338 - RNA, 21 nt, Human
auuaaauauauauauauauau

SEQ ID NO: 1342339 - RNA, 23 nt, Human
auucaaaauaaaugcccuuugau

SEQ ID NO: 1342340 - RNA, 24 nt, Human
auugcaaaucccagacuccagugg

SEQ ID NO: 1342341 - RNA, 21 nt, Human
caaaauuucacagaccuaaaa

SEQ ID NO: 1342342 - RNA, 23 nt, Human
cacaaaauuucacagaccuaaaa

SEQ ID NO: 1342343 - RNA, 21 nt, Human
cacagaccuaaaaugugcaag

SEQ ID NO: 1342344 - RNA, 26 nt, Human
cacuucauuuuagaaaagaaaaacaa

SEQ ID NO: 1342345 - RNA, 27 nt, Human
caggaaaagucucacaaaauuucacag

SEQ ID NO: 1342346 - RNA, 22 nt, Human
cauaaaaccccaaacucccaaa

SEQ ID NO: 1342347 - RNA, 21 nt, Human
ccaccucaaaaaacauagagc

SEQ ID NO: 1342348 - RNA, 23 nt, Human
ccacucacuccaccucaaaaaac

SEQ ID NO: 1342349 - RNA, 21 nt, Human
ccauuuaaaaaugaagaaaaa

SEQ ID NO: 1342350 - RNA, 19 nt, Human
cccagacuccaguggaaag

SEQ ID NO: 1342351 - RNA, 27 nt, Human
ccccaggugcagccacgaucagcucac

SEQ ID NO: 1342352 - RNA, 23 nt, Human
cccuacccuccccccaggugcag

SEQ ID NO: 1342353 - RNA, 22 nt, Human
ccuccucccuacccucccccca

SEQ ID NO: 1342354 - RNA, 22 nt, Human
cuaaauauuauucauaucauac

SEQ ID NO: 1342355 - RNA, 20 nt, Human
cucacuccaccucaaaaaac

SEQ ID NO: 1342356 - RNA, 19 nt, Human
cuccucccuacccuccccc

SEQ ID NO: 1342357 - RNA, 26 nt, Human
cuguccuuuguguuugugugugugug

SEQ ID NO: 1342358 - RNA, 27 nt, Human
cuuuuguucugaggugagccauaacag

SEQ ID NO: 1342359 - RNA, 22 nt, Human
gaaaaaccacucacuccaccuc

SEQ ID NO: 1342360 - RNA, 18 nt, Human
uaaaaccccaaacuccca

SEQ ID NO: 1342361 - RNA, 19 nt, Human
uaaaaccccaaacucccaa

SEQ ID NO: 1342362 - RNA, 18 nt, Human
uaaaauuacaguacaagc

SEQ ID NO: 1342363 - RNA, 23 nt, Human
uaaccuccagaauugcaaauccc

SEQ ID NO: 1342364 - RNA, 27 nt, Human
uaagaaagagcagaaaaacuucuaaua

SEQ ID NO: 1342365 - RNA, 21 nt, Human
uacacacaugaaagaugcaug

SEQ ID NO: 1342366 - RNA, 21 nt, Human
uacccuccccccaggugcagc

SEQ ID NO: 1342367 - RNA, 23 nt, Human
uagaaaaccccaaaucuuuagga

SEQ ID NO: 1342368 - RNA, 19 nt, Human
uagacagcacacaucacca

SEQ ID NO: 1342369 - RNA, 24 nt, Human
uagguggcaugccccuccucccua

SEQ ID NO: 1342370 - RNA, 22 nt, Human
uaguuuuagaaaaccccaaauc

SEQ ID NO: 1342371 - RNA, 21 nt, Human
uauuauuuuuuuacuguccag

SEQ ID NO: 1342372 - RNA, 25 nt, Human
uauuuacacacaugaaagaugcaug

SEQ ID NO: 1342373 - RNA, 21 nt, Human
ucaaauaucaaaauguaugac

SEQ ID NO: 1342374 - RNA, 22 nt, Human
ucccuacccuccccccaggugc

SEQ ID NO: 1342375 - RNA, 23 nt, Human
ucugaggugagccauaacagcug

SEQ ID NO: 1342376 - RNA, 24 nt, Human
ucuugguguuuaauuuucggguga

SEQ ID NO: 1342377 - RNA, 24 nt, Human
ucuuuuguucugaggugagccaua

SEQ ID NO: 1342378 - RNA, 20 nt, Human
ugaaauuagcccagaaauga

SEQ ID NO: 1342379 - RNA, 18 nt, Human
ugaagaaaaaccacucac

SEQ ID NO: 1342380 - RNA, 22 nt, Human
ugccaaacggaaaaaaaaggga

SEQ ID NO: 1342381 - RNA, 23 nt, Human
ugccaaacggaaaaaaaagggaa

SEQ ID NO: 1342382 - RNA, 21 nt, Human
ugccccuccucccuacccucc

SEQ ID NO: 1342383 - RNA, 22 nt, Human
uggcaugccccuccucccuacc

SEQ ID NO: 1342384 - RNA, 23 nt, Human
uggccauuuaaaaaugaagaaaa

SEQ ID NO: 1342385 - RNA, 23 nt, Human
uggguugccaaacggaaaaaaaa

SEQ ID NO: 1342386 - RNA, 20 nt, Human
uguaagaaagagcagaaaaa

SEQ ID NO: 1342387 - RNA, 18 nt, Human
ugugugugugugugugug

SEQ ID NO: 1342388 - RNA, 18 nt, Human
ugugugugugugugugug

SEQ ID NO: 1342389 - RNA, 18 nt, Human
ugugugugugugugugug

SEQ ID NO: 1342390 - RNA, 18 nt, Human
ugugugugugugugugug

SEQ ID NO: 1342391 - RNA, 18 nt, Human
ugugugugugugugugug

SEQ ID NO: 1342392 - RNA, 18 nt, Human
ugugugugugugugugug

SEQ ID NO: 1342393 - RNA, 18 nt, Human
ugugugugugugugugug

SEQ ID NO: 1342394 - RNA, 21 nt, Human
ugugugugugugugugugugu

SEQ ID NO: 1342395 - RNA, 21 nt, Human
ugugugugugugugugugugu

SEQ ID NO: 1342396 - RNA, 21 nt, Human
ugugugugugugugugugugu

SEQ ID NO: 1342397 - RNA, 21 nt, Human
ugugugugugugugugugugu

SEQ ID NO: 1342398 - RNA, 21 nt, Human
ugugugugugugugugugugu

SEQ ID NO: 1342399 - RNA, 21 nt, Human
ugugugugugugugugugugu

SEQ ID NO: 1342400 - RNA, 21 nt, Human
ugugugugugugugugugugu

SEQ ID NO: 1342401 - RNA, 21 nt, Human
ugugugugugugugugugugu

SEQ ID NO: 1342402 - RNA, 21 nt, Human
ugugugugugugugugugugu

SEQ ID NO: 1342403 - RNA, 21 nt, Human
ugugugugugugugugugugu

SEQ ID NO: 1342404 - RNA, 21 nt, Human
ugugugugugugugugugugu

SEQ ID NO: 1342405 - RNA, 21 nt, Human
ugugugugugugugugugugu

SEQ ID NO: 1342406 - RNA, 22 nt, Human
ugugugugugugugugugugug

SEQ ID NO: 1342407 - RNA, 22 nt, Human
ugugugugugugugugugugug

SEQ ID NO: 1342408 - RNA, 22 nt, Human
ugugugugugugugugugugug

SEQ ID NO: 1342409 - RNA, 22 nt, Human
ugugugugugugugugugugug

SEQ ID NO: 1342410 - RNA, 22 nt, Human
ugugugugugugugugugugug

SEQ ID NO: 1342411 - RNA, 23 nt, Human
uuaguuuuagaaaaccccaaauc

SEQ ID NO: 1342412 - RNA, 22 nt, Human
uuccuagauucuuuaguuuuag

SEQ ID NO: 1342413 - RNA, 19 nt, Human
uugcguuggcucuugcgcc

SEQ ID NO: 1342414 - RNA, 24 nt, Human
uuugugugugugugugugugugug

SEQ ID NO: 1342415 - RNA, 28 nt, Human
uuuguguuugugugugugugugugugug

SEQ ID NO: 1342416 - RNA, 25 nt, Human
uuuguucugaggugagccauaacag

SEQ ID NO: 1342417 - RNA, 20 nt, Human
aacaauaaauacuaacagua

SEQ ID NO: 1342418 - RNA, 20 nt, Human
aagcaggaauaaaauacuua

SEQ ID NO: 1342419 - RNA, 22 nt, Human
aagucaugccuaucagcgagcc

SEQ ID NO: 1342420 - RNA, 20 nt, Human
aauuauugcaugucagcugg

SEQ ID NO: 1342421 - RNA, 22 nt, Human
acaaauucuccuccuaaaauuc

SEQ ID NO: 1342422 - RNA, 21 nt, Human
auagugguaaacaauaaauac

SEQ ID NO: 1342423 - RNA, 22 nt, Human
cagcgagcccaccuccugggcu

SEQ ID NO: 1342424 - RNA, 24 nt, Human
caggcagggacaauucccucccag

SEQ ID NO: 1342425 - RNA, 19 nt, Human
ccagaagcaggcagggaca

SEQ ID NO: 1342426 - RNA, 24 nt, Human
ccguagauggugucaauaucuucu

SEQ ID NO: 1342427 - RNA, 22 nt, Human
ccuaucagcgagcccaccuccu

SEQ ID NO: 1342428 - RNA, 21 nt, Human
ccucccagccuggcagggccu

SEQ ID NO: 1342429 - RNA, 24 nt, Human
ccuccuaaaauuccuuuuccuagg

SEQ ID NO: 1342430 - RNA, 19 nt, Human
cgaaagcaggaauaaaaua

SEQ ID NO: 1342431 - RNA, 20 nt, Human
cgaaagcaggaauaaaauac

SEQ ID NO: 1342432 - RNA, 23 nt, Human
cucccagccuggcagggccuuau

SEQ ID NO: 1342433 - RNA, 21 nt, Human
cugcucacaaauucuccuccu

SEQ ID NO: 1342434 - RNA, 18 nt, Human
gucagcuggacaucacuu

SEQ ID NO: 1342435 - RNA, 25 nt, Human
uaaaaguaacacgaaagcaggaaua

SEQ ID NO: 1342436 - RNA, 21 nt, Human
uaacacgaaagcaggaauaaa

SEQ ID NO: 1342437 - RNA, 19 nt, Human
uagaguauugaguacagua

SEQ ID NO: 1342438 - RNA, 20 nt, Human
uaggaaagucuucauggaua

SEQ ID NO: 1342439 - RNA, 20 nt, Human
uagugguaaacaauaaauac

SEQ ID NO: 1342440 - RNA, 20 nt, Human
uaucuucuuucuccagaagc

SEQ ID NO: 1342441 - RNA, 18 nt, Human
ucauggauaaaaauucuu

SEQ ID NO: 1342442 - RNA, 20 nt, Human
aacugcagcgaacagcacca

SEQ ID NO: 1342443 - RNA, 22 nt, Human
acugcuccaugggccucuccug

SEQ ID NO: 1342444 - RNA, 23 nt, Human
agacacaaagaaggugagaguaa

SEQ ID NO: 1342445 - RNA, 20 nt, Human
agacacacacagaaauauga

SEQ ID NO: 1342446 - RNA, 21 nt, Human
agccccauuuauuugcacagc

SEQ ID NO: 1342447 - RNA, 18 nt, Human
agcgaacagcaccaggga

SEQ ID NO: 1342448 - RNA, 18 nt, Human
aggaggccauccaaggag

SEQ ID NO: 1342449 - RNA, 20 nt, Human
aggaggccauccaaggagug

SEQ ID NO: 1342450 - RNA, 19 nt, Human
caagcguacaugcucccuu

SEQ ID NO: 1342451 - RNA, 19 nt, Human
cagcaccagggaagcugga

SEQ ID NO: 1342452 - RNA, 20 nt, Human
ccaaucuuggaccaagcgua

SEQ ID NO: 1342453 - RNA, 21 nt, Human
ccaugggccucuccuggaccu

SEQ ID NO: 1342454 - RNA, 27 nt, Human
ccucuggaaguaugcuaugcucaacuu

SEQ ID NO: 1342455 - RNA, 26 nt, Human
cuccuuucuugccaucuccauaagaa

SEQ ID NO: 1342456 - RNA, 25 nt, Human
cugaggaaaggaaucuaaggcuuau

SEQ ID NO: 1342457 - RNA, 22 nt, Human
cuguuucccucuagccugggca

SEQ ID NO: 1342458 - RNA, 21 nt, Human
gccaaucuuggaccaagcgua

SEQ ID NO: 1342459 - RNA, 23 nt, Human
gccacaaacagcaguuuucgauu

SEQ ID NO: 1342460 - RNA, 19 nt, Human
gccugggcaggggcugaga

SEQ ID NO: 1342461 - RNA, 24 nt, Human
gcuguuucccucuagccugggcag

SEQ ID NO: 1342462 - RNA, 25 nt, Human
ggguuccugccacaaacagcaguuu

SEQ ID NO: 1342463 - RNA, 21 nt, Human
guaacugaaaaaaccugaaac

SEQ ID NO: 1342464 - RNA, 20 nt, Human
uaacugaaaaaaccugaaac

SEQ ID NO: 1342465 - RNA, 22 nt, Human
uaaguaaaacccauugcacaga

SEQ ID NO: 1342466 - RNA, 20 nt, Human
uaucaaggaacuagccaauc

SEQ ID NO: 1342467 - RNA, 24 nt, Human
ucagccccauuuauuugcacagcc

SEQ ID NO: 1342468 - RNA, 22 nt, Human
uccauaagaccaccucuggaag

SEQ ID NO: 1342469 - RNA, 22 nt, Human
ucccucuagccugggcaggggc

SEQ ID NO: 1342470 - RNA, 23 nt, Human
ucccuuccuucuuacuccaugga

SEQ ID NO: 1342471 - RNA, 21 nt, Human
ucuuccauggcuacaggaauu

SEQ ID NO: 1342472 - RNA, 19 nt, Human
ugaaaaaaccugaaacucu

SEQ ID NO: 1342473 - RNA, 23 nt, Human
ugagagagacacacacagaaaua

SEQ ID NO: 1342474 - RNA, 30 nt, Human
ugagagagacacacacagaaauaugauagu

SEQ ID NO: 1342475 - RNA, 21 nt, Human
ugagaguaagaugcuaucaag

SEQ ID NO: 1342476 - RNA, 22 nt, Human
ugcucccuuccuucuuacucca

SEQ ID NO: 1342477 - RNA, 19 nt, Human
uggaagagacugcuccaug

SEQ ID NO: 1342478 - RNA, 24 nt, Human
uguaacugaaaaaaccugaaacuc

SEQ ID NO: 1342479 - RNA, 21 nt, Human
uuaucaguagcuguuucccuc

SEQ ID NO: 1342480 - RNA, 18 nt, Human
uuccuuucaucacagaca

SEQ ID NO: 1342481 - RNA, 20 nt, Human
uugcacagccagggguuccu

SEQ ID NO: 1342482 - RNA, 23 nt, Human
aaaaaaaaaccaacccagcaaaa

SEQ ID NO: 1342483 - RNA, 25 nt, Human
aaaaaaaaaccaacccagcaaaauc

SEQ ID NO: 1342484 - RNA, 25 nt, Human
aaaaaaaaccaacccagcaaaaucu

SEQ ID NO: 1342485 - RNA, 19 nt, Human
aauuaaaaaaaaaaccaac

SEQ ID NO: 1342486 - RNA, 18 nt, Human
acgcugugcccggcccgg

SEQ ID NO: 1342487 - RNA, 19 nt, Human
agacgggggcugggguggu

SEQ ID NO: 1342488 - RNA, 21 nt, Human
aguggcugcccgaggccgggc

SEQ ID NO: 1342489 - RNA, 23 nt, Human
cacagacgggggcugggguggug

SEQ ID NO: 1342490 - RNA, 22 nt, Human
ccaccgggccuucagucacaga

SEQ ID NO: 1342491 - RNA, 22 nt, Human
cccgccgcaggugggcgggggc

SEQ ID NO: 1342492 - RNA, 21 nt, Human
ccgggcuggucggggcgcggg

SEQ ID NO: 1342493 - RNA, 22 nt, Human
ccucuguagccacgcugugccc

SEQ ID NO: 1342494 - RNA, 24 nt, Human
cgaaccagguagcccaaaaaugcc

SEQ ID NO: 1342495 - RNA, 20 nt, Human
cucuguagccacgcugugcc

SEQ ID NO: 1342496 - RNA, 19 nt, Human
cugcccgaggccgggcugg

SEQ ID NO: 1342497 - RNA, 19 nt, Human
gcccgguucucugggucca

SEQ ID NO: 1342498 - RNA, 19 nt, Human
gggggcuggggugguggcg

SEQ ID NO: 1342499 - RNA, 21 nt, Human
gucaaggaggaucguggucuu

SEQ ID NO: 1342500 - RNA, 23 nt, Human
uaaaaaaaaaaccaacccagcaa

SEQ ID NO: 1342501 - RNA, 22 nt, Human
uaaaaaaugccgcagacaguac

SEQ ID NO: 1342502 - RNA, 25 nt, Human
uaaaaacgaaccagguagcccaaaa

SEQ ID NO: 1342503 - RNA, 19 nt, Human
ucacagacgggggcugggg

SEQ ID NO: 1342504 - RNA, 21 nt, Human
ucagucacagacgggggcugg

SEQ ID NO: 1342505 - RNA, 18 nt, Human
ugaguggcugcccgaggc

SEQ ID NO: 1342506 - RNA, 19 nt, Human
ugcccggcccgguucucug

SEQ ID NO: 1342507 - RNA, 20 nt, Human
ugggagggggccgcgcccgg

SEQ ID NO: 1342508 - RNA, 22 nt, Human
ugggagggggccgcgcccggcg

SEQ ID NO: 1342509 - RNA, 18 nt, Human
uggucggggcgcgggcgg

SEQ ID NO: 1342510 - RNA, 21 nt, Human
uguagccacgcugugcccggc

SEQ ID NO: 1342511 - RNA, 23 nt, Human
uuaauuaaaaaaaaaaccaaccc

SEQ ID NO: 1342512 - RNA, 22 nt, Human
uucagucacagacgggggcugg

SEQ ID NO: 1342513 - RNA, 20 nt, Human
uucucuggguccaauaaaua

SEQ ID NO: 1342514 - RNA, 26 nt, Human
uucucuggguccaauaaauaccaguc

SEQ ID NO: 1342515 - RNA, 19 nt, Human
uugggagggggccgcgccc

SEQ ID NO: 1342516 - RNA, 23 nt, Human
uugggagggggccgcgcccggcg

SEQ ID NO: 1342517 - RNA, 25 nt, Human
aagcaauccuucucauuuggucucc

SEQ ID NO: 1342518 - RNA, 25 nt, Human
acacaagacaccaucacugcccaac

SEQ ID NO: 1342519 - RNA, 19 nt, Human
acuagaaugcagagccaca

SEQ ID NO: 1342520 - RNA, 19 nt, Human
acugcucuugucauaggug

SEQ ID NO: 1342521 - RNA, 21 nt, Human
agcuggagucccagcucugcc

SEQ ID NO: 1342522 - RNA, 21 nt, Human
aggagaacauuagcuacaacc

SEQ ID NO: 1342523 - RNA, 22 nt, Human
agggauuacaggcaugagccac

SEQ ID NO: 1342524 - RNA, 23 nt, Human
agggauuacaggcaugagccacc

SEQ ID NO: 1342525 - RNA, 24 nt, Human
agggauuacaggcaugagccacca

SEQ ID NO: 1342526 - RNA, 22 nt, Human
aucccuuccaagcccugugucg

SEQ ID NO: 1342527 - RNA, 25 nt, Human
caaacuccugggcucaagcaauccu

SEQ ID NO: 1342528 - RNA, 19 nt, Human
caccacaccaggcuaaugc

SEQ ID NO: 1342529 - RNA, 18 nt, Human
caccaggcuaaugcuccu

SEQ ID NO: 1342530 - RNA, 18 nt, Human
caccugcugcccuuggca

SEQ ID NO: 1342531 - RNA, 21 nt, Human
cacuguacuggcugcuagggc

SEQ ID NO: 1342532 - RNA, 24 nt, Human
cacuuuguugcccuggcuggucuc

SEQ ID NO: 1342533 - RNA, 25 nt, Human
cacuuuguugcccuggcuggucuca

SEQ ID NO: 1342534 - RNA, 21 nt, Human
cagugggcgauccucagccua

SEQ ID NO: 1342535 - RNA, 23 nt, Human
caucggcucugucucugucucuc

SEQ ID NO: 1342536 - RNA, 24 nt, Human
ccaaauugcagggauuacaggcau

SEQ ID NO: 1342537 - RNA, 25 nt, Human
ccagccccaggacucaaugcuuucu

SEQ ID NO: 1342538 - RNA, 22 nt, Human
cccacaaguggguccacagaac

SEQ ID NO: 1342539 - RNA, 20 nt, Human
ccccaaacaagcuuucaaau

SEQ ID NO: 1342540 - RNA, 18 nt, Human
cccugagagacacaagac

SEQ ID NO: 1342541 - RNA, 21 nt, Human
cccuuuaaauuuggaugcuuu

SEQ ID NO: 1342542 - RNA, 20 nt, Human
ccugggcucaagcaauccuu

SEQ ID NO: 1342543 - RNA, 22 nt, Human
cuaaaaauucuuggcaucccca

SEQ ID NO: 1342544 - RNA, 21 nt, Human
cuaccgaaauccuccaugcca

SEQ ID NO: 1342545 - RNA, 18 nt, Human
cuccacacggacaucugg

SEQ ID NO: 1342546 - RNA, 21 nt, Human
cuccugggcucaagcaauccu

SEQ ID NO: 1342547 - RNA, 23 nt, Human
cuccugggcucaagcaauccuuc

SEQ ID NO: 1342548 - RNA, 26 nt, Human
cuccugggcucaagcaauccuucuca

SEQ ID NO: 1342549 - RNA, 24 nt, Human
cucugcccggaucaccugcugccc

SEQ ID NO: 1342550 - RNA, 26 nt, Human
cugccacagcacgcgcaugugcugcu

SEQ ID NO: 1342551 - RNA, 23 nt, Human
cuggacguuccuugcuccugaaa

SEQ ID NO: 1342552 - RNA, 25 nt, Human
cuggcuggucucaaacuccuggggg

SEQ ID NO: 1342553 - RNA, 22 nt, Human
cuuucaaccacucuccagauga

SEQ ID NO: 1342554 - RNA, 22 nt, Human
cuuuggcuuucaaccacucucc

SEQ ID NO: 1342555 - RNA, 20 nt, Human
gaaauccuccaugccacugg

SEQ ID NO: 1342556 - RNA, 23 nt, Human
gaaauccuccaugccacuggcuc

SEQ ID NO: 1342557 - RNA, 20 nt, Human
gacgucugcccauuucuugu

SEQ ID NO: 1342558 - RNA, 20 nt, Human
gacuuaagucuggucaaugg

SEQ ID NO: 1342559 - RNA, 22 nt, Human
gagugaauucuccaggaaccaa

SEQ ID NO: 1342560 - RNA, 18 nt, Human
gauuacaggcaugagcca

SEQ ID NO: 1342561 - RNA, 21 nt, Human
gauuacaggcaugagccacca

SEQ ID NO: 1342562 - RNA, 22 nt, Human
gauuacaggcaugagccaccac

SEQ ID NO: 1342563 - RNA, 19 nt, Human
gauuccuaucgaucaccuc

SEQ ID NO: 1342564 - RNA, 25 nt, Human
gcaaguaccucaccuucacugcucu

SEQ ID NO: 1342565 - RNA, 18 nt, Human
gccugcucuggccccauc

SEQ ID NO: 1342566 - RNA, 19 nt, Human
ggauuacaggcaugagcca

SEQ ID NO: 1342567 - RNA, 23 nt, Human
gggauuacaggcaugagccacca

SEQ ID NO: 1342568 - RNA, 22 nt, Human
guggccccucccaacguccccu

SEQ ID NO: 1342569 - RNA, 20 nt, Human
uacaaccaaccacaagagag

SEQ ID NO: 1342570 - RNA, 22 nt, Human
uacaggcaugagccaccacacc

SEQ ID NO: 1342571 - RNA, 22 nt, Human
uagagacaggguaucacuuugu

SEQ ID NO: 1342572 - RNA, 21 nt, Human
uagguggaguguggucacaga

SEQ ID NO: 1342573 - RNA, 24 nt, Human
uaucacuuuguugcccuggcuggu

SEQ ID NO: 1342574 - RNA, 18 nt, Human
ucaccugcugcccuuggc

SEQ ID NO: 1342575 - RNA, 23 nt, Human
ucacugcccaacauggcaccagg

SEQ ID NO: 1342576 - RNA, 23 nt, Human
ucacugcucuugucauaggugac

SEQ ID NO: 1342577 - RNA, 19 nt, Human
uccacagaacucagacccu

SEQ ID NO: 1342578 - RNA, 27 nt, Human
uccacagaacucagacccugagagaca

SEQ ID NO: 1342579 - RNA, 24 nt, Human
ucccaaauugcagggauuacaggc

SEQ ID NO: 1342580 - RNA, 18 nt, Human
ucccuggacguuccuugc

SEQ ID NO: 1342581 - RNA, 23 nt, Human
ucccugguaaccucguccagccc

SEQ ID NO: 1342582 - RNA, 22 nt, Human
uccgccuguucugccugcucug

SEQ ID NO: 1342583 - RNA, 22 nt, Human
uccuccaugccacuggcuccag

SEQ ID NO: 1342584 - RNA, 20 nt, Human
uccuccuauguaccggcccu

SEQ ID NO: 1342585 - RNA, 18 nt, Human
uccugggcucaagcaauc

SEQ ID NO: 1342586 - RNA, 23 nt, Human
uccuuuggcuuucaaccacucuc

SEQ ID NO: 1342587 - RNA, 22 nt, Human
ucuaccgaaauccuccaugcca

SEQ ID NO: 1342588 - RNA, 23 nt, Human
ucucaaacuccugggcucaagca

SEQ ID NO: 1342589 - RNA, 19 nt, Human
ucucccaaauugcagggau

SEQ ID NO: 1342590 - RNA, 18 nt, Human
ucugucucugucucuccc

SEQ ID NO: 1342591 - RNA, 20 nt, Human
ugacgucugcccauuucuug

SEQ ID NO: 1342592 - RNA, 22 nt, Human
ugagagacacaagacaccauca

SEQ ID NO: 1342593 - RNA, 21 nt, Human
ugagccaaaggaugacgucug

SEQ ID NO: 1342594 - RNA, 19 nt, Human
ugagcuggagucccagcuc

SEQ ID NO: 1342595 - RNA, 23 nt, Human
ugagcuggagucccagcucugcc

SEQ ID NO: 1342596 - RNA, 20 nt, Human
ugcagggauuacaggcauga

SEQ ID NO: 1342597 - RNA, 24 nt, Human
ugcagugucuauguccccuccaca

SEQ ID NO: 1342598 - RNA, 20 nt, Human
ugccacagcacgcgcaugug

SEQ ID NO: 1342599 - RNA, 22 nt, Human
ugccacagcacgcgcaugugcu

SEQ ID NO: 1342600 - RNA, 23 nt, Human
ugccacuggcuccagugggcgau

SEQ ID NO: 1342601 - RNA, 22 nt, Human
ugcccggaucaccugcugcccu

SEQ ID NO: 1342602 - RNA, 19 nt, Human
ugccugcucuggccccauc

SEQ ID NO: 1342603 - RNA, 19 nt, Human
ugcucuggccccaucggcu

SEQ ID NO: 1342604 - RNA, 19 nt, Human
uggcaccaggcccuggcac

SEQ ID NO: 1342605 - RNA, 25 nt, Human
uggcuccagugggcgauccucagcc

SEQ ID NO: 1342606 - RNA, 19 nt, Human
ugggacgcugaucaaggug

SEQ ID NO: 1342607 - RNA, 21 nt, Human
ugggacgcugaucaagguguc

SEQ ID NO: 1342608 - RNA, 19 nt, Human
uggucacagacagggcacu

SEQ ID NO: 1342609 - RNA, 22 nt, Human
ugucucucccucccgauuggga

SEQ ID NO: 1342610 - RNA, 21 nt, Human
ugucucugucucucccucccg

SEQ ID NO: 1342611 - RNA, 23 nt, Human
uuauagcaagaagcuuggggagg

SEQ ID NO: 1342612 - RNA, 27 nt, Human
uucuaaaaauucuuggcauccccauuu

SEQ ID NO: 1342613 - RNA, 21 nt, Human
uucuccaggaaccaacccugg

SEQ ID NO: 1342614 - RNA, 27 nt, Human
uugccaggguccugugcaggguggccc

SEQ ID NO: 1342615 - RNA, 24 nt, Human
uuuguagagacaggguaucacuuu

SEQ ID NO: 1342616 - RNA, 18 nt, Human
uuuuuuuguagagacagg

SEQ ID NO: 1342617 - RNA, 18 nt, Human
uuuuuuuuuuuuuuuuug

SEQ ID NO: 1342618 - RNA, 19 nt, Human
uuuuuuuuuuuuuuuuugu

SEQ ID NO: 1342619 - RNA, 30 nt, Human
uuuuuuuuuuuuuuuuuguagagacagggg

SEQ ID NO: 1342620 - RNA, 20 nt, Human
aaaaaacauaaaaaccagaa

SEQ ID NO: 1342621 - RNA, 20 nt, Human
aaaaaccagaaugcugggua

SEQ ID NO: 1342622 - RNA, 19 nt, Human
auaaaacagaauacacagu

SEQ ID NO: 1342623 - RNA, 23 nt, Human
auaaaacagaauacacaguuguc

SEQ ID NO: 1342624 - RNA, 19 nt, Human
auagaacauggcccacccc

SEQ ID NO: 1342625 - RNA, 18 nt, Human
caacaaugaacuagggac

SEQ ID NO: 1342626 - RNA, 19 nt, Human
cagaaugcuggguaggugc

SEQ ID NO: 1342627 - RNA, 23 nt, Human
cauaaaaaacauaaaaaccagaa

SEQ ID NO: 1342628 - RNA, 29 nt, Human
cguggcgcaggccgcucuguagaccuucu

SEQ ID NO: 1342629 - RNA, 24 nt, Human
cugguggugcugguggugaaaacu

SEQ ID NO: 1342630 - RNA, 20 nt, Human
gaacauggcccaccccuccu

SEQ ID NO: 1342631 - RNA, 19 nt, Human
ggguaggugcugguggugc

SEQ ID NO: 1342632 - RNA, 25 nt, Human
ggguaggugcugguggugcuggugg

SEQ ID NO: 1342633 - RNA, 21 nt, Human
gguggugcugguggugaaaac

SEQ ID NO: 1342634 - RNA, 21 nt, Human
guggugaaaacugcagggcua

SEQ ID NO: 1342635 - RNA, 18 nt, Human
ugcugguggugcuggugg

SEQ ID NO: 1342636 - RNA, 20 nt, Human
ugcugguggugcugguggug

SEQ ID NO: 1342637 - RNA, 24 nt, Human
ugggagcgcggggggagggggagg

SEQ ID NO: 1342638 - RNA, 20 nt, Human
uggguaggugcugguggugc

SEQ ID NO: 1342639 - RNA, 20 nt, Human
aaaaggaaacaagucaucaa

SEQ ID NO: 1342640 - RNA, 23 nt, Human
aaagaaaaaagaaaagaaaagaa

SEQ ID NO: 1342641 - RNA, 24 nt, Human
aaauuugaaagugcuuugugaacu

SEQ ID NO: 1342642 - RNA, 22 nt, Human
aagaaaagaaaagaaaaaagga

SEQ ID NO: 1342643 - RNA, 21 nt, Human
aagaaagaaaaaagaaaagaa

SEQ ID NO: 1342644 - RNA, 23 nt, Human
aagaaagaaaaaagaaaagaaaa

SEQ ID NO: 1342645 - RNA, 23 nt, Human
aagcaaauaggcaguuuacagaa

SEQ ID NO: 1342646 - RNA, 21 nt, Human
agaaaaaagaaaagaaaagaa

SEQ ID NO: 1342647 - RNA, 19 nt, Human
agaaaagaaaagaaaaaag

SEQ ID NO: 1342648 - RNA, 21 nt, Human
agaaaagaaaagaaaaaagga

SEQ ID NO: 1342649 - RNA, 19 nt, Human
agaaaagaaaagaaaagaa

SEQ ID NO: 1342650 - RNA, 19 nt, Human
aggcaguuuacagaaggga

SEQ ID NO: 1342651 - RNA, 22 nt, Human
aggcugagucagcaucugcuug

SEQ ID NO: 1342652 - RNA, 19 nt, Human
aucccauuucugccccuca

SEQ ID NO: 1342653 - RNA, 20 nt, Human
caaaaugagcccuggacuug

SEQ ID NO: 1342654 - RNA, 27 nt, Human
caaaaugagcccuggacuugaccguca

SEQ ID NO: 1342655 - RNA, 23 nt, Human
caagaagggugcaucgaguggca

SEQ ID NO: 1342656 - RNA, 21 nt, Human
cacucuguccuacuucaggaa

SEQ ID NO: 1342657 - RNA, 19 nt, Human
cacuuaagaaauugggccc

SEQ ID NO: 1342658 - RNA, 21 nt, Human
cagacugaaagcaugaccaga

SEQ ID NO: 1342659 - RNA, 26 nt, Human
cagacugaaagcaugaccagaaauau

SEQ ID NO: 1342660 - RNA, 23 nt, Human
cagagccuccagcuuuguucccu

SEQ ID NO: 1342661 - RNA, 21 nt, Human
cagugggccuugucuggacuu

SEQ ID NO: 1342662 - RNA, 25 nt, Human
cagugggccuugucuggacuuugcc

SEQ ID NO: 1342663 - RNA, 20 nt, Human
cauuuuugucagacugaaag

SEQ ID NO: 1342664 - RNA, 21 nt, Human
ccacacacucuguccuacuuc

SEQ ID NO: 1342665 - RNA, 18 nt, Human
ccagagccuccagcuuug

SEQ ID NO: 1342666 - RNA, 19 nt, Human
ccauguaaaagcacaggcc

SEQ ID NO: 1342667 - RNA, 18 nt, Human
cccaaugggguacccaag

SEQ ID NO: 1342668 - RNA, 22 nt, Human
cccaucuuccaaauggccucaa

SEQ ID NO: 1342669 - RNA, 20 nt, Human
ccccgauaagcaaauaggca

SEQ ID NO: 1342670 - RNA, 24 nt, Human
ccuccagcuuuguucccuucaccc

SEQ ID NO: 1342671 - RNA, 21 nt, Human
ccugucccauaaauuugaaag

SEQ ID NO: 1342672 - RNA, 27 nt, Human
cgagaagaaauccaagaagggugcauc

SEQ ID NO: 1342673 - RNA, 19 nt, Human
cgccccaauuucuucuugc

SEQ ID NO: 1342674 - RNA, 21 nt, Human
cucaaaaccacacacucuguc

SEQ ID NO: 1342675 - RNA, 19 nt, Human
gaacaggcugagucagcau

SEQ ID NO: 1342676 - RNA, 18 nt, Human
gacccagcuccagagccu

SEQ ID NO: 1342677 - RNA, 21 nt, Human
gcaguaucauccauuuuuguc

SEQ ID NO: 1342678 - RNA, 21 nt, Human
gccccucauguuuuggccugu

SEQ ID NO: 1342679 - RNA, 22 nt, Human
uacccaagugcugucuaggagc

SEQ ID NO: 1342680 - RNA, 22 nt, Human
uacccaagugcugucuaggagc

SEQ ID NO: 1342681 - RNA, 25 nt, Human
ucacaugucuuccucuccaagaccc

SEQ ID NO: 1342682 - RNA, 18 nt, Human
ucagaagaaaaaaaucuu

SEQ ID NO: 1342683 - RNA, 23 nt, Human
ucccauccugcauuuccuguccc

SEQ ID NO: 1342684 - RNA, 19 nt, Human
ucuggacuuugccaaaggu

SEQ ID NO: 1342685 - RNA, 18 nt, Human
ugaaagugcuuugugaac

SEQ ID NO: 1342686 - RNA, 23 nt, Human
ugacuggcgccauaggaacugca

SEQ ID NO: 1342687 - RNA, 24 nt, Human
ugcagugggccuugucuggacuuu

SEQ ID NO: 1342688 - RNA, 18 nt, Human
ugcauucuggcaugacgc

SEQ ID NO: 1342689 - RNA, 20 nt, Human
ugccgggagguggcuggguu

SEQ ID NO: 1342690 - RNA, 24 nt, Human
ugcucagccaggggcucuccuaug

SEQ ID NO: 1342691 - RNA, 19 nt, Human
ugcuguauguugccaagau

SEQ ID NO: 1342692 - RNA, 20 nt, Human
uggcacuaugguacaagaca

SEQ ID NO: 1342693 - RNA, 19 nt, Human
uggcaugacgcugagguug

SEQ ID NO: 1342694 - RNA, 18 nt, Human
ugucuggacuuugccaaa

SEQ ID NO: 1342695 - RNA, 22 nt, Human
ugugaacuaaaaagcccaugua

SEQ ID NO: 1342696 - RNA, 19 nt, Human
uuagcucuuaauggaacag

SEQ ID NO: 1342697 - RNA, 20 nt, Human
uucacaugucuuccucucca

SEQ ID NO: 1342698 - RNA, 24 nt, Human
uugacccuuaagucauuauuaaaa

SEQ ID NO: 1342699 - RNA, 18 nt, Human
uugaccgucaaaacagac

SEQ ID NO: 1342700 - RNA, 19 nt, Human
uugccgggagguggcuggg

SEQ ID NO: 1342701 - RNA, 19 nt, Human
uugggcccaucuuccaaau

SEQ ID NO: 1342702 - RNA, 20 nt, Human
uugggcccaucuuccaaaug

SEQ ID NO: 1342703 - RNA, 23 nt, Human
uugggcccaucuuccaaauggcc

SEQ ID NO: 1342704 - RNA, 23 nt, Human
uuguucccuucacccugcguucc

SEQ ID NO: 1342705 - RNA, 24 nt, Human
uuuagaaagaaagaaaaaagaaaa

SEQ ID NO: 1342706 - RNA, 23 nt, Human
uuucagauagcacaggguggccc

SEQ ID NO: 1342707 - RNA, 26 nt, Human
uuucuucuugcuucuuagcucuuaau

SEQ ID NO: 1342708 - RNA, 21 nt, Human
uuuucagaagaaaaaaaucuu

SEQ ID NO: 1342709 - RNA, 21 nt, Human
agaugagcgcuucuaaacuua

SEQ ID NO: 1342710 - RNA, 18 nt, Human
cagaagcaagcgaaaagc

SEQ ID NO: 1342711 - RNA, 20 nt, Human
cagaagcaagcgaaaagcca

SEQ ID NO: 1342712 - RNA, 19 nt, Human
aaagaugccugaggugcgg

SEQ ID NO: 1342713 - RNA, 23 nt, Human
aaccagcacagcgacguccagca

SEQ ID NO: 1342714 - RNA, 23 nt, Human
acagagaacagcaacagcagcaa

SEQ ID NO: 1342715 - RNA, 21 nt, Human
agaaaaccccaggcacagcug

SEQ ID NO: 1342716 - RNA, 18 nt, Human
agccaagaaccagucccc

SEQ ID NO: 1342717 - RNA, 21 nt, Human
aggacagagaacagcaacagc

SEQ ID NO: 1342718 - RNA, 24 nt, Human
aggcagauaccccacggcccccca

SEQ ID NO: 1342719 - RNA, 22 nt, Human
aggccuccagccccugggccaa

SEQ ID NO: 1342720 - RNA, 20 nt, Human
agguaaggggcugcugacgu

SEQ ID NO: 1342721 - RNA, 19 nt, Human
auguuuccacacgcacgua

SEQ ID NO: 1342722 - RNA, 18 nt, Human
cacacagcuggaagcgga

SEQ ID NO: 1342723 - RNA, 21 nt, Human
cacguagacccagugccccca

SEQ ID NO: 1342724 - RNA, 19 nt, Human
cagcaauagggcuggcggc

SEQ ID NO: 1342725 - RNA, 19 nt, Human
cagcuggcauccugaggca

SEQ ID NO: 1342726 - RNA, 18 nt, Human
cagugguccccaaaaguu

SEQ ID NO: 1342727 - RNA, 21 nt, Human
ccacagagcuugaguugugca

SEQ ID NO: 1342728 - RNA, 19 nt, Human
ccagcuggcauccugaggc

SEQ ID NO: 1342729 - RNA, 19 nt, Human
ccagggaccagggcucgga

SEQ ID NO: 1342730 - RNA, 20 nt, Human
ccagggaccagggcucggag

SEQ ID NO: 1342731 - RNA, 19 nt, Human
ccaggggggcagugccagc

SEQ ID NO: 1342732 - RNA, 24 nt, Human
ccccccacacacaccagcugugcu

SEQ ID NO: 1342733 - RNA, 23 nt, Human
ccccugggccaaggacagagaac

SEQ ID NO: 1342734 - RNA, 21 nt, Human
ccugggccaaggacagagaac

SEQ ID NO: 1342735 - RNA, 18 nt, Human
ccuguaagugaagcuggg

SEQ ID NO: 1342736 - RNA, 20 nt, Human
cggaaaggacucagcuugcg

SEQ ID NO: 1342737 - RNA, 19 nt, Human
cguccagcaaacgccggac

SEQ ID NO: 1342738 - RNA, 20 nt, Human
cucggugcuggcaaaggagc

SEQ ID NO: 1342739 - RNA, 20 nt, Human
cuguguccccugggaagugu

SEQ ID NO: 1342740 - RNA, 19 nt, Human
gaaaaggccuccagccccu

SEQ ID NO: 1342741 - RNA, 20 nt, Human
gagggccggccaggaaccag

SEQ ID NO: 1342742 - RNA, 19 nt, Human
gcaccuccacaggccacag

SEQ ID NO: 1342743 - RNA, 23 nt, Human
gcagauaccccacggccccccac

SEQ ID NO: 1342744 - RNA, 22 nt, Human
gcagggguggggcuuugggacg

SEQ ID NO: 1342745 - RNA, 23 nt, Human
gcagugguccccaaaaguucccc

SEQ ID NO: 1342746 - RNA, 18 nt, Human
gcuggcggcagcugaaac

SEQ ID NO: 1342747 - RNA, 19 nt, Human
ggcaguguccagcugaggg

SEQ ID NO: 1342748 - RNA, 20 nt, Human
ggccgugggccuggggaagg

SEQ ID NO: 1342749 - RNA, 18 nt, Human
gggcucggagcaggccgg

SEQ ID NO: 1342750 - RNA, 23 nt, Human
gucaggaaaaggccuccagcccc

SEQ ID NO: 1342751 - RNA, 22 nt, Human
gugacagggggcaggcagauac

SEQ ID NO: 1342752 - RNA, 23 nt, Human
uacagggcugagcgauugugugg

SEQ ID NO: 1342753 - RNA, 19 nt, Human
uaccagggccccgggauga

SEQ ID NO: 1342754 - RNA, 22 nt, Human
uccagggaccagggcucggagc

SEQ ID NO: 1342755 - RNA, 19 nt, Human
uccccagguaaggggcugc

SEQ ID NO: 1342756 - RNA, 18 nt, Human
ugacagggggcaggcaga

SEQ ID NO: 1342757 - RNA, 23 nt, Human
ugacagggggcaggcagauaccc

SEQ ID NO: 1342758 - RNA, 23 nt, Human
ugagaaaaccccaggcacagcug

SEQ ID NO: 1342759 - RNA, 21 nt, Human
ugagggccggccaggaaccag

SEQ ID NO: 1342760 - RNA, 24 nt, Human
ugagguuccaaacagccaggaaug

SEQ ID NO: 1342761 - RNA, 19 nt, Human
ugaguugugcagggguggg

SEQ ID NO: 1342762 - RNA, 19 nt, Human
ugcagggguggggcuuugg

SEQ ID NO: 1342763 - RNA, 19 nt, Human
ugcagggguggggcuuugg

SEQ ID NO: 1342764 - RNA, 22 nt, Human
ugccugaggugcgguugggcag

SEQ ID NO: 1342765 - RNA, 18 nt, Human
ugcucugagggccggcca

SEQ ID NO: 1342766 - RNA, 20 nt, Human
uggaagagcucggugcuggc

SEQ ID NO: 1342767 - RNA, 20 nt, Human
uggaagcggaugguccuacc

SEQ ID NO: 1342768 - RNA, 20 nt, Human
uggcaaaggagcggaaagga

SEQ ID NO: 1342769 - RNA, 22 nt, Human
uguaagugaagcugggcacaaa

SEQ ID NO: 1342770 - RNA, 19 nt, Human
uugcggggugagcaggugg

SEQ ID NO: 1342771 - RNA, 26 nt, Human
aaacaaguaauuuuguaaaagucaga

SEQ ID NO: 1342772 - RNA, 20 nt, Human
aaaggugcaaucucggcuca

SEQ ID NO: 1342773 - RNA, 21 nt, Human
aaagugcugggauuacaggca

SEQ ID NO: 1342774 - RNA, 24 nt, Human
aaagugcugggauuacaggcagga

SEQ ID NO: 1342775 - RNA, 25 nt, Human
aacaaguaauuuuguaaaagucaga

SEQ ID NO: 1342776 - RNA, 23 nt, Human
aaguaauuuuguaaaagucagaa

SEQ ID NO: 1342777 - RNA, 18 nt, Human
aagugcugggauuacagg

SEQ ID NO: 1342778 - RNA, 19 nt, Human
aagugcugggauuacaggc

SEQ ID NO: 1342779 - RNA, 26 nt, Human
aagugcugggauuacaggcaggagcc

SEQ ID NO: 1342780 - RNA, 19 nt, Human
aaugaaagcacaaucuaaa

SEQ ID NO: 1342781 - RNA, 22 nt, Human
accuccgccucuuggguucaag

SEQ ID NO: 1342782 - RNA, 24 nt, Human
acuggguuucuccauguuggucag

SEQ ID NO: 1342783 - RNA, 19 nt, Human
agaaggacuaacagggucu

SEQ ID NO: 1342784 - RNA, 21 nt, Human
agcagcugggauuacaggcau

SEQ ID NO: 1342785 - RNA, 23 nt, Human
agcagcugggauuacaggcaugu

SEQ ID NO: 1342786 - RNA, 24 nt, Human
aggugauccgcccaccucggccuc

SEQ ID NO: 1342787 - RNA, 24 nt, Human
aggugcaaucucggcucaccacaa

SEQ ID NO: 1342788 - RNA, 24 nt, Human
aguacaaaggugcaaucucggcuc

SEQ ID NO: 1342789 - RNA, 23 nt, Human
agucagaaaacaccaguauccuu

SEQ ID NO: 1342790 - RNA, 18 nt, Human
agugcugggauuacaggc

SEQ ID NO: 1342791 - RNA, 25 nt, Human
auagaguuugcccccaaauggaaaa

SEQ ID NO: 1342792 - RNA, 23 nt, Human
auccagcagguaaguagaaggac

SEQ ID NO: 1342793 - RNA, 27 nt, Human
caaagugcugggauuacaggcaggagc

SEQ ID NO: 1342794 - RNA, 20 nt, Human
caagaauagaguuugccccc

SEQ ID NO: 1342795 - RNA, 22 nt, Human
caagaauagaguuugcccccaa

SEQ ID NO: 1342796 - RNA, 22 nt, Human
caagcaauucuccugccucagc

SEQ ID NO: 1342797 - RNA, 24 nt, Human
cacaagaauagaguuugcccccaa

SEQ ID NO: 1342798 - RNA, 26 nt, Human
cacaagaauagaguuugcccccaaau

SEQ ID NO: 1342799 - RNA, 21 nt, Human
caccacaaccuccgccucuug

SEQ ID NO: 1342800 - RNA, 24 nt, Human
caccucggccucccaaagugcugg

SEQ ID NO: 1342801 - RNA, 23 nt, Human
cagccuccugagcagcugggauu

SEQ ID NO: 1342802 - RNA, 20 nt, Human
caggagccaccacgcccggc

SEQ ID NO: 1342803 - RNA, 24 nt, Human
caguagagacuggguuucuccaug

SEQ ID NO: 1342804 - RNA, 22 nt, Human
caguauccuucugaucucaucc

SEQ ID NO: 1342805 - RNA, 18 nt, Human
caucccacucugcacaac

SEQ ID NO: 1342806 - RNA, 19 nt, Human
ccaaagugcugggauuaca

SEQ ID NO: 1342807 - RNA, 23 nt, Human
ccaaagugcugggauuacaggca

SEQ ID NO: 1342808 - RNA, 24 nt, Human
ccacaaccuccgccucuuggguuc

SEQ ID NO: 1342809 - RNA, 19 nt, Human
ccauguuggucaggcuggu

SEQ ID NO: 1342810 - RNA, 24 nt, Human
cccaaagugcugggauuacaggca

SEQ ID NO: 1342811 - RNA, 20 nt, Human
cccaggcuggaguacaaagg

SEQ ID NO: 1342812 - RNA, 22 nt, Human
cccaggcuggaguacaaaggug

SEQ ID NO: 1342813 - RNA, 24 nt, Human
cccgaccucaggugauccgcccac

SEQ ID NO: 1342814 - RNA, 24 nt, Human
ccucuuggguucaagcaauucucc

SEQ ID NO: 1342815 - RNA, 19 nt, Human
ccugagcagcugggauuac

SEQ ID NO: 1342816 - RNA, 23 nt, Human
ccugagcagcugggauuacaggc

SEQ ID NO: 1342817 - RNA, 24 nt, Human
ccugagcagcugggauuacaggca

SEQ ID NO: 1342818 - RNA, 18 nt, Human
ccuggauuuuucugucag

SEQ ID NO: 1342819 - RNA, 18 nt, Human
cgaccucaggugauccgc

SEQ ID NO: 1342820 - RNA, 24 nt, Human
cuaaagaguauuaucacaccguga

SEQ ID NO: 1342821 - RNA, 26 nt, Human
cucacaagaauagaguuugcccccaa

SEQ ID NO: 1342822 - RNA, 24 nt, Human
cucaccacaaccuccgccucuugg

SEQ ID NO: 1342823 - RNA, 24 nt, Human
cuccauguuggucaggcuggucuc

SEQ ID NO: 1342824 - RNA, 18 nt, Human
cucguugcccaggcugga

SEQ ID NO: 1342825 - RNA, 19 nt, Human
cucguugcccaggcuggag

SEQ ID NO: 1342826 - RNA, 21 nt, Human
cugaccccaucccagacacgu

SEQ ID NO: 1342827 - RNA, 23 nt, Human
cugagcagcugggauuacaggca

SEQ ID NO: 1342828 - RNA, 24 nt, Human
cugagcagcugggauuacaggcau

SEQ ID NO: 1342829 - RNA, 23 nt, Human
cugccucagccuccugagcagcu

SEQ ID NO: 1342830 - RNA, 22 nt, Human
cuggauuuuucugucagcugga

SEQ ID NO: 1342831 - RNA, 24 nt, Human
cuggguuucuccauguuggucagg

SEQ ID NO: 1342832 - RNA, 21 nt, Human
cuuuuuuuuuuuuuuuuuuuu

SEQ ID NO: 1342833 - RNA, 24 nt, Human
gaccucaggugauccgcccaccuc

SEQ ID NO: 1342834 - RNA, 22 nt, Human
gagcagcugggauuacaggcau

SEQ ID NO: 1342835 - RNA, 25 nt, Human
gagcagcugggauuacaggcaugug

SEQ ID NO: 1342836 - RNA, 18 nt, Human
gauuacaggcaggagcca

SEQ ID NO: 1342837 - RNA, 18 nt, Human
gauuacaggcaugugcca

SEQ ID NO: 1342838 - RNA, 18 nt, Human
gcagcugggauuacaggc

SEQ ID NO: 1342839 - RNA, 20 nt, Human
gcagcugggauuacaggcau

SEQ ID NO: 1342840 - RNA, 19 nt, Human
gcucguugcccaggcugga

SEQ ID NO: 1342841 - RNA, 19 nt, Human
gcuggaguacaaaggugca

SEQ ID NO: 1342842 - RNA, 23 nt, Human
gcuggucucaaacucccgaccuc

SEQ ID NO: 1342843 - RNA, 19 nt, Human
ggauuacaggcaggagcca

SEQ ID NO: 1342844 - RNA, 19 nt, Human
ggauuacaggcaugugcca

SEQ ID NO: 1342845 - RNA, 23 nt, Human
gggagggauauagggagaggaag

SEQ ID NO: 1342846 - RNA, 20 nt, Human
ggguucaagcaauucuccug

SEQ ID NO: 1342847 - RNA, 21 nt, Human
ggguuucuccauguuggucag

SEQ ID NO: 1342848 - RNA, 24 nt, Human
gugauccgcccaccucggccuccc

SEQ ID NO: 1342849 - RNA, 20 nt, Human
uaaguagaaggacuaacagg

SEQ ID NO: 1342850 - RNA, 23 nt, Human
uacaggcaggagccaccacgccc

SEQ ID NO: 1342851 - RNA, 22 nt, Human
uacaggcaugugccaccacgcc

SEQ ID NO: 1342852 - RNA, 19 nt, Human
uagggagaggaaggcgaua

SEQ ID NO: 1342853 - RNA, 21 nt, Human
uauaauaaugaaagcacaauc

SEQ ID NO: 1342854 - RNA, 19 nt, Human
ucaagcaauucuccugccu

SEQ ID NO: 1342855 - RNA, 23 nt, Human
ucaccacaaccuccgccucuugg

SEQ ID NO: 1342856 - RNA, 24 nt, Human
ucaccacaaccuccgccucuuggg

SEQ ID NO: 1342857 - RNA, 25 nt, Human
ucaccacaaccuccgccucuugggu

SEQ ID NO: 1342858 - RNA, 24 nt, Human
ucaguagagacuggguuucuccau

SEQ ID NO: 1342859 - RNA, 24 nt, Human
ucccaaagugcugggauuacaggc

SEQ ID NO: 1342860 - RNA, 24 nt, Human
uccgccucuuggguucaagcaauu

SEQ ID NO: 1342861 - RNA, 24 nt, Human
uccugagcagcugggauuacaggc

SEQ ID NO: 1342862 - RNA, 18 nt, Human
ucggccucccaaagugcu

SEQ ID NO: 1342863 - RNA, 24 nt, Human
ucugucagcuggaggaugcauuuc

SEQ ID NO: 1342864 - RNA, 24 nt, Human
ucuuggguucaagcaauucuccug

SEQ ID NO: 1342865 - RNA, 18 nt, Human
ucuuuuuuuuuuuuuuuu

SEQ ID NO: 1342866 - RNA, 24 nt, Human
ugaaaacaaacaaguaauuuugua

SEQ ID NO: 1342867 - RNA, 20 nt, Human
ugaaagcagaagacaugaug

SEQ ID NO: 1342868 - RNA, 21 nt, Human
ugaaagcagaagacaugaugc

SEQ ID NO: 1342869 - RNA, 24 nt, Human
ugauccgcccaccucggccuccca

SEQ ID NO: 1342870 - RNA, 24 nt, Human
ugcccaggcuggaguacaaaggug

SEQ ID NO: 1342871 - RNA, 24 nt, Human
ugccucagccuccugagcagcugg

SEQ ID NO: 1342872 - RNA, 18 nt, Human
uggaagccauuuuucuuu

SEQ ID NO: 1342873 - RNA, 18 nt, Human
ugggauuacaggcaggag

SEQ ID NO: 1342874 - RNA, 21 nt, Human
ugggauuacaggcaggagcca

SEQ ID NO: 1342875 - RNA, 22 nt, Human
ugggauuacaggcaggagccac

SEQ ID NO: 1342876 - RNA, 24 nt, Human
ugggauuacaggcaggagccacca

SEQ ID NO: 1342877 - RNA, 18 nt, Human
ugggauuacaggcaugug

SEQ ID NO: 1342878 - RNA, 21 nt, Human
ugggauuacaggcaugugcca

SEQ ID NO: 1342879 - RNA, 22 nt, Human
ugggauuacaggcaugugccac

SEQ ID NO: 1342880 - RNA, 24 nt, Human
ugggauuacaggcaugugccacca

SEQ ID NO: 1342881 - RNA, 21 nt, Human
uggguucaagcaauucuccug

SEQ ID NO: 1342882 - RNA, 23 nt, Human
uggguucaagcaauucuccugcc

SEQ ID NO: 1342883 - RNA, 24 nt, Human
uggguucaagcaauucuccugccu

SEQ ID NO: 1342884 - RNA, 23 nt, Human
uggguuucuccauguuggucagg

SEQ ID NO: 1342885 - RNA, 21 nt, Human
uggucaggcuggucucaaacu

SEQ ID NO: 1342886 - RNA, 19 nt, Human
uggucucaaacucccgacc

SEQ ID NO: 1342887 - RNA, 21 nt, Human
uguaaaagucagaaaacacca

SEQ ID NO: 1342888 - RNA, 20 nt, Human
uguccuggaagccauuuuuc

SEQ ID NO: 1342889 - RNA, 21 nt, Human
uucaagcaauucuccugccuc

SEQ ID NO: 1342890 - RNA, 24 nt, Human
uucaagcaauucuccugccucagc

SEQ ID NO: 1342891 - RNA, 21 nt, Human
uucaugggagggauauaggga

SEQ ID NO: 1342892 - RNA, 20 nt, Human
uugcucguugcccaggcugg

SEQ ID NO: 1342893 - RNA, 21 nt, Human
uugcucguugcccaggcugga

SEQ ID NO: 1342894 - RNA, 21 nt, Human
uuucuccauguuggucaggcu

SEQ ID NO: 1342895 - RNA, 24 nt, Human
uuugcucguugcccaggcuggagu

SEQ ID NO: 1342896 - RNA, 21 nt, Human
uuuugcucguugcccaggcug

SEQ ID NO: 1342897 - RNA, 23 nt, Human
uuuugcucguugcccaggcugga

SEQ ID NO: 1342898 - RNA, 23 nt, Human
uuuuguaaaagucagaaaacacc

SEQ ID NO: 1342899 - RNA, 24 nt, Human
uuuuugcucguugcccaggcugga

SEQ ID NO: 1342900 - RNA, 24 nt, Human
uuuuuugcucguugcccaggcugg

SEQ ID NO: 1342901 - RNA, 20 nt, Human
uuuuuuuuuuugagacagag

SEQ ID NO: 1342902 - RNA, 27 nt, Human
uuuuuuuuuuuuuuuuuuuuuuugggg

SEQ ID NO: 1342903 - RNA, 23 nt, Human
aaacaaaugaaagcugccuuccc

SEQ ID NO: 1342904 - RNA, 20 nt, Human
aagcugccuucccugcagcc

SEQ ID NO: 1342905 - RNA, 23 nt, Human
aaugaaagcugccuucccugcag

SEQ ID NO: 1342906 - RNA, 26 nt, Human
aaaaagcccuuaaauaaaugcuacca

SEQ ID NO: 1342907 - RNA, 24 nt, Human
aaacgaguuagguccugcaugugg

SEQ ID NO: 1342908 - RNA, 21 nt, Human
aagcaggaaagggcccucuag

SEQ ID NO: 1342909 - RNA, 18 nt, Human
agaggcggggagggggcc

SEQ ID NO: 1342910 - RNA, 26 nt, Human
agaggcggggagggggccgcgggccg

SEQ ID NO: 1342911 - RNA, 18 nt, Human
aggaaaaaacgaguuagg

SEQ ID NO: 1342912 - RNA, 22 nt, Human
aggaggcgguggagagaggcgg

SEQ ID NO: 1342913 - RNA, 22 nt, Human
aggcggggagggggccgcgggc

SEQ ID NO: 1342914 - RNA, 20 nt, Human
aggcgguggagagaggcggg

SEQ ID NO: 1342915 - RNA, 21 nt, Human
agggaaaggcuaacacugaug

SEQ ID NO: 1342916 - RNA, 21 nt, Human
agucuguucuuuugcuaggcc

SEQ ID NO: 1342917 - RNA, 24 nt, Human
caacagguaauaaaacaaggaaaa

SEQ ID NO: 1342918 - RNA, 21 nt, Human
cacgacacaaaagugugcaaa

SEQ ID NO: 1342919 - RNA, 25 nt, Human
cagcagccgggaggugugauucuga

SEQ ID NO: 1342920 - RNA, 21 nt, Human
caggaaagggcccucuaggug

SEQ ID NO: 1342921 - RNA, 24 nt, Human
cauuucaguaaauuuuuuaaugac

SEQ ID NO: 1342922 - RNA, 19 nt, Human
cggggagggggccgcgggc

SEQ ID NO: 1342923 - RNA, 22 nt, Human
cugaaauagggaaaggcuaaca

SEQ ID NO: 1342924 - RNA, 20 nt, Human
cuucucgcuccggcccucug

SEQ ID NO: 1342925 - RNA, 20 nt, Human
gagaagcaggaaagggcccu

SEQ ID NO: 1342926 - RNA, 19 nt, Human
gaggcuggaauccacuugg

SEQ ID NO: 1342927 - RNA, 23 nt, Human
gugcugaaauagggaaaggcuaa

SEQ ID NO: 1342928 - RNA, 22 nt, Human
uaagauugugcugaaauaggga

SEQ ID NO: 1342929 - RNA, 22 nt, Human
uacccuuuaauuuuaguauauu

SEQ ID NO: 1342930 - RNA, 24 nt, Human
ucagagaagcaggaaagggcccuc

SEQ ID NO: 1342931 - RNA, 19 nt, Human
uccugcaugugucuccacu

SEQ ID NO: 1342932 - RNA, 19 nt, Human
ucuguucuuuugcuaggcc

SEQ ID NO: 1342933 - RNA, 19 nt, Human
ugaaccagaccaaauaccc

SEQ ID NO: 1342934 - RNA, 22 nt, Human
ugaaccagaccaaauacccuuu

SEQ ID NO: 1342935 - RNA, 21 nt, Human
ugaggcuggaauccacuuggc

SEQ ID NO: 1342936 - RNA, 23 nt, Human
ugaggcugggugaccugugcuuu

SEQ ID NO: 1342937 - RNA, 23 nt, Human
ugagucuaagauugugcugaaau

SEQ ID NO: 1342938 - RNA, 21 nt, Human
ugcugcagucucucagaaaga

SEQ ID NO: 1342939 - RNA, 22 nt, Human
ugcuguaaaugcucuuuuaaca

SEQ ID NO: 1342940 - RNA, 21 nt, Human
ugggugaccugugcuuucaga

SEQ ID NO: 1342941 - RNA, 20 nt, Human
uuaguauauuaaccucugcu

SEQ ID NO: 1342942 - RNA, 24 nt, Human
aaaccaacacauuccucaacccca

SEQ ID NO: 1342943 - RNA, 23 nt, Human
aaagaaaccaacacauuccucaa

SEQ ID NO: 1342944 - RNA, 22 nt, Human
aaagugcauuaagauagacuga

SEQ ID NO: 1342945 - RNA, 19 nt, Human
aacagggaaugaccgagaa

SEQ ID NO: 1342946 - RNA, 22 nt, Human
aacaugugaauccaacagcccu

SEQ ID NO: 1342947 - RNA, 19 nt, Human
aacccuguaguucaguagc

SEQ ID NO: 1342948 - RNA, 18 nt, Human
aaccucugcuccacugga

SEQ ID NO: 1342949 - RNA, 25 nt, Human
aagaaagaaaccaacacauuccuca

SEQ ID NO: 1342950 - RNA, 20 nt, Human
aagacaaacccugcugcaaa

SEQ ID NO: 1342951 - RNA, 22 nt, Human
aagguaguuagguaaaggugga

SEQ ID NO: 1342952 - RNA, 19 nt, Human
aaggugaacuuaucagagc

SEQ ID NO: 1342953 - RNA, 27 nt, Human
aaugguaccuucuccaccacccgaggg

SEQ ID NO: 1342954 - RNA, 23 nt, Human
acaaagacaaacccugcugcaaa

SEQ ID NO: 1342955 - RNA, 24 nt, Human
acaaagacaaacccugcugcaaau

SEQ ID NO: 1342956 - RNA, 21 nt, Human
acacacacacacaugcccgug

SEQ ID NO: 1342957 - RNA, 23 nt, Human
acaggaugcaaacggcccugaca

SEQ ID NO: 1342958 - RNA, 22 nt, Human
agaaagaaaccaacacauuccu

SEQ ID NO: 1342959 - RNA, 23 nt, Human
agaaggaagaagaaucagccugg

SEQ ID NO: 1342960 - RNA, 22 nt, Human
agagcaauaguuaggcucugag

SEQ ID NO: 1342961 - RNA, 22 nt, Human
agccgcugguggcugucuuccu

SEQ ID NO: 1342962 - RNA, 21 nt, Human
agccuggguuucccuucucug

SEQ ID NO: 1342963 - RNA, 18 nt, Human
aggaguaagguuaaugag

SEQ ID NO: 1342964 - RNA, 18 nt, Human
aggaugauaagccugaaa

SEQ ID NO: 1342965 - RNA, 25 nt, Human
agggguguuaaucuuggcccugaaa

SEQ ID NO: 1342966 - RNA, 23 nt, Human
aguuacugagcugagggggccag

SEQ ID NO: 1342967 - RNA, 19 nt, Human
augaccgagaaagaaagaa

SEQ ID NO: 1342968 - RNA, 19 nt, Human
caaauaauacuaacuggca

SEQ ID NO: 1342969 - RNA, 24 nt, Human
caaccugaaacucacauggcuaaa

SEQ ID NO: 1342970 - RNA, 26 nt, Human
cacacacacacaugcccgugucuggc

SEQ ID NO: 1342971 - RNA, 20 nt, Human
cacagaauguucuguuucag

SEQ ID NO: 1342972 - RNA, 23 nt, Human
cacugcuaagaaccucugcucca

SEQ ID NO: 1342973 - RNA, 20 nt, Human
cacuguaugccuucuuaggc

SEQ ID NO: 1342974 - RNA, 18 nt, Human
cagcaaauaauacuaacu

SEQ ID NO: 1342975 - RNA, 19 nt, Human
cagcaaauaauacuaacug

SEQ ID NO: 1342976 - RNA, 27 nt, Human
cagccgcugguggcugucuuccuccug

SEQ ID NO: 1342977 - RNA, 18 nt, Human
caggaugcaaacggcccu

SEQ ID NO: 1342978 - RNA, 22 nt, Human
caucugaauucacaaagacaaa

SEQ ID NO: 1342979 - RNA, 23 nt, Human
caucugaauucacaaagacaaac

SEQ ID NO: 1342980 - RNA, 22 nt, Human
cauggcucccuucuacuuucug

SEQ ID NO: 1342981 - RNA, 24 nt, Human
cauuuaucauuucucuacacuuga

SEQ ID NO: 1342982 - RNA, 21 nt, Human
ccccaaagcgcuucuaacuuc

SEQ ID NO: 1342983 - RNA, 20 nt, Human
cccccagcaaugcaaggauu

SEQ ID NO: 1342984 - RNA, 22 nt, Human
cccgggauaaaucuucccugga

SEQ ID NO: 1342985 - RNA, 20 nt, Human
cccuggauccuacacaaccc

SEQ ID NO: 1342986 - RNA, 24 nt, Human
ccgagaaagaaagaaaccaacaca

SEQ ID NO: 1342987 - RNA, 19 nt, Human
ccgcugguggcugucuucc

SEQ ID NO: 1342988 - RNA, 22 nt, Human
ccgcugguggcugucuuccucc

SEQ ID NO: 1342989 - RNA, 23 nt, Human
ccuccugcaggagggguguuaau

SEQ ID NO: 1342990 - RNA, 23 nt, Human
cuaaguacaaauuauucuguacu

SEQ ID NO: 1342991 - RNA, 21 nt, Human
cugaacccuguaguucaguag

SEQ ID NO: 1342992 - RNA, 23 nt, Human
cugccccaaagcgcuucuaacuu

SEQ ID NO: 1342993 - RNA, 18 nt, Human
cuuucugaacccuguagu

SEQ ID NO: 1342994 - RNA, 24 nt, Human
gaaacagggaaugaccgagaaaga

SEQ ID NO: 1342995 - RNA, 23 nt, Human
gaaccucugcuccacuggaaaca

SEQ ID NO: 1342996 - RNA, 20 nt, Human
gacauggcaaaucugauuua

SEQ ID NO: 1342997 - RNA, 19 nt, Human
gagggcagaaccacccugc

SEQ ID NO: 1342998 - RNA, 20 nt, Human
gcagcagcagauccaauugc

SEQ ID NO: 1342999 - RNA, 19 nt, Human
gcauggcucccuucuacuu

SEQ ID NO: 1343000 - RNA, 24 nt, Human
gccccaaagcgcuucuaacuucuu

SEQ ID NO: 1343001 - RNA, 19 nt, Human
gcccugcauuucacagaau

SEQ ID NO: 1343002 - RNA, 21 nt, Human
gccgcugguggcugucuuccu

SEQ ID NO: 1343003 - RNA, 18 nt, Human
gcugucuuccuccugcag

SEQ ID NO: 1343004 - RNA, 24 nt, Human
ggaaugaccgagaaagaaagaaac

SEQ ID NO: 1343005 - RNA, 20 nt, Human
ggaaugugauacagcaguuc

SEQ ID NO: 1343006 - RNA, 21 nt, Human
ggccugguaaggcagaggcug

SEQ ID NO: 1343007 - RNA, 24 nt, Human
gggaagaguuuccuaaagugcauu

SEQ ID NO: 1343008 - RNA, 23 nt, Human
guaaggcagaggcugguuccucc

SEQ ID NO: 1343009 - RNA, 19 nt, Human
uagaaggaagaagaaucag

SEQ ID NO: 1343010 - RNA, 23 nt, Human
uagaaggaagaagaaucagccug

SEQ ID NO: 1343011 - RNA, 19 nt, Human
uauacgcaaagcacgugca

SEQ ID NO: 1343012 - RNA, 22 nt, Human
ucaccuaagugugaccuagucc

SEQ ID NO: 1343013 - RNA, 18 nt, Human
ucaucaccuaagugugac

SEQ ID NO: 1343014 - RNA, 21 nt, Human
uccccguguugcgaaaccccc

SEQ ID NO: 1343015 - RNA, 27 nt, Human
uccccuggcuucagggauugauggccu

SEQ ID NO: 1343016 - RNA, 20 nt, Human
uccucaaccccaguaggcuc

SEQ ID NO: 1343017 - RNA, 20 nt, Human
ucuguacuggacauggcaaa

SEQ ID NO: 1343018 - RNA, 21 nt, Human
ucuuggcccugaaaugaaaca

SEQ ID NO: 1343019 - RNA, 22 nt, Human
ugaaacacacacacacaugccc

SEQ ID NO: 1343020 - RNA, 20 nt, Human
ugaaacacacacacacaugg

SEQ ID NO: 1343021 - RNA, 21 nt, Human
ugaacguguaccaaccugaaa

SEQ ID NO: 1343022 - RNA, 20 nt, Human
ugaauucacaaagacaaacc

SEQ ID NO: 1343023 - RNA, 22 nt, Human
ugacacaccuaguuuuugcuuu

SEQ ID NO: 1343024 - RNA, 21 nt, Human
ugaccuaguccuacaagguga

SEQ ID NO: 1343025 - RNA, 19 nt, Human
ugagaaaacauaacacagg

SEQ ID NO: 1343026 - RNA, 26 nt, Human
ugagaugaaacaauuuaacaugugaa

SEQ ID NO: 1343027 - RNA, 18 nt, Human
uggaaacagagggacuug

SEQ ID NO: 1343028 - RNA, 23 nt, Human
uggcacaaguuaucagacuacaa

SEQ ID NO: 1343029 - RNA, 21 nt, Human
ugguaaggcagaggcugguuc

SEQ ID NO: 1343030 - RNA, 21 nt, Human
uggucagugagcccaggcucu

SEQ ID NO: 1343031 - RNA, 19 nt, Human
ugucuuccuccugcaggag

SEQ ID NO: 1343032 - RNA, 24 nt, Human
uguuaaagaauucucaaaggagua

SEQ ID NO: 1343033 - RNA, 18 nt, Human
uucaacacuaaaacucac

SEQ ID NO: 1343034 - RNA, 22 nt, Human
uucacaaagacaaacccugcug

SEQ ID NO: 1343035 - RNA, 20 nt, Human
uucccuggauccuacacaac

SEQ ID NO: 1343036 - RNA, 24 nt, Human
uuuaacaugugaauccaacagccc

SEQ ID NO: 1343037 - RNA, 22 nt, Human
aaacacacccgaacuuuucaac

SEQ ID NO: 1343038 - RNA, 23 nt, Human
aaacacacccgaacuuuucaaca

SEQ ID NO: 1343039 - RNA, 19 nt, Human
aaacaggaaaagccuuaug

SEQ ID NO: 1343040 - RNA, 20 nt, Human
accccacaacucuuuuccug

SEQ ID NO: 1343041 - RNA, 21 nt, Human
acccgaacuuuucaacaagac

SEQ ID NO: 1343042 - RNA, 22 nt, Human
agaaaacaaacauuccagcaga

SEQ ID NO: 1343043 - RNA, 18 nt, Human
agagaggauagagaggca

SEQ ID NO: 1343044 - RNA, 19 nt, Human
aggaaaagccuuaugggca

SEQ ID NO: 1343045 - RNA, 23 nt, Human
auaaaguacuuuccaaaugcaag

SEQ ID NO: 1343046 - RNA, 23 nt, Human
auccuuuagccucucccagaucc

SEQ ID NO: 1343047 - RNA, 21 nt, Human
augccugcugggggaggagag

SEQ ID NO: 1343048 - RNA, 21 nt, Human
augggccccauaccccacaac

SEQ ID NO: 1343049 - RNA, 22 nt, Human
caccauguuagcguguuuaggc

SEQ ID NO: 1343050 - RNA, 21 nt, Human
caccuccuccuagcucagagc

SEQ ID NO: 1343051 - RNA, 22 nt, Human
caccuccuccuagcucagagcc

SEQ ID NO: 1343052 - RNA, 22 nt, Human
caccuccuccucucuccccaag

SEQ ID NO: 1343053 - RNA, 23 nt, Human
cagaaggaauaggagugaugaga

SEQ ID NO: 1343054 - RNA, 25 nt, Human
cagaaguggcugggccaccuccuuc

SEQ ID NO: 1343055 - RNA, 18 nt, Human
cagagcccacugcccucc

SEQ ID NO: 1343056 - RNA, 23 nt, Human
cagcacccacuacccuccugccc

SEQ ID NO: 1343057 - RNA, 19 nt, Human
caggaagagcaauguggac

SEQ ID NO: 1343058 - RNA, 21 nt, Human
cauccccucccccaaggagcc

SEQ ID NO: 1343059 - RNA, 23 nt, Human
ccaacacccuaacccacauagcc

SEQ ID NO: 1343060 - RNA, 26 nt, Human
ccaaggagccccucccuuucuggccc

SEQ ID NO: 1343061 - RNA, 18 nt, Human
ccaaugcaucuggcaucu

SEQ ID NO: 1343062 - RNA, 18 nt, Human
ccaaugcaucuggcaucu

SEQ ID NO: 1343063 - RNA, 21 nt, Human
ccacagugcucucccucuuaa

SEQ ID NO: 1343064 - RNA, 20 nt, Human
ccacuagcauccacucccaa

SEQ ID NO: 1343065 - RNA, 22 nt, Human
ccaugccccaucuaccaaacac

SEQ ID NO: 1343066 - RNA, 19 nt, Human
cccagugugccacaaggca

SEQ ID NO: 1343067 - RNA, 20 nt, Human
cccauccucuaccaagauug

SEQ ID NO: 1343068 - RNA, 24 nt, Human
cccaucuaccaaacacacccgaac

SEQ ID NO: 1343069 - RNA, 18 nt, Human
ccccaagacagccaaucu

SEQ ID NO: 1343070 - RNA, 18 nt, Human
ccccaaggagccccuccc

SEQ ID NO: 1343071 - RNA, 20 nt, Human
ccccaaggagccccucccuu

SEQ ID NO: 1343072 - RNA, 19 nt, Human
ccccacugcccucgugccg

SEQ ID NO: 1343073 - RNA, 18 nt, Human
ccccauaccccacaacuc

SEQ ID NO: 1343074 - RNA, 22 nt, Human
ccccaucuaccaaacacacccg

SEQ ID NO: 1343075 - RNA, 24 nt, Human
ccccucccuuucuggcccuuuucc

SEQ ID NO: 1343076 - RNA, 22 nt, Human
ccccugcccccuccagaccaga

SEQ ID NO: 1343077 - RNA, 22 nt, Human
cccgaacuuuucaacaagacaa

SEQ ID NO: 1343078 - RNA, 20 nt, Human
cccucugucagucuuucuuc

SEQ ID NO: 1343079 - RNA, 21 nt, Human
cccugcccccuccagaccaga

SEQ ID NO: 1343080 - RNA, 23 nt, Human
ccuccuccuagcucagagcccac

SEQ ID NO: 1343081 - RNA, 22 nt, Human
ccuccugcccugagugccucug

SEQ ID NO: 1343082 - RNA, 24 nt, Human
ccugcaaagcggccuugaccagca

SEQ ID NO: 1343083 - RNA, 20 nt, Human
ccugcugggggaggagagag

SEQ ID NO: 1343084 - RNA, 21 nt, Human
ccuucuccaccuuacucugga

SEQ ID NO: 1343085 - RNA, 22 nt, Human
ccuugaccagcacccacuaccc

SEQ ID NO: 1343086 - RNA, 23 nt, Human
cuaacccacauagccucuuccuu

SEQ ID NO: 1343087 - RNA, 21 nt, Human
cuaagccccaagaucucacuc

SEQ ID NO: 1343088 - RNA, 20 nt, Human
cucagagcccacugcccucc

SEQ ID NO: 1343089 - RNA, 24 nt, Human
cuccaacacccuaacccacauagc

SEQ ID NO: 1343090 - RNA, 23 nt, Human
cucccucugucagucuuucuucu

SEQ ID NO: 1343091 - RNA, 24 nt, Human
cucccuuucuggcccuuuuccacc

SEQ ID NO: 1343092 - RNA, 23 nt, Human
cucuuaaguucugagagccccac

SEQ ID NO: 1343093 - RNA, 24 nt, Human
cucuuccuuuguguauccuuuagc

SEQ ID NO: 1343094 - RNA, 19 nt, Human
cuggacccucuucuaagcu

SEQ ID NO: 1343095 - RNA, 22 nt, Human
cuggcccuuuuccaccucuucc

SEQ ID NO: 1343096 - RNA, 20 nt, Human
cugggguggugcaguagagc

SEQ ID NO: 1343097 - RNA, 21 nt, Human
cuguaccugaguucaguaaga

SEQ ID NO: 1343098 - RNA, 21 nt, Human
cuuaaguuccuuugggcugug

SEQ ID NO: 1343099 - RNA, 21 nt, Human
gaggagagaggauagagaggc

SEQ ID NO: 1343100 - RNA, 19 nt, Human
gccccaucuaccaaacaca

SEQ ID NO: 1343101 - RNA, 22 nt, Human
gcccucccuuuacccuuuacug

SEQ ID NO: 1343102 - RNA, 20 nt, Human
gcccuuuuccaccucuuccu

SEQ ID NO: 1343103 - RNA, 20 nt, Human
gcguugggggucuucaugcc

SEQ ID NO: 1343104 - RNA, 19 nt, Human
gcuggaaauccuggcugca

SEQ ID NO: 1343105 - RNA, 18 nt, Human
gcuguucguuccuuccag

SEQ ID NO: 1343106 - RNA, 21 nt, Human
ggcagcccacagcccagcaca

SEQ ID NO: 1343107 - RNA, 22 nt, Human
ggccaccuccuccuagcucaga

SEQ ID NO: 1343108 - RNA, 20 nt, Human
gggaagggcugggguggugc

SEQ ID NO: 1343109 - RNA, 23 nt, Human
gggcugggguggugcaguagagc

SEQ ID NO: 1343110 - RNA, 24 nt, Human
gggcuguggggaagggcuggggug

SEQ ID NO: 1343111 - RNA, 23 nt, Human
gugccuaaguuuccccuaggagc

SEQ ID NO: 1343112 - RNA, 19 nt, Human
guggcugggccaccuccuc

SEQ ID NO: 1343113 - RNA, 22 nt, Human
uaagcagucaccuccuccucuc

SEQ ID NO: 1343114 - RNA, 18 nt, Human
uacauuuguuuccacaca

SEQ ID NO: 1343115 - RNA, 22 nt, Human
uaccagaaguccaacauuuucc

SEQ ID NO: 1343116 - RNA, 18 nt, Human
uaccugaguucaguaaga

SEQ ID NO: 1343117 - RNA, 21 nt, Human
uagcauccacucccaaucccc

SEQ ID NO: 1343118 - RNA, 21 nt, Human
uagcauccacucccaaucccu

SEQ ID NO: 1343119 - RNA, 25 nt, Human
uagcgcaggacaaaugugaggaggc

SEQ ID NO: 1343120 - RNA, 22 nt, Human
uagcugaacuuuauucacagcc

SEQ ID NO: 1343121 - RNA, 21 nt, Human
uaggcucaguccucugaugcc

SEQ ID NO: 1343122 - RNA, 27 nt, Human
uaucuagcgcaggacaaaugugagggg

SEQ ID NO: 1343123 - RNA, 24 nt, Human
ucaccuccuccucucuccccaaga

SEQ ID NO: 1343124 - RNA, 22 nt, Human
ucaguggcccucuucuaauccc

SEQ ID NO: 1343125 - RNA, 25 nt, Human
ucaguggcccucuucuaaucccucc

SEQ ID NO: 1343126 - RNA, 18 nt, Human
ucauuaacucccugaaac

SEQ ID NO: 1343127 - RNA, 18 nt, Human
uccacacaugugccaaau

SEQ ID NO: 1343128 - RNA, 20 nt, Human
ucccugaaacaggaaaagcc

SEQ ID NO: 1343129 - RNA, 21 nt, Human
ucccuuuacccuuuacugcca

SEQ ID NO: 1343130 - RNA, 19 nt, Human
uccuaagcagucaccuccu

SEQ ID NO: 1343131 - RNA, 19 nt, Human
uccuccuagcucagagccc

SEQ ID NO: 1343132 - RNA, 22 nt, Human
uccuuuagccucucccagaucc

SEQ ID NO: 1343133 - RNA, 19 nt, Human
ucuguaacccccacugccc

SEQ ID NO: 1343134 - RNA, 19 nt, Human
ucugucagucuuucuucuu

SEQ ID NO: 1343135 - RNA, 20 nt, Human
ucugucagucuuucuucuuu

SEQ ID NO: 1343136 - RNA, 23 nt, Human
ucuuaaguuccuuugggcugugg

SEQ ID NO: 1343137 - RNA, 22 nt, Human
ucuuucuucuuugaauuccucc

SEQ ID NO: 1343138 - RNA, 21 nt, Human
ugaaacaggaaaagccuuaug

SEQ ID NO: 1343139 - RNA, 18 nt, Human
ugagagccccacuaaccc

SEQ ID NO: 1343140 - RNA, 26 nt, Human
ugaggaggcagcccacagcccagcac

SEQ ID NO: 1343141 - RNA, 21 nt, Human
ugaugccccucaucucuagau

SEQ ID NO: 1343142 - RNA, 21 nt, Human
ugccccaucuaccaaacacac

SEQ ID NO: 1343143 - RNA, 21 nt, Human
ugcccugagugccucuggugc

SEQ ID NO: 1343144 - RNA, 22 nt, Human
ugcccugagugccucuggugcu

SEQ ID NO: 1343145 - RNA, 24 nt, Human
ugcccugagugccucuggugcugu

SEQ ID NO: 1343146 - RNA, 19 nt, Human
ugccucuggugcugucugu

SEQ ID NO: 1343147 - RNA, 21 nt, Human
ugccugcugggggaggagaga

SEQ ID NO: 1343148 - RNA, 19 nt, Human
ugcuggaaauccuggcugc

SEQ ID NO: 1343149 - RNA, 23 nt, Human
ugcuggaaauccuggcugcaugc

SEQ ID NO: 1343150 - RNA, 18 nt, Human
uggacacuaccagaaguc

SEQ ID NO: 1343151 - RNA, 20 nt, Human
uggauguuuccuucucauag

SEQ ID NO: 1343152 - RNA, 21 nt, Human
uggcccucuucuaaucccucc

SEQ ID NO: 1343153 - RNA, 18 nt, Human
ugggcuguggggaagggc

SEQ ID NO: 1343154 - RNA, 20 nt, Human
ugggggaggagagaggauag

SEQ ID NO: 1343155 - RNA, 18 nt, Human
uguagucugcgcuagugc

SEQ ID NO: 1343156 - RNA, 21 nt, Human
uguguuccucucuacucaguu

SEQ ID NO: 1343157 - RNA, 23 nt, Human
uguuccuuccccugcccccucca

SEQ ID NO: 1343158 - RNA, 20 nt, Human
uguucguuccuuccaugccc

SEQ ID NO: 1343159 - RNA, 22 nt, Human
uguucguuccuuccaugcccca

SEQ ID NO: 1343160 - RNA, 25 nt, Human
uuccacacaugugccaaauuuuacc

SEQ ID NO: 1343161 - RNA, 22 nt, Human
uuccagcagaaggaauaggagu

SEQ ID NO: 1343162 - RNA, 20 nt, Human
uuccugggccuuccgaucuc

SEQ ID NO: 1343163 - RNA, 18 nt, Human
uucguuccuuccaugccc

SEQ ID NO: 1343164 - RNA, 18 nt, Human
uucuaaucccuccaacac

SEQ ID NO: 1343165 - RNA, 26 nt, Human
uucucauaggucauccccucccccaa

SEQ ID NO: 1343166 - RNA, 20 nt, Human
uugauccuucuccaccuuac

SEQ ID NO: 1343167 - RNA, 21 nt, Human
uuguauuuuuuagagcaaaac

SEQ ID NO: 1343168 - RNA, 22 nt, Human
uuguuuccacacaugugccaaa

SEQ ID NO: 1343169 - RNA, 24 nt, Human
uuuguugccccuucggcuuccugu

SEQ ID NO: 1343170 - RNA, 19 nt, Human
uuuuccaccucuuccuaag

SEQ ID NO: 1343171 - RNA, 23 nt, Human
uuuuuagagcaaaacaacaguua

SEQ ID NO: 1343172 - RNA, 25 nt, Human
aaaacaaaaugaaacagaucucucc

SEQ ID NO: 1343173 - RNA, 23 nt, Human
aaaacaaacaguuacaaggguua

SEQ ID NO: 1343174 - RNA, 24 nt, Human
aaaaucaucuaggaccaaaagcac

SEQ ID NO: 1343175 - RNA, 25 nt, Human
aaacauccuucucccuuaugaaggg

SEQ ID NO: 1343176 - RNA, 26 nt, Human
aaacuccaacgaguuauuacguuccu

SEQ ID NO: 1343177 - RNA, 19 nt, Human
aacaaaaugaaacagaucu

SEQ ID NO: 1343178 - RNA, 19 nt, Human
aacgaguuauuacguuccu

SEQ ID NO: 1343179 - RNA, 21 nt, Human
aaguagacauuugaugaaugu

SEQ ID NO: 1343180 - RNA, 22 nt, Human
acccucauuuuuaaacuccaac

SEQ ID NO: 1343181 - RNA, 22 nt, Human
acuuauuuuccucagcacuuug

SEQ ID NO: 1343182 - RNA, 23 nt, Human
agauuaacaacauauaacuauaa

SEQ ID NO: 1343183 - RNA, 20 nt, Human
aguugauacuuauuuuccuc

SEQ ID NO: 1343184 - RNA, 22 nt, Human
auacuuuucuacugucuucugg

SEQ ID NO: 1343185 - RNA, 23 nt, Human
auuuuuuuucagacaucaguguu

SEQ ID NO: 1343186 - RNA, 20 nt, Human
caaaacaguugccagucuga

SEQ ID NO: 1343187 - RNA, 23 nt, Human
caaaacuagaaagaggcccaagu

SEQ ID NO: 1343188 - RNA, 24 nt, Human
caacaacaaaacaaacaguuacaa

SEQ ID NO: 1343189 - RNA, 22 nt, Human
caaguaguaaggcuaccuaugg

SEQ ID NO: 1343190 - RNA, 18 nt, Human
caauuccuacaccaagac

SEQ ID NO: 1343191 - RNA, 20 nt, Human
cagaaaauacuuauguaaau

SEQ ID NO: 1343192 - RNA, 20 nt, Human
caggaaaagugaagcgaaaa

SEQ ID NO: 1343193 - RNA, 23 nt, Human
ccaccgaguaacagaccaacucu

SEQ ID NO: 1343194 - RNA, 18 nt, Human
ccuacaccaagacaacuc

SEQ ID NO: 1343195 - RNA, 20 nt, Human
ccucauuuuuaaacuccaac

SEQ ID NO: 1343196 - RNA, 22 nt, Human
cgcaccuucgucucugcacucu

SEQ ID NO: 1343197 - RNA, 20 nt, Human
cggcaaaacaaaaugaaaag

SEQ ID NO: 1343198 - RNA, 21 nt, Human
cggcaaaacaaaaugaaacag

SEQ ID NO: 1343199 - RNA, 20 nt, Human
cugcacucucacccgccagg

SEQ ID NO: 1343200 - RNA, 23 nt, Human
gcagauccucuuuuuuguccuug

SEQ ID NO: 1343201 - RNA, 22 nt, Human
gccaagacccucauuuuuaaac

SEQ ID NO: 1343202 - RNA, 26 nt, Human
gccauaccuucaccuugggcagaucc

SEQ ID NO: 1343203 - RNA, 18 nt, Human
guaugucuaaacaugucu

SEQ ID NO: 1343204 - RNA, 21 nt, Human
uaacuauaaccuugucuccaa

SEQ ID NO: 1343205 - RNA, 22 nt, Human
uaaguagacauuugaugaaugu

SEQ ID NO: 1343206 - RNA, 18 nt, Human
uacaaacauccuucuccc

SEQ ID NO: 1343207 - RNA, 24 nt, Human
uacccaaaaggcuuagaaauaauu

SEQ ID NO: 1343208 - RNA, 19 nt, Human
uaccugaacuuaacuaauc

SEQ ID NO: 1343209 - RNA, 22 nt, Human
uaccuucaccuugggcagaucc

SEQ ID NO: 1343210 - RNA, 21 nt, Human
uagaaagaggcccaaguagua

SEQ ID NO: 1343211 - RNA, 23 nt, Human
uaggaccaaaagcacuaucaagu

SEQ ID NO: 1343212 - RNA, 21 nt, Human
uaguccuuccuggcccaugcu

SEQ ID NO: 1343213 - RNA, 21 nt, Human
ucauagacagccaacuugcag

SEQ ID NO: 1343214 - RNA, 19 nt, Human
ucccacagaaaauacuuau

SEQ ID NO: 1343215 - RNA, 19 nt, Human
ucuacagccaggaaaagug

SEQ ID NO: 1343216 - RNA, 23 nt, Human
ucuacagccaggaaaagugaagc

SEQ ID NO: 1343217 - RNA, 18 nt, Human
ucucuguugaccauuguu

SEQ ID NO: 1343218 - RNA, 21 nt, Human
ucuuaugucauguauuuggcu

SEQ ID NO: 1343219 - RNA, 23 nt, Human
ucuucuaaaucucuaaaugcuca

SEQ ID NO: 1343220 - RNA, 20 nt, Human
ucuugcuacaaaacaguugc

SEQ ID NO: 1343221 - RNA, 19 nt, Human
ucuugcuuuccaauuccua

SEQ ID NO: 1343222 - RNA, 18 nt, Human
ugaagagaacagcugagg

SEQ ID NO: 1343223 - RNA, 22 nt, Human
ugaagcgaaaacggcuuccgua

SEQ ID NO: 1343224 - RNA, 21 nt, Human
ugucuagaaagaaugauagaa

SEQ ID NO: 1343225 - RNA, 19 nt, Human
uugaaaaaaaaacaacaac

SEQ ID NO: 1343226 - RNA, 27 nt, Human
uugaagauacuuuucuacugucuucug

SEQ ID NO: 1343227 - RNA, 19 nt, Human
uugccaagacccucauuuu

SEQ ID NO: 1343228 - RNA, 23 nt, Human
uugcuggcugccauuuucacucu

SEQ ID NO: 1343229 - RNA, 21 nt, Human
uuguaugucuaaacaugucuu

SEQ ID NO: 1343230 - RNA, 24 nt, Human
uuuaaguagacauuugaugaaugu

SEQ ID NO: 1343231 - RNA, 26 nt, Human
uuuccaauuccuacaccaagacaacu

SEQ ID NO: 1343232 - RNA, 25 nt, Human
aaacaacaacaacaaaaaacauacc

SEQ ID NO: 1343233 - RNA, 21 nt, Human
aaaguugacaaagucagauaa

SEQ ID NO: 1343234 - RNA, 22 nt, Human
aaauaaaguugacaaagucaga

SEQ ID NO: 1343235 - RNA, 22 nt, Human
aacaacaacaaaaaacauaccu

SEQ ID NO: 1343236 - RNA, 26 nt, Human
aacagagccaauccaaggcagaauga

SEQ ID NO: 1343237 - RNA, 22 nt, Human
aagcagacacggcggcccggac

SEQ ID NO: 1343238 - RNA, 23 nt, Human
acaaaaaacauaccuacauuucc

SEQ ID NO: 1343239 - RNA, 27 nt, Human
acaacaaaaaacauaccuacauuucca

SEQ ID NO: 1343240 - RNA, 24 nt, Human
acuguaucuucaucuuaauuuuua

SEQ ID NO: 1343241 - RNA, 18 nt, Human
agacugaaauuuaggccu

SEQ ID NO: 1343242 - RNA, 18 nt, Human
agagcucuucacauuccc

SEQ ID NO: 1343243 - RNA, 20 nt, Human
agccggcagcggcagcggca

SEQ ID NO: 1343244 - RNA, 21 nt, Human
aggaaggauuuggacucuugg

SEQ ID NO: 1343245 - RNA, 20 nt, Human
agggaacaaaaagauuucca

SEQ ID NO: 1343246 - RNA, 21 nt, Human
aucugaaagguuuaaacagag

SEQ ID NO: 1343247 - RNA, 18 nt, Human
aucuuucucuucuucagu

SEQ ID NO: 1343248 - RNA, 22 nt, Human
auuuuuuucuuccuuuuuuggc

SEQ ID NO: 1343249 - RNA, 19 nt, Human
caaaauagauuuauccaga

SEQ ID NO: 1343250 - RNA, 24 nt, Human
caaagaauuuauuguaaauguagu

SEQ ID NO: 1343251 - RNA, 23 nt, Human
caaauuccugacugaauccuuca

SEQ ID NO: 1343252 - RNA, 22 nt, Human
caacaacaaaaaacauaccuac

SEQ ID NO: 1343253 - RNA, 20 nt, Human
caacaacaacaaaaaacaua

SEQ ID NO: 1343254 - RNA, 22 nt, Human
caacaacaacaaaaaacauacc

SEQ ID NO: 1343255 - RNA, 23 nt, Human
caacaacaacaaaaaacauaccu

SEQ ID NO: 1343256 - RNA, 18 nt, Human
cacugcacagccgagagc

SEQ ID NO: 1343257 - RNA, 19 nt, Human
cagacaauaaaccugagau

SEQ ID NO: 1343258 - RNA, 19 nt, Human
cagccgagagcucuucaca

SEQ ID NO: 1343259 - RNA, 19 nt, Human
cagcggcagcggcagcggu

SEQ ID NO: 1343260 - RNA, 20 nt, Human
cagcggcagcggcagcggug

SEQ ID NO: 1343261 - RNA, 18 nt, Human
cauuccccggcuccgggg

SEQ ID NO: 1343262 - RNA, 19 nt, Human
ccccggcaauuccagccuc

SEQ ID NO: 1343263 - RNA, 21 nt, Human
cccggcaauuccagccucggc

SEQ ID NO: 1343264 - RNA, 21 nt, Human
ccgcggccgcuggagccuugu

SEQ ID NO: 1343265 - RNA, 19 nt, Human
ccuccccggcaauuccagc

SEQ ID NO: 1343266 - RNA, 19 nt, Human
ccuccucuucuaaacuuuu

SEQ ID NO: 1343267 - RNA, 19 nt, Human
ccugagccucuuuuuggcc

SEQ ID NO: 1343268 - RNA, 18 nt, Human
cgcggcccaggccccgac

SEQ ID NO: 1343269 - RNA, 19 nt, Human
cggcagcggcagcgguggc

SEQ ID NO: 1343270 - RNA, 18 nt, Human
cggcagcgguggccggcc

SEQ ID NO: 1343271 - RNA, 20 nt, Human
cggcccggaccaccgcggcc

SEQ ID NO: 1343272 - RNA, 26 nt, Human
cucauucuuuucuucuucauuuuguu

SEQ ID NO: 1343273 - RNA, 20 nt, Human
cucuucaaauuccugacuga

SEQ ID NO: 1343274 - RNA, 22 nt, Human
cuucauggcuggguuaaauacu

SEQ ID NO: 1343275 - RNA, 21 nt, Human
cuugcuuugggccuccccggc

SEQ ID NO: 1343276 - RNA, 18 nt, Human
cuuuucuucuucauuuug

SEQ ID NO: 1343277 - RNA, 18 nt, Human
gaaauacuuaaugugaug

SEQ ID NO: 1343278 - RNA, 20 nt, Human
gagccucuuuuuggccuugc

SEQ ID NO: 1343279 - RNA, 18 nt, Human
gauaaugauaaucuauca

SEQ ID NO: 1343280 - RNA, 22 nt, Human
gcagcggcagcgguggccggcc

SEQ ID NO: 1343281 - RNA, 26 nt, Human
ggccccgacgguaccacugcacagcc

SEQ ID NO: 1343282 - RNA, 18 nt, Human
ggccuccccggcaauucc

SEQ ID NO: 1343283 - RNA, 20 nt, Human
gugaugacccauuuucagau

SEQ ID NO: 1343284 - RNA, 21 nt, Human
uaaaaaaaacucagaauucca

SEQ ID NO: 1343285 - RNA, 23 nt, Human
uaaaaacaacaacaacaaaaaac

SEQ ID NO: 1343286 - RNA, 25 nt, Human
uaagaguguauuggucauggcaucu

SEQ ID NO: 1343287 - RNA, 28 nt, Human
uaaguaccuuucauuagggucaaauuuu

SEQ ID NO: 1343288 - RNA, 19 nt, Human
uagaauucucauucuuuuc

SEQ ID NO: 1343289 - RNA, 18 nt, Human
uagggucaaauuuuuccu

SEQ ID NO: 1343290 - RNA, 19 nt, Human
uaucagacaauaaaccuga

SEQ ID NO: 1343291 - RNA, 22 nt, Human
uauuuugcuuuuuaugcucauu

SEQ ID NO: 1343292 - RNA, 21 nt, Human
ucagauaaaaaaaacucagaa

SEQ ID NO: 1343293 - RNA, 21 nt, Human
ucauucuuuucuucuucauuu

SEQ ID NO: 1343294 - RNA, 18 nt, Human
uccagauuugcaggacca

SEQ ID NO: 1343295 - RNA, 22 nt, Human
uccugagccucuuuuuggccuu

SEQ ID NO: 1343296 - RNA, 21 nt, Human
ucgcggcccaggccccgacgg

SEQ ID NO: 1343297 - RNA, 18 nt, Human
ucuaucagacaauaaacc

SEQ ID NO: 1343298 - RNA, 21 nt, Human
ucuaucagacaauaaaccuga

SEQ ID NO: 1343299 - RNA, 20 nt, Human
ucuuguucuugccgcccaug

SEQ ID NO: 1343300 - RNA, 22 nt, Human
ucuuucuuuuuaucuuucucuu

SEQ ID NO: 1343301 - RNA, 21 nt, Human
ugacaaagucagauaaaaaaa

SEQ ID NO: 1343302 - RNA, 22 nt, Human
ugacaaagucagauaaaaaaaa

SEQ ID NO: 1343303 - RNA, 22 nt, Human
ugacugaauccuucaggaagug

SEQ ID NO: 1343304 - RNA, 22 nt, Human
uggaagcagacacggcggcccg

SEQ ID NO: 1343305 - RNA, 19 nt, Human
uggccggccuggacacugg

SEQ ID NO: 1343306 - RNA, 20 nt, Human
ugggaagauucuuccugacc

SEQ ID NO: 1343307 - RNA, 18 nt, Human
ugggagauuuuccagucc

SEQ ID NO: 1343308 - RNA, 20 nt, Human
uguagaauuaaaacuauaaa

SEQ ID NO: 1343309 - RNA, 22 nt, Human
uuaaaaacaacaacaacaaaaa

SEQ ID NO: 1343310 - RNA, 19 nt, Human
uuaaacucaaguuuguuaa

SEQ ID NO: 1343311 - RNA, 24 nt, Human
uuaaaguaugugcuuuuuucccac

SEQ ID NO: 1343312 - RNA, 22 nt, Human
uuagguugcugcucuucaaauu

SEQ ID NO: 1343313 - RNA, 18 nt, Human
uucaauguccuuugucuu

SEQ ID NO: 1343314 - RNA, 18 nt, Human
uuccugagccucuuuuug

SEQ ID NO: 1343315 - RNA, 22 nt, Human
uucuuucuuuuuaucuuucucu

SEQ ID NO: 1343316 - RNA, 21 nt, Human
uugggagauuuuccaguccaa

SEQ ID NO: 1343317 - RNA, 22 nt, Human
uuucaugacuguaucuucaucu

SEQ ID NO: 1343318 - RNA, 20 nt, Human
uuuccaguaucuaccuacug

SEQ ID NO: 1343319 - RNA, 23 nt, Human
uuuuuuggcaguaagucuuccag

SEQ ID NO: 1343320 - RNA, 23 nt, Human
aaauauuuacacagaacaggaca

SEQ ID NO: 1343321 - RNA, 20 nt, Human
aacaacacaagccaauccuu

SEQ ID NO: 1343322 - RNA, 22 nt, Human
acacuccagcuuuuggacuugu

SEQ ID NO: 1343323 - RNA, 19 nt, Human
agaauaugcauauuaccuc

SEQ ID NO: 1343324 - RNA, 20 nt, Human
agaguuccuguccaaguuuu

SEQ ID NO: 1343325 - RNA, 21 nt, Human
agcuacgaaagucuauaaaua

SEQ ID NO: 1343326 - RNA, 23 nt, Human
aucauaccucuuucacaccaugg

SEQ ID NO: 1343327 - RNA, 19 nt, Human
augcauuuuuaacuuauga

SEQ ID NO: 1343328 - RNA, 22 nt, Human
auuuuugcuaaugcauugagag

SEQ ID NO: 1343329 - RNA, 23 nt, Human
caagacagggaauuucccaauca

SEQ ID NO: 1343330 - RNA, 24 nt, Human
cacaauguaaaucgaggaccaucu

SEQ ID NO: 1343331 - RNA, 25 nt, Human
caccagcgguacaccagcucuggcc

SEQ ID NO: 1343332 - RNA, 22 nt, Human
cacccuagcaagaggcuucugg

SEQ ID NO: 1343333 - RNA, 21 nt, Human
cagaacaagagaauccuccaa

SEQ ID NO: 1343334 - RNA, 20 nt, Human
cagaauaugcauauuaccuc

SEQ ID NO: 1343335 - RNA, 22 nt, Human
cagccccauuucaagcugagga

SEQ ID NO: 1343336 - RNA, 24 nt, Human
caggacaaaggaugauuuuccuuu

SEQ ID NO: 1343337 - RNA, 23 nt, Human
caucaugauuacagauggucacc

SEQ ID NO: 1343338 - RNA, 22 nt, Human
ccaacagauaccuuuggacugg

SEQ ID NO: 1343339 - RNA, 21 nt, Human
ccaccacaucaugauuacaga

SEQ ID NO: 1343340 - RNA, 24 nt, Human
ccuggguuuccagccuccugccuc

SEQ ID NO: 1343341 - RNA, 19 nt, Human
cugaagagaaaaaaagacc

SEQ ID NO: 1343342 - RNA, 20 nt, Human
cuucagaauaugcauauuac

SEQ ID NO: 1343343 - RNA, 20 nt, Human
cuuguaagaccugauccacc

SEQ ID NO: 1343344 - RNA, 18 nt, Human
cuuguaagaccugauccc

SEQ ID NO: 1343345 - RNA, 21 nt, Human
cuuuggacuggaccuugcacc

SEQ ID NO: 1343346 - RNA, 20 nt, Human
gaauaugcauauuaccucca

SEQ ID NO: 1343347 - RNA, 18 nt, Human
gaccugauccaccagcgg

SEQ ID NO: 1343348 - RNA, 18 nt, Human
gagaaaaaaagaccgucc

SEQ ID NO: 1343349 - RNA, 21 nt, Human
gagaucgcggacccugacccu

SEQ ID NO: 1343350 - RNA, 18 nt, Human
gauuuuugcuaaugcauu

SEQ ID NO: 1343351 - RNA, 20 nt, Human
gcagccccauuucaagcuga

SEQ ID NO: 1343352 - RNA, 21 nt, Human
gcguccaagauuuaccaccac

SEQ ID NO: 1343353 - RNA, 18 nt, Human
ggacccugacccucgugc

SEQ ID NO: 1343354 - RNA, 21 nt, Human
ggcccagggcaagacagggaa

SEQ ID NO: 1343355 - RNA, 23 nt, Human
guagaauuuuucuaagcuacgaa

SEQ ID NO: 1343356 - RNA, 20 nt, Human
guaugguuucuguauccuga

SEQ ID NO: 1343357 - RNA, 20 nt, Human
gucaccaacuuauguuuuag

SEQ ID NO: 1343358 - RNA, 19 nt, Human
uaacaacacaagccaaucc

SEQ ID NO: 1343359 - RNA, 20 nt, Human
uaacucaacguuuuucaaga

SEQ ID NO: 1343360 - RNA, 25 nt, Human
uaagguagcguccaagauuuaccac

SEQ ID NO: 1343361 - RNA, 22 nt, Human
uagccacucucuccauuaggcc

SEQ ID NO: 1343362 - RNA, 21 nt, Human
uaggauuuuuugacuuuauga

SEQ ID NO: 1343363 - RNA, 21 nt, Human
ucauaccucuuucacaccaug

SEQ ID NO: 1343364 - RNA, 25 nt, Human
uccaaguuuugcucacacccuagca

SEQ ID NO: 1343365 - RNA, 19 nt, Human
ucccaaucacugaguaggc

SEQ ID NO: 1343366 - RNA, 23 nt, Human
ucugaagagaaaaaaagaccguc

SEQ ID NO: 1343367 - RNA, 25 nt, Human
ugacaaacacaaacaucuacugaga

SEQ ID NO: 1343368 - RNA, 21 nt, Human
ugacuucaccauggggaaggg

SEQ ID NO: 1343369 - RNA, 20 nt, Human
uggcccagggcaagacaggg

SEQ ID NO: 1343370 - RNA, 25 nt, Human
ugguaugguuucuguauccugacug

SEQ ID NO: 1343371 - RNA, 20 nt, Human
uguagccacucucuccauua

SEQ ID NO: 1343372 - RNA, 20 nt, Human
uucaucccucuuaaaaguua

SEQ ID NO: 1343373 - RNA, 21 nt, Human
uuccugggguacucucagucc

SEQ ID NO: 1343374 - RNA, 23 nt, Human
uuccuuugucuaguuauuguaag

SEQ ID NO: 1343375 - RNA, 21 nt, Human
uuguaagguagcguccaagau

SEQ ID NO: 1343376 - RNA, 25 nt, Human
uuuccagccuccugccucacacucc

SEQ ID NO: 1343377 - RNA, 20 nt, Human
uuugucuggagaaucuugac

SEQ ID NO: 1343378 - RNA, 22 nt, Human
aacagcacugacagaaugugua

SEQ ID NO: 1343379 - RNA, 21 nt, Human
aagcucaagugauccuccugc

SEQ ID NO: 1343380 - RNA, 25 nt, Human
aagugauccuccugccucagccucc

SEQ ID NO: 1343381 - RNA, 19 nt, Human
acgcagcgcgcagacgugu

SEQ ID NO: 1343382 - RNA, 19 nt, Human
aggucgcugccccggggag

SEQ ID NO: 1343383 - RNA, 24 nt, Human
caaaguuccgggacuacaggugug

SEQ ID NO: 1343384 - RNA, 22 nt, Human
caagugauccuccugccucagc

SEQ ID NO: 1343385 - RNA, 27 nt, Human
caagugauccuccugccucagccuccc

SEQ ID NO: 1343386 - RNA, 19 nt, Human
cacccgggcuccaggucgc

SEQ ID NO: 1343387 - RNA, 24 nt, Human
cacccgggcuccaggucgcugccc

SEQ ID NO: 1343388 - RNA, 23 nt, Human
cacgcagcgcgcagacguguggc

SEQ ID NO: 1343389 - RNA, 18 nt, Human
cagccuuugccacagccc

SEQ ID NO: 1343390 - RNA, 24 nt, Human
ccaaaguuccgggacuacaggugu

SEQ ID NO: 1343391 - RNA, 24 nt, Human
cccaaaguuccgggacuacaggug

SEQ ID NO: 1343392 - RNA, 18 nt, Human
ccgcgcgcgcccuucucu

SEQ ID NO: 1343393 - RNA, 23 nt, Human
ccuccugccucagccucccaaag

SEQ ID NO: 1343394 - RNA, 18 nt, Human
cgcugcggggcgcgggaa

SEQ ID NO: 1343395 - RNA, 20 nt, Human
cgggaaagcgacgcgcggug

SEQ ID NO: 1343396 - RNA, 22 nt, Human
cgggacuacaggugugagcuac

SEQ ID NO: 1343397 - RNA, 24 nt, Human
cgggacuacaggugugagcuacug

SEQ ID NO: 1343398 - RNA, 25 nt, Human
cgggacuacaggugugagcuacugc

SEQ ID NO: 1343399 - RNA, 25 nt, Human
cggugcagacugccgcacccgggcu

SEQ ID NO: 1343400 - RNA, 24 nt, Human
cucaagugauccuccugccucagc

SEQ ID NO: 1343401 - RNA, 22 nt, Human
cucugugccgcgcgcgcccuuc

SEQ ID NO: 1343402 - RNA, 20 nt, Human
cugccucagccucccaaagu

SEQ ID NO: 1343403 - RNA, 24 nt, Human
cugcuugcugguuuuaccuucgau

SEQ ID NO: 1343404 - RNA, 18 nt, Human
gacuacaggugugagcua

SEQ ID NO: 1343405 - RNA, 19 nt, Human
gacuacaggugugagcuac

SEQ ID NO: 1343406 - RNA, 23 nt, Human
gacuacaggugugagcuacugca

SEQ ID NO: 1343407 - RNA, 19 nt, Human
gccccggggaggaagugcu

SEQ ID NO: 1343408 - RNA, 18 nt, Human
gcuccaggucgcugcccc

SEQ ID NO: 1343409 - RNA, 21 nt, Human
gggacuacaggugugagcuac

SEQ ID NO: 1343410 - RNA, 23 nt, Human
gggacuacaggugugagcuacug

SEQ ID NO: 1343411 - RNA, 24 nt, Human
gugauccuccugccucagccuccc

SEQ ID NO: 1343412 - RNA, 22 nt, Human
uaaaagagcaguuacuggaaua

SEQ ID NO: 1343413 - RNA, 18 nt, Human
uagauggcugagcuggug

SEQ ID NO: 1343414 - RNA, 24 nt, Human
uaguagagacaagcucucgcuaua

SEQ ID NO: 1343415 - RNA, 24 nt, Human
uauauuguccagucuggucucaaa

SEQ ID NO: 1343416 - RNA, 18 nt, Human
ucaagugauccuccugcc

SEQ ID NO: 1343417 - RNA, 18 nt, Human
ucagccucccaaaguucc

SEQ ID NO: 1343418 - RNA, 20 nt, Human
ucagccucccaaaguuccgg

SEQ ID NO: 1343419 - RNA, 20 nt, Human
uccuccugccucagccuccc

SEQ ID NO: 1343420 - RNA, 19 nt, Human
ucugugccgcgcgcgcccu

SEQ ID NO: 1343421 - RNA, 24 nt, Human
ugaagcucaagugauccuccugcc

SEQ ID NO: 1343422 - RNA, 19 nt, Human
ugacuguccccaaguuugu

SEQ ID NO: 1343423 - RNA, 24 nt, Human
ugccgcgcgcgcccuucucucagg

SEQ ID NO: 1343424 - RNA, 24 nt, Human
ugccucagccucccaaaguuccgg

SEQ ID NO: 1343425 - RNA, 18 nt, Human
ugccuguuuuagguccug

SEQ ID NO: 1343426 - RNA, 19 nt, Human
ugcggggcgcgggaaggcg

SEQ ID NO: 1343427 - RNA, 20 nt, Human
uggcugagcuggugcagcug

SEQ ID NO: 1343428 - RNA, 23 nt, Human
uggcugagcuggugcagcugcau

SEQ ID NO: 1343429 - RNA, 18 nt, Human
ugggcuggguggugccug

SEQ ID NO: 1343430 - RNA, 18 nt, Human
uguccauugggcugggug

SEQ ID NO: 1343431 - RNA, 18 nt, Human
uguuucagcaugucucug

SEQ ID NO: 1343432 - RNA, 23 nt, Human
uucagcaugucucugggccucuu

SEQ ID NO: 1343433 - RNA, 24 nt, Human
uuuuuuaguagagacaagcucucg

SEQ ID NO: 1343434 - RNA, 20 nt, Human
acuagugacugaaugauguc

SEQ ID NO: 1343435 - RNA, 22 nt, Human
aguacaaguuccacucugcuac

SEQ ID NO: 1343436 - RNA, 24 nt, Human
gagcacacaucuuccaugcugucc

SEQ ID NO: 1343437 - RNA, 18 nt, Human
gcuguccgcugauugccu

SEQ ID NO: 1343438 - RNA, 21 nt, Human
uacaaguuccacucugcuaca

SEQ ID NO: 1343439 - RNA, 18 nt, Human
uauccgagccagagcaca

SEQ ID NO: 1343440 - RNA, 18 nt, Human
uuaaaaacauuuauucug

SEQ ID NO: 1343441 - RNA, 21 nt, Human
uuuuuuuuuuuuuuuuuuaca

SEQ ID NO: 1343442 - RNA, 19 nt, Human
aagaaggggcuggugggcu

SEQ ID NO: 1343443 - RNA, 20 nt, Human
acugcucugccuucucaggu

SEQ ID NO: 1343444 - RNA, 23 nt, Human
acugcucugccuucucagguggg

SEQ ID NO: 1343445 - RNA, 23 nt, Human
agaaaaaaacgggauuuccuuca

SEQ ID NO: 1343446 - RNA, 21 nt, Human
agcacagacacugcucugccu

SEQ ID NO: 1343447 - RNA, 23 nt, Human
aggagcagcuuaggguccuggga

SEQ ID NO: 1343448 - RNA, 18 nt, Human
aggaggcaggggugcugc

SEQ ID NO: 1343449 - RNA, 19 nt, Human
aggaggcaggggugcuggc

SEQ ID NO: 1343450 - RNA, 23 nt, Human
aggccaggaccaggaggcagggg

SEQ ID NO: 1343451 - RNA, 19 nt, Human
caagaagaaggggcuggug

SEQ ID NO: 1343452 - RNA, 18 nt, Human
caccgaagagggcagggu

SEQ ID NO: 1343453 - RNA, 21 nt, Human
cagcacagacacugcucugcc

SEQ ID NO: 1343454 - RNA, 20 nt, Human
caggguguggucaguguggg

SEQ ID NO: 1343455 - RNA, 18 nt, Human
cagugguggcuaccuggc

SEQ ID NO: 1343456 - RNA, 20 nt, Human
cauuuuuguccgcacggcgg

SEQ ID NO: 1343457 - RNA, 24 nt, Human
ccaggacauccucauagucaccca

SEQ ID NO: 1343458 - RNA, 22 nt, Human
ccaggguuuauuuggcgccugg

SEQ ID NO: 1343459 - RNA, 19 nt, Human
cccaugugguccacaaagu

SEQ ID NO: 1343460 - RNA, 23 nt, Human
ccccccuucccucucccccuccc

SEQ ID NO: 1343461 - RNA, 20 nt, Human
cccccuucaaccuugggcuu

SEQ ID NO: 1343462 - RNA, 23 nt, Human
ccugggaagcugagccccccuuc

SEQ ID NO: 1343463 - RNA, 21 nt, Human
cgcacggcggaaaaucugcag

SEQ ID NO: 1343464 - RNA, 23 nt, Human
cggagucagcccugggccaggga

SEQ ID NO: 1343465 - RNA, 22 nt, Human
cucauagucacccauguggucc

SEQ ID NO: 1343466 - RNA, 24 nt, Human
cucauagucacccaugugguccac

SEQ ID NO: 1343467 - RNA, 18 nt, Human
cucugccuucucaggugg

SEQ ID NO: 1343468 - RNA, 26 nt, Human
cuucacaagaagaaggggcugguggg

SEQ ID NO: 1343469 - RNA, 22 nt, Human
gagaggcggagucagcccuggg

SEQ ID NO: 1343470 - RNA, 19 nt, Human
gagcagcuuaggguccugg

SEQ ID NO: 1343471 - RNA, 21 nt, Human
gagcagcuuaggguccuggga

SEQ ID NO: 1343472 - RNA, 18 nt, Human
gagccccccuucccucuc

SEQ ID NO: 1343473 - RNA, 18 nt, Human
gcccccuucaaccuuggg

SEQ ID NO: 1343474 - RNA, 19 nt, Human
gggccagggagaggcaagc

SEQ ID NO: 1343475 - RNA, 18 nt, Human
gggcuccuccacgggccu

SEQ ID NO: 1343476 - RNA, 20 nt, Human
ggggcuggugggcuccucca

SEQ ID NO: 1343477 - RNA, 18 nt, Human
gggggaacugaugaggga

SEQ ID NO: 1343478 - RNA, 26 nt, Human
gucaccgaagagggcagggugugguc

SEQ ID NO: 1343479 - RNA, 18 nt, Human
guggccaugugaggggua

SEQ ID NO: 1343480 - RNA, 20 nt, Human
gugggcuccuccacgggccu

SEQ ID NO: 1343481 - RNA, 19 nt, Human
uagaagaaugucaccgaag

SEQ ID NO: 1343482 - RNA, 22 nt, Human
ucaaccuugggcuucaccagga

SEQ ID NO: 1343483 - RNA, 23 nt, Human
ucaccaggaccuggcagcacaga

SEQ ID NO: 1343484 - RNA, 20 nt, Human
ucagugugggucaugcgugg

SEQ ID NO: 1343485 - RNA, 18 nt, Human
uccaaggacagcuuccca

SEQ ID NO: 1343486 - RNA, 22 nt, Human
uccaaggacagcuucccaucau

SEQ ID NO: 1343487 - RNA, 18 nt, Human
uccacgggccucugggag

SEQ ID NO: 1343488 - RNA, 19 nt, Human
uccacgggccucugggagg

SEQ ID NO: 1343489 - RNA, 24 nt, Human
uccuccaaggacagcuucccauca

SEQ ID NO: 1343490 - RNA, 23 nt, Human
uccuccacgggccucugggaggc

SEQ ID NO: 1343491 - RNA, 22 nt, Human
ucucccaggagcagcuuagggu

SEQ ID NO: 1343492 - RNA, 26 nt, Human
ucugcaccaaagugucugucuagaaa

SEQ ID NO: 1343493 - RNA, 19 nt, Human
ugaaaagaagcuucugcac

SEQ ID NO: 1343494 - RNA, 21 nt, Human
ugaaaagaagcuucugcacca

SEQ ID NO: 1343495 - RNA, 22 nt, Human
ugcaaagaagagcuggaauucc

SEQ ID NO: 1343496 - RNA, 23 nt, Human
ugcucugccuucucagguggggg

SEQ ID NO: 1343497 - RNA, 25 nt, Human
ugggaagcugagccccccuucccuc

SEQ ID NO: 1343498 - RNA, 19 nt, Human
ugucuagaaaaaaacggga

SEQ ID NO: 1343499 - RNA, 23 nt, Human
ugucuagaaaaaaacgggauuuc

SEQ ID NO: 1343500 - RNA, 18 nt, Human
uuuguccgcacggcggaa

SEQ ID NO: 1343501 - RNA, 21 nt, Human
aagcaggaggacgcgagacga

SEQ ID NO: 1343502 - RNA, 19 nt, Human
accauuuguaucuugggcu

SEQ ID NO: 1343503 - RNA, 18 nt, Human
agcacuuaucaaagcuaa

SEQ ID NO: 1343504 - RNA, 24 nt, Human
agcaggaggacgcgagacgacugc

SEQ ID NO: 1343505 - RNA, 22 nt, Human
caaaacaucccuugcaucaagu

SEQ ID NO: 1343506 - RNA, 22 nt, Human
caccagaacaagcaacauuaaa

SEQ ID NO: 1343507 - RNA, 24 nt, Human
ccaccaggcugugcucucucucag

SEQ ID NO: 1343508 - RNA, 21 nt, Human
ccagaacccaccaggcugugc

SEQ ID NO: 1343509 - RNA, 19 nt, Human
ccauuuguaucuugggcuu

SEQ ID NO: 1343510 - RNA, 21 nt, Human
cccaccaggcugugcucucuc

SEQ ID NO: 1343511 - RNA, 19 nt, Human
ccccagaacccaccaggcu

SEQ ID NO: 1343512 - RNA, 24 nt, Human
cccggccccuaggccguagacccc

SEQ ID NO: 1343513 - RNA, 28 nt, Human
cccggccccuaggccguagaccccagaa

SEQ ID NO: 1343514 - RNA, 22 nt, Human
ccguagaccccagaacccacca

SEQ ID NO: 1343515 - RNA, 21 nt, Human
ccucggggcuggagcccggcu

SEQ ID NO: 1343516 - RNA, 22 nt, Human
ccucggggcuggagcccggcuc

SEQ ID NO: 1343517 - RNA, 26 nt, Human
ccuucucaaaaaacuuugcuuaaggg

SEQ ID NO: 1343518 - RNA, 22 nt, Human
cggccccuaggccguagacccc

SEQ ID NO: 1343519 - RNA, 21 nt, Human
cguagaccccagaacccacca

SEQ ID NO: 1343520 - RNA, 18 nt, Human
cuaauagcacuuaucaaa

SEQ ID NO: 1343521 - RNA, 23 nt, Human
cuguucaccagaacaagcaacau

SEQ ID NO: 1343522 - RNA, 20 nt, Human
gaccccagaacccaccaggc

SEQ ID NO: 1343523 - RNA, 19 nt, Human
gagcccggcucgggaucgc

SEQ ID NO: 1343524 - RNA, 19 nt, Human
gauaacauugguucccaug

SEQ ID NO: 1343525 - RNA, 20 nt, Human
gaucgcagcacuggucgcgg

SEQ ID NO: 1343526 - RNA, 19 nt, Human
ggaggggguacuaucuaca

SEQ ID NO: 1343527 - RNA, 20 nt, Human
guagaccccagaacccacca

SEQ ID NO: 1343528 - RNA, 20 nt, Human
uacaacaaauacuucauuca

SEQ ID NO: 1343529 - RNA, 24 nt, Human
uagaagcuuaaacacuuuuccaag

SEQ ID NO: 1343530 - RNA, 21 nt, Human
uagccauaaaccauuuguauc

SEQ ID NO: 1343531 - RNA, 19 nt, Human
ucauuucccuucucaaaaa

SEQ ID NO: 1343532 - RNA, 23 nt, Human
ucccauguuauauauucauuacu

SEQ ID NO: 1343533 - RNA, 25 nt, Human
ucccuucucaaaaaacuuugcuuaa

SEQ ID NO: 1343534 - RNA, 24 nt, Human
uccguaggcaggcccgcccgaccc

SEQ ID NO: 1343535 - RNA, 20 nt, Human
uccucggggcuggagcccgg

SEQ ID NO: 1343536 - RNA, 22 nt, Human
uccucggggcuggagcccggcu

SEQ ID NO: 1343537 - RNA, 24 nt, Human
ucuaaacagauuuauucuuuaaga

SEQ ID NO: 1343538 - RNA, 21 nt, Human
ugaaaauggaaccuuauccca

SEQ ID NO: 1343539 - RNA, 23 nt, Human
ugcugcuggcccgcgggguuccg

SEQ ID NO: 1343540 - RNA, 21 nt, Human
uggaaccuuaucccagugcua

SEQ ID NO: 1343541 - RNA, 18 nt, Human
uggcacguaacauggcua

SEQ ID NO: 1343542 - RNA, 23 nt, Human
uucaccagaacaagcaacauuaa

SEQ ID NO: 1343543 - RNA, 19 nt, Human
aaacccaggccugccucug

SEQ ID NO: 1343544 - RNA, 21 nt, Human
aagcaaacucgacugaaucca

SEQ ID NO: 1343545 - RNA, 19 nt, Human
aauaaacccaggccugccu

SEQ ID NO: 1343546 - RNA, 21 nt, Human
agacaagagccugacaagagc

SEQ ID NO: 1343547 - RNA, 22 nt, Human
agcuggucacuuagccgccugg

SEQ ID NO: 1343548 - RNA, 21 nt, Human
augcuaaccuccagcucuggu

SEQ ID NO: 1343549 - RNA, 23 nt, Human
cacaacuucaugggccacacagg

SEQ ID NO: 1343550 - RNA, 18 nt, Human
cagcaaggacagggccuc

SEQ ID NO: 1343551 - RNA, 18 nt, Human
cagcaaggacagggccuc

SEQ ID NO: 1343552 - RNA, 18 nt, Human
cccagguaaauucccagg

SEQ ID NO: 1343553 - RNA, 22 nt, Human
cccuuagacaacacaaucuccg

SEQ ID NO: 1343554 - RNA, 20 nt, Human
cccuuguccagagcugccuu

SEQ ID NO: 1343555 - RNA, 25 nt, Human
ccugaccccugggguugggucuggg

SEQ ID NO: 1343556 - RNA, 26 nt, Human
ccugaccccugggguugggucugggg

SEQ ID NO: 1343557 - RNA, 22 nt, Human
cgacugaauccaagugaucugu

SEQ ID NO: 1343558 - RNA, 23 nt, Human
cguggguggcagcagcacugguc

SEQ ID NO: 1343559 - RNA, 19 nt, Human
cucguggcugugggugugg

SEQ ID NO: 1343560 - RNA, 19 nt, Human
cucuggacugccugcuccc

SEQ ID NO: 1343561 - RNA, 23 nt, Human
cucuggugcaguucccacggagc

SEQ ID NO: 1343562 - RNA, 22 nt, Human
cuggcagcaaggacagggccuc

SEQ ID NO: 1343563 - RNA, 23 nt, Human
cuuagacaacacaaucuccgaaa

SEQ ID NO: 1343564 - RNA, 21 nt, Human
gaccccaucauccuguuccca

SEQ ID NO: 1343565 - RNA, 21 nt, Human
gaccccaucauccuguucccc

SEQ ID NO: 1343566 - RNA, 20 nt, Human
gcagcaaggacagggccucg

SEQ ID NO: 1343567 - RNA, 24 nt, Human
gcucuggugcaguucccacggagc

SEQ ID NO: 1343568 - RNA, 21 nt, Human
ggaaggagggcaggcaggagg

SEQ ID NO: 1343569 - RNA, 21 nt, Human
ggaaggagggcaggcaggagg

SEQ ID NO: 1343570 - RNA, 24 nt, Human
ggccccacaguccuagaagcacag

SEQ ID NO: 1343571 - RNA, 23 nt, Human
gggaaggagggcaggcaggaggg

SEQ ID NO: 1343572 - RNA, 19 nt, Human
gggcuggggaggccaguuc

SEQ ID NO: 1343573 - RNA, 26 nt, Human
gguguggguggguggguagguaggug

SEQ ID NO: 1343574 - RNA, 25 nt, Human
guccagagcugccuuggccuaaugg

SEQ ID NO: 1343575 - RNA, 20 nt, Human
guggguggguggguagguag

SEQ ID NO: 1343576 - RNA, 24 nt, Human
uaaccuccagcucuggugcaguuc

SEQ ID NO: 1343577 - RNA, 23 nt, Human
ucagguccaccugcaauaaaccc

SEQ ID NO: 1343578 - RNA, 27 nt, Human
ucaugggccacacaggggaggaacacc

SEQ ID NO: 1343579 - RNA, 19 nt, Human
uccaagugaucuguaucug

SEQ ID NO: 1343580 - RNA, 19 nt, Human
ucccuuguccagagcugcc

SEQ ID NO: 1343581 - RNA, 24 nt, Human
uccgaggcggcucagacaaacccu

SEQ ID NO: 1343582 - RNA, 24 nt, Human
uccuugcaagaugcuaaccuccag

SEQ ID NO: 1343583 - RNA, 21 nt, Human
ucuggcagcaaggacagggcc

SEQ ID NO: 1343584 - RNA, 21 nt, Human
ucuguaucugccaaaaaggag

SEQ ID NO: 1343585 - RNA, 18 nt, Human
ugagccaggucccuccug

SEQ ID NO: 1343586 - RNA, 20 nt, Human
ugaucuguaucugccaaaaa

SEQ ID NO: 1343587 - RNA, 25 nt, Human
uggcagcaaggacagggccucgugg

SEQ ID NO: 1343588 - RNA, 23 nt, Human
uggcagugggcuggggaggccag

SEQ ID NO: 1343589 - RNA, 23 nt, Human
uggcagugggcuggggaggccag

SEQ ID NO: 1343590 - RNA, 23 nt, Human
uggcuguucaccugaccccuggg

SEQ ID NO: 1343591 - RNA, 24 nt, Human
ugggaaggagggcaggcaggaggg

SEQ ID NO: 1343592 - RNA, 20 nt, Human
ugggccacacaggggcccca

SEQ ID NO: 1343593 - RNA, 21 nt, Human
ugggcuggggaggccaguucu

SEQ ID NO: 1343594 - RNA, 18 nt, Human
uggguggcagcagcacug

SEQ ID NO: 1343595 - RNA, 24 nt, Human
uggguggcagcagcacugguccuc

SEQ ID NO: 1343596 - RNA, 21 nt, Human
uggguggguagguagguggga

SEQ ID NO: 1343597 - RNA, 25 nt, Human
uguccagagcugccuugagccaggu

SEQ ID NO: 1343598 - RNA, 22 nt, Human
uuucacgacuggauauguuacu

SEQ ID NO: 1343599 - RNA, 23 nt, Human
uuucacgacuggauauguuacua

SEQ ID NO: 1343600 - RNA, 20 nt, Human
uuuuuuuuuuuuuaaagaua

SEQ ID NO: 1343601 - RNA, 19 nt, Human
uuuuuuuuuuuuuuuuuaa

SEQ ID NO: 1343602 - RNA, 21 nt, Human
aaaacaccccagagugaaacg

SEQ ID NO: 1343603 - RNA, 18 nt, Human
aaacaccccagagugaaa

SEQ ID NO: 1343604 - RNA, 22 nt, Human
aaaucccaucguggaggagggg

SEQ ID NO: 1343605 - RNA, 20 nt, Human
aacccaagacaaaaagcccg

SEQ ID NO: 1343606 - RNA, 21 nt, Human
aacugcucccaaugaaucaau

SEQ ID NO: 1343607 - RNA, 18 nt, Human
aagaauaccccauccacc

SEQ ID NO: 1343608 - RNA, 22 nt, Human
aagaauaccccauccaccaaag

SEQ ID NO: 1343609 - RNA, 24 nt, Human
accacaaaaauacgccuagggaau

SEQ ID NO: 1343610 - RNA, 21 nt, Human
accccauccaccaaagccaca

SEQ ID NO: 1343611 - RNA, 23 nt, Human
agaaaucaaugaaaguccauuuc

SEQ ID NO: 1343612 - RNA, 28 nt, Human
agaaaucaaugaaaguccauuucggcaa

SEQ ID NO: 1343613 - RNA, 18 nt, Human
agagaaaaggcaucugga

SEQ ID NO: 1343614 - RNA, 18 nt, Human
aggaggaggaagggaaag

SEQ ID NO: 1343615 - RNA, 22 nt, Human
aggcaucauuauugacuuuuua

SEQ ID NO: 1343616 - RNA, 26 nt, Human
aggcaucuggaggaggaggaagggaa

SEQ ID NO: 1343617 - RNA, 24 nt, Human
agggaaagggggcuggaacccaag

SEQ ID NO: 1343618 - RNA, 21 nt, Human
aucuggaggaggaggaaggga

SEQ ID NO: 1343619 - RNA, 19 nt, Human
aucuuaaauuccuggcuug

SEQ ID NO: 1343620 - RNA, 23 nt, Human
caaaaaacaccccagagugaaac

SEQ ID NO: 1343621 - RNA, 24 nt, Human
caaaaaacaccccagagugaaacg

SEQ ID NO: 1343622 - RNA, 20 nt, Human
caagaauaccccauccacca

SEQ ID NO: 1343623 - RNA, 23 nt, Human
caagaauaccccauccaccaaag

SEQ ID NO: 1343624 - RNA, 26 nt, Human
caagaauaccccauccaccaaagcca

SEQ ID NO: 1343625 - RNA, 18 nt, Human
caagugaccaaagggcug

SEQ ID NO: 1343626 - RNA, 20 nt, Human
cacaaaaauacgccuaggga

SEQ ID NO: 1343627 - RNA, 24 nt, Human
cacgagcagcagccugcgcuggaa

SEQ ID NO: 1343628 - RNA, 23 nt, Human
cagaguauguauuugaaaaaagg

SEQ ID NO: 1343629 - RNA, 24 nt, Human
cagcagccugcgcuggaaaugucu

SEQ ID NO: 1343630 - RNA, 23 nt, Human
caucaagguuggucccauuuccu

SEQ ID NO: 1343631 - RNA, 23 nt, Human
ccaaagccacauauucaucaagg

SEQ ID NO: 1343632 - RNA, 21 nt, Human
ccagaccagcgaaacugcucc

SEQ ID NO: 1343633 - RNA, 20 nt, Human
ccagagugaaacgagccgaa

SEQ ID NO: 1343634 - RNA, 21 nt, Human
cccgcggagccuccacugccc

SEQ ID NO: 1343635 - RNA, 25 nt, Human
ccucaaaaaacaccccagagugaaa

SEQ ID NO: 1343636 - RNA, 21 nt, Human
ccucuuaauuucccuccuccc

SEQ ID NO: 1343637 - RNA, 26 nt, Human
cgagcagcagccugcgcuggaaaugu

SEQ ID NO: 1343638 - RNA, 19 nt, Human
cggacaccacgagcagcag

SEQ ID NO: 1343639 - RNA, 22 nt, Human
cuccuggaggauccagaccagc

SEQ ID NO: 1343640 - RNA, 18 nt, Human
gaaacugcucccaaugaa

SEQ ID NO: 1343641 - RNA, 23 nt, Human
gaaucaaucccaacgggggcuaa

SEQ ID NO: 1343642 - RNA, 21 nt, Human
gacccgcggagccuccacugc

SEQ ID NO: 1343643 - RNA, 21 nt, Human
gaccucggcguuccgaccucu

SEQ ID NO: 1343644 - RNA, 24 nt, Human
gagcaugaccugguucaagaauac

SEQ ID NO: 1343645 - RNA, 21 nt, Human
gaggcgccaccagacucgacc

SEQ ID NO: 1343646 - RNA, 20 nt, Human
gcauggagccgcuuucgacc

SEQ ID NO: 1343647 - RNA, 19 nt, Human
gcgaaacugcucccaauga

SEQ ID NO: 1343648 - RNA, 21 nt, Human
ggacaccacgagcagcagccu

SEQ ID NO: 1343649 - RNA, 18 nt, Human
ggaggaagucucuggcuc

SEQ ID NO: 1343650 - RNA, 20 nt, Human
ggaggaggaagggaaagggg

SEQ ID NO: 1343651 - RNA, 19 nt, Human
ggaguaaaaauuucguucu

SEQ ID NO: 1343652 - RNA, 26 nt, Human
uaaacagagaccacguuaaucaacgg

SEQ ID NO: 1343653 - RNA, 19 nt, Human
uaaauuccuggcuugguug

SEQ ID NO: 1343654 - RNA, 19 nt, Human
uaaggauaccgaggcgcca

SEQ ID NO: 1343655 - RNA, 24 nt, Human
uacagaguauguauuugaaaaaag

SEQ ID NO: 1343656 - RNA, 18 nt, Human
uccuuaucccuuuuccca

SEQ ID NO: 1343657 - RNA, 21 nt, Human
ucggcaagggagaaaaauccc

SEQ ID NO: 1343658 - RNA, 18 nt, Human
ucuggaggaggaggaagg

SEQ ID NO: 1343659 - RNA, 27 nt, Human
ugaaaaaaggaacuaccacaaaaauac

SEQ ID NO: 1343660 - RNA, 22 nt, Human
uggaacccaagacaaaaagccc

SEQ ID NO: 1343661 - RNA, 21 nt, Human
uggaacccaagacaaaaagcu

SEQ ID NO: 1343662 - RNA, 27 nt, Human
uggaaguaaguagaaaucaaugaaagu

SEQ ID NO: 1343663 - RNA, 19 nt, Human
uggaggaagucucuggcuc

SEQ ID NO: 1343664 - RNA, 23 nt, Human
ugggcauggagccgcuuucgacc

SEQ ID NO: 1343665 - RNA, 23 nt, Human
ugguucaagaauaccccauccac

SEQ ID NO: 1343666 - RNA, 24 nt, Human
uugaaaaaaggaacuaccacaaaa

SEQ ID NO: 1343667 - RNA, 23 nt, Human
aaacaaaccccaucaacugucca

SEQ ID NO: 1343668 - RNA, 23 nt, Human
aacaaaccccaucaacuguccac

SEQ ID NO: 1343669 - RNA, 20 nt, Human
aacagaaaucaaccccaccu

SEQ ID NO: 1343670 - RNA, 19 nt, Human
accgccgccgccgccgccg

SEQ ID NO: 1343671 - RNA, 22 nt, Human
accgccgccgccgccgccgccc

SEQ ID NO: 1343672 - RNA, 23 nt, Human
accucaugccuagaggcaacauc

SEQ ID NO: 1343673 - RNA, 22 nt, Human
accuccccuuggcuagucacug

SEQ ID NO: 1343674 - RNA, 22 nt, Human
acugugaaaagcgugcguaagg

SEQ ID NO: 1343675 - RNA, 19 nt, Human
agaaaucaaccccaccucc

SEQ ID NO: 1343676 - RNA, 25 nt, Human
auaaauauacagaaacaaaccccau

SEQ ID NO: 1343677 - RNA, 25 nt, Human
caaaccccaucaacuguccacauca

SEQ ID NO: 1343678 - RNA, 18 nt, Human
caccuccccuuggcuagu

SEQ ID NO: 1343679 - RNA, 21 nt, Human
caccuccccuuggcuagucac

SEQ ID NO: 1343680 - RNA, 19 nt, Human
caucaacuguccacaucag

SEQ ID NO: 1343681 - RNA, 22 nt, Human
ccccaccuccccuuggcuaguc

SEQ ID NO: 1343682 - RNA, 20 nt, Human
ccgccgccgccgcccagccc

SEQ ID NO: 1343683 - RNA, 22 nt, Human
ccgccgccgccgccgcccagcc

SEQ ID NO: 1343684 - RNA, 18 nt, Human
ccgccgccgccgccgccg

SEQ ID NO: 1343685 - RNA, 21 nt, Human
ccgccgccgccgccgccgccc

SEQ ID NO: 1343686 - RNA, 23 nt, Human
ccgccgccgccgccgccgcccag

SEQ ID NO: 1343687 - RNA, 23 nt, Human
ccucacuggugggcucaccauug

SEQ ID NO: 1343688 - RNA, 25 nt, Human
cuagaggccuuuaccuaccaacuag

SEQ ID NO: 1343689 - RNA, 20 nt, Human
cucaaaagaacauuacuagg

SEQ ID NO: 1343690 - RNA, 23 nt, Human
cuuuugcugacuggagcccugac

SEQ ID NO: 1343691 - RNA, 21 nt, Human
gaaaucaaccccaccuccccu

SEQ ID NO: 1343692 - RNA, 24 nt, Human
gaacagaaaucaaccccaccuccc

SEQ ID NO: 1343693 - RNA, 22 nt, Human
guccuagcagcaaggauuucua

SEQ ID NO: 1343694 - RNA, 21 nt, Human
guguaguuaggaacagaaauc

SEQ ID NO: 1343695 - RNA, 19 nt, Human
uaaggcaauugaaucgagg

SEQ ID NO: 1343696 - RNA, 21 nt, Human
uauacagaaacaaaccccauc

SEQ ID NO: 1343697 - RNA, 20 nt, Human
ucaguaauccucacuggugg

SEQ ID NO: 1343698 - RNA, 25 nt, Human
uccaaguagaaugugaccaaugacc

SEQ ID NO: 1343699 - RNA, 18 nt, Human
ugccuagaggcaacaucu

SEQ ID NO: 1343700 - RNA, 24 nt, Human
uuuuacaaaguucuguacauaaaa

SEQ ID NO: 1343701 - RNA, 18 nt, Human
uuuuuuuuuuuuuuuuug

SEQ ID NO: 1343702 - RNA, 18 nt, Human
uuuuuuuuuuuuuuuuug

SEQ ID NO: 1343703 - RNA, 22 nt, Human
aaguuccugacacagcuaaucc

SEQ ID NO: 1343704 - RNA, 20 nt, Human
accccagaacucuccugcga

SEQ ID NO: 1343705 - RNA, 19 nt, Human
caaguuccugacacagcua

SEQ ID NO: 1343706 - RNA, 21 nt, Human
ccaaguuccugacacagcuaa

SEQ ID NO: 1343707 - RNA, 21 nt, Human
ccagaacucuccugcgacugu

SEQ ID NO: 1343708 - RNA, 19 nt, Human
ccugcgacugugagccgag

SEQ ID NO: 1343709 - RNA, 20 nt, Human
cucuucggcuucgccuccgg

SEQ ID NO: 1343710 - RNA, 22 nt, Human
cuggaaugggcgagcuucucuu

SEQ ID NO: 1343711 - RNA, 23 nt, Human
cuucgccuccgggccuucucaag

SEQ ID NO: 1343712 - RNA, 18 nt, Human
gcccguguaccccagaaa

SEQ ID NO: 1343713 - RNA, 18 nt, Human
uucccagucuggaauggg

SEQ ID NO: 1343714 - RNA, 21 nt, Human
uuuuuauuucaagaggugcca

SEQ ID NO: 1343715 - RNA, 19 nt, Human
uuuuuuuuuuuuuuuugca

SEQ ID NO: 1343716 - RNA, 18 nt, Human
uuuuuuuuuuuuuuuuug

SEQ ID NO: 1343717 - RNA, 19 nt, Human
uuuuuuuuuuuuuuuuugc

SEQ ID NO: 1343718 - RNA, 24 nt, Human
aaccagcccuuccagagacugccc

SEQ ID NO: 1343719 - RNA, 19 nt, Human
aacucccccccagacuucu

SEQ ID NO: 1343720 - RNA, 21 nt, Human
aacucccccccagacuucuau

SEQ ID NO: 1343721 - RNA, 20 nt, Human
aagccuugccccagcccacc

SEQ ID NO: 1343722 - RNA, 24 nt, Human
aagccuugccccagcccaccccuc

SEQ ID NO: 1343723 - RNA, 23 nt, Human
acaggaaagaaaacaauuuccaa

SEQ ID NO: 1343724 - RNA, 21 nt, Human
acugggcucccaaauacgugc

SEQ ID NO: 1343725 - RNA, 20 nt, Human
acuuggguggagggauaccg

SEQ ID NO: 1343726 - RNA, 25 nt, Human
aggaaagaaaacaauuuccaaagga

SEQ ID NO: 1343727 - RNA, 18 nt, Human
aggcagaugggguggggg

SEQ ID NO: 1343728 - RNA, 21 nt, Human
aggcagauggggugggggugc

SEQ ID NO: 1343729 - RNA, 23 nt, Human
agguggccauacuuggguggagg

SEQ ID NO: 1343730 - RNA, 18 nt, Human
augaagacaaacaggugg

SEQ ID NO: 1343731 - RNA, 23 nt, Human
caaacagguggccauacuugggu

SEQ ID NO: 1343732 - RNA, 18 nt, Human
cagccuugaaccagcccu

SEQ ID NO: 1343733 - RNA, 19 nt, Human
caugaccagaccagaagcc

SEQ ID NO: 1343734 - RNA, 18 nt, Human
ccagaccagaagccccug

SEQ ID NO: 1343735 - RNA, 18 nt, Human
ccccagcccaccccucuc

SEQ ID NO: 1343736 - RNA, 19 nt, Human
cccccaacucccccccaga

SEQ ID NO: 1343737 - RNA, 20 nt, Human
cccccaacucccccccagac

SEQ ID NO: 1343738 - RNA, 23 nt, Human
cccuauacccaaacagccuugaa

SEQ ID NO: 1343739 - RNA, 20 nt, Human
ccugaaggcagauggggugg

SEQ ID NO: 1343740 - RNA, 19 nt, Human
ccugaccccuauacccaaa

SEQ ID NO: 1343741 - RNA, 21 nt, Human
ccuugccccagcccaccccuc

SEQ ID NO: 1343742 - RNA, 22 nt, Human
cuaacaucugccgccauccccc

SEQ ID NO: 1343743 - RNA, 18 nt, Human
cuuauuuugcuacagugg

SEQ ID NO: 1343744 - RNA, 18 nt, Human
gcucccaaauacgugcuc

SEQ ID NO: 1343745 - RNA, 18 nt, Human
uaagccuugccccagccc

SEQ ID NO: 1343746 - RNA, 19 nt, Human
uacacaggaaagaaaacaa

SEQ ID NO: 1343747 - RNA, 22 nt, Human
uacaguagccagucugggaggc

SEQ ID NO: 1343748 - RNA, 21 nt, Human
uaccugaccccuauacccaaa

SEQ ID NO: 1343749 - RNA, 19 nt, Human
uacgugcucguguguucuc

SEQ ID NO: 1343750 - RNA, 22 nt, Human
uauauacaaaauaauguaugua

SEQ ID NO: 1343751 - RNA, 19 nt, Human
uaugaaguaauuacacagg

SEQ ID NO: 1343752 - RNA, 24 nt, Human
uccagagacugccccuaguggccc

SEQ ID NO: 1343753 - RNA, 18 nt, Human
ucccccaacuccccccca

SEQ ID NO: 1343754 - RNA, 19 nt, Human
ucccccaacucccccccag

SEQ ID NO: 1343755 - RNA, 19 nt, Human
ucccccaacucccccccag

SEQ ID NO: 1343756 - RNA, 21 nt, Human
ucccccaacucccccccagac

SEQ ID NO: 1343757 - RNA, 22 nt, Human
ucccccaacucccccccagacu

SEQ ID NO: 1343758 - RNA, 24 nt, Human
ucccccaacucccccccagacuuc

SEQ ID NO: 1343759 - RNA, 24 nt, Human
ucucuagggacaugaccagaccag

SEQ ID NO: 1343760 - RNA, 18 nt, Human
ugaagacaaacagguggc

SEQ ID NO: 1343761 - RNA, 31 nt, Human
ugaagacaaacagguggccauacuugggugg

SEQ ID NO: 1343762 - RNA, 20 nt, Human
ugacagaugacaaacggaac

SEQ ID NO: 1343763 - RNA, 21 nt, Human
ugaccagaccagaagccccug

SEQ ID NO: 1343764 - RNA, 23 nt, Human
ugaccccuauacccaaacagccu

SEQ ID NO: 1343765 - RNA, 23 nt, Human
ugcccaggauaagccuugcccca

SEQ ID NO: 1343766 - RNA, 24 nt, Human
ugccccagcccaccccucucuucu

SEQ ID NO: 1343767 - RNA, 24 nt, Human
ugccccagcccaccccucucuucu

SEQ ID NO: 1343768 - RNA, 26 nt, Human
ugccgccaucccccaacuccccccca

SEQ ID NO: 1343769 - RNA, 20 nt, Human
ugcuacaguggagaaggggc

SEQ ID NO: 1343770 - RNA, 19 nt, Human
uggaaggagaccaugacag

SEQ ID NO: 1343771 - RNA, 24 nt, Human
uggaaggagaccaugacagaugac

SEQ ID NO: 1343772 - RNA, 24 nt, Human
uggcccacugggcagugcaggcug

SEQ ID NO: 1343773 - RNA, 19 nt, Human
ugggcucccaaauacgugc

SEQ ID NO: 1343774 - RNA, 21 nt, Human
ugguggaaggagaccaugaca

SEQ ID NO: 1343775 - RNA, 19 nt, Human
uugccccagcccaccccuc

SEQ ID NO: 1343776 - RNA, 20 nt, Human
aaucccgcuccugccgcgag

SEQ ID NO: 1343777 - RNA, 20 nt, Human
ccacgguggugacuuccuuu

SEQ ID NO: 1343778 - RNA, 22 nt, Human
cuccgcucgugccgcucgugcc

SEQ ID NO: 1343779 - RNA, 22 nt, Human
cuccugccgcgaggcgcccucc

SEQ ID NO: 1343780 - RNA, 22 nt, Human
cuuuuacuaucccacgcucucc

SEQ ID NO: 1343781 - RNA, 22 nt, Human
guagccuuaaagaauuuuuuuu

SEQ ID NO: 1343782 - RNA, 20 nt, Human
guagguccucuccucuucuc

SEQ ID NO: 1343783 - RNA, 21 nt, Human
uaguaaauguuccaauuacgc

SEQ ID NO: 1343784 - RNA, 22 nt, Human
ucccguuccccugccgguuccc

SEQ ID NO: 1343785 - RNA, 20 nt, Human
uccuuuuccgcuccccuaca

SEQ ID NO: 1343786 - RNA, 27 nt, Human
ucgcaggccacgguggugacuuccuuu

SEQ ID NO: 1343787 - RNA, 20 nt, Human
uggaguacauccacacgaaa

SEQ ID NO: 1343788 - RNA, 28 nt, Human
uuaauaguagccuuaaagaauuuuuuuu

SEQ ID NO: 1343789 - RNA, 19 nt, Human
uuguagguccucuccucuu

SEQ ID NO: 1343790 - RNA, 19 nt, Human
uuuuuuuuuuuuuuuuuaa

SEQ ID NO: 1343791 - RNA, 21 nt, Human
aaaaaaaaggauauuauauau

SEQ ID NO: 1343792 - RNA, 18 nt, Human
caacacgccguaccgcag

SEQ ID NO: 1343793 - RNA, 20 nt, Human
caauccuuuugauaagaaau

SEQ ID NO: 1343794 - RNA, 23 nt, Human
ccgcugggaccaacacgccguac

SEQ ID NO: 1343795 - RNA, 19 nt, Human
ccuacagcacgucccuacc

SEQ ID NO: 1343796 - RNA, 21 nt, Human
ccucagcugaaccgcugggac

SEQ ID NO: 1343797 - RNA, 19 nt, Human
cugggaccaacacgccgua

SEQ ID NO: 1343798 - RNA, 18 nt, Human
cuguaaaacaaauaccau

SEQ ID NO: 1343799 - RNA, 22 nt, Human
gaaguucuaagaaaaaaugaca

SEQ ID NO: 1343800 - RNA, 21 nt, Human
gcugaaccgcugggaccaaca

SEQ ID NO: 1343801 - RNA, 25 nt, Human
uaaacuccaaagccaauuucaaaag

SEQ ID NO: 1343802 - RNA, 23 nt, Human
uaaauaaaugcuugaaauauacc

SEQ ID NO: 1343803 - RNA, 21 nt, Human
uauccaauccuuuugauaaga

SEQ ID NO: 1343804 - RNA, 23 nt, Human
ugaaauauacccaguagaaacuu

SEQ ID NO: 1343805 - RNA, 18 nt, Human
uuucaugucauaaaaugg

SEQ ID NO: 1343806 - RNA, 23 nt, Human
aaaaaaaaaaagacgggggaggg

SEQ ID NO: 1343807 - RNA, 25 nt, Human
aaaaagaagcauuguuugaaaaaaa

SEQ ID NO: 1343808 - RNA, 22 nt, Human
aaaacaaagaaaaagaaaaccc

SEQ ID NO: 1343809 - RNA, 20 nt, Human
aaaacaaauccacaccagca

SEQ ID NO: 1343810 - RNA, 21 nt, Human
aaaagcaaaacaaagccauug

SEQ ID NO: 1343811 - RNA, 22 nt, Human
aaacaaaagcaaaaccaguuaa

SEQ ID NO: 1343812 - RNA, 22 nt, Human
aaacaaagaaaaagaaaaccca

SEQ ID NO: 1343813 - RNA, 22 nt, Human
aaagagcacacaaaaaaaggau

SEQ ID NO: 1343814 - RNA, 20 nt, Human
aaagcaaaaccaguuaaacc

SEQ ID NO: 1343815 - RNA, 22 nt, Human
aaaguuauucuaaaaauggcac

SEQ ID NO: 1343816 - RNA, 25 nt, Human
aaccacuuuucacugaucucucccc

SEQ ID NO: 1343817 - RNA, 19 nt, Human
aaccauccugccuuccuau

SEQ ID NO: 1343818 - RNA, 20 nt, Human
aaccucacuacucaaauacc

SEQ ID NO: 1343819 - RNA, 24 nt, Human
aagaacacugauagacucuaacuc

SEQ ID NO: 1343820 - RNA, 19 nt, Human
aagaagcaaauggaacaca

SEQ ID NO: 1343821 - RNA, 20 nt, Human
aagagcacacaaaaaaagga

SEQ ID NO: 1343822 - RNA, 22 nt, Human
aagaugaaagugaaauuacaaa

SEQ ID NO: 1343823 - RNA, 19 nt, Human
aagcaaaaaaauccagcca

SEQ ID NO: 1343824 - RNA, 18 nt, Human
aagcaaauggaacacaaa

SEQ ID NO: 1343825 - RNA, 21 nt, Human
aagcacaguggcugcuuugua

SEQ ID NO: 1343826 - RNA, 23 nt, Human
aagcauuguuugaaaaaaaaaaa

SEQ ID NO: 1343827 - RNA, 20 nt, Human
acacaaaaaaaggauauuaa

SEQ ID NO: 1343828 - RNA, 18 nt, Human
agacaacaagcuaaauga

SEQ ID NO: 1343829 - RNA, 19 nt, Human
agauucacaugcauguuca

SEQ ID NO: 1343830 - RNA, 18 nt, Human
agcaaaagcaaagaagca

SEQ ID NO: 1343831 - RNA, 18 nt, Human
aggaagggagcuuucgcu

SEQ ID NO: 1343832 - RNA, 21 nt, Human
aggggguuauaacaagaacac

SEQ ID NO: 1343833 - RNA, 23 nt, Human
aguaaaacacaucaaacuuaaag

SEQ ID NO: 1343834 - RNA, 21 nt, Human
agugagccggcggagcccagg

SEQ ID NO: 1343835 - RNA, 24 nt, Human
auacagaaagcauaaauauacagu

SEQ ID NO: 1343836 - RNA, 20 nt, Human
aucaaaaguaaccucacuac

SEQ ID NO: 1343837 - RNA, 18 nt, Human
augaaacaaguguaaggc

SEQ ID NO: 1343838 - RNA, 18 nt, Human
auuuucaucuguaaugca

SEQ ID NO: 1343839 - RNA, 22 nt, Human
caaaagcaaaaccaguuaaacc

SEQ ID NO: 1343840 - RNA, 23 nt, Human
caagaaaaaaacaaagaaaaaga

SEQ ID NO: 1343841 - RNA, 22 nt, Human
caaugagagaguaaaacacauc

SEQ ID NO: 1343842 - RNA, 19 nt, Human
cacugaucucucccccaca

SEQ ID NO: 1343843 - RNA, 22 nt, Human
cagacaacaagcuaaaugacgu

SEQ ID NO: 1343844 - RNA, 18 nt, Human
ccauauaaccauccugcc

SEQ ID NO: 1343845 - RNA, 21 nt, Human
cccaggcagcgcuugucaaga

SEQ ID NO: 1343846 - RNA, 22 nt, Human
ccccaaauagcuacuuuugaau

SEQ ID NO: 1343847 - RNA, 19 nt, Human
ccuacagcugaaacacuau

SEQ ID NO: 1343848 - RNA, 19 nt, Human
cgcugcucagaaaucaaag

SEQ ID NO: 1343849 - RNA, 19 nt, Human
cggcggagcccaggcagcg

SEQ ID NO: 1343850 - RNA, 24 nt, Human
cuuaaaguguuuacuuuuugaaca

SEQ ID NO: 1343851 - RNA, 22 nt, Human
cuuuuaggcaacugcaguccga

SEQ ID NO: 1343852 - RNA, 23 nt, Human
gaaaaaaaaaaaaaaagacgggg

SEQ ID NO: 1343853 - RNA, 26 nt, Human
gaaaaggucacucaguuauuagugag

SEQ ID NO: 1343854 - RNA, 22 nt, Human
gaauagcaagcaaaaaaaucca

SEQ ID NO: 1343855 - RNA, 21 nt, Human
gagcaaaagcaaagaagcaag

SEQ ID NO: 1343856 - RNA, 21 nt, Human
gaugucacuaaaaugcucugu

SEQ ID NO: 1343857 - RNA, 23 nt, Human
gccgagcugaaggaagcuccggc

SEQ ID NO: 1343858 - RNA, 24 nt, Human
ggaaggacaaaauauauaugcaaa

SEQ ID NO: 1343859 - RNA, 22 nt, Human
ggagcaaaagcaaagaagcaag

SEQ ID NO: 1343860 - RNA, 24 nt, Human
ggggagggaaugucuauuuuuuuu

SEQ ID NO: 1343861 - RNA, 22 nt, Human
guaaaacacaucaaacuuaaag

SEQ ID NO: 1343862 - RNA, 20 nt, Human
gugaucaagaaaaaaacaaa

SEQ ID NO: 1343863 - RNA, 20 nt, Human
guggagcaaaaaagauaaaa

SEQ ID NO: 1343864 - RNA, 18 nt, Human
uaaaacaaauccacacca

SEQ ID NO: 1343865 - RNA, 21 nt, Human
uaaaagaucaucugaauaaga

SEQ ID NO: 1343866 - RNA, 26 nt, Human
uaaacaaaagcaaaaccaaucaacgg

SEQ ID NO: 1343867 - RNA, 21 nt, Human
uaaacaucucaugccaaguga

SEQ ID NO: 1343868 - RNA, 18 nt, Human
uaagaaaaccacuuuuca

SEQ ID NO: 1343869 - RNA, 23 nt, Human
uaagguaguacuauuucaccuua

SEQ ID NO: 1343870 - RNA, 25 nt, Human
uaauuuaucacuuaaaaaucaucuc

SEQ ID NO: 1343871 - RNA, 23 nt, Human
uacagggggaggccguucaguaa

SEQ ID NO: 1343872 - RNA, 25 nt, Human
uacuagaaaguuacagcucauuuaa

SEQ ID NO: 1343873 - RNA, 18 nt, Human
uagaagauucuaugagca

SEQ ID NO: 1343874 - RNA, 22 nt, Human
uagcaagcaaaaaaauccagcc

SEQ ID NO: 1343875 - RNA, 19 nt, Human
uauaaaaugaaagugcuuu

SEQ ID NO: 1343876 - RNA, 27 nt, Human
uauaacaagaacacugauagacucuaa

SEQ ID NO: 1343877 - RNA, 19 nt, Human
uauaaccauccugccuucc

SEQ ID NO: 1343878 - RNA, 23 nt, Human
uaugguuaacggugccgugcaaa

SEQ ID NO: 1343879 - RNA, 20 nt, Human
uauguaaaagaaaaagcagu

SEQ ID NO: 1343880 - RNA, 25 nt, Human
ucaaaaguaaccucacuacucaaau

SEQ ID NO: 1343881 - RNA, 18 nt, Human
ucacuacucaaauaccau

SEQ ID NO: 1343882 - RNA, 20 nt, Human
ucacuaguucucagcauuuu

SEQ ID NO: 1343883 - RNA, 21 nt, Human
ucacucaguuauuagugagcc

SEQ ID NO: 1343884 - RNA, 22 nt, Human
uccaaaauaaacaucucaugcc

SEQ ID NO: 1343885 - RNA, 25 nt, Human
uccgaucaaaaguaaccucacuacu

SEQ ID NO: 1343886 - RNA, 21 nt, Human
uccuugggaaaggucaaaaag

SEQ ID NO: 1343887 - RNA, 21 nt, Human
ugaaaaagcaaaacaaagcca

SEQ ID NO: 1343888 - RNA, 21 nt, Human
ugaaaaguaguucuauuacag

SEQ ID NO: 1343889 - RNA, 19 nt, Human
ugacacaaaaacgaauagc

SEQ ID NO: 1343890 - RNA, 19 nt, Human
ugacacaaaaacgaauagc

SEQ ID NO: 1343891 - RNA, 23 nt, Human
ugacauauagauaaacaaaagca

SEQ ID NO: 1343892 - RNA, 20 nt, Human
ugagagaguaaaacacauca

SEQ ID NO: 1343893 - RNA, 20 nt, Human
ugagagaguaaaacacauca

SEQ ID NO: 1343894 - RNA, 21 nt, Human
ugagccacagguguccuccuu

SEQ ID NO: 1343895 - RNA, 21 nt, Human
ugcuuuguagcgcuucuccuu

SEQ ID NO: 1343896 - RNA, 22 nt, Human
uggaaagacaaauuucagccua

SEQ ID NO: 1343897 - RNA, 22 nt, Human
ugggaaaggucaaaaagaagca

SEQ ID NO: 1343898 - RNA, 25 nt, Human
ugggaaaggucaaaaagaagcugga

SEQ ID NO: 1343899 - RNA, 22 nt, Human
uguacauguggagcaaaaaaga

SEQ ID NO: 1343900 - RNA, 18 nt, Human
uguagcgcuucuccuugg

SEQ ID NO: 1343901 - RNA, 19 nt, Human
uguaugcuaucacguaagg

SEQ ID NO: 1343902 - RNA, 19 nt, Human
uuaaaagaucaucugaauu

SEQ ID NO: 1343903 - RNA, 22 nt, Human
uuaaaguuauucuaaaaauggc

SEQ ID NO: 1343904 - RNA, 23 nt, Human
uucaaauauuacaauacauuaua

SEQ ID NO: 1343905 - RNA, 18 nt, Human
uucaagaagcugagagaa

SEQ ID NO: 1343906 - RNA, 18 nt, Human
uucaagaagcugagagaa

SEQ ID NO: 1343907 - RNA, 19 nt, Human
uucaaugugcauuauagug

SEQ ID NO: 1343908 - RNA, 23 nt, Human
uuggaaggacaaaauauauaugc

SEQ ID NO: 1343909 - RNA, 20 nt, Human
uuucacugaucucuccccca

SEQ ID NO: 1343910 - RNA, 22 nt, Human
aaaauaaaauguucgcacaaug

SEQ ID NO: 1343911 - RNA, 21 nt, Human
aagaaaacgcugccuuggaaa

SEQ ID NO: 1343912 - RNA, 26 nt, Human
accgggaggcggcggcggccccccuu

SEQ ID NO: 1343913 - RNA, 24 nt, Human
agaaaagcagcgccggccugcagg

SEQ ID NO: 1343914 - RNA, 23 nt, Human
agcuggccagggcugcccaaaac

SEQ ID NO: 1343915 - RNA, 18 nt, Human
caguggcugccggcaggg

SEQ ID NO: 1343916 - RNA, 20 nt, Human
ccaacagagcccaaacuccg

SEQ ID NO: 1343917 - RNA, 18 nt, Human
ccagggcugcccaaaacc

SEQ ID NO: 1343918 - RNA, 26 nt, Human
ccgggaggcggcggcggccccccuuc

SEQ ID NO: 1343919 - RNA, 22 nt, Human
ccucuccucucuuugaagcaaa

SEQ ID NO: 1343920 - RNA, 22 nt, Human
ccuuggaaauuguuugcacaag

SEQ ID NO: 1343921 - RNA, 21 nt, Human
cgccggccugcaggaaucccc

SEQ ID NO: 1343922 - RNA, 18 nt, Human
cgggaggcggcggcggcc

SEQ ID NO: 1343923 - RNA, 20 nt, Human
cgguuucugcugagggcugg

SEQ ID NO: 1343924 - RNA, 20 nt, Human
cugcugagggcuggugacac

SEQ ID NO: 1343925 - RNA, 21 nt, Human
cuggugacacacuggccucuu

SEQ ID NO: 1343926 - RNA, 21 nt, Human
cuucccgcuggccaggugggc

SEQ ID NO: 1343927 - RNA, 19 nt, Human
cuuucgguuucugcugagg

SEQ ID NO: 1343928 - RNA, 18 nt, Human
gaaaagcagcgccggccu

SEQ ID NO: 1343929 - RNA, 27 nt, Human
gagucaguuccaaagugaaggcgcuga

SEQ ID NO: 1343930 - RNA, 18 nt, Human
ggcagggaagaaaacgcu

SEQ ID NO: 1343931 - RNA, 18 nt, Human
ggccaggaacagaguaga

SEQ ID NO: 1343932 - RNA, 20 nt, Human
uacaccuuagccaacagagc

SEQ ID NO: 1343933 - RNA, 22 nt, Human
uagccaacagagcccaaacucc

SEQ ID NO: 1343934 - RNA, 23 nt, Human
uagccaacagagcccaaacuccg

SEQ ID NO: 1343935 - RNA, 19 nt, Human
uccaaggccacagggagcu

SEQ ID NO: 1343936 - RNA, 22 nt, Human
ucccccgcgccugguagccugg

SEQ ID NO: 1343937 - RNA, 19 nt, Human
ugccuuggaaauuguuugc

SEQ ID NO: 1343938 - RNA, 20 nt, Human
uggcaucaugggaacgccug

SEQ ID NO: 1343939 - RNA, 23 nt, Human
uggccaggugggcuucuuuaggu

SEQ ID NO: 1343940 - RNA, 19 nt, Human
uggccucuugucaguggcu

SEQ ID NO: 1343941 - RNA, 19 nt, Human
uggcugccggcagggccag

SEQ ID NO: 1343942 - RNA, 24 nt, Human
uguucgcacaaugggagaaaauug

SEQ ID NO: 1343943 - RNA, 18 nt, Human
uucuuuaggucucugagu

SEQ ID NO: 1343944 - RNA, 25 nt, Human
uugaagcaaaaccuccagguguacu

SEQ ID NO: 1343945 - RNA, 26 nt, Human
aaacacaugcauacacacacauccuc

SEQ ID NO: 1343946 - RNA, 18 nt, Human
acaaaaucccaggucuuu

SEQ ID NO: 1343947 - RNA, 22 nt, Human
acaugcauacacacacauccuc

SEQ ID NO: 1343948 - RNA, 19 nt, Human
acauuuuauuauccauugu

SEQ ID NO: 1343949 - RNA, 20 nt, Human
agaaauugaauaacaaagga

SEQ ID NO: 1343950 - RNA, 23 nt, Human
aggucuuuagucuccucaugucc

SEQ ID NO: 1343951 - RNA, 24 nt, Human
caaaaucccaggucuuuagucucc

SEQ ID NO: 1343952 - RNA, 25 nt, Human
caaacacaugcauacacacacaucc

SEQ ID NO: 1343953 - RNA, 26 nt, Human
cauacacacacauccuccucugugug

SEQ ID NO: 1343954 - RNA, 18 nt, Human
cuguguguuacuuccucc

SEQ ID NO: 1343955 - RNA, 18 nt, Human
cuuucgagacugacgggc

SEQ ID NO: 1343956 - RNA, 19 nt, Human
guccgggcgcguggcgagg

SEQ ID NO: 1343957 - RNA, 22 nt, Human
gucuuuagucuccucauguccu

SEQ ID NO: 1343958 - RNA, 19 nt, Human
uacaaaacgcgaguagcag

SEQ ID NO: 1343959 - RNA, 18 nt, Human
uagcagaccccagcugug

SEQ ID NO: 1343960 - RNA, 18 nt, Human
uagcagaccccagcugug

SEQ ID NO: 1343961 - RNA, 18 nt, Human
ucccaggucuuuagucuc

SEQ ID NO: 1343962 - RNA, 23 nt, Human
uccccaaaaacaccuuucgagac

SEQ ID NO: 1343963 - RNA, 25 nt, Human
ugauugacaaaaucccaggucuuua

SEQ ID NO: 1343964 - RNA, 28 nt, Human
ugcauacacacacauccuccucugugug

SEQ ID NO: 1343965 - RNA, 21 nt, Human
uguguaaagcucaggcugauu

SEQ ID NO: 1343966 - RNA, 24 nt, Human
uuagucuccucauguccuuucuca

SEQ ID NO: 1343967 - RNA, 21 nt, Human
acaccgguggucuccagccuc

SEQ ID NO: 1343968 - RNA, 23 nt, Human
accgguggucuccagccucuccc

SEQ ID NO: 1343969 - RNA, 21 nt, Human
agugaacaggcagcuccuccc

SEQ ID NO: 1343970 - RNA, 22 nt, Human
cacaggggccucacggggcgug

SEQ ID NO: 1343971 - RNA, 23 nt, Human
cagugaauuuacccgcgaggccu

SEQ ID NO: 1343972 - RNA, 22 nt, Human
caguggaucccacugcugcagc

SEQ ID NO: 1343973 - RNA, 23 nt, Human
cauccucugccuuuguccccgcc

SEQ ID NO: 1343974 - RNA, 23 nt, Human
ccaggcgcuccucagcuggacuu

SEQ ID NO: 1343975 - RNA, 23 nt, Human
ccagugaacaggcagcuccuccc

SEQ ID NO: 1343976 - RNA, 19 nt, Human
cccgcgaggccuucacacc

SEQ ID NO: 1343977 - RNA, 21 nt, Human
cccugcacaggggccucacgg

SEQ ID NO: 1343978 - RNA, 22 nt, Human
ccgcuguguggagucucuccug

SEQ ID NO: 1343979 - RNA, 21 nt, Human
ccgguggucuccagccucucc

SEQ ID NO: 1343980 - RNA, 19 nt, Human
ccucaguuccauccaggca

SEQ ID NO: 1343981 - RNA, 25 nt, Human
ccuccaccccuccccaauggggcua

SEQ ID NO: 1343982 - RNA, 19 nt, Human
ccugcgucugucucugcuc

SEQ ID NO: 1343983 - RNA, 20 nt, Human
ccuuccuccaccccucccca

SEQ ID NO: 1343984 - RNA, 22 nt, Human
cggccccuucugucucccagug

SEQ ID NO: 1343985 - RNA, 23 nt, Human
cggcgcccuggcugaucccagug

SEQ ID NO: 1343986 - RNA, 21 nt, Human
cgugcucacacccgauguaug

SEQ ID NO: 1343987 - RNA, 21 nt, Human
cucccugcacaggggccucac

SEQ ID NO: 1343988 - RNA, 18 nt, Human
cuggggaccggccccuuc

SEQ ID NO: 1343989 - RNA, 18 nt, Human
gccucacggggcguggaa

SEQ ID NO: 1343990 - RNA, 18 nt, Human
gccucuccccaguggauc

SEQ ID NO: 1343991 - RNA, 24 nt, Human
gcugugccaccaucucccgccucu

SEQ ID NO: 1343992 - RNA, 18 nt, Human
ggcccggcgcccuggcug

SEQ ID NO: 1343993 - RNA, 22 nt, Human
ggcccuuuuuuuuuuuuuuuuu

SEQ ID NO: 1343994 - RNA, 20 nt, Human
ggcgccuggggaccggcccc

SEQ ID NO: 1343995 - RNA, 21 nt, Human
guggccugugagggcccauag

SEQ ID NO: 1343996 - RNA, 22 nt, Human
guggucuccagccucuccccag

SEQ ID NO: 1343997 - RNA, 22 nt, Human
uccauccaggcagauucaggcu

SEQ ID NO: 1343998 - RNA, 24 nt, Human
uccucaguuccauccaggcagauu

SEQ ID NO: 1343999 - RNA, 26 nt, Human
ucuccagccucuccccaguggauccc

SEQ ID NO: 1344000 - RNA, 23 nt, Human
ucucccgccucugccgcugcacu

SEQ ID NO: 1344001 - RNA, 20 nt, Human
ucugucucugcucugugcuc

SEQ ID NO: 1344002 - RNA, 27 nt, Human
ucugugcucagaagugggaggcguaac

SEQ ID NO: 1344003 - RNA, 20 nt, Human
ucuguggaccagccgccgcc

SEQ ID NO: 1344004 - RNA, 21 nt, Human
ucuguggaccagccgccgccc

SEQ ID NO: 1344005 - RNA, 18 nt, Human
ugagaugccacgacucug

SEQ ID NO: 1344006 - RNA, 21 nt, Human
ugccaccaucucccgccucug

SEQ ID NO: 1344007 - RNA, 23 nt, Human
ugccuuuguccccgccugcgucu

SEQ ID NO: 1344008 - RNA, 19 nt, Human
uggaccagccgccgcccag

SEQ ID NO: 1344009 - RNA, 22 nt, Human
uggcccuuuuuuuuuuuuuuuu

SEQ ID NO: 1344010 - RNA, 24 nt, Human
uggccugugagggcccauaggauc

SEQ ID NO: 1344011 - RNA, 21 nt, Human
uggcucugcuugucagcguga

SEQ ID NO: 1344012 - RNA, 24 nt, Human
uggggaccggccccuucugucucc

SEQ ID NO: 1344013 - RNA, 19 nt, Human
uggggcuacauccucugcc

SEQ ID NO: 1344014 - RNA, 24 nt, Human
uuuacccgcgaggccuucacaccg

SEQ ID NO: 1344015 - RNA, 25 nt, Human
uuuuuuuuggcccuuuuuuuuuuuu

SEQ ID NO: 1344016 - RNA, 29 nt, Human
uuuuuuuuuuuuggcccuuuuuuuuuuuu

SEQ ID NO: 1344017 - RNA, 18 nt, Human
uuuuuuuuuuuuuuuuug

SEQ ID NO: 1344018 - RNA, 26 nt, Human
uuuuuuuuuuuuuuuuuggcccuuuu

SEQ ID NO: 1344019 - RNA, 22 nt, Human
uuuuuuuuuuuuuuuuuuuggc

SEQ ID NO: 1344020 - RNA, 27 nt, Human
uuuuuuuuuuuuuuuuuuuuuuugggg

SEQ ID NO: 1344021 - RNA, 21 nt, Human
aaagugagugcaugcaugcca

SEQ ID NO: 1344022 - RNA, 21 nt, Human
acacacacacacacgcacagc

SEQ ID NO: 1344023 - RNA, 23 nt, Human
acacacaugcacacacacacaca

SEQ ID NO: 1344024 - RNA, 19 nt, Human
acagaauguucaacggagg

SEQ ID NO: 1344025 - RNA, 21 nt, Human
accagcuagcccccaagacag

SEQ ID NO: 1344026 - RNA, 18 nt, Human
acugcgcuccgggccggc

SEQ ID NO: 1344027 - RNA, 23 nt, Human
acugucaccuccagccccaaagu

SEQ ID NO: 1344028 - RNA, 19 nt, Human
auaccgcccacccucccuc

SEQ ID NO: 1344029 - RNA, 18 nt, Human
auagacaggucuuuauuu

SEQ ID NO: 1344030 - RNA, 20 nt, Human
auagacaggucuuuauuugg

SEQ ID NO: 1344031 - RNA, 23 nt, Human
augcacacacacacacacacacg

SEQ ID NO: 1344032 - RNA, 24 nt, Human
caagacagccucucccaaccaccu

SEQ ID NO: 1344033 - RNA, 27 nt, Human
cacacacacacacacacacgcacagcu

SEQ ID NO: 1344034 - RNA, 19 nt, Human
cacacacaugcacacacac

SEQ ID NO: 1344035 - RNA, 20 nt, Human
cacacacaugcacacacaca

SEQ ID NO: 1344036 - RNA, 28 nt, Human
cacacacaugcacacacacacacacaca

SEQ ID NO: 1344037 - RNA, 19 nt, Human
cacccucccuccuccccag

SEQ ID NO: 1344038 - RNA, 22 nt, Human
cacccucccuccuccccagggg

SEQ ID NO: 1344039 - RNA, 22 nt, Human
caccuccagccccaaagugagu

SEQ ID NO: 1344040 - RNA, 22 nt, Human
cagacagacacacacaugcaca

SEQ ID NO: 1344041 - RNA, 21 nt, Human
cagcuagcccccaagacagcc

SEQ ID NO: 1344042 - RNA, 25 nt, Human
caugcacacacacacacacacacgc

SEQ ID NO: 1344043 - RNA, 24 nt, Human
ccaagacagccucucccaaccacu

SEQ ID NO: 1344044 - RNA, 20 nt, Human
ccagcuacucuuaccuccuc

SEQ ID NO: 1344045 - RNA, 20 nt, Human
cccacccucccuccucccca

SEQ ID NO: 1344046 - RNA, 18 nt, Human
ccccaagacagccucucc

SEQ ID NO: 1344047 - RNA, 21 nt, Human
ccccaagacagccucucccaa

SEQ ID NO: 1344048 - RNA, 22 nt, Human
ccccacuggaaacugcgcuccg

SEQ ID NO: 1344049 - RNA, 21 nt, Human
ccccaggggcccagcacuggg

SEQ ID NO: 1344050 - RNA, 22 nt, Human
cccccaagacagccucucccaa

SEQ ID NO: 1344051 - RNA, 22 nt, Human
ccgcccacccucccuccucccc

SEQ ID NO: 1344052 - RNA, 19 nt, Human
ccugaugcuccagggcucu

SEQ ID NO: 1344053 - RNA, 22 nt, Human
cucccuccuccccaggggccca

SEQ ID NO: 1344054 - RNA, 20 nt, Human
cucucccaaccaccuucccu

SEQ ID NO: 1344055 - RNA, 27 nt, Human
cucuggcuucuccccgcuuucuggucu

SEQ ID NO: 1344056 - RNA, 22 nt, Human
cucuuaccuccuccaccagcua

SEQ ID NO: 1344057 - RNA, 22 nt, Human
cugaugcuccagggcucuuuuc

SEQ ID NO: 1344058 - RNA, 18 nt, Human
cugggggaaaggaacuug

SEQ ID NO: 1344059 - RNA, 20 nt, Human
cuuaccuccuccaccagcua

SEQ ID NO: 1344060 - RNA, 25 nt, Human
cuuucaggcucagucaacuuucugu

SEQ ID NO: 1344061 - RNA, 31 nt, Human
gacagacacacacaugcacacacacacacag

SEQ ID NO: 1344062 - RNA, 19 nt, Human
gacagccucucccaaccac

SEQ ID NO: 1344063 - RNA, 21 nt, Human
gccaagaacucuggcuucucc

SEQ ID NO: 1344064 - RNA, 19 nt, Human
gcccacccucccuccuccc

SEQ ID NO: 1344065 - RNA, 22 nt, Human
ggcaguggagaugucagaggga

SEQ ID NO: 1344066 - RNA, 21 nt, Human
uaccuccuccaccagcuagcc

SEQ ID NO: 1344067 - RNA, 23 nt, Human
uagcccccaagacagccucuccc

SEQ ID NO: 1344068 - RNA, 22 nt, Human
uccaccagcuagcccccaagac

SEQ ID NO: 1344069 - RNA, 19 nt, Human
ucccaaccaccuucccuuc

SEQ ID NO: 1344070 - RNA, 21 nt, Human
uccccaggggcccagcacugg

SEQ ID NO: 1344071 - RNA, 24 nt, Human
uccuccaccagcuagcccccaaga

SEQ ID NO: 1344072 - RNA, 20 nt, Human
ugaucuccuccucugcccuc

SEQ ID NO: 1344073 - RNA, 20 nt, Human
ugcacacacacacacacaca

SEQ ID NO: 1344074 - RNA, 25 nt, Human
ugcacacacacacacacacacgcac

SEQ ID NO: 1344075 - RNA, 33 nt, Human
ugcaugcaugccagacagacacacacaugcagu

SEQ ID NO: 1344076 - RNA, 26 nt, Human
ugcccucaccuacugucaccuccagc

SEQ ID NO: 1344077 - RNA, 22 nt, Human
ugggaccuggcccuuucaggcu

SEQ ID NO: 1344078 - RNA, 23 nt, Human
uuucugggggaaaggaacuugga

SEQ ID NO: 1344079 - RNA, 19 nt, Human
aacauuuggaaguuuucuc

SEQ ID NO: 1344080 - RNA, 23 nt, Human
aagaagcaggggggcagguggag

SEQ ID NO: 1344081 - RNA, 28 nt, Human
aagcaggggggcagguggaaggucgacc

SEQ ID NO: 1344082 - RNA, 18 nt, Human
acuacacuccagccuggg

SEQ ID NO: 1344083 - RNA, 21 nt, Human
agaggcugaggugggaggaua

SEQ ID NO: 1344084 - RNA, 24 nt, Human
agcuauuugagaggcugagguggg

SEQ ID NO: 1344085 - RNA, 24 nt, Human
aggcugaggugggaggauagcuug

SEQ ID NO: 1344086 - RNA, 24 nt, Human
auugcgccacuacacuccagccug

SEQ ID NO: 1344087 - RNA, 23 nt, Human
cacuacacuccagccugggugac

SEQ ID NO: 1344088 - RNA, 18 nt, Human
cacuccagccugggugac

SEQ ID NO: 1344089 - RNA, 24 nt, Human
cagcuauuugagaggcugaggugg

SEQ ID NO: 1344090 - RNA, 20 nt, Human
ccacuacacuccagccuggg

SEQ ID NO: 1344091 - RNA, 21 nt, Human
ccacuacacuccagccugggu

SEQ ID NO: 1344092 - RNA, 22 nt, Human
ccacuacacuccagccugggug

SEQ ID NO: 1344093 - RNA, 24 nt, Human
ccacuacacuccagccugggugac

SEQ ID NO: 1344094 - RNA, 20 nt, Human
cccaggacgagggcugcacu

SEQ ID NO: 1344095 - RNA, 23 nt, Human
ccuccauggggcguagcaggaac

SEQ ID NO: 1344096 - RNA, 22 nt, Human
gagcugcccggugcagacccag

SEQ ID NO: 1344097 - RNA, 18 nt, Human
gaggagagugaggggaga

SEQ ID NO: 1344098 - RNA, 19 nt, Human
gccacuacacuccagccug

SEQ ID NO: 1344099 - RNA, 24 nt, Human
gccacuacacuccagccuggguga

SEQ ID NO: 1344100 - RNA, 19 nt, Human
gcguagcaggaaccgggcu

SEQ ID NO: 1344101 - RNA, 21 nt, Human
gcuuugcugccuguaguccca

SEQ ID NO: 1344102 - RNA, 20 nt, Human
ggaggagagugaggggagag

SEQ ID NO: 1344103 - RNA, 19 nt, Human
gguggaggagagugagggg

SEQ ID NO: 1344104 - RNA, 21 nt, Human
gguguggccguguccugagcc

SEQ ID NO: 1344105 - RNA, 23 nt, Human
uaagaagcaggggggcaggugga

SEQ ID NO: 1344106 - RNA, 23 nt, Human
uaagaagcaggggggcaggugga

SEQ ID NO: 1344107 - RNA, 20 nt, Human
uagcuugagcccaaggaggg

SEQ ID NO: 1344108 - RNA, 21 nt, Human
ucagugaggcugggcagaugg

SEQ ID NO: 1344109 - RNA, 21 nt, Human
ucuuuauaaacauuuggaagu

SEQ ID NO: 1344110 - RNA, 26 nt, Human
ugacagacuuucuuuauaaacauuug

SEQ ID NO: 1344111 - RNA, 22 nt, Human
ugagaaaagugaccacgugggg

SEQ ID NO: 1344112 - RNA, 19 nt, Human
ugagaggcugaggugggag

SEQ ID NO: 1344113 - RNA, 24 nt, Human
ugagauugcgccacuacacuccag

SEQ ID NO: 1344114 - RNA, 20 nt, Human
ugaggggagagcugcccggu

SEQ ID NO: 1344115 - RNA, 18 nt, Human
ugaggugggaggauagcu

SEQ ID NO: 1344116 - RNA, 20 nt, Human
ugaggugggaggauagcuug

SEQ ID NO: 1344117 - RNA, 24 nt, Human
ugaggugggaggauagcuugagcc

SEQ ID NO: 1344118 - RNA, 22 nt, Human
ugccuguagucccagcuauuug

SEQ ID NO: 1344119 - RNA, 22 nt, Human
ugcuuugcugccuguaguccca

SEQ ID NO: 1344120 - RNA, 23 nt, Human
uggucucggagccuccauggggc

SEQ ID NO: 1344121 - RNA, 22 nt, Human
ugguguggccguguccugagcc

SEQ ID NO: 1344122 - RNA, 25 nt, Human
uuggaaguuuucucccccaucuucu

SEQ ID NO: 1344123 - RNA, 23 nt, Human
uuuggaaguuuucucccccaucu

SEQ ID NO: 1344124 - RNA, 21 nt, Human
aaacuggucucauucauauca

SEQ ID NO: 1344125 - RNA, 24 nt, Human
aaauacaguaaagauugaaaccaa

SEQ ID NO: 1344126 - RNA, 22 nt, Human
acagaccccuccccaacuuaag

SEQ ID NO: 1344127 - RNA, 21 nt, Human
aggcagaaacuugucaaccca

SEQ ID NO: 1344128 - RNA, 22 nt, Human
agggucagggaagaggagaagg

SEQ ID NO: 1344129 - RNA, 23 nt, Human
aucuucuuuagacauaaugcuau

SEQ ID NO: 1344130 - RNA, 20 nt, Human
cagaccccuccccaacuuaa

SEQ ID NO: 1344131 - RNA, 19 nt, Human
caguaaagauugaaaccaa

SEQ ID NO: 1344132 - RNA, 21 nt, Human
cccaccgacgcacaacagacc

SEQ ID NO: 1344133 - RNA, 22 nt, Human
cccaccgacgcacaacagaccc

SEQ ID NO: 1344134 - RNA, 18 nt, Human
ccggcagccaggacagcu

SEQ ID NO: 1344135 - RNA, 23 nt, Human
cucccaucuccuggaagcucuac

SEQ ID NO: 1344136 - RNA, 20 nt, Human
cuccuggccguggguuggga

SEQ ID NO: 1344137 - RNA, 23 nt, Human
cucugagggucagggaagaggag

SEQ ID NO: 1344138 - RNA, 23 nt, Human
gaggagaagggacggggaggaga

SEQ ID NO: 1344139 - RNA, 20 nt, Human
gaugggggguggucuccaga

SEQ ID NO: 1344140 - RNA, 21 nt, Human
gcuugugucuuuggucccgga

SEQ ID NO: 1344141 - RNA, 21 nt, Human
ggccguggguugggaggggag

SEQ ID NO: 1344142 - RNA, 18 nt, Human
gggacggggaggagaagg

SEQ ID NO: 1344143 - RNA, 23 nt, Human
ggggaggagaaggaacaggggag

SEQ ID NO: 1344144 - RNA, 22 nt, Human
ggggaugggggguggucuccag

SEQ ID NO: 1344145 - RNA, 20 nt, Human
ggguugggaggggagggugg

SEQ ID NO: 1344146 - RNA, 20 nt, Human
uaagaugcaaacuuacguga

SEQ ID NO: 1344147 - RNA, 24 nt, Human
uaagcccggcagccaggacagcac

SEQ ID NO: 1344148 - RNA, 23 nt, Human
uaaggaaaaaauucauuuaaaaa

SEQ ID NO: 1344149 - RNA, 22 nt, Human
uauuuuaaauggcugagcuggu

SEQ ID NO: 1344150 - RNA, 19 nt, Human
uccaagaaguugugaggag

SEQ ID NO: 1344151 - RNA, 21 nt, Human
ugagggucagggaagaggaga

SEQ ID NO: 1344152 - RNA, 28 nt, Human
ugagggucagggaagaggagaagggacg

SEQ ID NO: 1344153 - RNA, 20 nt, Human
ugcagaaagccaguccugaa

SEQ ID NO: 1344154 - RNA, 20 nt, Human
uggcugagcuggucauuaga

SEQ ID NO: 1344155 - RNA, 21 nt, Human
uggguugggaggggagggugg

SEQ ID NO: 1344156 - RNA, 21 nt, Human
uggguugggaggggagggugg

SEQ ID NO: 1344157 - RNA, 25 nt, Human
uguagcuggucaggggauggggggu

SEQ ID NO: 1344158 - RNA, 20 nt, Human
ugugucuuuggucccggagg

SEQ ID NO: 1344159 - RNA, 18 nt, Human
uugcuuaagcaggcgaca

SEQ ID NO: 1344160 - RNA, 24 nt, Human
aaagugcugggauuacaggcguga

SEQ ID NO: 1344161 - RNA, 25 nt, Human
aagcaauucuccugccucagccucc

SEQ ID NO: 1344162 - RNA, 24 nt, Human
aaguaucugggauuacaggcaugu

SEQ ID NO: 1344163 - RNA, 19 nt, Human
aagugcugggauuacaggc

SEQ ID NO: 1344164 - RNA, 19 nt, Human
aagugcugggauuacaggc

SEQ ID NO: 1344165 - RNA, 26 nt, Human
aagugcugggauuacaggcgugagcc

SEQ ID NO: 1344166 - RNA, 24 nt, Human
aauuuuguauuuuuaguagagaug

SEQ ID NO: 1344167 - RNA, 23 nt, Human
acagcaggcccagcugaaacaag

SEQ ID NO: 1344168 - RNA, 24 nt, Human
accauguuagucagguuggucuug

SEQ ID NO: 1344169 - RNA, 18 nt, Human
accccaaccuccaaaauu

SEQ ID NO: 1344170 - RNA, 18 nt, Human
acuaaggugcccaguggu

SEQ ID NO: 1344171 - RNA, 24 nt, Human
aggcgauccgcccaccuuggccuc

SEQ ID NO: 1344172 - RNA, 18 nt, Human
agugcugggauuacaggc

SEQ ID NO: 1344173 - RNA, 19 nt, Human
augggguuucaccauguua

SEQ ID NO: 1344174 - RNA, 20 nt, Human
augggguuucaccauguuag

SEQ ID NO: 1344175 - RNA, 24 nt, Human
augggguuucaccauguuagucag

SEQ ID NO: 1344176 - RNA, 26 nt, Human
augggguuucaccauguuagucaggu

SEQ ID NO: 1344177 - RNA, 21 nt, Human
auucuccugccucagccuccc

SEQ ID NO: 1344178 - RNA, 21 nt, Human
auuucaucuccuaggccccaa

SEQ ID NO: 1344179 - RNA, 24 nt, Human
caaagugcugggauuacaggcgug

SEQ ID NO: 1344180 - RNA, 23 nt, Human
caaccuccaaaauuaaaaaaaaa

SEQ ID NO: 1344181 - RNA, 23 nt, Human
caaccuccaccuccuggguucaa

SEQ ID NO: 1344182 - RNA, 22 nt, Human
caagcaauucuccugccucagc

SEQ ID NO: 1344183 - RNA, 24 nt, Human
caccauguuagucagguuggucuu

SEQ ID NO: 1344184 - RNA, 21 nt, Human
caccccaaccuccaaaauuaa

SEQ ID NO: 1344185 - RNA, 21 nt, Human
cacugcaaccuccaccuccug

SEQ ID NO: 1344186 - RNA, 23 nt, Human
cacugcaaccuccaccuccuggg

SEQ ID NO: 1344187 - RNA, 23 nt, Human
cagcugaaacaaggaggucucuu

SEQ ID NO: 1344188 - RNA, 19 nt, Human
caugugccaucaugccugg

SEQ ID NO: 1344189 - RNA, 24 nt, Human
cauguuagucagguuggucuugaa

SEQ ID NO: 1344190 - RNA, 22 nt, Human
ccaaagugcugggauuacaggc

SEQ ID NO: 1344191 - RNA, 22 nt, Human
ccaaagugcugggauuacaggc

SEQ ID NO: 1344192 - RNA, 24 nt, Human
ccaaagugcugggauuacaggcgu

SEQ ID NO: 1344193 - RNA, 23 nt, Human
ccaaguaucugggauuacaggca

SEQ ID NO: 1344194 - RNA, 24 nt, Human
ccaaguaucugggauuacaggcau

SEQ ID NO: 1344195 - RNA, 27 nt, Human
ccaccuccuggguucaagcaauucuuu

SEQ ID NO: 1344196 - RNA, 19 nt, Human
cccaaguaucugggauuac

SEQ ID NO: 1344197 - RNA, 24 nt, Human
cccaaguaucugggauuacaggca

SEQ ID NO: 1344198 - RNA, 18 nt, Human
cccagcugaaacaaggag

SEQ ID NO: 1344199 - RNA, 18 nt, Human
cccaguggucagaugagc

SEQ ID NO: 1344200 - RNA, 19 nt, Human
ccuccaccuccuggguuca

SEQ ID NO: 1344201 - RNA, 24 nt, Human
ccuccuggguucaagcaauucucc

SEQ ID NO: 1344202 - RNA, 24 nt, Human
ccugaccucaggcgauccgcccac

SEQ ID NO: 1344203 - RNA, 23 nt, Human
ccuggguucaagcaauucuccug

SEQ ID NO: 1344204 - RNA, 24 nt, Human
cgauccgcccaccuuggccuccca

SEQ ID NO: 1344205 - RNA, 21 nt, Human
cgcccagcgcccgccgcgagc

SEQ ID NO: 1344206 - RNA, 24 nt, Human
cucacugcaaccuccaccuccugg

SEQ ID NO: 1344207 - RNA, 26 nt, Human
cucacugcaaccuccaccuccugggu

SEQ ID NO: 1344208 - RNA, 24 nt, Human
cucaggcgauccgcccaccuuggc

SEQ ID NO: 1344209 - RNA, 23 nt, Human
cuccaaaauuaaaaaaaaaaauc

SEQ ID NO: 1344210 - RNA, 21 nt, Human
cuccuggguucaagcaauucu

SEQ ID NO: 1344211 - RNA, 18 nt, Human
cugcaaccuccaccuccu

SEQ ID NO: 1344212 - RNA, 23 nt, Human
cugcaaccuccaccuccuggguu

SEQ ID NO: 1344213 - RNA, 22 nt, Human
gacagcaggcccagcugaaaca

SEQ ID NO: 1344214 - RNA, 23 nt, Human
gaccucaggcgauccgcccaccu

SEQ ID NO: 1344215 - RNA, 18 nt, Human
gagaugggguuucaccau

SEQ ID NO: 1344216 - RNA, 24 nt, Human
gagaugggguuucaccauguuagu

SEQ ID NO: 1344217 - RNA, 18 nt, Human
gagucggaucccgcccag

SEQ ID NO: 1344218 - RNA, 18 nt, Human
gauuacaggcaugugcca

SEQ ID NO: 1344219 - RNA, 22 nt, Human
gauuacaggcaugugccaucau

SEQ ID NO: 1344220 - RNA, 18 nt, Human
gauuacaggcgugagcca

SEQ ID NO: 1344221 - RNA, 22 nt, Human
gauuacaggcgugagccaccgc

SEQ ID NO: 1344222 - RNA, 22 nt, Human
gauuacaggcgugagccaccgc

SEQ ID NO: 1344223 - RNA, 19 nt, Human
gauugcaccccaaccucca

SEQ ID NO: 1344224 - RNA, 22 nt, Human
gcaaccuccaccuccuggguuc

SEQ ID NO: 1344225 - RNA, 24 nt, Human
ggauuacaggcaugugccaucaug

SEQ ID NO: 1344226 - RNA, 22 nt, Human
gggguuucaccauguuagucag

SEQ ID NO: 1344227 - RNA, 19 nt, Human
ggucuugaacuccugaccu

SEQ ID NO: 1344228 - RNA, 20 nt, Human
ggucuugaacuccugaccuc

SEQ ID NO: 1344229 - RNA, 23 nt, Human
guagagaugggguuucaccaugu

SEQ ID NO: 1344230 - RNA, 22 nt, Human
uaaagauugcaccccaaccucc

SEQ ID NO: 1344231 - RNA, 22 nt, Human
uacaggcaugugccaucaugcc

SEQ ID NO: 1344232 - RNA, 23 nt, Human
uacaggcgugagccaccgcgccc

SEQ ID NO: 1344233 - RNA, 22 nt, Human
uagagaugggguuucaccaugu

SEQ ID NO: 1344234 - RNA, 24 nt, Human
uaguagagaugggguuucaccaug

SEQ ID NO: 1344235 - RNA, 26 nt, Human
uaguagagaugggguuucaccauguu

SEQ ID NO: 1344236 - RNA, 24 nt, Human
uagucagguuggucuugaacuccu

SEQ ID NO: 1344237 - RNA, 19 nt, Human
ucaagcaauucuccugccu

SEQ ID NO: 1344238 - RNA, 23 nt, Human
ucacugcaaccuccaccuccugg

SEQ ID NO: 1344239 - RNA, 24 nt, Human
ucacugcaaccuccaccuccuggg

SEQ ID NO: 1344240 - RNA, 25 nt, Human
ucacugcaaccuccaccuccugggu

SEQ ID NO: 1344241 - RNA, 27 nt, Human
ucacugcaaccuccaccuccuggguuc

SEQ ID NO: 1344242 - RNA, 18 nt, Human
ucaucuccuaggccccaa

SEQ ID NO: 1344243 - RNA, 24 nt, Human
ucccaaagugcugggauuacaggc

SEQ ID NO: 1344244 - RNA, 24 nt, Human
ucccaaguaucugggauuacaggc

SEQ ID NO: 1344245 - RNA, 22 nt, Human
uccuaggccccaaucaaucauc

SEQ ID NO: 1344246 - RNA, 21 nt, Human
uccuggguucaagcaauucuc

SEQ ID NO: 1344247 - RNA, 24 nt, Human
uccuggguucaagcaauucuccug

SEQ ID NO: 1344248 - RNA, 19 nt, Human
ucuccugccucagccuccc

SEQ ID NO: 1344249 - RNA, 23 nt, Human
ucuugaacuccugaccucaggcg

SEQ ID NO: 1344250 - RNA, 22 nt, Human
ucuuugguucagguuggcacua

SEQ ID NO: 1344251 - RNA, 18 nt, Human
ugaaacaaggaggucucu

SEQ ID NO: 1344252 - RNA, 20 nt, Human
ugaaacaaggaggucucuuu

SEQ ID NO: 1344253 - RNA, 18 nt, Human
ugaccucaggcgauccgc

SEQ ID NO: 1344254 - RNA, 21 nt, Human
ugaccucaggcgauccgccca

SEQ ID NO: 1344255 - RNA, 24 nt, Human
ugcaccccaaccuccaaaauuaaa

SEQ ID NO: 1344256 - RNA, 24 nt, Human
ugccucagccucccaaguaucugg

SEQ ID NO: 1344257 - RNA, 24 nt, Human
ugcugggauuacaggcgugagcca

SEQ ID NO: 1344258 - RNA, 24 nt, Human
uggcacgaucucagcucacugcaa

SEQ ID NO: 1344259 - RNA, 18 nt, Human
ugggauuacaggcaugug

SEQ ID NO: 1344260 - RNA, 19 nt, Human
ugggauuacaggcaugugc

SEQ ID NO: 1344261 - RNA, 21 nt, Human
ugggauuacaggcaugugcca

SEQ ID NO: 1344262 - RNA, 21 nt, Human
ugggauuacaggcaugugcca

SEQ ID NO: 1344263 - RNA, 23 nt, Human
ugggauuacaggcaugugccauc

SEQ ID NO: 1344264 - RNA, 24 nt, Human
ugggauuacaggcaugugccauca

SEQ ID NO: 1344265 - RNA, 18 nt, Human
ugggauuacaggcgugag

SEQ ID NO: 1344266 - RNA, 19 nt, Human
ugggauuacaggcgugagc

SEQ ID NO: 1344267 - RNA, 21 nt, Human
ugggauuacaggcgugagcca

SEQ ID NO: 1344268 - RNA, 22 nt, Human
ugggauuacaggcgugagccac

SEQ ID NO: 1344269 - RNA, 23 nt, Human
ugggauuacaggcgugagccacc

SEQ ID NO: 1344270 - RNA, 24 nt, Human
ugggauuacaggcgugagccaccg

SEQ ID NO: 1344271 - RNA, 24 nt, Human
ugggguuucaccauguuagucagg

SEQ ID NO: 1344272 - RNA, 21 nt, Human
uggguucaagcaauucuccug

SEQ ID NO: 1344273 - RNA, 23 nt, Human
uggguucaagcaauucuccugcc

SEQ ID NO: 1344274 - RNA, 24 nt, Human
uggguucaagcaauucuccugccu

SEQ ID NO: 1344275 - RNA, 21 nt, Human
uguauuuuuaguagagauggg

SEQ ID NO: 1344276 - RNA, 20 nt, Human
uguucccacaacccacugca

SEQ ID NO: 1344277 - RNA, 26 nt, Human
uguucccacaacccacugcaccuggg

SEQ ID NO: 1344278 - RNA, 22 nt, Human
uuaaggcauauucuaaagauug

SEQ ID NO: 1344279 - RNA, 18 nt, Human
uuaguagagaugggguuu

SEQ ID NO: 1344280 - RNA, 22 nt, Human
uuaguagagaugggguuucacc

SEQ ID NO: 1344281 - RNA, 24 nt, Human
uuaguagagaugggguuucaccau

SEQ ID NO: 1344282 - RNA, 21 nt, Human
uucaagcaauucuccugccuc

SEQ ID NO: 1344283 - RNA, 24 nt, Human
uucaagcaauucuccugccucagc

SEQ ID NO: 1344284 - RNA, 18 nt, Human
uucccacaacccacugca

SEQ ID NO: 1344285 - RNA, 23 nt, Human
uuguauuuuuaguagagaugggg

SEQ ID NO: 1344286 - RNA, 19 nt, Human
uuucaccauguuagucagg

SEQ ID NO: 1344287 - RNA, 23 nt, Human
uuucagggguggggaacacuuua

SEQ ID NO: 1344288 - RNA, 19 nt, Human
uuuuguauuuuuaguagag

SEQ ID NO: 1344289 - RNA, 20 nt, Human
uuuuguauuuuuaguagaga

SEQ ID NO: 1344290 - RNA, 24 nt, Human
uuuuuaguagagaugggguuucac

SEQ ID NO: 1344291 - RNA, 23 nt, Human
uuuuucuuugguccuuuuauccu

SEQ ID NO: 1344292 - RNA, 23 nt, Human
uuuuuuuucagggguggggaaca

SEQ ID NO: 1344293 - RNA, 19 nt, Human
uuuuuuuuuuuucaggggu

SEQ ID NO: 1344294 - RNA, 20 nt, Human
uuuuuuuuuuuuuucagggg

SEQ ID NO: 1344295 - RNA, 24 nt, Human
uuuuuuuuuuuuuuucaggggugg

SEQ ID NO: 1344296 - RNA, 25 nt, Human
uuuuuuuuuuuuuuuuuuuucaggg

SEQ ID NO: 1344297 - RNA, 19 nt, Human
aaaaaccagaaacaacuuc

SEQ ID NO: 1344298 - RNA, 21 nt, Human
aaacaaaugucucaggucaaa

SEQ ID NO: 1344299 - RNA, 21 nt, Human
aaacaccaacaguacccacuu

SEQ ID NO: 1344300 - RNA, 22 nt, Human
aaacauucauagccccuucccc

SEQ ID NO: 1344301 - RNA, 23 nt, Human
aaacauucauagccccuuccccu

SEQ ID NO: 1344302 - RNA, 18 nt, Human
aaagcacugcugggcccu

SEQ ID NO: 1344303 - RNA, 22 nt, Human
aaaggagacaggaaaagcugcc

SEQ ID NO: 1344304 - RNA, 19 nt, Human
aacacagugaagcccuguc

SEQ ID NO: 1344305 - RNA, 20 nt, Human
aacacagugaagcccugucu

SEQ ID NO: 1344306 - RNA, 21 nt, Human
aacacagugaagcccugucuc

SEQ ID NO: 1344307 - RNA, 24 nt, Human
aaccugggugacagagcgagacuc

SEQ ID NO: 1344308 - RNA, 20 nt, Human
aagaggagcagagcaugaua

SEQ ID NO: 1344309 - RNA, 19 nt, Human
aagaggcagaaacaucugc

SEQ ID NO: 1344310 - RNA, 23 nt, Human
aagcugcugagugagugacagcu

SEQ ID NO: 1344311 - RNA, 22 nt, Human
aaggagacaggaaaagcugcca

SEQ ID NO: 1344312 - RNA, 18 nt, Human
aaucaguggaacugauaa

SEQ ID NO: 1344313 - RNA, 24 nt, Human
aauggcgugaacccaggaggcaga

SEQ ID NO: 1344314 - RNA, 23 nt, Human
acaaaacagcaagagcacagguc

SEQ ID NO: 1344315 - RNA, 20 nt, Human
acaagccccaaaaaaccagg

SEQ ID NO: 1344316 - RNA, 20 nt, Human
acacaagccccaaaaaacca

SEQ ID NO: 1344317 - RNA, 24 nt, Human
acagagcgagacuccgucucaaaa

SEQ ID NO: 1344318 - RNA, 23 nt, Human
acaggaaaagcugccacuggagg

SEQ ID NO: 1344319 - RNA, 24 nt, Human
acccaagagccuuccugggcucuc

SEQ ID NO: 1344320 - RNA, 23 nt, Human
accugggugacagagcgagacuc

SEQ ID NO: 1344321 - RNA, 22 nt, Human
acgccacugcacuccaaccugg

SEQ ID NO: 1344322 - RNA, 28 nt, Human
acuccgucucaaaaaaaaaaaaaaaaaa

SEQ ID NO: 1344323 - RNA, 18 nt, Human
acugcacuccaaccuggg

SEQ ID NO: 1344324 - RNA, 24 nt, Human
acugcacuccaaccugggugacag

SEQ ID NO: 1344325 - RNA, 23 nt, Human
acuucacaggggagaaaaccagc

SEQ ID NO: 1344326 - RNA, 23 nt, Human
agagcuugcagugagccgagauc

SEQ ID NO: 1344327 - RNA, 25 nt, Human
agaggagcagagcaugauaaagcua

SEQ ID NO: 1344328 - RNA, 20 nt, Human
agcaagacuguugcagaaga

SEQ ID NO: 1344329 - RNA, 24 nt, Human
agcacuuugggaggccgagguggg

SEQ ID NO: 1344330 - RNA, 18 nt, Human
agcugcugagugagugac

SEQ ID NO: 1344331 - RNA, 21 nt, Human
agcugcugagugagugacagc

SEQ ID NO: 1344332 - RNA, 21 nt, Human
agcuuggccaacccaagagcc

SEQ ID NO: 1344333 - RNA, 19 nt, Human
aggagggugauugcugggc

SEQ ID NO: 1344334 - RNA, 21 nt, Human
aggcagagcuugcagugagcc

SEQ ID NO: 1344335 - RNA, 24 nt, Human
aggcagagcuugcagugagccgag

SEQ ID NO: 1344336 - RNA, 21 nt, Human
aggcaggagaauggcgugaac

SEQ ID NO: 1344337 - RNA, 24 nt, Human
aggcaggagaauggcgugaaccca

SEQ ID NO: 1344338 - RNA, 27 nt, Human
aggcaggagaauggcgugaacccagga

SEQ ID NO: 1344339 - RNA, 19 nt, Human
aggcagguggccagaugag

SEQ ID NO: 1344340 - RNA, 25 nt, Human
aggcagguggccagaugaggucaga

SEQ ID NO: 1344341 - RNA, 21 nt, Human
aggccgaggugggcggaucac

SEQ ID NO: 1344342 - RNA, 22 nt, Human
aggccuugugcugggcaccgua

SEQ ID NO: 1344343 - RNA, 24 nt, Human
aggcgcaguggcucacaucuguaa

SEQ ID NO: 1344344 - RNA, 19 nt, Human
aggcugaggcaggagaaug

SEQ ID NO: 1344345 - RNA, 24 nt, Human
aggugggcggaucacgaggucagg

SEQ ID NO: 1344346 - RNA, 24 nt, Human
aggugugguggcgggcaccuguag

SEQ ID NO: 1344347 - RNA, 22 nt, Human
agugagugacagcugggcacaa

SEQ ID NO: 1344348 - RNA, 24 nt, Human
aguggcucacaucuguaaucccag

SEQ ID NO: 1344349 - RNA, 19 nt, Human
aucaaacaccaacaguacc

SEQ ID NO: 1344350 - RNA, 24 nt, Human
aucacgccacugcacuccaaccug

SEQ ID NO: 1344351 - RNA, 19 nt, Human
auccagcucuucucuuuca

SEQ ID NO: 1344352 - RNA, 19 nt, Human
caaaaaaccaggcccugca

SEQ ID NO: 1344353 - RNA, 23 nt, Human
caaaacagcaagagcacaggucc

SEQ ID NO: 1344354 - RNA, 21 nt, Human
caaaacuucuaaagaugcaaa

SEQ ID NO: 1344355 - RNA, 24 nt, Human
caaacacaagcaguauacauacca

SEQ ID NO: 1344356 - RNA, 22 nt, Human
caaagcagcucuuucuggagac

SEQ ID NO: 1344357 - RNA, 22 nt, Human
caacaguacccacuugugccag

SEQ ID NO: 1344358 - RNA, 20 nt, Human
caacccaaacacaagcagua

SEQ ID NO: 1344359 - RNA, 19 nt, Human
caagccccaaaaaaccagg

SEQ ID NO: 1344360 - RNA, 22 nt, Human
cacacaggggcaaggaaaaacc

SEQ ID NO: 1344361 - RNA, 24 nt, Human
cacaucuguaaucccagcacuuug

SEQ ID NO: 1344362 - RNA, 23 nt, Human
caccaacaguacccacuugugcc

SEQ ID NO: 1344363 - RNA, 22 nt, Human
caccacacaagccccaaaaaac

SEQ ID NO: 1344364 - RNA, 23 nt, Human
caccuguaguaccagcuacuugg

SEQ ID NO: 1344365 - RNA, 24 nt, Human
caccuguaguaccagcuacuuggg

SEQ ID NO: 1344366 - RNA, 23 nt, Human
cacuccaaccugggugacagagc

SEQ ID NO: 1344367 - RNA, 24 nt, Human
cacuccaaccugggugacagagcg

SEQ ID NO: 1344368 - RNA, 19 nt, Human
cacugcacuccaaccuggg

SEQ ID NO: 1344369 - RNA, 24 nt, Human
cacugcacuccaaccugggugaca

SEQ ID NO: 1344370 - RNA, 22 nt, Human
cacuugugccaggccuugugcu

SEQ ID NO: 1344371 - RNA, 18 nt, Human
cagaugaggucagagcuc

SEQ ID NO: 1344372 - RNA, 24 nt, Human
cagcacuuugggaggccgaggugg

SEQ ID NO: 1344373 - RNA, 22 nt, Human
cagcagccugaccucuacaucu

SEQ ID NO: 1344374 - RNA, 22 nt, Human
cagcaguagcccauguguuggc

SEQ ID NO: 1344375 - RNA, 20 nt, Human
cagcccaaaggagcagucaa

SEQ ID NO: 1344376 - RNA, 18 nt, Human
cagcccaagaggcugccc

SEQ ID NO: 1344377 - RNA, 20 nt, Human
cagcccaggcuucccagcag

SEQ ID NO: 1344378 - RNA, 24 nt, Human
cagcuacuugggaggcugaggcag

SEQ ID NO: 1344379 - RNA, 22 nt, Human
cagcugggcacaaagugucuug

SEQ ID NO: 1344380 - RNA, 18 nt, Human
caggccaucuggaggagc

SEQ ID NO: 1344381 - RNA, 21 nt, Human
caggcccugcagagccaugac

SEQ ID NO: 1344382 - RNA, 24 nt, Human
caggcuucccagcaguagcccaug

SEQ ID NO: 1344383 - RNA, 21 nt, Human
cauaagauuuuccgugcccug

SEQ ID NO: 1344384 - RNA, 23 nt, Human
caucuguaaucccagcacuuugg

SEQ ID NO: 1344385 - RNA, 24 nt, Human
caucuguaaucccagcacuuuggg

SEQ ID NO: 1344386 - RNA, 24 nt, Human
ccaacaguacccacuugugccagg

SEQ ID NO: 1344387 - RNA, 20 nt, Human
ccaccuucuggcuuuguagc

SEQ ID NO: 1344388 - RNA, 20 nt, Human
ccacugcacuccaaccuggg

SEQ ID NO: 1344389 - RNA, 20 nt, Human
ccacugcacuccaaccuggg

SEQ ID NO: 1344390 - RNA, 24 nt, Human
ccacugcacuccaaccugggugac

SEQ ID NO: 1344391 - RNA, 18 nt, Human
ccagcccaagaggcugcc

SEQ ID NO: 1344392 - RNA, 22 nt, Human
cccaaaggagcagucaagggcc

SEQ ID NO: 1344393 - RNA, 18 nt, Human
ccccaaaaaaccaggccc

SEQ ID NO: 1344394 - RNA, 19 nt, Human
cccccuccuccucucucuu

SEQ ID NO: 1344395 - RNA, 22 nt, Human
cccccuccuccucucucuuucc

SEQ ID NO: 1344396 - RNA, 23 nt, Human
ccccuccuccucucucuuuccua

SEQ ID NO: 1344397 - RNA, 23 nt, Human
cccugucucuacuaaaaauacaa

SEQ ID NO: 1344398 - RNA, 22 nt, Human
ccuggcuaacacagugaagccc

SEQ ID NO: 1344399 - RNA, 21 nt, Human
ccuguaguaccagcuacuugg

SEQ ID NO: 1344400 - RNA, 24 nt, Human
cgagaccauccuggcuaacacagu

SEQ ID NO: 1344401 - RNA, 19 nt, Human
cgagaucacgccacugcac

SEQ ID NO: 1344402 - RNA, 24 nt, Human
cgaggugggcggaucacgagguca

SEQ ID NO: 1344403 - RNA, 26 nt, Human
cgccacugcacuccaaccugggugac

SEQ ID NO: 1344404 - RNA, 24 nt, Human
cggccaggcgcaguggcucacauc

SEQ ID NO: 1344405 - RNA, 21 nt, Human
cgggcaccuguaguaccagcu

SEQ ID NO: 1344406 - RNA, 18 nt, Human
cucaaaaaaaaaaaaaaa

SEQ ID NO: 1344407 - RNA, 24 nt, Human
cucacaucuguaaucccagcacuu

SEQ ID NO: 1344408 - RNA, 19 nt, Human
cuccgucucaaaaaaaaaa

SEQ ID NO: 1344409 - RNA, 23 nt, Human
cucucuccaaguccuuccuuuaa

SEQ ID NO: 1344410 - RNA, 19 nt, Human
cuggagaccuccuguggag

SEQ ID NO: 1344411 - RNA, 18 nt, Human
cuggcuaacacagugaag

SEQ ID NO: 1344412 - RNA, 24 nt, Human
cuggcuaacacagugaagcccugu

SEQ ID NO: 1344413 - RNA, 19 nt, Human
cuugcagugagccgagauc

SEQ ID NO: 1344414 - RNA, 30 nt, Human
gaacauguauacaaacauucauagccccuu

SEQ ID NO: 1344415 - RNA, 19 nt, Human
gaagcccugucucuacuaa

SEQ ID NO: 1344416 - RNA, 21 nt, Human
gacagagcgagacuccgucuc

SEQ ID NO: 1344417 - RNA, 24 nt, Human
gacagagcgagacuccgucucaaa

SEQ ID NO: 1344418 - RNA, 26 nt, Human
gagaaaauaggagaacgaacaccagc

SEQ ID NO: 1344419 - RNA, 22 nt, Human
gagcuuggccaacccaagagcc

SEQ ID NO: 1344420 - RNA, 26 nt, Human
gaggguccccucuucuacccuuggga

SEQ ID NO: 1344421 - RNA, 22 nt, Human
gcaaggaaaaaccagaaacaac

SEQ ID NO: 1344422 - RNA, 21 nt, Human
gcagagcaugauaaagcuaca

SEQ ID NO: 1344423 - RNA, 22 nt, Human
gcaggagaauggcgugaaccca

SEQ ID NO: 1344424 - RNA, 24 nt, Human
gccacugcacuccaaccuggguga

SEQ ID NO: 1344425 - RNA, 19 nt, Human
gccaggugugguggcgggc

SEQ ID NO: 1344426 - RNA, 24 nt, Human
gccccaaaaaaccaggcccugcag

SEQ ID NO: 1344427 - RNA, 18 nt, Human
gcccugugaacauguaua

SEQ ID NO: 1344428 - RNA, 20 nt, Human
gccgagaucacgccacugca

SEQ ID NO: 1344429 - RNA, 24 nt, Human
gcuaacacagugaagcccugucuc

SEQ ID NO: 1344430 - RNA, 18 nt, Human
gcucagccaccuucuggc

SEQ ID NO: 1344431 - RNA, 22 nt, Human
gcugaggcaggagaauggcgug

SEQ ID NO: 1344432 - RNA, 22 nt, Human
gcugguucagcagccugaccuc

SEQ ID NO: 1344433 - RNA, 23 nt, Human
ggaaauauauaauccagcucuuc

SEQ ID NO: 1344434 - RNA, 21 nt, Human
ggagaaaaccagcccaagagg

SEQ ID NO: 1344435 - RNA, 21 nt, Human
ggccaggcgcaguggcucaca

SEQ ID NO: 1344436 - RNA, 21 nt, Human
ggcggaucacgaggucaggag

SEQ ID NO: 1344437 - RNA, 20 nt, Human
gggaggccgaggugggcgga

SEQ ID NO: 1344438 - RNA, 18 nt, Human
gggcaagucaugaggucc

SEQ ID NO: 1344439 - RNA, 21 nt, Human
gggcaucugagucaugcaugg

SEQ ID NO: 1344440 - RNA, 18 nt, Human
gucacuggggagcccugg

SEQ ID NO: 1344441 - RNA, 21 nt, Human
uaacacagugaagcccugucu

SEQ ID NO: 1344442 - RNA, 22 nt, Human
uaacacagugaagcccugucuc

SEQ ID NO: 1344443 - RNA, 24 nt, Human
uaacacagugaagcccugucucua

SEQ ID NO: 1344444 - RNA, 21 nt, Human
uaauggucaccacacaagccc

SEQ ID NO: 1344445 - RNA, 22 nt, Human
uacaaaaguagggggcaaguca

SEQ ID NO: 1344446 - RNA, 24 nt, Human
uacauacaaaccuuggcccagccc

SEQ ID NO: 1344447 - RNA, 19 nt, Human
uaccuuaagggucaaugag

SEQ ID NO: 1344448 - RNA, 18 nt, Human
uauacaaacauucauagc

SEQ ID NO: 1344449 - RNA, 25 nt, Human
uauacaaacauucauagccccuucc

SEQ ID NO: 1344450 - RNA, 22 nt, Human
ucaaaaaaaaaaaaaaaaaaaa

SEQ ID NO: 1344451 - RNA, 23 nt, Human
ucaaaaaaaaaaaaaaaaaaaaa

SEQ ID NO: 1344452 - RNA, 22 nt, Human
ucaaacaccaacaguacccacu

SEQ ID NO: 1344453 - RNA, 20 nt, Human
ucaacccaaacacaagcagu

SEQ ID NO: 1344454 - RNA, 24 nt, Human
ucacgaggucaggagagcgagacc

SEQ ID NO: 1344455 - RNA, 23 nt, Human
ucacgccacugcacuccaaccug

SEQ ID NO: 1344456 - RNA, 18 nt, Human
ucagcccugcucugcugc

SEQ ID NO: 1344457 - RNA, 24 nt, Human
ucauaucaggccaucuggaggagc

SEQ ID NO: 1344458 - RNA, 24 nt, Human
uccaaccugggugacagagcgaga

SEQ ID NO: 1344459 - RNA, 24 nt, Human
uccccucagcccugcucugcugca

SEQ ID NO: 1344460 - RNA, 23 nt, Human
uccgucucaaaaaaaaaaaaaaa

SEQ ID NO: 1344461 - RNA, 22 nt, Human
ucucuacuaaaaauacaaaaaa

SEQ ID NO: 1344462 - RNA, 20 nt, Human
ucugcggccaggcgcagugg

SEQ ID NO: 1344463 - RNA, 19 nt, Human
ucuugugagaccagcuaua

SEQ ID NO: 1344464 - RNA, 21 nt, Human
ugaaacaaaugucucagguca

SEQ ID NO: 1344465 - RNA, 24 nt, Human
ugaaacaaccccccacagugggga

SEQ ID NO: 1344466 - RNA, 20 nt, Human
ugaaggacauggaaagagga

SEQ ID NO: 1344467 - RNA, 21 nt, Human
ugaaggacauggaaagaggag

SEQ ID NO: 1344468 - RNA, 22 nt, Human
ugagccgagaucacgccacugc

SEQ ID NO: 1344469 - RNA, 24 nt, Human
ugagcuacagagaaaaagagccaa

SEQ ID NO: 1344470 - RNA, 19 nt, Human
ugaggagggugauugcugg

SEQ ID NO: 1344471 - RNA, 24 nt, Human
ugaggcaggagaauggcgugaacc

SEQ ID NO: 1344472 - RNA, 25 nt, Human
ugaggcaggagaauggcgugaaccc

SEQ ID NO: 1344473 - RNA, 21 nt, Human
uggaagaaagaugguuugcuc

SEQ ID NO: 1344474 - RNA, 19 nt, Human
uggaaggaguaagacacag

SEQ ID NO: 1344475 - RNA, 21 nt, Human
uggagaccuccuguggagggu

SEQ ID NO: 1344476 - RNA, 21 nt, Human
uggcucacaucuguaauccca

SEQ ID NO: 1344477 - RNA, 22 nt, Human
uggcucacaucuguaaucccag

SEQ ID NO: 1344478 - RNA, 24 nt, Human
uggcucacaucuguaaucccagca

SEQ ID NO: 1344479 - RNA, 19 nt, Human
ugggaggccgaggugggcg

SEQ ID NO: 1344480 - RNA, 24 nt, Human
ugggaggccgaggugggcggauca

SEQ ID NO: 1344481 - RNA, 18 nt, Human
ugggaggcugaggcagga

SEQ ID NO: 1344482 - RNA, 24 nt, Human
ugggaggcugaggcaggagaaugg

SEQ ID NO: 1344483 - RNA, 25 nt, Human
ugugcucguucauucacuuguucau

SEQ ID NO: 1344484 - RNA, 24 nt, Human
uguuaaaacaugacacagaugggu

SEQ ID NO: 1344485 - RNA, 18 nt, Human
uugcagugagccgagauc

SEQ ID NO: 1344486 - RNA, 20 nt, Human
uugcagugagccgagaucac

SEQ ID NO: 1344487 - RNA, 21 nt, Human
uugcagugagccgagaucacg

SEQ ID NO: 1344488 - RNA, 23 nt, Human
uugcgagggaguaggaaaugaag

SEQ ID NO: 1344489 - RNA, 21 nt, Human
uuggcccagcccaaaggagca

SEQ ID NO: 1344490 - RNA, 25 nt, Human
uugggaggccgaggugggcggauca

SEQ ID NO: 1344491 - RNA, 24 nt, Human
uuucccccuccuccucucucuuuc

SEQ ID NO: 1344492 - RNA, 18 nt, Human
aaacccagaagaaucaag

SEQ ID NO: 1344493 - RNA, 23 nt, Human
aaaucuauugccugcaccaaacc

SEQ ID NO: 1344494 - RNA, 21 nt, Human
aagcaaugucauaaagucaaa

SEQ ID NO: 1344495 - RNA, 19 nt, Human
aagccaccacaaaaaaaug

SEQ ID NO: 1344496 - RNA, 19 nt, Human
aauccaacaacucaagucu

SEQ ID NO: 1344497 - RNA, 18 nt, Human
acugcacugacuuaccaa

SEQ ID NO: 1344498 - RNA, 23 nt, Human
agauaggaaguggucuuuaggga

SEQ ID NO: 1344499 - RNA, 21 nt, Human
agccaaaagguccucacagaa

SEQ ID NO: 1344500 - RNA, 24 nt, Human
agcucagcaccaguggcggcuguc

SEQ ID NO: 1344501 - RNA, 24 nt, Human
aggaaaugucagaaaggcaaaaug

SEQ ID NO: 1344502 - RNA, 23 nt, Human
aguggcccaauuguuuccagugu

SEQ ID NO: 1344503 - RNA, 22 nt, Human
aucaagcuguuccuuuaaaagu

SEQ ID NO: 1344504 - RNA, 21 nt, Human
aucagccgccuucugcuucaa

SEQ ID NO: 1344505 - RNA, 21 nt, Human
auggucuuauugugggagggg

SEQ ID NO: 1344506 - RNA, 23 nt, Human
auuacuuaaguaacuaccacuca

SEQ ID NO: 1344507 - RNA, 23 nt, Human
auuuucuccuuugcaaucaagcu

SEQ ID NO: 1344508 - RNA, 19 nt, Human
caaaauggccagcauuauc

SEQ ID NO: 1344509 - RNA, 22 nt, Human
caaacauaaugagcacaaucuu

SEQ ID NO: 1344510 - RNA, 19 nt, Human
caagacggggagguaaagc

SEQ ID NO: 1344511 - RNA, 23 nt, Human
cacccugaaaucuuaugaguagc

SEQ ID NO: 1344512 - RNA, 18 nt, Human
caccuuuacuuggaaagu

SEQ ID NO: 1344513 - RNA, 23 nt, Human
cacuaguacuacaaggcuuaaca

SEQ ID NO: 1344514 - RNA, 21 nt, Human
cagaggaaaacaacagaaugu

SEQ ID NO: 1344515 - RNA, 21 nt, Human
cagaugucacucauaaguuuu

SEQ ID NO: 1344516 - RNA, 19 nt, Human
cagcacuccacaaacauaa

SEQ ID NO: 1344517 - RNA, 21 nt, Human
cagcauuauccauuugcuuuu

SEQ ID NO: 1344518 - RNA, 20 nt, Human
cagcucagcaccaguggcgg

SEQ ID NO: 1344519 - RNA, 19 nt, Human
caggggcuuccuagcagcu

SEQ ID NO: 1344520 - RNA, 22 nt, Human
cagguuuugcauacugagaaca

SEQ ID NO: 1344521 - RNA, 21 nt, Human
cauaagaauauggaaggauuc

SEQ ID NO: 1344522 - RNA, 18 nt, Human
ccagcauuauccauuugc

SEQ ID NO: 1344523 - RNA, 25 nt, Human
ccucuaauccaacaacucaagucug

SEQ ID NO: 1344524 - RNA, 28 nt, Human
ccugcaccaaaccaauucugacagcacc

SEQ ID NO: 1344525 - RNA, 19 nt, Human
cgccuucugcuucaacaac

SEQ ID NO: 1344526 - RNA, 19 nt, Human
cucacagaagcuuuaaccc

SEQ ID NO: 1344527 - RNA, 24 nt, Human
cuccaaccacccucuaauagcuag

SEQ ID NO: 1344528 - RNA, 23 nt, Human
cugggauuuugguccaaaguuuu

SEQ ID NO: 1344529 - RNA, 23 nt, Human
cuguguaaaggaccacgagaacc

SEQ ID NO: 1344530 - RNA, 24 nt, Human
cuuaugcaacugcacugacuuacc

SEQ ID NO: 1344531 - RNA, 23 nt, Human
gaaccuccugacuaccuccacuu

SEQ ID NO: 1344532 - RNA, 23 nt, Human
gauuucaguuagaaaacacccug

SEQ ID NO: 1344533 - RNA, 18 nt, Human
gcgggaaccucgccuccc

SEQ ID NO: 1344534 - RNA, 23 nt, Human
gcuuaucuauuuucuccuuugca

SEQ ID NO: 1344535 - RNA, 23 nt, Human
ggaaaauuacuuucuuuugccac

SEQ ID NO: 1344536 - RNA, 20 nt, Human
ggaugcuuuuuaagguaugg

SEQ ID NO: 1344537 - RNA, 28 nt, Human
ggugagucggaggggugacaguggguca

SEQ ID NO: 1344538 - RNA, 21 nt, Human
gucugugauuaguaguagucu

SEQ ID NO: 1344539 - RNA, 20 nt, Human
guggaaugcugauagauuca

SEQ ID NO: 1344540 - RNA, 24 nt, Human
uaaacaaaaugaaacccaaagcug

SEQ ID NO: 1344541 - RNA, 22 nt, Human
uaaacauguuuuacuuuuuucc

SEQ ID NO: 1344542 - RNA, 22 nt, Human
uaaaggaccacgagaaccuccu

SEQ ID NO: 1344543 - RNA, 22 nt, Human
uaacccaaguaaucauaagaau

SEQ ID NO: 1344544 - RNA, 19 nt, Human
uacaacaaaaaaaauuaga

SEQ ID NO: 1344545 - RNA, 22 nt, Human
uacugggugaauagcacuuucc

SEQ ID NO: 1344546 - RNA, 24 nt, Human
uacugggugaauagcacuuuccuu

SEQ ID NO: 1344547 - RNA, 23 nt, Human
uagcuaaacaaaaugaaacccaa

SEQ ID NO: 1344548 - RNA, 26 nt, Human
uagcuaaacaaaaugaaacccaaagc

SEQ ID NO: 1344549 - RNA, 19 nt, Human
uaggaaguuggagauaaau

SEQ ID NO: 1344550 - RNA, 18 nt, Human
uaggaggacugaaccgcg

SEQ ID NO: 1344551 - RNA, 22 nt, Human
uaggauaucuuaagagccaaaa

SEQ ID NO: 1344552 - RNA, 22 nt, Human
uaggcagaaugauucaucucuc

SEQ ID NO: 1344553 - RNA, 24 nt, Human
uauaaaacaauacagcaaaagaaa

SEQ ID NO: 1344554 - RNA, 23 nt, Human
ucaauacaaaacauuccaaaaag

SEQ ID NO: 1344555 - RNA, 21 nt, Human
ucagcaccaguggcggcuguc

SEQ ID NO: 1344556 - RNA, 24 nt, Human
ucaguuagaaaacacccugaaauc

SEQ ID NO: 1344557 - RNA, 18 nt, Human
ucaguuaggaggacugaa

SEQ ID NO: 1344558 - RNA, 21 nt, Human
uccaaaaagugaaaagugauc

SEQ ID NO: 1344559 - RNA, 21 nt, Human
uccugagauccacaggaaccc

SEQ ID NO: 1344560 - RNA, 27 nt, Human
uccuuugcaaucaagcuguuccuuuuc

SEQ ID NO: 1344561 - RNA, 20 nt, Human
ucuacaacuaaacuguuugu

SEQ ID NO: 1344562 - RNA, 22 nt, Human
ugaaagaguaagagcaagcacc

SEQ ID NO: 1344563 - RNA, 24 nt, Human
ugacuuaccaacaaucagccgccu

SEQ ID NO: 1344564 - RNA, 18 nt, Human
ugagaacagugagauuuc

SEQ ID NO: 1344565 - RNA, 18 nt, Human
ugaguagcauacuccaac

SEQ ID NO: 1344566 - RNA, 26 nt, Human
ugcaccaaaccaauucugacagcacu

SEQ ID NO: 1344567 - RNA, 21 nt, Human
ugcuucaacaacucuuagcau

SEQ ID NO: 1344568 - RNA, 20 nt, Human
uggaaaguuacaacacuagu

SEQ ID NO: 1344569 - RNA, 24 nt, Human
uggaaaguuacaacacuaguacua

SEQ ID NO: 1344570 - RNA, 24 nt, Human
uggaagaucuuagaauugcuugcc

SEQ ID NO: 1344571 - RNA, 22 nt, Human
uggaaggauucggcuaagacaa

SEQ ID NO: 1344572 - RNA, 18 nt, Human
uggaaugcugauagauuc

SEQ ID NO: 1344573 - RNA, 25 nt, Human
uggaaugcugauagauucacuuuuu

SEQ ID NO: 1344574 - RNA, 21 nt, Human
uggauaagccaccacaaaaaa

SEQ ID NO: 1344575 - RNA, 21 nt, Human
uggcagaggaaaacaacagaa

SEQ ID NO: 1344576 - RNA, 18 nt, Human
uggcuagauguuuugugg

SEQ ID NO: 1344577 - RNA, 24 nt, Human
uggcuagauguuuuguggaagauc

SEQ ID NO: 1344578 - RNA, 21 nt, Human
uggcucuagucuccaaagcaa

SEQ ID NO: 1344579 - RNA, 20 nt, Human
uggguaguuaugauagaaua

SEQ ID NO: 1344580 - RNA, 20 nt, Human
uggguuuacugggugaauag

SEQ ID NO: 1344581 - RNA, 21 nt, Human
ugucagaaaggcaaaauggcc

SEQ ID NO: 1344582 - RNA, 22 nt, Human
ugucagaaaggcaaaauggcca

SEQ ID NO: 1344583 - RNA, 26 nt, Human
uguggaaugcugauagauucacuuuu

SEQ ID NO: 1344584 - RNA, 22 nt, Human
uguuguacuuacuaucccuagg

SEQ ID NO: 1344585 - RNA, 22 nt, Human
uuaaaagugagacauuagaguu

SEQ ID NO: 1344586 - RNA, 18 nt, Human
uuagaaaacacccugaaa

SEQ ID NO: 1344587 - RNA, 23 nt, Human
uuagaaaacacccugaaaucuua

SEQ ID NO: 1344588 - RNA, 24 nt, Human
uuaguaguagucugccaaaugaga

SEQ ID NO: 1344589 - RNA, 24 nt, Human
uuaguuccucuaauccaacaacuc

SEQ ID NO: 1344590 - RNA, 26 nt, Human
uucaagcuccaacaagcucgccgacc

SEQ ID NO: 1344591 - RNA, 24 nt, Human
uuccuagcagcucagcaccagugg

SEQ ID NO: 1344592 - RNA, 22 nt, Human
uucuauguucaacuaccacuua

SEQ ID NO: 1344593 - RNA, 19 nt, Human
uugcaaucaagcuguuccu

SEQ ID NO: 1344594 - RNA, 25 nt, Human
uuggaaaguuacaacacuaguacua

SEQ ID NO: 1344595 - RNA, 21 nt, Human
uuuaggauaucuuaagagcca

SEQ ID NO: 1344596 - RNA, 19 nt, Human
uuucacaggcauuugaugc

SEQ ID NO: 1344597 - RNA, 20 nt, Human
uuucaguuagaaaacacccu

SEQ ID NO: 1344598 - RNA, 24 nt, Human
uuugcuuguugaaaagcaauguca

SEQ ID NO: 1344599 - RNA, 21 nt, Human
uuuggucauuacccuuguggu

SEQ ID NO: 1344600 - RNA, 24 nt, Human
uuuuguggaagaucuuagaauugc

SEQ ID NO: 1344601 - RNA, 24 nt, Human
uuuuuuuuuugccggugagucgga

SEQ ID NO: 1344602 - RNA, 19 nt, Human
uuuuuuuuuuuuuuugcca

SEQ ID NO: 1344603 - RNA, 22 nt, Human
aaacaaaccugaacucguccac

SEQ ID NO: 1344604 - RNA, 18 nt, Human
aacaaaauuagucacuuu

SEQ ID NO: 1344605 - RNA, 19 nt, Human
aacauggccaacuccuccu

SEQ ID NO: 1344606 - RNA, 18 nt, Human
aacugcauggacccuccc

SEQ ID NO: 1344607 - RNA, 25 nt, Human
aacugcauggacccucccagacccu

SEQ ID NO: 1344608 - RNA, 23 nt, Human
aagaaaccggcaaaaccgagaac

SEQ ID NO: 1344609 - RNA, 20 nt, Human
aagcagacaaccacguaugg

SEQ ID NO: 1344610 - RNA, 25 nt, Human
aagcagacaaccacguauggcuucg

SEQ ID NO: 1344611 - RNA, 19 nt, Human
aaggcaagcugcugguguu

SEQ ID NO: 1344612 - RNA, 23 nt, Human
aauguuaaaaaaaauuaugugcc

SEQ ID NO: 1344613 - RNA, 26 nt, Human
acaguaaagaacuaaaaggucuacac

SEQ ID NO: 1344614 - RNA, 21 nt, Human
acccucccagacccugcucug

SEQ ID NO: 1344615 - RNA, 21 nt, Human
acucguccacccucucagccc

SEQ ID NO: 1344616 - RNA, 20 nt, Human
agaaaccggcaaaaccgaga

SEQ ID NO: 1344617 - RNA, 23 nt, Human
agaacgacggaaucugcugcaaa

SEQ ID NO: 1344618 - RNA, 20 nt, Human
agacucaguaagaacgacgg

SEQ ID NO: 1344619 - RNA, 18 nt, Human
agcauccgugguccuggu

SEQ ID NO: 1344620 - RNA, 22 nt, Human
agcccguggcccaggaggcccc

SEQ ID NO: 1344621 - RNA, 20 nt, Human
aggucguuuuucuucauguu

SEQ ID NO: 1344622 - RNA, 20 nt, Human
aguaaagaacuaaagaaacc

SEQ ID NO: 1344623 - RNA, 22 nt, Human
auggcgccggaauccauuuucc

SEQ ID NO: 1344624 - RNA, 21 nt, Human
caaagcauccgugguccuggu

SEQ ID NO: 1344625 - RNA, 22 nt, Human
caacggagacggggacgccacg

SEQ ID NO: 1344626 - RNA, 23 nt, Human
caccagcgggaacugcauggacc

SEQ ID NO: 1344627 - RNA, 22 nt, Human
cacgggcacagaugaccacguu

SEQ ID NO: 1344628 - RNA, 21 nt, Human
cacugaguuaccuacggugcc

SEQ ID NO: 1344629 - RNA, 24 nt, Human
cagcaacauccacagagaauuagc

SEQ ID NO: 1344630 - RNA, 24 nt, Human
cauaaccuaguuaccaaauguuaa

SEQ ID NO: 1344631 - RNA, 19 nt, Human
cauggccaacuccuccuuc

SEQ ID NO: 1344632 - RNA, 25 nt, Human
ccaaaauguaaccaggagacccccc

SEQ ID NO: 1344633 - RNA, 21 nt, Human
ccaaguagcugacaauguaga

SEQ ID NO: 1344634 - RNA, 19 nt, Human
ccacaggcugggcucacac

SEQ ID NO: 1344635 - RNA, 21 nt, Human
ccacugaguuaccuacggugc

SEQ ID NO: 1344636 - RNA, 18 nt, Human
cccaggaggccccugggg

SEQ ID NO: 1344637 - RNA, 19 nt, Human
ccccccguccccgccccgc

SEQ ID NO: 1344638 - RNA, 21 nt, Human
cccccgcugcagacucaguaa

SEQ ID NO: 1344639 - RNA, 26 nt, Human
ccccguccccgccccgcacacgccug

SEQ ID NO: 1344640 - RNA, 23 nt, Human
cccgcugcagacucaguaagaac

SEQ ID NO: 1344641 - RNA, 18 nt, Human
cccguggcccaggaggcc

SEQ ID NO: 1344642 - RNA, 26 nt, Human
cccguggcccaggaggccccuggggc

SEQ ID NO: 1344643 - RNA, 23 nt, Human
ccgccgugcugggucgccgcucc

SEQ ID NO: 1344644 - RNA, 21 nt, Human
ccguccccgccccgcacacgc

SEQ ID NO: 1344645 - RNA, 22 nt, Human
ccgugcugggucgccgcuccuc

SEQ ID NO: 1344646 - RNA, 24 nt, Human
ccucccagacccugcucuggcaga

SEQ ID NO: 1344647 - RNA, 21 nt, Human
cgaauguucaaaguucgugca

SEQ ID NO: 1344648 - RNA, 22 nt, Human
cgccggaauccauuuuccaucc

SEQ ID NO: 1344649 - RNA, 22 nt, Human
cgggcacaggugacgucacggg

SEQ ID NO: 1344650 - RNA, 26 nt, Human
cguccacccucucagcccagucccca

SEQ ID NO: 1344651 - RNA, 25 nt, Human
cuaaagaaaccggcaaaaccgagaa

SEQ ID NO: 1344652 - RNA, 20 nt, Human
cucccagacccugcucuggc

SEQ ID NO: 1344653 - RNA, 21 nt, Human
cucggaauccauuuuccaucc

SEQ ID NO: 1344654 - RNA, 20 nt, Human
cugcacacuuguucacuccc

SEQ ID NO: 1344655 - RNA, 22 nt, Human
cugcucuggcagacgaccccga

SEQ ID NO: 1344656 - RNA, 18 nt, Human
cugcugcaaaaacaaacc

SEQ ID NO: 1344657 - RNA, 18 nt, Human
gaacuaaagaaaccggca

SEQ ID NO: 1344658 - RNA, 19 nt, Human
gacaauguagagcccauaa

SEQ ID NO: 1344659 - RNA, 19 nt, Human
gaccugggggcucggaggc

SEQ ID NO: 1344660 - RNA, 22 nt, Human
gaggguuacacggcaggagguu

SEQ ID NO: 1344661 - RNA, 22 nt, Human
gaggguuacacggcaggagguu

SEQ ID NO: 1344662 - RNA, 22 nt, Human
gcagguggugggugcuguggcg

SEQ ID NO: 1344663 - RNA, 23 nt, Human
gccccgagagucugaaggcggca

SEQ ID NO: 1344664 - RNA, 21 nt, Human
gccugaggugugacggcucgg

SEQ ID NO: 1344665 - RNA, 22 nt, Human
ggaaacagguuuaauccaaaau

SEQ ID NO: 1344666 - RNA, 18 nt, Human
ggaaagcagacaaccacg

SEQ ID NO: 1344667 - RNA, 21 nt, Human
ggacccucccagacccugcuc

SEQ ID NO: 1344668 - RNA, 21 nt, Human
ggaggccccuggggcacuggc

SEQ ID NO: 1344669 - RNA, 20 nt, Human
ggcggcagguggugggugcu

SEQ ID NO: 1344670 - RNA, 20 nt, Human
ggcgggaaaaggaauuccuu

SEQ ID NO: 1344671 - RNA, 22 nt, Human
gugacggcucggcuucuagagu

SEQ ID NO: 1344672 - RNA, 24 nt, Human
gugccucuccuucccaaaauguua

SEQ ID NO: 1344673 - RNA, 19 nt, Human
gugggugcuguggcgcccc

SEQ ID NO: 1344674 - RNA, 21 nt, Human
guuugcaaucugaaaucaaaa

SEQ ID NO: 1344675 - RNA, 26 nt, Human
uaaagaaaccggcaaaacuggagacc

SEQ ID NO: 1344676 - RNA, 22 nt, Human
uaaccaggagaccccccguccc

SEQ ID NO: 1344677 - RNA, 18 nt, Human
uacacaugaaaggaacau

SEQ ID NO: 1344678 - RNA, 21 nt, Human
uacaucugcacacuuguucac

SEQ ID NO: 1344679 - RNA, 19 nt, Human
uaggaaagcagacaaccac

SEQ ID NO: 1344680 - RNA, 20 nt, Human
uccacccucucagcccaguc

SEQ ID NO: 1344681 - RNA, 24 nt, Human
uccacccucucagcccagucccca

SEQ ID NO: 1344682 - RNA, 22 nt, Human
uccagcccguggcccaggaggc

SEQ ID NO: 1344683 - RNA, 25 nt, Human
uccccagguccguauggagcccccg

SEQ ID NO: 1344684 - RNA, 21 nt, Human
ucccuacacauaaccgggaaa

SEQ ID NO: 1344685 - RNA, 21 nt, Human
ucccuccacaccagcgggaac

SEQ ID NO: 1344686 - RNA, 19 nt, Human
ucccugggcagccccucca

SEQ ID NO: 1344687 - RNA, 23 nt, Human
ucccugggcagccccuccagccc

SEQ ID NO: 1344688 - RNA, 24 nt, Human
uccugguugaagccggcguagagc

SEQ ID NO: 1344689 - RNA, 24 nt, Human
uccugguugaagccggcguagagc

SEQ ID NO: 1344690 - RNA, 21 nt, Human
ucugaaggcggcagguggugg

SEQ ID NO: 1344691 - RNA, 18 nt, Human
ucuuguuucucuuuuucu

SEQ ID NO: 1344692 - RNA, 21 nt, Human
ugaagcuaacgucacagcuga

SEQ ID NO: 1344693 - RNA, 22 nt, Human
ugacaguaaagaacuaaagaaa

SEQ ID NO: 1344694 - RNA, 28 nt, Human
ugacagugacaguaaagaacuaaagaaa

SEQ ID NO: 1344695 - RNA, 19 nt, Human
ugaggggaggggagacggu

SEQ ID NO: 1344696 - RNA, 19 nt, Human
ugaggugugacggcucggc

SEQ ID NO: 1344697 - RNA, 20 nt, Human
ugcagacucaguaagaacga

SEQ ID NO: 1344698 - RNA, 23 nt, Human
ugccucauucuaauggccccaac

SEQ ID NO: 1344699 - RNA, 21 nt, Human
ugcuguggcgcccccagcugg

SEQ ID NO: 1344700 - RNA, 24 nt, Human
uggaccugggggcucggaggccag

SEQ ID NO: 1344701 - RNA, 18 nt, Human
uggccuggugucugccuc

SEQ ID NO: 1344702 - RNA, 19 nt, Human
uguagcuauucuuacaaau

SEQ ID NO: 1344703 - RNA, 23 nt, Human
uuuuucuuuuaguggaucagugu

SEQ ID NO: 1344704 - RNA, 19 nt, Human
aaaaauuucagaaugacau

SEQ ID NO: 1344705 - RNA, 22 nt, Human
caaacauaacuaguagagaaaa

SEQ ID NO: 1344706 - RNA, 26 nt, Human
cauaacuaguagagaaaaauuucaga

SEQ ID NO: 1344707 - RNA, 24 nt, Human
cuggagcccauauuuuuucugcac

SEQ ID NO: 1344708 - RNA, 23 nt, Human
gaagccuucucauauuuguacuu

SEQ ID NO: 1344709 - RNA, 25 nt, Human
uaaccagguugacucaaacuaggug

SEQ ID NO: 1344710 - RNA, 25 nt, Human
uaguagagaaaaauuucagaaugac

SEQ ID NO: 1344711 - RNA, 19 nt, Human
ugacaugguaaaaaccacu

SEQ ID NO: 1344712 - RNA, 23 nt, Human
ugagaagccuucucauauuugua

SEQ ID NO: 1344713 - RNA, 22 nt, Human
accagguacauuucagauauau

SEQ ID NO: 1344714 - RNA, 21 nt, Human
agcaggaaauggcuuccaagg

SEQ ID NO: 1344715 - RNA, 24 nt, Human
caggcaaagacuuuauuagagaaa

SEQ ID NO: 1344716 - RNA, 24 nt, Human
cguagccacaaucucuguuaauuc

SEQ ID NO: 1344717 - RNA, 20 nt, Human
cucacuuuuaucauaagacu

SEQ ID NO: 1344718 - RNA, 23 nt, Human
cugauagccugcauauaccauga

SEQ ID NO: 1344719 - RNA, 22 nt, Human
cugauccuucugcugauagccu

SEQ ID NO: 1344720 - RNA, 18 nt, Human
cuucuaacuucuuggcug

SEQ ID NO: 1344721 - RNA, 19 nt, Human
gcuuccaagggcagaacca

SEQ ID NO: 1344722 - RNA, 23 nt, Human
ggcuauaacauuugggcccugcg

SEQ ID NO: 1344723 - RNA, 19 nt, Human
uaugcucaguagcuugcau

SEQ ID NO: 1344724 - RNA, 24 nt, Human
uggaauaaucuugaaucugaacag

SEQ ID NO: 1344725 - RNA, 23 nt, Human
uuaguggcaugagcaggaaaugg

SEQ ID NO: 1344726 - RNA, 21 nt, Human
uucuuuggcuauaacauuugg

SEQ ID NO: 1344727 - RNA, 22 nt, Human
aaauaaauacggagggguggga

SEQ ID NO: 1344728 - RNA, 18 nt, Human
aaggagggacugucggcg

SEQ ID NO: 1344729 - RNA, 20 nt, Human
acccggggcuccggcucccc

SEQ ID NO: 1344730 - RNA, 22 nt, Human
agacaaggagggacugucggcg

SEQ ID NO: 1344731 - RNA, 21 nt, Human
agacacuguuuauugaguggc

SEQ ID NO: 1344732 - RNA, 20 nt, Human
agguggcaggucaugccagg

SEQ ID NO: 1344733 - RNA, 21 nt, Human
caccgcguccacgcuccagcc

SEQ ID NO: 1344734 - RNA, 23 nt, Human
caccgcguccacgcuccagccuc

SEQ ID NO: 1344735 - RNA, 18 nt, Human
caugccagggugcugugg

SEQ ID NO: 1344736 - RNA, 20 nt, Human
cccccgccccacccuccccc

SEQ ID NO: 1344737 - RNA, 19 nt, Human
ccccgccccacccuccccc

SEQ ID NO: 1344738 - RNA, 21 nt, Human
ccccgccccacccucccccac

SEQ ID NO: 1344739 - RNA, 22 nt, Human
ccccgccccacccucccccacc

SEQ ID NO: 1344740 - RNA, 20 nt, Human
ccucguaauucucgaaagcu

SEQ ID NO: 1344741 - RNA, 19 nt, Human
ccugaaucccggagacaga

SEQ ID NO: 1344742 - RNA, 22 nt, Human
cgccccacccucccccaccgcg

SEQ ID NO: 1344743 - RNA, 23 nt, Human
gcccccgccccacccucccccac

SEQ ID NO: 1344744 - RNA, 21 nt, Human
ggagagguagcuggcuccggu

SEQ ID NO: 1344745 - RNA, 26 nt, Human
ggaggcggacgccaggucccccaagg

SEQ ID NO: 1344746 - RNA, 23 nt, Human
ggggagggccucugccuccuguc

SEQ ID NO: 1344747 - RNA, 24 nt, Human
gguggcaggucaugccagggugcu

SEQ ID NO: 1344748 - RNA, 23 nt, Human
gugggaauugcagggugcagaga

SEQ ID NO: 1344749 - RNA, 19 nt, Human
ucaggucguggggacccgg

SEQ ID NO: 1344750 - RNA, 21 nt, Human
uccacgcuccagccucaaggg

SEQ ID NO: 1344751 - RNA, 23 nt, Human
uccuccaauaaugcggaugggga

SEQ ID NO: 1344752 - RNA, 22 nt, Human
uccucguaauucucgaaagcug

SEQ ID NO: 1344753 - RNA, 21 nt, Human
ugccagggugcugugggcauc

SEQ ID NO: 1344754 - RNA, 23 nt, Human
ugcccccgccccacccuccccca

SEQ ID NO: 1344755 - RNA, 19 nt, Human
ugcugugggcaucuggcag

SEQ ID NO: 1344756 - RNA, 18 nt, Human
uggaagcagagguggcag

SEQ ID NO: 1344757 - RNA, 18 nt, Human
uggaagcagagguggcag

SEQ ID NO: 1344758 - RNA, 18 nt, Human
aauauugaccucauacag

SEQ ID NO: 1344759 - RNA, 21 nt, Human
agacaaaagaugaaagcuggg

SEQ ID NO: 1344760 - RNA, 21 nt, Human
agacuuggaugccacccagug

SEQ ID NO: 1344761 - RNA, 22 nt, Human
agaugaaagcuggguuuucucg

SEQ ID NO: 1344762 - RNA, 22 nt, Human
caaaacaugugcuaaaaaguua

SEQ ID NO: 1344763 - RNA, 20 nt, Human
ccaaguacaaaacaugugcu

SEQ ID NO: 1344764 - RNA, 25 nt, Human
ccucauacagacaaaagaugaaagc

SEQ ID NO: 1344765 - RNA, 19 nt, Human
gcuucacacgguuuuccaa

SEQ ID NO: 1344766 - RNA, 20 nt, Human
uacagacaaaagaugaaagc

SEQ ID NO: 1344767 - RNA, 27 nt, Human
uaccaaguacaaaacaugugcuaaaaa

SEQ ID NO: 1344768 - RNA, 23 nt, Human
uauaggacacuguaauuaauuca

SEQ ID NO: 1344769 - RNA, 20 nt, Human
ucauacagacaaaagaugaa

SEQ ID NO: 1344770 - RNA, 23 nt, Human
ucauacagacaaaagaugaaagc

SEQ ID NO: 1344771 - RNA, 22 nt, Human
ugacaucaauauugaccucaua

SEQ ID NO: 1344772 - RNA, 18 nt, Human
ugugcuaaaaaguuaaca

SEQ ID NO: 1344773 - RNA, 24 nt, Human
uuuuuuuuuuuuuuuuucuggauu

SEQ ID NO: 1344774 - RNA, 28 nt, Human
uuuuuuuuuuuuuuuuuuuuucuggggg

SEQ ID NO: 1344775 - RNA, 20 nt, Human
aaugcugcaacucagagaug

SEQ ID NO: 1344776 - RNA, 19 nt, Human
acucaggugucagaaagaa

SEQ ID NO: 1344777 - RNA, 27 nt, Human
agaaagaaacucugucacaaccauaga

SEQ ID NO: 1344778 - RNA, 18 nt, Human
agauuccaagccccuccc

SEQ ID NO: 1344779 - RNA, 18 nt, Human
aggagaaagacucaggug

SEQ ID NO: 1344780 - RNA, 22 nt, Human
aggggaaggggugaggagggau

SEQ ID NO: 1344781 - RNA, 19 nt, Human
auguuugcaggucuguguc

SEQ ID NO: 1344782 - RNA, 19 nt, Human
caacucagagaugcccuuu

SEQ ID NO: 1344783 - RNA, 19 nt, Human
cagaaagaaacucugucac

SEQ ID NO: 1344784 - RNA, 20 nt, Human
cagauuccaagccccuccca

SEQ ID NO: 1344785 - RNA, 25 nt, Human
ccccucccagcaagcuuuccgugca

SEQ ID NO: 1344786 - RNA, 23 nt, Human
cccuuuggcuucaugccagauuc

SEQ ID NO: 1344787 - RNA, 21 nt, Human
cgugcagcaggagaaagacuc

SEQ ID NO: 1344788 - RNA, 25 nt, Human
cuucaugccagauuccaagccccuc

SEQ ID NO: 1344789 - RNA, 20 nt, Human
gcagcucuucggaauugugu

SEQ ID NO: 1344790 - RNA, 19 nt, Human
ggcucugggaaucccaugg

SEQ ID NO: 1344791 - RNA, 18 nt, Human
gggaaucccauggucagg

SEQ ID NO: 1344792 - RNA, 19 nt, Human
ggggaaggggugaggaggg

SEQ ID NO: 1344793 - RNA, 20 nt, Human
gugcagcaggagaaagacuc

SEQ ID NO: 1344794 - RNA, 18 nt, Human
uaaaugcugcaacucaga

SEQ ID NO: 1344795 - RNA, 22 nt, Human
uagauguuugcaggucuguguc

SEQ ID NO: 1344796 - RNA, 21 nt, Human
ucagguagaaagagggauucc

SEQ ID NO: 1344797 - RNA, 20 nt, Human
ugagugggaucauuuaaaug

SEQ ID NO: 1344798 - RNA, 18 nt, Human
ugccagauuccaagcccc

SEQ ID NO: 1344799 - RNA, 21 nt, Human
uggucagguagaaagagggau

SEQ ID NO: 1344800 - RNA, 19 nt, Human
ugucacaaccauagauguu

SEQ ID NO: 1344801 - RNA, 22 nt, Human
ugucacaaccauagauguuugc

SEQ ID NO: 1344802 - RNA, 23 nt, Human
ugucacaaccauagauguuugca

SEQ ID NO: 1344803 - RNA, 23 nt, Human
uuccucaacaaugaggagucuga

SEQ ID NO: 1344804 - RNA, 22 nt, Human
aacaggaaggagaugauuggug

SEQ ID NO: 1344805 - RNA, 24 nt, Human
aacaggaaggagaugauuggugag

SEQ ID NO: 1344806 - RNA, 18 nt, Human
agagauuacaaagagauu

SEQ ID NO: 1344807 - RNA, 24 nt, Human
agcgagcugauggcguucuccaga

SEQ ID NO: 1344808 - RNA, 18 nt, Human
aggaaggagaugauuggu

SEQ ID NO: 1344809 - RNA, 18 nt, Human
cagaacucgguuucgugc

SEQ ID NO: 1344810 - RNA, 22 nt, Human
gugaguuuucuucguaaccagg

SEQ ID NO: 1344811 - RNA, 22 nt, Human
guucacuguggauaggaagggc

SEQ ID NO: 1344812 - RNA, 18 nt, Human
uaacaggaaggagaugau

SEQ ID NO: 1344813 - RNA, 19 nt, Human
uaaccagguucacugugga

SEQ ID NO: 1344814 - RNA, 27 nt, Human
uggugaguuuucuucguaaccagguuc

SEQ ID NO: 1344815 - RNA, 20 nt, Human
ugguuuaauuuuaagcagcg

SEQ ID NO: 1344816 - RNA, 20 nt, Human
uuaugaguucaauauuuuua

SEQ ID NO: 1344817 - RNA, 22 nt, Human
uuccuucccaccauggagaucc

SEQ ID NO: 1344818 - RNA, 25 nt, Human
uucuuuacaaugauuucagaagaga

SEQ ID NO: 1344819 - RNA, 21 nt, Human
acauaguuugccaggcaggcu

SEQ ID NO: 1344820 - RNA, 21 nt, Human
agcgagagagcaaagucagaa

SEQ ID NO: 1344821 - RNA, 23 nt, Human
caaaaccaggcagcagaagaagg

SEQ ID NO: 1344822 - RNA, 21 nt, Human
caaaauuguuuugaaaaacau

SEQ ID NO: 1344823 - RNA, 19 nt, Human
cagcuugacagauuaaugu

SEQ ID NO: 1344824 - RNA, 21 nt, Human
ccccaaaaccaggcagcagaa

SEQ ID NO: 1344825 - RNA, 24 nt, Human
ccccaaaaccaggcagcagaagaa

SEQ ID NO: 1344826 - RNA, 20 nt, Human
cccccaaaaccaggcagcag

SEQ ID NO: 1344827 - RNA, 21 nt, Human
cccccaaaaccaggcagcaga

SEQ ID NO: 1344828 - RNA, 24 nt, Human
cccccaaaaccaggcagcagaaga

SEQ ID NO: 1344829 - RNA, 22 nt, Human
gcagaagaaggcauacucaagc

SEQ ID NO: 1344830 - RNA, 23 nt, Human
gucauacagcccccaaaaccagg

SEQ ID NO: 1344831 - RNA, 26 nt, Human
uacagcccccaaaaccaggcagcaga

SEQ ID NO: 1344832 - RNA, 23 nt, Human
ucagcgagagagcaaagucagaa

SEQ ID NO: 1344833 - RNA, 24 nt, Human
ucagcgagagagcaaagucagaag

SEQ ID NO: 1344834 - RNA, 23 nt, Human
ugguauacauuuuaaaauaugaa

SEQ ID NO: 1344835 - RNA, 25 nt, Human
uguuucauucuuugcuugucauuua

SEQ ID NO: 1344836 - RNA, 23 nt, Human
uugauccuagcuccacauuucuu

SEQ ID NO: 1344837 - RNA, 20 nt, Human
uuguaaaaauaaaauucaca

SEQ ID NO: 1344838 - RNA, 20 nt, Human
agcuguuuaaacaagaaguu

SEQ ID NO: 1344839 - RNA, 18 nt, Human
aggcaagauaaaaagucu

SEQ ID NO: 1344840 - RNA, 22 nt, Human
aggcaagauaaaaagucucuga

SEQ ID NO: 1344841 - RNA, 19 nt, Human
auccuaaaaccuguugagu

SEQ ID NO: 1344842 - RNA, 26 nt, Human
ccucugagaggauuacagacuaugca

SEQ ID NO: 1344843 - RNA, 18 nt, Human
ccucuuaaaucuuucuuu

SEQ ID NO: 1344844 - RNA, 19 nt, Human
ggcugagaauggaagaagg

SEQ ID NO: 1344845 - RNA, 21 nt, Human
uaaaaagucucugacuugaaa

SEQ ID NO: 1344846 - RNA, 19 nt, Human
uauaacaaucaauuuuuga

SEQ ID NO: 1344847 - RNA, 18 nt, Human
ucuggcugagaauggaag

SEQ ID NO: 1344848 - RNA, 18 nt, Human
ugagaauggaagaaggga

SEQ ID NO: 1344849 - RNA, 22 nt, Human
ugcuucuggcugagaauggaag

SEQ ID NO: 1344850 - RNA, 22 nt, Human
uuaaacaagaaguuucccucuc

SEQ ID NO: 1344851 - RNA, 21 nt, Human
uuacagacuaugcaaucugcu

SEQ ID NO: 1344852 - RNA, 20 nt, Human
uuguucagaugguuucuugu

SEQ ID NO: 1344853 - RNA, 27 nt, Human
aagaagacauaugaggugucgcggacc

SEQ ID NO: 1344854 - RNA, 18 nt, Human
aagcagacauaaaauuac

SEQ ID NO: 1344855 - RNA, 18 nt, Human
aagcagacauaaaauuac

SEQ ID NO: 1344856 - RNA, 26 nt, Human
agaaaaaaaaaggugaaaguagagaa

SEQ ID NO: 1344857 - RNA, 24 nt, Human
agaauagggauguuuguggguagg

SEQ ID NO: 1344858 - RNA, 19 nt, Human
agcggccucggcgaggcaa

SEQ ID NO: 1344859 - RNA, 21 nt, Human
aggagcguugcuucugaacua

SEQ ID NO: 1344860 - RNA, 21 nt, Human
augaaaacucuaucucuaaau

SEQ ID NO: 1344861 - RNA, 25 nt, Human
auuuuauuuuccuuaaagcagacau

SEQ ID NO: 1344862 - RNA, 21 nt, Human
caaauggacaaacuaauaaau

SEQ ID NO: 1344863 - RNA, 19 nt, Human
caccuguccacuccggcuc

SEQ ID NO: 1344864 - RNA, 19 nt, Human
cacgcuccucgcagcggcc

SEQ ID NO: 1344865 - RNA, 23 nt, Human
cacuguuacuguguuacugcucu

SEQ ID NO: 1344866 - RNA, 21 nt, Human
cagaguuauaguaugcuucuc

SEQ ID NO: 1344867 - RNA, 23 nt, Human
cagcggccucggcgaggcaaguc

SEQ ID NO: 1344868 - RNA, 24 nt, Human
caggacagaucuauacauguuaca

SEQ ID NO: 1344869 - RNA, 22 nt, Human
cgaggcaaguccuccccuccuc

SEQ ID NO: 1344870 - RNA, 22 nt, Human
cuaccaaaucauuuaguagugu

SEQ ID NO: 1344871 - RNA, 23 nt, Human
cucacaggacagaucuauacaug

SEQ ID NO: 1344872 - RNA, 24 nt, Human
cuuaaacaaauauucaaugcuuaa

SEQ ID NO: 1344873 - RNA, 23 nt, Human
gaaccauagauucaucagaaaug

SEQ ID NO: 1344874 - RNA, 19 nt, Human
gcgaggcaaguccuccccu

SEQ ID NO: 1344875 - RNA, 19 nt, Human
gcgcgggagccggguuccc

SEQ ID NO: 1344876 - RNA, 22 nt, Human
guaguacuuuuauuuuucauga

SEQ ID NO: 1344877 - RNA, 24 nt, Human
guuuguggguagguauuaucuuca

SEQ ID NO: 1344878 - RNA, 23 nt, Human
uaaaagaaaaaaaaaggugaaag

SEQ ID NO: 1344879 - RNA, 26 nt, Human
uaaacaaauauucaaugcuuaauuuu

SEQ ID NO: 1344880 - RNA, 21 nt, Human
uaaaccuucuaggauaaaaau

SEQ ID NO: 1344881 - RNA, 19 nt, Human
uaaccugauuucuaccaaa

SEQ ID NO: 1344882 - RNA, 18 nt, Human
ucaauggaagaucagagu

SEQ ID NO: 1344883 - RNA, 19 nt, Human
ucacuaccaaaucauuuag

SEQ ID NO: 1344884 - RNA, 23 nt, Human
ucagaaacuauuguaacaguuua

SEQ ID NO: 1344885 - RNA, 28 nt, Human
ucgcaguaagcacugaugcuguccggac

SEQ ID NO: 1344886 - RNA, 21 nt, Human
ucggcgaggcaaguccucccc

SEQ ID NO: 1344887 - RNA, 21 nt, Human
ugaaagauuuacaauagcaaa

SEQ ID NO: 1344888 - RNA, 20 nt, Human
uggaagaaaauaacuuugau

SEQ ID NO: 1344889 - RNA, 21 nt, Human
uggaagaaaauaacuuugaug

SEQ ID NO: 1344890 - RNA, 26 nt, Human
uggacaaacuaauaaauaaauaacau

SEQ ID NO: 1344891 - RNA, 21 nt, Human
uggcaagcaagcaaacuuuug

SEQ ID NO: 1344892 - RNA, 23 nt, Human
uuaaaagaaaaaaaaaggugaaa

SEQ ID NO: 1344893 - RNA, 27 nt, Human
uucccuggaccuucgcccuugggcacg

SEQ ID NO: 1344894 - RNA, 25 nt, Human
uuuuuuuuuuuuuuuucccuauuaa

SEQ ID NO: 1344895 - RNA, 21 nt, Human
aaaaaggacaucuuuuaagcu

SEQ ID NO: 1344896 - RNA, 19 nt, Human
aaacaauuccaucccucuc

SEQ ID NO: 1344897 - RNA, 21 nt, Human
aaauuccaauucuuauaacuc

SEQ ID NO: 1344898 - RNA, 19 nt, Human
aacaauuccaucccucuca

SEQ ID NO: 1344899 - RNA, 19 nt, Human
aacagcagcuugggaagug

SEQ ID NO: 1344900 - RNA, 19 nt, Human
aauggaaagaaccccagcc

SEQ ID NO: 1344901 - RNA, 19 nt, Human
acuuuacgaaugaaagaaa

SEQ ID NO: 1344902 - RNA, 18 nt, Human
auacuugcaaccucuucg

SEQ ID NO: 1344903 - RNA, 20 nt, Human
auggaaagaaccccagccua

SEQ ID NO: 1344904 - RNA, 19 nt, Human
caagcaaccagccuguugu

SEQ ID NO: 1344905 - RNA, 21 nt, Human
cacuccagucucaaagccagg

SEQ ID NO: 1344906 - RNA, 23 nt, Human
cacuuuaggauuccacgccaagc

SEQ ID NO: 1344907 - RNA, 24 nt, Human
cagaaauuccaauucuuauaacuc

SEQ ID NO: 1344908 - RNA, 22 nt, Human
cagcaggacaugcacugccccu

SEQ ID NO: 1344909 - RNA, 22 nt, Human
cagcucagccuugaaacagcag

SEQ ID NO: 1344910 - RNA, 22 nt, Human
ccagcucagccuugaaacagca

SEQ ID NO: 1344911 - RNA, 21 nt, Human
cuccugcgcguuaagccucac

SEQ ID NO: 1344912 - RNA, 23 nt, Human
gcaggaagaagaucaaggaguca

SEQ ID NO: 1344913 - RNA, 18 nt, Human
ggcuggggucucacucca

SEQ ID NO: 1344914 - RNA, 20 nt, Human
gggcaaggacaucaaguagc

SEQ ID NO: 1344915 - RNA, 24 nt, Human
gucucacuccagucucaaagccag

SEQ ID NO: 1344916 - RNA, 23 nt, Human
uaacuccccggggacagcaaucu

SEQ ID NO: 1344917 - RNA, 24 nt, Human
uaacuccccggggacagcaaucug

SEQ ID NO: 1344918 - RNA, 26 nt, Human
uaacuuuacgaaugaaagaaaacaau

SEQ ID NO: 1344919 - RNA, 23 nt, Human
uagcccuucugaauccgucuccu

SEQ ID NO: 1344920 - RNA, 26 nt, Human
ucagccuugaaacagcagcuugggaa

SEQ ID NO: 1344921 - RNA, 21 nt, Human
uccacgcaggaagaagaucaa

SEQ ID NO: 1344922 - RNA, 20 nt, Human
uccccggggacagcaaucug

SEQ ID NO: 1344923 - RNA, 31 nt, Human
ucuauaauggaaagaaccccagccuagggcc

SEQ ID NO: 1344924 - RNA, 21 nt, Human
ucucagcuggggcagaggggc

SEQ ID NO: 1344925 - RNA, 27 nt, Human
ucuguagcccuucugaauccgucuccu

SEQ ID NO: 1344926 - RNA, 18 nt, Human
ucuuauaacucaaauccc

SEQ ID NO: 1344927 - RNA, 19 nt, Human
ugaaagaaaacaauuccau

SEQ ID NO: 1344928 - RNA, 22 nt, Human
uggaaagaaccccagccuaggg

SEQ ID NO: 1344929 - RNA, 19 nt, Human
uggcagagagggcagcagg

SEQ ID NO: 1344930 - RNA, 21 nt, Human
uggcagagagggcagcaggaa

SEQ ID NO: 1344931 - RNA, 27 nt, Human
uguucugugcccucuggcagagagggc

SEQ ID NO: 1344932 - RNA, 23 nt, Human
uuuuuuuuuuuuuuuuuugauuu

SEQ ID NO: 1344933 - RNA, 20 nt, Human
uuuuuuuuuuuuuuuuuugg

SEQ ID NO: 1344934 - RNA, 18 nt, Human
aaaaacaccuccccuaca

SEQ ID NO: 1344935 - RNA, 24 nt, Human
aaauacaaaaacaacucgcauuua

SEQ ID NO: 1344936 - RNA, 21 nt, Human
aacacacaaauacaaaaacaa

SEQ ID NO: 1344937 - RNA, 19 nt, Human
aacaccuccccuacaugcc

SEQ ID NO: 1344938 - RNA, 25 nt, Human
aacccagccccuccauuagacccca

SEQ ID NO: 1344939 - RNA, 25 nt, Human
aagaaccacccaacccucuugccuc

SEQ ID NO: 1344940 - RNA, 19 nt, Human
aagaacccagccccuccau

SEQ ID NO: 1344941 - RNA, 27 nt, Human
aagaacccagccccuccauuagacccc

SEQ ID NO: 1344942 - RNA, 18 nt, Human
acaacaaugccccagaac

SEQ ID NO: 1344943 - RNA, 20 nt, Human
acacaaauacaaaaacaacu

SEQ ID NO: 1344944 - RNA, 21 nt, Human
acacugggucuuccagguggc

SEQ ID NO: 1344945 - RNA, 19 nt, Human
acagcccacucuucccgcc

SEQ ID NO: 1344946 - RNA, 18 nt, Human
accacaaggcccaucuca

SEQ ID NO: 1344947 - RNA, 21 nt, Human
accacaaggcccaucucaaca

SEQ ID NO: 1344948 - RNA, 19 nt, Human
accacccaacccucuugcc

SEQ ID NO: 1344949 - RNA, 22 nt, Human
accagagcucaggggcagucag

SEQ ID NO: 1344950 - RNA, 25 nt, Human
acccuggccuggggaagggaaguca

SEQ ID NO: 1344951 - RNA, 19 nt, Human
acccuuccccagcuccccc

SEQ ID NO: 1344952 - RNA, 21 nt, Human
accuguuccugccuggguccc

SEQ ID NO: 1344953 - RNA, 22 nt, Human
agacauccugaccccucugccc

SEQ ID NO: 1344954 - RNA, 18 nt, Human
agacgcacccacacaccc

SEQ ID NO: 1344955 - RNA, 18 nt, Human
agagggcagagcuggcug

SEQ ID NO: 1344956 - RNA, 19 nt, Human
agagggcagagcuggcugc

SEQ ID NO: 1344957 - RNA, 21 nt, Human
agagggugcuggcuccagcug

SEQ ID NO: 1344958 - RNA, 21 nt, Human
agaugcugggggcugcuagug

SEQ ID NO: 1344959 - RNA, 25 nt, Human
agaugcugggggcugcuagugggcc

SEQ ID NO: 1344960 - RNA, 20 nt, Human
agcagccagagggugcuggc

SEQ ID NO: 1344961 - RNA, 21 nt, Human
agccugacaauggggaggggg

SEQ ID NO: 1344962 - RNA, 24 nt, Human
agcugaccucccagcagacagcac

SEQ ID NO: 1344963 - RNA, 26 nt, Human
agcugaccucccagcagacagcaccg

SEQ ID NO: 1344964 - RNA, 21 nt, Human
agcugggugggugggagaugc

SEQ ID NO: 1344965 - RNA, 25 nt, Human
agcugggugggugggagaugcuggg

SEQ ID NO: 1344966 - RNA, 22 nt, Human
aggcaucccagcaacccuggcc

SEQ ID NO: 1344967 - RNA, 18 nt, Human
aguccuccuccuccccuc

SEQ ID NO: 1344968 - RNA, 19 nt, Human
auaaaacagagauuccaga

SEQ ID NO: 1344969 - RNA, 22 nt, Human
auccugaccccucugcccuagg

SEQ ID NO: 1344970 - RNA, 18 nt, Human
aucuuuuuuuccccuccu

SEQ ID NO: 1344971 - RNA, 19 nt, Human
aucuuuuuuuccccuccuu

SEQ ID NO: 1344972 - RNA, 21 nt, Human
auggcagaucccuuggggcug

SEQ ID NO: 1344973 - RNA, 24 nt, Human
caaaaacaccuccccuacaugccc

SEQ ID NO: 1344974 - RNA, 24 nt, Human
caagggacaacaaugccccagaac

SEQ ID NO: 1344975 - RNA, 18 nt, Human
caauacacagauacacag

SEQ ID NO: 1344976 - RNA, 18 nt, Human
cacauucccagccuccag

SEQ ID NO: 1344977 - RNA, 22 nt, Human
caccaagauaucacggcgcgac

SEQ ID NO: 1344978 - RNA, 23 nt, Human
caccaagauaucacggcgcgaca

SEQ ID NO: 1344979 - RNA, 18 nt, Human
cacccaacccucuugccu

SEQ ID NO: 1344980 - RNA, 26 nt, Human
cacccacucugagggucacucagaau

SEQ ID NO: 1344981 - RNA, 19 nt, Human
caccccagaucccuggggg

SEQ ID NO: 1344982 - RNA, 24 nt, Human
caccccagaucccugggggcucua

SEQ ID NO: 1344983 - RNA, 21 nt, Human
cacccugggaaagacagccca

SEQ ID NO: 1344984 - RNA, 23 nt, Human
cacccuuccccagcucccccacc

SEQ ID NO: 1344985 - RNA, 25 nt, Human
caccucuguguucccuccccaaguc

SEQ ID NO: 1344986 - RNA, 21 nt, Human
cacucucuccuccccucuuua

SEQ ID NO: 1344987 - RNA, 20 nt, Human
cagaacccaccccuccccgc

SEQ ID NO: 1344988 - RNA, 26 nt, Human
cagacacaagggacaacaaugccccc

SEQ ID NO: 1344989 - RNA, 24 nt, Human
cagaucccugggggcucuccccgg

SEQ ID NO: 1344990 - RNA, 22 nt, Human
cagcccauccugaccaccccuc

SEQ ID NO: 1344991 - RNA, 19 nt, Human
cagcccccauccuuuccuc

SEQ ID NO: 1344992 - RNA, 23 nt, Human
cagguggcuucugagcuaacuga

SEQ ID NO: 1344993 - RNA, 19 nt, Human
caguagcggugugggggca

SEQ ID NO: 1344994 - RNA, 18 nt, Human
caguggcagggagccacc

SEQ ID NO: 1344995 - RNA, 24 nt, Human
caguggcagggagccaccaagaua

SEQ ID NO: 1344996 - RNA, 25 nt, Human
caguggcagggagccaccaagauau

SEQ ID NO: 1344997 - RNA, 21 nt, Human
caucccuggcccugauucuga

SEQ ID NO: 1344998 - RNA, 27 nt, Human
caucucaacacacaaauacaaaaacaa

SEQ ID NO: 1344999 - RNA, 21 nt, Human
ccagccaguuuugugugucau

SEQ ID NO: 1345000 - RNA, 22 nt, Human
ccagcucccccacccuaucucu

SEQ ID NO: 1345001 - RNA, 18 nt, Human
ccagcugaccucccagca

SEQ ID NO: 1345002 - RNA, 25 nt, Human
ccauauccucucaaucuucugcauc

SEQ ID NO: 1345003 - RNA, 20 nt, Human
ccauccuuuccuccucuccu

SEQ ID NO: 1345004 - RNA, 21 nt, Human
cccacucuucccgccugcacc

SEQ ID NO: 1345005 - RNA, 23 nt, Human
cccaggcagaacgcguccuugcc

SEQ ID NO: 1345006 - RNA, 21 nt, Human
ccccagaacccaccccucccc

SEQ ID NO: 1345007 - RNA, 20 nt, Human
ccccagaucccugggggcuc

SEQ ID NO: 1345008 - RNA, 23 nt, Human
ccccagcccauccugaccacccc

SEQ ID NO: 1345009 - RNA, 23 nt, Human
cccccacccuaucucuaguccac

SEQ ID NO: 1345010 - RNA, 18 nt, Human
cccccgagaaucagcggg

SEQ ID NO: 1345011 - RNA, 24 nt, Human
cccccuaccgggauacccccuaga

SEQ ID NO: 1345012 - RNA, 25 nt, Human
cccccuaccgggauacccccuagac

SEQ ID NO: 1345013 - RNA, 19 nt, Human
ccccucccuucugcucuuc

SEQ ID NO: 1345014 - RNA, 24 nt, Human
ccccucugugcuccccagccugag

SEQ ID NO: 1345015 - RNA, 18 nt, Human
cccggaaauguguugcgg

SEQ ID NO: 1345016 - RNA, 18 nt, Human
cccuagacgcacccacac

SEQ ID NO: 1345017 - RNA, 19 nt, Human
cccucuugccucugggcac

SEQ ID NO: 1345018 - RNA, 18 nt, Human
ccuacaugcccaggcaga

SEQ ID NO: 1345019 - RNA, 23 nt, Human
ccuaccgggauacccccuagacg

SEQ ID NO: 1345020 - RNA, 22 nt, Human
ccucccuucugcucuucagccc

SEQ ID NO: 1345021 - RNA, 24 nt, Human
ccucuagauuaucuacaccucucc

SEQ ID NO: 1345022 - RNA, 21 nt, Human
ccucucaaucuucugcauccc

SEQ ID NO: 1345023 - RNA, 25 nt, Human
ccucucaaucuucugcauccccuuu

SEQ ID NO: 1345024 - RNA, 24 nt, Human
ccucuggcucccugcaggcccccu

SEQ ID NO: 1345025 - RNA, 18 nt, Human
ccugacaauggggagggg

SEQ ID NO: 1345026 - RNA, 22 nt, Human
ccugagcccugaccaccccaga

SEQ ID NO: 1345027 - RNA, 18 nt, Human
ccugcaggcccccuaccg

SEQ ID NO: 1345028 - RNA, 24 nt, Human
ccuuacccccgagaaucagcggga

SEQ ID NO: 1345029 - RNA, 18 nt, Human
ccuugaccagcugaccuc

SEQ ID NO: 1345030 - RNA, 22 nt, Human
ccuugaccagcugaccucccag

SEQ ID NO: 1345031 - RNA, 19 nt, Human
ccuuggggcugccagcagc

SEQ ID NO: 1345032 - RNA, 21 nt, Human
cuagcagucuaugccucuaga

SEQ ID NO: 1345033 - RNA, 22 nt, Human
cucacagagccuccacauuccc

SEQ ID NO: 1345034 - RNA, 19 nt, Human
cucccccacccuaucucua

SEQ ID NO: 1345035 - RNA, 23 nt, Human
cuccgugauucucagauggagaa

SEQ ID NO: 1345036 - RNA, 18 nt, Human
cuccuccccucuuuaauc

SEQ ID NO: 1345037 - RNA, 20 nt, Human
cuccuccccucuuuaauccc

SEQ ID NO: 1345038 - RNA, 18 nt, Human
cuccuuucuuugucuugg

SEQ ID NO: 1345039 - RNA, 25 nt, Human
cucuauccaucuccauauccucuca

SEQ ID NO: 1345040 - RNA, 22 nt, Human
cucuccuccccucuuuaauccc

SEQ ID NO: 1345041 - RNA, 23 nt, Human
cugaccccucugcccuagcuggg

SEQ ID NO: 1345042 - RNA, 22 nt, Human
cugcaggcccccuaccgggaua

SEQ ID NO: 1345043 - RNA, 23 nt, Human
cugcggcaugcuugcaucacccu

SEQ ID NO: 1345044 - RNA, 20 nt, Human
cuggccuggggaagggaagu

SEQ ID NO: 1345045 - RNA, 21 nt, Human
cugggaaagacagcccacucu

SEQ ID NO: 1345046 - RNA, 19 nt, Human
cuggguuugaguuucaaua

SEQ ID NO: 1345047 - RNA, 22 nt, Human
cugugcuccccagccuggugac

SEQ ID NO: 1345048 - RNA, 21 nt, Human
cuucaagaacccagccccucc

SEQ ID NO: 1345049 - RNA, 18 nt, Human
cuucccagaggacccugc

SEQ ID NO: 1345050 - RNA, 19 nt, Human
cuuccccagcucccccacc

SEQ ID NO: 1345051 - RNA, 19 nt, Human
cuucccgccugcacccuuc

SEQ ID NO: 1345052 - RNA, 27 nt, Human
cuuuuuuuccccuccuuucuuugucuu

SEQ ID NO: 1345053 - RNA, 23 nt, Human
gacaauaaaaauaacaauaguaa

SEQ ID NO: 1345054 - RNA, 24 nt, Human
gaccccucugcccuagcugggugg

SEQ ID NO: 1345055 - RNA, 23 nt, Human
gacuauuucaggucccaguucuc

SEQ ID NO: 1345056 - RNA, 18 nt, Human
gaggaucuugugcuccuc

SEQ ID NO: 1345057 - RNA, 22 nt, Human
gcagagacaccugucucuaaga

SEQ ID NO: 1345058 - RNA, 22 nt, Human
gcaguggcagggagccaccaag

SEQ ID NO: 1345059 - RNA, 22 nt, Human
gccccagaacccaccccucccc

SEQ ID NO: 1345060 - RNA, 25 nt, Human
gccccagaacccaccccuccccgcu

SEQ ID NO: 1345061 - RNA, 18 nt, Human
gcccugauucugagggcu

SEQ ID NO: 1345062 - RNA, 21 nt, Human
gcucuucagcccccauccuuu

SEQ ID NO: 1345063 - RNA, 24 nt, Human
gcugcagcucugauacccuuuccu

SEQ ID NO: 1345064 - RNA, 20 nt, Human
ggcagagcuggcugcagcuc

SEQ ID NO: 1345065 - RNA, 23 nt, Human
ggcgcgacaggaggggaggugca

SEQ ID NO: 1345066 - RNA, 19 nt, Human
ggcugccagcagccagagg

SEQ ID NO: 1345067 - RNA, 21 nt, Human
gggacaacaaugccccagaac

SEQ ID NO: 1345068 - RNA, 18 nt, Human
gggcagagcuggcugcag

SEQ ID NO: 1345069 - RNA, 21 nt, Human
gggcagagcuggcugcagcuc

SEQ ID NO: 1345070 - RNA, 23 nt, Human
gggucuaagagcacagagaaggg

SEQ ID NO: 1345071 - RNA, 22 nt, Human
ggugccagggguaagggaaaga

SEQ ID NO: 1345072 - RNA, 19 nt, Human
ggugugguuggcagaagcu

SEQ ID NO: 1345073 - RNA, 22 nt, Human
gugggugggagaugcugggggc

SEQ ID NO: 1345074 - RNA, 20 nt, Human
gugugggggcagagacaccu

SEQ ID NO: 1345075 - RNA, 21 nt, Human
uaaaacccaaggcagucuggg

SEQ ID NO: 1345076 - RNA, 20 nt, Human
uaacaauaguaauuacaaga

SEQ ID NO: 1345077 - RNA, 19 nt, Human
uaacuucccagaggacccu

SEQ ID NO: 1345078 - RNA, 24 nt, Human
uaagggaaagauaaaacccaaggc

SEQ ID NO: 1345079 - RNA, 21 nt, Human
uaauggagggaaucucaaacc

SEQ ID NO: 1345080 - RNA, 22 nt, Human
uacagagaaaccacaaggccca

SEQ ID NO: 1345081 - RNA, 19 nt, Human
uacaguaccauggguaggg

SEQ ID NO: 1345082 - RNA, 18 nt, Human
uacauggucaaaggggag

SEQ ID NO: 1345083 - RNA, 18 nt, Human
uacccccuagacgcaccc

SEQ ID NO: 1345084 - RNA, 23 nt, Human
uagaccccaguagcggugugggg

SEQ ID NO: 1345085 - RNA, 19 nt, Human
uagaguaacuucccagagg

SEQ ID NO: 1345086 - RNA, 21 nt, Human
uaggguagagggcagagcugg

SEQ ID NO: 1345087 - RNA, 22 nt, Human
ucaacacacaaauacaaaaaca

SEQ ID NO: 1345088 - RNA, 19 nt, Human
ucagguaggcucuucuuac

SEQ ID NO: 1345089 - RNA, 18 nt, Human
uccacagacacaagggac

SEQ ID NO: 1345090 - RNA, 23 nt, Human
uccacagacacaagggacaacaa

SEQ ID NO: 1345091 - RNA, 19 nt, Human
uccagagauggaaacacug

SEQ ID NO: 1345092 - RNA, 20 nt, Human
ucccaacaccucuguguucc

SEQ ID NO: 1345093 - RNA, 26 nt, Human
ucccaacaccucuguguucccucccc

SEQ ID NO: 1345094 - RNA, 19 nt, Human
ucccagcaacccuggccug

SEQ ID NO: 1345095 - RNA, 18 nt, Human
uccccagcucccccaccc

SEQ ID NO: 1345096 - RNA, 21 nt, Human
uccccagcucccccacccuau

SEQ ID NO: 1345097 - RNA, 24 nt, Human
uccccagcucccccacccuaucuc

SEQ ID NO: 1345098 - RNA, 24 nt, Human
ucccuggcccugauucuuccgaug

SEQ ID NO: 1345099 - RNA, 22 nt, Human
ucccugggggcucuagcagucu

SEQ ID NO: 1345100 - RNA, 19 nt, Human
uccucugccuugaccagcu

SEQ ID NO: 1345101 - RNA, 18 nt, Human
uccugaccaccccuccuc

SEQ ID NO: 1345102 - RNA, 22 nt, Human
uccuggagcucugcacucucuc

SEQ ID NO: 1345103 - RNA, 21 nt, Human
ucuaagaggcaaacagacauc

SEQ ID NO: 1345104 - RNA, 18 nt, Human
ucugagcuaacugaugcc

SEQ ID NO: 1345105 - RNA, 19 nt, Human
ucugcaucccuggcccuga

SEQ ID NO: 1345106 - RNA, 19 nt, Human
ucugucuccccucccuucu

SEQ ID NO: 1345107 - RNA, 20 nt, Human
ucuguguucccuccccaagu

SEQ ID NO: 1345108 - RNA, 23 nt, Human
ucuugguuguuuuaauggaggga

SEQ ID NO: 1345109 - RNA, 20 nt, Human
ucuuguggacaccuguuccu

SEQ ID NO: 1345110 - RNA, 24 nt, Human
ugaagccugagcccugaccacccc

SEQ ID NO: 1345111 - RNA, 19 nt, Human
ugaccaccccuccucugcc

SEQ ID NO: 1345112 - RNA, 19 nt, Human
ugaccagcugaccucccag

SEQ ID NO: 1345113 - RNA, 20 nt, Human
ugagaaacuggugauggcaa

SEQ ID NO: 1345114 - RNA, 21 nt, Human
ugagaacaaauggcagauccc

SEQ ID NO: 1345115 - RNA, 19 nt, Human
ugagcccugaccaccccag

SEQ ID NO: 1345116 - RNA, 18 nt, Human
ugccagcagccagagggu

SEQ ID NO: 1345117 - RNA, 24 nt, Human
ugccuugaccagcugaccucccag

SEQ ID NO: 1345118 - RNA, 20 nt, Human
uggaaggcuucucagggcgu

SEQ ID NO: 1345119 - RNA, 20 nt, Human
uggcucccugcaggcccccu

SEQ ID NO: 1345120 - RNA, 20 nt, Human
ugggugggugggagaugcug

SEQ ID NO: 1345121 - RNA, 23 nt, Human
uggugauggcaaaaacaccuccc

SEQ ID NO: 1345122 - RNA, 20 nt, Human
ugucuuucuggccucccuag

SEQ ID NO: 1345123 - RNA, 23 nt, Human
ugugucaugaauguguucaugug

SEQ ID NO: 1345124 - RNA, 18 nt, Human
uguuccugccuggguccc

SEQ ID NO: 1345125 - RNA, 24 nt, Human
uuccuggagcucugcacucucucc

SEQ ID NO: 1345126 - RNA, 18 nt, Human
uucguccuuuucucuacc

SEQ ID NO: 1345127 - RNA, 19 nt, Human
uucugagcuaacugaugcc

SEQ ID NO: 1345128 - RNA, 21 nt, Human
uugauagguuaaucucagugc

SEQ ID NO: 1345129 - RNA, 18 nt, Human
uugccucugggcacaccc

SEQ ID NO: 1345130 - RNA, 24 nt, Human
uuguuucccccuuaaaagaaaaac

SEQ ID NO: 1345131 - RNA, 23 nt, Human
uuuaauccccucugucuccccuc

SEQ ID NO: 1345132 - RNA, 25 nt, Human
uuuagcauaaaacagagauuccaga

SEQ ID NO: 1345133 - RNA, 23 nt, Human
uuuaucuuuuuuuccccuccuuu

SEQ ID NO: 1345134 - RNA, 18 nt, Human
accucgcccgcuuccucc

SEQ ID NO: 1345135 - RNA, 19 nt, Human
accucgcccgcuuccucca

SEQ ID NO: 1345136 - RNA, 21 nt, Human
accucgcccgcuuccuccagc

SEQ ID NO: 1345137 - RNA, 24 nt, Human
caccucgcccgcuuccuccagcau

SEQ ID NO: 1345138 - RNA, 22 nt, Human
cauaaaaugcaauaaaaugcuu

SEQ ID NO: 1345139 - RNA, 24 nt, Human
ccacaccagccugagccccagacg

SEQ ID NO: 1345140 - RNA, 21 nt, Human
ccgccccgccagccgcgcugc

SEQ ID NO: 1345141 - RNA, 22 nt, Human
ccgccccgccagccgcgcugcc

SEQ ID NO: 1345142 - RNA, 23 nt, Human
ccgccccgccagccgcgcugccu

SEQ ID NO: 1345143 - RNA, 18 nt, Human
ccugugggcaccgcggcg

SEQ ID NO: 1345144 - RNA, 24 nt, Human
cgacucgugcucggccccagggac

SEQ ID NO: 1345145 - RNA, 19 nt, Human
cgccgggguccugcgggcg

SEQ ID NO: 1345146 - RNA, 20 nt, Human
cgcggggcggcagcugggac

SEQ ID NO: 1345147 - RNA, 25 nt, Human
cggcggcggcggcggcucccgcgga

SEQ ID NO: 1345148 - RNA, 24 nt, Human
cggcggcggggccgcgcggggcgg

SEQ ID NO: 1345149 - RNA, 22 nt, Human
cuccagcaccucgcccgcuucc

SEQ ID NO: 1345150 - RNA, 23 nt, Human
gcauccaucaugacgacucgugc

SEQ ID NO: 1345151 - RNA, 21 nt, Human
gcccugagguccugugggcac

SEQ ID NO: 1345152 - RNA, 20 nt, Human
gccgccgggguccugcgggc

SEQ ID NO: 1345153 - RNA, 23 nt, Human
gcggggcagcccgcacucgcccu

SEQ ID NO: 1345154 - RNA, 20 nt, Human
gcugcaucccacaccagccu

SEQ ID NO: 1345155 - RNA, 21 nt, Human
gcugcaucccacaccagccug

SEQ ID NO: 1345156 - RNA, 19 nt, Human
ggcugcaucccacaccagc

SEQ ID NO: 1345157 - RNA, 18 nt, Human
gggacggcggcggcggcg

SEQ ID NO: 1345158 - RNA, 19 nt, Human
gggacggcggcggcggcgg

SEQ ID NO: 1345159 - RNA, 20 nt, Human
gggggcuccggcuguggggg

SEQ ID NO: 1345160 - RNA, 20 nt, Human
uaaaaugcaauaaaaugcuu

SEQ ID NO: 1345161 - RNA, 22 nt, Human
uagggugaggggcgaaaggugg

SEQ ID NO: 1345162 - RNA, 20 nt, Human
ucacauaaacuccaagucau

SEQ ID NO: 1345163 - RNA, 23 nt, Human
ucacauaaacuccaagucauaaa

SEQ ID NO: 1345164 - RNA, 21 nt, Human
ucccacaccagccugagcccc

SEQ ID NO: 1345165 - RNA, 19 nt, Human
ucccgcggacucaccucgg

SEQ ID NO: 1345166 - RNA, 20 nt, Human
ucccggaaggugcggcaggc

SEQ ID NO: 1345167 - RNA, 26 nt, Human
ugagccccagacggucaggacccguc

SEQ ID NO: 1345168 - RNA, 22 nt, Human
uggccggcggcggggccgcgcg

SEQ ID NO: 1345169 - RNA, 23 nt, Human
aaaacuccuccauaauuucacaa

SEQ ID NO: 1345170 - RNA, 24 nt, Human
aagaugagggaccucagggaggga

SEQ ID NO: 1345171 - RNA, 20 nt, Human
aaugaaagagaggaagagga

SEQ ID NO: 1345172 - RNA, 21 nt, Human
acccuuaugggcaagaaaggu

SEQ ID NO: 1345173 - RNA, 21 nt, Human
agagagaaaggcagccuggga

SEQ ID NO: 1345174 - RNA, 23 nt, Human
agaggaagaggagccuaugggag

SEQ ID NO: 1345175 - RNA, 18 nt, Human
agcccggccaacccaccg

SEQ ID NO: 1345176 - RNA, 18 nt, Human
aggaggccgagccccagg

SEQ ID NO: 1345177 - RNA, 18 nt, Human
aggaguguucaggaucug

SEQ ID NO: 1345178 - RNA, 19 nt, Human
aggaguguucaggaucugc

SEQ ID NO: 1345179 - RNA, 19 nt, Human
aggcagccugggagggcca

SEQ ID NO: 1345180 - RNA, 21 nt, Human
aggcagccugggagggccagc

SEQ ID NO: 1345181 - RNA, 18 nt, Human
aggccgcgaccagagaga

SEQ ID NO: 1345182 - RNA, 25 nt, Human
aggccgcgaccagagagaaaggcag

SEQ ID NO: 1345183 - RNA, 19 nt, Human
agggaccucagggagggac

SEQ ID NO: 1345184 - RNA, 19 nt, Human
agggcacaaggacuugaaa

SEQ ID NO: 1345185 - RNA, 23 nt, Human
agucaggggguugagaggacugg

SEQ ID NO: 1345186 - RNA, 23 nt, Human
caauccuguaacucguuacaaac

SEQ ID NO: 1345187 - RNA, 18 nt, Human
cagaaucagagcagggac

SEQ ID NO: 1345188 - RNA, 19 nt, Human
cagaaucagagcagggaca

SEQ ID NO: 1345189 - RNA, 24 nt, Human
cagacugguggcucccgggcgccc

SEQ ID NO: 1345190 - RNA, 21 nt, Human
caggcccucagcccucuuuuc

SEQ ID NO: 1345191 - RNA, 27 nt, Human
caggcccucagcccucuuuuccucaua

SEQ ID NO: 1345192 - RNA, 22 nt, Human
ccaccuccaggcccucagcccu

SEQ ID NO: 1345193 - RNA, 19 nt, Human
ccagcccggccaacccacc

SEQ ID NO: 1345194 - RNA, 19 nt, Human
ccaggaguggggcugcggg

SEQ ID NO: 1345195 - RNA, 18 nt, Human
cccccaagucugaacuca

SEQ ID NO: 1345196 - RNA, 22 nt, Human
cccccaagucugaacucauagg

SEQ ID NO: 1345197 - RNA, 23 nt, Human
cccccaagucugaacucauaggc

SEQ ID NO: 1345198 - RNA, 18 nt, Human
ccccugggacccccagcc

SEQ ID NO: 1345199 - RNA, 19 nt, Human
cccuggagaaucucaggca

SEQ ID NO: 1345200 - RNA, 19 nt, Human
cccugggacccccagccac

SEQ ID NO: 1345201 - RNA, 20 nt, Human
ccgcgaccagagagaaaggc

SEQ ID NO: 1345202 - RNA, 24 nt, Human
ccugggacccccagccacgauggg

SEQ ID NO: 1345203 - RNA, 19 nt, Human
cgggaaggaggaccggcuu

SEQ ID NO: 1345204 - RNA, 21 nt, Human
gagagcaaaacacagagauuu

SEQ ID NO: 1345205 - RNA, 22 nt, Human
gagcccacgcucgaggggcuga

SEQ ID NO: 1345206 - RNA, 21 nt, Human
gagggccagcccggccaaccc

SEQ ID NO: 1345207 - RNA, 21 nt, Human
gaugggcuggcuccgcgggag

SEQ ID NO: 1345208 - RNA, 18 nt, Human
gccuccagccccugggac

SEQ ID NO: 1345209 - RNA, 18 nt, Human
gcgguggaggccggggcg

SEQ ID NO: 1345210 - RNA, 22 nt, Human
ggaagaggagccuaugggagga

SEQ ID NO: 1345211 - RNA, 21 nt, Human
ggaggaggccgagccccaggg

SEQ ID NO: 1345212 - RNA, 19 nt, Human
ggcacaaggacuugaaagg

SEQ ID NO: 1345213 - RNA, 20 nt, Human
ggccgggaaggaggaccggc

SEQ ID NO: 1345214 - RNA, 19 nt, Human
ggcugcgggcgcggcacca

SEQ ID NO: 1345215 - RNA, 23 nt, Human
gguugagaggacuggaggcgccu

SEQ ID NO: 1345216 - RNA, 19 nt, Human
uaacaggaaacacguggca

SEQ ID NO: 1345217 - RNA, 18 nt, Human
uaccauuugcuuuccggc

SEQ ID NO: 1345218 - RNA, 20 nt, Human
uaguuccuagugagacacgu

SEQ ID NO: 1345219 - RNA, 18 nt, Human
ucauaggcuggggaggag

SEQ ID NO: 1345220 - RNA, 21 nt, Human
ucccgggcgcccugaggacuc

SEQ ID NO: 1345221 - RNA, 19 nt, Human
ugaaagagaggaagaggag

SEQ ID NO: 1345222 - RNA, 20 nt, Human
ugaaugaaagagaggaagag

SEQ ID NO: 1345223 - RNA, 18 nt, Human
ugagggaccucagggagg

SEQ ID NO: 1345224 - RNA, 22 nt, Human
uggcucccgggcgcccugagga

SEQ ID NO: 1345225 - RNA, 24 nt, Human
ugggaggaggccgagccccagggc

SEQ ID NO: 1345226 - RNA, 24 nt, Human
uggggaggaggagacaucuaggug

SEQ ID NO: 1345227 - RNA, 19 nt, Human
uggggcugcgggcgcggca

SEQ ID NO: 1345228 - RNA, 18 nt, Human
ugguggcucccgggcgcc

SEQ ID NO: 1345229 - RNA, 21 nt, Human
uuacaaacacgauucuccuua

SEQ ID NO: 1345230 - RNA, 22 nt, Human
uucccaucugacuuuauuucac

SEQ ID NO: 1345231 - RNA, 19 nt, Human
uucuuuguaaaaacccuua

SEQ ID NO: 1345232 - RNA, 18 nt, Human
uuuacauuuuuguucagg

SEQ ID NO: 1345233 - RNA, 22 nt, Human
cggcgccccucacauccgcucu

SEQ ID NO: 1345234 - RNA, 24 nt, Human
ucuccucgccccagggugccccug

SEQ ID NO: 1345235 - RNA, 22 nt, Human
aagcagcucugacaacuccagc

SEQ ID NO: 1345236 - RNA, 22 nt, Human
aaguagcagguauugaagcuag

SEQ ID NO: 1345237 - RNA, 24 nt, Human
agaaaaacagacugggggagcagg

SEQ ID NO: 1345238 - RNA, 19 nt, Human
agccacugucaucuccccu

SEQ ID NO: 1345239 - RNA, 18 nt, Human
aggagacacagaccuccc

SEQ ID NO: 1345240 - RNA, 22 nt, Human
aguggagggacuguggcccaaa

SEQ ID NO: 1345241 - RNA, 24 nt, Human
aguucaguggaucccgagugaguc

SEQ ID NO: 1345242 - RNA, 20 nt, Human
cauucaaggccaagacauuc

SEQ ID NO: 1345243 - RNA, 23 nt, Human
ccaaagguagugaugacucugcu

SEQ ID NO: 1345244 - RNA, 21 nt, Human
ccagauccaaaaucagcagcc

SEQ ID NO: 1345245 - RNA, 18 nt, Human
cugcugggaggagacaca

SEQ ID NO: 1345246 - RNA, 20 nt, Human
cuggaagcagcaggguccuu

SEQ ID NO: 1345247 - RNA, 20 nt, Human
cuuugaaggaugaauaggag

SEQ ID NO: 1345248 - RNA, 19 nt, Human
gacucugcugggaggagac

SEQ ID NO: 1345249 - RNA, 21 nt, Human
gagcuuucuccagauccaaaa

SEQ ID NO: 1345250 - RNA, 18 nt, Human
ggagaaaaacagacuggg

SEQ ID NO: 1345251 - RNA, 22 nt, Human
ggagcaggaagagucaguguga

SEQ ID NO: 1345252 - RNA, 23 nt, Human
gggacuguggcccaaacucaggg

SEQ ID NO: 1345253 - RNA, 23 nt, Human
gugagcuuucuccagauccaaaa

SEQ ID NO: 1345254 - RNA, 21 nt, Human
uacauggauggaguagcagga

SEQ ID NO: 1345255 - RNA, 21 nt, Human
uagcagguauugaagcuaggg

SEQ ID NO: 1345256 - RNA, 23 nt, Human
ucagcagccugucauucaaggcc

SEQ ID NO: 1345257 - RNA, 18 nt, Human
uccacaauaguuccccuu

SEQ ID NO: 1345258 - RNA, 24 nt, Human
uccacaauaguuccccuuggcccu

SEQ ID NO: 1345259 - RNA, 22 nt, Human
uccccuuggcccugucaagccu

SEQ ID NO: 1345260 - RNA, 21 nt, Human
uccuugaaggauaagcaaugg

SEQ ID NO: 1345261 - RNA, 18 nt, Human
ugaaggauaagcaauggc

SEQ ID NO: 1345262 - RNA, 22 nt, Human
uggaucccgagugagucagaag

SEQ ID NO: 1345263 - RNA, 19 nt, Human
uggcccaaacucagggaua

SEQ ID NO: 1345264 - RNA, 24 nt, Human
ugggugauccugcggccccaaagg

SEQ ID NO: 1345265 - RNA, 26 nt, Human
uugaaggauaagcaauggcugcauga

SEQ ID NO: 1345266 - RNA, 22 nt, Human
aacaacauuggcaccgacaaaa

SEQ ID NO: 1345267 - RNA, 20 nt, Human
aaccagccagacaucuuuuu

SEQ ID NO: 1345268 - RNA, 25 nt, Human
aacugcuucuugaaguaggucccac

SEQ ID NO: 1345269 - RNA, 23 nt, Human
aagcacuuugacaucucuacauu

SEQ ID NO: 1345270 - RNA, 20 nt, Human
aagcucuccuugaugcucuu

SEQ ID NO: 1345271 - RNA, 24 nt, Human
aaggcucagaagauugaaguauca

SEQ ID NO: 1345272 - RNA, 18 nt, Human
aaguaggucccacucccu

SEQ ID NO: 1345273 - RNA, 21 nt, Human
acacagcaccaccagggguaa

SEQ ID NO: 1345274 - RNA, 21 nt, Human
acuguguagauaagagaaaau

SEQ ID NO: 1345275 - RNA, 23 nt, Human
agagaaaauguggcuguaaggug

SEQ ID NO: 1345276 - RNA, 20 nt, Human
agcaccaccagggguaaggu

SEQ ID NO: 1345277 - RNA, 18 nt, Human
agcucuccuugaugcucu

SEQ ID NO: 1345278 - RNA, 22 nt, Human
aggagcagaggagaggggcuca

SEQ ID NO: 1345279 - RNA, 23 nt, Human
agucgucgguaaucaagcccaga

SEQ ID NO: 1345280 - RNA, 19 nt, Human
aucccuuucucuccuacaa

SEQ ID NO: 1345281 - RNA, 18 nt, Human
caacaacauuggcaccga

SEQ ID NO: 1345282 - RNA, 21 nt, Human
cacagcaccaccagggguaag

SEQ ID NO: 1345283 - RNA, 18 nt, Human
cacagugaaguugcugcu

SEQ ID NO: 1345284 - RNA, 18 nt, Human
caccacaguuccuucaug

SEQ ID NO: 1345285 - RNA, 19 nt, Human
cagaaaguguuucaaaggc

SEQ ID NO: 1345286 - RNA, 20 nt, Human
cauguaggcauaugcuuuau

SEQ ID NO: 1345287 - RNA, 21 nt, Human
cccccagccauccauggucua

SEQ ID NO: 1345288 - RNA, 18 nt, Human
ccucaaggacaggaacca

SEQ ID NO: 1345289 - RNA, 22 nt, Human
ccucugauuuuguacuuccauc

SEQ ID NO: 1345290 - RNA, 24 nt, Human
ccugugacacagcaccaccagggg

SEQ ID NO: 1345291 - RNA, 18 nt, Human
ccuucucucuuccucucc

SEQ ID NO: 1345292 - RNA, 22 nt, Human
ccuucucucuuccucuccccca

SEQ ID NO: 1345293 - RNA, 23 nt, Human
cgccugagaaaccagccagacau

SEQ ID NO: 1345294 - RNA, 23 nt, Human
cucacaucuccagcaggaaaugg

SEQ ID NO: 1345295 - RNA, 22 nt, Human
cucacuuccauucugcaaccca

SEQ ID NO: 1345296 - RNA, 20 nt, Human
cuccugugacacagcaccac

SEQ ID NO: 1345297 - RNA, 20 nt, Human
cuuuucugcacaaaaucugg

SEQ ID NO: 1345298 - RNA, 24 nt, Human
gcacaaaaucugggaaucuggaaa

SEQ ID NO: 1345299 - RNA, 23 nt, Human
uaagacaagacccuugggaccua

SEQ ID NO: 1345300 - RNA, 22 nt, Human
uacaaggcucagaagauugaag

SEQ ID NO: 1345301 - RNA, 19 nt, Human
uacaagguuuucacuguuu

SEQ ID NO: 1345302 - RNA, 19 nt, Human
uaggucccacucccuaaaa

SEQ ID NO: 1345303 - RNA, 18 nt, Human
ucaagcccagacgccaua

SEQ ID NO: 1345304 - RNA, 24 nt, Human
ucacaauggacuuuuacucgagga

SEQ ID NO: 1345305 - RNA, 21 nt, Human
ucauuggcuggauuccaagua

SEQ ID NO: 1345306 - RNA, 18 nt, Human
ucccaaaaagcucuccuu

SEQ ID NO: 1345307 - RNA, 23 nt, Human
ucccaaaaagcucuccuugaugc

SEQ ID NO: 1345308 - RNA, 24 nt, Human
ucccuaaaaggccuggcacagccc

SEQ ID NO: 1345309 - RNA, 21 nt, Human
uccuauaugcucugucccucc

SEQ ID NO: 1345310 - RNA, 21 nt, Human
ucuccagcaggaaauggaggc

SEQ ID NO: 1345311 - RNA, 21 nt, Human
ucuuccuucuuaggcaacuga

SEQ ID NO: 1345312 - RNA, 18 nt, Human
ugaagaucauuggcugga

SEQ ID NO: 1345313 - RNA, 22 nt, Human
ugaucacauauccuuuugauaa

SEQ ID NO: 1345314 - RNA, 20 nt, Human
ugauuuccuccacaguuccc

SEQ ID NO: 1345315 - RNA, 21 nt, Human
ugcaguagcgcgacaugguua

SEQ ID NO: 1345316 - RNA, 21 nt, Human
uggcaccgacaaaauugaggc

SEQ ID NO: 1345317 - RNA, 18 nt, Human
uggccuucucucuuccuc

SEQ ID NO: 1345318 - RNA, 22 nt, Human
uguucagcauacgauuccugac

SEQ ID NO: 1345319 - RNA, 18 nt, Human
uuccucaaggacaggaac

SEQ ID NO: 1345320 - RNA, 25 nt, Human
uuccucaaggacaggaaccaauugc

SEQ ID NO: 1345321 - RNA, 19 nt, Human
uugcauggccuuucggcca

SEQ ID NO: 1345322 - RNA, 20 nt, Human
uugccgugugucucugaccu

SEQ ID NO: 1345323 - RNA, 24 nt, Human
aaaaccuccuccaaucccccuuca

SEQ ID NO: 1345324 - RNA, 23 nt, Human
aaccgaugucuggcggugaaacg

SEQ ID NO: 1345325 - RNA, 18 nt, Human
aacgagggggaggaaaag

SEQ ID NO: 1345326 - RNA, 19 nt, Human
aacuuauuuauuuucuagg

SEQ ID NO: 1345327 - RNA, 19 nt, Human
aaggaaaaggugaacgagg

SEQ ID NO: 1345328 - RNA, 21 nt, Human
aaggggggcugggggcgggag

SEQ ID NO: 1345329 - RNA, 23 nt, Human
acagaggagggaggaagagaagc

SEQ ID NO: 1345330 - RNA, 19 nt, Human
agaaggaggggagggggaa

SEQ ID NO: 1345331 - RNA, 21 nt, Human
agaaggaggggagggggaaau

SEQ ID NO: 1345332 - RNA, 28 nt, Human
agagaagcccgccuuagcccagcuuggg

SEQ ID NO: 1345333 - RNA, 18 nt, Human
agaggaagggaagagcag

SEQ ID NO: 1345334 - RNA, 20 nt, Human
agaggaagggaagagcaggg

SEQ ID NO: 1345335 - RNA, 21 nt, Human
agcagcagaaggaagaggggg

SEQ ID NO: 1345336 - RNA, 21 nt, Human
agcagcgucaaggcuccccca

SEQ ID NO: 1345337 - RNA, 19 nt, Human
aggaaaaggugaacgaggg

SEQ ID NO: 1345338 - RNA, 18 nt, Human
aggaagaggggggcaaag

SEQ ID NO: 1345339 - RNA, 22 nt, Human
aggaggagguggagaggaaggg

SEQ ID NO: 1345340 - RNA, 23 nt, Human
aggaggagguggagaggagggac

SEQ ID NO: 1345341 - RNA, 21 nt, Human
aggcgacagaggagggaggaa

SEQ ID NO: 1345342 - RNA, 21 nt, Human
aggcucccccaccuccccucc

SEQ ID NO: 1345343 - RNA, 24 nt, Human
aggcucccccaccuccccuccgcc

SEQ ID NO: 1345344 - RNA, 23 nt, Human
agggaaggggggcugggggcggg

SEQ ID NO: 1345345 - RNA, 19 nt, Human
agggagggagccgcugccc

SEQ ID NO: 1345346 - RNA, 23 nt, Human
aggggaggggagagggagaagga

SEQ ID NO: 1345347 - RNA, 24 nt, Human
agggggaggguugggggcagcugg

SEQ ID NO: 1345348 - RNA, 24 nt, Human
agguggagaggaagggaagagcag

SEQ ID NO: 1345349 - RNA, 18 nt, Human
aucgggcuuccccucccc

SEQ ID NO: 1345350 - RNA, 26 nt, Human
augguaucugugccuggcgccugucc

SEQ ID NO: 1345351 - RNA, 22 nt, Human
caaaaggggugaaauugaccag

SEQ ID NO: 1345352 - RNA, 18 nt, Human
caaggaggaggaggaggu

SEQ ID NO: 1345353 - RNA, 21 nt, Human
caaggcucccccaccuccccu

SEQ ID NO: 1345354 - RNA, 22 nt, Human
caaggcucccccaccuccccuc

SEQ ID NO: 1345355 - RNA, 21 nt, Human
caccuccccuccgccgcgucc

SEQ ID NO: 1345356 - RNA, 18 nt, Human
cagcagagggggugggaa

SEQ ID NO: 1345357 - RNA, 22 nt, Human
cagccacccgcacaaagggaaa

SEQ ID NO: 1345358 - RNA, 19 nt, Human
cagccccgggccgcguccc

SEQ ID NO: 1345359 - RNA, 19 nt, Human
cagcccggacgccuggguu

SEQ ID NO: 1345360 - RNA, 21 nt, Human
ccaccagccccgggccgcguc

SEQ ID NO: 1345361 - RNA, 22 nt, Human
ccagccacccgcacaaagggaa

SEQ ID NO: 1345362 - RNA, 26 nt, Human
cccccaccuccccuccgccgcguccc

SEQ ID NO: 1345363 - RNA, 22 nt, Human
cccccgccccuccccucccccc

SEQ ID NO: 1345364 - RNA, 19 nt, Human
cccccugcgcuccccucgg

SEQ ID NO: 1345365 - RNA, 22 nt, Human
ccccgccccuccccucccccug

SEQ ID NO: 1345366 - RNA, 20 nt, Human
ccccucccccaagagggcuc

SEQ ID NO: 1345367 - RNA, 21 nt, Human
ccccuccgccgcgucccccgc

SEQ ID NO: 1345368 - RNA, 22 nt, Human
ccccuccgccgcgucccccgcc

SEQ ID NO: 1345369 - RNA, 22 nt, Human
cccgcgcgcugggggcuagggc

SEQ ID NO: 1345370 - RNA, 18 nt, Human
cccgcggcccccgccgcc

SEQ ID NO: 1345371 - RNA, 20 nt, Human
cccgcucccgccccagagga

SEQ ID NO: 1345372 - RNA, 18 nt, Human
cccgggaaaugggggacu

SEQ ID NO: 1345373 - RNA, 21 nt, Human
ccgccccagaggacuaauugc

SEQ ID NO: 1345374 - RNA, 23 nt, Human
ccgccgccuccaggaagcuccgg

SEQ ID NO: 1345375 - RNA, 23 nt, Human
ccgccgccucgauccggccccag

SEQ ID NO: 1345376 - RNA, 19 nt, Human
ccgccgcgucccccgcccc

SEQ ID NO: 1345377 - RNA, 19 nt, Human
ccgccgcgucccccgcccc

SEQ ID NO: 1345378 - RNA, 22 nt, Human
ccuccccucccccugcgcuccc

SEQ ID NO: 1345379 - RNA, 23 nt, Human
cgacagaggagggaggaagagaa

SEQ ID NO: 1345380 - RNA, 18 nt, Human
cgagggggaggaaaagga

SEQ ID NO: 1345381 - RNA, 22 nt, Human
cgagggggaggaaaaggaggcg

SEQ ID NO: 1345382 - RNA, 22 nt, Human
cgcacaaagggaaauaaaaacc

SEQ ID NO: 1345383 - RNA, 25 nt, Human
cgccccuccccucccccugcgcucc

SEQ ID NO: 1345384 - RNA, 22 nt, Human
cgcccgagacuggccgcagcga

SEQ ID NO: 1345385 - RNA, 20 nt, Human
cgccgcgucccccgccccuc

SEQ ID NO: 1345386 - RNA, 21 nt, Human
cgccgggaggugggacgcugg

SEQ ID NO: 1345387 - RNA, 24 nt, Human
cgcgggcagcgcgguucccuggag

SEQ ID NO: 1345388 - RNA, 24 nt, Human
cgcucccggccccucucccagccc

SEQ ID NO: 1345389 - RNA, 22 nt, Human
cgcugggggcuagggcgagggg

SEQ ID NO: 1345390 - RNA, 18 nt, Human
cggagacugugaccccgg

SEQ ID NO: 1345391 - RNA, 19 nt, Human
cgggccccuuuccccaagg

SEQ ID NO: 1345392 - RNA, 19 nt, Human
cgggggaaggggggaccuc

SEQ ID NO: 1345393 - RNA, 22 nt, Human
cgucaaggcucccccaccuccc

SEQ ID NO: 1345394 - RNA, 18 nt, Human
cuaggccaugggagggcu

SEQ ID NO: 1345395 - RNA, 24 nt, Human
cucccagcccggacgccuggguuc

SEQ ID NO: 1345396 - RNA, 24 nt, Human
cucccccaccuccccuccgccgcg

SEQ ID NO: 1345397 - RNA, 21 nt, Human
cucgauccggccccagccacc

SEQ ID NO: 1345398 - RNA, 18 nt, Human
cuggacacugaccgggac

SEQ ID NO: 1345399 - RNA, 20 nt, Human
cuggcuuggggaagggagau

SEQ ID NO: 1345400 - RNA, 20 nt, Human
gaacgagggggaggaaaagg

SEQ ID NO: 1345401 - RNA, 23 nt, Human
gaaggaagaggggggcaaaggaa

SEQ ID NO: 1345402 - RNA, 20 nt, Human
gagaccuucagcuguucugg

SEQ ID NO: 1345403 - RNA, 19 nt, Human
gagaggaagggaagagcag

SEQ ID NO: 1345404 - RNA, 24 nt, Human
gagagggagaaggaggggaggggg

SEQ ID NO: 1345405 - RNA, 19 nt, Human
gagcagcagaaggaagagg

SEQ ID NO: 1345406 - RNA, 21 nt, Human
gagcagcagaaggaagagggg

SEQ ID NO: 1345407 - RNA, 22 nt, Human
gagcagcagaaggaagaggggg

SEQ ID NO: 1345408 - RNA, 22 nt, Human
gagcagcagaaggaagaggggg

SEQ ID NO: 1345409 - RNA, 21 nt, Human
gaggaaaaggaggcgacagag

SEQ ID NO: 1345410 - RNA, 23 nt, Human
gaggacucaaaagggggccgagg

SEQ ID NO: 1345411 - RNA, 23 nt, Human
gagguggggagcagcugggagug

SEQ ID NO: 1345412 - RNA, 20 nt, Human
gaucccuuccuggggucggg

SEQ ID NO: 1345413 - RNA, 22 nt, Human
gaucgggcuuccccucccccaa

SEQ ID NO: 1345414 - RNA, 27 nt, Human
gaugguaucugugccuggcgccugucc

SEQ ID NO: 1345415 - RNA, 24 nt, Human
gccagcgccaccugcggacgcucc

SEQ ID NO: 1345416 - RNA, 19 nt, Human
gcccccgccgccucgaucc

SEQ ID NO: 1345417 - RNA, 24 nt, Human
gccccgaaccccgcgcgcuggggg

SEQ ID NO: 1345418 - RNA, 18 nt, Human
gccgcagcgagcgcggag

SEQ ID NO: 1345419 - RNA, 20 nt, Human
gccgcccgccgccuccagga

SEQ ID NO: 1345420 - RNA, 19 nt, Human
gccggggccgaggccgcgg

SEQ ID NO: 1345421 - RNA, 24 nt, Human
gccggggccgaggccgcggcagcu

SEQ ID NO: 1345422 - RNA, 18 nt, Human
gccucgauccggccccag

SEQ ID NO: 1345423 - RNA, 21 nt, Human
gcggaggcgcgcggaguuucc

SEQ ID NO: 1345424 - RNA, 19 nt, Human
gcggagggaaggggggcug

SEQ ID NO: 1345425 - RNA, 20 nt, Human
ggaccgggagaguggggaug

SEQ ID NO: 1345426 - RNA, 24 nt, Human
ggagagggagaaggaggggagggg

SEQ ID NO: 1345427 - RNA, 19 nt, Human
ggagaguggggaugugcaa

SEQ ID NO: 1345428 - RNA, 24 nt, Human
ggagcagcugggagugacacugcu

SEQ ID NO: 1345429 - RNA, 19 nt, Human
ggagcgcgggaggugggga

SEQ ID NO: 1345430 - RNA, 19 nt, Human
ggaggcgcgcggaguuucc

SEQ ID NO: 1345431 - RNA, 23 nt, Human
ggaggugggacgcuggggagggg

SEQ ID NO: 1345432 - RNA, 18 nt, Human
ggcagcuggcuuggggaa

SEQ ID NO: 1345433 - RNA, 20 nt, Human
ggcagggggaggguuggggg

SEQ ID NO: 1345434 - RNA, 20 nt, Human
ggcgacagaggagggaggaa

SEQ ID NO: 1345435 - RNA, 18 nt, Human
gggaaggggggcuggggg

SEQ ID NO: 1345436 - RNA, 18 nt, Human
gggcaaaggaaggguggg

SEQ ID NO: 1345437 - RNA, 19 nt, Human
gggcagggggaggguuggg

SEQ ID NO: 1345438 - RNA, 22 nt, Human
gggcagggggaggguugggggc

SEQ ID NO: 1345439 - RNA, 19 nt, Human
gggccgaggccgcggcagc

SEQ ID NO: 1345440 - RNA, 23 nt, Human
gggccgaggccgcggcagcugga

SEQ ID NO: 1345441 - RNA, 19 nt, Human
gggcuccccaggggcgcgg

SEQ ID NO: 1345442 - RNA, 18 nt, Human
gggcugggggcgggaguc

SEQ ID NO: 1345443 - RNA, 19 nt, Human
gggcugggggcgggagucg

SEQ ID NO: 1345444 - RNA, 18 nt, Human
ggggagagggagaaggag

SEQ ID NO: 1345445 - RNA, 25 nt, Human
ggggagagggagaaggaggggaggg

SEQ ID NO: 1345446 - RNA, 25 nt, Human
ggggaggggagagggagaaggaggg

SEQ ID NO: 1345447 - RNA, 19 nt, Human
ggggcaaaggaaggguggg

SEQ ID NO: 1345448 - RNA, 24 nt, Human
ggugaacgagggggaggaaaagga

SEQ ID NO: 1345449 - RNA, 21 nt, Human
gguggagaggaagggaagagc

SEQ ID NO: 1345450 - RNA, 19 nt, Human
ggugggugcggaucgggcu

SEQ ID NO: 1345451 - RNA, 18 nt, Human
gucccccgccccuccccu

SEQ ID NO: 1345452 - RNA, 23 nt, Human
guggagaggucacuggcugaaau

SEQ ID NO: 1345453 - RNA, 21 nt, Human
uaaaaaccuccuccaaucccc

SEQ ID NO: 1345454 - RNA, 19 nt, Human
uaauugcgggcagggggag

SEQ ID NO: 1345455 - RNA, 20 nt, Human
uccccaggggcgcgggcgcc

SEQ ID NO: 1345456 - RNA, 20 nt, Human
ucccccaccuccccuccgcc

SEQ ID NO: 1345457 - RNA, 18 nt, Human
ucccccgccccuccccuc

SEQ ID NO: 1345458 - RNA, 21 nt, Human
ucccccugcgcuccccucgga

SEQ ID NO: 1345459 - RNA, 24 nt, Human
ucccuggagcgacacggccgcccg

SEQ ID NO: 1345460 - RNA, 18 nt, Human
uccgccgcgucccccgcc

SEQ ID NO: 1345461 - RNA, 25 nt, Human
uccgcgggcagcgcgguucccugga

SEQ ID NO: 1345462 - RNA, 21 nt, Human
uccgggaucccuuccuggggu

SEQ ID NO: 1345463 - RNA, 19 nt, Human
ucggcucagcggggagccc

SEQ ID NO: 1345464 - RNA, 19 nt, Human
ucucccagcccggacgccu

SEQ ID NO: 1345465 - RNA, 19 nt, Human
ugaaacggaccgggagagu

SEQ ID NO: 1345466 - RNA, 21 nt, Human
ugacacugcuggggaggggag

SEQ ID NO: 1345467 - RNA, 20 nt, Human
ugcucugugccccgcucccg

SEQ ID NO: 1345468 - RNA, 20 nt, Human
uggggagggagggagccgcu

SEQ ID NO: 1345469 - RNA, 21 nt, Human
uggggaggggaggggagaggg

SEQ ID NO: 1345470 - RNA, 21 nt, Human
ugucgcgcuccucucggcuca

SEQ ID NO: 1345471 - RNA, 25 nt, Human
uguucccaccagccccgggccgcgu

SEQ ID NO: 1345472 - RNA, 20 nt, Human
uuccccucccccaagagggc

SEQ ID NO: 1345473 - RNA, 22 nt, Human
uucuccgggccccuuuccccaa

SEQ ID NO: 1345474 - RNA, 20 nt, Human
aaaauaaaucacgcugcgaa

SEQ ID NO: 1345475 - RNA, 24 nt, Human
aagaaaauaaaucacgcugcgaag

SEQ ID NO: 1345476 - RNA, 21 nt, Human
cagccucgcuccgccggcggg

SEQ ID NO: 1345477 - RNA, 18 nt, Human
ccucgcuccgccggcggg

SEQ ID NO: 1345478 - RNA, 23 nt, Human
cggcgggagcagcgagccgggag

SEQ ID NO: 1345479 - RNA, 21 nt, Human
cgggagcagcgagccgggagg

SEQ ID NO: 1345480 - RNA, 18 nt, Human
gccuguuaccacuagccu

SEQ ID NO: 1345481 - RNA, 22 nt, Human
ggaagaagaguucagaaaaaaa

SEQ ID NO: 1345482 - RNA, 19 nt, Human
ggagcagcgagccgggagg

SEQ ID NO: 1345483 - RNA, 23 nt, Human
gggaggcuccguccaccucggcc

SEQ ID NO: 1345484 - RNA, 21 nt, Human
ucacgcugcgaagaaagggca

SEQ ID NO: 1345485 - RNA, 24 nt, Human
ucccuggaagaagaguucagaaaa

SEQ ID NO: 1345486 - RNA, 20 nt, Human
ugcgaagaaagggcagccuc

SEQ ID NO: 1345487 - RNA, 23 nt, Human
uggaagaagaguucagaaaaaaa

SEQ ID NO: 1345488 - RNA, 18 nt, Human
uucagaaaaaaagaagaa

SEQ ID NO: 1345489 - RNA, 19 nt, Human
aagcguugaagaucucagc

SEQ ID NO: 1345490 - RNA, 19 nt, Human
agaggcuuagugguugaag

SEQ ID NO: 1345491 - RNA, 19 nt, Human
aggaagaaggaaauagaag

SEQ ID NO: 1345492 - RNA, 23 nt, Human
cacucccuaucuagguacuucuu

SEQ ID NO: 1345493 - RNA, 22 nt, Human
cagcuugcugcucccacugacu

SEQ ID NO: 1345494 - RNA, 23 nt, Human
ccccuugcuggcucugcagaggc

SEQ ID NO: 1345495 - RNA, 21 nt, Human
ccguacugaguggcucuuccu

SEQ ID NO: 1345496 - RNA, 20 nt, Human
ccuguggagcuguggcucug

SEQ ID NO: 1345497 - RNA, 20 nt, Human
cgagugcaggccuguggagc

SEQ ID NO: 1345498 - RNA, 19 nt, Human
cugcucccacugacugucc

SEQ ID NO: 1345499 - RNA, 20 nt, Human
cugcucccacugacuguccu

SEQ ID NO: 1345500 - RNA, 22 nt, Human
gauuauacuuuuccccuugcug

SEQ ID NO: 1345501 - RNA, 22 nt, Human
ggagcccaguccguagcagucc

SEQ ID NO: 1345502 - RNA, 25 nt, Human
uacugaguggcucuuccucccacuc

SEQ ID NO: 1345503 - RNA, 22 nt, Human
uagaagguggccguacugagug

SEQ ID NO: 1345504 - RNA, 20 nt, Human
ucucuuggccucaguguccu

SEQ ID NO: 1345505 - RNA, 21 nt, Human
ucugcagaggccccagacucc

SEQ ID NO: 1345506 - RNA, 23 nt, Human
ugacaagaggcuuagugguugaa

SEQ ID NO: 1345507 - RNA, 25 nt, Human
ugacaagaggcuuagugguugaagg

SEQ ID NO: 1345508 - RNA, 23 nt, Human
ugcucccacugacuguccuugau

SEQ ID NO: 1345509 - RNA, 18 nt, Human
uggcucugcagaggcccc

SEQ ID NO: 1345510 - RNA, 18 nt, Human
uggcucuuccucccacuc

SEQ ID NO: 1345511 - RNA, 20 nt, Human
uggcucuuccucccacuccc

SEQ ID NO: 1345512 - RNA, 18 nt, Human
ugggagcagcugccucgu

SEQ ID NO: 1345513 - RNA, 18 nt, Human
uuauacuuuuccccuugc

SEQ ID NO: 1345514 - RNA, 21 nt, Human
aaacagggugaagucaaaggg

SEQ ID NO: 1345515 - RNA, 21 nt, Human
aaacagggugaagucaaaggg

SEQ ID NO: 1345516 - RNA, 23 nt, Human
aaagauugggaaauauagaauaa

SEQ ID NO: 1345517 - RNA, 20 nt, Human
aaaucgcagccucaacacaa

SEQ ID NO: 1345518 - RNA, 22 nt, Human
aacacuuuuaugagggcagaug

SEQ ID NO: 1345519 - RNA, 22 nt, Human
aacacuuuuaugagggcagaug

SEQ ID NO: 1345520 - RNA, 18 nt, Human
aagcccugaucccuuuac

SEQ ID NO: 1345521 - RNA, 22 nt, Human
acaaacagggugaagucaaagg

SEQ ID NO: 1345522 - RNA, 22 nt, Human
acaaacagggugaagucaaagg

SEQ ID NO: 1345523 - RNA, 22 nt, Human
agagcagcugagauccagaaug

SEQ ID NO: 1345524 - RNA, 21 nt, Human
agaggaugggccaggggaucc

SEQ ID NO: 1345525 - RNA, 20 nt, Human
agaugccuuugccauaggcu

SEQ ID NO: 1345526 - RNA, 19 nt, Human
agcaccccuccauaccacu

SEQ ID NO: 1345527 - RNA, 24 nt, Human
aggaaauacuggagauggggcuca

SEQ ID NO: 1345528 - RNA, 20 nt, Human
aggagaccacaaagggagac

SEQ ID NO: 1345529 - RNA, 21 nt, Human
aggaggaacuggugugaggug

SEQ ID NO: 1345530 - RNA, 19 nt, Human
agggcacgaugucagggac

SEQ ID NO: 1345531 - RNA, 18 nt, Human
auagaauaacugaagccc

SEQ ID NO: 1345532 - RNA, 21 nt, Human
auagagcuucuuggcgguccg

SEQ ID NO: 1345533 - RNA, 19 nt, Human
aucaugcuuuguuaggucc

SEQ ID NO: 1345534 - RNA, 19 nt, Human
caaagggaaagucagggga

SEQ ID NO: 1345535 - RNA, 19 nt, Human
caaagggaaagucagggga

SEQ ID NO: 1345536 - RNA, 23 nt, Human
caauagguucuguccggaggacc

SEQ ID NO: 1345537 - RNA, 18 nt, Human
cacacccagauguuccca

SEQ ID NO: 1345538 - RNA, 18 nt, Human
cacacccagauguuccca

SEQ ID NO: 1345539 - RNA, 19 nt, Human
cacccuuugugagaggcuc

SEQ ID NO: 1345540 - RNA, 22 nt, Human
cacuagccgaaccaaggccaac

SEQ ID NO: 1345541 - RNA, 21 nt, Human
cacugcaggagaggaugggcc

SEQ ID NO: 1345542 - RNA, 22 nt, Human
cagcaggaggaacuggugugag

SEQ ID NO: 1345543 - RNA, 18 nt, Human
caggagggcugcucagca

SEQ ID NO: 1345544 - RNA, 24 nt, Human
cagggugaagucaaagggaaaguc

SEQ ID NO: 1345545 - RNA, 24 nt, Human
cagggugaagucaaagggaaaguc

SEQ ID NO: 1345546 - RNA, 19 nt, Human
cagugcuaggcagcacccc

SEQ ID NO: 1345547 - RNA, 22 nt, Human
cccauuccugaguauccaaagg

SEQ ID NO: 1345548 - RNA, 29 nt, Human
ccccugaacgccauagagaaauuccucug

SEQ ID NO: 1345549 - RNA, 23 nt, Human
cccuccauaccacuagccgaacc

SEQ ID NO: 1345550 - RNA, 24 nt, Human
ccuccauaccacuagccgaaccaa

SEQ ID NO: 1345551 - RNA, 23 nt, Human
ccugggguaacaggggugguacg

SEQ ID NO: 1345552 - RNA, 23 nt, Human
ccugggguaacaggggugguacg

SEQ ID NO: 1345553 - RNA, 24 nt, Human
ccuucaagagcagcugagauccag

SEQ ID NO: 1345554 - RNA, 20 nt, Human
cgaggaagcugauguugaug

SEQ ID NO: 1345555 - RNA, 18 nt, Human
cuagccgaaccaaggcca

SEQ ID NO: 1345556 - RNA, 20 nt, Human
cuagccgaaccaaggccaac

SEQ ID NO: 1345557 - RNA, 22 nt, Human
cuaggcagcaccccuccauacc

SEQ ID NO: 1345558 - RNA, 25 nt, Human
cugcacagcuccccugaacgccaua

SEQ ID NO: 1345559 - RNA, 22 nt, Human
cuguagaucuccuucacggcuu

SEQ ID NO: 1345560 - RNA, 19 nt, Human
cugugcuguccuuuuccca

SEQ ID NO: 1345561 - RNA, 20 nt, Human
cugugcuguccuuuucccau

SEQ ID NO: 1345562 - RNA, 21 nt, Human
cuucaagagcagcugagaucc

SEQ ID NO: 1345563 - RNA, 18 nt, Human
cuugugcagacauggucg

SEQ ID NO: 1345564 - RNA, 18 nt, Human
cuugugcagacauggucg

SEQ ID NO: 1345565 - RNA, 18 nt, Human
gcaggagaggaugggcca

SEQ ID NO: 1345566 - RNA, 19 nt, Human
ggaaaggcgugggaugaua

SEQ ID NO: 1345567 - RNA, 23 nt, Human
ggauccugggguaacaggggugg

SEQ ID NO: 1345568 - RNA, 23 nt, Human
ggauccugggguaacaggggugg

SEQ ID NO: 1345569 - RNA, 22 nt, Human
ggauggcaggcucugcuguugc

SEQ ID NO: 1345570 - RNA, 18 nt, Human
ggcagauggauccugggg

SEQ ID NO: 1345571 - RNA, 20 nt, Human
gggcagauggauccuggggu

SEQ ID NO: 1345572 - RNA, 24 nt, Human
guaacaagucacuguccuucaaga

SEQ ID NO: 1345573 - RNA, 19 nt, Human
guaauggccccuugauucc

SEQ ID NO: 1345574 - RNA, 24 nt, Human
gucugcaucaagcugugggugucg

SEQ ID NO: 1345575 - RNA, 19 nt, Human
guugcuagagaugauccac

SEQ ID NO: 1345576 - RNA, 18 nt, Human
uaauggccccuugauucc

SEQ ID NO: 1345577 - RNA, 18 nt, Human
uacaguuuagauuccgac

SEQ ID NO: 1345578 - RNA, 18 nt, Human
uacaguuuagauuccgac

SEQ ID NO: 1345579 - RNA, 21 nt, Human
uaccugaacacuuuuaugagg

SEQ ID NO: 1345580 - RNA, 21 nt, Human
uaccugaacacuuuuaugagg

SEQ ID NO: 1345581 - RNA, 19 nt, Human
uagauguaaucacuucaca

SEQ ID NO: 1345582 - RNA, 19 nt, Human
uagauguaaucacuucaca

SEQ ID NO: 1345583 - RNA, 20 nt, Human
uaggcugcuccaugcagcug

SEQ ID NO: 1345584 - RNA, 23 nt, Human
uaucuugggguccugaguauuaa

SEQ ID NO: 1345585 - RNA, 23 nt, Human
uaucuugggguccugaguauuaa

SEQ ID NO: 1345586 - RNA, 18 nt, Human
ucaagcucuaccaugaag

SEQ ID NO: 1345587 - RNA, 18 nt, Human
ucaagcucuaccaugaag

SEQ ID NO: 1345588 - RNA, 18 nt, Human
ucagucucuuccugauau

SEQ ID NO: 1345589 - RNA, 18 nt, Human
ucagucucuuccugauau

SEQ ID NO: 1345590 - RNA, 18 nt, Human
uccacugcaggagaggau

SEQ ID NO: 1345591 - RNA, 21 nt, Human
uccaggcuguagagacuuccu

SEQ ID NO: 1345592 - RNA, 21 nt, Human
uccauaccacuagccgaaccc

SEQ ID NO: 1345593 - RNA, 23 nt, Human
ucccuauuaucccauggaaaggc

SEQ ID NO: 1345594 - RNA, 19 nt, Human
uccugggguaacaggggug

SEQ ID NO: 1345595 - RNA, 19 nt, Human
uccugggguaacaggggug

SEQ ID NO: 1345596 - RNA, 23 nt, Human
ucgcagccucaacacaauagguu

SEQ ID NO: 1345597 - RNA, 23 nt, Human
ucucugauggauacagaguucuc

SEQ ID NO: 1345598 - RNA, 20 nt, Human
ugaccuguugcuagagauga

SEQ ID NO: 1345599 - RNA, 23 nt, Human
ugaccuguugcuagagaugaucc

SEQ ID NO: 1345600 - RNA, 21 nt, Human
ugagaaauaaggauaucaugc

SEQ ID NO: 1345601 - RNA, 21 nt, Human
ugagagguaguuugacaaugu

SEQ ID NO: 1345602 - RNA, 18 nt, Human
ugagccaaaacaacaugc

SEQ ID NO: 1345603 - RNA, 20 nt, Human
ugagccaaaacaacaugcag

SEQ ID NO: 1345604 - RNA, 26 nt, Human
ugagggcagauggauccuccccgagg

SEQ ID NO: 1345605 - RNA, 26 nt, Human
ugagggcagauggauccuccccgagg

SEQ ID NO: 1345606 - RNA, 19 nt, Human
ugagggcagauggauccug

SEQ ID NO: 1345607 - RNA, 19 nt, Human
ugagggcagauggauccug

SEQ ID NO: 1345608 - RNA, 20 nt, Human
ugauggauacagaguucuca

SEQ ID NO: 1345609 - RNA, 18 nt, Human
ugauucauuaucucccuc

SEQ ID NO: 1345610 - RNA, 20 nt, Human
ugcuccaugcagcugcaguu

SEQ ID NO: 1345611 - RNA, 22 nt, Human
uggaucgggucugggggauggu

SEQ ID NO: 1345612 - RNA, 22 nt, Human
uggaucgggucugggggauggu

SEQ ID NO: 1345613 - RNA, 22 nt, Human
uggcaggagggcugcucagcag

SEQ ID NO: 1345614 - RNA, 23 nt, Human
uggcaggcucugcuguugcggug

SEQ ID NO: 1345615 - RNA, 21 nt, Human
ugggaaauauagaauaacuga

SEQ ID NO: 1345616 - RNA, 18 nt, Human
ugggagagagaaaaucgc

SEQ ID NO: 1345617 - RNA, 18 nt, Human
ugggaugauauggugagg

SEQ ID NO: 1345618 - RNA, 21 nt, Human
ugggccaggggauccaacuug

SEQ ID NO: 1345619 - RNA, 21 nt, Human
uguaucuugggguccugagua

SEQ ID NO: 1345620 - RNA, 21 nt, Human
uguaucuugggguccugagua

SEQ ID NO: 1345621 - RNA, 23 nt, Human
uguccacgucaucgauaguucca

SEQ ID NO: 1345622 - RNA, 18 nt, Human
uuggagggcauccugugc

SEQ ID NO: 1345623 - RNA, 24 nt, Human
uuuuuuuuuuuuuuuuuccauuuu

SEQ ID NO: 1345624 - RNA, 26 nt, Human
aaacagaacgaaaacaucaccacccc

SEQ ID NO: 1345625 - RNA, 24 nt, Human
aauaaaacagaacgaaaacaucac

SEQ ID NO: 1345626 - RNA, 21 nt, Human
acaguggccuccucuuccucc

SEQ ID NO: 1345627 - RNA, 19 nt, Human
accuagcccuggaggcagg

SEQ ID NO: 1345628 - RNA, 20 nt, Human
aggcaccagugaagggaggc

SEQ ID NO: 1345629 - RNA, 22 nt, Human
aggcaccagugaagggaggcug

SEQ ID NO: 1345630 - RNA, 27 nt, Human
auccccuucaaaccuccccugggcucc

SEQ ID NO: 1345631 - RNA, 22 nt, Human
caaggcaccagugaagggggag

SEQ ID NO: 1345632 - RNA, 20 nt, Human
cacagaggaggccuggcccc

SEQ ID NO: 1345633 - RNA, 22 nt, Human
cacagguagaggaagccacaaa

SEQ ID NO: 1345634 - RNA, 20 nt, Human
caguggccuccucuuccucc

SEQ ID NO: 1345635 - RNA, 24 nt, Human
ccacgggccacaguggccuccucu

SEQ ID NO: 1345636 - RNA, 23 nt, Human
ccaggauccccuucaaaccuccc

SEQ ID NO: 1345637 - RNA, 25 nt, Human
ccccugggcuccacgucccaagggc

SEQ ID NO: 1345638 - RNA, 24 nt, Human
cccgcgagccggggggcuccgccu

SEQ ID NO: 1345639 - RNA, 19 nt, Human
ccuccccugcacggugggg

SEQ ID NO: 1345640 - RNA, 19 nt, Human
cgauccccgcgagccgggg

SEQ ID NO: 1345641 - RNA, 20 nt, Human
cuagcccuggaggcagggca

SEQ ID NO: 1345642 - RNA, 20 nt, Human
cuccucuuccuccuccucca

SEQ ID NO: 1345643 - RNA, 19 nt, Human
gagcacagguagaggaagc

SEQ ID NO: 1345644 - RNA, 21 nt, Human
gauaggccgccugccugggcc

SEQ ID NO: 1345645 - RNA, 24 nt, Human
gcggacucccuccccugcacggug

SEQ ID NO: 1345646 - RNA, 22 nt, Human
ggcaaggccacgggccacagug

SEQ ID NO: 1345647 - RNA, 21 nt, Human
ggccccuagcaucaaggcacc

SEQ ID NO: 1345648 - RNA, 23 nt, Human
ggucccucugccaaaggaggugg

SEQ ID NO: 1345649 - RNA, 28 nt, Human
gugcuggggucccucugccaaaggaggu

SEQ ID NO: 1345650 - RNA, 18 nt, Human
uagaaaaauaaaacagaa

SEQ ID NO: 1345651 - RNA, 21 nt, Human
uagaggaagccacaaaugggu

SEQ ID NO: 1345652 - RNA, 22 nt, Human
ucacagaggaggccuggccccu

SEQ ID NO: 1345653 - RNA, 19 nt, Human
uccccgcgagccggggggc

SEQ ID NO: 1345654 - RNA, 22 nt, Human
uccccgcgagccggggggcucc

SEQ ID NO: 1345655 - RNA, 21 nt, Human
uccuccaaggaucaggauagg

SEQ ID NO: 1345656 - RNA, 20 nt, Human
ucucuaccuagcccuggagg

SEQ ID NO: 1345657 - RNA, 22 nt, Human
ugacccgcaggacgcagcgcuc

SEQ ID NO: 1345658 - RNA, 23 nt, Human
ugcuggggucccucugccaaagg

SEQ ID NO: 1345659 - RNA, 19 nt, Human
ugggcuccacgucccaagg

SEQ ID NO: 1345660 - RNA, 31 nt, Human
aacaaauaaccacuuaaauagaacagugucc

SEQ ID NO: 1345661 - RNA, 22 nt, Human
aagaacugaugcaggcucaaag

SEQ ID NO: 1345662 - RNA, 22 nt, Human
aauaaaguacaauugaaccugg

SEQ ID NO: 1345663 - RNA, 21 nt, Human
agaacugaugcaggcucaaag

SEQ ID NO: 1345664 - RNA, 22 nt, Human
agccgcacgcaagcccaacgca

SEQ ID NO: 1345665 - RNA, 19 nt, Human
aguccauacaucacacugg

SEQ ID NO: 1345666 - RNA, 22 nt, Human
auacacaacuauaauaaaguac

SEQ ID NO: 1345667 - RNA, 21 nt, Human
cacgcaagcccaacgcagccg

SEQ ID NO: 1345668 - RNA, 23 nt, Human
caguguucuagagaccuagaggg

SEQ ID NO: 1345669 - RNA, 23 nt, Human
cgagccgcacgcaagcccaacgc

SEQ ID NO: 1345670 - RNA, 21 nt, Human
cggaacccgaaacaagacugg

SEQ ID NO: 1345671 - RNA, 21 nt, Human
cugaugcaggcucaaaggaag

SEQ ID NO: 1345672 - RNA, 20 nt, Human
gauuuguauuuuauuuccuu

SEQ ID NO: 1345673 - RNA, 19 nt, Human
ggaacccgaaacaagacug

SEQ ID NO: 1345674 - RNA, 25 nt, Human
ggguuucaagaaaucaaauccuaau

SEQ ID NO: 1345675 - RNA, 23 nt, Human
guagauaggcaaaaccaagaacu

SEQ ID NO: 1345676 - RNA, 22 nt, Human
uaggcaaaaccaagaacugaug

SEQ ID NO: 1345677 - RNA, 24 nt, Human
uagggcauuuuaaugugcaaaaaa

SEQ ID NO: 1345678 - RNA, 23 nt, Human
uauaauaaaguacaauugaaccu

SEQ ID NO: 1345679 - RNA, 23 nt, Human
ucuuuacacaugcagacaaacca

SEQ ID NO: 1345680 - RNA, 22 nt, Human
ugguagauaggcaaaaccaaga

SEQ ID NO: 1345681 - RNA, 22 nt, Human
uuuugcguuuaauguuuuugau

SEQ ID NO: 1345682 - RNA, 23 nt, Human
uuuuugauugaguccauacauca

SEQ ID NO: 1345683 - RNA, 24 nt, Human
aaacccaucccauucugaaaccag

SEQ ID NO: 1345684 - RNA, 22 nt, Human
aaccuggacucuucuaaagugg

SEQ ID NO: 1345685 - RNA, 25 nt, Human
aagaaacccaucccauucugaaacc

SEQ ID NO: 1345686 - RNA, 19 nt, Human
aaggacagauaucaaugaa

SEQ ID NO: 1345687 - RNA, 20 nt, Human
acaccacugugccccccagc

SEQ ID NO: 1345688 - RNA, 24 nt, Human
acagaguguuaaugcucaacgaug

SEQ ID NO: 1345689 - RNA, 23 nt, Human
acagucaaaugugguuggggaug

SEQ ID NO: 1345690 - RNA, 21 nt, Human
agauaucaaugaaaacuuuua

SEQ ID NO: 1345691 - RNA, 18 nt, Human
aggcaggggucugcagcu

SEQ ID NO: 1345692 - RNA, 19 nt, Human
aggcaggggucugcagcuc

SEQ ID NO: 1345693 - RNA, 25 nt, Human
auccacacaaucucuccaaauauuu

SEQ ID NO: 1345694 - RNA, 21 nt, Human
caaaugcacauccccucucuu

SEQ ID NO: 1345695 - RNA, 22 nt, Human
cacuaaguuccuccaauggucc

SEQ ID NO: 1345696 - RNA, 22 nt, Human
cacuacacaccacugugccccc

SEQ ID NO: 1345697 - RNA, 24 nt, Human
cacucugucugcuaagcacccacu

SEQ ID NO: 1345698 - RNA, 18 nt, Human
cagaaucucaagauaugu

SEQ ID NO: 1345699 - RNA, 21 nt, Human
cagaguucugcccugcuuccc

SEQ ID NO: 1345700 - RNA, 19 nt, Human
ccaaacugagcguggaugg

SEQ ID NO: 1345701 - RNA, 21 nt, Human
ccacugugccccccagccagc

SEQ ID NO: 1345702 - RNA, 22 nt, Human
ccccagccagcuucacucuguc

SEQ ID NO: 1345703 - RNA, 21 nt, Human
ccucuaaaugcucaccaaccu

SEQ ID NO: 1345704 - RNA, 21 nt, Human
ccugggcucaagagcguucuc

SEQ ID NO: 1345705 - RNA, 19 nt, Human
cuacacaccacugugcccc

SEQ ID NO: 1345706 - RNA, 21 nt, Human
cuacacaccacugugcccccc

SEQ ID NO: 1345707 - RNA, 21 nt, Human
cuauccaacaucacacacaaa

SEQ ID NO: 1345708 - RNA, 24 nt, Human
cucagagugaacaaauccagagga

SEQ ID NO: 1345709 - RNA, 21 nt, Human
cugcagcucugucacagagug

SEQ ID NO: 1345710 - RNA, 18 nt, Human
cugcuaagcacccacucu

SEQ ID NO: 1345711 - RNA, 22 nt, Human
cugugccccccagccagcuuca

SEQ ID NO: 1345712 - RNA, 21 nt, Human
cuuaaauccacacaaucucuc

SEQ ID NO: 1345713 - RNA, 18 nt, Human
gagccacuugacucgugu

SEQ ID NO: 1345714 - RNA, 20 nt, Human
gauggaagggggcagaggga

SEQ ID NO: 1345715 - RNA, 18 nt, Human
ggacaggaguuggcugga

SEQ ID NO: 1345716 - RNA, 19 nt, Human
ggcagacaagcccuauucu

SEQ ID NO: 1345717 - RNA, 23 nt, Human
gugccccccagccagcuucacuc

SEQ ID NO: 1345718 - RNA, 18 nt, Human
guuggggauggaaggggg

SEQ ID NO: 1345719 - RNA, 19 nt, Human
uaaagugggcagacaagcc

SEQ ID NO: 1345720 - RNA, 21 nt, Human
uaacaagaacaaaggggucuc

SEQ ID NO: 1345721 - RNA, 22 nt, Human
uaacaugaggugaagaaaccca

SEQ ID NO: 1345722 - RNA, 24 nt, Human
uaacaugaggugaagaaacccauc

SEQ ID NO: 1345723 - RNA, 23 nt, Human
uaagcacccacucugcaaacaga

SEQ ID NO: 1345724 - RNA, 20 nt, Human
uaccuuggucuuuugauaca

SEQ ID NO: 1345725 - RNA, 18 nt, Human
ucaagagcguucugguca

SEQ ID NO: 1345726 - RNA, 25 nt, Human
ucuaaaugcucaccaaccuggacuc

SEQ ID NO: 1345727 - RNA, 21 nt, Human
ucugcuaagcacccacucugc

SEQ ID NO: 1345728 - RNA, 20 nt, Human
ugaaagacaagaggguggcc

SEQ ID NO: 1345729 - RNA, 24 nt, Human
ugacaacaggacacagaugcaaug

SEQ ID NO: 1345730 - RNA, 22 nt, Human
ugacucgugucacaaagaaugg

SEQ ID NO: 1345731 - RNA, 20 nt, Human
ugagacucaaggcagggguc

SEQ ID NO: 1345732 - RNA, 21 nt, Human
ugagaugagacucaaggcagg

SEQ ID NO: 1345733 - RNA, 19 nt, Human
ugagccacuugacucgugu

SEQ ID NO: 1345734 - RNA, 22 nt, Human
ugaggugaagaaacccauccca

SEQ ID NO: 1345735 - RNA, 22 nt, Human
ugauacacagcagcacuacaca

SEQ ID NO: 1345736 - RNA, 18 nt, Human
ugcccugaggagguugug

SEQ ID NO: 1345737 - RNA, 18 nt, Human
ugcccugcuucccucuaa

SEQ ID NO: 1345738 - RNA, 22 nt, Human
ugcccugcuucccucuaaaugc

SEQ ID NO: 1345739 - RNA, 20 nt, Human
uggaggagcagauggguccc

SEQ ID NO: 1345740 - RNA, 21 nt, Human
uggcuggaggagcagaugggu

SEQ ID NO: 1345741 - RNA, 20 nt, Human
ugggaggagccaccauggug

SEQ ID NO: 1345742 - RNA, 18 nt, Human
uggggauggaagggggca

SEQ ID NO: 1345743 - RNA, 23 nt, Human
uggggauggaagggggcagaggg

SEQ ID NO: 1345744 - RNA, 23 nt, Human
uggucuuuugauacacagcagca

SEQ ID NO: 1345745 - RNA, 19 nt, Human
ugugagggacaggaguugg

SEQ ID NO: 1345746 - RNA, 18 nt, Human
ugugguuggggauggaag

SEQ ID NO: 1345747 - RNA, 22 nt, Human
uuggcuggaggagcagaugggu

SEQ ID NO: 1345748 - RNA, 22 nt, Human
aaacaacaacaauaaacaaccc

SEQ ID NO: 1345749 - RNA, 23 nt, Human
aaaccaauuuccaaaaagacuag

SEQ ID NO: 1345750 - RNA, 23 nt, Human
aaagaaacaaucuuauucuucag

SEQ ID NO: 1345751 - RNA, 25 nt, Human
aacaacaauaaacaacccagaaaaa

SEQ ID NO: 1345752 - RNA, 21 nt, Human
aacaacauuaguaacuauuuu

SEQ ID NO: 1345753 - RNA, 19 nt, Human
aacaaugagaacacuugga

SEQ ID NO: 1345754 - RNA, 21 nt, Human
aacccaaauguccaucaaugg

SEQ ID NO: 1345755 - RNA, 21 nt, Human
aacccagaaaaauggagaucu

SEQ ID NO: 1345756 - RNA, 23 nt, Human
aagaaagaaaaaucuaaacauau

SEQ ID NO: 1345757 - RNA, 18 nt, Human
aagcagggaaaaggcaga

SEQ ID NO: 1345758 - RNA, 21 nt, Human
aauuguauggccucaagcagg

SEQ ID NO: 1345759 - RNA, 21 nt, Human
acaacaacaaacaacaacaaa

SEQ ID NO: 1345760 - RNA, 20 nt, Human
acaccgccuguucucacuca

SEQ ID NO: 1345761 - RNA, 18 nt, Human
accugcacauugugcaca

SEQ ID NO: 1345762 - RNA, 21 nt, Human
acucuggguaauucacuuuug

SEQ ID NO: 1345763 - RNA, 18 nt, Human
acuggaaaaccucaaccu

SEQ ID NO: 1345764 - RNA, 24 nt, Human
acuuauuggauagauauacuuuuu

SEQ ID NO: 1345765 - RNA, 23 nt, Human
agaaaaaucuaaacauauuuuua

SEQ ID NO: 1345766 - RNA, 21 nt, Human
agagagcaaacaguaaugaga

SEQ ID NO: 1345767 - RNA, 22 nt, Human
agaggcucgcuggcucccacgg

SEQ ID NO: 1345768 - RNA, 18 nt, Human
agggacauagaugaagcu

SEQ ID NO: 1345769 - RNA, 22 nt, Human
agggugaguuggugaacgugug

SEQ ID NO: 1345770 - RNA, 25 nt, Human
aguaagauuuucuuuaauuuuucuu

SEQ ID NO: 1345771 - RNA, 23 nt, Human
aguaaugagauccuauaaagaga

SEQ ID NO: 1345772 - RNA, 21 nt, Human
caaagacagaaaaccaaacac

SEQ ID NO: 1345773 - RNA, 22 nt, Human
caaauguccaucaaugguagac

SEQ ID NO: 1345774 - RNA, 23 nt, Human
caacaacaauaaacaacccagaa

SEQ ID NO: 1345775 - RNA, 22 nt, Human
caauagcaaagacuuggaacca

SEQ ID NO: 1345776 - RNA, 20 nt, Human
cacaaaccauuggcaaccug

SEQ ID NO: 1345777 - RNA, 24 nt, Human
cacaccaacauggcacauguauac

SEQ ID NO: 1345778 - RNA, 18 nt, Human
cacauguauacauaugua

SEQ ID NO: 1345779 - RNA, 18 nt, Human
cagaaaaccaaacaccgc

SEQ ID NO: 1345780 - RNA, 25 nt, Human
cauauacaccauggaauacuaugca

SEQ ID NO: 1345781 - RNA, 22 nt, Human
ccaaacaccgccuguucucacu

SEQ ID NO: 1345782 - RNA, 20 nt, Human
cccaacauuucagacaaguu

SEQ ID NO: 1345783 - RNA, 24 nt, Human
cccccaacauuucagacaaguugu

SEQ ID NO: 1345784 - RNA, 24 nt, Human
ccugucaugggguugggggaggug

SEQ ID NO: 1345785 - RNA, 22 nt, Human
ccuucccauagacagcugaagc

SEQ ID NO: 1345786 - RNA, 19 nt, Human
cgcaaagacagaaaaccaa

SEQ ID NO: 1345787 - RNA, 18 nt, Human
cucauguguccagcuucc

SEQ ID NO: 1345788 - RNA, 30 nt, Human
gacaacaacaaacaacaacaauaaacaacu

SEQ ID NO: 1345789 - RNA, 23 nt, Human
gagaggcucgcuggcucccacgg

SEQ ID NO: 1345790 - RNA, 22 nt, Human
gcaaacuaucgcaaagacagaa

SEQ ID NO: 1345791 - RNA, 19 nt, Human
gcaaagacagaaaaccaaa

SEQ ID NO: 1345792 - RNA, 18 nt, Human
gcagaaaaugacaacaac

SEQ ID NO: 1345793 - RNA, 19 nt, Human
gcccccaacauuucagaca

SEQ ID NO: 1345794 - RNA, 20 nt, Human
gggguugggggaggugggag

SEQ ID NO: 1345795 - RNA, 23 nt, Human
gggguugggggaggugggaggga

SEQ ID NO: 1345796 - RNA, 22 nt, Human
ggucacugccaugccagaaaca

SEQ ID NO: 1345797 - RNA, 22 nt, Human
guccuuuguagggacauagaug

SEQ ID NO: 1345798 - RNA, 19 nt, Human
gugcagcacaccaacaugg

SEQ ID NO: 1345799 - RNA, 22 nt, Human
uaaaaugaauccuaaggaguug

SEQ ID NO: 1345800 - RNA, 18 nt, Human
uaaaugacuugcucaaga

SEQ ID NO: 1345801 - RNA, 23 nt, Human
uacaugcuguauuguguccaagu

SEQ ID NO: 1345802 - RNA, 19 nt, Human
uagaauuacuggaaaaccu

SEQ ID NO: 1345803 - RNA, 18 nt, Human
uaguaacaccucaacaac

SEQ ID NO: 1345804 - RNA, 18 nt, Human
uaguucugaaaaugccug

SEQ ID NO: 1345805 - RNA, 22 nt, Human
uaucacuggccaaugacucagc

SEQ ID NO: 1345806 - RNA, 22 nt, Human
ucacagucacaaaccauuggca

SEQ ID NO: 1345807 - RNA, 19 nt, Human
ucaccauugucuuuccuuc

SEQ ID NO: 1345808 - RNA, 25 nt, Human
ucacugccaugccagaaacagauug

SEQ ID NO: 1345809 - RNA, 21 nt, Human
ucagaaagaaacaaucuuauu

SEQ ID NO: 1345810 - RNA, 19 nt, Human
ucagcccccaacauuucag

SEQ ID NO: 1345811 - RNA, 22 nt, Human
ucauguguccagcuuccaucug

SEQ ID NO: 1345812 - RNA, 20 nt, Human
ucccucaauauauaggacaa

SEQ ID NO: 1345813 - RNA, 22 nt, Human
ucccuugagcacguaagaucag

SEQ ID NO: 1345814 - RNA, 21 nt, Human
ucgcaaagacagaaaaccaaa

SEQ ID NO: 1345815 - RNA, 21 nt, Human
ucucagaugacugcuagaagu

SEQ ID NO: 1345816 - RNA, 19 nt, Human
ugaaagaguaaaguauuuu

SEQ ID NO: 1345817 - RNA, 21 nt, Human
ugaaagaguaaaguauuuuga

SEQ ID NO: 1345818 - RNA, 18 nt, Human
ugacaacaacaaacaaca

SEQ ID NO: 1345819 - RNA, 19 nt, Human
ugacaacaacaaacaacaa

SEQ ID NO: 1345820 - RNA, 20 nt, Human
ugacaacaacaaacaacaac

SEQ ID NO: 1345821 - RNA, 23 nt, Human
ugacaacaacaaacaacaacaau

SEQ ID NO: 1345822 - RNA, 21 nt, Human
ugacuuccauugcaagacucc

SEQ ID NO: 1345823 - RNA, 23 nt, Human
ugacuuggucacugccaugccag

SEQ ID NO: 1345824 - RNA, 31 nt, Human
ugagaaacaaaccagcaguuguuugaaaacc

SEQ ID NO: 1345825 - RNA, 19 nt, Human
ugagcgaggaacuguaugg

SEQ ID NO: 1345826 - RNA, 24 nt, Human
ugaggcaagcaaacuuagagaggu

SEQ ID NO: 1345827 - RNA, 19 nt, Human
ugaugaguuaaugggugca

SEQ ID NO: 1345828 - RNA, 21 nt, Human
uggaaaaccucaaccuagaug

SEQ ID NO: 1345829 - RNA, 20 nt, Human
uggaagauugcaaccuuggc

SEQ ID NO: 1345830 - RNA, 23 nt, Human
uggaagauugcaaccuuggcuca

SEQ ID NO: 1345831 - RNA, 20 nt, Human
uggaauacuaugcagccaua

SEQ ID NO: 1345832 - RNA, 22 nt, Human
uggauuuuuuuuuauagcacac

SEQ ID NO: 1345833 - RNA, 19 nt, Human
uggcacauguauacauaug

SEQ ID NO: 1345834 - RNA, 18 nt, Human
uggcucagaaagaaacaa

SEQ ID NO: 1345835 - RNA, 21 nt, Human
uguccaaugugaauuaugcua

SEQ ID NO: 1345836 - RNA, 21 nt, Human
uguccaucaaugguagacugg

SEQ ID NO: 1345837 - RNA, 18 nt, Human
uguguagauuuucccaug

SEQ ID NO: 1345838 - RNA, 23 nt, Human
uuaaacuggucuuccuaggcuuu

SEQ ID NO: 1345839 - RNA, 23 nt, Human
uuacuggaaaaccucaaccuaga

SEQ ID NO: 1345840 - RNA, 24 nt, Human
uucaccauugucuuuccuucuaaa

SEQ ID NO: 1345841 - RNA, 23 nt, Human
uucuagugcaagaaagaaaaauc

SEQ ID NO: 1345842 - RNA, 22 nt, Human
uucucacagucacaaaccauug

SEQ ID NO: 1345843 - RNA, 21 nt, Human
uugaacacaaaaagagaaguc

SEQ ID NO: 1345844 - RNA, 21 nt, Human
uuggucacugccaugccagaa

SEQ ID NO: 1345845 - RNA, 24 nt, Human
uugguuuuugaaugaauugucuua

SEQ ID NO: 1345846 - RNA, 22 nt, Human
uuucucaagcucugaaagcuuu

SEQ ID NO: 1345847 - RNA, 24 nt, Human
uuucuuggucucaaagcuucucuu

SEQ ID NO: 1345848 - RNA, 22 nt, Human
uuucuuuucuuuucucacaguc

SEQ ID NO: 1345849 - RNA, 21 nt, Human
uuugauauuaacaacuguuuc

SEQ ID NO: 1345850 - RNA, 19 nt, Human
uuuuaaguguaagauaaua

SEQ ID NO: 1345851 - RNA, 21 nt, Human
ccgcugguggugcugagcgcg

SEQ ID NO: 1345852 - RNA, 18 nt, Human
cgagcugcggagacgccc

SEQ ID NO: 1345853 - RNA, 21 nt, Human
ugguggugcugagcgcgcggg

SEQ ID NO: 1345854 - RNA, 29 nt, Human
aaacagaaugauagagcaagagggacccc

SEQ ID NO: 1345855 - RNA, 24 nt, Human
aaaugucuuuauugaaacagaaug

SEQ ID NO: 1345856 - RNA, 19 nt, Human
aagcagcagggaggaggca

SEQ ID NO: 1345857 - RNA, 21 nt, Human
aagcagcagggaggaggcagg

SEQ ID NO: 1345858 - RNA, 22 nt, Human
aagcagcagggaggaggcaggg

SEQ ID NO: 1345859 - RNA, 19 nt, Human
agcagggaggaggcagggu

SEQ ID NO: 1345860 - RNA, 23 nt, Human
agcagggaggaggcagggugggg

SEQ ID NO: 1345861 - RNA, 19 nt, Human
agcccugccuucccuacuc

SEQ ID NO: 1345862 - RNA, 20 nt, Human
aggaggcaggguggggacgg

SEQ ID NO: 1345863 - RNA, 19 nt, Human
agggaggaggcaggguggg

SEQ ID NO: 1345864 - RNA, 20 nt, Human
aggugccucugagacuucug

SEQ ID NO: 1345865 - RNA, 23 nt, Human
aggugccucugagacuucugggc

SEQ ID NO: 1345866 - RNA, 20 nt, Human
caaagcagcagggaggaggc

SEQ ID NO: 1345867 - RNA, 19 nt, Human
cagcagaggccgagcugca

SEQ ID NO: 1345868 - RNA, 18 nt, Human
caggauggagcccagacc

SEQ ID NO: 1345869 - RNA, 19 nt, Human
ccccugacucuggccaagg

SEQ ID NO: 1345870 - RNA, 20 nt, Human
ccucugagacuucugggcag

SEQ ID NO: 1345871 - RNA, 21 nt, Human
ccuguccccugacucuggcca

SEQ ID NO: 1345872 - RNA, 21 nt, Human
cgugaggugccucugagacuu

SEQ ID NO: 1345873 - RNA, 20 nt, Human
cugagacuucugggcagccc

SEQ ID NO: 1345874 - RNA, 26 nt, Human
gaagagcaccggcaggcagcagaggc

SEQ ID NO: 1345875 - RNA, 18 nt, Human
gagcaccggcaggcagca

SEQ ID NO: 1345876 - RNA, 19 nt, Human
gagccacgaagagcaccgg

SEQ ID NO: 1345877 - RNA, 25 nt, Human
gauagagcaagaaauaaugaggucu

SEQ ID NO: 1345878 - RNA, 19 nt, Human
gccgagcugcagcugcugg

SEQ ID NO: 1345879 - RNA, 23 nt, Human
uccgcgauggcuggcgugaggug

SEQ ID NO: 1345880 - RNA, 19 nt, Human
ucucccuguccccugacuc

SEQ ID NO: 1345881 - RNA, 18 nt, Human
ucuuugggcgcaggaugg

SEQ ID NO: 1345882 - RNA, 21 nt, Human
ugacucuggccaaggaaguga

SEQ ID NO: 1345883 - RNA, 21 nt, Human
ugagacuucugggcagcccug

SEQ ID NO: 1345884 - RNA, 21 nt, Human
ugaggucuggguggaugucuu

SEQ ID NO: 1345885 - RNA, 19 nt, Human
uuuuuuuuuuuuuuuugcu

SEQ ID NO: 1345886 - RNA, 18 nt, Human
uuuuuuuuuuuuuuuuug

SEQ ID NO: 1345887 - RNA, 24 nt, Human
uuuuuuuuuuuuuuuuugcucguu

SEQ ID NO: 1345888 - RNA, 19 nt, Human
aaaaagaaacagacacaaa

SEQ ID NO: 1345889 - RNA, 20 nt, Human
aaaaagaaacagacacaaaa

SEQ ID NO: 1345890 - RNA, 21 nt, Human
aaaagaaacagacacaaaaag

SEQ ID NO: 1345891 - RNA, 21 nt, Human
aaaaguaggauccaaugugcu

SEQ ID NO: 1345892 - RNA, 19 nt, Human
aaagaaacagacacaaaaa

SEQ ID NO: 1345893 - RNA, 20 nt, Human
aacaacugaaaauacacuga

SEQ ID NO: 1345894 - RNA, 23 nt, Human
aagaauuuagaaagccugauggg

SEQ ID NO: 1345895 - RNA, 21 nt, Human
aagaggacaggggagcuggag

SEQ ID NO: 1345896 - RNA, 24 nt, Human
acugcagcaaggucaacuaaccug

SEQ ID NO: 1345897 - RNA, 19 nt, Human
acuuuugcuauuugcccuc

SEQ ID NO: 1345898 - RNA, 23 nt, Human
agaaacuuuugguuuucuuguga

SEQ ID NO: 1345899 - RNA, 18 nt, Human
agaaugccauaucaccuc

SEQ ID NO: 1345900 - RNA, 19 nt, Human
agacucaacaacugaaaau

SEQ ID NO: 1345901 - RNA, 21 nt, Human
agagaucugguucaauaucug

SEQ ID NO: 1345902 - RNA, 22 nt, Human
agauggacacaaggauacaaga

SEQ ID NO: 1345903 - RNA, 21 nt, Human
agccuuguuucaauggacaga

SEQ ID NO: 1345904 - RNA, 23 nt, Human
auacccuggcaagagagaaacag

SEQ ID NO: 1345905 - RNA, 20 nt, Human
aucaccuccacccuuuacug

SEQ ID NO: 1345906 - RNA, 23 nt, Human
caacaaauguaaagugccuggca

SEQ ID NO: 1345907 - RNA, 21 nt, Human
caaccaaucuuccuggaaguu

SEQ ID NO: 1345908 - RNA, 20 nt, Human
caagaacaggucucaucuaa

SEQ ID NO: 1345909 - RNA, 19 nt, Human
caccuccacccuuuacugu

SEQ ID NO: 1345910 - RNA, 19 nt, Human
cagacuuucaaccaaucuu

SEQ ID NO: 1345911 - RNA, 21 nt, Human
cagauccuccuccuacuuuuc

SEQ ID NO: 1345912 - RNA, 22 nt, Human
caguagaaauaggguugccuuc

SEQ ID NO: 1345913 - RNA, 23 nt, Human
caguguguuagaaccucucuccc

SEQ ID NO: 1345914 - RNA, 19 nt, Human
cccagucugauauuucagc

SEQ ID NO: 1345915 - RNA, 18 nt, Human
ccuagggcaaugccccag

SEQ ID NO: 1345916 - RNA, 19 nt, Human
ccuccuacuuuuccugucc

SEQ ID NO: 1345917 - RNA, 19 nt, Human
ccuccuacuuuuccugucc

SEQ ID NO: 1345918 - RNA, 18 nt, Human
cuaauacccuggcaagag

SEQ ID NO: 1345919 - RNA, 22 nt, Human
cucaacccuaauccucagaggc

SEQ ID NO: 1345920 - RNA, 23 nt, Human
cucaacccuaauccucagaggca

SEQ ID NO: 1345921 - RNA, 19 nt, Human
cucucuagguuuuaaugaa

SEQ ID NO: 1345922 - RNA, 22 nt, Human
cuguacuaugagucaacaacuc

SEQ ID NO: 1345923 - RNA, 19 nt, Human
cuuucagaaugccauauca

SEQ ID NO: 1345924 - RNA, 21 nt, Human
gaaacagacacaaaaaguuac

SEQ ID NO: 1345925 - RNA, 22 nt, Human
gaaauucuuccuuccccuacuu

SEQ ID NO: 1345926 - RNA, 20 nt, Human
gaauaaaauuuuugaaguag

SEQ ID NO: 1345927 - RNA, 20 nt, Human
gaaucuuaggaugugcuucu

SEQ ID NO: 1345928 - RNA, 19 nt, Human
gaauuuagaaagccugaug

SEQ ID NO: 1345929 - RNA, 19 nt, Human
gacacaaggauacaagaac

SEQ ID NO: 1345930 - RNA, 25 nt, Human
gacuuagucccucccuacuuucaga

SEQ ID NO: 1345931 - RNA, 22 nt, Human
gagaagcuggggaaguuguggg

SEQ ID NO: 1345932 - RNA, 22 nt, Human
gaggacaggggagcuggagaag

SEQ ID NO: 1345933 - RNA, 26 nt, Human
gccccagauccuccuccuacuuuucc

SEQ ID NO: 1345934 - RNA, 21 nt, Human
guguaaacuuaaacaagcuuc

SEQ ID NO: 1345935 - RNA, 22 nt, Human
uaaagugccuggcauaaucugc

SEQ ID NO: 1345936 - RNA, 19 nt, Human
uacaaagucauuuggagac

SEQ ID NO: 1345937 - RNA, 20 nt, Human
uagcuguguaaacuuaaaca

SEQ ID NO: 1345938 - RNA, 19 nt, Human
uaucugaagaaaaguagga

SEQ ID NO: 1345939 - RNA, 20 nt, Human
ucacaguuagucuuucccug

SEQ ID NO: 1345940 - RNA, 20 nt, Human
uccucagaggcaccucuuuu

SEQ ID NO: 1345941 - RNA, 26 nt, Human
uccucagaggcaccucuuuuauuuuu

SEQ ID NO: 1345942 - RNA, 18 nt, Human
uccuugaugaucccccuc

SEQ ID NO: 1345943 - RNA, 21 nt, Human
ugaagaggacaggggagcugg

SEQ ID NO: 1345944 - RNA, 22 nt, Human
ugaagaggacaggggagcugga

SEQ ID NO: 1345945 - RNA, 23 nt, Human
ugaagaggacaggggagcuggag

SEQ ID NO: 1345946 - RNA, 20 nt, Human
ugaagauggacacaaggaua

SEQ ID NO: 1345947 - RNA, 23 nt, Human
ugaggagggggaggaaauuggag

SEQ ID NO: 1345948 - RNA, 23 nt, Human
ugaugaucccccuuccauucuau

SEQ ID NO: 1345949 - RNA, 21 nt, Human
ugccaguucucuuuugcucca

SEQ ID NO: 1345950 - RNA, 22 nt, Human
ugccaguucucuuuugcuccaa

SEQ ID NO: 1345951 - RNA, 26 nt, Human
ugcucaacccuaauccucagaggcac

SEQ ID NO: 1345952 - RNA, 21 nt, Human
ugcucuggggcuuccaguagc

SEQ ID NO: 1345953 - RNA, 27 nt, Human
uggaacucagagcuuuggugugaaugu

SEQ ID NO: 1345954 - RNA, 21 nt, Human
uggcauaaucugcccugcagg

SEQ ID NO: 1345955 - RNA, 20 nt, Human
ugggaaggagaacugcagca

SEQ ID NO: 1345956 - RNA, 22 nt, Human
uggucauggugauaguaguugg

SEQ ID NO: 1345957 - RNA, 23 nt, Human
uguccuugaugaucccccuucca

SEQ ID NO: 1345958 - RNA, 22 nt, Human
ugugagagugaggagggggagg

SEQ ID NO: 1345959 - RNA, 21 nt, Human
uguguuagaaccucucuccca

SEQ ID NO: 1345960 - RNA, 19 nt, Human
uuaaugggaaggagaacug

SEQ ID NO: 1345961 - RNA, 20 nt, Human
uuagaaccucucucccaaug

SEQ ID NO: 1345962 - RNA, 21 nt, Human
uucaauggacagaaaggaacc

SEQ ID NO: 1345963 - RNA, 24 nt, Human
uucaauuucuucagcuguaaaaug

SEQ ID NO: 1345964 - RNA, 23 nt, Human
uucccugaaucuuaggaugugcu

SEQ ID NO: 1345965 - RNA, 22 nt, Human
uucucucacuguccuuacuugg

SEQ ID NO: 1345966 - RNA, 20 nt, Human
uucuucagcuguaaaaugga

SEQ ID NO: 1345967 - RNA, 20 nt, Human
uugccuucaguguguuagaa

SEQ ID NO: 1345968 - RNA, 18 nt, Human
uugguuuucuugugagag

SEQ ID NO: 1345969 - RNA, 21 nt, Human
uuguuucaauggacagaaagg

SEQ ID NO: 1345970 - RNA, 23 nt, Human
uuuuccuguccuuccuaauaccc

SEQ ID NO: 1345971 - RNA, 20 nt, Human
uuuugguuuucuugugagag

SEQ ID NO: 1345972 - RNA, 19 nt, Human
aaacacaacagacuucaca

SEQ ID NO: 1345973 - RNA, 19 nt, Human
accucgagaggcccccgag

SEQ ID NO: 1345974 - RNA, 21 nt, Human
accuucccagagaggggccag

SEQ ID NO: 1345975 - RNA, 26 nt, Human
acucugagaagcucaaacacaacaga

SEQ ID NO: 1345976 - RNA, 21 nt, Human
agagaggggccaggccuggca

SEQ ID NO: 1345977 - RNA, 18 nt, Human
agccuggggcacggacag

SEQ ID NO: 1345978 - RNA, 19 nt, Human
aggaaggaaaaggagucau

SEQ ID NO: 1345979 - RNA, 22 nt, Human
aggccucuguuucugggcccag

SEQ ID NO: 1345980 - RNA, 23 nt, Human
aggggccaggccuggcagcccug

SEQ ID NO: 1345981 - RNA, 22 nt, Human
caacccccaggccccggccccc

SEQ ID NO: 1345982 - RNA, 20 nt, Human
caaccuucccagagaggggc

SEQ ID NO: 1345983 - RNA, 18 nt, Human
cacccggggagguuucuc

SEQ ID NO: 1345984 - RNA, 19 nt, Human
cagaagggagcuggcgucg

SEQ ID NO: 1345985 - RNA, 19 nt, Human
cagacaggagcugagguag

SEQ ID NO: 1345986 - RNA, 21 nt, Human
caggccccggccccccagaag

SEQ ID NO: 1345987 - RNA, 20 nt, Human
caguaggcgaucaucaggug

SEQ ID NO: 1345988 - RNA, 22 nt, Human
cccagggugguugaggacucac

SEQ ID NO: 1345989 - RNA, 20 nt, Human
ccccagauagcucucccagc

SEQ ID NO: 1345990 - RNA, 23 nt, Human
cccgcagacaguaggcgaucauc

SEQ ID NO: 1345991 - RNA, 22 nt, Human
cccuccccagauagcucuccca

SEQ ID NO: 1345992 - RNA, 18 nt, Human
cgccccucccuccucccc

SEQ ID NO: 1345993 - RNA, 22 nt, Human
cgccuccuaagcagucaaccuu

SEQ ID NO: 1345994 - RNA, 19 nt, Human
cggccuccucucccccucc

SEQ ID NO: 1345995 - RNA, 20 nt, Human
cuccccucggcaggccucug

SEQ ID NO: 1345996 - RNA, 18 nt, Human
cucggccuccucuccccc

SEQ ID NO: 1345997 - RNA, 25 nt, Human
cucggccuccucucccccuccccag

SEQ ID NO: 1345998 - RNA, 27 nt, Human
cucugggguguauucugcucggccucc

SEQ ID NO: 1345999 - RNA, 26 nt, Human
cugagguagggguuggagaggcugac

SEQ ID NO: 1346000 - RNA, 18 nt, Human
gacagggcugcccgucuc

SEQ ID NO: 1346001 - RNA, 21 nt, Human
gcaggccucuguuucugggcc

SEQ ID NO: 1346002 - RNA, 21 nt, Human
gcccagggugguugaggacuc

SEQ ID NO: 1346003 - RNA, 22 nt, Human
gcgccuccuaagcagucaaccu

SEQ ID NO: 1346004 - RNA, 19 nt, Human
ggaaaaggagucauuccac

SEQ ID NO: 1346005 - RNA, 19 nt, Human
ggagcugagguagggguug

SEQ ID NO: 1346006 - RNA, 24 nt, Human
ggccaggaaggaaaaggagucauu

SEQ ID NO: 1346007 - RNA, 25 nt, Human
ggcgccccucccuccuccccugccc

SEQ ID NO: 1346008 - RNA, 26 nt, Human
gggagcgggucuggaagggggucgcg

SEQ ID NO: 1346009 - RNA, 23 nt, Human
ggguggacagaggccaggcuccu

SEQ ID NO: 1346010 - RNA, 20 nt, Human
ggucuggaagggggucgcgg

SEQ ID NO: 1346011 - RNA, 23 nt, Human
uaacaaacgguguaaaaaaccag

SEQ ID NO: 1346012 - RNA, 23 nt, Human
ucaaccuucccagagaggggcca

SEQ ID NO: 1346013 - RNA, 18 nt, Human
ucacugagggagagcagg

SEQ ID NO: 1346014 - RNA, 18 nt, Human
ucagcucucaaccuuccc

SEQ ID NO: 1346015 - RNA, 22 nt, Human
uccacucugagaagcucaaaca

SEQ ID NO: 1346016 - RNA, 23 nt, Human
uccccagauagcucucccagccu

SEQ ID NO: 1346017 - RNA, 21 nt, Human
uccucucccccuccccagaua

SEQ ID NO: 1346018 - RNA, 27 nt, Human
ugagaagcucaaacacaacagacuuca

SEQ ID NO: 1346019 - RNA, 21 nt, Human
ugagguagggguuggagaggc

SEQ ID NO: 1346020 - RNA, 21 nt, Human
ugcaccggucgccuuuggucc

SEQ ID NO: 1346021 - RNA, 22 nt, Human
ugcagacaggagcugagguagg

SEQ ID NO: 1346022 - RNA, 20 nt, Human
ugcccuggcugucagucugu

SEQ ID NO: 1346023 - RNA, 18 nt, Human
ugcucggccuccucuccc

SEQ ID NO: 1346024 - RNA, 18 nt, Human
uggaggaagggacagggc

SEQ ID NO: 1346025 - RNA, 20 nt, Human
uggaggaagggacagggcug

SEQ ID NO: 1346026 - RNA, 20 nt, Human
ugggguguauucugcucggc

SEQ ID NO: 1346027 - RNA, 21 nt, Human
uuggagaggcugaccucgaga

SEQ ID NO: 1346028 - RNA, 21 nt, Human
aaaaaucaucuccuaugaacc

SEQ ID NO: 1346029 - RNA, 21 nt, Human
aaaaccacaggccaccgcccu

SEQ ID NO: 1346030 - RNA, 26 nt, Human
aaaagaaagcagaacucauuuagcaa

SEQ ID NO: 1346031 - RNA, 19 nt, Human
aaaccaggggcagaggagg

SEQ ID NO: 1346032 - RNA, 24 nt, Human
aacaaauaaaacauauuuuucuca

SEQ ID NO: 1346033 - RNA, 22 nt, Human
aacaagagcaaaacuacaucua

SEQ ID NO: 1346034 - RNA, 18 nt, Human
aacacucucaccaaugaa

SEQ ID NO: 1346035 - RNA, 19 nt, Human
aacauagugaaaccccauc

SEQ ID NO: 1346036 - RNA, 20 nt, Human
aacauagugaaaccccaucu

SEQ ID NO: 1346037 - RNA, 20 nt, Human
aacauagugaaaccccaucu

SEQ ID NO: 1346038 - RNA, 21 nt, Human
aacauagugaaaccccaucuc

SEQ ID NO: 1346039 - RNA, 25 nt, Human
aacugcaccauugcacuccagccug

SEQ ID NO: 1346040 - RNA, 26 nt, Human
aagaaaaaaaaaauuugguucuuuga

SEQ ID NO: 1346041 - RNA, 25 nt, Human
aagcauuucaaacagaacaguguuc

SEQ ID NO: 1346042 - RNA, 24 nt, Human
aaucacuugaacccaggaggcgga

SEQ ID NO: 1346043 - RNA, 21 nt, Human
acauccaaccagcacaccuaa

SEQ ID NO: 1346044 - RNA, 20 nt, Human
acauuauaaaaaccauaaag

SEQ ID NO: 1346045 - RNA, 22 nt, Human
accauugcacuccagccugggc

SEQ ID NO: 1346046 - RNA, 25 nt, Human
accauugcacuccagccugggcaac

SEQ ID NO: 1346047 - RNA, 24 nt, Human
acccaggaggcggagguugcagug

SEQ ID NO: 1346048 - RNA, 24 nt, Human
accccaucucuacuaaaaauacaa

SEQ ID NO: 1346049 - RNA, 28 nt, Human
acugcaccauugcacuccagccugggca

SEQ ID NO: 1346050 - RNA, 19 nt, Human
agaaagcauuucaaacaga

SEQ ID NO: 1346051 - RNA, 23 nt, Human
agaaggaagugacuugugcaagg

SEQ ID NO: 1346052 - RNA, 22 nt, Human
agaaucacuugaacccaggagg

SEQ ID NO: 1346053 - RNA, 20 nt, Human
agagcaaaacuacaucuaaa

SEQ ID NO: 1346054 - RNA, 24 nt, Human
agcacuuugggaggccgaggcagg

SEQ ID NO: 1346055 - RNA, 23 nt, Human
agccaggcgugguggcaggugcc

SEQ ID NO: 1346056 - RNA, 23 nt, Human
aggaguucgagacuagccugacc

SEQ ID NO: 1346057 - RNA, 18 nt, Human
aggcaggagaaucacuug

SEQ ID NO: 1346058 - RNA, 23 nt, Human
aggcaggagaaucacuugaaccc

SEQ ID NO: 1346059 - RNA, 24 nt, Human
aggcaggagaaucacuugaaccca

SEQ ID NO: 1346060 - RNA, 18 nt, Human
aggcaggcggaucaccug

SEQ ID NO: 1346061 - RNA, 22 nt, Human
aggcaggcggaucaccugaggu

SEQ ID NO: 1346062 - RNA, 26 nt, Human
aggcaggcggaucaccugaggucagg

SEQ ID NO: 1346063 - RNA, 24 nt, Human
aggccaggugcaguggcucaagcc

SEQ ID NO: 1346064 - RNA, 21 nt, Human
aggccgaggcaggcggaucac

SEQ ID NO: 1346065 - RNA, 19 nt, Human
aggcggagguugcagugag

SEQ ID NO: 1346066 - RNA, 23 nt, Human
aggcggagguugcagugagucaa

SEQ ID NO: 1346067 - RNA, 24 nt, Human
aggcgugguggcaggugccuguaa

SEQ ID NO: 1346068 - RNA, 24 nt, Human
aggcugaggcaggagaaucacuug

SEQ ID NO: 1346069 - RNA, 18 nt, Human
aggucaggaguucgagac

SEQ ID NO: 1346070 - RNA, 24 nt, Human
aggugcaguggcucaagccucuaa

SEQ ID NO: 1346071 - RNA, 22 nt, Human
agguuaaaagaacacucucacc

SEQ ID NO: 1346072 - RNA, 24 nt, Human
aguggcucaagccucuaaucccag

SEQ ID NO: 1346073 - RNA, 25 nt, Human
aguguccgauugcaggccugugaga

SEQ ID NO: 1346074 - RNA, 21 nt, Human
auacugcauuauaaauccaga

SEQ ID NO: 1346075 - RNA, 23 nt, Human
auacugcauuauaaauccagaga

SEQ ID NO: 1346076 - RNA, 25 nt, Human
aucuuguuuaaucucuuuuuuuuuu

SEQ ID NO: 1346077 - RNA, 25 nt, Human
auguugggcccugauaaaaaugguu

SEQ ID NO: 1346078 - RNA, 24 nt, Human
auugcacuccagccugggcaacaa

SEQ ID NO: 1346079 - RNA, 25 nt, Human
auugcacuccagccugggcaacaag

SEQ ID NO: 1346080 - RNA, 21 nt, Human
caaaugaauacauuucacuug

SEQ ID NO: 1346081 - RNA, 21 nt, Human
caacaagagcaaaacuacauc

SEQ ID NO: 1346082 - RNA, 27 nt, Human
caacaagagcaaaacuacaucuaaaaa

SEQ ID NO: 1346083 - RNA, 20 nt, Human
caaccagcacaccuaacgca

SEQ ID NO: 1346084 - RNA, 23 nt, Human
caagccaacaaauaaaacauauu

SEQ ID NO: 1346085 - RNA, 19 nt, Human
caagccucuaaucccagca

SEQ ID NO: 1346086 - RNA, 24 nt, Human
caagccucuaaucccagcacuuug

SEQ ID NO: 1346087 - RNA, 23 nt, Human
caccugaggucaggaguucgaga

SEQ ID NO: 1346088 - RNA, 24 nt, Human
cacuccagccugggcaacaagagc

SEQ ID NO: 1346089 - RNA, 21 nt, Human
cacuugaaaaaaagcuccuuu

SEQ ID NO: 1346090 - RNA, 24 nt, Human
cagcacuuugggaggccgaggcag

SEQ ID NO: 1346091 - RNA, 26 nt, Human
cagcacuuugggaggccgaggcaggc

SEQ ID NO: 1346092 - RNA, 24 nt, Human
cagcccaggcugggcaaacaacag

SEQ ID NO: 1346093 - RNA, 24 nt, Human
cagcuacucgggaggcugaggcag

SEQ ID NO: 1346094 - RNA, 24 nt, Human
caggcggaucaccugaggucagga

SEQ ID NO: 1346095 - RNA, 21 nt, Human
caguguccgauugcaggccug

SEQ ID NO: 1346096 - RNA, 24 nt, Human
cauuauaaauccagagacaugagg

SEQ ID NO: 1346097 - RNA, 19 nt, Human
cauugcacuccagccuggg

SEQ ID NO: 1346098 - RNA, 21 nt, Human
cauugcacuccagccugggca

SEQ ID NO: 1346099 - RNA, 22 nt, Human
ccaaaaagaaagcagaacucau

SEQ ID NO: 1346100 - RNA, 25 nt, Human
ccacacagagacaguguccgauugc

SEQ ID NO: 1346101 - RNA, 24 nt, Human
ccacccgggguagaaaccacagcc

SEQ ID NO: 1346102 - RNA, 26 nt, Human
ccagcacaccuaacgcaaaguaugac

SEQ ID NO: 1346103 - RNA, 20 nt, Human
ccauugcacuccagccuggg

SEQ ID NO: 1346104 - RNA, 20 nt, Human
ccauugcacuccagccuggg

SEQ ID NO: 1346105 - RNA, 21 nt, Human
ccauugcacuccagccugggc

SEQ ID NO: 1346106 - RNA, 23 nt, Human
ccauugcacuccagccugggcaa

SEQ ID NO: 1346107 - RNA, 24 nt, Human
ccauugcacuccagccugggcaac

SEQ ID NO: 1346108 - RNA, 25 nt, Human
ccauugcacuccagccugggcaaca

SEQ ID NO: 1346109 - RNA, 24 nt, Human
ccugaccaacauagugaaacccca

SEQ ID NO: 1346110 - RNA, 22 nt, Human
ccugaggucaggaguucgagac

SEQ ID NO: 1346111 - RNA, 19 nt, Human
ccuguaauuccagcuacuc

SEQ ID NO: 1346112 - RNA, 21 nt, Human
ccuguaauuccagcuacucgg

SEQ ID NO: 1346113 - RNA, 23 nt, Human
cgaacuagguaauaaaaucuguu

SEQ ID NO: 1346114 - RNA, 24 nt, Human
cgagacuagccugaccaacauagu

SEQ ID NO: 1346115 - RNA, 26 nt, Human
cgaggcaggcggaucaccugagguca

SEQ ID NO: 1346116 - RNA, 24 nt, Human
cggaucaccugaggucaggaguuc

SEQ ID NO: 1346117 - RNA, 27 nt, Human
cggaucaccugaggucaggaguucgag

SEQ ID NO: 1346118 - RNA, 24 nt, Human
cgggaggcugaggcaggagaauca

SEQ ID NO: 1346119 - RNA, 22 nt, Human
cgggguagaaaccacagccacu

SEQ ID NO: 1346120 - RNA, 21 nt, Human
cgugacaagugaaaacugcuu

SEQ ID NO: 1346121 - RNA, 24 nt, Human
cucaagccucuaaucccagcacuu

SEQ ID NO: 1346122 - RNA, 31 nt, Human
cugcaccauugcacuccagccugggcaacaa

SEQ ID NO: 1346123 - RNA, 21 nt, Human
cugcugcuuucuagcagccca

SEQ ID NO: 1346124 - RNA, 26 nt, Human
cuucaggaaagaaaaacagacuauuc

SEQ ID NO: 1346125 - RNA, 20 nt, Human
cuuuucggcaauuucuccaa

SEQ ID NO: 1346126 - RNA, 20 nt, Human
gaaagcauuucaaacagaag

SEQ ID NO: 1346127 - RNA, 23 nt, Human
gaaguuccugcacauccaaccag

SEQ ID NO: 1346128 - RNA, 19 nt, Human
gaauacauuucacuugaaa

SEQ ID NO: 1346129 - RNA, 19 nt, Human
gagaaaauugaggcucaga

SEQ ID NO: 1346130 - RNA, 18 nt, Human
gaggaggaacuuacagua

SEQ ID NO: 1346131 - RNA, 19 nt, Human
gaggcaggcggaucaccug

SEQ ID NO: 1346132 - RNA, 18 nt, Human
gagguugcagugagucaa

SEQ ID NO: 1346133 - RNA, 24 nt, Human
gaucaccugaggucaggaguucga

SEQ ID NO: 1346134 - RNA, 22 nt, Human
gcaggagaaucacuugaaccca

SEQ ID NO: 1346135 - RNA, 21 nt, Human
gcccaggcugggcaaacaaca

SEQ ID NO: 1346136 - RNA, 22 nt, Human
gcccuaggauccugccuggugc

SEQ ID NO: 1346137 - RNA, 19 nt, Human
gcgacugcagccucaagug

SEQ ID NO: 1346138 - RNA, 21 nt, Human
ggaggcggagguugcagugag

SEQ ID NO: 1346139 - RNA, 18 nt, Human
ggagguugcagugaguca

SEQ ID NO: 1346140 - RNA, 24 nt, Human
ggagguugcagugagucaaaacug

SEQ ID NO: 1346141 - RNA, 22 nt, Human
ggaucaccugaggucaggaguu

SEQ ID NO: 1346142 - RNA, 23 nt, Human
ggaucaccugaggucaggaguuc

SEQ ID NO: 1346143 - RNA, 23 nt, Human
guggcaggugccuguaauuccag

SEQ ID NO: 1346144 - RNA, 20 nt, Human
guucaagaccaaaauuugac

SEQ ID NO: 1346145 - RNA, 20 nt, Human
uaaaaauacaaaauuagcca

SEQ ID NO: 1346146 - RNA, 22 nt, Human
uaaaaauacaaaauuagccagg

SEQ ID NO: 1346147 - RNA, 23 nt, Human
uaaaaauacaaaauuagccaggc

SEQ ID NO: 1346148 - RNA, 23 nt, Human
uaaaaccuagucugaucuaaagc

SEQ ID NO: 1346149 - RNA, 18 nt, Human
uaaaagaacacucucacc

SEQ ID NO: 1346150 - RNA, 23 nt, Human
uaacgcagaauaagaggcgcccu

SEQ ID NO: 1346151 - RNA, 20 nt, Human
uaacuaaaaggaagcggcaa

SEQ ID NO: 1346152 - RNA, 22 nt, Human
uaagcuaaaucuauaggccuca

SEQ ID NO: 1346153 - RNA, 18 nt, Human
uagcagcccaggcugggc

SEQ ID NO: 1346154 - RNA, 20 nt, Human
uagcaguuccaaaaagaaag

SEQ ID NO: 1346155 - RNA, 18 nt, Human
uauaacuuuugggggagg

SEQ ID NO: 1346156 - RNA, 21 nt, Human
uauaauacaauacauuaaccu

SEQ ID NO: 1346157 - RNA, 20 nt, Human
uauccagaagugccgcggga

SEQ ID NO: 1346158 - RNA, 20 nt, Human
ucaaacagaacaguguucuc

SEQ ID NO: 1346159 - RNA, 20 nt, Human
ucaccugaggucaggaguuc

SEQ ID NO: 1346160 - RNA, 19 nt, Human
uccuuaaagaaaaaaaaaa

SEQ ID NO: 1346161 - RNA, 25 nt, Human
ucgggaggcugaggcaggagaauca

SEQ ID NO: 1346162 - RNA, 23 nt, Human
ucuaaagcaucuuauccaugguu

SEQ ID NO: 1346163 - RNA, 18 nt, Human
ucuagcagcccaggcugg

SEQ ID NO: 1346164 - RNA, 19 nt, Human
ucuccauuaugacaaauug

SEQ ID NO: 1346165 - RNA, 20 nt, Human
ucucuacuaaaaauacaaaa

SEQ ID NO: 1346166 - RNA, 20 nt, Human
ucuguaauuggaugucugug

SEQ ID NO: 1346167 - RNA, 24 nt, Human
ucuuaagcuaaaucuauaggccuc

SEQ ID NO: 1346168 - RNA, 23 nt, Human
ucuuucuguaauuggaugucugu

SEQ ID NO: 1346169 - RNA, 23 nt, Human
ucuuuuuuuuuuucacacuugau

SEQ ID NO: 1346170 - RNA, 19 nt, Human
ugaaaccccaucucuacua

SEQ ID NO: 1346171 - RNA, 30 nt, Human
ugaauacauuucacuugaaaaaaagcuccu

SEQ ID NO: 1346172 - RNA, 20 nt, Human
ugaggcaggagaaucacuug

SEQ ID NO: 1346173 - RNA, 24 nt, Human
ugaggcaggagaaucacuugaacc

SEQ ID NO: 1346174 - RNA, 25 nt, Human
ugaggcaggagaaucacuugaaccc

SEQ ID NO: 1346175 - RNA, 20 nt, Human
ugagucuggaagggucuggg

SEQ ID NO: 1346176 - RNA, 19 nt, Human
ugauaaaaggaaggaaaaa

SEQ ID NO: 1346177 - RNA, 21 nt, Human
ugcaccauugcacuccagccu

SEQ ID NO: 1346178 - RNA, 19 nt, Human
ugcacuccagccugggcaa

SEQ ID NO: 1346179 - RNA, 22 nt, Human
ugccuggugcccugcagugccc

SEQ ID NO: 1346180 - RNA, 24 nt, Human
ugccuguaauuccagcuacucggg

SEQ ID NO: 1346181 - RNA, 24 nt, Human
ugcuuucuagcagcccaggcuggg

SEQ ID NO: 1346182 - RNA, 21 nt, Human
uggaagggucugggaccuggg

SEQ ID NO: 1346183 - RNA, 22 nt, Human
uggcaggugccuguaauuccag

SEQ ID NO: 1346184 - RNA, 22 nt, Human
uggcucaagccucuaaucccag

SEQ ID NO: 1346185 - RNA, 24 nt, Human
uggcucaagccucuaaucccagca

SEQ ID NO: 1346186 - RNA, 20 nt, Human
uggcucgguccaaucaauaa

SEQ ID NO: 1346187 - RNA, 19 nt, Human
ugggaccuggggguaucca

SEQ ID NO: 1346188 - RNA, 20 nt, Human
ugggaggccgaggcaggcgg

SEQ ID NO: 1346189 - RNA, 24 nt, Human
ugggaggccgaggcaggcggauca

SEQ ID NO: 1346190 - RNA, 19 nt, Human
ugggcccugauaaaaaugg

SEQ ID NO: 1346191 - RNA, 24 nt, Human
ugguggcaggugccuguaauucca

SEQ ID NO: 1346192 - RNA, 22 nt, Human
ugguucaagaccaaaauuugac

SEQ ID NO: 1346193 - RNA, 19 nt, Human
uguaaacucagccuucuug

SEQ ID NO: 1346194 - RNA, 21 nt, Human
uuaaugauuaaaaccuagucu

SEQ ID NO: 1346195 - RNA, 23 nt, Human
uuccaaaaagaaagcagaacuca

SEQ ID NO: 1346196 - RNA, 19 nt, Human
uucuguuucugaaacucgu

SEQ ID NO: 1346197 - RNA, 24 nt, Human
uugaacccaggaggcggagguugc

SEQ ID NO: 1346198 - RNA, 22 nt, Human
uugcagugagucaaaacugcac

SEQ ID NO: 1346199 - RNA, 25 nt, Human
uugggaggccgaggcaggcggauca

SEQ ID NO: 1346200 - RNA, 18 nt, Human
uuuccuguccauuugcug

SEQ ID NO: 1346201 - RNA, 23 nt, Human
uuuccuguccauuugcugagguc

SEQ ID NO: 1346202 - RNA, 20 nt, Human
uuucuagcagcccaggcugg

SEQ ID NO: 1346203 - RNA, 22 nt, Human
aaacacacauggacaguaagac

SEQ ID NO: 1346204 - RNA, 24 nt, Human
aaacacacccaccgcagggacccc

SEQ ID NO: 1346205 - RNA, 22 nt, Human
aagcgccugcccaggccagucc

SEQ ID NO: 1346206 - RNA, 20 nt, Human
acaaagucaagaggaaggag

SEQ ID NO: 1346207 - RNA, 23 nt, Human
accagguuucagaccacaaaguc

SEQ ID NO: 1346208 - RNA, 20 nt, Human
agacaccuggucuggguccc

SEQ ID NO: 1346209 - RNA, 19 nt, Human
agaggaaggugcugagcac

SEQ ID NO: 1346210 - RNA, 19 nt, Human
agcugacugcagacaccug

SEQ ID NO: 1346211 - RNA, 19 nt, Human
aggaauaaccgcagucacc

SEQ ID NO: 1346212 - RNA, 21 nt, Human
aggaauaaccgcagucaccgu

SEQ ID NO: 1346213 - RNA, 19 nt, Human
aggcgugcccauggccguc

SEQ ID NO: 1346214 - RNA, 23 nt, Human
agggggucagcagucgguaaagc

SEQ ID NO: 1346215 - RNA, 22 nt, Human
agucaagaggaaggaggaccuu

SEQ ID NO: 1346216 - RNA, 21 nt, Human
augcucaaaguucaaacggcc

SEQ ID NO: 1346217 - RNA, 21 nt, Human
augugaucugucccugugacu

SEQ ID NO: 1346218 - RNA, 18 nt, Human
caaaggaggaaaaugugg

SEQ ID NO: 1346219 - RNA, 19 nt, Human
cacacauggacaguaagac

SEQ ID NO: 1346220 - RNA, 23 nt, Human
caccagaguugccacucugggga

SEQ ID NO: 1346221 - RNA, 21 nt, Human
cacccaccgcagggaccccgg

SEQ ID NO: 1346222 - RNA, 25 nt, Human
cacccgagaccccggccuccccggg

SEQ ID NO: 1346223 - RNA, 19 nt, Human
cagcaccguauggacuggc

SEQ ID NO: 1346224 - RNA, 22 nt, Human
cagcacgcacgcuccagucccc

SEQ ID NO: 1346225 - RNA, 19 nt, Human
caggagcugacugcagaca

SEQ ID NO: 1346226 - RNA, 24 nt, Human
cagguuucagaccacaaagucaag

SEQ ID NO: 1346227 - RNA, 21 nt, Human
caguaagaccagguuucagac

SEQ ID NO: 1346228 - RNA, 18 nt, Human
cauccucgugcuaugggg

SEQ ID NO: 1346229 - RNA, 22 nt, Human
ccaaacacacauggacaguaag

SEQ ID NO: 1346230 - RNA, 19 nt, Human
ccacccugaccauccgggc

SEQ ID NO: 1346231 - RNA, 21 nt, Human
ccaguccgaaacacacccacc

SEQ ID NO: 1346232 - RNA, 21 nt, Human
cccacaggccccaaccucacc

SEQ ID NO: 1346233 - RNA, 23 nt, Human
cccacccugaccauccgggccca

SEQ ID NO: 1346234 - RNA, 19 nt, Human
ccccggccuccccgggccc

SEQ ID NO: 1346235 - RNA, 19 nt, Human
cccgcacgcguugcgcaua

SEQ ID NO: 1346236 - RNA, 23 nt, Human
cccgcacgcguugcgcauaccuc

SEQ ID NO: 1346237 - RNA, 19 nt, Human
ccgcagggaccccguccag

SEQ ID NO: 1346238 - RNA, 19 nt, Human
ccuccaggaauaaccgcag

SEQ ID NO: 1346239 - RNA, 24 nt, Human
ccugggccggcggccacccgagac

SEQ ID NO: 1346240 - RNA, 22 nt, Human
cgaaacacacccaccgcaggga

SEQ ID NO: 1346241 - RNA, 20 nt, Human
cggcagcagcagcagggcag

SEQ ID NO: 1346242 - RNA, 20 nt, Human
cggcccacaggccccaaccu

SEQ ID NO: 1346243 - RNA, 21 nt, Human
cggcccacaggccccaaccuc

SEQ ID NO: 1346244 - RNA, 23 nt, Human
cgugcccauggccgucccugcuc

SEQ ID NO: 1346245 - RNA, 23 nt, Human
cguggccaggcgugcccauggcc

SEQ ID NO: 1346246 - RNA, 25 nt, Human
cguugcgcauaccucagcacgcacg

SEQ ID NO: 1346247 - RNA, 23 nt, Human
cuccaggaauaaccgcagucacc

SEQ ID NO: 1346248 - RNA, 30 nt, Human
cuccucgagaggaaggugcugagcaccucu

SEQ ID NO: 1346249 - RNA, 21 nt, Human
cugaccauccgggcccaaaca

SEQ ID NO: 1346250 - RNA, 23 nt, Human
cugcuccccacccugaccauccg

SEQ ID NO: 1346251 - RNA, 18 nt, Human
gaaacacacccaccgcag

SEQ ID NO: 1346252 - RNA, 25 nt, Human
gaaacacacccaccgcagggacccc

SEQ ID NO: 1346253 - RNA, 18 nt, Human
gcagcagcagcagggcag

SEQ ID NO: 1346254 - RNA, 21 nt, Human
gcagcagcagcagggcaggac

SEQ ID NO: 1346255 - RNA, 22 nt, Human
gcaugucugccgaccuccagga

SEQ ID NO: 1346256 - RNA, 18 nt, Human
gccacgccccucugccau

SEQ ID NO: 1346257 - RNA, 20 nt, Human
gccagcugugucucaggagc

SEQ ID NO: 1346258 - RNA, 18 nt, Human
gcccaggcaacacauccu

SEQ ID NO: 1346259 - RNA, 20 nt, Human
ggaaaccccugauguaacac

SEQ ID NO: 1346260 - RNA, 21 nt, Human
ggccacaggaaaccccugaug

SEQ ID NO: 1346261 - RNA, 28 nt, Human
uaagaccagguuucagaccacaaaguca

SEQ ID NO: 1346262 - RNA, 18 nt, Human
uagcaccacgccacgccc

SEQ ID NO: 1346263 - RNA, 25 nt, Human
ucccugcuccccacccugaccaucc

SEQ ID NO: 1346264 - RNA, 24 nt, Human
ucccugugacuggucacauugccu

SEQ ID NO: 1346265 - RNA, 21 nt, Human
uccgggcccaaacacacaugg

SEQ ID NO: 1346266 - RNA, 22 nt, Human
uccucggugugucugccccuuu

SEQ ID NO: 1346267 - RNA, 24 nt, Human
ucggugugucugccccuuuucugu

SEQ ID NO: 1346268 - RNA, 18 nt, Human
ucugggucccucaagccc

SEQ ID NO: 1346269 - RNA, 22 nt, Human
ugacagcaccguauggacuggc

SEQ ID NO: 1346270 - RNA, 19 nt, Human
ugaccauccgggcccaaac

SEQ ID NO: 1346271 - RNA, 19 nt, Human
ugacugcagacaccugguc

SEQ ID NO: 1346272 - RNA, 19 nt, Human
ugccacuggcuguuccugg

SEQ ID NO: 1346273 - RNA, 18 nt, Human
ugcucaaaguucaaacgg

SEQ ID NO: 1346274 - RNA, 22 nt, Human
uggcagcacaagcgccugccca

SEQ ID NO: 1346275 - RNA, 19 nt, Human
uggcccagggggucagcag

SEQ ID NO: 1346276 - RNA, 25 nt, Human
ugucugccccuuuucuguccagcug

SEQ ID NO: 1346277 - RNA, 23 nt, Human
uuuucuguccagcugucaggugg

SEQ ID NO: 1346278 - RNA, 22 nt, Human
aaccugaaaaaggaggcacagg

SEQ ID NO: 1346279 - RNA, 20 nt, Human
aagaaccagcccauugucuc

SEQ ID NO: 1346280 - RNA, 19 nt, Human
accaggggaaggcucacca

SEQ ID NO: 1346281 - RNA, 19 nt, Human
agagagagagaaaugaaac

SEQ ID NO: 1346282 - RNA, 19 nt, Human
agcaaggaagguuggucac

SEQ ID NO: 1346283 - RNA, 18 nt, Human
aggacaggagagaccuga

SEQ ID NO: 1346284 - RNA, 24 nt, Human
aggcacaggacuguguggcagggg

SEQ ID NO: 1346285 - RNA, 25 nt, Human
aggggugauaggugggugguggggg

SEQ ID NO: 1346286 - RNA, 19 nt, Human
agguggguggugggggcug

SEQ ID NO: 1346287 - RNA, 21 nt, Human
auaaaacacaguuccuccccu

SEQ ID NO: 1346288 - RNA, 24 nt, Human
caaccaaguagcaaggauagacau

SEQ ID NO: 1346289 - RNA, 19 nt, Human
cacguggucccaggacacc

SEQ ID NO: 1346290 - RNA, 27 nt, Human
cacugcugagaaacagaggacauagag

SEQ ID NO: 1346291 - RNA, 24 nt, Human
caucccaaccugaaaaaggaggca

SEQ ID NO: 1346292 - RNA, 21 nt, Human
ccaaccugaaaaaggaggcac

SEQ ID NO: 1346293 - RNA, 18 nt, Human
cccauugucucaccuggc

SEQ ID NO: 1346294 - RNA, 20 nt, Human
ccugaaaaaggaggcacagg

SEQ ID NO: 1346295 - RNA, 19 nt, Human
cugaaaaaggaggcacagg

SEQ ID NO: 1346296 - RNA, 20 nt, Human
cugacaggggagggaaagca

SEQ ID NO: 1346297 - RNA, 21 nt, Human
cugucccagcccagcagguca

SEQ ID NO: 1346298 - RNA, 18 nt, Human
gaagaaaucuggacucag

SEQ ID NO: 1346299 - RNA, 18 nt, Human
gacuguguggcaggggag

SEQ ID NO: 1346300 - RNA, 19 nt, Human
gacuguguggcaggggagg

SEQ ID NO: 1346301 - RNA, 18 nt, Human
gauagguggguggugggg

SEQ ID NO: 1346302 - RNA, 18 nt, Human
gaucaucccaaccugaaa

SEQ ID NO: 1346303 - RNA, 22 nt, Human
gauggcagcagauaucuguggg

SEQ ID NO: 1346304 - RNA, 18 nt, Human
gccaggcagacaccaggg

SEQ ID NO: 1346305 - RNA, 19 nt, Human
gcugagaaacagaggacau

SEQ ID NO: 1346306 - RNA, 18 nt, Human
ggagagaagaaaucugga

SEQ ID NO: 1346307 - RNA, 18 nt, Human
ggaggagggcaaaaggug

SEQ ID NO: 1346308 - RNA, 21 nt, Human
ggcaaaagguguugagccaag

SEQ ID NO: 1346309 - RNA, 23 nt, Human
gggaaggcucaccaggcagaggg

SEQ ID NO: 1346310 - RNA, 19 nt, Human
gggaauggagagagagaga

SEQ ID NO: 1346311 - RNA, 25 nt, Human
ggugaggggugauagguggguggug

SEQ ID NO: 1346312 - RNA, 23 nt, Human
ggugauagguggguggugggggc

SEQ ID NO: 1346313 - RNA, 19 nt, Human
gguggugggggcugccagg

SEQ ID NO: 1346314 - RNA, 18 nt, Human
gucacguugaccugaguu

SEQ ID NO: 1346315 - RNA, 19 nt, Human
guggcaggggaggagggca

SEQ ID NO: 1346316 - RNA, 21 nt, Human
guuuauguguaagcaaggaag

SEQ ID NO: 1346317 - RNA, 19 nt, Human
uauauacaaguuuaugugu

SEQ ID NO: 1346318 - RNA, 23 nt, Human
ucaguagaacccauuaaauuuca

SEQ ID NO: 1346319 - RNA, 22 nt, Human
uccaagggagaggaaguaagga

SEQ ID NO: 1346320 - RNA, 20 nt, Human
ucccaaccugaaaaaggagg

SEQ ID NO: 1346321 - RNA, 24 nt, Human
ucuucauucauuuauucauccauu

SEQ ID NO: 1346322 - RNA, 20 nt, Human
ugaaacaagaaccagcccau

SEQ ID NO: 1346323 - RNA, 21 nt, Human
ugaaacaagaaccagcccauu

SEQ ID NO: 1346324 - RNA, 24 nt, Human
ugacaggggagggaaagcagucuc

SEQ ID NO: 1346325 - RNA, 22 nt, Human
ugagaaacagaggacauagaga

SEQ ID NO: 1346326 - RNA, 19 nt, Human
ugagccaagcuggaugguu

SEQ ID NO: 1346327 - RNA, 21 nt, Human
ugaguuuggaggcccuuggag

SEQ ID NO: 1346328 - RNA, 19 nt, Human
ugccaggcagacaccaggg

SEQ ID NO: 1346329 - RNA, 24 nt, Human
uggaggcccuuggaggauguuggc

SEQ ID NO: 1346330 - RNA, 21 nt, Human
uggcaggggaggagggcaaaa

SEQ ID NO: 1346331 - RNA, 18 nt, Human
ugggggcugccaggcaga

SEQ ID NO: 1346332 - RNA, 28 nt, Human
uggguggugggggcugccaggcagacac

SEQ ID NO: 1346333 - RNA, 18 nt, Human
uguccagcuaugaguuug

SEQ ID NO: 1346334 - RNA, 19 nt, Human
uguggcaggggaggagggc

SEQ ID NO: 1346335 - RNA, 24 nt, Human
uucauucauuuauucauccauuuc

SEQ ID NO: 1346336 - RNA, 22 nt, Human
uuuuuggaucucuucauucauu

SEQ ID NO: 1346337 - RNA, 19 nt, Human
uuuuuuuuuuuuggaucuc

SEQ ID NO: 1346338 - RNA, 18 nt, Human
uuuuuuuuuuuuuuuuug

SEQ ID NO: 1346339 - RNA, 18 nt, Human
uuuuuuuuuuuuuuuuug

SEQ ID NO: 1346340 - RNA, 19 nt, Human
acaucagggaaaauggggu

SEQ ID NO: 1346341 - RNA, 18 nt, Human
acauguauauauucauga

SEQ ID NO: 1346342 - RNA, 21 nt, Human
auggagccugcggcagucacc

SEQ ID NO: 1346343 - RNA, 19 nt, Human
cacccgggacucuccgagc

SEQ ID NO: 1346344 - RNA, 20 nt, Human
cacccgggacucuccgagcc

SEQ ID NO: 1346345 - RNA, 23 nt, Human
ccagcguccucccuauaaaucuc

SEQ ID NO: 1346346 - RNA, 21 nt, Human
ccugcggcagucacccgggac

SEQ ID NO: 1346347 - RNA, 20 nt, Human
cugcggcagucacccgggac

SEQ ID NO: 1346348 - RNA, 22 nt, Human
gagcccacgcguccgcccacgc

SEQ ID NO: 1346349 - RNA, 21 nt, Human
gagccugcggcagucacccgg

SEQ ID NO: 1346350 - RNA, 19 nt, Human
ggccacagggcgauggagc

SEQ ID NO: 1346351 - RNA, 24 nt, Human
ucuacaauuaaauuauuauugacu

SEQ ID NO: 1346352 - RNA, 20 nt, Human
uguguacauguauauauuca

SEQ ID NO: 1346353 - RNA, 22 nt, Human
uguguacauguauauauucaug

SEQ ID NO: 1346354 - RNA, 20 nt, Human
uguguguacauguauauaau

SEQ ID NO: 1346355 - RNA, 23 nt, Human
uuuuuuuuuuucuuuuucuuuuu

SEQ ID NO: 1346356 - RNA, 25 nt, Human
uuuuuuuuuuuuuuuuuuucuuuuu

SEQ ID NO: 1346357 - RNA, 23 nt, Human
aaagaucaguuauacuuccucca

SEQ ID NO: 1346358 - RNA, 21 nt, Human
acuuggcaauucucucauccu

SEQ ID NO: 1346359 - RNA, 24 nt, Human
caaagaucaguuauacuuccucca

SEQ ID NO: 1346360 - RNA, 21 nt, Human
cagaaucaccauucucagcuu

SEQ ID NO: 1346361 - RNA, 23 nt, Human
cucaccguuccgccccgcccugc

SEQ ID NO: 1346362 - RNA, 19 nt, Human
uaauaagccuuucaucuuu

SEQ ID NO: 1346363 - RNA, 19 nt, Human
uaugauacaaaaaccuacu

SEQ ID NO: 1346364 - RNA, 21 nt, Human
ucucucauccuucucugguca

SEQ ID NO: 1346365 - RNA, 22 nt, Human
ucucucauccuucucuggucaa

SEQ ID NO: 1346366 - RNA, 23 nt, Human
uuggcguucaguacaacuuggca

SEQ ID NO: 1346367 - RNA, 20 nt, Human
uuuuuuuuuuuuuuuuuugg

SEQ ID NO: 1346368 - RNA, 25 nt, Human
aaacaguccuccugccucagccucc

SEQ ID NO: 1346369 - RNA, 24 nt, Human
aaacuccugaacucaaacaguccu

SEQ ID NO: 1346370 - RNA, 24 nt, Human
aaaguguugggauuacaggcguga

SEQ ID NO: 1346371 - RNA, 19 nt, Human
aagcgccuggcaaacagga

SEQ ID NO: 1346372 - RNA, 21 nt, Human
aaguguugggauuacaggcgu

SEQ ID NO: 1346373 - RNA, 26 nt, Human
aaguguugggauuacaggcgugagcc

SEQ ID NO: 1346374 - RNA, 25 nt, Human
aaucugucacccaggcuggagugca

SEQ ID NO: 1346375 - RNA, 23 nt, Human
acaggugcucgccaccacacccg

SEQ ID NO: 1346376 - RNA, 23 nt, Human
accauguuggucaggcuggucuu

SEQ ID NO: 1346377 - RNA, 23 nt, Human
acccaggcuggagugcaguggug

SEQ ID NO: 1346378 - RNA, 21 nt, Human
agcggccgggggcgcgcuggg

SEQ ID NO: 1346379 - RNA, 25 nt, Human
aggcuggagugcaguggugugaucu

SEQ ID NO: 1346380 - RNA, 21 nt, Human
aggugcucggcagaugccggc

SEQ ID NO: 1346381 - RNA, 22 nt, Human
aguagagaugggguuucaccau

SEQ ID NO: 1346382 - RNA, 22 nt, Human
aguccuccugccucagccuccc

SEQ ID NO: 1346383 - RNA, 19 nt, Human
agugcaguggugugaucuc

SEQ ID NO: 1346384 - RNA, 23 nt, Human
agugcaguggugugaucucagcu

SEQ ID NO: 1346385 - RNA, 24 nt, Human
agugcaguggugugaucucagcug

SEQ ID NO: 1346386 - RNA, 24 nt, Human
aguggugugaucucagcugauugc

SEQ ID NO: 1346387 - RNA, 21 nt, Human
auagaaagcgccuggcaaaca

SEQ ID NO: 1346388 - RNA, 24 nt, Human
augggguuucaccauguuggucag

SEQ ID NO: 1346389 - RNA, 18 nt, Human
auucuccugccucagccu

SEQ ID NO: 1346390 - RNA, 27 nt, Human
caaacaguccuccugccucagccuccc

SEQ ID NO: 1346391 - RNA, 27 nt, Human
caaacaguccuccugccucagccuccc

SEQ ID NO: 1346392 - RNA, 24 nt, Human
caaaguguugggauuacaggcgug

SEQ ID NO: 1346393 - RNA, 22 nt, Human
caagugauucuccugccucagc

SEQ ID NO: 1346394 - RNA, 27 nt, Human
caagugauucuccugccucagccuccc

SEQ ID NO: 1346395 - RNA, 24 nt, Human
caaucugucacccaggcuggagug

SEQ ID NO: 1346396 - RNA, 21 nt, Human
caccauguuggucaggcuggu

SEQ ID NO: 1346397 - RNA, 24 nt, Human
caccauguuggucaggcuggucuu

SEQ ID NO: 1346398 - RNA, 21 nt, Human
cacccaggcuggagugcagug

SEQ ID NO: 1346399 - RNA, 25 nt, Human
cacugcacccagcccagugauuaca

SEQ ID NO: 1346400 - RNA, 22 nt, Human
cauuacaggugcucgccaccac

SEQ ID NO: 1346401 - RNA, 22 nt, Human
ccaaaguguugggauuacaggc

SEQ ID NO: 1346402 - RNA, 22 nt, Human
ccaaaguguugggauuacaggc

SEQ ID NO: 1346403 - RNA, 24 nt, Human
ccaaaguguugggauuacaggcgu

SEQ ID NO: 1346404 - RNA, 18 nt, Human
ccacugcacccagcccag

SEQ ID NO: 1346405 - RNA, 18 nt, Human
ccacugcacccagcccag

SEQ ID NO: 1346406 - RNA, 21 nt, Human
ccacugcacccagcccaguga

SEQ ID NO: 1346407 - RNA, 22 nt, Human
cccaaguagcugacauuacagg

SEQ ID NO: 1346408 - RNA, 20 nt, Human
cccaggcuggagugcagugg

SEQ ID NO: 1346409 - RNA, 18 nt, Human
cccuccucuccaccccag

SEQ ID NO: 1346410 - RNA, 22 nt, Human
ccuccgcuuccuggguucaagu

SEQ ID NO: 1346411 - RNA, 18 nt, Human
ccuccucuccaccccagg

SEQ ID NO: 1346412 - RNA, 23 nt, Human
ccuccugccucagccucccaaag

SEQ ID NO: 1346413 - RNA, 23 nt, Human
ccugccucagccucccaaguagc

SEQ ID NO: 1346414 - RNA, 23 nt, Human
ccuggguucaagugauucuccuc

SEQ ID NO: 1346415 - RNA, 23 nt, Human
ccuggguucaagugauucuccug

SEQ ID NO: 1346416 - RNA, 18 nt, Human
cgagcgcggcgcggagga

SEQ ID NO: 1346417 - RNA, 24 nt, Human
cgggggcgcggcgcgggcgcagag

SEQ ID NO: 1346418 - RNA, 18 nt, Human
cucccuccucuccacccc

SEQ ID NO: 1346419 - RNA, 18 nt, Human
cugccucagccucccaaa

SEQ ID NO: 1346420 - RNA, 23 nt, Human
cugccucagccucccaaguagcu

SEQ ID NO: 1346421 - RNA, 24 nt, Human
cuggagugcaguggugugaucuca

SEQ ID NO: 1346422 - RNA, 21 nt, Human
cuuaaaacuccugaacucaaa

SEQ ID NO: 1346423 - RNA, 24 nt, Human
gagaugggguuucaccauguuggu

SEQ ID NO: 1346424 - RNA, 18 nt, Human
gauuacaggcgugagcca

SEQ ID NO: 1346425 - RNA, 22 nt, Human
gauuacaggcgugagccacugc

SEQ ID NO: 1346426 - RNA, 23 nt, Human
gauuacaggcgugagccacugca

SEQ ID NO: 1346427 - RNA, 21 nt, Human
gauucuccugccucagccucc

SEQ ID NO: 1346428 - RNA, 21 nt, Human
gcacccagcccagugauuaca

SEQ ID NO: 1346429 - RNA, 18 nt, Human
gccgggggcgcgcugggg

SEQ ID NO: 1346430 - RNA, 19 nt, Human
gccucagccucccaaagug

SEQ ID NO: 1346431 - RNA, 19 nt, Human
gcgcggcgcgggcgcagag

SEQ ID NO: 1346432 - RNA, 21 nt, Human
gcgcuggggagggggcgccgg

SEQ ID NO: 1346433 - RNA, 23 nt, Human
ggcgcgcuggggagggggcgccg

SEQ ID NO: 1346434 - RNA, 22 nt, Human
ggcuggagugcaguggugugau

SEQ ID NO: 1346435 - RNA, 19 nt, Human
ggggagggggcgccggggg

SEQ ID NO: 1346436 - RNA, 22 nt, Human
gggguuucaccauguuggucag

SEQ ID NO: 1346437 - RNA, 22 nt, Human
ggguuucaccauguuggucagg

SEQ ID NO: 1346438 - RNA, 22 nt, Human
ggugcucgccaccacacccggc

SEQ ID NO: 1346439 - RNA, 23 nt, Human
guagagaugggguuucaccaugu

SEQ ID NO: 1346440 - RNA, 22 nt, Human
gugagccacugcacccagccca

SEQ ID NO: 1346441 - RNA, 24 nt, Human
gugauucuccugccucagccuccc

SEQ ID NO: 1346442 - RNA, 23 nt, Human
uaauuuuuauauuuuaguagaga

SEQ ID NO: 1346443 - RNA, 25 nt, Human
uaauuuuuauauuuuaguagagaug

SEQ ID NO: 1346444 - RNA, 19 nt, Human
uacaggcgugagccacugc

SEQ ID NO: 1346445 - RNA, 24 nt, Human
uacaggcgugagccacugcaccca

SEQ ID NO: 1346446 - RNA, 23 nt, Human
uacaggugcucgccaccacaccc

SEQ ID NO: 1346447 - RNA, 22 nt, Human
uagagaugggguuucaccaugu

SEQ ID NO: 1346448 - RNA, 23 nt, Human
uagcugacauuacaggugcucgc

SEQ ID NO: 1346449 - RNA, 24 nt, Human
uaguagagaugggguuucaccaug

SEQ ID NO: 1346450 - RNA, 26 nt, Human
uaguagagaugggguuucaccauguu

SEQ ID NO: 1346451 - RNA, 19 nt, Human
ucaagugauucuccugccu

SEQ ID NO: 1346452 - RNA, 24 nt, Human
ucaaucugucacccaggcuggagu

SEQ ID NO: 1346453 - RNA, 24 nt, Human
ucacccaggcuggagugcaguggu

SEQ ID NO: 1346454 - RNA, 20 nt, Human
ucagccucccaaguagcugg

SEQ ID NO: 1346455 - RNA, 24 nt, Human
ucccaaaguguugggauuacaggc

SEQ ID NO: 1346456 - RNA, 24 nt, Human
ucccaaguagcugacauuacaggu

SEQ ID NO: 1346457 - RNA, 20 nt, Human
uccuccugccucagccuccc

SEQ ID NO: 1346458 - RNA, 19 nt, Human
uccuggguucaagugauuc

SEQ ID NO: 1346459 - RNA, 20 nt, Human
uccuggguucaagugauucu

SEQ ID NO: 1346460 - RNA, 21 nt, Human
uccuggguucaagugauucuc

SEQ ID NO: 1346461 - RNA, 22 nt, Human
uccuggguucaagugauucucc

SEQ ID NO: 1346462 - RNA, 24 nt, Human
uccuggguucaagugauucuccug

SEQ ID NO: 1346463 - RNA, 22 nt, Human
ucggcagaugccggcucccucc

SEQ ID NO: 1346464 - RNA, 22 nt, Human
ucucaaucugucacccaggcug

SEQ ID NO: 1346465 - RNA, 24 nt, Human
ucucaaucugucacccaggcugga

SEQ ID NO: 1346466 - RNA, 20 nt, Human
ucuccaccccaggcucgucu

SEQ ID NO: 1346467 - RNA, 26 nt, Human
ucuccugccucagccucccaaguagc

SEQ ID NO: 1346468 - RNA, 24 nt, Human
ucugucacccaggcuggagugcag

SEQ ID NO: 1346469 - RNA, 24 nt, Human
ugaacucaaacaguccuccugccu

SEQ ID NO: 1346470 - RNA, 21 nt, Human
ugacauuacaggugcucgcca

SEQ ID NO: 1346471 - RNA, 24 nt, Human
ugacauuacaggugcucgccacca

SEQ ID NO: 1346472 - RNA, 22 nt, Human
ugagagggagucucaaucuguc

SEQ ID NO: 1346473 - RNA, 24 nt, Human
ugauugcaaccuccgcuuccuggg

SEQ ID NO: 1346474 - RNA, 20 nt, Human
ugcaaccuccgcuuccuggg

SEQ ID NO: 1346475 - RNA, 20 nt, Human
ugccggcucccuccucucca

SEQ ID NO: 1346476 - RNA, 24 nt, Human
ugccucagccucccaaaguguugg

SEQ ID NO: 1346477 - RNA, 24 nt, Human
ugccucagccucccaaguagcuga

SEQ ID NO: 1346478 - RNA, 19 nt, Human
uggagugcaguggugugau

SEQ ID NO: 1346479 - RNA, 24 nt, Human
uggagugcaguggugugaucucag

SEQ ID NO: 1346480 - RNA, 18 nt, Human
ugggauuacaggcgugag

SEQ ID NO: 1346481 - RNA, 19 nt, Human
ugggauuacaggcgugagc

SEQ ID NO: 1346482 - RNA, 21 nt, Human
ugggauuacaggcgugagcca

SEQ ID NO: 1346483 - RNA, 22 nt, Human
ugggauuacaggcgugagccac

SEQ ID NO: 1346484 - RNA, 22 nt, Human
ugggauuacaggcgugagccac

SEQ ID NO: 1346485 - RNA, 24 nt, Human
ugggauuacaggcgugagccacug

SEQ ID NO: 1346486 - RNA, 26 nt, Human
ugggauuacaggcgugagccacugca

SEQ ID NO: 1346487 - RNA, 24 nt, Human
ugggguuucaccauguuggucagg

SEQ ID NO: 1346488 - RNA, 23 nt, Human
uggguucaagugauucuccugcc

SEQ ID NO: 1346489 - RNA, 24 nt, Human
uggguucaagugauucuccugccu

SEQ ID NO: 1346490 - RNA, 25 nt, Human
uggucaggcuggucuuaaaacuccu

SEQ ID NO: 1346491 - RNA, 18 nt, Human
uuaguagagaugggguuu

SEQ ID NO: 1346492 - RNA, 22 nt, Human
uuaguagagaugggguuucacc

SEQ ID NO: 1346493 - RNA, 24 nt, Human
uuaguagagaugggguuucaccau

SEQ ID NO: 1346494 - RNA, 21 nt, Human
uucaagugauucuccugccuc

SEQ ID NO: 1346495 - RNA, 23 nt, Human
uucaagugauucuccugccucag

SEQ ID NO: 1346496 - RNA, 24 nt, Human
uucaagugauucuccugccucagc

SEQ ID NO: 1346497 - RNA, 23 nt, Human
uugcaaccuccgcuuccuggguu

SEQ ID NO: 1346498 - RNA, 24 nt, Human
uugcaaccuccgcuuccuggguuc

SEQ ID NO: 1346499 - RNA, 24 nt, Human
uuucaccauguuggucaggcuggu

SEQ ID NO: 1346500 - RNA, 23 nt, Human
uuuuaguagagaugggguuucac

SEQ ID NO: 1346501 - RNA, 19 nt, Human
uuuuuauauuuuaguagag

SEQ ID NO: 1346502 - RNA, 23 nt, Human
aaaaaaaaaaaaaaaagaaagaa

SEQ ID NO: 1346503 - RNA, 19 nt, Human
aaaaaaaacuagccgggca

SEQ ID NO: 1346504 - RNA, 25 nt, Human
aaaaaaagaaagaaauuacuuaaag

SEQ ID NO: 1346505 - RNA, 26 nt, Human
aaaaauacaaaaaaaaacuagccggg

SEQ ID NO: 1346506 - RNA, 25 nt, Human
aaaagcaaauaccacagaagggcuu

SEQ ID NO: 1346507 - RNA, 21 nt, Human
aaaauacucuuggccacaaag

SEQ ID NO: 1346508 - RNA, 22 nt, Human
aaaccccaucuguacuaaaaaa

SEQ ID NO: 1346509 - RNA, 22 nt, Human
aaagcaaauaccacagaagggc

SEQ ID NO: 1346510 - RNA, 21 nt, Human
aacacaaucccuaaauuggcu

SEQ ID NO: 1346511 - RNA, 19 nt, Human
aacauggugaaaccccauc

SEQ ID NO: 1346512 - RNA, 20 nt, Human
aacauggugaaaccccaucu

SEQ ID NO: 1346513 - RNA, 23 nt, Human
aacauggugaaaccccaucugua

SEQ ID NO: 1346514 - RNA, 21 nt, Human
aaccaacacaagaacaacaca

SEQ ID NO: 1346515 - RNA, 22 nt, Human
aagaaagaaauuacuuaaagga

SEQ ID NO: 1346516 - RNA, 23 nt, Human
aagaaagaaauuacuuaaaggac

SEQ ID NO: 1346517 - RNA, 23 nt, Human
aagcgagaggacacagccaagga

SEQ ID NO: 1346518 - RNA, 25 nt, Human
aaggcagguggagcaccugagguca

SEQ ID NO: 1346519 - RNA, 22 nt, Human
accaacauggugaaaccccauc

SEQ ID NO: 1346520 - RNA, 22 nt, Human
accguugcacuccagccugggc

SEQ ID NO: 1346521 - RNA, 25 nt, Human
accguugcacuccagccugggcaac

SEQ ID NO: 1346522 - RNA, 24 nt, Human
accugaggucaggaguuugagacu

SEQ ID NO: 1346523 - RNA, 23 nt, Human
agccgggcacgguggcgggugcc

SEQ ID NO: 1346524 - RNA, 24 nt, Human
agccugaccaacauggugaaaccc

SEQ ID NO: 1346525 - RNA, 22 nt, Human
agcgagaggacacagccaagga

SEQ ID NO: 1346526 - RNA, 22 nt, Human
aggcacgagacucacuugaacc

SEQ ID NO: 1346527 - RNA, 24 nt, Human
aggcacgagacucacuugaaccug

SEQ ID NO: 1346528 - RNA, 20 nt, Human
aggcagguggagcaccugag

SEQ ID NO: 1346529 - RNA, 26 nt, Human
aggcagguggagcaccugaggucagg

SEQ ID NO: 1346530 - RNA, 24 nt, Human
aggcugaggcacgagacucacuug

SEQ ID NO: 1346531 - RNA, 23 nt, Human
agugaaaaaauuaacagcugccc

SEQ ID NO: 1346532 - RNA, 24 nt, Human
aguggcucacgccuguaaucccag

SEQ ID NO: 1346533 - RNA, 24 nt, Human
aguuggagguugcagugagccgag

SEQ ID NO: 1346534 - RNA, 22 nt, Human
aucccagcacuuugggaggcca

SEQ ID NO: 1346535 - RNA, 20 nt, Human
caaaaaaaaacuagccgggc

SEQ ID NO: 1346536 - RNA, 23 nt, Human
caaaaaaaaacuagccgggcacg

SEQ ID NO: 1346537 - RNA, 24 nt, Human
caacaguaccaagugcaaauaugu

SEQ ID NO: 1346538 - RNA, 21 nt, Human
caacauggugaaaccccaucu

SEQ ID NO: 1346539 - RNA, 24 nt, Human
caaggcagguggagcaccugaggu

SEQ ID NO: 1346540 - RNA, 26 nt, Human
cacaaaaaaaaaaaaaaaaaaaagaa

SEQ ID NO: 1346541 - RNA, 25 nt, Human
cacaagaacaacacaaucccuaaau

SEQ ID NO: 1346542 - RNA, 18 nt, Human
caccguugcacuccagcc

SEQ ID NO: 1346543 - RNA, 18 nt, Human
caccguugcacuccagcc

SEQ ID NO: 1346544 - RNA, 23 nt, Human
caccugaggucaggaguuugaga

SEQ ID NO: 1346545 - RNA, 24 nt, Human
cacgccuguaaucccagcacuuug

SEQ ID NO: 1346546 - RNA, 24 nt, Human
cagcacuuugggaggccaaggcag

SEQ ID NO: 1346547 - RNA, 25 nt, Human
cagcacuuugggaggccaaggcagg

SEQ ID NO: 1346548 - RNA, 19 nt, Human
cagcaguacuugaaaagaa

SEQ ID NO: 1346549 - RNA, 20 nt, Human
caggaccccgccaaggucaa

SEQ ID NO: 1346550 - RNA, 24 nt, Human
cagguggagcaccugaggucagga

SEQ ID NO: 1346551 - RNA, 22 nt, Human
caguaccaagugcaaauaugua

SEQ ID NO: 1346552 - RNA, 23 nt, Human
caguggaaacuacaccuuuagac

SEQ ID NO: 1346553 - RNA, 27 nt, Human
cauuuuuauuuuaagaaauggcuuagg

SEQ ID NO: 1346554 - RNA, 19 nt, Human
ccggccucugagcagucac

SEQ ID NO: 1346555 - RNA, 20 nt, Human
ccguugcacuccagccuggg

SEQ ID NO: 1346556 - RNA, 20 nt, Human
ccguugcacuccagccuggg

SEQ ID NO: 1346557 - RNA, 21 nt, Human
ccguugcacuccagccugggc

SEQ ID NO: 1346558 - RNA, 23 nt, Human
ccguugcacuccagccugggcaa

SEQ ID NO: 1346559 - RNA, 24 nt, Human
ccguugcacuccagccugggcaac

SEQ ID NO: 1346560 - RNA, 25 nt, Human
ccguugcacuccagccugggcaaca

SEQ ID NO: 1346561 - RNA, 24 nt, Human
ccugaccaacauggugaaacccca

SEQ ID NO: 1346562 - RNA, 22 nt, Human
ccugaggucaggaguuugagac

SEQ ID NO: 1346563 - RNA, 21 nt, Human
ccugggaguuggagguugcag

SEQ ID NO: 1346564 - RNA, 22 nt, Human
ccuguaaucccagcacuuuggg

SEQ ID NO: 1346565 - RNA, 21 nt, Human
ccuguaaucccagcuacuugg

SEQ ID NO: 1346566 - RNA, 23 nt, Human
cgccuguaaucccagcacuuugg

SEQ ID NO: 1346567 - RNA, 21 nt, Human
cguugcacuccagccugggca

SEQ ID NO: 1346568 - RNA, 20 nt, Human
cguugcacuccagccugggg

SEQ ID NO: 1346569 - RNA, 24 nt, Human
cuauaaacaaucacuguugcuccc

SEQ ID NO: 1346570 - RNA, 22 nt, Human
cucacgccuguaaucccagcac

SEQ ID NO: 1346571 - RNA, 24 nt, Human
cucacgccuguaaucccagcacuu

SEQ ID NO: 1346572 - RNA, 24 nt, Human
cuccgucacaaaaaaaaaaaaaaa

SEQ ID NO: 1346573 - RNA, 27 nt, Human
cuccgucacaaaaaaaaaaaaaaaaaa

SEQ ID NO: 1346574 - RNA, 20 nt, Human
cucuagaagcccaggacccc

SEQ ID NO: 1346575 - RNA, 21 nt, Human
cugaggcuuuggggucaacgg

SEQ ID NO: 1346576 - RNA, 25 nt, Human
gacugcaccguugcacuccagccug

SEQ ID NO: 1346577 - RNA, 23 nt, Human
gagacuagccugaccaacauggu

SEQ ID NO: 1346578 - RNA, 23 nt, Human
gagacugcaccguugcacuccag

SEQ ID NO: 1346579 - RNA, 21 nt, Human
gagcaccugaggucaggaguu

SEQ ID NO: 1346580 - RNA, 24 nt, Human
gagcaccugaggucaggaguuuga

SEQ ID NO: 1346581 - RNA, 20 nt, Human
gagggaaacuccgucacaaa

SEQ ID NO: 1346582 - RNA, 23 nt, Human
gagguugcagugagccgagacug

SEQ ID NO: 1346583 - RNA, 25 nt, Human
gcaccguugcacuccagccugggca

SEQ ID NO: 1346584 - RNA, 28 nt, Human
gcaccguugcacuccagccugggcaaca

SEQ ID NO: 1346585 - RNA, 23 nt, Human
gcaccugaggucaggaguuugag

SEQ ID NO: 1346586 - RNA, 21 nt, Human
gcccugaggcuuugggguccc

SEQ ID NO: 1346587 - RNA, 23 nt, Human
gccgggcacgguggcgggugccu

SEQ ID NO: 1346588 - RNA, 20 nt, Human
gcgggugccuguaaucccag

SEQ ID NO: 1346589 - RNA, 22 nt, Human
gcgggugccuguaaucccagcu

SEQ ID NO: 1346590 - RNA, 21 nt, Human
gcugcugcgggauccuacaag

SEQ ID NO: 1346591 - RNA, 23 nt, Human
gcuuaggcugggcacaguggcuc

SEQ ID NO: 1346592 - RNA, 18 nt, Human
ggagguugcagugagccg

SEQ ID NO: 1346593 - RNA, 20 nt, Human
ggagguugcagugagccgag

SEQ ID NO: 1346594 - RNA, 22 nt, Human
ggagguugcagugagccgagac

SEQ ID NO: 1346595 - RNA, 23 nt, Human
ggcacgguggcgggugccuguaa

SEQ ID NO: 1346596 - RNA, 23 nt, Human
ggcuuaggcugggcacaguggcu

SEQ ID NO: 1346597 - RNA, 18 nt, Human
gggcacaguggcucacgc

SEQ ID NO: 1346598 - RNA, 24 nt, Human
gggcacaguggcucacgccuguaa

SEQ ID NO: 1346599 - RNA, 24 nt, Human
ggugccuguaaucccagcuacuug

SEQ ID NO: 1346600 - RNA, 23 nt, Human
gguggcgggugccuguaauccca

SEQ ID NO: 1346601 - RNA, 23 nt, Human
guggcgggugccuguaaucccag

SEQ ID NO: 1346602 - RNA, 25 nt, Human
guugcacuccagccugggcaacaag

SEQ ID NO: 1346603 - RNA, 19 nt, Human
guugcagugagccgagacu

SEQ ID NO: 1346604 - RNA, 22 nt, Human
uaaacaaucacuguugcuccca

SEQ ID NO: 1346605 - RNA, 24 nt, Human
uaccaagugcaaauauguaaaaga

SEQ ID NO: 1346606 - RNA, 21 nt, Human
uacccagcccccuucuucuaa

SEQ ID NO: 1346607 - RNA, 20 nt, Human
uacuaaaaaaaauacaaaaa

SEQ ID NO: 1346608 - RNA, 21 nt, Human
uagccgggcacgguggcgggu

SEQ ID NO: 1346609 - RNA, 18 nt, Human
ucacuugaaccugggagu

SEQ ID NO: 1346610 - RNA, 21 nt, Human
ucaugucgcucugucucuugc

SEQ ID NO: 1346611 - RNA, 23 nt, Human
uccgucacaaaaaaaaaaaaaaa

SEQ ID NO: 1346612 - RNA, 26 nt, Human
ucgcucugucucuugcugcuccugac

SEQ ID NO: 1346613 - RNA, 22 nt, Human
ucuagaagcccaggaccccgcc

SEQ ID NO: 1346614 - RNA, 21 nt, Human
ugaaaacaaaaaacuauaaac

SEQ ID NO: 1346615 - RNA, 21 nt, Human
ugaaaagaagcccggccucug

SEQ ID NO: 1346616 - RNA, 22 nt, Human
ugaaaagaagcccggccucuga

SEQ ID NO: 1346617 - RNA, 19 nt, Human
ugaaaauacucuuggccac

SEQ ID NO: 1346618 - RNA, 23 nt, Human
ugaaaauacucuuggccacuguc

SEQ ID NO: 1346619 - RNA, 19 nt, Human
ugaaaccccaucuguacua

SEQ ID NO: 1346620 - RNA, 24 nt, Human
ugaaccugggaguuggagguugca

SEQ ID NO: 1346621 - RNA, 25 nt, Human
ugaagcucacuucaaucucuuuagg

SEQ ID NO: 1346622 - RNA, 24 nt, Human
ugaccaacauggugaaaccccauc

SEQ ID NO: 1346623 - RNA, 23 nt, Human
ugagacuagccugaccaacaugg

SEQ ID NO: 1346624 - RNA, 24 nt, Human
ugaggcacgagacucacuugaacc

SEQ ID NO: 1346625 - RNA, 23 nt, Human
ugaggcuuuggggucaacgggcu

SEQ ID NO: 1346626 - RNA, 18 nt, Human
ugaggucaggaguuugag

SEQ ID NO: 1346627 - RNA, 21 nt, Human
ugcaccguugcacuccagccu

SEQ ID NO: 1346628 - RNA, 19 nt, Human
ugcacuccagccugggcaa

SEQ ID NO: 1346629 - RNA, 23 nt, Human
ugccuguaaucccagcuacuugg

SEQ ID NO: 1346630 - RNA, 24 nt, Human
ugccuguaaucccagcuacuuggg

SEQ ID NO: 1346631 - RNA, 18 nt, Human
uggacauaagcccugagg

SEQ ID NO: 1346632 - RNA, 24 nt, Human
uggagcaccugaggucaggaguuu

SEQ ID NO: 1346633 - RNA, 22 nt, Human
uggcgggugccuguaaucccag

SEQ ID NO: 1346634 - RNA, 24 nt, Human
uggcgggugccuguaaucccagcu

SEQ ID NO: 1346635 - RNA, 22 nt, Human
uggcucacgccuguaaucccag

SEQ ID NO: 1346636 - RNA, 24 nt, Human
uggcucacgccuguaaucccagca

SEQ ID NO: 1346637 - RNA, 19 nt, Human
ugggaaccaacacaagaac

SEQ ID NO: 1346638 - RNA, 22 nt, Human
ugggaggccaaggcagguggag

SEQ ID NO: 1346639 - RNA, 24 nt, Human
ugggaggcugaggcacgagacuca

SEQ ID NO: 1346640 - RNA, 24 nt, Human
ugggaguuggagguugcagugagc

SEQ ID NO: 1346641 - RNA, 24 nt, Human
uguucuguuuuggauuuuuuuuuu

SEQ ID NO: 1346642 - RNA, 24 nt, Human
uuaggcugggcacaguggcucacg

SEQ ID NO: 1346643 - RNA, 21 nt, Human
uugaaaagaagcccggccucu

SEQ ID NO: 1346644 - RNA, 23 nt, Human
uugaaaauacucuuggccacaaa

SEQ ID NO: 1346645 - RNA, 24 nt, Human
uugaaccugggaguuggagguugc

SEQ ID NO: 1346646 - RNA, 23 nt, Human
uugcacuccagccugggcaacaa

SEQ ID NO: 1346647 - RNA, 18 nt, Human
uugcagugagccgagacu

SEQ ID NO: 1346648 - RNA, 19 nt, Human
uugcagugagccgagacug

SEQ ID NO: 1346649 - RNA, 20 nt, Human
uugcagugagccgagacugc

SEQ ID NO: 1346650 - RNA, 22 nt, Human
uugcagugagccgagacugcac

SEQ ID NO: 1346651 - RNA, 18 nt, Human
uuuuuuuuuuuuuuuuug

SEQ ID NO: 1346652 - RNA, 23 nt, Human
aagaaccauuuacucagauaguc

SEQ ID NO: 1346653 - RNA, 18 nt, Human
aaggcggcgggggaggag

SEQ ID NO: 1346654 - RNA, 24 nt, Human
agccugcuuuugagguauugauuu

SEQ ID NO: 1346655 - RNA, 22 nt, Human
agucaaaugcacaaaggcucuu

SEQ ID NO: 1346656 - RNA, 22 nt, Human
agucaggaacugccuaggucca

SEQ ID NO: 1346657 - RNA, 24 nt, Human
auaagcugccuaaggaaaccucag

SEQ ID NO: 1346658 - RNA, 24 nt, Human
auagagcuuacucuuauguuaaag

SEQ ID NO: 1346659 - RNA, 19 nt, Human
caaaugcacaaaggcucuu

SEQ ID NO: 1346660 - RNA, 25 nt, Human
cacaaaauuaagcuaaccagcuuga

SEQ ID NO: 1346661 - RNA, 20 nt, Human
cacucuuccucaaagccaag

SEQ ID NO: 1346662 - RNA, 19 nt, Human
caguaaauucgaccucucc

SEQ ID NO: 1346663 - RNA, 23 nt, Human
ccacaaagaaccauuuacucaga

SEQ ID NO: 1346664 - RNA, 21 nt, Human
ccacuuugggguuuucuuguc

SEQ ID NO: 1346665 - RNA, 21 nt, Human
cugccacucuuccucaaagcc

SEQ ID NO: 1346666 - RNA, 21 nt, Human
gaauccuuuuuccuaaaguuu

SEQ ID NO: 1346667 - RNA, 24 nt, Human
ggaugggaaaagcaggccacuuug

SEQ ID NO: 1346668 - RNA, 18 nt, Human
ggcggcgggggaggaggc

SEQ ID NO: 1346669 - RNA, 19 nt, Human
ggggaggaggccgaggguc

SEQ ID NO: 1346670 - RNA, 20 nt, Human
gggggaggaggccgaggguc

SEQ ID NO: 1346671 - RNA, 24 nt, Human
guccacaaagaaccauuuacucag

SEQ ID NO: 1346672 - RNA, 24 nt, Human
guggaacagucaggaacugccuag

SEQ ID NO: 1346673 - RNA, 18 nt, Human
uaaaguuuaacucacauc

SEQ ID NO: 1346674 - RNA, 23 nt, Human
uacugugagccucaccacccagg

SEQ ID NO: 1346675 - RNA, 18 nt, Human
uagcuaaaauuuuuuaaa

SEQ ID NO: 1346676 - RNA, 19 nt, Human
uugagguauugauuuuuuu

SEQ ID NO: 1346677 - RNA, 20 nt, Human
aaaagacaacaaaaaagcac

SEQ ID NO: 1346678 - RNA, 28 nt, Human
aaaagacaacaaaaaagcacacaccaag

SEQ ID NO: 1346679 - RNA, 21 nt, Human
aacaaaaaagcacacaccaaa

SEQ ID NO: 1346680 - RNA, 19 nt, Human
aacagcucuuacauccuuc

SEQ ID NO: 1346681 - RNA, 21 nt, Human
aaccauggucaauccaaugau

SEQ ID NO: 1346682 - RNA, 21 nt, Human
aacucuagggauaucuaaguu

SEQ ID NO: 1346683 - RNA, 21 nt, Human
aagaagaaaugacacugaugu

SEQ ID NO: 1346684 - RNA, 20 nt, Human
aagaaguguuuugccaucug

SEQ ID NO: 1346685 - RNA, 19 nt, Human
aagcacacaccaaaaaacc

SEQ ID NO: 1346686 - RNA, 23 nt, Human
acaacaaaaaagcacacaccaaa

SEQ ID NO: 1346687 - RNA, 22 nt, Human
accugagcacaaguccaaaagc

SEQ ID NO: 1346688 - RNA, 18 nt, Human
acucuagggauaucuaag

SEQ ID NO: 1346689 - RNA, 24 nt, Human
agacaacaaaaaagcacacaccaa

SEQ ID NO: 1346690 - RNA, 25 nt, Human
agacaacaaaaaagcacacaccaaa

SEQ ID NO: 1346691 - RNA, 19 nt, Human
agagggagggagggaagag

SEQ ID NO: 1346692 - RNA, 22 nt, Human
agccuaagaauauucugagagu

SEQ ID NO: 1346693 - RNA, 20 nt, Human
agggagggaagagauuugag

SEQ ID NO: 1346694 - RNA, 24 nt, Human
agggagggagggaagagauuugag

SEQ ID NO: 1346695 - RNA, 28 nt, Human
agggggccccacgccggcaccugagcgu

SEQ ID NO: 1346696 - RNA, 18 nt, Human
augacacugauguacaaa

SEQ ID NO: 1346697 - RNA, 23 nt, Human
auuugcagaaauaaacuuuccuc

SEQ ID NO: 1346698 - RNA, 21 nt, Human
caaaagauucacagccuccga

SEQ ID NO: 1346699 - RNA, 24 nt, Human
caaaugacucaccaagggacucuc

SEQ ID NO: 1346700 - RNA, 23 nt, Human
caacaaaaaagcacacaccaaaa

SEQ ID NO: 1346701 - RNA, 24 nt, Human
caacaaaaaagcacacaccaaaaa

SEQ ID NO: 1346702 - RNA, 24 nt, Human
caacugaugaaaagcuucaaauac

SEQ ID NO: 1346703 - RNA, 18 nt, Human
caauccaaugaugcacuu

SEQ ID NO: 1346704 - RNA, 19 nt, Human
cacaguaacuuccagugac

SEQ ID NO: 1346705 - RNA, 18 nt, Human
cacgccggcaccugagcg

SEQ ID NO: 1346706 - RNA, 25 nt, Human
caucucccauuuacauucggggguc

SEQ ID NO: 1346707 - RNA, 19 nt, Human
ccaaaagcacugacagcug

SEQ ID NO: 1346708 - RNA, 26 nt, Human
ccccacgccggcaccugagcgucccc

SEQ ID NO: 1346709 - RNA, 21 nt, Human
cgccggcaccugagcgucccc

SEQ ID NO: 1346710 - RNA, 23 nt, Human
cucaggaagaaagaugcugagaa

SEQ ID NO: 1346711 - RNA, 24 nt, Human
cucaggaagaaagaugcugagaaa

SEQ ID NO: 1346712 - RNA, 19 nt, Human
cuuagcuucuacuugcugc

SEQ ID NO: 1346713 - RNA, 22 nt, Human
cuugaaaaaaaaaaaagccuaa

SEQ ID NO: 1346714 - RNA, 26 nt, Human
cuugaaaaaaaaaaaagccuaagaau

SEQ ID NO: 1346715 - RNA, 22 nt, Human
gaaaaaaaaaaaagccuaagaa

SEQ ID NO: 1346716 - RNA, 18 nt, Human
gaaaagcuucaaauacua

SEQ ID NO: 1346717 - RNA, 23 nt, Human
gaaaugacacugauguacaaaug

SEQ ID NO: 1346718 - RNA, 25 nt, Human
gaggucuugucugugucgucuccuu

SEQ ID NO: 1346719 - RNA, 18 nt, Human
gagguuuauucuugagua

SEQ ID NO: 1346720 - RNA, 19 nt, Human
gcauguguggugaauggaa

SEQ ID NO: 1346721 - RNA, 19 nt, Human
ggauguaagguccaugacc

SEQ ID NO: 1346722 - RNA, 20 nt, Human
gggagagggagggagggaag

SEQ ID NO: 1346723 - RNA, 23 nt, Human
uaacuugaaaaaaaaaaaagccu

SEQ ID NO: 1346724 - RNA, 21 nt, Human
uaagaagaaaugacacugaug

SEQ ID NO: 1346725 - RNA, 23 nt, Human
uaaggggccucuuccuuugaucu

SEQ ID NO: 1346726 - RNA, 21 nt, Human
uaguagccacaguaacuucca

SEQ ID NO: 1346727 - RNA, 18 nt, Human
ucagauccuauaagugca

SEQ ID NO: 1346728 - RNA, 22 nt, Human
uccaaaagauucacagccuccg

SEQ ID NO: 1346729 - RNA, 23 nt, Human
uccaaaagauucacagccuccga

SEQ ID NO: 1346730 - RNA, 23 nt, Human
uccaaaagcacugacagcuggga

SEQ ID NO: 1346731 - RNA, 22 nt, Human
ucuacuugcugcggguagaagc

SEQ ID NO: 1346732 - RNA, 23 nt, Human
ucuauaacuugaaaaaaaaaaaa

SEQ ID NO: 1346733 - RNA, 24 nt, Human
ucuauaacuugaaaaaaaaaaaag

SEQ ID NO: 1346734 - RNA, 25 nt, Human
ugaaaaaccauggucaauccaauga

SEQ ID NO: 1346735 - RNA, 18 nt, Human
ugaaaagcuucaaauacu

SEQ ID NO: 1346736 - RNA, 20 nt, Human
ugagccaacugaugaaaagc

SEQ ID NO: 1346737 - RNA, 18 nt, Human
ugccccuaaucaagaagu

SEQ ID NO: 1346738 - RNA, 18 nt, Human
ugcugagaaacucuaggg

SEQ ID NO: 1346739 - RNA, 24 nt, Human
ugcugcggguagaagcuggcaagc

SEQ ID NO: 1346740 - RNA, 21 nt, Human
ugcuuugucuuuauuucugau

SEQ ID NO: 1346741 - RNA, 19 nt, Human
uggaauaaaucccuucuau

SEQ ID NO: 1346742 - RNA, 25 nt, Human
uggaauucccaugaacagcucuuac

SEQ ID NO: 1346743 - RNA, 19 nt, Human
uggcauguguggugaaugg

SEQ ID NO: 1346744 - RNA, 18 nt, Human
uggguacucucaucuccc

SEQ ID NO: 1346745 - RNA, 23 nt, Human
ugucugugucgucuccuuugcug

SEQ ID NO: 1346746 - RNA, 18 nt, Human
uucaauaacuaguuggcu

SEQ ID NO: 1346747 - RNA, 19 nt, Human
uugaaaaaaaaaaaagccu

SEQ ID NO: 1346748 - RNA, 27 nt, Human
uuuaagaagacauuugaauuuuugccc

SEQ ID NO: 1346749 - RNA, 21 nt, Human
aaccuggcuguuuccaaucuc

SEQ ID NO: 1346750 - RNA, 23 nt, Human
agaaaaccauuuauuccuggggc

SEQ ID NO: 1346751 - RNA, 20 nt, Human
agacaggaaccaggggacug

SEQ ID NO: 1346752 - RNA, 26 nt, Human
agacaggaaccaggggacugggucca

SEQ ID NO: 1346753 - RNA, 20 nt, Human
agagccuggggaaucuggag

SEQ ID NO: 1346754 - RNA, 18 nt, Human
aggaagaagaaaugaaga

SEQ ID NO: 1346755 - RNA, 19 nt, Human
aggaggugcagcugagggc

SEQ ID NO: 1346756 - RNA, 21 nt, Human
agggcagccagguuuccuuac

SEQ ID NO: 1346757 - RNA, 21 nt, Human
cacucacugcuccaaccuggc

SEQ ID NO: 1346758 - RNA, 23 nt, Human
ccuuacucacucacugcuccaac

SEQ ID NO: 1346759 - RNA, 23 nt, Human
cucacugcuccaaccuggcuguu

SEQ ID NO: 1346760 - RNA, 24 nt, Human
cucacugcuccaaccuggcuguuu

SEQ ID NO: 1346761 - RNA, 19 nt, Human
cuccaaccuggcuguuucc

SEQ ID NO: 1346762 - RNA, 21 nt, Human
cucugagagccuggggaaucu

SEQ ID NO: 1346763 - RNA, 22 nt, Human
cuucucugagagccuggggaau

SEQ ID NO: 1346764 - RNA, 26 nt, Human
cuuucugcugaucuucucugagagcc

SEQ ID NO: 1346765 - RNA, 24 nt, Human
gaaccaggggacuggguccagaug

SEQ ID NO: 1346766 - RNA, 18 nt, Human
gaggaagccaagaaaacc

SEQ ID NO: 1346767 - RNA, 18 nt, Human
gaggugcagcugagggcu

SEQ ID NO: 1346768 - RNA, 24 nt, Human
gcuccaaccuggcuguuuccaauc

SEQ ID NO: 1346769 - RNA, 21 nt, Human
ggucuugcagacuuucugcug

SEQ ID NO: 1346770 - RNA, 23 nt, Human
uaaagauuucuuuauuguggucc

SEQ ID NO: 1346771 - RNA, 21 nt, Human
ucccugagugaggacaggagu

SEQ ID NO: 1346772 - RNA, 18 nt, Human
ucuugcagacuuucugcu

SEQ ID NO: 1346773 - RNA, 23 nt, Human
ugaaguggaggcaguaggaagaa

SEQ ID NO: 1346774 - RNA, 24 nt, Human
ugaaguggaggcaguaggaagaag

SEQ ID NO: 1346775 - RNA, 19 nt, Human
uggaggggaggaggugcag

SEQ ID NO: 1346776 - RNA, 24 nt, Human
uuacaaauaacagacaggaaccag

SEQ ID NO: 1346777 - RNA, 23 nt, Human
aaaagaagaucaagaucacgacc

SEQ ID NO: 1346778 - RNA, 22 nt, Human
aagacaacggugauaacaacug

SEQ ID NO: 1346779 - RNA, 18 nt, Human
aagaggcagaucagcacc

SEQ ID NO: 1346780 - RNA, 20 nt, Human
aagaggcagaucagcacccc

SEQ ID NO: 1346781 - RNA, 22 nt, Human
aaggaguagucaggaggcuggu

SEQ ID NO: 1346782 - RNA, 20 nt, Human
aagggcucagauuagggggu

SEQ ID NO: 1346783 - RNA, 21 nt, Human
acagaguagagcagccaauga

SEQ ID NO: 1346784 - RNA, 19 nt, Human
accuggcuggagcuuggau

SEQ ID NO: 1346785 - RNA, 25 nt, Human
acguaagcaugagguuguuggggaa

SEQ ID NO: 1346786 - RNA, 24 nt, Human
agagaaaacuuucccauaauaagc

SEQ ID NO: 1346787 - RNA, 18 nt, Human
agagcaggguaaggaaga

SEQ ID NO: 1346788 - RNA, 19 nt, Human
agcgcgcugcgcugggggc

SEQ ID NO: 1346789 - RNA, 20 nt, Human
agcucuaguaagagggccug

SEQ ID NO: 1346790 - RNA, 18 nt, Human
aggguaaggaagacaacg

SEQ ID NO: 1346791 - RNA, 21 nt, Human
caaccugugaaaaaagaugac

SEQ ID NO: 1346792 - RNA, 22 nt, Human
caaccugugaaaaaagaugacu

SEQ ID NO: 1346793 - RNA, 20 nt, Human
cacauacucagauguccccu

SEQ ID NO: 1346794 - RNA, 21 nt, Human
cacgaccgagagcaggguaag

SEQ ID NO: 1346795 - RNA, 22 nt, Human
cacuaggugaccagguagggga

SEQ ID NO: 1346796 - RNA, 18 nt, Human
cagagaaaacuuucccau

SEQ ID NO: 1346797 - RNA, 21 nt, Human
cagccaaugaccuuaacucaa

SEQ ID NO: 1346798 - RNA, 27 nt, Human
cagcggagcgcugagcuucccgaaucg

SEQ ID NO: 1346799 - RNA, 21 nt, Human
caugucccuggucccuggagu

SEQ ID NO: 1346800 - RNA, 23 nt, Human
ccacaucaaucaaugcuucuccc

SEQ ID NO: 1346801 - RNA, 26 nt, Human
cccucugccccagcggagcgcugagc

SEQ ID NO: 1346802 - RNA, 22 nt, Human
ccgccgcgacccucugccccag

SEQ ID NO: 1346803 - RNA, 21 nt, Human
cuccauagucuccuaccccuc

SEQ ID NO: 1346804 - RNA, 26 nt, Human
cuuuucucucccuucaaccugugaaa

SEQ ID NO: 1346805 - RNA, 19 nt, Human
gagguuguuggggaacacg

SEQ ID NO: 1346806 - RNA, 25 nt, Human
gcgcugagcuucggccgcuccgggu

SEQ ID NO: 1346807 - RNA, 21 nt, Human
gcggagcgcgcugcgcugggg

SEQ ID NO: 1346808 - RNA, 21 nt, Human
gcuccaucuucuggggacagg

SEQ ID NO: 1346809 - RNA, 21 nt, Human
gggaacacggaaaggaagggc

SEQ ID NO: 1346810 - RNA, 22 nt, Human
gggcuaucacuaggugaccagg

SEQ ID NO: 1346811 - RNA, 22 nt, Human
ggggacagggccucagugggcu

SEQ ID NO: 1346812 - RNA, 18 nt, Human
ggugcgucggggagcggc

SEQ ID NO: 1346813 - RNA, 18 nt, Human
guagagcagccaaugacc

SEQ ID NO: 1346814 - RNA, 18 nt, Human
gucauugucacuaguggu

SEQ ID NO: 1346815 - RNA, 31 nt, Human
uaaaaaucacguaagcaugagguuguugggg

SEQ ID NO: 1346816 - RNA, 18 nt, Human
uaagaucuccauagucuc

SEQ ID NO: 1346817 - RNA, 18 nt, Human
uagagcagccaaugaccu

SEQ ID NO: 1346818 - RNA, 22 nt, Human
uagagcagccaaugaccuuaac

SEQ ID NO: 1346819 - RNA, 18 nt, Human
uagccacaucuuguuggc

SEQ ID NO: 1346820 - RNA, 18 nt, Human
uaucaggagguaagaucu

SEQ ID NO: 1346821 - RNA, 23 nt, Human
uaucaggagguaagaucuccaua

SEQ ID NO: 1346822 - RNA, 22 nt, Human
ucaaucaaugcuucucccuggc

SEQ ID NO: 1346823 - RNA, 21 nt, Human
ucagcaccccgcggagcgcgc

SEQ ID NO: 1346824 - RNA, 18 nt, Human
uccauagucuccuacccc

SEQ ID NO: 1346825 - RNA, 21 nt, Human
uccauagucuccuaccccucc

SEQ ID NO: 1346826 - RNA, 24 nt, Human
uccauagucuccuaccccuccugg

SEQ ID NO: 1346827 - RNA, 24 nt, Human
ucccuggagucagugaugucggca

SEQ ID NO: 1346828 - RNA, 26 nt, Human
ucccuggagucagugaugucggcauu

SEQ ID NO: 1346829 - RNA, 19 nt, Human
ucucuuggagaaggaguag

SEQ ID NO: 1346830 - RNA, 20 nt, Human
ugaaaaaagaugacugggca

SEQ ID NO: 1346831 - RNA, 19 nt, Human
ugcgcugggggcggccggu

SEQ ID NO: 1346832 - RNA, 19 nt, Human
ugggaagaccuuguaugga

SEQ ID NO: 1346833 - RNA, 23 nt, Human
ugggggcggccggugcgucgggg

SEQ ID NO: 1346834 - RNA, 18 nt, Human
ugggguggucaucaguuc

SEQ ID NO: 1346835 - RNA, 19 nt, Human
ugguugaguuucuuggaga

SEQ ID NO: 1346836 - RNA, 23 nt, Human
ugugcuggcuccaucuucugggg

SEQ ID NO: 1346837 - RNA, 19 nt, Human
uuggccagucacaaacacc

SEQ ID NO: 1346838 - RNA, 24 nt, Human
uugggguggucaucaguucuucuc

SEQ ID NO: 1346839 - RNA, 21 nt, Human
uuguacagguaaaagaagauc

SEQ ID NO: 1346840 - RNA, 23 nt, Human
uuucuuggagaagaggcagauca

SEQ ID NO: 1346841 - RNA, 19 nt, Human
uuuuuuuuuuuuuuuuugu

SEQ ID NO: 1346842 - RNA, 21 nt, Human
uuuuuuuuuuuuuuuuuuugg

SEQ ID NO: 1346843 - RNA, 20 nt, Human
aagggucccugggucugggc

SEQ ID NO: 1346844 - RNA, 19 nt, Human
agcccaggggcaggaggau

SEQ ID NO: 1346845 - RNA, 20 nt, Human
aggcaggagagggcuggggc

SEQ ID NO: 1346846 - RNA, 25 nt, Human
aggcaggagagggcuggggccaggg

SEQ ID NO: 1346847 - RNA, 18 nt, Human
agggcuggggccagggga

SEQ ID NO: 1346848 - RNA, 22 nt, Human
agggcuggggccaggggaguuu

SEQ ID NO: 1346849 - RNA, 24 nt, Human
auuuggagcuggagggguuggggc

SEQ ID NO: 1346850 - RNA, 24 nt, Human
cauugugcgggccucugaggcugu

SEQ ID NO: 1346851 - RNA, 18 nt, Human
ccacagcggccccuccuc

SEQ ID NO: 1346852 - RNA, 22 nt, Human
ccagaccacagcggccccuccu

SEQ ID NO: 1346853 - RNA, 19 nt, Human
ccucugaggcuguggcagg

SEQ ID NO: 1346854 - RNA, 26 nt, Human
ccucugaggcuguggcagggguaccc

SEQ ID NO: 1346855 - RNA, 18 nt, Human
ccuggcagagaggaggug

SEQ ID NO: 1346856 - RNA, 23 nt, Human
cgacccagggggucccugagagc

SEQ ID NO: 1346857 - RNA, 20 nt, Human
cgcuggcuuuuauugccucc

SEQ ID NO: 1346858 - RNA, 21 nt, Human
cuaugacagccccucccuggg

SEQ ID NO: 1346859 - RNA, 23 nt, Human
cugggacuaugacagccccuccc

SEQ ID NO: 1346860 - RNA, 23 nt, Human
gccagaccacagcggccccuccu

SEQ ID NO: 1346861 - RNA, 19 nt, Human
gccuggacagggagggggc

SEQ ID NO: 1346862 - RNA, 18 nt, Human
ggagcuggagggguuggg

SEQ ID NO: 1346863 - RNA, 19 nt, Human
ggagcuggagggguugggg

SEQ ID NO: 1346864 - RNA, 19 nt, Human
ggguugggggugugacagg

SEQ ID NO: 1346865 - RNA, 24 nt, Human
ucagucagaaauagguauugcuua

SEQ ID NO: 1346866 - RNA, 21 nt, Human
ucccugagagcccaggggcag

SEQ ID NO: 1346867 - RNA, 22 nt, Human
ucccugagagcccaggggcagg

SEQ ID NO: 1346868 - RNA, 19 nt, Human
uccuggcagagaggaggug

SEQ ID NO: 1346869 - RNA, 19 nt, Human
ugagcuuggggccaagggu

SEQ ID NO: 1346870 - RNA, 23 nt, Human
uggaggcucagauuuggagcugg

SEQ ID NO: 1346871 - RNA, 21 nt, Human
ugugguggaggcucagauuug

SEQ ID NO: 1346872 - RNA, 23 nt, Human
aacccuguugguuucaccuguug

SEQ ID NO: 1346873 - RNA, 20 nt, Human
acuucaguacuucaaguguu

SEQ ID NO: 1346874 - RNA, 23 nt, Human
ccuacuauuggaguagaugaaac

SEQ ID NO: 1346875 - RNA, 20 nt, Human
ccuuaacuuuuagaaagagg

SEQ ID NO: 1346876 - RNA, 21 nt, Human
cucuucagauuuuacugugca

SEQ ID NO: 1346877 - RNA, 25 nt, Human
uaacagcaugaaaucugacuucagu

SEQ ID NO: 1346878 - RNA, 22 nt, Human
uauuggaguagaugaaacccug

SEQ ID NO: 1346879 - RNA, 23 nt, Human
aaaauaucuugagucuccaacua

SEQ ID NO: 1346880 - RNA, 26 nt, Human
aaucacauuacucuucacagaauuca

SEQ ID NO: 1346881 - RNA, 24 nt, Human
acccauguacccugcugcuccgga

SEQ ID NO: 1346882 - RNA, 19 nt, Human
accgcauuuggggcaggau

SEQ ID NO: 1346883 - RNA, 19 nt, Human
acugcccaugcaagggaau

SEQ ID NO: 1346884 - RNA, 19 nt, Human
caaccgccugggucccgcc

SEQ ID NO: 1346885 - RNA, 24 nt, Human
caaucacauuacucuucacagaau

SEQ ID NO: 1346886 - RNA, 22 nt, Human
cacagaauucacagaauucauu

SEQ ID NO: 1346887 - RNA, 20 nt, Human
cagccaaugggcugcaguca

SEQ ID NO: 1346888 - RNA, 23 nt, Human
cagccucaaccgccugggucccg

SEQ ID NO: 1346889 - RNA, 18 nt, Human
caugcaagggaauacacc

SEQ ID NO: 1346890 - RNA, 25 nt, Human
ccauguacccugcugcuccggacgc

SEQ ID NO: 1346891 - RNA, 19 nt, Human
cccauguacccugcugcuc

SEQ ID NO: 1346892 - RNA, 20 nt, Human
ccccaaagcucuggggaacc

SEQ ID NO: 1346893 - RNA, 23 nt, Human
ccgggcccggaccccggcccucg

SEQ ID NO: 1346894 - RNA, 18 nt, Human
cuagccccgggcugggac

SEQ ID NO: 1346895 - RNA, 21 nt, Human
cuccugaccagccucaaccgc

SEQ ID NO: 1346896 - RNA, 18 nt, Human
cugaaugaaccucccacc

SEQ ID NO: 1346897 - RNA, 20 nt, Human
cugaaugaaccucccaccca

SEQ ID NO: 1346898 - RNA, 24 nt, Human
cuggggaaccguggauaccaggga

SEQ ID NO: 1346899 - RNA, 20 nt, Human
cugugugcagaaugcaggcu

SEQ ID NO: 1346900 - RNA, 21 nt, Human
gaacuugaagacuucauggua

SEQ ID NO: 1346901 - RNA, 20 nt, Human
gccugggucccgccgccggg

SEQ ID NO: 1346902 - RNA, 23 nt, Human
gccugggucccgccgccgggccc

SEQ ID NO: 1346903 - RNA, 22 nt, Human
gcuccggacgcucugagggcua

SEQ ID NO: 1346904 - RNA, 21 nt, Human
ggcuggcugacuccugaccag

SEQ ID NO: 1346905 - RNA, 19 nt, Human
ggggaugggagcagaugcu

SEQ ID NO: 1346906 - RNA, 19 nt, Human
uaaggaaugucucaaagaa

SEQ ID NO: 1346907 - RNA, 21 nt, Human
uacagcuugccacuuuccucc

SEQ ID NO: 1346908 - RNA, 24 nt, Human
uacaugggucucuauguaaaacuu

SEQ ID NO: 1346909 - RNA, 19 nt, Human
uagacuuauuuucaaucac

SEQ ID NO: 1346910 - RNA, 22 nt, Human
uagcacauugaaauagaaaaga

SEQ ID NO: 1346911 - RNA, 19 nt, Human
uagccccgggcugggaccu

SEQ ID NO: 1346912 - RNA, 19 nt, Human
ucauacaugggucucuaug

SEQ ID NO: 1346913 - RNA, 22 nt, Human
uccccaaagcucuggggaaccg

SEQ ID NO: 1346914 - RNA, 18 nt, Human
ucccugagagugguggcu

SEQ ID NO: 1346915 - RNA, 24 nt, Human
uccgaccgcauuuggggcaggauc

SEQ ID NO: 1346916 - RNA, 18 nt, Human
uccggacgcucugagggc

SEQ ID NO: 1346917 - RNA, 24 nt, Human
ucgcgugguccccaaagcucuggg

SEQ ID NO: 1346918 - RNA, 19 nt, Human
ucuacagcuugccacuuuc

SEQ ID NO: 1346919 - RNA, 18 nt, Human
ugacuccugaccagccuc

SEQ ID NO: 1346920 - RNA, 23 nt, Human
ugagucuccaacuauaaggaaug

SEQ ID NO: 1346921 - RNA, 19 nt, Human
ugaugcaacaaaaauaucu

SEQ ID NO: 1346922 - RNA, 22 nt, Human
ugcccaugcaagggaauacacc

SEQ ID NO: 1346923 - RNA, 24 nt, Human
ugcgacugcuguggguucacucag

SEQ ID NO: 1346924 - RNA, 18 nt, Human
ugcuuugcacaagcuucu

SEQ ID NO: 1346925 - RNA, 24 nt, Human
ugggggaugggagcagaugcugug

SEQ ID NO: 1346926 - RNA, 18 nt, Human
uggugggugcugaaugaa

SEQ ID NO: 1346927 - RNA, 18 nt, Human
uggugggugcugaaugaa

SEQ ID NO: 1346928 - RNA, 22 nt, Human
ugucucaaagaaaauguccuug

SEQ ID NO: 1346929 - RNA, 19 nt, Human
uugaagacuucaugguaga

SEQ ID NO: 1346930 - RNA, 24 nt, Human
uugccacuuuccucccuggucuug

SEQ ID NO: 1346931 - RNA, 25 nt, Human
uuggagguuuucgcgugguccccaa

SEQ ID NO: 1346932 - RNA, 24 nt, Human
uuugcacaagcuucucagugacau

SEQ ID NO: 1346933 - RNA, 21 nt, Human
uuuggggcaggaucccugaga

SEQ ID NO: 1346934 - RNA, 21 nt, Human
uuuuacagcuguuuagacuua

SEQ ID NO: 1346935 - RNA, 20 nt, Human
uuuuuuuuuuuuuuuuugcu

SEQ ID NO: 1346936 - RNA, 23 nt, Human
uuuuuuuuuuuuuuuuuugcuga

SEQ ID NO: 1346937 - RNA, 20 nt, Human
uuuuuuuuuuuuuuuuuugg

SEQ ID NO: 1346938 - RNA, 22 nt, Human
aaagcaccaaucaacuuuacag

SEQ ID NO: 1346939 - RNA, 21 nt, Human
aaaggagcucugaagggacca

SEQ ID NO: 1346940 - RNA, 21 nt, Human
aaaguaagaaccaaugucagg

SEQ ID NO: 1346941 - RNA, 21 nt, Human
aaauucucuugcuccccgcuu

SEQ ID NO: 1346942 - RNA, 18 nt, Human
aaggagcucugaagggac

SEQ ID NO: 1346943 - RNA, 22 nt, Human
aagugacuccacagaggggaag

SEQ ID NO: 1346944 - RNA, 23 nt, Human
aagugacuccacagaggggaagg

SEQ ID NO: 1346945 - RNA, 24 nt, Human
aauacaaaagugacuccacagaag

SEQ ID NO: 1346946 - RNA, 20 nt, Human
agaggaggcagcauacaaaa

SEQ ID NO: 1346947 - RNA, 19 nt, Human
agcuccgaccccucccauu

SEQ ID NO: 1346948 - RNA, 19 nt, Human
aggaggccgcugccugccc

SEQ ID NO: 1346949 - RNA, 24 nt, Human
aucagcugcuccccaaaccuucaa

SEQ ID NO: 1346950 - RNA, 18 nt, Human
auccccuccuugcccagu

SEQ ID NO: 1346951 - RNA, 20 nt, Human
augucaggauucacaaaaca

SEQ ID NO: 1346952 - RNA, 22 nt, Human
caaaaguaagaaccaaugucag

SEQ ID NO: 1346953 - RNA, 26 nt, Human
caacaacauuuuaagaaaucugguua

SEQ ID NO: 1346954 - RNA, 22 nt, Human
cagauaaauguuuacuuagaug

SEQ ID NO: 1346955 - RNA, 25 nt, Human
cagcauacaaaaguaagaaccaaug

SEQ ID NO: 1346956 - RNA, 23 nt, Human
cagcugguucuuuuucuuaaucu

SEQ ID NO: 1346957 - RNA, 22 nt, Human
caguggcagcuuuccaaaguuu

SEQ ID NO: 1346958 - RNA, 22 nt, Human
ccaaucaacuuuacagaucuga

SEQ ID NO: 1346959 - RNA, 25 nt, Human
ccacaaugggaacugggaacaaucc

SEQ ID NO: 1346960 - RNA, 21 nt, Human
ccaccgccaccgccgccaacg

SEQ ID NO: 1346961 - RNA, 25 nt, Human
ccaccgccaccgccgccaacguuag

SEQ ID NO: 1346962 - RNA, 27 nt, Human
ccaccgccgccaacguuagaccacuug

SEQ ID NO: 1346963 - RNA, 23 nt, Human
ccaucuacuggaugcugaaaguc

SEQ ID NO: 1346964 - RNA, 21 nt, Human
ccccagauucauggauccccu

SEQ ID NO: 1346965 - RNA, 21 nt, Human
cccgcuccgugcugcuccucc

SEQ ID NO: 1346966 - RNA, 18 nt, Human
ccgccgccaccgccaccg

SEQ ID NO: 1346967 - RNA, 21 nt, Human
ccgccgccaccgccaccgccg

SEQ ID NO: 1346968 - RNA, 25 nt, Human
ccgccgccaccgccaccgccgccaa

SEQ ID NO: 1346969 - RNA, 23 nt, Human
ccgccgccgccaccgccaccgcc

SEQ ID NO: 1346970 - RNA, 18 nt, Human
ccgccgccgccgccaccg

SEQ ID NO: 1346971 - RNA, 26 nt, Human
ccgcugagcagccaggaucccggucu

SEQ ID NO: 1346972 - RNA, 19 nt, Human
ccgcugccugcccuuggcg

SEQ ID NO: 1346973 - RNA, 20 nt, Human
ccgcugccugcccuuggcgc

SEQ ID NO: 1346974 - RNA, 20 nt, Human
ccucccauuguuguccccuc

SEQ ID NO: 1346975 - RNA, 19 nt, Human
ccuugcaagagcccuccuu

SEQ ID NO: 1346976 - RNA, 19 nt, Human
cgccacgcucucccgcucc

SEQ ID NO: 1346977 - RNA, 22 nt, Human
cggaugucucuuuucaaauucu

SEQ ID NO: 1346978 - RNA, 20 nt, Human
cucccauuguuguccccucu

SEQ ID NO: 1346979 - RNA, 20 nt, Human
cucugaagggaccacaaugg

SEQ ID NO: 1346980 - RNA, 20 nt, Human
cucuuccuuggcuccuuucu

SEQ ID NO: 1346981 - RNA, 22 nt, Human
cugaggcugcuuaguuguagcc

SEQ ID NO: 1346982 - RNA, 20 nt, Human
cugcuccccaaaccuucaac

SEQ ID NO: 1346983 - RNA, 23 nt, Human
cugcugccuucccgcugagcagc

SEQ ID NO: 1346984 - RNA, 24 nt, Human
cugggagggcacagaggaggcagc

SEQ ID NO: 1346985 - RNA, 28 nt, Human
cugugccagugugugugugugugugugg

SEQ ID NO: 1346986 - RNA, 19 nt, Human
gaccacuugccugcugccu

SEQ ID NO: 1346987 - RNA, 19 nt, Human
gacugggaggagacuccua

SEQ ID NO: 1346988 - RNA, 20 nt, Human
gaugcuguuggaaaggagcu

SEQ ID NO: 1346989 - RNA, 20 nt, Human
gauucauggauccccuccuu

SEQ ID NO: 1346990 - RNA, 18 nt, Human
gcuccgugcugcuccucc

SEQ ID NO: 1346991 - RNA, 21 nt, Human
gcuccgugcugcuccuccagg

SEQ ID NO: 1346992 - RNA, 22 nt, Human
guggggggaggaggcagcagag

SEQ ID NO: 1346993 - RNA, 25 nt, Human
guguguguguguaugcgugcgcgca

SEQ ID NO: 1346994 - RNA, 22 nt, Human
guguguguguguguguguguaa

SEQ ID NO: 1346995 - RNA, 19 nt, Human
uacuucuuguguuucccag

SEQ ID NO: 1346996 - RNA, 19 nt, Human
ucaugguucagcugguucu

SEQ ID NO: 1346997 - RNA, 20 nt, Human
uccuguugguuguacuucuu

SEQ ID NO: 1346998 - RNA, 24 nt, Human
uccuugcaagagcccuccuugcug

SEQ ID NO: 1346999 - RNA, 23 nt, Human
ucgccacgcucucccgcuccgug

SEQ ID NO: 1347000 - RNA, 24 nt, Human
ucggugccgccgccgccgccaccg

SEQ ID NO: 1347001 - RNA, 24 nt, Human
ucuccaguggcagcuuuucccaag

SEQ ID NO: 1347002 - RNA, 19 nt, Human
ucucccgcuccgugcugcu

SEQ ID NO: 1347003 - RNA, 24 nt, Human
ucucccgcuccgugcugcuccucc

SEQ ID NO: 1347004 - RNA, 27 nt, Human
ugaaacuugguggggggaggaggcagc

SEQ ID NO: 1347005 - RNA, 23 nt, Human
ugaaagucucgugggagcacacc

SEQ ID NO: 1347006 - RNA, 27 nt, Human
ugacuccacagaggggaaggaagagcu

SEQ ID NO: 1347007 - RNA, 21 nt, Human
ugaggcugcuuaguuguagcc

SEQ ID NO: 1347008 - RNA, 19 nt, Human
ugcgcgcacgcacgcagua

SEQ ID NO: 1347009 - RNA, 21 nt, Human
ugcgcgcacgcacgcaguagc

SEQ ID NO: 1347010 - RNA, 18 nt, Human
uggaaaggagcucugaag

SEQ ID NO: 1347011 - RNA, 18 nt, Human
uggagcagauuaacaagg

SEQ ID NO: 1347012 - RNA, 19 nt, Human
uggcgcugguuccuguugg

SEQ ID NO: 1347013 - RNA, 23 nt, Human
ugggagggcacagaggaggcagc

SEQ ID NO: 1347014 - RNA, 19 nt, Human
ugguggggggaggaggcag

SEQ ID NO: 1347015 - RNA, 22 nt, Human
ugguggggggaggaggcagcag

SEQ ID NO: 1347016 - RNA, 18 nt, Human
ugguucuuucucauuugg

SEQ ID NO: 1347017 - RNA, 21 nt, Human
ugguucuuuuucuuaaucucu

SEQ ID NO: 1347018 - RNA, 24 nt, Human
uguguguaugcgugcgcgcacgca

SEQ ID NO: 1347019 - RNA, 19 nt, Human
uguguguguguaugcgugc

SEQ ID NO: 1347020 - RNA, 21 nt, Human
uguguguguguguguaugcgu

SEQ ID NO: 1347021 - RNA, 21 nt, Human
uguguguguguguguguaugc

SEQ ID NO: 1347022 - RNA, 24 nt, Human
uguguguguguguguguaugcgug

SEQ ID NO: 1347023 - RNA, 18 nt, Human
ugugugugugugugugug

SEQ ID NO: 1347024 - RNA, 19 nt, Human
ugugugugugugugugugu

SEQ ID NO: 1347025 - RNA, 25 nt, Human
uucaugauuucuugugguucuuucu

SEQ ID NO: 1347026 - RNA, 18 nt, Human
uuggagcagauuaacaag

SEQ ID NO: 1347027 - RNA, 23 nt, Human
uuggagcagauuaacaaggaaaa

SEQ ID NO: 1347028 - RNA, 19 nt, Human
uuguuucaugguucagcug

SEQ ID NO: 1347029 - RNA, 24 nt, Human
uuuaagaaaucugguuaaaaagaa

SEQ ID NO: 1347030 - RNA, 19 nt, Human
cacggcccuagaacggggc

SEQ ID NO: 1347031 - RNA, 22 nt, Human
ccccuagggcgggucccggcuc

SEQ ID NO: 1347032 - RNA, 20 nt, Human
ccgcgccuccccgugccggg

SEQ ID NO: 1347033 - RNA, 21 nt, Human
cugcuacagucucggcaaagg

SEQ ID NO: 1347034 - RNA, 22 nt, Human
cugcuacagucucggcaaaggc

SEQ ID NO: 1347035 - RNA, 18 nt, Human
gcgggcuggcgggcgagc

SEQ ID NO: 1347036 - RNA, 20 nt, Human
gggcgagcggcgagcgcgcg

SEQ ID NO: 1347037 - RNA, 25 nt, Human
gggcgagcggcgagcgcgcggcgau

SEQ ID NO: 1347038 - RNA, 23 nt, Human
gugcgccccgcgccuccccgugc

SEQ ID NO: 1347039 - RNA, 23 nt, Human
guggagcgcgccgccacggaccc

SEQ ID NO: 1347040 - RNA, 22 nt, Human
uagaacggggcgccgccuccga

SEQ ID NO: 1347041 - RNA, 19 nt, Human
ucucugcuacagucucggc

SEQ ID NO: 1347042 - RNA, 24 nt, Human
ucucugcuacagucucggcaaagg

SEQ ID NO: 1347043 - RNA, 18 nt, Human
aaaaacaagccaaaaaaa

SEQ ID NO: 1347044 - RNA, 22 nt, Human
aaagucaaacugaaaccacgga

SEQ ID NO: 1347045 - RNA, 20 nt, Human
aagaggacaggagaaaguca

SEQ ID NO: 1347046 - RNA, 21 nt, Human
aagguugagggcaaaaugaca

SEQ ID NO: 1347047 - RNA, 23 nt, Human
acacauccaucccacauagcaca

SEQ ID NO: 1347048 - RNA, 21 nt, Human
acaggagaaagucagcacaag

SEQ ID NO: 1347049 - RNA, 19 nt, Human
acaggagccacgggaaaga

SEQ ID NO: 1347050 - RNA, 21 nt, Human
acccuucccccagaagccugu

SEQ ID NO: 1347051 - RNA, 21 nt, Human
acuggaacgcaguguucuacu

SEQ ID NO: 1347052 - RNA, 21 nt, Human
agaaggcugggccagagccaa

SEQ ID NO: 1347053 - RNA, 23 nt, Human
agagauccuuuccuuuggccucc

SEQ ID NO: 1347054 - RNA, 23 nt, Human
agcacaagacuaaaagggcccca

SEQ ID NO: 1347055 - RNA, 22 nt, Human
agccaaaaaaaaaaaaaaaaaa

SEQ ID NO: 1347056 - RNA, 23 nt, Human
agccaccccugcccuggcuccca

SEQ ID NO: 1347057 - RNA, 24 nt, Human
agggggcugcuuagccccagccag

SEQ ID NO: 1347058 - RNA, 19 nt, Human
aggugcugguuucuucugg

SEQ ID NO: 1347059 - RNA, 18 nt, Human
auggguaacaggggagaa

SEQ ID NO: 1347060 - RNA, 18 nt, Human
caagaccggggugacugg

SEQ ID NO: 1347061 - RNA, 22 nt, Human
cacaagacuaaaagggccccag

SEQ ID NO: 1347062 - RNA, 22 nt, Human
cacaaucccauggagggacagg

SEQ ID NO: 1347063 - RNA, 22 nt, Human
caccaucaccucaaaagagauc

SEQ ID NO: 1347064 - RNA, 25 nt, Human
caccccugcccuggcucccaggucu

SEQ ID NO: 1347065 - RNA, 23 nt, Human
cagcacaagacuaaaagggcccc

SEQ ID NO: 1347066 - RNA, 19 nt, Human
cagcaccaucaccucaaaa

SEQ ID NO: 1347067 - RNA, 21 nt, Human
cagccaccccugcccuggcuc

SEQ ID NO: 1347068 - RNA, 22 nt, Human
caggcuccaugucuugcucuuc

SEQ ID NO: 1347069 - RNA, 21 nt, Human
cauucccgugauggccaaggg

SEQ ID NO: 1347070 - RNA, 24 nt, Human
ccaaaaaaaaaaaaaaaaaacccc

SEQ ID NO: 1347071 - RNA, 19 nt, Human
ccaacacugagcucuuucu

SEQ ID NO: 1347072 - RNA, 22 nt, Human
ccaacacugagcucuuucuagc

SEQ ID NO: 1347073 - RNA, 23 nt, Human
ccaauaccacauucugaacacag

SEQ ID NO: 1347074 - RNA, 18 nt, Human
ccacgggaaagaggugcu

SEQ ID NO: 1347075 - RNA, 23 nt, Human
cccccagccugauggccugccgu

SEQ ID NO: 1347076 - RNA, 22 nt, Human
ccccugcccuggcucccagguc

SEQ ID NO: 1347077 - RNA, 23 nt, Human
ccgcugcccucacaggauggcag

SEQ ID NO: 1347078 - RNA, 19 nt, Human
ccuugucccacacucgaaa

SEQ ID NO: 1347079 - RNA, 22 nt, Human
cggaggagggggcugcuuagcc

SEQ ID NO: 1347080 - RNA, 18 nt, Human
cuaaacuggaagaggaca

SEQ ID NO: 1347081 - RNA, 21 nt, Human
cucacaggauggcaguuccgu

SEQ ID NO: 1347082 - RNA, 28 nt, Human
cuccagaaacagcucggccagcaccauc

SEQ ID NO: 1347083 - RNA, 27 nt, Human
cuccccugucuuauucuaaacuggaag

SEQ ID NO: 1347084 - RNA, 22 nt, Human
cucgaaaagccuuuuucucccc

SEQ ID NO: 1347085 - RNA, 19 nt, Human
cugggccagagccaauacc

SEQ ID NO: 1347086 - RNA, 18 nt, Human
cuugcucuucaauuccgu

SEQ ID NO: 1347087 - RNA, 19 nt, Human
gagcaucuccagaaacagc

SEQ ID NO: 1347088 - RNA, 18 nt, Human
gccaaaaaaaaaaaaaaa

SEQ ID NO: 1347089 - RNA, 20 nt, Human
gccaaaaaaaaaaaaaaaaa

SEQ ID NO: 1347090 - RNA, 21 nt, Human
gccccaggagaaauaccaagg

SEQ ID NO: 1347091 - RNA, 19 nt, Human
gcccccagccugauggccu

SEQ ID NO: 1347092 - RNA, 19 nt, Human
gcucuuucuagcauggacu

SEQ ID NO: 1347093 - RNA, 23 nt, Human
gcugguuucuucuggcaagaccg

SEQ ID NO: 1347094 - RNA, 22 nt, Human
ggaaagaggugcugguuucuuc

SEQ ID NO: 1347095 - RNA, 19 nt, Human
ggccuccgauccuccacaa

SEQ ID NO: 1347096 - RNA, 21 nt, Human
ggggagaaggcugggccagag

SEQ ID NO: 1347097 - RNA, 26 nt, Human
uaaaaaacaagccaaaaaaaaaaaaa

SEQ ID NO: 1347098 - RNA, 19 nt, Human
uaaaagggccccaggagaa

SEQ ID NO: 1347099 - RNA, 20 nt, Human
uaaacucuauagccaaaauc

SEQ ID NO: 1347100 - RNA, 20 nt, Human
uaaacuggaagaggacagga

SEQ ID NO: 1347101 - RNA, 20 nt, Human
uagcacagcccccagccuga

SEQ ID NO: 1347102 - RNA, 18 nt, Human
uagcagagccugugccau

SEQ ID NO: 1347103 - RNA, 24 nt, Human
uagccaaaaucccucuggagcauc

SEQ ID NO: 1347104 - RNA, 20 nt, Human
ucaauuccguucacugacau

SEQ ID NO: 1347105 - RNA, 24 nt, Human
ucacugacaucagaccuuguccca

SEQ ID NO: 1347106 - RNA, 20 nt, Human
ucagcacaagacuaaaaggg

SEQ ID NO: 1347107 - RNA, 30 nt, Human
ucccucuggagcaucuccagaaacagcucu

SEQ ID NO: 1347108 - RNA, 20 nt, Human
uccuccacaaucccauggag

SEQ ID NO: 1347109 - RNA, 24 nt, Human
uccuccacaaucccauggagggac

SEQ ID NO: 1347110 - RNA, 25 nt, Human
ucuauagccaaaaucccucuggagc

SEQ ID NO: 1347111 - RNA, 24 nt, Human
ucuccagaaacagcucggccagca

SEQ ID NO: 1347112 - RNA, 24 nt, Human
ucuuucuagcauggacuccauucc

SEQ ID NO: 1347113 - RNA, 23 nt, Human
ugacuggaacgcaguguucuacu

SEQ ID NO: 1347114 - RNA, 21 nt, Human
ugagcauggggucagccaccc

SEQ ID NO: 1347115 - RNA, 23 nt, Human
ugcccuggcucccaggucucgcu

SEQ ID NO: 1347116 - RNA, 21 nt, Human
uggaaagaggcaagaauuaug

SEQ ID NO: 1347117 - RNA, 18 nt, Human
uggaagaggacaggagaa

SEQ ID NO: 1347118 - RNA, 24 nt, Human
ugucuugcucuucaauuccguuca

SEQ ID NO: 1347119 - RNA, 27 nt, Human
uuuuuuuuuuuuuuuuuuuuuuugggg

SEQ ID NO: 1347120 - RNA, 31 nt, Human; identical to SEQ ID NO: 314735

SEQ ID NO: 1347121 - RNA, 25 nt, Human
aaggagaccccggcaccugccuccu

SEQ ID NO: 1347122 - RNA, 20 nt, Human
accaaaguacacagacccua

SEQ ID NO: 1347123 - RNA, 23 nt, Human
caaaggagaccccggcaccugcc

SEQ ID NO: 1347124 - RNA, 19 nt, Human
caccugccuccgcggcagc

SEQ ID NO: 1347125 - RNA, 19 nt, Human
gcagccaggaccacacugc

SEQ ID NO: 1347126 - RNA, 23 nt, Human
gcagcugcccacugaaauauuua

SEQ ID NO: 1347127 - RNA, 20 nt, Human
uagaauacaaccaaaguaca

SEQ ID NO: 1347128 - RNA, 25 nt, Human
uccuccucuuucuaagcucuucaca

SEQ ID NO: 1347129 - RNA, 19 nt, Human
ugaaggaaauaugcugugu

SEQ ID NO: 1347130 - RNA, 20 nt, Human
ugaggcaaaggagaccccgg

SEQ ID NO: 1347131 - RNA, 18 nt, Human
ugggaucacagagauggc

SEQ ID NO: 1347132 - RNA, 19 nt, Human
ugggaucacagagauggcc

SEQ ID NO: 1347133 - RNA, 19 nt, Human
uuagaauacaaccaaagua

SEQ ID NO: 1347134 - RNA, 20 nt, Human
uucacauugaggcaaaggag

SEQ ID NO: 1347135 - RNA, 22 nt, Human
uucacugucaauaaaagauaaa

SEQ ID NO: 1347136 - RNA, 19 nt, Human
cagcucccuugucacagaa

SEQ ID NO: 1347137 - RNA, 21 nt, Human
cccuugucacagaagaucuug

SEQ ID NO: 1347138 - RNA, 20 nt, Human
cgcucagugcccaagccaca

SEQ ID NO: 1347139 - RNA, 20 nt, Human
ucugcagguucagggggaca

SEQ ID NO: 1347140 - RNA, 26 nt, Human
uuaaugguuacgaaaucuguuucuuc

SEQ ID NO: 1347141 - RNA, 21 nt, Human
uuccucucagcucccuuguca

SEQ ID NO: 1347142 - RNA, 24 nt, Human
aaaaaaaaaaaaaaaaaaacaaaa

SEQ ID NO: 1347143 - RNA, 27 nt, Human
aaaaaaaaaaaaaaaaacaaaacacau

SEQ ID NO: 1347144 - RNA, 23 nt, Human
aaaaacccaacaauaaaauacug

SEQ ID NO: 1347145 - RNA, 20 nt, Human
aaaacacaucacaaacugca

SEQ ID NO: 1347146 - RNA, 26 nt, Human
aaacacaucacaaacugcacuugaag

SEQ ID NO: 1347147 - RNA, 21 nt, Human
aaagcacauuugcaaaaauaa

SEQ ID NO: 1347148 - RNA, 25 nt, Human
aaaugcaacacgauuuaaaaaaagg

SEQ ID NO: 1347149 - RNA, 21 nt, Human
aacaaaacacaucacaaacug

SEQ ID NO: 1347150 - RNA, 23 nt, Human
aagaaaacuuuaacaaauauugc

SEQ ID NO: 1347151 - RNA, 25 nt, Human
aagaaaagggauauuccauccauac

SEQ ID NO: 1347152 - RNA, 28 nt, Human
aagaacuuagaaagcuauaaaaggacug

SEQ ID NO: 1347153 - RNA, 23 nt, Human
aagacauauauugcauuuaauau

SEQ ID NO: 1347154 - RNA, 20 nt, Human
aaggcucaauuuuuucucca

SEQ ID NO: 1347155 - RNA, 24 nt, Human
aaucuauugaggaagcuaaaauaa

SEQ ID NO: 1347156 - RNA, 25 nt, Human
aaugacaagaaugaaaucuauugga

SEQ ID NO: 1347157 - RNA, 19 nt, Human
aauguagauaccacuuuau

SEQ ID NO: 1347158 - RNA, 21 nt, Human
acaaagucucaaaguauuaac

SEQ ID NO: 1347159 - RNA, 27 nt, Human
acacugccacacguaaaccgggugucc

SEQ ID NO: 1347160 - RNA, 23 nt, Human
acagaugucuauuuuauuaaaaa

SEQ ID NO: 1347161 - RNA, 23 nt, Human
acaugcaaucuauugaggaagcu

SEQ ID NO: 1347162 - RNA, 24 nt, Human
agaaacaagaacacaaucuacagg

SEQ ID NO: 1347163 - RNA, 21 nt, Human
agaaagcuauaaaaggacuga

SEQ ID NO: 1347164 - RNA, 21 nt, Human
agaacuuuggugcaguaggug

SEQ ID NO: 1347165 - RNA, 21 nt, Human
agaguucacuuugagggaauu

SEQ ID NO: 1347166 - RNA, 27 nt, Human
aggaaagaaacauuauaaaaaaaucaa

SEQ ID NO: 1347167 - RNA, 19 nt, Human
aggucauaacuaaauuuag

SEQ ID NO: 1347168 - RNA, 22 nt, Human
aggucauaacuaaauuuagaac

SEQ ID NO: 1347169 - RNA, 24 nt, Human
auaaaaaaaucaaaaucucuagaa

SEQ ID NO: 1347170 - RNA, 19 nt, Human
auaaagacaagacauauau

SEQ ID NO: 1347171 - RNA, 18 nt, Human
auguagauaccacuuuau

SEQ ID NO: 1347172 - RNA, 24 nt, Human
caaaacacaucacaaacugcacuu

SEQ ID NO: 1347173 - RNA, 25 nt, Human
caaaaugacaagaaugaaaucuauu

SEQ ID NO: 1347174 - RNA, 20 nt, Human
caacaauaaaauacugucaa

SEQ ID NO: 1347175 - RNA, 22 nt, Human
caagaacacaaucuacaggaaa

SEQ ID NO: 1347176 - RNA, 21 nt, Human
caaggcucaguucugcaaccc

SEQ ID NO: 1347177 - RNA, 18 nt, Human
cacugccacacguaaaca

SEQ ID NO: 1347178 - RNA, 20 nt, Human
ccacuuuauuugaacaucac

SEQ ID NO: 1347179 - RNA, 18 nt, Human
ccauaauaaagacaagac

SEQ ID NO: 1347180 - RNA, 18 nt, Human
ccaugaucacuuaaccua

SEQ ID NO: 1347181 - RNA, 18 nt, Human
cgauuuaaaaaaaggaaa

SEQ ID NO: 1347182 - RNA, 20 nt, Human
cuaaaaucaaauaaaaaccc

SEQ ID NO: 1347183 - RNA, 20 nt, Human
cuaauaacaaugauccauga

SEQ ID NO: 1347184 - RNA, 19 nt, Human
cuccaaagcagcaucugug

SEQ ID NO: 1347185 - RNA, 18 nt, Human
cuguaauagagacagguu

SEQ ID NO: 1347186 - RNA, 20 nt, Human
gacuuggcgcuauucucccu

SEQ ID NO: 1347187 - RNA, 19 nt, Human
gaugccauaauaaagacaa

SEQ ID NO: 1347188 - RNA, 23 nt, Human
gcaaaaauaaaaaauagcccaga

SEQ ID NO: 1347189 - RNA, 23 nt, Human
gcaaaugaaaagcacacaacuaa

SEQ ID NO: 1347190 - RNA, 20 nt, Human
gcugacccauaaaucacauu

SEQ ID NO: 1347191 - RNA, 20 nt, Human
gcugcaguuacuaacuucug

SEQ ID NO: 1347192 - RNA, 23 nt, Human
ggugcaguaggugagcugcaguu

SEQ ID NO: 1347193 - RNA, 20 nt, Human
guaaacgugcuaagcauucc

SEQ ID NO: 1347194 - RNA, 24 nt, Human
gugaaaaccuaauggaacugaaug

SEQ ID NO: 1347195 - RNA, 24 nt, Human
guuugguauuaaagugcaaacuua

SEQ ID NO: 1347196 - RNA, 22 nt, Human
uaaaaaauagcccagagacuug

SEQ ID NO: 1347197 - RNA, 18 nt, Human
uaaaauguucaaguauuc

SEQ ID NO: 1347198 - RNA, 21 nt, Human
uaaauacaagucgagaaacug

SEQ ID NO: 1347199 - RNA, 21 nt, Human
uaaauagauguauggcaacau

SEQ ID NO: 1347200 - RNA, 23 nt, Human
uaaaugagauuaacacaugugaa

SEQ ID NO: 1347201 - RNA, 25 nt, Human
uaaggucgauggaucuugaaggcca

SEQ ID NO: 1347202 - RNA, 22 nt, Human
uaaguuuccuuucugauucuac

SEQ ID NO: 1347203 - RNA, 22 nt, Human
uaauggucaugcugacccauaa

SEQ ID NO: 1347204 - RNA, 18 nt, Human
uacaaaaaaaaaaaaaaa

SEQ ID NO: 1347205 - RNA, 18 nt, Human
uacaaauaggaugaagca

SEQ ID NO: 1347206 - RNA, 19 nt, Human
uaccaaggcucaguucugc

SEQ ID NO: 1347207 - RNA, 19 nt, Human
uagaauuucacaaagccac

SEQ ID NO: 1347208 - RNA, 20 nt, Human
uauauugcauuuaauauuaa

SEQ ID NO: 1347209 - RNA, 18 nt, Human
ucaaauaucaauuguaac

SEQ ID NO: 1347210 - RNA, 20 nt, Human
ucagaacauguuaauuacaa

SEQ ID NO: 1347211 - RNA, 22 nt, Human
ucgagaacuuuggugcaguagg

SEQ ID NO: 1347212 - RNA, 20 nt, Human
ugaagcacugguacgaggua

SEQ ID NO: 1347213 - RNA, 19 nt, Human
ugacccauaaaucacauga

SEQ ID NO: 1347214 - RNA, 18 nt, Human
ugagaaauaacuaaaaag

SEQ ID NO: 1347215 - RNA, 21 nt, Human
ugagaaauaacuaaaaagcaa

SEQ ID NO: 1347216 - RNA, 19 nt, Human
ugcaaaugaaaagcacaca

SEQ ID NO: 1347217 - RNA, 18 nt, Human
ugcaguaggugagcugca

SEQ ID NO: 1347218 - RNA, 21 nt, Human
ugccucuaucuuuacaaucuc

SEQ ID NO: 1347219 - RNA, 23 nt, Human
uggagaaaccaccuuuaaaauca

SEQ ID NO: 1347220 - RNA, 21 nt, Human
ugugaaaaccuaauggaacug

SEQ ID NO: 1347221 - RNA, 21 nt, Human
uuaaaaaaguuacaaacaggu

SEQ ID NO: 1347222 - RNA, 21 nt, Human
uuacaaacagguggacugcag

SEQ ID NO: 1347223 - RNA, 24 nt, Human
uuagaagcauguucaaaugacuaa

SEQ ID NO: 1347224 - RNA, 21 nt, Human
uuagagcuuuccuugacaaag

SEQ ID NO: 1347225 - RNA, 28 nt, Human
uugcuuuaaacuauuauucagaaagaca

SEQ ID NO: 1347226 - RNA, 18 nt, Human
uuuaaaaucacuuucccc

SEQ ID NO: 1347227 - RNA, 24 nt, Human
uuuaaacuauuauucagaaagaca

SEQ ID NO: 1347228 - RNA, 24 nt, Human
uuuagaauuucacaaagccacaaa

SEQ ID NO: 1347229 - RNA, 24 nt, Human
uuucugauucuacaccugcguuac

SEQ ID NO: 1347230 - RNA, 20 nt, Human
uuugcagagcccuacugcag

SEQ ID NO: 1347231 - RNA, 19 nt, Human
aacaaggcaucuugaaaac

SEQ ID NO: 1347232 - RNA, 23 nt, Human
aucaauguaaccuuccaguuccg

SEQ ID NO: 1347233 - RNA, 24 nt, Human
caaaagcagagucuugugccuucc

SEQ ID NO: 1347234 - RNA, 22 nt, Human
caacaaggcaucuugaaaacuc

SEQ ID NO: 1347235 - RNA, 24 nt, Human
cagaaugaagaacuucagccaaca

SEQ ID NO: 1347236 - RNA, 20 nt, Human
cagagccaaugauaccuucc

SEQ ID NO: 1347237 - RNA, 21 nt, Human
cagauagaguugcucuuccag

SEQ ID NO: 1347238 - RNA, 23 nt, Human
cagauagaguugcucuuccagga

SEQ ID NO: 1347239 - RNA, 18 nt, Human
caguggcagagagucucu

SEQ ID NO: 1347240 - RNA, 18 nt, Human
caguggcagagagucucu

SEQ ID NO: 1347241 - RNA, 19 nt, Human
cauucugguucuguugugg

SEQ ID NO: 1347242 - RNA, 27 nt, Human
cccacagucauugcuucauuccuuguc

SEQ ID NO: 1347243 - RNA, 20 nt, Human
ccuuccaguuccgggaagcc

SEQ ID NO: 1347244 - RNA, 22 nt, Human
gaagcucuccuacauccaucuu

SEQ ID NO: 1347245 - RNA, 21 nt, Human
gcagagucuugugccuucaaa

SEQ ID NO: 1347246 - RNA, 24 nt, Human
gcagagucuugugccuucaaagga

SEQ ID NO: 1347247 - RNA, 23 nt, Human
gggaugaaaacucuucaaaggaa

SEQ ID NO: 1347248 - RNA, 18 nt, Human
guucauauuccucuagga

SEQ ID NO: 1347249 - RNA, 20 nt, Human
uaaggcauccuguucccagu

SEQ ID NO: 1347250 - RNA, 23 nt, Human
uacauccaucuucuauaccagga

SEQ ID NO: 1347251 - RNA, 23 nt, Human
ucaaaggaaaaccuccccucaac

SEQ ID NO: 1347252 - RNA, 18 nt, Human
ucagguugcuaaagggag

SEQ ID NO: 1347253 - RNA, 20 nt, Human
ucauucugguucuguugugg

SEQ ID NO: 1347254 - RNA, 18 nt, Human
ucuaggaaauacuaugcu

SEQ ID NO: 1347255 - RNA, 21 nt, Human
ugaaaagacagcugagucugg

SEQ ID NO: 1347256 - RNA, 24 nt, Human
ugcagugggaagagagguagguac

SEQ ID NO: 1347257 - RNA, 23 nt, Human
ugcuucauuccuugucugaucaa

SEQ ID NO: 1347258 - RNA, 18 nt, Human
uggcagagagucucuuac

SEQ ID NO: 1347259 - RNA, 22 nt, Human
uggcagagagucucuuacucag

SEQ ID NO: 1347260 - RNA, 23 nt, Human
uggcagagagucucuuacucagg

SEQ ID NO: 1347261 - RNA, 23 nt, Human
ugggaugaaaacucuucaaagga

SEQ ID NO: 1347262 - RNA, 22 nt, Human
uggucuaucccagaaauuugca

SEQ ID NO: 1347263 - RNA, 20 nt, Human
uguagcuauucaggggacaa

SEQ ID NO: 1347264 - RNA, 20 nt, Human
uguagcuauucaggggacaa

SEQ ID NO: 1347265 - RNA, 21 nt, Human
uuacucagguugcuaaaggga

SEQ ID NO: 1347266 - RNA, 26 nt, Human
uucaaagcaacaaggcaucuugaaaa

SEQ ID NO: 1347267 - RNA, 20 nt, Human
uugcagcccaguggcagaga

SEQ ID NO: 1347268 - RNA, 23 nt, Human
uugcagcccaguggcagagaguc

SEQ ID NO: 1347269 - RNA, 19 nt, Human
uugugggcuaaggcauccu

SEQ ID NO: 1347270 - RNA, 26 nt, Human
uuuuuuuuuuuucaaggggagauuca

SEQ ID NO: 1347271 - RNA, 24 nt, Human
uuuuuuuuuuuuuuuuuuucaagg

SEQ ID NO: 1347272 - RNA, 19 nt, Human
aaaaacaaaacagagagga

SEQ ID NO: 1347273 - RNA, 25 nt, Human
aaaagaauaaaauuaagggaugggg

SEQ ID NO: 1347274 - RNA, 24 nt, Human
aaacagagaggaaagaaggauucg

SEQ ID NO: 1347275 - RNA, 18 nt, Human
aaggauucggggacaggg

SEQ ID NO: 1347276 - RNA, 19 nt, Human
acaaaacagagaggaaaga

SEQ ID NO: 1347277 - RNA, 21 nt, Human
caaaagccuucaccgaggccu

SEQ ID NO: 1347278 - RNA, 24 nt, Human
caaagagaugauauacagcaacac

SEQ ID NO: 1347279 - RNA, 23 nt, Human
cacauaaaaauaaaagcugaaau

SEQ ID NO: 1347280 - RNA, 20 nt, Human
caccgaggccugaacagggu

SEQ ID NO: 1347281 - RNA, 19 nt, Human
cagcucagggauaucgccu

SEQ ID NO: 1347282 - RNA, 19 nt, Human
ccagucgucguggacugga

SEQ ID NO: 1347283 - RNA, 19 nt, Human
cgaggccugaacaggguca

SEQ ID NO: 1347284 - RNA, 18 nt, Human
cuucaccgaggccugaac

SEQ ID NO: 1347285 - RNA, 18 nt, Human
cuugaaaugcacucuuca

SEQ ID NO: 1347286 - RNA, 22 nt, Human
cuuucuguaaucccucucucca

SEQ ID NO: 1347287 - RNA, 24 nt, Human
cuuucuguaaucccucucuccacc

SEQ ID NO: 1347288 - RNA, 18 nt, Human
gaaaaacaaaacagagag

SEQ ID NO: 1347289 - RNA, 19 nt, Human
ggaggggagagagggaggg

SEQ ID NO: 1347290 - RNA, 24 nt, Human
ggaggggagagagggaggggaaug

SEQ ID NO: 1347291 - RNA, 19 nt, Human
ggagggggaggggagagag

SEQ ID NO: 1347292 - RNA, 21 nt, Human
ggagggggaggggagagaggg

SEQ ID NO: 1347293 - RNA, 21 nt, Human
gggugggaaggggaguaacca

SEQ ID NO: 1347294 - RNA, 21 nt, Human
uaaccaaaagccuucaccgag

SEQ ID NO: 1347295 - RNA, 19 nt, Human
uaagggauggggugggaag

SEQ ID NO: 1347296 - RNA, 20 nt, Human
ucaguuaauuuguaaaugcu

SEQ ID NO: 1347297 - RNA, 21 nt, Human
ugaaaaacaaaacagagagga

SEQ ID NO: 1347298 - RNA, 22 nt, Human
ugaaauaagguguucuccuuuc

SEQ ID NO: 1347299 - RNA, 22 nt, Human
ugaaaugcacucuucaaaagaa

SEQ ID NO: 1347300 - RNA, 24 nt, Human
ugccuauucaucaaugcgcagaug

SEQ ID NO: 1347301 - RNA, 23 nt, Human
uucuguaaucccucucuccaccu

SEQ ID NO: 1347302 - RNA, 21 nt, Human
uuucuguaaucccucucucca

SEQ ID NO: 1347303 - RNA, 18 nt, Human
uuuuauuuucaucuuaca

SEQ ID NO: 1347304 - RNA, 22 nt, Human
aaaaccaaagaacccccaaauc

SEQ ID NO: 1347305 - RNA, 23 nt, Human
aaacagaugcgaggcuacuuuau

SEQ ID NO: 1347306 - RNA, 18 nt, Human
aaaccaaagaacccccaa

SEQ ID NO: 1347307 - RNA, 24 nt, Human
aaccaaagaacccccaaauccaaa

SEQ ID NO: 1347308 - RNA, 22 nt, Human
aaccaacacaaguaguauagca

SEQ ID NO: 1347309 - RNA, 20 nt, Human
aacccccaaauccaaacccc

SEQ ID NO: 1347310 - RNA, 24 nt, Human
aacccccaaauccaaaccccuaac

SEQ ID NO: 1347311 - RNA, 20 nt, Human
aagccuuuacagcuacccag

SEQ ID NO: 1347312 - RNA, 21 nt, Human
acacuagcuuuccaguuacac

SEQ ID NO: 1347313 - RNA, 19 nt, Human
accaaagaacccccaaauc

SEQ ID NO: 1347314 - RNA, 20 nt, Human
accaccucuagauacaaaag

SEQ ID NO: 1347315 - RNA, 19 nt, Human
agccugacaaaagaaauca

SEQ ID NO: 1347316 - RNA, 24 nt, Human
agcugcaugugaaauaccgagaac

SEQ ID NO: 1347317 - RNA, 27 nt, Human
aggaauaaaaacauauuaacaaaaugu

SEQ ID NO: 1347318 - RNA, 22 nt, Human
aggacggacgcgcggcgaggga

SEQ ID NO: 1347319 - RNA, 25 nt, Human
auuccugcaagguaaugaagcuggg

SEQ ID NO: 1347320 - RNA, 20 nt, Human
caaaccccuaaccaacacaa

SEQ ID NO: 1347321 - RNA, 22 nt, Human
caaagaacccccaaauccaaag

SEQ ID NO: 1347322 - RNA, 21 nt, Human
caacacaaguaguauagcaau

SEQ ID NO: 1347323 - RNA, 23 nt, Human
caaccacugugccgcauccaagc

SEQ ID NO: 1347324 - RNA, 18 nt, Human
cacaaugugauugcaaau

SEQ ID NO: 1347325 - RNA, 25 nt, Human
caccacacuagcuuuccaguuacac

SEQ ID NO: 1347326 - RNA, 21 nt, Human
cacuagaaaauugucccuaca

SEQ ID NO: 1347327 - RNA, 23 nt, Human
cauccaagcaacaguacacaaac

SEQ ID NO: 1347328 - RNA, 22 nt, Human
ccaaauaauuccuaaacuaaaa

SEQ ID NO: 1347329 - RNA, 21 nt, Human
ccaaauccaaaccccuaacca

SEQ ID NO: 1347330 - RNA, 23 nt, Human
ccacacuagcuuuccaguuacac

SEQ ID NO: 1347331 - RNA, 22 nt, Human
cccccaaauccaaaccccuaac

SEQ ID NO: 1347332 - RNA, 22 nt, Human
ccccuaaccaacacaaguagua

SEQ ID NO: 1347333 - RNA, 18 nt, Human
cccuaaagguugggcacu

SEQ ID NO: 1347334 - RNA, 18 nt, Human
ccggcuggcuggcuggcu

SEQ ID NO: 1347335 - RNA, 22 nt, Human
cgccggcccggcuggcuggcug

SEQ ID NO: 1347336 - RNA, 22 nt, Human
cugugccgcauccaagcaacag

SEQ ID NO: 1347337 - RNA, 23 nt, Human
cuguucaguuuaacguguugugu

SEQ ID NO: 1347338 - RNA, 19 nt, Human
cuuccagugucaaaaccca

SEQ ID NO: 1347339 - RNA, 22 nt, Human
gaacacccuaaagguugggcac

SEQ ID NO: 1347340 - RNA, 22 nt, Human
gaacccccaaauccaaaccccu

SEQ ID NO: 1347341 - RNA, 18 nt, Human
gagcuggcaggcgagcgc

SEQ ID NO: 1347342 - RNA, 18 nt, Human
gaggacuuuacagaagga

SEQ ID NO: 1347343 - RNA, 19 nt, Human
gcaaaacagaggacucuuc

SEQ ID NO: 1347344 - RNA, 19 nt, Human
gcagaaagagagcugcaug

SEQ ID NO: 1347345 - RNA, 24 nt, Human
gcagaaccaccucuagauacaaaa

SEQ ID NO: 1347346 - RNA, 23 nt, Human
gcuggcuggcuggcccgggagga

SEQ ID NO: 1347347 - RNA, 20 nt, Human
gcuggcuggcuggcuggcug

SEQ ID NO: 1347348 - RNA, 22 nt, Human
ggaggacggacgcgcggcgagg

SEQ ID NO: 1347349 - RNA, 18 nt, Human
ggcccgggaggacggagg

SEQ ID NO: 1347350 - RNA, 19 nt, Human
gggaggacggaggacggac

SEQ ID NO: 1347351 - RNA, 23 nt, Human
uaaauuuacacuuaaaaaaaccc

SEQ ID NO: 1347352 - RNA, 22 nt, Human
uaauaaaggaauuuucaccaca

SEQ ID NO: 1347353 - RNA, 21 nt, Human
uaauagcaaaacauaggaaua

SEQ ID NO: 1347354 - RNA, 21 nt, Human
uacaaacaaggaaucugcagu

SEQ ID NO: 1347355 - RNA, 26 nt, Human
uacacuaucacagcuucacaaaugga

SEQ ID NO: 1347356 - RNA, 18 nt, Human
uacuuuaaaaaagccuac

SEQ ID NO: 1347357 - RNA, 21 nt, Human
uacuuuauacagcacuagaaa

SEQ ID NO: 1347358 - RNA, 20 nt, Human
uagcaaaacauaggaauaaa

SEQ ID NO: 1347359 - RNA, 22 nt, Human
uagcagaaccaccucuagauac

SEQ ID NO: 1347360 - RNA, 20 nt, Human
uauagcaauguuaagcaucu

SEQ ID NO: 1347361 - RNA, 24 nt, Human
uaucuaccauuaagaaucuaugca

SEQ ID NO: 1347362 - RNA, 22 nt, Human
ucauuguuguagccugacaaaa

SEQ ID NO: 1347363 - RNA, 20 nt, Human
uccaagcaacaguacacaaa

SEQ ID NO: 1347364 - RNA, 20 nt, Human
uccaguaaauuacccuucag

SEQ ID NO: 1347365 - RNA, 18 nt, Human
uccaugcauccuuuauuc

SEQ ID NO: 1347366 - RNA, 23 nt, Human
ucccuacauucagcucucauucc

SEQ ID NO: 1347367 - RNA, 24 nt, Human
ucuagauacaaaagacugagauuu

SEQ ID NO: 1347368 - RNA, 23 nt, Human
ucuaugcacaaugugauugcaaa

SEQ ID NO: 1347369 - RNA, 21 nt, Human
ucuguucacaguaaaugaggu

SEQ ID NO: 1347370 - RNA, 19 nt, Human
ucuuugauuagaacacccu

SEQ ID NO: 1347371 - RNA, 24 nt, Human
ugaacccauguauccaguggcaga

SEQ ID NO: 1347372 - RNA, 18 nt, Human
ugagaaacagaugcgagg

SEQ ID NO: 1347373 - RNA, 21 nt, Human
ugagaaacagaugcgaggcua

SEQ ID NO: 1347374 - RNA, 19 nt, Human
ugccgcauccaagcaacag

SEQ ID NO: 1347375 - RNA, 18 nt, Human
uggaaaaaaaaauuaaaa

SEQ ID NO: 1347376 - RNA, 21 nt, Human
uggcagaaagagagcugcaug

SEQ ID NO: 1347377 - RNA, 23 nt, Human
uggcccgggaggacggaggacgg

SEQ ID NO: 1347378 - RNA, 24 nt, Human
uggcuaguaauaaauuuacacuua

SEQ ID NO: 1347379 - RNA, 23 nt, Human
uguuaacaaaaaauaauaaagga

SEQ ID NO: 1347380 - RNA, 20 nt, Human
uuaaaaaagccuacaaggag

SEQ ID NO: 1347381 - RNA, 19 nt, Human
uuaaaaccaaagaaccccc

SEQ ID NO: 1347382 - RNA, 25 nt, Human
uuaaaaccaaagaacccccaaaucc

SEQ ID NO: 1347383 - RNA, 22 nt, Human
uucacaaauggauugaacccau

SEQ ID NO: 1347384 - RNA, 23 nt, Human
uuggaaauguuauaaaauuuuua

SEQ ID NO: 1347385 - RNA, 21 nt, Human
uuuacauuacaaacaaggaau

SEQ ID NO: 1347386 - RNA, 19 nt, Human
acaaaacaggauauuuauu

SEQ ID NO: 1347387 - RNA, 23 nt, Human
acaaaauaagugcuauaccaggu

SEQ ID NO: 1347388 - RNA, 18 nt, Human
acgacaggacaccugagc

SEQ ID NO: 1347389 - RNA, 20 nt, Human
agcacgacaggacaccugag

SEQ ID NO: 1347390 - RNA, 19 nt, Human
uaagugcuauaccagguuu

SEQ ID NO: 1347391 - RNA, 21 nt, Human
uacaaaauaagugcuauacca

SEQ ID NO: 1347392 - RNA, 24 nt, Human
uacucugaauuuuuagguacaaaa

SEQ ID NO: 1347393 - RNA, 19 nt, Human
ucccagguccacuguauuc

SEQ ID NO: 1347394 - RNA, 18 nt, Human
ucccgcccgcuccugggc

SEQ ID NO: 1347395 - RNA, 20 nt, Human
uuagguacaaaauaagugcu

SEQ ID NO: 1347396 - RNA, 19 nt, Human
cccccguggccugcccugc

SEQ ID NO: 1347397 - RNA, 22 nt, Human
ggugcccccccguggccugccc

SEQ ID NO: 1347398 - RNA, 19 nt, Human
ugcaacagaguuuauugag

SEQ ID NO: 1347399 - RNA, 23 nt, Human
ugcaacagaguuuauugaggugc

SEQ ID NO: 1347400 - RNA, 24 nt, Human
accguccccuucugacccucacca

SEQ ID NO: 1347401 - RNA, 24 nt, Human
agcacauuuaauaaagaaagcuga

SEQ ID NO: 1347402 - RNA, 21 nt, Human
caaaaguccccacagucccca

SEQ ID NO: 1347403 - RNA, 22 nt, Human
cagcagacgugguacagaagug

SEQ ID NO: 1347404 - RNA, 22 nt, Human
cccaaaaguccccacagucccc

SEQ ID NO: 1347405 - RNA, 18 nt, Human
ccccacaguccccacaga

SEQ ID NO: 1347406 - RNA, 21 nt, Human
cccgguggcugccuggauccu

SEQ ID NO: 1347407 - RNA, 25 nt, Human
cuccauacaaggcuggagaccagca

SEQ ID NO: 1347408 - RNA, 23 nt, Human
gcuaagcgcugcucuugguaccg

SEQ ID NO: 1347409 - RNA, 20 nt, Human
uacaaggcuggagaccagca

SEQ ID NO: 1347410 - RNA, 24 nt, Human
uccagagcgccuggcugcuccaga

SEQ ID NO: 1347411 - RNA, 22 nt, Human
ucuaacuccauacaaggcugga

SEQ ID NO: 1347412 - RNA, 19 nt, Human
ugccuggauccugggcgcc

SEQ ID NO: 1347413 - RNA, 18 nt, Human
uguggggucccaaaaguc

SEQ ID NO: 1347414 - RNA, 22 nt, Human
uucccgguggcugccuggaucc

SEQ ID NO: 1347415 - RNA, 25 nt, Human
uuuuuuuuuuuuuuuugcuuuguga

SEQ ID NO: 1347416 - RNA, 23 nt, Human
uuuuuuuuuuuuuuuuuugcuuu

SEQ ID NO: 1347417 - RNA, 27 nt, Human
uuuuuuuuuuuuuuuuuuuuuuugggg

SEQ ID NO: 1347418 - RNA, 18 nt, Human
accgccucgcccucgccc

SEQ ID NO: 1347419 - RNA, 19 nt, Human
caccgccucgcccucgccc

SEQ ID NO: 1347420 - RNA, 18 nt, Human
ccagcacgugcgcgucca

SEQ ID NO: 1347421 - RNA, 21 nt, Human
ccccgucgccgucgcccucug

SEQ ID NO: 1347422 - RNA, 19 nt, Human
cgcccucgcccucaccguc

SEQ ID NO: 1347423 - RNA, 25 nt, Human
cgccucgcccucgcccucgcccuca

SEQ ID NO: 1347424 - RNA, 23 nt, Human
cgcguccaguggcagcucgugcg

SEQ ID NO: 1347425 - RNA, 21 nt, Human
cguccaggcucugcuggauca

SEQ ID NO: 1347426 - RNA, 25 nt, Human
cguccccgucgccgucgcccucugu

SEQ ID NO: 1347427 - RNA, 21 nt, Human
cgugcgccgugagcagccgcg

SEQ ID NO: 1347428 - RNA, 22 nt, Human
cucaccguccccgucgccgucg

SEQ ID NO: 1347429 - RNA, 19 nt, Human
cuccugcuugaggaugggg

SEQ ID NO: 1347430 - RNA, 19 nt, Human
cucgugcgccgugagcagc

SEQ ID NO: 1347431 - RNA, 23 nt, Human
cucgugcgccgugagcagccgcg

SEQ ID NO: 1347432 - RNA, 21 nt, Human
cugcggcugggggacuggggc

SEQ ID NO: 1347433 - RNA, 21 nt, Human
cugcuggaucagguccuccuc

SEQ ID NO: 1347434 - RNA, 19 nt, Human
gagcagccgcgggcuguac

SEQ ID NO: 1347435 - RNA, 21 nt, Human
gccuccgcggggccgcccucc

SEQ ID NO: 1347436 - RNA, 22 nt, Human
ggcugcggcugggggacugggg

SEQ ID NO: 1347437 - RNA, 21 nt, Human
gggcggggugggcgccgcguc

SEQ ID NO: 1347438 - RNA, 21 nt, Human
gucgccgucgcccucugucgg

SEQ ID NO: 1347439 - RNA, 24 nt, Human
ucaggcuccaggcugcggcugggg

SEQ ID NO: 1347440 - RNA, 23 nt, Human
ucagguccuccuccaugagcacc

SEQ ID NO: 1347441 - RNA, 19 nt, Human
uccaugagcaccgccucgc

SEQ ID NO: 1347442 - RNA, 27 nt, Human
uccucaggcuccaggcugcggcugggg

SEQ ID NO: 1347443 - RNA, 18 nt, Human
ucgcccucgcccucgccc

SEQ ID NO: 1347444 - RNA, 23 nt, Human
ucgcucuccacgcccugcuccug

SEQ ID NO: 1347445 - RNA, 19 nt, Human
ucugucggggucgcgccgu

SEQ ID NO: 1347446 - RNA, 19 nt, Human
ugagcaccgccucgcccuc

SEQ ID NO: 1347447 - RNA, 20 nt, Human
ugagcaccgccucgcccucg

SEQ ID NO: 1347448 - RNA, 22 nt, Human
ugaggauggggaacagcggcuc

SEQ ID NO: 1347449 - RNA, 20 nt, Human
ugcuugaggauggggaacag

SEQ ID NO: 1347450 - RNA, 21 nt, Human
ugggggacuggggcuccugcu

SEQ ID NO: 1347451 - RNA, 18 nt, Human
uuccagcacgugcgcguc

SEQ ID NO: 1347452 - RNA, 23 nt, Human
aaaaagccacgaagcuugauccc

SEQ ID NO: 1347453 - RNA, 21 nt, Human
acgcuggguguacaguacggg

SEQ ID NO: 1347454 - RNA, 26 nt, Human
agccacgaagcuugauccccacgaag

SEQ ID NO: 1347455 - RNA, 20 nt, Human
aggagguggggacaaagcgu

SEQ ID NO: 1347456 - RNA, 23 nt, Human
aggggaugugggaacagccacag

SEQ ID NO: 1347457 - RNA, 23 nt, Human
cagccccgcggggugggggaggg

SEQ ID NO: 1347458 - RNA, 18 nt, Human
cagcccgucggcggagcu

SEQ ID NO: 1347459 - RNA, 26 nt, Human
caucuccccuccccagccgcugggaa

SEQ ID NO: 1347460 - RNA, 22 nt, Human
ccaucuccccuccccagccgcu

SEQ ID NO: 1347461 - RNA, 27 nt, Human
ccccugggaggguggggcgggcuccua

SEQ ID NO: 1347462 - RNA, 18 nt, Human
cccgggccgggcugggcg

SEQ ID NO: 1347463 - RNA, 18 nt, Human
cccugcccagcccgggcg

SEQ ID NO: 1347464 - RNA, 18 nt, Human
cccugggcccagugggca

SEQ ID NO: 1347465 - RNA, 19 nt, Human
ccgcugggaaaggggagag

SEQ ID NO: 1347466 - RNA, 22 nt, Human
ccgggcggggcccucggccgcc

SEQ ID NO: 1347467 - RNA, 23 nt, Human
ccugggaggguggggcgggcucc

SEQ ID NO: 1347468 - RNA, 21 nt, Human
ccugggauauucaaggggaug

SEQ ID NO: 1347469 - RNA, 25 nt, Human
ccugguccuggguugguccagccac

SEQ ID NO: 1347470 - RNA, 19 nt, Human
cggggcccucggccgccgu

SEQ ID NO: 1347471 - RNA, 21 nt, Human
cguccagcccgucggcggagc

SEQ ID NO: 1347472 - RNA, 19 nt, Human
gaggggcgcagggcggaga

SEQ ID NO: 1347473 - RNA, 18 nt, Human
gaugugggaacagccaca

SEQ ID NO: 1347474 - RNA, 22 nt, Human
gcagagauggugcccaugggga

SEQ ID NO: 1347475 - RNA, 19 nt, Human
gccacuguggucccugggc

SEQ ID NO: 1347476 - RNA, 24 nt, Human
gccgugaagcucucgugcgcggag

SEQ ID NO: 1347477 - RNA, 23 nt, Human
gcgggcccgggccgggcugggcg

SEQ ID NO: 1347478 - RNA, 19 nt, Human
gcuccuaggcaggguucgg

SEQ ID NO: 1347479 - RNA, 22 nt, Human
gcugggaaaggggagaggccca

SEQ ID NO: 1347480 - RNA, 23 nt, Human
ggaagguaaaaaacccacgagag

SEQ ID NO: 1347481 - RNA, 18 nt, Human
ggaccaggugggcagggg

SEQ ID NO: 1347482 - RNA, 18 nt, Human
ggagcugcagcgccgggc

SEQ ID NO: 1347483 - RNA, 20 nt, Human
ggaggagguggggacaaagc

SEQ ID NO: 1347484 - RNA, 18 nt, Human
ggcagagggcugaggaug

SEQ ID NO: 1347485 - RNA, 18 nt, Human
ggcccgggggccggggcg

SEQ ID NO: 1347486 - RNA, 20 nt, Human
ggcggggcccucggccgccg

SEQ ID NO: 1347487 - RNA, 20 nt, Human
ggcugaggauggagccccug

SEQ ID NO: 1347488 - RNA, 28 nt, Human
gggaggagguggggacaaaggggacccc

SEQ ID NO: 1347489 - RNA, 23 nt, Human
gggcgggcgcacggggcggcccg

SEQ ID NO: 1347490 - RNA, 19 nt, Human
gggcggggcccucggccgc

SEQ ID NO: 1347491 - RNA, 24 nt, Human
gggggacgcagagcccagaugagg

SEQ ID NO: 1347492 - RNA, 23 nt, Human
gggugggggagggggggacgcag

SEQ ID NO: 1347493 - RNA, 22 nt, Human
ggguugguccagccacuguggu

SEQ ID NO: 1347494 - RNA, 20 nt, Human
gguggagaaccgcgggcccg

SEQ ID NO: 1347495 - RNA, 19 nt, Human
gugggcaggggauccaggu

SEQ ID NO: 1347496 - RNA, 21 nt, Human
gugggcaggggauccagguga

SEQ ID NO: 1347497 - RNA, 20 nt, Human
guggucccugggcccagugg

SEQ ID NO: 1347498 - RNA, 24 nt, Human
guggucccugggcccagugggcag

SEQ ID NO: 1347499 - RNA, 18 nt, Human
ucacagugaccucgacgc

SEQ ID NO: 1347500 - RNA, 19 nt, Human
ucgcgugggaucaggaagg

SEQ ID NO: 1347501 - RNA, 22 nt, Human
ugagggacccggcccggccugg

SEQ ID NO: 1347502 - RNA, 21 nt, Human
ugauccccacgaagcccagcc

SEQ ID NO: 1347503 - RNA, 22 nt, Human
uggcagagauggugcccauggg

SEQ ID NO: 1347504 - RNA, 24 nt, Human
uggcagagauggugcccaugggga

SEQ ID NO: 1347505 - RNA, 24 nt, Human
ugggcagagggcugaggauggagc

SEQ ID NO: 1347506 - RNA, 27 nt, Human
ugggcaggggauccaggucgaacguuu

SEQ ID NO: 1347507 - RNA, 23 nt, Human
ugggcccagugggcagagggcug

SEQ ID NO: 1347508 - RNA, 20 nt, Human
ugugacgggcccgggggccg

SEQ ID NO: 1347509 - RNA, 22 nt, Human
aaacauuugcagagcgagaaaa

SEQ ID NO: 1347510 - RNA, 19 nt, Human
aaagaaagaggaagaggga

SEQ ID NO: 1347511 - RNA, 26 nt, Human
aaagagccaacagcugggaacuuggg

SEQ ID NO: 1347512 - RNA, 23 nt, Human
aaccccacccuccagggccccag

SEQ ID NO: 1347513 - RNA, 22 nt, Human
aaccccacuggcccccacccaa

SEQ ID NO: 1347514 - RNA, 22 nt, Human
aagaaucccuccaguaucaucc

SEQ ID NO: 1347515 - RNA, 21 nt, Human
aagcaggcaccgcagaccucg

SEQ ID NO: 1347516 - RNA, 19 nt, Human
accccccaaccccacccuc

SEQ ID NO: 1347517 - RNA, 18 nt, Human
accuccuucagugagcug

SEQ ID NO: 1347518 - RNA, 23 nt, Human
acgaggugcguguuguguguguu

SEQ ID NO: 1347519 - RNA, 18 nt, Human
acggugccguuccgcaga

SEQ ID NO: 1347520 - RNA, 22 nt, Human
acucaccacagaacucgcagcg

SEQ ID NO: 1347521 - RNA, 20 nt, Human
agaaaaacacacgcuggccg

SEQ ID NO: 1347522 - RNA, 20 nt, Human
agaaagcaacagugaaaagg

SEQ ID NO: 1347523 - RNA, 21 nt, Human
agaaucccuccaguaucaucc

SEQ ID NO: 1347524 - RNA, 20 nt, Human
agagcccaaguccauggcca

SEQ ID NO: 1347525 - RNA, 20 nt, Human
agaggagacagagguggccg

SEQ ID NO: 1347526 - RNA, 20 nt, Human
agagggacaaggacacagag

SEQ ID NO: 1347527 - RNA, 25 nt, Human
agagucccaccccccaaccccaccc

SEQ ID NO: 1347528 - RNA, 21 nt, Human
agcaggggcauccaagggcuu

SEQ ID NO: 1347529 - RNA, 19 nt, Human
agcguggcuuccccugagc

SEQ ID NO: 1347530 - RNA, 24 nt, Human
agcuggacuucuuagccaggccug

SEQ ID NO: 1347531 - RNA, 19 nt, Human
agcuggcucccggcgcccu

SEQ ID NO: 1347532 - RNA, 22 nt, Human
agcugggggcucuuguccucag

SEQ ID NO: 1347533 - RNA, 19 nt, Human
aggaggccccgaucccagc

SEQ ID NO: 1347534 - RNA, 22 nt, Human
aggccccagcaggccccacaga

SEQ ID NO: 1347535 - RNA, 20 nt, Human
agggacaaggacacagagga

SEQ ID NO: 1347536 - RNA, 20 nt, Human
agggagagcccaaguccaug

SEQ ID NO: 1347537 - RNA, 22 nt, Human
agggagagggagcaggaguggg

SEQ ID NO: 1347538 - RNA, 18 nt, Human
aggggcugcgggcuucca

SEQ ID NO: 1347539 - RNA, 18 nt, Human
agguccaccaggccgaga

SEQ ID NO: 1347540 - RNA, 19 nt, Human
agguggucaggcucugggc

SEQ ID NO: 1347541 - RNA, 19 nt, Human
aguggagagcugggcgggu

SEQ ID NO: 1347542 - RNA, 23 nt, Human
aucccuccaguaucauccuguua

SEQ ID NO: 1347543 - RNA, 19 nt, Human
caaagcaggcaccgcagac

SEQ ID NO: 1347544 - RNA, 22 nt, Human
caaccccacccuccagggcccc

SEQ ID NO: 1347545 - RNA, 23 nt, Human
caaggugggcgucaggcagaccc

SEQ ID NO: 1347546 - RNA, 18 nt, Human
caccccccaaccccaccc

SEQ ID NO: 1347547 - RNA, 18 nt, Human
caccccccaaccccaccc

SEQ ID NO: 1347548 - RNA, 27 nt, Human
caccccccaaccccacccuccagggcc

SEQ ID NO: 1347549 - RNA, 21 nt, Human
cacccuccagggccccagagc

SEQ ID NO: 1347550 - RNA, 19 nt, Human
cacccuguggccccagagu

SEQ ID NO: 1347551 - RNA, 21 nt, Human
cacccuguggccccagagucc

SEQ ID NO: 1347552 - RNA, 19 nt, Human
caccguggcaugauguggu

SEQ ID NO: 1347553 - RNA, 19 nt, Human
caccguggcaugauguggu

SEQ ID NO: 1347554 - RNA, 22 nt, Human
cacuggagccgcuuugccagcc

SEQ ID NO: 1347555 - RNA, 20 nt, Human
cagaacccugguucaucugc

SEQ ID NO: 1347556 - RNA, 21 nt, Human
cagcaggggcauccaagggcu

SEQ ID NO: 1347557 - RNA, 18 nt, Human
cagcucugagcucuuccc

SEQ ID NO: 1347558 - RNA, 21 nt, Human
caggcaccgcagaccucgcag

SEQ ID NO: 1347559 - RNA, 23 nt, Human
caggcucugggccuugagguccu

SEQ ID NO: 1347560 - RNA, 22 nt, Human
caggcucuucuuagggagcgag

SEQ ID NO: 1347561 - RNA, 20 nt, Human
cagguggucaggcucugggc

SEQ ID NO: 1347562 - RNA, 20 nt, Human
caguggcuccucuuuucccc

SEQ ID NO: 1347563 - RNA, 22 nt, Human
cauccuguuauccaaccguccc

SEQ ID NO: 1347564 - RNA, 23 nt, Human
caucgcccugccuggcugcuaga

SEQ ID NO: 1347565 - RNA, 26 nt, Human
ccacccaaaugcucccaacggguccc

SEQ ID NO: 1347566 - RNA, 22 nt, Human
ccagccagagacccccucccag

SEQ ID NO: 1347567 - RNA, 26 nt, Human
ccagccagagacccccucccagccau

SEQ ID NO: 1347568 - RNA, 27 nt, Human
ccagccagccagagacccccucccagc

SEQ ID NO: 1347569 - RNA, 18 nt, Human
ccagggccccagggacag

SEQ ID NO: 1347570 - RNA, 19 nt, Human
ccaucagagaccuggcugc

SEQ ID NO: 1347571 - RNA, 21 nt, Human
cccaaccccacccuccagggc

SEQ ID NO: 1347572 - RNA, 21 nt, Human
cccacccaaaugcucccaacg

SEQ ID NO: 1347573 - RNA, 19 nt, Human
cccagagccccugaggcuc

SEQ ID NO: 1347574 - RNA, 24 nt, Human
cccaucaucuuggccagggcuuuu

SEQ ID NO: 1347575 - RNA, 23 nt, Human
ccccaaccccacccuccagggcc

SEQ ID NO: 1347576 - RNA, 18 nt, Human
ccccacccaaaugcuccc

SEQ ID NO: 1347577 - RNA, 22 nt, Human
ccccacccuccagggccccaga

SEQ ID NO: 1347578 - RNA, 20 nt, Human
ccccacuggcccccacccag

SEQ ID NO: 1347579 - RNA, 20 nt, Human
ccccagagccccugaggcuc

SEQ ID NO: 1347580 - RNA, 21 nt, Human
ccccagaguccucgggcuggg

SEQ ID NO: 1347581 - RNA, 20 nt, Human
cccccacccaaaugcuccca

SEQ ID NO: 1347582 - RNA, 22 nt, Human
ccccccaaccccacccuccagg

SEQ ID NO: 1347583 - RNA, 20 nt, Human
ccccucccagccauggccua

SEQ ID NO: 1347584 - RNA, 21 nt, Human
ccccugagcaagcaccguggc

SEQ ID NO: 1347585 - RNA, 19 nt, Human
ccccugaggcucuuugggg

SEQ ID NO: 1347586 - RNA, 25 nt, Human
cccgaucccagccccggcugccagc

SEQ ID NO: 1347587 - RNA, 20 nt, Human
cccugagcaagcaccguggc

SEQ ID NO: 1347588 - RNA, 23 nt, Human
ccgacucugccacucccagcugc

SEQ ID NO: 1347589 - RNA, 22 nt, Human
ccucagaacccaggccugaucu

SEQ ID NO: 1347590 - RNA, 23 nt, Human
ccuccaguaucauccuguuaucc

SEQ ID NO: 1347591 - RNA, 23 nt, Human
ccucugcagccacuuugcugcuc

SEQ ID NO: 1347592 - RNA, 18 nt, Human
ccugcagcuccuguuugc

SEQ ID NO: 1347593 - RNA, 20 nt, Human
ccugccccaggguguuucca

SEQ ID NO: 1347594 - RNA, 23 nt, Human
ccuggcuucuagcuggcccagga

SEQ ID NO: 1347595 - RNA, 21 nt, Human
ccuugggucaggggugcaugu

SEQ ID NO: 1347596 - RNA, 23 nt, Human
cgagaaaauaaauaacaucgcaa

SEQ ID NO: 1347597 - RNA, 23 nt, Human
cgagggagagcccaaguccaugg

SEQ ID NO: 1347598 - RNA, 21 nt, Human
cggcugccaucagagaccugg

SEQ ID NO: 1347599 - RNA, 19 nt, Human
cggcuuggcggccaacugg

SEQ ID NO: 1347600 - RNA, 21 nt, Human
cgggccggggggccccggcga

SEQ ID NO: 1347601 - RNA, 25 nt, Human
cguaggaggaggagaggcaguuggu

SEQ ID NO: 1347602 - RNA, 26 nt, Human
cguuccgcagaccuagggaaccccac

SEQ ID NO: 1347603 - RNA, 23 nt, Human
cucaccacagaacucgcagcgga

SEQ ID NO: 1347604 - RNA, 23 nt, Human
cucccaacgggucccugacaccc

SEQ ID NO: 1347605 - RNA, 21 nt, Human
cuccucuagccucaacugcuu

SEQ ID NO: 1347606 - RNA, 19 nt, Human
cugccaggaccugcgccgc

SEQ ID NO: 1347607 - RNA, 21 nt, Human
cugccuggcugcuagacgggg

SEQ ID NO: 1347608 - RNA, 23 nt, Human
cuggaccaggugggcaugggcug

SEQ ID NO: 1347609 - RNA, 20 nt, Human
cuguagugugcccggccccu

SEQ ID NO: 1347610 - RNA, 20 nt, Human
cuucccagcugggaaggccc

SEQ ID NO: 1347611 - RNA, 21 nt, Human
cuugacagaaaaacacacgcu

SEQ ID NO: 1347612 - RNA, 23 nt, Human
cuuggccagggcuuuugggcuug

SEQ ID NO: 1347613 - RNA, 19 nt, Human
gaagaagaggagacagagg

SEQ ID NO: 1347614 - RNA, 20 nt, Human
gaagacacccuguggccccu

SEQ ID NO: 1347615 - RNA, 18 nt, Human
gacuggccaccugcucca

SEQ ID NO: 1347616 - RNA, 18 nt, Human
gagaggggaucuggaaug

SEQ ID NO: 1347617 - RNA, 22 nt, Human
gagccaacagcugggaacuugg

SEQ ID NO: 1347618 - RNA, 23 nt, Human
gagcgcgcguggcucgagaggcc

SEQ ID NO: 1347619 - RNA, 23 nt, Human
gagcgcgcguggcuggacaggcc

SEQ ID NO: 1347620 - RNA, 20 nt, Human
gagcugccaggaccugcgcc

SEQ ID NO: 1347621 - RNA, 21 nt, Human
gaggaagaagaggagacagag

SEQ ID NO: 1347622 - RNA, 21 nt, Human
gaggaagaagaggagacagag

SEQ ID NO: 1347623 - RNA, 22 nt, Human
gaggcagcugucagcucugagc

SEQ ID NO: 1347624 - RNA, 22 nt, Human
gcaacagugaaaagggagaggg

SEQ ID NO: 1347625 - RNA, 18 nt, Human
gcagccaacaaggauuuc

SEQ ID NO: 1347626 - RNA, 25 nt, Human
gccccagagccccugaggcucuuuu

SEQ ID NO: 1347627 - RNA, 24 nt, Human
gccccgaucccagccccggcugcc

SEQ ID NO: 1347628 - RNA, 19 nt, Human
gccuuuggggaggccggcc

SEQ ID NO: 1347629 - RNA, 20 nt, Human
gcguuuuuaaaaaagugaaa

SEQ ID NO: 1347630 - RNA, 22 nt, Human
gcuccagggccccagggacagg

SEQ ID NO: 1347631 - RNA, 19 nt, Human
gcucccaacgggucccuga

SEQ ID NO: 1347632 - RNA, 20 nt, Human
gcucuuguccucaggauucu

SEQ ID NO: 1347633 - RNA, 21 nt, Human
ggaaacggaaagaaagaggaa

SEQ ID NO: 1347634 - RNA, 20 nt, Human
ggaaccccacaaggccggca

SEQ ID NO: 1347635 - RNA, 19 nt, Human
ggacuucuuagccaggccu

SEQ ID NO: 1347636 - RNA, 22 nt, Human
ggaggaagaagaggagacagag

SEQ ID NO: 1347637 - RNA, 23 nt, Human
ggccaggcugagcaagccgggcc

SEQ ID NO: 1347638 - RNA, 21 nt, Human
ggccagggcuuuugggcuugg

SEQ ID NO: 1347639 - RNA, 18 nt, Human
ggcggguggcccaggccc

SEQ ID NO: 1347640 - RNA, 22 nt, Human
ggcucccaggccccagcaggcc

SEQ ID NO: 1347641 - RNA, 23 nt, Human
gggacaaggacacagaggaggaa

SEQ ID NO: 1347642 - RNA, 21 nt, Human
gggagagagggaaccagaaca

SEQ ID NO: 1347643 - RNA, 24 nt, Human
gggaggccggccgggggcucaggg

SEQ ID NO: 1347644 - RNA, 19 nt, Human
gggccccucauccucagac

SEQ ID NO: 1347645 - RNA, 19 nt, Human
gggcggguggcccaggccc

SEQ ID NO: 1347646 - RNA, 25 nt, Human
gggcucccaggccccagcaggcccc

SEQ ID NO: 1347647 - RNA, 19 nt, Human
gggcuuggccaggcugagc

SEQ ID NO: 1347648 - RNA, 21 nt, Human
ggggaggagagucccaccccc

SEQ ID NO: 1347649 - RNA, 18 nt, Human
ggggaggccggccggggg

SEQ ID NO: 1347650 - RNA, 19 nt, Human
gggggaggagagucccacc

SEQ ID NO: 1347651 - RNA, 22 nt, Human
gggggcucagggacagcugggg

SEQ ID NO: 1347652 - RNA, 21 nt, Human
gggugcgccgcugcuuuccga

SEQ ID NO: 1347653 - RNA, 26 nt, Human
ggugguggcaacuucuuggccaaggg

SEQ ID NO: 1347654 - RNA, 21 nt, Human
gucagcucugagcucuuccca

SEQ ID NO: 1347655 - RNA, 21 nt, Human
gugagguucaagggccccuca

SEQ ID NO: 1347656 - RNA, 19 nt, Human
gugaguggcccagggggcu

SEQ ID NO: 1347657 - RNA, 18 nt, Human
guggcccagggggcugcc

SEQ ID NO: 1347658 - RNA, 24 nt, Human
guuccgcagaccuagggaacccca

SEQ ID NO: 1347659 - RNA, 21 nt, Human
uaaagagccaacagcugggaa

SEQ ID NO: 1347660 - RNA, 18 nt, Human
uaacaucgcaaaggagcc

SEQ ID NO: 1347661 - RNA, 19 nt, Human
uacaaccccacuggccccc

SEQ ID NO: 1347662 - RNA, 19 nt, Human
uagcuggcucccggcgccc

SEQ ID NO: 1347663 - RNA, 21 nt, Human
ucagggacagcugggggcucu

SEQ ID NO: 1347664 - RNA, 21 nt, Human
uccacuugacagaaaaacaca

SEQ ID NO: 1347665 - RNA, 21 nt, Human
ucccaccccccaaccccaccc

SEQ ID NO: 1347666 - RNA, 19 nt, Human
ucccagacaggcugcccag

SEQ ID NO: 1347667 - RNA, 22 nt, Human
ucccagccauggccuaaagagc

SEQ ID NO: 1347668 - RNA, 18 nt, Human
ucccaggccccagcaggc

SEQ ID NO: 1347669 - RNA, 20 nt, Human
ucccaggccccagcaggccc

SEQ ID NO: 1347670 - RNA, 20 nt, Human
uccccugugaccagaccggc

SEQ ID NO: 1347671 - RNA, 18 nt, Human
uccgcagaccuagggaac

SEQ ID NO: 1347672 - RNA, 21 nt, Human
ucgcagguggucaggcucugg

SEQ ID NO: 1347673 - RNA, 21 nt, Human
ucgcccugccuggcugcuaga

SEQ ID NO: 1347674 - RNA, 18 nt, Human
ucgggcugggggaagggc

SEQ ID NO: 1347675 - RNA, 24 nt, Human
ucuacaaccccacuggcccccacc

SEQ ID NO: 1347676 - RNA, 26 nt, Human
ucuacaaccccacuggcccccaccca

SEQ ID NO: 1347677 - RNA, 19 nt, Human
ucuagccucaacugcuucu

SEQ ID NO: 1347678 - RNA, 19 nt, Human
ucucaaagcaggcaccgca

SEQ ID NO: 1347679 - RNA, 23 nt, Human
ucucuacaaccccacuggccccc

SEQ ID NO: 1347680 - RNA, 21 nt, Human
ucuuggccagggcuuuugggc

SEQ ID NO: 1347681 - RNA, 19 nt, Human
ugaaggaagacacccugug

SEQ ID NO: 1347682 - RNA, 23 nt, Human
ugacagaaaaacacacgcuggcc

SEQ ID NO: 1347683 - RNA, 19 nt, Human
ugagaggauauucaugggg

SEQ ID NO: 1347684 - RNA, 22 nt, Human
ugagaugugaagguccgagggg

SEQ ID NO: 1347685 - RNA, 20 nt, Human
ugagguccugcagcuccugu

SEQ ID NO: 1347686 - RNA, 22 nt, Human
ugagguccugcagcuccuguuu

SEQ ID NO: 1347687 - RNA, 20 nt, Human
ugaggugagguucaagggcc

SEQ ID NO: 1347688 - RNA, 19 nt, Human
ugccuuuggggaggccggc

SEQ ID NO: 1347689 - RNA, 21 nt, Human
ugccuuuggggaggccggccg

SEQ ID NO: 1347690 - RNA, 18 nt, Human
uggaaacggaaagaaaga

SEQ ID NO: 1347691 - RNA, 20 nt, Human
uggcaacuucuuggccaagg

SEQ ID NO: 1347692 - RNA, 18 nt, Human
uggcacgagaggggaucu

SEQ ID NO: 1347693 - RNA, 23 nt, Human
uggccaggcugagcaagccgggc

SEQ ID NO: 1347694 - RNA, 26 nt, Human
uggcccaggcccuuggccgagaagcc

SEQ ID NO: 1347695 - RNA, 20 nt, Human
uggcccagggggcugcccgg

SEQ ID NO: 1347696 - RNA, 25 nt, Human
uggccccagaguccucgggcugggg

SEQ ID NO: 1347697 - RNA, 22 nt, Human
uggcccugguggguugggaggu

SEQ ID NO: 1347698 - RNA, 21 nt, Human
uggcuguagugugcccggccc

SEQ ID NO: 1347699 - RNA, 22 nt, Human
uggcuuccccugagcaagcacc

SEQ ID NO: 1347700 - RNA, 22 nt, Human
uggcuugcuccuuuggaaacgg

SEQ ID NO: 1347701 - RNA, 25 nt, Human
ugggaaggccccucucgggggcagc

SEQ ID NO: 1347702 - RNA, 22 nt, Human
ugggccuugagguccugcagcu

SEQ ID NO: 1347703 - RNA, 21 nt, Human
ugggcggguggcccaggcccu

SEQ ID NO: 1347704 - RNA, 24 nt, Human
ugggcucaguggggggcucccagg

SEQ ID NO: 1347705 - RNA, 23 nt, Human
ugggggagagagggaaccagaac

SEQ ID NO: 1347706 - RNA, 20 nt, Human
uggggggccuugacauggca

SEQ ID NO: 1347707 - RNA, 21 nt, Human
uggguccgucucuucaggauc

SEQ ID NO: 1347708 - RNA, 19 nt, Human
ugugaagguccgaggggcu

SEQ ID NO: 1347709 - RNA, 20 nt, Human
ugugaagguccgaggggcug

SEQ ID NO: 1347710 - RNA, 23 nt, Human
uguggccccagaguccucgggcu

SEQ ID NO: 1347711 - RNA, 22 nt, Human
uguucgcauguacaugugugug

SEQ ID NO: 1347712 - RNA, 18 nt, Human
uguuguguguguucgcau

SEQ ID NO: 1347713 - RNA, 20 nt, Human
uucaucugcucacuggagcc

SEQ ID NO: 1347714 - RNA, 18 nt, Human
uucaugggggagagaggg

SEQ ID NO: 1347715 - RNA, 23 nt, Human
uuguguguguucgcauguacaug

SEQ ID NO: 1347716 - RNA, 24 nt, Human
uuuugaggaguggagagcugggcg

SEQ ID NO: 1347717 - RNA, 23 nt, Human
acccagcgaggacaaaggggccu

SEQ ID NO: 1347718 - RNA, 20 nt, Human
acccuacuuagacccucgca

SEQ ID NO: 1347719 - RNA, 24 nt, Human
acgccaccgcucccgcugccgucu

SEQ ID NO: 1347720 - RNA, 23 nt, Human
agcaacugcccaccauugucccu

SEQ ID NO: 1347721 - RNA, 20 nt, Human
agccccuggcccaccccucu

SEQ ID NO: 1347722 - RNA, 19 nt, Human
aggcgcaggugggcgcgcu

SEQ ID NO: 1347723 - RNA, 20 nt, Human
caacugcccaccauuguccc

SEQ ID NO: 1347724 - RNA, 19 nt, Human
caagacaggucccagaccu

SEQ ID NO: 1347725 - RNA, 21 nt, Human
caccccucuccuucccacuuc

SEQ ID NO: 1347726 - RNA, 21 nt, Human
cagcgaggacaaaggggccuc

SEQ ID NO: 1347727 - RNA, 19 nt, Human
caguggacuccgcgcugcg

SEQ ID NO: 1347728 - RNA, 18 nt, Human
ccagggagcugggccgcg

SEQ ID NO: 1347729 - RNA, 26 nt, Human
cccacaguccaagacaggucccagac

SEQ ID NO: 1347730 - RNA, 23 nt, Human
cccacccagcgaggacaaagggg

SEQ ID NO: 1347731 - RNA, 19 nt, Human
ccccucuccuucccacuuc

SEQ ID NO: 1347732 - RNA, 21 nt, Human
cccgauggcccggcucuacca

SEQ ID NO: 1347733 - RNA, 21 nt, Human
cccggcucuaccaguucugga

SEQ ID NO: 1347734 - RNA, 19 nt, Human
cccucuccuucccacuucu

SEQ ID NO: 1347735 - RNA, 23 nt, Human
cccuggcccaccccucuccuucc

SEQ ID NO: 1347736 - RNA, 22 nt, Human
ccuccuucgcuccgagggcaaa

SEQ ID NO: 1347737 - RNA, 23 nt, Human
ccugcgggcugggggcuggagga

SEQ ID NO: 1347738 - RNA, 21 nt, Human
ccuggcccaccccucuccuuc

SEQ ID NO: 1347739 - RNA, 20 nt, Human
cgccaccgcucccgcugccg

SEQ ID NO: 1347740 - RNA, 18 nt, Human
cgcgcggagaggcgcagg

SEQ ID NO: 1347741 - RNA, 24 nt, Human
cgcucccgcugccgucuacccgac

SEQ ID NO: 1347742 - RNA, 23 nt, Human
cuggcccagcagugaggcaggcu

SEQ ID NO: 1347743 - RNA, 20 nt, Human
cugggcgcccaggcccggga

SEQ ID NO: 1347744 - RNA, 20 nt, Human
gagggaaggcggggagacgc

SEQ ID NO: 1347745 - RNA, 20 nt, Human
gcccaccccucuccuuccca

SEQ ID NO: 1347746 - RNA, 18 nt, Human
gccgacaggggcgcggag

SEQ ID NO: 1347747 - RNA, 25 nt, Human
gccgcgcggagaggcgcaggugggc

SEQ ID NO: 1347748 - RNA, 20 nt, Human
gcgccgacaggggcgcggag

SEQ ID NO: 1347749 - RNA, 20 nt, Human
ggaggaggagcgcuccggcc

SEQ ID NO: 1347750 - RNA, 18 nt, Human
ggagggagggaaggcggg

SEQ ID NO: 1347751 - RNA, 20 nt, Human
ggcccagcagugaggcaggc

SEQ ID NO: 1347752 - RNA, 23 nt, Human
gggcugggggcuggaggaggagc

SEQ ID NO: 1347753 - RNA, 22 nt, Human
gugaggcaggcugagggcaugg

SEQ ID NO: 1347754 - RNA, 23 nt, Human
guugaucaaaggcaguggccacc

SEQ ID NO: 1347755 - RNA, 23 nt, Human
uccaagacaggucccagaccuuu

SEQ ID NO: 1347756 - RNA, 23 nt, Human
uccgcgcugcgggcgccgcgggg

SEQ ID NO: 1347757 - RNA, 21 nt, Human
uccugcaggggagaggccugg

SEQ ID NO: 1347758 - RNA, 19 nt, Human
ugagggugagucucccaca

SEQ ID NO: 1347759 - RNA, 18 nt, Human
ugaugcgaggcuccaggg

SEQ ID NO: 1347760 - RNA, 20 nt, Human
ugcaaugccaguccugcagg

SEQ ID NO: 1347761 - RNA, 18 nt, Human
uggcaaggugagggugag

SEQ ID NO: 1347762 - RNA, 19 nt, Human
uggcccagcagugaggcag

SEQ ID NO: 1347763 - RNA, 19 nt, Human
uguccggcugggcgcccag

SEQ ID NO: 1347764 - RNA, 23 nt, Human
acccaaauuuaaggaccagaagc

SEQ ID NO: 1347765 - RNA, 22 nt, Human
caaaaauaacccaaauuuaagg

SEQ ID NO: 1347766 - RNA, 20 nt, Human
caaccccaucaagacugucc

SEQ ID NO: 1347767 - RNA, 21 nt, Human
ccagaagguucucaaccccau

SEQ ID NO: 1347768 - RNA, 20 nt, Human
ccaguucuucucagagagua

SEQ ID NO: 1347769 - RNA, 18 nt, Human
ccccagaagguucucaac

SEQ ID NO: 1347770 - RNA, 21 nt, Human
cucaaccccaucaagacuguc

SEQ ID NO: 1347771 - RNA, 24 nt, Human
cuccccagaagguucucaaccccc

SEQ ID NO: 1347772 - RNA, 22 nt, Human
gugcaaagagagggucaucugg

SEQ ID NO: 1347773 - RNA, 20 nt, Human
uaaccaaaaauaacccaaau

SEQ ID NO: 1347774 - RNA, 19 nt, Human
uacaucucuagcuccaguu

SEQ ID NO: 1347775 - RNA, 21 nt, Human
ucauggguacugauuaagggc

SEQ ID NO: 1347776 - RNA, 22 nt, Human
uccccagaagguucucaacccc

SEQ ID NO: 1347777 - RNA, 18 nt, Human
ucuggcuccccagaaggu

SEQ ID NO: 1347778 - RNA, 22 nt, Human
ugcaaagagagggucaucuggc

SEQ ID NO: 1347779 - RNA, 20 nt, Human
ugcagacucuucagauccag

SEQ ID NO: 1347780 - RNA, 24 nt, Human
uucucaaccccaucaagacugucc

SEQ ID NO: 1347781 - RNA, 18 nt, Human
uugugcaaagagaggguc

SEQ ID NO: 1347782 - RNA, 21 nt, Human
aggcuagguguuggagaaaga

SEQ ID NO: 1347783 - RNA, 25 nt, Human
agguguuggagaaagaggaccagcu

SEQ ID NO: 1347784 - RNA, 24 nt, Human
augucaggggcuggccgggauggc

SEQ ID NO: 1347785 - RNA, 20 nt, Human
cccucccuuuuuucuugccc

SEQ ID NO: 1347786 - RNA, 22 nt, Human
cuacguucaaaacuccaacccc

SEQ ID NO: 1347787 - RNA, 24 nt, Human
cucaggcuagguguuggagaaaga

SEQ ID NO: 1347788 - RNA, 20 nt, Human
cuccaacccccucccuuuuu

SEQ ID NO: 1347789 - RNA, 22 nt, Human
gacacaacacuuaccaagcuag

SEQ ID NO: 1347790 - RNA, 22 nt, Human
ggcuagguguuggagaaagagg

SEQ ID NO: 1347791 - RNA, 24 nt, Human
uacuacguucaaaacuccaacccc

SEQ ID NO: 1347792 - RNA, 21 nt, Human
ucaaaacuccaacccccuccc

SEQ ID NO: 1347793 - RNA, 22 nt, Human
ucagucuuggugcaagaucgau

SEQ ID NO: 1347794 - RNA, 20 nt, Human
uccaacccccucccuuuuuu

SEQ ID NO: 1347795 - RNA, 21 nt, Human
uucaaaacuccaacccccucc

SEQ ID NO: 1347796 - RNA, 20 nt, Human
aaacaaagccacaucacaug

SEQ ID NO: 1347797 - RNA, 18 nt, Human
accaguggcuaacugaau

SEQ ID NO: 1347798 - RNA, 21 nt, Human
acuuaaucuuuucugcugugu

SEQ ID NO: 1347799 - RNA, 23 nt, Human
agcuagcaacucauagcuaaugc

SEQ ID NO: 1347800 - RNA, 23 nt, Human
auuauucauuaaaaaaguauauc

SEQ ID NO: 1347801 - RNA, 26 nt, Human
cuaacugaauuaaaacaaagccacau

SEQ ID NO: 1347802 - RNA, 29 nt, Human
uacagcuuaauuuuacaaugaagggaccu

SEQ ID NO: 1347803 - RNA, 22 nt, Human
uagaauauaacccacacauuaa

SEQ ID NO: 1347804 - RNA, 26 nt, Human
uagaauauaacccacacauuaaaaac

SEQ ID NO: 1347805 - RNA, 22 nt, Human
uagacaaguuaugaacaccugu

SEQ ID NO: 1347806 - RNA, 22 nt, Human
uaugggagauuugagcuuagac

SEQ ID NO: 1347807 - RNA, 23 nt, Human
ugaauuaaaacaaagccacauca

SEQ ID NO: 1347808 - RNA, 23 nt, Human
ugccacagaauuuugcuuuggga

SEQ ID NO: 1347809 - RNA, 21 nt, Human
ugcuguguuuuuauucucaaa

SEQ ID NO: 1347810 - RNA, 21 nt, Human
uuaaucuuuucugcuguguuu

SEQ ID NO: 1347811 - RNA, 25 nt, Human
uuacuuaaucuuuucugcuguguuu

SEQ ID NO: 1347812 - RNA, 20 nt, Human
uuagacaaguuaugaacacc

SEQ ID NO: 1347813 - RNA, 19 nt, Human
uuuuuuuuuuuuuacuuaa

SEQ ID NO: 1347814 - RNA, 20 nt, Human
aaaaauagcaguaaggcggc

SEQ ID NO: 1347815 - RNA, 24 nt, Human
aaacccaaugggaaaggaggugac

SEQ ID NO: 1347816 - RNA, 21 nt, Human
aaauagcaguaaggcggcagc

SEQ ID NO: 1347817 - RNA, 19 nt, Human
aagcugccacagcuggugg

SEQ ID NO: 1347818 - RNA, 21 nt, Human
accacuacccaccccgcccca

SEQ ID NO: 1347819 - RNA, 24 nt, Human
acccucauaaagacgggcaaaaau

SEQ ID NO: 1347820 - RNA, 21 nt, Human
agagggagucugaggccuggu

SEQ ID NO: 1347821 - RNA, 21 nt, Human
agucuuugggaggaaccaauu

SEQ ID NO: 1347822 - RNA, 19 nt, Human
agugcagggcggggaaaag

SEQ ID NO: 1347823 - RNA, 23 nt, Human
auaaagacgggcaaaaaugcagg

SEQ ID NO: 1347824 - RNA, 22 nt, Human
caaaaaugcaggugagagggaa

SEQ ID NO: 1347825 - RNA, 19 nt, Human
caacuggugaagugcuggg

SEQ ID NO: 1347826 - RNA, 24 nt, Human
caagacagucaaauuauucaaagu

SEQ ID NO: 1347827 - RNA, 20 nt, Human
cacucccacaaaacccaggg

SEQ ID NO: 1347828 - RNA, 21 nt, Human
cagcuuuggucuccagcaugc

SEQ ID NO: 1347829 - RNA, 18 nt, Human
cagggcggggaaaagagg

SEQ ID NO: 1347830 - RNA, 19 nt, Human
cagggcggggaaaagaggg

SEQ ID NO: 1347831 - RNA, 18 nt, Human
ccacuacccaccccgccc

SEQ ID NO: 1347832 - RNA, 21 nt, Human
cccacaaaacccagggcucca

SEQ ID NO: 1347833 - RNA, 21 nt, Human
ccccuuuuauccccuuuauuc

SEQ ID NO: 1347834 - RNA, 19 nt, Human
cccugggucaucagaacuc

SEQ ID NO: 1347835 - RNA, 22 nt, Human
ccuaaccccugggucaucagaa

SEQ ID NO: 1347836 - RNA, 22 nt, Human
cgccccaagcugccacagcugg

SEQ ID NO: 1347837 - RNA, 18 nt, Human
cucagcccuaaccccugg

SEQ ID NO: 1347838 - RNA, 19 nt, Human
cuccucugugcuucuuucc

SEQ ID NO: 1347839 - RNA, 23 nt, Human
cuggugggcaugaaugggaguug

SEQ ID NO: 1347840 - RNA, 19 nt, Human
gcacucccacaaaacccag

SEQ ID NO: 1347841 - RNA, 25 nt, Human
gcccuaauccaguauauauguugcu

SEQ ID NO: 1347842 - RNA, 22 nt, Human
ggaguugcagaagagucuuugg

SEQ ID NO: 1347843 - RNA, 19 nt, Human
ggcggggaaaagagggagu

SEQ ID NO: 1347844 - RNA, 21 nt, Human
gggaaaggaggugacaaacgu

SEQ ID NO: 1347845 - RNA, 20 nt, Human
gggaguugcagaagagucuu

SEQ ID NO: 1347846 - RNA, 23 nt, Human
gucuccagcaugcuggauacaag

SEQ ID NO: 1347847 - RNA, 26 nt, Human
gugcagggcggggaaaagagggaguc

SEQ ID NO: 1347848 - RNA, 19 nt, Human
gugggcaugaaugggaguu

SEQ ID NO: 1347849 - RNA, 21 nt, Human
uaacaccagaaauuaaaaggg

SEQ ID NO: 1347850 - RNA, 25 nt, Human
uaaccccugggucaucagaacuccu

SEQ ID NO: 1347851 - RNA, 21 nt, Human
uauauauguugcugaagauaa

SEQ ID NO: 1347852 - RNA, 21 nt, Human
ucagaacuccuccucugugcu

SEQ ID NO: 1347853 - RNA, 19 nt, Human
ucugugcuucuuuccagag

SEQ ID NO: 1347854 - RNA, 22 nt, Human
ugaccacuacccaccccgcccc

SEQ ID NO: 1347855 - RNA, 19 nt, Human
ugagagggaaggaaccucc

SEQ ID NO: 1347856 - RNA, 20 nt, Human
ugagagggaaggaaccucca

SEQ ID NO: 1347857 - RNA, 21 nt, Human
ugagcacucccacaaaaccca

SEQ ID NO: 1347858 - RNA, 23 nt, Human
ugcauuagcagaacuuuaaauac

SEQ ID NO: 1347859 - RNA, 21 nt, Human
ugugcaacuacuauuuugauu

SEQ ID NO: 1347860 - RNA, 23 nt, Human
uucaaaguugaaaugagugagaa

SEQ ID NO: 1347861 - RNA, 22 nt, Human
uuccuaaaaacccaaugggaaa

SEQ ID NO: 1347862 - RNA, 23 nt, Human
uuuuccuaaaaacccaaugggaa

SEQ ID NO: 1347863 - RNA, 20 nt, Human
aaaacaaugugcaggguggc

SEQ ID NO: 1347864 - RNA, 18 nt, Human
aagaguccagacuucaag

SEQ ID NO: 1347865 - RNA, 23 nt, Human
aaguagagaugagaccccaaacg

SEQ ID NO: 1347866 - RNA, 26 nt, Human
aauacaguuuauugucgcccugcguc

SEQ ID NO: 1347867 - RNA, 24 nt, Human
acccaggaaaucagcaaaaaccca

SEQ ID NO: 1347868 - RNA, 19 nt, Human
accugagccaccuccuccu

SEQ ID NO: 1347869 - RNA, 22 nt, Human
accugguguggggucugugguc

SEQ ID NO: 1347870 - RNA, 21 nt, Human
agaaaaagcugagcugggaga

SEQ ID NO: 1347871 - RNA, 20 nt, Human
agaaccccggcgugccucuc

SEQ ID NO: 1347872 - RNA, 19 nt, Human
agacuucaagggucccuca

SEQ ID NO: 1347873 - RNA, 18 nt, Human
agcaaaaacccauuuaag

SEQ ID NO: 1347874 - RNA, 19 nt, Human
aggaagccugggagaccug

SEQ ID NO: 1347875 - RNA, 23 nt, Human
aggaagccugggagaccuggugc

SEQ ID NO: 1347876 - RNA, 23 nt, Human
aguggccccagggggacgaaggc

SEQ ID NO: 1347877 - RNA, 21 nt, Human
aucaagccccaucauccuagc

SEQ ID NO: 1347878 - RNA, 19 nt, Human
aucauaauagaaauaaagu

SEQ ID NO: 1347879 - RNA, 23 nt, Human
aucauaauagaaauaaagugcac

SEQ ID NO: 1347880 - RNA, 23 nt, Human
auuuacagccacuccccauugcu

SEQ ID NO: 1347881 - RNA, 23 nt, Human
caaaguguuucauuccccuagaa

SEQ ID NO: 1347882 - RNA, 23 nt, Human
caaccaccuuucaccccauccug

SEQ ID NO: 1347883 - RNA, 18 nt, Human
caaccccagggcgcuccc

SEQ ID NO: 1347884 - RNA, 27 nt, Human
caacgggcuguuucagcuccgagauuu

SEQ ID NO: 1347885 - RNA, 20 nt, Human
caagcccaaggcacaaacgg

SEQ ID NO: 1347886 - RNA, 19 nt, Human
caccuccuccuucgcgggc

SEQ ID NO: 1347887 - RNA, 22 nt, Human
caccuccuccuucgcgggcccc

SEQ ID NO: 1347888 - RNA, 21 nt, Human
cacucguuuccccuuauucug

SEQ ID NO: 1347889 - RNA, 23 nt, Human
cagacuucaagggucccucacag

SEQ ID NO: 1347890 - RNA, 20 nt, Human
cagcacaaggugagcggcag

SEQ ID NO: 1347891 - RNA, 23 nt, Human
caggaaaucagcaaaaacccauu

SEQ ID NO: 1347892 - RNA, 22 nt, Human
caucccaaaaccauccccuguc

SEQ ID NO: 1347893 - RNA, 20 nt, Human
cauuuaagaguccagacuuc

SEQ ID NO: 1347894 - RNA, 23 nt, Human
cauuuaagaguccagacuucaag

SEQ ID NO: 1347895 - RNA, 23 nt, Human
ccaaaaccauccccugucaccca

SEQ ID NO: 1347896 - RNA, 25 nt, Human
ccaccuuucaccccauccugaaucc

SEQ ID NO: 1347897 - RNA, 25 nt, Human
ccagaaccccggcgugccucuccuc

SEQ ID NO: 1347898 - RNA, 21 nt, Human
ccaggccccgcguuuccacgc

SEQ ID NO: 1347899 - RNA, 19 nt, Human
cccauccguggaaaaacug

SEQ ID NO: 1347900 - RNA, 24 nt, Human
ccccaucauccuagcaugcaccca

SEQ ID NO: 1347901 - RNA, 18 nt, Human
cccccggggccgguuccc

SEQ ID NO: 1347902 - RNA, 24 nt, Human
ccccgcguuuccacgccucccccg

SEQ ID NO: 1347903 - RNA, 19 nt, Human
ccccgggcgcucccaaccc

SEQ ID NO: 1347904 - RNA, 21 nt, Human
cccggacccacgcguucucuc

SEQ ID NO: 1347905 - RNA, 23 nt, Human
cccuagaaguagagaugagaccc

SEQ ID NO: 1347906 - RNA, 23 nt, Human
ccggacccacgcguucucuccuc

SEQ ID NO: 1347907 - RNA, 21 nt, Human
ccucccacccgcgacccgggc

SEQ ID NO: 1347908 - RNA, 24 nt, Human
ccuccuccuucgcgggccccgggc

SEQ ID NO: 1347909 - RNA, 18 nt, Human
ccuggagcugaugguggu

SEQ ID NO: 1347910 - RNA, 18 nt, Human
ccuuuaagcaaccaccuu

SEQ ID NO: 1347911 - RNA, 18 nt, Human
cgagcugaagcuucaucu

SEQ ID NO: 1347912 - RNA, 23 nt, Human
cgagcuggaggcggaagggccgg

SEQ ID NO: 1347913 - RNA, 22 nt, Human
cggcgugccucuccucccaccc

SEQ ID NO: 1347914 - RNA, 18 nt, Human
cgggccccgggcgcuccc

SEQ ID NO: 1347915 - RNA, 25 nt, Human
cuccagaaccccggcgugccucucc

SEQ ID NO: 1347916 - RNA, 18 nt, Human
cucuccucccacccgcga

SEQ ID NO: 1347917 - RNA, 18 nt, Human
cucuccucccgccggaga

SEQ ID NO: 1347918 - RNA, 22 nt, Human
cucugagaccaaaugagauaga

SEQ ID NO: 1347919 - RNA, 24 nt, Human
cugcugagcuagacuuuaguacac

SEQ ID NO: 1347920 - RNA, 21 nt, Human
cuuucaccccauccugaaucc

SEQ ID NO: 1347921 - RNA, 21 nt, Human
cuuugaguuggguuuucagug

SEQ ID NO: 1347922 - RNA, 23 nt, Human
gaaaucagcaaaaacccauuuaa

SEQ ID NO: 1347923 - RNA, 23 nt, Human
gagaauaacuggagccugaugac

SEQ ID NO: 1347924 - RNA, 18 nt, Human
gagaccccaaacggguca

SEQ ID NO: 1347925 - RNA, 18 nt, Human
gagcaagcccaaggcaca

SEQ ID NO: 1347926 - RNA, 18 nt, Human
gaguuggguuuucaguga

SEQ ID NO: 1347927 - RNA, 19 nt, Human
ggaaaacaaugugcagggu

SEQ ID NO: 1347928 - RNA, 21 nt, Human
ggaaaacaaugugcagggugg

SEQ ID NO: 1347929 - RNA, 22 nt, Human
ggccccgggcgcucccaacccc

SEQ ID NO: 1347930 - RNA, 23 nt, Human
gggagaggcuggucgagucccag

SEQ ID NO: 1347931 - RNA, 25 nt, Human
gggagaggcuggucgagucccaggc

SEQ ID NO: 1347932 - RNA, 19 nt, Human
gggccccgggcgcucccaa

SEQ ID NO: 1347933 - RNA, 19 nt, Human
uaagaguccagacuucaag

SEQ ID NO: 1347934 - RNA, 21 nt, Human
uaagcaaccaccuuucacccc

SEQ ID NO: 1347935 - RNA, 20 nt, Human
uaauagaaauaaagugcaca

SEQ ID NO: 1347936 - RNA, 21 nt, Human
uacaguuuauugucgcccugc

SEQ ID NO: 1347937 - RNA, 26 nt, Human
uaggaaagagccuuccugaaaaucag

SEQ ID NO: 1347938 - RNA, 19 nt, Human
ucacccauccguggaaaaa

SEQ ID NO: 1347939 - RNA, 21 nt, Human
ucccaaccccagggcgcuccc

SEQ ID NO: 1347940 - RNA, 24 nt, Human
uccccauugcuugcauuaccgccu

SEQ ID NO: 1347941 - RNA, 21 nt, Human
uccccuagaaguagagaugag

SEQ ID NO: 1347942 - RNA, 18 nt, Human
ucccugaugccaaaaagg

SEQ ID NO: 1347943 - RNA, 19 nt, Human
ucgcgggccccgggcgcuc

SEQ ID NO: 1347944 - RNA, 24 nt, Human
ucuacauuauggugaguuguauaa

SEQ ID NO: 1347945 - RNA, 20 nt, Human
ugacaccugagccaccuccu

SEQ ID NO: 1347946 - RNA, 24 nt, Human
ugaggaagccugggagaccuggug

SEQ ID NO: 1347947 - RNA, 23 nt, Human
ugcccuuggauccagcugugccu

SEQ ID NO: 1347948 - RNA, 21 nt, Human
ugcuugcauuaccgccugagc

SEQ ID NO: 1347949 - RNA, 20 nt, Human
uggaaaaacugucccugaug

SEQ ID NO: 1347950 - RNA, 23 nt, Human
uggaaaacaaugugcaggguggc

SEQ ID NO: 1347951 - RNA, 18 nt, Human
uggagccugaugacauca

SEQ ID NO: 1347952 - RNA, 22 nt, Human
uggggacugcugagcuagacuu

SEQ ID NO: 1347953 - RNA, 23 nt, Human
ugguguggggucuguggucuguu

SEQ ID NO: 1347954 - RNA, 21 nt, Human
uguuucauuccccuagaagua

SEQ ID NO: 1347955 - RNA, 22 nt, Human
uuggcccuaaauagaguuagaa

SEQ ID NO: 1347956 - RNA, 18 nt, Human
uuguauuucauuuuccuu

SEQ ID NO: 1347957 - RNA, 21 nt, Human
uuuuuuuuuuuuuuuugaagg

SEQ ID NO: 1347958 - RNA, 18 nt, Human
uuuuuuuuuuuuuuuuug

SEQ ID NO: 1347959 - RNA, 22 nt, Human
aaaaauacaggcaucacacaaa

SEQ ID NO: 1347960 - RNA, 19 nt, Human
aaagugcugggauuacagg

SEQ ID NO: 1347961 - RNA, 22 nt, Human
aaagugcugggauuacaggcgg

SEQ ID NO: 1347962 - RNA, 23 nt, Human
aaagugcugggauuacaggcgga

SEQ ID NO: 1347963 - RNA, 23 nt, Human
aaaucaacuuuaaauugaagaga

SEQ ID NO: 1347964 - RNA, 23 nt, Human
aacuacuuaaaacaaaaaacccc

SEQ ID NO: 1347965 - RNA, 18 nt, Human
aagaaaagcucagaagug

SEQ ID NO: 1347966 - RNA, 19 nt, Human
aagagaaagaggguaacga

SEQ ID NO: 1347967 - RNA, 25 nt, Human
aagcaauucucaugccucagccucc

SEQ ID NO: 1347968 - RNA, 21 nt, Human
aaguagccaggauuacaggca

SEQ ID NO: 1347969 - RNA, 24 nt, Human
aaguagccaggauuacaggcaugu

SEQ ID NO: 1347970 - RNA, 26 nt, Human
aaguagccaggauuacaggcauguau

SEQ ID NO: 1347971 - RNA, 18 nt, Human
aagugcugggauuacagg

SEQ ID NO: 1347972 - RNA, 19 nt, Human
aagugcugggauuacaggc

SEQ ID NO: 1347973 - RNA, 25 nt, Human
aagugcugggauuacaggcggaacc

SEQ ID NO: 1347974 - RNA, 18 nt, Human
aauguuaccaaagcugca

SEQ ID NO: 1347975 - RNA, 22 nt, Human
acacaauuacauacauucacac

SEQ ID NO: 1347976 - RNA, 22 nt, Human
accacguuggccaggcuggucu

SEQ ID NO: 1347977 - RNA, 19 nt, Human
acccaggcuggagugcagu

SEQ ID NO: 1347978 - RNA, 22 nt, Human
acccauuuugaaccugaggugc

SEQ ID NO: 1347979 - RNA, 19 nt, Human
accuggacuguggcugacu

SEQ ID NO: 1347980 - RNA, 19 nt, Human
acuggaaugcauggacaug

SEQ ID NO: 1347981 - RNA, 24 nt, Human
agcccugaugucuggaucuuuagu

SEQ ID NO: 1347982 - RNA, 18 nt, Human
aggugcaugugggccgca

SEQ ID NO: 1347983 - RNA, 23 nt, Human
auauauuaaugcacacacagaga

SEQ ID NO: 1347984 - RNA, 21 nt, Human
auauuaaugcacacacagaga

SEQ ID NO: 1347985 - RNA, 22 nt, Human
augaauuuuugcauaggcagag

SEQ ID NO: 1347986 - RNA, 22 nt, Human
augccucagccucccaaguagc

SEQ ID NO: 1347987 - RNA, 20 nt, Human
auucauuuucccagacuucu

SEQ ID NO: 1347988 - RNA, 22 nt, Human
auuuuuguauuuuuaguagaga

SEQ ID NO: 1347989 - RNA, 24 nt, Human
auuuuuguauuuuuaguagagaca

SEQ ID NO: 1347990 - RNA, 26 nt, Human
caaagugcugggauuacaggcggaac

SEQ ID NO: 1347991 - RNA, 20 nt, Human
caaccuccaccucccagguu

SEQ ID NO: 1347992 - RNA, 23 nt, Human
caaccuccaccucccagguucaa

SEQ ID NO: 1347993 - RNA, 19 nt, Human
caagaaaagcucagaagug

SEQ ID NO: 1347994 - RNA, 23 nt, Human
caagaaucuaaacacuuuccagg

SEQ ID NO: 1347995 - RNA, 22 nt, Human
caagagauccaccugccuggac

SEQ ID NO: 1347996 - RNA, 21 nt, Human
cacacagcugcuaugcuccca

SEQ ID NO: 1347997 - RNA, 22 nt, Human
cacacagcugcuaugcucccaa

SEQ ID NO: 1347998 - RNA, 20 nt, Human
caccacguuggccaggcugg

SEQ ID NO: 1347999 - RNA, 21 nt, Human
caccacguuggccaggcuggu

SEQ ID NO: 1348000 - RNA, 22 nt, Human
caccacguuggccaggcugguc

SEQ ID NO: 1348001 - RNA, 24 nt, Human
caccacguuggccaggcuggucuu

SEQ ID NO: 1348002 - RNA, 24 nt, Human
caccgaaagaugaauuuuugcaua

SEQ ID NO: 1348003 - RNA, 23 nt, Human
caccugccuggaccucccaaagu

SEQ ID NO: 1348004 - RNA, 23 nt, Human
cacguuggccaggcuggucuuga

SEQ ID NO: 1348005 - RNA, 21 nt, Human
cacugcaaccuccaccuccca

SEQ ID NO: 1348006 - RNA, 21 nt, Human
cagaaagcacacgugcagggc

SEQ ID NO: 1348007 - RNA, 21 nt, Human
caggacaccagugccccugag

SEQ ID NO: 1348008 - RNA, 23 nt, Human
caggacaccagugccccugaggg

SEQ ID NO: 1348009 - RNA, 21 nt, Human
caggauuacaggcauguauca

SEQ ID NO: 1348010 - RNA, 24 nt, Human
caguguuucaccacguuggccagg

SEQ ID NO: 1348011 - RNA, 19 nt, Human
caucacacccagcucauuu

SEQ ID NO: 1348012 - RNA, 19 nt, Human
ccaaagugcugggauuaca

SEQ ID NO: 1348013 - RNA, 22 nt, Human
ccaaagugcugggauuacaggc

SEQ ID NO: 1348014 - RNA, 23 nt, Human
ccaaagugcugggauuacaggcg

SEQ ID NO: 1348015 - RNA, 24 nt, Human
ccaaguagccaggauuacaggcau

SEQ ID NO: 1348016 - RNA, 27 nt, Human
ccaccucccagguucaagcaauucuuu

SEQ ID NO: 1348017 - RNA, 24 nt, Human
cccaaguagccaggauuacaggca

SEQ ID NO: 1348018 - RNA, 20 nt, Human
cccacacacaauuacauaca

SEQ ID NO: 1348019 - RNA, 23 nt, Human
cccagguucaagcaauucucaug

SEQ ID NO: 1348020 - RNA, 22 nt, Human
ccccugagggcucauauggcuc

SEQ ID NO: 1348021 - RNA, 20 nt, Human
ccgcugugcccagcccugau

SEQ ID NO: 1348022 - RNA, 23 nt, Human
ccgcugugcccagcccugauguc

SEQ ID NO: 1348023 - RNA, 22 nt, Human
ccucccagguucaagcaauucu

SEQ ID NO: 1348024 - RNA, 24 nt, Human
ccuccuggucucaagagauccacc

SEQ ID NO: 1348025 - RNA, 21 nt, Human
ccugcagggccgcgucgccag

SEQ ID NO: 1348026 - RNA, 21 nt, Human
ccuggucucaagagauccacc

SEQ ID NO: 1348027 - RNA, 21 nt, Human
cuaaacacuuuccagguccca

SEQ ID NO: 1348028 - RNA, 24 nt, Human
cucacugcaaccuccaccucccag

SEQ ID NO: 1348029 - RNA, 25 nt, Human
cucaugccucagccucccaaguagc

SEQ ID NO: 1348030 - RNA, 24 nt, Human
cugcaaccuccaccucccagguuc

SEQ ID NO: 1348031 - RNA, 21 nt, Human
cugccagaagacacccauuuu

SEQ ID NO: 1348032 - RNA, 21 nt, Human
cuggaccucccaaagugcugg

SEQ ID NO: 1348033 - RNA, 21 nt, Human
cuggucuugaccuccuggucu

SEQ ID NO: 1348034 - RNA, 21 nt, Human
cuugcucagucacccaggcug

SEQ ID NO: 1348035 - RNA, 22 nt, Human
gauccaccugccuggaccuccc

SEQ ID NO: 1348036 - RNA, 20 nt, Human
gauuacaggcggaaccgcug

SEQ ID NO: 1348037 - RNA, 19 nt, Human
gcaggaucuagaauaggua

SEQ ID NO: 1348038 - RNA, 21 nt, Human
gccuggaccucccaaagugcu

SEQ ID NO: 1348039 - RNA, 24 nt, Human
uacaggcauguaucaucacaccca

SEQ ID NO: 1348040 - RNA, 23 nt, Human
uacauacauucacacagcugcua

SEQ ID NO: 1348041 - RNA, 18 nt, Human
uagcuaaaaauacaggca

SEQ ID NO: 1348042 - RNA, 24 nt, Human
uaguagagacaguguuucaccacg

SEQ ID NO: 1348043 - RNA, 21 nt, Human
uaucaagaaucuaaacacuuu

SEQ ID NO: 1348044 - RNA, 21 nt, Human
ucacccaggcuggagugcagu

SEQ ID NO: 1348045 - RNA, 24 nt, Human
ucacugcaaccuccaccucccagg

SEQ ID NO: 1348046 - RNA, 25 nt, Human
ucacugcaaccuccaccucccaggu

SEQ ID NO: 1348047 - RNA, 27 nt, Human
ucacugcaaccuccaccucccagguuc

SEQ ID NO: 1348048 - RNA, 20 nt, Human
ucagccucccaaguagccag

SEQ ID NO: 1348049 - RNA, 21 nt, Human
ucagccucccaaguagccagg

SEQ ID NO: 1348050 - RNA, 25 nt, Human
ucagcucacugcaaccuccaccucc

SEQ ID NO: 1348051 - RNA, 24 nt, Human
ucagucacccaggcuggagugcag

SEQ ID NO: 1348052 - RNA, 19 nt, Human
ucauuuuuuucuuuucuuu

SEQ ID NO: 1348053 - RNA, 24 nt, Human
ucccaaagugcugggauuacaggc

SEQ ID NO: 1348054 - RNA, 24 nt, Human
ucccaaguagccaggauuacaggc

SEQ ID NO: 1348055 - RNA, 21 nt, Human
ucccagguucaagcaauucuc

SEQ ID NO: 1348056 - RNA, 24 nt, Human
ucccagguucaagcaauucucaug

SEQ ID NO: 1348057 - RNA, 24 nt, Human
ucgcaugagcucagcucacugcaa

SEQ ID NO: 1348058 - RNA, 21 nt, Human
ucuaaacacuuuccagguccc

SEQ ID NO: 1348059 - RNA, 23 nt, Human
ucuugcucagucacccaggcugg

SEQ ID NO: 1348060 - RNA, 24 nt, Human
ucuugcucagucacccaggcugga

SEQ ID NO: 1348061 - RNA, 24 nt, Human
ugaggugcaugugggccgcaguga

SEQ ID NO: 1348062 - RNA, 22 nt, Human
ugcaggacaccagugccccuga

SEQ ID NO: 1348063 - RNA, 23 nt, Human
ugccucagccucccaaguagcca

SEQ ID NO: 1348064 - RNA, 24 nt, Human
ugccucagccucccaaguagccag

SEQ ID NO: 1348065 - RNA, 24 nt, Human
ugcucagucacccaggcuggagug

SEQ ID NO: 1348066 - RNA, 19 nt, Human
ugcugggauuacaggcgga

SEQ ID NO: 1348067 - RNA, 19 nt, Human
uggacuguggcugacuagu

SEQ ID NO: 1348068 - RNA, 19 nt, Human
uggagugcagucgcaugag

SEQ ID NO: 1348069 - RNA, 24 nt, Human
uggcaagaaaagcucagaaguguu

SEQ ID NO: 1348070 - RNA, 24 nt, Human
uggccaggcuggucuugaccuccu

SEQ ID NO: 1348071 - RNA, 18 nt, Human
ugggauuacaggcggaac

SEQ ID NO: 1348072 - RNA, 20 nt, Human
ugggauuacaggcggaaccg

SEQ ID NO: 1348073 - RNA, 20 nt, Human
ugggauuacaggcggaaccg

SEQ ID NO: 1348074 - RNA, 21 nt, Human
ugggauuacaggcggaaccgc

SEQ ID NO: 1348075 - RNA, 23 nt, Human
ugggauuacaggcggaaccgcug

SEQ ID NO: 1348076 - RNA, 20 nt, Human
ugguagguagcuaguguugc

SEQ ID NO: 1348077 - RNA, 24 nt, Human
uucaaaaauucauuuucccagacu

SEQ ID NO: 1348078 - RNA, 19 nt, Human
uuccaggucccaggcaacc

SEQ ID NO: 1348079 - RNA, 18 nt, Human
uugaucucagcaaaagua

SEQ ID NO: 1348080 - RNA, 23 nt, Human
uugaucucagcaaaaguauagaa

SEQ ID NO: 1348081 - RNA, 24 nt, Human
uugcucagucacccaggcuggagu

SEQ ID NO: 1348082 - RNA, 18 nt, Human
uugcuggaaccuggacug

SEQ ID NO: 1348083 - RNA, 24 nt, Human
uuggccaggcuggucuugaccucc

SEQ ID NO: 1348084 - RNA, 21 nt, Human
uuucaccacguuggccaggcu

SEQ ID NO: 1348085 - RNA, 24 nt, Human
uuuuuaguagagacaguguuucac

SEQ ID NO: 1348086 - RNA, 20 nt, Human
uuuuuguauuuuuaguagag

SEQ ID NO: 1348087 - RNA, 19 nt, Human
aaguaauucuggagagcug

SEQ ID NO: 1348088 - RNA, 19 nt, Human
agaagcugaauuuauaugg

SEQ ID NO: 1348089 - RNA, 19 nt, Human
agguggaguugcaagugag

SEQ ID NO: 1348090 - RNA, 22 nt, Human
augaagagaggaauuaccuaca

SEQ ID NO: 1348091 - RNA, 23 nt, Human
cagagccugagggagcccagggg

SEQ ID NO: 1348092 - RNA, 22 nt, Human
cagaugccagaggagaagcuga

SEQ ID NO: 1348093 - RNA, 22 nt, Human
ccagagccugagggagcccagg

SEQ ID NO: 1348094 - RNA, 18 nt, Human
ccaggggacuccugugcu

SEQ ID NO: 1348095 - RNA, 25 nt, Human
ccugugcugcgauuuguuacauaga

SEQ ID NO: 1348096 - RNA, 24 nt, Human
uaagcauuugagcucaaaccuccu

SEQ ID NO: 1348097 - RNA, 21 nt, Human
uacucuuuccuugcuuugaga

SEQ ID NO: 1348098 - RNA, 19 nt, Human
uauguugccagcaguuuaa

SEQ ID NO: 1348099 - RNA, 20 nt, Human
uauguugccagcaguuuaag

SEQ ID NO: 1348100 - RNA, 27 nt, Human
ugccucauaggcagaaauucauugaau

SEQ ID NO: 1348101 - RNA, 21 nt, Human
uguugccagcaguuuaagcau

SEQ ID NO: 1348102 - RNA, 19 nt, Human
acgcccggccgggcauggg

SEQ ID NO: 1348103 - RNA, 19 nt, Human
agaggacaaagggggacag

SEQ ID NO: 1348104 - RNA, 19 nt, Human
aggacaaagggggacagag

SEQ ID NO: 1348105 - RNA, 20 nt, Human
aggcggagugggccccccgg

SEQ ID NO: 1348106 - RNA, 19 nt, Human
aguggcagcguagccgagg

SEQ ID NO: 1348107 - RNA, 19 nt, Human
auaaagccccaaaccacgc

SEQ ID NO: 1348108 - RNA, 20 nt, Human
caccagggcaccagccggcg

SEQ ID NO: 1348109 - RNA, 18 nt, Human
ccacuucuuaggaaaaac

SEQ ID NO: 1348110 - RNA, 18 nt, Human
ccccggauccggguuugc

SEQ ID NO: 1348111 - RNA, 18 nt, Human
cccggccuccuggagagc

SEQ ID NO: 1348112 - RNA, 26 nt, Human
cuccucccggauauaaagccccaaaa

SEQ ID NO: 1348113 - RNA, 19 nt, Human
cugcguggcaguagcccuc

SEQ ID NO: 1348114 - RNA, 18 nt, Human
gaaagaacagcagcucgc

SEQ ID NO: 1348115 - RNA, 18 nt, Human
gcccggccgggcaugggg

SEQ ID NO: 1348116 - RNA, 24 nt, Human
ggagagccugagauaaagaggaca

SEQ ID NO: 1348117 - RNA, 21 nt, Human
ggagugggccccccggccucc

SEQ ID NO: 1348118 - RNA, 19 nt, Human
ggauauaaagccccaaacc

SEQ ID NO: 1348119 - RNA, 25 nt, Human
ggcgccuucgaaagaacagcagcuc

SEQ ID NO: 1348120 - RNA, 23 nt, Human
uauaaagccccaaaccacgccac

SEQ ID NO: 1348121 - RNA, 19 nt, Human
uccggguuugcaaacgccc

SEQ ID NO: 1348122 - RNA, 21 nt, Human
uccuugcccaagggcgggagc

SEQ ID NO: 1348123 - RNA, 22 nt, Human
ucgaaagaacagcagcucgcga

SEQ ID NO: 1348124 - RNA, 22 nt, Human
ugcguggcaguagcccucaaac

SEQ ID NO: 1348125 - RNA, 24 nt, Human
uggccugggcuuccccuugagggc

SEQ ID NO: 1348126 - RNA, 22 nt, Human
ugggcuuccccuugagggcccg

SEQ ID NO: 1348127 - RNA, 23 nt, Human
uuugcaaacgccccaggauuugc

SEQ ID NO: 1348128 - RNA, 23 nt, Human
aaacauuucugacaucuuccucc

SEQ ID NO: 1348129 - RNA, 18 nt, Human
agccccaguagcaaagcu

SEQ ID NO: 1348130 - RNA, 24 nt, Human
aucuuccuccagcucagucugcca

SEQ ID NO: 1348131 - RNA, 18 nt, Human
auuucugacaucuuccuc

SEQ ID NO: 1348132 - RNA, 19 nt, Human
ccauccaaguugaugccaa

SEQ ID NO: 1348133 - RNA, 21 nt, Human
cccaccuuccuccauacagaa

SEQ ID NO: 1348134 - RNA, 25 nt, Human
cccaccuuccuccauacagaauuga

SEQ ID NO: 1348135 - RNA, 18 nt, Human
cccccuuaacagugaccc

SEQ ID NO: 1348136 - RNA, 22 nt, Human
ccuccagcucagucugccaugc

SEQ ID NO: 1348137 - RNA, 22 nt, Human
cggaauccucagccccaguagc

SEQ ID NO: 1348138 - RNA, 20 nt, Human
gcccccuuaacagugacccg

SEQ ID NO: 1348139 - RNA, 23 nt, Human
gcuuugggagauuauacaggucc

SEQ ID NO: 1348140 - RNA, 18 nt, Human
ggaaauguccacuccuuu

SEQ ID NO: 1348141 - RNA, 18 nt, Human
uacauuauuaccaaaccu

SEQ ID NO: 1348142 - RNA, 24 nt, Human
uaccugcauuuuuaaagacagcuu

SEQ ID NO: 1348143 - RNA, 24 nt, Human
ucacaugcuuaccugcauuuuuaa

SEQ ID NO: 1348144 - RNA, 19 nt, Human
uccuccagcucagucugcc

SEQ ID NO: 1348145 - RNA, 25 nt, Human
uccuuugggggugauuuuucuccuc

SEQ ID NO: 1348146 - RNA, 21 nt, Human
uuaccccaccuuccuccauac

SEQ ID NO: 1348147 - RNA, 18 nt, Human
uuuuuuuuuuuuuuuuug

SEQ ID NO: 1348148 - RNA, 20 nt, Human
uuuuuuuuuuuuuuuuugcc

SEQ ID NO: 1348149 - RNA, 19 nt, Human
aaacagcaacagaucccca

SEQ ID NO: 1348150 - RNA, 21 nt, Human
aaacagcaacagauccccaga

SEQ ID NO: 1348151 - RNA, 21 nt, Human
acagcaacagauccccagaac

SEQ ID NO: 1348152 - RNA, 22 nt, Human
acagcaacagauccccagaaca

SEQ ID NO: 1348153 - RNA, 20 nt, Human
accccgccgcuccagacaag

SEQ ID NO: 1348154 - RNA, 18 nt, Human
agaccccgccgcuccaga

SEQ ID NO: 1348155 - RNA, 25 nt, Human
agauccccagaacagaugacagccc

SEQ ID NO: 1348156 - RNA, 19 nt, Human
agcacucuccuccaggugu

SEQ ID NO: 1348157 - RNA, 20 nt, Human
cagcaacagauccccagaac

SEQ ID NO: 1348158 - RNA, 23 nt, Human
caggagccaaaugggccuuccag

SEQ ID NO: 1348159 - RNA, 24 nt, Human
caggugcuuccuauugggcugggc

SEQ ID NO: 1348160 - RNA, 24 nt, Human
ccagaacagaugacagcccuaaag

SEQ ID NO: 1348161 - RNA, 25 nt, Human
ccagaacagaugacagcccuaaaga

SEQ ID NO: 1348162 - RNA, 20 nt, Human
cccaagaaacagcaacagau

SEQ ID NO: 1348163 - RNA, 22 nt, Human
cccaagaaacagcaacagaucc

SEQ ID NO: 1348164 - RNA, 23 nt, Human
cccaagaaacagcaacagauccc

SEQ ID NO: 1348165 - RNA, 23 nt, Human
cccgagguguggaguguauucug

SEQ ID NO: 1348166 - RNA, 22 nt, Human
ccuccaggugugcaccagcucu

SEQ ID NO: 1348167 - RNA, 22 nt, Human
cguccgggcgccuccgcgguga

SEQ ID NO: 1348168 - RNA, 22 nt, Human
cuccgcggugagucgcgccgcc

SEQ ID NO: 1348169 - RNA, 25 nt, Human
cuccuccaggugugcaccagcuccc

SEQ ID NO: 1348170 - RNA, 21 nt, Human
cugggccucggcccgggcggc

SEQ ID NO: 1348171 - RNA, 20 nt, Human
cuugggcucagaccccgccg

SEQ ID NO: 1348172 - RNA, 22 nt, Human
gcccgaagccucaggagguccu

SEQ ID NO: 1348173 - RNA, 21 nt, Human
gcggcggcggcggcuuccgac

SEQ ID NO: 1348174 - RNA, 23 nt, Human
gcuggcggcggcggcggcuuccg

SEQ ID NO: 1348175 - RNA, 27 nt, Human
gcuggcggcggcggcggcuuccgacuu

SEQ ID NO: 1348176 - RNA, 21 nt, Human
ggagguccuccugcauaagag

SEQ ID NO: 1348177 - RNA, 22 nt, Human
gggacgcuggcggcggcggcgg

SEQ ID NO: 1348178 - RNA, 21 nt, Human
uagaaagaguguggaucaggu

SEQ ID NO: 1348179 - RNA, 21 nt, Human
uauuauggagucccgaggugu

SEQ ID NO: 1348180 - RNA, 25 nt, Human
uauuauggagucccgagguguggag

SEQ ID NO: 1348181 - RNA, 22 nt, Human
ucagaccccgccgcuccagaca

SEQ ID NO: 1348182 - RNA, 23 nt, Human
uccccagacgggagacagacccu

SEQ ID NO: 1348183 - RNA, 21 nt, Human
ucccuggggcuagaaagagug

SEQ ID NO: 1348184 - RNA, 24 nt, Human
ucccuggggcuagaaagagugugg

SEQ ID NO: 1348185 - RNA, 21 nt, Human
ucgcggcuggucccggggcgg

SEQ ID NO: 1348186 - RNA, 19 nt, Human
ucuccgucccgagaagaag

SEQ ID NO: 1348187 - RNA, 18 nt, Human
ugagcaucccuggggcua

SEQ ID NO: 1348188 - RNA, 21 nt, Human
uggcggcggcggcggcuuccg

SEQ ID NO: 1348189 - RNA, 24 nt, Human
uggcggcggcggcggcuuccgacu

SEQ ID NO: 1348190 - RNA, 22 nt, Human
ugggcccaagaaacagcaacag

SEQ ID NO: 1348191 - RNA, 21 nt, Human
ugggcugggccucggcccggg

SEQ ID NO: 1348192 - RNA, 18 nt, Human
ugggucccugccuggugc

SEQ ID NO: 1348193 - RNA, 21 nt, Human
uucagcuccccagacgggaga

SEQ ID NO: 1348194 - RNA, 24 nt, Human
aaagugcugggauuacaggcguga

SEQ ID NO: 1348195 - RNA, 19 nt, Human
aagugcugggauuacaggc

SEQ ID NO: 1348196 - RNA, 19 nt, Human
aagugcugggauuacaggc

SEQ ID NO: 1348197 - RNA, 26 nt, Human
aagugcugggauuacaggcgugagcc

SEQ ID NO: 1348198 - RNA, 20 nt, Human
aaugcaguggcgcaaucucg

SEQ ID NO: 1348199 - RNA, 24 nt, Human
aaugcaguggcgcaaucucggcuc

SEQ ID NO: 1348200 - RNA, 21 nt, Human
acaggcaccugccaccaugcc

SEQ ID NO: 1348201 - RNA, 25 nt, Human
accucccggguuuaugccauuuucc

SEQ ID NO: 1348202 - RNA, 19 nt, Human
accucgugauccgcccuuc

SEQ ID NO: 1348203 - RNA, 18 nt, Human
acggggucucaccguguu

SEQ ID NO: 1348204 - RNA, 20 nt, Human
acggggucucaccguguuag

SEQ ID NO: 1348205 - RNA, 18 nt, Human
aguagcugggacuacagg

SEQ ID NO: 1348206 - RNA, 19 nt, Human
aguagcugggacuacaggc

SEQ ID NO: 1348207 - RNA, 23 nt, Human
aguagcugggacuacaggcaccu

SEQ ID NO: 1348208 - RNA, 24 nt, Human
caaagugcugggauuacaggcgug

SEQ ID NO: 1348209 - RNA, 18 nt, Human
caccguguuagccaggau

SEQ ID NO: 1348210 - RNA, 24 nt, Human
caccguguuagccaggauggucuc

SEQ ID NO: 1348211 - RNA, 22 nt, Human
caggauggucuccaucuccuga

SEQ ID NO: 1348212 - RNA, 22 nt, Human
ccaaagugcugggauuacaggc

SEQ ID NO: 1348213 - RNA, 22 nt, Human
ccaaagugcugggauuacaggc

SEQ ID NO: 1348214 - RNA, 24 nt, Human
ccaaagugcugggauuacaggcgu

SEQ ID NO: 1348215 - RNA, 23 nt, Human
cccggguuuaugccauuuuccug

SEQ ID NO: 1348216 - RNA, 18 nt, Human
ccgcccuucucagccucc

SEQ ID NO: 1348217 - RNA, 21 nt, Human
ccgcgcccagccuacuuuuuc

SEQ ID NO: 1348218 - RNA, 21 nt, Human
ccucgugauccgcccuucuca

SEQ ID NO: 1348219 - RNA, 24 nt, Human
cgugauccgcccuucucagccucc

SEQ ID NO: 1348220 - RNA, 25 nt, Human
cuagaagacaaguuaauauccaggc

SEQ ID NO: 1348221 - RNA, 24 nt, Human
cucacugcaagcuccaccucccgg

SEQ ID NO: 1348222 - RNA, 22 nt, Human
cuccugaccucgugauccgccc

SEQ ID NO: 1348223 - RNA, 23 nt, Human
cucgugauccgcccuucucagcc

SEQ ID NO: 1348224 - RNA, 24 nt, Human
cugcaagcuccaccucccggguuu

SEQ ID NO: 1348225 - RNA, 21 nt, Human
cugcacuggcuccaguuaugu

SEQ ID NO: 1348226 - RNA, 22 nt, Human
gaccucgugauccgcccuucuc

SEQ ID NO: 1348227 - RNA, 24 nt, Human
gaccucgugauccgcccuucucag

SEQ ID NO: 1348228 - RNA, 22 nt, Human
gacuacaggcaccugccaccau

SEQ ID NO: 1348229 - RNA, 18 nt, Human
gauuacaggcgugagcca

SEQ ID NO: 1348230 - RNA, 22 nt, Human
gauuacaggcgugagccaccgc

SEQ ID NO: 1348231 - RNA, 22 nt, Human
gauuacaggcgugagccaccgc

SEQ ID NO: 1348232 - RNA, 23 nt, Human
gcccggcuaauuuuuuguauuuu

SEQ ID NO: 1348233 - RNA, 19 nt, Human
gcccuucucagccucccaa

SEQ ID NO: 1348234 - RNA, 24 nt, Human
gccgaguagcugggacuacaggca

SEQ ID NO: 1348235 - RNA, 19 nt, Human
gcuggaaugcaguggcgca

SEQ ID NO: 1348236 - RNA, 22 nt, Human
gggucucaccguguuagccagg

SEQ ID NO: 1348237 - RNA, 20 nt, Human
ggucuccaucuccugaccuc

SEQ ID NO: 1348238 - RNA, 24 nt, Human
gugauccgcccuucucagccuccc

SEQ ID NO: 1348239 - RNA, 24 nt, Human
uaauuuuuuguauuuuuagcggag

SEQ ID NO: 1348240 - RNA, 25 nt, Human
uaauuuuuuguauuuuuagcggaga

SEQ ID NO: 1348241 - RNA, 23 nt, Human
uacaggcaccugccaccaugccc

SEQ ID NO: 1348242 - RNA, 24 nt, Human
uacaggcgugagccaccgcgccca

SEQ ID NO: 1348243 - RNA, 22 nt, Human
uagaagacaaguuaauauccag

SEQ ID NO: 1348244 - RNA, 24 nt, Human
uagccaggauggucuccaucuccu

SEQ ID NO: 1348245 - RNA, 24 nt, Human
uagcggagacggggucucaccgug

SEQ ID NO: 1348246 - RNA, 26 nt, Human
uagcggagacggggucucaccguguu

SEQ ID NO: 1348247 - RNA, 19 nt, Human
ucacccaggcuggaaugca

SEQ ID NO: 1348248 - RNA, 24 nt, Human
ucaccguguuagccaggauggucu

SEQ ID NO: 1348249 - RNA, 24 nt, Human
ucacugcaagcuccaccucccggg

SEQ ID NO: 1348250 - RNA, 24 nt, Human
ucccaaagugcugggauuacaggc

SEQ ID NO: 1348251 - RNA, 24 nt, Human
ucccggguuuaugccauuuuccug

SEQ ID NO: 1348252 - RNA, 24 nt, Human
ucucgcucagucacccaggcugga

SEQ ID NO: 1348253 - RNA, 18 nt, Human
ucuuuuuuuuuuuuuuuu

SEQ ID NO: 1348254 - RNA, 18 nt, Human
ugagacagagucucgcuc

SEQ ID NO: 1348255 - RNA, 22 nt, Human
ugauccgcccuucucagccucc

SEQ ID NO: 1348256 - RNA, 22 nt, Human
ugcaguggcgcaaucucggcuc

SEQ ID NO: 1348257 - RNA, 23 nt, Human
ugcaguggcgcaaucucggcuca

SEQ ID NO: 1348258 - RNA, 25 nt, Human
ugcccggcuaauuuuuuguauuuuu

SEQ ID NO: 1348259 - RNA, 24 nt, Human
ugccgaguagcugggacuacaggc

SEQ ID NO: 1348260 - RNA, 24 nt, Human
ugcugggauuacaggcgugagcca

SEQ ID NO: 1348261 - RNA, 19 nt, Human
uggaaugcaguggcgcaau

SEQ ID NO: 1348262 - RNA, 24 nt, Human
uggaaugcaguggcgcaaucucgg

SEQ ID NO: 1348263 - RNA, 21 nt, Human
ugggacuacaggcaccugcca

SEQ ID NO: 1348264 - RNA, 22 nt, Human
ugggacuacaggcaccugccac

SEQ ID NO: 1348265 - RNA, 24 nt, Human
ugggacuacaggcaccugccacca

SEQ ID NO: 1348266 - RNA, 25 nt, Human
ugggacuacaggcaccugccaccau

SEQ ID NO: 1348267 - RNA, 18 nt, Human
ugggauuacaggcgugag

SEQ ID NO: 1348268 - RNA, 19 nt, Human
ugggauuacaggcgugagc

SEQ ID NO: 1348269 - RNA, 21 nt, Human
ugggauuacaggcgugagcca

SEQ ID NO: 1348270 - RNA, 22 nt, Human
ugggauuacaggcgugagccac

SEQ ID NO: 1348271 - RNA, 23 nt, Human
ugggauuacaggcgugagccacc

SEQ ID NO: 1348272 - RNA, 24 nt, Human
ugggauuacaggcgugagccaccg

SEQ ID NO: 1348273 - RNA, 24 nt, Human
uuagcggagacggggucucaccgu

SEQ ID NO: 1348274 - RNA, 21 nt, Human
uucucagccucccaaagugcu

SEQ ID NO: 1348275 - RNA, 23 nt, Human
uuguauuuuuagcggagacgggg

SEQ ID NO: 1348276 - RNA, 21 nt, Human
uuuuuguauuuuuagcggaga

SEQ ID NO: 1348277 - RNA, 24 nt, Human
uuuuuuguauuuuuagcggagacg

SEQ ID NO: 1348278 - RNA, 20 nt, Human
uuuuuuuuuuugagacagag

SEQ ID NO: 1348279 - RNA, 25 nt, Human
uuuuuuuuuuuugagacagagucuc

SEQ ID NO: 1348280 - RNA, 18 nt, Human
uuuuuuuuuuuuuuuuug

SEQ ID NO: 1348281 - RNA, 24 nt, Human
uuuuuuuuuuuuuuuuuucuuuuu

SEQ ID NO: 1348282 - RNA, 21 nt, Human
aacuuuguggggugucugugg

SEQ ID NO: 1348283 - RNA, 24 nt, Human
agaacucagugagaccaagaaccc

SEQ ID NO: 1348284 - RNA, 19 nt, Human
agugagaccaagaacccac

SEQ ID NO: 1348285 - RNA, 21 nt, Human
cagugagaccaagaacccacc

SEQ ID NO: 1348286 - RNA, 19 nt, Human
cucagugagaccaagaacc

SEQ ID NO: 1348287 - RNA, 19 nt, Human
ggccgggcaggcaggcagg

SEQ ID NO: 1348288 - RNA, 22 nt, Human
gggugucuguggcuugcuacag

SEQ ID NO: 1348289 - RNA, 21 nt, Human
ggugucuguggcuugcuacag

SEQ ID NO: 1348290 - RNA, 21 nt, Human
guggcuugcuacagugacauc

SEQ ID NO: 1348291 - RNA, 18 nt, Human
ugagaccaagaacccacc

SEQ ID NO: 1348292 - RNA, 19 nt, Human
ugagaccaagaacccacca

SEQ ID NO: 1348293 - RNA, 24 nt, Human
aggagagggggcuuugugaggcuu

SEQ ID NO: 1348294 - RNA, 19 nt, Human
ugaacuaggagagggggcu

SEQ ID NO: 1348295 - RNA, 18 nt, Human
ugaggcuuugccacagug

SEQ ID NO: 1348296 - RNA, 24 nt, Human
uuuauucucagcauaugcuuguga

SEQ ID NO: 1348297 - RNA, 20 nt, Human
uuuuuuuuuuuuuuuuccau

SEQ ID NO: 1348298 - RNA, 23 nt, Human
uuuuuuuuuuuuuuuuuuuccau

SEQ ID NO: 1348299 - RNA, 24 nt, Human
uuuuuuuuuuuuuuuuuuuccaug

SEQ ID NO: 1348300 - RNA, 19 nt, Human
aaaagacaagcgacaaaaa

SEQ ID NO: 1348301 - RNA, 22 nt, Human
aagucuuagaaauagugaagcu

SEQ ID NO: 1348302 - RNA, 18 nt, Human
aauguggaauggaugacc

SEQ ID NO: 1348303 - RNA, 18 nt, Human
acuuagcccgguaucugg

SEQ ID NO: 1348304 - RNA, 21 nt, Human
agacaagcgacaaaaagagca

SEQ ID NO: 1348305 - RNA, 26 nt, Human
agacaagcgacaaaaagaggggaccc

SEQ ID NO: 1348306 - RNA, 22 nt, Human
agcaccccaugcucuucuauca

SEQ ID NO: 1348307 - RNA, 21 nt, Human
agcgacaaaaagagcaccgaa

SEQ ID NO: 1348308 - RNA, 19 nt, Human
augacccuccaauauuucc

SEQ ID NO: 1348309 - RNA, 20 nt, Human
caaaaagagcaccgaaggca

SEQ ID NO: 1348310 - RNA, 21 nt, Human
caaaaagagcaccgaaggcac

SEQ ID NO: 1348311 - RNA, 19 nt, Human
caacccugaaaagaauguc

SEQ ID NO: 1348312 - RNA, 22 nt, Human
caacuugcucuuuuaaugugga

SEQ ID NO: 1348313 - RNA, 28 nt, Human
caagcgacaaaaagagcaccgaaggcac

SEQ ID NO: 1348314 - RNA, 24 nt, Human
caccccaugcucuucuaucaggga

SEQ ID NO: 1348315 - RNA, 18 nt, Human
cacugccucauucccaga

SEQ ID NO: 1348316 - RNA, 20 nt, Human
cagagcaccccaugcucuuc

SEQ ID NO: 1348317 - RNA, 22 nt, Human
cagcugcccuucauccucuguc

SEQ ID NO: 1348318 - RNA, 27 nt, Human
cagcugcccuucauccucugucgucuc

SEQ ID NO: 1348319 - RNA, 22 nt, Human
cagcugcuguaugccuugagaa

SEQ ID NO: 1348320 - RNA, 20 nt, Human
cagggcgcauccucugggcc

SEQ ID NO: 1348321 - RNA, 25 nt, Human
ccacgccguuucuuccuuucuaucc

SEQ ID NO: 1348322 - RNA, 21 nt, Human
cccgucaguucccugggccuc

SEQ ID NO: 1348323 - RNA, 19 nt, Human
ccuacugucaguccuugaa

SEQ ID NO: 1348324 - RNA, 26 nt, Human
ccuagcuacgguuccugcuuguuuuc

SEQ ID NO: 1348325 - RNA, 24 nt, Human
ccuccgcggcugccucugccaccu

SEQ ID NO: 1348326 - RNA, 18 nt, Human
ccuuucuauccgcuccaa

SEQ ID NO: 1348327 - RNA, 22 nt, Human
cggcugccucugccaccugcuc

SEQ ID NO: 1348328 - RNA, 23 nt, Human
cuccaauauuuccccagagcacc

SEQ ID NO: 1348329 - RNA, 20 nt, Human
cuccccauucucucuccacc

SEQ ID NO: 1348330 - RNA, 23 nt, Human
cuccuccgcggcugccucugcca

SEQ ID NO: 1348331 - RNA, 18 nt, Human
cugccucugccaccugcu

SEQ ID NO: 1348332 - RNA, 20 nt, Human
cugccucugccaccugcucc

SEQ ID NO: 1348333 - RNA, 19 nt, Human
cuuagcccgguaucuggca

SEQ ID NO: 1348334 - RNA, 23 nt, Human
cuuagcccgguaucuggcaugug

SEQ ID NO: 1348335 - RNA, 21 nt, Human
cuuccgggacugccagggcgc

SEQ ID NO: 1348336 - RNA, 23 nt, Human
cuugagaaugggcaaaagacaag

SEQ ID NO: 1348337 - RNA, 19 nt, Human
gcauguggcaugcccagua

SEQ ID NO: 1348338 - RNA, 18 nt, Human
gcuuugguccuucucccg

SEQ ID NO: 1348339 - RNA, 20 nt, Human
gggcaaaagacaagcgacaa

SEQ ID NO: 1348340 - RNA, 20 nt, Human
uaagugaauccaugucucuu

SEQ ID NO: 1348341 - RNA, 18 nt, Human
uaccacugaaaauucaac

SEQ ID NO: 1348342 - RNA, 19 nt, Human
ucaacccugaaaagaaugu

SEQ ID NO: 1348343 - RNA, 19 nt, Human
uccgcccagauugcuuugg

SEQ ID NO: 1348344 - RNA, 18 nt, Human
uccucugucgucucccca

SEQ ID NO: 1348345 - RNA, 19 nt, Human
ucuauccgcuccaauguca

SEQ ID NO: 1348346 - RNA, 26 nt, Human
ucucuugcuugccgcuauuugcccac

SEQ ID NO: 1348347 - RNA, 18 nt, Human
ucugccaccugcuccgcc

SEQ ID NO: 1348348 - RNA, 24 nt, Human
ugaaaagaaugucuucgguugugg

SEQ ID NO: 1348349 - RNA, 21 nt, Human
ugaaaauucaacccugaaaag

SEQ ID NO: 1348350 - RNA, 22 nt, Human
ugagaaugggcaaaagacaagc

SEQ ID NO: 1348351 - RNA, 24 nt, Human
ugccagauacuuagcccgguaucu

SEQ ID NO: 1348352 - RNA, 20 nt, Human
ugccucugccaccugcuccu

SEQ ID NO: 1348353 - RNA, 20 nt, Human
uggaauggaugacccuccaa

SEQ ID NO: 1348354 - RNA, 21 nt, Human
uggaauggaugacccuccaau

SEQ ID NO: 1348355 - RNA, 23 nt, Human
ugggcaaaagacaagcgacaaaa

SEQ ID NO: 1348356 - RNA, 19 nt, Human
uggugacaagauuuagguc

SEQ ID NO: 1348357 - RNA, 22 nt, Human
uguggaauggaugacccuccaa

SEQ ID NO: 1348358 - RNA, 20 nt, Human
uuagaaauagugaagcuccu

SEQ ID NO: 1348359 - RNA, 23 nt, Human
uucauaauggauaccacugaaaa

SEQ ID NO: 1348360 - RNA, 21 nt, Human
uuccuuucuauccgcuccaau

SEQ ID NO: 1348361 - RNA, 24 nt, Human
uuggugacaagauuuaggucuuuu

SEQ ID NO: 1348362 - RNA, 18 nt, Human
uugugggcccauaaaguc

SEQ ID NO: 1348363 - RNA, 22 nt, Human
aaaacuaaacaaaaacaaaaau

SEQ ID NO: 1348364 - RNA, 25 nt, Human
aaacaaaaacaaaaauacccagaag

SEQ ID NO: 1348365 - RNA, 24 nt, Human
aaacaaaaacaaaaauacccagag

SEQ ID NO: 1348366 - RNA, 19 nt, Human
aaacaaaaauacccagagc

SEQ ID NO: 1348367 - RNA, 20 nt, Human
aaacaaaaauacccagagca

SEQ ID NO: 1348368 - RNA, 19 nt, Human
aaaccauaagaaaaacaca

SEQ ID NO: 1348369 - RNA, 19 nt, Human
aaagaggaugggggucagg

SEQ ID NO: 1348370 - RNA, 23 nt, Human
aaagcugucccggcccucugccu

SEQ ID NO: 1348371 - RNA, 19 nt, Human
aaaggggagagcgagggcu

SEQ ID NO: 1348372 - RNA, 22 nt, Human
aacaaaaacaaaaauacccaga

SEQ ID NO: 1348373 - RNA, 24 nt, Human
aacacacacucauacacacacaca

SEQ ID NO: 1348374 - RNA, 20 nt, Human
aagagaauggcagccauaca

SEQ ID NO: 1348375 - RNA, 19 nt, Human
aagcaacagagaggucuuc

SEQ ID NO: 1348376 - RNA, 23 nt, Human
aagcagcaaguccugaagcccca

SEQ ID NO: 1348377 - RNA, 23 nt, Human
aagccccagauccagaaagcaac

SEQ ID NO: 1348378 - RNA, 18 nt, Human
aagugccuucugccaaca

SEQ ID NO: 1348379 - RNA, 23 nt, Human
acaaaaacaaaaauacccagagc

SEQ ID NO: 1348380 - RNA, 19 nt, Human
acaagcaguacacguuaag

SEQ ID NO: 1348381 - RNA, 27 nt, Human
acacacacacacacucacgcacacaca

SEQ ID NO: 1348382 - RNA, 27 nt, Human
acacacacacacucacgcacacacaca

SEQ ID NO: 1348383 - RNA, 19 nt, Human
acaugaaaucuuuuaagca

SEQ ID NO: 1348384 - RNA, 24 nt, Human
acucacgcacacacacaagcagua

SEQ ID NO: 1348385 - RNA, 21 nt, Human
agaagggaagggagaaaggga

SEQ ID NO: 1348386 - RNA, 18 nt, Human
agaccccugccucagucc

SEQ ID NO: 1348387 - RNA, 20 nt, Human
agagcagauggggagagggu

SEQ ID NO: 1348388 - RNA, 18 nt, Human
agaggaugggggucaggg

SEQ ID NO: 1348389 - RNA, 21 nt, Human
agagguaggaaaagaggaugg

SEQ ID NO: 1348390 - RNA, 26 nt, Human
agauccuacugaaggcaggggggagg

SEQ ID NO: 1348391 - RNA, 21 nt, Human
agccaggaacugugguuccca

SEQ ID NO: 1348392 - RNA, 22 nt, Human
agccccagauccagaaagcaac

SEQ ID NO: 1348393 - RNA, 19 nt, Human
aggcagccaggaacugugg

SEQ ID NO: 1348394 - RNA, 18 nt, Human
aggcaggggggaggcggg

SEQ ID NO: 1348395 - RNA, 18 nt, Human
aggcaggggggaggcggg

SEQ ID NO: 1348396 - RNA, 24 nt, Human
aggggggaggcgggaagggaugug

SEQ ID NO: 1348397 - RNA, 22 nt, Human
agguaggaaaagaggauggggg

SEQ ID NO: 1348398 - RNA, 24 nt, Human
caaaaacaaaaauacccagagcag

SEQ ID NO: 1348399 - RNA, 23 nt, Human
caaaggcggaccacgagccuccu

SEQ ID NO: 1348400 - RNA, 23 nt, Human
caaaggugugcacacuucuccca

SEQ ID NO: 1348401 - RNA, 18 nt, Human
caacucagggcgaagaga

SEQ ID NO: 1348402 - RNA, 24 nt, Human
cacacacacucacgcacacacaca

SEQ ID NO: 1348403 - RNA, 22 nt, Human
cacacacucauacacacacaca

SEQ ID NO: 1348404 - RNA, 29 nt, Human
cacacucacgcacacacacaagcaguaca

SEQ ID NO: 1348405 - RNA, 21 nt, Human
cagcagaccgggagaagggaa

SEQ ID NO: 1348406 - RNA, 21 nt, Human
cagccccucggcgcggcgccc

SEQ ID NO: 1348407 - RNA, 23 nt, Human
cagccccucggcgcggcgccccu

SEQ ID NO: 1348408 - RNA, 21 nt, Human
ccacuccgcagccccucggcg

SEQ ID NO: 1348409 - RNA, 24 nt, Human
ccagagaccccugccucaguccgg

SEQ ID NO: 1348410 - RNA, 18 nt, Human
ccagagacccucagccca

SEQ ID NO: 1348411 - RNA, 18 nt, Human
ccagagcagauggggaga

SEQ ID NO: 1348412 - RNA, 24 nt, Human
ccaggcaaaggcggaccacgagcc

SEQ ID NO: 1348413 - RNA, 20 nt, Human
ccagggugccggcgggggca

SEQ ID NO: 1348414 - RNA, 23 nt, Human
cccacacaugaaaucuuuuaagc

SEQ ID NO: 1348415 - RNA, 23 nt, Human
ccccaaaugacuuauugagcaau

SEQ ID NO: 1348416 - RNA, 19 nt, Human
ccccacuccgcagccccuc

SEQ ID NO: 1348417 - RNA, 21 nt, Human
ccccagagaccccugccucag

SEQ ID NO: 1348418 - RNA, 21 nt, Human
ccccagagaccccugccucag

SEQ ID NO: 1348419 - RNA, 22 nt, Human
ccccagauccagaaagcaacuc

SEQ ID NO: 1348420 - RNA, 24 nt, Human
cccccacuccgcagccccucggcg

SEQ ID NO: 1348421 - RNA, 25 nt, Human
cccccagagaccccugccucagucc

SEQ ID NO: 1348422 - RNA, 21 nt, Human
ccccugccucaguccgggguu

SEQ ID NO: 1348423 - RNA, 21 nt, Human
ccuccucgcccccagagaccc

SEQ ID NO: 1348424 - RNA, 26 nt, Human
ccucuggccggccugucugcuggccu

SEQ ID NO: 1348425 - RNA, 25 nt, Human
cuaaaacuaaacaaaaacaaaaaua

SEQ ID NO: 1348426 - RNA, 27 nt, Human
cucacgcacacacacaagcaguacacg

SEQ ID NO: 1348427 - RNA, 20 nt, Human
cuccugagcggggagagccc

SEQ ID NO: 1348428 - RNA, 25 nt, Human
cugaagccccagauccagaaagcaa

SEQ ID NO: 1348429 - RNA, 23 nt, Human
cugauaaauuaauuccucucugu

SEQ ID NO: 1348430 - RNA, 22 nt, Human
gaaagggaguuaucaaugacau

SEQ ID NO: 1348431 - RNA, 18 nt, Human
gaaggcaggggggaggcg

SEQ ID NO: 1348432 - RNA, 22 nt, Human
gagaagggaagggagaaaggga

SEQ ID NO: 1348433 - RNA, 18 nt, Human
gaggaugggggucagggg

SEQ ID NO: 1348434 - RNA, 19 nt, Human
gauuucaguacuugcuuca

SEQ ID NO: 1348435 - RNA, 22 nt, Human
gcaauuucuaaaccaaacagag

SEQ ID NO: 1348436 - RNA, 21 nt, Human
gcccuccucgcccccagagac

SEQ ID NO: 1348437 - RNA, 19 nt, Human
gcugaagagaauggcagcc

SEQ ID NO: 1348438 - RNA, 19 nt, Human
ggaaagcugucccggcccu

SEQ ID NO: 1348439 - RNA, 20 nt, Human
ggaccucuaagcuuuccccu

SEQ ID NO: 1348440 - RNA, 20 nt, Human
ggacucccggucccccgccc

SEQ ID NO: 1348441 - RNA, 24 nt, Human
ggcuguggaaaggggagagcgagg

SEQ ID NO: 1348442 - RNA, 22 nt, Human
gggaacgguggggaaacagagc

SEQ ID NO: 1348443 - RNA, 24 nt, Human
uaaacaaaaacaaaaauacccaga

SEQ ID NO: 1348444 - RNA, 18 nt, Human
uaaaggcugacugaagca

SEQ ID NO: 1348445 - RNA, 18 nt, Human
uaaaucaugagaacauga

SEQ ID NO: 1348446 - RNA, 24 nt, Human
uaagaaaaacacaacaguuuuagg

SEQ ID NO: 1348447 - RNA, 20 nt, Human
uaagcaaaguuuucuugucu

SEQ ID NO: 1348448 - RNA, 25 nt, Human
uacaacacccacagacccuucugag

SEQ ID NO: 1348449 - RNA, 21 nt, Human
uacaacauaaagcaacagaga

SEQ ID NO: 1348450 - RNA, 31 nt, Human
uacacacacacacacucacgcacacacacag

SEQ ID NO: 1348451 - RNA, 18 nt, Human
uacacaggagaaaggcag

SEQ ID NO: 1348452 - RNA, 20 nt, Human
uacacaggagaaaggcagcc

SEQ ID NO: 1348453 - RNA, 18 nt, Human
ucagcccaggcaaaggcg

SEQ ID NO: 1348454 - RNA, 24 nt, Human
uccggccccgccggacgccccuuc

SEQ ID NO: 1348455 - RNA, 19 nt, Human
ucuaaaccaaacagagagg

SEQ ID NO: 1348456 - RNA, 21 nt, Human
ucuaaaccaaacagagaggua

SEQ ID NO: 1348457 - RNA, 24 nt, Human
ucugccaacaacuucuaaggugcu

SEQ ID NO: 1348458 - RNA, 21 nt, Human
ucugcuggccuugcgucccgc

SEQ ID NO: 1348459 - RNA, 24 nt, Human
ucuggccggccugucugcuggccu

SEQ ID NO: 1348460 - RNA, 25 nt, Human
ucuucauguuugggaaguggcuggg

SEQ ID NO: 1348461 - RNA, 23 nt, Human
ugaagagaauggcagccauacag

SEQ ID NO: 1348462 - RNA, 18 nt, Human
ugaaggcaggggggaggc

SEQ ID NO: 1348463 - RNA, 18 nt, Human
ugagaggaaagcuguccc

SEQ ID NO: 1348464 - RNA, 18 nt, Human
ugccaaaccccaaaugac

SEQ ID NO: 1348465 - RNA, 18 nt, Human
ugcucauccucauaggag

SEQ ID NO: 1348466 - RNA, 24 nt, Human
uggaaaggggagagcgagggcuga

SEQ ID NO: 1348467 - RNA, 18 nt, Human
uggauacacaggcaugaa

SEQ ID NO: 1348468 - RNA, 23 nt, Human
ugggaaguggcugggcaggaugc

SEQ ID NO: 1348469 - RNA, 22 nt, Human
ugggauggcuauggggcauguc

SEQ ID NO: 1348470 - RNA, 21 nt, Human
ugggcaggaugccaaacccca

SEQ ID NO: 1348471 - RNA, 22 nt, Human
uguacaacauaaagcaacagag

SEQ ID NO: 1348472 - RNA, 20 nt, Human
ugugcacacuucucccacag

SEQ ID NO: 1348473 - RNA, 24 nt, Human
uuaauuccucucuguuguaaaccu

SEQ ID NO: 1348474 - RNA, 23 nt, Human
uugcuucauucccauaaaucaug

SEQ ID NO: 1348475 - RNA, 18 nt, Human
uuuucaaguggggugaac

SEQ ID NO: 1348476 - RNA, 19 nt, Human
aguucugggaccucucagg

SEQ ID NO: 1348477 - RNA, 19 nt, Human
cagaguucugggaccucuc

SEQ ID NO: 1348478 - RNA, 20 nt, Human
cccacauaguagauuuuagu

SEQ ID NO: 1348479 - RNA, 20 nt, Human
cucagcgcuggacucacuuc

SEQ ID NO: 1348480 - RNA, 25 nt, Human
ugccuggaagagaacuuuggauuuc

SEQ ID NO: 1348481 - RNA, 21 nt, Human
uggauuucucuaccccacugg

SEQ ID NO: 1348482 - RNA, 19 nt, Human
aguucugggaccucucagg

SEQ ID NO: 1348483 - RNA, 19 nt, Human
cagaguucugggaccucuc

SEQ ID NO: 1348484 - RNA, 25 nt, Human
ugccuggaagagaacuuuggauuuc

SEQ ID NO: 1348485 - RNA, 21 nt, Human
uggaauuauuaaaaaaugaaa

SEQ ID NO: 1348486 - RNA, 21 nt, Human
uggaucugcaagaaaaaucuc

SEQ ID NO: 1348487 - RNA, 22 nt, Human
uuggauuucucuaccccacugg

SEQ ID NO: 1348488 - RNA, 24 nt, Human
aaacaucuuagucacauccuccca

SEQ ID NO: 1348489 - RNA, 19 nt, Human
aacaucuuagucacauccu

SEQ ID NO: 1348490 - RNA, 22 nt, Human
aaguauuuacucucagcagccc

SEQ ID NO: 1348491 - RNA, 25 nt, Human
acgcaacuucacccaggugcuggcc

SEQ ID NO: 1348492 - RNA, 23 nt, Human
acuccuacuccucaauguccucu

SEQ ID NO: 1348493 - RNA, 22 nt, Human
agcccccucuccccgcugggcc

SEQ ID NO: 1348494 - RNA, 20 nt, Human
aggaggcuucccaauuguac

SEQ ID NO: 1348495 - RNA, 20 nt, Human
auggauuuuugagggaucag

SEQ ID NO: 1348496 - RNA, 21 nt, Human
auggauuuuugagggaucagg

SEQ ID NO: 1348497 - RNA, 24 nt, Human
caaaauccgagaucuggacuugug

SEQ ID NO: 1348498 - RNA, 24 nt, Human
caacuugagcuccaucugucuccu

SEQ ID NO: 1348499 - RNA, 18 nt, Human
cacagggccacccgcucc

SEQ ID NO: 1348500 - RNA, 23 nt, Human
cacauccucccacagggccaccc

SEQ ID NO: 1348501 - RNA, 21 nt, Human
caggagcugcugcagcaugac

SEQ ID NO: 1348502 - RNA, 21 nt, Human
cagggugaucaggagcugcug

SEQ ID NO: 1348503 - RNA, 23 nt, Human
caguaucaaaauccgagaucugg

SEQ ID NO: 1348504 - RNA, 24 nt, Human
caugacggcguccgcacuccuuuc

SEQ ID NO: 1348505 - RNA, 18 nt, Human
ccagcugcccccacuccu

SEQ ID NO: 1348506 - RNA, 19 nt, Human
cccgcuccguggccgccuu

SEQ ID NO: 1348507 - RNA, 22 nt, Human
ccucugucuuagcccauagggc

SEQ ID NO: 1348508 - RNA, 19 nt, Human
ccuuuggaugacgcaacuu

SEQ ID NO: 1348509 - RNA, 20 nt, Human
cgaucuccuuaaucgccgac

SEQ ID NO: 1348510 - RNA, 22 nt, Human
cucccaacuugagcuccaucug

SEQ ID NO: 1348511 - RNA, 25 nt, Human
cuccccgcugggccggcacgccccc

SEQ ID NO: 1348512 - RNA, 20 nt, Human
cuccucaauguccucucuca

SEQ ID NO: 1348513 - RNA, 25 nt, Human
cugacaggaggcuucccaauuguac

SEQ ID NO: 1348514 - RNA, 22 nt, Human
cuucccaccgcugcagccgggu

SEQ ID NO: 1348515 - RNA, 18 nt, Human
cuuguccaccucugauga

SEQ ID NO: 1348516 - RNA, 23 nt, Human
gacuccuacuccucaauguccuc

SEQ ID NO: 1348517 - RNA, 21 nt, Human
gagcugcugcagcaugacggc

SEQ ID NO: 1348518 - RNA, 21 nt, Human
gccagcugcccccacuccucc

SEQ ID NO: 1348519 - RNA, 23 nt, Human
gcccccgccuucccaccgcugca

SEQ ID NO: 1348520 - RNA, 22 nt, Human
ggaggcuucccaauuguaccga

SEQ ID NO: 1348521 - RNA, 19 nt, Human
ggugaucaggagcugcugc

SEQ ID NO: 1348522 - RNA, 25 nt, Human
uaaucgccgacuccuacuccucaau

SEQ ID NO: 1348523 - RNA, 19 nt, Human
uacaguaucaaaauccgag

SEQ ID NO: 1348524 - RNA, 24 nt, Human
uacguccuugaagguuaacaguuc

SEQ ID NO: 1348525 - RNA, 21 nt, Human
ucacccaggugcuggccucgg

SEQ ID NO: 1348526 - RNA, 19 nt, Human
ucagcagcccccucucccc

SEQ ID NO: 1348527 - RNA, 19 nt, Human
uccaacauagauucuuuga

SEQ ID NO: 1348528 - RNA, 20 nt, Human
ugacgcaacuucacccaggu

SEQ ID NO: 1348529 - RNA, 18 nt, Human
ugaugaggaaauugcugg

SEQ ID NO: 1348530 - RNA, 19 nt, Human
uggccgccuuuggaugacg

SEQ ID NO: 1348531 - RNA, 22 nt, Human
uugaagguuaacaguuccuucu

SEQ ID NO: 1348532 - RNA, 24 nt, Human
aaaguuaccaaccuuauuaaaaua

SEQ ID NO: 1348533 - RNA, 22 nt, Human
acccugcacugcuagaaagaag

SEQ ID NO: 1348534 - RNA, 19 nt, Human
caacacagaagcuaagcag

SEQ ID NO: 1348535 - RNA, 24 nt, Human
caaccuuauuaaaauaaauaugau

SEQ ID NO: 1348536 - RNA, 21 nt, Human
cccacagaucuuguccucauc

SEQ ID NO: 1348537 - RNA, 24 nt, Human
cccacaguccgcaguccccgaggc

SEQ ID NO: 1348538 - RNA, 23 nt, Human
ccccacaguccgcaguccccgag

SEQ ID NO: 1348539 - RNA, 20 nt, Human
cccguccuucccucucucuc

SEQ ID NO: 1348540 - RNA, 18 nt, Human
ccgcaguccccgaggccu

SEQ ID NO: 1348541 - RNA, 20 nt, Human
ccggccagccuccccacagu

SEQ ID NO: 1348542 - RNA, 20 nt, Human
ccguccuucccucucucucc

SEQ ID NO: 1348543 - RNA, 21 nt, Human
cgacaguucucagcaccgcca

SEQ ID NO: 1348544 - RNA, 18 nt, Human
cuagaaagaagcaacaac

SEQ ID NO: 1348545 - RNA, 24 nt, Human
cucccgacaguucucagcaccgcc

SEQ ID NO: 1348546 - RNA, 26 nt, Human
cuccggccagccuccccacaguccgc

SEQ ID NO: 1348547 - RNA, 19 nt, Human
cugcaaucuacuagcuagu

SEQ ID NO: 1348548 - RNA, 20 nt, Human
cugcuagaaagaagcaacaa

SEQ ID NO: 1348549 - RNA, 19 nt, Human
gccaggccccguccuuccc

SEQ ID NO: 1348550 - RNA, 22 nt, Human
guccugggacuuaaauggacuc

SEQ ID NO: 1348551 - RNA, 22 nt, Human
guccuucccucucucuccggcc

SEQ ID NO: 1348552 - RNA, 25 nt, Human
uaaaauuacuggugucuacaaacug

SEQ ID NO: 1348553 - RNA, 24 nt, Human
ucaagguaaaaguuaccaaccuua

SEQ ID NO: 1348554 - RNA, 18 nt, Human
uccccgaggccuggagcc

SEQ ID NO: 1348555 - RNA, 18 nt, Human
ucccgggggccaggcccc

SEQ ID NO: 1348556 - RNA, 19 nt, Human
uccgcaguccccgaggccu

SEQ ID NO: 1348557 - RNA, 23 nt, Human
uccucggucucaagaagcucccg

SEQ ID NO: 1348558 - RNA, 18 nt, Human
ucucuccggccagccucc

SEQ ID NO: 1348559 - RNA, 20 nt, Human
ugcuagaaagaagcaacaac

SEQ ID NO: 1348560 - RNA, 23 nt, Human
uuccccgucggcgucagcuccaa

SEQ ID NO: 1348561 - RNA, 18 nt, Human
uuuuuuuuuuuuuuuuug

SEQ ID NO: 1348562 - RNA, 19 nt, Human
aaaaagcagaaaaacauug

SEQ ID NO: 1348563 - RNA, 28 nt, Human
aaaaauagcaauggaaugaccgguaccc

SEQ ID NO: 1348564 - RNA, 22 nt, Human
aaaacguagaaaucugugaaac

SEQ ID NO: 1348565 - RNA, 29 nt, Human
aaacaagaacuggaucuaggagggacccc

SEQ ID NO: 1348566 - RNA, 22 nt, Human
aaagcagaaaaacauugcagga

SEQ ID NO: 1348567 - RNA, 18 nt, Human
aacauggugaaaccccau

SEQ ID NO: 1348568 - RNA, 19 nt, Human
aacauggugaaaccccauu

SEQ ID NO: 1348569 - RNA, 20 nt, Human
aacauggugaaaccccauuu

SEQ ID NO: 1348570 - RNA, 21 nt, Human
aacauggugaaaccccauuuc

SEQ ID NO: 1348571 - RNA, 21 nt, Human
aacauggugaaaccccauuuc

SEQ ID NO: 1348572 - RNA, 18 nt, Human
aagaaguacauucaucua

SEQ ID NO: 1348573 - RNA, 26 nt, Human
aaggcaaaaagcagaaaaagggaccc

SEQ ID NO: 1348574 - RNA, 20 nt, Human
aaggcaggcggaucacaagg

SEQ ID NO: 1348575 - RNA, 21 nt, Human
aauauaaaaaaaagaccuauu

SEQ ID NO: 1348576 - RNA, 24 nt, Human
aauggcgugaacccgggaggugga

SEQ ID NO: 1348577 - RNA, 24 nt, Human
acaaagcaagacuccaucucaaaa

SEQ ID NO: 1348578 - RNA, 21 nt, Human
acgccacugcacuccagccug

SEQ ID NO: 1348579 - RNA, 24 nt, Human
acgccacugcacuccagccugggc

SEQ ID NO: 1348580 - RNA, 18 nt, Human
acugcacuccagccuggg

SEQ ID NO: 1348581 - RNA, 23 nt, Human
acugcacuccagccugggcgaca

SEQ ID NO: 1348582 - RNA, 18 nt, Human
agaugucuacaaugacuc

SEQ ID NO: 1348583 - RNA, 23 nt, Human
agccaggcgugguggcaggugcc

SEQ ID NO: 1348584 - RNA, 24 nt, Human
agccugggcgacaaagcaagacuc

SEQ ID NO: 1348585 - RNA, 19 nt, Human
aggcaaaaagcagaaaaac

SEQ ID NO: 1348586 - RNA, 28 nt, Human
aggcaaaaagcagaaaaacauugcagga

SEQ ID NO: 1348587 - RNA, 21 nt, Human
aggcaggagaauggcgugaac

SEQ ID NO: 1348588 - RNA, 24 nt, Human
aggcaggagaauggcgugaacccg

SEQ ID NO: 1348589 - RNA, 18 nt, Human
aggcaggcggaucacaag

SEQ ID NO: 1348590 - RNA, 24 nt, Human
aggcaggcggaucacaaggucagg

SEQ ID NO: 1348591 - RNA, 26 nt, Human
aggcaggcggaucacaaggucaggag

SEQ ID NO: 1348592 - RNA, 24 nt, Human
aggcgcaguggcucacgccuguaa

SEQ ID NO: 1348593 - RNA, 25 nt, Human
aggcggaucacaaggucaggagauu

SEQ ID NO: 1348594 - RNA, 18 nt, Human
aggcugaggcaggagaau

SEQ ID NO: 1348595 - RNA, 21 nt, Human
aggugaucuauuuagcaucug

SEQ ID NO: 1348596 - RNA, 24 nt, Human
agguggagguugcagugagcugag

SEQ ID NO: 1348597 - RNA, 21 nt, Human
aguacauaggcgguauuuaaa

SEQ ID NO: 1348598 - RNA, 24 nt, Human
aguggcucacgccuguaaucccag

SEQ ID NO: 1348599 - RNA, 20 nt, Human
aucacaaggucaggagauuc

SEQ ID NO: 1348600 - RNA, 24 nt, Human
aucacgccacugcacuccagccug

SEQ ID NO: 1348601 - RNA, 22 nt, Human
aucccagcacuuugggaggcca

SEQ ID NO: 1348602 - RNA, 23 nt, Human
caaaaagcagaaaaacauugcag

SEQ ID NO: 1348603 - RNA, 22 nt, Human
caacaaauagaugguagugcaa

SEQ ID NO: 1348604 - RNA, 22 nt, Human
caaggcaggcggaucacaaggu

SEQ ID NO: 1348605 - RNA, 26 nt, Human
caaggcaggcggaucacaaggucagg

SEQ ID NO: 1348606 - RNA, 24 nt, Human
caccaaauaucaacugcaguucac

SEQ ID NO: 1348607 - RNA, 20 nt, Human
caccacggcgcccagggccc

SEQ ID NO: 1348608 - RNA, 24 nt, Human
cacgccuguaaucccagcacuuug

SEQ ID NO: 1348609 - RNA, 19 nt, Human
cacugcacuccagccuggg

SEQ ID NO: 1348610 - RNA, 20 nt, Human
cacugcacuccagccugggc

SEQ ID NO: 1348611 - RNA, 22 nt, Human
cacugcacuccagccugggcga

SEQ ID NO: 1348612 - RNA, 23 nt, Human
cacugcacuccagccugggcgac

SEQ ID NO: 1348613 - RNA, 24 nt, Human
cacugcacuccagccugggcgaca

SEQ ID NO: 1348614 - RNA, 27 nt, Human
cacugcacuccagccugggcgacaaag

SEQ ID NO: 1348615 - RNA, 19 nt, Human
cagaaaaacauugcaggag

SEQ ID NO: 1348616 - RNA, 24 nt, Human
cagcacuuugggaggccaaggcag

SEQ ID NO: 1348617 - RNA, 25 nt, Human
cagcacuuugggaggccaaggcagg

SEQ ID NO: 1348618 - RNA, 24 nt, Human
cagcuacucaggaggcugaggcag

SEQ ID NO: 1348619 - RNA, 20 nt, Human
caggcggaucacaaggucau

SEQ ID NO: 1348620 - RNA, 21 nt, Human
caucucaaaaaauaaauaaau

SEQ ID NO: 1348621 - RNA, 20 nt, Human
ccacugcacuccagccuggg

SEQ ID NO: 1348622 - RNA, 21 nt, Human
ccacugcacuccagccugggc

SEQ ID NO: 1348623 - RNA, 21 nt, Human
ccacugcacuccagccugggc

SEQ ID NO: 1348624 - RNA, 23 nt, Human
ccacugcacuccagccugggcga

SEQ ID NO: 1348625 - RNA, 24 nt, Human
ccacugcacuccagccugggcgac

SEQ ID NO: 1348626 - RNA, 18 nt, Human
ccaggcaaguaagcucac

SEQ ID NO: 1348627 - RNA, 21 nt, Human
cccgggagguggagguugcag

SEQ ID NO: 1348628 - RNA, 20 nt, Human
cccuugugagcgcaacccca

SEQ ID NO: 1348629 - RNA, 21 nt, Human
ccguggcgacggucgccccuu

SEQ ID NO: 1348630 - RNA, 22 nt, Human
ccuggcuaacauggugaaaccc

SEQ ID NO: 1348631 - RNA, 23 nt, Human
ccuggcuaacauggugaaacccc

SEQ ID NO: 1348632 - RNA, 24 nt, Human
ccuggcuaacauggugaaacccca

SEQ ID NO: 1348633 - RNA, 21 nt, Human
ccuguagucccagcuacucag

SEQ ID NO: 1348634 - RNA, 22 nt, Human
ccuguagucccagcuacucagg

SEQ ID NO: 1348635 - RNA, 26 nt, Human
cgccacugcacuccagccugggcgac

SEQ ID NO: 1348636 - RNA, 22 nt, Human
cgcccagggccgcggagguggg

SEQ ID NO: 1348637 - RNA, 24 nt, Human
cgccuguaaucccagcacuuuggg

SEQ ID NO: 1348638 - RNA, 29 nt, Human
cgggagguggagguugcagugacaacggu

SEQ ID NO: 1348639 - RNA, 24 nt, Human
cgggagguggagguugcagugagc

SEQ ID NO: 1348640 - RNA, 25 nt, Human
cucaaaauauaaaaaaaaguuagcc

SEQ ID NO: 1348641 - RNA, 22 nt, Human
cucacgccuguaaucccagcac

SEQ ID NO: 1348642 - RNA, 24 nt, Human
cucacgccuguaaucccagcacuu

SEQ ID NO: 1348643 - RNA, 22 nt, Human
cucagauuuuauaaauuuaaaa

SEQ ID NO: 1348644 - RNA, 18 nt, Human
cugaauuaaaacuaaagc

SEQ ID NO: 1348645 - RNA, 19 nt, Human
cuggauccuagaagcucag

SEQ ID NO: 1348646 - RNA, 23 nt, Human
cuggcuaacauggugaaacccca

SEQ ID NO: 1348647 - RNA, 23 nt, Human
gagaucacgccacugcacuccag

SEQ ID NO: 1348648 - RNA, 21 nt, Human
gagcuuguugcugccuugggc

SEQ ID NO: 1348649 - RNA, 22 nt, Human
gagguugcagugagcugagauc

SEQ ID NO: 1348650 - RNA, 19 nt, Human
gcaggagacuuagcaguuc

SEQ ID NO: 1348651 - RNA, 24 nt, Human
gccaaaaaacaagaacuggaucua

SEQ ID NO: 1348652 - RNA, 22 nt, Human
gccacugcacuccagccugggc

SEQ ID NO: 1348653 - RNA, 24 nt, Human
gccacugcacuccagccugggcga

SEQ ID NO: 1348654 - RNA, 20 nt, Human
gcgcaguggcucacgccugu

SEQ ID NO: 1348655 - RNA, 24 nt, Human
gcuaacauggugaaaccccauuuc

SEQ ID NO: 1348656 - RNA, 20 nt, Human
gcugagaucacgccacugca

SEQ ID NO: 1348657 - RNA, 22 nt, Human
gcugaggcaggagaauggcgug

SEQ ID NO: 1348658 - RNA, 22 nt, Human
ggagguugcagugagcugagau

SEQ ID NO: 1348659 - RNA, 23 nt, Human
ggagguugcagugagcugagauc

SEQ ID NO: 1348660 - RNA, 24 nt, Human
ggagguugcagugagcugagauca

SEQ ID NO: 1348661 - RNA, 23 nt, Human
ggaguacauaggcgguauuuaaa

SEQ ID NO: 1348662 - RNA, 23 nt, Human
ggcaaguaagcucacaaaaagaa

SEQ ID NO: 1348663 - RNA, 22 nt, Human
ggucaacaccuuauucaguaaa

SEQ ID NO: 1348664 - RNA, 19 nt, Human
gguggagguugcagugagc

SEQ ID NO: 1348665 - RNA, 18 nt, Human
gugaaacucuauccuucg

SEQ ID NO: 1348666 - RNA, 24 nt, Human
gugaacccgggagguggagguugc

SEQ ID NO: 1348667 - RNA, 20 nt, Human
guggagguugcagugagcug

SEQ ID NO: 1348668 - RNA, 24 nt, Human
guggauguuuacgauaaauaaaaa

SEQ ID NO: 1348669 - RNA, 19 nt, Human
guugcagugagcugagauc

SEQ ID NO: 1348670 - RNA, 19 nt, Human
uaacauggugaaaccccau

SEQ ID NO: 1348671 - RNA, 21 nt, Human
uaacauggugaaaccccauuu

SEQ ID NO: 1348672 - RNA, 24 nt, Human
uaacauggugaaaccccauuucua

SEQ ID NO: 1348673 - RNA, 21 nt, Human
uaacuuauaaagcauucaucu

SEQ ID NO: 1348674 - RNA, 20 nt, Human
uacaauuagguacuuaccau

SEQ ID NO: 1348675 - RNA, 18 nt, Human
uaccuugucaacaaacau

SEQ ID NO: 1348676 - RNA, 18 nt, Human
uauacuggaauuguccuc

SEQ ID NO: 1348677 - RNA, 26 nt, Human
uauauauggggaaggcaaaaagcaga

SEQ ID NO: 1348678 - RNA, 23 nt, Human
uaucugaaaacugaaguauaaag

SEQ ID NO: 1348679 - RNA, 22 nt, Human
uaugccaaaaaacaagaacugg

SEQ ID NO: 1348680 - RNA, 23 nt, Human
uaugccaaaaaacaagaacugga

SEQ ID NO: 1348681 - RNA, 24 nt, Human
ucacaaggucaggagauugagacc

SEQ ID NO: 1348682 - RNA, 23 nt, Human
ucacgccacugcacuccagccug

SEQ ID NO: 1348683 - RNA, 22 nt, Human
uccaaaauauaaaaaaaagacc

SEQ ID NO: 1348684 - RNA, 24 nt, Human
uccagccugggcgacaaagcaaga

SEQ ID NO: 1348685 - RNA, 20 nt, Human
uccauauaucugaaaacuga

SEQ ID NO: 1348686 - RNA, 21 nt, Human
ucgacaccacggcgcccaggg

SEQ ID NO: 1348687 - RNA, 21 nt, Human
ucucuggggaaaaaaaauagc

SEQ ID NO: 1348688 - RNA, 24 nt, Human
ucuggccaggcgcaguggcucacg

SEQ ID NO: 1348689 - RNA, 21 nt, Human
ugagaaaccaaugaagauuaa

SEQ ID NO: 1348690 - RNA, 24 nt, Human
ugagaccauccuggcuaacauggu

SEQ ID NO: 1348691 - RNA, 22 nt, Human
ugagcugagaucacgccacugc

SEQ ID NO: 1348692 - RNA, 24 nt, Human
ugaggcaggagaauggcgugaacc

SEQ ID NO: 1348693 - RNA, 25 nt, Human
ugaggcaggagaauggcgugaaccc

SEQ ID NO: 1348694 - RNA, 24 nt, Human
ugccuguagucccagcuacucagg

SEQ ID NO: 1348695 - RNA, 24 nt, Human
uggaaugacaauagaugucagaua

SEQ ID NO: 1348696 - RNA, 18 nt, Human
uggagguugcagugagcu

SEQ ID NO: 1348697 - RNA, 24 nt, Human
uggccaggcgcaguggcucacgcc

SEQ ID NO: 1348698 - RNA, 23 nt, Human
uggccgccaccguggcgacgguc

SEQ ID NO: 1348699 - RNA, 24 nt, Human
uggcgugaacccgggagguggagg

SEQ ID NO: 1348700 - RNA, 22 nt, Human
uggcucacgccuguaaucccag

SEQ ID NO: 1348701 - RNA, 24 nt, Human
uggcucacgccuguaaucccagca

SEQ ID NO: 1348702 - RNA, 24 nt, Human
ugggaggccaaggcaggcggauca

SEQ ID NO: 1348703 - RNA, 21 nt, Human
ugggcgacaaagcaagacucc

SEQ ID NO: 1348704 - RNA, 22 nt, Human
ugguauugcacaaagguuaauu

SEQ ID NO: 1348705 - RNA, 24 nt, Human
ugguggcaggugccuguaguccca

SEQ ID NO: 1348706 - RNA, 20 nt, Human
uuaugccaaaaaacaagaac

SEQ ID NO: 1348707 - RNA, 26 nt, Human
uuaugccaaaaaacaagaacuggauc

SEQ ID NO: 1348708 - RNA, 24 nt, Human
uugauggcagccauuucaggcaga

SEQ ID NO: 1348709 - RNA, 18 nt, Human
uugcagugagcugagauc

SEQ ID NO: 1348710 - RNA, 20 nt, Human
uugcagugagcugagaucac

SEQ ID NO: 1348711 - RNA, 21 nt, Human
uugcagugagcugagaucacg

SEQ ID NO: 1348712 - RNA, 22 nt, Human
uuucuacucaaaauauaaaaaa

SEQ ID NO: 1348713 - RNA, 23 nt, Human
uuugagaaaccaaugaagauuaa

SEQ ID NO: 1348714 - RNA, 30 nt, Human
aaaaaaaaaaaaaaggguuucagaaagagg

SEQ ID NO: 1348715 - RNA, 24 nt, Human
aaaaaaaaaaaggguuucagaaag

SEQ ID NO: 1348716 - RNA, 22 nt, Human
aagggagcagggagaaaagaga

SEQ ID NO: 1348717 - RNA, 20 nt, Human
aauaagggagcagggagaaa

SEQ ID NO: 1348718 - RNA, 24 nt, Human
agaccugaagagaauuguuggugg

SEQ ID NO: 1348719 - RNA, 20 nt, Human
aggacggaagaguuugaaga

SEQ ID NO: 1348720 - RNA, 20 nt, Human
aggcauaaccaggugcugca

SEQ ID NO: 1348721 - RNA, 20 nt, Human
aggggacccagcuagagucc

SEQ ID NO: 1348722 - RNA, 27 nt, Human
aggugcugcaaguuggcucuguaaacu

SEQ ID NO: 1348723 - RNA, 19 nt, Human
cagguuucucucagauucu

SEQ ID NO: 1348724 - RNA, 20 nt, Human
cauugugacacaggcaagau

SEQ ID NO: 1348725 - RNA, 25 nt, Human
ccauugugggggcaauagccaugga

SEQ ID NO: 1348726 - RNA, 19 nt, Human
gaacauagaccacauaacc

SEQ ID NO: 1348727 - RNA, 24 nt, Human
uagaccacauaaccauuuaccugg

SEQ ID NO: 1348728 - RNA, 26 nt, Human
ucuaugcugaaacucaucaccagggg

SEQ ID NO: 1348729 - RNA, 18 nt, Human
ugaaaggaggcauaacca

SEQ ID NO: 1348730 - RNA, 23 nt, Human
ugagaugaaaggaggcauaacca

SEQ ID NO: 1348731 - RNA, 24 nt, Human
ugugacacaggcaagaucaugugg

SEQ ID NO: 1348732 - RNA, 19 nt, Human
uguggcugaggaguagucg

SEQ ID NO: 1348733 - RNA, 19 nt, Human
ugugguagagauuuaaacu

SEQ ID NO: 1348734 - RNA, 18 nt, Human
ugugguuuguuuggaaca

SEQ ID NO: 1348735 - RNA, 20 nt, Human
uuaccuggcagcucuuuggc

SEQ ID NO: 1348736 - RNA, 22 nt, Human
uugugacacaggcaagaucaug

SEQ ID NO: 1348737 - RNA, 20 nt, Human
uuuaauaagggagcagggag

SEQ ID NO: 1348738 - RNA, 23 nt, Human
uuucguuuucuuuuccuugaaca

SEQ ID NO: 1348739 - RNA, 25 nt, Human
uuucguuuucuuuuccuugaacauu

SEQ ID NO: 1348740 - RNA, 20 nt, Human
aaacaggcaguaaaucaauu

SEQ ID NO: 1348741 - RNA, 23 nt, Human
aaauagcucagcucaccuaaaac

SEQ ID NO: 1348742 - RNA, 19 nt, Human
aacauucuaaauggauacu

SEQ ID NO: 1348743 - RNA, 18 nt, Human
acagaacuuaaaaaaaaa

SEQ ID NO: 1348744 - RNA, 21 nt, Human
acagaacuuaaaaaaaaaucc

SEQ ID NO: 1348745 - RNA, 26 nt, Human
acauaccuguauguaguucaaauaca

SEQ ID NO: 1348746 - RNA, 19 nt, Human
auacaaaacucuccaaaca

SEQ ID NO: 1348747 - RNA, 18 nt, Human
aucacaguacacauagca

SEQ ID NO: 1348748 - RNA, 20 nt, Human
aucacaguacacauagcauu

SEQ ID NO: 1348749 - RNA, 20 nt, Human
auuuuauauauaauauauau

SEQ ID NO: 1348750 - RNA, 21 nt, Human
caacaucauggauaacaugaa

SEQ ID NO: 1348751 - RNA, 22 nt, Human
cagcucaccuaaaacaguaucu

SEQ ID NO: 1348752 - RNA, 23 nt, Human
cagcucaccuaaaacaguaucug

SEQ ID NO: 1348753 - RNA, 22 nt, Human
ccaaacauuacaugaacauucu

SEQ ID NO: 1348754 - RNA, 18 nt, Human
cccccgggaaggcgggcc

SEQ ID NO: 1348755 - RNA, 22 nt, Human
cuaaaacaguaucuggaugugc

SEQ ID NO: 1348756 - RNA, 22 nt, Human
gcaacggaaaggcacaauuagc

SEQ ID NO: 1348757 - RNA, 19 nt, Human
uaaaaaaaaauccaaaaac

SEQ ID NO: 1348758 - RNA, 23 nt, Human
uaaaaaaaaauccaaaaacuaau

SEQ ID NO: 1348759 - RNA, 23 nt, Human
uaccugaauuauuaaacugacau

SEQ ID NO: 1348760 - RNA, 24 nt, Human
uauacagaacuuaaaaaaaaaucc

SEQ ID NO: 1348761 - RNA, 24 nt, Human
uauuauuuuauauauaauauauau

SEQ ID NO: 1348762 - RNA, 18 nt, Human
ucagauauauaauugcau

SEQ ID NO: 1348763 - RNA, 18 nt, Human
ucaguaacugauacccuc

SEQ ID NO: 1348764 - RNA, 19 nt, Human
uccaaaaacuaauuuuucu

SEQ ID NO: 1348765 - RNA, 23 nt, Human
uccauaauacaaaacucuccaaa

SEQ ID NO: 1348766 - RNA, 22 nt, Human
uguaaaaacaggcaguaaauca

SEQ ID NO: 1348767 - RNA, 21 nt, Human
uuaagauaaaguuaaugucuu

SEQ ID NO: 1348768 - RNA, 21 nt, Human
uuauauauauuauauauaagu

SEQ ID NO: 1348769 - RNA, 21 nt, Human
aaaaaacaaccucuaaacaca

SEQ ID NO: 1348770 - RNA, 18 nt, Human
aaaagaggacccagggcu

SEQ ID NO: 1348771 - RNA, 24 nt, Human
aaacagcugcaaaaauagugucuu

SEQ ID NO: 1348772 - RNA, 24 nt, Human
aacaccaagaucugcaaaaaacaa

SEQ ID NO: 1348773 - RNA, 27 nt, Human
aagaaaacucgaacauuaacauucuuc

SEQ ID NO: 1348774 - RNA, 21 nt, Human
aaucuguggcgucuucucucc

SEQ ID NO: 1348775 - RNA, 24 nt, Human
acaaacuucaaacagcugcaaaaa

SEQ ID NO: 1348776 - RNA, 22 nt, Human
acaagauaagaaaacucgaaca

SEQ ID NO: 1348777 - RNA, 20 nt, Human
agcucuccuccccacuaccc

SEQ ID NO: 1348778 - RNA, 20 nt, Human
agggaaggaaaucuguggcg

SEQ ID NO: 1348779 - RNA, 23 nt, Human
agggccccuccauaccccaucuc

SEQ ID NO: 1348780 - RNA, 18 nt, Human
auagagucgccauuugcc

SEQ ID NO: 1348781 - RNA, 18 nt, Human
caaccucuaaacacaaga

SEQ ID NO: 1348782 - RNA, 20 nt, Human
caaccucuaaacacaagaua

SEQ ID NO: 1348783 - RNA, 19 nt, Human
caagauaagaaaacucgaa

SEQ ID NO: 1348784 - RNA, 21 nt, Human
caagauaagaaaacucgaaca

SEQ ID NO: 1348785 - RNA, 23 nt, Human
caagaucugcaaaaaacaaccuc

SEQ ID NO: 1348786 - RNA, 26 nt, Human
caccuggggcugggcgggcugggcug

SEQ ID NO: 1348787 - RNA, 18 nt, Human
caguaagugaaagaaagu

SEQ ID NO: 1348788 - RNA, 23 nt, Human
caguacggaaaauauacaaacuu

SEQ ID NO: 1348789 - RNA, 19 nt, Human
ccaccuggggcugggcggg

SEQ ID NO: 1348790 - RNA, 22 nt, Human
ccauccagcccuggggcgggcg

SEQ ID NO: 1348791 - RNA, 19 nt, Human
cccuccauaccccaucuca

SEQ ID NO: 1348792 - RNA, 20 nt, Human
cccuccauaccccaucucag

SEQ ID NO: 1348793 - RNA, 25 nt, Human
ccggugcccaucaaaaagaggaccc

SEQ ID NO: 1348794 - RNA, 18 nt, Human
ccucccucugccagcagc

SEQ ID NO: 1348795 - RNA, 22 nt, Human
ccucccucugccagcagcugaa

SEQ ID NO: 1348796 - RNA, 19 nt, Human
ccucuaaacacaagauaag

SEQ ID NO: 1348797 - RNA, 18 nt, Human
ccuggaggagagggaagg

SEQ ID NO: 1348798 - RNA, 22 nt, Human
ccuucguucauggccagcuugc

SEQ ID NO: 1348799 - RNA, 18 nt, Human
cggugcccaucaaaaaga

SEQ ID NO: 1348800 - RNA, 19 nt, Human
cggugcccaucaaaaagag

SEQ ID NO: 1348801 - RNA, 22 nt, Human
cuccaaugagagggaggcaugg

SEQ ID NO: 1348802 - RNA, 22 nt, Human
cuccuggaggagagggaaggaa

SEQ ID NO: 1348803 - RNA, 20 nt, Human
cucgaaggccgagagggaag

SEQ ID NO: 1348804 - RNA, 24 nt, Human
cugcaaaaauagugucuuugggag

SEQ ID NO: 1348805 - RNA, 20 nt, Human
cuggguguuuuccaccaagu

SEQ ID NO: 1348806 - RNA, 24 nt, Human
gagaaaauagagucucuacaucga

SEQ ID NO: 1348807 - RNA, 23 nt, Human
gcaaaaaacaaccucuaaacaca

SEQ ID NO: 1348808 - RNA, 22 nt, Human
gccgagagggaagggccccucc

SEQ ID NO: 1348809 - RNA, 22 nt, Human
gcucuccuccccacuacccacu

SEQ ID NO: 1348810 - RNA, 18 nt, Human
gcuuugacacaguaagug

SEQ ID NO: 1348811 - RNA, 23 nt, Human
ggaaaacacuuguuuccucccuc

SEQ ID NO: 1348812 - RNA, 21 nt, Human
gggcugggcgggcugggcugc

SEQ ID NO: 1348813 - RNA, 18 nt, Human
ggggaucuaucuuauggu

SEQ ID NO: 1348814 - RNA, 21 nt, Human
gugcccaucaaaaagaggacc

SEQ ID NO: 1348815 - RNA, 20 nt, Human
uaagaaaacucgaacauuag

SEQ ID NO: 1348816 - RNA, 23 nt, Human
ucagggugaaagcgagaugaaaa

SEQ ID NO: 1348817 - RNA, 22 nt, Human
ucgaacauuaacauucuucaau

SEQ ID NO: 1348818 - RNA, 24 nt, Human
ucuaugguaaaguggggccggggc

SEQ ID NO: 1348819 - RNA, 24 nt, Human
ucucaggggaccuggggagggacc

SEQ ID NO: 1348820 - RNA, 26 nt, Human
ucucuaugguaaaguggggcaggggu

SEQ ID NO: 1348821 - RNA, 28 nt, Human
ucugugacaaaaauaagggccggggucc

SEQ ID NO: 1348822 - RNA, 20 nt, Human
ucuucaauuuuguguaagcu

SEQ ID NO: 1348823 - RNA, 19 nt, Human
ucuuuagucagggugaaag

SEQ ID NO: 1348824 - RNA, 25 nt, Human
ucuuuagucagggugaaagcgagau

SEQ ID NO: 1348825 - RNA, 19 nt, Human
ugaaagcgagaugaaaaug

SEQ ID NO: 1348826 - RNA, 21 nt, Human
ugagagggaggcaugggaaua

SEQ ID NO: 1348827 - RNA, 18 nt, Human
ugccagcucuccucccca

SEQ ID NO: 1348828 - RNA, 19 nt, Human
ugcuuuggucagcuccucc

SEQ ID NO: 1348829 - RNA, 18 nt, Human
uggggcugggcgggcugg

SEQ ID NO: 1348830 - RNA, 19 nt, Human
uggggcugggcgggcuggg

SEQ ID NO: 1348831 - RNA, 20 nt, Human
uggggcugggcgggcugggc

SEQ ID NO: 1348832 - RNA, 18 nt, Human
ugguaaaguggggcaggg

SEQ ID NO: 1348833 - RNA, 18 nt, Human
uguuuccucccucugcca

SEQ ID NO: 1348834 - RNA, 25 nt, Human
uuguuuccucccucugccagcagcu

SEQ ID NO: 1348835 - RNA, 21 nt, Human
aaaaaauacccucaugccccu

SEQ ID NO: 1348836 - RNA, 23 nt, Human
aaaacaagauccaaccacgggug

SEQ ID NO: 1348837 - RNA, 18 nt, Human
aaaauacccucaugcccc

SEQ ID NO: 1348838 - RNA, 21 nt, Human
aaaauacccucaugccccuag

SEQ ID NO: 1348839 - RNA, 23 nt, Human
aaaauacccucaugccccuagaa

SEQ ID NO: 1348840 - RNA, 18 nt, Human
aaacaagauccaaccacg

SEQ ID NO: 1348841 - RNA, 19 nt, Human
aaaccuuagaaccuaaaaa

SEQ ID NO: 1348842 - RNA, 20 nt, Human
aaccaagaagaaugagacaa

SEQ ID NO: 1348843 - RNA, 19 nt, Human
acaagauaaaaccuuagaa

SEQ ID NO: 1348844 - RNA, 22 nt, Human
accucauucuacccccacccag

SEQ ID NO: 1348845 - RNA, 19 nt, Human
accugcagcaaugccuccc

SEQ ID NO: 1348846 - RNA, 19 nt, Human
agaaaugucaacugucccc

SEQ ID NO: 1348847 - RNA, 22 nt, Human
agauaaaaccuuagaaccuaaa

SEQ ID NO: 1348848 - RNA, 19 nt, Human
aggcagaggugggugggac

SEQ ID NO: 1348849 - RNA, 24 nt, Human
aggcagaggugggugggaccagaa

SEQ ID NO: 1348850 - RNA, 18 nt, Human
aggggaaaugccaaugaa

SEQ ID NO: 1348851 - RNA, 19 nt, Human
caaaagcugcucucagaaa

SEQ ID NO: 1348852 - RNA, 19 nt, Human
caaagccagcucaccccac

SEQ ID NO: 1348853 - RNA, 21 nt, Human
caaagccagcucaccccaccc

SEQ ID NO: 1348854 - RNA, 23 nt, Human
caacaagauaaaaccuuagaacc

SEQ ID NO: 1348855 - RNA, 19 nt, Human
caacugucccccauccccu

SEQ ID NO: 1348856 - RNA, 21 nt, Human
caagaggcacccacugcaaaa

SEQ ID NO: 1348857 - RNA, 23 nt, Human
caccccaccucauucuaccccca

SEQ ID NO: 1348858 - RNA, 18 nt, Human
cagcaaugccucccuggc

SEQ ID NO: 1348859 - RNA, 20 nt, Human
cagcucaccccaccccaccu

SEQ ID NO: 1348860 - RNA, 22 nt, Human
cagcucaccccaccccaccuca

SEQ ID NO: 1348861 - RNA, 21 nt, Human
caggcucaccugcagcaaugc

SEQ ID NO: 1348862 - RNA, 19 nt, Human
caguuaaaaccuacucaac

SEQ ID NO: 1348863 - RNA, 18 nt, Human
ccacccuggaaaaacugu

SEQ ID NO: 1348864 - RNA, 21 nt, Human
ccacggguggcaagggcaucc

SEQ ID NO: 1348865 - RNA, 22 nt, Human
cccaaugauaggccacccugga

SEQ ID NO: 1348866 - RNA, 18 nt, Human
cccaccccaccucauucu

SEQ ID NO: 1348867 - RNA, 19 nt, Human
cccaccucauucuaccccc

SEQ ID NO: 1348868 - RNA, 21 nt, Human
cccacugcaaaacaacuugaa

SEQ ID NO: 1348869 - RNA, 26 nt, Human
cccccacccagaacauuuugcuaaaa

SEQ ID NO: 1348870 - RNA, 21 nt, Human
ccccuagaauuccaaagccag

SEQ ID NO: 1348871 - RNA, 24 nt, Human
ccccuagucaaaaauaauugggac

SEQ ID NO: 1348872 - RNA, 22 nt, Human
ccugcagcaaugccucccuggc

SEQ ID NO: 1348873 - RNA, 21 nt, Human
cgagagcggcugcacguggug

SEQ ID NO: 1348874 - RNA, 19 nt, Human
cucaccccaccccaccuca

SEQ ID NO: 1348875 - RNA, 20 nt, Human
cucaccccaccccaccucau

SEQ ID NO: 1348876 - RNA, 18 nt, Human
cucauucuacccccaccc

SEQ ID NO: 1348877 - RNA, 24 nt, Human
cugcccuguaagaugccacaaaag

SEQ ID NO: 1348878 - RNA, 21 nt, Human
cuuagaaccuaaaaaauaccc

SEQ ID NO: 1348879 - RNA, 21 nt, Human
cuucccccuuggguagguccc

SEQ ID NO: 1348880 - RNA, 18 nt, Human
gaaaaacuguccccugca

SEQ ID NO: 1348881 - RNA, 20 nt, Human
gagcugccgaacucagcugc

SEQ ID NO: 1348882 - RNA, 19 nt, Human
gcacacugcaaacgccugc

SEQ ID NO: 1348883 - RNA, 21 nt, Human
gccagcucaccccaccccacc

SEQ ID NO: 1348884 - RNA, 25 nt, Human
gcccuguaagaugccacaaaagcug

SEQ ID NO: 1348885 - RNA, 18 nt, Human
gcugccgaacucagcugc

SEQ ID NO: 1348886 - RNA, 21 nt, Human
ggaaaaacuguccccugcagg

SEQ ID NO: 1348887 - RNA, 20 nt, Human
uacucaaccaagaagaauga

SEQ ID NO: 1348888 - RNA, 21 nt, Human
uagaauuccaaagccagcuca

SEQ ID NO: 1348889 - RNA, 22 nt, Human
uagaauuccaaagccagcucac

SEQ ID NO: 1348890 - RNA, 21 nt, Human
ucacaagaggcacccacugca

SEQ ID NO: 1348891 - RNA, 24 nt, Human
uccaaagccagcucaccccacccc

SEQ ID NO: 1348892 - RNA, 19 nt, Human
ucccccauccccuagucaa

SEQ ID NO: 1348893 - RNA, 26 nt, Human
uccccugcaggguuuccaaggauugg

SEQ ID NO: 1348894 - RNA, 19 nt, Human
ucccuggccagaaagggcc

SEQ ID NO: 1348895 - RNA, 20 nt, Human
ucccuggccagaaagggccu

SEQ ID NO: 1348896 - RNA, 25 nt, Human
ucuacccccacccagaacauuuugc

SEQ ID NO: 1348897 - RNA, 27 nt, Human
ucuugucuucccccuuggguagguccc

SEQ ID NO: 1348898 - RNA, 21 nt, Human
ugcccaucuaacaggagccca

SEQ ID NO: 1348899 - RNA, 24 nt, Human
ugucuucccccuuggguagguccc

SEQ ID NO: 1348900 - RNA, 22 nt, Human
uuagaaccuaaaaaauacccuc

SEQ ID NO: 1348901 - RNA, 21 nt, Human
uuccaaggaugacaucuuguc

SEQ ID NO: 1348902 - RNA, 24 nt, Human
uugcuaaaauuaauccgcccgugc

SEQ ID NO: 1348903 - RNA, 21 nt, Human
aaaaccacuccccacgccccc

SEQ ID NO: 1348904 - RNA, 19 nt, Human
aaccacuccccacgccccc

SEQ ID NO: 1348905 - RNA, 19 nt, Human
acaacgggcgucugccugg

SEQ ID NO: 1348906 - RNA, 19 nt, Human
accacuccccacgcccccu

SEQ ID NO: 1348907 - RNA, 23 nt, Human
agagaagacgggcggggagcaga

SEQ ID NO: 1348908 - RNA, 27 nt, Human
agccacagcugccaacaacaaccgccc

SEQ ID NO: 1348909 - RNA, 18 nt, Human
aggaaggugcugccgagc

SEQ ID NO: 1348910 - RNA, 21 nt, Human
aggcauuuauugaaaacuuau

SEQ ID NO: 1348911 - RNA, 24 nt, Human
augccauauaaacaaacuaaacuc

SEQ ID NO: 1348912 - RNA, 23 nt, Human
cauucuuugccauugccuacaag

SEQ ID NO: 1348913 - RNA, 20 nt, Human
ccacagcugccaacaacaac

SEQ ID NO: 1348914 - RNA, 20 nt, Human
ccacauucuuugccauugcc

SEQ ID NO: 1348915 - RNA, 21 nt, Human
ccgccuaaaaccacuccccac

SEQ ID NO: 1348916 - RNA, 19 nt, Human
ggaaacgcagaagagaaga

SEQ ID NO: 1348917 - RNA, 21 nt, Human
ggaaacgcagaagagaagacg

SEQ ID NO: 1348918 - RNA, 22 nt, Human
ggcgucugccuggcaaagaagg

SEQ ID NO: 1348919 - RNA, 19 nt, Human
gggcggggagcagagguuc

SEQ ID NO: 1348920 - RNA, 24 nt, Human
uaaacucuuuuagcugcuauacca

SEQ ID NO: 1348921 - RNA, 22 nt, Human
uaagaaauggcacauggaaaca

SEQ ID NO: 1348922 - RNA, 21 nt, Human
uacaacgggcgucugccuggc

SEQ ID NO: 1348923 - RNA, 19 nt, Human
uaggcauuuauugaaaacu

SEQ ID NO: 1348924 - RNA, 25 nt, Human
ugccaacaacaaccgccccucagcc

SEQ ID NO: 1348925 - RNA, 18 nt, Human
uggcaaagaaggaaggug

SEQ ID NO: 1348926 - RNA, 22 nt, Human
uggcacauggaaacauggcagg

SEQ ID NO: 1348927 - RNA, 19 nt, Human
uuuaugcuugaacuuuagg

SEQ ID NO: 1348928 - RNA, 21 nt, Human
accucagcccaccuccacgcu

SEQ ID NO: 1348929 - RNA, 22 nt, Human
acuauucaagaacagaugucca

SEQ ID NO: 1348930 - RNA, 21 nt, Human
aggcagagcguucaaaucgug

SEQ ID NO: 1348931 - RNA, 19 nt, Human
agucccaaagggcuggaga

SEQ ID NO: 1348932 - RNA, 22 nt, Human
aucaaugccuauaugguccagu

SEQ ID NO: 1348933 - RNA, 20 nt, Human
auggugaggguagggcuuug

SEQ ID NO: 1348934 - RNA, 22 nt, Human
auuuccauaguuaucacaugua

SEQ ID NO: 1348935 - RNA, 24 nt, Human
caagaacagauguccaauacucag

SEQ ID NO: 1348936 - RNA, 22 nt, Human
caccuucuaaccucagcccacc

SEQ ID NO: 1348937 - RNA, 18 nt, Human
cagcccaccuccacgcug

SEQ ID NO: 1348938 - RNA, 23 nt, Human
ccacgcucugcaccuucuaaccu

SEQ ID NO: 1348939 - RNA, 21 nt, Human
cccuuugcuugcguugacuuc

SEQ ID NO: 1348940 - RNA, 21 nt, Human
ccucacgcugcuucggcugcu

SEQ ID NO: 1348941 - RNA, 20 nt, Human
cgcacuccccuuugcuugcg

SEQ ID NO: 1348942 - RNA, 21 nt, Human
cggauaagaacuguaacccug

SEQ ID NO: 1348943 - RNA, 23 nt, Human
cucacaaucuucuuccacgcucu

SEQ ID NO: 1348944 - RNA, 22 nt, Human
cucacgcugcuucggcugcuuc

SEQ ID NO: 1348945 - RNA, 18 nt, Human
cuccacgcugcucuuccc

SEQ ID NO: 1348946 - RNA, 18 nt, Human
cuccccgacccgcacucc

SEQ ID NO: 1348947 - RNA, 24 nt, Human
cugcucuucccacaggaccuggug

SEQ ID NO: 1348948 - RNA, 18 nt, Human
gcccucacgcugcuucgg

SEQ ID NO: 1348949 - RNA, 19 nt, Human
gcggauaagaacuguaacc

SEQ ID NO: 1348950 - RNA, 19 nt, Human
gcucugcaccuucuaaccu

SEQ ID NO: 1348951 - RNA, 19 nt, Human
gcugcuucuaagaucccau

SEQ ID NO: 1348952 - RNA, 22 nt, Human
gucccaaagggcuggagagccc

SEQ ID NO: 1348953 - RNA, 19 nt, Human
uaaggagaucuucauguga

SEQ ID NO: 1348954 - RNA, 25 nt, Human
uagaugggucucuuccuuuauguuu

SEQ ID NO: 1348955 - RNA, 24 nt, Human
uaucaaagguaauauucauaaaga

SEQ ID NO: 1348956 - RNA, 25 nt, Human
uaucaaagguaauauucauaaagaa

SEQ ID NO: 1348957 - RNA, 22 nt, Human
uauucaagaacagauguccaau

SEQ ID NO: 1348958 - RNA, 21 nt, Human
ucaaugccuauaugguccaag

SEQ ID NO: 1348959 - RNA, 18 nt, Human
ucacgcugcuucggcugc

SEQ ID NO: 1348960 - RNA, 28 nt, Human
ucagcccaccuccacgcugcucuuccca

SEQ ID NO: 1348961 - RNA, 24 nt, Human
ucagcucacaaucuucuuccacgc

SEQ ID NO: 1348962 - RNA, 23 nt, Human
ucccaaagggcuggagagcccca

SEQ ID NO: 1348963 - RNA, 22 nt, Human
ucccaaagggcuggagagccuc

SEQ ID NO: 1348964 - RNA, 19 nt, Human
uccccgacccgcacucccc

SEQ ID NO: 1348965 - RNA, 21 nt, Human
uccccgacccgcacuccccuu

SEQ ID NO: 1348966 - RNA, 18 nt, Human
uccuuuauguuuuucagu

SEQ ID NO: 1348967 - RNA, 23 nt, Human
ucggcugcuucuaagaucccauu

SEQ ID NO: 1348968 - RNA, 22 nt, Human
ucuaagaucccauuggaagucc

SEQ ID NO: 1348969 - RNA, 23 nt, Human
ucugcaccuucuaaccucagccc

SEQ ID NO: 1348970 - RNA, 19 nt, Human
ugaggguagggcuuugggc

SEQ ID NO: 1348971 - RNA, 20 nt, Human
uggcccugggcugccgcccu

SEQ ID NO: 1348972 - RNA, 22 nt, Human
uggugaggguagggcuuugggc

SEQ ID NO: 1348973 - RNA, 20 nt, Human
uuauguuuuucagucacaua

SEQ ID NO: 1348974 - RNA, 22 nt, Human
uuccauaguuaucacauguacu

SEQ ID NO: 1348975 - RNA, 18 nt, Human
uucuaaccucagcccacc

SEQ ID NO: 1348976 - RNA, 21 nt, Human
uuuccuauggcaggcccaggg

SEQ ID NO: 1348977 - RNA, 18 nt, Human
uuuuuuuuuuuuuuuuug

SEQ ID NO: 1348978 - RNA, 19 nt, Human
uuuuuuuuuuuuuuuuugu

SEQ ID NO: 1348979 - RNA, 18 nt, Human
aaccuggaagaaauggca

SEQ ID NO: 1348980 - RNA, 19 nt, Human
aaucaugacuauguaauua

SEQ ID NO: 1348981 - RNA, 21 nt, Human
aaucaugacuauguaauuaac

SEQ ID NO: 1348982 - RNA, 24 nt, Human
acaagggaccgcagacggagagcc

SEQ ID NO: 1348983 - RNA, 18 nt, Human
agaccugcaguuggggug

SEQ ID NO: 1348984 - RNA, 23 nt, Human
agccaaaccggacggccggccuc

SEQ ID NO: 1348985 - RNA, 23 nt, Human
auuacauuuauuuuuaaggccau

SEQ ID NO: 1348986 - RNA, 22 nt, Human
caaccuggaagaaauggcaggc

SEQ ID NO: 1348987 - RNA, 26 nt, Human
caauacauuuuucauagaaacaaaua

SEQ ID NO: 1348988 - RNA, 20 nt, Human
cagcagaaaaaaaauuacca

SEQ ID NO: 1348989 - RNA, 22 nt, Human
cagcagaaaaaaaauuaccaaa

SEQ ID NO: 1348990 - RNA, 23 nt, Human
caggcaaagcguccaaaauuaga

SEQ ID NO: 1348991 - RNA, 26 nt, Human
caggcucuuccacuccuuuuggcucu

SEQ ID NO: 1348992 - RNA, 18 nt, Human
cccaggaaaaucuccaag

SEQ ID NO: 1348993 - RNA, 23 nt, Human
ccgcccagagccuucacaaggga

SEQ ID NO: 1348994 - RNA, 21 nt, Human
ccuaaauuaacagaaaaaaac

SEQ ID NO: 1348995 - RNA, 22 nt, Human
ccugggagaggugagccaaacc

SEQ ID NO: 1348996 - RNA, 22 nt, Human
cgagcguccgggggcgacgugg

SEQ ID NO: 1348997 - RNA, 20 nt, Human
cgccucugcggcucccucaa

SEQ ID NO: 1348998 - RNA, 22 nt, Human
cgcucgcgaagggccugagcac

SEQ ID NO: 1348999 - RNA, 23 nt, Human
cuccaagacaggcucuuccacuc

SEQ ID NO: 1349000 - RNA, 23 nt, Human
cucuggcuguccaugcuuaaccc

SEQ ID NO: 1349001 - RNA, 18 nt, Human
cugagcaguagcugcagg

SEQ ID NO: 1349002 - RNA, 18 nt, Human
cugcggcucccucaaccu

SEQ ID NO: 1349003 - RNA, 21 nt, Human
cuuuuggcucuccagugugaa

SEQ ID NO: 1349004 - RNA, 18 nt, Human
gagccaaaccggacggcc

SEQ ID NO: 1349005 - RNA, 19 nt, Human
gcccagagccuucacaagg

SEQ ID NO: 1349006 - RNA, 24 nt, Human
gcccagagccuucacaagggaccc

SEQ ID NO: 1349007 - RNA, 21 nt, Human
ggagagccccgcucgcgaagg

SEQ ID NO: 1349008 - RNA, 18 nt, Human
ggagaggugagccaaacc

SEQ ID NO: 1349009 - RNA, 23 nt, Human
ggcaccuuuuugggcugaaaaua

SEQ ID NO: 1349010 - RNA, 19 nt, Human
ggccucugcagccgcccag

SEQ ID NO: 1349011 - RNA, 24 nt, Human
gggcgccccagcguuucugagcag

SEQ ID NO: 1349012 - RNA, 18 nt, Human
uaaaaaaaaaucaguggc

SEQ ID NO: 1349013 - RNA, 22 nt, Human
uauuuuauauaaaauaagaagu

SEQ ID NO: 1349014 - RNA, 25 nt, Human
uccaccagcagaaaaaaaauuacca

SEQ ID NO: 1349015 - RNA, 22 nt, Human
uccaccagcagaaaaaauuuaa

SEQ ID NO: 1349016 - RNA, 18 nt, Human
uccaugcuuaacccuaca

SEQ ID NO: 1349017 - RNA, 21 nt, Human
ucccaaggaaucaaacauuuu

SEQ ID NO: 1349018 - RNA, 18 nt, Human
uccccaggaaaaucucca

SEQ ID NO: 1349019 - RNA, 20 nt, Human
ucugccagggugggcgcccc

SEQ ID NO: 1349020 - RNA, 23 nt, Human
ugaaacaugauuaauuuuaaugu

SEQ ID NO: 1349021 - RNA, 19 nt, Human
ugagauuauuuggaguugg

SEQ ID NO: 1349022 - RNA, 21 nt, Human
ugcaguuggggugggaaggga

SEQ ID NO: 1349023 - RNA, 18 nt, Human
ugccagggugggcgcccc

SEQ ID NO: 1349024 - RNA, 23 nt, Human
ugcuaagaaaauauagcaauauu

SEQ ID NO: 1349025 - RNA, 22 nt, Human
uggcaauauuuauauacaaggu

SEQ ID NO: 1349026 - RNA, 23 nt, Human
uggcauagcauugaacuggggaa

SEQ ID NO: 1349027 - RNA, 19 nt, Human
ugggcugaaaauaguugau

SEQ ID NO: 1349028 - RNA, 18 nt, Human
ugugauaagguuucuuuc

SEQ ID NO: 1349029 - RNA, 21 nt, Human
uuaacccuacauuuacuacau

SEQ ID NO: 1349030 - RNA, 19 nt, Human
uuagaccugcaguuggggu

SEQ ID NO: 1349031 - RNA, 24 nt, Human
uucaucuuuguucaacuuuuugcu

SEQ ID NO: 1349032 - RNA, 19 nt, Human
uuccuggccugcaggagua

SEQ ID NO: 1349033 - RNA, 20 nt, Human
uuccuggccugcaggaguau

SEQ ID NO: 1349034 - RNA, 24 nt, Human
uuccugggagaggugagccaaacc

SEQ ID NO: 1349035 - RNA, 23 nt, Human
uuggggugggaagggagcugcuu

SEQ ID NO: 1349036 - RNA, 24 nt, Human
uuucauagaaacaaauauaucacc

SEQ ID NO: 1349037 - RNA, 18 nt, Human
uuuuacagauuuuuagua

SEQ ID NO: 1349038 - RNA, 26 nt, Human
aaaaacguaggaaaaccagauauaac

SEQ ID NO: 1349039 - RNA, 20 nt, Human
aaaacuucucaaguggccau

SEQ ID NO: 1349040 - RNA, 24 nt, Human
aaaccagauauaacaagcucuaaa

SEQ ID NO: 1349041 - RNA, 24 nt, Human
aaaccggucccgccagacccgcgc

SEQ ID NO: 1349042 - RNA, 22 nt, Human
aaaggcaccacacacacgcaca

SEQ ID NO: 1349043 - RNA, 19 nt, Human
aacaagcucuaaagggcua

SEQ ID NO: 1349044 - RNA, 21 nt, Human
aagaguccauguuaagucacc

SEQ ID NO: 1349045 - RNA, 20 nt, Human
aaugcuacuggaauggaaua

SEQ ID NO: 1349046 - RNA, 20 nt, Human
aauuucaguuauaaaauggg

SEQ ID NO: 1349047 - RNA, 21 nt, Human
agaaaucacuauuuauccaca

SEQ ID NO: 1349048 - RNA, 20 nt, Human
agaccugacaaaucauauua

SEQ ID NO: 1349049 - RNA, 21 nt, Human
agauagucaaacagcuagagc

SEQ ID NO: 1349050 - RNA, 19 nt, Human
agcaaugaaacacaggaga

SEQ ID NO: 1349051 - RNA, 21 nt, Human
agccucaggcauuauugaucc

SEQ ID NO: 1349052 - RNA, 23 nt, Human
agguagaaacugucaacagcagc

SEQ ID NO: 1349053 - RNA, 19 nt, Human
augaaacacaggagauaaa

SEQ ID NO: 1349054 - RNA, 18 nt, Human
caaaagaugacugcaggu

SEQ ID NO: 1349055 - RNA, 27 nt, Human
cacacacacgcacacacacgguucucu

SEQ ID NO: 1349056 - RNA, 20 nt, Human
cacacacgcacacacacggu

SEQ ID NO: 1349057 - RNA, 20 nt, Human
cacauuuaaaaaccagcaca

SEQ ID NO: 1349058 - RNA, 21 nt, Human
caccacacacacgcacacaca

SEQ ID NO: 1349059 - RNA, 21 nt, Human
cagcacaacuccucuagugaa

SEQ ID NO: 1349060 - RNA, 25 nt, Human
cagcagccauggcaaccuucucucu

SEQ ID NO: 1349061 - RNA, 23 nt, Human
cauuauugauccugugccaucca

SEQ ID NO: 1349062 - RNA, 19 nt, Human
ccaaaccggucccgccaga

SEQ ID NO: 1349063 - RNA, 27 nt, Human
ccacacacacgcacacacacgguucuc

SEQ ID NO: 1349064 - RNA, 21 nt, Human
cccgcgcggccgccgcccccg

SEQ ID NO: 1349065 - RNA, 20 nt, Human
ccgucucggccgccggagcu

SEQ ID NO: 1349066 - RNA, 18 nt, Human
cgucucggccgccggagc

SEQ ID NO: 1349067 - RNA, 31 nt, Human
cugucaacagcagccauggcaaccuucucuu

SEQ ID NO: 1349068 - RNA, 19 nt, Human
gggaaaaagcacugaaaug

SEQ ID NO: 1349069 - RNA, 18 nt, Human
gucagaggcugagaaauc

SEQ ID NO: 1349070 - RNA, 18 nt, Human
guggcucuagaacaacag

SEQ ID NO: 1349071 - RNA, 27 nt, Human
guucugggccgucagcagucgacuuuc

SEQ ID NO: 1349072 - RNA, 22 nt, Human
uaacaagcucuaaagggcuaaa

SEQ ID NO: 1349073 - RNA, 22 nt, Human
uaagaccugacaaaucauauua

SEQ ID NO: 1349074 - RNA, 23 nt, Human
uaagcuucuaacuuauauugaca

SEQ ID NO: 1349075 - RNA, 23 nt, Human
uacaagagguagaaacugucaac

SEQ ID NO: 1349076 - RNA, 20 nt, Human
uauuccauaaauacuuacua

SEQ ID NO: 1349077 - RNA, 23 nt, Human
ucaaacagcuagagcuauacaau

SEQ ID NO: 1349078 - RNA, 27 nt, Human
ucagcaguauguggcuccguccuucuc

SEQ ID NO: 1349079 - RNA, 23 nt, Human
ucaggcauuauugauccugugcc

SEQ ID NO: 1349080 - RNA, 18 nt, Human
ucauuccauagcagauuu

SEQ ID NO: 1349081 - RNA, 22 nt, Human
uccauaaauacuuacuauuucu

SEQ ID NO: 1349082 - RNA, 22 nt, Human
ucccuguacaagagguagaaac

SEQ ID NO: 1349083 - RNA, 22 nt, Human
ugaaauaccaguugaagugcag

SEQ ID NO: 1349084 - RNA, 21 nt, Human
ugaaauuauaagaccugacaa

SEQ ID NO: 1349085 - RNA, 24 nt, Human
ugaauaaucagcaaugaaacacag

SEQ ID NO: 1349086 - RNA, 23 nt, Human
ugaugcacauuuaaaaaccagca

SEQ ID NO: 1349087 - RNA, 19 nt, Human
ugcaaaugacgaaucaaca

SEQ ID NO: 1349088 - RNA, 27 nt, Human
ugccaguucugggccguuaccaagugg

SEQ ID NO: 1349089 - RNA, 23 nt, Human
uggaauaauauuacauagaaaaa

SEQ ID NO: 1349090 - RNA, 22 nt, Human
ugucaacagcagccauggcaac

SEQ ID NO: 1349091 - RNA, 20 nt, Human
uguggcuccguccuucucuu

SEQ ID NO: 1349092 - RNA, 18 nt, Human
uuagggaaaaagcacuga

SEQ ID NO: 1349093 - RNA, 22 nt, Human
uucacagcacucugacgguauu

SEQ ID NO: 1349094 - RNA, 26 nt, Human
uuccaaaccggucccgccagacccgc

SEQ ID NO: 1349095 - RNA, 18 nt, Human
uuccauagcagauuugaa

SEQ ID NO: 1349096 - RNA, 22 nt, Human
uugaaaaaacacaaauauaaug

SEQ ID NO: 1349097 - RNA, 33 nt, Human
uugaaaaaacacaaauauaauguaggaaguaau

SEQ ID NO: 1349098 - RNA, 18 nt, Human
uuggcaaaacuucucaag

SEQ ID NO: 1349099 - RNA, 24 nt, Human
uuuuuuuuuuuaagcuucuaacuu

SEQ ID NO: 1349100 - RNA, 19 nt, Human
uuuuuuuuuuuuuuuuuaa

SEQ ID NO: 1349101 - RNA, 23 nt, Human
accacugagaagggacccgggcc

SEQ ID NO: 1349102 - RNA, 22 nt, Human
acccccaccuccuccccugagc

SEQ ID NO: 1349103 - RNA, 19 nt, Human
agcaccgagcccuuggggc

SEQ ID NO: 1349104 - RNA, 19 nt, Human
agggguuaggcccaggccc

SEQ ID NO: 1349105 - RNA, 21 nt, Human
caggccaagggguuaggccca

SEQ ID NO: 1349106 - RNA, 18 nt, Human
ccaccugcgaggggagga

SEQ ID NO: 1349107 - RNA, 21 nt, Human
ccccaccuccuccccugagcu

SEQ ID NO: 1349108 - RNA, 23 nt, Human
cccccaccuccuccccugagcua

SEQ ID NO: 1349109 - RNA, 21 nt, Human
ccccucacccgggguaggagc

SEQ ID NO: 1349110 - RNA, 18 nt, Human
cccuccuggacccccacc

SEQ ID NO: 1349111 - RNA, 18 nt, Human
cccugucacgccuccccg

SEQ ID NO: 1349112 - RNA, 22 nt, Human
ccgcgcuccggucccaccgacg

SEQ ID NO: 1349113 - RNA, 19 nt, Human
ccucuggaagcugggccag

SEQ ID NO: 1349114 - RNA, 24 nt, Human
cgcccgcccgcgcuccggucccac

SEQ ID NO: 1349115 - RNA, 20 nt, Human
cggggggccgcgcccgcccg

SEQ ID NO: 1349116 - RNA, 21 nt, Human
cugaagagggcacgaucccac

SEQ ID NO: 1349117 - RNA, 20 nt, Human
cuggacccccaccuccuccc

SEQ ID NO: 1349118 - RNA, 21 nt, Human
gagcuugcccugaagcacaga

SEQ ID NO: 1349119 - RNA, 22 nt, Human
gagcuugcccugaagcacagag

SEQ ID NO: 1349120 - RNA, 22 nt, Human
gaucccccuccuggacccccac

SEQ ID NO: 1349121 - RNA, 20 nt, Human
gcccagggucccucuggaag

SEQ ID NO: 1349122 - RNA, 21 nt, Human
gcccagggucccucuggaagc

SEQ ID NO: 1349123 - RNA, 24 nt, Human
ggccaccccucacccgggguagga

SEQ ID NO: 1349124 - RNA, 21 nt, Human
gggaucccccuccuggacccc

SEQ ID NO: 1349125 - RNA, 19 nt, Human
uacacgugaugucggggac

SEQ ID NO: 1349126 - RNA, 19 nt, Human
uagcaccgagcccuugggg

SEQ ID NO: 1349127 - RNA, 18 nt, Human
ucccaccugcgaggggag

SEQ ID NO: 1349128 - RNA, 18 nt, Human
ucccccuccuggaccccc

SEQ ID NO: 1349129 - RNA, 24 nt, Human
ucccucuggaagcugggccaggcc

SEQ ID NO: 1349130 - RNA, 18 nt, Human
ugaagcacagagcaccac

SEQ ID NO: 1349131 - RNA, 22 nt, Human
ugaagcacagagcaccacugag

SEQ ID NO: 1349132 - RNA, 18 nt, Human
ugcagguaggugagcggg

SEQ ID NO: 1349133 - RNA, 20 nt, Human
ugcccugaagcacagagcac

SEQ ID NO: 1349134 - RNA, 22 nt, Human
ugcgaggggaggaggcuggaga

SEQ ID NO: 1349135 - RNA, 28 nt, Human
ugcgaggggaggaggcuggagaaaggag

SEQ ID NO: 1349136 - RNA, 21 nt, Human
uggaagcugggccaggccaag

SEQ ID NO: 1349137 - RNA, 25 nt, Human
uggcacaaauuuuauuccguuacaa

SEQ ID NO: 1349138 - RNA, 20 nt, Human
uggggcugccccuguggaga

SEQ ID NO: 1349139 - RNA, 19 nt, Human
aaaaggacggggaagacag

SEQ ID NO: 1349140 - RNA, 19 nt, Human
aggacggggaagacaggga

SEQ ID NO: 1349141 - RNA, 26 nt, Human
aggccagaggcgagacugguggaaaa

SEQ ID NO: 1349142 - RNA, 20 nt, Human
cccccacuucuccuccugcc

SEQ ID NO: 1349143 - RNA, 23 nt, Human
ccuccugccucagcucccaggac

SEQ ID NO: 1349144 - RNA, 20 nt, Human
cucccaggaguggccagagg

SEQ ID NO: 1349145 - RNA, 18 nt, Human
cuggcagcgggacagggg

SEQ ID NO: 1349146 - RNA, 19 nt, Human
guggugaggcagucccucc

SEQ ID NO: 1349147 - RNA, 22 nt, Human
ugccucagcucccaggacccag

SEQ ID NO: 1349148 - RNA, 19 nt, Human
uuuuuuuuuuuuuuuuugg

SEQ ID NO: 1349149 - RNA, 23 nt, Human
uuuuuuuuuuuuuuuuugguuuu

SEQ ID NO: 1349150 - RNA, 25 nt, Human
aaacaaaugucuaacaauaggaaac

SEQ ID NO: 1349151 - RNA, 18 nt, Human
aaacuggaaacaaauguc

SEQ ID NO: 1349152 - RNA, 18 nt, Human
aacccgagagagugacaa

SEQ ID NO: 1349153 - RNA, 21 nt, Human
aacccggacgcgacgagacgg

SEQ ID NO: 1349154 - RNA, 20 nt, Human
aaugucuuccgagcaguucu

SEQ ID NO: 1349155 - RNA, 18 nt, Human
acaacccggacgcgacga

SEQ ID NO: 1349156 - RNA, 21 nt, Human
agaaacuggaaacaaaugucu

SEQ ID NO: 1349157 - RNA, 25 nt, Human
agaaaugguauaguaagagauauug

SEQ ID NO: 1349158 - RNA, 26 nt, Human
agaaaugguauaguaagagauauugu

SEQ ID NO: 1349159 - RNA, 21 nt, Human
agaagagguuucuacaauuua

SEQ ID NO: 1349160 - RNA, 24 nt, Human
auaaagagaacuaacucuguuuuu

SEQ ID NO: 1349161 - RNA, 25 nt, Human
aucccagcucucugucccauccauu

SEQ ID NO: 1349162 - RNA, 23 nt, Human
caaugucuuccgagcaguucucu

SEQ ID NO: 1349163 - RNA, 21 nt, Human
ccagucuugaacagucuugaa

SEQ ID NO: 1349164 - RNA, 24 nt, Human
ccauauaugcuccucuccuauucc

SEQ ID NO: 1349165 - RNA, 20 nt, Human
ccuuucgcgagccgggaagc

SEQ ID NO: 1349166 - RNA, 21 nt, Human
cuaccaaugucuuccgagcag

SEQ ID NO: 1349167 - RNA, 20 nt, Human
cucugccauauaugcuccuc

SEQ ID NO: 1349168 - RNA, 22 nt, Human
cugcacaucaccccagucacac

SEQ ID NO: 1349169 - RNA, 22 nt, Human
cuuguaaacuacuccaaaucac

SEQ ID NO: 1349170 - RNA, 30 nt, Human
gagggcacucugaaugaggaaucuuguaaa

SEQ ID NO: 1349171 - RNA, 23 nt, Human
gggaagcuacagaguaacaaccc

SEQ ID NO: 1349172 - RNA, 23 nt, Human
uaacaacccgagagagugacaac

SEQ ID NO: 1349173 - RNA, 23 nt, Human
uaagcccuaaaaugaaauuguga

SEQ ID NO: 1349174 - RNA, 24 nt, Human
uaagcccuaaaaugaaauugugaa

SEQ ID NO: 1349175 - RNA, 20 nt, Human
uaaggaaauccaaucaauca

SEQ ID NO: 1349176 - RNA, 23 nt, Human
uaaggaaauccaaucaaucagaa

SEQ ID NO: 1349177 - RNA, 23 nt, Human
uacauugcuaccuuuuuaugucu

SEQ ID NO: 1349178 - RNA, 19 nt, Human
uacuccaaaucaccagucu

SEQ ID NO: 1349179 - RNA, 24 nt, Human
uaggaaacugguuuaaaaaaauca

SEQ ID NO: 1349180 - RNA, 20 nt, Human
ucacuuguacauuagauccc

SEQ ID NO: 1349181 - RNA, 25 nt, Human
uccucuaccucuuuacucacccuca

SEQ ID NO: 1349182 - RNA, 21 nt, Human
ucuacaauuuacuaucacauu

SEQ ID NO: 1349183 - RNA, 27 nt, Human
ucuacaauuuacuaucacauuuaccca

SEQ ID NO: 1349184 - RNA, 18 nt, Human
ucuuguaaacuacuccaa

SEQ ID NO: 1349185 - RNA, 21 nt, Human
ugucauaaagagaacuaacuc

SEQ ID NO: 1349186 - RNA, 18 nt, Human
uuagaucccagcucucug

SEQ ID NO: 1349187 - RNA, 23 nt, Human
uucacuuguacauuagaucccag

SEQ ID NO: 1349188 - RNA, 21 nt, Human
aaaacaaauguacauacccuu

SEQ ID NO: 1349189 - RNA, 20 nt, Human
aaacaaauguacauacccuu

SEQ ID NO: 1349190 - RNA, 22 nt, Human
acaaaacaaauguacauacccu

SEQ ID NO: 1349191 - RNA, 23 nt, Human
augcaaaauaugaaucuggcuca

SEQ ID NO: 1349192 - RNA, 23 nt, Human
caaaacaaauguacauacccuuc

SEQ ID NO: 1349193 - RNA, 21 nt, Human
caccacgcucuccuaggcagu

SEQ ID NO: 1349194 - RNA, 23 nt, Human
cuuagagaccuccucucuugcuu

SEQ ID NO: 1349195 - RNA, 22 nt, Human
cuucccgcuauuugcugugggu

SEQ ID NO: 1349196 - RNA, 23 nt, Human
gagcuggggccaccacgcucucc

SEQ ID NO: 1349197 - RNA, 25 nt, Human
gcaaaaaguggcacagaggcuaucc

SEQ ID NO: 1349198 - RNA, 24 nt, Human
gcaaaauaugaaucuggcucaaag

SEQ ID NO: 1349199 - RNA, 18 nt, Human
ggcaaaaaguggcacaga

SEQ ID NO: 1349200 - RNA, 21 nt, Human
ucuggcaaaaaguggcacaga

SEQ ID NO: 1349201 - RNA, 25 nt, Human
ugacacacaaaacaaauguacauac

SEQ ID NO: 1349202 - RNA, 22 nt, Human
uggcucaaagacacucuggcaa

SEQ ID NO: 1349203 - RNA, 26 nt, Human
uuagagaccuccucucuugcuuuucu

SEQ ID NO: 1349204 - RNA, 20 nt, Human
aaaaaaauacuugaacagaa

SEQ ID NO: 1349205 - RNA, 19 nt, Human
aaaaaaggacugugcugug

SEQ ID NO: 1349206 - RNA, 27 nt, Human
aaaacaccacccucuucuccuggcuga

SEQ ID NO: 1349207 - RNA, 23 nt, Human
aaacaucaugccuacuccaaagc

SEQ ID NO: 1349208 - RNA, 22 nt, Human
aacacguggugcaucagagaca

SEQ ID NO: 1349209 - RNA, 19 nt, Human
aaccccauguaggccggcg

SEQ ID NO: 1349210 - RNA, 25 nt, Human
aagcagccaucucccagugggucug

SEQ ID NO: 1349211 - RNA, 23 nt, Human
aagcuagccacuauucugagaac

SEQ ID NO: 1349212 - RNA, 24 nt, Human
aagcuagccacuauucugagaacg

SEQ ID NO: 1349213 - RNA, 24 nt, Human
aagcucuuuuuuuacccucuuuuc

SEQ ID NO: 1349214 - RNA, 20 nt, Human
aaguggcaaugucccaugaa

SEQ ID NO: 1349215 - RNA, 23 nt, Human
aaguggcaaugucccaugaaggc

SEQ ID NO: 1349216 - RNA, 19 nt, Human
acauaguuacaguuccuac

SEQ ID NO: 1349217 - RNA, 20 nt, Human
accuggagccccucccagac

SEQ ID NO: 1349218 - RNA, 23 nt, Human
acugcugucagcaugcccaaaga

SEQ ID NO: 1349219 - RNA, 19 nt, Human
aggaacagaaaaaaggacc

SEQ ID NO: 1349220 - RNA, 19 nt, Human
aggcaggaggauguuaaac

SEQ ID NO: 1349221 - RNA, 21 nt, Human
aggcaggaggauguuaaacuu

SEQ ID NO: 1349222 - RNA, 24 nt, Human
aggcaggaggauguuaaacuuggu

SEQ ID NO: 1349223 - RNA, 18 nt, Human
caccugccacuuccgcgu

SEQ ID NO: 1349224 - RNA, 20 nt, Human
cagaauaugcuguacagaac

SEQ ID NO: 1349225 - RNA, 20 nt, Human
cagacgguaaucccaccccu

SEQ ID NO: 1349226 - RNA, 25 nt, Human
cagcaacauucucuaguguuccggc

SEQ ID NO: 1349227 - RNA, 18 nt, Human
cagcaugcccaaagagaa

SEQ ID NO: 1349228 - RNA, 19 nt, Human
cagccugcgccuuacagcg

SEQ ID NO: 1349229 - RNA, 22 nt, Human
cagcuuaaggagagcaaaaaua

SEQ ID NO: 1349230 - RNA, 18 nt, Human
ccacgaccugggagugcu

SEQ ID NO: 1349231 - RNA, 22 nt, Human
ccacgggcguccacuucugcag

SEQ ID NO: 1349232 - RNA, 22 nt, Human
cccaccccuguucucacacucu

SEQ ID NO: 1349233 - RNA, 19 nt, Human
cccacgggggggggggggg

SEQ ID NO: 1349234 - RNA, 24 nt, Human
cccacggggggggggggggagugu

SEQ ID NO: 1349235 - RNA, 22 nt, Human
ccccaaagagaacagggcuugc

SEQ ID NO: 1349236 - RNA, 20 nt, Human
ccccacgggggggggggggg

SEQ ID NO: 1349237 - RNA, 24 nt, Human
ccccauguaggccggcgagcaguu

SEQ ID NO: 1349238 - RNA, 18 nt, Human
cccccgucaccugccacu

SEQ ID NO: 1349239 - RNA, 21 nt, Human
ccccgcugccgucgccgucgc

SEQ ID NO: 1349240 - RNA, 23 nt, Human
ccccgcugccgucgccgucgccg

SEQ ID NO: 1349241 - RNA, 20 nt, Human
ccccucccagacagacgguu

SEQ ID NO: 1349242 - RNA, 23 nt, Human
cccgcaccccgugcugcacagcc

SEQ ID NO: 1349243 - RNA, 22 nt, Human
cccuguucucacacucuuccug

SEQ ID NO: 1349244 - RNA, 18 nt, Human
ccgcauaugaagaugcua

SEQ ID NO: 1349245 - RNA, 18 nt, Human
ccgcguccacgcugcugc

SEQ ID NO: 1349246 - RNA, 23 nt, Human
ccggcuucaagcagcgcuuguca

SEQ ID NO: 1349247 - RNA, 24 nt, Human
ccgucgccgucgccgccgccgccg

SEQ ID NO: 1349248 - RNA, 24 nt, Human
ccgucgccgucgccgucgccgccg

SEQ ID NO: 1349249 - RNA, 18 nt, Human
ccuacugacugccccagc

SEQ ID NO: 1349250 - RNA, 22 nt, Human
ccuguucucacacucuuccugg

SEQ ID NO: 1349251 - RNA, 20 nt, Human
cgagggggcagaggaaggcg

SEQ ID NO: 1349252 - RNA, 19 nt, Human
cgccagcgccagccgcguc

SEQ ID NO: 1349253 - RNA, 21 nt, Human
cguccccgcugccgucgccgu

SEQ ID NO: 1349254 - RNA, 20 nt, Human
cucucagcaacauucucuag

SEQ ID NO: 1349255 - RNA, 18 nt, Human
cugagaacgucagaaaag

SEQ ID NO: 1349256 - RNA, 19 nt, Human
gaaaaacugcugucagcau

SEQ ID NO: 1349257 - RNA, 20 nt, Human
gacccagcuccaguacuggg

SEQ ID NO: 1349258 - RNA, 20 nt, Human
gagacccagcuccaguacug

SEQ ID NO: 1349259 - RNA, 18 nt, Human
gcacgcacacgugaaaac

SEQ ID NO: 1349260 - RNA, 20 nt, Human
gcagaaggcaugugccuaca

SEQ ID NO: 1349261 - RNA, 19 nt, Human
gcccgcgugaaaacaccac

SEQ ID NO: 1349262 - RNA, 20 nt, Human
gcccgcgugaaaacaccacc

SEQ ID NO: 1349263 - RNA, 21 nt, Human
gcuggcaggagggaagcuuga

SEQ ID NO: 1349264 - RNA, 20 nt, Human
gcuugguguugccguugugg

SEQ ID NO: 1349265 - RNA, 20 nt, Human
ggaccugggagugcucagcg

SEQ ID NO: 1349266 - RNA, 24 nt, Human
ggcauccgcaucugcuggcacaca

SEQ ID NO: 1349267 - RNA, 21 nt, Human
ggucugcggggugaacgaggg

SEQ ID NO: 1349268 - RNA, 21 nt, Human
guuugaagcuagccacuauuc

SEQ ID NO: 1349269 - RNA, 21 nt, Human
uacaguuccuacugacugccc

SEQ ID NO: 1349270 - RNA, 21 nt, Human
uaccuggagccccucccagac

SEQ ID NO: 1349271 - RNA, 20 nt, Human
uacuugaacagaauaugcug

SEQ ID NO: 1349272 - RNA, 19 nt, Human
uagaaagggcucauccgug

SEQ ID NO: 1349273 - RNA, 20 nt, Human
uaugcuguacagaacuaggg

SEQ ID NO: 1349274 - RNA, 22 nt, Human
ucacacucuuccuggcauccgc

SEQ ID NO: 1349275 - RNA, 22 nt, Human
ucaccugccacuuccgcguccc

SEQ ID NO: 1349276 - RNA, 21 nt, Human
ucagcccuguggagaaauaca

SEQ ID NO: 1349277 - RNA, 21 nt, Human
ucaggcaggaggauguuaaac

SEQ ID NO: 1349278 - RNA, 26 nt, Human
uccacaguaggaacagaaaaaaggac

SEQ ID NO: 1349279 - RNA, 23 nt, Human
ucccaccccuguucucacacucu

SEQ ID NO: 1349280 - RNA, 24 nt, Human
ucccgcuacugcugccguccccgc

SEQ ID NO: 1349281 - RNA, 19 nt, Human
uccuccucccccgcacccc

SEQ ID NO: 1349282 - RNA, 22 nt, Human
uccuggcugagaagaucaaagc

SEQ ID NO: 1349283 - RNA, 24 nt, Human
ucgccgucgccgccgccgccgccg

SEQ ID NO: 1349284 - RNA, 24 nt, Human
ucgccgucgccgucgccgccgccg

SEQ ID NO: 1349285 - RNA, 20 nt, Human
ucgugacccgcguggccguu

SEQ ID NO: 1349286 - RNA, 18 nt, Human
ucuaaacaauacuuuuga

SEQ ID NO: 1349287 - RNA, 19 nt, Human
ucuccuggcugagaagauc

SEQ ID NO: 1349288 - RNA, 19 nt, Human
ucuguauacaagcauggag

SEQ ID NO: 1349289 - RNA, 18 nt, Human
ucuguccccggaaguggc

SEQ ID NO: 1349290 - RNA, 22 nt, Human
ugaaaacaccacccucuucucc

SEQ ID NO: 1349291 - RNA, 22 nt, Human
ugaacagaauaugcuguacaga

SEQ ID NO: 1349292 - RNA, 21 nt, Human
ugacacacgguggaaccugca

SEQ ID NO: 1349293 - RNA, 20 nt, Human
ugacugccccagccacgacc

SEQ ID NO: 1349294 - RNA, 24 nt, Human
ugagauggacguaccuggagaccc

SEQ ID NO: 1349295 - RNA, 19 nt, Human
ugagcaggaaagucuaaac

SEQ ID NO: 1349296 - RNA, 18 nt, Human
ugaggaccugggagugcu

SEQ ID NO: 1349297 - RNA, 21 nt, Human
ugaggcuaugaaaaacugcug

SEQ ID NO: 1349298 - RNA, 19 nt, Human
ugcaaacaaggcaugagau

SEQ ID NO: 1349299 - RNA, 21 nt, Human
ugcaggaggucagcccugugg

SEQ ID NO: 1349300 - RNA, 21 nt, Human
ugccuacuccaaagccuucuu

SEQ ID NO: 1349301 - RNA, 21 nt, Human
ugcucccgcuacugcugccgu

SEQ ID NO: 1349302 - RNA, 26 nt, Human
ugcugcacagccugcgccuuacagcg

SEQ ID NO: 1349303 - RNA, 22 nt, Human
ugcuggcacacacccccgucac

SEQ ID NO: 1349304 - RNA, 25 nt, Human
uggcaaugucccaugaaggcguggc

SEQ ID NO: 1349305 - RNA, 24 nt, Human
ugggagugcugaggaccugggagu

SEQ ID NO: 1349306 - RNA, 19 nt, Human
uucagcaccguauagacag

SEQ ID NO: 1349307 - RNA, 24 nt, Human
uugcuggaggccagugccaagggc

SEQ ID NO: 1349308 - RNA, 25 nt, Human
aaaaaaaaaaaaaauaucaaagccu

SEQ ID NO: 1349309 - RNA, 18 nt, Human
aaaagaaauucaugccau

SEQ ID NO: 1349310 - RNA, 22 nt, Human
aacuugacacagucccagaagc

SEQ ID NO: 1349311 - RNA, 23 nt, Human
aagaaaaaaagauauuuuuacac

SEQ ID NO: 1349312 - RNA, 22 nt, Human
aagaaaucuagaggcugacuuu

SEQ ID NO: 1349313 - RNA, 18 nt, Human
aagagcgcccugcuacag

SEQ ID NO: 1349314 - RNA, 22 nt, Human
aaguacagucacaauauugugc

SEQ ID NO: 1349315 - RNA, 18 nt, Human
aagugucauccauucuuu

SEQ ID NO: 1349316 - RNA, 20 nt, Human
aaguuucucgggcacaagcu

SEQ ID NO: 1349317 - RNA, 22 nt, Human
aauuaaaaaaaaaaaaaauauc

SEQ ID NO: 1349318 - RNA, 25 nt, Human
acaagaaaaaauugaacuccuucca

SEQ ID NO: 1349319 - RNA, 20 nt, Human
acacagucccagaagccaag

SEQ ID NO: 1349320 - RNA, 22 nt, Human
acagucccagaagccaagcuca

SEQ ID NO: 1349321 - RNA, 18 nt, Human
acuuuguaagugaaagcu

SEQ ID NO: 1349322 - RNA, 21 nt, Human
agcauuuaaaauuuagaaaua

SEQ ID NO: 1349323 - RNA, 20 nt, Human
agcauuucagauguuuccag

SEQ ID NO: 1349324 - RNA, 19 nt, Human
agccuguuugguuucaugu

SEQ ID NO: 1349325 - RNA, 18 nt, Human
agcuguuacuucaacaca

SEQ ID NO: 1349326 - RNA, 18 nt, Human
aggcagacugaaacuugg

SEQ ID NO: 1349327 - RNA, 21 nt, Human
aggcaggaggaucagcacaug

SEQ ID NO: 1349328 - RNA, 21 nt, Human
augagcccucuagccucaaaa

SEQ ID NO: 1349329 - RNA, 21 nt, Human
auggaggguuuuagaucucca

SEQ ID NO: 1349330 - RNA, 23 nt, Human
auggcaauaaaguuaaaggauuc

SEQ ID NO: 1349331 - RNA, 25 nt, Human
auuaacacaguuuuuaaaguagcac

SEQ ID NO: 1349332 - RNA, 22 nt, Human
caacugaauuugccuuggcugg

SEQ ID NO: 1349333 - RNA, 24 nt, Human
caacuugacacagucccagaagcc

SEQ ID NO: 1349334 - RNA, 18 nt, Human
caagaggaaaggauuuuc

SEQ ID NO: 1349335 - RNA, 18 nt, Human
caagcccuagauccaacu

SEQ ID NO: 1349336 - RNA, 23 nt, Human
cacaaaagagcaaaaacuggagg

SEQ ID NO: 1349337 - RNA, 22 nt, Human
cacucuaacuuccaggccuaag

SEQ ID NO: 1349338 - RNA, 18 nt, Human
caggaggccacagacugc

SEQ ID NO: 1349339 - RNA, 21 nt, Human
caguacaacacaaaagagcaa

SEQ ID NO: 1349340 - RNA, 24 nt, Human
caguuuauucaaacuauuucaucu

SEQ ID NO: 1349341 - RNA, 20 nt, Human
ccaagcuucuggaaggaaga

SEQ ID NO: 1349342 - RNA, 23 nt, Human
cccuucucagcccaugaaggagc

SEQ ID NO: 1349343 - RNA, 19 nt, Human
cccuugguuggggagaucc

SEQ ID NO: 1349344 - RNA, 18 nt, Human
ccuaaaaauauguagaga

SEQ ID NO: 1349345 - RNA, 19 nt, Human
ccuacaauggaacuuaaga

SEQ ID NO: 1349346 - RNA, 21 nt, Human
ccuagauccaacugaauuugc

SEQ ID NO: 1349347 - RNA, 18 nt, Human
ccuuacaccugagucugu

SEQ ID NO: 1349348 - RNA, 21 nt, Human
ccuuccuucuuuccuuuuacc

SEQ ID NO: 1349349 - RNA, 22 nt, Human
cucaaggacggguaaagguaag

SEQ ID NO: 1349350 - RNA, 25 nt, Human
cuccuggaccgcuguucucaaggac

SEQ ID NO: 1349351 - RNA, 22 nt, Human
cugaaggcccucuugaaacuga

SEQ ID NO: 1349352 - RNA, 18 nt, Human
cuuccugauuccagaagu

SEQ ID NO: 1349353 - RNA, 23 nt, Human
cuuuccuuuuaccuccauaagaa

SEQ ID NO: 1349354 - RNA, 24 nt, Human
gaaaaaaaaauucauauccuaaaa

SEQ ID NO: 1349355 - RNA, 25 nt, Human
gaaaaaaagauauuuuuacacgaaa

SEQ ID NO: 1349356 - RNA, 24 nt, Human
gaaaaaaaggacaccaaguaaugu

SEQ ID NO: 1349357 - RNA, 27 nt, Human
gaaggaagagagcaguguggcagaggg

SEQ ID NO: 1349358 - RNA, 22 nt, Human
gagcaguguggcagagggugug

SEQ ID NO: 1349359 - RNA, 19 nt, Human
gagcccucuagccucaaaa

SEQ ID NO: 1349360 - RNA, 24 nt, Human
gcauuucagauguuuccaguuuuu

SEQ ID NO: 1349361 - RNA, 20 nt, Human
gccacagcauauaauagcug

SEQ ID NO: 1349362 - RNA, 19 nt, Human
ggguaagaaaucuagaggc

SEQ ID NO: 1349363 - RNA, 21 nt, Human
gggucuccuggccaaaauucc

SEQ ID NO: 1349364 - RNA, 25 nt, Human
gggugugucuguguguauaggcagu

SEQ ID NO: 1349365 - RNA, 18 nt, Human
gucaucucaucccagauu

SEQ ID NO: 1349366 - RNA, 23 nt, Human
uaaaaaaaaaaaaaauaucaaag

SEQ ID NO: 1349367 - RNA, 25 nt, Human
uaacauaaauagagcauuucagaug

SEQ ID NO: 1349368 - RNA, 19 nt, Human
uaacuuccaggccuaagau

SEQ ID NO: 1349369 - RNA, 20 nt, Human
uaagucacuggacaaucuac

SEQ ID NO: 1349370 - RNA, 24 nt, Human
uaauaaacuacugccucauuucuu

SEQ ID NO: 1349371 - RNA, 20 nt, Human
uaauuuaggaaaugauagcc

SEQ ID NO: 1349372 - RNA, 20 nt, Human
uacaacacaaaagagcaaaa

SEQ ID NO: 1349373 - RNA, 25 nt, Human
uacauccgucaucucaucccagauu

SEQ ID NO: 1349374 - RNA, 24 nt, Human
uaccaaggaagaagaaucaagcaa

SEQ ID NO: 1349375 - RNA, 20 nt, Human
uaccuauucugcuuagugac

SEQ ID NO: 1349376 - RNA, 19 nt, Human
uagaacuaaaggcaggagg

SEQ ID NO: 1349377 - RNA, 21 nt, Human
uaggaaaugauagcuuuccac

SEQ ID NO: 1349378 - RNA, 24 nt, Human
uaucagaaaagugcagcagguuuc

SEQ ID NO: 1349379 - RNA, 21 nt, Human
uaugaacauagcuuuucuucc

SEQ ID NO: 1349380 - RNA, 18 nt, Human
ucacaauauugugcaguc

SEQ ID NO: 1349381 - RNA, 22 nt, Human
ucacuggacaaucuacccagcu

SEQ ID NO: 1349382 - RNA, 20 nt, Human
uccaauuuuaauauccagau

SEQ ID NO: 1349383 - RNA, 20 nt, Human
uccacaaaaguuaacuucuc

SEQ ID NO: 1349384 - RNA, 24 nt, Human
ucccaagaggaaaggauuuucuuc

SEQ ID NO: 1349385 - RNA, 18 nt, Human
ucccagauucaagaacuc

SEQ ID NO: 1349386 - RNA, 23 nt, Human
uccuggccaaaauuccccaaagc

SEQ ID NO: 1349387 - RNA, 20 nt, Human
uccugguuuccccuucucag

SEQ ID NO: 1349388 - RNA, 20 nt, Human
ucuccuggccaaaauucccc

SEQ ID NO: 1349389 - RNA, 20 nt, Human
ucugaaggcgcacccuacaa

SEQ ID NO: 1349390 - RNA, 22 nt, Human
ucuugggcaguuuucaagcccu

SEQ ID NO: 1349391 - RNA, 18 nt, Human
ugaagacagaaaaguggu

SEQ ID NO: 1349392 - RNA, 21 nt, Human
ugaaggcccucuugaaacuga

SEQ ID NO: 1349393 - RNA, 21 nt, Human
ugaauuguuauuuuaccaguu

SEQ ID NO: 1349394 - RNA, 22 nt, Human
ugacuuugguucuguuuuuagg

SEQ ID NO: 1349395 - RNA, 19 nt, Human
uggaaggaagagagcagug

SEQ ID NO: 1349396 - RNA, 20 nt, Human
uggccaaaauuccccaaagc

SEQ ID NO: 1349397 - RNA, 24 nt, Human
uguuugguuucauguuucaggguc

SEQ ID NO: 1349398 - RNA, 20 nt, Human
uucugaauuaaaaaaaaaag

SEQ ID NO: 1349399 - RNA, 20 nt, Human
uucuuccugauuccagaagu

SEQ ID NO: 1349400 - RNA, 18 nt, Human
uugaaaaauaaaaguaua

SEQ ID NO: 1349401 - RNA, 18 nt, Human
uugguuggggagauccug

SEQ ID NO: 1349402 - RNA, 24 nt, Human
uuguguucaguacaacacaaaaga

SEQ ID NO: 1349403 - RNA, 21 nt, Human
uuuaaaguguacaguucagug

SEQ ID NO: 1349404 - RNA, 26 nt, Human
uuuaagauaaaaaaaaaaaaaaaaaa

SEQ ID NO: 1349405 - RNA, 21 nt, Human
uuuaaguucuguucuagucuu

SEQ ID NO: 1349406 - RNA, 26 nt, Human
uuuagaguaugaacauagcuuuucuu

SEQ ID NO: 1349407 - RNA, 21 nt, Human
uuuccuuccuucuuuccuuuu

SEQ ID NO: 1349408 - RNA, 27 nt, Human
aggaauauugggaggaaaccgguaccc

SEQ ID NO: 1349409 - RNA, 22 nt, Human
gggcguugcugcaaagcauccu

SEQ ID NO: 1349410 - RNA, 21 nt, Human
ugagaaggaauauugggagga

SEQ ID NO: 1349411 - RNA, 19 nt, Human
uugcugcaaagcauccugg

SEQ ID NO: 1349412 - RNA, 23 nt, Human
aaacgaaauaaacccaaggaacc

SEQ ID NO: 1349413 - RNA, 21 nt, Human
aaagcaagacgaaacccaccc

SEQ ID NO: 1349414 - RNA, 21 nt, Human
aacaguggccgcucagggucc

SEQ ID NO: 1349415 - RNA, 23 nt, Human
aacccacccagacagcucuuccg

SEQ ID NO: 1349416 - RNA, 22 nt, Human
aagcaagacgaaacccacccag

SEQ ID NO: 1349417 - RNA, 20 nt, Human
aagcacccuccguccgggga

SEQ ID NO: 1349418 - RNA, 20 nt, Human
aagguggagaagagagagga

SEQ ID NO: 1349419 - RNA, 26 nt, Human
aauaucuggugauaauaauuuuuucu

SEQ ID NO: 1349420 - RNA, 20 nt, Human
agacgaaacccacccagaca

SEQ ID NO: 1349421 - RNA, 22 nt, Human
agacgaaacccacccagacagc

SEQ ID NO: 1349422 - RNA, 18 nt, Human
agaggaaaacgaaauaaa

SEQ ID NO: 1349423 - RNA, 18 nt, Human
agcgcagcgcgaaagggg

SEQ ID NO: 1349424 - RNA, 18 nt, Human
agggccccaacaguggcc

SEQ ID NO: 1349425 - RNA, 22 nt, Human
aguauguuuuuggagcacagga

SEQ ID NO: 1349426 - RNA, 24 nt, Human
auccccgcuuucuucucuccuccc

SEQ ID NO: 1349427 - RNA, 19 nt, Human
auguuuuuggagcacagga

SEQ ID NO: 1349428 - RNA, 23 nt, Human
caaauaauccccugccuugcuca

SEQ ID NO: 1349429 - RNA, 24 nt, Human
caaggcaaaaaggcugugagagca

SEQ ID NO: 1349430 - RNA, 18 nt, Human
cacccuccguccggggac

SEQ ID NO: 1349431 - RNA, 26 nt, Human
ccacccagacagcucuuccgacuccc

SEQ ID NO: 1349432 - RNA, 25 nt, Human
ccacccucuacaccucaaauaaucc

SEQ ID NO: 1349433 - RNA, 25 nt, Human
ccagacagcucuuccgacucccaga

SEQ ID NO: 1349434 - RNA, 24 nt, Human
ccccaacaguggccgcucaggguc

SEQ ID NO: 1349435 - RNA, 19 nt, Human
ccucccagcuggaagugaa

SEQ ID NO: 1349436 - RNA, 20 nt, Human
cgaaauaaacccaaggaacc

SEQ ID NO: 1349437 - RNA, 19 nt, Human
cggccgaggcgccacgcgg

SEQ ID NO: 1349438 - RNA, 25 nt, Human
gaaccaaugcuacucgcgaagccga

SEQ ID NO: 1349439 - RNA, 18 nt, Human
gacuggguggcggugggg

SEQ ID NO: 1349440 - RNA, 20 nt, Human
gagaggaaaacgaaauaaac

SEQ ID NO: 1349441 - RNA, 21 nt, Human
gagcacgcuacagcgcagcgc

SEQ ID NO: 1349442 - RNA, 22 nt, Human
gaggcgccacgcggggccgcgg

SEQ ID NO: 1349443 - RNA, 22 nt, Human
ggcgacuaagguggagaagaga

SEQ ID NO: 1349444 - RNA, 20 nt, Human
ggggccgcggcucgcccugg

SEQ ID NO: 1349445 - RNA, 22 nt, Human
gguggagaagagagaggaaaac

SEQ ID NO: 1349446 - RNA, 21 nt, Human
gucucggcuucgcuucccacc

SEQ ID NO: 1349447 - RNA, 19 nt, Human
uacucgcgaagccgaaguc

SEQ ID NO: 1349448 - RNA, 21 nt, Human
ucagcguccagacccgcaggc

SEQ ID NO: 1349449 - RNA, 21 nt, Human
ucccacccucuacaccucaaa

SEQ ID NO: 1349450 - RNA, 21 nt, Human
ucgcuucccacccucuacacc

SEQ ID NO: 1349451 - RNA, 19 nt, Human
ucuaugccaggcagugccc

SEQ ID NO: 1349452 - RNA, 21 nt, Human
ucuggcaguacagccuucuuc

SEQ ID NO: 1349453 - RNA, 22 nt, Human
ucuggugauaauaauuuuuucu

SEQ ID NO: 1349454 - RNA, 20 nt, Human
ugaaaagcacccuccguccg

SEQ ID NO: 1349455 - RNA, 23 nt, Human
uggaagugaaaagcacccuccuc

SEQ ID NO: 1349456 - RNA, 20 nt, Human
ugucaggugguugaaaaacu

SEQ ID NO: 1349457 - RNA, 22 nt, Human
uucaaggcaaaaaggcugugag

SEQ ID NO: 1349458 - RNA, 23 nt, Human
uucaaggcaaaaaggcugugaga

SEQ ID NO: 1349459 - RNA, 19 nt, Human
uucccacccucuacaccuc

SEQ ID NO: 1349460 - RNA, 28 nt, Human
uuccucucugaagaccugauuccuuaaa

SEQ ID NO: 1349461 - RNA, 20 nt, Human
uuuggagcacaggauggaga

SEQ ID NO: 1349462 - RNA, 22 nt, Human
aagcgcccggagcacugagcag

SEQ ID NO: 1349463 - RNA, 20 nt, Human
aggcagaagaaagagcaugg

SEQ ID NO: 1349464 - RNA, 20 nt, Human
agugauggagguaucaggga

SEQ ID NO: 1349465 - RNA, 24 nt, Human
cagaagaaagagcauguuucccau

SEQ ID NO: 1349466 - RNA, 18 nt, Human
cagcaggacccaagccag

SEQ ID NO: 1349467 - RNA, 23 nt, Human
cagucugugccugccuuuguggu

SEQ ID NO: 1349468 - RNA, 18 nt, Human
cccuugggguuggagcag

SEQ ID NO: 1349469 - RNA, 22 nt, Human
ccugaagcgcccggagcacuga

SEQ ID NO: 1349470 - RNA, 19 nt, Human
cgcccggagcacugagcag

SEQ ID NO: 1349471 - RNA, 22 nt, Human
gagguaucagggagcgcuccag

SEQ ID NO: 1349472 - RNA, 20 nt, Human
gcaggguugcagucugugcc

SEQ ID NO: 1349473 - RNA, 18 nt, Human
uaacagaggcagaagaaa

SEQ ID NO: 1349474 - RNA, 23 nt, Human
uauaagagugguggaaacugcag

SEQ ID NO: 1349475 - RNA, 23 nt, Human
ugagcaggguugcagucugugcc

SEQ ID NO: 1349476 - RNA, 21 nt, Human
uuuuuuuuuuuuaacagaggc

SEQ ID NO: 1349477 - RNA, 23 nt, Human
uuuuuuuuuuuuuuuuuuaacag

SEQ ID NO: 1349478 - RNA, 20 nt, Human
auggggucuggaaacucuac

SEQ ID NO: 1349479 - RNA, 23 nt, Human
caccacgagcaguagagcagcag

SEQ ID NO: 1349480 - RNA, 22 nt, Human
cagcagagugggacaguccacg

SEQ ID NO: 1349481 - RNA, 20 nt, Human
ccacgagcaguagagcagca

SEQ ID NO: 1349482 - RNA, 18 nt, Human
ccuagaauaagugagaaa

SEQ ID NO: 1349483 - RNA, 22 nt, Human
ccugcaagucacaguccccgga

SEQ ID NO: 1349484 - RNA, 19 nt, Human
gagaaagugggggaaaggg

SEQ ID NO: 1349485 - RNA, 21 nt, Human
ggacccugcaagucacagucc

SEQ ID NO: 1349486 - RNA, 23 nt, Human
ggacccugcaagucacagucccc

SEQ ID NO: 1349487 - RNA, 24 nt, Human
ucccaaguaccuagaauaagugag

SEQ ID NO: 1349488 - RNA, 18 nt, Human
uccguggucuccagcugg

SEQ ID NO: 1349489 - RNA, 19 nt, Human
aucacugucauuaccccgg

SEQ ID NO: 1349490 - RNA, 21 nt, Human
cacacugcauaauuuuuugca

SEQ ID NO: 1349491 - RNA, 20 nt, Human
caccucugaaguucaguagc

SEQ ID NO: 1349492 - RNA, 25 nt, Human
cagcccagagcgcagcguugcgcag

SEQ ID NO: 1349493 - RNA, 20 nt, Human
caucacugucauuaccccgg

SEQ ID NO: 1349494 - RNA, 23 nt, Human
ccaauagcuggugugcuuuuucu

SEQ ID NO: 1349495 - RNA, 21 nt, Human
cccacugcccacgcugugcca

SEQ ID NO: 1349496 - RNA, 21 nt, Human
ccccacugcccacgcugugcc

SEQ ID NO: 1349497 - RNA, 18 nt, Human
ccccggaaguccucgauc

SEQ ID NO: 1349498 - RNA, 18 nt, Human
ccuguaggccccacugcc

SEQ ID NO: 1349499 - RNA, 20 nt, Human
ccuguaggccccacugccca

SEQ ID NO: 1349500 - RNA, 19 nt, Human
ccugucagcccagagcgca

SEQ ID NO: 1349501 - RNA, 19 nt, Human
cggaaguccucgaucacca

SEQ ID NO: 1349502 - RNA, 23 nt, Human
cguuuuauccgccugucagccca

SEQ ID NO: 1349503 - RNA, 19 nt, Human
gagcgcagcguugcgcagu

SEQ ID NO: 1349504 - RNA, 21 nt, Human
gcuggugugcuuuuucucagu

SEQ ID NO: 1349505 - RNA, 22 nt, Human
uaccccggaaguccucgaucac

SEQ ID NO: 1349506 - RNA, 21 nt, Human
uacgccgggaucucuguagac

SEQ ID NO: 1349507 - RNA, 21 nt, Human
ucaccuucugucaucuuaaga

SEQ ID NO: 1349508 - RNA, 18 nt, Human
ucacugucauuaccccgg

SEQ ID NO: 1349509 - RNA, 23 nt, Human
ucagucuugaugggaccguuuua

SEQ ID NO: 1349510 - RNA, 24 nt, Human
uuauccgccugucagcccagagcg

SEQ ID NO: 1349511 - RNA, 22 nt, Human
uuauuagucuuuuuauucuucu

SEQ ID NO: 1349512 - RNA, 19 nt, Human
aaaccgcacuuugugcuuc

SEQ ID NO: 1349513 - RNA, 18 nt, Human
aacacagaaaagcuagca

SEQ ID NO: 1349514 - RNA, 21 nt, Human
aacacccuaaccuuggguaac

SEQ ID NO: 1349515 - RNA, 20 nt, Human
aagcacagauauacucuggg

SEQ ID NO: 1349516 - RNA, 18 nt, Human
acagugcugugggcugag

SEQ ID NO: 1349517 - RNA, 19 nt, Human
agauggacaaaggcuuggg

SEQ ID NO: 1349518 - RNA, 20 nt, Human
agccagcgcgugcaggcugg

SEQ ID NO: 1349519 - RNA, 21 nt, Human
agccaggcgcccauuucugcc

SEQ ID NO: 1349520 - RNA, 18 nt, Human
agccguugagaccugaag

SEQ ID NO: 1349521 - RNA, 21 nt, Human
agcugguggggaaaguugggg

SEQ ID NO: 1349522 - RNA, 21 nt, Human
agcugugcagcuacgcaccuc

SEQ ID NO: 1349523 - RNA, 21 nt, Human
aggagaagaagauucuggcaa

SEQ ID NO: 1349524 - RNA, 18 nt, Human
aggcccuccaccccaaug

SEQ ID NO: 1349525 - RNA, 19 nt, Human
aggccuccagucaggcagc

SEQ ID NO: 1349526 - RNA, 19 nt, Human
aggggaccugguucuugug

SEQ ID NO: 1349527 - RNA, 22 nt, Human
aguagaauuuccaagguccugg

SEQ ID NO: 1349528 - RNA, 23 nt, Human
auggggcuaacaggagcggggag

SEQ ID NO: 1349529 - RNA, 21 nt, Human
caaacggcacuuaaacccccc

SEQ ID NO: 1349530 - RNA, 20 nt, Human
caacacagaaaagcuagcaa

SEQ ID NO: 1349531 - RNA, 20 nt, Human
caacagaaggaccaacaggc

SEQ ID NO: 1349532 - RNA, 28 nt, Human
caagguccuggguuaggcauuuuggggg

SEQ ID NO: 1349533 - RNA, 23 nt, Human
cagcaacagaaacuggcggccag

SEQ ID NO: 1349534 - RNA, 24 nt, Human
cagcagcacaggguggcagcagag

SEQ ID NO: 1349535 - RNA, 18 nt, Human
cagcuacgcaccucagca

SEQ ID NO: 1349536 - RNA, 25 nt, Human
cagcuacgcaccucagcagcacagg

SEQ ID NO: 1349537 - RNA, 18 nt, Human
caguagcuccaaacaggg

SEQ ID NO: 1349538 - RNA, 21 nt, Human
cauuaaacgaagcugcagguu

SEQ ID NO: 1349539 - RNA, 20 nt, Human
ccaaauauuagacaccaaca

SEQ ID NO: 1349540 - RNA, 19 nt, Human
ccaagguccuggguuaggc

SEQ ID NO: 1349541 - RNA, 21 nt, Human
ccagaagcugcggccucuccu

SEQ ID NO: 1349542 - RNA, 21 nt, Human
cccacccuacccaaauauuag

SEQ ID NO: 1349543 - RNA, 26 nt, Human
cccccagcugugcagcuacgcaccuc

SEQ ID NO: 1349544 - RNA, 20 nt, Human
ccccugagagauaagaccuc

SEQ ID NO: 1349545 - RNA, 24 nt, Human
cccuccaccccaaugugcuggaag

SEQ ID NO: 1349546 - RNA, 24 nt, Human
ccuuccuucaacacccuaaccuug

SEQ ID NO: 1349547 - RNA, 26 nt, Human
ccuuuaauuuugucaccauaaacauu

SEQ ID NO: 1349548 - RNA, 19 nt, Human
cggccagcccggcagcccc

SEQ ID NO: 1349549 - RNA, 24 nt, Human
cgguccagcuucucagcccaugcu

SEQ ID NO: 1349550 - RNA, 25 nt, Human
cuaccuuccuucaacacccuaaccu

SEQ ID NO: 1349551 - RNA, 22 nt, Human
cucaggacucuuccccuacaaa

SEQ ID NO: 1349552 - RNA, 21 nt, Human
cuccuccuugcugccgccaac

SEQ ID NO: 1349553 - RNA, 20 nt, Human
cugggccaagagaagagggg

SEQ ID NO: 1349554 - RNA, 23 nt, Human
cuggguuaggcauuuuggggggc

SEQ ID NO: 1349555 - RNA, 18 nt, Human
cugugcagcuacgcaccu

SEQ ID NO: 1349556 - RNA, 18 nt, Human
cuuggaaggccuccaguc

SEQ ID NO: 1349557 - RNA, 19 nt, Human
cuuggaaggccuccaguca

SEQ ID NO: 1349558 - RNA, 18 nt, Human
gaagccccacccucuacc

SEQ ID NO: 1349559 - RNA, 20 nt, Human
gaaguggggggaaccaggcu

SEQ ID NO: 1349560 - RNA, 21 nt, Human
gagaagaagauucuggcaaug

SEQ ID NO: 1349561 - RNA, 20 nt, Human
gagcugguggggaaaguugg

SEQ ID NO: 1349562 - RNA, 19 nt, Human
gaguggaaguggggggaac

SEQ ID NO: 1349563 - RNA, 21 nt, Human
gcaacagaaggaccaacaggc

SEQ ID NO: 1349564 - RNA, 19 nt, Human
gcagcagagagccacauua

SEQ ID NO: 1349565 - RNA, 19 nt, Human
gccccucaggacucuuccc

SEQ ID NO: 1349566 - RNA, 18 nt, Human
gccgguccagcuucucag

SEQ ID NO: 1349567 - RNA, 18 nt, Human
gcggcugucacccggagc

SEQ ID NO: 1349568 - RNA, 19 nt, Human
gcugugggcugaggggacc

SEQ ID NO: 1349569 - RNA, 23 nt, Human
gcuugggaaaccgcacuuugugc

SEQ ID NO: 1349570 - RNA, 24 nt, Human
ggaaggccuccagucaggcagccc

SEQ ID NO: 1349571 - RNA, 19 nt, Human
ggaaguggggggaaccagg

SEQ ID NO: 1349572 - RNA, 22 nt, Human
ggagagggacgccccagccccc

SEQ ID NO: 1349573 - RNA, 22 nt, Human
ggagcugguggggaaaguugga

SEQ ID NO: 1349574 - RNA, 18 nt, Human
ggaugaguagaauuucca

SEQ ID NO: 1349575 - RNA, 19 nt, Human
ggggaguggaagugggggg

SEQ ID NO: 1349576 - RNA, 20 nt, Human
ggggcuuagagaugggaaac

SEQ ID NO: 1349577 - RNA, 19 nt, Human
gggguaggggaaaguuggg

SEQ ID NO: 1349578 - RNA, 20 nt, Human
ggguagggcucagggggccg

SEQ ID NO: 1349579 - RNA, 19 nt, Human
gugggcugaggggaccugg

SEQ ID NO: 1349580 - RNA, 18 nt, Human
uaaaagguaagagggggg

SEQ ID NO: 1349581 - RNA, 19 nt, Human
uaagaccucccuuagcuca

SEQ ID NO: 1349582 - RNA, 24 nt, Human
uacccaaauauuagacaccaacac

SEQ ID NO: 1349583 - RNA, 24 nt, Human
uagacaccaacacagaaaagcuag

SEQ ID NO: 1349584 - RNA, 20 nt, Human
uaucucaggggaccugauug

SEQ ID NO: 1349585 - RNA, 23 nt, Human
ucaacaccugcugcuguggggca

SEQ ID NO: 1349586 - RNA, 23 nt, Human
ucagccaggcgcccauuucugcc

SEQ ID NO: 1349587 - RNA, 18 nt, Human
ucccccacccuacccaaa

SEQ ID NO: 1349588 - RNA, 18 nt, Human
ucccccacccuacccaaa

SEQ ID NO: 1349589 - RNA, 18 nt, Human
ucccuguauaaguccaga

SEQ ID NO: 1349590 - RNA, 23 nt, Human
uccugauaaaagguaagaggggg

SEQ ID NO: 1349591 - RNA, 19 nt, Human
uccuugcugccgccaacug

SEQ ID NO: 1349592 - RNA, 22 nt, Human
ucggcucugcuccagaagcugc

SEQ ID NO: 1349593 - RNA, 18 nt, Human
ucuaggugugucucaacu

SEQ ID NO: 1349594 - RNA, 22 nt, Human
ucuuguguguugccccucagga

SEQ ID NO: 1349595 - RNA, 18 nt, Human
ugccuaggaaucagccag

SEQ ID NO: 1349596 - RNA, 20 nt, Human
ugccuaggaaucagccaggc

SEQ ID NO: 1349597 - RNA, 23 nt, Human
ugcuguggggcaccucagugggg

SEQ ID NO: 1349598 - RNA, 19 nt, Human
ugcuucgucucggcucugc

SEQ ID NO: 1349599 - RNA, 19 nt, Human
uggcagcagagagccacau

SEQ ID NO: 1349600 - RNA, 19 nt, Human
ugggacccagugaggcagg

SEQ ID NO: 1349601 - RNA, 23 nt, Human
ugggaugaguagaauuuccaagg

SEQ ID NO: 1349602 - RNA, 23 nt, Human
uguggagcugguggggaaaguug

SEQ ID NO: 1349603 - RNA, 20 nt, Human
uugcugccgccaacugccua

SEQ ID NO: 1349604 - RNA, 21 nt, Human
uugggaugaguagaauuucca

SEQ ID NO: 1349605 - RNA, 18 nt, Human
uuggugccgguccagcuu

SEQ ID NO: 1349606 - RNA, 22 nt, Human
uuuccaagguccuggguuaggc

SEQ ID NO: 1349607 - RNA, 19 nt, Human
cacuaugagaaaacaggau

SEQ ID NO: 1349608 - RNA, 22 nt, Human
caucaaaugugaguuuacacua

SEQ ID NO: 1349609 - RNA, 19 nt, Human
ggaaauguucggggccuga

SEQ ID NO: 1349610 - RNA, 22 nt, Human
ggaaauguucggggccugaacc

SEQ ID NO: 1349611 - RNA, 20 nt, Human
ggccugaacauguuuguuuc

SEQ ID NO: 1349612 - RNA, 21 nt, Human
ugagaaaacaggauuugacaa

SEQ ID NO: 1349613 - RNA, 26 nt, Human
ugguuacuuuccuucauaaaaacaca

SEQ ID NO: 1349614 - RNA, 22 nt, Human
acacugcugaccucaggugaac

SEQ ID NO: 1349615 - RNA, 23 nt, Human
cuguucuaggugucuugccaagg

SEQ ID NO: 1349616 - RNA, 18 nt, Human
cuucacacugcugaccuc

SEQ ID NO: 1349617 - RNA, 20 nt, Human
ggggugggcuggaguagggg

SEQ ID NO: 1349618 - RNA, 24 nt, Human
guccagggucuguucuaggugucu

SEQ ID NO: 1349619 - RNA, 25 nt, Human
ucuguucuaggugucuugccaaggg

SEQ ID NO: 1349620 - RNA, 20 nt, Human
uggaguagggguaugguagu

SEQ ID NO: 1349621 - RNA, 19 nt, Human
aaagugcugggauuacagg

SEQ ID NO: 1349622 - RNA, 22 nt, Human
aaagugcugggauuacaggcga

SEQ ID NO: 1349623 - RNA, 21 nt, Human
aagcaaacagcugcuccuuuc

SEQ ID NO: 1349624 - RNA, 21 nt, Human
aagcaggucaauagagucagg

SEQ ID NO: 1349625 - RNA, 20 nt, Human
aagcucauccaguuaguuuu

SEQ ID NO: 1349626 - RNA, 21 nt, Human
aaguccuguucugagcuuagc

SEQ ID NO: 1349627 - RNA, 18 nt, Human
aagugcugggauuacagg

SEQ ID NO: 1349628 - RNA, 19 nt, Human
aagugcugggauuacaggc

SEQ ID NO: 1349629 - RNA, 26 nt, Human
aagugcugggauuacaggcgagagcc

SEQ ID NO: 1349630 - RNA, 23 nt, Human
aauaacaaucuacuuuucagagu

SEQ ID NO: 1349631 - RNA, 22 nt, Human
aauuucuauucucugucaucuc

SEQ ID NO: 1349632 - RNA, 19 nt, Human
aauuuuuuucuuugucugu

SEQ ID NO: 1349633 - RNA, 20 nt, Human
acugcaagcuccgccuccca

SEQ ID NO: 1349634 - RNA, 27 nt, Human
agacacuggcaaguccuguucugagcu

SEQ ID NO: 1349635 - RNA, 19 nt, Human
agccaccgcacccggccua

SEQ ID NO: 1349636 - RNA, 18 nt, Human
aggcgccugccacuaagc

SEQ ID NO: 1349637 - RNA, 22 nt, Human
aggcgccugccacuaagcccgg

SEQ ID NO: 1349638 - RNA, 25 nt, Human
aggcuggagugcaguggcgcgaucu

SEQ ID NO: 1349639 - RNA, 18 nt, Human
aguagcugggacuauagg

SEQ ID NO: 1349640 - RNA, 20 nt, Human
agugcaguggcgcgaucucg

SEQ ID NO: 1349641 - RNA, 23 nt, Human
agugcaguggcgcgaucucggcu

SEQ ID NO: 1349642 - RNA, 24 nt, Human
agugcaguggcgcgaucucggcuc

SEQ ID NO: 1349643 - RNA, 18 nt, Human
agugcugggauuacaggc

SEQ ID NO: 1349644 - RNA, 20 nt, Human
auaacaaucuacuuuucaga

SEQ ID NO: 1349645 - RNA, 25 nt, Human
aucuccacuguacuauuaagcucau

SEQ ID NO: 1349646 - RNA, 20 nt, Human
augggcuuucacuguguuag

SEQ ID NO: 1349647 - RNA, 19 nt, Human
auucuauugaucuguccuc

SEQ ID NO: 1349648 - RNA, 22 nt, Human
auuucuucacugagaauuucca

SEQ ID NO: 1349649 - RNA, 24 nt, Human
auuuuuguauuuuuaguagagaug

SEQ ID NO: 1349650 - RNA, 27 nt, Human
caaagugcugggauuacaggcgagagc

SEQ ID NO: 1349651 - RNA, 22 nt, Human
cacgcccuucuccugccucagc

SEQ ID NO: 1349652 - RNA, 24 nt, Human
cacuaagcccggcuaauuuuugua

SEQ ID NO: 1349653 - RNA, 18 nt, Human
cacuguguuagccaggau

SEQ ID NO: 1349654 - RNA, 19 nt, Human
cacuguguuagccaggaug

SEQ ID NO: 1349655 - RNA, 24 nt, Human
cacuguguuagccaggauggucuc

SEQ ID NO: 1349656 - RNA, 20 nt, Human
cauuguuucucccuggcugc

SEQ ID NO: 1349657 - RNA, 19 nt, Human
cauuuguuacuuugccagc

SEQ ID NO: 1349658 - RNA, 19 nt, Human
ccaaagugcugggauuaca

SEQ ID NO: 1349659 - RNA, 22 nt, Human
ccaaagugcugggauuacaggc

SEQ ID NO: 1349660 - RNA, 23 nt, Human
ccaaagugcugggauuacaggcg

SEQ ID NO: 1349661 - RNA, 19 nt, Human
ccagcgauccguacuuguc

SEQ ID NO: 1349662 - RNA, 21 nt, Human
ccaugcaggguuaagcagguc

SEQ ID NO: 1349663 - RNA, 19 nt, Human
ccaugcauuguuucucccu

SEQ ID NO: 1349664 - RNA, 22 nt, Human
ccaugcauuguuucucccuggc

SEQ ID NO: 1349665 - RNA, 22 nt, Human
cccacacgcuccccuacgacca

SEQ ID NO: 1349666 - RNA, 19 nt, Human
cccgaguagcugggacuau

SEQ ID NO: 1349667 - RNA, 24 nt, Human
cccgaguagcugggacuauaggcg

SEQ ID NO: 1349668 - RNA, 19 nt, Human
ccgcuucugaggcucccaa

SEQ ID NO: 1349669 - RNA, 22 nt, Human
ccuacgaccaucuggagacaag

SEQ ID NO: 1349670 - RNA, 19 nt, Human
ccucaauuucuauucucug

SEQ ID NO: 1349671 - RNA, 24 nt, Human
ccucccagguucacgcccuucucc

SEQ ID NO: 1349672 - RNA, 28 nt, Human
ccugaccucgugauccgccagccucggc

SEQ ID NO: 1349673 - RNA, 23 nt, Human
ccugccucagccucccgaguagc

SEQ ID NO: 1349674 - RNA, 24 nt, Human
cgcccaggcuggagugcaguggcg

SEQ ID NO: 1349675 - RNA, 21 nt, Human
cgccucccagguucacgcccu

SEQ ID NO: 1349676 - RNA, 18 nt, Human
cguagagucccagcgauc

SEQ ID NO: 1349677 - RNA, 24 nt, Human
cgugauccgccagccucggccucc

SEQ ID NO: 1349678 - RNA, 24 nt, Human
cucagccucccgaguagcugggac

SEQ ID NO: 1349679 - RNA, 24 nt, Human
cuccugaccucgugauccgccagc

SEQ ID NO: 1349680 - RNA, 24 nt, Human
cuccuuguugguaguagcugagga

SEQ ID NO: 1349681 - RNA, 23 nt, Human
cucugucgcccaggcuggagugc

SEQ ID NO: 1349682 - RNA, 19 nt, Human
cugaggagccaggugccuu

SEQ ID NO: 1349683 - RNA, 24 nt, Human
cugcaagcuccgccucccagguuc

SEQ ID NO: 1349684 - RNA, 23 nt, Human
cugccucagccucccgaguagcu

SEQ ID NO: 1349685 - RNA, 19 nt, Human
cuguggacucucugagggc

SEQ ID NO: 1349686 - RNA, 22 nt, Human
cuuuaugccccacacgcucccc

SEQ ID NO: 1349687 - RNA, 22 nt, Human
gaccucgugauccgccagccuc

SEQ ID NO: 1349688 - RNA, 22 nt, Human
gaccucgugauccgccagccuc

SEQ ID NO: 1349689 - RNA, 24 nt, Human
gaccucgugauccgccagccucgg

SEQ ID NO: 1349690 - RNA, 18 nt, Human
gauuacaggcgagagcca

SEQ ID NO: 1349691 - RNA, 22 nt, Human
gcaagcuccgccucccagguuc

SEQ ID NO: 1349692 - RNA, 19 nt, Human
gcccaggcuggagugcagu

SEQ ID NO: 1349693 - RNA, 20 nt, Human
gcccaggcuggagugcagug

SEQ ID NO: 1349694 - RNA, 22 nt, Human
gcccggcuaauuuuuguauuuu

SEQ ID NO: 1349695 - RNA, 24 nt, Human
gcuccuuuccauccuuccccccca

SEQ ID NO: 1349696 - RNA, 20 nt, Human
gcugaggagccaggugccuu

SEQ ID NO: 1349697 - RNA, 19 nt, Human
gcuggagugcaguggcgcg

SEQ ID NO: 1349698 - RNA, 18 nt, Human
ggaguucucucagccucu

SEQ ID NO: 1349699 - RNA, 24 nt, Human
ggauggucucaaucuccugaccuc

SEQ ID NO: 1349700 - RNA, 24 nt, Human
gugauccgccagccucggccuccc

SEQ ID NO: 1349701 - RNA, 22 nt, Human
guuagguauguuacaugccauu

SEQ ID NO: 1349702 - RNA, 20 nt, Human
guucuuuuuuguuaauuccu

SEQ ID NO: 1349703 - RNA, 21 nt, Human
guuucuauuuuuugccaaaug

SEQ ID NO: 1349704 - RNA, 23 nt, Human
uaagaagagaucugcuagugaca

SEQ ID NO: 1349705 - RNA, 24 nt, Human
uaauuuuuguauuuuuaguagaga

SEQ ID NO: 1349706 - RNA, 23 nt, Human
uacaggcgagagccaccgcaccc

SEQ ID NO: 1349707 - RNA, 21 nt, Human
uaccugaacuggaggcauggc

SEQ ID NO: 1349708 - RNA, 21 nt, Human
uacgaccaucuggagacaaga

SEQ ID NO: 1349709 - RNA, 19 nt, Human
uagagucagguuacuuuuc

SEQ ID NO: 1349710 - RNA, 20 nt, Human
uagcaggcagcccccuuuag

SEQ ID NO: 1349711 - RNA, 20 nt, Human
uaggaugucaaugcuauaaa

SEQ ID NO: 1349712 - RNA, 19 nt, Human
uaggcgccugccacuaagc

SEQ ID NO: 1349713 - RNA, 23 nt, Human
uaggcgccugccacuaagcccgg

SEQ ID NO: 1349714 - RNA, 20 nt, Human
uaguagagaugggcuuucac

SEQ ID NO: 1349715 - RNA, 24 nt, Human
uaguagagaugggcuuucacugug

SEQ ID NO: 1349716 - RNA, 24 nt, Human
uauagagcuucuccuguuguugac

SEQ ID NO: 1349717 - RNA, 19 nt, Human
uaucuggauauuuugguua

SEQ ID NO: 1349718 - RNA, 20 nt, Human
uaugcugccauucaaauggg

SEQ ID NO: 1349719 - RNA, 19 nt, Human
uauuuauuuauuuuuugag

SEQ ID NO: 1349720 - RNA, 22 nt, Human
uauuuauuuuuugagacagucu

SEQ ID NO: 1349721 - RNA, 20 nt, Human
ucacagcacuuuaugcccca

SEQ ID NO: 1349722 - RNA, 20 nt, Human
ucacgcccuucuccugccuc

SEQ ID NO: 1349723 - RNA, 18 nt, Human
ucacugcaagcuccgccu

SEQ ID NO: 1349724 - RNA, 19 nt, Human
ucacugcaagcuccgccuc

SEQ ID NO: 1349725 - RNA, 19 nt, Human
ucacugcaagcuccgccuc

SEQ ID NO: 1349726 - RNA, 24 nt, Human
ucacugcaagcuccgccucccagg

SEQ ID NO: 1349727 - RNA, 24 nt, Human
ucacuguguuagccaggauggucu

SEQ ID NO: 1349728 - RNA, 23 nt, Human
ucagccucccgaguagcugggac

SEQ ID NO: 1349729 - RNA, 24 nt, Human
ucccaaagugcugggauuacaggc

SEQ ID NO: 1349730 - RNA, 21 nt, Human
ucccagguucacgcccuucuc

SEQ ID NO: 1349731 - RNA, 24 nt, Human
ucccagguucacgcccuucuccug

SEQ ID NO: 1349732 - RNA, 21 nt, Human
uccccuacgaccaucuggaga

SEQ ID NO: 1349733 - RNA, 24 nt, Human
ucccgaguagcugggacuauaggc

SEQ ID NO: 1349734 - RNA, 23 nt, Human
uccgccucccagguucacgcccu

SEQ ID NO: 1349735 - RNA, 19 nt, Human
uccgcugucuuugguuagg

SEQ ID NO: 1349736 - RNA, 24 nt, Human
ucgcccaggcuggagugcaguggc

SEQ ID NO: 1349737 - RNA, 18 nt, Human
ucggccucccaaagugcu

SEQ ID NO: 1349738 - RNA, 18 nt, Human
ucuauuuuuugccaaaug

SEQ ID NO: 1349739 - RNA, 19 nt, Human
ucuccaaacugcucggcca

SEQ ID NO: 1349740 - RNA, 24 nt, Human
ucuccugccucagccucccgagua

SEQ ID NO: 1349741 - RNA, 23 nt, Human
ucugcuuucucccuuguucuuuc

SEQ ID NO: 1349742 - RNA, 24 nt, Human
ucugucgcccaggcuggagugcag

SEQ ID NO: 1349743 - RNA, 23 nt, Human
ucuugcucugucgcccaggcugg

SEQ ID NO: 1349744 - RNA, 24 nt, Human
ucuugcucugucgcccaggcugga

SEQ ID NO: 1349745 - RNA, 29 nt, Human
ugaaaaguucacagcacuuuaugcccccu

SEQ ID NO: 1349746 - RNA, 24 nt, Human
ugaaauauaguuucaccagauaca

SEQ ID NO: 1349747 - RNA, 28 nt, Human
ugacagaguccgcugucuuugguuaggu

SEQ ID NO: 1349748 - RNA, 22 nt, Human
ugcaguggcgcgaucucggcuc

SEQ ID NO: 1349749 - RNA, 24 nt, Human
ugccucagccucccgaguagcugg

SEQ ID NO: 1349750 - RNA, 19 nt, Human
ugcuauaaauguuggaucu

SEQ ID NO: 1349751 - RNA, 24 nt, Human
ugcucugucgcccaggcuggagug

SEQ ID NO: 1349752 - RNA, 24 nt, Human
ugcugggauuacaggcgagagcca

SEQ ID NO: 1349753 - RNA, 23 nt, Human
uggagugcaguggcgcgaucucg

SEQ ID NO: 1349754 - RNA, 24 nt, Human
uggagugcaguggcgcgaucucgg

SEQ ID NO: 1349755 - RNA, 21 nt, Human
ugggacuauaggcgccugcca

SEQ ID NO: 1349756 - RNA, 22 nt, Human
ugggacuauaggcgccugccac

SEQ ID NO: 1349757 - RNA, 22 nt, Human
ugggacuauaggcgccugccac

SEQ ID NO: 1349758 - RNA, 24 nt, Human
ugggacuauaggcgccugccacua

SEQ ID NO: 1349759 - RNA, 19 nt, Human
ugggauuacaggcgagagc

SEQ ID NO: 1349760 - RNA, 21 nt, Human
ugggauuacaggcgagagcca

SEQ ID NO: 1349761 - RNA, 22 nt, Human
ugggauuacaggcgagagccac

SEQ ID NO: 1349762 - RNA, 23 nt, Human
ugggauuacaggcgagagccacc

SEQ ID NO: 1349763 - RNA, 24 nt, Human
ugggauuacaggcgagagccaccg

SEQ ID NO: 1349764 - RNA, 24 nt, Human
ugggcuuucacuguguuagccagg

SEQ ID NO: 1349765 - RNA, 24 nt, Human
ugguuacuuuaaaaugcuuuucag

SEQ ID NO: 1349766 - RNA, 24 nt, Human
uguccucaauuucuauucucuguc

SEQ ID NO: 1349767 - RNA, 21 nt, Human
ugucuggaugguguuucaggg

SEQ ID NO: 1349768 - RNA, 19 nt, Human
ugucuguaguuuucagaaa

SEQ ID NO: 1349769 - RNA, 24 nt, Human
uguuugguuugucucccgcuucug

SEQ ID NO: 1349770 - RNA, 18 nt, Human
uuaguagagaugggcuuu

SEQ ID NO: 1349771 - RNA, 21 nt, Human
uuaguagagaugggcuuucac

SEQ ID NO: 1349772 - RNA, 23 nt, Human
uuaguagagaugggcuuucacug

SEQ ID NO: 1349773 - RNA, 24 nt, Human
uuaguagagaugggcuuucacugu

SEQ ID NO: 1349774 - RNA, 20 nt, Human
uuauuuauuuauuuauuuuu

SEQ ID NO: 1349775 - RNA, 21 nt, Human
uucacuguguuagccaggaug

SEQ ID NO: 1349776 - RNA, 23 nt, Human
uucauuugaugcucccuuaugca

SEQ ID NO: 1349777 - RNA, 18 nt, Human
uuccauuuuuuuuuacuu

SEQ ID NO: 1349778 - RNA, 24 nt, Human
uuccuuucuuucgaagaacuuccu

SEQ ID NO: 1349779 - RNA, 18 nt, Human
uucugaggcucccaacac

SEQ ID NO: 1349780 - RNA, 20 nt, Human
uucugcuuucucccuuguuc

SEQ ID NO: 1349781 - RNA, 21 nt, Human
uucuuugucuguaguuuucag

SEQ ID NO: 1349782 - RNA, 23 nt, Human
uugagacagucuugcucugucgc

SEQ ID NO: 1349783 - RNA, 24 nt, Human
uugcucugucgcccaggcuggagu

SEQ ID NO: 1349784 - RNA, 18 nt, Human
uuguuucacucuucuccu

SEQ ID NO: 1349785 - RNA, 19 nt, Human
uuuaaacuucucaguagca

SEQ ID NO: 1349786 - RNA, 19 nt, Human
uuucacuguguuagccagg

SEQ ID NO: 1349787 - RNA, 19 nt, Human
uuucagggccaauuuucca

SEQ ID NO: 1349788 - RNA, 24 nt, Human
uuucugcuuucucccuuguucuuu

SEQ ID NO: 1349789 - RNA, 18 nt, Human
uuucuuggcauugauugc

SEQ ID NO: 1349790 - RNA, 24 nt, Human
uuuucuguugacaguucuucucuu

SEQ ID NO: 1349791 - RNA, 19 nt, Human
uuuugguucuauaguuucc

SEQ ID NO: 1349792 - RNA, 24 nt, Human
uuuuuaguagagaugggcuuucac

SEQ ID NO: 1349793 - RNA, 23 nt, Human
uuuuugguucuauaguuuccauu

SEQ ID NO: 1349794 - RNA, 20 nt, Human
uuuuuguauuuuuaguagag

SEQ ID NO: 1349795 - RNA, 18 nt, Human
uuuuuuuuuuuuuuuuug

SEQ ID NO: 1349796 - RNA, 22 nt, Human
aagaauauggaggaguaaguac

SEQ ID NO: 1349797 - RNA, 24 nt, Human
acaagaaacauuuuauucucucca

SEQ ID NO: 1349798 - RNA, 18 nt, Human
acacaauuccuuuaaaug

SEQ ID NO: 1349799 - RNA, 25 nt, Human
accccagaaucucccaacuaguccu

SEQ ID NO: 1349800 - RNA, 18 nt, Human
agacacagacucucagac

SEQ ID NO: 1349801 - RNA, 23 nt, Human
agagggagcaggaggagcuggag

SEQ ID NO: 1349802 - RNA, 20 nt, Human
agcaggaggagcuggagaag

SEQ ID NO: 1349803 - RNA, 24 nt, Human
cagagggagcaggaggagcuggag

SEQ ID NO: 1349804 - RNA, 26 nt, Human
cauuuuauucucuccauucugcucca

SEQ ID NO: 1349805 - RNA, 19 nt, Human
ccaacuaguccucgaauua

SEQ ID NO: 1349806 - RNA, 25 nt, Human
cuggcagcucuccgcagcucucucu

SEQ ID NO: 1349807 - RNA, 25 nt, Human
gcggaacacgcccggugcagcuggc

SEQ ID NO: 1349808 - RNA, 19 nt, Human
gcuccaaacugccucuccu

SEQ ID NO: 1349809 - RNA, 26 nt, Human
uaaaaccuaagaaacuccagaaauuu

SEQ ID NO: 1349810 - RNA, 20 nt, Human
uaacuucaggaucuuagucu

SEQ ID NO: 1349811 - RNA, 19 nt, Human
uaccccagaaucucccaac

SEQ ID NO: 1349812 - RNA, 24 nt, Human
uaccccagaaucucccaacuaguc

SEQ ID NO: 1349813 - RNA, 22 nt, Human
uaggguaccuagaaaagguuuc

SEQ ID NO: 1349814 - RNA, 18 nt, Human
ucaggaucuuagucucag

SEQ ID NO: 1349815 - RNA, 18 nt, Human
uccaaacugccucuccuc

SEQ ID NO: 1349816 - RNA, 21 nt, Human
uccaaacugccucuccucacu

SEQ ID NO: 1349817 - RNA, 18 nt, Human
ucucccaacuaguccucg

SEQ ID NO: 1349818 - RNA, 19 nt, Human
ucugcuccaaacugccucu

SEQ ID NO: 1349819 - RNA, 18 nt, Human
ugaaagaauauggaggag

SEQ ID NO: 1349820 - RNA, 20 nt, Human
ugaaagaauauggaggagua

SEQ ID NO: 1349821 - RNA, 26 nt, Human
ugaaucaauaaaaccuaagaaacucc

SEQ ID NO: 1349822 - RNA, 21 nt, Human
ugccuacagcugcggaacacg

SEQ ID NO: 1349823 - RNA, 24 nt, Human
uggcagcucuccgcagcucucucu

SEQ ID NO: 1349824 - RNA, 19 nt, Human
uuaccccagaaucucccaa

SEQ ID NO: 1349825 - RNA, 18 nt, Human
uugaaagaauauggagga

SEQ ID NO: 1349826 - RNA, 19 nt, Human
ugcaacaggccaggaaacc

SEQ ID NO: 1349827 - RNA, 24 nt, Human
cagggaagagggcgccgagccucg

SEQ ID NO: 1349828 - RNA, 21 nt, Human
ccucgccgccgccgccgcuac

SEQ ID NO: 1349829 - RNA, 24 nt, Human
cgccgagccucgccgccgccgccg

SEQ ID NO: 1349830 - RNA, 24 nt, Human
cggcgcucgcucgcucucucgcuc

SEQ ID NO: 1349831 - RNA, 18 nt, Human
cuccucgcucccggcccc

SEQ ID NO: 1349832 - RNA, 21 nt, Human
ucgccgccgccgccgcuaccg

SEQ ID NO: 1349833 - RNA, 27 nt, Human
ucgccgccgccgccgcuaccgcuccgg

SEQ ID NO: 1349834 - RNA, 18 nt, Human
aauccauaaguucuccuu

SEQ ID NO: 1349835 - RNA, 26 nt, Human
acagcaaugagaagacuaucuguguc

SEQ ID NO: 1349836 - RNA, 22 nt, Human
acaguuuucuucuuggaacugu

SEQ ID NO: 1349837 - RNA, 18 nt, Human
accaaugucugcuacauu

SEQ ID NO: 1349838 - RNA, 18 nt, Human
agucuugggugggucuag

SEQ ID NO: 1349839 - RNA, 18 nt, Human
agugaucugguguguaac

SEQ ID NO: 1349840 - RNA, 18 nt, Human
aguucagaaucuucuuuc

SEQ ID NO: 1349841 - RNA, 23 nt, Human
auaacuuuauagauuugccuccu

SEQ ID NO: 1349842 - RNA, 18 nt, Human
auaagucuuggguggguc

SEQ ID NO: 1349843 - RNA, 18 nt, Human
auaaguucuccuucucga

SEQ ID NO: 1349844 - RNA, 24 nt, Human
augaaacaucuuucacacaacccu

SEQ ID NO: 1349845 - RNA, 19 nt, Human
auguuacaaucaaaaccaa

SEQ ID NO: 1349846 - RNA, 20 nt, Human
caccaucuguuccuuccacu

SEQ ID NO: 1349847 - RNA, 20 nt, Human
cauaaauccaccaauaccuu

SEQ ID NO: 1349848 - RNA, 18 nt, Human
ccacgcuauucugauuua

SEQ ID NO: 1349849 - RNA, 25 nt, Human
ccugcagauguugcuccacaguguc

SEQ ID NO: 1349850 - RNA, 21 nt, Human
cucagaaacagagccugagga

SEQ ID NO: 1349851 - RNA, 24 nt, Human
cugauaaugaaaaugaugacucuu

SEQ ID NO: 1349852 - RNA, 22 nt, Human
cugcuacauuuuccacuucuuc

SEQ ID NO: 1349853 - RNA, 20 nt, Human
cuggacaggaagauaagcuc

SEQ ID NO: 1349854 - RNA, 24 nt, Human
cuuaguuucaucauucacagcuuc

SEQ ID NO: 1349855 - RNA, 23 nt, Human
gccgcaccauaaauccaccaaua

SEQ ID NO: 1349856 - RNA, 23 nt, Human
ggaagauaagcuugcacaaggag

SEQ ID NO: 1349857 - RNA, 22 nt, Human
ucagaaucuucuuucuguuccu

SEQ ID NO: 1349858 - RNA, 19 nt, Human
ucauguggggacacuaagg

SEQ ID NO: 1349859 - RNA, 22 nt, Human
uccacagugucugcaccaaaca

SEQ ID NO: 1349860 - RNA, 19 nt, Human
uccaccaauaccuggucug

SEQ ID NO: 1349861 - RNA, 21 nt, Human
ucuacauugcagaauaagauc

SEQ ID NO: 1349862 - RNA, 18 nt, Human
ucugcaccaaacacacca

SEQ ID NO: 1349863 - RNA, 24 nt, Human
ucuguaacugagucaucccugauu

SEQ ID NO: 1349864 - RNA, 18 nt, Human
ucuguuccuuccacuccc

SEQ ID NO: 1349865 - RNA, 22 nt, Human
ucuuagaccugcagauguugcu

SEQ ID NO: 1349866 - RNA, 23 nt, Human
ucuuuggauaccacuguuuuagg

SEQ ID NO: 1349867 - RNA, 18 nt, Human
ugagaagacuaucugugu

SEQ ID NO: 1349868 - RNA, 24 nt, Human
ugccgcaccauaaauccaccaaua

SEQ ID NO: 1349869 - RNA, 23 nt, Human
uggaagagugacagauucaauga

SEQ ID NO: 1349870 - RNA, 22 nt, Human
uguaacgacuucaauguuuucu

SEQ ID NO: 1349871 - RNA, 21 nt, Human
uguaggagucauuucagaguc

SEQ ID NO: 1349872 - RNA, 24 nt, Human
uguaugguuuccuuuuucucuuuu

SEQ ID NO: 1349873 - RNA, 20 nt, Human
uuauaaucuucaauuucagu

SEQ ID NO: 1349874 - RNA, 19 nt, Human
uucuuggaacuguaacugu

SEQ ID NO: 1349875 - RNA, 21 nt, Human
uuggaggccuugauucuucuu

SEQ ID NO: 1349876 - RNA, 18 nt, Human
uugggugggucuagcuuu

SEQ ID NO: 1349877 - RNA, 19 nt, Human
uugugcuacaagugaagau

SEQ ID NO: 1349878 - RNA, 22 nt, Human
uuugccgcaccauaaauccacc

SEQ ID NO: 1349879 - RNA, 22 nt, Human
aaagcagagccaacagcagaaa

SEQ ID NO: 1349880 - RNA, 23 nt, Human
aacagcagaaacaacacgaggag

SEQ ID NO: 1349881 - RNA, 22 nt, Human
accaagucuuuacacugauccu

SEQ ID NO: 1349882 - RNA, 23 nt, Human
agcagaaacaacacgaggaggaa

SEQ ID NO: 1349883 - RNA, 18 nt, Human
agguagaaagaugggagg

SEQ ID NO: 1349884 - RNA, 22 nt, Human
caaaccuaggcccacccugccc

SEQ ID NO: 1349885 - RNA, 22 nt, Human
caaagcagagccaacagcagaa

SEQ ID NO: 1349886 - RNA, 24 nt, Human
caaagcagagccaacagcagaaac

SEQ ID NO: 1349887 - RNA, 18 nt, Human
caccaagucuuuacacug

SEQ ID NO: 1349888 - RNA, 19 nt, Human
cagauucauuggaaagggc

SEQ ID NO: 1349889 - RNA, 19 nt, Human
cagcacccacaccuucugg

SEQ ID NO: 1349890 - RNA, 20 nt, Human
cagcacugaguuccacucag

SEQ ID NO: 1349891 - RNA, 18 nt, Human
cccagggcucucaaaccu

SEQ ID NO: 1349892 - RNA, 23 nt, Human
cuacaaauucuacccagccgugu

SEQ ID NO: 1349893 - RNA, 22 nt, Human
cuagcggcaacaccaagucuuu

SEQ ID NO: 1349894 - RNA, 20 nt, Human
cucaaagcagagccaacagc

SEQ ID NO: 1349895 - RNA, 18 nt, Human
cuccagcgugaagguaaa

SEQ ID NO: 1349896 - RNA, 19 nt, Human
cugaaagauugguuccuuu

SEQ ID NO: 1349897 - RNA, 23 nt, Human
cuguggaucuuuucuacaaauuc

SEQ ID NO: 1349898 - RNA, 23 nt, Human
cuuggagccccagggcucucaaa

SEQ ID NO: 1349899 - RNA, 22 nt, Human
gagccaacagcagaaacaacac

SEQ ID NO: 1349900 - RNA, 22 nt, Human
gagcucaaagcagagccaacag

SEQ ID NO: 1349901 - RNA, 20 nt, Human
gcccacccugcccguccccc

SEQ ID NO: 1349902 - RNA, 20 nt, Human
gucuuuacacugauccuaaa

SEQ ID NO: 1349903 - RNA, 18 nt, Human
uaaaaucagcugccacug

SEQ ID NO: 1349904 - RNA, 19 nt, Human
uagaaagaugggagggaag

SEQ ID NO: 1349905 - RNA, 24 nt, Human
uagaaagaugggagggaagcaccu

SEQ ID NO: 1349906 - RNA, 21 nt, Human
uccccgcagcgaucuuggcuc

SEQ ID NO: 1349907 - RNA, 18 nt, Human
ugccacugaaagauuggu

SEQ ID NO: 1349908 - RNA, 23 nt, Human
ugguguuuccccuuccaaggucu

SEQ ID NO: 1349909 - RNA, 22 nt, Human
ugucauuuaggggaguuaaaau

SEQ ID NO: 1349910 - RNA, 23 nt, Human
uguuuccccuuccaaggucuuag

SEQ ID NO: 1349911 - RNA, 20 nt, Human
uuuaggggaguuaaaauccg

SEQ ID NO: 1349912 - RNA, 23 nt, Human
uuuuuuuuuuuuuuuuuuccuuu

SEQ ID NO: 1349913 - RNA, 24 nt, Human
uuuuuuuuuuuuuuuuuuccuuuu

SEQ ID NO: 1349914 - RNA, 25 nt, Human
uuuuuuuuuuuuuuuuuuuuccuuu

SEQ ID NO: 1349915 - RNA, 25 nt, Human
uuuuuuuuuuuuuuuuuuuuuccuu

SEQ ID NO: 1349916 - RNA, 30 nt, Human; identical to SEQ ID NO: 345631

SEQ ID NO: 1349917 - RNA, 23 nt, Human
aagacagcagaacucaaaguuca

SEQ ID NO: 1349918 - RNA, 24 nt, Human
cagaacucaaaguucaaggaauuu

SEQ ID NO: 1349919 - RNA, 21 nt, Human
cagacaccuucuuccauccua

SEQ ID NO: 1349920 - RNA, 26 nt, Human
ccuuuuguucuugcugcucuugguca

SEQ ID NO: 1349921 - RNA, 23 nt, Human
cuuaucaagaaugguugaacaga

SEQ ID NO: 1349922 - RNA, 22 nt, Human
guaauuuacggucagacaccuu

SEQ ID NO: 1349923 - RNA, 24 nt, Human
uaacuuaucaagaaugguugaaca

SEQ ID NO: 1349924 - RNA, 20 nt, Human
uaccaugaagacagcagaac

SEQ ID NO: 1349925 - RNA, 23 nt, Human
uaccaugaagacagcagaacuca

SEQ ID NO: 1349926 - RNA, 18 nt, Human
uacuaggaaacauuugau

SEQ ID NO: 1349927 - RNA, 19 nt, Human
uaucaagaaugguugaaca

SEQ ID NO: 1349928 - RNA, 18 nt, Human
ucaaaugugaaccauccu

SEQ ID NO: 1349929 - RNA, 19 nt, Human
ucagacaccuucuuccauc

SEQ ID NO: 1349930 - RNA, 19 nt, Human
uccccugucuuuacucaaa

SEQ ID NO: 1349931 - RNA, 20 nt, Human
ugaaaacaaacuccccuguc

SEQ ID NO: 1349932 - RNA, 18 nt, Human
ugaaccauccucucaaga

SEQ ID NO: 1349933 - RNA, 21 nt, Human
ugaagacagcagaacucaaag

SEQ ID NO: 1349934 - RNA, 22 nt, Human
ugaagacagcagaacucaaagu

SEQ ID NO: 1349935 - RNA, 18 nt, Human
ugagcacucugacuuuuc

SEQ ID NO: 1349936 - RNA, 21 nt, Human
uguaccagaaccucaucccca

SEQ ID NO: 1349937 - RNA, 22 nt, Human
ugucauucugaaaacaaacucc

SEQ ID NO: 1349938 - RNA, 22 nt, Human
uuccauccuagaguccugaguu

SEQ ID NO: 1349939 - RNA, 21 nt, Human
uugcacugcagguguaauuua

SEQ ID NO: 1349940 - RNA, 18 nt, Human
uuuguucuugcugcucuu

SEQ ID NO: 1349941 - RNA, 22 nt, Human
aacucccuucuucaauggacua

SEQ ID NO: 1349942 - RNA, 24 nt, Human
aagaucuacaaucuagaaauggaa

SEQ ID NO: 1349943 - RNA, 21 nt, Human
acaacaacuuucaaacucccu

SEQ ID NO: 1349944 - RNA, 22 nt, Human
acuaccaaaaaucagaaagcca

SEQ ID NO: 1349945 - RNA, 24 nt, Human
agaaagccacuauaaaacccaaug

SEQ ID NO: 1349946 - RNA, 22 nt, Human
gaaauggaaccacuacucuuuu

SEQ ID NO: 1349947 - RNA, 21 nt, Human
gcaguggcgacaguggcggga

SEQ ID NO: 1349948 - RNA, 21 nt, Human
ggcaucacuggaaaguccaga

SEQ ID NO: 1349949 - RNA, 21 nt, Human
guggcaguggcgacaguggcg

SEQ ID NO: 1349950 - RNA, 22 nt, Human
uaccaaaaaucagaaagccacu

SEQ ID NO: 1349951 - RNA, 24 nt, Human
uaccaaaaaucagaaagccacuau

SEQ ID NO: 1349952 - RNA, 21 nt, Human
ucuacaaucuagaaauggaac

SEQ ID NO: 1349953 - RNA, 19 nt, Human
ucuacaaucuagaaauggg

SEQ ID NO: 1349954 - RNA, 20 nt, Human
ugaaaauggcagaauuuauc

SEQ ID NO: 1349955 - RNA, 21 nt, Human
ugaaaauggcagaauuuaucu

SEQ ID NO: 1349956 - RNA, 23 nt, Human
uggaaccacuacucuuuugacag

SEQ ID NO: 1349957 - RNA, 18 nt, Human
uggcaucacuggaaaguc

SEQ ID NO: 1349958 - RNA, 18 nt, Human
uggcgacaguggcgggag

SEQ ID NO: 1349959 - RNA, 20 nt, Human
uuaucugaagaucuacaauc

SEQ ID NO: 1349960 - RNA, 24 nt, Human
aaguggcuccuacauaauguccca

SEQ ID NO: 1349961 - RNA, 18 nt, Human
agaagaacacgaggacgc

SEQ ID NO: 1349962 - RNA, 21 nt, Human
agggcagcugugauccuugcc

SEQ ID NO: 1349963 - RNA, 21 nt, Human
augagagaagaacacgaggac

SEQ ID NO: 1349964 - RNA, 18 nt, Human
cgguaucagaaucccugg

SEQ ID NO: 1349965 - RNA, 19 nt, Human
cguggccaaaucuguccuc

SEQ ID NO: 1349966 - RNA, 23 nt, Human
gagaagaacacgaggacgcaaug

SEQ ID NO: 1349967 - RNA, 23 nt, Human
gcuguguggcauggcagaaggcu

SEQ ID NO: 1349968 - RNA, 22 nt, Human
ggaugagagaagaacacgagga

SEQ ID NO: 1349969 - RNA, 18 nt, Human
ggcaguggcagagcagag

SEQ ID NO: 1349970 - RNA, 24 nt, Human
guggcuccuacauaaugucccagc

SEQ ID NO: 1349971 - RNA, 20 nt, Human
uaugaaguggcuccuacaua

SEQ ID NO: 1349972 - RNA, 18 nt, Human
ucccuggggcaguggcag

SEQ ID NO: 1349973 - RNA, 21 nt, Human
ucccugguuuaaggcaaggau

SEQ ID NO: 1349974 - RNA, 23 nt, Human
ucccugguuuaaggcaaggauug

SEQ ID NO: 1349975 - RNA, 20 nt, Human
uggcuccuacauaauguccc

SEQ ID NO: 1349976 - RNA, 23 nt, Human
uucaagggcagcugugauccuug

SEQ ID NO: 1349977 - RNA, 25 nt, Human
uucaagggcagcugugauccuugcc

SEQ ID NO: 1349978 - RNA, 26 nt, Human
aaagcaaaagccuguuuuuuuucuug

SEQ ID NO: 1349979 - RNA, 23 nt, Human
accucuaccuccucgcccuccau

SEQ ID NO: 1349980 - RNA, 18 nt, Human
acugcagaaguaguaucc

SEQ ID NO: 1349981 - RNA, 22 nt, Human
agcagccccacgaccucuggau

SEQ ID NO: 1349982 - RNA, 20 nt, Human
auagagcccacaaaaagccu

SEQ ID NO: 1349983 - RNA, 23 nt, Human
aucucacucaccaaaaugaauga

SEQ ID NO: 1349984 - RNA, 18 nt, Human
caagaaagcaaaagccug

SEQ ID NO: 1349985 - RNA, 20 nt, Human
caccccuucucuagcuccaa

SEQ ID NO: 1349986 - RNA, 21 nt, Human
cacucauuccaguuucccaac

SEQ ID NO: 1349987 - RNA, 23 nt, Human
cacuuuuguucugaacacgagag

SEQ ID NO: 1349988 - RNA, 19 nt, Human
cauaaccaccucuaccucc

SEQ ID NO: 1349989 - RNA, 18 nt, Human
ccaccccuucucuagcuc

SEQ ID NO: 1349990 - RNA, 23 nt, Human
ccagcaucaagcaaugucugaaa

SEQ ID NO: 1349991 - RNA, 21 nt, Human
ccaguuucccaaacugacuaa

SEQ ID NO: 1349992 - RNA, 21 nt, Human
ccccuucucuagcuccaacuu

SEQ ID NO: 1349993 - RNA, 18 nt, Human
ccccuugcuccucuacca

SEQ ID NO: 1349994 - RNA, 23 nt, Human
cccuccaagucuuuaccauucau

SEQ ID NO: 1349995 - RNA, 21 nt, Human
cccuccaucucuuguuggagg

SEQ ID NO: 1349996 - RNA, 23 nt, Human
ccuccaagucuuuaccauucauu

SEQ ID NO: 1349997 - RNA, 20 nt, Human
ccucuaccuccucgcccucc

SEQ ID NO: 1349998 - RNA, 22 nt, Human
cuaaaugccuuuucuaaaaucu

SEQ ID NO: 1349999 - RNA, 24 nt, Human
cucucugugaauaaccggcucuac

SEQ ID NO: 1350000 - RNA, 19 nt, Human
cuuuccuuuucugauuugg

SEQ ID NO: 1350001 - RNA, 23 nt, Human
gaacugccaaugcaccgucuuca

SEQ ID NO: 1350002 - RNA, 18 nt, Human
gagcagcaccccuugcuc

SEQ ID NO: 1350003 - RNA, 19 nt, Human
gggaagagcagccccacga

SEQ ID NO: 1350004 - RNA, 18 nt, Human
guugggcaccuccucucg

SEQ ID NO: 1350005 - RNA, 22 nt, Human
uaauaguaguaaucgucauaca

SEQ ID NO: 1350006 - RNA, 23 nt, Human
uaccacggggaagagcagcccca

SEQ ID NO: 1350007 - RNA, 22 nt, Human
uauuuucucccuccaagucuuu

SEQ ID NO: 1350008 - RNA, 23 nt, Human
ucacucauuccaguuucccaaac

SEQ ID NO: 1350009 - RNA, 20 nt, Human
ucagcaacuuucugugauaa

SEQ ID NO: 1350010 - RNA, 24 nt, Human
ucauaaccauaguauggaucuuca

SEQ ID NO: 1350011 - RNA, 21 nt, Human
ucauauccauaauaaucugga

SEQ ID NO: 1350012 - RNA, 23 nt, Human
uccauagccuugacagcaccauc

SEQ ID NO: 1350013 - RNA, 22 nt, Human
ucccaaacugacuaaaugccuu

SEQ ID NO: 1350014 - RNA, 19 nt, Human
ucccuccaagucuuuacca

SEQ ID NO: 1350015 - RNA, 25 nt, Human
ucccuccaagucuuuaccauucauu

SEQ ID NO: 1350016 - RNA, 18 nt, Human
uccuugguuuuaacucuu

SEQ ID NO: 1350017 - RNA, 19 nt, Human
ucuguaagacccucuguua

SEQ ID NO: 1350018 - RNA, 18 nt, Human
ucugugaauaaccggcuc

SEQ ID NO: 1350019 - RNA, 18 nt, Human
ucuucaguaucauuucca

SEQ ID NO: 1350020 - RNA, 24 nt, Human
ucuucauauccaccacgauaguua

SEQ ID NO: 1350021 - RNA, 21 nt, Human
ucuuguuggagggggcauaua

SEQ ID NO: 1350022 - RNA, 19 nt, Human
ugaauggauaacugcagaa

SEQ ID NO: 1350023 - RNA, 23 nt, Human
ugaucuucauauucaagaaagca

SEQ ID NO: 1350024 - RNA, 18 nt, Human
uggaggauauccauaacc

SEQ ID NO: 1350025 - RNA, 20 nt, Human
uugaaaaucuucauaaccau

SEQ ID NO: 1350026 - RNA, 22 nt, Human
uugcuccucuaccaccccuucu

SEQ ID NO: 1350027 - RNA, 23 nt, Human
aaaauauacaucugaaguacaag

SEQ ID NO: 1350028 - RNA, 24 nt, Human
aaaaucuguaaucccagcacuuug

SEQ ID NO: 1350029 - RNA, 27 nt, Human
aaacuccauuaucuaauagagagugac

SEQ ID NO: 1350030 - RNA, 21 nt, Human
aaauuccaaauggucaaacuc

SEQ ID NO: 1350031 - RNA, 19 nt, Human
aacauagugagaccccauc

SEQ ID NO: 1350032 - RNA, 20 nt, Human
aacauagugagaccccaucu

SEQ ID NO: 1350033 - RNA, 21 nt, Human
aacauagugagaccccaucuc

SEQ ID NO: 1350034 - RNA, 19 nt, Human
aagagugaaacuccauguc

SEQ ID NO: 1350035 - RNA, 19 nt, Human
aagguugcggugagccaag

SEQ ID NO: 1350036 - RNA, 18 nt, Human
aaucgcuugaaccuggga

SEQ ID NO: 1350037 - RNA, 21 nt, Human
acaauaaagaaaaugaagcca

SEQ ID NO: 1350038 - RNA, 23 nt, Human
acacauagucccugacacguuca

SEQ ID NO: 1350039 - RNA, 20 nt, Human
acaccauugcacuccagccu

SEQ ID NO: 1350040 - RNA, 23 nt, Human
acaguuccaaauaaccaaaaaca

SEQ ID NO: 1350041 - RNA, 22 nt, Human
accauugcacuccagccugggc

SEQ ID NO: 1350042 - RNA, 25 nt, Human
acuccagccugggcaacaagaguga

SEQ ID NO: 1350043 - RNA, 24 nt, Human
agaggaagguugcggugagccaag

SEQ ID NO: 1350044 - RNA, 22 nt, Human
agcacuuugggaggcugaggug

SEQ ID NO: 1350045 - RNA, 22 nt, Human
agccugggcaacauagugagac

SEQ ID NO: 1350046 - RNA, 23 nt, Human
agccugggcaacauagugagacc

SEQ ID NO: 1350047 - RNA, 24 nt, Human
agccugggcaacauagugagaccc

SEQ ID NO: 1350048 - RNA, 23 nt, Human
agcuacucgggaggcugaggcag

SEQ ID NO: 1350049 - RNA, 22 nt, Human
aggaagguugcggugagccaag

SEQ ID NO: 1350050 - RNA, 23 nt, Human
aggaguucaagaccagccugggc

SEQ ID NO: 1350051 - RNA, 24 nt, Human
aggauugcuugaguccaggaguuc

SEQ ID NO: 1350052 - RNA, 22 nt, Human
aggcaggagaaucgcuugaacc

SEQ ID NO: 1350053 - RNA, 24 nt, Human
aggcaggagaaucgcuugaaccug

SEQ ID NO: 1350054 - RNA, 20 nt, Human
aggcugaggcaggagaaucg

SEQ ID NO: 1350055 - RNA, 24 nt, Human
aggcugaggcaggagaaucgcuug

SEQ ID NO: 1350056 - RNA, 24 nt, Human
aggcugaggugagaggauugcuug

SEQ ID NO: 1350057 - RNA, 21 nt, Human
aguauuacacaauaaagaaaa

SEQ ID NO: 1350058 - RNA, 27 nt, Human
aguccaggaguucaagaccagccuggg

SEQ ID NO: 1350059 - RNA, 21 nt, Human
agucccugacacguucaguuc

SEQ ID NO: 1350060 - RNA, 24 nt, Human
aucacaccauugcacuccagccug

SEQ ID NO: 1350061 - RNA, 28 nt, Human
aucacaccauugcacuccagccugggca

SEQ ID NO: 1350062 - RNA, 24 nt, Human
auugcacuccagccugggcaacaa

SEQ ID NO: 1350063 - RNA, 25 nt, Human
auugcacuccagccugggcaacaag

SEQ ID NO: 1350064 - RNA, 24 nt, Human
auugcuugaguccaggaguucaag

SEQ ID NO: 1350065 - RNA, 24 nt, Human
caacauagugagaccccaucucuc

SEQ ID NO: 1350066 - RNA, 20 nt, Human
cacaauaaagaaaaugaagc

SEQ ID NO: 1350067 - RNA, 21 nt, Human
cacaccauugcacuccagccu

SEQ ID NO: 1350068 - RNA, 18 nt, Human
caccagaguuuucuuccc

SEQ ID NO: 1350069 - RNA, 19 nt, Human
cacuauucaaaagcagccc

SEQ ID NO: 1350070 - RNA, 23 nt, Human
cacuccagccugggcaacaagag

SEQ ID NO: 1350071 - RNA, 24 nt, Human
cacuccagccugggcaacaagagu

SEQ ID NO: 1350072 - RNA, 25 nt, Human
cacuccagccugggcaacaagagug

SEQ ID NO: 1350073 - RNA, 22 nt, Human
cacuguaauccuagcuacucgg

SEQ ID NO: 1350074 - RNA, 23 nt, Human
cacuguaauccuagcuacucggg

SEQ ID NO: 1350075 - RNA, 23 nt, Human
cacuguuuugcuaccaagauuca

SEQ ID NO: 1350076 - RNA, 23 nt, Human
cagcacuuugggaggcugaggug

SEQ ID NO: 1350077 - RNA, 19 nt, Human
cauacagugccacacauag

SEQ ID NO: 1350078 - RNA, 19 nt, Human
cauagugagaccccaucuc

SEQ ID NO: 1350079 - RNA, 19 nt, Human
cauugcacuccagccuggg

SEQ ID NO: 1350080 - RNA, 21 nt, Human
cauugcacuccagccugggca

SEQ ID NO: 1350081 - RNA, 25 nt, Human
cauugcacuccagccugggcaacaa

SEQ ID NO: 1350082 - RNA, 21 nt, Human
ccaaaaacauccuugaauaac

SEQ ID NO: 1350083 - RNA, 22 nt, Human
ccaagauucaagcugcaccaga

SEQ ID NO: 1350084 - RNA, 20 nt, Human
ccauugcacuccagccuggg

SEQ ID NO: 1350085 - RNA, 21 nt, Human
ccauugcacuccagccugggc

SEQ ID NO: 1350086 - RNA, 23 nt, Human
ccauugcacuccagccugggcaa

SEQ ID NO: 1350087 - RNA, 24 nt, Human
ccauugcacuccagccugggcaac

SEQ ID NO: 1350088 - RNA, 25 nt, Human
ccauugcacuccagccugggcaaca

SEQ ID NO: 1350089 - RNA, 21 nt, Human
ccugacacguucaguuccuac

SEQ ID NO: 1350090 - RNA, 24 nt, Human
ccugggcaacauagugagacccca

SEQ ID NO: 1350091 - RNA, 19 nt, Human
cggagagguuguguccaca

SEQ ID NO: 1350092 - RNA, 21 nt, Human
cuaccaagauucaagcugcac

SEQ ID NO: 1350093 - RNA, 20 nt, Human
cuccaugguugaaaaagcag

SEQ ID NO: 1350094 - RNA, 19 nt, Human
cugaaguacaaggaaugga

SEQ ID NO: 1350095 - RNA, 21 nt, Human
cuguaaucccagcacuuuggg

SEQ ID NO: 1350096 - RNA, 21 nt, Human
cuguaauccuagcuacucggg

SEQ ID NO: 1350097 - RNA, 20 nt, Human
gaagguugcggugagccaag

SEQ ID NO: 1350098 - RNA, 24 nt, Human
gaagguugcggugagccaagauca

SEQ ID NO: 1350099 - RNA, 24 nt, Human
gacaguuccaaauaaccaaaaaca

SEQ ID NO: 1350100 - RNA, 18 nt, Human
gaccccaucucucucagc

SEQ ID NO: 1350101 - RNA, 23 nt, Human
gagaaucgcuugaaccugggaga

SEQ ID NO: 1350102 - RNA, 21 nt, Human
gagaggaagguugcggugagc

SEQ ID NO: 1350103 - RNA, 24 nt, Human
gaggugagaggauugcuugagucc

SEQ ID NO: 1350104 - RNA, 24 nt, Human
gauugcuugaguccaggaguucaa

SEQ ID NO: 1350105 - RNA, 22 nt, Human
gcaccagaguuuucuuccccca

SEQ ID NO: 1350106 - RNA, 22 nt, Human
gcuugaguccaggaguucaaga

SEQ ID NO: 1350107 - RNA, 23 nt, Human
ggaggcugaggugagaggauugc

SEQ ID NO: 1350108 - RNA, 23 nt, Human
ggauugcuugaguccaggaguuc

SEQ ID NO: 1350109 - RNA, 24 nt, Human
guuaaaauauacaucugaaguaca

SEQ ID NO: 1350110 - RNA, 19 nt, Human
guucuuuauaaauggcaga

SEQ ID NO: 1350111 - RNA, 26 nt, Human
uaaaaucuguaaucccagcacuuugg

SEQ ID NO: 1350112 - RNA, 24 nt, Human
uaaccaaaaacauccuugaauaac

SEQ ID NO: 1350113 - RNA, 22 nt, Human
uaauacagucccugagaaucaa

SEQ ID NO: 1350114 - RNA, 19 nt, Human
uaccaagauucaagcugca

SEQ ID NO: 1350115 - RNA, 22 nt, Human
uacuccauucaaaaaugagggu

SEQ ID NO: 1350116 - RNA, 21 nt, Human
uaggaaaaacuuucacggaga

SEQ ID NO: 1350117 - RNA, 19 nt, Human
uauaaauggcagagacuca

SEQ ID NO: 1350118 - RNA, 23 nt, Human
ucacaccauugcacuccagccug

SEQ ID NO: 1350119 - RNA, 20 nt, Human
uccaugguugaaaaagcagc

SEQ ID NO: 1350120 - RNA, 22 nt, Human
ucccugacacguucaguuccua

SEQ ID NO: 1350121 - RNA, 20 nt, Human
ucgcuugaaccugggagagg

SEQ ID NO: 1350122 - RNA, 25 nt, Human
ucgcuugaaccugggagaggaaggu

SEQ ID NO: 1350123 - RNA, 24 nt, Human
ucgggaggcugaggcaggagaauc

SEQ ID NO: 1350124 - RNA, 21 nt, Human
ucugaaguacaaggaauggau

SEQ ID NO: 1350125 - RNA, 21 nt, Human
ucuuuauaaauggcagagacu

SEQ ID NO: 1350126 - RNA, 22 nt, Human
ugaaauaggaauaauacagucc

SEQ ID NO: 1350127 - RNA, 23 nt, Human
ugaaccugggagaggaagguugc

SEQ ID NO: 1350128 - RNA, 19 nt, Human
ugagaccccaucucucuca

SEQ ID NO: 1350129 - RNA, 20 nt, Human
ugaggcaggagaaucgcuug

SEQ ID NO: 1350130 - RNA, 24 nt, Human
ugaggcaggagaaucgcuugaacc

SEQ ID NO: 1350131 - RNA, 25 nt, Human
ugaggcaggagaaucgcuugaaccu

SEQ ID NO: 1350132 - RNA, 21 nt, Human
ugaggugagaggauugcuuga

SEQ ID NO: 1350133 - RNA, 22 nt, Human
ugaggugagaggauugcuugag

SEQ ID NO: 1350134 - RNA, 22 nt, Human
ugaggugagaggauugcuugag

SEQ ID NO: 1350135 - RNA, 19 nt, Human
ugcacuccagccugggcaa

SEQ ID NO: 1350136 - RNA, 24 nt, Human
ugcuucccagucuuggagacuugc

SEQ ID NO: 1350137 - RNA, 20 nt, Human
uggaccuugcuguucagcag

SEQ ID NO: 1350138 - RNA, 23 nt, Human
uggauaggaaaaacuuucacgga

SEQ ID NO: 1350139 - RNA, 21 nt, Human
ugggagaggaagguugcggug

SEQ ID NO: 1350140 - RNA, 22 nt, Human
ugggaggcugaggugagaggau

SEQ ID NO: 1350141 - RNA, 24 nt, Human
ugggaggcugaggugagaggauug

SEQ ID NO: 1350142 - RNA, 25 nt, Human
ugggaggcugaggugagaggauugg

SEQ ID NO: 1350143 - RNA, 22 nt, Human
ugggcaacauagugagacccca

SEQ ID NO: 1350144 - RNA, 23 nt, Human
ugucaaguauuuaaguaugacag

SEQ ID NO: 1350145 - RNA, 27 nt, Human
uucaaaaagaucaacaauauuuauaaa

SEQ ID NO: 1350146 - RNA, 24 nt, Human
uugaaccugggagaggaagguugc

SEQ ID NO: 1350147 - RNA, 22 nt, Human
uugaguccaggaguucaagacc

SEQ ID NO: 1350148 - RNA, 20 nt, Human
uugcggugagccaagaucac

SEQ ID NO: 1350149 - RNA, 21 nt, Human
uuggagacuugccauacagug

SEQ ID NO: 1350150 - RNA, 19 nt, Human
uugggaggcugaggugaga

SEQ ID NO: 1350151 - RNA, 22 nt, Human
uugggaggcugaggugagagga

SEQ ID NO: 1350152 - RNA, 23 nt, Human
aaaacaaaaguaaaacuucccaa

SEQ ID NO: 1350153 - RNA, 19 nt, Human
aaacaaaaguaaaacuucc

SEQ ID NO: 1350154 - RNA, 23 nt, Human
aaacauaaacauacuaaauaauc

SEQ ID NO: 1350155 - RNA, 19 nt, Human
aaagugcuaggauuacagg

SEQ ID NO: 1350156 - RNA, 24 nt, Human
aaagugcuaggauuacaggcguga

SEQ ID NO: 1350157 - RNA, 18 nt, Human
aaauacuggacccuuagc

SEQ ID NO: 1350158 - RNA, 23 nt, Human
aacaaaaaggauauuuaagauau

SEQ ID NO: 1350159 - RNA, 20 nt, Human
aacaaacccuguugauccug

SEQ ID NO: 1350160 - RNA, 23 nt, Human
aagaaaaagauaugcuuucaaaa

SEQ ID NO: 1350161 - RNA, 26 nt, Human
aagugcuaggauuacaggcgugagcc

SEQ ID NO: 1350162 - RNA, 18 nt, Human
acagaauguaaaauguau

SEQ ID NO: 1350163 - RNA, 22 nt, Human
accauguuggccaggcuggucu

SEQ ID NO: 1350164 - RNA, 18 nt, Human
acgggguuucaccauguu

SEQ ID NO: 1350165 - RNA, 23 nt, Human
acgggguuucaccauguuggcca

SEQ ID NO: 1350166 - RNA, 24 nt, Human
acgggguuucaccauguuggccag

SEQ ID NO: 1350167 - RNA, 24 nt, Human
acucccggguuucagcaauucucc

SEQ ID NO: 1350168 - RNA, 18 nt, Human
acucugucauccaggcug

SEQ ID NO: 1350169 - RNA, 24 nt, Human
acucugucauccaggcuggagugc

SEQ ID NO: 1350170 - RNA, 23 nt, Human
acugaccucaggugauccaccug

SEQ ID NO: 1350171 - RNA, 24 nt, Human
acuggacccuuagcacagaaaauu

SEQ ID NO: 1350172 - RNA, 18 nt, Human
agacagcagcacgagccc

SEQ ID NO: 1350173 - RNA, 19 nt, Human
agacagcagcacgagccca

SEQ ID NO: 1350174 - RNA, 22 nt, Human
agauagcagcgucuccgaagag

SEQ ID NO: 1350175 - RNA, 20 nt, Human
agcaauucuccugccucagc

SEQ ID NO: 1350176 - RNA, 22 nt, Human
agcagcgucuccgaagagacag

SEQ ID NO: 1350177 - RNA, 25 nt, Human
aggcuggagugcaguggcccagucu

SEQ ID NO: 1350178 - RNA, 24 nt, Human
aggugauccaccugccucggccuc

SEQ ID NO: 1350179 - RNA, 22 nt, Human
aguagagacgggguuucaccau

SEQ ID NO: 1350180 - RNA, 20 nt, Human
agugcaguggcccagucucg

SEQ ID NO: 1350181 - RNA, 24 nt, Human
agugcaguggcccagucucggcuc

SEQ ID NO: 1350182 - RNA, 23 nt, Human
aucaacuuuuccucuccuuuagg

SEQ ID NO: 1350183 - RNA, 24 nt, Human
auuuuuguauuuuuaguagagacg

SEQ ID NO: 1350184 - RNA, 20 nt, Human
caaaaguaaaacuucccaaa

SEQ ID NO: 1350185 - RNA, 24 nt, Human
caaagugcuaggauuacaggcgug

SEQ ID NO: 1350186 - RNA, 24 nt, Human
caccacgcccagcuaauuuuugua

SEQ ID NO: 1350187 - RNA, 21 nt, Human
caccauguuggccaggcuggu

SEQ ID NO: 1350188 - RNA, 22 nt, Human
caccauguuggccaggcugguc

SEQ ID NO: 1350189 - RNA, 23 nt, Human
caccauguuggccaggcuggucu

SEQ ID NO: 1350190 - RNA, 24 nt, Human
caccauguuggccaggcuggucuu

SEQ ID NO: 1350191 - RNA, 23 nt, Human
caccugccucggccucccaaagu

SEQ ID NO: 1350192 - RNA, 23 nt, Human
cacucugucauccaggcuggagu

SEQ ID NO: 1350193 - RNA, 24 nt, Human
cacucugucauccaggcuggagug

SEQ ID NO: 1350194 - RNA, 18 nt, Human
cagcacgagcccauuuac

SEQ ID NO: 1350195 - RNA, 20 nt, Human
cagccuccuggguagcuggg

SEQ ID NO: 1350196 - RNA, 22 nt, Human
caggugauccaccugccucggc

SEQ ID NO: 1350197 - RNA, 24 nt, Human
caugccaccacgcccagcuaauuu

SEQ ID NO: 1350198 - RNA, 24 nt, Human
cauguuggccaggcuggucuugaa

SEQ ID NO: 1350199 - RNA, 22 nt, Human
ccaaagugcuaggauuacaggc

SEQ ID NO: 1350200 - RNA, 24 nt, Human
ccaaagugcuaggauuacaggcgu

SEQ ID NO: 1350201 - RNA, 23 nt, Human
cccggguuucagcaauucuccug

SEQ ID NO: 1350202 - RNA, 18 nt, Human
ccgcgcccagccugcauu

SEQ ID NO: 1350203 - RNA, 23 nt, Human
ccuggguagcugggauuacaggc

SEQ ID NO: 1350204 - RNA, 24 nt, Human
ccuggguagcugggauuacaggcg

SEQ ID NO: 1350205 - RNA, 23 nt, Human
cgaagagacagcagcacgagccc

SEQ ID NO: 1350206 - RNA, 21 nt, Human
cgcaugccaccacgcccagcu

SEQ ID NO: 1350207 - RNA, 22 nt, Human
cuaucuagcaauuccuaaucau

SEQ ID NO: 1350208 - RNA, 24 nt, Human
cucacucugucauccaggcuggag

SEQ ID NO: 1350209 - RNA, 24 nt, Human
cucagccuccuggguagcugggau

SEQ ID NO: 1350210 - RNA, 21 nt, Human
cucccggguuucagcaauucu

SEQ ID NO: 1350211 - RNA, 21 nt, Human
cucucugcagccucugacucc

SEQ ID NO: 1350212 - RNA, 20 nt, Human
cugaccucaggugauccacc

SEQ ID NO: 1350213 - RNA, 21 nt, Human
cugcagccucugacucccggg

SEQ ID NO: 1350214 - RNA, 23 nt, Human
cugcagccucugacucccggguu

SEQ ID NO: 1350215 - RNA, 23 nt, Human
cugccucagccuccuggguagcu

SEQ ID NO: 1350216 - RNA, 23 nt, Human
cugccucggccucccaaagugcu

SEQ ID NO: 1350217 - RNA, 20 nt, Human
cuggguagcugggauuacag

SEQ ID NO: 1350218 - RNA, 19 nt, Human
cugucauccaggcuggagu

SEQ ID NO: 1350219 - RNA, 19 nt, Human
gacaguggcugacucaccc

SEQ ID NO: 1350220 - RNA, 24 nt, Human
gaccucaggugauccaccugccuc

SEQ ID NO: 1350221 - RNA, 22 nt, Human
gacucccggguuucagcaauuc

SEQ ID NO: 1350222 - RNA, 24 nt, Human
gagacgggguuucaccauguuggc

SEQ ID NO: 1350223 - RNA, 24 nt, Human
gagccaccgcgcccagccugcauu

SEQ ID NO: 1350224 - RNA, 18 nt, Human
gauuacaggcgcaugcca

SEQ ID NO: 1350225 - RNA, 18 nt, Human
gauuacaggcgugagcca

SEQ ID NO: 1350226 - RNA, 20 nt, Human
gauuacaggcgugagccacc

SEQ ID NO: 1350227 - RNA, 22 nt, Human
gauuacaggcgugagccaccgc

SEQ ID NO: 1350228 - RNA, 18 nt, Human
gcaugccaccacgcccag

SEQ ID NO: 1350229 - RNA, 22 nt, Human
gcccagcuaauuuuuguauuuu

SEQ ID NO: 1350230 - RNA, 21 nt, Human
gccucccguuaucguuuagac

SEQ ID NO: 1350231 - RNA, 25 nt, Human
gcuggagugcaguggcccagucucg

SEQ ID NO: 1350232 - RNA, 22 nt, Human
ggauuacaggcgugagccaccg

SEQ ID NO: 1350233 - RNA, 23 nt, Human
ggcugacucacccucucucacuc

SEQ ID NO: 1350234 - RNA, 23 nt, Human
gggguuucaccauguuggccagg

SEQ ID NO: 1350235 - RNA, 22 nt, Human
ggguuucaccauguuggccagg

SEQ ID NO: 1350236 - RNA, 23 nt, Human
guagagacgggguuucaccaugu

SEQ ID NO: 1350237 - RNA, 18 nt, Human
guagcugggauuacaggc

SEQ ID NO: 1350238 - RNA, 18 nt, Human
guagcugggauuacaggc

SEQ ID NO: 1350239 - RNA, 18 nt, Human
guagcugggauuacaggc

SEQ ID NO: 1350240 - RNA, 24 nt, Human
gugauccaccugccucggccuccc

SEQ ID NO: 1350241 - RNA, 19 nt, Human
guggcugacucacccucuc

SEQ ID NO: 1350242 - RNA, 18 nt, Human
uaagauagcagcgucucc

SEQ ID NO: 1350243 - RNA, 24 nt, Human
uaauuuuuguauuuuuaguagaga

SEQ ID NO: 1350244 - RNA, 24 nt, Human
uacaggcgcaugccaccacgccca

SEQ ID NO: 1350245 - RNA, 24 nt, Human
uacaggcgugagccaccgcgccca

SEQ ID NO: 1350246 - RNA, 21 nt, Human
uacauuguucugaagaaaaag

SEQ ID NO: 1350247 - RNA, 22 nt, Human
uagagacgggguuucaccaugu

SEQ ID NO: 1350248 - RNA, 18 nt, Human
uaggauuacaggcgugag

SEQ ID NO: 1350249 - RNA, 19 nt, Human
uaggauuacaggcgugagc

SEQ ID NO: 1350250 - RNA, 21 nt, Human
uaggauuacaggcgugagcca

SEQ ID NO: 1350251 - RNA, 22 nt, Human
uaggauuacaggcgugagccac

SEQ ID NO: 1350252 - RNA, 23 nt, Human
uaggauuacaggcgugagccacc

SEQ ID NO: 1350253 - RNA, 24 nt, Human
uaggauuacaggcgugagccaccg

SEQ ID NO: 1350254 - RNA, 24 nt, Human
uaguagagacgggguuucaccaug

SEQ ID NO: 1350255 - RNA, 26 nt, Human
uaguagagacgggguuucaccauguu

SEQ ID NO: 1350256 - RNA, 22 nt, Human
ucaaauaaauacuggacccuua

SEQ ID NO: 1350257 - RNA, 19 nt, Human
ucaacccuaccccgcagaa

SEQ ID NO: 1350258 - RNA, 27 nt, Human
ucagcaauucuccugccucagccuccu

SEQ ID NO: 1350259 - RNA, 20 nt, Human
ucagccuccuggguagcugg

SEQ ID NO: 1350260 - RNA, 21 nt, Human
ucaggugauccaccugccucg

SEQ ID NO: 1350261 - RNA, 24 nt, Human
ucauccaggcuggagugcaguggc

SEQ ID NO: 1350262 - RNA, 24 nt, Human
ucccaaagugcuaggauuacaggc

SEQ ID NO: 1350263 - RNA, 21 nt, Human
ucccggguuucagcaauucuc

SEQ ID NO: 1350264 - RNA, 24 nt, Human
ucccggguuucagcaauucuccug

SEQ ID NO: 1350265 - RNA, 23 nt, Human
uccuccucaaccuucccucgcug

SEQ ID NO: 1350266 - RNA, 24 nt, Human
uccuggguagcugggauuacaggc

SEQ ID NO: 1350267 - RNA, 18 nt, Human
ucggccucccaaagugcu

SEQ ID NO: 1350268 - RNA, 18 nt, Human
ucuaaaccaaaccagaag

SEQ ID NO: 1350269 - RNA, 23 nt, Human
ucucacucugucauccaggcugg

SEQ ID NO: 1350270 - RNA, 24 nt, Human
ucucacucugucauccaggcugga

SEQ ID NO: 1350271 - RNA, 24 nt, Human
ucuccugccucagccuccugggua

SEQ ID NO: 1350272 - RNA, 18 nt, Human
ucucucacucccgcgucc

SEQ ID NO: 1350273 - RNA, 24 nt, Human
ucucugcagccucugacucccggg

SEQ ID NO: 1350274 - RNA, 21 nt, Human
ucugcagccucugacucccgg

SEQ ID NO: 1350275 - RNA, 22 nt, Human
ucuggcuccuccucaaccuucc

SEQ ID NO: 1350276 - RNA, 24 nt, Human
ucugucauccaggcuggagugcag

SEQ ID NO: 1350277 - RNA, 24 nt, Human
ugaccucaggugauccaccugccu

SEQ ID NO: 1350278 - RNA, 28 nt, Human
ugacucccggguuucagcaauucuccuu

SEQ ID NO: 1350279 - RNA, 18 nt, Human
ugcaggacccggcucugg

SEQ ID NO: 1350280 - RNA, 22 nt, Human
ugcaguggcccagucucggcuc

SEQ ID NO: 1350281 - RNA, 21 nt, Human
ugccucagccuccuggguagc

SEQ ID NO: 1350282 - RNA, 24 nt, Human
ugccucagccuccuggguagcugg

SEQ ID NO: 1350283 - RNA, 21 nt, Human
ugccucggccucccaaagugc

SEQ ID NO: 1350284 - RNA, 23 nt, Human
ugccucggccucccaaagugcua

SEQ ID NO: 1350285 - RNA, 24 nt, Human
ugccucggccucccaaagugcuag

SEQ ID NO: 1350286 - RNA, 24 nt, Human
ugcuaggauuacaggcgugagcca

SEQ ID NO: 1350287 - RNA, 23 nt, Human
uggagugcaguggcccagucucg

SEQ ID NO: 1350288 - RNA, 24 nt, Human
uggagugcaguggcccagucucgg

SEQ ID NO: 1350289 - RNA, 26 nt, Human
uggccaggcuggucuugaacugaccu

SEQ ID NO: 1350290 - RNA, 21 nt, Human
ugggauuacaggcgcaugcca

SEQ ID NO: 1350291 - RNA, 22 nt, Human
ugggauuacaggcgcaugccac

SEQ ID NO: 1350292 - RNA, 24 nt, Human
ugggauuacaggcgcaugccacca

SEQ ID NO: 1350293 - RNA, 21 nt, Human
uggucuugaacugaccucagg

SEQ ID NO: 1350294 - RNA, 19 nt, Human
uguggcaguaaacagaaug

SEQ ID NO: 1350295 - RNA, 19 nt, Human
uuaagauauuuuccaaaac

SEQ ID NO: 1350296 - RNA, 24 nt, Human
uuacugaauucaacccuaccccgc

SEQ ID NO: 1350297 - RNA, 18 nt, Human
uuaguagagacgggguuu

SEQ ID NO: 1350298 - RNA, 22 nt, Human
uuaguagagacgggguuucacc

SEQ ID NO: 1350299 - RNA, 24 nt, Human
uuaguagagacgggguuucaccau

SEQ ID NO: 1350300 - RNA, 24 nt, Human
uuggccaggcuggucuugaacuga

SEQ ID NO: 1350301 - RNA, 23 nt, Human
uuguauuuuuaguagagacgggg

SEQ ID NO: 1350302 - RNA, 24 nt, Human
uuucaccauguuggccaggcuggu

SEQ ID NO: 1350303 - RNA, 24 nt, Human
uuuuuaguagagacgggguuucac

SEQ ID NO: 1350304 - RNA, 20 nt, Human
uuuuuguauuuuuaguagag

SEQ ID NO: 1350305 - RNA, 24 nt, Human
aaccugggagagaaaacaaguccc

SEQ ID NO: 1350306 - RNA, 22 nt, Human
aagaaccuguaaucccgacacu

SEQ ID NO: 1350307 - RNA, 25 nt, Human
aaugacuacuaacaauggcacuaua

SEQ ID NO: 1350308 - RNA, 18 nt, Human
accuguaaucccgacacu

SEQ ID NO: 1350309 - RNA, 24 nt, Human
acgaucacuugaggccaggaguuu

SEQ ID NO: 1350310 - RNA, 21 nt, Human
acuuuaaggaucacuagugaa

SEQ ID NO: 1350311 - RNA, 24 nt, Human
agaaaaaagaaaccugggagagaa

SEQ ID NO: 1350312 - RNA, 20 nt, Human
aucacuugaggccaggaguu

SEQ ID NO: 1350313 - RNA, 19 nt, Human
cacuguauugcaggaagaa

SEQ ID NO: 1350314 - RNA, 20 nt, Human
cacuguauugcaggaagaac

SEQ ID NO: 1350315 - RNA, 25 nt, Human
cagccgauccuuccuagucagguuc

SEQ ID NO: 1350316 - RNA, 26 nt, Human
cagcugggcuccuccuauacugaauc

SEQ ID NO: 1350317 - RNA, 27 nt, Human
cagcugggcuccuccuauacugaaucc

SEQ ID NO: 1350318 - RNA, 25 nt, Human
caggaagaaacgaugguaggccuug

SEQ ID NO: 1350319 - RNA, 21 nt, Human
caggaagaaccuguaaucccg

SEQ ID NO: 1350320 - RNA, 23 nt, Human
ccaaaggcaggaagaaacgaugg

SEQ ID NO: 1350321 - RNA, 18 nt, Human
cccagcugggcuccuccu

SEQ ID NO: 1350322 - RNA, 18 nt, Human
cgaggguuggagcggguc

SEQ ID NO: 1350323 - RNA, 25 nt, Human
cuaacaauggcacuauauuuccuuu

SEQ ID NO: 1350324 - RNA, 21 nt, Human
cugagguaagacgaucacuug

SEQ ID NO: 1350325 - RNA, 27 nt, Human
cuuccuagucagguucugaauccugag

SEQ ID NO: 1350326 - RNA, 18 nt, Human
gaauagagacuuuaagga

SEQ ID NO: 1350327 - RNA, 19 nt, Human
gaauugcuauagcgucccc

SEQ ID NO: 1350328 - RNA, 19 nt, Human
gagagaaaacaagucccaa

SEQ ID NO: 1350329 - RNA, 18 nt, Human
gaucacuugaggccagga

SEQ ID NO: 1350330 - RNA, 24 nt, Human
gaucacuugaggccaggaguuuaa

SEQ ID NO: 1350331 - RNA, 28 nt, Human
gggaauaacuggagagauaccgguaccc

SEQ ID NO: 1350332 - RNA, 22 nt, Human
gucccagcuacccuugagcagc

SEQ ID NO: 1350333 - RNA, 22 nt, Human
guggcuccaccccuaucccagc

SEQ ID NO: 1350334 - RNA, 22 nt, Human
uagaaugacuacuaacaauggc

SEQ ID NO: 1350335 - RNA, 20 nt, Human
uagcguagaauaacuccagu

SEQ ID NO: 1350336 - RNA, 24 nt, Human
uagcguagaauaacuccaguuccu

SEQ ID NO: 1350337 - RNA, 23 nt, Human
uagggcauaguuagaaaagauuu

SEQ ID NO: 1350338 - RNA, 19 nt, Human
ucaagguaacacgagucua

SEQ ID NO: 1350339 - RNA, 23 nt, Human
ucacuugaggccaggaguuuaag

SEQ ID NO: 1350340 - RNA, 30 nt, Human
uccaccccuaucccagcugggcuccuccua

SEQ ID NO: 1350341 - RNA, 23 nt, Human
uccugcucuguaccgaggguugg

SEQ ID NO: 1350342 - RNA, 24 nt, Human
uccugcucuguaccgaggguugga

SEQ ID NO: 1350343 - RNA, 20 nt, Human
ucugggaauaacuggagaga

SEQ ID NO: 1350344 - RNA, 21 nt, Human
ugaacagguggcuccaccccu

SEQ ID NO: 1350345 - RNA, 24 nt, Human
ugagaggcugagguaagacgauca

SEQ ID NO: 1350346 - RNA, 21 nt, Human
ugagauggaaagugucuuccc

SEQ ID NO: 1350347 - RNA, 22 nt, Human
ugcaggaagaaccuguaauccc

SEQ ID NO: 1350348 - RNA, 18 nt, Human
ugccugacggcccaaagg

SEQ ID NO: 1350349 - RNA, 24 nt, Human
uggagcgggucccaaccaacugcc

SEQ ID NO: 1350350 - RNA, 21 nt, Human
ugggagagaaaacaaguccca

SEQ ID NO: 1350351 - RNA, 23 nt, Human
uuagacaaauccaauauccauca

SEQ ID NO: 1350352 - RNA, 25 nt, Human
uugagaggcugagguaagacgauca

SEQ ID NO: 1350353 - RNA, 18 nt, Human
uuggagcgggucccaacc

SEQ ID NO: 1350354 - RNA, 27 nt, Human
uuuaagaaaaaagaaaccugggagaga

SEQ ID NO: 1350355 - RNA, 24 nt, Human
aaaauagaggccucacaauaauau

SEQ ID NO: 1350356 - RNA, 22 nt, Human
aaacucuauagccccuccccag

SEQ ID NO: 1350357 - RNA, 26 nt, Human
aaauacuggaaaauuaaagcugagcu

SEQ ID NO: 1350358 - RNA, 18 nt, Human
aacacaccccucacaguu

SEQ ID NO: 1350359 - RNA, 24 nt, Human
aacacagugagaaggcaaucaucu

SEQ ID NO: 1350360 - RNA, 20 nt, Human
aacaguggguuccaucuccc

SEQ ID NO: 1350361 - RNA, 19 nt, Human
aacauggugaaaccccguc

SEQ ID NO: 1350362 - RNA, 20 nt, Human
aacauggugaaaccccgucu

SEQ ID NO: 1350363 - RNA, 21 nt, Human
aacauggugaaaccccgucuc

SEQ ID NO: 1350364 - RNA, 19 nt, Human
aagcaaaagaaucccugaa

SEQ ID NO: 1350365 - RNA, 22 nt, Human
aagcagaaauggaaccugccca

SEQ ID NO: 1350366 - RNA, 23 nt, Human
aagcagaaauggaaccugcccaa

SEQ ID NO: 1350367 - RNA, 25 nt, Human
aagcagaaauggaaccugcccaagg

SEQ ID NO: 1350368 - RNA, 24 nt, Human
aagcaggaagagagccuuccccag

SEQ ID NO: 1350369 - RNA, 26 nt, Human
aagcaggaagagagccuuccccagga

SEQ ID NO: 1350370 - RNA, 22 nt, Human
aagcuccucaagcuugaaguua

SEQ ID NO: 1350371 - RNA, 20 nt, Human
acaaaggcugugaaaacacu

SEQ ID NO: 1350372 - RNA, 20 nt, Human
acacagguugugcacacugg

SEQ ID NO: 1350373 - RNA, 22 nt, Human
acacagugagaaggcaaucauc

SEQ ID NO: 1350374 - RNA, 20 nt, Human
acacugaguaaauauuuaau

SEQ ID NO: 1350375 - RNA, 22 nt, Human
accccaguagcucccauggcua

SEQ ID NO: 1350376 - RNA, 24 nt, Human
accccgucucuaauaaaaauacaa

SEQ ID NO: 1350377 - RNA, 22 nt, Human
accuagcggcuuaaugaaacac

SEQ ID NO: 1350378 - RNA, 23 nt, Human
acuccaccauccaaugguaaugg

SEQ ID NO: 1350379 - RNA, 21 nt, Human
acugcucugagcuccuggagg

SEQ ID NO: 1350380 - RNA, 22 nt, Human
acugcucugagcuccuggaggc

SEQ ID NO: 1350381 - RNA, 22 nt, Human
agaaagcaggggucauggcacc

SEQ ID NO: 1350382 - RNA, 21 nt, Human
agagaaacacugugcuaugca

SEQ ID NO: 1350383 - RNA, 19 nt, Human
agagagccuuccccaggag

SEQ ID NO: 1350384 - RNA, 19 nt, Human
agagagccuuccccaggag

SEQ ID NO: 1350385 - RNA, 18 nt, Human
agagcccuuccuaccgcc

SEQ ID NO: 1350386 - RNA, 22 nt, Human
agagguggacugaucuauugua

SEQ ID NO: 1350387 - RNA, 18 nt, Human
agcaaaagaaucccugaa

SEQ ID NO: 1350388 - RNA, 24 nt, Human
agcacuuugggaggccgaggcagg

SEQ ID NO: 1350389 - RNA, 27 nt, Human
agccugagcuaagaugauacuggaggc

SEQ ID NO: 1350390 - RNA, 20 nt, Human
agcggcuuaaugaaacacaa

SEQ ID NO: 1350391 - RNA, 23 nt, Human
agcuauuuugggcccaaggugau

SEQ ID NO: 1350392 - RNA, 24 nt, Human
agcuugaaguuaggugaacuucca

SEQ ID NO: 1350393 - RNA, 23 nt, Human
aggaaagaggcacccuuuuucca

SEQ ID NO: 1350394 - RNA, 19 nt, Human
aggagacacuuugaaugau

SEQ ID NO: 1350395 - RNA, 23 nt, Human
aggcagaagugcagguguggugu

SEQ ID NO: 1350396 - RNA, 26 nt, Human
aggcagguggaucaugagguccggag

SEQ ID NO: 1350397 - RNA, 25 nt, Human
aggccaggcccacccacucaaggga

SEQ ID NO: 1350398 - RNA, 20 nt, Human
aggccgaggcagguggauca

SEQ ID NO: 1350399 - RNA, 24 nt, Human
agggaaaaucuuuuaccuucccca

SEQ ID NO: 1350400 - RNA, 19 nt, Human
agggauggggauuacacag

SEQ ID NO: 1350401 - RNA, 19 nt, Human
agguccggagaucgagacu

SEQ ID NO: 1350402 - RNA, 18 nt, Human
aguaacucaaugccaaau

SEQ ID NO: 1350403 - RNA, 23 nt, Human
agucaggcauacuggacacccuu

SEQ ID NO: 1350404 - RNA, 19 nt, Human
agugagaaggcaaucaucu

SEQ ID NO: 1350405 - RNA, 23 nt, Human
auacauucccuuuacuggauucu

SEQ ID NO: 1350406 - RNA, 26 nt, Human
auuagaaaagagaacaaaaggggccg

SEQ ID NO: 1350407 - RNA, 25 nt, Human
caaagaguguuuaacucauuguugg

SEQ ID NO: 1350408 - RNA, 26 nt, Human
caaagcagggacccaaaauguguaau

SEQ ID NO: 1350409 - RNA, 23 nt, Human
caacaauaguaacucaaugccaa

SEQ ID NO: 1350410 - RNA, 19 nt, Human
caagaaaaaucccucucau

SEQ ID NO: 1350411 - RNA, 20 nt, Human
caauaguaacucaaugccaa

SEQ ID NO: 1350412 - RNA, 24 nt, Human
caauguucaauuagaaacaagaga

SEQ ID NO: 1350413 - RNA, 22 nt, Human
cacacacauagaugaacgugca

SEQ ID NO: 1350414 - RNA, 22 nt, Human
cacacagacccccacccacagc

SEQ ID NO: 1350415 - RNA, 27 nt, Human
cacacagacccccacccacagcaggcc

SEQ ID NO: 1350416 - RNA, 25 nt, Human
caccccaguagcucccauggcuacu

SEQ ID NO: 1350417 - RNA, 20 nt, Human
caccugagccaaaccuuagu

SEQ ID NO: 1350418 - RNA, 22 nt, Human
caccuguaaugccagcacuuug

SEQ ID NO: 1350419 - RNA, 23 nt, Human
caccuguaaugccagcacuuugg

SEQ ID NO: 1350420 - RNA, 24 nt, Human
caccuguaaugccagcacuuuggg

SEQ ID NO: 1350421 - RNA, 21 nt, Human
cacuaugucagccaagaaacc

SEQ ID NO: 1350422 - RNA, 22 nt, Human
cacucaguccucgugaccucgu

SEQ ID NO: 1350423 - RNA, 20 nt, Human
cagaaauggaaccugcccaa

SEQ ID NO: 1350424 - RNA, 20 nt, Human
cagacaccugagccaaaccu

SEQ ID NO: 1350425 - RNA, 22 nt, Human
cagcaagaaagugaggcagaaa

SEQ ID NO: 1350426 - RNA, 24 nt, Human
cagcacuuugggaggccgaggcag

SEQ ID NO: 1350427 - RNA, 26 nt, Human
cagcacuuugggaggccgaggcaggu

SEQ ID NO: 1350428 - RNA, 28 nt, Human
cagcaggccaggccccccacgugaaguc

SEQ ID NO: 1350429 - RNA, 19 nt, Human
cagccuccagaaccaccag

SEQ ID NO: 1350430 - RNA, 26 nt, Human
cagccuccagaaccaccagagagaaa

SEQ ID NO: 1350431 - RNA, 20 nt, Human
caggacacgaguagagacgg

SEQ ID NO: 1350432 - RNA, 20 nt, Human
caggcauacuggacacccuu

SEQ ID NO: 1350433 - RNA, 23 nt, Human
caggugugguguggcugcguucu

SEQ ID NO: 1350434 - RNA, 19 nt, Human
caguaggggaaaaaagaag

SEQ ID NO: 1350435 - RNA, 18 nt, Human
caguggguuccaucuccc

SEQ ID NO: 1350436 - RNA, 21 nt, Human
caucucccuggccacugcacu

SEQ ID NO: 1350437 - RNA, 24 nt, Human
cauuuugcucuguuaaaugccaaa

SEQ ID NO: 1350438 - RNA, 18 nt, Human
ccaaugguaauggcaccc

SEQ ID NO: 1350439 - RNA, 23 nt, Human
ccacccacucaagggauggggau

SEQ ID NO: 1350440 - RNA, 19 nt, Human
ccagacaccugagccaaac

SEQ ID NO: 1350441 - RNA, 20 nt, Human
ccagacaccugagccaaacc

SEQ ID NO: 1350442 - RNA, 18 nt, Human
ccagcaagaaagugaggc

SEQ ID NO: 1350443 - RNA, 19 nt, Human
ccagcaagaaagugaggca

SEQ ID NO: 1350444 - RNA, 18 nt, Human
ccaguuagaacacacccc

SEQ ID NO: 1350445 - RNA, 21 nt, Human
ccaguuagaacacaccccuca

SEQ ID NO: 1350446 - RNA, 23 nt, Human
cccaaaggaaacaguaggggaaa

SEQ ID NO: 1350447 - RNA, 21 nt, Human
cccacagcaggccaggccccc

SEQ ID NO: 1350448 - RNA, 19 nt, Human
ccccaggaguugaaucugc

SEQ ID NO: 1350449 - RNA, 19 nt, Human
ccccaguagcucccauggc

SEQ ID NO: 1350450 - RNA, 18 nt, Human
ccccauggucucuccggg

SEQ ID NO: 1350451 - RNA, 23 nt, Human
ccccuccccaguaucuagaaccu

SEQ ID NO: 1350452 - RNA, 20 nt, Human
ccccugaaagaugcucuggg

SEQ ID NO: 1350453 - RNA, 24 nt, Human
ccccugaaagaugcucuggggaga

SEQ ID NO: 1350454 - RNA, 19 nt, Human
ccgggcgcgguagcuccca

SEQ ID NO: 1350455 - RNA, 20 nt, Human
ccgggcuucaagccuuccca

SEQ ID NO: 1350456 - RNA, 24 nt, Human
ccuaacauggugaaaccccgucuc

SEQ ID NO: 1350457 - RNA, 28 nt, Human
ccuaacauggugaaaccccgucucuaau

SEQ ID NO: 1350458 - RNA, 22 nt, Human
ccuauuuucucauccuguagcc

SEQ ID NO: 1350459 - RNA, 18 nt, Human
ccucuggggacccagccu

SEQ ID NO: 1350460 - RNA, 26 nt, Human
ccuguagcccucuuauaauguagcua

SEQ ID NO: 1350461 - RNA, 22 nt, Human
cuaagcagaaauggaaccugcc

SEQ ID NO: 1350462 - RNA, 22 nt, Human
cuauccuaacauggugaaaccc

SEQ ID NO: 1350463 - RNA, 23 nt, Human
cuauccuaacauggugaaacccc

SEQ ID NO: 1350464 - RNA, 23 nt, Human
cuauuguagaaaggagauaagcu

SEQ ID NO: 1350465 - RNA, 23 nt, Human
cucacaauaauaugagcccugga

SEQ ID NO: 1350466 - RNA, 21 nt, Human
cuccccaguaucuagaaccuu

SEQ ID NO: 1350467 - RNA, 20 nt, Human
cucccuggccacugcacuga

SEQ ID NO: 1350468 - RNA, 21 nt, Human
cucgugaccucgucuuccugc

SEQ ID NO: 1350469 - RNA, 22 nt, Human
cugaaacucuauagccccuccc

SEQ ID NO: 1350470 - RNA, 21 nt, Human
cugcuccccauggucucuccg

SEQ ID NO: 1350471 - RNA, 24 nt, Human
cuggcuguuacuggggacugcucu

SEQ ID NO: 1350472 - RNA, 20 nt, Human
cugugcuggccaaacagugg

SEQ ID NO: 1350473 - RNA, 24 nt, Human
cuuauaagaaaaggaacagagacc

SEQ ID NO: 1350474 - RNA, 18 nt, Human
cuugaucuuggacuuccc

SEQ ID NO: 1350475 - RNA, 23 nt, Human
cuuggcucaguaccuuacacuga

SEQ ID NO: 1350476 - RNA, 22 nt, Human
gaaaaauguaaucaacaaccac

SEQ ID NO: 1350477 - RNA, 21 nt, Human
gaaauuagaaggcccgaggca

SEQ ID NO: 1350478 - RNA, 21 nt, Human
gaacagagaccacauacucuu

SEQ ID NO: 1350479 - RNA, 23 nt, Human
gaacgugcaggaugcuggggugg

SEQ ID NO: 1350480 - RNA, 23 nt, Human
gacccagccuuuccccacacuca

SEQ ID NO: 1350481 - RNA, 18 nt, Human
gaccucgucuuccugcuc

SEQ ID NO: 1350482 - RNA, 18 nt, Human
gagaagaaaugaguguua

SEQ ID NO: 1350483 - RNA, 19 nt, Human
gaggaacacagugagaagg

SEQ ID NO: 1350484 - RNA, 19 nt, Human
gaguagagacggaauaacc

SEQ ID NO: 1350485 - RNA, 24 nt, Human
gaguagagacggaauaaccccacg

SEQ ID NO: 1350486 - RNA, 19 nt, Human
gcaggaugcugggguggcu

SEQ ID NO: 1350487 - RNA, 21 nt, Human
gcuggggagaagccucugcuc

SEQ ID NO: 1350488 - RNA, 22 nt, Human
ggaacacagugagaaggcaauc

SEQ ID NO: 1350489 - RNA, 21 nt, Human
ggaauaaccccacgagugaca

SEQ ID NO: 1350490 - RNA, 25 nt, Human
ggacugaucuauuguagaaaggaga

SEQ ID NO: 1350491 - RNA, 21 nt, Human
ggagaagaaaugaguguuagc

SEQ ID NO: 1350492 - RNA, 20 nt, Human
ggagagaagacaguccacuc

SEQ ID NO: 1350493 - RNA, 23 nt, Human
ggccagagauuuggguuaggggu

SEQ ID NO: 1350494 - RNA, 23 nt, Human
ggccaggccccccacgugaaguc

SEQ ID NO: 1350495 - RNA, 19 nt, Human
gggauggggauuacacagg

SEQ ID NO: 1350496 - RNA, 18 nt, Human
gggcacagaaauucccac

SEQ ID NO: 1350497 - RNA, 18 nt, Human
gggcauuguguggggagu

SEQ ID NO: 1350498 - RNA, 24 nt, Human
gggcauuguguggggagugggugc

SEQ ID NO: 1350499 - RNA, 24 nt, Human
gggcgcgguagcucccaccuguaa

SEQ ID NO: 1350500 - RNA, 21 nt, Human
guaaagcaggaagagagccuu

SEQ ID NO: 1350501 - RNA, 22 nt, Human
guacacacacacauagaugaac

SEQ ID NO: 1350502 - RNA, 20 nt, Human
gucaaaaaauucuuacuuaa

SEQ ID NO: 1350503 - RNA, 18 nt, Human
guccccaguaacagccag

SEQ ID NO: 1350504 - RNA, 21 nt, Human
gugaagucuucauacagcccu

SEQ ID NO: 1350505 - RNA, 23 nt, Human
gugcuggccaaacaguggguucc

SEQ ID NO: 1350506 - RNA, 23 nt, Human
uaaagucaggcauacuggacacc

SEQ ID NO: 1350507 - RNA, 22 nt, Human
uaacauggugaaaccccgucuc

SEQ ID NO: 1350508 - RNA, 24 nt, Human
uaacauggugaaaccccgucucua

SEQ ID NO: 1350509 - RNA, 20 nt, Human
uaaccccacgagugacagcu

SEQ ID NO: 1350510 - RNA, 27 nt, Human
uaacuccccaguuagaacacaccccuu

SEQ ID NO: 1350511 - RNA, 22 nt, Human
uaagcaucaugaaucaaauaga

SEQ ID NO: 1350512 - RNA, 23 nt, Human
uaaguacaacuuugcuacauaaa

SEQ ID NO: 1350513 - RNA, 21 nt, Human
uacacugaguaaauauuuaau

SEQ ID NO: 1350514 - RNA, 21 nt, Human
uacuacagaaucaucagcuau

SEQ ID NO: 1350515 - RNA, 19 nt, Human
uacuggggacugcucugag

SEQ ID NO: 1350516 - RNA, 21 nt, Human
uacuuuccccacauguuccca

SEQ ID NO: 1350517 - RNA, 20 nt, Human
uagaaauagacacacaugcc

SEQ ID NO: 1350518 - RNA, 25 nt, Human
uagaacacaccccucacaguuacuu

SEQ ID NO: 1350519 - RNA, 19 nt, Human
uagaaggcccgaggcagag

SEQ ID NO: 1350520 - RNA, 22 nt, Human
uagcacacccaacugcuaagag

SEQ ID NO: 1350521 - RNA, 26 nt, Human
uaguagauucuaaauugcuauguaaa

SEQ ID NO: 1350522 - RNA, 19 nt, Human
uauuacagcgaucaaacuu

SEQ ID NO: 1350523 - RNA, 21 nt, Human
ucacaugauacauucccuuua

SEQ ID NO: 1350524 - RNA, 24 nt, Human
ucaugagguccggagaucgagacu

SEQ ID NO: 1350525 - RNA, 18 nt, Human
uccaauaagcugucuucc

SEQ ID NO: 1350526 - RNA, 20 nt, Human
uccacucucagaggaacaca

SEQ ID NO: 1350527 - RNA, 21 nt, Human
uccagaaagcaggggucaugg

SEQ ID NO: 1350528 - RNA, 18 nt, Human
uccagagauguuuagacu

SEQ ID NO: 1350529 - RNA, 22 nt, Human
ucccaaagaaacagauuuagcu

SEQ ID NO: 1350530 - RNA, 19 nt, Human
uccccacauguucccaccc

SEQ ID NO: 1350531 - RNA, 22 nt, Human
uccuaccgccucaauccagaaa

SEQ ID NO: 1350532 - RNA, 21 nt, Human
uccugcuguguggcagaucca

SEQ ID NO: 1350533 - RNA, 18 nt, Human
ucucuccggcuaagcaga

SEQ ID NO: 1350534 - RNA, 18 nt, Human
ucuuucucucucuuucuc

SEQ ID NO: 1350535 - RNA, 23 nt, Human
ugaagcaaaagaaucccugaaac

SEQ ID NO: 1350536 - RNA, 19 nt, Human
ugaagggcauugugugggg

SEQ ID NO: 1350537 - RNA, 30 nt, Human
ugaaucaaauagauaaccccacuaggauag

SEQ ID NO: 1350538 - RNA, 20 nt, Human
ugacuauagcagacccuguc

SEQ ID NO: 1350539 - RNA, 26 nt, Human
ugagcuacagaaaugucuccagcuaa

SEQ ID NO: 1350540 - RNA, 22 nt, Human
ugagggaaucuugggggucacu

SEQ ID NO: 1350541 - RNA, 24 nt, Human
ugaugggauuagugucuuauaaga

SEQ ID NO: 1350542 - RNA, 18 nt, Human
ugauuggcccaaggguga

SEQ ID NO: 1350543 - RNA, 25 nt, Human
ugcaggugugguguggcugcguucu

SEQ ID NO: 1350544 - RNA, 22 nt, Human
ugccuugccucaccccaauuca

SEQ ID NO: 1350545 - RNA, 20 nt, Human
ugcuacgcacuugcuucauc

SEQ ID NO: 1350546 - RNA, 19 nt, Human
ugcugggguggcucagugg

SEQ ID NO: 1350547 - RNA, 20 nt, Human
ugcugggguggcucaguggg

SEQ ID NO: 1350548 - RNA, 18 nt, Human
uggaagcacagagcuggg

SEQ ID NO: 1350549 - RNA, 24 nt, Human
ugggaggccgaggcagguggauca

SEQ ID NO: 1350550 - RNA, 20 nt, Human
uggggacccagccuuucccc

SEQ ID NO: 1350551 - RNA, 19 nt, Human
uggggagugggugccugag

SEQ ID NO: 1350552 - RNA, 19 nt, Human
uggggugaggccagagauu

SEQ ID NO: 1350553 - RNA, 19 nt, Human
uggguuccaucucccuggc

SEQ ID NO: 1350554 - RNA, 18 nt, Human
ugguguggcugcguucuc

SEQ ID NO: 1350555 - RNA, 22 nt, Human
uguaauuuuaaugcacuacauu

SEQ ID NO: 1350556 - RNA, 26 nt, Human
ugucuuauaagaaaaggaacagagac

SEQ ID NO: 1350557 - RNA, 24 nt, Human
ugugaccaaagcucaaauggucag

SEQ ID NO: 1350558 - RNA, 22 nt, Human
uguggggagugggugccugaga

SEQ ID NO: 1350559 - RNA, 22 nt, Human
ugugguguggcugcguucucug

SEQ ID NO: 1350560 - RNA, 22 nt, Human
uguucccaccccaguagcuccc

SEQ ID NO: 1350561 - RNA, 20 nt, Human
uuaaagaguucacuugauua

SEQ ID NO: 1350562 - RNA, 22 nt, Human
uuacacagguugugcacacugg

SEQ ID NO: 1350563 - RNA, 19 nt, Human
uuacuggggacugcucuga

SEQ ID NO: 1350564 - RNA, 24 nt, Human
uuacuggggacugcucugagcucc

SEQ ID NO: 1350565 - RNA, 18 nt, Human
uuagaaaagagaacaaaa

SEQ ID NO: 1350566 - RNA, 24 nt, Human
uuagucauuuuuuucccacugggu

SEQ ID NO: 1350567 - RNA, 19 nt, Human
uucaugucagaguuguaga

SEQ ID NO: 1350568 - RNA, 20 nt, Human
uuccucuggggacccagccu

SEQ ID NO: 1350569 - RNA, 23 nt, Human
uuccugcugcacacagaccccca

SEQ ID NO: 1350570 - RNA, 22 nt, Human
uuccugggauuuggagcuucug

SEQ ID NO: 1350571 - RNA, 24 nt, Human
uucuacgcuauguaacaaauuacu

SEQ ID NO: 1350572 - RNA, 19 nt, Human
uucucugcguagggucuca

SEQ ID NO: 1350573 - RNA, 21 nt, Human
uuggcacuuuacuuuugcaua

SEQ ID NO: 1350574 - RNA, 25 nt, Human
uugggaggccgaggcagguggauca

SEQ ID NO: 1350575 - RNA, 18 nt, Human
uugugccaaagcagggac

SEQ ID NO: 1350576 - RNA, 18 nt, Human
uuuacuggauucucugca

SEQ ID NO: 1350577 - RNA, 20 nt, Human
uuuccagagauguuuagacu

SEQ ID NO: 1350578 - RNA, 20 nt, Human
uuugcuuauccccuuauuca

SEQ ID NO: 1350579 - RNA, 22 nt, Human
aaaaaacaaacaaacaaaugca

SEQ ID NO: 1350580 - RNA, 20 nt, Human
aaaaagaccucugccccagc

SEQ ID NO: 1350581 - RNA, 23 nt, Human
aaaaagaccucugccccagccca

SEQ ID NO: 1350582 - RNA, 21 nt, Human
aaaaaugcauugauggcuggg

SEQ ID NO: 1350583 - RNA, 21 nt, Human
aaagaccucugccccagccca

SEQ ID NO: 1350584 - RNA, 20 nt, Human
aaaguuauuggcauugccau

SEQ ID NO: 1350585 - RNA, 20 nt, Human
aacauggagaaaccccgucu

SEQ ID NO: 1350586 - RNA, 21 nt, Human
aacauggagaaaccccgucuc

SEQ ID NO: 1350587 - RNA, 19 nt, Human
aacauggugaaaccccauc

SEQ ID NO: 1350588 - RNA, 20 nt, Human
aacauggugaaaccccaucu

SEQ ID NO: 1350589 - RNA, 21 nt, Human
aacauggugaaaccccaucuc

SEQ ID NO: 1350590 - RNA, 22 nt, Human
aacauggugaaaccccaucuca

SEQ ID NO: 1350591 - RNA, 20 nt, Human
aaccugcccccggcuccccc

SEQ ID NO: 1350592 - RNA, 23 nt, Human
aagagugaaacucugucucaaaa

SEQ ID NO: 1350593 - RNA, 18 nt, Human
aauuagccaggcauggug

SEQ ID NO: 1350594 - RNA, 20 nt, Human
acaagagugaaacucugucu

SEQ ID NO: 1350595 - RNA, 21 nt, Human
acaagagugaaacucugucuc

SEQ ID NO: 1350596 - RNA, 21 nt, Human
acacaggagaaucaagaaccc

SEQ ID NO: 1350597 - RNA, 20 nt, Human
acaggagaaucaagaaccca

SEQ ID NO: 1350598 - RNA, 19 nt, Human
acagugcuaacugcagcug

SEQ ID NO: 1350599 - RNA, 22 nt, Human
accauuguacuccagccugggc

SEQ ID NO: 1350600 - RNA, 23 nt, Human
accauuguacuccagccugggca

SEQ ID NO: 1350601 - RNA, 24 nt, Human
accauuguacuccagccugggcaa

SEQ ID NO: 1350602 - RNA, 24 nt, Human
acccaggagacggagguugcagug

SEQ ID NO: 1350603 - RNA, 24 nt, Human
accccgucucuacuaaaaauacaa

SEQ ID NO: 1350604 - RNA, 20 nt, Human
accugaggucgggaguucaa

SEQ ID NO: 1350605 - RNA, 22 nt, Human
accugaggucgggaguucaaga

SEQ ID NO: 1350606 - RNA, 24 nt, Human
accugaggucgggaguucaagacc

SEQ ID NO: 1350607 - RNA, 23 nt, Human
accuguaaucccagcuacucagg

SEQ ID NO: 1350608 - RNA, 23 nt, Human
agaaggcugacacaggagaauca

SEQ ID NO: 1350609 - RNA, 24 nt, Human
agacggagguugcagugagcugag

SEQ ID NO: 1350610 - RNA, 20 nt, Human
agagagaagcugguaacugg

SEQ ID NO: 1350611 - RNA, 19 nt, Human
agaucccuggcagcugcuc

SEQ ID NO: 1350612 - RNA, 24 nt, Human
agcacuuugggaggcugaggcggg

SEQ ID NO: 1350613 - RNA, 21 nt, Human
agcauuuugggaggccgaggc

SEQ ID NO: 1350614 - RNA, 24 nt, Human
agcauuuugggaggccgaggcggg

SEQ ID NO: 1350615 - RNA, 25 nt, Human
agccucaagucucugaagccccagc

SEQ ID NO: 1350616 - RNA, 22 nt, Human
agccuggccaacauggugaaac

SEQ ID NO: 1350617 - RNA, 24 nt, Human
agccuggccaacauggugaaaccc

SEQ ID NO: 1350618 - RNA, 20 nt, Human
agcugcacccuccauccucu

SEQ ID NO: 1350619 - RNA, 23 nt, Human
aggagacggagguugcagugagc

SEQ ID NO: 1350620 - RNA, 21 nt, Human
aggaggcugaggcuggagaag

SEQ ID NO: 1350621 - RNA, 22 nt, Human
aggcacuuuuggggcuagaggg

SEQ ID NO: 1350622 - RNA, 24 nt, Human
aggcagagccccagaagcccaugg

SEQ ID NO: 1350623 - RNA, 21 nt, Human
aggcagccugggauuccgggg

SEQ ID NO: 1350624 - RNA, 24 nt, Human
aggcagccugggauuccggggcag

SEQ ID NO: 1350625 - RNA, 24 nt, Human
aggcaugguggcacauaccuguaa

SEQ ID NO: 1350626 - RNA, 21 nt, Human
aggccgaggcgggcggauuac

SEQ ID NO: 1350627 - RNA, 21 nt, Human
aggcgggcagaucaucugagg

SEQ ID NO: 1350628 - RNA, 22 nt, Human
aggcgggcagaucaucugaggu

SEQ ID NO: 1350629 - RNA, 26 nt, Human
aggcgggcagaucaucugaggucaga

SEQ ID NO: 1350630 - RNA, 22 nt, Human
aggcgggcggauuaccugaggu

SEQ ID NO: 1350631 - RNA, 20 nt, Human
aggcuaaacacugggugggu

SEQ ID NO: 1350632 - RNA, 21 nt, Human
aggcugaggcgggcagaucau

SEQ ID NO: 1350633 - RNA, 24 nt, Human
aggcugaggcuggagaagcgcuug

SEQ ID NO: 1350634 - RNA, 21 nt, Human
aggcugcagggcaugggugug

SEQ ID NO: 1350635 - RNA, 19 nt, Human
agggauggggagggagggc

SEQ ID NO: 1350636 - RNA, 23 nt, Human
agggauggggagggagggccggg

SEQ ID NO: 1350637 - RNA, 25 nt, Human
agggguggggagaggucgggaggga

SEQ ID NO: 1350638 - RNA, 19 nt, Human
aggugcccgcguccucugc

SEQ ID NO: 1350639 - RNA, 24 nt, Human
agguggagguugcagugagccaag

SEQ ID NO: 1350640 - RNA, 24 nt, Human
aguggcucacaccucuaaucccag

SEQ ID NO: 1350641 - RNA, 20 nt, Human
auaaagcaugucuacacccc

SEQ ID NO: 1350642 - RNA, 24 nt, Human
aucgcaccauuguacuccagccug

SEQ ID NO: 1350643 - RNA, 24 nt, Human
aucgcgccauugcccuccagccug

SEQ ID NO: 1350644 - RNA, 21 nt, Human
aucuauuccauuuugccaaca

SEQ ID NO: 1350645 - RNA, 19 nt, Human
augccuguaaucccagcac

SEQ ID NO: 1350646 - RNA, 24 nt, Human
augggcacugggcagcaggcaccg

SEQ ID NO: 1350647 - RNA, 22 nt, Human
auguggaacacaacgcuuuuaa

SEQ ID NO: 1350648 - RNA, 21 nt, Human
auguuggccucaggagggcuu

SEQ ID NO: 1350649 - RNA, 24 nt, Human
auuaccugaggucgggaguucaag

SEQ ID NO: 1350650 - RNA, 18 nt, Human
auugcccuccagccuggg

SEQ ID NO: 1350651 - RNA, 22 nt, Human
auuguacuccagccugggcaag

SEQ ID NO: 1350652 - RNA, 27 nt, Human
caaaaaaguggccuuuauuuuccaguc

SEQ ID NO: 1350653 - RNA, 23 nt, Human
caacaagagugaaacucugucuc

SEQ ID NO: 1350654 - RNA, 24 nt, Human
caacauggagaaaccccgucucua

SEQ ID NO: 1350655 - RNA, 18 nt, Human
caacauggugaaacccca

SEQ ID NO: 1350656 - RNA, 22 nt, Human
caaccugcccccggcuccccca

SEQ ID NO: 1350657 - RNA, 23 nt, Human
caaccugcccccggcucccccaa

SEQ ID NO: 1350658 - RNA, 19 nt, Human
caagggguggggagagguc

SEQ ID NO: 1350659 - RNA, 24 nt, Human
cacaccucuaaucccagcauuuug

SEQ ID NO: 1350660 - RNA, 23 nt, Human
caccaacugccccagggcugccu

SEQ ID NO: 1350661 - RNA, 20 nt, Human
caccgcacgggguaggcugc

SEQ ID NO: 1350662 - RNA, 23 nt, Human
caccucuaaucccagcauuuugg

SEQ ID NO: 1350663 - RNA, 24 nt, Human
caccucuaaucccagcauuuuggg

SEQ ID NO: 1350664 - RNA, 26 nt, Human
caccucuaaucccagcauuuugggag

SEQ ID NO: 1350665 - RNA, 22 nt, Human
caccuggggaaggugggccuca

SEQ ID NO: 1350666 - RNA, 19 nt, Human
cacgcucgacccaugugga

SEQ ID NO: 1350667 - RNA, 21 nt, Human
cacucuugcuccgaggcaaag

SEQ ID NO: 1350668 - RNA, 25 nt, Human
cagaagcccauggauucaggaaucu

SEQ ID NO: 1350669 - RNA, 23 nt, Human
cagaagccccaggcuggggacga

SEQ ID NO: 1350670 - RNA, 24 nt, Human
cagaucaucugaggucagaaguuc

SEQ ID NO: 1350671 - RNA, 21 nt, Human
cagauugcucuucuugaaaac

SEQ ID NO: 1350672 - RNA, 22 nt, Human
cagcacuuugggaggcugaggc

SEQ ID NO: 1350673 - RNA, 24 nt, Human
cagcacuuugggaggcugaggcgg

SEQ ID NO: 1350674 - RNA, 24 nt, Human
cagcauuuugggaggccgaggcgg

SEQ ID NO: 1350675 - RNA, 24 nt, Human
cagccugugguuaugucagagaug

SEQ ID NO: 1350676 - RNA, 22 nt, Human
caggaccagaaccacccuaagc

SEQ ID NO: 1350677 - RNA, 24 nt, Human
caggaccagaaccacccuaagcag

SEQ ID NO: 1350678 - RNA, 29 nt, Human
caggagguggagguugcagugacaacggu

SEQ ID NO: 1350679 - RNA, 21 nt, Human
cagggccagggcucccugggc

SEQ ID NO: 1350680 - RNA, 24 nt, Human
caggggcccuggacccaagcuccu

SEQ ID NO: 1350681 - RNA, 24 nt, Human
cagucugaccaacauggagaaacc

SEQ ID NO: 1350682 - RNA, 19 nt, Human
cauaccuguaaucccagcu

SEQ ID NO: 1350683 - RNA, 20 nt, Human
cauccucucagccuccgacu

SEQ ID NO: 1350684 - RNA, 20 nt, Human
caucuccacccaguccaggg

SEQ ID NO: 1350685 - RNA, 19 nt, Human
caucuguaauccuagcuac

SEQ ID NO: 1350686 - RNA, 24 nt, Human
caucuguaauccuagcuacucaga

SEQ ID NO: 1350687 - RNA, 22 nt, Human
caugacagacagcuuggggccc

SEQ ID NO: 1350688 - RNA, 22 nt, Human
caugagcgccaggaccagaacc

SEQ ID NO: 1350689 - RNA, 20 nt, Human
caugccuguaaucccagcac

SEQ ID NO: 1350690 - RNA, 24 nt, Human
caugccuguaaucccagcacuuug

SEQ ID NO: 1350691 - RNA, 18 nt, Human
cauuacacaucucccugc

SEQ ID NO: 1350692 - RNA, 18 nt, Human
cauugcccuccagccugg

SEQ ID NO: 1350693 - RNA, 19 nt, Human
cauugcccuccagccuggg

SEQ ID NO: 1350694 - RNA, 23 nt, Human
cauugcccuccagccugggcaac

SEQ ID NO: 1350695 - RNA, 24 nt, Human
cauugcccuccagccugggcaaca

SEQ ID NO: 1350696 - RNA, 18 nt, Human
cauuguacuccagccugg

SEQ ID NO: 1350697 - RNA, 19 nt, Human
cauuguacuccagccuggg

SEQ ID NO: 1350698 - RNA, 20 nt, Human
cauuguacuccagccugggc

SEQ ID NO: 1350699 - RNA, 21 nt, Human
cauuguacuccagccugggca

SEQ ID NO: 1350700 - RNA, 22 nt, Human
cauuguacuccagccugggcaa

SEQ ID NO: 1350701 - RNA, 23 nt, Human
cauuguacuccagccugggcaag

SEQ ID NO: 1350702 - RNA, 23 nt, Human
cauuguacuccagccugggcaag

SEQ ID NO: 1350703 - RNA, 18 nt, Human
ccacagcagccuucaccc

SEQ ID NO: 1350704 - RNA, 19 nt, Human
ccacccaguccaggggccc

SEQ ID NO: 1350705 - RNA, 20 nt, Human
ccacccaguccaggggcccu

SEQ ID NO: 1350706 - RNA, 28 nt, Human
ccagaacccacaccugugagguauacag

SEQ ID NO: 1350707 - RNA, 22 nt, Human
ccagaagauaacucccuuugcc

SEQ ID NO: 1350708 - RNA, 24 nt, Human
ccagagagaggaagccaagagucc

SEQ ID NO: 1350709 - RNA, 22 nt, Human
ccaggagguggagguugcagug

SEQ ID NO: 1350710 - RNA, 20 nt, Human
ccaggggcccuggacccaag

SEQ ID NO: 1350711 - RNA, 24 nt, Human
ccaguccaggggcccuggacccaa

SEQ ID NO: 1350712 - RNA, 22 nt, Human
ccauccucucagccuccgacuc

SEQ ID NO: 1350713 - RNA, 21 nt, Human
ccauugcccuccagccugggc

SEQ ID NO: 1350714 - RNA, 22 nt, Human
ccauugcccuccagccugggca

SEQ ID NO: 1350715 - RNA, 23 nt, Human
ccauugcccuccagccugggcaa

SEQ ID NO: 1350716 - RNA, 24 nt, Human
ccauugcccuccagccugggcaac

SEQ ID NO: 1350717 - RNA, 21 nt, Human
ccauuguacuccagccugggc

SEQ ID NO: 1350718 - RNA, 22 nt, Human
ccauuguacuccagccugggca

SEQ ID NO: 1350719 - RNA, 24 nt, Human
ccauuguacuccagccugggcaag

SEQ ID NO: 1350720 - RNA, 18 nt, Human
cccaagcaucacugccuc

SEQ ID NO: 1350721 - RNA, 18 nt, Human
cccacaacccuuccccau

SEQ ID NO: 1350722 - RNA, 24 nt, Human
cccacaacccuuccccauugcuau

SEQ ID NO: 1350723 - RNA, 21 nt, Human
cccacagagcuagagccucug

SEQ ID NO: 1350724 - RNA, 21 nt, Human
cccaggagguggagguugcag

SEQ ID NO: 1350725 - RNA, 22 nt, Human
cccaggcuggggacgacggggc

SEQ ID NO: 1350726 - RNA, 20 nt, Human
cccaguacuaaagcugcacc

SEQ ID NO: 1350727 - RNA, 24 nt, Human
cccaguacuaaagcugcacccucc

SEQ ID NO: 1350728 - RNA, 22 nt, Human
ccccacuuauaaagcaugucua

SEQ ID NO: 1350729 - RNA, 20 nt, Human
ccccauggccauucuccaaa

SEQ ID NO: 1350730 - RNA, 24 nt, Human
cccccaagcaucacugccucaacc

SEQ ID NO: 1350731 - RNA, 19 nt, Human
cccgucuuuccugugucca

SEQ ID NO: 1350732 - RNA, 23 nt, Human
cccgucuuuccuguguccaggaa

SEQ ID NO: 1350733 - RNA, 18 nt, Human
cccuaugggaggcagagc

SEQ ID NO: 1350734 - RNA, 24 nt, Human
cccuccagccugggcaacaagagu

SEQ ID NO: 1350735 - RNA, 22 nt, Human
cccuggacccaagcuccugccc

SEQ ID NO: 1350736 - RNA, 25 nt, Human
cccugggccggcucccuuggaccuu

SEQ ID NO: 1350737 - RNA, 20 nt, Human
ccgugugggugcuccuuccu

SEQ ID NO: 1350738 - RNA, 21 nt, Human
ccuaacccccucaccugggga

SEQ ID NO: 1350739 - RNA, 19 nt, Human
ccucaccuggggaaggugg

SEQ ID NO: 1350740 - RNA, 23 nt, Human
ccuccagccugggcaacaagagu

SEQ ID NO: 1350741 - RNA, 22 nt, Human
ccugacagcuagcuuuaaaaca

SEQ ID NO: 1350742 - RNA, 23 nt, Human
ccuggccaacauggugaaacccc

SEQ ID NO: 1350743 - RNA, 24 nt, Human
ccuggccaacauggugaaacccca

SEQ ID NO: 1350744 - RNA, 22 nt, Human
ccuggcccaggcuguuggucuu

SEQ ID NO: 1350745 - RNA, 21 nt, Human
ccuguaaucccagcuacucag

SEQ ID NO: 1350746 - RNA, 21 nt, Human
ccuucccaaauccuucauuaa

SEQ ID NO: 1350747 - RNA, 24 nt, Human
cgagaccagccuggccaacauggu

SEQ ID NO: 1350748 - RNA, 18 nt, Human
cgaggcaaaguuauuggc

SEQ ID NO: 1350749 - RNA, 24 nt, Human
cgaggcgggcggauuaccugaggu

SEQ ID NO: 1350750 - RNA, 21 nt, Human
cgcaccauuguacuccagccu

SEQ ID NO: 1350751 - RNA, 19 nt, Human
cgcgccauugcccuccagc

SEQ ID NO: 1350752 - RNA, 21 nt, Human
cgcggccccuguccugugcug

SEQ ID NO: 1350753 - RNA, 24 nt, Human
cggauuaccugaggucgggaguuc

SEQ ID NO: 1350754 - RNA, 22 nt, Human
cggcacacaccagguucaugug

SEQ ID NO: 1350755 - RNA, 24 nt, Human
cgggcagaucaucugaggucagaa

SEQ ID NO: 1350756 - RNA, 18 nt, Human
cgggcggauuaccugagg

SEQ ID NO: 1350757 - RNA, 19 nt, Human
cucaaaaaacaaacaaaca

SEQ ID NO: 1350758 - RNA, 21 nt, Human
cucacaccucuaaucccagca

SEQ ID NO: 1350759 - RNA, 21 nt, Human
cucacaccucuaaucccagca

SEQ ID NO: 1350760 - RNA, 19 nt, Human
cucagaaggcugacacagg

SEQ ID NO: 1350761 - RNA, 24 nt, Human
cucaugccuguaaucccagcacuu

SEQ ID NO: 1350762 - RNA, 24 nt, Human
cucccccaagcaucacugccucaa

SEQ ID NO: 1350763 - RNA, 21 nt, Human
cucccuuggaccuuuggccuu

SEQ ID NO: 1350764 - RNA, 22 nt, Human
cucugcaccgcggccccugucc

SEQ ID NO: 1350765 - RNA, 19 nt, Human
cucugucucaaaaaaaaaa

SEQ ID NO: 1350766 - RNA, 22 nt, Human
cucugucucaaaaaacaaacaa

SEQ ID NO: 1350767 - RNA, 22 nt, Human
cugaccaacauggagaaacccc

SEQ ID NO: 1350768 - RNA, 21 nt, Human
cugaggcuuggagaaguuggg

SEQ ID NO: 1350769 - RNA, 19 nt, Human
cugccacagcuguaggugc

SEQ ID NO: 1350770 - RNA, 22 nt, Human
cugcugccgccaccauccgugu

SEQ ID NO: 1350771 - RNA, 23 nt, Human
cuggccaacauggugaaacccca

SEQ ID NO: 1350772 - RNA, 20 nt, Human
cuggccaucuuucugccagg

SEQ ID NO: 1350773 - RNA, 19 nt, Human
cuggcccugggauccagga

SEQ ID NO: 1350774 - RNA, 22 nt, Human
cugucagaggagaugggcuggc

SEQ ID NO: 1350775 - RNA, 19 nt, Human
cuguccugugcuggcuggg

SEQ ID NO: 1350776 - RNA, 19 nt, Human
cuuccuuucucccuagccc

SEQ ID NO: 1350777 - RNA, 21 nt, Human
cuugaacccaggagguggagg

SEQ ID NO: 1350778 - RNA, 18 nt, Human
cuuggagaaguuggguga

SEQ ID NO: 1350779 - RNA, 19 nt, Human
gaaaccccaucucaacuaa

SEQ ID NO: 1350780 - RNA, 18 nt, Human
gaaugaguagagaagacu

SEQ ID NO: 1350781 - RNA, 21 nt, Human
gaccugcccccggcuggugcc

SEQ ID NO: 1350782 - RNA, 22 nt, Human
gacgacggggcccauggagaga

SEQ ID NO: 1350783 - RNA, 21 nt, Human
gagaaaccccgucucuacuaa

SEQ ID NO: 1350784 - RNA, 21 nt, Human
gagaaguugggugacuugcca

SEQ ID NO: 1350785 - RNA, 19 nt, Human
gagagccgcaccaacugcc

SEQ ID NO: 1350786 - RNA, 21 nt, Human
gagguggagguugcagugagc

SEQ ID NO: 1350787 - RNA, 18 nt, Human
gagguugcagugagccaa

SEQ ID NO: 1350788 - RNA, 23 nt, Human
gagguugcagugagccaagaucg

SEQ ID NO: 1350789 - RNA, 23 nt, Human
gagguugcagugagcugagaucg

SEQ ID NO: 1350790 - RNA, 18 nt, Human
gauaacagugcuaacugc

SEQ ID NO: 1350791 - RNA, 24 nt, Human
gaucaucugaggucagaaguucga

SEQ ID NO: 1350792 - RNA, 23 nt, Human
gauuaccugaggucgggaguuca

SEQ ID NO: 1350793 - RNA, 24 nt, Human
gauuaccugaggucgggaguucaa

SEQ ID NO: 1350794 - RNA, 20 nt, Human
gcaccauuguacuccagccu

SEQ ID NO: 1350795 - RNA, 19 nt, Human
gcacuuuuggggcuagagg

SEQ ID NO: 1350796 - RNA, 23 nt, Human
gcagagccccagaagcccaugga

SEQ ID NO: 1350797 - RNA, 20 nt, Human
gcagccgccauaccagaagc

SEQ ID NO: 1350798 - RNA, 27 nt, Human
gcauugauggcugggcgugguggcuca

SEQ ID NO: 1350799 - RNA, 24 nt, Human
gccaacauggugaaaccccaucuc

SEQ ID NO: 1350800 - RNA, 22 nt, Human
gccauugcccuccagccugggc

SEQ ID NO: 1350801 - RNA, 19 nt, Human
gccccaggcuggggacgac

SEQ ID NO: 1350802 - RNA, 20 nt, Human
gccccagggcugccugcacc

SEQ ID NO: 1350803 - RNA, 20 nt, Human
gcccuggacccaagcuccug

SEQ ID NO: 1350804 - RNA, 19 nt, Human
gcugggcacaguggcucac

SEQ ID NO: 1350805 - RNA, 20 nt, Human
gcugggcacaguggcucaca

SEQ ID NO: 1350806 - RNA, 21 nt, Human
gcugggcgugguggcucaugc

SEQ ID NO: 1350807 - RNA, 18 nt, Human
ggaaagggacuuggaagc

SEQ ID NO: 1350808 - RNA, 18 nt, Human
ggaagcucauagaaucca

SEQ ID NO: 1350809 - RNA, 18 nt, Human
ggagaaacagaaguuagg

SEQ ID NO: 1350810 - RNA, 19 nt, Human
ggagaaccccggagccacc

SEQ ID NO: 1350811 - RNA, 21 nt, Human
ggagaagcgcuugaacccagg

SEQ ID NO: 1350812 - RNA, 18 nt, Human
ggagaaucaagaacccag

SEQ ID NO: 1350813 - RNA, 20 nt, Human
ggagaggucgggagggacgg

SEQ ID NO: 1350814 - RNA, 18 nt, Human
ggaggucagggccagggc

SEQ ID NO: 1350815 - RNA, 20 nt, Human
ggagguugcagugagccaag

SEQ ID NO: 1350816 - RNA, 23 nt, Human
ggagguugcagugagccaagauc

SEQ ID NO: 1350817 - RNA, 24 nt, Human
ggagguugcagugagccaagaucg

SEQ ID NO: 1350818 - RNA, 22 nt, Human
ggagguugcagugagcugagau

SEQ ID NO: 1350819 - RNA, 24 nt, Human
ggagguugcagugagcugagaucg

SEQ ID NO: 1350820 - RNA, 23 nt, Human
ggauuaccugaggucgggaguuc

SEQ ID NO: 1350821 - RNA, 23 nt, Human
ggcacaguggcucacaccucuaa

SEQ ID NO: 1350822 - RNA, 19 nt, Human
ggccccuguccugugcugg

SEQ ID NO: 1350823 - RNA, 19 nt, Human
ggcuaaacacugggugggu

SEQ ID NO: 1350824 - RNA, 21 nt, Human
ggcucaugccuguaaucccag

SEQ ID NO: 1350825 - RNA, 21 nt, Human
ggcugggcgugguggcucaug

SEQ ID NO: 1350826 - RNA, 20 nt, Human
gggauggggagggagggccg

SEQ ID NO: 1350827 - RNA, 22 nt, Human
gggauggggagggagggccggc

SEQ ID NO: 1350828 - RNA, 18 nt, Human
gggccuccccuggcccag

SEQ ID NO: 1350829 - RNA, 24 nt, Human
gggcgugguggcucaugccuguaa

SEQ ID NO: 1350830 - RNA, 24 nt, Human
gggcugccugcaccaacgagggcu

SEQ ID NO: 1350831 - RNA, 24 nt, Human
gggguggggagaggucgggaggga

SEQ ID NO: 1350832 - RNA, 19 nt, Human
gggguuuagcuccaacugg

SEQ ID NO: 1350833 - RNA, 21 nt, Human
ggguggcgcuggugauccggc

SEQ ID NO: 1350834 - RNA, 19 nt, Human
ggugcccgcguccucugcc

SEQ ID NO: 1350835 - RNA, 24 nt, Human
gguggcacauaccuguaaucccag

SEQ ID NO: 1350836 - RNA, 20 nt, Human
gguggcgcuggugauccggc

SEQ ID NO: 1350837 - RNA, 23 nt, Human
gguggcgcuggugauccggcauc

SEQ ID NO: 1350838 - RNA, 24 nt, Human
gguggcucaugccuguaaucccag

SEQ ID NO: 1350839 - RNA, 22 nt, Human
gguggggagaggucgggaggga

SEQ ID NO: 1350840 - RNA, 18 nt, Human
gucacugaggugcccagu

SEQ ID NO: 1350841 - RNA, 25 nt, Human
gucugcgcaagagccaugggcacca

SEQ ID NO: 1350842 - RNA, 20 nt, Human
gugauaggcaucuguaaucc

SEQ ID NO: 1350843 - RNA, 21 nt, Human
gugcgaaacucugucucaaaa

SEQ ID NO: 1350844 - RNA, 19 nt, Human
guugcagugagcugagauc

SEQ ID NO: 1350845 - RNA, 20 nt, Human
uaaaaauacaaaauuagcca

SEQ ID NO: 1350846 - RNA, 22 nt, Human
uaaaaauacaaaauuagccagg

SEQ ID NO: 1350847 - RNA, 23 nt, Human
uaaaaauacaaaauuagccaggc

SEQ ID NO: 1350848 - RNA, 23 nt, Human
uaaaugaaaaaagaccucugccc

SEQ ID NO: 1350849 - RNA, 23 nt, Human
uaauaugauccagucccaggagu

SEQ ID NO: 1350850 - RNA, 19 nt, Human
uacacaucucccugcccag

SEQ ID NO: 1350851 - RNA, 23 nt, Human
uacagagagaagcugguaacugg

SEQ ID NO: 1350852 - RNA, 23 nt, Human
uacccaggcauggugauaggcau

SEQ ID NO: 1350853 - RNA, 24 nt, Human
uaccuguaaucccagcuacucagg

SEQ ID NO: 1350854 - RNA, 18 nt, Human
uagaaaacaaacaggugu

SEQ ID NO: 1350855 - RNA, 19 nt, Human
uagagaagacugagaagua

SEQ ID NO: 1350856 - RNA, 21 nt, Human
uagcagcaacaagguaggugc

SEQ ID NO: 1350857 - RNA, 25 nt, Human
uagcagcaacaagguaggugcaaag

SEQ ID NO: 1350858 - RNA, 19 nt, Human
uaugucagagaugcaaaca

SEQ ID NO: 1350859 - RNA, 22 nt, Human
ucacugccucaaccuguucuug

SEQ ID NO: 1350860 - RNA, 21 nt, Human
ucagggccagggcucccuggg

SEQ ID NO: 1350861 - RNA, 22 nt, Human
ucaugccuguaaucccagcacu

SEQ ID NO: 1350862 - RNA, 25 nt, Human
uccaaacagauugcucuucuugaaa

SEQ ID NO: 1350863 - RNA, 19 nt, Human
uccacugugcagaccugcc

SEQ ID NO: 1350864 - RNA, 20 nt, Human
uccagccagacaggccccgg

SEQ ID NO: 1350865 - RNA, 18 nt, Human
uccagccugggcaagaag

SEQ ID NO: 1350866 - RNA, 18 nt, Human
uccauccucucagccucc

SEQ ID NO: 1350867 - RNA, 22 nt, Human
uccaugacagacagcuuggggc

SEQ ID NO: 1350868 - RNA, 23 nt, Human
uccccaaccugcccccggcuccc

SEQ ID NO: 1350869 - RNA, 19 nt, Human
ucccccaagcaucacugcc

SEQ ID NO: 1350870 - RNA, 20 nt, Human
ucccuguaaugcccgucuuu

SEQ ID NO: 1350871 - RNA, 24 nt, Human
ucccuguaaugcccgucuuuccug

SEQ ID NO: 1350872 - RNA, 23 nt, Human
ucgcaccauuguacuccagccug

SEQ ID NO: 1350873 - RNA, 23 nt, Human
ucgcgccauugcccuccagccug

SEQ ID NO: 1350874 - RNA, 23 nt, Human
ucucaaaaaacaaacaaacaaau

SEQ ID NO: 1350875 - RNA, 20 nt, Human
ucucuacuaaaaauacaaaa

SEQ ID NO: 1350876 - RNA, 18 nt, Human
ucucugaagccccagcuu

SEQ ID NO: 1350877 - RNA, 24 nt, Human
ucugaccaacauggagaaaccccg

SEQ ID NO: 1350878 - RNA, 22 nt, Human
ucugaggucagaaguucgagac

SEQ ID NO: 1350879 - RNA, 23 nt, Human
ucugaggucagaaguucgagacc

SEQ ID NO: 1350880 - RNA, 19 nt, Human
ugaaaccccaucucaacua

SEQ ID NO: 1350881 - RNA, 22 nt, Human
ugacacaggagaaucaagaacc

SEQ ID NO: 1350882 - RNA, 23 nt, Human
ugacacaggagaaucaagaaccc

SEQ ID NO: 1350883 - RNA, 21 nt, Human
ugaccuggcccugggauccag

SEQ ID NO: 1350884 - RNA, 20 nt, Human
ugagagagacuagagcaaug

SEQ ID NO: 1350885 - RNA, 19 nt, Human
ugagagaugaagaauguug

SEQ ID NO: 1350886 - RNA, 22 nt, Human
ugagcugagaucgcgccauugc

SEQ ID NO: 1350887 - RNA, 24 nt, Human
ugaggcgggcagaucaucugaggu

SEQ ID NO: 1350888 - RNA, 26 nt, Human
ugaggcgggcagaucaucugagguca

SEQ ID NO: 1350889 - RNA, 24 nt, Human
ugaggcuggagaagcgcuugaacc

SEQ ID NO: 1350890 - RNA, 21 nt, Human
ugaggcuuggagaaguugggu

SEQ ID NO: 1350891 - RNA, 21 nt, Human
ugauccggcaucuccacccag

SEQ ID NO: 1350892 - RNA, 18 nt, Human
ugccaagcuaauccugga

SEQ ID NO: 1350893 - RNA, 22 nt, Human
ugccacagcagccuucacccac

SEQ ID NO: 1350894 - RNA, 26 nt, Human
ugccacagcagccuucacccacagag

SEQ ID NO: 1350895 - RNA, 18 nt, Human
ugccacagcuguaggugc

SEQ ID NO: 1350896 - RNA, 18 nt, Human
ugccaggcagccugggau

SEQ ID NO: 1350897 - RNA, 20 nt, Human
ugccauggcagccgccauac

SEQ ID NO: 1350898 - RNA, 20 nt, Human
ugccccagggcugccugcac

SEQ ID NO: 1350899 - RNA, 19 nt, Human
ugcccuccagccugggcaa

SEQ ID NO: 1350900 - RNA, 19 nt, Human
ugccucaaccuguucuugu

SEQ ID NO: 1350901 - RNA, 24 nt, Human
ugccugcaccaacgagggcuccac

SEQ ID NO: 1350902 - RNA, 23 nt, Human
ugccuguaaucccagcacuuugg

SEQ ID NO: 1350903 - RNA, 24 nt, Human
ugccuguaaucccagcacuuuggg

SEQ ID NO: 1350904 - RNA, 21 nt, Human
ugcgaaguuggaucuucuggg

SEQ ID NO: 1350905 - RNA, 20 nt, Human
ugcucuucuugaaaacagca

SEQ ID NO: 1350906 - RNA, 23 nt, Human
ugcuuccaccagagucuguccac

SEQ ID NO: 1350907 - RNA, 21 nt, Human
uggacuggggcuggaacuagc

SEQ ID NO: 1350908 - RNA, 21 nt, Human
uggcagcaaacauuuugcuuc

SEQ ID NO: 1350909 - RNA, 22 nt, Human
uggcauugccauggcagccccg

SEQ ID NO: 1350910 - RNA, 24 nt, Human
uggccaacauggugaaaccccauc

SEQ ID NO: 1350911 - RNA, 21 nt, Human
uggccuuuauuuuccaauuuc

SEQ ID NO: 1350912 - RNA, 24 nt, Human
uggcucacaccucuaaucccagca

SEQ ID NO: 1350913 - RNA, 22 nt, Human
uggcucaugccuguaaucccag

SEQ ID NO: 1350914 - RNA, 24 nt, Human
uggcucaugccuguaaucccagca

SEQ ID NO: 1350915 - RNA, 23 nt, Human
uggcugggcgugguggcucaugc

SEQ ID NO: 1350916 - RNA, 24 nt, Human
uggcugggcgugguggcucaugcc

SEQ ID NO: 1350917 - RNA, 19 nt, Human
ugggaggccgaggcgggcg

SEQ ID NO: 1350918 - RNA, 22 nt, Human
ugggaggccgaggcgggcggau

SEQ ID NO: 1350919 - RNA, 20 nt, Human
ugggaggcugaggcgggcag

SEQ ID NO: 1350920 - RNA, 24 nt, Human
ugggaggcugaggcgggcagauca

SEQ ID NO: 1350921 - RNA, 22 nt, Human
uggggagggagggccggcugac

SEQ ID NO: 1350922 - RNA, 22 nt, Human
uggggcuagagggucccuaugg

SEQ ID NO: 1350923 - RNA, 22 nt, Human
ugggugacuugccaaaggucac

SEQ ID NO: 1350924 - RNA, 22 nt, Human
uggugauaggcaucuguaaucc

SEQ ID NO: 1350925 - RNA, 23 nt, Human
ugguggcacauaccuguaauccc

SEQ ID NO: 1350926 - RNA, 24 nt, Human
ugguggcacauaccuguaauccca

SEQ ID NO: 1350927 - RNA, 25 nt, Human
ugguggcucaugccuguaaucccaa

SEQ ID NO: 1350928 - RNA, 24 nt, Human
ugguuugucccuuuuccagccagu

SEQ ID NO: 1350929 - RNA, 20 nt, Human
uguacuccagccugggcaag

SEQ ID NO: 1350930 - RNA, 19 nt, Human
ugucuuccaacucaaacca

SEQ ID NO: 1350931 - RNA, 19 nt, Human
ugugccugucagaggagau

SEQ ID NO: 1350932 - RNA, 20 nt, Human
ugugcuggcuggguuccugc

SEQ ID NO: 1350933 - RNA, 22 nt, Human
uuagagcugacugaugcacugc

SEQ ID NO: 1350934 - RNA, 23 nt, Human
uuccaugacagacagcuuggggc

SEQ ID NO: 1350935 - RNA, 24 nt, Human
uugaacccaggagguggagguugc

SEQ ID NO: 1350936 - RNA, 18 nt, Human
uugaaugaguagagaaga

SEQ ID NO: 1350937 - RNA, 26 nt, Human
uugaaugaguagagaagacugagaag

SEQ ID NO: 1350938 - RNA, 22 nt, Human
uugcagugagccaagaucgcac

SEQ ID NO: 1350939 - RNA, 18 nt, Human
uugcagugagcugagauc

SEQ ID NO: 1350940 - RNA, 19 nt, Human
uugcagugagcugagaucg

SEQ ID NO: 1350941 - RNA, 20 nt, Human
uugcagugagcugagaucgc

SEQ ID NO: 1350942 - RNA, 22 nt, Human
uugcagugagcugagaucgcgc

SEQ ID NO: 1350943 - RNA, 25 nt, Human
uugggaggcugaggcgggcagauca

SEQ ID NO: 1350944 - RNA, 18 nt, Human
uuucagagcuuugguccc

SEQ ID NO: 1350945 - RNA, 19 nt, Human
uuucagagcuuuggucccu

SEQ ID NO: 1350946 - RNA, 23 nt, Human
uuuguuuuuaaccuucccaaauc

SEQ ID NO: 1350947 - RNA, 20 nt, Human
uuuuggggcuagaggguccc

SEQ ID NO: 1350948 - RNA, 20 nt, Human
aaaaagucccggcgcaaagg

SEQ ID NO: 1350949 - RNA, 23 nt, Human
aaacuugaggggggaccccccaa

SEQ ID NO: 1350950 - RNA, 21 nt, Human
acaccugugcuccccggcccc

SEQ ID NO: 1350951 - RNA, 23 nt, Human
accaggaaagggggguagagccc

SEQ ID NO: 1350952 - RNA, 21 nt, Human
acccggaacccggccccgacc

SEQ ID NO: 1350953 - RNA, 21 nt, Human
agcucccacaccugugcuccc

SEQ ID NO: 1350954 - RNA, 18 nt, Human
agcuccugcucagccacc

SEQ ID NO: 1350955 - RNA, 25 nt, Human
agcugugcugccccugcagagcccc

SEQ ID NO: 1350956 - RNA, 22 nt, Human
aggaacccaaccuccgguccuc

SEQ ID NO: 1350957 - RNA, 20 nt, Human
aguggcagccuggccugcac

SEQ ID NO: 1350958 - RNA, 24 nt, Human
caaagcucugccuuccagcccucc

SEQ ID NO: 1350959 - RNA, 24 nt, Human
caccccagcugugcugccccugcc

SEQ ID NO: 1350960 - RNA, 24 nt, Human
caccccagcugugcugccccugcu

SEQ ID NO: 1350961 - RNA, 19 nt, Human
caccugccacggcccaccc

SEQ ID NO: 1350962 - RNA, 25 nt, Human
cagccaccugccacggcccacccug

SEQ ID NO: 1350963 - RNA, 20 nt, Human
cagcgaggcacacccagguc

SEQ ID NO: 1350964 - RNA, 20 nt, Human
cagcucccacaccugugcuc

SEQ ID NO: 1350965 - RNA, 21 nt, Human
caggagccagggcagugcaug

SEQ ID NO: 1350966 - RNA, 23 nt, Human
ccacacacaugaugcccaggggu

SEQ ID NO: 1350967 - RNA, 21 nt, Human
ccagcagcgaggcacacccag

SEQ ID NO: 1350968 - RNA, 22 nt, Human
ccagcucccacaccugugcucc

SEQ ID NO: 1350969 - RNA, 19 nt, Human
cccacacacaugaugccca

SEQ ID NO: 1350970 - RNA, 19 nt, Human
cccaggucaggggaggggg

SEQ ID NO: 1350971 - RNA, 24 nt, Human
ccccacacacaugaugcccagggg

SEQ ID NO: 1350972 - RNA, 23 nt, Human
ccccgaccugguccucaagccuu

SEQ ID NO: 1350973 - RNA, 24 nt, Human
cccgacccggaacccggccccgac

SEQ ID NO: 1350974 - RNA, 18 nt, Human
cccuccucauacccacug

SEQ ID NO: 1350975 - RNA, 19 nt, Human
ccuggccugcaccccagcu

SEQ ID NO: 1350976 - RNA, 23 nt, Human
ccuggccugcaccccagcugugc

SEQ ID NO: 1350977 - RNA, 22 nt, Human
cuggccugcaccccagcugugc

SEQ ID NO: 1350978 - RNA, 20 nt, Human
cuggggucaccagcucccac

SEQ ID NO: 1350979 - RNA, 18 nt, Human
gaaagggggguagagccc

SEQ ID NO: 1350980 - RNA, 20 nt, Human
gaguggcagccuggccugca

SEQ ID NO: 1350981 - RNA, 18 nt, Human
gcaccccagcugugcugc

SEQ ID NO: 1350982 - RNA, 19 nt, Human
gcccugagaauucuggguc

SEQ ID NO: 1350983 - RNA, 20 nt, Human
ggagcuccugcucagccacc

SEQ ID NO: 1350984 - RNA, 26 nt, Human
ggcccaaagcucugccuuccagcccu

SEQ ID NO: 1350985 - RNA, 22 nt, Human
ggucaggggagggggcuugggu

SEQ ID NO: 1350986 - RNA, 19 nt, Human
ggucuggggucaccagcuc

SEQ ID NO: 1350987 - RNA, 23 nt, Human
uagaaaacacacagugaaguuua

SEQ ID NO: 1350988 - RNA, 22 nt, Human
uccccgacccggaacccggccc

SEQ ID NO: 1350989 - RNA, 20 nt, Human
ucccggaguggcagccuggc

SEQ ID NO: 1350990 - RNA, 22 nt, Human
ucccggaguggcagccuggccu

SEQ ID NO: 1350991 - RNA, 21 nt, Human
uccgagauagaaaacacacag

SEQ ID NO: 1350992 - RNA, 21 nt, Human
uccgguccucugcuacaacca

SEQ ID NO: 1350993 - RNA, 23 nt, Human
uccgguccucugcuacaaccacg

SEQ ID NO: 1350994 - RNA, 23 nt, Human
ugccacggcccacccuggggguc

SEQ ID NO: 1350995 - RNA, 19 nt, Human
ugccccugcagagccccag

SEQ ID NO: 1350996 - RNA, 18 nt, Human
uggcagccuggccugcac

SEQ ID NO: 1350997 - RNA, 23 nt, Human
ugugcugccccugcagagcccca

SEQ ID NO: 1350998 - RNA, 24 nt, Human
uucugggucuggggucaccagcuc

SEQ ID NO: 1350999 - RNA, 24 nt, Human
uuuuuuuuuuuuuuuuuuuuuagg

SEQ ID NO: 1351000 - RNA, 25 nt, Human
acaaagccaggcccagagccauccu

SEQ ID NO: 1351001 - RNA, 19 nt, Human
agaacaaagucagcucagg

SEQ ID NO: 1351002 - RNA, 19 nt, Human
aggcggcagucucccacug

SEQ ID NO: 1351003 - RNA, 23 nt, Human
caaagagcacgccugaguccagc

SEQ ID NO: 1351004 - RNA, 27 nt, Human
caaagccaggcccagagccaucccacc

SEQ ID NO: 1351005 - RNA, 19 nt, Human
caccccuuccccacccucu

SEQ ID NO: 1351006 - RNA, 19 nt, Human
cagagccaucccaccuuuc

SEQ ID NO: 1351007 - RNA, 22 nt, Human
cagagccaucccaccuuucccc

SEQ ID NO: 1351008 - RNA, 18 nt, Human
cagcacuuuuucugaggg

SEQ ID NO: 1351009 - RNA, 19 nt, Human
cagcccagccugucacccu

SEQ ID NO: 1351010 - RNA, 21 nt, Human
cagcccgacagccucggcaca

SEQ ID NO: 1351011 - RNA, 18 nt, Human
caggacagugagcccaag

SEQ ID NO: 1351012 - RNA, 18 nt, Human
caucccaccuuucccugc

SEQ ID NO: 1351013 - RNA, 23 nt, Human
ccaggacucacauguccuccuca

SEQ ID NO: 1351014 - RNA, 18 nt, Human
ccaggcccagagccaucc

SEQ ID NO: 1351015 - RNA, 22 nt, Human
ccaggcccagagccaucccacc

SEQ ID NO: 1351016 - RNA, 21 nt, Human
ccugcaggcuuaggguuuuga

SEQ ID NO: 1351017 - RNA, 18 nt, Human
cucacaugugagcugggc

SEQ ID NO: 1351018 - RNA, 18 nt, Human
cucacaugugagcugggc

SEQ ID NO: 1351019 - RNA, 22 nt, Human
cucacgccgaguuccuuccaga

SEQ ID NO: 1351020 - RNA, 19 nt, Human
gaagacgcagggugaggau

SEQ ID NO: 1351021 - RNA, 18 nt, Human
gacucacauguccuccuc

SEQ ID NO: 1351022 - RNA, 20 nt, Human
gcaccagcaggagggggugc

SEQ ID NO: 1351023 - RNA, 19 nt, Human
gcagucucccacuggcacc

SEQ ID NO: 1351024 - RNA, 18 nt, Human
gcgugggggguggggggc

SEQ ID NO: 1351025 - RNA, 20 nt, Human
ggaagaacaaagucagcuca

SEQ ID NO: 1351026 - RNA, 24 nt, Human
ggcacaagagcagggcuguaggaa

SEQ ID NO: 1351027 - RNA, 19 nt, Human
ggcuguaggaaagccauca

SEQ ID NO: 1351028 - RNA, 22 nt, Human
gggaagcagcgagugggaaggg

SEQ ID NO: 1351029 - RNA, 23 nt, Human
gggggcgggggccacugagcugg

SEQ ID NO: 1351030 - RNA, 24 nt, Human
ggggggcgggggccacugagcugg

SEQ ID NO: 1351031 - RNA, 24 nt, Human
uacugcaacucaggacagugagcc

SEQ ID NO: 1351032 - RNA, 22 nt, Human
uccagaaucccaaagaaggcuc

SEQ ID NO: 1351033 - RNA, 19 nt, Human
ucccacuggcaccagcagg

SEQ ID NO: 1351034 - RNA, 22 nt, Human
ucuccagcccagccugucaccc

SEQ ID NO: 1351035 - RNA, 21 nt, Human
ugaacaccagagacaccugcu

SEQ ID NO: 1351036 - RNA, 18 nt, Human
ugaaggaagaacaaaguc

SEQ ID NO: 1351037 - RNA, 23 nt, Human
ugagacaccccuuccccacccuc

SEQ ID NO: 1351038 - RNA, 22 nt, Human
ugagggauguggccaagccucc

SEQ ID NO: 1351039 - RNA, 23 nt, Human
ugcucccacccuagagacagccc

SEQ ID NO: 1351040 - RNA, 18 nt, Human
ugcuguucgggcgugggg

SEQ ID NO: 1351041 - RNA, 19 nt, Human
uggcaccagcaggaggggg

SEQ ID NO: 1351042 - RNA, 21 nt, Human
uggcaccagcaggagggggug

SEQ ID NO: 1351043 - RNA, 19 nt, Human
ugggaagcagcgaguggga

SEQ ID NO: 1351044 - RNA, 19 nt, Human
ugggaagggaaaggggaag

SEQ ID NO: 1351045 - RNA, 19 nt, Human
uggggcagcagccaccagg

SEQ ID NO: 1351046 - RNA, 19 nt, Human
ugggggguggggggcgggg

SEQ ID NO: 1351047 - RNA, 23 nt, Human
ugggggguggggggcgggggcca

SEQ ID NO: 1351048 - RNA, 19 nt, Human
uguuucuccagcccagccu

SEQ ID NO: 1351049 - RNA, 21 nt, Human
uuggacacacuucgaaggagg

SEQ ID NO: 1351050 - RNA, 19 nt, Human
uuugcagugaggggugggg

SEQ ID NO: 1351051 - RNA, 21 nt, Human
aaaaaggagucacugagucuc

SEQ ID NO: 1351052 - RNA, 20 nt, Human
aaggacuucuuaugccuccu

SEQ ID NO: 1351053 - RNA, 21 nt, Human
aauucaagcaaaauauuuguu

SEQ ID NO: 1351054 - RNA, 18 nt, Human
cugcaaucugccggugug

SEQ ID NO: 1351055 - RNA, 18 nt, Human
cuuaugccuccuuccuca

SEQ ID NO: 1351056 - RNA, 22 nt, Human
gagaaucauuaggaucacugga

SEQ ID NO: 1351057 - RNA, 20 nt, Human
gagucucagagaauugagaa

SEQ ID NO: 1351058 - RNA, 18 nt, Human
ggagucacugagucucag

SEQ ID NO: 1351059 - RNA, 23 nt, Human
uaaaaaggagucacugagucuca

SEQ ID NO: 1351060 - RNA, 24 nt, Human
uagaaaucauauguggauuuaccu

SEQ ID NO: 1351061 - RNA, 21 nt, Human
uccucagcacccuuagugagu

SEQ ID NO: 1351062 - RNA, 21 nt, Human
uggccugggggaccuugcccg

SEQ ID NO: 1351063 - RNA, 18 nt, Human
uguagaaaucauaugugg

SEQ ID NO: 1351064 - RNA, 23 nt, Human
uuccucagcacccuuagugagug

SEQ ID NO: 1351065 - RNA, 20 nt, Human
uucuuaugccuccuuccuca

SEQ ID NO: 1351066 - RNA, 18 nt, Human
uuuuuuuuuuuuuucuug

SEQ ID NO: 1351067 - RNA, 26 nt, Human
uuuuuuuuuuuuuuuuucuuguuuuu

SEQ ID NO: 1351068 - RNA, 19 nt, Human
aacuugaucaacacaaaau

SEQ ID NO: 1351069 - RNA, 19 nt, Human
aagugcugggauuccaggc

SEQ ID NO: 1351070 - RNA, 19 nt, Human
aagugcugggauuccaggc

SEQ ID NO: 1351071 - RNA, 23 nt, Human
aagugcugggauuccaggcguga

SEQ ID NO: 1351072 - RNA, 24 nt, Human
acugcguugcccaggcuggucucg

SEQ ID NO: 1351073 - RNA, 25 nt, Human
acugcguugcccaggcuggucucga

SEQ ID NO: 1351074 - RNA, 18 nt, Human
agguagggucugcaugug

SEQ ID NO: 1351075 - RNA, 22 nt, Human
agguagggucugcaugugccuc

SEQ ID NO: 1351076 - RNA, 21 nt, Human
aggugccagccugucucacau

SEQ ID NO: 1351077 - RNA, 21 nt, Human
auccugaggccugucgugguc

SEQ ID NO: 1351078 - RNA, 18 nt, Human
auguuccuuuuccuugga

SEQ ID NO: 1351079 - RNA, 20 nt, Human
caagugcugggauuccaggc

SEQ ID NO: 1351080 - RNA, 23 nt, Human
caagugcugggauuccaggcgug

SEQ ID NO: 1351081 - RNA, 18 nt, Human
caccuagacccugccagc

SEQ ID NO: 1351082 - RNA, 18 nt, Human
cacggaacaccaaggcug

SEQ ID NO: 1351083 - RNA, 24 nt, Human
cacugcguugcccaggcuggucuc

SEQ ID NO: 1351084 - RNA, 20 nt, Human
caggcgugagccaccacgcc

SEQ ID NO: 1351085 - RNA, 23 nt, Human
cagugugcacgcauguguaugua

SEQ ID NO: 1351086 - RNA, 26 nt, Human
cauguguauguaccugcacacggugu

SEQ ID NO: 1351087 - RNA, 22 nt, Human
cauuuccgcuucagcugcgggg

SEQ ID NO: 1351088 - RNA, 20 nt, Human
ccagccaccuagacccugcc

SEQ ID NO: 1351089 - RNA, 21 nt, Human
ccagggccacacaguagccug

SEQ ID NO: 1351090 - RNA, 18 nt, Human
ccugcacacgcuacuggc

SEQ ID NO: 1351091 - RNA, 24 nt, Human
ccugcacacgcuacuggcaccucg

SEQ ID NO: 1351092 - RNA, 25 nt, Human
ccugcacacgcuacuggcaccucgc

SEQ ID NO: 1351093 - RNA, 22 nt, Human
cgagauguuccuuuuccuugga

SEQ ID NO: 1351094 - RNA, 19 nt, Human
cggaacaccaaggcugaaa

SEQ ID NO: 1351095 - RNA, 24 nt, Human
cggauagagcccagggacgcugcu

SEQ ID NO: 1351096 - RNA, 22 nt, Human
cguugcccaggcuggucucgaa

SEQ ID NO: 1351097 - RNA, 24 nt, Human
cucaagugcugggauuccaggcgu

SEQ ID NO: 1351098 - RNA, 21 nt, Human
cugggacagauucucaaccgg

SEQ ID NO: 1351099 - RNA, 24 nt, Human
gacguccugagacauuucugggug

SEQ ID NO: 1351100 - RNA, 18 nt, Human
gauuccaggcgugagcca

SEQ ID NO: 1351101 - RNA, 21 nt, Human
gauuccaggcgugagccacca

SEQ ID NO: 1351102 - RNA, 21 nt, Human
gccagccaccuagacccugcc

SEQ ID NO: 1351103 - RNA, 23 nt, Human
gcuggucucgaacuccuggccuc

SEQ ID NO: 1351104 - RNA, 18 nt, Human
ggaacaccaaggcugaaa

SEQ ID NO: 1351105 - RNA, 24 nt, Human
ggcuggucucgaacuccuggccuc

SEQ ID NO: 1351106 - RNA, 18 nt, Human
uagagcccagggacgcug

SEQ ID NO: 1351107 - RNA, 23 nt, Human
uagggcgggcuccagguaggguc

SEQ ID NO: 1351108 - RNA, 25 nt, Human
uauguaccugcacacgcuacuggca

SEQ ID NO: 1351109 - RNA, 23 nt, Human
ucaagugcugggauuccaggcgu

SEQ ID NO: 1351110 - RNA, 18 nt, Human
uccaggcgugagccacca

SEQ ID NO: 1351111 - RNA, 25 nt, Human
ucccuagggcgggcuccagguaggg

SEQ ID NO: 1351112 - RNA, 19 nt, Human
ucucacugcguugcccagg

SEQ ID NO: 1351113 - RNA, 23 nt, Human
ucucacugcguugcccaggcugg

SEQ ID NO: 1351114 - RNA, 26 nt, Human
ucucacugcguugcccaggcuggucu

SEQ ID NO: 1351115 - RNA, 27 nt, Human
ucucacugcguugcccaggcuggucuc

SEQ ID NO: 1351116 - RNA, 21 nt, Human
ucucgaacuccuggccucaag

SEQ ID NO: 1351117 - RNA, 18 nt, Human
ucucucacugcguugccc

SEQ ID NO: 1351118 - RNA, 20 nt, Human
ugaccugcccagcgucccua

SEQ ID NO: 1351119 - RNA, 23 nt, Human
ugcccagcgucccuagggcgggc

SEQ ID NO: 1351120 - RNA, 24 nt, Human
ugcccaggcuggucucgaacuccu

SEQ ID NO: 1351121 - RNA, 24 nt, Human
ugcguugcccaggcuggucucgaa

SEQ ID NO: 1351122 - RNA, 18 nt, Human
ugggauuccaggcgugag

SEQ ID NO: 1351123 - RNA, 19 nt, Human
ugggauuccaggcgugagc

SEQ ID NO: 1351124 - RNA, 24 nt, Human
ugggauuccaggcgugagccacca

SEQ ID NO: 1351125 - RNA, 22 nt, Human
ugggggucucucacugcguugc

SEQ ID NO: 1351126 - RNA, 20 nt, Human
ugugcacgcauguguaugua

SEQ ID NO: 1351127 - RNA, 19 nt, Human
uucugggugucauaacagu

SEQ ID NO: 1351128 - RNA, 23 nt, Human
aagcagcucaggcuaagacaggc

SEQ ID NO: 1351129 - RNA, 22 nt, Human
aaggcaccccccuccuccucca

SEQ ID NO: 1351130 - RNA, 21 nt, Human
acaaaagcaaaagaaaucaga

SEQ ID NO: 1351131 - RNA, 24 nt, Human
acagcaaaguaacacgagaccaag

SEQ ID NO: 1351132 - RNA, 22 nt, Human
accaaggcaccccccuccuccu

SEQ ID NO: 1351133 - RNA, 18 nt, Human
acgagaccaaggcacccc

SEQ ID NO: 1351134 - RNA, 22 nt, Human
acgagaccaaggcaccccccuc

SEQ ID NO: 1351135 - RNA, 24 nt, Human
agaaaucagacugcacuggcuuuu

SEQ ID NO: 1351136 - RNA, 23 nt, Human
agacaggcugauguacuucaugc

SEQ ID NO: 1351137 - RNA, 26 nt, Human
agcuacuggguaauccaugcccaucg

SEQ ID NO: 1351138 - RNA, 24 nt, Human
aggcaccccccuccuccuccagag

SEQ ID NO: 1351139 - RNA, 22 nt, Human
aguagcuacuggguaauccaug

SEQ ID NO: 1351140 - RNA, 21 nt, Human
auaaaacaauugcuccacccc

SEQ ID NO: 1351141 - RNA, 18 nt, Human
auugcuccacccccaaau

SEQ ID NO: 1351142 - RNA, 21 nt, Human
caaagcagcucaggcuaagac

SEQ ID NO: 1351143 - RNA, 24 nt, Human
caaagcagcucaggcuaagacagg

SEQ ID NO: 1351144 - RNA, 22 nt, Human
caaaguaacacgagaccaaggc

SEQ ID NO: 1351145 - RNA, 24 nt, Human
caaauggcaguggugcccaucucc

SEQ ID NO: 1351146 - RNA, 22 nt, Human
caaccagaugcucgggcacaug

SEQ ID NO: 1351147 - RNA, 18 nt, Human
caaccccaaaauucuaag

SEQ ID NO: 1351148 - RNA, 23 nt, Human
caacgcacugaaacuggggaaua

SEQ ID NO: 1351149 - RNA, 19 nt, Human
cacccccaaauaagccaag

SEQ ID NO: 1351150 - RNA, 25 nt, Human
caccccccuccuccuccagagguuc

SEQ ID NO: 1351151 - RNA, 23 nt, Human
caccucugucacagcuccaaagg

SEQ ID NO: 1351152 - RNA, 30 nt, Human
cagcaaacccuaagcacagaagauucuaaa

SEQ ID NO: 1351153 - RNA, 21 nt, Human
cagcaaaguaacacgagacca

SEQ ID NO: 1351154 - RNA, 24 nt, Human
cagcaaaguaacacgagaccaagg

SEQ ID NO: 1351155 - RNA, 18 nt, Human
cagcacaggcacagcaaa

SEQ ID NO: 1351156 - RNA, 19 nt, Human
cagcagcaaacccuaagca

SEQ ID NO: 1351157 - RNA, 18 nt, Human
cagcagcagcaaacccua

SEQ ID NO: 1351158 - RNA, 22 nt, Human
cauggaagcaacuuacuuucaa

SEQ ID NO: 1351159 - RNA, 23 nt, Human
ccaaaauucuaagcucaccagca

SEQ ID NO: 1351160 - RNA, 24 nt, Human
ccaaaauucuaagcucaccagcag

SEQ ID NO: 1351161 - RNA, 19 nt, Human
ccaaaccaggaugguauua

SEQ ID NO: 1351162 - RNA, 23 nt, Human
ccaaaggacacaccauguuugaa

SEQ ID NO: 1351163 - RNA, 20 nt, Human
ccccaaaauucuaagcucac

SEQ ID NO: 1351164 - RNA, 25 nt, Human
ccccaaaauucuaagcucaccagca

SEQ ID NO: 1351165 - RNA, 22 nt, Human
ccccaaaauucuaagcucaccu

SEQ ID NO: 1351166 - RNA, 18 nt, Human
ccuagaucagacauagag

SEQ ID NO: 1351167 - RNA, 27 nt, Human
cgagaccaaggcaccccccuccuccuc

SEQ ID NO: 1351168 - RNA, 22 nt, Human
cucccagaaguuguaaaccuag

SEQ ID NO: 1351169 - RNA, 22 nt, Human
cuggccccagcugaccuuucca

SEQ ID NO: 1351170 - RNA, 22 nt, Human
cuuauagguuuguacauuuuaa

SEQ ID NO: 1351171 - RNA, 23 nt, Human
gaauaaaacaauugcuccacccc

SEQ ID NO: 1351172 - RNA, 19 nt, Human
gagcaaauggcaguggugc

SEQ ID NO: 1351173 - RNA, 20 nt, Human
gcaccccccuccuccuccag

SEQ ID NO: 1351174 - RNA, 24 nt, Human
gcacugaaacuggggaauaaaaca

SEQ ID NO: 1351175 - RNA, 20 nt, Human
gcuccaaaggacacaccaug

SEQ ID NO: 1351176 - RNA, 22 nt, Human
ggaggcucuucccccagccucc

SEQ ID NO: 1351177 - RNA, 18 nt, Human
ggcaguggugcccaucuc

SEQ ID NO: 1351178 - RNA, 23 nt, Human
gggaagugaaauuccuguacuuu

SEQ ID NO: 1351179 - RNA, 20 nt, Human
gguggccaguugugugggcc

SEQ ID NO: 1351180 - RNA, 24 nt, Human
uaacacgagaccaaggcacccccc

SEQ ID NO: 1351181 - RNA, 18 nt, Human
uaagcucaccagcagcag

SEQ ID NO: 1351182 - RNA, 24 nt, Human
uaagcucaccagcagcagcaaacc

SEQ ID NO: 1351183 - RNA, 24 nt, Human
uaugugcucaaguccuggugggaa

SEQ ID NO: 1351184 - RNA, 24 nt, Human
ucccaaccccaaaauucuaagcuc

SEQ ID NO: 1351185 - RNA, 20 nt, Human
ucccagaaguuguaaaccuu

SEQ ID NO: 1351186 - RNA, 21 nt, Human
ucccccagccuccuagaucag

SEQ ID NO: 1351187 - RNA, 18 nt, Human
ucuaacuccuucaagcuu

SEQ ID NO: 1351188 - RNA, 24 nt, Human
ucuaagucagaacaggccgggguc

SEQ ID NO: 1351189 - RNA, 20 nt, Human
ugacaaaagcaaaagaaauc

SEQ ID NO: 1351190 - RNA, 23 nt, Human
ugacaaaagcaaaagaaaucaga

SEQ ID NO: 1351191 - RNA, 24 nt, Human
ugacaaaagcaaaagaaaucagac

SEQ ID NO: 1351192 - RNA, 20 nt, Human
ugaggcaccacuggccccag

SEQ ID NO: 1351193 - RNA, 21 nt, Human
ugccugaggcaccacuggccc

SEQ ID NO: 1351194 - RNA, 24 nt, Human
ugccuuccacuuuuucccaacccc

SEQ ID NO: 1351195 - RNA, 18 nt, Human
ugcuuaugccuuccacuu

SEQ ID NO: 1351196 - RNA, 21 nt, Human
uggaagaauucagcccacaga

SEQ ID NO: 1351197 - RNA, 23 nt, Human
uguacuuuuaggugcugggcuca

SEQ ID NO: 1351198 - RNA, 25 nt, Human
uucaaagcagcucaggcuaagacag

SEQ ID NO: 1351199 - RNA, 22 nt, Human
uucacauauccuaaaauauccu

SEQ ID NO: 1351200 - RNA, 22 nt, Human
uucacucaaguuuucuaaagga

SEQ ID NO: 1351201 - RNA, 24 nt, Human
uucccaaccccaaaauucuaagcu

SEQ ID NO: 1351202 - RNA, 23 nt, Human
uuuucccaaccccaaaauucuaa

SEQ ID NO: 1351203 - RNA, 19 nt, Human
aagccucaggcccccucug

SEQ ID NO: 1351204 - RNA, 18 nt, Human
aagggccccagcuucuuc

SEQ ID NO: 1351205 - RNA, 18 nt, Human
agagagcagccuuuuugg

SEQ ID NO: 1351206 - RNA, 26 nt, Human
aggcccucaacacacccuugccaucu

SEQ ID NO: 1351207 - RNA, 20 nt, Human
agggaauagguggguggagg

SEQ ID NO: 1351208 - RNA, 20 nt, Human
aggugggcagacagguaagc

SEQ ID NO: 1351209 - RNA, 21 nt, Human
augagaacagcuccucacuga

SEQ ID NO: 1351210 - RNA, 18 nt, Human
caaaagcaggcgaagggc

SEQ ID NO: 1351211 - RNA, 19 nt, Human
cagggcaggcgagggagcc

SEQ ID NO: 1351212 - RNA, 21 nt, Human
caggugggcagacagguaagc

SEQ ID NO: 1351213 - RNA, 18 nt, Human
caucacaaccccuuacuc

SEQ ID NO: 1351214 - RNA, 19 nt, Human
ccacuggcgguguccucuc

SEQ ID NO: 1351215 - RNA, 18 nt, Human
cccacagggucugggcca

SEQ ID NO: 1351216 - RNA, 19 nt, Human
cccagaacuuccagagagu

SEQ ID NO: 1351217 - RNA, 19 nt, Human
cccuaccugggcccuuccc

SEQ ID NO: 1351218 - RNA, 19 nt, Human
ccucaggcccccucugguc

SEQ ID NO: 1351219 - RNA, 20 nt, Human
ccuggaccaugaaggugacc

SEQ ID NO: 1351220 - RNA, 21 nt, Human
ccuggaucaucugaauuuccc

SEQ ID NO: 1351221 - RNA, 23 nt, Human
ccuggcccuuguuccagacaggu

SEQ ID NO: 1351222 - RNA, 18 nt, Human
ccugggcccuucccggga

SEQ ID NO: 1351223 - RNA, 23 nt, Human
ccuucgccaucuaauugaagccc

SEQ ID NO: 1351224 - RNA, 20 nt, Human
cuggaccaugaaggugaccg

SEQ ID NO: 1351225 - RNA, 25 nt, Human
cuucugcuguaaacugggauaguga

SEQ ID NO: 1351226 - RNA, 22 nt, Human
gacucccagcuguaugaucuua

SEQ ID NO: 1351227 - RNA, 19 nt, Human
gagaacagcuccucacuga

SEQ ID NO: 1351228 - RNA, 20 nt, Human
gagcugggugagggagcggg

SEQ ID NO: 1351229 - RNA, 22 nt, Human
gaucaucugaauuucccuuuga

SEQ ID NO: 1351230 - RNA, 18 nt, Human
gcccaggguuccugcagc

SEQ ID NO: 1351231 - RNA, 20 nt, Human
gcuguaaacugggauaguga

SEQ ID NO: 1351232 - RNA, 25 nt, Human
ggccgcugcagugaagccucaggcc

SEQ ID NO: 1351233 - RNA, 20 nt, Human
gggaaagggggugagcagcu

SEQ ID NO: 1351234 - RNA, 21 nt, Human
gggcagacagguaagcagagc

SEQ ID NO: 1351235 - RNA, 18 nt, Human
gguguccucuccuucgcc

SEQ ID NO: 1351236 - RNA, 22 nt, Human
uaacacucacucccuggcccuc

SEQ ID NO: 1351237 - RNA, 24 nt, Human
uacccugccugccugggccccagc

SEQ ID NO: 1351238 - RNA, 19 nt, Human
ucaacacacccuugccauc

SEQ ID NO: 1351239 - RNA, 19 nt, Human
ucacuggccucccugccuc

SEQ ID NO: 1351240 - RNA, 22 nt, Human
ucacuggccucccugccucucu

SEQ ID NO: 1351241 - RNA, 24 nt, Human
ucccagcuguaugaucuuaugcaa

SEQ ID NO: 1351242 - RNA, 23 nt, Human
ucuucugcuguaaacugggauag

SEQ ID NO: 1351243 - RNA, 20 nt, Human
ucuuggggagacccagaacu

SEQ ID NO: 1351244 - RNA, 20 nt, Human
ugaaggugaccaggaaaggg

SEQ ID NO: 1351245 - RNA, 21 nt, Human
ugagaacagcuccucacugag

SEQ ID NO: 1351246 - RNA, 20 nt, Human
ugaggagcugggugagggaa

SEQ ID NO: 1351247 - RNA, 23 nt, Human
ugauaaccccuugugggugaugu

SEQ ID NO: 1351248 - RNA, 21 nt, Human
ugcaaguuacucaaucucucu

SEQ ID NO: 1351249 - RNA, 23 nt, Human
uggaagagagcagccuuuuugga

SEQ ID NO: 1351250 - RNA, 18 nt, Human
uggcagccgccauggccc

SEQ ID NO: 1351251 - RNA, 21 nt, Human
uggcagccgccauggcccagg

SEQ ID NO: 1351252 - RNA, 22 nt, Human
uggcccaggguuccugcagcag

SEQ ID NO: 1351253 - RNA, 25 nt, Human
ugggccccagccaugagaacagcuc

SEQ ID NO: 1351254 - RNA, 22 nt, Human
ugggugaugucugaggagcugg

SEQ ID NO: 1351255 - RNA, 21 nt, Human
uggguggaggccgcugcagug

SEQ ID NO: 1351256 - RNA, 18 nt, Human
ugucugaggagcugggug

SEQ ID NO: 1351257 - RNA, 20 nt, Human
ugucugaggagcugggugag

SEQ ID NO: 1351258 - RNA, 18 nt, Human
uucauaauuuaauacccu

SEQ ID NO: 1351259 - RNA, 20 nt, Human
aaaggugcauuccuggcagg

SEQ ID NO: 1351260 - RNA, 22 nt, Human
aagcagcaggucucgucaaaca

SEQ ID NO: 1351261 - RNA, 19 nt, Human
aagcagcuguugaggccag

SEQ ID NO: 1351262 - RNA, 21 nt, Human
aagcggcccaggaggcugggu

SEQ ID NO: 1351263 - RNA, 22 nt, Human
aagcuccagcuuagcugcccag

SEQ ID NO: 1351264 - RNA, 20 nt, Human
aagcugcaccugcagggugg

SEQ ID NO: 1351265 - RNA, 18 nt, Human
aaggagacagacagaaag

SEQ ID NO: 1351266 - RNA, 21 nt, Human
aaggagacagacagaaaggga

SEQ ID NO: 1351267 - RNA, 19 nt, Human
aagggccccugcccuguca

SEQ ID NO: 1351268 - RNA, 23 nt, Human
acacacacacacacacacacaca

SEQ ID NO: 1351269 - RNA, 23 nt, Human
acacacacacacacacacacaca

SEQ ID NO: 1351270 - RNA, 23 nt, Human
acacacacacacacacacacaca

SEQ ID NO: 1351271 - RNA, 23 nt, Human
acacacacacacacacacacaca

SEQ ID NO: 1351272 - RNA, 23 nt, Human
acacacacacacacacacacaca

SEQ ID NO: 1351273 - RNA, 23 nt, Human
acacacacacacacacacacaca

SEQ ID NO: 1351274 - RNA, 23 nt, Human
acacacacacacacacacacaca

SEQ ID NO: 1351275 - RNA, 23 nt, Human
acacacacacacacacacacaca

SEQ ID NO: 1351276 - RNA, 23 nt, Human
acacacacacacacacacacaca

SEQ ID NO: 1351277 - RNA, 23 nt, Human
acacacacacacacacacacaca

SEQ ID NO: 1351278 - RNA, 23 nt, Human
acacacacacacacacacacaca

SEQ ID NO: 1351279 - RNA, 23 nt, Human
acacacacacacacacacacaca

SEQ ID NO: 1351280 - RNA, 22 nt, Human
acacacacacacacacacacag

SEQ ID NO: 1351281 - RNA, 26 nt, Human
acacacacacgcacgcgcacacagca

SEQ ID NO: 1351282 - RNA, 21 nt, Human
acacacacgcacgcgcacaca

SEQ ID NO: 1351283 - RNA, 26 nt, Human
acccaacaggcacaaaucgucggcuu

SEQ ID NO: 1351284 - RNA, 24 nt, Human
acccagcugcccaggcccacccag

SEQ ID NO: 1351285 - RNA, 24 nt, Human
acccagcugcccaggcccacccag

SEQ ID NO: 1351286 - RNA, 24 nt, Human
acccucaccucugcagccccccag

SEQ ID NO: 1351287 - RNA, 22 nt, Human
acguggcaucugggguaccccc

SEQ ID NO: 1351288 - RNA, 31 nt, Human
acuccagacacacacacacacacacacacag

SEQ ID NO: 1351289 - RNA, 22 nt, Human
agagagaagcacagcuccccga

SEQ ID NO: 1351290 - RNA, 23 nt, Human
agagcccugggcucccgggcagc

SEQ ID NO: 1351291 - RNA, 24 nt, Human
agcaaggagacagacagaaaggga

SEQ ID NO: 1351292 - RNA, 18 nt, Human
agcaggaagcugaaggga

SEQ ID NO: 1351293 - RNA, 18 nt, Human
agcagguaccagugcucc

SEQ ID NO: 1351294 - RNA, 19 nt, Human
agcagguaccagugcucca

SEQ ID NO: 1351295 - RNA, 21 nt, Human
agccccuguugcauggccucc

SEQ ID NO: 1351296 - RNA, 21 nt, Human
agccggccugagcugggcacg

SEQ ID NO: 1351297 - RNA, 19 nt, Human
agccucccagccaccuccc

SEQ ID NO: 1351298 - RNA, 23 nt, Human
agcucagcucuucccugacucca

SEQ ID NO: 1351299 - RNA, 19 nt, Human
aggaagcugaagggaggga

SEQ ID NO: 1351300 - RNA, 23 nt, Human
aggacgcaccacagcuggggccc

SEQ ID NO: 1351301 - RNA, 21 nt, Human
aggcagcacgggguggccagg

SEQ ID NO: 1351302 - RNA, 26 nt, Human
aggcagcacgggguggccaggggcga

SEQ ID NO: 1351303 - RNA, 18 nt, Human
aggcagcggcgugagcca

SEQ ID NO: 1351304 - RNA, 19 nt, Human
aggcagggccugggcagcc

SEQ ID NO: 1351305 - RNA, 20 nt, Human
aggcccacccagcugcccag

SEQ ID NO: 1351306 - RNA, 20 nt, Human
aggcccacccagcugcccag

SEQ ID NO: 1351307 - RNA, 22 nt, Human
aggcgaaggcggggcugcaggg

SEQ ID NO: 1351308 - RNA, 19 nt, Human
agguaccagugcuccagaa

SEQ ID NO: 1351309 - RNA, 21 nt, Human
augaaggugaggugguggcag

SEQ ID NO: 1351310 - RNA, 23 nt, Human
caaagcuccagcuuagcugccca

SEQ ID NO: 1351311 - RNA, 20 nt, Human
cacacacacacacacacaca

SEQ ID NO: 1351312 - RNA, 20 nt, Human
cacacacacacacacacaca

SEQ ID NO: 1351313 - RNA, 20 nt, Human
cacacacacacacacacaca

SEQ ID NO: 1351314 - RNA, 20 nt, Human
cacacacacacacacacaca

SEQ ID NO: 1351315 - RNA, 20 nt, Human
cacacacacacacacacaca

SEQ ID NO: 1351316 - RNA, 20 nt, Human
cacacacacacacacacaca

SEQ ID NO: 1351317 - RNA, 20 nt, Human
cacacacacacacacacaca

SEQ ID NO: 1351318 - RNA, 20 nt, Human
cacacacacacacacacaca

SEQ ID NO: 1351319 - RNA, 20 nt, Human
cacacacacacacacacaca

SEQ ID NO: 1351320 - RNA, 20 nt, Human
cacacacacacacacacaca

SEQ ID NO: 1351321 - RNA, 20 nt, Human
cacacacacacacacacaca

SEQ ID NO: 1351322 - RNA, 20 nt, Human
cacacacacacacacacaca

SEQ ID NO: 1351323 - RNA, 20 nt, Human
cacacacacacacacacaca

SEQ ID NO: 1351324 - RNA, 20 nt, Human
cacacacacacacacacaca

SEQ ID NO: 1351325 - RNA, 20 nt, Human
cacacacacacacacacaca

SEQ ID NO: 1351326 - RNA, 22 nt, Human
cacacacacacacacacacaca

SEQ ID NO: 1351327 - RNA, 22 nt, Human
cacacacacacacacacacaca

SEQ ID NO: 1351328 - RNA, 22 nt, Human
cacacacacacacacacacaca

SEQ ID NO: 1351329 - RNA, 22 nt, Human
cacacacacacacacacacaca

SEQ ID NO: 1351330 - RNA, 26 nt, Human
cacacacacacacacacacacacaca

SEQ ID NO: 1351331 - RNA, 26 nt, Human
cacacacacacacacacacacacaca

SEQ ID NO: 1351332 - RNA, 26 nt, Human
cacacacacacacacacacacacaca

SEQ ID NO: 1351333 - RNA, 26 nt, Human
cacacacacacacacacacacacaca

SEQ ID NO: 1351334 - RNA, 26 nt, Human
cacacacacacacacacacacacaca

SEQ ID NO: 1351335 - RNA, 26 nt, Human
cacacacacacacacacacacacaca

SEQ ID NO: 1351336 - RNA, 26 nt, Human
cacacacacacacacacacacacaca

SEQ ID NO: 1351337 - RNA, 26 nt, Human
cacacacacacacacacacacacaca

SEQ ID NO: 1351338 - RNA, 26 nt, Human
cacacacacacacacacacacacacg

SEQ ID NO: 1351339 - RNA, 26 nt, Human
cacacacacacacacacacacacgca

SEQ ID NO: 1351340 - RNA, 26 nt, Human
cacacacacacacacacacacgcacg

SEQ ID NO: 1351341 - RNA, 26 nt, Human
cacacacacacacacacacgcacgcg

SEQ ID NO: 1351342 - RNA, 26 nt, Human
cacacacacacacacacgcacgcgca

SEQ ID NO: 1351343 - RNA, 25 nt, Human
cacacacacacacacgcacgcgcac

SEQ ID NO: 1351344 - RNA, 23 nt, Human
cacacacacacacgcacgcgcac

SEQ ID NO: 1351345 - RNA, 20 nt, Human
cacagcuccccgaccugcuc

SEQ ID NO: 1351346 - RNA, 21 nt, Human
caccaggaaggugaaggccuc

SEQ ID NO: 1351347 - RNA, 19 nt, Human
cacccagcugcccaggccc

SEQ ID NO: 1351348 - RNA, 19 nt, Human
cacccagcugcccaggccc

SEQ ID NO: 1351349 - RNA, 21 nt, Human
cacccuuuccggaaacucgca

SEQ ID NO: 1351350 - RNA, 19 nt, Human
caccggaccucagagcacc

SEQ ID NO: 1351351 - RNA, 19 nt, Human
caccuccuggcuuccaaag

SEQ ID NO: 1351352 - RNA, 23 nt, Human
cacgcgcacacagcaucaaugcc

SEQ ID NO: 1351353 - RNA, 21 nt, Human
cagaacaugcugcagauccac

SEQ ID NO: 1351354 - RNA, 23 nt, Human
cagagcgugccucggugcacuuu

SEQ ID NO: 1351355 - RNA, 25 nt, Human
cagauacccucaccucugcagcccc

SEQ ID NO: 1351356 - RNA, 19 nt, Human
cagauccacggugcccagu

SEQ ID NO: 1351357 - RNA, 19 nt, Human
cagcaugcgguccaccucc

SEQ ID NO: 1351358 - RNA, 19 nt, Human
cagcaugucugcccagugc

SEQ ID NO: 1351359 - RNA, 22 nt, Human
cagccagcaccagguccacauu

SEQ ID NO: 1351360 - RNA, 19 nt, Human
cagcccaggcccauccagc

SEQ ID NO: 1351361 - RNA, 24 nt, Human
cagcccaggcccauccagccgucc

SEQ ID NO: 1351362 - RNA, 19 nt, Human
cagccguccaggcccaccc

SEQ ID NO: 1351363 - RNA, 21 nt, Human
cagcggggcccuucaccuccu

SEQ ID NO: 1351364 - RNA, 19 nt, Human
cagcugcccaggcccaccc

SEQ ID NO: 1351365 - RNA, 21 nt, Human
cagcugggaggguggccccuc

SEQ ID NO: 1351366 - RNA, 20 nt, Human
caggaacuuggaagcccaga

SEQ ID NO: 1351367 - RNA, 21 nt, Human
caggagacucuguuccuccac

SEQ ID NO: 1351368 - RNA, 18 nt, Human
caggcacaaaucgucggc

SEQ ID NO: 1351369 - RNA, 21 nt, Human
caggcccagccucccagccac

SEQ ID NO: 1351370 - RNA, 23 nt, Human
cagggggugccacugggcaaugg

SEQ ID NO: 1351371 - RNA, 22 nt, Human
cagggucccugccagcucugcc

SEQ ID NO: 1351372 - RNA, 20 nt, Human
caucacuuccuugccucuac

SEQ ID NO: 1351373 - RNA, 21 nt, Human
caugacuccagacacacacac

SEQ ID NO: 1351374 - RNA, 19 nt, Human
cauggggccuacggugacc

SEQ ID NO: 1351375 - RNA, 23 nt, Human
cauuccacacacacugacucagc

SEQ ID NO: 1351376 - RNA, 20 nt, Human
ccaaacccacccaaaacgug

SEQ ID NO: 1351377 - RNA, 23 nt, Human
ccacaagagccugggaccccucu

SEQ ID NO: 1351378 - RNA, 18 nt, Human
ccacauucuggaccuggc

SEQ ID NO: 1351379 - RNA, 23 nt, Human
ccaccaugguuugccagccaugc

SEQ ID NO: 1351380 - RNA, 23 nt, Human
ccaccucccagcagcccccagcc

SEQ ID NO: 1351381 - RNA, 19 nt, Human
ccagaacaugcugcagauc

SEQ ID NO: 1351382 - RNA, 23 nt, Human
ccagaacauuccacacacacuga

SEQ ID NO: 1351383 - RNA, 22 nt, Human
ccagacagccagcaccaggucc

SEQ ID NO: 1351384 - RNA, 19 nt, Human
ccaggcccugcugcccuag

SEQ ID NO: 1351385 - RNA, 23 nt, Human
ccaucucaucccugggggucuca

SEQ ID NO: 1351386 - RNA, 21 nt, Human
ccaugacuccagacacacaca

SEQ ID NO: 1351387 - RNA, 26 nt, Human
ccaugguuugccagccaugcaggugg

SEQ ID NO: 1351388 - RNA, 19 nt, Human
cccaccacccagggcaugg

SEQ ID NO: 1351389 - RNA, 21 nt, Human
cccagcccaggcccauccagc

SEQ ID NO: 1351390 - RNA, 19 nt, Human
cccagcugcccaggcccac

SEQ ID NO: 1351391 - RNA, 19 nt, Human
cccagcugcccaggcccac

SEQ ID NO: 1351392 - RNA, 28 nt, Human
cccagcugcccaggcccacccagcugcc

SEQ ID NO: 1351393 - RNA, 21 nt, Human
cccaggccaucccaucgggaa

SEQ ID NO: 1351394 - RNA, 19 nt, Human
cccaggcccagccucccag

SEQ ID NO: 1351395 - RNA, 20 nt, Human
cccauagggcagggucccug

SEQ ID NO: 1351396 - RNA, 21 nt, Human
ccccagccaagcaggcagggc

SEQ ID NO: 1351397 - RNA, 22 nt, Human
ccccaggaacuuggaagcccag

SEQ ID NO: 1351398 - RNA, 18 nt, Human
ccccaggcccagggugac

SEQ ID NO: 1351399 - RNA, 20 nt, Human
ccccaggcccagggugacuc

SEQ ID NO: 1351400 - RNA, 23 nt, Human
cccccagccccagccaagcaggc

SEQ ID NO: 1351401 - RNA, 23 nt, Human
cccccaggaacuuggaagcccag

SEQ ID NO: 1351402 - RNA, 20 nt, Human
cccccaggccucaggucggc

SEQ ID NO: 1351403 - RNA, 27 nt, Human
cccccauugcugagcaucccccgggcu

SEQ ID NO: 1351404 - RNA, 21 nt, Human
ccccccgccuccaggccaggc

SEQ ID NO: 1351405 - RNA, 22 nt, Human
cccccugccuuccucaagaacc

SEQ ID NO: 1351406 - RNA, 25 nt, Human
cccccugccuuccucaagaacccgc

SEQ ID NO: 1351407 - RNA, 19 nt, Human
ccccgagaagcgcuugaag

SEQ ID NO: 1351408 - RNA, 19 nt, Human
ccccgaggcccgggcaccc

SEQ ID NO: 1351409 - RNA, 22 nt, Human
ccccugcccgcuaccccaucug

SEQ ID NO: 1351410 - RNA, 24 nt, Human
cccuccggccccugcccgcuaccc

SEQ ID NO: 1351411 - RNA, 21 nt, Human
cccugccaugacuccagacac

SEQ ID NO: 1351412 - RNA, 20 nt, Human
cccugcccugucagcucccc

SEQ ID NO: 1351413 - RNA, 21 nt, Human
cccuggacccugggcccugcc

SEQ ID NO: 1351414 - RNA, 25 nt, Human
cccuggacccugggcccugccuggg

SEQ ID NO: 1351415 - RNA, 18 nt, Human
cccugggcccugccuggg

SEQ ID NO: 1351416 - RNA, 20 nt, Human
ccgcagcgccugaggaugaa

SEQ ID NO: 1351417 - RNA, 20 nt, Human
ccgccugcgggaucugaggc

SEQ ID NO: 1351418 - RNA, 25 nt, Human
ccucaagaacccgcuguggcucccu

SEQ ID NO: 1351419 - RNA, 19 nt, Human
ccucauugaaguagggggc

SEQ ID NO: 1351420 - RNA, 21 nt, Human
ccuccaggccaggccacccaa

SEQ ID NO: 1351421 - RNA, 21 nt, Human
ccucccagcagcccccagccc

SEQ ID NO: 1351422 - RNA, 21 nt, Human
ccucccagccaccucccagca

SEQ ID NO: 1351423 - RNA, 21 nt, Human
ccucccuggcuggccgcaggg

SEQ ID NO: 1351424 - RNA, 21 nt, Human
ccucccuggcuggccgcaggg

SEQ ID NO: 1351425 - RNA, 20 nt, Human
ccucgagccuccagcaccac

SEQ ID NO: 1351426 - RNA, 24 nt, Human
ccugcgcagcggggcccuucaccu

SEQ ID NO: 1351427 - RNA, 25 nt, Human
ccuggacccugggcccugccugggg

SEQ ID NO: 1351428 - RNA, 19 nt, Human
ccugggaccccucuugcca

SEQ ID NO: 1351429 - RNA, 22 nt, Human
ccuguacccgccugccuagggc

SEQ ID NO: 1351430 - RNA, 24 nt, Human
ccuguagugaguugggaccggggc

SEQ ID NO: 1351431 - RNA, 19 nt, Human
cgagccuccagcaccacca

SEQ ID NO: 1351432 - RNA, 24 nt, Human
cgccggggugggccagcaugucug

SEQ ID NO: 1351433 - RNA, 19 nt, Human
cgccugaggaugaagguga

SEQ ID NO: 1351434 - RNA, 20 nt, Human
cgccugaggaugaaggugag

SEQ ID NO: 1351435 - RNA, 19 nt, Human
cgcgcacacagcaucaaug

SEQ ID NO: 1351436 - RNA, 26 nt, Human
cggagcucacccaggggcucaugccc

SEQ ID NO: 1351437 - RNA, 18 nt, Human
cgggaggagcagggcugg

SEQ ID NO: 1351438 - RNA, 18 nt, Human
cgggaggagcagggcugg

SEQ ID NO: 1351439 - RNA, 18 nt, Human
cggggcugcagggccagc

SEQ ID NO: 1351440 - RNA, 22 nt, Human
cgggguggccaggggcgagggu

SEQ ID NO: 1351441 - RNA, 23 nt, Human
cuccagcaccaccacggucagcc

SEQ ID NO: 1351442 - RNA, 19 nt, Human
cuccugggcccuggacccu

SEQ ID NO: 1351443 - RNA, 23 nt, Human
cuccuucucaccucuguucaccc

SEQ ID NO: 1351444 - RNA, 23 nt, Human
cucuaccccaggacgcaccacag

SEQ ID NO: 1351445 - RNA, 22 nt, Human
cucuggacccuggccaaagcuc

SEQ ID NO: 1351446 - RNA, 18 nt, Human
cucuucuuccacuuccuc

SEQ ID NO: 1351447 - RNA, 18 nt, Human
cugcagggcggccugggc

SEQ ID NO: 1351448 - RNA, 21 nt, Human
cugcagggcggccugggcaag

SEQ ID NO: 1351449 - RNA, 20 nt, Human
cugcagggucauggcgggag

SEQ ID NO: 1351450 - RNA, 24 nt, Human
cugcccaggcccacccagcccagg

SEQ ID NO: 1351451 - RNA, 23 nt, Human
cugggcaagugccugggcucagc

SEQ ID NO: 1351452 - RNA, 19 nt, Human
cugggucagcugggagggu

SEQ ID NO: 1351453 - RNA, 18 nt, Human
cugguccugcgcagcggg

SEQ ID NO: 1351454 - RNA, 20 nt, Human
cuguggcucccucgggccca

SEQ ID NO: 1351455 - RNA, 18 nt, Human
cuguguccggccugggug

SEQ ID NO: 1351456 - RNA, 24 nt, Human
cuucaccggaccucagagcacccu

SEQ ID NO: 1351457 - RNA, 23 nt, Human
cuucucaccucuguucacccacu

SEQ ID NO: 1351458 - RNA, 24 nt, Human
gaaaaugcugcccaucaggccugu

SEQ ID NO: 1351459 - RNA, 18 nt, Human
gaacuuggaagcccagag

SEQ ID NO: 1351460 - RNA, 19 nt, Human
gaaggaagguggggcgggc

SEQ ID NO: 1351461 - RNA, 20 nt, Human
gacucacguggaagcagcag

SEQ ID NO: 1351462 - RNA, 23 nt, Human
gaggugguggcagguaggggcag

SEQ ID NO: 1351463 - RNA, 23 nt, Human
gcaaugggccgccggggugggcc

SEQ ID NO: 1351464 - RNA, 20 nt, Human
gcagccggcgggcccagcag

SEQ ID NO: 1351465 - RNA, 21 nt, Human
gcagguaggggcagggugcag

SEQ ID NO: 1351466 - RNA, 25 nt, Human
gccaagggccccugcccugucagcu

SEQ ID NO: 1351467 - RNA, 18 nt, Human
gcccaccaugguuugcca

SEQ ID NO: 1351468 - RNA, 22 nt, Human
gcccagcagguaccagugcucc

SEQ ID NO: 1351469 - RNA, 21 nt, Human
gccccugcccugucagcuccc

SEQ ID NO: 1351470 - RNA, 18 nt, Human
gcccuggacccugggccc

SEQ ID NO: 1351471 - RNA, 20 nt, Human
gcgcagcugcuggccccugu

SEQ ID NO: 1351472 - RNA, 22 nt, Human
gcgggaggagcagggcuggcug

SEQ ID NO: 1351473 - RNA, 23 nt, Human
gcugcaggcgcccccauugcuga

SEQ ID NO: 1351474 - RNA, 23 nt, Human
ggaagaagcggcccaggaggcug

SEQ ID NO: 1351475 - RNA, 23 nt, Human
ggaagcucucucccucccugcuu

SEQ ID NO: 1351476 - RNA, 21 nt, Human
ggacaaggggcagguggugcu

SEQ ID NO: 1351477 - RNA, 21 nt, Human
ggagccagcggggugggcuca

SEQ ID NO: 1351478 - RNA, 24 nt, Human
ggagcucacugagcaggccugggc

SEQ ID NO: 1351479 - RNA, 19 nt, Human
ggcagcacgggguggccag

SEQ ID NO: 1351480 - RNA, 21 nt, Human
ggcagcacgggguggccaggg

SEQ ID NO: 1351481 - RNA, 23 nt, Human
ggcaucugggguacccccugccu

SEQ ID NO: 1351482 - RNA, 19 nt, Human
ggcgggaggagcagggcug

SEQ ID NO: 1351483 - RNA, 20 nt, Human
ggcgggcgcagcugcuggcc

SEQ ID NO: 1351484 - RNA, 20 nt, Human
ggcucaguucggagcggcag

SEQ ID NO: 1351485 - RNA, 20 nt, Human
ggcuggccgcagggggugcc

SEQ ID NO: 1351486 - RNA, 19 nt, Human
ggcuucagcccgggagggu

SEQ ID NO: 1351487 - RNA, 23 nt, Human
gggcaaggaggcagcacggggug

SEQ ID NO: 1351488 - RNA, 24 nt, Human
gggcaaugggccgccggggugggc

SEQ ID NO: 1351489 - RNA, 20 nt, Human
gggcagccuagucccugccu

SEQ ID NO: 1351490 - RNA, 23 nt, Human
ggggcccuucaccuccuggcuuc

SEQ ID NO: 1351491 - RNA, 21 nt, Human
ggguggccccuggcagcuccg

SEQ ID NO: 1351492 - RNA, 24 nt, Human
ggucccugccagcucugccuuggg

SEQ ID NO: 1351493 - RNA, 19 nt, Human
ggugaccccaggcccaggg

SEQ ID NO: 1351494 - RNA, 23 nt, Human
ggugaccccaggcccagggugac

SEQ ID NO: 1351495 - RNA, 20 nt, Human
ggugggcucagccaagggcc

SEQ ID NO: 1351496 - RNA, 23 nt, Human
gucauggcgggaggagcagggcu

SEQ ID NO: 1351497 - RNA, 24 nt, Human
guccacggugcccccaggccucag

SEQ ID NO: 1351498 - RNA, 22 nt, Human
guggccccuggcagcuccgccu

SEQ ID NO: 1351499 - RNA, 18 nt, Human
gugguggcagguaggggc

SEQ ID NO: 1351500 - RNA, 20 nt, Human
uaccccaggacgcaccacag

SEQ ID NO: 1351501 - RNA, 25 nt, Human
uaccccaucugacuagcagcagcca

SEQ ID NO: 1351502 - RNA, 20 nt, Human
uacccucaccucugcagccc

SEQ ID NO: 1351503 - RNA, 21 nt, Human
ucacccaggggcucaugcccc

SEQ ID NO: 1351504 - RNA, 26 nt, Human
ucaccuacaggcaggggaaccagggu

SEQ ID NO: 1351505 - RNA, 22 nt, Human
ucacugagcaggccugggcuaa

SEQ ID NO: 1351506 - RNA, 23 nt, Human
ucacugagcaggccugggcuaaa

SEQ ID NO: 1351507 - RNA, 19 nt, Human
ucagccaagggccccugcc

SEQ ID NO: 1351508 - RNA, 23 nt, Human
ucagccgcugccuggacucgucc

SEQ ID NO: 1351509 - RNA, 19 nt, Human
ucagcggggagacagaggc

SEQ ID NO: 1351510 - RNA, 20 nt, Human
ucaggaguggggcaagggca

SEQ ID NO: 1351511 - RNA, 22 nt, Human
ucagggccgcagcgccugagga

SEQ ID NO: 1351512 - RNA, 22 nt, Human
uccacacacacugacucagccg

SEQ ID NO: 1351513 - RNA, 19 nt, Human
uccacauucuggaccuggc

SEQ ID NO: 1351514 - RNA, 21 nt, Human
uccacggugcccccaggccuc

SEQ ID NO: 1351515 - RNA, 20 nt, Human
uccagacacacacacacaca

SEQ ID NO: 1351516 - RNA, 31 nt, Human
uccagacacacacacacacacacacacacag

SEQ ID NO: 1351517 - RNA, 20 nt, Human
uccagagagcagcagccagc

SEQ ID NO: 1351518 - RNA, 19 nt, Human
uccagccguccaggcccac

SEQ ID NO: 1351519 - RNA, 20 nt, Human
ucccagacagccagcaccag

SEQ ID NO: 1351520 - RNA, 22 nt, Human
ucccagacagccagcaccaggu

SEQ ID NO: 1351521 - RNA, 23 nt, Human
ucccagcagcccccagccccagc

SEQ ID NO: 1351522 - RNA, 18 nt, Human
ucccccgggcuggacucc

SEQ ID NO: 1351523 - RNA, 22 nt, Human
uccccugcuuugcccacaagag

SEQ ID NO: 1351524 - RNA, 22 nt, Human
ucccucgggcccauggggcagc

SEQ ID NO: 1351525 - RNA, 23 nt, Human
ucccucgggcccauggggcagcc

SEQ ID NO: 1351526 - RNA, 22 nt, Human
ucccugcuucucucuccugggc

SEQ ID NO: 1351527 - RNA, 22 nt, Human
ucccugggggucucaucucugc

SEQ ID NO: 1351528 - RNA, 24 nt, Human
uccuggacgcaggccucgagccuc

SEQ ID NO: 1351529 - RNA, 24 nt, Human
uccugggcccuggacccugggccc

SEQ ID NO: 1351530 - RNA, 25 nt, Human
uccugggcccuggacccugggcccu

SEQ ID NO: 1351531 - RNA, 21 nt, Human
ucuacccugcugguuuggaag

SEQ ID NO: 1351532 - RNA, 22 nt, Human
ucuccugggcccuggacccugg

SEQ ID NO: 1351533 - RNA, 20 nt, Human
ucucugcggucccaucacuu

SEQ ID NO: 1351534 - RNA, 21 nt, Human
ucugcagggucauggcgggag

SEQ ID NO: 1351535 - RNA, 21 nt, Human
ucugcggucccaucacuuccu

SEQ ID NO: 1351536 - RNA, 24 nt, Human
ucuugccauguccaagucagccug

SEQ ID NO: 1351537 - RNA, 23 nt, Human
ucuuucucuucuuccacuuccuc

SEQ ID NO: 1351538 - RNA, 24 nt, Human
ucuuucucuucuuccacuuccucu

SEQ ID NO: 1351539 - RNA, 20 nt, Human
ugaaaagcugcaccugcagg

SEQ ID NO: 1351540 - RNA, 25 nt, Human
ugaaggccucauugaaguagggggc

SEQ ID NO: 1351541 - RNA, 20 nt, Human
ugacuccccagcucagcucu

SEQ ID NO: 1351542 - RNA, 23 nt, Human
ugacuccccagcucagcucuucc

SEQ ID NO: 1351543 - RNA, 19 nt, Human
ugaggccagauacccucac

SEQ ID NO: 1351544 - RNA, 18 nt, Human
ugaucugggagccagcgg

SEQ ID NO: 1351545 - RNA, 21 nt, Human
ugcaggguggccccuggcagc

SEQ ID NO: 1351546 - RNA, 18 nt, Human
ugccaugacuccagacac

SEQ ID NO: 1351547 - RNA, 20 nt, Human
ugccaugacuccagacacac

SEQ ID NO: 1351548 - RNA, 25 nt, Human
ugccaugacuccagacacacacaca

SEQ ID NO: 1351549 - RNA, 18 nt, Human
ugcccaggcccacccagc

SEQ ID NO: 1351550 - RNA, 18 nt, Human
ugcccaggcccacccagc

SEQ ID NO: 1351551 - RNA, 18 nt, Human
ugccccgaggcccgggca

SEQ ID NO: 1351552 - RNA, 19 nt, Human
ugccugggcucagcgggga

SEQ ID NO: 1351553 - RNA, 21 nt, Human
uggaagaagcggcccaggagg

SEQ ID NO: 1351554 - RNA, 20 nt, Human
uggaagcccagaggggucug

SEQ ID NO: 1351555 - RNA, 22 nt, Human
uggacccuggccaaagcuccag

SEQ ID NO: 1351556 - RNA, 19 nt, Human
uggacccugggcccugccu

SEQ ID NO: 1351557 - RNA, 19 nt, Human
uggcaggagaaggcguuua

SEQ ID NO: 1351558 - RNA, 18 nt, Human
uggcagguaggggcaggg

SEQ ID NO: 1351559 - RNA, 21 nt, Human
uggccccuccggccccugccc

SEQ ID NO: 1351560 - RNA, 23 nt, Human
uggccccuccggccccugcccgc

SEQ ID NO: 1351561 - RNA, 22 nt, Human
uggccccuggcagcuccgccug

SEQ ID NO: 1351562 - RNA, 20 nt, Human
uggccgaguugggguucaga

SEQ ID NO: 1351563 - RNA, 21 nt, Human
uggcuuccaaagucgaacucc

SEQ ID NO: 1351564 - RNA, 22 nt, Human
ugggcaagugccugggcucagc

SEQ ID NO: 1351565 - RNA, 19 nt, Human
ugggcucagccaagggccc

SEQ ID NO: 1351566 - RNA, 23 nt, Human
uggggcaagggcaggcgcaggcg

SEQ ID NO: 1351567 - RNA, 22 nt, Human
ugggggucccaucucaucccug

SEQ ID NO: 1351568 - RNA, 18 nt, Human
uggugcugacaucaugcc

SEQ ID NO: 1351569 - RNA, 21 nt, Human
uguggccuggugaccagcacc

SEQ ID NO: 1351570 - RNA, 23 nt, Human
uguggcucccucgggcccauggg

SEQ ID NO: 1351571 - RNA, 22 nt, Human
uucacccacuuucccugccagg

SEQ ID NO: 1351572 - RNA, 19 nt, Human
uuggaagaagcggcccagg

SEQ ID NO: 1351573 - RNA, 23 nt, Human
uuuggcaggagaaggcguuuauu

SEQ ID NO: 1351574 - RNA, 27 nt, Human
uuuuuuuuuuuggcaggagaaggcguu

SEQ ID NO: 1351575 - RNA, 27 nt, Human
uuuuuuuuuuuuuuuggcaggagaagg

SEQ ID NO: 1351576 - RNA, 18 nt, Human
uuuuuuuuuuuuuuuuug

SEQ ID NO: 1351577 - RNA, 23 nt, Human
uuuuuuuuuuuuuuuuuggcagg

SEQ ID NO: 1351578 - RNA, 22 nt, Human
uuuuuuuuuuuuuuuuuuuggc

SEQ ID NO: 1351579 - RNA, 26 nt, Human
aaaagcuccaaccacguugccagucc

SEQ ID NO: 1351580 - RNA, 27 nt, Human
ccccaaaagcuccaaccacguugccag

SEQ ID NO: 1351581 - RNA, 21 nt, Human
ccguagaggcggcaggcccgc

SEQ ID NO: 1351582 - RNA, 23 nt, Human
ccuccuggccgcgacgccuugcc

SEQ ID NO: 1351583 - RNA, 19 nt, Human
ccugagcagggacuggucc

SEQ ID NO: 1351584 - RNA, 22 nt, Human
ccugccagcaaaagugacaccu

SEQ ID NO: 1351585 - RNA, 20 nt, Human
cuccuccgcuaguccgcucc

SEQ ID NO: 1351586 - RNA, 18 nt, Human
gccagcaaaagugacacc

SEQ ID NO: 1351587 - RNA, 23 nt, Human
gcuaguccgcucccgcguuccac

SEQ ID NO: 1351588 - RNA, 22 nt, Human
gggugugugugugcgggguccg

SEQ ID NO: 1351589 - RNA, 20 nt, Human
uccacagcgccccgccgcuc

SEQ ID NO: 1351590 - RNA, 23 nt, Human
ugcaguuggucggggagaggggc

SEQ ID NO: 1351591 - RNA, 20 nt, Human
ugguagagcccuucuccucc

SEQ ID NO: 1351592 - RNA, 23 nt, Human
ugguagagcccuucuccuccugg

SEQ ID NO: 1351593 - RNA, 25 nt, Human
uuaacccagccgacaaggcacgcuu

SEQ ID NO: 1351594 - RNA, 19 nt, Human
uuccccccaaaagcuccaa

SEQ ID NO: 1351595 - RNA, 24 nt, Human
aaaagaaccaacauggaugcaugg

SEQ ID NO: 1351596 - RNA, 19 nt, Human
aaaauaucacauguacccu

SEQ ID NO: 1351597 - RNA, 21 nt, Human
aaaaugaaacaagcuuagccc

SEQ ID NO: 1351598 - RNA, 21 nt, Human
aaacaggcacucacacuuuca

SEQ ID NO: 1351599 - RNA, 19 nt, Human
aaauacaaaaagcaagccc

SEQ ID NO: 1351600 - RNA, 18 nt, Human
aaaugaagcuaacaaaua

SEQ ID NO: 1351601 - RNA, 21 nt, Human
aaaugggaauaauaagaauau

SEQ ID NO: 1351602 - RNA, 19 nt, Human
aaccugcaaagguacccuc

SEQ ID NO: 1351603 - RNA, 20 nt, Human
aacugcccacauuuuugcca

SEQ ID NO: 1351604 - RNA, 19 nt, Human
aacuuccucuucuucucug

SEQ ID NO: 1351605 - RNA, 20 nt, Human
aagaacccuccuggggaaga

SEQ ID NO: 1351606 - RNA, 18 nt, Human
aagcacaggcuucucuug

SEQ ID NO: 1351607 - RNA, 20 nt, Human
aagccuuccuuacaaacacc

SEQ ID NO: 1351608 - RNA, 20 nt, Human
aaggccacaaaaaaucagaa

SEQ ID NO: 1351609 - RNA, 24 nt, Human
aaggccacaaaaaaucagaacgua

SEQ ID NO: 1351610 - RNA, 25 nt, Human
aaguaccuucuaacuacugaucuac

SEQ ID NO: 1351611 - RNA, 24 nt, Human
aagugaucugcccaccuuggccuc

SEQ ID NO: 1351612 - RNA, 24 nt, Human
aagugauucuccugccucacccuc

SEQ ID NO: 1351613 - RNA, 24 nt, Human
aagugcaguggcaugaucacagcu

SEQ ID NO: 1351614 - RNA, 24 nt, Human
aauaauaaucauaaucaugaaaau

SEQ ID NO: 1351615 - RNA, 21 nt, Human
aauagaaggauucugccugga

SEQ ID NO: 1351616 - RNA, 19 nt, Human
aauaucuacuuaaucucaa

SEQ ID NO: 1351617 - RNA, 19 nt, Human
aaugcugggauuacaggug

SEQ ID NO: 1351618 - RNA, 27 nt, Human
acaaaaagcaagcccauggaugucaac

SEQ ID NO: 1351619 - RNA, 21 nt, Human
acacuugcagguuaacagccu

SEQ ID NO: 1351620 - RNA, 18 nt, Human
acagccucaggggaagac

SEQ ID NO: 1351621 - RNA, 18 nt, Human
acagcucauugcagccuc

SEQ ID NO: 1351622 - RNA, 23 nt, Human
acaggguuucaccauguuggcca

SEQ ID NO: 1351623 - RNA, 24 nt, Human
acaggguuucaccauguuggccag

SEQ ID NO: 1351624 - RNA, 25 nt, Human
acaggguuucaccauguuggccagg

SEQ ID NO: 1351625 - RNA, 18 nt, Human
accacuguccuggccugu

SEQ ID NO: 1351626 - RNA, 28 nt, Human
accacuguccuggccuguuuccugucag

SEQ ID NO: 1351627 - RNA, 23 nt, Human
accauguuggccagguuggucuc

SEQ ID NO: 1351628 - RNA, 22 nt, Human
acccacucuuuugcccuuccca

SEQ ID NO: 1351629 - RNA, 25 nt, Human
acccaggcuggaagugcaguggcau

SEQ ID NO: 1351630 - RNA, 24 nt, Human
accuggcuaauuuuuuuguauuuu

SEQ ID NO: 1351631 - RNA, 18 nt, Human
acuacacauuguaugcau

SEQ ID NO: 1351632 - RNA, 28 nt, Human
acuaucuuauauucacacauguguuggu

SEQ ID NO: 1351633 - RNA, 25 nt, Human
acucuguugcccaggcuggaguuca

SEQ ID NO: 1351634 - RNA, 21 nt, Human
acugcaaccuuccucuccugg

SEQ ID NO: 1351635 - RNA, 22 nt, Human
acugcaaccuuccucuccuggg

SEQ ID NO: 1351636 - RNA, 26 nt, Human
acugugucacccaggcuggaagugca

SEQ ID NO: 1351637 - RNA, 20 nt, Human
agagaccuaccaccaggaua

SEQ ID NO: 1351638 - RNA, 19 nt, Human
agagagggugaagcucuga

SEQ ID NO: 1351639 - RNA, 23 nt, Human
agcacaaauacagcccagaaaca

SEQ ID NO: 1351640 - RNA, 23 nt, Human
agccccuucccaucuugucuuug

SEQ ID NO: 1351641 - RNA, 19 nt, Human
agcuggguaaugagagacc

SEQ ID NO: 1351642 - RNA, 19 nt, Human
aggaaugugguaguaaagg

SEQ ID NO: 1351643 - RNA, 24 nt, Human
aggcaaucugcccaccuuggucuc

SEQ ID NO: 1351644 - RNA, 23 nt, Human
aggcaggaguaucacuucaaccc

SEQ ID NO: 1351645 - RNA, 18 nt, Human
aggcuaaacuuuuuucuu

SEQ ID NO: 1351646 - RNA, 22 nt, Human
aggcucaggugauccuccuacc

SEQ ID NO: 1351647 - RNA, 18 nt, Human
aggcugagauagcuccca

SEQ ID NO: 1351648 - RNA, 19 nt, Human
aggcugaggcaggaguauc

SEQ ID NO: 1351649 - RNA, 24 nt, Human
agggacuacaggcaugagccacca

SEQ ID NO: 1351650 - RNA, 22 nt, Human
aggggacuugggacucacacag

SEQ ID NO: 1351651 - RNA, 19 nt, Human
aguaccuucuaacuacuga

SEQ ID NO: 1351652 - RNA, 23 nt, Human
aguagcuggaauuauagacgugu

SEQ ID NO: 1351653 - RNA, 18 nt, Human
aguagcugggauuacagg

SEQ ID NO: 1351654 - RNA, 22 nt, Human
aguaggcacaggguuucaccau

SEQ ID NO: 1351655 - RNA, 21 nt, Human
agugcaguggcaugaucacag

SEQ ID NO: 1351656 - RNA, 24 nt, Human
agugcaguggcaugaucacagcuc

SEQ ID NO: 1351657 - RNA, 24 nt, Human
aguggcaugaucucagcuuacugc

SEQ ID NO: 1351658 - RNA, 25 nt, Human
auacuuuuuuuuggaaauaggguga

SEQ ID NO: 1351659 - RNA, 23 nt, Human
aucauucaauaauaaucauaauc

SEQ ID NO: 1351660 - RNA, 20 nt, Human
aucucacucuguugcccagg

SEQ ID NO: 1351661 - RNA, 18 nt, Human
aucucacucuuuccuuag

SEQ ID NO: 1351662 - RNA, 22 nt, Human
aucuuccuauguuguccaggcu

SEQ ID NO: 1351663 - RNA, 23 nt, Human
aucuuccuauguuguccaggcug

SEQ ID NO: 1351664 - RNA, 19 nt, Human
augcaauacuuuuuuuugg

SEQ ID NO: 1351665 - RNA, 22 nt, Human
auguacccuacaaauauguaua

SEQ ID NO: 1351666 - RNA, 20 nt, Human
augucuccugccucauaagu

SEQ ID NO: 1351667 - RNA, 19 nt, Human
auguggggauaaaagaacc

SEQ ID NO: 1351668 - RNA, 20 nt, Human
auucagggcagggguccucu

SEQ ID NO: 1351669 - RNA, 24 nt, Human
caaauugcugggaugacuggcaug

SEQ ID NO: 1351670 - RNA, 18 nt, Human
caacuccauagaaauuca

SEQ ID NO: 1351671 - RNA, 21 nt, Human
caacuccauagaaauucagcu

SEQ ID NO: 1351672 - RNA, 22 nt, Human
caagggauccuccugccucagc

SEQ ID NO: 1351673 - RNA, 20 nt, Human
caagugauucuccugccuca

SEQ ID NO: 1351674 - RNA, 20 nt, Human
caauggcaguuaaugcuuau

SEQ ID NO: 1351675 - RNA, 19 nt, Human
cacacaaguguuccagaag

SEQ ID NO: 1351676 - RNA, 24 nt, Human
cacacaauacacccauguaauaaa

SEQ ID NO: 1351677 - RNA, 20 nt, Human
cacaguuugcacuuugaaau

SEQ ID NO: 1351678 - RNA, 24 nt, Human
caccacaccuggcuaauuuuugua

SEQ ID NO: 1351679 - RNA, 21 nt, Human
caccauguuggccagguuggu

SEQ ID NO: 1351680 - RNA, 22 nt, Human
caccauguuggccagguugguc

SEQ ID NO: 1351681 - RNA, 24 nt, Human
caccauguuggccagguuggucuc

SEQ ID NO: 1351682 - RNA, 23 nt, Human
cacccacucuuuugcccuuccca

SEQ ID NO: 1351683 - RNA, 24 nt, Human
cacccuguaaaagccuuccuuaca

SEQ ID NO: 1351684 - RNA, 22 nt, Human
caccuucucaagugcaggauuc

SEQ ID NO: 1351685 - RNA, 20 nt, Human
caccuuucauucagucucag

SEQ ID NO: 1351686 - RNA, 22 nt, Human
cacucuguugcccaggcuggag

SEQ ID NO: 1351687 - RNA, 21 nt, Human
cacuuaaaaaaugcacugaga

SEQ ID NO: 1351688 - RNA, 20 nt, Human
cacuuacccugauacagaaa

SEQ ID NO: 1351689 - RNA, 19 nt, Human
cacuuugaaauggacccag

SEQ ID NO: 1351690 - RNA, 23 nt, Human
cagaagauugccuacagaggcaa

SEQ ID NO: 1351691 - RNA, 21 nt, Human
cagaaguugguuaauggacac

SEQ ID NO: 1351692 - RNA, 24 nt, Human
cagaaucucacucuguugcccagg

SEQ ID NO: 1351693 - RNA, 22 nt, Human
cagcaaacucaagauacacuuu

SEQ ID NO: 1351694 - RNA, 19 nt, Human
cagcaucacacaauacacc

SEQ ID NO: 1351695 - RNA, 21 nt, Human
cagcaucacacaauacaccca

SEQ ID NO: 1351696 - RNA, 18 nt, Human
cagccaccacgcacagcc

SEQ ID NO: 1351697 - RNA, 19 nt, Human
cagccuccugaguagcugg

SEQ ID NO: 1351698 - RNA, 24 nt, Human
cagcuacucaggaggcugaggcag

SEQ ID NO: 1351699 - RNA, 23 nt, Human
cagcucauugcagccucuacauc

SEQ ID NO: 1351700 - RNA, 24 nt, Human
caggaggcugaggcaggaguauca

SEQ ID NO: 1351701 - RNA, 18 nt, Human
cagggccugguccaugga

SEQ ID NO: 1351702 - RNA, 24 nt, Human
cagggucucacugugucacccagg

SEQ ID NO: 1351703 - RNA, 24 nt, Human
caggguuucaccauguuggccagg

SEQ ID NO: 1351704 - RNA, 21 nt, Human
cauaacaagcugcaaacaaga

SEQ ID NO: 1351705 - RNA, 22 nt, Human
cauaaugcugggauuacaggug

SEQ ID NO: 1351706 - RNA, 24 nt, Human
caugcaccacuguccuggccuguu

SEQ ID NO: 1351707 - RNA, 20 nt, Human
caugggcagggccuggucca

SEQ ID NO: 1351708 - RNA, 21 nt, Human
cauuuuaaacuaacacugagu

SEQ ID NO: 1351709 - RNA, 23 nt, Human
cauuuuagaccacugagcacuuu

SEQ ID NO: 1351710 - RNA, 23 nt, Human
ccaaauacaaaaagcaagcccau

SEQ ID NO: 1351711 - RNA, 18 nt, Human
ccacaaagccauccaagc

SEQ ID NO: 1351712 - RNA, 22 nt, Human
ccacaaggucaaaguugagugu

SEQ ID NO: 1351713 - RNA, 21 nt, Human
ccagagaggcaccuucucaag

SEQ ID NO: 1351714 - RNA, 19 nt, Human
ccagaguagcugggauuac

SEQ ID NO: 1351715 - RNA, 22 nt, Human
ccagaguagcugggauuacagg

SEQ ID NO: 1351716 - RNA, 22 nt, Human
ccagaguagcugggauuacagg

SEQ ID NO: 1351717 - RNA, 24 nt, Human
ccagaguagcugggauuacaggug

SEQ ID NO: 1351718 - RNA, 23 nt, Human
ccagccaccacgcacagccacaa

SEQ ID NO: 1351719 - RNA, 20 nt, Human
ccaggguacagucaguggag

SEQ ID NO: 1351720 - RNA, 21 nt, Human
ccauaaugcugggauuacagg

SEQ ID NO: 1351721 - RNA, 24 nt, Human
cccaaguagcagggacuacaggca

SEQ ID NO: 1351722 - RNA, 19 nt, Human
cccacauuugcauuauguc

SEQ ID NO: 1351723 - RNA, 22 nt, Human
cccacauuugcauuaugucuaa

SEQ ID NO: 1351724 - RNA, 20 nt, Human
cccagccaaucugauugcaa

SEQ ID NO: 1351725 - RNA, 21 nt, Human
cccaucauuuguuugcuguug

SEQ ID NO: 1351726 - RNA, 21 nt, Human
cccaugguccaccuuuuuauu

SEQ ID NO: 1351727 - RNA, 24 nt, Human
ccccccguucagccagcacugagc

SEQ ID NO: 1351728 - RNA, 21 nt, Human
cccuaggccccaugcaagcuc

SEQ ID NO: 1351729 - RNA, 23 nt, Human
cccuccgaaaucuaaaaugaaag

SEQ ID NO: 1351730 - RNA, 23 nt, Human
cccugagugcccagcaugugccc

SEQ ID NO: 1351731 - RNA, 18 nt, Human
cccugauacagaaagaag

SEQ ID NO: 1351732 - RNA, 25 nt, Human
cccuucagaaagcagauccuugggc

SEQ ID NO: 1351733 - RNA, 20 nt, Human
cccuuuucauccacccacuc

SEQ ID NO: 1351734 - RNA, 23 nt, Human
ccuaccucagccucccaaguagc

SEQ ID NO: 1351735 - RNA, 22 nt, Human
ccuauguuguccaggcuggucu

SEQ ID NO: 1351736 - RNA, 22 nt, Human
ccucacuugagaagcuuugcaa

SEQ ID NO: 1351737 - RNA, 26 nt, Human
ccuccaaauacaaaaagcaagcccau

SEQ ID NO: 1351738 - RNA, 19 nt, Human
ccugaguagcuggaauuau

SEQ ID NO: 1351739 - RNA, 19 nt, Human
ccugauccaugaaucucug

SEQ ID NO: 1351740 - RNA, 23 nt, Human
ccuggguucaagugauucuccuc

SEQ ID NO: 1351741 - RNA, 23 nt, Human
ccuggguucaagugauucuccug

SEQ ID NO: 1351742 - RNA, 21 nt, Human
ccuggugcucuccuacccccc

SEQ ID NO: 1351743 - RNA, 18 nt, Human
ccuguaaaagccuuccuu

SEQ ID NO: 1351744 - RNA, 21 nt, Human
ccuguaaucccagcuacucag

SEQ ID NO: 1351745 - RNA, 20 nt, Human
ccuucugcuuuuagucauuu

SEQ ID NO: 1351746 - RNA, 19 nt, Human
cgaaaagaaugacauugag

SEQ ID NO: 1351747 - RNA, 23 nt, Human
cuaacaguuagaaguggagaaaa

SEQ ID NO: 1351748 - RNA, 24 nt, Human
cucaagugaucugcccaccuuggc

SEQ ID NO: 1351749 - RNA, 24 nt, Human
cucacucuguugcccaggcuggag

SEQ ID NO: 1351750 - RNA, 24 nt, Human
cucaggugauccuccuaccucagc

SEQ ID NO: 1351751 - RNA, 23 nt, Human
cucccauggccaggguuccugca

SEQ ID NO: 1351752 - RNA, 20 nt, Human
cuccuggguucaagugauuc

SEQ ID NO: 1351753 - RNA, 21 nt, Human
cuccuggguucaagugauucu

SEQ ID NO: 1351754 - RNA, 18 nt, Human
cugagcacuuuugccucu

SEQ ID NO: 1351755 - RNA, 23 nt, Human
cugcaaccuuccucuccuggguu

SEQ ID NO: 1351756 - RNA, 23 nt, Human
cugccucagccuccugaguagcu

SEQ ID NO: 1351757 - RNA, 19 nt, Human
cuggaagugcaguggcaug

SEQ ID NO: 1351758 - RNA, 21 nt, Human
cuggacaaguucccuuuuaug

SEQ ID NO: 1351759 - RNA, 24 nt, Human
cuggaguucaguggcaugaucuca

SEQ ID NO: 1351760 - RNA, 24 nt, Human
cuuacaaacaccuccaguagaucc

SEQ ID NO: 1351761 - RNA, 23 nt, Human
cuuagcucaaggccacaaaaaau

SEQ ID NO: 1351762 - RNA, 22 nt, Human
cuucccaaaagaaucagacacu

SEQ ID NO: 1351763 - RNA, 19 nt, Human
cuuuugccucuggacuaca

SEQ ID NO: 1351764 - RNA, 24 nt, Human
gaaaauauauguaaagaccuuuga

SEQ ID NO: 1351765 - RNA, 18 nt, Human
gaacguaaauuccagccc

SEQ ID NO: 1351766 - RNA, 22 nt, Human
gaagaggccaugcaggcucagg

SEQ ID NO: 1351767 - RNA, 23 nt, Human
gaagccccuucccaucuugucuu

SEQ ID NO: 1351768 - RNA, 18 nt, Human
gaaguagcaacuccauag

SEQ ID NO: 1351769 - RNA, 18 nt, Human
gaagugcaguggcaugau

SEQ ID NO: 1351770 - RNA, 23 nt, Human
gaaguggagaacaaagauaagug

SEQ ID NO: 1351771 - RNA, 24 nt, Human
gaccuaccaccaggauaguucaaa

SEQ ID NO: 1351772 - RNA, 21 nt, Human
gacuacaggcaugagccacca

SEQ ID NO: 1351773 - RNA, 20 nt, Human
gagacagaaucucacucugu

SEQ ID NO: 1351774 - RNA, 19 nt, Human
gagagaccuaccaccagga

SEQ ID NO: 1351775 - RNA, 19 nt, Human
gagagggugaagcucugag

SEQ ID NO: 1351776 - RNA, 22 nt, Human
gagagugaaaguuaccugaggu

SEQ ID NO: 1351777 - RNA, 20 nt, Human
gagcacuuuugccucuggaa

SEQ ID NO: 1351778 - RNA, 24 nt, Human
gagcucaggcaaucugcccaccuu

SEQ ID NO: 1351779 - RNA, 26 nt, Human
gaguagcugggauuacaggugcacac

SEQ ID NO: 1351780 - RNA, 24 nt, Human
gagugugguggcacaugccuguaa

SEQ ID NO: 1351781 - RNA, 19 nt, Human
gaugggguuuugauauguu

SEQ ID NO: 1351782 - RNA, 18 nt, Human
gauuacaggugccagcca

SEQ ID NO: 1351783 - RNA, 23 nt, Human
gcagaugcuacugcaguuuguau

SEQ ID NO: 1351784 - RNA, 19 nt, Human
gcaggauucagggcagggg

SEQ ID NO: 1351785 - RNA, 24 nt, Human
gcccaggcuggaguucaguggcau

SEQ ID NO: 1351786 - RNA, 20 nt, Human
gccucagccuccugaguagc

SEQ ID NO: 1351787 - RNA, 19 nt, Human
gcucuaauaaugcaguuga

SEQ ID NO: 1351788 - RNA, 21 nt, Human
ggaaagauguggaauguucuc

SEQ ID NO: 1351789 - RNA, 20 nt, Human
ggacagguggacaaaugcuc

SEQ ID NO: 1351790 - RNA, 19 nt, Human
ggacuacaggcaugagcca

SEQ ID NO: 1351791 - RNA, 24 nt, Human
ggacucaagugaucugcccaccuu

SEQ ID NO: 1351792 - RNA, 22 nt, Human
ggauccuccugccucagccucc

SEQ ID NO: 1351793 - RNA, 22 nt, Human
ggaucuuccuauguuguccagg

SEQ ID NO: 1351794 - RNA, 18 nt, Human
ggcagggccugguccaug

SEQ ID NO: 1351795 - RNA, 18 nt, Human
ggcagggguccucuugcc

SEQ ID NO: 1351796 - RNA, 21 nt, Human
ggcaugaucacagcucauugc

SEQ ID NO: 1351797 - RNA, 23 nt, Human
ggcucaggugauccuccuaccuc

SEQ ID NO: 1351798 - RNA, 20 nt, Human
ggcuggaagugcaguggcau

SEQ ID NO: 1351799 - RNA, 23 nt, Human
gggacuacaggcaugagccacca

SEQ ID NO: 1351800 - RNA, 24 nt, Human
gggauccuccugccucagccuccu

SEQ ID NO: 1351801 - RNA, 23 nt, Human
gggguuuugauauguugcucagg

SEQ ID NO: 1351802 - RNA, 22 nt, Human
ggguuucaccauguuggccagg

SEQ ID NO: 1351803 - RNA, 19 nt, Human
gguaagaacccuccugggg

SEQ ID NO: 1351804 - RNA, 24 nt, Human
gguggcacaugccuguaaucccag

SEQ ID NO: 1351805 - RNA, 18 nt, Human
guagcugggauuacaggu

SEQ ID NO: 1351806 - RNA, 19 nt, Human
guauuuuuuguagagaugg

SEQ ID NO: 1351807 - RNA, 24 nt, Human
gugauccuccuaccucagccuccc

SEQ ID NO: 1351808 - RNA, 19 nt, Human
gugauucuccugccucacc

SEQ ID NO: 1351809 - RNA, 22 nt, Human
gugccuccacacccagcuuaca

SEQ ID NO: 1351810 - RNA, 20 nt, Human
guggcaugaggagcuguggg

SEQ ID NO: 1351811 - RNA, 20 nt, Human
guggccugcugaguauuagc

SEQ ID NO: 1351812 - RNA, 19 nt, Human
guguccuaauacauaugua

SEQ ID NO: 1351813 - RNA, 23 nt, Human
guucaguggcaugaucucagcuu

SEQ ID NO: 1351814 - RNA, 19 nt, Human
guuguuccuggugcucucc

SEQ ID NO: 1351815 - RNA, 22 nt, Human
uaaaagaaccaacauggaugca

SEQ ID NO: 1351816 - RNA, 26 nt, Human
uaaaagccuuccuuacaaacaccucc

SEQ ID NO: 1351817 - RNA, 18 nt, Human
uaaacaagguacagagaa

SEQ ID NO: 1351818 - RNA, 24 nt, Human
uaaaccugcaaagguacccuccga

SEQ ID NO: 1351819 - RNA, 25 nt, Human
uaaacuccugaacucaagggauccu

SEQ ID NO: 1351820 - RNA, 19 nt, Human
uaaagggagagcugaucau

SEQ ID NO: 1351821 - RNA, 25 nt, Human
uaaauacuuucacuuaaaaaaugca

SEQ ID NO: 1351822 - RNA, 22 nt, Human
uaacaauaacuuauauauuuca

SEQ ID NO: 1351823 - RNA, 21 nt, Human
uaauuaucaaguaaaaucuca

SEQ ID NO: 1351824 - RNA, 22 nt, Human
uaauuuuuguauuuuuuguaga

SEQ ID NO: 1351825 - RNA, 24 nt, Human
uaauuuuuguauuuuuuguagaga

SEQ ID NO: 1351826 - RNA, 21 nt, Human
uacaaaaagcaagcccaugga

SEQ ID NO: 1351827 - RNA, 22 nt, Human
uacaaacaccuccaguagaucc

SEQ ID NO: 1351828 - RNA, 23 nt, Human
uacagcccagaaacacuugcagg

SEQ ID NO: 1351829 - RNA, 22 nt, Human
uacaggcaugagccaccacacc

SEQ ID NO: 1351830 - RNA, 21 nt, Human
uaccccaaaucucagcaucac

SEQ ID NO: 1351831 - RNA, 23 nt, Human
uaccccaaaucucagcaucacac

SEQ ID NO: 1351832 - RNA, 23 nt, Human
uaccucagccucccaaguagcag

SEQ ID NO: 1351833 - RNA, 23 nt, Human
uacugcaaccuuccucuccuggg

SEQ ID NO: 1351834 - RNA, 20 nt, Human
uagaauucucugauuucuug

SEQ ID NO: 1351835 - RNA, 24 nt, Human
uagacgugugccuccacacccagc

SEQ ID NO: 1351836 - RNA, 20 nt, Human
uagauccuccaaccacuuuc

SEQ ID NO: 1351837 - RNA, 22 nt, Human
uagauccuccaaccacuuucag

SEQ ID NO: 1351838 - RNA, 26 nt, Human
uagcucccauggccaggguuccuucc

SEQ ID NO: 1351839 - RNA, 18 nt, Human
uagcugcucucugccucc

SEQ ID NO: 1351840 - RNA, 22 nt, Human
uaggcacaggguuucaccaugu

SEQ ID NO: 1351841 - RNA, 24 nt, Human
uaguaggcacaggguuucaccaug

SEQ ID NO: 1351842 - RNA, 21 nt, Human
uauauaauauauaacuauaua

SEQ ID NO: 1351843 - RNA, 19 nt, Human
uaucaugucuccugccuca

SEQ ID NO: 1351844 - RNA, 24 nt, Human
uaucccucaucuacaaaaugggaa

SEQ ID NO: 1351845 - RNA, 24 nt, Human
uauguucccugcaccacuggugcc

SEQ ID NO: 1351846 - RNA, 24 nt, Human
uauguugcucaggcuugucucaaa

SEQ ID NO: 1351847 - RNA, 24 nt, Human
uauguuguccaggcuggucuuaaa

SEQ ID NO: 1351848 - RNA, 18 nt, Human
uauuaggaaugccuuguu

SEQ ID NO: 1351849 - RNA, 24 nt, Human
uauuuggagacagaaucucacucu

SEQ ID NO: 1351850 - RNA, 25 nt, Human
uauuuggagacagaaucucacucug

SEQ ID NO: 1351851 - RNA, 25 nt, Human
uauuuggagacagaaucucacucug

SEQ ID NO: 1351852 - RNA, 23 nt, Human
ucaaaacccauuugcaaauagau

SEQ ID NO: 1351853 - RNA, 26 nt, Human
ucaaaacccauuugcaaauagaugua

SEQ ID NO: 1351854 - RNA, 23 nt, Human
ucaaaauacauaugaguacaauc

SEQ ID NO: 1351855 - RNA, 19 nt, Human
ucaagugauucuccugccu

SEQ ID NO: 1351856 - RNA, 21 nt, Human
ucaccauguuggccagguugg

SEQ ID NO: 1351857 - RNA, 23 nt, Human
ucaccccuucagaaagcagaucc

SEQ ID NO: 1351858 - RNA, 24 nt, Human
ucacucuguugcccaggcuggagu

SEQ ID NO: 1351859 - RNA, 27 nt, Human
ucagaaagcagauccuugggcaccauu

SEQ ID NO: 1351860 - RNA, 22 nt, Human
ucagccuccugaguagcuggaa

SEQ ID NO: 1351861 - RNA, 23 nt, Human
ucagcucaccuuucauucagucu

SEQ ID NO: 1351862 - RNA, 22 nt, Human
ucagucucagacaccgugagaa

SEQ ID NO: 1351863 - RNA, 19 nt, Human
ucauauccagcuucccaaa

SEQ ID NO: 1351864 - RNA, 19 nt, Human
uccacaaagccauccaagc

SEQ ID NO: 1351865 - RNA, 21 nt, Human
uccacaauucucaccccuuca

SEQ ID NO: 1351866 - RNA, 19 nt, Human
uccacuguacaaauaaaau

SEQ ID NO: 1351867 - RNA, 24 nt, Human
uccagaguagcugggauuacaggu

SEQ ID NO: 1351868 - RNA, 25 nt, Human
uccaguagauccuccaaccacuuuc

SEQ ID NO: 1351869 - RNA, 24 nt, Human
ucccaaauugcugggaugacuggc

SEQ ID NO: 1351870 - RNA, 24 nt, Human
ucccaaguagcagggacuacaggc

SEQ ID NO: 1351871 - RNA, 18 nt, Human
ucccagccaaucugauug

SEQ ID NO: 1351872 - RNA, 23 nt, Human
ucccauaaugcugggauuacagg

SEQ ID NO: 1351873 - RNA, 25 nt, Human
ucccugcaccacuggugccuauuuc

SEQ ID NO: 1351874 - RNA, 27 nt, Human
uccuccuaccucagccucccaaguagc

SEQ ID NO: 1351875 - RNA, 26 nt, Human
uccuccugccucagccuccugaguag

SEQ ID NO: 1351876 - RNA, 19 nt, Human
uccuggguucaagugauuc

SEQ ID NO: 1351877 - RNA, 21 nt, Human
uccuggguucaagugauucuc

SEQ ID NO: 1351878 - RNA, 24 nt, Human
uccuggguucaagugauucuccug

SEQ ID NO: 1351879 - RNA, 19 nt, Human
uccuugaagaagcuucauu

SEQ ID NO: 1351880 - RNA, 23 nt, Human
ucucaaacuccugagcucaggca

SEQ ID NO: 1351881 - RNA, 24 nt, Human
ucucaccccuucagaaagcagauc

SEQ ID NO: 1351882 - RNA, 23 nt, Human
ucucacucuguugcccaggcugg

SEQ ID NO: 1351883 - RNA, 24 nt, Human
ucucacucuguugcccaggcugga

SEQ ID NO: 1351884 - RNA, 26 nt, Human
ucucacucuguugcccaggcuggagu

SEQ ID NO: 1351885 - RNA, 24 nt, Human
ucucacugugucacccaggcugga

SEQ ID NO: 1351886 - RNA, 22 nt, Human
ucuccaggcucaggugauccuc

SEQ ID NO: 1351887 - RNA, 25 nt, Human
ucuccaggcucaggugauccuccua

SEQ ID NO: 1351888 - RNA, 24 nt, Human
ucuccuggguucaagugauucucc

SEQ ID NO: 1351889 - RNA, 18 nt, Human
ucucugauuucuuggugc

SEQ ID NO: 1351890 - RNA, 19 nt, Human
ucucuugugcugccagcaa

SEQ ID NO: 1351891 - RNA, 21 nt, Human
ucugcagucccuacucuaagc

SEQ ID NO: 1351892 - RNA, 21 nt, Human
ucugcccaccuuggucuccca

SEQ ID NO: 1351893 - RNA, 19 nt, Human
ucugugaagaccuguaccc

SEQ ID NO: 1351894 - RNA, 18 nt, Human
ucuguugcccaggcugga

SEQ ID NO: 1351895 - RNA, 19 nt, Human
ucuuccuauguuguccagg

SEQ ID NO: 1351896 - RNA, 23 nt, Human
ucuuccuauguuguccaggcugg

SEQ ID NO: 1351897 - RNA, 24 nt, Human
ucuuccuauguuguccaggcuggu

SEQ ID NO: 1351898 - RNA, 23 nt, Human
ucuucuucucugagauuucuaga

SEQ ID NO: 1351899 - RNA, 20 nt, Human
ugaaauggacccagggaaga

SEQ ID NO: 1351900 - RNA, 24 nt, Human
ugaacucaagggauccuccugccu

SEQ ID NO: 1351901 - RNA, 20 nt, Human
ugaagaccuguacccucagu

SEQ ID NO: 1351902 - RNA, 23 nt, Human
ugaagauuauagcaauauuuuug

SEQ ID NO: 1351903 - RNA, 19 nt, Human
ugacuucauauccagcuuc

SEQ ID NO: 1351904 - RNA, 23 nt, Human
ugagagugaaaguuaccugaggu

SEQ ID NO: 1351905 - RNA, 19 nt, Human
ugagaucaaccuuccacca

SEQ ID NO: 1351906 - RNA, 24 nt, Human
ugagcacaaauacagcccagaaac

SEQ ID NO: 1351907 - RNA, 24 nt, Human
ugagccagcaggaaggaucucaca

SEQ ID NO: 1351908 - RNA, 24 nt, Human
ugaggcaggaguaucacuucaacc

SEQ ID NO: 1351909 - RNA, 25 nt, Human
ugaggcaggaguaucacuucaaccc

SEQ ID NO: 1351910 - RNA, 18 nt, Human
ugaggucagacacugugc

SEQ ID NO: 1351911 - RNA, 19 nt, Human
ugagugggccaggguacag

SEQ ID NO: 1351912 - RNA, 24 nt, Human
ugaucugcccaccuuggccuccca

SEQ ID NO: 1351913 - RNA, 21 nt, Human
ugauuugaucacuacacauug

SEQ ID NO: 1351914 - RNA, 19 nt, Human
ugcaaaaagagauuggaaa

SEQ ID NO: 1351915 - RNA, 21 nt, Human
ugcauagacaaaaugaaacaa

SEQ ID NO: 1351916 - RNA, 21 nt, Human
ugcauguaucaaaauaucaca

SEQ ID NO: 1351917 - RNA, 18 nt, Human
ugccagcaguucucuucc

SEQ ID NO: 1351918 - RNA, 19 nt, Human
ugccauucaauuucugcag

SEQ ID NO: 1351919 - RNA, 19 nt, Human
ugccauucaauuucugcag

SEQ ID NO: 1351920 - RNA, 21 nt, Human
ugcccaggcuggaguucagug

SEQ ID NO: 1351921 - RNA, 24 nt, Human
ugcccaggcuggaguucaguggca

SEQ ID NO: 1351922 - RNA, 24 nt, Human
ugccucagccuccugaguagcugg

SEQ ID NO: 1351923 - RNA, 24 nt, Human
ugccucauaaguaccacuggacaa

SEQ ID NO: 1351924 - RNA, 19 nt, Human
ugccugagcacaaauacag

SEQ ID NO: 1351925 - RNA, 28 nt, Human
ugccugagcacaaauacagcccagaaac

SEQ ID NO: 1351926 - RNA, 18 nt, Human
ugccuggauuugcaugug

SEQ ID NO: 1351927 - RNA, 24 nt, Human
ugccuguaaucccagcuacucagg

SEQ ID NO: 1351928 - RNA, 21 nt, Human
ugcucuccuaccccccguuca

SEQ ID NO: 1351929 - RNA, 20 nt, Human
ugcugagggaaacagggugg

SEQ ID NO: 1351930 - RNA, 18 nt, Human
ugcugggaugacuggcau

SEQ ID NO: 1351931 - RNA, 20 nt, Human
ugcugggauuacaggugcca

SEQ ID NO: 1351932 - RNA, 23 nt, Human
ugcugugagauauccacagaacu

SEQ ID NO: 1351933 - RNA, 21 nt, Human
uggaaggaacagaaaaauuuc

SEQ ID NO: 1351934 - RNA, 24 nt, Human
uggaauuauagacgugugccucca

SEQ ID NO: 1351935 - RNA, 24 nt, Human
uggacacaaaaauacaguuagaug

SEQ ID NO: 1351936 - RNA, 18 nt, Human
uggacucaagugaucugc

SEQ ID NO: 1351937 - RNA, 22 nt, Human
uggacucaagugaucugcccac

SEQ ID NO: 1351938 - RNA, 19 nt, Human
uggaguucaguggcaugau

SEQ ID NO: 1351939 - RNA, 19 nt, Human
uggaguucaguggcaugau

SEQ ID NO: 1351940 - RNA, 21 nt, Human
uggcacaugccuguaauccca

SEQ ID NO: 1351941 - RNA, 24 nt, Human
uggcaugaucucagcuuacugcaa

SEQ ID NO: 1351942 - RNA, 24 nt, Human
uggccagguuggucucaaacuccu

SEQ ID NO: 1351943 - RNA, 19 nt, Human
ugggacagggucucacugu

SEQ ID NO: 1351944 - RNA, 21 nt, Human
ugggagagcauuaggcugaga

SEQ ID NO: 1351945 - RNA, 18 nt, Human
ugggaucuuccuauguug

SEQ ID NO: 1351946 - RNA, 24 nt, Human
ugggaucuuccuauguuguccagg

SEQ ID NO: 1351947 - RNA, 21 nt, Human
ugggauuacaggugcacacca

SEQ ID NO: 1351948 - RNA, 19 nt, Human
ugggauuacaggugcacca

SEQ ID NO: 1351949 - RNA, 22 nt, Human
ugggauuacaggugccagccac

SEQ ID NO: 1351950 - RNA, 24 nt, Human
ugggauuacaggugccagccacca

SEQ ID NO: 1351951 - RNA, 21 nt, Human
uggggauaaaagaaccaacau

SEQ ID NO: 1351952 - RNA, 24 nt, Human
ugggguuuugauauguugcucagg

SEQ ID NO: 1351953 - RNA, 23 nt, Human
uggguucaagugauucuccugcc

SEQ ID NO: 1351954 - RNA, 24 nt, Human
uggguucaagugauucuccugccu

SEQ ID NO: 1351955 - RNA, 19 nt, Human
ugguaagaacccuccuggg

SEQ ID NO: 1351956 - RNA, 24 nt, Human
ugguggcacaugccuguaauccca

SEQ ID NO: 1351957 - RNA, 23 nt, Human
ugguguccuaauacauauguaug

SEQ ID NO: 1351958 - RNA, 25 nt, Human
uguaaaagccuuccuuacaaacacc

SEQ ID NO: 1351959 - RNA, 18 nt, Human
uguaauaaaccugcaaag

SEQ ID NO: 1351960 - RNA, 24 nt, Human
uguagagaugggguuuugauaugu

SEQ ID NO: 1351961 - RNA, 20 nt, Human
uguauucauaacaagcugca

SEQ ID NO: 1351962 - RNA, 24 nt, Human
uguccaggcuggucuuaaacuccu

SEQ ID NO: 1351963 - RNA, 23 nt, Human
ugucucaaacucuuggacucaac

SEQ ID NO: 1351964 - RNA, 25 nt, Human
ugugucacccaggcuggaagugcag

SEQ ID NO: 1351965 - RNA, 24 nt, Human
uguguguuguuccuggugcucucc

SEQ ID NO: 1351966 - RNA, 25 nt, Human
uguuaugacaccuccaaauacaaaa

SEQ ID NO: 1351967 - RNA, 23 nt, Human
uuaaaguagcuucaaaacccauu

SEQ ID NO: 1351968 - RNA, 24 nt, Human
uuacugcaaccuuccucuccuggg

SEQ ID NO: 1351969 - RNA, 18 nt, Human
uuagcccacccacaggug

SEQ ID NO: 1351970 - RNA, 22 nt, Human
uuaggcugagauagcucccaug

SEQ ID NO: 1351971 - RNA, 24 nt, Human
uuaguaggcacaggguuucaccau

SEQ ID NO: 1351972 - RNA, 21 nt, Human
uucaagugauucuccugccuc

SEQ ID NO: 1351973 - RNA, 23 nt, Human
uucaagugauucuccugccucac

SEQ ID NO: 1351974 - RNA, 18 nt, Human
uucaaguuaguuuacccu

SEQ ID NO: 1351975 - RNA, 24 nt, Human
uucacccuguaaaagccuuccuua

SEQ ID NO: 1351976 - RNA, 27 nt, Human
uucauucauaccccaaaucucagcauc

SEQ ID NO: 1351977 - RNA, 24 nt, Human
uuccuugggucccuuuuccuuagc

SEQ ID NO: 1351978 - RNA, 23 nt, Human
uucgccaggucccugagugccca

SEQ ID NO: 1351979 - RNA, 19 nt, Human
uugcagccucuacaucucc

SEQ ID NO: 1351980 - RNA, 21 nt, Human
uugcugggaugacuggcaugc

SEQ ID NO: 1351981 - RNA, 22 nt, Human
uuguagagaugggguuuugaua

SEQ ID NO: 1351982 - RNA, 24 nt, Human
uuguagagaugggguuuugauaug

SEQ ID NO: 1351983 - RNA, 19 nt, Human
uuucaccauguuggccagg

SEQ ID NO: 1351984 - RNA, 20 nt, Human
uuucaccauguuggccaggu

SEQ ID NO: 1351985 - RNA, 24 nt, Human
uuuguagagaugggguuuugauau

SEQ ID NO: 1351986 - RNA, 18 nt, Human
uuuucacauugcuaaguu

SEQ ID NO: 1351987 - RNA, 19 nt, Human
uuuugauauguugcucagg

SEQ ID NO: 1351988 - RNA, 24 nt, Human
uuuuuaguaggcacaggguuucac

SEQ ID NO: 1351989 - RNA, 20 nt, Human
uuuuuguauuuuuuguagag

SEQ ID NO: 1351990 - RNA, 23 nt, Human
uuuuuguauuuuuuguagagaug

SEQ ID NO: 1351991 - RNA, 22 nt, Human
uuuuuuguagagaugggguuuu

SEQ ID NO: 1351992 - RNA, 19 nt, Human
aaagguacaugccaaaucu

SEQ ID NO: 1351993 - RNA, 23 nt, Human
aagauuucuugaaguaagccacu

SEQ ID NO: 1351994 - RNA, 18 nt, Human
aaugacaucuuggggacc

SEQ ID NO: 1351995 - RNA, 21 nt, Human
aaugagguuaaaaaugggugu

SEQ ID NO: 1351996 - RNA, 23 nt, Human
acagggcuucuaaaagggcagga

SEQ ID NO: 1351997 - RNA, 24 nt, Human
agaaauagcccuuuggcccacagg

SEQ ID NO: 1351998 - RNA, 21 nt, Human
agauguugaaagguacaugcc

SEQ ID NO: 1351999 - RNA, 18 nt, Human
aggauauacuguuugaaa

SEQ ID NO: 1352000 - RNA, 18 nt, Human
augaaagaggagcaaaua

SEQ ID NO: 1352001 - RNA, 22 nt, Human
augccucuuuaagaaauagccc

SEQ ID NO: 1352002 - RNA, 20 nt, Human
auuucuugaaguaagccacu

SEQ ID NO: 1352003 - RNA, 19 nt, Human
cacauaguucaaaaucagg

SEQ ID NO: 1352004 - RNA, 21 nt, Human
ccccgccgcgcugcagucaga

SEQ ID NO: 1352005 - RNA, 22 nt, Human
ccccgccgcgcugcagucagaa

SEQ ID NO: 1352006 - RNA, 21 nt, Human
cggagauguaacagggcuucu

SEQ ID NO: 1352007 - RNA, 22 nt, Human
gaaaaaaacauuagauaaauaa

SEQ ID NO: 1352008 - RNA, 25 nt, Human
gaaaauaauaugaaagaggagccgg

SEQ ID NO: 1352009 - RNA, 20 nt, Human
guaaaccaugcuauuaaccc

SEQ ID NO: 1352010 - RNA, 23 nt, Human
uaaaaguggcagguuucuuaaaa

SEQ ID NO: 1352011 - RNA, 19 nt, Human
uaagaugucaguuuugaag

SEQ ID NO: 1352012 - RNA, 22 nt, Human
uacuguuugaaaauggaaaguu

SEQ ID NO: 1352013 - RNA, 18 nt, Human
uauacuguuugaaaaugg

SEQ ID NO: 1352014 - RNA, 25 nt, Human
uccaaaagguguuuaauuuuaugga

SEQ ID NO: 1352015 - RNA, 18 nt, Human
ugaagccauuuuuuuuua

SEQ ID NO: 1352016 - RNA, 19 nt, Human
ugaaguaagccacuugaac

SEQ ID NO: 1352017 - RNA, 20 nt, Human
ugaaugagguuaaaaauggg

SEQ ID NO: 1352018 - RNA, 19 nt, Human
ugcaaacuuuaccaugcua

SEQ ID NO: 1352019 - RNA, 19 nt, Human
ugcuauuaacccaacaucu

SEQ ID NO: 1352020 - RNA, 21 nt, Human
uggcuucucaggccugggggg

SEQ ID NO: 1352021 - RNA, 19 nt, Human
uguacugucaaguauaaga

SEQ ID NO: 1352022 - RNA, 20 nt, Human
uucuuguugaacagcagcuu

SEQ ID NO: 1352023 - RNA, 19 nt, Human
uugguauuuuggcuaaggu

SEQ ID NO: 1352024 - RNA, 23 nt, Human
uuucuuguugaacagcagcuuca

SEQ ID NO: 1352025 - RNA, 23 nt, Human
aacguggcccggcagguucccca

SEQ ID NO: 1352026 - RNA, 20 nt, Human
aagaagaacaagaacaacaa

SEQ ID NO: 1352027 - RNA, 23 nt, Human
aagaagaacaagaacaacaacug

SEQ ID NO: 1352028 - RNA, 22 nt, Human
aagggucacugccugaggagcc

SEQ ID NO: 1352029 - RNA, 25 nt, Human
accucgccccucccccaggccccag

SEQ ID NO: 1352030 - RNA, 26 nt, Human
accucgccccucccccaggccccagc

SEQ ID NO: 1352031 - RNA, 20 nt, Human
acugcacgaggcuuuccaug

SEQ ID NO: 1352032 - RNA, 20 nt, Human
agaagaacaagaacaacaac

SEQ ID NO: 1352033 - RNA, 25 nt, Human
agaagaacaagaacaacaacugaga

SEQ ID NO: 1352034 - RNA, 19 nt, Human
agaggugggggcugaggcc

SEQ ID NO: 1352035 - RNA, 21 nt, Human
caaagaacaagaagaacaaga

SEQ ID NO: 1352036 - RNA, 20 nt, Human
caaccagguccagccuccca

SEQ ID NO: 1352037 - RNA, 18 nt, Human
caagaacaacaacugaga

SEQ ID NO: 1352038 - RNA, 20 nt, Human
caauccugcccuccacuccc

SEQ ID NO: 1352039 - RNA, 22 nt, Human
cacacaaacggaagaggccacc

SEQ ID NO: 1352040 - RNA, 18 nt, Human
cacuccugcaggccagag

SEQ ID NO: 1352041 - RNA, 24 nt, Human
cacugccugaggagcccugcccca

SEQ ID NO: 1352042 - RNA, 24 nt, Human
cagcgggacaagcugcugggcccu

SEQ ID NO: 1352043 - RNA, 21 nt, Human
caggccccaccaacguggccc

SEQ ID NO: 1352044 - RNA, 25 nt, Human
ccaauccugcccuccacucccaugc

SEQ ID NO: 1352045 - RNA, 21 nt, Human
ccacacuguggcccagccacc

SEQ ID NO: 1352046 - RNA, 18 nt, Human
ccagccucccagcuucca

SEQ ID NO: 1352047 - RNA, 19 nt, Human
ccccacacccgccacccag

SEQ ID NO: 1352048 - RNA, 20 nt, Human
ccccaggccccagccugccc

SEQ ID NO: 1352049 - RNA, 21 nt, Human
ccccaggccccagccugcccc

SEQ ID NO: 1352050 - RNA, 20 nt, Human
cccccacacccgccacccag

SEQ ID NO: 1352051 - RNA, 18 nt, Human
cccccaggccccagccug

SEQ ID NO: 1352052 - RNA, 18 nt, Human
ccccucccccaggcccca

SEQ ID NO: 1352053 - RNA, 22 nt, Human
cccugccccaauccugcccucc

SEQ ID NO: 1352054 - RNA, 24 nt, Human
ccuccacucccaugcgcacacaaa

SEQ ID NO: 1352055 - RNA, 21 nt, Human
ccucccccaggccccagccug

SEQ ID NO: 1352056 - RNA, 23 nt, Human
ccugcaggccagaggugggggcu

SEQ ID NO: 1352057 - RNA, 19 nt, Human
ccugcccccacacccgcca

SEQ ID NO: 1352058 - RNA, 21 nt, Human
ccuggccugccuggggagggg

SEQ ID NO: 1352059 - RNA, 24 nt, Human
cgcacacaaacggaagaggccaca

SEQ ID NO: 1352060 - RNA, 25 nt, Human
cgccccucccccaggccccagccug

SEQ ID NO: 1352061 - RNA, 19 nt, Human
cggaagaggccacacugug

SEQ ID NO: 1352062 - RNA, 24 nt, Human
cggcagguuccccacugcagaccu

SEQ ID NO: 1352063 - RNA, 24 nt, Human
cuccugcaggccagaggugggggc

SEQ ID NO: 1352064 - RNA, 21 nt, Human
cugcagcaauuucaugccucc

SEQ ID NO: 1352065 - RNA, 19 nt, Human
cugggcccuggccugccug

SEQ ID NO: 1352066 - RNA, 19 nt, Human
gcagaccugggacaggccc

SEQ ID NO: 1352067 - RNA, 19 nt, Human
gccccucccccaggcccca

SEQ ID NO: 1352068 - RNA, 21 nt, Human
gccccucccccaggccccagc

SEQ ID NO: 1352069 - RNA, 22 nt, Human
gccugcccccacacccgccacc

SEQ ID NO: 1352070 - RNA, 20 nt, Human
gcugaagggucacugccuga

SEQ ID NO: 1352071 - RNA, 31 nt, Human
ggagcccugccccaauccugcccuccacucu

SEQ ID NO: 1352072 - RNA, 20 nt, Human
ggccagagccaccgggccuc

SEQ ID NO: 1352073 - RNA, 26 nt, Human
ggcucugcugguggccggcagcucca

SEQ ID NO: 1352074 - RNA, 22 nt, Human
gggccagagccaccgggccucc

SEQ ID NO: 1352075 - RNA, 19 nt, Human
guggcccagccaccuccuc

SEQ ID NO: 1352076 - RNA, 28 nt, Human
uacaaagaacaagaagaacaagaacaac

SEQ ID NO: 1352077 - RNA, 20 nt, Human
ucaauauuuacaaagaacaa

SEQ ID NO: 1352078 - RNA, 22 nt, Human
uccaugaagaggguaggcucug

SEQ ID NO: 1352079 - RNA, 23 nt, Human
uccccacugcagaccugggacag

SEQ ID NO: 1352080 - RNA, 22 nt, Human
uccugcaggccagagguggggg

SEQ ID NO: 1352081 - RNA, 22 nt, Human
ucgccccucccccaggccccag

SEQ ID NO: 1352082 - RNA, 20 nt, Human
ucgggccagagccaccgggc

SEQ ID NO: 1352083 - RNA, 19 nt, Human
ucugcagcaauuucaugcc

SEQ ID NO: 1352084 - RNA, 23 nt, Human
ucuuuauucuuuuaacuuucuca

SEQ ID NO: 1352085 - RNA, 19 nt, Human
ugcaaggcaaggaagggca

SEQ ID NO: 1352086 - RNA, 18 nt, Human
ugcaaggcugaaggguca

SEQ ID NO: 1352087 - RNA, 23 nt, Human
ugccuggggaggggccaaccagg

SEQ ID NO: 1352088 - RNA, 25 nt, Human
uggccggcagcuccaaggaagggca

SEQ ID NO: 1352089 - RNA, 23 nt, Human
uuuaacuuucucaauauuuacaa

SEQ ID NO: 1352090 - RNA, 23 nt, Human
uuuacaaagaacaagaagaacaa

SEQ ID NO: 1352091 - RNA, 18 nt, Human
uuuauggaaacuccaaaa

SEQ ID NO: 1352092 - RNA, 20 nt, Human
aacacuuugggaggccaagg

SEQ ID NO: 1352093 - RNA, 24 nt, Human
aacacuuugggaggccaagguggg

SEQ ID NO: 1352094 - RNA, 23 nt, Human
aacuccugggcucaagcgauccu

SEQ ID NO: 1352095 - RNA, 24 nt, Human
aagcgugugccaccaugccuagcu

SEQ ID NO: 1352096 - RNA, 25 nt, Human
aaguagcuaagauuacaagcgugug

SEQ ID NO: 1352097 - RNA, 25 nt, Human
aagugauccucccauuucagccucc

SEQ ID NO: 1352098 - RNA, 24 nt, Human
acauggucuugaacuccugaucuc

SEQ ID NO: 1352099 - RNA, 24 nt, Human
acuauguugcucaggcuggucuug

SEQ ID NO: 1352100 - RNA, 19 nt, Human
acugcagccucaaacuccu

SEQ ID NO: 1352101 - RNA, 25 nt, Human
agacagggagaagcugcugagguug

SEQ ID NO: 1352102 - RNA, 23 nt, Human
agacagggucucacuauguugcu

SEQ ID NO: 1352103 - RNA, 22 nt, Human
agagaaaaaggaggaauaugau

SEQ ID NO: 1352104 - RNA, 18 nt, Human
agagagggugaagcuuaa

SEQ ID NO: 1352105 - RNA, 24 nt, Human
agagagggugaagcuuaaagagag

SEQ ID NO: 1352106 - RNA, 22 nt, Human
agauuacaagcgugugccacca

SEQ ID NO: 1352107 - RNA, 18 nt, Human
agccuccagaguagcugg

SEQ ID NO: 1352108 - RNA, 24 nt, Human
agcuaagauuacaagcgugugcca

SEQ ID NO: 1352109 - RNA, 19 nt, Human
aggaagacagggagaagcu

SEQ ID NO: 1352110 - RNA, 21 nt, Human
aggcacgguggcucauuucug

SEQ ID NO: 1352111 - RNA, 19 nt, Human
aggcaugagccaccaugcc

SEQ ID NO: 1352112 - RNA, 21 nt, Human
aggccaaggugggcggaucac

SEQ ID NO: 1352113 - RNA, 24 nt, Human
aggcgcgguggcucacgccuguaa

SEQ ID NO: 1352114 - RNA, 25 nt, Human
aggcuggagugcaguggcaugaucu

SEQ ID NO: 1352115 - RNA, 25 nt, Human
aggcuggagugcagugguacgaucu

SEQ ID NO: 1352116 - RNA, 23 nt, Human
aggugggcggaucacuugagguc

SEQ ID NO: 1352117 - RNA, 23 nt, Human
aggugugagccacugugccuggc

SEQ ID NO: 1352118 - RNA, 19 nt, Human
agguugucagguuccuacu

SEQ ID NO: 1352119 - RNA, 20 nt, Human
aguagagaggggauuuuagc

SEQ ID NO: 1352120 - RNA, 18 nt, Human
aguagcugggacuacagg

SEQ ID NO: 1352121 - RNA, 20 nt, Human
agugauaggaggagccccga

SEQ ID NO: 1352122 - RNA, 22 nt, Human
agugaucugcccgccucggccu

SEQ ID NO: 1352123 - RNA, 24 nt, Human
agugauucuugugccucagccucc

SEQ ID NO: 1352124 - RNA, 20 nt, Human
agugcaguggcaugaucucg

SEQ ID NO: 1352125 - RNA, 23 nt, Human
agugcaguggcaugaucucggcu

SEQ ID NO: 1352126 - RNA, 24 nt, Human
agugcaguggcaugaucucggcuc

SEQ ID NO: 1352127 - RNA, 20 nt, Human
agugcagugguacgaucuug

SEQ ID NO: 1352128 - RNA, 23 nt, Human
agugguacgaucuugacucacua

SEQ ID NO: 1352129 - RNA, 18 nt, Human
auagcucacugcagccuc

SEQ ID NO: 1352130 - RNA, 22 nt, Human
auccuaacacuuugggaggcca

SEQ ID NO: 1352131 - RNA, 25 nt, Human
caaacuccugggcucaagugauccu

SEQ ID NO: 1352132 - RNA, 20 nt, Human
caaacugcuggaauuagcag

SEQ ID NO: 1352133 - RNA, 24 nt, Human
caaaguggugggauugcaggugug

SEQ ID NO: 1352134 - RNA, 25 nt, Human
caacagagagagaaacagagaaaaa

SEQ ID NO: 1352135 - RNA, 22 nt, Human
caagagauucuccugucucagc

SEQ ID NO: 1352136 - RNA, 23 nt, Human
caagagauucuccugucucagca

SEQ ID NO: 1352137 - RNA, 22 nt, Human
caagcgauccuccugccucagc

SEQ ID NO: 1352138 - RNA, 27 nt, Human
caagcgauccuccugccucagccuccc

SEQ ID NO: 1352139 - RNA, 27 nt, Human
caagcgauccuccugccucagccuccc

SEQ ID NO: 1352140 - RNA, 21 nt, Human
caaggugggcggaucacuuga

SEQ ID NO: 1352141 - RNA, 24 nt, Human
caaggugggcggaucacuugaggu

SEQ ID NO: 1352142 - RNA, 22 nt, Human
caagugauucuugugccucagc

SEQ ID NO: 1352143 - RNA, 27 nt, Human
caagugauucuugugccucagccuccc

SEQ ID NO: 1352144 - RNA, 24 nt, Human
caccaugccuagcuaauuuuugua

SEQ ID NO: 1352145 - RNA, 24 nt, Human
cacgccuguaauccuaacacuuug

SEQ ID NO: 1352146 - RNA, 24 nt, Human
cacgguggcucauuucugcaacuu

SEQ ID NO: 1352147 - RNA, 24 nt, Human
cacuauguugcucaggcuggucuu

SEQ ID NO: 1352148 - RNA, 18 nt, Human
cacucgccucuagcugca

SEQ ID NO: 1352149 - RNA, 24 nt, Human
cagagaaaaaggaggaauaugaua

SEQ ID NO: 1352150 - RNA, 20 nt, Human
cagcagaccacaugguacca

SEQ ID NO: 1352151 - RNA, 24 nt, Human
cagccucaaacuccugggcucaag

SEQ ID NO: 1352152 - RNA, 18 nt, Human
caggaguggggugugaaa

SEQ ID NO: 1352153 - RNA, 24 nt, Human
caggcgauccacccaccucggccc

SEQ ID NO: 1352154 - RNA, 22 nt, Human
caggcgcgguggcucacgccug

SEQ ID NO: 1352155 - RNA, 24 nt, Human
cagggucucacuauguugcucagg

SEQ ID NO: 1352156 - RNA, 20 nt, Human
caggugugagccacugugcc

SEQ ID NO: 1352157 - RNA, 19 nt, Human
cagguucaagagauucucc

SEQ ID NO: 1352158 - RNA, 24 nt, Human
caugccucccaaaggcaugagcca

SEQ ID NO: 1352159 - RNA, 23 nt, Human
cauucaaauaaugcucacuaaca

SEQ ID NO: 1352160 - RNA, 18 nt, Human
ccaaaagagcuuggacca

SEQ ID NO: 1352161 - RNA, 21 nt, Human
ccaaacugcuggaauuagcac

SEQ ID NO: 1352162 - RNA, 18 nt, Human
ccaaaggcaugagccacc

SEQ ID NO: 1352163 - RNA, 21 nt, Human
ccaaaguggugggauugcagg

SEQ ID NO: 1352164 - RNA, 21 nt, Human
ccaaaguggugggauugcagg

SEQ ID NO: 1352165 - RNA, 24 nt, Human
ccaaaguggugggauugcaggugu

SEQ ID NO: 1352166 - RNA, 24 nt, Human
ccacaugguaccacucccagccau

SEQ ID NO: 1352167 - RNA, 22 nt, Human
ccagaguagcugggacuacagg

SEQ ID NO: 1352168 - RNA, 24 nt, Human
ccagaguagcugggacuacaggug

SEQ ID NO: 1352169 - RNA, 21 nt, Human
ccagccuggccaacauggucu

SEQ ID NO: 1352170 - RNA, 19 nt, Human
ccagguucaagagauucuc

SEQ ID NO: 1352171 - RNA, 22 nt, Human
ccagguucaagagauucuccug

SEQ ID NO: 1352172 - RNA, 19 nt, Human
cccaaaggcaugagccacc

SEQ ID NO: 1352173 - RNA, 18 nt, Human
cccagccauagacuggac

SEQ ID NO: 1352174 - RNA, 19 nt, Human
cccaggcuggagugcagug

SEQ ID NO: 1352175 - RNA, 23 nt, Human
cccaggcuggagugcaguggcau

SEQ ID NO: 1352176 - RNA, 19 nt, Human
ccccaggcuggagugcagu

SEQ ID NO: 1352177 - RNA, 24 nt, Human
cccuccagguucaagagauucucc

SEQ ID NO: 1352178 - RNA, 22 nt, Human
ccuccagguucaagagauucuc

SEQ ID NO: 1352179 - RNA, 24 nt, Human
ccucccauuucagccuccagagua

SEQ ID NO: 1352180 - RNA, 24 nt, Human
ccugaucucaggcgauccacccac

SEQ ID NO: 1352181 - RNA, 19 nt, Human
ccuggccaacauggucuug

SEQ ID NO: 1352182 - RNA, 20 nt, Human
ccugggcucaagcgauccuc

SEQ ID NO: 1352183 - RNA, 23 nt, Human
ccugggcucaagcgauccuccug

SEQ ID NO: 1352184 - RNA, 22 nt, Human
ccugggcucaagugauccuccc

SEQ ID NO: 1352185 - RNA, 24 nt, Human
cgagaccagccuggccaacauggu

SEQ ID NO: 1352186 - RNA, 25 nt, Human
cgauccacccaccucggcccauauc

SEQ ID NO: 1352187 - RNA, 23 nt, Human
cgccuguaauccuaacacuuugg

SEQ ID NO: 1352188 - RNA, 24 nt, Human
cgccuguaauccuaacacuuuggg

SEQ ID NO: 1352189 - RNA, 24 nt, Human
cggaucacuugaggucgggaguuc

SEQ ID NO: 1352190 - RNA, 24 nt, Human
cuacaacuuccacccuccagguuc

SEQ ID NO: 1352191 - RNA, 24 nt, Human
cucaagcgauccuccugccucagc

SEQ ID NO: 1352192 - RNA, 24 nt, Human
cucaagugauccucccauuucagc

SEQ ID NO: 1352193 - RNA, 20 nt, Human
cucacgccuguaauccuaac

SEQ ID NO: 1352194 - RNA, 24 nt, Human
cucacgccuguaauccuaacacuu

SEQ ID NO: 1352195 - RNA, 19 nt, Human
cucacggauucaagugauu

SEQ ID NO: 1352196 - RNA, 24 nt, Human
cucacuacaaccuccaccucacgg

SEQ ID NO: 1352197 - RNA, 21 nt, Human
cucacugcagccucaaacucc

SEQ ID NO: 1352198 - RNA, 24 nt, Human
cucacugcagccucaaacuccugg

SEQ ID NO: 1352199 - RNA, 21 nt, Human
cucccaaguagcuaagauuac

SEQ ID NO: 1352200 - RNA, 22 nt, Human
cucccacuguggccaaucucaa

SEQ ID NO: 1352201 - RNA, 26 nt, Human
cuccugaccucuagugaucugcccgc

SEQ ID NO: 1352202 - RNA, 23 nt, Human
cuccugccucagccucccaaacu

SEQ ID NO: 1352203 - RNA, 23 nt, Human
cuccugggcucaagcgauccucc

SEQ ID NO: 1352204 - RNA, 23 nt, Human
cugcagccucaaacuccugggcu

SEQ ID NO: 1352205 - RNA, 18 nt, Human
cuggaccaagggguacac

SEQ ID NO: 1352206 - RNA, 24 nt, Human
cuggagugcaguggcaugaucucg

SEQ ID NO: 1352207 - RNA, 25 nt, Human
cuggccaacauggucuugaacuccu

SEQ ID NO: 1352208 - RNA, 21 nt, Human
cuugcucuguuccccaggcug

SEQ ID NO: 1352209 - RNA, 25 nt, Human
cuugugccucagccucccaaguagc

SEQ ID NO: 1352210 - RNA, 24 nt, Human
cuuguucugucacccaggcuggag

SEQ ID NO: 1352211 - RNA, 26 nt, Human
gaacuggaagauguuguugagccucu

SEQ ID NO: 1352212 - RNA, 19 nt, Human
gaagacagggagaagcugc

SEQ ID NO: 1352213 - RNA, 23 nt, Human
gaccagccuggccaacauggucu

SEQ ID NO: 1352214 - RNA, 19 nt, Human
gagagaaacagagaaaaag

SEQ ID NO: 1352215 - RNA, 26 nt, Human
gagaggaagacagggagaagcugccg

SEQ ID NO: 1352216 - RNA, 24 nt, Human
gaguagcugggacuacaggugugc

SEQ ID NO: 1352217 - RNA, 24 nt, Human
gaucacuugaggucgggaguucga

SEQ ID NO: 1352218 - RNA, 24 nt, Human
gaucucaggcgauccacccaccuc

SEQ ID NO: 1352219 - RNA, 24 nt, Human
gauuacaagcgugugccaccaugc

SEQ ID NO: 1352220 - RNA, 18 nt, Human
gauugcaggugugagcca

SEQ ID NO: 1352221 - RNA, 19 nt, Human
gauugcaggugugagccac

SEQ ID NO: 1352222 - RNA, 21 nt, Human
gauugcaggugugagccacug

SEQ ID NO: 1352223 - RNA, 25 nt, Human
gcaacagagagagaaacagagaaaa

SEQ ID NO: 1352224 - RNA, 22 nt, Human
gccuagcuaauuuuuguauuuu

SEQ ID NO: 1352225 - RNA, 24 nt, Human
gcgauccuccugccucagccuccc

SEQ ID NO: 1352226 - RNA, 18 nt, Human
gcucaagugauccuccca

SEQ ID NO: 1352227 - RNA, 21 nt, Human
gcuggaauuagcaccuuuggg

SEQ ID NO: 1352228 - RNA, 19 nt, Human
gcuggagugcaguggcaug

SEQ ID NO: 1352229 - RNA, 27 nt, Human
gcuuuuuuuuuucuuuuuuuuuucuuu

SEQ ID NO: 1352230 - RNA, 18 nt, Human
ggacagcccacccagucc

SEQ ID NO: 1352231 - RNA, 23 nt, Human
ggaucacuugaggucgggaguuc

SEQ ID NO: 1352232 - RNA, 21 nt, Human
ggccaggcgcgguggcucacg

SEQ ID NO: 1352233 - RNA, 19 nt, Human
ggccccaauucacuuuuua

SEQ ID NO: 1352234 - RNA, 18 nt, Human
ggcucaaacuccugaccu

SEQ ID NO: 1352235 - RNA, 18 nt, Human
ggcucacgccuguaaucc

SEQ ID NO: 1352236 - RNA, 18 nt, Human
ggcuggucuugaacuccu

SEQ ID NO: 1352237 - RNA, 23 nt, Human
gggauuuuagcauguuggucagg

SEQ ID NO: 1352238 - RNA, 22 nt, Human
gggcucaagcgauccuccugcc

SEQ ID NO: 1352239 - RNA, 20 nt, Human
gggcucaagugauccuccca

SEQ ID NO: 1352240 - RNA, 21 nt, Human
gguggcucacgccuguaaucc

SEQ ID NO: 1352241 - RNA, 23 nt, Human
gguggcucacgccuguaauccua

SEQ ID NO: 1352242 - RNA, 24 nt, Human
gugaucugcccgccucggccuucc

SEQ ID NO: 1352243 - RNA, 24 nt, Human
gugauucuugugccucagccuccc

SEQ ID NO: 1352244 - RNA, 22 nt, Human
gugccucagccucccaaguagc

SEQ ID NO: 1352245 - RNA, 23 nt, Human
gugccucagccucccaaguagcu

SEQ ID NO: 1352246 - RNA, 19 nt, Human
gugggcggaucacuugagg

SEQ ID NO: 1352247 - RNA, 24 nt, Human
uaacacuuugggaggccaaggugg

SEQ ID NO: 1352248 - RNA, 21 nt, Human
uaagauuacaagcgugugcca

SEQ ID NO: 1352249 - RNA, 24 nt, Human
uaagauuacaagcgugugccacca

SEQ ID NO: 1352250 - RNA, 24 nt, Human
uaauuuuuguauuuuuaguagaga

SEQ ID NO: 1352251 - RNA, 25 nt, Human
uaccaauaaacagaaauaaugauca

SEQ ID NO: 1352252 - RNA, 18 nt, Human
uagacuggaccaaggggu

SEQ ID NO: 1352253 - RNA, 19 nt, Human
uagcauguuggucaggcuc

SEQ ID NO: 1352254 - RNA, 24 nt, Human
uagcucacugcagccucaaacucc

SEQ ID NO: 1352255 - RNA, 24 nt, Human
uaggaggagccccgauuuguagug

SEQ ID NO: 1352256 - RNA, 24 nt, Human
uaguagagaggggauuuuagcaug

SEQ ID NO: 1352257 - RNA, 22 nt, Human
uagugaucugcccgccucggcc

SEQ ID NO: 1352258 - RNA, 24 nt, Human
uagugcaauaauagcucacugcag

SEQ ID NO: 1352259 - RNA, 24 nt, Human
uaguuucuaauuuuuuacuauuac

SEQ ID NO: 1352260 - RNA, 20 nt, Human
uauaaaacaugccauccuuc

SEQ ID NO: 1352261 - RNA, 24 nt, Human
uaugucacccaggcuggaaugcag

SEQ ID NO: 1352262 - RNA, 19 nt, Human
uauguugcucaggcugguc

SEQ ID NO: 1352263 - RNA, 20 nt, Human
uauguugcucaggcuggucu

SEQ ID NO: 1352264 - RNA, 24 nt, Human
uauguugcucaggcuggucuugaa

SEQ ID NO: 1352265 - RNA, 22 nt, Human
uauuaccaauaaacagaaauaa

SEQ ID NO: 1352266 - RNA, 19 nt, Human
ucacccaggcuggaaugca

SEQ ID NO: 1352267 - RNA, 24 nt, Human
ucacccaggcuggagugcaguggc

SEQ ID NO: 1352268 - RNA, 18 nt, Human
ucacuacaaccuccaccu

SEQ ID NO: 1352269 - RNA, 23 nt, Human
ucacuacaaccuccaccucacgg

SEQ ID NO: 1352270 - RNA, 26 nt, Human
ucacuacaaccuccaccucacggauu

SEQ ID NO: 1352271 - RNA, 18 nt, Human
ucacuacaacuuccaccc

SEQ ID NO: 1352272 - RNA, 24 nt, Human
ucacuacaacuuccacccuccagg

SEQ ID NO: 1352273 - RNA, 24 nt, Human
ucacugcagccucaaacuccuggg

SEQ ID NO: 1352274 - RNA, 23 nt, Human
ucagccuccagaguagcugggac

SEQ ID NO: 1352275 - RNA, 18 nt, Human
ucagccucccaaguagcu

SEQ ID NO: 1352276 - RNA, 21 nt, Human
ucagccucccaaguagcuaag

SEQ ID NO: 1352277 - RNA, 20 nt, Human
ucaggcgauccacccaccuc

SEQ ID NO: 1352278 - RNA, 24 nt, Human
ucaggcuggucuugaacuccuggg

SEQ ID NO: 1352279 - RNA, 20 nt, Human
uccacacacagcccuucuca

SEQ ID NO: 1352280 - RNA, 24 nt, Human
uccagaguagcugggacuacaggu

SEQ ID NO: 1352281 - RNA, 25 nt, Human
ucccaaaggcaugagccaccaugcc

SEQ ID NO: 1352282 - RNA, 22 nt, Human
ucccagccauagacuggaccaa

SEQ ID NO: 1352283 - RNA, 23 nt, Human
ucccagccauagacuggaccaag

SEQ ID NO: 1352284 - RNA, 21 nt, Human
uccccaggcuggagugcagug

SEQ ID NO: 1352285 - RNA, 20 nt, Human
ucccuuucugcaaaguuaac

SEQ ID NO: 1352286 - RNA, 24 nt, Human
uccuccugccucagccucccaaac

SEQ ID NO: 1352287 - RNA, 21 nt, Human
uccugggcucaagcgauccuc

SEQ ID NO: 1352288 - RNA, 22 nt, Human
uccugggcucaagcgauccucc

SEQ ID NO: 1352289 - RNA, 24 nt, Human
uccugggcucaagcgauccuccug

SEQ ID NO: 1352290 - RNA, 21 nt, Human
uccugggcucaagugauccuc

SEQ ID NO: 1352291 - RNA, 22 nt, Human
uccugggcucaagugauccucc

SEQ ID NO: 1352292 - RNA, 24 nt, Human
uccugggcucaagugauccuccca

SEQ ID NO: 1352293 - RNA, 23 nt, Human
ucucacuauguugcucaggcugg

SEQ ID NO: 1352294 - RNA, 24 nt, Human
ucucacuauguugcucaggcuggu

SEQ ID NO: 1352295 - RNA, 22 nt, Human
ucucaugucucugugccccaca

SEQ ID NO: 1352296 - RNA, 21 nt, Human
ucugaacuuaaaaaccaaaag

SEQ ID NO: 1352297 - RNA, 24 nt, Human
ucugucacccaggcuggagugcag

SEQ ID NO: 1352298 - RNA, 19 nt, Human
ucuguuccccaggcuggag

SEQ ID NO: 1352299 - RNA, 23 nt, Human
ucuugaacuccugaucucaggcg

SEQ ID NO: 1352300 - RNA, 19 nt, Human
ucuugaacuccugggcuca

SEQ ID NO: 1352301 - RNA, 23 nt, Human
ucuugaacuccugggcucaagcg

SEQ ID NO: 1352302 - RNA, 24 nt, Human
ucuugauaugucacccaggcugga

SEQ ID NO: 1352303 - RNA, 19 nt, Human
ucuugcucuguuccccagg

SEQ ID NO: 1352304 - RNA, 23 nt, Human
ucuugcucuguuccccaggcugg

SEQ ID NO: 1352305 - RNA, 24 nt, Human
ucuugcucuguuccccaggcugga

SEQ ID NO: 1352306 - RNA, 22 nt, Human
ucuuguucugucacccaggcug

SEQ ID NO: 1352307 - RNA, 23 nt, Human
ucuuguucugucacccaggcugg

SEQ ID NO: 1352308 - RNA, 24 nt, Human
ucuuguucugucacccaggcugga

SEQ ID NO: 1352309 - RNA, 25 nt, Human
ucuuuuuuagugucucuguaccauu

SEQ ID NO: 1352310 - RNA, 20 nt, Human
ugaccucuagugaucugccc

SEQ ID NO: 1352311 - RNA, 18 nt, Human
ugagacagagucuuguuc

SEQ ID NO: 1352312 - RNA, 22 nt, Human
ugagacagagucuuguucuguc

SEQ ID NO: 1352313 - RNA, 22 nt, Human
ugagacagggucucacuauguu

SEQ ID NO: 1352314 - RNA, 20 nt, Human
ugauucuugugccucagccu

SEQ ID NO: 1352315 - RNA, 23 nt, Human
ugcaggugugagccacugugccu

SEQ ID NO: 1352316 - RNA, 23 nt, Human
ugcaguagggacaaacuagaaac

SEQ ID NO: 1352317 - RNA, 22 nt, Human
ugcaguggcaugaucucggcuc

SEQ ID NO: 1352318 - RNA, 24 nt, Human
ugccucagccucccaaacugcugg

SEQ ID NO: 1352319 - RNA, 24 nt, Human
ugccucagccucccaaguagcuaa

SEQ ID NO: 1352320 - RNA, 21 nt, Human
ugccuggcugaucgccuucuu

SEQ ID NO: 1352321 - RNA, 24 nt, Human
ugcucaggcuggucuugaacuccu

SEQ ID NO: 1352322 - RNA, 24 nt, Human
ugcucuguuccccaggcuggagug

SEQ ID NO: 1352323 - RNA, 20 nt, Human
uggaauugggagacagggau

SEQ ID NO: 1352324 - RNA, 25 nt, Human
uggaauugggagacagggauuugug

SEQ ID NO: 1352325 - RNA, 18 nt, Human
uggagaagugguaugccc

SEQ ID NO: 1352326 - RNA, 19 nt, Human
uggagugcaguggcaugau

SEQ ID NO: 1352327 - RNA, 24 nt, Human
uggagugcaguggcaugaucucgg

SEQ ID NO: 1352328 - RNA, 21 nt, Human
uggagugcagugguacgaucu

SEQ ID NO: 1352329 - RNA, 23 nt, Human
uggagugcagugguacgaucuug

SEQ ID NO: 1352330 - RNA, 24 nt, Human
uggcaugaucucggcucacuacaa

SEQ ID NO: 1352331 - RNA, 24 nt, Human
uggccaggcgcgguggcucacgcc

SEQ ID NO: 1352332 - RNA, 24 nt, Human
uggcucacgccuguaauccuaaca

SEQ ID NO: 1352333 - RNA, 21 nt, Human
ugggacuacaggugugcacca

SEQ ID NO: 1352334 - RNA, 24 nt, Human
ugggacuacaggugugcaccacca

SEQ ID NO: 1352335 - RNA, 19 nt, Human
ugggaggccaaggugggcg

SEQ ID NO: 1352336 - RNA, 24 nt, Human
ugggaggccaaggugggcggauca

SEQ ID NO: 1352337 - RNA, 18 nt, Human
ugggauugcaggugugag

SEQ ID NO: 1352338 - RNA, 21 nt, Human
ugggauugcaggugugagcca

SEQ ID NO: 1352339 - RNA, 22 nt, Human
ugggauugcaggugugagccac

SEQ ID NO: 1352340 - RNA, 24 nt, Human
ugggauugcaggugugagccacug

SEQ ID NO: 1352341 - RNA, 24 nt, Human
ugggcucaagcgauccuccugccu

SEQ ID NO: 1352342 - RNA, 24 nt, Human
ugggcucaagugauccucccauuu

SEQ ID NO: 1352343 - RNA, 19 nt, Human
ugguacgaucuugacucac

SEQ ID NO: 1352344 - RNA, 24 nt, Human
ugguacgaucuugacucacuacaa

SEQ ID NO: 1352345 - RNA, 18 nt, Human
uguaaagucagagcuggg

SEQ ID NO: 1352346 - RNA, 21 nt, Human
uguuccccaggcuggagugca

SEQ ID NO: 1352347 - RNA, 24 nt, Human
uguucugucacccaggcuggagug

SEQ ID NO: 1352348 - RNA, 18 nt, Human
uuaguagagaggggauuu

SEQ ID NO: 1352349 - RNA, 18 nt, Human
uuaguagagaggggauuu

SEQ ID NO: 1352350 - RNA, 24 nt, Human
uuaguagagaggggauuuuagcau

SEQ ID NO: 1352351 - RNA, 23 nt, Human
uucaagugauucuugugccucag

SEQ ID NO: 1352352 - RNA, 23 nt, Human
uucuugagacagagucuuguucu

SEQ ID NO: 1352353 - RNA, 20 nt, Human
uucuuuuuuuuuucuugaga

SEQ ID NO: 1352354 - RNA, 20 nt, Human
uucuuuuuuuuuuuuuucuu

SEQ ID NO: 1352355 - RNA, 22 nt, Human
uugagacagggucucacuaugu

SEQ ID NO: 1352356 - RNA, 22 nt, Human
uugcaccaagauguucaccaca

SEQ ID NO: 1352357 - RNA, 24 nt, Human
uugcucuguuccccaggcuggagu

SEQ ID NO: 1352358 - RNA, 24 nt, Human
uuguucugucacccaggcuggagu

SEQ ID NO: 1352359 - RNA, 18 nt, Human
uuucuuuuuuuuuucuug

SEQ ID NO: 1352360 - RNA, 20 nt, Human
uuuuuguauuuuuaguagag

SEQ ID NO: 1352361 - RNA, 20 nt, Human
uuuuuuuucuugagacagag

SEQ ID NO: 1352362 - RNA, 24 nt, Human
uuuuuuuuucuugagacagagucu

SEQ ID NO: 1352363 - RNA, 24 nt, Human
aaagcuuucccacauuccccgcac

SEQ ID NO: 1352364 - RNA, 22 nt, Human
aacaagauaugaggcacgacug

SEQ ID NO: 1352365 - RNA, 24 nt, Human
agccaguacuaaaggccuugccac

SEQ ID NO: 1352366 - RNA, 23 nt, Human
auaggguuucucaccaacaugca

SEQ ID NO: 1352367 - RNA, 27 nt, Human
augaggcacgacugaagguucucccgc

SEQ ID NO: 1352368 - RNA, 19 nt, Human
caaaagguuucucaccagu

SEQ ID NO: 1352369 - RNA, 19 nt, Human
caaaggguuuuucaccagu

SEQ ID NO: 1352370 - RNA, 23 nt, Human
cacacacgaagcacuucccacac

SEQ ID NO: 1352371 - RNA, 22 nt, Human
cacgaagcacuucccacacucc

SEQ ID NO: 1352372 - RNA, 23 nt, Human
caguacuaaaggccuugccacac

SEQ ID NO: 1352373 - RNA, 19 nt, Human
caguaugaauucucugaug

SEQ ID NO: 1352374 - RNA, 24 nt, Human
caguaugaauuuuccgaugcugug

SEQ ID NO: 1352375 - RNA, 22 nt, Human
caugcaaucucugauguauggu

SEQ ID NO: 1352376 - RNA, 20 nt, Human
ccacacuccucacacccaaa

SEQ ID NO: 1352377 - RNA, 22 nt, Human
cuaaaggccuuuccacauuccu

SEQ ID NO: 1352378 - RNA, 22 nt, Human
cuaauagucuuuccacauugcu

SEQ ID NO: 1352379 - RNA, 25 nt, Human
gcugauggcgacuaauaaaggcuuu

SEQ ID NO: 1352380 - RNA, 22 nt, Human
ggcgacuaauaaaggcuuugcc

SEQ ID NO: 1352381 - RNA, 26 nt, Human
guacugaaggccuucccaaccggagg

SEQ ID NO: 1352382 - RNA, 24 nt, Human
guacugaaggccuucccacacucc

SEQ ID NO: 1352383 - RNA, 23 nt, Human
uaacaaaggcugagccacugaua

SEQ ID NO: 1352384 - RNA, 19 nt, Human
uaagaugagaauagaccug

SEQ ID NO: 1352385 - RNA, 21 nt, Human
uaagaugagaauagaccugcc

SEQ ID NO: 1352386 - RNA, 19 nt, Human
uaaguugauagcuaccacu

SEQ ID NO: 1352387 - RNA, 21 nt, Human
uacuagaaaagcuuucccaca

SEQ ID NO: 1352388 - RNA, 22 nt, Human
uagaaaagcuuucccacauucc

SEQ ID NO: 1352389 - RNA, 24 nt, Human
ucccacacuccucacacccaaagg

SEQ ID NO: 1352390 - RNA, 23 nt, Human
uccuugcauccguagggcuuuau

SEQ ID NO: 1352391 - RNA, 25 nt, Human
ucgccagugugaagucuuccauguu

SEQ ID NO: 1352392 - RNA, 21 nt, Human
ucucccaugcuuaacaaaggc

SEQ ID NO: 1352393 - RNA, 25 nt, Human
ucucugaugcuuagcaaggggugag

SEQ ID NO: 1352394 - RNA, 23 nt, Human
ugaaaagguacugaaggccuucc

SEQ ID NO: 1352395 - RNA, 20 nt, Human
ugaacaagguaugagccagu

SEQ ID NO: 1352396 - RNA, 22 nt, Human
ugagccaguacuaaaggccuug

SEQ ID NO: 1352397 - RNA, 25 nt, Human
ugaugugcaugaaggaaggaacuaa

SEQ ID NO: 1352398 - RNA, 19 nt, Human
uguugaacaagauaugagg

SEQ ID NO: 1352399 - RNA, 19 nt, Human
uguugaaccagguaugaaa

SEQ ID NO: 1352400 - RNA, 22 nt, Human
uucgcugauguugaaccaggua

SEQ ID NO: 1352401 - RNA, 23 nt, Human
uugaaaguuuccuaccagcauaa

SEQ ID NO: 1352402 - RNA, 24 nt, Human
aaagugcugggauuacagguguga

SEQ ID NO: 1352403 - RNA, 25 nt, Human
aacccagccuuucugaaccauccac

SEQ ID NO: 1352404 - RNA, 23 nt, Human
aagcaaaaggcuggucuccagga

SEQ ID NO: 1352405 - RNA, 22 nt, Human
aagcagagaagggaacccagcg

SEQ ID NO: 1352406 - RNA, 21 nt, Human
aagcagagaguucccucgagg

SEQ ID NO: 1352407 - RNA, 21 nt, Human
aagcagugucugccauccugg

SEQ ID NO: 1352408 - RNA, 18 nt, Human
aagugcugggauuacagg

SEQ ID NO: 1352409 - RNA, 18 nt, Human
aagugcugggauuacagg

SEQ ID NO: 1352410 - RNA, 19 nt, Human
aagugcugggauuacaggu

SEQ ID NO: 1352411 - RNA, 19 nt, Human
aagugcugggauuacaggu

SEQ ID NO: 1352412 - RNA, 22 nt, Human
aagugcugggauuacaggugug

SEQ ID NO: 1352413 - RNA, 23 nt, Human
aagugcugggauuacagguguga

SEQ ID NO: 1352414 - RNA, 26 nt, Human
aagugcugggauuacaggugugagcc

SEQ ID NO: 1352415 - RNA, 26 nt, Human
aagugcugggauuacaggugugagcu

SEQ ID NO: 1352416 - RNA, 24 nt, Human
aauuuauuguauuuuuaguagaga

SEQ ID NO: 1352417 - RNA, 20 nt, Human
acaagccccaggccugugac

SEQ ID NO: 1352418 - RNA, 19 nt, Human
acaagucaacucccucaug

SEQ ID NO: 1352419 - RNA, 21 nt, Human
acaggcacccaccaccaugcc

SEQ ID NO: 1352420 - RNA, 24 nt, Human
acagguuuuugccauguuggccag

SEQ ID NO: 1352421 - RNA, 18 nt, Human
acauggcacgaagcagag

SEQ ID NO: 1352422 - RNA, 25 nt, Human
accagcuccagagaagggggaacgc

SEQ ID NO: 1352423 - RNA, 18 nt, Human
acccagcgcccgugucuc

SEQ ID NO: 1352424 - RNA, 23 nt, Human
accucagccucccaaagugcugg

SEQ ID NO: 1352425 - RNA, 24 nt, Human
accuugugauucgcccaccucagc

SEQ ID NO: 1352426 - RNA, 21 nt, Human
acgaagcagagaagggaaccc

SEQ ID NO: 1352427 - RNA, 19 nt, Human
acgguggggccuggucucu

SEQ ID NO: 1352428 - RNA, 23 nt, Human
acuacaacagaguaacuuugacu

SEQ ID NO: 1352429 - RNA, 25 nt, Human
acugcaaucuccgcucccaggguuc

SEQ ID NO: 1352430 - RNA, 18 nt, Human
acuugucuggguagcaug

SEQ ID NO: 1352431 - RNA, 23 nt, Human
agacgaugccuucccaugucccc

SEQ ID NO: 1352432 - RNA, 19 nt, Human
agagaugggguuucauuau

SEQ ID NO: 1352433 - RNA, 24 nt, Human
agagaugggguuucauuauguugg

SEQ ID NO: 1352434 - RNA, 19 nt, Human
agcaugagguucugucuca

SEQ ID NO: 1352435 - RNA, 21 nt, Human
agccacacaagccccaggccu

SEQ ID NO: 1352436 - RNA, 23 nt, Human
agccaucuuccugccuuggccuc

SEQ ID NO: 1352437 - RNA, 24 nt, Human
agcgauucuucugccucagucucc

SEQ ID NO: 1352438 - RNA, 23 nt, Human
aggcauaggagggggcguguggg

SEQ ID NO: 1352439 - RNA, 22 nt, Human
aggccacaucuggcugggggcu

SEQ ID NO: 1352440 - RNA, 21 nt, Human
aggcuggauggccccgcccaa

SEQ ID NO: 1352441 - RNA, 20 nt, Human
agggcacagaugcagccugc

SEQ ID NO: 1352442 - RNA, 21 nt, Human
aggggucgguggucuuggagc

SEQ ID NO: 1352443 - RNA, 24 nt, Human
aggugauccaccuaccuugaccuc

SEQ ID NO: 1352444 - RNA, 20 nt, Human
aggugcccaccaccacgccc

SEQ ID NO: 1352445 - RNA, 21 nt, Human
aggugcccaccaccacgcccg

SEQ ID NO: 1352446 - RNA, 19 nt, Human
agguuuuugccauguuggc

SEQ ID NO: 1352447 - RNA, 23 nt, Human
agguuuuugccauguuggccagg

SEQ ID NO: 1352448 - RNA, 22 nt, Human
aguagagacagguuuuugccau

SEQ ID NO: 1352449 - RNA, 18 nt, Human
aguagagaugggguuuca

SEQ ID NO: 1352450 - RNA, 18 nt, Human
aguagcugggauaauagg

SEQ ID NO: 1352451 - RNA, 18 nt, Human
aguagcugggauuacagg

SEQ ID NO: 1352452 - RNA, 18 nt, Human
augcugcugggugccgag

SEQ ID NO: 1352453 - RNA, 23 nt, Human
augggguuucauuauguuggcca

SEQ ID NO: 1352454 - RNA, 24 nt, Human
augggguuucauuauguuggccag

SEQ ID NO: 1352455 - RNA, 20 nt, Human
auguuggccaggcuggucuc

SEQ ID NO: 1352456 - RNA, 21 nt, Human
auguuggccaggcuggucucg

SEQ ID NO: 1352457 - RNA, 24 nt, Human
auuuuuguauuuuuaguagagaca

SEQ ID NO: 1352458 - RNA, 24 nt, Human
caaagugcugggauuacaggugug

SEQ ID NO: 1352459 - RNA, 19 nt, Human
caacagaguaacuuugacu

SEQ ID NO: 1352460 - RNA, 22 nt, Human
caagcagagaguucccucgagg

SEQ ID NO: 1352461 - RNA, 22 nt, Human
caagccaucuuccugccuuggc

SEQ ID NO: 1352462 - RNA, 20 nt, Human
caagcgauucuucugccuca

SEQ ID NO: 1352463 - RNA, 21 nt, Human
caagcgauucuucugccucag

SEQ ID NO: 1352464 - RNA, 20 nt, Human
caaggcccuggugagcgugg

SEQ ID NO: 1352465 - RNA, 18 nt, Human
cacaagccccaggccugu

SEQ ID NO: 1352466 - RNA, 22 nt, Human
cacacaagccccaggccuguga

SEQ ID NO: 1352467 - RNA, 19 nt, Human
cacaccagcgccgcccucu

SEQ ID NO: 1352468 - RNA, 24 nt, Human
caccacgcccggcuaauuuuugua

SEQ ID NO: 1352469 - RNA, 20 nt, Human
caccccccuggccuccaccc

SEQ ID NO: 1352470 - RNA, 20 nt, Human
caccccuccccccacaccuu

SEQ ID NO: 1352471 - RNA, 21 nt, Human
caccccuccccccacaccuug

SEQ ID NO: 1352472 - RNA, 21 nt, Human
caccugugacaccuguggacc

SEQ ID NO: 1352473 - RNA, 23 nt, Human
cacugcaacuuccgccuucuggg

SEQ ID NO: 1352474 - RNA, 21 nt, Human
cacuggagugaggguuucagc

SEQ ID NO: 1352475 - RNA, 25 nt, Human
cagcagcgccaggcaaaacaguuuc

SEQ ID NO: 1352476 - RNA, 20 nt, Human
cagcccacaccagcgccgcc

SEQ ID NO: 1352477 - RNA, 21 nt, Human
caggcacccaccaccaugccc

SEQ ID NO: 1352478 - RNA, 18 nt, Human
cagggcacagaugcagcc

SEQ ID NO: 1352479 - RNA, 24 nt, Human
cagguuuuugccauguuggccagg

SEQ ID NO: 1352480 - RNA, 19 nt, Human
cauggcacgaagcagagaa

SEQ ID NO: 1352481 - RNA, 23 nt, Human
cauguuggccaggcuggucuuca

SEQ ID NO: 1352482 - RNA, 19 nt, Human
cauuauguuggccaggcug

SEQ ID NO: 1352483 - RNA, 24 nt, Human
cauuauguuggccaggcuggucuc

SEQ ID NO: 1352484 - RNA, 20 nt, Human
ccaaagugcugggauuacag

SEQ ID NO: 1352485 - RNA, 21 nt, Human
ccaaagugcugggauuacagg

SEQ ID NO: 1352486 - RNA, 21 nt, Human
ccaaagugcugggauuacagg

SEQ ID NO: 1352487 - RNA, 24 nt, Human
ccaaagugcugggauuacaggugu

SEQ ID NO: 1352488 - RNA, 22 nt, Human
ccacccacuggaugccauacca

SEQ ID NO: 1352489 - RNA, 22 nt, Human
ccagcuccagagaaggugggga

SEQ ID NO: 1352490 - RNA, 23 nt, Human
ccagcuccagagaagguggggag

SEQ ID NO: 1352491 - RNA, 22 nt, Human
ccaggaagggaggacgggggca

SEQ ID NO: 1352492 - RNA, 19 nt, Human
ccauguuggccaggcuggu

SEQ ID NO: 1352493 - RNA, 21 nt, Human
ccauguuggccaggcuggucu

SEQ ID NO: 1352494 - RNA, 27 nt, Human
cccaccaccaugcccagcuaauuuauu

SEQ ID NO: 1352495 - RNA, 18 nt, Human
cccacuggaugccauacc

SEQ ID NO: 1352496 - RNA, 24 nt, Human
cccaggguucaagccaucuuccug

SEQ ID NO: 1352497 - RNA, 18 nt, Human
ccccaaaggcccccucuc

SEQ ID NO: 1352498 - RNA, 19 nt, Human
ccccaaaggcccccucucc

SEQ ID NO: 1352499 - RNA, 20 nt, Human
ccccacaccuugugcgcucu

SEQ ID NO: 1352500 - RNA, 20 nt, Human
cccccaaaggcccccucucc

SEQ ID NO: 1352501 - RNA, 19 nt, Human
cccccaccccccuggccuc

SEQ ID NO: 1352502 - RNA, 20 nt, Human
cccccaccccccuggccucc

SEQ ID NO: 1352503 - RNA, 23 nt, Human
ccccccaccccccuggccuccac

SEQ ID NO: 1352504 - RNA, 25 nt, Human
cccccccaccccccuggccuccacc

SEQ ID NO: 1352505 - RNA, 21 nt, Human
ccccccuggccuccacccacu

SEQ ID NO: 1352506 - RNA, 18 nt, Human
cccccucuccuaacacca

SEQ ID NO: 1352507 - RNA, 20 nt, Human
cccccuggccuccacccacu

SEQ ID NO: 1352508 - RNA, 19 nt, Human
ccccgcgccagggccuccc

SEQ ID NO: 1352509 - RNA, 20 nt, Human
ccccugagggugcugguccu

SEQ ID NO: 1352510 - RNA, 24 nt, Human
cccgaagugcugggauuacaggug

SEQ ID NO: 1352511 - RNA, 19 nt, Human
cccgaguagcugggauaau

SEQ ID NO: 1352512 - RNA, 23 nt, Human
cccgaguagcugggauuacaggc

SEQ ID NO: 1352513 - RNA, 24 nt, Human
cccgaguagcugggauuacaggca

SEQ ID NO: 1352514 - RNA, 24 nt, Human
cccguccuauuugcauuuuaagaa

SEQ ID NO: 1352515 - RNA, 18 nt, Human
cccuccugacccagucac

SEQ ID NO: 1352516 - RNA, 19 nt, Human
cccugagccacacaagccc

SEQ ID NO: 1352517 - RNA, 23 nt, Human
ccgaagugcugggauuacaggug

SEQ ID NO: 1352518 - RNA, 24 nt, Human
ccgaagugcugggauuacaggugu

SEQ ID NO: 1352519 - RNA, 23 nt, Human
ccgaguagcugggauuacaggca

SEQ ID NO: 1352520 - RNA, 24 nt, Human
ccgccuucuggguucaagcgauuc

SEQ ID NO: 1352521 - RNA, 19 nt, Human
ccuaccuugaccucccgaa

SEQ ID NO: 1352522 - RNA, 24 nt, Human
ccugaccuuaggugauccaccuac

SEQ ID NO: 1352523 - RNA, 22 nt, Human
ccugugacaccuguggaccaga

SEQ ID NO: 1352524 - RNA, 24 nt, Human
ccugugacugaggccacaucuggc

SEQ ID NO: 1352525 - RNA, 24 nt, Human
ccuucuggguucaagcgauucuuc

SEQ ID NO: 1352526 - RNA, 18 nt, Human
cgaagcagagaagggaac

SEQ ID NO: 1352527 - RNA, 21 nt, Human
cguccgagccgcagggaugga

SEQ ID NO: 1352528 - RNA, 21 nt, Human
cgugacuggccuuacaccaug

SEQ ID NO: 1352529 - RNA, 21 nt, Human
cuaaaaugugaauggcuaaca

SEQ ID NO: 1352530 - RNA, 19 nt, Human
cucacugcaacuuccgccu

SEQ ID NO: 1352531 - RNA, 25 nt, Human
cucacugcaaucuccgcucccaggg

SEQ ID NO: 1352532 - RNA, 24 nt, Human
cucagucucccgaguagcugggau

SEQ ID NO: 1352533 - RNA, 21 nt, Human
cuccccagccgucacagcuga

SEQ ID NO: 1352534 - RNA, 22 nt, Human
cuccccggcagcccugagccac

SEQ ID NO: 1352535 - RNA, 23 nt, Human
cuccggagccaccguagcucccc

SEQ ID NO: 1352536 - RNA, 22 nt, Human
cuccugaccuugugauucgccc

SEQ ID NO: 1352537 - RNA, 21 nt, Human
cucuugucgccaggcuggagu

SEQ ID NO: 1352538 - RNA, 23 nt, Human
cugccucagucucccgaguagcu

SEQ ID NO: 1352539 - RNA, 23 nt, Human
cugccuuggccucccgaguagcu

SEQ ID NO: 1352540 - RNA, 21 nt, Human
cugcugggugccgaggguggc

SEQ ID NO: 1352541 - RNA, 19 nt, Human
cuguaggugggaugccagg

SEQ ID NO: 1352542 - RNA, 23 nt, Human
cugugagggccggcuuccuggcu

SEQ ID NO: 1352543 - RNA, 22 nt, Human
cugugcagccucuggugugcag

SEQ ID NO: 1352544 - RNA, 23 nt, Human
cuugcaccgucgcccuggcugug

SEQ ID NO: 1352545 - RNA, 24 nt, Human
cuuggccucccgaguagcugggau

SEQ ID NO: 1352546 - RNA, 21 nt, Human
cuuggugcccccccacccccc

SEQ ID NO: 1352547 - RNA, 26 nt, Human
cuuugacuuggugccuuaaacaacag

SEQ ID NO: 1352548 - RNA, 21 nt, Human
gaagggaggacgggggcagag

SEQ ID NO: 1352549 - RNA, 23 nt, Human
gaagguggggaggggaccccgcg

SEQ ID NO: 1352550 - RNA, 24 nt, Human
gaagugcugggauuacagguguga

SEQ ID NO: 1352551 - RNA, 20 nt, Human
gaccccgcgccagggccucc

SEQ ID NO: 1352552 - RNA, 24 nt, Human
gaccuuaggugauccaccuaccuu

SEQ ID NO: 1352553 - RNA, 22 nt, Human
gaccuugugauucgcccaccuc

SEQ ID NO: 1352554 - RNA, 24 nt, Human
gaccuugugauucgcccaccucag

SEQ ID NO: 1352555 - RNA, 25 nt, Human
gacggagucucgcucuugucgccag

SEQ ID NO: 1352556 - RNA, 18 nt, Human
gacuggcauuggggcugg

SEQ ID NO: 1352557 - RNA, 23 nt, Human
gagaugggguuucauuauguugg

SEQ ID NO: 1352558 - RNA, 24 nt, Human
gagaugggguuucauuauguuggc

SEQ ID NO: 1352559 - RNA, 25 nt, Human
gaguagcugggauuacaggcaccca

SEQ ID NO: 1352560 - RNA, 21 nt, Human
gaugccuucccauguccccac

SEQ ID NO: 1352561 - RNA, 18 nt, Human
gaugugggguggggaggg

SEQ ID NO: 1352562 - RNA, 24 nt, Human
gauuacaggcacccaccaccaugc

SEQ ID NO: 1352563 - RNA, 18 nt, Human
gauuacaggugugagcca

SEQ ID NO: 1352564 - RNA, 21 nt, Human
gauuacaggugugagccaccg

SEQ ID NO: 1352565 - RNA, 22 nt, Human
gauuacaggugugagccaccgu

SEQ ID NO: 1352566 - RNA, 19 nt, Human
gauuacaggugugagcuac

SEQ ID NO: 1352567 - RNA, 23 nt, Human
gauuacaggugugagcuaccuca

SEQ ID NO: 1352568 - RNA, 18 nt, Human
gcaccgucgcccuggcug

SEQ ID NO: 1352569 - RNA, 19 nt, Human
gcagccucuggugugcagc

SEQ ID NO: 1352570 - RNA, 20 nt, Human
gcagccucuggugugcagcu

SEQ ID NO: 1352571 - RNA, 19 nt, Human
gcagggccaggucucagga

SEQ ID NO: 1352572 - RNA, 23 nt, Human
gccaccguagcuccccagccguc

SEQ ID NO: 1352573 - RNA, 20 nt, Human
gccaucuuccugccuuggcc

SEQ ID NO: 1352574 - RNA, 20 nt, Human
gccauguuggccaggcuggu

SEQ ID NO: 1352575 - RNA, 21 nt, Human
gcccaccccuccccccacacc

SEQ ID NO: 1352576 - RNA, 22 nt, Human
gcccggcuaauuuuuguauuuu

SEQ ID NO: 1352577 - RNA, 21 nt, Human
gcccugagccacacaagcccc

SEQ ID NO: 1352578 - RNA, 24 nt, Human
gccucagucucccgaguagcuggg

SEQ ID NO: 1352579 - RNA, 20 nt, Human
gccuuggccucccgaguagc

SEQ ID NO: 1352580 - RNA, 20 nt, Human
gccuugggacucgccggacu

SEQ ID NO: 1352581 - RNA, 24 nt, Human
gcggcugccugcgggccauacucu

SEQ ID NO: 1352582 - RNA, 18 nt, Human
gcuaguccugagcuccag

SEQ ID NO: 1352583 - RNA, 19 nt, Human
gcuggagugcaauggcacg

SEQ ID NO: 1352584 - RNA, 18 nt, Human
ggagaacccagccuuucu

SEQ ID NO: 1352585 - RNA, 20 nt, Human
ggaggacgggggcagagggg

SEQ ID NO: 1352586 - RNA, 21 nt, Human
ggaggccaccugugacaccug

SEQ ID NO: 1352587 - RNA, 18 nt, Human
ggaggguguggggcagcg

SEQ ID NO: 1352588 - RNA, 19 nt, Human
ggaggguguggggcagcgg

SEQ ID NO: 1352589 - RNA, 24 nt, Human
ggcagacucgguucugugagggcc

SEQ ID NO: 1352590 - RNA, 20 nt, Human
ggcagccagggcacagaugc

SEQ ID NO: 1352591 - RNA, 21 nt, Human
ggcugccugcgggccauacuc

SEQ ID NO: 1352592 - RNA, 23 nt, Human
ggcuggucucgaacuccugaccu

SEQ ID NO: 1352593 - RNA, 23 nt, Human
ggcuggucuucaacuccugaccu

SEQ ID NO: 1352594 - RNA, 24 nt, Human
ggcugugcaguggcgcgaucucgg

SEQ ID NO: 1352595 - RNA, 22 nt, Human
gggcuccacccuccugacccag

SEQ ID NO: 1352596 - RNA, 22 nt, Human
gggguuucauuauguuggccag

SEQ ID NO: 1352597 - RNA, 23 nt, Human
ggguagcaugagguucugucuca

SEQ ID NO: 1352598 - RNA, 20 nt, Human
ggguucaagcgauucuucug

SEQ ID NO: 1352599 - RNA, 20 nt, Human
ggucucgaacuccugaccuu

SEQ ID NO: 1352600 - RNA, 23 nt, Human
guagagacagguuuuugccaugu

SEQ ID NO: 1352601 - RNA, 18 nt, Human
guagcugggauuacaggc

SEQ ID NO: 1352602 - RNA, 23 nt, Human
gucuuggagcguguggcagggcc

SEQ ID NO: 1352603 - RNA, 24 nt, Human
gugauccaccuaccuugaccuccc

SEQ ID NO: 1352604 - RNA, 24 nt, Human
gugauucgcccaccucagccuccc

SEQ ID NO: 1352605 - RNA, 23 nt, Human
gugcaguggcgcgaucucggcuc

SEQ ID NO: 1352606 - RNA, 21 nt, Human
guggggcagcagcgccaggca

SEQ ID NO: 1352607 - RNA, 19 nt, Human
guggggugggggcugacuc

SEQ ID NO: 1352608 - RNA, 24 nt, Human
uaauuuauuguauuuuuaguagag

SEQ ID NO: 1352609 - RNA, 24 nt, Human
uaauuuuuguauuuuuaguagaga

SEQ ID NO: 1352610 - RNA, 22 nt, Human
uacagguggauuucugcccuuu

SEQ ID NO: 1352611 - RNA, 23 nt, Human
uacaggugugagccaccgugacu

SEQ ID NO: 1352612 - RNA, 21 nt, Human
uaccucacccguccuauuugc

SEQ ID NO: 1352613 - RNA, 22 nt, Human
uagagacagguuuuugccaugu

SEQ ID NO: 1352614 - RNA, 19 nt, Human
uaggugcccaccaccacgc

SEQ ID NO: 1352615 - RNA, 21 nt, Human
uaggugcccaccaccacgccc

SEQ ID NO: 1352616 - RNA, 24 nt, Human
uaguagagacagguuuuugccaug

SEQ ID NO: 1352617 - RNA, 24 nt, Human
uaguagagaugggguuucauuaug

SEQ ID NO: 1352618 - RNA, 22 nt, Human
uaguccugagcuccagcugccc

SEQ ID NO: 1352619 - RNA, 24 nt, Human
uauguuggccaggcuggucucgaa

SEQ ID NO: 1352620 - RNA, 25 nt, Human
ucaacuccugaccuuaggugaucca

SEQ ID NO: 1352621 - RNA, 19 nt, Human
ucaagcgauucuucugccu

SEQ ID NO: 1352622 - RNA, 24 nt, Human
ucacugcaacuuccgccuucuggg

SEQ ID NO: 1352623 - RNA, 23 nt, Human
ucacugcaaucuccgcucccagg

SEQ ID NO: 1352624 - RNA, 23 nt, Human
ucacugcaaucuccgcucccagg

SEQ ID NO: 1352625 - RNA, 24 nt, Human
ucacugcaaucuccgcucccaggg

SEQ ID NO: 1352626 - RNA, 18 nt, Human
ucagccucccaaagugcu

SEQ ID NO: 1352627 - RNA, 20 nt, Human
ucagggaugucgggguggcc

SEQ ID NO: 1352628 - RNA, 23 nt, Human
ucagucucccgaguagcugggau

SEQ ID NO: 1352629 - RNA, 22 nt, Human
ucauuauguuggccaggcuggu

SEQ ID NO: 1352630 - RNA, 22 nt, Human
uccacgcaggccugaguggccg

SEQ ID NO: 1352631 - RNA, 25 nt, Human
uccacuugucuggguagcaugaggu

SEQ ID NO: 1352632 - RNA, 23 nt, Human
ucccaaagugcugggauuacagg

SEQ ID NO: 1352633 - RNA, 18 nt, Human
ucccaggguucaagccau

SEQ ID NO: 1352634 - RNA, 22 nt, Human
ucccaggguucaagccaucuuc

SEQ ID NO: 1352635 - RNA, 19 nt, Human
ucccgaagugcugggauua

SEQ ID NO: 1352636 - RNA, 23 nt, Human
ucccgaagugcugggauuacagg

SEQ ID NO: 1352637 - RNA, 24 nt, Human
ucccgaagugcugggauuacaggu

SEQ ID NO: 1352638 - RNA, 23 nt, Human
ucccgaguagcugggauaauagg

SEQ ID NO: 1352639 - RNA, 24 nt, Human
ucccgaguagcugggauuacaggc

SEQ ID NO: 1352640 - RNA, 18 nt, Human
ucccugagaagaagcagu

SEQ ID NO: 1352641 - RNA, 19 nt, Human
ucccuugggaacaaaaccc

SEQ ID NO: 1352642 - RNA, 22 nt, Human
ucccuugggaacaaaaccccug

SEQ ID NO: 1352643 - RNA, 23 nt, Human
ucccuugggaacaaaaccccugg

SEQ ID NO: 1352644 - RNA, 25 nt, Human
ucccuugggaacaaaaccccugggu

SEQ ID NO: 1352645 - RNA, 19 nt, Human
uccucuuccgagggcucca

SEQ ID NO: 1352646 - RNA, 19 nt, Human
uccugagcuccagcugccc

SEQ ID NO: 1352647 - RNA, 20 nt, Human
ucgaggugccagggagucuc

SEQ ID NO: 1352648 - RNA, 22 nt, Human
ucgcccuggcugugcaguggcg

SEQ ID NO: 1352649 - RNA, 23 nt, Human
ucgggguggccgugugcccagga

SEQ ID NO: 1352650 - RNA, 25 nt, Human
ucuccaggauggggccagcucgucc

SEQ ID NO: 1352651 - RNA, 22 nt, Human
ucuccaggauggggccagcucu

SEQ ID NO: 1352652 - RNA, 23 nt, Human
ucucgcucuugucgccaggcugg

SEQ ID NO: 1352653 - RNA, 24 nt, Human
ucucgcucuugucgccaggcugga

SEQ ID NO: 1352654 - RNA, 22 nt, Human
ucugcugaaagccacucagcuc

SEQ ID NO: 1352655 - RNA, 24 nt, Human
ucuugucgccaggcuggagugcaa

SEQ ID NO: 1352656 - RNA, 24 nt, Human
ucuuuuuuuuuugagacggagucu

SEQ ID NO: 1352657 - RNA, 23 nt, Human
ugacagguugacaugcaccuucc

SEQ ID NO: 1352658 - RNA, 18 nt, Human
ugacaugcaccuuccuug

SEQ ID NO: 1352659 - RNA, 21 nt, Human
ugacaugcaccuuccuugggc

SEQ ID NO: 1352660 - RNA, 19 nt, Human
ugaccuuaggugauccacc

SEQ ID NO: 1352661 - RNA, 20 nt, Human
ugacuggccuuacaccaugu

SEQ ID NO: 1352662 - RNA, 23 nt, Human
ugacuuggugccuuaaacaacag

SEQ ID NO: 1352663 - RNA, 22 nt, Human
ugagacggagucuugcaccguc

SEQ ID NO: 1352664 - RNA, 19 nt, Human
ugagagcaauugaccuaaa

SEQ ID NO: 1352665 - RNA, 18 nt, Human
ugagcguggcgccugcgu

SEQ ID NO: 1352666 - RNA, 19 nt, Human
ugaggcagaugcugcuggg

SEQ ID NO: 1352667 - RNA, 19 nt, Human
ugagggccggcuuccuggc

SEQ ID NO: 1352668 - RNA, 19 nt, Human
ugaggguuucagcaugugg

SEQ ID NO: 1352669 - RNA, 24 nt, Human
ugauucgcccaccucagccuccca

SEQ ID NO: 1352670 - RNA, 21 nt, Human
ugcagcuuggagaacccagcc

SEQ ID NO: 1352671 - RNA, 22 nt, Human
ugcaguggcgcgaucucggcuc

SEQ ID NO: 1352672 - RNA, 21 nt, Human
ugccaggaagugugauuaagc

SEQ ID NO: 1352673 - RNA, 27 nt, Human
ugccauguuggccaggcuggucuucaa

SEQ ID NO: 1352674 - RNA, 18 nt, Human
ugcccaccccucccccca

SEQ ID NO: 1352675 - RNA, 25 nt, Human
ugcccccccaccccccuggccucca

SEQ ID NO: 1352676 - RNA, 23 nt, Human
ugccucagucucccgaguagcug

SEQ ID NO: 1352677 - RNA, 24 nt, Human
ugccucagucucccgaguagcugg

SEQ ID NO: 1352678 - RNA, 23 nt, Human
ugccugaaggcauaggagggggc

SEQ ID NO: 1352679 - RNA, 20 nt, Human
ugccuuggccucccgaguaa

SEQ ID NO: 1352680 - RNA, 22 nt, Human
ugcgcucugugcaguggggcag

SEQ ID NO: 1352681 - RNA, 20 nt, Human
ugcugggauuacagguguga

SEQ ID NO: 1352682 - RNA, 24 nt, Human
ugcugggauuacaggugugagcca

SEQ ID NO: 1352683 - RNA, 23 nt, Human
uggagcguguggcagggccaggu

SEQ ID NO: 1352684 - RNA, 23 nt, Human
uggagugcaauggcacgaucuca

SEQ ID NO: 1352685 - RNA, 24 nt, Human
uggagugcaauggcacgaucucag

SEQ ID NO: 1352686 - RNA, 24 nt, Human
uggcacgaucucagcucacugcaa

SEQ ID NO: 1352687 - RNA, 23 nt, Human
uggcauuggggcuggaugacgcu

SEQ ID NO: 1352688 - RNA, 24 nt, Human
uggccaggcuggucucgaacuccu

SEQ ID NO: 1352689 - RNA, 24 nt, Human
uggccaggcuggucuucaacuccu

SEQ ID NO: 1352690 - RNA, 24 nt, Human
uggcuaacauaccagaacuauuug

SEQ ID NO: 1352691 - RNA, 20 nt, Human
uggcugggggcuccagcgac

SEQ ID NO: 1352692 - RNA, 21 nt, Human
ugggauaauaggugcccacca

SEQ ID NO: 1352693 - RNA, 19 nt, Human
ugggauuacaggcacccac

SEQ ID NO: 1352694 - RNA, 21 nt, Human
ugggauuacaggcacccacca

SEQ ID NO: 1352695 - RNA, 22 nt, Human
ugggauuacaggcacccaccac

SEQ ID NO: 1352696 - RNA, 24 nt, Human
ugggauuacaggcacccaccacca

SEQ ID NO: 1352697 - RNA, 18 nt, Human
ugggauuacaggugugag

SEQ ID NO: 1352698 - RNA, 18 nt, Human
ugggauuacaggugugag

SEQ ID NO: 1352699 - RNA, 19 nt, Human
ugggauuacaggugugagc

SEQ ID NO: 1352700 - RNA, 21 nt, Human
ugggauuacaggugugagcca

SEQ ID NO: 1352701 - RNA, 22 nt, Human
ugggauuacaggugugagccac

SEQ ID NO: 1352702 - RNA, 23 nt, Human
ugggauuacaggugugagccacc

SEQ ID NO: 1352703 - RNA, 23 nt, Human
ugggauuacaggugugagccacc

SEQ ID NO: 1352704 - RNA, 24 nt, Human
ugggauuacaggugugagccaccg

SEQ ID NO: 1352705 - RNA, 21 nt, Human
ugggauuacaggugugagcua

SEQ ID NO: 1352706 - RNA, 24 nt, Human
ugggauuacaggugugagcuaacc

SEQ ID NO: 1352707 - RNA, 22 nt, Human
ugggauuacaggugugagcuac

SEQ ID NO: 1352708 - RNA, 23 nt, Human
ugggauuacaggugugagcuacc

SEQ ID NO: 1352709 - RNA, 23 nt, Human
ugggauuacaggugugagcuacc

SEQ ID NO: 1352710 - RNA, 25 nt, Human
ugggauuacaggugugagcuaccuc

SEQ ID NO: 1352711 - RNA, 23 nt, Human
uggggcagcagcgccaggcaaaa

SEQ ID NO: 1352712 - RNA, 21 nt, Human
uggggccagcucguccgagcc

SEQ ID NO: 1352713 - RNA, 24 nt, Human
uggggcugugagugucugugccca

SEQ ID NO: 1352714 - RNA, 21 nt, Human
uggggucuccccggcagcccu

SEQ ID NO: 1352715 - RNA, 22 nt, Human
ugggguggggagggcugugaca

SEQ ID NO: 1352716 - RNA, 24 nt, Human
ugggguuucauuauguuggccagg

SEQ ID NO: 1352717 - RNA, 19 nt, Human
ugggguuuggggaugccac

SEQ ID NO: 1352718 - RNA, 20 nt, Human
uggguucaagcgauucuucu

SEQ ID NO: 1352719 - RNA, 23 nt, Human
uggguucaagcgauucuucugcc

SEQ ID NO: 1352720 - RNA, 24 nt, Human
uggguucaagcgauucuucugccu

SEQ ID NO: 1352721 - RNA, 21 nt, Human
uguauuuuuaguagagauggg

SEQ ID NO: 1352722 - RNA, 18 nt, Human
ugucuggguagcaugagg

SEQ ID NO: 1352723 - RNA, 21 nt, Human
ugucugugcccaccccucccc

SEQ ID NO: 1352724 - RNA, 25 nt, Human
ugucugugcccaccccuccccccac

SEQ ID NO: 1352725 - RNA, 24 nt, Human
ugugauucgcccaccucagccucc

SEQ ID NO: 1352726 - RNA, 20 nt, Human
ugugcagccucuggugugca

SEQ ID NO: 1352727 - RNA, 20 nt, Human
ugugcaguggcgcgaucucg

SEQ ID NO: 1352728 - RNA, 20 nt, Human
ugugcaguggcgcgaucucg

SEQ ID NO: 1352729 - RNA, 23 nt, Human
ugugcaguggcgcgaucucggcu

SEQ ID NO: 1352730 - RNA, 20 nt, Human
ugugggguggggagggcugu

SEQ ID NO: 1352731 - RNA, 19 nt, Human
uguuuucuuuuuuuuuuga

SEQ ID NO: 1352732 - RNA, 24 nt, Human
uuaguagagacagguuuuugccau

SEQ ID NO: 1352733 - RNA, 20 nt, Human
uuaguagagaugggguuuca

SEQ ID NO: 1352734 - RNA, 20 nt, Human
uuaguagagaugggguuuca

SEQ ID NO: 1352735 - RNA, 24 nt, Human
uuaguagagaugggguuucauuau

SEQ ID NO: 1352736 - RNA, 27 nt, Human
uuauugguggcugggaaguacaaguca

SEQ ID NO: 1352737 - RNA, 20 nt, Human
uucaagccaucuuccugccu

SEQ ID NO: 1352738 - RNA, 23 nt, Human
uucaagcgauucuucugccucag

SEQ ID NO: 1352739 - RNA, 25 nt, Human
uucaagcgauucuucugccucaguc

SEQ ID NO: 1352740 - RNA, 21 nt, Human
uucgcccaccucagccuccca

SEQ ID NO: 1352741 - RNA, 24 nt, Human
uucuggguucaagcgauucuucug

SEQ ID NO: 1352742 - RNA, 21 nt, Human
uugcaccgucgcccuggcugu

SEQ ID NO: 1352743 - RNA, 24 nt, Human
uugccauguuggccaggcuggucu

SEQ ID NO: 1352744 - RNA, 27 nt, Human
uugccggaggguguggggccgggcccc

SEQ ID NO: 1352745 - RNA, 23 nt, Human
uuguauuuuuaguagagaugggg

SEQ ID NO: 1352746 - RNA, 24 nt, Human
uuuauuguauuuuuaguagagaug

SEQ ID NO: 1352747 - RNA, 23 nt, Human
uuucauuauguuggccaggcugu

SEQ ID NO: 1352748 - RNA, 25 nt, Human
uuuuauuuuuuugagacggagucuc

SEQ ID NO: 1352749 - RNA, 23 nt, Human
uuuugccauguuggccaggcugg

SEQ ID NO: 1352750 - RNA, 24 nt, Human
uuuuuaguagagaugggguuucau

SEQ ID NO: 1352751 - RNA, 23 nt, Human
uuuuugccauguuggccaggcug

SEQ ID NO: 1352752 - RNA, 20 nt, Human
uuuuuguauuuuuaguagag

SEQ ID NO: 1352753 - RNA, 23 nt, Human
aaaaacuaauguaaacccaggaa

SEQ ID NO: 1352754 - RNA, 23 nt, Human
aaaaggaaaagaaaaaaaaagag

SEQ ID NO: 1352755 - RNA, 29 nt, Human
aaaaggaaaagaaaaaaaaagaguagaag

SEQ ID NO: 1352756 - RNA, 23 nt, Human
aaacaggaauggagaaaagggac

SEQ ID NO: 1352757 - RNA, 18 nt, Human
aagaaggccgcucuccuc

SEQ ID NO: 1352758 - RNA, 22 nt, Human
aagcaagcagcagcucucacac

SEQ ID NO: 1352759 - RNA, 23 nt, Human
aaugacuucaaggccugagaagg

SEQ ID NO: 1352760 - RNA, 25 nt, Human
acaagcaagcagcagcucucacaca

SEQ ID NO: 1352761 - RNA, 21 nt, Human
acaccuguaaucccagcacuu

SEQ ID NO: 1352762 - RNA, 19 nt, Human
acacugcagcacuccaggg

SEQ ID NO: 1352763 - RNA, 23 nt, Human
acaucauaaaacaaaauuagaac

SEQ ID NO: 1352764 - RNA, 18 nt, Human
acuccguugcccaggcug

SEQ ID NO: 1352765 - RNA, 19 nt, Human
acuccguugcccaggcugg

SEQ ID NO: 1352766 - RNA, 26 nt, Human
acuccguugcccaggcuggagaauca

SEQ ID NO: 1352767 - RNA, 19 nt, Human
acuuuauauauuuauauau

SEQ ID NO: 1352768 - RNA, 23 nt, Human
agaaacaauaauaguuacauaac

SEQ ID NO: 1352769 - RNA, 24 nt, Human
aggaaaaugaaaagucuucacagc

SEQ ID NO: 1352770 - RNA, 26 nt, Human
aggcagguggaccacuugaggucaga

SEQ ID NO: 1352771 - RNA, 19 nt, Human
aggugcgguggcuuacacc

SEQ ID NO: 1352772 - RNA, 24 nt, Human
aggugcgguggcuuacaccuguaa

SEQ ID NO: 1352773 - RNA, 18 nt, Human
auagaaacuggccaggug

SEQ ID NO: 1352774 - RNA, 22 nt, Human
aucccagcacuuugggaggcca

SEQ ID NO: 1352775 - RNA, 23 nt, Human
caacccaauuuuauuccuaaacu

SEQ ID NO: 1352776 - RNA, 20 nt, Human
caagagccacaccaugguga

SEQ ID NO: 1352777 - RNA, 24 nt, Human
caaggcagguggaccacuugaggu

SEQ ID NO: 1352778 - RNA, 26 nt, Human
caaggcagguggaccacuugagguca

SEQ ID NO: 1352779 - RNA, 23 nt, Human
caaguuaagauuuucuaagaccu

SEQ ID NO: 1352780 - RNA, 22 nt, Human
cacacugcagcacuccagggua

SEQ ID NO: 1352781 - RNA, 20 nt, Human
caccauggugagaaaggaca

SEQ ID NO: 1352782 - RNA, 19 nt, Human
caccuguaaucccagcacu

SEQ ID NO: 1352783 - RNA, 24 nt, Human
caccuguaaucccagcacuuuggg

SEQ ID NO: 1352784 - RNA, 22 nt, Human
cacuccguugcccaggcuggag

SEQ ID NO: 1352785 - RNA, 24 nt, Human
cagcacuuugggaggccaaggcag

SEQ ID NO: 1352786 - RNA, 25 nt, Human
cagcacuuugggaggccaaggcagg

SEQ ID NO: 1352787 - RNA, 24 nt, Human
cagcucucuguaucuuccaaucuu

SEQ ID NO: 1352788 - RNA, 24 nt, Human
caggaaaaaacuaauguaaaccca

SEQ ID NO: 1352789 - RNA, 24 nt, Human
caggccuaguggagaaacaagcaa

SEQ ID NO: 1352790 - RNA, 18 nt, Human
cagguggaccacuugagg

SEQ ID NO: 1352791 - RNA, 24 nt, Human
cagguggaccacuugaggucagaa

SEQ ID NO: 1352792 - RNA, 23 nt, Human
ccacaccauggugagaaaggaca

SEQ ID NO: 1352793 - RNA, 19 nt, Human
ccacaggggaaaaaaguaa

SEQ ID NO: 1352794 - RNA, 19 nt, Human
ccaggcuggagaaucaaaa

SEQ ID NO: 1352795 - RNA, 18 nt, Human
ccccauccucaagcgcca

SEQ ID NO: 1352796 - RNA, 20 nt, Human
ccccccauccucaagcgcca

SEQ ID NO: 1352797 - RNA, 25 nt, Human
cccccuccccccauccucaagcgcc

SEQ ID NO: 1352798 - RNA, 23 nt, Human
cccguaggcaacugugucggcuc

SEQ ID NO: 1352799 - RNA, 27 nt, Human
cccguaggcaacugugucggcuccaga

SEQ ID NO: 1352800 - RNA, 20 nt, Human
ccucaagcgccaaaaguacu

SEQ ID NO: 1352801 - RNA, 24 nt, Human
ccucuuacagucaaccuuuggagu

SEQ ID NO: 1352802 - RNA, 19 nt, Human
ccuggugcuaagucacccc

SEQ ID NO: 1352803 - RNA, 18 nt, Human
cuagugccauaaaaaagg

SEQ ID NO: 1352804 - RNA, 19 nt, Human
cucacacacugcagcacuc

SEQ ID NO: 1352805 - RNA, 20 nt, Human
cucuccucuuacagucaacc

SEQ ID NO: 1352806 - RNA, 26 nt, Human
cugcagcacuccaggguaggcccuaa

SEQ ID NO: 1352807 - RNA, 22 nt, Human
cuuacaccuguaaucccagcac

SEQ ID NO: 1352808 - RNA, 18 nt, Human
cuuacagucaaccuuugg

SEQ ID NO: 1352809 - RNA, 23 nt, Human
gaaaaaacuaauguaaacccagg

SEQ ID NO: 1352810 - RNA, 22 nt, Human
gaaaaacaaaauuaagaaaugc

SEQ ID NO: 1352811 - RNA, 22 nt, Human
gaaagaaaauuauuuguccaca

SEQ ID NO: 1352812 - RNA, 19 nt, Human
gacauggguagcuucugag

SEQ ID NO: 1352813 - RNA, 24 nt, Human
gaccacuugaggucagaaguucga

SEQ ID NO: 1352814 - RNA, 21 nt, Human
gagaaacaagcaagcagcagc

SEQ ID NO: 1352815 - RNA, 18 nt, Human
gaggaggggagugagaag

SEQ ID NO: 1352816 - RNA, 20 nt, Human
ggaauccucuacugccaccu

SEQ ID NO: 1352817 - RNA, 18 nt, Human
ggagagcuaauggaaccu

SEQ ID NO: 1352818 - RNA, 21 nt, Human
ggcuuacaccuguaaucccag

SEQ ID NO: 1352819 - RNA, 23 nt, Human
ggugaggaggggagugagaagaa

SEQ ID NO: 1352820 - RNA, 23 nt, Human
gguggcuuacaccuguaauccca

SEQ ID NO: 1352821 - RNA, 24 nt, Human
gguggcuuacaccuguaaucccag

SEQ ID NO: 1352822 - RNA, 23 nt, Human
guggcuuacaccuguaaucccag

SEQ ID NO: 1352823 - RNA, 20 nt, Human
guguaauuuggaaguagggu

SEQ ID NO: 1352824 - RNA, 23 nt, Human
uaaaacaaaauuagaacauacaa

SEQ ID NO: 1352825 - RNA, 19 nt, Human
uaaagcaaaaggaauccuc

SEQ ID NO: 1352826 - RNA, 21 nt, Human
uaaauaaucccccucccccca

SEQ ID NO: 1352827 - RNA, 20 nt, Human
uaaucccccuccccccaucc

SEQ ID NO: 1352828 - RNA, 22 nt, Human
uaaucccccuccccccauccuc

SEQ ID NO: 1352829 - RNA, 24 nt, Human
uacaccuguaaucccagcacuuug

SEQ ID NO: 1352830 - RNA, 20 nt, Human
uauucuuaagggcaggaaaa

SEQ ID NO: 1352831 - RNA, 20 nt, Human
ucagggcuccaagagccacc

SEQ ID NO: 1352832 - RNA, 19 nt, Human
uccucuacugccaccucgg

SEQ ID NO: 1352833 - RNA, 23 nt, Human
ucucacuccguugcccaggcugg

SEQ ID NO: 1352834 - RNA, 24 nt, Human
ucucacuccguugcccaggcugga

SEQ ID NO: 1352835 - RNA, 24 nt, Human
ucucacuccguugcccaggcugga

SEQ ID NO: 1352836 - RNA, 25 nt, Human
ucucacuccguugcccaggcuggag

SEQ ID NO: 1352837 - RNA, 19 nt, Human
ucuuuucuuuucucuuuuu

SEQ ID NO: 1352838 - RNA, 20 nt, Human
ugacuucaaggccugagaag

SEQ ID NO: 1352839 - RNA, 18 nt, Human
ugagaaaggacaugggua

SEQ ID NO: 1352840 - RNA, 22 nt, Human
ugagaagaaaucaaaagcucau

SEQ ID NO: 1352841 - RNA, 18 nt, Human
ugagauaauggcaagaga

SEQ ID NO: 1352842 - RNA, 22 nt, Human
ugagauggagucucacuccguu

SEQ ID NO: 1352843 - RNA, 25 nt, Human
ugauagaaacuggccaggugcggug

SEQ ID NO: 1352844 - RNA, 22 nt, Human
ugccauaaaaaaggaaaagaaa

SEQ ID NO: 1352845 - RNA, 24 nt, Human
uggaccacuugaggucagaaguuc

SEQ ID NO: 1352846 - RNA, 20 nt, Human
uggagaaaaacaaaauuaag

SEQ ID NO: 1352847 - RNA, 22 nt, Human
uggagaaacaagcaagcagcag

SEQ ID NO: 1352848 - RNA, 24 nt, Human
uggagucucacuccguugcccagg

SEQ ID NO: 1352849 - RNA, 24 nt, Human
uggccaggugcgguggcuuacacc

SEQ ID NO: 1352850 - RNA, 21 nt, Human
uggcuuacaccuguaauccca

SEQ ID NO: 1352851 - RNA, 24 nt, Human
uggcuuacaccuguaaucccagca

SEQ ID NO: 1352852 - RNA, 19 nt, Human
ugugugagcagcaaugagg

SEQ ID NO: 1352853 - RNA, 21 nt, Human
uuaaauaaucccccucccccc

SEQ ID NO: 1352854 - RNA, 19 nt, Human
uuaagauuuucuaagaccu

SEQ ID NO: 1352855 - RNA, 21 nt, Human
uuaagggcaggaaaaaacuaa

SEQ ID NO: 1352856 - RNA, 18 nt, Human
uucaggcuaagguaagaa

SEQ ID NO: 1352857 - RNA, 19 nt, Human
uuccuaaacuaccugggcu

SEQ ID NO: 1352858 - RNA, 19 nt, Human
uucucuuuuuugugagaug

SEQ ID NO: 1352859 - RNA, 23 nt, Human
uuggagagcuaauggaaccuggu

SEQ ID NO: 1352860 - RNA, 23 nt, Human
uuggagcaggccuaguggagaaa

SEQ ID NO: 1352861 - RNA, 22 nt, Human
uuuaaauaaucccccucccccc

SEQ ID NO: 1352862 - RNA, 21 nt, Human
uuucucuuuuuugugagaugg

SEQ ID NO: 1352863 - RNA, 21 nt, Human
uuuggaaguagggugaggagg

SEQ ID NO: 1352864 - RNA, 27 nt, Human
uuuuaaauaaucccccuccccccaucc

SEQ ID NO: 1352865 - RNA, 22 nt, Human
uuuucuuuucuuuucucuuuuu

SEQ ID NO: 1352866 - RNA, 21 nt, Human
aacccagauugauagcuucaa

SEQ ID NO: 1352867 - RNA, 18 nt, Human
acagguaggcagggcgca

SEQ ID NO: 1352868 - RNA, 19 nt, Human
accccucugcccuccccgc

SEQ ID NO: 1352869 - RNA, 22 nt, Human
accccucugcccuccccgcccu

SEQ ID NO: 1352870 - RNA, 21 nt, Human
accgccaucuccaggccccac

SEQ ID NO: 1352871 - RNA, 21 nt, Human
agagccagccccucuugguuc

SEQ ID NO: 1352872 - RNA, 25 nt, Human
agccagccccucuugggguccucga

SEQ ID NO: 1352873 - RNA, 18 nt, Human
agggcagcccccaccccu

SEQ ID NO: 1352874 - RNA, 25 nt, Human
caaaugccccucuuccucaccgcuc

SEQ ID NO: 1352875 - RNA, 26 nt, Human
caaaugccccucuuccucaccgcucc

SEQ ID NO: 1352876 - RNA, 18 nt, Human
caccgcuccugccccugc

SEQ ID NO: 1352877 - RNA, 23 nt, Human
cagcccugaccccucugcccucc

SEQ ID NO: 1352878 - RNA, 18 nt, Human
caggcaccccaccugccc

SEQ ID NO: 1352879 - RNA, 21 nt, Human
caggcaccccaccugcccccu

SEQ ID NO: 1352880 - RNA, 18 nt, Human
caggcucaggagggugga

SEQ ID NO: 1352881 - RNA, 19 nt, Human
ccagccccucuugguucug

SEQ ID NO: 1352882 - RNA, 20 nt, Human
ccaggcaccccaccugcccc

SEQ ID NO: 1352883 - RNA, 20 nt, Human
ccaggccccaccagcaccca

SEQ ID NO: 1352884 - RNA, 24 nt, Human
cccaccagcacccauccucugacc

SEQ ID NO: 1352885 - RNA, 22 nt, Human
ccccgcccugccuccugccccu

SEQ ID NO: 1352886 - RNA, 24 nt, Human
ccccugcuucuccuccucagcccc

SEQ ID NO: 1352887 - RNA, 23 nt, Human
cccugaccccucugcccuccccg

SEQ ID NO: 1352888 - RNA, 21 nt, Human
ccuaccaccguguccuuaccu

SEQ ID NO: 1352889 - RNA, 20 nt, Human
ccuccaggcucaggagggug

SEQ ID NO: 1352890 - RNA, 24 nt, Human
ccuccccgcccugccuccugcccc

SEQ ID NO: 1352891 - RNA, 24 nt, Human
ccugacccaaccucgaccaaaugc

SEQ ID NO: 1352892 - RNA, 19 nt, Human
ccugaccccucugcccucc

SEQ ID NO: 1352893 - RNA, 22 nt, Human
cgugcugcugacacgauggugg

SEQ ID NO: 1352894 - RNA, 21 nt, Human
cuccaggccccaccagcaccc

SEQ ID NO: 1352895 - RNA, 24 nt, Human
cuccaggccccaccagcacccauc

SEQ ID NO: 1352896 - RNA, 22 nt, Human
cucccaggcaccccaccugccc

SEQ ID NO: 1352897 - RNA, 18 nt, Human
cuccugccccugcuucuc

SEQ ID NO: 1352898 - RNA, 22 nt, Human
cucugaccacggaccucccagg

SEQ ID NO: 1352899 - RNA, 28 nt, Human
cugacacgaugguggcuguggauuuuuc

SEQ ID NO: 1352900 - RNA, 19 nt, Human
cugcccuccccgcccugcc

SEQ ID NO: 1352901 - RNA, 19 nt, Human
cugcccuccccgcccugcc

SEQ ID NO: 1352902 - RNA, 20 nt, Human
cugcccuccccgcccugccu

SEQ ID NO: 1352903 - RNA, 19 nt, Human
cuugguucugagaagcaaa

SEQ ID NO: 1352904 - RNA, 20 nt, Human
gagccagccccucuugguuc

SEQ ID NO: 1352905 - RNA, 24 nt, Human
gcaagaaugcccguccccaugucg

SEQ ID NO: 1352906 - RNA, 20 nt, Human
gccccugcuucuccuccuca

SEQ ID NO: 1352907 - RNA, 21 nt, Human
gccuuugccuaccaccguguc

SEQ ID NO: 1352908 - RNA, 21 nt, Human
ggccuccaggcucaggagggu

SEQ ID NO: 1352909 - RNA, 21 nt, Human
gggcagcccccaccccuggag

SEQ ID NO: 1352910 - RNA, 18 nt, Human
guggcuguggauuuuucg

SEQ ID NO: 1352911 - RNA, 22 nt, Human
uaccugacccaaccucgaccaa

SEQ ID NO: 1352912 - RNA, 21 nt, Human
uagcuucaaagggcagccccc

SEQ ID NO: 1352913 - RNA, 19 nt, Human
uccccgcccugccuccugc

SEQ ID NO: 1352914 - RNA, 20 nt, Human
uccucugaccacggaccucc

SEQ ID NO: 1352915 - RNA, 22 nt, Human
ucugcccuccccgcccugccuc

SEQ ID NO: 1352916 - RNA, 23 nt, Human
ugaauccacacuuaaaacccaga

SEQ ID NO: 1352917 - RNA, 22 nt, Human
ugaccacggaccucccaggcac

SEQ ID NO: 1352918 - RNA, 24 nt, Human
ugacccaaccucgaccaaaugccc

SEQ ID NO: 1352919 - RNA, 19 nt, Human
ugaggaagcggcaagaaug

SEQ ID NO: 1352920 - RNA, 23 nt, Human
ugucaauaaugaauccacacuua

SEQ ID NO: 1352921 - RNA, 20 nt, Human
uucaaagggcagcccccacc

SEQ ID NO: 1352922 - RNA, 23 nt, Human
uuccucaccgcuccugccccugc

SEQ ID NO: 1352923 - RNA, 18 nt, Human
aaagauucucugcagcaa

SEQ ID NO: 1352924 - RNA, 26 nt, Human
aacucccugcagcguugacaccgcac

SEQ ID NO: 1352925 - RNA, 22 nt, Human
aagcagcuuuguggcagugugg

SEQ ID NO: 1352926 - RNA, 23 nt, Human
aagcugccgauaaauuagagagc

SEQ ID NO: 1352927 - RNA, 22 nt, Human
aaggggcugugcagccaggagg

SEQ ID NO: 1352928 - RNA, 22 nt, Human
aaggugccacaacucccugcag

SEQ ID NO: 1352929 - RNA, 22 nt, Human
aagucccuggcagcuguggucc

SEQ ID NO: 1352930 - RNA, 22 nt, Human
acacccuguguccugcucuagg

SEQ ID NO: 1352931 - RNA, 20 nt, Human
acccuggggggaggcgucgg

SEQ ID NO: 1352932 - RNA, 19 nt, Human
acgaagaccaugaagcacc

SEQ ID NO: 1352933 - RNA, 26 nt, Human
acucugaguaauacguuaacaaaaaa

SEQ ID NO: 1352934 - RNA, 19 nt, Human
agaggcuugggugacucug

SEQ ID NO: 1352935 - RNA, 21 nt, Human
agcagcagcagcagcaccgac

SEQ ID NO: 1352936 - RNA, 22 nt, Human
agccccuggcucccaggguucc

SEQ ID NO: 1352937 - RNA, 19 nt, Human
agccgcacuucccuucccc

SEQ ID NO: 1352938 - RNA, 21 nt, Human
aggaagccagccuaggggugg

SEQ ID NO: 1352939 - RNA, 21 nt, Human
aggcagguggugugcgggccg

SEQ ID NO: 1352940 - RNA, 18 nt, Human
aggccucaggcggcccag

SEQ ID NO: 1352941 - RNA, 21 nt, Human
aggcggccaggugcucagagg

SEQ ID NO: 1352942 - RNA, 23 nt, Human
aggggagccuuccgugucccguu

SEQ ID NO: 1352943 - RNA, 21 nt, Human
aggggcugugcagccaggagg

SEQ ID NO: 1352944 - RNA, 27 nt, Human
aguggcggcggcgguguccaggcgacg

SEQ ID NO: 1352945 - RNA, 20 nt, Human
auggagagaacacagccaca

SEQ ID NO: 1352946 - RNA, 21 nt, Human
caaaaaguuucucuuccagug

SEQ ID NO: 1352947 - RNA, 18 nt, Human
cacaacucccugcagcgu

SEQ ID NO: 1352948 - RNA, 19 nt, Human
cacauguccacgaagacca

SEQ ID NO: 1352949 - RNA, 21 nt, Human
caccaccagcccccucccgcc

SEQ ID NO: 1352950 - RNA, 22 nt, Human
cacccauggagagaacacagcc

SEQ ID NO: 1352951 - RNA, 21 nt, Human
cacccgcgccgaccgagccgc

SEQ ID NO: 1352952 - RNA, 21 nt, Human
caccgacagcuugcgcuggaa

SEQ ID NO: 1352953 - RNA, 23 nt, Human
caccggcaggugggcgcugcccc

SEQ ID NO: 1352954 - RNA, 22 nt, Human
caccuucacccucagccaagag

SEQ ID NO: 1352955 - RNA, 19 nt, Human
cacgcagaaggggcugugc

SEQ ID NO: 1352956 - RNA, 23 nt, Human
cacgucgaaguuguuguacuugg

SEQ ID NO: 1352957 - RNA, 19 nt, Human
cacugguccgccugacagg

SEQ ID NO: 1352958 - RNA, 26 nt, Human
cagcagcagcagcagcaccgacagcu

SEQ ID NO: 1352959 - RNA, 20 nt, Human
cagccaggagggccccccuc

SEQ ID NO: 1352960 - RNA, 23 nt, Human
cagcccaggcccccgaccagcag

SEQ ID NO: 1352961 - RNA, 24 nt, Human
cagcccaggcccccgaccagcagc

SEQ ID NO: 1352962 - RNA, 20 nt, Human
cagccccuggcucccagggu

SEQ ID NO: 1352963 - RNA, 18 nt, Human
caggagccaccggcaggu

SEQ ID NO: 1352964 - RNA, 22 nt, Human
caggccagccccugagcuggga

SEQ ID NO: 1352965 - RNA, 21 nt, Human
caggccgggacgauacaucaa

SEQ ID NO: 1352966 - RNA, 23 nt, Human
caggguagggucacaagucccac

SEQ ID NO: 1352967 - RNA, 21 nt, Human
cagggugaugucuaaaguccc

SEQ ID NO: 1352968 - RNA, 23 nt, Human
caugcaggcagguggugugcggg

SEQ ID NO: 1352969 - RNA, 23 nt, Human
ccaccagcccccucccgccuccc

SEQ ID NO: 1352970 - RNA, 24 nt, Human
ccacccauggagagaacacagcca

SEQ ID NO: 1352971 - RNA, 22 nt, Human
ccagccccugagcugggagccu

SEQ ID NO: 1352972 - RNA, 20 nt, Human
cccacacagccccucaggau

SEQ ID NO: 1352973 - RNA, 21 nt, Human
cccacccauggagagaacaca

SEQ ID NO: 1352974 - RNA, 24 nt, Human
cccaccccgcaguacgacccgaag

SEQ ID NO: 1352975 - RNA, 25 nt, Human
cccaggccagccccugagcugggag

SEQ ID NO: 1352976 - RNA, 20 nt, Human
cccagggcguggacgcagcc

SEQ ID NO: 1352977 - RNA, 20 nt, Human
cccaugcccagagugugggg

SEQ ID NO: 1352978 - RNA, 20 nt, Human
cccucaggaugacacacaca

SEQ ID NO: 1352979 - RNA, 20 nt, Human
cccuccggaauugcuccugg

SEQ ID NO: 1352980 - RNA, 19 nt, Human
cccugcuccgggcccgcgc

SEQ ID NO: 1352981 - RNA, 22 nt, Human
cccugcuccgggcccgcgcugg

SEQ ID NO: 1352982 - RNA, 23 nt, Human
ccgcacgagcggcaccaccagcc

SEQ ID NO: 1352983 - RNA, 18 nt, Human
ccgcgcccccaucacaga

SEQ ID NO: 1352984 - RNA, 19 nt, Human
ccgcgccgaccgagccgca

SEQ ID NO: 1352985 - RNA, 28 nt, Human
ccucauggcuccugggccacugguccgc

SEQ ID NO: 1352986 - RNA, 25 nt, Human
ccucccaccugagcccuucuccggc

SEQ ID NO: 1352987 - RNA, 19 nt, Human
ccucccgucccaccuucac

SEQ ID NO: 1352988 - RNA, 20 nt, Human
ccucccgucccaccuucacc

SEQ ID NO: 1352989 - RNA, 24 nt, Human
ccugagcugggagccugcugaggc

SEQ ID NO: 1352990 - RNA, 18 nt, Human
ccugcgggugccccuguc

SEQ ID NO: 1352991 - RNA, 18 nt, Human
ccugcugaggccccuccc

SEQ ID NO: 1352992 - RNA, 18 nt, Human
ccugcugaggccccuccc

SEQ ID NO: 1352993 - RNA, 23 nt, Human
cgacccgaagacaugugagcagg

SEQ ID NO: 1352994 - RNA, 23 nt, Human
cgcaugcaggcagguggugugcg

SEQ ID NO: 1352995 - RNA, 20 nt, Human
cgcccccuccacccgcgccg

SEQ ID NO: 1352996 - RNA, 20 nt, Human
cgccggcggcccagcagcag

SEQ ID NO: 1352997 - RNA, 23 nt, Human
cgccugacaggguagggucacaa

SEQ ID NO: 1352998 - RNA, 22 nt, Human
cggcccagggcagaguaagcag

SEQ ID NO: 1352999 - RNA, 23 nt, Human
cguugacaccgcacgagcggcac

SEQ ID NO: 1353000 - RNA, 23 nt, Human
cucacgcccccuccacccgcgcc

SEQ ID NO: 1353001 - RNA, 25 nt, Human
cucaggacccacacagccccucagg

SEQ ID NO: 1353002 - RNA, 20 nt, Human
cucauggcuccugggccacu

SEQ ID NO: 1353003 - RNA, 19 nt, Human
cucccagaacaggcagaca

SEQ ID NO: 1353004 - RNA, 22 nt, Human
cucccaggguuccccccaggcc

SEQ ID NO: 1353005 - RNA, 22 nt, Human
cucuguguccaggggccuccca

SEQ ID NO: 1353006 - RNA, 19 nt, Human
cugaaggcuggcuggggac

SEQ ID NO: 1353007 - RNA, 18 nt, Human
cugcugaggccccuccca

SEQ ID NO: 1353008 - RNA, 19 nt, Human
cuguccucauggcuccugg

SEQ ID NO: 1353009 - RNA, 23 nt, Human
cuuggugcgggccaggugggagg

SEQ ID NO: 1353010 - RNA, 20 nt, Human
cuuuguggcaguguggugug

SEQ ID NO: 1353011 - RNA, 21 nt, Human
gaagcucccgccuaccugccc

SEQ ID NO: 1353012 - RNA, 19 nt, Human
gaccagcagcauggugacg

SEQ ID NO: 1353013 - RNA, 22 nt, Human
gaccggcauugggccccggcgg

SEQ ID NO: 1353014 - RNA, 20 nt, Human
gagagugcauacggggaggg

SEQ ID NO: 1353015 - RNA, 22 nt, Human
gagugcauacggggaggguggg

SEQ ID NO: 1353016 - RNA, 23 nt, Human
gcagugaacaggcugcagcuaaa

SEQ ID NO: 1353017 - RNA, 18 nt, Human
gcauacggggaggguggg

SEQ ID NO: 1353018 - RNA, 19 nt, Human
gccgaccccacccauggag

SEQ ID NO: 1353019 - RNA, 21 nt, Human
gccgcaugcaggcagguggug

SEQ ID NO: 1353020 - RNA, 18 nt, Human
gccuaggccugggagccc

SEQ ID NO: 1353021 - RNA, 21 nt, Human
gcggaacggagggcccacccc

SEQ ID NO: 1353022 - RNA, 23 nt, Human
gcggaacggagggcccaccccgc

SEQ ID NO: 1353023 - RNA, 24 nt, Human
gcggccaggugcucagagggcacc

SEQ ID NO: 1353024 - RNA, 20 nt, Human
gcggccgcauggugcugggg

SEQ ID NO: 1353025 - RNA, 19 nt, Human
gcgggugccccugucccuc

SEQ ID NO: 1353026 - RNA, 24 nt, Human
ggaaggcgcuggccgaccccaccc

SEQ ID NO: 1353027 - RNA, 18 nt, Human
ggacccacacagccccuc

SEQ ID NO: 1353028 - RNA, 19 nt, Human
ggacucaggacccacacag

SEQ ID NO: 1353029 - RNA, 21 nt, Human
ggagggcccaccccgcaguac

SEQ ID NO: 1353030 - RNA, 25 nt, Human
ggcaccaccagcccccucccgccuc

SEQ ID NO: 1353031 - RNA, 19 nt, Human
ggcaggugggcgcugcccc

SEQ ID NO: 1353032 - RNA, 19 nt, Human
ggccccggcggcggcggcg

SEQ ID NO: 1353033 - RNA, 22 nt, Human
ggcggccagcgcaccccagagc

SEQ ID NO: 1353034 - RNA, 25 nt, Human
ggcggccaggugcucagagggcacc

SEQ ID NO: 1353035 - RNA, 22 nt, Human
ggcggccgcauggugcuggggc

SEQ ID NO: 1353036 - RNA, 23 nt, Human
ggcggcggcgguguccaggcggc

SEQ ID NO: 1353037 - RNA, 21 nt, Human
gggaggguggguccaggaagc

SEQ ID NO: 1353038 - RNA, 23 nt, Human
gggccagggcacgcagaaggggc

SEQ ID NO: 1353039 - RNA, 19 nt, Human
gggccccggcggcggcggc

SEQ ID NO: 1353040 - RNA, 21 nt, Human
gggcugugcagccaggagggc

SEQ ID NO: 1353041 - RNA, 18 nt, Human
ggggaugggcgaagggaa

SEQ ID NO: 1353042 - RNA, 18 nt, Human
gggggaugggcgaaggga

SEQ ID NO: 1353043 - RNA, 21 nt, Human
ggguugucaguaccacacccu

SEQ ID NO: 1353044 - RNA, 21 nt, Human
gucgcaguggcggcggcggug

SEQ ID NO: 1353045 - RNA, 19 nt, Human
guuguacuuggugcgggcc

SEQ ID NO: 1353046 - RNA, 25 nt, Human
uaaaaaaauagguuuaaugcaggug

SEQ ID NO: 1353047 - RNA, 25 nt, Human
uacgacccgaagacaugugagcagg

SEQ ID NO: 1353048 - RNA, 18 nt, Human
ucagccaagaggcuuggg

SEQ ID NO: 1353049 - RNA, 24 nt, Human
ucagccccuggcucccaggguucc

SEQ ID NO: 1353050 - RNA, 21 nt, Human
uccaguggcacacaacugucc

SEQ ID NO: 1353051 - RNA, 18 nt, Human
uccccccaggccagcccc

SEQ ID NO: 1353052 - RNA, 19 nt, Human
ucccccugcuccgggcccg

SEQ ID NO: 1353053 - RNA, 22 nt, Human
ucccgccucccgucccaccuuc

SEQ ID NO: 1353054 - RNA, 19 nt, Human
ucccgucccaccuucaccc

SEQ ID NO: 1353055 - RNA, 19 nt, Human
uccgugcgcagggcggccg

SEQ ID NO: 1353056 - RNA, 21 nt, Human
uccgugcgcagggcggccgca

SEQ ID NO: 1353057 - RNA, 21 nt, Human
ucuaggguagccucugccugu

SEQ ID NO: 1353058 - RNA, 24 nt, Human
ucuccgcggcggcgccggcguccc

SEQ ID NO: 1353059 - RNA, 22 nt, Human
ucucuaccugauuuaggguuuu

SEQ ID NO: 1353060 - RNA, 19 nt, Human
ucugcagcaagaaaugagg

SEQ ID NO: 1353061 - RNA, 19 nt, Human
ucugccuguuguccuugca

SEQ ID NO: 1353062 - RNA, 18 nt, Human
ugaaggggcucucgggcg

SEQ ID NO: 1353063 - RNA, 24 nt, Human
ugagcaggagccaccggcaggugg

SEQ ID NO: 1353064 - RNA, 21 nt, Human
ugagcccuucuccggcccccc

SEQ ID NO: 1353065 - RNA, 23 nt, Human
ugaggugacacuagggucggaac

SEQ ID NO: 1353066 - RNA, 19 nt, Human
ugcaggcagguggugugcg

SEQ ID NO: 1353067 - RNA, 22 nt, Human
ugccaggccucaggcggcccag

SEQ ID NO: 1353068 - RNA, 21 nt, Human
ugcuggggcgcgcggcugggg

SEQ ID NO: 1353069 - RNA, 24 nt, Human
uggaagcgcagcaggacgcgaacg

SEQ ID NO: 1353070 - RNA, 18 nt, Human
uggagagaggcccacaga

SEQ ID NO: 1353071 - RNA, 19 nt, Human
uggagucagccccuggcuc

SEQ ID NO: 1353072 - RNA, 24 nt, Human
uggagucagccccuggcucccagg

SEQ ID NO: 1353073 - RNA, 21 nt, Human
uggcuccugggccacuggucc

SEQ ID NO: 1353074 - RNA, 20 nt, Human
ugggagcccgcagcugaccc

SEQ ID NO: 1353075 - RNA, 18 nt, Human
ugggcgaagggaaggcgc

SEQ ID NO: 1353076 - RNA, 19 nt, Human
ugggcgaagggaaggcgcu

SEQ ID NO: 1353077 - RNA, 22 nt, Human
ugggggaugggcgaagggaagg

SEQ ID NO: 1353078 - RNA, 19 nt, Human
uguaggcagaagagggcgg

SEQ ID NO: 1353079 - RNA, 22 nt, Human
uucaaaaaguuucucuuccagu

SEQ ID NO: 1353080 - RNA, 22 nt, Human
uuggcuggggcuggggccaggg

SEQ ID NO: 1353081 - RNA, 23 nt, Human
aaacaacuaugguucuugacuuc

SEQ ID NO: 1353082 - RNA, 22 nt, Human
aaggagcugaagccugugccag

SEQ ID NO: 1353083 - RNA, 19 nt, Human
aagggggguccccagacag

SEQ ID NO: 1353084 - RNA, 19 nt, Human
acacagcagccucccuccu

SEQ ID NO: 1353085 - RNA, 19 nt, Human
accugaaggagcugaagcc

SEQ ID NO: 1353086 - RNA, 18 nt, Human
acucauguucugcauccc

SEQ ID NO: 1353087 - RNA, 23 nt, Human
acugcagcucccggaucuccacu

SEQ ID NO: 1353088 - RNA, 20 nt, Human
agccaaugggcgagccgggc

SEQ ID NO: 1353089 - RNA, 18 nt, Human
agccgcugguggucuucg

SEQ ID NO: 1353090 - RNA, 24 nt, Human
aggaagucagaggacucagacacc

SEQ ID NO: 1353091 - RNA, 20 nt, Human
aggagcugccacaguuguuc

SEQ ID NO: 1353092 - RNA, 18 nt, Human
aggcagcaggcuaaacca

SEQ ID NO: 1353093 - RNA, 22 nt, Human
aggcaggaguggaggcagcagg

SEQ ID NO: 1353094 - RNA, 23 nt, Human
aggccaccccagaagcugcacag

SEQ ID NO: 1353095 - RNA, 21 nt, Human
aggcugccucccccucucagc

SEQ ID NO: 1353096 - RNA, 19 nt, Human
aucuuggagaucugagucu

SEQ ID NO: 1353097 - RNA, 18 nt, Human
auggacaugguggaggca

SEQ ID NO: 1353098 - RNA, 19 nt, Human
caccugaaggagcugaagc

SEQ ID NO: 1353099 - RNA, 23 nt, Human
cagcagccucccuccuggagucu

SEQ ID NO: 1353100 - RNA, 22 nt, Human
cagcccgggaacgcagcugcga

SEQ ID NO: 1353101 - RNA, 20 nt, Human
cagcucccggaucuccacuu

SEQ ID NO: 1353102 - RNA, 25 nt, Human
cagcuuucuguagguggcgaccucc

SEQ ID NO: 1353103 - RNA, 25 nt, Human
cagucggcccuuccaggugagacuc

SEQ ID NO: 1353104 - RNA, 19 nt, Human
cauuuuuucugguuuuccu

SEQ ID NO: 1353105 - RNA, 22 nt, Human
ccaccauagccuccgcccaggc

SEQ ID NO: 1353106 - RNA, 21 nt, Human
ccagaagcugcacagugaagc

SEQ ID NO: 1353107 - RNA, 21 nt, Human
ccagacccggcccuggacggc

SEQ ID NO: 1353108 - RNA, 23 nt, Human
ccagacuccagcuggcucuccua

SEQ ID NO: 1353109 - RNA, 25 nt, Human
cccacacagcagccucccuccugga

SEQ ID NO: 1353110 - RNA, 23 nt, Human
cccacaguugucuuugccggagc

SEQ ID NO: 1353111 - RNA, 28 nt, Human
ccccagaagcugcacagugaagcucccc

SEQ ID NO: 1353112 - RNA, 25 nt, Human
cccccuggccuuggaggcccucaau

SEQ ID NO: 1353113 - RNA, 21 nt, Human
cccuggacggcacggagcccc

SEQ ID NO: 1353114 - RNA, 23 nt, Human
cccugguggagcuggugcaccug

SEQ ID NO: 1353115 - RNA, 21 nt, Human
ccgcagcgccggggcccucag

SEQ ID NO: 1353116 - RNA, 22 nt, Human
ccgcccaggccaccccagaagc

SEQ ID NO: 1353117 - RNA, 20 nt, Human
ccgucgccuugccgccgccc

SEQ ID NO: 1353118 - RNA, 22 nt, Human
ccgucgccuugccgccgcccgg

SEQ ID NO: 1353119 - RNA, 23 nt, Human
ccuagccagcgucugcagcucca

SEQ ID NO: 1353120 - RNA, 23 nt, Human
ccuccagggaagcccccuggccu

SEQ ID NO: 1353121 - RNA, 19 nt, Human
ccuccgcccaggccacccc

SEQ ID NO: 1353122 - RNA, 23 nt, Human
ccuggccuuggaggcccucaauc

SEQ ID NO: 1353123 - RNA, 25 nt, Human
ccugugccagagccaaagcuggagc

SEQ ID NO: 1353124 - RNA, 22 nt, Human
cgcccaggccaccccagaagcu

SEQ ID NO: 1353125 - RNA, 20 nt, Human
cgccggggcccucagaucga

SEQ ID NO: 1353126 - RNA, 23 nt, Human
cggcacggagccccagcccggga

SEQ ID NO: 1353127 - RNA, 23 nt, Human
cucaaucucagccuggagcuggc

SEQ ID NO: 1353128 - RNA, 19 nt, Human
cucagcccggcugcaguug

SEQ ID NO: 1353129 - RNA, 27 nt, Human
cucagccucagcccggcugcaguuggc

SEQ ID NO: 1353130 - RNA, 20 nt, Human
cuccgcccaggccaccccag

SEQ ID NO: 1353131 - RNA, 21 nt, Human
cugaaggagcugaagccugug

SEQ ID NO: 1353132 - RNA, 21 nt, Human
cuggaggcgaugggcguggcc

SEQ ID NO: 1353133 - RNA, 22 nt, Human
cuggugcaggcacugggcccac

SEQ ID NO: 1353134 - RNA, 21 nt, Human
cuuggaggcccucaaucucag

SEQ ID NO: 1353135 - RNA, 19 nt, Human
cuuuccgcugagccuccuc

SEQ ID NO: 1353136 - RNA, 20 nt, Human
gaagccugugccagagccaa

SEQ ID NO: 1353137 - RNA, 19 nt, Human
gaaggagcagagaagcugc

SEQ ID NO: 1353138 - RNA, 20 nt, Human
gacaccagcuucccaucgcg

SEQ ID NO: 1353139 - RNA, 23 nt, Human
gacagcaccacagacauguugga

SEQ ID NO: 1353140 - RNA, 23 nt, Human
gagcugccacaguuguucacuug

SEQ ID NO: 1353141 - RNA, 20 nt, Human
gaggcaggaguggaggcagc

SEQ ID NO: 1353142 - RNA, 23 nt, Human
gauguuccgguucaucuuggaga

SEQ ID NO: 1353143 - RNA, 21 nt, Human
gcaccacagacauguuggaga

SEQ ID NO: 1353144 - RNA, 20 nt, Human
gcccaggccaccccagaagc

SEQ ID NO: 1353145 - RNA, 26 nt, Human
gcccccagacccggcccuggacggca

SEQ ID NO: 1353146 - RNA, 19 nt, Human
gcccugguggagcuggugc

SEQ ID NO: 1353147 - RNA, 18 nt, Human
gccuggagcuggcugaug

SEQ ID NO: 1353148 - RNA, 18 nt, Human
gcugcaguuggcaaccuc

SEQ ID NO: 1353149 - RNA, 22 nt, Human
gcugcaguuggcaaccuccuug

SEQ ID NO: 1353150 - RNA, 20 nt, Human
gcuuccccacacagcagccu

SEQ ID NO: 1353151 - RNA, 18 nt, Human
ggagacagcgaagcucag

SEQ ID NO: 1353152 - RNA, 21 nt, Human
ggagccugguuagccaauggg

SEQ ID NO: 1353153 - RNA, 20 nt, Human
ggcccacauaggccgagcuc

SEQ ID NO: 1353154 - RNA, 20 nt, Human
ggcccugguggagcuggugc

SEQ ID NO: 1353155 - RNA, 20 nt, Human
ggggggucuccuguugucug

SEQ ID NO: 1353156 - RNA, 22 nt, Human
ggguccccagacaguaaacucc

SEQ ID NO: 1353157 - RNA, 22 nt, Human
ggguggguugagccucaggugg

SEQ ID NO: 1353158 - RNA, 21 nt, Human
gguggguugagccucaggugg

SEQ ID NO: 1353159 - RNA, 19 nt, Human
guggagcuagcugagguuu

SEQ ID NO: 1353160 - RNA, 18 nt, Human
uaaguggaggccuguggc

SEQ ID NO: 1353161 - RNA, 20 nt, Human
uacaguagugaacaaaacaa

SEQ ID NO: 1353162 - RNA, 21 nt, Human
uacaguagugaacaaaacaac

SEQ ID NO: 1353163 - RNA, 26 nt, Human
uagcuugcuuuucaauuuaaguggag

SEQ ID NO: 1353164 - RNA, 19 nt, Human
uagguggcgaccuccauuu

SEQ ID NO: 1353165 - RNA, 21 nt, Human
uauacaguagugaacaaaaag

SEQ ID NO: 1353166 - RNA, 24 nt, Human
ucacaaccacggcccugguggagc

SEQ ID NO: 1353167 - RNA, 18 nt, Human
ucacuugggcaggaaguc

SEQ ID NO: 1353168 - RNA, 22 nt, Human
ucauacagucggcccuuccagg

SEQ ID NO: 1353169 - RNA, 24 nt, Human
uccaggaguggcugcuguccaugg

SEQ ID NO: 1353170 - RNA, 18 nt, Human
uccauguccaggaguggc

SEQ ID NO: 1353171 - RNA, 20 nt, Human
ucccugugcuuccuagccag

SEQ ID NO: 1353172 - RNA, 21 nt, Human
uccgcugagccuccucaacuc

SEQ ID NO: 1353173 - RNA, 20 nt, Human
ucgccuugccgccgcccggc

SEQ ID NO: 1353174 - RNA, 24 nt, Human
ucugcagcuccacauacuugaucu

SEQ ID NO: 1353175 - RNA, 19 nt, Human
ucugcaucccagacuccag

SEQ ID NO: 1353176 - RNA, 23 nt, Human
ucuguagguggcgaccuccauuu

SEQ ID NO: 1353177 - RNA, 18 nt, Human
ucuuggagaucugagucu

SEQ ID NO: 1353178 - RNA, 19 nt, Human
ugcagaguggccuccagcu

SEQ ID NO: 1353179 - RNA, 20 nt, Human
ugccacaguuguucacuugg

SEQ ID NO: 1353180 - RNA, 24 nt, Human
ugccacaguuguucacuugggcag

SEQ ID NO: 1353181 - RNA, 19 nt, Human
ugccagagccaaagcugga

SEQ ID NO: 1353182 - RNA, 21 nt, Human
ugccagagccaaagcuggagc

SEQ ID NO: 1353183 - RNA, 18 nt, Human
uggagcuggcugauguuc

SEQ ID NO: 1353184 - RNA, 19 nt, Human
uggaggcaggaguggaggc

SEQ ID NO: 1353185 - RNA, 23 nt, Human
uggcagccacgggaggggcagac

SEQ ID NO: 1353186 - RNA, 22 nt, Human
uggcauccuuaacggccagcuc

SEQ ID NO: 1353187 - RNA, 21 nt, Human
uggcgaccuccauuuccaggc

SEQ ID NO: 1353188 - RNA, 22 nt, Human
ugggcaggaagucagaggacuc

SEQ ID NO: 1353189 - RNA, 19 nt, Human
ugggcguggccgcagcgcc

SEQ ID NO: 1353190 - RNA, 21 nt, Human
ugggggccaaagguggacacc

SEQ ID NO: 1353191 - RNA, 24 nt, Human
ugggggccaaagguggacaccuug

SEQ ID NO: 1353192 - RNA, 19 nt, Human
uggguugagccucaggugg

SEQ ID NO: 1353193 - RNA, 19 nt, Human
ugguggagcuagcugaggu

SEQ ID NO: 1353194 - RNA, 22 nt, Human
ugguggagcuagcugagguuuu

SEQ ID NO: 1353195 - RNA, 23 nt, Human
uguagggguggcugcugaaagcc

SEQ ID NO: 1353196 - RNA, 21 nt, Human
uguggcagccacgggaggggc

SEQ ID NO: 1353197 - RNA, 23 nt, Human
uguucauguaaguuucauccaca

SEQ ID NO: 1353198 - RNA, 21 nt, Human
uguuggagaucugggacugca

SEQ ID NO: 1353199 - RNA, 22 nt, Human
uuccgucgccuugccgccgccc

SEQ ID NO: 1353200 - RNA, 26 nt, Human
uucguauggauacucauguucugcau

SEQ ID NO: 1353201 - RNA, 19 nt, Human
uucugcuuuaggggcauau

SEQ ID NO: 1353202 - RNA, 25 nt, Human
uuggaggcccucaaucucagccugg

SEQ ID NO: 1353203 - RNA, 24 nt, Human
uuguacugccucuuuaccucagug

SEQ ID NO: 1353204 - RNA, 20 nt, Human
uuucaucagcuccugguacu

SEQ ID NO: 1353205 - RNA, 26 nt, Human
aaagagggcgcugggccugguguucc

SEQ ID NO: 1353206 - RNA, 19 nt, Human
aaccucagauccccagcac

SEQ ID NO: 1353207 - RNA, 22 nt, Human
aaccucagauccccagcacagc

SEQ ID NO: 1353208 - RNA, 22 nt, Human
aagacugagcucagagaccugg

SEQ ID NO: 1353209 - RNA, 24 nt, Human
aagccugaggggaggcuggaagcu

SEQ ID NO: 1353210 - RNA, 20 nt, Human
aagccuggagggaauacuaa

SEQ ID NO: 1353211 - RNA, 19 nt, Human
aagcugaugcuaaagucag

SEQ ID NO: 1353212 - RNA, 20 nt, Human
aaugugugaccucaacacuc

SEQ ID NO: 1353213 - RNA, 23 nt, Human
acagagccacagaaaaacagaaa

SEQ ID NO: 1353214 - RNA, 22 nt, Human
accugaaucuuugcagcaggca

SEQ ID NO: 1353215 - RNA, 20 nt, Human
acuaagaaaugugcggacag

SEQ ID NO: 1353216 - RNA, 23 nt, Human
acuucucugagauuugcuuuugc

SEQ ID NO: 1353217 - RNA, 22 nt, Human
agaagagggcucaggggaguca

SEQ ID NO: 1353218 - RNA, 23 nt, Human
agaccaaaccucagauccccagc

SEQ ID NO: 1353219 - RNA, 18 nt, Human
agacgcacaggccaggga

SEQ ID NO: 1353220 - RNA, 27 nt, Human
agagagcagacaucacacuccagucgg

SEQ ID NO: 1353221 - RNA, 21 nt, Human
agaggggagagaagagagcag

SEQ ID NO: 1353222 - RNA, 23 nt, Human
agcacagccuccagcagccaccc

SEQ ID NO: 1353223 - RNA, 22 nt, Human
agccacagaaaaacagaaaccu

SEQ ID NO: 1353224 - RNA, 21 nt, Human
agccagcguugagauguuugc

SEQ ID NO: 1353225 - RNA, 18 nt, Human
agccuggagagaagaggg

SEQ ID NO: 1353226 - RNA, 19 nt, Human
aggcaguuccuggcugacu

SEQ ID NO: 1353227 - RNA, 18 nt, Human
aggccaggggugcaugug

SEQ ID NO: 1353228 - RNA, 22 nt, Human
agggaaggggguggcauguggg

SEQ ID NO: 1353229 - RNA, 18 nt, Human
agggacagaggggagaga

SEQ ID NO: 1353230 - RNA, 22 nt, Human
agggcucaggggagucaaugug

SEQ ID NO: 1353231 - RNA, 26 nt, Human
agguaugcaagaggguggagaagucu

SEQ ID NO: 1353232 - RNA, 24 nt, Human
aggugcuggggucucuggagaacc

SEQ ID NO: 1353233 - RNA, 20 nt, Human
agugaggagagagggcccag

SEQ ID NO: 1353234 - RNA, 19 nt, Human
aguucuggguguggagagg

SEQ ID NO: 1353235 - RNA, 21 nt, Human
auggaaugguguuuucuuagc

SEQ ID NO: 1353236 - RNA, 18 nt, Human
caaaccucagauccccag

SEQ ID NO: 1353237 - RNA, 20 nt, Human
caaacuuacggugccuggca

SEQ ID NO: 1353238 - RNA, 23 nt, Human
caagaggggcagcccccaggccc

SEQ ID NO: 1353239 - RNA, 21 nt, Human
cacagccuccagcagccaccc

SEQ ID NO: 1353240 - RNA, 18 nt, Human
cacugagcccagaccaaa

SEQ ID NO: 1353241 - RNA, 21 nt, Human
cagauccccagcacagccucc

SEQ ID NO: 1353242 - RNA, 21 nt, Human
cagccaccccugaucuaucag

SEQ ID NO: 1353243 - RNA, 22 nt, Human
cagcccccaggccccaggcugg

SEQ ID NO: 1353244 - RNA, 21 nt, Human
cagccuccagcagccaccccu

SEQ ID NO: 1353245 - RNA, 18 nt, Human
cagcggggaggggcacgg

SEQ ID NO: 1353246 - RNA, 25 nt, Human
cagcugaaucuccgugcagccccug

SEQ ID NO: 1353247 - RNA, 18 nt, Human
caggaggagauuagagga

SEQ ID NO: 1353248 - RNA, 19 nt, Human
caguccaaaggcaggaggc

SEQ ID NO: 1353249 - RNA, 24 nt, Human
caucuugcaauccaguugccaaca

SEQ ID NO: 1353250 - RNA, 18 nt, Human
cauggacagagccacaga

SEQ ID NO: 1353251 - RNA, 20 nt, Human
ccagaccaaaccucagaucc

SEQ ID NO: 1353252 - RNA, 24 nt, Human
ccagggucuggcuggaccaaagag

SEQ ID NO: 1353253 - RNA, 25 nt, Human
ccauauuuuuguccucauuuuguuu

SEQ ID NO: 1353254 - RNA, 22 nt, Human
ccccagcacagccuccagcagc

SEQ ID NO: 1353255 - RNA, 21 nt, Human
ccccaggccccaggcugggcc

SEQ ID NO: 1353256 - RNA, 19 nt, Human
ccccugggcuuugaugacu

SEQ ID NO: 1353257 - RNA, 19 nt, Human
ccccugggucucaggagcu

SEQ ID NO: 1353258 - RNA, 25 nt, Human
ccccugggucucaggagcuuagcuu

SEQ ID NO: 1353259 - RNA, 22 nt, Human
ccucagaccagccauuugccuc

SEQ ID NO: 1353260 - RNA, 23 nt, Human
ccuccagcagccaccccugaucu

SEQ ID NO: 1353261 - RNA, 19 nt, Human
ccugaucuaucaggguagg

SEQ ID NO: 1353262 - RNA, 18 nt, Human
ccuggagacgacucagcu

SEQ ID NO: 1353263 - RNA, 19 nt, Human
ccuggagagaagagggcuc

SEQ ID NO: 1353264 - RNA, 20 nt, Human
ccuggcugacuugcccucuc

SEQ ID NO: 1353265 - RNA, 21 nt, Human
ccugugcugcgugucugugga

SEQ ID NO: 1353266 - RNA, 19 nt, Human
cgccugugcugcgugucug

SEQ ID NO: 1353267 - RNA, 21 nt, Human
cgccugugcugcgugucugug

SEQ ID NO: 1353268 - RNA, 23 nt, Human
cgcgguaccaguggcaggucccc

SEQ ID NO: 1353269 - RNA, 22 nt, Human
cggugccuggcagacaucacuc

SEQ ID NO: 1353270 - RNA, 18 nt, Human
cucacucuuggccccggc

SEQ ID NO: 1353271 - RNA, 19 nt, Human
cucccacugagcccagacc

SEQ ID NO: 1353272 - RNA, 22 nt, Human
cucccacugagcccagaccaaa

SEQ ID NO: 1353273 - RNA, 18 nt, Human
cuccuuccaucccugccc

SEQ ID NO: 1353274 - RNA, 22 nt, Human
cugagauuugcuuuugccuccu

SEQ ID NO: 1353275 - RNA, 18 nt, Human
cugagcccagaccaaacc

SEQ ID NO: 1353276 - RNA, 22 nt, Human
cugaugcuaaagucagagcagu

SEQ ID NO: 1353277 - RNA, 20 nt, Human
cugcauccugggccaggugc

SEQ ID NO: 1353278 - RNA, 21 nt, Human
cugcuccuuccaucccugccc

SEQ ID NO: 1353279 - RNA, 21 nt, Human
cuggcccuucuccuggccauc

SEQ ID NO: 1353280 - RNA, 21 nt, Human
cuugcccucucuugucugggg

SEQ ID NO: 1353281 - RNA, 22 nt, Human
cuuggcaaggauguugaagaag

SEQ ID NO: 1353282 - RNA, 18 nt, Human
gaaagcaaggauccuacc

SEQ ID NO: 1353283 - RNA, 23 nt, Human
gaaggacagggaaggggguggcc

SEQ ID NO: 1353284 - RNA, 19 nt, Human
gaaggggguggcauguggg

SEQ ID NO: 1353285 - RNA, 18 nt, Human
gacagaguccuggaugca

SEQ ID NO: 1353286 - RNA, 21 nt, Human
gacagggaaggggguggcaug

SEQ ID NO: 1353287 - RNA, 23 nt, Human
gacauugggugcugggcaguggu

SEQ ID NO: 1353288 - RNA, 19 nt, Human
gaccaaaccucagaucccc

SEQ ID NO: 1353289 - RNA, 24 nt, Human
gagagaagagggcucaggggaguc

SEQ ID NO: 1353290 - RNA, 21 nt, Human
gagcccagaccaaaccucaga

SEQ ID NO: 1353291 - RNA, 21 nt, Human
gagggcccagggucuggcugg

SEQ ID NO: 1353292 - RNA, 21 nt, Human
gaggggaggcuggaagcugau

SEQ ID NO: 1353293 - RNA, 18 nt, Human
gaguuggggaaggacagg

SEQ ID NO: 1353294 - RNA, 24 nt, Human
gauguugaagaagauauccaagcc

SEQ ID NO: 1353295 - RNA, 21 nt, Human
gauuugcuuuugccuccuugu

SEQ ID NO: 1353296 - RNA, 23 nt, Human
gcaguccaaaggcaggaggcugc

SEQ ID NO: 1353297 - RNA, 19 nt, Human
gccacagaaaaacagaaac

SEQ ID NO: 1353298 - RNA, 25 nt, Human
gccucaucuucuccccuggggccaa

SEQ ID NO: 1353299 - RNA, 18 nt, Human
ggacagggaagggggugg

SEQ ID NO: 1353300 - RNA, 18 nt, Human
ggagagccagcguugaga

SEQ ID NO: 1353301 - RNA, 23 nt, Human
ggaugcagugacagcagccugga

SEQ ID NO: 1353302 - RNA, 21 nt, Human
ggaugcugaggccaggggugc

SEQ ID NO: 1353303 - RNA, 20 nt, Human
ggcagcccccaggccccagg

SEQ ID NO: 1353304 - RNA, 21 nt, Human
ggcagcccccaggccccaggc

SEQ ID NO: 1353305 - RNA, 21 nt, Human
ggcccagggucuggcuggacc

SEQ ID NO: 1353306 - RNA, 22 nt, Human
ggccgcgguaccaguggcaggu

SEQ ID NO: 1353307 - RNA, 18 nt, Human
gggaggacauugggugcu

SEQ ID NO: 1353308 - RNA, 20 nt, Human
gggauugcgcuguggguucc

SEQ ID NO: 1353309 - RNA, 27 nt, Human
gggcagcagagcugacagaguccugga

SEQ ID NO: 1353310 - RNA, 22 nt, Human
gggcagcccccaggccccaggc

SEQ ID NO: 1353311 - RNA, 22 nt, Human
gggccgcgguaccaguggcagg

SEQ ID NO: 1353312 - RNA, 20 nt, Human
ggggaaggacagggaagggg

SEQ ID NO: 1353313 - RNA, 19 nt, Human
ggguggcaugugggagagg

SEQ ID NO: 1353314 - RNA, 22 nt, Human
ggguguggagagggagacccag

SEQ ID NO: 1353315 - RNA, 21 nt, Human
ggugcugggcaguggugggug

SEQ ID NO: 1353316 - RNA, 19 nt, Human
gucauggaaugguguuuuc

SEQ ID NO: 1353317 - RNA, 22 nt, Human
gugcugggcagugguggguggg

SEQ ID NO: 1353318 - RNA, 24 nt, Human
gugcugggcagugguggguggggc

SEQ ID NO: 1353319 - RNA, 22 nt, Human
gugggcagcagagcugacagag

SEQ ID NO: 1353320 - RNA, 21 nt, Human
uaaaaaaauagcucuauuccc

SEQ ID NO: 1353321 - RNA, 23 nt, Human
uaaagucagagcaguccaaaggc

SEQ ID NO: 1353322 - RNA, 22 nt, Human
uaagacugagcucagagaccug

SEQ ID NO: 1353323 - RNA, 19 nt, Human
uaagcucucugucccugga

SEQ ID NO: 1353324 - RNA, 25 nt, Human
uaccagcugggccauucuuggauua

SEQ ID NO: 1353325 - RNA, 19 nt, Human
uagagcagggaggaggcag

SEQ ID NO: 1353326 - RNA, 20 nt, Human
uagcucuauuccccuggccc

SEQ ID NO: 1353327 - RNA, 21 nt, Human
uaggagcaucuugcaauccag

SEQ ID NO: 1353328 - RNA, 22 nt, Human
uaggagcaucuugcaauccagu

SEQ ID NO: 1353329 - RNA, 22 nt, Human
ucagaacugucacgccugugcu

SEQ ID NO: 1353330 - RNA, 23 nt, Human
ucagagcaguccaaaggcaggag

SEQ ID NO: 1353331 - RNA, 24 nt, Human
ucagguccuggugcagugaggaga

SEQ ID NO: 1353332 - RNA, 21 nt, Human
ucauggaaugguguuuucuua

SEQ ID NO: 1353333 - RNA, 18 nt, Human
uccagcagccaccccuga

SEQ ID NO: 1353334 - RNA, 20 nt, Human
uccccuggcccuucuccuga

SEQ ID NO: 1353335 - RNA, 20 nt, Human
uccccuggcccuucuccugg

SEQ ID NO: 1353336 - RNA, 24 nt, Human
uccccuggcccuucuccuggccau

SEQ ID NO: 1353337 - RNA, 23 nt, Human
uccuggaugcagugacagcagcc

SEQ ID NO: 1353338 - RNA, 22 nt, Human
ucuaggcuguggcuccgagugu

SEQ ID NO: 1353339 - RNA, 23 nt, Human
ucucccacugagcccagaccaaa

SEQ ID NO: 1353340 - RNA, 18 nt, Human
ucuccuggccaucucuga

SEQ ID NO: 1353341 - RNA, 18 nt, Human
ucugcgagucucccugcc

SEQ ID NO: 1353342 - RNA, 19 nt, Human
ucugucccuggagguaugc

SEQ ID NO: 1353343 - RNA, 21 nt, Human
ugacagcagccuggagacgac

SEQ ID NO: 1353344 - RNA, 25 nt, Human
ugcacugccaucucccacugagccc

SEQ ID NO: 1353345 - RNA, 23 nt, Human
ugccaucucccacugagcccaga

SEQ ID NO: 1353346 - RNA, 22 nt, Human
ugccauggacagagccacagaa

SEQ ID NO: 1353347 - RNA, 23 nt, Human
ugccguguuagcagcucacucuu

SEQ ID NO: 1353348 - RNA, 26 nt, Human
ugccuaaauccucacuuucuuggcau

SEQ ID NO: 1353349 - RNA, 22 nt, Human
ugccuggcagacaucacucauu

SEQ ID NO: 1353350 - RNA, 20 nt, Human
ugccuucgggauucuuuagc

SEQ ID NO: 1353351 - RNA, 22 nt, Human
uggaaagccugaggggaggcug

SEQ ID NO: 1353352 - RNA, 19 nt, Human
uggaccaaagagggcgcug

SEQ ID NO: 1353353 - RNA, 20 nt, Human
uggagagaagagggcucagg

SEQ ID NO: 1353354 - RNA, 20 nt, Human
uggagagaagagggcucagg

SEQ ID NO: 1353355 - RNA, 20 nt, Human
uggagguaugcaagagggug

SEQ ID NO: 1353356 - RNA, 22 nt, Human
uggcagacaucacuaaucaaac

SEQ ID NO: 1353357 - RNA, 21 nt, Human
uggcagacaucacucauuagg

SEQ ID NO: 1353358 - RNA, 20 nt, Human
uggcugacuugcccucucuu

SEQ ID NO: 1353359 - RNA, 18 nt, Human
uggcuugugagacagaau

SEQ ID NO: 1353360 - RNA, 19 nt, Human
ugggagguaguaagcucuc

SEQ ID NO: 1353361 - RNA, 26 nt, Human
ugggaugccauggacagagccacagg

SEQ ID NO: 1353362 - RNA, 19 nt, Human
uggggagguaggagcgagg

SEQ ID NO: 1353363 - RNA, 20 nt, Human
uggggaguuggggaaggaca

SEQ ID NO: 1353364 - RNA, 22 nt, Human
uggugacuggaaagccugaggg

SEQ ID NO: 1353365 - RNA, 21 nt, Human
uggugggagggcaaggacugg

SEQ ID NO: 1353366 - RNA, 21 nt, Human
ugguggguggggcgagucuuc

SEQ ID NO: 1353367 - RNA, 21 nt, Human
uguagagcagggaggaggcag

SEQ ID NO: 1353368 - RNA, 21 nt, Human
ugugaugugcaccucugugug

SEQ ID NO: 1353369 - RNA, 19 nt, Human
ugugggugguucaagaggg

SEQ ID NO: 1353370 - RNA, 21 nt, Human
uugccuaaauccucacuuucu

SEQ ID NO: 1353371 - RNA, 23 nt, Human
uuggggaaggacagggaaggggg

SEQ ID NO: 1353372 - RNA, 25 nt, Human
uuggggaaggacagggaagggggug

SEQ ID NO: 1353373 - RNA, 24 nt, Human
uuggucucuagagcagccugcauc

SEQ ID NO: 1353374 - RNA, 21 nt, Human
uuucuuggcaucagguccugg

SEQ ID NO: 1353375 - RNA, 18 nt, Human
uuuguccucauuuuguuu

SEQ ID NO: 1353376 - RNA, 24 nt, Human
aaagugcugggauuguaggcauga

SEQ ID NO: 1353377 - RNA, 19 nt, Human
aacaugucucuugccccca

SEQ ID NO: 1353378 - RNA, 22 nt, Human
aacccaaccagcuaccaccgcu

SEQ ID NO: 1353379 - RNA, 23 nt, Human
aaccccugggcucaaaugauccu

SEQ ID NO: 1353380 - RNA, 19 nt, Human
aacuggcaccauuggcaga

SEQ ID NO: 1353381 - RNA, 23 nt, Human
aagaagagugaggaggaggagga

SEQ ID NO: 1353382 - RNA, 18 nt, Human
aagagugaggaggaggag

SEQ ID NO: 1353383 - RNA, 19 nt, Human
aaggaaacuggcaccauug

SEQ ID NO: 1353384 - RNA, 23 nt, Human
aaggagacccccggcagcaacca

SEQ ID NO: 1353385 - RNA, 19 nt, Human
aaguagcugggacuacagg

SEQ ID NO: 1353386 - RNA, 20 nt, Human
aaguagcugggacuacaggu

SEQ ID NO: 1353387 - RNA, 26 nt, Human
aaguagcugggacuacagguacacac

SEQ ID NO: 1353388 - RNA, 24 nt, Human
aagugauccuccugcuuuggccuc

SEQ ID NO: 1353389 - RNA, 19 nt, Human
aagugcugggauuguaggc

SEQ ID NO: 1353390 - RNA, 21 nt, Human
aagugcugggauuguaggcau

SEQ ID NO: 1353391 - RNA, 24 nt, Human
aaucacuugaucccaggaggcgga

SEQ ID NO: 1353392 - RNA, 24 nt, Human
acaaagugagacucugucucaaaa

SEQ ID NO: 1353393 - RNA, 20 nt, Human
acaacaaccgagccccagca

SEQ ID NO: 1353394 - RNA, 18 nt, Human
acagaaggagacccccgg

SEQ ID NO: 1353395 - RNA, 19 nt, Human
acagacagugcccugggac

SEQ ID NO: 1353396 - RNA, 23 nt, Human
acaggcaaggcauggggaacgug

SEQ ID NO: 1353397 - RNA, 20 nt, Human
acaucauuaguagagucgag

SEQ ID NO: 1353398 - RNA, 23 nt, Human
accagcuaccaccgcuuucccag

SEQ ID NO: 1353399 - RNA, 22 nt, Human
accagugccaucccuagcccca

SEQ ID NO: 1353400 - RNA, 18 nt, Human
acuacaacaaccgagccc

SEQ ID NO: 1353401 - RNA, 21 nt, Human
acuccagcuuaggugacaaag

SEQ ID NO: 1353402 - RNA, 26 nt, Human
acuguacuccagcuuaggacaacggg

SEQ ID NO: 1353403 - RNA, 20 nt, Human
acuguacuccagcuuaggug

SEQ ID NO: 1353404 - RNA, 24 nt, Human
agcaggacaggcaaggcaugggga

SEQ ID NO: 1353405 - RNA, 18 nt, Human
agcccgagagggcuugcu

SEQ ID NO: 1353406 - RNA, 24 nt, Human
agcuuaggugacaaagugagacuc

SEQ ID NO: 1353407 - RNA, 19 nt, Human
aggacgugacugcuagaaa

SEQ ID NO: 1353408 - RNA, 23 nt, Human
aggaggcuaaggcaggagaauca

SEQ ID NO: 1353409 - RNA, 21 nt, Human
aggcaaggcauggggaacgug

SEQ ID NO: 1353410 - RNA, 18 nt, Human
aggcaggagaaucacuug

SEQ ID NO: 1353411 - RNA, 21 nt, Human
aggcggaaguugcagugagcc

SEQ ID NO: 1353412 - RNA, 24 nt, Human
aggcggaaguugcagugagccgag

SEQ ID NO: 1353413 - RNA, 24 nt, Human
aggcuaaggcaggagaaucacuug

SEQ ID NO: 1353414 - RNA, 19 nt, Human
aggcucaagugauccuccu

SEQ ID NO: 1353415 - RNA, 23 nt, Human
auagcaguuacuggagcccagca

SEQ ID NO: 1353416 - RNA, 22 nt, Human
auauguguguguauguauacau

SEQ ID NO: 1353417 - RNA, 20 nt, Human
auccaggcuggagugcgaca

SEQ ID NO: 1353418 - RNA, 22 nt, Human
aucgcgcacuguacuccagcuu

SEQ ID NO: 1353419 - RNA, 19 nt, Human
auggagcagagggcagcug

SEQ ID NO: 1353420 - RNA, 22 nt, Human
auggcggccugacucagggcug

SEQ ID NO: 1353421 - RNA, 24 nt, Human
caaagugcugggauuguaggcaug

SEQ ID NO: 1353422 - RNA, 27 nt, Human
caaaugauccuuccaccucagccuccc

SEQ ID NO: 1353423 - RNA, 27 nt, Human
caaaugauccuuccaccucagccuccc

SEQ ID NO: 1353424 - RNA, 23 nt, Human
caacaaccgagccccagcaaccc

SEQ ID NO: 1353425 - RNA, 31 nt, Human
caacccaaccagcuaccaccgcuuucccagg

SEQ ID NO: 1353426 - RNA, 22 nt, Human
caagugauccuccugcuuuggc

SEQ ID NO: 1353427 - RNA, 27 nt, Human
caagugauccuccugcuuuggccuccc

SEQ ID NO: 1353428 - RNA, 18 nt, Human
cacaccacuaaauccaga

SEQ ID NO: 1353429 - RNA, 22 nt, Human
cacauggcuaagugucugggug

SEQ ID NO: 1353430 - RNA, 24 nt, Human
caccucagccucccaaguagcugg

SEQ ID NO: 1353431 - RNA, 20 nt, Human
cacuaaaugcugagugucca

SEQ ID NO: 1353432 - RNA, 19 nt, Human
cacuguacuccagcuuagg

SEQ ID NO: 1353433 - RNA, 19 nt, Human
cacuguacuccagcuuagg

SEQ ID NO: 1353434 - RNA, 19 nt, Human
cacuguacuccagcuuagg

SEQ ID NO: 1353435 - RNA, 23 nt, Human
cacuguacuccagcuuaggugac

SEQ ID NO: 1353436 - RNA, 25 nt, Human
cacuguacuccagcuuaggugacaa

SEQ ID NO: 1353437 - RNA, 19 nt, Human
cagcuaccaccgcuuuccc

SEQ ID NO: 1353438 - RNA, 19 nt, Human
cagcuaccaccgcuuuccc

SEQ ID NO: 1353439 - RNA, 19 nt, Human
caggacaggcaaggcaugg

SEQ ID NO: 1353440 - RNA, 19 nt, Human
caggacaggcaaggcaugg

SEQ ID NO: 1353441 - RNA, 20 nt, Human
caugagccuaucuuagagaa

SEQ ID NO: 1353442 - RNA, 24 nt, Human
ccaaagugcugggauuguaggcau

SEQ ID NO: 1353443 - RNA, 23 nt, Human
ccacagugagacucccaagcccc

SEQ ID NO: 1353444 - RNA, 23 nt, Human
ccagcaacccaaccagcuaccac

SEQ ID NO: 1353445 - RNA, 18 nt, Human
ccagccuggcuggcagcc

SEQ ID NO: 1353446 - RNA, 20 nt, Human
ccaguauuuuggaauuaccu

SEQ ID NO: 1353447 - RNA, 23 nt, Human
cccaaguagcugggacuacaggu

SEQ ID NO: 1353448 - RNA, 24 nt, Human
cccaaguagcugggacuacaggua

SEQ ID NO: 1353449 - RNA, 24 nt, Human
ccccagcaacccaaccagcuacca

SEQ ID NO: 1353450 - RNA, 19 nt, Human
ccccaguacccucaucacc

SEQ ID NO: 1353451 - RNA, 22 nt, Human
ccccaguacccucaucacccug

SEQ ID NO: 1353452 - RNA, 21 nt, Human
cccccaguacccucaucaccc

SEQ ID NO: 1353453 - RNA, 24 nt, Human
cccccaguacccucaucacccugu

SEQ ID NO: 1353454 - RNA, 25 nt, Human
ccccugggcucaaaugauccuucca

SEQ ID NO: 1353455 - RNA, 24 nt, Human
ccuagccccagcucuagcaauggc

SEQ ID NO: 1353456 - RNA, 21 nt, Human
ccuaggcucaagugauccucc

SEQ ID NO: 1353457 - RNA, 22 nt, Human
ccuaggcucaagugauccuccu

SEQ ID NO: 1353458 - RNA, 24 nt, Human
ccugcuuuggccucccaaagugcu

SEQ ID NO: 1353459 - RNA, 22 nt, Human
ccugggcucaaaugauccuucc

SEQ ID NO: 1353460 - RNA, 26 nt, Human
ccuuccaccucagccucccaaguagc

SEQ ID NO: 1353461 - RNA, 21 nt, Human
cgacuacaacaaccgagcccc

SEQ ID NO: 1353462 - RNA, 23 nt, Human
cguacacuuauaaauaagaguac

SEQ ID NO: 1353463 - RNA, 24 nt, Human
cuacaacaaccgagccccagcaac

SEQ ID NO: 1353464 - RNA, 24 nt, Human
cucaaaugauccuuccaccucagc

SEQ ID NO: 1353465 - RNA, 18 nt, Human
cucaagugauccuccugc

SEQ ID NO: 1353466 - RNA, 24 nt, Human
cucaagugauccuccugcuuuggc

SEQ ID NO: 1353467 - RNA, 24 nt, Human
cucagccucccaaguagcugggac

SEQ ID NO: 1353468 - RNA, 19 nt, Human
cugaagcuucaaaccccug

SEQ ID NO: 1353469 - RNA, 22 nt, Human
cugcaaacaugucucuugcccc

SEQ ID NO: 1353470 - RNA, 18 nt, Human
cuggccacacagaaggag

SEQ ID NO: 1353471 - RNA, 21 nt, Human
cuuaagccuaugcuucccaag

SEQ ID NO: 1353472 - RNA, 18 nt, Human
cuugcacagacagugccc

SEQ ID NO: 1353473 - RNA, 24 nt, Human
gacaaagugagacucugucucaaa

SEQ ID NO: 1353474 - RNA, 23 nt, Human
gagaaucacuugaucccaggagg

SEQ ID NO: 1353475 - RNA, 21 nt, Human
gagacagggucuugcucuauc

SEQ ID NO: 1353476 - RNA, 20 nt, Human
gagaggguagggggcaagaa

SEQ ID NO: 1353477 - RNA, 23 nt, Human
gagaggguagggggcaagaagag

SEQ ID NO: 1353478 - RNA, 20 nt, Human
gagcagagggcagcugagcc

SEQ ID NO: 1353479 - RNA, 18 nt, Human
gagcagcucaaggcuugc

SEQ ID NO: 1353480 - RNA, 21 nt, Human
gaggaggaggaggaccaccag

SEQ ID NO: 1353481 - RNA, 18 nt, Human
gauucugagaugcaaguc

SEQ ID NO: 1353482 - RNA, 20 nt, Human
gauuguaggcaugagccuau

SEQ ID NO: 1353483 - RNA, 19 nt, Human
gcacuguacuccagcuuag

SEQ ID NO: 1353484 - RNA, 21 nt, Human
gcacuguacuccagcuuaggu

SEQ ID NO: 1353485 - RNA, 22 nt, Human
gcaggagaaucacuugauccca

SEQ ID NO: 1353486 - RNA, 22 nt, Human
gcaguguggagaggguaggggg

SEQ ID NO: 1353487 - RNA, 19 nt, Human
gcucaagugauccuccugc

SEQ ID NO: 1353488 - RNA, 22 nt, Human
gcuuuggccucccaaagugcug

SEQ ID NO: 1353489 - RNA, 24 nt, Human
ggaaguugcagugagccgagaucg

SEQ ID NO: 1353490 - RNA, 20 nt, Human
ggcaagaagagugaggagga

SEQ ID NO: 1353491 - RNA, 20 nt, Human
gggcagcugagcagcucaag

SEQ ID NO: 1353492 - RNA, 19 nt, Human
ggguguggcgguacacacc

SEQ ID NO: 1353493 - RNA, 24 nt, Human
ggguguggcgguacacaccuguaa

SEQ ID NO: 1353494 - RNA, 22 nt, Human
gguacacaccuguaaacccaga

SEQ ID NO: 1353495 - RNA, 18 nt, Human
ggugcaggacgugacugc

SEQ ID NO: 1353496 - RNA, 23 nt, Human
guaacccauauauguguguguau

SEQ ID NO: 1353497 - RNA, 20 nt, Human
guagagucgagucugcugac

SEQ ID NO: 1353498 - RNA, 24 nt, Human
gucuugcucuaucauccaggcugg

SEQ ID NO: 1353499 - RNA, 24 nt, Human
gugacaaagugagacucugucuca

SEQ ID NO: 1353500 - RNA, 19 nt, Human
guguauguauacauaugca

SEQ ID NO: 1353501 - RNA, 25 nt, Human
guguauguauacauaugcaccuacu

SEQ ID NO: 1353502 - RNA, 19 nt, Human
guugcagugagccgagauc

SEQ ID NO: 1353503 - RNA, 21 nt, Human
guugcagugagccgagaucgc

SEQ ID NO: 1353504 - RNA, 22 nt, Human
uaaacccagauacucaggaggc

SEQ ID NO: 1353505 - RNA, 25 nt, Human
uaaacccagauacucaggaggcuaa

SEQ ID NO: 1353506 - RNA, 20 nt, Human
uaagaguacugauaccagua

SEQ ID NO: 1353507 - RNA, 20 nt, Human
uaaggcaggagaaucacuug

SEQ ID NO: 1353508 - RNA, 24 nt, Human
uaaggcaggagaaucacuugaucc

SEQ ID NO: 1353509 - RNA, 25 nt, Human
uaaggcaggagaaucacuugauccc

SEQ ID NO: 1353510 - RNA, 22 nt, Human
uacuccagcuuaggugacaaag

SEQ ID NO: 1353511 - RNA, 24 nt, Human
uacuccagcuuaggugacaaagug

SEQ ID NO: 1353512 - RNA, 18 nt, Human
uagagacagggucuugcu

SEQ ID NO: 1353513 - RNA, 18 nt, Human
uagcaguuacuggagccc

SEQ ID NO: 1353514 - RNA, 21 nt, Human
uagccccagcucuagcaaugg

SEQ ID NO: 1353515 - RNA, 26 nt, Human
uagccccagcucuagcaauggcggcc

SEQ ID NO: 1353516 - RNA, 24 nt, Human
uaggcucaagugauccuccugcuu

SEQ ID NO: 1353517 - RNA, 18 nt, Human
uauauguguguguaugua

SEQ ID NO: 1353518 - RNA, 26 nt, Human
uaugauaaugacgcuuaauguuucca

SEQ ID NO: 1353519 - RNA, 18 nt, Human
uauggagcagagggcagc

SEQ ID NO: 1353520 - RNA, 19 nt, Human
uauguugcccaggcuaguc

SEQ ID NO: 1353521 - RNA, 24 nt, Human
uauguugcccaggcuagucuccaa

SEQ ID NO: 1353522 - RNA, 27 nt, Human
uauguugcccaggcuagucuccaauuc

SEQ ID NO: 1353523 - RNA, 19 nt, Human
uauuaauuuuuugguaggg

SEQ ID NO: 1353524 - RNA, 22 nt, Human
ucaaaaaaaacccgcaaacguu

SEQ ID NO: 1353525 - RNA, 21 nt, Human
ucaaggcuugcuucuccacag

SEQ ID NO: 1353526 - RNA, 22 nt, Human
ucacugaagcuucaaaccccug

SEQ ID NO: 1353527 - RNA, 24 nt, Human
ucacugaagcuucaaaccccuggg

SEQ ID NO: 1353528 - RNA, 18 nt, Human
ucagccucccaaguagcu

SEQ ID NO: 1353529 - RNA, 20 nt, Human
ucagccucccaaguagcugg

SEQ ID NO: 1353530 - RNA, 18 nt, Human
ucauccaggcuggagugc

SEQ ID NO: 1353531 - RNA, 24 nt, Human
uccagcuuaggugacaaagugaga

SEQ ID NO: 1353532 - RNA, 24 nt, Human
ucccaaagugcugggauuguaggc

SEQ ID NO: 1353533 - RNA, 24 nt, Human
ucccaaguagcugggacuacaggu

SEQ ID NO: 1353534 - RNA, 20 nt, Human
uccccagaguuaccaaaagu

SEQ ID NO: 1353535 - RNA, 21 nt, Human
uccuaggcucaagugauccuc

SEQ ID NO: 1353536 - RNA, 24 nt, Human
uccuaggcucaagugauccuccug

SEQ ID NO: 1353537 - RNA, 21 nt, Human
ucuaucaucagcauccaaaaa

SEQ ID NO: 1353538 - RNA, 24 nt, Human
ucuaucauccaggcuggagugcga

SEQ ID NO: 1353539 - RNA, 21 nt, Human
ucucaaaaaaaacccgcaaac

SEQ ID NO: 1353540 - RNA, 19 nt, Human
ucuugcucuaucauccagg

SEQ ID NO: 1353541 - RNA, 23 nt, Human
ucuugcucuaucauccaggcugg

SEQ ID NO: 1353542 - RNA, 24 nt, Human
ucuugcucuaucauccaggcugga

SEQ ID NO: 1353543 - RNA, 19 nt, Human
ugacaaagugagacucugu

SEQ ID NO: 1353544 - RNA, 21 nt, Human
ugagccgagaucgcgcacugu

SEQ ID NO: 1353545 - RNA, 23 nt, Human
ugaggaggaggaggaccaccagu

SEQ ID NO: 1353546 - RNA, 23 nt, Human
ugaggaggaggaggaccaccagu

SEQ ID NO: 1353547 - RNA, 18 nt, Human
ugaguagagcaccguggc

SEQ ID NO: 1353548 - RNA, 24 nt, Human
ugaguagagcaccguggccugcaa

SEQ ID NO: 1353549 - RNA, 22 nt, Human
ugaguguccagcauugcuguuc

SEQ ID NO: 1353550 - RNA, 23 nt, Human
ugcaguguggagaggguaggggg

SEQ ID NO: 1353551 - RNA, 24 nt, Human
ugcucuaucauccaggcuggagug

SEQ ID NO: 1353552 - RNA, 24 nt, Human
uggaacauaguaaguauucuguau

SEQ ID NO: 1353553 - RNA, 22 nt, Human
uggcagccuaccgcggccacgc

SEQ ID NO: 1353554 - RNA, 21 nt, Human
ugggacuacagguacacacca

SEQ ID NO: 1353555 - RNA, 22 nt, Human
ugggacuacagguacacaccac

SEQ ID NO: 1353556 - RNA, 24 nt, Human
ugggacuacagguacacaccacua

SEQ ID NO: 1353557 - RNA, 18 nt, Human
ugggauuguaggcaugag

SEQ ID NO: 1353558 - RNA, 19 nt, Human
ugggauuguaggcaugagc

SEQ ID NO: 1353559 - RNA, 19 nt, Human
ugggauuguaggcaugagc

SEQ ID NO: 1353560 - RNA, 20 nt, Human
ugggauuguaggcaugagcc

SEQ ID NO: 1353561 - RNA, 22 nt, Human
ugggauuguaggcaugagccua

SEQ ID NO: 1353562 - RNA, 24 nt, Human
uggggucucgguauguugcccagg

SEQ ID NO: 1353563 - RNA, 20 nt, Human
ugguagggauggggucucgg

SEQ ID NO: 1353564 - RNA, 24 nt, Human
ugguagggauggggucucgguaug

SEQ ID NO: 1353565 - RNA, 25 nt, Human
uguauacauaugcaccuacuaugua

SEQ ID NO: 1353566 - RNA, 18 nt, Human
uguauguauacauaugca

SEQ ID NO: 1353567 - RNA, 18 nt, Human
uguguauguauacauaug

SEQ ID NO: 1353568 - RNA, 20 nt, Human
uguguguauguauacauaug

SEQ ID NO: 1353569 - RNA, 18 nt, Human
uguguguguauguauaca

SEQ ID NO: 1353570 - RNA, 20 nt, Human
uguguguguauguauacaua

SEQ ID NO: 1353571 - RNA, 23 nt, Human
uguugagcaaaugaaggaaacug

SEQ ID NO: 1353572 - RNA, 19 nt, Human
uuaagccuaugcuucccaa

SEQ ID NO: 1353573 - RNA, 19 nt, Human
uucuuugucuugcacagac

SEQ ID NO: 1353574 - RNA, 22 nt, Human
uugcagugagccgagaucgcgc

SEQ ID NO: 1353575 - RNA, 24 nt, Human
uugcucuaucauccaggcuggagu

SEQ ID NO: 1353576 - RNA, 24 nt, Human
uugguagggauggggucucgguau

SEQ ID NO: 1353577 - RNA, 25 nt, Human
uuuaaauuuuaacacuuaaaaagug

SEQ ID NO: 1353578 - RNA, 19 nt, Human
uuuggccucccaaagugcu

SEQ ID NO: 1353579 - RNA, 20 nt, Human
uuugucuugcacagacagug

SEQ ID NO: 1353580 - RNA, 19 nt, Human
uuuuugguagggauggggu

SEQ ID NO: 1353581 - RNA, 24 nt, Human
uuuuuugguagggauggggucucg

SEQ ID NO: 1353582 - RNA, 22 nt, Human
aaaagaaagaaauucuggccaa

SEQ ID NO: 1353583 - RNA, 26 nt, Human
aaacaaaaaaaagaaagaaauucugg

SEQ ID NO: 1353584 - RNA, 22 nt, Human
aaacaaaaacaaaaaaaagaaa

SEQ ID NO: 1353585 - RNA, 22 nt, Human
aacacaaggaauacuuuuauac

SEQ ID NO: 1353586 - RNA, 23 nt, Human
aagcaacacacaacagcauggga

SEQ ID NO: 1353587 - RNA, 25 nt, Human
aaguagccaggacaguguccagaug

SEQ ID NO: 1353588 - RNA, 19 nt, Human
aauaacacaaggaauacuu

SEQ ID NO: 1353589 - RNA, 22 nt, Human
acauugcguuuaaauccuuagu

SEQ ID NO: 1353590 - RNA, 20 nt, Human
accuuuuuuuuuacccacuu

SEQ ID NO: 1353591 - RNA, 28 nt, Human
agaaauaacacaaggaauaccgguaccc

SEQ ID NO: 1353592 - RNA, 18 nt, Human
agaacuacauacaaagca

SEQ ID NO: 1353593 - RNA, 18 nt, Human
agcaagaauaagugacac

SEQ ID NO: 1353594 - RNA, 19 nt, Human
agcaugggaacaagagccc

SEQ ID NO: 1353595 - RNA, 21 nt, Human
aggaggcccaugauagcauuu

SEQ ID NO: 1353596 - RNA, 22 nt, Human
aggcuuucuuuugaucccuguu

SEQ ID NO: 1353597 - RNA, 24 nt, Human
agggccccagugagacccugcccc

SEQ ID NO: 1353598 - RNA, 24 nt, Human
aguacugggaagaccugaaccacc

SEQ ID NO: 1353599 - RNA, 20 nt, Human
auauccuuauuuccccaaaa

SEQ ID NO: 1353600 - RNA, 18 nt, Human
auccauugauguuucagc

SEQ ID NO: 1353601 - RNA, 18 nt, Human
aucuggaauggcaugaga

SEQ ID NO: 1353602 - RNA, 21 nt, Human
caacacacaacagcaugggaa

SEQ ID NO: 1353603 - RNA, 19 nt, Human
caacauggggcagaggggc

SEQ ID NO: 1353604 - RNA, 21 nt, Human
caacauggggcagaggggccc

SEQ ID NO: 1353605 - RNA, 21 nt, Human
cacuagaaagucagaaaacag

SEQ ID NO: 1353606 - RNA, 24 nt, Human
cagauuggaaacagagaccauuua

SEQ ID NO: 1353607 - RNA, 18 nt, Human
cauacagagaaguuuuag

SEQ ID NO: 1353608 - RNA, 19 nt, Human
cauccccgcuuccacuccc

SEQ ID NO: 1353609 - RNA, 24 nt, Human
cauucagcaaacacuggugagcac

SEQ ID NO: 1353610 - RNA, 25 nt, Human
ccuaauauccuuauuuccccaaaaa

SEQ ID NO: 1353611 - RNA, 21 nt, Human
ccuggacuaggacuuaaggac

SEQ ID NO: 1353612 - RNA, 22 nt, Human
ccuggacuaggacuuaaggacc

SEQ ID NO: 1353613 - RNA, 26 nt, Human
cgaaugccugucaucccaggagcucc

SEQ ID NO: 1353614 - RNA, 18 nt, Human
cuagaaagucagaaaaca

SEQ ID NO: 1353615 - RNA, 24 nt, Human
cucacacacauauaaacacuguau

SEQ ID NO: 1353616 - RNA, 18 nt, Human
cucagcaagaauaaguga

SEQ ID NO: 1353617 - RNA, 25 nt, Human
cugaccuaauauccuuauuucccca

SEQ ID NO: 1353618 - RNA, 21 nt, Human
cuggaauggugucccugaagu

SEQ ID NO: 1353619 - RNA, 19 nt, Human
gcaacacacaacagcaugg

SEQ ID NO: 1353620 - RNA, 22 nt, Human
gccaagaacuacauacaaagca

SEQ ID NO: 1353621 - RNA, 19 nt, Human
gccccagugagacccugcc

SEQ ID NO: 1353622 - RNA, 18 nt, Human
gcccugcaaagagugggc

SEQ ID NO: 1353623 - RNA, 22 nt, Human
gcugacacaguaccugaucuua

SEQ ID NO: 1353624 - RNA, 22 nt, Human
ggaaggcauccccgcuuccacu

SEQ ID NO: 1353625 - RNA, 18 nt, Human
ggagacagauuggaaaca

SEQ ID NO: 1353626 - RNA, 23 nt, Human
ggagacagauuggaaacagagac

SEQ ID NO: 1353627 - RNA, 20 nt, Human
ggauggccagaaaucuggaa

SEQ ID NO: 1353628 - RNA, 19 nt, Human
gggaagaccugaaccacca

SEQ ID NO: 1353629 - RNA, 27 nt, Human
gggccaggcccagggugcuucagaaga

SEQ ID NO: 1353630 - RNA, 18 nt, Human
ggggcagaggggcccugc

SEQ ID NO: 1353631 - RNA, 22 nt, Human
uaaaauagggcccaggauugcu

SEQ ID NO: 1353632 - RNA, 24 nt, Human
uaaauugcugaccuaauauccuua

SEQ ID NO: 1353633 - RNA, 18 nt, Human
uaaccaaaaaacaaaaac

SEQ ID NO: 1353634 - RNA, 20 nt, Human
uaaccaaaaaacaaaaacaa

SEQ ID NO: 1353635 - RNA, 23 nt, Human
uaaccaaaaaacaaaaacaaaaa

SEQ ID NO: 1353636 - RNA, 26 nt, Human
uaaccaaaaaacaaaaacaaaaaaaa

SEQ ID NO: 1353637 - RNA, 19 nt, Human
uaaccaaaaaacaaaaacc

SEQ ID NO: 1353638 - RNA, 22 nt, Human
uaaggugguaucugccagguuu

SEQ ID NO: 1353639 - RNA, 21 nt, Human
uaagugacacugucuccuuuu

SEQ ID NO: 1353640 - RNA, 25 nt, Human
uacagcauauaagcucaucuguaaa

SEQ ID NO: 1353641 - RNA, 26 nt, Human
uacuuugaucaccugguuaagguggg

SEQ ID NO: 1353642 - RNA, 18 nt, Human
uagcauuuguuacauauu

SEQ ID NO: 1353643 - RNA, 19 nt, Human
uaggacuuaaggacaggga

SEQ ID NO: 1353644 - RNA, 20 nt, Human
uauccuuauuuccccaaaaa

SEQ ID NO: 1353645 - RNA, 27 nt, Human
uauuacuuuuuucuggaaacauuugag

SEQ ID NO: 1353646 - RNA, 23 nt, Human
ucagaagaggccuguggaaggca

SEQ ID NO: 1353647 - RNA, 21 nt, Human
uccauaugccauauuugaggg

SEQ ID NO: 1353648 - RNA, 22 nt, Human
ucccagaguacugggaagaccc

SEQ ID NO: 1353649 - RNA, 18 nt, Human
uccccaccucuucucaug

SEQ ID NO: 1353650 - RNA, 18 nt, Human
ucccccagcauauuccca

SEQ ID NO: 1353651 - RNA, 19 nt, Human
ucccccagcauauucccag

SEQ ID NO: 1353652 - RNA, 18 nt, Human
uccccgcuuccacucccc

SEQ ID NO: 1353653 - RNA, 23 nt, Human
ucuucuacuuugccccugccuac

SEQ ID NO: 1353654 - RNA, 19 nt, Human
ugcuuuaucauacucucuc

SEQ ID NO: 1353655 - RNA, 26 nt, Human
uggaaacagagaccauuuacuucuga

SEQ ID NO: 1353656 - RNA, 25 nt, Human
uggccagaaaucuggaauggcauga

SEQ ID NO: 1353657 - RNA, 19 nt, Human
ugggaagaccugaaccacc

SEQ ID NO: 1353658 - RNA, 22 nt, Human
uguaaauauuguuucucauacc

SEQ ID NO: 1353659 - RNA, 27 nt, Human
uguaaccaaaaaacaaaaacaaaaaaa

SEQ ID NO: 1353660 - RNA, 23 nt, Human
ugucuugucucuuuaaaugagca

SEQ ID NO: 1353661 - RNA, 22 nt, Human
ugucuuguuuccuuaugauuaa

SEQ ID NO: 1353662 - RNA, 25 nt, Human
uguuuuaucauccauugauguuuca

SEQ ID NO: 1353663 - RNA, 21 nt, Human
uucagaguuagggcaacaugg

SEQ ID NO: 1353664 - RNA, 20 nt, Human
uugaggcuauguaaauauug

SEQ ID NO: 1353665 - RNA, 21 nt, Human
aaaaccuucccuauuccacag

SEQ ID NO: 1353666 - RNA, 24 nt, Human
aaagugcugggauuacaggcauga

SEQ ID NO: 1353667 - RNA, 21 nt, Human
aaauaacaaaaacauaaaaag

SEQ ID NO: 1353668 - RNA, 23 nt, Human
aacucaauuuuucuugcuagcau

SEQ ID NO: 1353669 - RNA, 19 nt, Human
aaggacauguuugcuuccc

SEQ ID NO: 1353670 - RNA, 21 nt, Human
aagguucaccauguuggccag

SEQ ID NO: 1353671 - RNA, 19 nt, Human
aaguagcugggauuacagg

SEQ ID NO: 1353672 - RNA, 19 nt, Human
aagugcugggauuacaggc

SEQ ID NO: 1353673 - RNA, 21 nt, Human
aagugcugggauuacaggcau

SEQ ID NO: 1353674 - RNA, 25 nt, Human
aauaacaaaaacauaaaaagaggga

SEQ ID NO: 1353675 - RNA, 22 nt, Human
aaugaagccuuagaaaaaaccu

SEQ ID NO: 1353676 - RNA, 24 nt, Human
aauguacaaucauguagccucuuu

SEQ ID NO: 1353677 - RNA, 21 nt, Human
aauuagccgggcaugggaagc

SEQ ID NO: 1353678 - RNA, 25 nt, Human
acaaaacacaaauaacaaaaacaua

SEQ ID NO: 1353679 - RNA, 18 nt, Human
acaauaaugaagccuuag

SEQ ID NO: 1353680 - RNA, 21 nt, Human
acaccacugcacucuagccug

SEQ ID NO: 1353681 - RNA, 23 nt, Human
acaggcgcccaccaccacacucg

SEQ ID NO: 1353682 - RNA, 18 nt, Human
accaccacacucggcuca

SEQ ID NO: 1353683 - RNA, 24 nt, Human
accauguuggccaggcuggucucg

SEQ ID NO: 1353684 - RNA, 24 nt, Human
acucuagccugggacauagaguga

SEQ ID NO: 1353685 - RNA, 24 nt, Human
acucuuguugcccaggcuggagug

SEQ ID NO: 1353686 - RNA, 25 nt, Human
acugaaauauuuauuuucuucaaaa

SEQ ID NO: 1353687 - RNA, 18 nt, Human
acugcacucuagccuggg

SEQ ID NO: 1353688 - RNA, 22 nt, Human
acugcacucuagccugggacau

SEQ ID NO: 1353689 - RNA, 24 nt, Human
acugcacucuagccugggacauag

SEQ ID NO: 1353690 - RNA, 24 nt, Human
acuuuaaaugggugaacugaaggg

SEQ ID NO: 1353691 - RNA, 20 nt, Human
agaaaaaccacucuagcugg

SEQ ID NO: 1353692 - RNA, 26 nt, Human
agaaaaggcaacucuauauaaggaua

SEQ ID NO: 1353693 - RNA, 21 nt, Human
agaagaugaggggauggaaga

SEQ ID NO: 1353694 - RNA, 22 nt, Human
agagugagaccuuaucucaaaa

SEQ ID NO: 1353695 - RNA, 24 nt, Human
agccugggacauagagugagaccu

SEQ ID NO: 1353696 - RNA, 21 nt, Human
agccugggcaagauccugucu

SEQ ID NO: 1353697 - RNA, 21 nt, Human
agcuaugccuuaguacagagc

SEQ ID NO: 1353698 - RNA, 21 nt, Human
aguagagacaagguucaccau

SEQ ID NO: 1353699 - RNA, 23 nt, Human
aguagcugggauuacaggcgccc

SEQ ID NO: 1353700 - RNA, 18 nt, Human
agugcugggauuacaggc

SEQ ID NO: 1353701 - RNA, 25 nt, Human
auaaaacaaaacacaaauaacaaaa

SEQ ID NO: 1353702 - RNA, 20 nt, Human
augaagccuuagaaaaaacc

SEQ ID NO: 1353703 - RNA, 21 nt, Human
auuuuuuuauuuuuaguagag

SEQ ID NO: 1353704 - RNA, 22 nt, Human
auuuuuuuauuuuuaguagaga

SEQ ID NO: 1353705 - RNA, 24 nt, Human
auuuuuuuauuuuuaguagagaca

SEQ ID NO: 1353706 - RNA, 20 nt, Human
caaaacacaaauaacaaaaa

SEQ ID NO: 1353707 - RNA, 24 nt, Human
caaagugcugggauuacaggcaug

SEQ ID NO: 1353708 - RNA, 22 nt, Human
caagaaaauguacuaaaacuca

SEQ ID NO: 1353709 - RNA, 22 nt, Human
caagcgauucuccugucuuagc

SEQ ID NO: 1353710 - RNA, 23 nt, Human
caagguucaccauguuggccagg

SEQ ID NO: 1353711 - RNA, 22 nt, Human
caauaaugaagccuuagaaaaa

SEQ ID NO: 1353712 - RNA, 21 nt, Human
cacaguuuucuccugcccccc

SEQ ID NO: 1353713 - RNA, 21 nt, Human
caccauguuggccaggcuggu

SEQ ID NO: 1353714 - RNA, 24 nt, Human
caccauguuggccaggcuggucuc

SEQ ID NO: 1353715 - RNA, 27 nt, Human
caccauguuggccaggcuggucucgaa

SEQ ID NO: 1353716 - RNA, 21 nt, Human
cacccaaaacucaucaugcau

SEQ ID NO: 1353717 - RNA, 24 nt, Human
cacucuuguugcccaggcuggagu

SEQ ID NO: 1353718 - RNA, 21 nt, Human
cacugcaaccuccgccucccg

SEQ ID NO: 1353719 - RNA, 23 nt, Human
cacugcaaccuccgccucccggg

SEQ ID NO: 1353720 - RNA, 18 nt, Human
cacugcacucuagccugg

SEQ ID NO: 1353721 - RNA, 19 nt, Human
cacugcacucuagccuggg

SEQ ID NO: 1353722 - RNA, 19 nt, Human
cacugcacucuagccuggg

SEQ ID NO: 1353723 - RNA, 22 nt, Human
cacugcacucuagccugggaca

SEQ ID NO: 1353724 - RNA, 21 nt, Human
cacuguacuccaagccugggc

SEQ ID NO: 1353725 - RNA, 24 nt, Human
cacuguacuccaagccugggcaag

SEQ ID NO: 1353726 - RNA, 25 nt, Human
cagaacuauaagucaauuaaaccuc

SEQ ID NO: 1353727 - RNA, 21 nt, Human
caggcgcccaccaccacacuc

SEQ ID NO: 1353728 - RNA, 24 nt, Human
caguaugcagcaaaugaagaaacg

SEQ ID NO: 1353729 - RNA, 23 nt, Human
cauaauagugaguucucacgaga

SEQ ID NO: 1353730 - RNA, 24 nt, Human
cauagagugagaccuuaucucaaa

SEQ ID NO: 1353731 - RNA, 24 nt, Human
cauguuggccaggcuggucucgaa

SEQ ID NO: 1353732 - RNA, 23 nt, Human
cauguuugcuuccccuucugcca

SEQ ID NO: 1353733 - RNA, 23 nt, Human
ccaaagugcugggauuacaggca

SEQ ID NO: 1353734 - RNA, 24 nt, Human
ccaaagugcugggauuacaggcau

SEQ ID NO: 1353735 - RNA, 25 nt, Human
ccaagaacacaggccucccucuccc

SEQ ID NO: 1353736 - RNA, 22 nt, Human
ccaaggguacaggguucuuuau

SEQ ID NO: 1353737 - RNA, 22 nt, Human
ccaaguagcugggauuacaggc

SEQ ID NO: 1353738 - RNA, 19 nt, Human
ccacugcacucuagccugg

SEQ ID NO: 1353739 - RNA, 20 nt, Human
ccacugcacucuagccuggg

SEQ ID NO: 1353740 - RNA, 20 nt, Human
ccacugcacucuagccuggg

SEQ ID NO: 1353741 - RNA, 21 nt, Human
ccacugcacucuagccuggga

SEQ ID NO: 1353742 - RNA, 22 nt, Human
ccacugcacucuagccugggac

SEQ ID NO: 1353743 - RNA, 24 nt, Human
cccaaagugcugggauuacaggca

SEQ ID NO: 1353744 - RNA, 23 nt, Human
cccaaguagcugggauuacaggc

SEQ ID NO: 1353745 - RNA, 23 nt, Human
cccaaguagcugggauuacaggc

SEQ ID NO: 1353746 - RNA, 23 nt, Human
cccggguucaagcgauucuccug

SEQ ID NO: 1353747 - RNA, 24 nt, Human
ccgccucccggguucaagcgauuc

SEQ ID NO: 1353748 - RNA, 21 nt, Human
ccuagcggggugaggggcagg

SEQ ID NO: 1353749 - RNA, 24 nt, Human
ccucccggguucaagcgauucucc

SEQ ID NO: 1353750 - RNA, 22 nt, Human
ccuccugcugcuaaguuagaag

SEQ ID NO: 1353751 - RNA, 19 nt, Human
ccugaccucaagugauccg

SEQ ID NO: 1353752 - RNA, 24 nt, Human
ccugaccucaagugauccgcccac

SEQ ID NO: 1353753 - RNA, 20 nt, Human
ccugaggccuccccagcccu

SEQ ID NO: 1353754 - RNA, 21 nt, Human
ccugcccccccauuuuagcua

SEQ ID NO: 1353755 - RNA, 20 nt, Human
cuacagccaagaacacaggc

SEQ ID NO: 1353756 - RNA, 24 nt, Human
cucaagugauccgcccaccugggc

SEQ ID NO: 1353757 - RNA, 24 nt, Human
cucacugcaaccuccgccucccgg

SEQ ID NO: 1353758 - RNA, 20 nt, Human
cuccugaggccuccccagcc

SEQ ID NO: 1353759 - RNA, 25 nt, Human
cuccugucuuagccucccaaguagc

SEQ ID NO: 1353760 - RNA, 18 nt, Human
cucuuguugcccaggcug

SEQ ID NO: 1353761 - RNA, 23 nt, Human
cugcaaccuccgccucccggguu

SEQ ID NO: 1353762 - RNA, 24 nt, Human
cugcaaccuccgccucccggguuc

SEQ ID NO: 1353763 - RNA, 21 nt, Human
cugggccucccaaagugcugg

SEQ ID NO: 1353764 - RNA, 23 nt, Human
cugucuuagccucccaaguagcu

SEQ ID NO: 1353765 - RNA, 23 nt, Human
cuuagccucccaaguagcuggga

SEQ ID NO: 1353766 - RNA, 24 nt, Human
cuuguugcccaggcuggagugcaa

SEQ ID NO: 1353767 - RNA, 21 nt, Human
gaaaaagccaauuuaaaaaga

SEQ ID NO: 1353768 - RNA, 18 nt, Human
gaagaaggacauguuugc

SEQ ID NO: 1353769 - RNA, 24 nt, Human
gacaagguucaccauguuggccag

SEQ ID NO: 1353770 - RNA, 22 nt, Human
gaccucaagugauccgcccacc

SEQ ID NO: 1353771 - RNA, 22 nt, Human
gauuacaggcaugagcaaaugu

SEQ ID NO: 1353772 - RNA, 19 nt, Human
gcccaggcuggagugcaau

SEQ ID NO: 1353773 - RNA, 20 nt, Human
gccgcuuagugcuagagaag

SEQ ID NO: 1353774 - RNA, 24 nt, Human
gcgauucuccugucuuagccuccc

SEQ ID NO: 1353775 - RNA, 21 nt, Human
gcucaaugagaaagaaaaacc

SEQ ID NO: 1353776 - RNA, 19 nt, Human
gcuggagugcaauggcaca

SEQ ID NO: 1353777 - RNA, 23 nt, Human
gcuggucucgaacuccugaccuc

SEQ ID NO: 1353778 - RNA, 20 nt, Human
ggaagaucccugcagaucag

SEQ ID NO: 1353779 - RNA, 22 nt, Human
ggauuacaggcaugagcaaaug

SEQ ID NO: 1353780 - RNA, 19 nt, Human
ggcgcccaccaccacacuc

SEQ ID NO: 1353781 - RNA, 24 nt, Human
ggcuggucucgaacuccugaccuc

SEQ ID NO: 1353782 - RNA, 20 nt, Human
gggaagcugcaguuagucau

SEQ ID NO: 1353783 - RNA, 19 nt, Human
ggucucgaacuccugaccu

SEQ ID NO: 1353784 - RNA, 18 nt, Human
guagcugggauuacaggc

SEQ ID NO: 1353785 - RNA, 22 nt, Human
gugaaucaagaugcugcuccuu

SEQ ID NO: 1353786 - RNA, 20 nt, Human
gugguccuaacaguaugcag

SEQ ID NO: 1353787 - RNA, 24 nt, Human
uaaaaagagggagacuaugugaua

SEQ ID NO: 1353788 - RNA, 20 nt, Human
uaaaaauggguuauauggua

SEQ ID NO: 1353789 - RNA, 19 nt, Human
uaaaacaaaacacaaauaa

SEQ ID NO: 1353790 - RNA, 24 nt, Human
uaaaacaaaacacaaauaacaaaa

SEQ ID NO: 1353791 - RNA, 26 nt, Human
uaaaacaaaacacaaauaacaaaaac

SEQ ID NO: 1353792 - RNA, 20 nt, Human
uaaaagaacacaacuaucua

SEQ ID NO: 1353793 - RNA, 21 nt, Human
uaaacauaaaacaaaacacaa

SEQ ID NO: 1353794 - RNA, 21 nt, Human
uaaagaaauauaagaaauuag

SEQ ID NO: 1353795 - RNA, 26 nt, Human
uaaaggguacaggguuuguuuguuuu

SEQ ID NO: 1353796 - RNA, 24 nt, Human
uaagaaaagcaagagucuguggua

SEQ ID NO: 1353797 - RNA, 21 nt, Human
uacaaaauauuccacuguaag

SEQ ID NO: 1353798 - RNA, 22 nt, Human
uacaggcaugagcaaaugugcc

SEQ ID NO: 1353799 - RNA, 18 nt, Human
uaccacagcaaccuccug

SEQ ID NO: 1353800 - RNA, 21 nt, Human
uagagacaagguucaccaugu

SEQ ID NO: 1353801 - RNA, 22 nt, Human
uagcagugugacaaugaacuaa

SEQ ID NO: 1353802 - RNA, 19 nt, Human
uagccauaaaaaauuagaa

SEQ ID NO: 1353803 - RNA, 20 nt, Human
uaggggagaaguacaugaua

SEQ ID NO: 1353804 - RNA, 23 nt, Human
uaguagagacaagguucaccaug

SEQ ID NO: 1353805 - RNA, 20 nt, Human
uagugcuagagaagaugagg

SEQ ID NO: 1353806 - RNA, 18 nt, Human
uaucaagauagaugguuu

SEQ ID NO: 1353807 - RNA, 20 nt, Human
uaucuaaaaucucuggaagu

SEQ ID NO: 1353808 - RNA, 19 nt, Human
uaugucuuauaggggagaa

SEQ ID NO: 1353809 - RNA, 24 nt, Human
ucaauccccucuucuagccagccc

SEQ ID NO: 1353810 - RNA, 22 nt, Human
ucacucuuguugcccaggcugg

SEQ ID NO: 1353811 - RNA, 23 nt, Human
ucacucuuguugcccaggcugga

SEQ ID NO: 1353812 - RNA, 23 nt, Human
ucacugcaaccuccgccucccgg

SEQ ID NO: 1353813 - RNA, 24 nt, Human
ucacugcaaccuccgccucccggg

SEQ ID NO: 1353814 - RNA, 25 nt, Human
ucacugcaaccuccgccucccgggu

SEQ ID NO: 1353815 - RNA, 26 nt, Human
ucacugcaaccuccgccucccggguu

SEQ ID NO: 1353816 - RNA, 24 nt, Human
ucagcucaaugagaaagaaaaacc

SEQ ID NO: 1353817 - RNA, 20 nt, Human
ucaugggaggaacccagugg

SEQ ID NO: 1353818 - RNA, 24 nt, Human
ucauuuuuuuauuuuuaguagaga

SEQ ID NO: 1353819 - RNA, 24 nt, Human
ucccaaagugcugggauuacaggc

SEQ ID NO: 1353820 - RNA, 24 nt, Human
ucccaaguagcugggauuacaggc

SEQ ID NO: 1353821 - RNA, 21 nt, Human
ucccggguucaagcgauucuc

SEQ ID NO: 1353822 - RNA, 24 nt, Human
ucccggguucaagcgauucuccug

SEQ ID NO: 1353823 - RNA, 21 nt, Human
ucccugcagaucagaucccca

SEQ ID NO: 1353824 - RNA, 26 nt, Human
uccuugcugcugccaugucgucgucg

SEQ ID NO: 1353825 - RNA, 24 nt, Human
ucuagccugggacauagagugaga

SEQ ID NO: 1353826 - RNA, 22 nt, Human
ucuccacccaaaacucaucaug

SEQ ID NO: 1353827 - RNA, 20 nt, Human
ucuccugcccccccauuuua

SEQ ID NO: 1353828 - RNA, 21 nt, Human
ucucgaacuccugaccucaag

SEQ ID NO: 1353829 - RNA, 19 nt, Human
ucugcuggaauggaaucca

SEQ ID NO: 1353830 - RNA, 23 nt, Human
ucugugguaugugaaucaagaug

SEQ ID NO: 1353831 - RNA, 22 nt, Human
ucuuguugcccaggcuggagug

SEQ ID NO: 1353832 - RNA, 18 nt, Human
ugaccucaagugauccgc

SEQ ID NO: 1353833 - RNA, 18 nt, Human
ugagaaagaaaaaccacu

SEQ ID NO: 1353834 - RNA, 23 nt, Human
ugagaaagaaaaaccacucuagc

SEQ ID NO: 1353835 - RNA, 23 nt, Human
ugagacagaguuucacucuuguu

SEQ ID NO: 1353836 - RNA, 18 nt, Human
ugaggggauggaagauga

SEQ ID NO: 1353837 - RNA, 24 nt, Human
ugauccgcccaccugggccuccca

SEQ ID NO: 1353838 - RNA, 20 nt, Human
ugccaugugaagaaggacau

SEQ ID NO: 1353839 - RNA, 18 nt, Human
ugcccaggcuggagugca

SEQ ID NO: 1353840 - RNA, 21 nt, Human
ugcccaggcuggagugcaaug

SEQ ID NO: 1353841 - RNA, 24 nt, Human
ugcccaggcuggagugcaauggca

SEQ ID NO: 1353842 - RNA, 21 nt, Human
ugccuggccaaggguacaggg

SEQ ID NO: 1353843 - RNA, 23 nt, Human
ugcugggauuacaggcaugagca

SEQ ID NO: 1353844 - RNA, 21 nt, Human
uggaaaaagccaauuuaaaaa

SEQ ID NO: 1353845 - RNA, 23 nt, Human
uggaaaaagccaauuuaaaaaga

SEQ ID NO: 1353846 - RNA, 25 nt, Human
uggaaaaagccaauuuaaaaagacc

SEQ ID NO: 1353847 - RNA, 23 nt, Human
uggagugcaauggcacagucuca

SEQ ID NO: 1353848 - RNA, 19 nt, Human
uggcacaauaaugaagccu

SEQ ID NO: 1353849 - RNA, 22 nt, Human
uggcacaauaaugaagccuuag

SEQ ID NO: 1353850 - RNA, 24 nt, Human
uggcacagucucagcucacugcaa

SEQ ID NO: 1353851 - RNA, 24 nt, Human
uggccaggcuggucucgaacuccu

SEQ ID NO: 1353852 - RNA, 19 nt, Human
ugggacauagagugagacc

SEQ ID NO: 1353853 - RNA, 18 nt, Human
ugggaggaacccaguggg

SEQ ID NO: 1353854 - RNA, 20 nt, Human
ugggagguaacugaaucaug

SEQ ID NO: 1353855 - RNA, 18 nt, Human
ugggauuacaggcaugag

SEQ ID NO: 1353856 - RNA, 19 nt, Human
ugggauuacaggcaugagc

SEQ ID NO: 1353857 - RNA, 19 nt, Human
ugggauuacaggcaugagc

SEQ ID NO: 1353858 - RNA, 19 nt, Human
ugggauuacaggcaugagc

SEQ ID NO: 1353859 - RNA, 20 nt, Human
ugggauuacaggcaugagca

SEQ ID NO: 1353860 - RNA, 22 nt, Human
ugggauuacaggcaugagcaaa

SEQ ID NO: 1353861 - RNA, 24 nt, Human
ugggauuacaggcaugagcaaaug

SEQ ID NO: 1353862 - RNA, 21 nt, Human
ugggauuacaggcgcccacca

SEQ ID NO: 1353863 - RNA, 24 nt, Human
ugggauuacaggcgcccaccacca

SEQ ID NO: 1353864 - RNA, 25 nt, Human
uggguaaacauaaaacaaaacacaa

SEQ ID NO: 1353865 - RNA, 23 nt, Human
ugugacaaugaacuaauauguau

SEQ ID NO: 1353866 - RNA, 20 nt, Human
uguugcccaggcuggagugc

SEQ ID NO: 1353867 - RNA, 19 nt, Human
uguuuguuuuuuguuuuuu

SEQ ID NO: 1353868 - RNA, 23 nt, Human
uuaaaccucuuuccuuuauaauu

SEQ ID NO: 1353869 - RNA, 24 nt, Human
uuaauuacuaaaugcccauuaugu

SEQ ID NO: 1353870 - RNA, 22 nt, Human
uuagauaccaccuuaaagcuuu

SEQ ID NO: 1353871 - RNA, 24 nt, Human
uuaguagagacaagguucaccaug

SEQ ID NO: 1353872 - RNA, 23 nt, Human
uucaaauauaggaaaacauaaga

SEQ ID NO: 1353873 - RNA, 23 nt, Human
uucaagaacuugauggauacaaa

SEQ ID NO: 1353874 - RNA, 23 nt, Human
uucaagcgauucuccugucuuag

SEQ ID NO: 1353875 - RNA, 20 nt, Human
uucaccauguuggccaggcu

SEQ ID NO: 1353876 - RNA, 24 nt, Human
uucacucuuguugcccaggcugga

SEQ ID NO: 1353877 - RNA, 18 nt, Human
uucuagccagcccccacc

SEQ ID NO: 1353878 - RNA, 25 nt, Human
uucucacgagauaugaugguuuuau

SEQ ID NO: 1353879 - RNA, 18 nt, Human
uuggcugugucuccaccc

SEQ ID NO: 1353880 - RNA, 23 nt, Human
uuguaguucucauaacccccaug

SEQ ID NO: 1353881 - RNA, 24 nt, Human
uuuaguagagacaagguucaccau

SEQ ID NO: 1353882 - RNA, 24 nt, Human
uuucacucuuguugcccaggcugg

SEQ ID NO: 1353883 - RNA, 20 nt, Human
uuucuccugcccccccauuu

SEQ ID NO: 1353884 - RNA, 24 nt, Human
uuuggcugugucuccacccaaaac

SEQ ID NO: 1353885 - RNA, 25 nt, Human
uuuuuuguuuuuugagacagaguuu

SEQ ID NO: 1353886 - RNA, 18 nt, Human
agcagcagcuuguuggau

SEQ ID NO: 1353887 - RNA, 22 nt, Human
aggucuuuggcauagcuguaca

SEQ ID NO: 1353888 - RNA, 26 nt, Human
auucuggcucuggcccugacccuggc

SEQ ID NO: 1353889 - RNA, 20 nt, Human
caacuccauauccagaaaaa

SEQ ID NO: 1353890 - RNA, 18 nt, Human
caccaaagcuagcagcag

SEQ ID NO: 1353891 - RNA, 22 nt, Human
cauauuuaguccaaccccaaaa

SEQ ID NO: 1353892 - RNA, 20 nt, Human
ccaaccccaaaaagacaauu

SEQ ID NO: 1353893 - RNA, 20 nt, Human
cccaaugaaggaagcaggau

SEQ ID NO: 1353894 - RNA, 23 nt, Human
ccuacacacaguauaacacugaa

SEQ ID NO: 1353895 - RNA, 24 nt, Human
ccuacacacaguauaacacugaau

SEQ ID NO: 1353896 - RNA, 18 nt, Human
ccugacccuggcucugga

SEQ ID NO: 1353897 - RNA, 22 nt, Human
ccugacccuggcucuggaaaug

SEQ ID NO: 1353898 - RNA, 18 nt, Human
ccuggcucuggaaauggg

SEQ ID NO: 1353899 - RNA, 23 nt, Human
ccuucuggcucaaacucugaguc

SEQ ID NO: 1353900 - RNA, 18 nt, Human
ccuugccugaguucugcu

SEQ ID NO: 1353901 - RNA, 21 nt, Human
cgccauuucucuacacugccu

SEQ ID NO: 1353902 - RNA, 19 nt, Human
cugacccuggcucuggaaa

SEQ ID NO: 1353903 - RNA, 21 nt, Human
cugauaccucugcaaaaaaag

SEQ ID NO: 1353904 - RNA, 19 nt, Human
cuggcccugacccuggcuc

SEQ ID NO: 1353905 - RNA, 18 nt, Human
cuggccuccugaugcucu

SEQ ID NO: 1353906 - RNA, 21 nt, Human
gacccuggcucuggaaauggg

SEQ ID NO: 1353907 - RNA, 21 nt, Human
gaccuuguuucuuugcuuuuc

SEQ ID NO: 1353908 - RNA, 26 nt, Human
gcccugacccuggcucuggaaauggg

SEQ ID NO: 1353909 - RNA, 24 nt, Human
gcuguacaacuccauauccagaaa

SEQ ID NO: 1353910 - RNA, 23 nt, Human
uauugggucuuccgcugaaacuc

SEQ ID NO: 1353911 - RNA, 25 nt, Human
ucagguucugauuggcauucugccg

SEQ ID NO: 1353912 - RNA, 22 nt, Human
uccagaaaauucagucccucaa

SEQ ID NO: 1353913 - RNA, 18 nt, Human
uccauauccagaaaauuc

SEQ ID NO: 1353914 - RNA, 23 nt, Human
ucuccuucuggcucaaacucuga

SEQ ID NO: 1353915 - RNA, 23 nt, Human
ucucuacacugccuauguagucg

SEQ ID NO: 1353916 - RNA, 24 nt, Human
ucugauucggauucuggcucuggc

SEQ ID NO: 1353917 - RNA, 18 nt, Human
ugaaaggcaacuguaaag

SEQ ID NO: 1353918 - RNA, 21 nt, Human
ugaaaggcaacuguaaaggca

SEQ ID NO: 1353919 - RNA, 23 nt, Human
ugaaggaagcaggauguguuugg

SEQ ID NO: 1353920 - RNA, 20 nt, Human
ugaauugaaaggcaacugua

SEQ ID NO: 1353921 - RNA, 21 nt, Human
ugacccuggcucuggaaaugg

SEQ ID NO: 1353922 - RNA, 25 nt, Human
ugacccuggcucuggaaaugggucu

SEQ ID NO: 1353923 - RNA, 19 nt, Human
ugcaaaaaaaggucuuugg

SEQ ID NO: 1353924 - RNA, 21 nt, Human
uggcauagcuguacaacucca

SEQ ID NO: 1353925 - RNA, 21 nt, Human
uggcauucggauuuggguucu

SEQ ID NO: 1353926 - RNA, 21 nt, Human
uggcgaaauaaaguucauguu

SEQ ID NO: 1353927 - RNA, 19 nt, Human
uggcucuggaaaugggucu

SEQ ID NO: 1353928 - RNA, 24 nt, Human
uggcucuggcccugacccuggcuc

SEQ ID NO: 1353929 - RNA, 19 nt, Human
uguaaaggcaacaucuaaa

SEQ ID NO: 1353930 - RNA, 18 nt, Human
uguuuuaccuacacacag

SEQ ID NO: 1353931 - RNA, 24 nt, Human
uuaguccaaccccaaaaagacaau

SEQ ID NO: 1353932 - RNA, 18 nt, Human
uucaguggcgcuuuggga

SEQ ID NO: 1353933 - RNA, 18 nt, Human
uuuggacacuuucaucuu

SEQ ID NO: 1353934 - RNA, 21 nt, Human
uuuuaaaacuuccccaaugaa

SEQ ID NO: 1353935 - RNA, 19 nt, Human
aaaaaauaaauucuggcag

SEQ ID NO: 1353936 - RNA, 18 nt, Human
aaacagaaauaagaaaga

SEQ ID NO: 1353937 - RNA, 23 nt, Human
aaacucaaggaaugaggcaacag

SEQ ID NO: 1353938 - RNA, 19 nt, Human
aaaugccauuagacgcuaa

SEQ ID NO: 1353939 - RNA, 19 nt, Human
aacauucauuuccuggccu

SEQ ID NO: 1353940 - RNA, 23 nt, Human
aaccaagaaaaugguuucuacaa

SEQ ID NO: 1353941 - RNA, 22 nt, Human
aaucucuugagaaagaaacaga

SEQ ID NO: 1353942 - RNA, 22 nt, Human
aauggaagagugaaacucaagg

SEQ ID NO: 1353943 - RNA, 21 nt, Human
agaaacagaaauaagaaagaa

SEQ ID NO: 1353944 - RNA, 18 nt, Human
agaaauaagaaagaagcc

SEQ ID NO: 1353945 - RNA, 18 nt, Human
agaaauguccauagguuc

SEQ ID NO: 1353946 - RNA, 20 nt, Human
agaaauuggggagaaucucu

SEQ ID NO: 1353947 - RNA, 24 nt, Human
agaaauuggggagaaucucuugag

SEQ ID NO: 1353948 - RNA, 19 nt, Human
agggcauguucuaaagucc

SEQ ID NO: 1353949 - RNA, 23 nt, Human
aguaaaaagauaccugcaaagaa

SEQ ID NO: 1353950 - RNA, 18 nt, Human
aucuaugccaccaccucc

SEQ ID NO: 1353951 - RNA, 22 nt, Human
cagauccaagaugauucaagaa

SEQ ID NO: 1353952 - RNA, 21 nt, Human
caucacacuuuauuacaauaa

SEQ ID NO: 1353953 - RNA, 23 nt, Human
cauggaacuggcucagaaauguc

SEQ ID NO: 1353954 - RNA, 22 nt, Human
ccacagugcuggugaggagagg

SEQ ID NO: 1353955 - RNA, 19 nt, Human
cccacacaaauaguaaaga

SEQ ID NO: 1353956 - RNA, 20 nt, Human
ccuccuuccugaggcuguag

SEQ ID NO: 1353957 - RNA, 24 nt, Human
ccuugccacagugcuggugaggag

SEQ ID NO: 1353958 - RNA, 26 nt, Human
cucuagaaauugauuuaauucaugaa

SEQ ID NO: 1353959 - RNA, 24 nt, Human
cuuccuagagccaaauccuucuuu

SEQ ID NO: 1353960 - RNA, 25 nt, Human
gaaagaaacagaaauaagaaagaag

SEQ ID NO: 1353961 - RNA, 18 nt, Human
gaagccuuccuagagcca

SEQ ID NO: 1353962 - RNA, 21 nt, Human
gagggcauguucuaaaguccc

SEQ ID NO: 1353963 - RNA, 21 nt, Human
gaucuaugccaccaccuccuu

SEQ ID NO: 1353964 - RNA, 20 nt, Human
gcaguggagaugacaaauac

SEQ ID NO: 1353965 - RNA, 24 nt, Human
gccacagugcuggugaggagaggg

SEQ ID NO: 1353966 - RNA, 22 nt, Human
ggaaugaggcaacagcuggauc

SEQ ID NO: 1353967 - RNA, 21 nt, Human
ggcucagaaauguccauaggu

SEQ ID NO: 1353968 - RNA, 22 nt, Human
uaaauucuggcaggaaauauua

SEQ ID NO: 1353969 - RNA, 26 nt, Human
uaagaaagaagcauuuuccuucuccc

SEQ ID NO: 1353970 - RNA, 18 nt, Human
uaagagcacaaagaucaa

SEQ ID NO: 1353971 - RNA, 18 nt, Human
uaagagcacaaagaucaa

SEQ ID NO: 1353972 - RNA, 25 nt, Human
uaagagcacaaagaucaacacaguc

SEQ ID NO: 1353973 - RNA, 25 nt, Human
uaaggcaggcauccaaaaugagauu

SEQ ID NO: 1353974 - RNA, 18 nt, Human
uauuuuuuaauuaccugg

SEQ ID NO: 1353975 - RNA, 18 nt, Human
uccaagaugauucaagaa

SEQ ID NO: 1353976 - RNA, 20 nt, Human
ucccagauccaagaugauuc

SEQ ID NO: 1353977 - RNA, 25 nt, Human
uccuagauuaauucuaaaccuguau

SEQ ID NO: 1353978 - RNA, 23 nt, Human
ucucuugagaaagaaacagaaau

SEQ ID NO: 1353979 - RNA, 19 nt, Human
ucugccuaagucgguaaca

SEQ ID NO: 1353980 - RNA, 19 nt, Human
ugacaaaaaauaaauucug

SEQ ID NO: 1353981 - RNA, 22 nt, Human
ugagaaagaaacagaaauaaga

SEQ ID NO: 1353982 - RNA, 19 nt, Human
ugaggagagggcauguucu

SEQ ID NO: 1353983 - RNA, 24 nt, Human
ugcaagaagcuaugacaaaaaaua

SEQ ID NO: 1353984 - RNA, 22 nt, Human
ugcauacaugcaagaagcuaug

SEQ ID NO: 1353985 - RNA, 19 nt, Human
ugccaacccauacugucac

SEQ ID NO: 1353986 - RNA, 21 nt, Human
ugccuugccacagugcuggug

SEQ ID NO: 1353987 - RNA, 19 nt, Human
uggaagagugaaacucaag

SEQ ID NO: 1353988 - RNA, 21 nt, Human
uggaagccuuccuagagccaa

SEQ ID NO: 1353989 - RNA, 25 nt, Human
uguaguaaccaagaaaaugguuucu

SEQ ID NO: 1353990 - RNA, 22 nt, Human
uucaagaaaggaauggugcccc

SEQ ID NO: 1353991 - RNA, 23 nt, Human
uuccugaggcuguaggagggcca

SEQ ID NO: 1353992 - RNA, 23 nt, Human
uucuucagcauugaagagccuga

SEQ ID NO: 1353993 - RNA, 23 nt, Human
aaaaagcagaugaauucaucccg

SEQ ID NO: 1353994 - RNA, 23 nt, Human
aaaauaucuccauaacacggagu

SEQ ID NO: 1353995 - RNA, 23 nt, Human
aaaccccaagcauguuaaaaaca

SEQ ID NO: 1353996 - RNA, 21 nt, Human
aaagaaaugccagugucccug

SEQ ID NO: 1353997 - RNA, 21 nt, Human
aacaacacagccaaacgcuau

SEQ ID NO: 1353998 - RNA, 21 nt, Human
aacacagccaaacgcuauccu

SEQ ID NO: 1353999 - RNA, 24 nt, Human
aaggaaaagacccaacugaaaaag

SEQ ID NO: 1354000 - RNA, 21 nt, Human
aaguacccagucccuuccauu

SEQ ID NO: 1354001 - RNA, 23 nt, Human
aauaaaugacagaagaucuguca

SEQ ID NO: 1354002 - RNA, 22 nt, Human
aaugccagugucccuguugccc

SEQ ID NO: 1354003 - RNA, 24 nt, Human
acaggcaagagcccuguuucugug

SEQ ID NO: 1354004 - RNA, 21 nt, Human
acaugccaaaagccaggaacu

SEQ ID NO: 1354005 - RNA, 20 nt, Human
acccuugagccguugacuuc

SEQ ID NO: 1354006 - RNA, 19 nt, Human
accucaguuuuuuucaucu

SEQ ID NO: 1354007 - RNA, 23 nt, Human
agacaucuuugggugugucuuca

SEQ ID NO: 1354008 - RNA, 24 nt, Human
agauggucagugaguccaaaaagc

SEQ ID NO: 1354009 - RNA, 21 nt, Human
agccguugacuucacugagcc

SEQ ID NO: 1354010 - RNA, 21 nt, Human
agcucuggccuccaccugcaa

SEQ ID NO: 1354011 - RNA, 19 nt, Human
aggaaaucccaaaaggcaa

SEQ ID NO: 1354012 - RNA, 26 nt, Human
aggaacugaaaacuacacacggugcc

SEQ ID NO: 1354013 - RNA, 22 nt, Human
aggcacagggacgagaggaggg

SEQ ID NO: 1354014 - RNA, 23 nt, Human
aucccauuuaacccucaccacca

SEQ ID NO: 1354015 - RNA, 28 nt, Human
caaaccccaagcauguuaaaaacagucu

SEQ ID NO: 1354016 - RNA, 25 nt, Human
caaagcagagccaauaauaccugcu

SEQ ID NO: 1354017 - RNA, 24 nt, Human
caacacagccaaacgcuauccccu

SEQ ID NO: 1354018 - RNA, 19 nt, Human
caacaugccaaaagccagg

SEQ ID NO: 1354019 - RNA, 21 nt, Human
caacaugccaaaagccaggaa

SEQ ID NO: 1354020 - RNA, 22 nt, Human
caagaacacggcagguucagac

SEQ ID NO: 1354021 - RNA, 23 nt, Human
caaggcacacagcuuggcaagga

SEQ ID NO: 1354022 - RNA, 21 nt, Human
cacagccaaacgcuauccccu

SEQ ID NO: 1354023 - RNA, 24 nt, Human
caccaaaaaauccagcaaguaccc

SEQ ID NO: 1354024 - RNA, 26 nt, Human
caccaaaaaauccagcaaguacccag

SEQ ID NO: 1354025 - RNA, 23 nt, Human
cacgaaaagccaagaacacggca

SEQ ID NO: 1354026 - RNA, 18 nt, Human
cacugagccucaguuccc

SEQ ID NO: 1354027 - RNA, 23 nt, Human
cacugagccucaguucccucauc

SEQ ID NO: 1354028 - RNA, 18 nt, Human
cagcaggccuggaugggu

SEQ ID NO: 1354029 - RNA, 19 nt, Human
cagugucccuguugcccgg

SEQ ID NO: 1354030 - RNA, 23 nt, Human
caucccauuuaacccucaccacc

SEQ ID NO: 1354031 - RNA, 20 nt, Human
caugccaaaagccaggaacu

SEQ ID NO: 1354032 - RNA, 26 nt, Human
cauguuaaaaacagucugagaugguc

SEQ ID NO: 1354033 - RNA, 22 nt, Human
cauuacaggaaaucccaaaagg

SEQ ID NO: 1354034 - RNA, 19 nt, Human
ccacguagcucuggccucc

SEQ ID NO: 1354035 - RNA, 19 nt, Human
ccacuuagagcugcgugag

SEQ ID NO: 1354036 - RNA, 18 nt, Human
cccucaccaccaccucgg

SEQ ID NO: 1354037 - RNA, 20 nt, Human
ccucccacgaaaagccaaga

SEQ ID NO: 1354038 - RNA, 24 nt, Human
ccugccacugagaaagaugagaau

SEQ ID NO: 1354039 - RNA, 21 nt, Human
cucagcccuucugcugguucu

SEQ ID NO: 1354040 - RNA, 24 nt, Human
cucaugacuauguggucuccuggg

SEQ ID NO: 1354041 - RNA, 22 nt, Human
cuccagggccacuucgaacccc

SEQ ID NO: 1354042 - RNA, 21 nt, Human
cugcauuacaggaaaucccaa

SEQ ID NO: 1354043 - RNA, 23 nt, Human
cugccugccagcucuaccacuua

SEQ ID NO: 1354044 - RNA, 24 nt, Human
cuggucuuugcagccaccguuguu

SEQ ID NO: 1354045 - RNA, 19 nt, Human
cuguguccucccagccaug

SEQ ID NO: 1354046 - RNA, 21 nt, Human
cuuagcccaccucaaccucag

SEQ ID NO: 1354047 - RNA, 22 nt, Human
cuugggaaaaauaaaugacaga

SEQ ID NO: 1354048 - RNA, 23 nt, Human
cuugggcuccucuuagcugacca

SEQ ID NO: 1354049 - RNA, 18 nt, Human
gaaaaauaaaugacagaa

SEQ ID NO: 1354050 - RNA, 22 nt, Human
gaacagcaggccuggaugggua

SEQ ID NO: 1354051 - RNA, 22 nt, Human
gcagccucccacgaaaagccaa

SEQ ID NO: 1354052 - RNA, 18 nt, Human
gccaacgcuuuuacagaa

SEQ ID NO: 1354053 - RNA, 22 nt, Human
gcccuguuucuguguccuccca

SEQ ID NO: 1354054 - RNA, 22 nt, Human
gccugggucugccugccagcuc

SEQ ID NO: 1354055 - RNA, 21 nt, Human
gggcaggguucccagcacaug

SEQ ID NO: 1354056 - RNA, 25 nt, Human
gggucauguuuucuguccggccuuc

SEQ ID NO: 1354057 - RNA, 18 nt, Human
gguauuaguuucucacuc

SEQ ID NO: 1354058 - RNA, 18 nt, Human
guagcucuggccuccacc

SEQ ID NO: 1354059 - RNA, 21 nt, Human
guccaggauuggggcacggag

SEQ ID NO: 1354060 - RNA, 19 nt, Human
uacuagcaaguagcaaagc

SEQ ID NO: 1354061 - RNA, 21 nt, Human
uagcaaagcaggacugccaga

SEQ ID NO: 1354062 - RNA, 18 nt, Human
uaggaugaguccaucccc

SEQ ID NO: 1354063 - RNA, 19 nt, Human
uauuaguuucucacuccau

SEQ ID NO: 1354064 - RNA, 20 nt, Human
ucacacaucaagaucugaga

SEQ ID NO: 1354065 - RNA, 20 nt, Human
uccaaaaagcagaugaauuc

SEQ ID NO: 1354066 - RNA, 23 nt, Human
uccaagagacugaauaacuuacu

SEQ ID NO: 1354067 - RNA, 27 nt, Human
uccaagagacugaauaacuuacuagca

SEQ ID NO: 1354068 - RNA, 21 nt, Human
uccagggccacuucgaacccc

SEQ ID NO: 1354069 - RNA, 19 nt, Human
uccagugaugugccaggca

SEQ ID NO: 1354070 - RNA, 19 nt, Human
uccaguuuuaucaaacccc

SEQ ID NO: 1354071 - RNA, 20 nt, Human
uccccugggcucgccgaaga

SEQ ID NO: 1354072 - RNA, 18 nt, Human
uccucccagccaugcacc

SEQ ID NO: 1354073 - RNA, 21 nt, Human
uccugggcaugcuccagccuc

SEQ ID NO: 1354074 - RNA, 23 nt, Human
ucgccgaagaugaaaagaaucgc

SEQ ID NO: 1354075 - RNA, 23 nt, Human
ucgguguuauuagcucauuuaag

SEQ ID NO: 1354076 - RNA, 18 nt, Human
ucguaaccagcuuccugu

SEQ ID NO: 1354077 - RNA, 23 nt, Human
ucuccaaagacaucuuugggugu

SEQ ID NO: 1354078 - RNA, 21 nt, Human
ucugcaaaccaucuccacugc

SEQ ID NO: 1354079 - RNA, 22 nt, Human
ucuucaugggcgugucaggggu

SEQ ID NO: 1354080 - RNA, 20 nt, Human
ugaaucacugcuauucuaag

SEQ ID NO: 1354081 - RNA, 20 nt, Human
ugagaaagaugagaauggug

SEQ ID NO: 1354082 - RNA, 18 nt, Human
ugagcaaacaacacagcc

SEQ ID NO: 1354083 - RNA, 24 nt, Human
ugagcaaacaacacagccaaacgc

SEQ ID NO: 1354084 - RNA, 20 nt, Human
ugcaaaccaucuccacugca

SEQ ID NO: 1354085 - RNA, 19 nt, Human
ugcaggaguuuguacgugu

SEQ ID NO: 1354086 - RNA, 18 nt, Human
ugccacgguuggacacuc

SEQ ID NO: 1354087 - RNA, 20 nt, Human
ugccagauagggcuggcucc

SEQ ID NO: 1354088 - RNA, 21 nt, Human
ugcccggggaucuccaaagac

SEQ ID NO: 1354089 - RNA, 20 nt, Human
ugccugggucugccugccag

SEQ ID NO: 1354090 - RNA, 24 nt, Human
ugcuugcuguuuuuccagugaugu

SEQ ID NO: 1354091 - RNA, 22 nt, Human
uggcaaggaggagugaaguuuu

SEQ ID NO: 1354092 - RNA, 19 nt, Human
uggcagcagccuucuaacu

SEQ ID NO: 1354093 - RNA, 19 nt, Human
uggcccagaugccccaccu

SEQ ID NO: 1354094 - RNA, 18 nt, Human
ugggaaaaauaaaugaca

SEQ ID NO: 1354095 - RNA, 18 nt, Human
ugggcaugcuccagccuc

SEQ ID NO: 1354096 - RNA, 21 nt, Human
ugggcgugucaggggucuggc

SEQ ID NO: 1354097 - RNA, 19 nt, Human
uggggccacauugaugggu

SEQ ID NO: 1354098 - RNA, 19 nt, Human
ugucaccaagguuggggcc

SEQ ID NO: 1354099 - RNA, 18 nt, Human
ugucaggggucuggcggu

SEQ ID NO: 1354100 - RNA, 21 nt, Human
ugucugugaaggugcgggugg

SEQ ID NO: 1354101 - RNA, 18 nt, Human
uguggaugguaccccugg

SEQ ID NO: 1354102 - RNA, 19 nt, Human
uguggaugguaccccuggg

SEQ ID NO: 1354103 - RNA, 22 nt, Human
uguggaugguaccccugggguu

SEQ ID NO: 1354104 - RNA, 24 nt, Human
uguggaugguaccccugggguugu

SEQ ID NO: 1354105 - RNA, 18 nt, Human
ugugucuucaugggcgug

SEQ ID NO: 1354106 - RNA, 21 nt, Human
uucaucugcaaagcagagcca

SEQ ID NO: 1354107 - RNA, 19 nt, Human
uuccagugaugugccaggg

SEQ ID NO: 1354108 - RNA, 18 nt, Human
uucccagcacauguuaau

SEQ ID NO: 1354109 - RNA, 18 nt, Human
uucccgccagaggcuugc

SEQ ID NO: 1354110 - RNA, 22 nt, Human
uucucagagcagugagcaaaca

SEQ ID NO: 1354111 - RNA, 21 nt, Human
uugcuacaucaagaucacaaa

SEQ ID NO: 1354112 - RNA, 20 nt, Human
uugggcaaacuacuccaccu

SEQ ID NO: 1354113 - RNA, 19 nt, Human
uuuaacccucaccaccacc

SEQ ID NO: 1354114 - RNA, 24 nt, Human
aaacaagaaaaugguacaaaauag

SEQ ID NO: 1354115 - RNA, 21 nt, Human
aaagccaggagucuccagaug

SEQ ID NO: 1354116 - RNA, 19 nt, Human
aagguccccugcccgcccg

SEQ ID NO: 1354117 - RNA, 18 nt, Human
aauaaacccaaacaaaga

SEQ ID NO: 1354118 - RNA, 22 nt, Human
agcaggcaauaaaacugaugag

SEQ ID NO: 1354119 - RNA, 21 nt, Human
agccgccggaguuuccaaacu

SEQ ID NO: 1354120 - RNA, 21 nt, Human
aguucagaaagccaggagucu

SEQ ID NO: 1354121 - RNA, 25 nt, Human
caaacaaaaauaccguaaucaacgg

SEQ ID NO: 1354122 - RNA, 18 nt, Human
caaacaaagacccucagc

SEQ ID NO: 1354123 - RNA, 18 nt, Human
caaagcagcugucccggc

SEQ ID NO: 1354124 - RNA, 21 nt, Human
caagccuacagcugggacuga

SEQ ID NO: 1354125 - RNA, 23 nt, Human
caaggcgggggccaggaccggcc

SEQ ID NO: 1354126 - RNA, 20 nt, Human
cacccgcccgucgcccgcgg

SEQ ID NO: 1354127 - RNA, 21 nt, Human
cagcaaagcagcugucccggc

SEQ ID NO: 1354128 - RNA, 24 nt, Human
caugcuaaaguuaaacaagaaaau

SEQ ID NO: 1354129 - RNA, 18 nt, Human
ccccgcacgcagccgccg

SEQ ID NO: 1354130 - RNA, 24 nt, Human
ccccugcccgcccgcgcacccgcc

SEQ ID NO: 1354131 - RNA, 26 nt, Human
cccgcacgcagccgccggaguuucca

SEQ ID NO: 1354132 - RNA, 22 nt, Human
cccgcgcacccgcccgucgccc

SEQ ID NO: 1354133 - RNA, 23 nt, Human
cccgcgcacccgcccgucgcccg

SEQ ID NO: 1354134 - RNA, 25 nt, Human
cccgcgcacccgcccgucgcccgcg

SEQ ID NO: 1354135 - RNA, 27 nt, Human
ccgggacgccagagucccucuccuuuc

SEQ ID NO: 1354136 - RNA, 19 nt, Human
ccuacagcugggacugaaa

SEQ ID NO: 1354137 - RNA, 18 nt, Human
ccucguugcucucuuccu

SEQ ID NO: 1354138 - RNA, 18 nt, Human
ccucucgucucucucucc

SEQ ID NO: 1354139 - RNA, 22 nt, Human
ccuuuccucguugcucucuucc

SEQ ID NO: 1354140 - RNA, 24 nt, Human
cgccagagucccucuccuuuccuc

SEQ ID NO: 1354141 - RNA, 24 nt, Human
cuccuuuccucguugcucucuucc

SEQ ID NO: 1354142 - RNA, 18 nt, Human
cugaaaccccgcacgcag

SEQ ID NO: 1354143 - RNA, 20 nt, Human
cuguccuuccuucuuucgcu

SEQ ID NO: 1354144 - RNA, 19 nt, Human
gccaagguccccugcccgc

SEQ ID NO: 1354145 - RNA, 22 nt, Human
gcgcccuuccucccucucgcuc

SEQ ID NO: 1354146 - RNA, 26 nt, Human
gcuaaaguuaaacaagaaaaugguac

SEQ ID NO: 1354147 - RNA, 23 nt, Human
gggaccucccacccucucgucuc

SEQ ID NO: 1354148 - RNA, 19 nt, Human
gggccaggaccggccacga

SEQ ID NO: 1354149 - RNA, 18 nt, Human
guccgucuguccuuccuu

SEQ ID NO: 1354150 - RNA, 23 nt, Human
guccuuccuucuuucgcucagcc

SEQ ID NO: 1354151 - RNA, 18 nt, Human
uaaacaagaaaaugguac

SEQ ID NO: 1354152 - RNA, 19 nt, Human
uaaacccaaacaaagaccc

SEQ ID NO: 1354153 - RNA, 23 nt, Human
uaaacccaaacaaagacccucag

SEQ ID NO: 1354154 - RNA, 21 nt, Human
uaccguaauaauaaacccaaa

SEQ ID NO: 1354155 - RNA, 22 nt, Human
uaugauccaugaucaacaacau

SEQ ID NO: 1354156 - RNA, 23 nt, Human
ucucacccaaagaaacaagggga

SEQ ID NO: 1354157 - RNA, 20 nt, Human
ucuccagauggccuugguga

SEQ ID NO: 1354158 - RNA, 23 nt, Human
ugacagacagguccgucuguccu

SEQ ID NO: 1354159 - RNA, 20 nt, Human
ugauccaugaucaacaacau

SEQ ID NO: 1354160 - RNA, 18 nt, Human
ugaugagauuugggcgcc

SEQ ID NO: 1354161 - RNA, 19 nt, Human
ugccucgccgcccuucagc

SEQ ID NO: 1354162 - RNA, 20 nt, Human
uuacaaacaaaaauaccgua

SEQ ID NO: 1354163 - RNA, 22 nt, Human
aaacaacaacaacaacaacaac

SEQ ID NO: 1354164 - RNA, 20 nt, Human
aaaucccaacuuugcuccuc

SEQ ID NO: 1354165 - RNA, 22 nt, Human
aacaacaacaacaacaacggag

SEQ ID NO: 1354166 - RNA, 23 nt, Human
aacaacaacaacaacaacggaga

SEQ ID NO: 1354167 - RNA, 20 nt, Human
aacaacggagauuccgucuc

SEQ ID NO: 1354168 - RNA, 23 nt, Human
aacaacggagauuccgucucagg

SEQ ID NO: 1354169 - RNA, 23 nt, Human
aagaaaagagagcccauugguaa

SEQ ID NO: 1354170 - RNA, 21 nt, Human
aagaggaagugacaaaggcaa

SEQ ID NO: 1354171 - RNA, 18 nt, Human
aaguagagggggaagggg

SEQ ID NO: 1354172 - RNA, 19 nt, Human
acaacaacaacaacaacaa

SEQ ID NO: 1354173 - RNA, 23 nt, Human
acaacaacaacaacaacaacgga

SEQ ID NO: 1354174 - RNA, 24 nt, Human
acaacaacaacaacaacaacggag

SEQ ID NO: 1354175 - RNA, 19 nt, Human
acaggauauaaacacagag

SEQ ID NO: 1354176 - RNA, 19 nt, Human
acggcauagagauggcacc

SEQ ID NO: 1354177 - RNA, 18 nt, Human
agaaaacaacaacaacaa

SEQ ID NO: 1354178 - RNA, 19 nt, Human
agagaaguccuuggacugu

SEQ ID NO: 1354179 - RNA, 19 nt, Human
agcaggugguguuggaaca

SEQ ID NO: 1354180 - RNA, 19 nt, Human
aggaggggacucgguagca

SEQ ID NO: 1354181 - RNA, 30 nt, Human
agggaggcauggccaauugcucugugggcc

SEQ ID NO: 1354182 - RNA, 20 nt, Human
aggugguuuugaaauuggga

SEQ ID NO: 1354183 - RNA, 21 nt, Human
agugacaaaggcaacaggaua

SEQ ID NO: 1354184 - RNA, 24 nt, Human
agugaugagguauaaaugaacuuc

SEQ ID NO: 1354185 - RNA, 20 nt, Human
aguggaggaggggacucggu

SEQ ID NO: 1354186 - RNA, 21 nt, Human
auaggaagggaaggaauagua

SEQ ID NO: 1354187 - RNA, 19 nt, Human
aucaagucuucccucuuuc

SEQ ID NO: 1354188 - RNA, 19 nt, Human
augcaccccaugccaaguc

SEQ ID NO: 1354189 - RNA, 19 nt, Human
augguucuucuccaacccc

SEQ ID NO: 1354190 - RNA, 24 nt, Human
caaaccuuggaguuccaaggccag

SEQ ID NO: 1354191 - RNA, 18 nt, Human
caacaacaacaacaacaa

SEQ ID NO: 1354192 - RNA, 18 nt, Human
caacacaaaaguuagccc

SEQ ID NO: 1354193 - RNA, 24 nt, Human
caacagcuagaaugcaccccaugc

SEQ ID NO: 1354194 - RNA, 26 nt, Human
cacaggauauaaacacagagugcagg

SEQ ID NO: 1354195 - RNA, 25 nt, Human
caccagagucaacacaaaaguuagc

SEQ ID NO: 1354196 - RNA, 22 nt, Human
cagcccacuaauuucccuuucu

SEQ ID NO: 1354197 - RNA, 20 nt, Human
cagcuguccaagccuuuaag

SEQ ID NO: 1354198 - RNA, 23 nt, Human
cagguggccgcgacuuguccccc

SEQ ID NO: 1354199 - RNA, 24 nt, Human
caggugguuuugaaauugggaggg

SEQ ID NO: 1354200 - RNA, 20 nt, Human
cauucaucaaaaacugggga

SEQ ID NO: 1354201 - RNA, 19 nt, Human
ccaucggacucauccucuc

SEQ ID NO: 1354202 - RNA, 23 nt, Human
cccauagcaggugguguuggaac

SEQ ID NO: 1354203 - RNA, 23 nt, Human
ccccaugccaagucugcaccucc

SEQ ID NO: 1354204 - RNA, 25 nt, Human
ccucauccucuucccaccuccccag

SEQ ID NO: 1354205 - RNA, 22 nt, Human
ccugcaccaaccucggggcuga

SEQ ID NO: 1354206 - RNA, 22 nt, Human
ccugcaggcacugauguaaacu

SEQ ID NO: 1354207 - RNA, 18 nt, Human
cgcccgggcuccccagcu

SEQ ID NO: 1354208 - RNA, 23 nt, Human
cuaaugguucuucuccaaccccc

SEQ ID NO: 1354209 - RNA, 19 nt, Human
cuccggagcagguggccgc

SEQ ID NO: 1354210 - RNA, 24 nt, Human
cugcaccaaccucggggcugagga

SEQ ID NO: 1354211 - RNA, 18 nt, Human
cugccaccauugcuauuu

SEQ ID NO: 1354212 - RNA, 19 nt, Human
cugccaggcuggagugcuc

SEQ ID NO: 1354213 - RNA, 18 nt, Human
gacuccuuaggauguaag

SEQ ID NO: 1354214 - RNA, 25 nt, Human
gaggggacucgguagcaaucugguc

SEQ ID NO: 1354215 - RNA, 22 nt, Human
gauggugggauggacugggugg

SEQ ID NO: 1354216 - RNA, 22 nt, Human
gcagcucaucaguggaggaggg

SEQ ID NO: 1354217 - RNA, 20 nt, Human
gccgaggugcugacugccag

SEQ ID NO: 1354218 - RNA, 22 nt, Human
gccuucugccaaaucccaacuu

SEQ ID NO: 1354219 - RNA, 20 nt, Human
ggacggcgcccgggcucccc

SEQ ID NO: 1354220 - RNA, 28 nt, Human
ggaggcauggccaauugcucugugggcc

SEQ ID NO: 1354221 - RNA, 18 nt, Human
ggcagcucaucaguggag

SEQ ID NO: 1354222 - RNA, 23 nt, Human
ggcagcucaucaguggaggaggg

SEQ ID NO: 1354223 - RNA, 23 nt, Human
ggcuagaaaacaacaacaacaac

SEQ ID NO: 1354224 - RNA, 18 nt, Human
gggaggcccugcaccaac

SEQ ID NO: 1354225 - RNA, 20 nt, Human
gggcugaggaucaagucuuc

SEQ ID NO: 1354226 - RNA, 20 nt, Human
ggggaaggggugaugguggg

SEQ ID NO: 1354227 - RNA, 18 nt, Human
uaagacaaaaugcaacac

SEQ ID NO: 1354228 - RNA, 20 nt, Human
uaaguagagggggaaggggu

SEQ ID NO: 1354229 - RNA, 22 nt, Human
uagaaaggagauaggaagggaa

SEQ ID NO: 1354230 - RNA, 24 nt, Human
uagccccuaguauccagagagccu

SEQ ID NO: 1354231 - RNA, 21 nt, Human
ucagaguaagacaaaaugcaa

SEQ ID NO: 1354232 - RNA, 22 nt, Human
uccaaggccagcaggaauuuac

SEQ ID NO: 1354233 - RNA, 21 nt, Human
uccaggaaguucugccaccau

SEQ ID NO: 1354234 - RNA, 24 nt, Human
ucccagaugagcaccagagucaac

SEQ ID NO: 1354235 - RNA, 18 nt, Human
ucccucuccagcugcucu

SEQ ID NO: 1354236 - RNA, 20 nt, Human
ucccucuccagcugcucugg

SEQ ID NO: 1354237 - RNA, 20 nt, Human
ucccugagacaucaaguggc

SEQ ID NO: 1354238 - RNA, 20 nt, Human
uccucauccucuucccaccu

SEQ ID NO: 1354239 - RNA, 18 nt, Human
uccuugaggaauaguaaa

SEQ ID NO: 1354240 - RNA, 21 nt, Human
ucucaagaaaagagagcccau

SEQ ID NO: 1354241 - RNA, 20 nt, Human
ucuguaaucuuuauucuuga

SEQ ID NO: 1354242 - RNA, 24 nt, Human
ugaagagucagggagccagucugc

SEQ ID NO: 1354243 - RNA, 18 nt, Human
ugagcucguuucuccuaa

SEQ ID NO: 1354244 - RNA, 24 nt, Human
ugaggaucaagucuucccucuuuc

SEQ ID NO: 1354245 - RNA, 22 nt, Human
ugccaaaucccaacuuugcucc

SEQ ID NO: 1354246 - RNA, 19 nt, Human
ugccaggcuggagugcucg

SEQ ID NO: 1354247 - RNA, 24 nt, Human
ugccuucugccaaaucccaacuuu

SEQ ID NO: 1354248 - RNA, 20 nt, Human
uggaggaggggacucgguag

SEQ ID NO: 1354249 - RNA, 22 nt, Human
uggcaccgaaagaaugaaugag

SEQ ID NO: 1354250 - RNA, 24 nt, Human
uggggauuugaggcugaagaguca

SEQ ID NO: 1354251 - RNA, 24 nt, Human
uggucaacagcuagaaugcacccc

SEQ ID NO: 1354252 - RNA, 21 nt, Human
uggugggauggacugggugga

SEQ ID NO: 1354253 - RNA, 21 nt, Human
uuaaggcugcaacccagaaau

SEQ ID NO: 1354254 - RNA, 23 nt, Human
uuaccccugagcucguuucuccu

SEQ ID NO: 1354255 - RNA, 21 nt, Human
uucagugggucagacuccauc

SEQ ID NO: 1354256 - RNA, 23 nt, Human
uuccagauacaccagcccaccgu

SEQ ID NO: 1354257 - RNA, 23 nt, Human
uucccugagacaucaaguggcuu

SEQ ID NO: 1354258 - RNA, 26 nt, Human
uucccugagacaucaaguggcuuuca

SEQ ID NO: 1354259 - RNA, 19 nt, Human
uugcuccucauccucuucc

SEQ ID NO: 1354260 - RNA, 24 nt, Human
uuuccaguucugcgauuacugccu

SEQ ID NO: 1354261 - RNA, 18 nt, Human
uuucuccuaaguucccag

SEQ ID NO: 1354262 - RNA, 21 nt, Human
uuucuccuaaguucccagaug

SEQ ID NO: 1354263 - RNA, 24 nt, Human
uuuggccaccagaguuuggcugug

SEQ ID NO: 1354264 - RNA, 21 nt, Human
aaaaauaaucaugguagacac

SEQ ID NO: 1354265 - RNA, 23 nt, Human
agaaaaauaaucaugguagacac

SEQ ID NO: 1354266 - RNA, 19 nt, Human
acaaagcuaggggucaucg

SEQ ID NO: 1354267 - RNA, 23 nt, Human
acugagcuuuaucccugcagccu

SEQ ID NO: 1354268 - RNA, 23 nt, Human
aggcagagguuuuguccccucug

SEQ ID NO: 1354269 - RNA, 20 nt, Human
aggcucccccacaacacgcc

SEQ ID NO: 1354270 - RNA, 23 nt, Human
auccccccauucaauuucugcug

SEQ ID NO: 1354271 - RNA, 26 nt, Human
cacaguucaggccacaaagcuagggg

SEQ ID NO: 1354272 - RNA, 21 nt, Human
caccuggggugggaucucagg

SEQ ID NO: 1354273 - RNA, 21 nt, Human
cagccacccacaguucaggcc

SEQ ID NO: 1354274 - RNA, 22 nt, Human
ccaucugucucuuuccagcugc

SEQ ID NO: 1354275 - RNA, 22 nt, Human
cccacaguucaggccacaaagc

SEQ ID NO: 1354276 - RNA, 19 nt, Human
cccauucaauuucugcugu

SEQ ID NO: 1354277 - RNA, 18 nt, Human
cccccacaacacgccucu

SEQ ID NO: 1354278 - RNA, 24 nt, Human
ccucugaggcucccccacaacacc

SEQ ID NO: 1354279 - RNA, 19 nt, Human
cgccagcgcuaucaauccc

SEQ ID NO: 1354280 - RNA, 19 nt, Human
cucacaagccucagucugc

SEQ ID NO: 1354281 - RNA, 22 nt, Human
cuggggugggaucucaggcaga

SEQ ID NO: 1354282 - RNA, 22 nt, Human
gaggcucccccacaacacgccu

SEQ ID NO: 1354283 - RNA, 26 nt, Human
guccuauucaccucugggcugucuca

SEQ ID NO: 1354284 - RNA, 20 nt, Human
ucaugucaagaaccagacuc

SEQ ID NO: 1354285 - RNA, 24 nt, Human
ucugucucuuuccagcugcuuccc

SEQ ID NO: 1354286 - RNA, 20 nt, Human
ugaagagaugucugaagggc

SEQ ID NO: 1354287 - RNA, 24 nt, Human
ugaagagaugucugaagggcaucu

SEQ ID NO: 1354288 - RNA, 20 nt, Human
ugccaucugucucuuuccag

SEQ ID NO: 1354289 - RNA, 25 nt, Human
uggggugggaucucaggcagagguu

SEQ ID NO: 1354290 - RNA, 19 nt, Human
ugucaagaaccagacucug

SEQ ID NO: 1354291 - RNA, 21 nt, Human
ugucugaagggcaucucaugu

SEQ ID NO: 1354292 - RNA, 22 nt, Human
aagaugugagaaguguugacag

SEQ ID NO: 1354293 - RNA, 20 nt, Human
aagcugcagcuuagauggga

SEQ ID NO: 1354294 - RNA, 20 nt, Human
agagaccccaggggacagga

SEQ ID NO: 1354295 - RNA, 23 nt, Human
aggaagcugcagcuuagauggga

SEQ ID NO: 1354296 - RNA, 26 nt, Human
aggaagucaccaucaaaccacuuucu

SEQ ID NO: 1354297 - RNA, 21 nt, Human
aucacaacuccauggcaacaa

SEQ ID NO: 1354298 - RNA, 19 nt, Human
augcagcagagaccccagg

SEQ ID NO: 1354299 - RNA, 22 nt, Human
caacaagaugacacaaaugcag

SEQ ID NO: 1354300 - RNA, 23 nt, Human
caacuccauggcaacaagaugac

SEQ ID NO: 1354301 - RNA, 21 nt, Human
caagaugacacaaaugcagca

SEQ ID NO: 1354302 - RNA, 18 nt, Human
cucugucucuccccucug

SEQ ID NO: 1354303 - RNA, 18 nt, Human
cugcuuguccucccuggc

SEQ ID NO: 1354304 - RNA, 22 nt, Human
cuugcugcucugucucuccccu

SEQ ID NO: 1354305 - RNA, 23 nt, Human
gcuugcugcucugucucuccccu

SEQ ID NO: 1354306 - RNA, 19 nt, Human
uaaaauuuaaugcaugggg

SEQ ID NO: 1354307 - RNA, 18 nt, Human
uccccucucuuggccuac

SEQ ID NO: 1354308 - RNA, 21 nt, Human
ucucugguuccccucucuugg

SEQ ID NO: 1354309 - RNA, 23 nt, Human
ucucuuggccuacgucugucccu

SEQ ID NO: 1354310 - RNA, 18 nt, Human
ugacacaaaugcagcaga

SEQ ID NO: 1354311 - RNA, 19 nt, Human
ugcugaaguuuauucacuu

SEQ ID NO: 1354312 - RNA, 22 nt, Human
uggcaacaagaugacacaaaug

SEQ ID NO: 1354313 - RNA, 19 nt, Human
ugggaugaucacaacucca

SEQ ID NO: 1354314 - RNA, 21 nt, Human
uucaaaccacuuucaguaaca

SEQ ID NO: 1354315 - RNA, 19 nt, Human
uugcugcucugucucuccc

SEQ ID NO: 1354316 - RNA, 25 nt, Human
uugcugcucugucucuccccucugg

SEQ ID NO: 1354317 - RNA, 22 nt, Human
aaacuucauuaagaaagaacac

SEQ ID NO: 1354318 - RNA, 19 nt, Human
acaacccgcacccuccuac

SEQ ID NO: 1354319 - RNA, 23 nt, Human
acagccacccuggggggccccgg

SEQ ID NO: 1354320 - RNA, 20 nt, Human
acaggcagcagcacagccac

SEQ ID NO: 1354321 - RNA, 24 nt, Human
acccgcacccuccuacaggcagca

SEQ ID NO: 1354322 - RNA, 23 nt, Human
accuccccugaagccccaaagua

SEQ ID NO: 1354323 - RNA, 26 nt, Human
agaagaaagggggaaaguggaaggag

SEQ ID NO: 1354324 - RNA, 22 nt, Human
agcacaacccgcacccuccuac

SEQ ID NO: 1354325 - RNA, 26 nt, Human
caaaaccugacaaucaucaaucacua

SEQ ID NO: 1354326 - RNA, 20 nt, Human
caaaagguccacuggccccu

SEQ ID NO: 1354327 - RNA, 21 nt, Human
caaaguacaaaaccacagaug

SEQ ID NO: 1354328 - RNA, 24 nt, Human
caccaucuacaggggaugcaaaag

SEQ ID NO: 1354329 - RNA, 21 nt, Human
caccccggcccccgccgcaac

SEQ ID NO: 1354330 - RNA, 22 nt, Human
caccccugcuuccuccuucuuc

SEQ ID NO: 1354331 - RNA, 20 nt, Human
cacccuggggggccccggcc

SEQ ID NO: 1354332 - RNA, 21 nt, Human
caccggcccggccgcccgcgc

SEQ ID NO: 1354333 - RNA, 18 nt, Human
cacucaccaucuacaggg

SEQ ID NO: 1354334 - RNA, 22 nt, Human
cagcacaacccgcacccuccua

SEQ ID NO: 1354335 - RNA, 18 nt, Human
ccacuggccccuucccuc

SEQ ID NO: 1354336 - RNA, 20 nt, Human
ccagcccaccggcccggccg

SEQ ID NO: 1354337 - RNA, 21 nt, Human
cccccgccgcaaccgccgcag

SEQ ID NO: 1354338 - RNA, 20 nt, Human
ccccugcuuccuccuucuuc

SEQ ID NO: 1354339 - RNA, 20 nt, Human
ccccugcuuccuccuucuuc

SEQ ID NO: 1354340 - RNA, 27 nt, Human
cccgcgccucacugcccggcccggacc

SEQ ID NO: 1354341 - RNA, 20 nt, Human
cccggcccccgccgcaaccg

SEQ ID NO: 1354342 - RNA, 18 nt, Human
cccugcuuccuccuucuu

SEQ ID NO: 1354343 - RNA, 20 nt, Human
cccugcuuccuccuucuucu

SEQ ID NO: 1354344 - RNA, 21 nt, Human
ccgaacgccgagauggacauc

SEQ ID NO: 1354345 - RNA, 21 nt, Human
ccgccgcaaccgccgcagcag

SEQ ID NO: 1354346 - RNA, 21 nt, Human
ccgccgcagcagccgccaccc

SEQ ID NO: 1354347 - RNA, 23 nt, Human
ccgccgggcccgccgcccagccc

SEQ ID NO: 1354348 - RNA, 20 nt, Human
ccgggcccgccgcccagccc

SEQ ID NO: 1354349 - RNA, 20 nt, Human
ccuccgaacgccgagaugga

SEQ ID NO: 1354350 - RNA, 20 nt, Human
ccuccuacaggcagcagcac

SEQ ID NO: 1354351 - RNA, 23 nt, Human
ccuccuacaggcagcagcacagc

SEQ ID NO: 1354352 - RNA, 19 nt, Human
ccugaagccccaaaguaca

SEQ ID NO: 1354353 - RNA, 19 nt, Human
ccugcuuccuccuucuucu

SEQ ID NO: 1354354 - RNA, 22 nt, Human
ccuggcagcgggacuuucagug

SEQ ID NO: 1354355 - RNA, 20 nt, Human
cgagauggacaucaccgcca

SEQ ID NO: 1354356 - RNA, 20 nt, Human
cgccgggcccgccgcccagc

SEQ ID NO: 1354357 - RNA, 21 nt, Human
cggccgccgggcccgccgccc

SEQ ID NO: 1354358 - RNA, 24 nt, Human
cuccccugaagccccaaaguacaa

SEQ ID NO: 1354359 - RNA, 18 nt, Human
cuccuaaaaaagggcgug

SEQ ID NO: 1354360 - RNA, 23 nt, Human
gcacaacccgcacccuccuacag

SEQ ID NO: 1354361 - RNA, 21 nt, Human
gcacccuccuacaggcagcag

SEQ ID NO: 1354362 - RNA, 18 nt, Human
gcccaccggcccggccgc

SEQ ID NO: 1354363 - RNA, 20 nt, Human
gcgugcaaacccgaggauga

SEQ ID NO: 1354364 - RNA, 19 nt, Human
ggaaaguggaaggagugag

SEQ ID NO: 1354365 - RNA, 18 nt, Human
gggcgggugcuuccaaag

SEQ ID NO: 1354366 - RNA, 20 nt, Human
gucaccgguuucccccaaca

SEQ ID NO: 1354367 - RNA, 23 nt, Human
uaagaaagaacacguuaaauuag

SEQ ID NO: 1354368 - RNA, 24 nt, Human
uacaaaaccacagauguccacagg

SEQ ID NO: 1354369 - RNA, 21 nt, Human
uauuuauuuaaaaacagaaca

SEQ ID NO: 1354370 - RNA, 25 nt, Human
ucaacaaaaauaaauuaaaacuuca

SEQ ID NO: 1354371 - RNA, 23 nt, Human
ucaccgccaacacucaccaucua

SEQ ID NO: 1354372 - RNA, 24 nt, Human
uccuaaaaaagggcgugcaaaccc

SEQ ID NO: 1354373 - RNA, 21 nt, Human
ucucgguggccuccagccguc

SEQ ID NO: 1354374 - RNA, 20 nt, Human
ugcaaaugguggcugaaagc

SEQ ID NO: 1354375 - RNA, 19 nt, Human
ugcccggcccggaccgcgg

SEQ ID NO: 1354376 - RNA, 19 nt, Human
ugcgagggcggccgccggg

SEQ ID NO: 1354377 - RNA, 20 nt, Human
uggaaggagugaguuccauu

SEQ ID NO: 1354378 - RNA, 18 nt, Human
uggccccuucccucccca

SEQ ID NO: 1354379 - RNA, 22 nt, Human
uuaaacaccuccccugaagccc

SEQ ID NO: 1354380 - RNA, 21 nt, Human
uucauuuuauugaguggaaag

SEQ ID NO: 1354381 - RNA, 20 nt, Human
uucucgguggccuccagccg

SEQ ID NO: 1354382 - RNA, 23 nt, Human
aaaauuuguagaugaacuuuuag

SEQ ID NO: 1354383 - RNA, 23 nt, Human
aaagaaauagcacauucccuuca

SEQ ID NO: 1354384 - RNA, 20 nt, Human
aaaguguuaggauuacacca

SEQ ID NO: 1354385 - RNA, 18 nt, Human
aacuuaugaagaauaccc

SEQ ID NO: 1354386 - RNA, 23 nt, Human
aagcacuggggauugucacaacu

SEQ ID NO: 1354387 - RNA, 19 nt, Human
aaguggcugggacuauagg

SEQ ID NO: 1354388 - RNA, 20 nt, Human
aaguggcugggacuauaggc

SEQ ID NO: 1354389 - RNA, 25 nt, Human
aaguguuaggauuacaccaugcccg

SEQ ID NO: 1354390 - RNA, 19 nt, Human
acaacugaacaaaauucac

SEQ ID NO: 1354391 - RNA, 18 nt, Human
acagaaaguuugagaucu

SEQ ID NO: 1354392 - RNA, 19 nt, Human
acagaacaaagagcugucu

SEQ ID NO: 1354393 - RNA, 24 nt, Human
accauguugcccaggcuggucuug

SEQ ID NO: 1354394 - RNA, 25 nt, Human
accauguugcccaggcuggucuuga

SEQ ID NO: 1354395 - RNA, 19 nt, Human
acuauaggcgcaugcugcc

SEQ ID NO: 1354396 - RNA, 22 nt, Human
acugaacaaaauucacguucac

SEQ ID NO: 1354397 - RNA, 18 nt, Human
agagcuucccacauaccu

SEQ ID NO: 1354398 - RNA, 22 nt, Human
aggcaauccgcccgccuuggcc

SEQ ID NO: 1354399 - RNA, 24 nt, Human
aggcaauccgcccgccuuggccuc

SEQ ID NO: 1354400 - RNA, 22 nt, Human
agucugacaacaaauggcacca

SEQ ID NO: 1354401 - RNA, 21 nt, Human
agugcaguggugcaaucucag

SEQ ID NO: 1354402 - RNA, 24 nt, Human
agugcaguggugcaaucucagcuc

SEQ ID NO: 1354403 - RNA, 22 nt, Human
auagaacacccaagauuaaagg

SEQ ID NO: 1354404 - RNA, 22 nt, Human
aucuauucaccccuucaugcug

SEQ ID NO: 1354405 - RNA, 18 nt, Human
augggauuucaccauguu

SEQ ID NO: 1354406 - RNA, 21 nt, Human
auuacaaugaaccuccucaga

SEQ ID NO: 1354407 - RNA, 19 nt, Human
auuuuaguagacaugggau

SEQ ID NO: 1354408 - RNA, 23 nt, Human
caaaguguuaggauuacaccaug

SEQ ID NO: 1354409 - RNA, 22 nt, Human
caagcgauucuccugccucagc

SEQ ID NO: 1354410 - RNA, 27 nt, Human
caagcgauucuccugccucagccuccc

SEQ ID NO: 1354411 - RNA, 21 nt, Human
cacaauacaggaacacaaagc

SEQ ID NO: 1354412 - RNA, 23 nt, Human
caccauguugcccaggcuggucu

SEQ ID NO: 1354413 - RNA, 24 nt, Human
caccauguugcccaggcuggucuu

SEQ ID NO: 1354414 - RNA, 27 nt, Human
caccauguugcccaggcuggucuugaa

SEQ ID NO: 1354415 - RNA, 23 nt, Human
cacccaagauuaaaggugcguaa

SEQ ID NO: 1354416 - RNA, 22 nt, Human
cacucuguugccugggcuggag

SEQ ID NO: 1354417 - RNA, 23 nt, Human
cacugcaacuuccgccuucuggg

SEQ ID NO: 1354418 - RNA, 20 nt, Human
cagaacaaagagcugucuuc

SEQ ID NO: 1354419 - RNA, 26 nt, Human
cagcgauaguaaacagaagauccuga

SEQ ID NO: 1354420 - RNA, 21 nt, Human
cagugcuaggaauuaugugga

SEQ ID NO: 1354421 - RNA, 22 nt, Human
cagugcuauuauacugaauaaa

SEQ ID NO: 1354422 - RNA, 23 nt, Human
cauguugcccaggcuggucuuga

SEQ ID NO: 1354423 - RNA, 24 nt, Human
cauguugcccaggcuggucuugaa

SEQ ID NO: 1354424 - RNA, 19 nt, Human
ccaaaguguuaggauuaca

SEQ ID NO: 1354425 - RNA, 23 nt, Human
ccaaaguguuaggauuacaccau

SEQ ID NO: 1354426 - RNA, 18 nt, Human
ccacaauacaggaacaca

SEQ ID NO: 1354427 - RNA, 23 nt, Human
ccaggccacaauacaggaacaca

SEQ ID NO: 1354428 - RNA, 19 nt, Human
cccaaguggcugggacuau

SEQ ID NO: 1354429 - RNA, 24 nt, Human
cccaaguggcugggacuauaggcg

SEQ ID NO: 1354430 - RNA, 20 nt, Human
cccacuuucgcgacuucucu

SEQ ID NO: 1354431 - RNA, 21 nt, Human
cccauuuaccuggaguuucug

SEQ ID NO: 1354432 - RNA, 21 nt, Human
ccccucaccagugcuaggaau

SEQ ID NO: 1354433 - RNA, 22 nt, Human
cccgccuuggccucccaaagug

SEQ ID NO: 1354434 - RNA, 27 nt, Human
cccuaucccgggccuggcgcagcuccu

SEQ ID NO: 1354435 - RNA, 24 nt, Human
ccgccuucuggguucaagcgauuc

SEQ ID NO: 1354436 - RNA, 27 nt, Human
ccuccacaccuauagucugacaacaaa

SEQ ID NO: 1354437 - RNA, 23 nt, Human
ccugccucagccucccaaguggc

SEQ ID NO: 1354438 - RNA, 19 nt, Human
ccugggcuggagugcagug

SEQ ID NO: 1354439 - RNA, 24 nt, Human
ccuucuggguucaagcgauucucc

SEQ ID NO: 1354440 - RNA, 21 nt, Human
ccuuugcaggaccugggcaac

SEQ ID NO: 1354441 - RNA, 22 nt, Human
cgaacacaacagucccuauccc

SEQ ID NO: 1354442 - RNA, 20 nt, Human
cgaccggggcgggcauucga

SEQ ID NO: 1354443 - RNA, 23 nt, Human
cggggagcggcggccgaccaggu

SEQ ID NO: 1354444 - RNA, 24 nt, Human
cucacucuguugccugggcuggag

SEQ ID NO: 1354445 - RNA, 19 nt, Human
cucacugcaacuuccgccu

SEQ ID NO: 1354446 - RNA, 24 nt, Human
cucagccucccaaguggcugggac

SEQ ID NO: 1354447 - RNA, 23 nt, Human
cuccguggacuaggcggggagcg

SEQ ID NO: 1354448 - RNA, 18 nt, Human
cugacaaaaauggcacca

SEQ ID NO: 1354449 - RNA, 23 nt, Human
cugccucagccucccaaguggcu

SEQ ID NO: 1354450 - RNA, 21 nt, Human
cugucccgucccucagucgcg

SEQ ID NO: 1354451 - RNA, 20 nt, Human
cuugaacuccugagcucagg

SEQ ID NO: 1354452 - RNA, 21 nt, Human
cuuugcaggaccugggcaaca

SEQ ID NO: 1354453 - RNA, 22 nt, Human
gaacaaagagcugucuucugcc

SEQ ID NO: 1354454 - RNA, 24 nt, Human
gagcucaggcaauccgcccgccuu

SEQ ID NO: 1354455 - RNA, 21 nt, Human
gauucuccugccucagccucc

SEQ ID NO: 1354456 - RNA, 19 nt, Human
gcaggaccugggcaacaga

SEQ ID NO: 1354457 - RNA, 19 nt, Human
gccacaauacaggaacaca

SEQ ID NO: 1354458 - RNA, 24 nt, Human
gccucagccucccaaguggcuggg

SEQ ID NO: 1354459 - RNA, 23 nt, Human
gccuggcuaauuuuuuguauuuu

SEQ ID NO: 1354460 - RNA, 24 nt, Human
gcgauucuccugccucagccuccc

SEQ ID NO: 1354461 - RNA, 20 nt, Human
gcuccuuugcaggaccuggg

SEQ ID NO: 1354462 - RNA, 22 nt, Human
gcuccuuugcaggaccugggaa

SEQ ID NO: 1354463 - RNA, 24 nt, Human
ggcuggagugcaguggugcaaucu

SEQ ID NO: 1354464 - RNA, 24 nt, Human
ggcuggucuugaacuccugagcuc

SEQ ID NO: 1354465 - RNA, 22 nt, Human
gggauuucaccauguugcccag

SEQ ID NO: 1354466 - RNA, 22 nt, Human
gggcauucgaacacaacagucc

SEQ ID NO: 1354467 - RNA, 20 nt, Human
ggguucaagcgauucuccug

SEQ ID NO: 1354468 - RNA, 19 nt, Human
gguucaagcgauucuccug

SEQ ID NO: 1354469 - RNA, 21 nt, Human
gugaccucugaccugacaaaa

SEQ ID NO: 1354470 - RNA, 20 nt, Human
uaaagcaaugugcaccaagc

SEQ ID NO: 1354471 - RNA, 21 nt, Human
uaaauuaaagcaaugugcacc

SEQ ID NO: 1354472 - RNA, 19 nt, Human
uaauccuuagaaagcugac

SEQ ID NO: 1354473 - RNA, 22 nt, Human
uaauuuuuuguauuuuaguaga

SEQ ID NO: 1354474 - RNA, 23 nt, Human
uagaaagcugacagcacaacuca

SEQ ID NO: 1354475 - RNA, 22 nt, Human
uagacaugggauuucaccaugu

SEQ ID NO: 1354476 - RNA, 20 nt, Human
uagagcaauacagaacaaag

SEQ ID NO: 1354477 - RNA, 24 nt, Human
uaguagacaugggauuucaccaug

SEQ ID NO: 1354478 - RNA, 21 nt, Human
uagucugacaacaaauggcac

SEQ ID NO: 1354479 - RNA, 21 nt, Human
uagucugacaacaaauggcac

SEQ ID NO: 1354480 - RNA, 21 nt, Human
uauucacuggaaaauuuguag

SEQ ID NO: 1354481 - RNA, 19 nt, Human
ucaagcgauucuccugccu

SEQ ID NO: 1354482 - RNA, 21 nt, Human
ucacauugucccuucugagua

SEQ ID NO: 1354483 - RNA, 24 nt, Human
ucacucuguugccugggcuggagu

SEQ ID NO: 1354484 - RNA, 18 nt, Human
ucacugcaacuuccgccu

SEQ ID NO: 1354485 - RNA, 24 nt, Human
ucacugcaacuuccgccuucuggg

SEQ ID NO: 1354486 - RNA, 19 nt, Human
uccacaaaaucuauucacc

SEQ ID NO: 1354487 - RNA, 20 nt, Human
uccacaaaaucuauucaccc

SEQ ID NO: 1354488 - RNA, 21 nt, Human
uccacaaaaucuauucacccc

SEQ ID NO: 1354489 - RNA, 20 nt, Human
uccaucuaauuuacugcagu

SEQ ID NO: 1354490 - RNA, 18 nt, Human
ucccaaaguguuaggauu

SEQ ID NO: 1354491 - RNA, 24 nt, Human
ucccaaaguguuaggauuacaccu

SEQ ID NO: 1354492 - RNA, 24 nt, Human
ucccaaguggcugggacuauaggc

SEQ ID NO: 1354493 - RNA, 21 nt, Human
ucccaauuacuguugaaccug

SEQ ID NO: 1354494 - RNA, 20 nt, Human
ucuaaagucagagaaaagac

SEQ ID NO: 1354495 - RNA, 23 nt, Human
ucucacucuguugccugggcugg

SEQ ID NO: 1354496 - RNA, 24 nt, Human
ucucacucuguugccugggcugga

SEQ ID NO: 1354497 - RNA, 19 nt, Human
ucuccacaaaaucuauuca

SEQ ID NO: 1354498 - RNA, 26 nt, Human
ucuccugccucagccucccaaguggc

SEQ ID NO: 1354499 - RNA, 25 nt, Human
ucuccuguggacaacugaacaaaau

SEQ ID NO: 1354500 - RNA, 23 nt, Human
ucucugucccgucccucagucgc

SEQ ID NO: 1354501 - RNA, 22 nt, Human
ucuguugccugggcuggagugc

SEQ ID NO: 1354502 - RNA, 24 nt, Human
ucuguugccugggcuggagugcag

SEQ ID NO: 1354503 - RNA, 23 nt, Human
ucuugaacuccugagcucaggca

SEQ ID NO: 1354504 - RNA, 24 nt, Human
ugaacuccugagcucaggcaaucc

SEQ ID NO: 1354505 - RNA, 19 nt, Human
ugaauaaagaaauagcaca

SEQ ID NO: 1354506 - RNA, 23 nt, Human
ugaauagaacacccaagauuaaa

SEQ ID NO: 1354507 - RNA, 20 nt, Human
ugaaucagaauguggaaaaa

SEQ ID NO: 1354508 - RNA, 19 nt, Human
ugaccugacaaaaauggca

SEQ ID NO: 1354509 - RNA, 18 nt, Human
ugagaccgacaauguucc

SEQ ID NO: 1354510 - RNA, 18 nt, Human
ugaggccuugggcagcag

SEQ ID NO: 1354511 - RNA, 24 nt, Human
ugcccaggcuggucuugaacuccu

SEQ ID NO: 1354512 - RNA, 28 nt, Human
ugcccaggcuggucuugaacuccugagc

SEQ ID NO: 1354513 - RNA, 24 nt, Human
ugccucagccucccaaguggcugg

SEQ ID NO: 1354514 - RNA, 18 nt, Human
ugccugggcuggagugca

SEQ ID NO: 1354515 - RNA, 19 nt, Human
ugccugggcuggagugcag

SEQ ID NO: 1354516 - RNA, 20 nt, Human
ugccugggcuggagugcagu

SEQ ID NO: 1354517 - RNA, 24 nt, Human
ugccugggcuggagugcaguggug

SEQ ID NO: 1354518 - RNA, 18 nt, Human
uggagugcaguggugcaa

SEQ ID NO: 1354519 - RNA, 23 nt, Human
uggagugcaguggugcaaucuca

SEQ ID NO: 1354520 - RNA, 24 nt, Human
uggagugcaguggugcaaucucag

SEQ ID NO: 1354521 - RNA, 19 nt, Human
ugggacuauaggcgcaugc

SEQ ID NO: 1354522 - RNA, 21 nt, Human
ugggacuauaggcgcaugcug

SEQ ID NO: 1354523 - RNA, 22 nt, Human
ugggacuauaggcgcaugcugc

SEQ ID NO: 1354524 - RNA, 24 nt, Human
ugggacuauaggcgcaugcugcca

SEQ ID NO: 1354525 - RNA, 24 nt, Human
ugggauuucaccauguugcccagg

SEQ ID NO: 1354526 - RNA, 23 nt, Human
uggguucaagcgauucuccugcc

SEQ ID NO: 1354527 - RNA, 24 nt, Human
uggguucaagcgauucuccugccu

SEQ ID NO: 1354528 - RNA, 24 nt, Human
uggucuugaacuccugagcucagg

SEQ ID NO: 1354529 - RNA, 24 nt, Human
uggugcaaucucagcucacugcaa

SEQ ID NO: 1354530 - RNA, 27 nt, Human
ugucccgucccucagucgcgaccucca

SEQ ID NO: 1354531 - RNA, 18 nt, Human
uuaguagacaugggauuu

SEQ ID NO: 1354532 - RNA, 24 nt, Human
uuaguagacaugggauuucaccau

SEQ ID NO: 1354533 - RNA, 21 nt, Human
uucaagcgauucuccugccuc

SEQ ID NO: 1354534 - RNA, 23 nt, Human
uucaagcgauucuccugccucag

SEQ ID NO: 1354535 - RNA, 24 nt, Human
uucaagcgauucuccugccucagc

SEQ ID NO: 1354536 - RNA, 19 nt, Human
uucacagaagcacugggga

SEQ ID NO: 1354537 - RNA, 24 nt, Human
uucaccccuucaugcugacaucac

SEQ ID NO: 1354538 - RNA, 18 nt, Human
uucacuggaaaauuugua

SEQ ID NO: 1354539 - RNA, 24 nt, Human
uugccugggcuggagugcaguggu

SEQ ID NO: 1354540 - RNA, 21 nt, Human
uuggccucccaaaguguuagg

SEQ ID NO: 1354541 - RNA, 22 nt, Human
uuucaccauguugcccaggcug

SEQ ID NO: 1354542 - RNA, 23 nt, Human
uuucaccauguugcccaggcugg

SEQ ID NO: 1354543 - RNA, 24 nt, Human
uuucaccauguugcccaggcuggu

SEQ ID NO: 1354544 - RNA, 21 nt, Human
uuugcaggaccugggcaacag

SEQ ID NO: 1354545 - RNA, 18 nt, Human
uuuuuguauuuuaguaga

SEQ ID NO: 1354546 - RNA, 21 nt, Human
uuuuuuguauuuuaguagaca

SEQ ID NO: 1354547 - RNA, 27 nt, Human
uuuuuuuuuuuuggagacggagucuca

SEQ ID NO: 1354548 - RNA, 23 nt, Human
uuuuuuuuuuuuuuggagacgga

SEQ ID NO: 1354549 - RNA, 20 nt, Human
uuuuuuuuuuuuuuuuuugg

SEQ ID NO: 1354550 - RNA, 23 nt, Human
aaacaaggacauucucuuacaua

SEQ ID NO: 1354551 - RNA, 18 nt, Human
aagagccagagcaugggu

SEQ ID NO: 1354552 - RNA, 24 nt, Human
acacacgcauauuucuccugaacc

SEQ ID NO: 1354553 - RNA, 21 nt, Human
acauggcacuuuuccuucccu

SEQ ID NO: 1354554 - RNA, 19 nt, Human
agacaagagccagagcaug

SEQ ID NO: 1354555 - RNA, 18 nt, Human
agagagacaagagccaga

SEQ ID NO: 1354556 - RNA, 20 nt, Human
agauacccaggaguuguaau

SEQ ID NO: 1354557 - RNA, 20 nt, Human
agccacggcggcagaguccc

SEQ ID NO: 1354558 - RNA, 22 nt, Human
aggcaaaaucgagguguuggca

SEQ ID NO: 1354559 - RNA, 24 nt, Human
agggccauauaauauuccauugua

SEQ ID NO: 1354560 - RNA, 18 nt, Human
agggguuggagcugcugc

SEQ ID NO: 1354561 - RNA, 20 nt, Human
agggguuggagcugcugcca

SEQ ID NO: 1354562 - RNA, 20 nt, Human
agguguuggcaggcugggcu

SEQ ID NO: 1354563 - RNA, 19 nt, Human
agugccaccaacugagcag

SEQ ID NO: 1354564 - RNA, 19 nt, Human
auccuccuuucccuuacug

SEQ ID NO: 1354565 - RNA, 25 nt, Human
aucucccuuucccccaugcugucuc

SEQ ID NO: 1354566 - RNA, 22 nt, Human
auggaaaguucucugcuuuuaa

SEQ ID NO: 1354567 - RNA, 21 nt, Human
auuauuauaaauaaugcugcu

SEQ ID NO: 1354568 - RNA, 20 nt, Human
caacugacgagcagccuuaa

SEQ ID NO: 1354569 - RNA, 30 nt, Human
cacaauccauaucuaaacgucaauuguccu

SEQ ID NO: 1354570 - RNA, 19 nt, Human
cacaguuucugugcacuga

SEQ ID NO: 1354571 - RNA, 19 nt, Human
caccagccauggaaaguuc

SEQ ID NO: 1354572 - RNA, 19 nt, Human
cacuuuuccuucccucucu

SEQ ID NO: 1354573 - RNA, 25 nt, Human
cagaagcuucuggaagaagaccuca

SEQ ID NO: 1354574 - RNA, 20 nt, Human
cagcuccuggagccggaccu

SEQ ID NO: 1354575 - RNA, 18 nt, Human
cagcuucaagcaacaucc

SEQ ID NO: 1354576 - RNA, 22 nt, Human
caucaucacaucuaaguuuaga

SEQ ID NO: 1354577 - RNA, 24 nt, Human
cauccuccuuucccuuacuggggg

SEQ ID NO: 1354578 - RNA, 20 nt, Human
ccauccuuccuucccaagcu

SEQ ID NO: 1354579 - RNA, 21 nt, Human
ccauucaauuccauucaaugc

SEQ ID NO: 1354580 - RNA, 22 nt, Human
ccauuuaagaugaaccauucaa

SEQ ID NO: 1354581 - RNA, 18 nt, Human
cccacaauccauaucuaa

SEQ ID NO: 1354582 - RNA, 23 nt, Human
ccccgauuaaggccaccugagac

SEQ ID NO: 1354583 - RNA, 19 nt, Human
cccgccagccugcagcaac

SEQ ID NO: 1354584 - RNA, 19 nt, Human
cccuuucccccaugcuguc

SEQ ID NO: 1354585 - RNA, 22 nt, Human
ccuagacuguaacacggucacu

SEQ ID NO: 1354586 - RNA, 21 nt, Human
ccugagacaguccacccugga

SEQ ID NO: 1354587 - RNA, 19 nt, Human
ccuggggucuccauuucuu

SEQ ID NO: 1354588 - RNA, 18 nt, Human
cuaagugggacuaagacc

SEQ ID NO: 1354589 - RNA, 24 nt, Human
cucacauucuucccacuggacuug

SEQ ID NO: 1354590 - RNA, 22 nt, Human
cuuaucagagcuaggacaauuu

SEQ ID NO: 1354591 - RNA, 22 nt, Human
cuucaagcaacauccauuuagc

SEQ ID NO: 1354592 - RNA, 20 nt, Human
cuugcagccacggcggcaga

SEQ ID NO: 1354593 - RNA, 24 nt, Human
cuuggccacaaaagggugcagggg

SEQ ID NO: 1354594 - RNA, 18 nt, Human
cuuuggguguggggugcu

SEQ ID NO: 1354595 - RNA, 25 nt, Human
gaagcuucuggaagaagaccucaca

SEQ ID NO: 1354596 - RNA, 21 nt, Human
gauuaaggccaccugagacag

SEQ ID NO: 1354597 - RNA, 18 nt, Human
gcaaauuuuucuggggac

SEQ ID NO: 1354598 - RNA, 23 nt, Human
gcagccacuuuccauuccucccu

SEQ ID NO: 1354599 - RNA, 21 nt, Human
gcugcaggcuaggggucuccc

SEQ ID NO: 1354600 - RNA, 20 nt, Human
gcugcuguaacaaagugcca

SEQ ID NO: 1354601 - RNA, 20 nt, Human
gcuguggcagggagagaagc

SEQ ID NO: 1354602 - RNA, 18 nt, Human
ggccaccugagacagucc

SEQ ID NO: 1354603 - RNA, 23 nt, Human
gggugccccacguguggggacag

SEQ ID NO: 1354604 - RNA, 18 nt, Human
ggguuggagcugcugcca

SEQ ID NO: 1354605 - RNA, 24 nt, Human
ggucuccauuucuuugcuacgugg

SEQ ID NO: 1354606 - RNA, 20 nt, Human
gguugggagugaggggggcc

SEQ ID NO: 1354607 - RNA, 19 nt, Human
gugcagggguuggagcugc

SEQ ID NO: 1354608 - RNA, 20 nt, Human
gugcuggagggagaggcugg

SEQ ID NO: 1354609 - RNA, 22 nt, Human
uaacacggucacugggguccag

SEQ ID NO: 1354610 - RNA, 22 nt, Human
uaaugcugcuaugaacauugug

SEQ ID NO: 1354611 - RNA, 26 nt, Human
uaccucugccaccagccauggaaagu

SEQ ID NO: 1354612 - RNA, 21 nt, Human
uagaacacuuucauugccccc

SEQ ID NO: 1354613 - RNA, 18 nt, Human
uauagucacaugaaugcc

SEQ ID NO: 1354614 - RNA, 24 nt, Human
uauguacggagacacacgcauagu

SEQ ID NO: 1354615 - RNA, 18 nt, Human
uauuuuguuuaucuauuc

SEQ ID NO: 1354616 - RNA, 20 nt, Human
ucaagcaacauccauuuagc

SEQ ID NO: 1354617 - RNA, 18 nt, Human
ucacgcacuauaaaauuc

SEQ ID NO: 1354618 - RNA, 24 nt, Human
ucaguauuuuucuagcagggcuuu

SEQ ID NO: 1354619 - RNA, 22 nt, Human
ucauuaggguugugagcagaau

SEQ ID NO: 1354620 - RNA, 22 nt, Human
ucauugcccccagaauaaaccg

SEQ ID NO: 1354621 - RNA, 20 nt, Human
uccuccuuucccuuacuggg

SEQ ID NO: 1354622 - RNA, 21 nt, Human
uccuggguccugugguagcuc

SEQ ID NO: 1354623 - RNA, 18 nt, Human
uccuucccaagcuuuaaa

SEQ ID NO: 1354624 - RNA, 23 nt, Human
ucgcuuaugauugcaggccuggg

SEQ ID NO: 1354625 - RNA, 19 nt, Human
ugaaaacaugaccuuuggg

SEQ ID NO: 1354626 - RNA, 19 nt, Human
ugacauggcacuuuuccuu

SEQ ID NO: 1354627 - RNA, 24 nt, Human
ugagaaucugcagaagcuucugga

SEQ ID NO: 1354628 - RNA, 20 nt, Human
ugauccaagacacucucccu

SEQ ID NO: 1354629 - RNA, 20 nt, Human
ugaucgaaccccacaaucca

SEQ ID NO: 1354630 - RNA, 19 nt, Human
ugcagccacggcggcagag

SEQ ID NO: 1354631 - RNA, 18 nt, Human
ugccaccagccauggaaa

SEQ ID NO: 1354632 - RNA, 21 nt, Human
ugccucaacuguauuuucugc

SEQ ID NO: 1354633 - RNA, 24 nt, Human
ugcuggagggagaggcuggaggcu

SEQ ID NO: 1354634 - RNA, 27 nt, Human
uggagggagaggcuggaggcuguuuuu

SEQ ID NO: 1354635 - RNA, 19 nt, Human
uggcaggcugggcucuuuc

SEQ ID NO: 1354636 - RNA, 22 nt, Human
uggcaggcugggcucuuucccg

SEQ ID NO: 1354637 - RNA, 21 nt, Human
uggcagggagagaagccugcg

SEQ ID NO: 1354638 - RNA, 27 nt, Human
ugggguccagcuccuggagccggaccu

SEQ ID NO: 1354639 - RNA, 18 nt, Human
uggggugcuaagugggac

SEQ ID NO: 1354640 - RNA, 20 nt, Human
ugucucuuuccaauguccuu

SEQ ID NO: 1354641 - RNA, 20 nt, Human
ugugaaaacaugaccuuugg

SEQ ID NO: 1354642 - RNA, 21 nt, Human
uguggcagggagagaagccug

SEQ ID NO: 1354643 - RNA, 24 nt, Human
uuagcagccacuuuccauuccucc

SEQ ID NO: 1354644 - RNA, 22 nt, Human
uucacgcacuauaaaauucacc

SEQ ID NO: 1354645 - RNA, 20 nt, Human
uucauuuuccauugcugcug

SEQ ID NO: 1354646 - RNA, 24 nt, Human
uuccaauguccuuucuaccucugc

SEQ ID NO: 1354647 - RNA, 22 nt, Human
uuccauccuuccuucccaagcu

SEQ ID NO: 1354648 - RNA, 25 nt, Human
uuccauccuuccuucccaagcuuua

SEQ ID NO: 1354649 - RNA, 22 nt, Human
uucccacuggacuuggccacaa

SEQ ID NO: 1354650 - RNA, 21 nt, Human
uucccggaggugcucauuagg

SEQ ID NO: 1354651 - RNA, 21 nt, Human
uuccugaccccagaggccagg

SEQ ID NO: 1354652 - RNA, 22 nt, Human
uuuaagaugaaccauucaauuc

SEQ ID NO: 1354653 - RNA, 24 nt, Human
uuucccggaggugcucauuagggu

SEQ ID NO: 1354654 - RNA, 21 nt, Human
uuucugcuuaggggcuuacaa

SEQ ID NO: 1354655 - RNA, 24 nt, Human
uuugcuacguggccugaggcuucc

SEQ ID NO: 1354656 - RNA, 27 nt, Human
uuugcuacguggccugaggcuuccuuu

SEQ ID NO: 1354657 - RNA, 24 nt, Human
uuuuaugucuggcuucuucauuac

SEQ ID NO: 1354658 - RNA, 23 nt, Human
acccagcaggcacagaaauguuu

SEQ ID NO: 1354659 - RNA, 21 nt, Human
acuuggggcugggcccauccu

SEQ ID NO: 1354660 - RNA, 18 nt, Human
agacaaagucaggacacg

SEQ ID NO: 1354661 - RNA, 18 nt, Human
agacgugccccuacccag

SEQ ID NO: 1354662 - RNA, 19 nt, Human
agcagccucagguguacag

SEQ ID NO: 1354663 - RNA, 22 nt, Human
agccacaucugaguccagcccc

SEQ ID NO: 1354664 - RNA, 18 nt, Human
agcuggaacuuggggcug

SEQ ID NO: 1354665 - RNA, 21 nt, Human
agcuggaacuuggggcugggc

SEQ ID NO: 1354666 - RNA, 24 nt, Human
aggagccguggggugucccugggu

SEQ ID NO: 1354667 - RNA, 20 nt, Human
aggaugaggacaagcagcag

SEQ ID NO: 1354668 - RNA, 20 nt, Human
aggcagacggccacggcgau

SEQ ID NO: 1354669 - RNA, 22 nt, Human
aggcugggggaggggcaggggc

SEQ ID NO: 1354670 - RNA, 24 nt, Human
aggugguggugguggugcugaggu

SEQ ID NO: 1354671 - RNA, 22 nt, Human
aucacacgcacauacacacaca

SEQ ID NO: 1354672 - RNA, 25 nt, Human
cacauacacacacacagaugggcug

SEQ ID NO: 1354673 - RNA, 22 nt, Human
cacucaccacuguacagccugg

SEQ ID NO: 1354674 - RNA, 18 nt, Human
cacuguacagccugggac

SEQ ID NO: 1354675 - RNA, 23 nt, Human
cacuguacagccugggacuccca

SEQ ID NO: 1354676 - RNA, 23 nt, Human
cagacgugccccuacccagcagg

SEQ ID NO: 1354677 - RNA, 19 nt, Human
cagcagcaggaccaggcag

SEQ ID NO: 1354678 - RNA, 19 nt, Human
cagcaggaccaggcagacg

SEQ ID NO: 1354679 - RNA, 26 nt, Human
cagcaugagaugugugugguuggggg

SEQ ID NO: 1354680 - RNA, 20 nt, Human
cagggaggagccguggggug

SEQ ID NO: 1354681 - RNA, 18 nt, Human
caugacaggccccgcgug

SEQ ID NO: 1354682 - RNA, 18 nt, Human
ccacaucugaguccagcc

SEQ ID NO: 1354683 - RNA, 20 nt, Human
ccacccagggggcugagcag

SEQ ID NO: 1354684 - RNA, 21 nt, Human
ccccgguguggggaagggccc

SEQ ID NO: 1354685 - RNA, 18 nt, Human
ccccucagacgugccccu

SEQ ID NO: 1354686 - RNA, 22 nt, Human
cccuaugugccccggcggccgg

SEQ ID NO: 1354687 - RNA, 18 nt, Human
ccggcuucugccuguccu

SEQ ID NO: 1354688 - RNA, 21 nt, Human
ccucaaggcugggggaggggc

SEQ ID NO: 1354689 - RNA, 19 nt, Human
ccucggccucagagguggg

SEQ ID NO: 1354690 - RNA, 19 nt, Human
ccugggcccuggggccgag

SEQ ID NO: 1354691 - RNA, 22 nt, Human
cgcacauacacacacacagaug

SEQ ID NO: 1354692 - RNA, 21 nt, Human
cgccacgccacacacacacuc

SEQ ID NO: 1354693 - RNA, 25 nt, Human
cugguaggugguggugguggugcuu

SEQ ID NO: 1354694 - RNA, 18 nt, Human
gagcagauggggguuguc

SEQ ID NO: 1354695 - RNA, 19 nt, Human
gagccguggggugucccug

SEQ ID NO: 1354696 - RNA, 26 nt, Human
gaggcaugcguggcacgugcucgugu

SEQ ID NO: 1354697 - RNA, 21 nt, Human
gaguguaggugucgggccugg

SEQ ID NO: 1354698 - RNA, 20 nt, Human
gcacugucccuccugggccc

SEQ ID NO: 1354699 - RNA, 23 nt, Human
gcagcucuccccgguguggggaa

SEQ ID NO: 1354700 - RNA, 19 nt, Human
gccacgccacacacacacu

SEQ ID NO: 1354701 - RNA, 18 nt, Human
gcccugguaggugguggu

SEQ ID NO: 1354702 - RNA, 19 nt, Human
gccugggacucccauugca

SEQ ID NO: 1354703 - RNA, 20 nt, Human
gcuggaacuuggggcugggc

SEQ ID NO: 1354704 - RNA, 18 nt, Human
gcugggcuugaugcugac

SEQ ID NO: 1354705 - RNA, 21 nt, Human
ggagcagggccccucagacgu

SEQ ID NO: 1354706 - RNA, 25 nt, Human
ggcaccucaaggcugggggaggggc

SEQ ID NO: 1354707 - RNA, 21 nt, Human
ggcagggaggagccguggggu

SEQ ID NO: 1354708 - RNA, 18 nt, Human
ggccacggcgaugaggcc

SEQ ID NO: 1354709 - RNA, 20 nt, Human
ggccgccacccagggggcug

SEQ ID NO: 1354710 - RNA, 23 nt, Human
ggccuggcccaggcuccaggcac

SEQ ID NO: 1354711 - RNA, 21 nt, Human
gggcagggucugaaggaccag

SEQ ID NO: 1354712 - RNA, 20 nt, Human
gggcccuggcccaggcccag

SEQ ID NO: 1354713 - RNA, 19 nt, Human
ggggaagggccccuguccg

SEQ ID NO: 1354714 - RNA, 22 nt, Human
ggggugucugcgugacccggga

SEQ ID NO: 1354715 - RNA, 24 nt, Human
gguagcaucacacgcacauacaca

SEQ ID NO: 1354716 - RNA, 23 nt, Human
gguggguggagagggcagcaugu

SEQ ID NO: 1354717 - RNA, 23 nt, Human
gugcauggccguguguaugcggg

SEQ ID NO: 1354718 - RNA, 23 nt, Human
gugcauggccguguguaugcggg

SEQ ID NO: 1354719 - RNA, 18 nt, Human
guggugcugagguccggc

SEQ ID NO: 1354720 - RNA, 23 nt, Human
gugguggugcugagguccggcug

SEQ ID NO: 1354721 - RNA, 23 nt, Human
guguguggcggccgccacccagg

SEQ ID NO: 1354722 - RNA, 23 nt, Human
uaagacaaagucaggacacgagc

SEQ ID NO: 1354723 - RNA, 24 nt, Human
uaagacaaagucaggacacgagcu

SEQ ID NO: 1354724 - RNA, 22 nt, Human
uaagggacagcuucggccggga

SEQ ID NO: 1354725 - RNA, 19 nt, Human
ucacgcccgauaaaacccc

SEQ ID NO: 1354726 - RNA, 19 nt, Human
ucacgcccgauaaaacccc

SEQ ID NO: 1354727 - RNA, 19 nt, Human
uccagccccuccuucuucc

SEQ ID NO: 1354728 - RNA, 22 nt, Human
ucuuccggcaauaaacgaggau

SEQ ID NO: 1354729 - RNA, 18 nt, Human
ugacaggccccgcguggg

SEQ ID NO: 1354730 - RNA, 19 nt, Human
ugacccgggaggggggugu

SEQ ID NO: 1354731 - RNA, 24 nt, Human
ugagaugugugugguuggggggug

SEQ ID NO: 1354732 - RNA, 21 nt, Human
ugagcacacgaggcaugcgug

SEQ ID NO: 1354733 - RNA, 21 nt, Human
ugagcuggaacuuggggcugg

SEQ ID NO: 1354734 - RNA, 19 nt, Human
ugcauaagguccagcucag

SEQ ID NO: 1354735 - RNA, 18 nt, Human
ugcccugguagguggugg

SEQ ID NO: 1354736 - RNA, 20 nt, Human
ugccucggggcagggagcgg

SEQ ID NO: 1354737 - RNA, 21 nt, Human
ugcgugcauggccguguguau

SEQ ID NO: 1354738 - RNA, 22 nt, Human
ugcucgugugguggucgugugc

SEQ ID NO: 1354739 - RNA, 18 nt, Human
uggaacuuggggcugggc

SEQ ID NO: 1354740 - RNA, 21 nt, Human
uggagaggugggaguucgggc

SEQ ID NO: 1354741 - RNA, 18 nt, Human
uggcacgugcucgugugg

SEQ ID NO: 1354742 - RNA, 18 nt, Human
uggcccaggcuccaggca

SEQ ID NO: 1354743 - RNA, 18 nt, Human
uggcggccgccacccagg

SEQ ID NO: 1354744 - RNA, 20 nt, Human
uggcggccgccacccagggg

SEQ ID NO: 1354745 - RNA, 21 nt, Human
ugggagagcuguggugcagug

SEQ ID NO: 1354746 - RNA, 18 nt, Human
ugggaguucgggcagggu

SEQ ID NO: 1354747 - RNA, 26 nt, Human
uggggccgagugugaguggcagugcc

SEQ ID NO: 1354748 - RNA, 19 nt, Human
ugguagguggugguggugg

SEQ ID NO: 1354749 - RNA, 25 nt, Human
uggugagcuggaacuuggggcuggg

SEQ ID NO: 1354750 - RNA, 20 nt, Human
uggugguggugcugaggucc

SEQ ID NO: 1354751 - RNA, 18 nt, Human
ugguggugguggugcuga

SEQ ID NO: 1354752 - RNA, 21 nt, Human
ugguggugguggugcugaggu

SEQ ID NO: 1354753 - RNA, 22 nt, Human
uguacagcaugagaugugugug

SEQ ID NO: 1354754 - RNA, 22 nt, Human
uguccuuggugggugccaaagc

SEQ ID NO: 1354755 - RNA, 25 nt, Human
uguccuuggugggugccaaagcugg

SEQ ID NO: 1354756 - RNA, 21 nt, Human
ugugagaggcaaaugugcacc

SEQ ID NO: 1354757 - RNA, 19 nt, Human
ugugcgugcauggccgugu

SEQ ID NO: 1354758 - RNA, 26 nt, Human
ugugcgugcauggccguguguaugcg

SEQ ID NO: 1354759 - RNA, 26 nt, Human
ugugugcgugcauggccguguguaug

SEQ ID NO: 1354760 - RNA, 21 nt, Human
aaaccugcagcccaagcccag

SEQ ID NO: 1354761 - RNA, 19 nt, Human
aaagaacauauuccucucc

SEQ ID NO: 1354762 - RNA, 21 nt, Human
aaagaacauauuccucuccaa

SEQ ID NO: 1354763 - RNA, 19 nt, Human
aaagcagacuguauaggaa

SEQ ID NO: 1354764 - RNA, 24 nt, Human
aaagccucuccaacauauucacac

SEQ ID NO: 1354765 - RNA, 24 nt, Human
aaaggcaaguagugucuguccaca

SEQ ID NO: 1354766 - RNA, 18 nt, Human
aaauagccuuaauuaaga

SEQ ID NO: 1354767 - RNA, 24 nt, Human
aagcagguggauacaaacuguuug

SEQ ID NO: 1354768 - RNA, 19 nt, Human
accaccuccacaaacguug

SEQ ID NO: 1354769 - RNA, 20 nt, Human
acccagguccagcuaagccc

SEQ ID NO: 1354770 - RNA, 24 nt, Human
agauuaccagagguugucaugacu

SEQ ID NO: 1354771 - RNA, 23 nt, Human
agauuguucuuagagacccccaa

SEQ ID NO: 1354772 - RNA, 23 nt, Human
agcaagaaguucuagguucccuc

SEQ ID NO: 1354773 - RNA, 21 nt, Human
aggaaaacccagguccagcua

SEQ ID NO: 1354774 - RNA, 23 nt, Human
aggagaagguaagauuaccagag

SEQ ID NO: 1354775 - RNA, 21 nt, Human
aggggaaaaaaaaauacugua

SEQ ID NO: 1354776 - RNA, 24 nt, Human
aggguucuucucagagauuguucu

SEQ ID NO: 1354777 - RNA, 18 nt, Human
agugaagaacacaaagcc

SEQ ID NO: 1354778 - RNA, 22 nt, Human
auagaugaggggaaagacuugg

SEQ ID NO: 1354779 - RNA, 22 nt, Human
auccuguccaacuuggcuccca

SEQ ID NO: 1354780 - RNA, 20 nt, Human
caaaaaugccuugaaauaac

SEQ ID NO: 1354781 - RNA, 22 nt, Human
caaaccugcagcccaagcccag

SEQ ID NO: 1354782 - RNA, 24 nt, Human
caauucuuaaucuguugcaaaaca

SEQ ID NO: 1354783 - RNA, 20 nt, Human
cacagugaagaacacaaagc

SEQ ID NO: 1354784 - RNA, 20 nt, Human
caccaccccagucaccaccc

SEQ ID NO: 1354785 - RNA, 25 nt, Human
cacucccuccuacgcuccuccaguc

SEQ ID NO: 1354786 - RNA, 21 nt, Human
cagcacgguacauguccucuc

SEQ ID NO: 1354787 - RNA, 20 nt, Human
cagcccaagcccaggagcca

SEQ ID NO: 1354788 - RNA, 18 nt, Human
cagccggcuccgaacgau

SEQ ID NO: 1354789 - RNA, 18 nt, Human
caggaaggcugccucccu

SEQ ID NO: 1354790 - RNA, 22 nt, Human
cauagaugaggggaaagacuug

SEQ ID NO: 1354791 - RNA, 24 nt, Human
cauaggaaaacccagguccagcua

SEQ ID NO: 1354792 - RNA, 22 nt, Human
cauguccucucacugcucggcc

SEQ ID NO: 1354793 - RNA, 23 nt, Human
ccaccuccacaaacguugagcca

SEQ ID NO: 1354794 - RNA, 24 nt, Human
ccagcuaagcccuaccucaaagua

SEQ ID NO: 1354795 - RNA, 20 nt, Human
ccagguccagcuaagcccua

SEQ ID NO: 1354796 - RNA, 20 nt, Human
ccccaaaccugcagcccaag

SEQ ID NO: 1354797 - RNA, 22 nt, Human
cccccaaaccugcagcccaagc

SEQ ID NO: 1354798 - RNA, 26 nt, Human
cccccaaaccugcagcccaagcccag

SEQ ID NO: 1354799 - RNA, 24 nt, Human
ccccuucaccaccccagucaccac

SEQ ID NO: 1354800 - RNA, 23 nt, Human
cccgcgccguggccgccgccucc

SEQ ID NO: 1354801 - RNA, 21 nt, Human
ccgccgccucccgcgccggcg

SEQ ID NO: 1354802 - RNA, 24 nt, Human
ccgccgccucccgcgccggcgucu

SEQ ID NO: 1354803 - RNA, 20 nt, Human
ccgccgccuucccgccgucc

SEQ ID NO: 1354804 - RNA, 19 nt, Human
ccgcgccguggccgccgcc

SEQ ID NO: 1354805 - RNA, 18 nt, Human
ccguggccgccgccuccc

SEQ ID NO: 1354806 - RNA, 21 nt, Human
ccuacgcuccuccagucuuca

SEQ ID NO: 1354807 - RNA, 19 nt, Human
ccucccucaggcuucccaa

SEQ ID NO: 1354808 - RNA, 24 nt, Human
ccugaguuaaagcagaccgggguc

SEQ ID NO: 1354809 - RNA, 22 nt, Human
ccugcaccaagccccagacucc

SEQ ID NO: 1354810 - RNA, 22 nt, Human
ccugcagcccaagcccaggagc

SEQ ID NO: 1354811 - RNA, 23 nt, Human
ccugcagcccaagcccaggagcc

SEQ ID NO: 1354812 - RNA, 20 nt, Human
cgccacgucgccaggcuguc

SEQ ID NO: 1354813 - RNA, 21 nt, Human
cucuccauucuuuuuugcagu

SEQ ID NO: 1354814 - RNA, 18 nt, Human
cugcagcacgguacaugu

SEQ ID NO: 1354815 - RNA, 19 nt, Human
cugcccgcuggccgccgcc

SEQ ID NO: 1354816 - RNA, 24 nt, Human
cuguagaauaauuaaagcuuccaa

SEQ ID NO: 1354817 - RNA, 24 nt, Human
cugucauagucacaaggagcaaga

SEQ ID NO: 1354818 - RNA, 24 nt, Human
gaaaagagcauaggaaaacccagg

SEQ ID NO: 1354819 - RNA, 18 nt, Human
gagccaauucaggggcug

SEQ ID NO: 1354820 - RNA, 20 nt, Human
gaguuuccucugauacaaaa

SEQ ID NO: 1354821 - RNA, 21 nt, Human
gauccggagccccucccgucg

SEQ ID NO: 1354822 - RNA, 21 nt, Human
gcagcucgcgccuggccacgc

SEQ ID NO: 1354823 - RNA, 21 nt, Human
gcauagucccccgacucaugc

SEQ ID NO: 1354824 - RNA, 24 nt, Human
gccaguuuaccauuagagagaguu

SEQ ID NO: 1354825 - RNA, 20 nt, Human
gcccaagcccaggagccacc

SEQ ID NO: 1354826 - RNA, 25 nt, Human
gccccagacuccagugcgcuggggg

SEQ ID NO: 1354827 - RNA, 18 nt, Human
gccgccuucccgccgucc

SEQ ID NO: 1354828 - RNA, 21 nt, Human
gcuuccaacacuaaaccacaa

SEQ ID NO: 1354829 - RNA, 23 nt, Human
ggagccccucccgucggggugcc

SEQ ID NO: 1354830 - RNA, 20 nt, Human
ggcaccaccugcaccaagcc

SEQ ID NO: 1354831 - RNA, 19 nt, Human
ggccgccgccucccgcgcc

SEQ ID NO: 1354832 - RNA, 19 nt, Human
guauuuccucuccauucuu

SEQ ID NO: 1354833 - RNA, 20 nt, Human
gugucuguccacacugaugg

SEQ ID NO: 1354834 - RNA, 20 nt, Human
guucugaugccccucuuuca

SEQ ID NO: 1354835 - RNA, 28 nt, Human
uaaagaacauauuccucuccaaaacuga

SEQ ID NO: 1354836 - RNA, 20 nt, Human
uaaagcagacuguuagaagc

SEQ ID NO: 1354837 - RNA, 22 nt, Human
uaaagcagacuguuagaagccc

SEQ ID NO: 1354838 - RNA, 22 nt, Human
uaagauguaaguccaaaccauu

SEQ ID NO: 1354839 - RNA, 20 nt, Human
uacaaacuguuuggcuauaa

SEQ ID NO: 1354840 - RNA, 25 nt, Human
uagaauccuaaagagugaugucucc

SEQ ID NO: 1354841 - RNA, 24 nt, Human
uagagacccccaaaccugcagccc

SEQ ID NO: 1354842 - RNA, 21 nt, Human
uagccaggaaggcugccuccc

SEQ ID NO: 1354843 - RNA, 24 nt, Human
uaggaagaucuauagaaacccguu

SEQ ID NO: 1354844 - RNA, 21 nt, Human
ucacucauccccugacccaga

SEQ ID NO: 1354845 - RNA, 22 nt, Human
ucagacaucugucauagucacu

SEQ ID NO: 1354846 - RNA, 20 nt, Human
ucaggacauccuguccaacu

SEQ ID NO: 1354847 - RNA, 21 nt, Human
ucaggacauccuguccaacuu

SEQ ID NO: 1354848 - RNA, 22 nt, Human
ucaggacauccuguccaacuug

SEQ ID NO: 1354849 - RNA, 23 nt, Human
ucaggacauccuguccaacuugg

SEQ ID NO: 1354850 - RNA, 19 nt, Human
uccaaaccauugcucuucc

SEQ ID NO: 1354851 - RNA, 25 nt, Human
ucccaggggcccaaggguucuucuc

SEQ ID NO: 1354852 - RNA, 24 nt, Human
uccccugacccagacggguuacac

SEQ ID NO: 1354853 - RNA, 22 nt, Human
ucccgcgccguggccgccgccu

SEQ ID NO: 1354854 - RNA, 23 nt, Human
uccugaguuaaagcagacuguau

SEQ ID NO: 1354855 - RNA, 23 nt, Human
ucgccaggcugucaggagcaugc

SEQ ID NO: 1354856 - RNA, 25 nt, Human
ucuauagaaacccguuacuacuaaa

SEQ ID NO: 1354857 - RNA, 23 nt, Human
ucucgggccgcggcugcccgcug

SEQ ID NO: 1354858 - RNA, 28 nt, Human
ucuucaaaaaugccuugaaauaacccac

SEQ ID NO: 1354859 - RNA, 18 nt, Human
ugaaagcagguggauaca

SEQ ID NO: 1354860 - RNA, 27 nt, Human
ugacuaugccaguaacagaucuauccc

SEQ ID NO: 1354861 - RNA, 19 nt, Human
ugaguuaaagcagacugua

SEQ ID NO: 1354862 - RNA, 18 nt, Human
ugcaucauagaugagggg

SEQ ID NO: 1354863 - RNA, 23 nt, Human
ugccaguagaauccuaaagagug

SEQ ID NO: 1354864 - RNA, 19 nt, Human
ugccucaaaaaaaauagcu

SEQ ID NO: 1354865 - RNA, 18 nt, Human
ugcgcugggggcaucaga

SEQ ID NO: 1354866 - RNA, 22 nt, Human
ugcucuucccuucauaaaaagg

SEQ ID NO: 1354867 - RNA, 18 nt, Human
uggauacaaacuguuugg

SEQ ID NO: 1354868 - RNA, 21 nt, Human
uggcaguggacacacccuccu

SEQ ID NO: 1354869 - RNA, 21 nt, Human
uggcucccaggggcccaaggg

SEQ ID NO: 1354870 - RNA, 21 nt, Human
ugggagaaagcuaaaguaaca

SEQ ID NO: 1354871 - RNA, 22 nt, Human
ugggagaaagcuaaaguaacag

SEQ ID NO: 1354872 - RNA, 24 nt, Human
uggggcaccaccugcaccaagccc

SEQ ID NO: 1354873 - RNA, 19 nt, Human
uguaaguccaaaccauugc

SEQ ID NO: 1354874 - RNA, 22 nt, Human
uuacuacuaaaggggaaaaaaa

SEQ ID NO: 1354875 - RNA, 22 nt, Human
uucaacacucuaaucaauaaau

SEQ ID NO: 1354876 - RNA, 23 nt, Human
uucacagugaagaacacaaagcc

SEQ ID NO: 1354877 - RNA, 21 nt, Human
uucaccaccccagucaccacc

SEQ ID NO: 1354878 - RNA, 25 nt, Human
uuccaacacuaaaccacaagguacc

SEQ ID NO: 1354879 - RNA, 24 nt, Human
uuccuccucugaaagcagguggau

SEQ ID NO: 1354880 - RNA, 29 nt, Human
uucuuagagacccccaaaccugcagcccc

SEQ ID NO: 1354881 - RNA, 21 nt, Human
uugcucuucccuucauaaaaa

SEQ ID NO: 1354882 - RNA, 20 nt, Human
uuucacagugaagaacacaa

SEQ ID NO: 1354883 - RNA, 24 nt, Human
uuuggccuuugguuccuccucugg

SEQ ID NO: 1354884 - RNA, 22 nt, Human
aaagaaucucggguuaugaggg

SEQ ID NO: 1354885 - RNA, 21 nt, Human
aagagcccacaaagaaucucg

SEQ ID NO: 1354886 - RNA, 26 nt, Human
acaccaccucaaaggcaggggaacgc

SEQ ID NO: 1354887 - RNA, 20 nt, Human
agacaggaauaaaaaugagc

SEQ ID NO: 1354888 - RNA, 25 nt, Human
agacaggaauaaaaaugagcucugc

SEQ ID NO: 1354889 - RNA, 26 nt, Human
agacaggaauaaaaaugaggggaccc

SEQ ID NO: 1354890 - RNA, 18 nt, Human
agggaggggcuggccgug

SEQ ID NO: 1354891 - RNA, 23 nt, Human
agggcagacugagguaggagagc

SEQ ID NO: 1354892 - RNA, 19 nt, Human
cagcagggaagcgauggga

SEQ ID NO: 1354893 - RNA, 21 nt, Human
cauuccaggguagggcagacu

SEQ ID NO: 1354894 - RNA, 22 nt, Human
ccgucuggaaaacucucugagu

SEQ ID NO: 1354895 - RNA, 18 nt, Human
cuacugggccguccuggu

SEQ ID NO: 1354896 - RNA, 20 nt, Human
uccaggguagggcagacuga

SEQ ID NO: 1354897 - RNA, 21 nt, Human
uggaaaacucucugaguucug

SEQ ID NO: 1354898 - RNA, 22 nt, Human
uggaaaacucucugaguucugg

SEQ ID NO: 1354899 - RNA, 30 nt, Human
uuugcacgauugcagacaggaauaaaaauu

SEQ ID NO: 1354900 - RNA, 19 nt, Human
aaaacaaacaaacaaaaaa

SEQ ID NO: 1354901 - RNA, 22 nt, Human
aaacaaaaaauauagagcaggg

SEQ ID NO: 1354902 - RNA, 23 nt, Human
aaacaaacaaaaaauauagagca

SEQ ID NO: 1354903 - RNA, 20 nt, Human
aaaguagcaccaugagagca

SEQ ID NO: 1354904 - RNA, 19 nt, Human
aacacugugaaaccccguc

SEQ ID NO: 1354905 - RNA, 20 nt, Human
aacacugugaaaccccgucu

SEQ ID NO: 1354906 - RNA, 21 nt, Human
aacacugugaaaccccgucuc

SEQ ID NO: 1354907 - RNA, 23 nt, Human
aagaaucccauugucccugcccu

SEQ ID NO: 1354908 - RNA, 27 nt, Human
aaggcgcucagcucagacugcagaagc

SEQ ID NO: 1354909 - RNA, 22 nt, Human
aauccugaccucugcggacaua

SEQ ID NO: 1354910 - RNA, 18 nt, Human
aaugaucuugucuccugg

SEQ ID NO: 1354911 - RNA, 24 nt, Human
aauugcuugaacccgggaggugga

SEQ ID NO: 1354912 - RNA, 24 nt, Human
aauugcuuuaaccugggaccugga

SEQ ID NO: 1354913 - RNA, 18 nt, Human
acaaagagacagagaagc

SEQ ID NO: 1354914 - RNA, 21 nt, Human
acaaagaguaucagagggaaa

SEQ ID NO: 1354915 - RNA, 20 nt, Human
acaccuuggcggcaucauaa

SEQ ID NO: 1354916 - RNA, 19 nt, Human
acacggugagacucccucu

SEQ ID NO: 1354917 - RNA, 20 nt, Human
acacggugagacucccucuc

SEQ ID NO: 1354918 - RNA, 24 nt, Human
acacggugagacucccucucaaaa

SEQ ID NO: 1354919 - RNA, 25 nt, Human
acagagcaagauuuguuucauuuag

SEQ ID NO: 1354920 - RNA, 24 nt, Human
accaauauggugaaaccccaucuc

SEQ ID NO: 1354921 - RNA, 18 nt, Human
accaccuucuauugaggc

SEQ ID NO: 1354922 - RNA, 18 nt, Human
accaccuucugucucuug

SEQ ID NO: 1354923 - RNA, 24 nt, Human
accccaucucuacuaaaaauacaa

SEQ ID NO: 1354924 - RNA, 24 nt, Human
accccgucucuacuaaaaauacaa

SEQ ID NO: 1354925 - RNA, 24 nt, Human
accuggagguugcagugagccgag

SEQ ID NO: 1354926 - RNA, 23 nt, Human
accuggauggcagagcaagacuc

SEQ ID NO: 1354927 - RNA, 18 nt, Human
acgcaacucugccuccca

SEQ ID NO: 1354928 - RNA, 18 nt, Human
acuacuguugggguggug

SEQ ID NO: 1354929 - RNA, 21 nt, Human
acucuugccucuuuagacaaa

SEQ ID NO: 1354930 - RNA, 19 nt, Human
acugcaccaaccccagccc

SEQ ID NO: 1354931 - RNA, 24 nt, Human
acugcacucaaaccuggauggugg

SEQ ID NO: 1354932 - RNA, 18 nt, Human
acugcacuccagccuggg

SEQ ID NO: 1354933 - RNA, 23 nt, Human
acugcacuccagccugggugaca

SEQ ID NO: 1354934 - RNA, 18 nt, Human
acuuugggaggcugaggc

SEQ ID NO: 1354935 - RNA, 21 nt, Human
agaaaagaccuuccagucaga

SEQ ID NO: 1354936 - RNA, 24 nt, Human
agacagacugaccgaccgaccaga

SEQ ID NO: 1354937 - RNA, 24 nt, Human
agacaggagaauugcuugaacccg

SEQ ID NO: 1354938 - RNA, 18 nt, Human
agacuggacauugaaaau

SEQ ID NO: 1354939 - RNA, 18 nt, Human
agagaucacaccacugca

SEQ ID NO: 1354940 - RNA, 20 nt, Human
agagggaacuggcccccggu

SEQ ID NO: 1354941 - RNA, 20 nt, Human
agaggucaggggagggaaau

SEQ ID NO: 1354942 - RNA, 20 nt, Human
agaguaaauucacagccaga

SEQ ID NO: 1354943 - RNA, 18 nt, Human
agcaagacuccauccccc

SEQ ID NO: 1354944 - RNA, 24 nt, Human
agcacuuugggaggccgaggaggg

SEQ ID NO: 1354945 - RNA, 23 nt, Human
agcagacaguaaaacacagacaa

SEQ ID NO: 1354946 - RNA, 19 nt, Human
agcaggcaccaggccaccc

SEQ ID NO: 1354947 - RNA, 23 nt, Human
agccgggcaugguggcacgugcc

SEQ ID NO: 1354948 - RNA, 24 nt, Human
agccugaccaauauggugaaaccc

SEQ ID NO: 1354949 - RNA, 22 nt, Human
agccugggugacacggugagac

SEQ ID NO: 1354950 - RNA, 24 nt, Human
agccugggugacacggugagacuc

SEQ ID NO: 1354951 - RNA, 19 nt, Human
agcuaugaucacaccugug

SEQ ID NO: 1354952 - RNA, 19 nt, Human
aggaagccccaaacaugca

SEQ ID NO: 1354953 - RNA, 22 nt, Human
aggaagccccaaacaugcauga

SEQ ID NO: 1354954 - RNA, 22 nt, Human
aggaaggagggacuaagagggu

SEQ ID NO: 1354955 - RNA, 22 nt, Human
aggagauuacuacuguuggggu

SEQ ID NO: 1354956 - RNA, 24 nt, Human
aggagggcggaucaugaagucagg

SEQ ID NO: 1354957 - RNA, 22 nt, Human
aggcagugcucaucaaagugcc

SEQ ID NO: 1354958 - RNA, 20 nt, Human
aggccgaggagggcggauca

SEQ ID NO: 1354959 - RNA, 24 nt, Human
aggcgcgguggcucacgccaguaa

SEQ ID NO: 1354960 - RNA, 24 nt, Human
aggcugagacaggagaauugcuug

SEQ ID NO: 1354961 - RNA, 18 nt, Human
aggcugaggcgaguggau

SEQ ID NO: 1354962 - RNA, 27 nt, Human
agggaagagaugaaggaagggggaccc

SEQ ID NO: 1354963 - RNA, 23 nt, Human
agggugcaguggcacgccugugg

SEQ ID NO: 1354964 - RNA, 25 nt, Human
agguggagguugcagugacaacggu

SEQ ID NO: 1354965 - RNA, 22 nt, Human
agguggagguugcagugagaag

SEQ ID NO: 1354966 - RNA, 24 nt, Human
agguggagguugcagugagaagag

SEQ ID NO: 1354967 - RNA, 18 nt, Human
aguggcucagccucucug

SEQ ID NO: 1354968 - RNA, 18 nt, Human
auauauauacacauauau

SEQ ID NO: 1354969 - RNA, 24 nt, Human
aucacaccacugcacucaaaccug

SEQ ID NO: 1354970 - RNA, 24 nt, Human
aucgugccacugcacuccagccug

SEQ ID NO: 1354971 - RNA, 23 nt, Human
aucugcgugucgacugcaggcac

SEQ ID NO: 1354972 - RNA, 20 nt, Human
auggugaaaccccaucucua

SEQ ID NO: 1354973 - RNA, 20 nt, Human
caaaaaggcacaaagaguau

SEQ ID NO: 1354974 - RNA, 20 nt, Human
caaaguagcaccaugagagc

SEQ ID NO: 1354975 - RNA, 19 nt, Human
caagcugaaauaauauccu

SEQ ID NO: 1354976 - RNA, 19 nt, Human
caccaggccaccccuccgc

SEQ ID NO: 1354977 - RNA, 20 nt, Human
caccaugagagcaaaggucu

SEQ ID NO: 1354978 - RNA, 23 nt, Human
cacccagccacccugaccaccuu

SEQ ID NO: 1354979 - RNA, 21 nt, Human
caccuguaguaguuacuuggg

SEQ ID NO: 1354980 - RNA, 24 nt, Human
cacgccaguaaucccagcacuuug

SEQ ID NO: 1354981 - RNA, 19 nt, Human
cacuccagccugggugaca

SEQ ID NO: 1354982 - RNA, 19 nt, Human
cacuccagccugggugaca

SEQ ID NO: 1354983 - RNA, 24 nt, Human
cacuccagccugggugacacggug

SEQ ID NO: 1354984 - RNA, 24 nt, Human
cacugcacucaaaccuggauggca

SEQ ID NO: 1354985 - RNA, 19 nt, Human
cacugcacuccagccuggg

SEQ ID NO: 1354986 - RNA, 21 nt, Human
cacugcacuccagccugggug

SEQ ID NO: 1354987 - RNA, 22 nt, Human
cacugcacuccagccuggguga

SEQ ID NO: 1354988 - RNA, 23 nt, Human
cacugcacuccagccugggugac

SEQ ID NO: 1354989 - RNA, 24 nt, Human
cacugcacuccagccugggugaca

SEQ ID NO: 1354990 - RNA, 24 nt, Human
cacuucacuccagccuaggcaaca

SEQ ID NO: 1354991 - RNA, 21 nt, Human
cagagcaagacuccauccccc

SEQ ID NO: 1354992 - RNA, 21 nt, Human
cagcaacccugccauaauacc

SEQ ID NO: 1354993 - RNA, 23 nt, Human
cagcacuuugggaggccgaggag

SEQ ID NO: 1354994 - RNA, 28 nt, Human
cagcacuuugggaggccgaggagggcgg

SEQ ID NO: 1354995 - RNA, 18 nt, Human
cagccacggaaccugcca

SEQ ID NO: 1354996 - RNA, 24 nt, Human
cagcuauucgggaggcugaggcag

SEQ ID NO: 1354997 - RNA, 21 nt, Human
cagcucagacugcagaagcaa

SEQ ID NO: 1354998 - RNA, 18 nt, Human
cagcugguugagacugga

SEQ ID NO: 1354999 - RNA, 24 nt, Human
cagcuuccuccucguaaagcagga

SEQ ID NO: 1355000 - RNA, 21 nt, Human
caggcacagagggaggucggg

SEQ ID NO: 1355001 - RNA, 20 nt, Human
caguagguccacuuugggaa

SEQ ID NO: 1355002 - RNA, 23 nt, Human
cagugaugacgccaaaguagcac

SEQ ID NO: 1355003 - RNA, 19 nt, Human
cagugcucaucaaagugcc

SEQ ID NO: 1355004 - RNA, 19 nt, Human
caucugggacaaacaccgc

SEQ ID NO: 1355005 - RNA, 18 nt, Human
ccaaccccagcccucugg

SEQ ID NO: 1355006 - RNA, 18 nt, Human
ccaacggccucaccccag

SEQ ID NO: 1355007 - RNA, 20 nt, Human
ccacugcacuccagccuggg

SEQ ID NO: 1355008 - RNA, 20 nt, Human
ccacugcacuccagccuggg

SEQ ID NO: 1355009 - RNA, 21 nt, Human
ccacugcacuccagccugggu

SEQ ID NO: 1355010 - RNA, 21 nt, Human
ccacugcacuccagccugggu

SEQ ID NO: 1355011 - RNA, 23 nt, Human
ccacugcacuccagccuggguga

SEQ ID NO: 1355012 - RNA, 24 nt, Human
ccacugcacuccagccugggugac

SEQ ID NO: 1355013 - RNA, 20 nt, Human
ccacuucacuccagccuagg

SEQ ID NO: 1355014 - RNA, 20 nt, Human
ccacuucacuccagccuagg

SEQ ID NO: 1355015 - RNA, 21 nt, Human
ccacuucacuccagccuaggc

SEQ ID NO: 1355016 - RNA, 21 nt, Human
ccaggccaccccuccgcuccc

SEQ ID NO: 1355017 - RNA, 21 nt, Human
ccagggcccugggaccggagc

SEQ ID NO: 1355018 - RNA, 22 nt, Human
ccaguaaucccagcacuuuggg

SEQ ID NO: 1355019 - RNA, 19 nt, Human
cccacacacacauaaaugu

SEQ ID NO: 1355020 - RNA, 23 nt, Human
cccacagcauuuagaccaaaacc

SEQ ID NO: 1355021 - RNA, 19 nt, Human
cccauugucccugcccugg

SEQ ID NO: 1355022 - RNA, 21 nt, Human
ccccaaaugagccacuccagu

SEQ ID NO: 1355023 - RNA, 21 nt, Human
cccgggagguggagguugcag

SEQ ID NO: 1355024 - RNA, 18 nt, Human
cccugggcuacaaggccc

SEQ ID NO: 1355025 - RNA, 24 nt, Human
ccugaccaauauggugaaacccca

SEQ ID NO: 1355026 - RNA, 23 nt, Human
ccugcgggccgagucaaugagcu

SEQ ID NO: 1355027 - RNA, 19 nt, Human
ccuggaggacugaggaaug

SEQ ID NO: 1355028 - RNA, 23 nt, Human
ccuggcuaacacugugaaacccc

SEQ ID NO: 1355029 - RNA, 24 nt, Human
ccuggcuaacacugugaaaccccg

SEQ ID NO: 1355030 - RNA, 21 nt, Human
ccugggaccuggagguugcag

SEQ ID NO: 1355031 - RNA, 18 nt, Human
ccuggguacagcaaggcu

SEQ ID NO: 1355032 - RNA, 22 nt, Human
ccugggugacacggugagacuc

SEQ ID NO: 1355033 - RNA, 19 nt, Human
ccuguagucccagcuauuc

SEQ ID NO: 1355034 - RNA, 21 nt, Human
ccuguagucccagcuauucgg

SEQ ID NO: 1355035 - RNA, 22 nt, Human
ccuguagucccagcuauucggg

SEQ ID NO: 1355036 - RNA, 19 nt, Human
ccugugguucuagcuacuc

SEQ ID NO: 1355037 - RNA, 24 nt, Human
cgagaccauccuggcuaacacugu

SEQ ID NO: 1355038 - RNA, 18 nt, Human
cgccaaaguagcaccaug

SEQ ID NO: 1355039 - RNA, 24 nt, Human
cgccugugguucuagcuacucagg

SEQ ID NO: 1355040 - RNA, 23 nt, Human
cgggagguggagguugcagugag

SEQ ID NO: 1355041 - RNA, 21 nt, Human
cuaucugccuagauugugcuu

SEQ ID NO: 1355042 - RNA, 24 nt, Human
cucacgccaguaaucccagcacuu

SEQ ID NO: 1355043 - RNA, 20 nt, Human
cugaauccaccuccugcuuc

SEQ ID NO: 1355044 - RNA, 27 nt, Human
cugcuguguucccaguuucuagaagug

SEQ ID NO: 1355045 - RNA, 21 nt, Human
cuggcccccgguccaucccuc

SEQ ID NO: 1355046 - RNA, 19 nt, Human
cuggguagacauggggcug

SEQ ID NO: 1355047 - RNA, 20 nt, Human
cugguguugaacacaacuga

SEQ ID NO: 1355048 - RNA, 22 nt, Human
cuucagcuuccugguaaauucc

SEQ ID NO: 1355049 - RNA, 21 nt, Human
cuuuccucuuucuuuaauucu

SEQ ID NO: 1355050 - RNA, 20 nt, Human
gaaggaaggagggacuaaga

SEQ ID NO: 1355051 - RNA, 21 nt, Human
gaaggaaggagggacuaagag

SEQ ID NO: 1355052 - RNA, 19 nt, Human
gagaagcaguccaagccuc

SEQ ID NO: 1355053 - RNA, 23 nt, Human
gagaauugcuugaacccgggagg

SEQ ID NO: 1355054 - RNA, 23 nt, Human
gagaucgugccacugcacuccag

SEQ ID NO: 1355055 - RNA, 18 nt, Human
gaggaauggaugcucuga

SEQ ID NO: 1355056 - RNA, 22 nt, Human
gaggcugagacaggagaauugc

SEQ ID NO: 1355057 - RNA, 23 nt, Human
gagguugcagugagccgagaucg

SEQ ID NO: 1355058 - RNA, 18 nt, Human
gagucagagggaagagau

SEQ ID NO: 1355059 - RNA, 24 nt, Human
gaucagcugaggucaguaguucaa

SEQ ID NO: 1355060 - RNA, 18 nt, Human
gaucaugaagucaggaga

SEQ ID NO: 1355061 - RNA, 18 nt, Human
gauugcuuaugcccagga

SEQ ID NO: 1355062 - RNA, 24 nt, Human
gcaauccugaccucugcggacaua

SEQ ID NO: 1355063 - RNA, 22 nt, Human
gcacacuuuguccaucuggaaa

SEQ ID NO: 1355064 - RNA, 19 nt, Human
gcacagagggaggucgggg

SEQ ID NO: 1355065 - RNA, 25 nt, Human
gcagagcaagacuccaucccccccc

SEQ ID NO: 1355066 - RNA, 21 nt, Human
gcaggagcgacuguuggggug

SEQ ID NO: 1355067 - RNA, 19 nt, Human
gccacugcacuccagccug

SEQ ID NO: 1355068 - RNA, 24 nt, Human
gccacugcacuccagccuggguga

SEQ ID NO: 1355069 - RNA, 23 nt, Human
gccacuucacuccagccuaggca

SEQ ID NO: 1355070 - RNA, 20 nt, Human
gccgagaucgugccacugca

SEQ ID NO: 1355071 - RNA, 24 nt, Human
gcucugggccgcuggcugcacugg

SEQ ID NO: 1355072 - RNA, 25 nt, Human
gcugcaguaagcuaugaucacaccu

SEQ ID NO: 1355073 - RNA, 22 nt, Human
gcuuuggcuggcccacugcugu

SEQ ID NO: 1355074 - RNA, 18 nt, Human
ggagguugcagugagaag

SEQ ID NO: 1355075 - RNA, 24 nt, Human
ggagguugcagugagaagagauca

SEQ ID NO: 1355076 - RNA, 20 nt, Human
ggagguugcagugagccgag

SEQ ID NO: 1355077 - RNA, 22 nt, Human
ggagguugcagugagccgagau

SEQ ID NO: 1355078 - RNA, 24 nt, Human
ggagguugcagugagccgagaucg

SEQ ID NO: 1355079 - RNA, 20 nt, Human
ggauauguguggauggaugg

SEQ ID NO: 1355080 - RNA, 18 nt, Human
ggauggcagagcaagacu

SEQ ID NO: 1355081 - RNA, 19 nt, Human
ggaugguggacgggaggca

SEQ ID NO: 1355082 - RNA, 22 nt, Human
ggaugguggacgggaggcagug

SEQ ID NO: 1355083 - RNA, 23 nt, Human
ggcaacaccuggcuagcucuagu

SEQ ID NO: 1355084 - RNA, 20 nt, Human
ggccauaggacuuacagagc

SEQ ID NO: 1355085 - RNA, 18 nt, Human
ggccgaggagggcggauc

SEQ ID NO: 1355086 - RNA, 18 nt, Human
ggcggaucaugaagucag

SEQ ID NO: 1355087 - RNA, 21 nt, Human
ggcucacgccaguaaucccag

SEQ ID NO: 1355088 - RNA, 19 nt, Human
ggcuuuggcuggcccacug

SEQ ID NO: 1355089 - RNA, 20 nt, Human
ggguacagcaaggcuuucau

SEQ ID NO: 1355090 - RNA, 23 nt, Human
ggguacuuugggaggcugaggcg

SEQ ID NO: 1355091 - RNA, 24 nt, Human
gggugcaguggugugcaccuguag

SEQ ID NO: 1355092 - RNA, 21 nt, Human
ggucaguucucagccucucag

SEQ ID NO: 1355093 - RNA, 24 nt, Human
gguggcucacgccaguaaucccag

SEQ ID NO: 1355094 - RNA, 20 nt, Human
guaaauuccucaaacuccuu

SEQ ID NO: 1355095 - RNA, 21 nt, Human
guaaauuccucaaacuccuua

SEQ ID NO: 1355096 - RNA, 26 nt, Human
gugaccuuaaaaaugugcuggacaua

SEQ ID NO: 1355097 - RNA, 19 nt, Human
gugcaguggugugcaccug

SEQ ID NO: 1355098 - RNA, 19 nt, Human
gugcugagcuucccugagc

SEQ ID NO: 1355099 - RNA, 24 nt, Human
guggcucacgccaguaaucccagc

SEQ ID NO: 1355100 - RNA, 22 nt, Human
guggugugcaccuguaguaguu

SEQ ID NO: 1355101 - RNA, 20 nt, Human
uaaaacacagacaagacagc

SEQ ID NO: 1355102 - RNA, 22 nt, Human
uaaacacaacaaagagacagag

SEQ ID NO: 1355103 - RNA, 27 nt, Human
uaaacacaacaaagagacagagaagca

SEQ ID NO: 1355104 - RNA, 21 nt, Human
uaaagcagggugcaguggcac

SEQ ID NO: 1355105 - RNA, 24 nt, Human
uaacacugugaaaccccgucucua

SEQ ID NO: 1355106 - RNA, 21 nt, Human
uaagauagggaagcuaaaagc

SEQ ID NO: 1355107 - RNA, 22 nt, Human
uagaaugggugggugguuguaa

SEQ ID NO: 1355108 - RNA, 24 nt, Human
uagauagauagacagacugaccga

SEQ ID NO: 1355109 - RNA, 24 nt, Human
uagcagaauaccaaaauacacuuu

SEQ ID NO: 1355110 - RNA, 23 nt, Human
uagccacuucacuccagccuagg

SEQ ID NO: 1355111 - RNA, 22 nt, Human
uaggcaacauaaggagacccca

SEQ ID NO: 1355112 - RNA, 19 nt, Human
uagucccagcuauucggga

SEQ ID NO: 1355113 - RNA, 20 nt, Human
uauaagcagccagaaagagc

SEQ ID NO: 1355114 - RNA, 18 nt, Human
uauauauacacauauaua

SEQ ID NO: 1355115 - RNA, 24 nt, Human
uauguagaaagggcagaggucagg

SEQ ID NO: 1355116 - RNA, 23 nt, Human
ucacaccacugcacucaaaccug

SEQ ID NO: 1355117 - RNA, 20 nt, Human
ucaccagggaaaaagaacuc

SEQ ID NO: 1355118 - RNA, 20 nt, Human
ucaggugggcucuggugggc

SEQ ID NO: 1355119 - RNA, 18 nt, Human
ucaugaagucaggagauc

SEQ ID NO: 1355120 - RNA, 24 nt, Human
ucaugaagucaggagaucgagacc

SEQ ID NO: 1355121 - RNA, 20 nt, Human
uccaaugaaugaaagaaucc

SEQ ID NO: 1355122 - RNA, 21 nt, Human
uccagagggaacuggcccccg

SEQ ID NO: 1355123 - RNA, 23 nt, Human
uccagccugggugacacggugag

SEQ ID NO: 1355124 - RNA, 24 nt, Human
uccagccugggugacacggugaga

SEQ ID NO: 1355125 - RNA, 20 nt, Human
uccauccccccccaaaaaua

SEQ ID NO: 1355126 - RNA, 22 nt, Human
uccauccccccccaaaaauaua

SEQ ID NO: 1355127 - RNA, 22 nt, Human
ucccuuacugcaccaaccccag

SEQ ID NO: 1355128 - RNA, 20 nt, Human
uccggcaacaccuggcuagc

SEQ ID NO: 1355129 - RNA, 20 nt, Human
ucgggaggcugaggcagaau

SEQ ID NO: 1355130 - RNA, 23 nt, Human
ucgugccacugcacuccagccug

SEQ ID NO: 1355131 - RNA, 22 nt, Human
ucuaacuauaagcagccagaaa

SEQ ID NO: 1355132 - RNA, 24 nt, Human
ucucuacuaaaaauacaaaaaauu

SEQ ID NO: 1355133 - RNA, 23 nt, Human
ucucuacuaaaaauacaaaaauu

SEQ ID NO: 1355134 - RNA, 20 nt, Human
ucugucagcgggaggccaua

SEQ ID NO: 1355135 - RNA, 23 nt, Human
ucuugccucuuuagacaaaguga

SEQ ID NO: 1355136 - RNA, 21 nt, Human
ucuugcuuuucuuuggcguuu

SEQ ID NO: 1355137 - RNA, 22 nt, Human
ucuuuccucuuucuuuaauucu

SEQ ID NO: 1355138 - RNA, 19 nt, Human
ugaaaccccaucucuacua

SEQ ID NO: 1355139 - RNA, 22 nt, Human
ugaaggaaggagggacuaagag

SEQ ID NO: 1355140 - RNA, 23 nt, Human
ugaagugggaggauugcuuaugc

SEQ ID NO: 1355141 - RNA, 24 nt, Human
ugaauccuuaaaaacucuuagucu

SEQ ID NO: 1355142 - RNA, 18 nt, Human
ugaaugaaagaaucccau

SEQ ID NO: 1355143 - RNA, 22 nt, Human
ugacacggugagacucccucuc

SEQ ID NO: 1355144 - RNA, 24 nt, Human
ugaccaauauggugaaaccccauc

SEQ ID NO: 1355145 - RNA, 25 nt, Human
ugaccuuaaaaaugugcuggacaua

SEQ ID NO: 1355146 - RNA, 24 nt, Human
ugagacaggagaauugcuugaacc

SEQ ID NO: 1355147 - RNA, 25 nt, Human
ugagacaggagaauugcuugaaccc

SEQ ID NO: 1355148 - RNA, 21 nt, Human
ugagagaggcagagacccugc

SEQ ID NO: 1355149 - RNA, 20 nt, Human
ugagaucauucugcaagaau

SEQ ID NO: 1355150 - RNA, 22 nt, Human
ugagccgagaucgugccacugc

SEQ ID NO: 1355151 - RNA, 23 nt, Human
ugaggcugcaguaagcuaugauc

SEQ ID NO: 1355152 - RNA, 23 nt, Human
ugcaggagcgacuguuggggugc

SEQ ID NO: 1355153 - RNA, 26 nt, Human
ugcccaccuaagccaccuaagcugua

SEQ ID NO: 1355154 - RNA, 26 nt, Human
ugcccagccacggaaccugccaagca

SEQ ID NO: 1355155 - RNA, 24 nt, Human
ugccuguagucccagcuauucggg

SEQ ID NO: 1355156 - RNA, 21 nt, Human
uggaaaaugaucuugucuccu

SEQ ID NO: 1355157 - RNA, 19 nt, Human
uggacagauguggccccac

SEQ ID NO: 1355158 - RNA, 24 nt, Human
uggaucagcugaggucaguaguuc

SEQ ID NO: 1355159 - RNA, 19 nt, Human
uggcccuccucuccaucuc

SEQ ID NO: 1355160 - RNA, 20 nt, Human
uggcggcaucauaaugggcg

SEQ ID NO: 1355161 - RNA, 24 nt, Human
uggcucacgccaguaaucccagca

SEQ ID NO: 1355162 - RNA, 24 nt, Human
uggcucagccucucugagcuccag

SEQ ID NO: 1355163 - RNA, 24 nt, Human
ugggaccuggagguugcagugagc

SEQ ID NO: 1355164 - RNA, 19 nt, Human
ugggaggccgaggagggcg

SEQ ID NO: 1355165 - RNA, 24 nt, Human
ugggaggccgaggagggcggauca

SEQ ID NO: 1355166 - RNA, 20 nt, Human
ugggaggcugagacaggaga

SEQ ID NO: 1355167 - RNA, 24 nt, Human
ugggaggcugaggcgaguggauca

SEQ ID NO: 1355168 - RNA, 21 nt, Human
ugggagggggugcugaagggc

SEQ ID NO: 1355169 - RNA, 18 nt, Human
ugggcagguagagcugca

SEQ ID NO: 1355170 - RNA, 23 nt, Human
ugggcucugggccgcuggcugca

SEQ ID NO: 1355171 - RNA, 24 nt, Human
uggggcugaauccaccuccugcuu

SEQ ID NO: 1355172 - RNA, 19 nt, Human
ugggguggugacacaugca

SEQ ID NO: 1355173 - RNA, 21 nt, Human
ugggguggugacacaugcagg

SEQ ID NO: 1355174 - RNA, 22 nt, Human
ugggguggugacacaugcagga

SEQ ID NO: 1355175 - RNA, 19 nt, Human
ugggucaguucucagccuc

SEQ ID NO: 1355176 - RNA, 21 nt, Human
uggugcugggagggggugcug

SEQ ID NO: 1355177 - RNA, 18 nt, Human
ugguggacgggaggcagu

SEQ ID NO: 1355178 - RNA, 24 nt, Human
ugguggcacgugccuguaguccca

SEQ ID NO: 1355179 - RNA, 20 nt, Human
uguaaacaugugcuaauucu

SEQ ID NO: 1355180 - RNA, 18 nt, Human
ugucucaccaagcagcaa

SEQ ID NO: 1355181 - RNA, 18 nt, Human
ugugaauagccacuucac

SEQ ID NO: 1355182 - RNA, 21 nt, Human
uguuggggugcugagcuuccc

SEQ ID NO: 1355183 - RNA, 24 nt, Human
uuagccgggcaugguggcacgugc

SEQ ID NO: 1355184 - RNA, 18 nt, Human
uucaaggaaaucacuucu

SEQ ID NO: 1355185 - RNA, 23 nt, Human
uucacccauuccacccagccacc

SEQ ID NO: 1355186 - RNA, 24 nt, Human
uucacccucauacaaugggcccca

SEQ ID NO: 1355187 - RNA, 22 nt, Human
uuccagcucccuuucuagccuc

SEQ ID NO: 1355188 - RNA, 20 nt, Human
uuccucaaacuccuuaaagc

SEQ ID NO: 1355189 - RNA, 19 nt, Human
uuccugccaaccugguaga

SEQ ID NO: 1355190 - RNA, 22 nt, Human
uuccuguuucuuuccucuuucu

SEQ ID NO: 1355191 - RNA, 24 nt, Human
uugaacccgggagguggagguugc

SEQ ID NO: 1355192 - RNA, 18 nt, Human
uugcagugagccgagauc

SEQ ID NO: 1355193 - RNA, 21 nt, Human
uugcagugagccgagaucgug

SEQ ID NO: 1355194 - RNA, 22 nt, Human
uugcagugagccgagaucgugc

SEQ ID NO: 1355195 - RNA, 23 nt, Human
uugcagugagccgagaucgugcc

SEQ ID NO: 1355196 - RNA, 24 nt, Human
uugcuugaacccgggagguggagg

SEQ ID NO: 1355197 - RNA, 27 nt, Human
uugggaagggugcuagaaugggugaca

SEQ ID NO: 1355198 - RNA, 25 nt, Human
uugggaggccgaggagggcggauca

SEQ ID NO: 1355199 - RNA, 23 nt, Human
uugggaggcugagacaggagaau

SEQ ID NO: 1355200 - RNA, 25 nt, Human
uugggaggcugaggcgaguggauca

SEQ ID NO: 1355201 - RNA, 18 nt, Human
uuuaaccugggaccugga

SEQ ID NO: 1355202 - RNA, 21 nt, Human
uuuaaccugggaccuggaggu

SEQ ID NO: 1355203 - RNA, 18 nt, Human
uuuagaaaaacaaagcug

SEQ ID NO: 1355204 - RNA, 18 nt, Human
uuuccuguuucuuuccuc

SEQ ID NO: 1355205 - RNA, 20 nt, Human
uuucuugcuuuucuuuggcg

SEQ ID NO: 1355206 - RNA, 20 nt, Human
uuuguguuguagaguaaauu

SEQ ID NO: 1355207 - RNA, 21 nt, Human
aagacccagauuaugccucuc

SEQ ID NO: 1355208 - RNA, 20 nt, Human
acagcagcagagaggguugg

SEQ ID NO: 1355209 - RNA, 23 nt, Human
accacacccagugugggcugcag

SEQ ID NO: 1355210 - RNA, 24 nt, Human
acccagugugggcugcagcggggc

SEQ ID NO: 1355211 - RNA, 20 nt, Human
agccaccccgggcugagggc

SEQ ID NO: 1355212 - RNA, 21 nt, Human
agccagugagggccccggggc

SEQ ID NO: 1355213 - RNA, 20 nt, Human
aggcuuccugggggaagagg

SEQ ID NO: 1355214 - RNA, 18 nt, Human
agggugggggacaggggc

SEQ ID NO: 1355215 - RNA, 19 nt, Human
aucucagccaccccgggcu

SEQ ID NO: 1355216 - RNA, 22 nt, Human
caccacacccagugugggcugc

SEQ ID NO: 1355217 - RNA, 22 nt, Human
caccacggaccagaccuggcuc

SEQ ID NO: 1355218 - RNA, 23 nt, Human
caccccgggcugagggcugaaac

SEQ ID NO: 1355219 - RNA, 20 nt, Human
caggccuccaggccccaucu

SEQ ID NO: 1355220 - RNA, 23 nt, Human
cagugagggccccggggcugggc

SEQ ID NO: 1355221 - RNA, 19 nt, Human
ccaggccucggccuuccag

SEQ ID NO: 1355222 - RNA, 23 nt, Human
cccacagucaacaccagcggguu

SEQ ID NO: 1355223 - RNA, 18 nt, Human
ccccugcugggugcgggg

SEQ ID NO: 1355224 - RNA, 19 nt, Human
ccccuuccuccaggccucc

SEQ ID NO: 1355225 - RNA, 19 nt, Human
cccgggcugagggcugaaa

SEQ ID NO: 1355226 - RNA, 26 nt, Human
ccucaagacccagauuaugccucucc

SEQ ID NO: 1355227 - RNA, 20 nt, Human
ccuccaggccccaucucucc

SEQ ID NO: 1355228 - RNA, 20 nt, Human
ccuccaggccucggccuucc

SEQ ID NO: 1355229 - RNA, 23 nt, Human
ccuccaguucuacucaguccacu

SEQ ID NO: 1355230 - RNA, 18 nt, Human
ccucucccaccuccccca

SEQ ID NO: 1355231 - RNA, 20 nt, Human
ccugcaccucccucucccuu

SEQ ID NO: 1355232 - RNA, 19 nt, Human
ccuuccagccaaggaugag

SEQ ID NO: 1355233 - RNA, 22 nt, Human
ccuuccagccaaggaugagggc

SEQ ID NO: 1355234 - RNA, 23 nt, Human
cucccuuuguccuucuuuccacc

SEQ ID NO: 1355235 - RNA, 19 nt, Human
cuggagccagugagggccc

SEQ ID NO: 1355236 - RNA, 20 nt, Human
cuuuguccuucuuuccaccu

SEQ ID NO: 1355237 - RNA, 23 nt, Human
cuuuguccuucuuuccaccucug

SEQ ID NO: 1355238 - RNA, 19 nt, Human
gacaggcucccacugggcc

SEQ ID NO: 1355239 - RNA, 19 nt, Human
gaccuggcucaagucauag

SEQ ID NO: 1355240 - RNA, 22 nt, Human
gacuccuguccuccaguucuac

SEQ ID NO: 1355241 - RNA, 19 nt, Human
gagcgaccugcaccucccu

SEQ ID NO: 1355242 - RNA, 21 nt, Human
gagggccaugggagggucagg

SEQ ID NO: 1355243 - RNA, 18 nt, Human
gccaaggaugagggcacc

SEQ ID NO: 1355244 - RNA, 24 nt, Human
gccgggugggaguccuggagaggg

SEQ ID NO: 1355245 - RNA, 20 nt, Human
ggaccagaccuggcucaagu

SEQ ID NO: 1355246 - RNA, 21 nt, Human
ggagaggcuggacugcccaca

SEQ ID NO: 1355247 - RNA, 18 nt, Human
ggaggggccaucugcagg

SEQ ID NO: 1355248 - RNA, 22 nt, Human
ggcacagaggccuggggcacca

SEQ ID NO: 1355249 - RNA, 23 nt, Human
ggccauggaaacagcagcagaga

SEQ ID NO: 1355250 - RNA, 19 nt, Human
ggccgggugugugaggagu

SEQ ID NO: 1355251 - RNA, 26 nt, Human
ggccucaggugacuuuauauggccuc

SEQ ID NO: 1355252 - RNA, 23 nt, Human
ggccuggccccuuccuccaggcc

SEQ ID NO: 1355253 - RNA, 26 nt, Human
gggccaugggagggucaggguggggg

SEQ ID NO: 1355254 - RNA, 19 nt, Human
gggccgggugugugaggag

SEQ ID NO: 1355255 - RNA, 20 nt, Human
gggcugcagcggggcccccc

SEQ ID NO: 1355256 - RNA, 18 nt, Human
gggcugggcagguccgag

SEQ ID NO: 1355257 - RNA, 22 nt, Human
gggucagggugggggacagggg

SEQ ID NO: 1355258 - RNA, 19 nt, Human
ggugggaguccuggagagg

SEQ ID NO: 1355259 - RNA, 22 nt, Human
uaccgggcccuccugagugccu

SEQ ID NO: 1355260 - RNA, 22 nt, Human
ucaaauggggagaggcuggacu

SEQ ID NO: 1355261 - RNA, 22 nt, Human
uccaggccccaucucuggagac

SEQ ID NO: 1355262 - RNA, 24 nt, Human
uccaggccccaucucuggagacuu

SEQ ID NO: 1355263 - RNA, 23 nt, Human
uccaggccuccaggccccaucuc

SEQ ID NO: 1355264 - RNA, 25 nt, Human
ucccugagcgaccugcaccucccuc

SEQ ID NO: 1355265 - RNA, 19 nt, Human
ucccugggcccugugcucc

SEQ ID NO: 1355266 - RNA, 21 nt, Human
uccuggagccagugagggccc

SEQ ID NO: 1355267 - RNA, 18 nt, Human
uccugggggaagaggugc

SEQ ID NO: 1355268 - RNA, 23 nt, Human
uccugggggaagaggugccugag

SEQ ID NO: 1355269 - RNA, 19 nt, Human
uccuucuuuccaccucugg

SEQ ID NO: 1355270 - RNA, 21 nt, Human
uccuucuuuccaccucuggag

SEQ ID NO: 1355271 - RNA, 19 nt, Human
ucucagccaccccgggcug

SEQ ID NO: 1355272 - RNA, 20 nt, Human
ucucagccaccccgggcuga

SEQ ID NO: 1355273 - RNA, 26 nt, Human
ucuccagacuccuccaggccucggcc

SEQ ID NO: 1355274 - RNA, 21 nt, Human
ucucccaccucccccaccuca

SEQ ID NO: 1355275 - RNA, 25 nt, Human
ucucccuuuguccuucuuuccaccu

SEQ ID NO: 1355276 - RNA, 19 nt, Human
ugaaacguccucaagaccc

SEQ ID NO: 1355277 - RNA, 22 nt, Human
ugaaacguccucaagacccaga

SEQ ID NO: 1355278 - RNA, 18 nt, Human
ugagggccccggggcugg

SEQ ID NO: 1355279 - RNA, 25 nt, Human
ugccucucccaccucccccaccuca

SEQ ID NO: 1355280 - RNA, 22 nt, Human
uggccccuuccuccaggccucc

SEQ ID NO: 1355281 - RNA, 23 nt, Human
uggccccuuccuccaggccucca

SEQ ID NO: 1355282 - RNA, 19 nt, Human
ugggccauggaaacagcag

SEQ ID NO: 1355283 - RNA, 20 nt, Human
uggggagaggcuggacugcc

SEQ ID NO: 1355284 - RNA, 18 nt, Human
ugggggacaggggcgcag

SEQ ID NO: 1355285 - RNA, 22 nt, Human
ugggugcgggggacaccacgga

SEQ ID NO: 1355286 - RNA, 22 nt, Human
uuggaggggccaucugcaggcg

SEQ ID NO: 1355287 - RNA, 18 nt, Human
uuguccuucuuuccaccu

SEQ ID NO: 1355288 - RNA, 19 nt, Human
aaagaagaguaguacaaua

SEQ ID NO: 1355289 - RNA, 19 nt, Human
aaaggagacaaauuuauga

SEQ ID NO: 1355290 - RNA, 20 nt, Human
aauucagaauuuucagaagu

SEQ ID NO: 1355291 - RNA, 19 nt, Human
acaacucuggagauuugcc

SEQ ID NO: 1355292 - RNA, 19 nt, Human
acacccccuuaccccaccc

SEQ ID NO: 1355293 - RNA, 20 nt, Human
acccccuuaccccacccauc

SEQ ID NO: 1355294 - RNA, 19 nt, Human
aguguagauuggugaagau

SEQ ID NO: 1355295 - RNA, 26 nt, Human
auucagaauuuucagaagucauauuu

SEQ ID NO: 1355296 - RNA, 21 nt, Human
caagcaguggacauacacccu

SEQ ID NO: 1355297 - RNA, 25 nt, Human
cacacacccccuuacccccccugag

SEQ ID NO: 1355298 - RNA, 19 nt, Human
cacccccuuaccccaccca

SEQ ID NO: 1355299 - RNA, 22 nt, Human
cacccccuuaccccacccaucu

SEQ ID NO: 1355300 - RNA, 23 nt, Human
cacccccuuaccccacccaucuu

SEQ ID NO: 1355301 - RNA, 21 nt, Human
cagggaaaacggaguaaggga

SEQ ID NO: 1355302 - RNA, 25 nt, Human
cagguaaauggcucuugaaaggaca

SEQ ID NO: 1355303 - RNA, 21 nt, Human
caugguguuccuuggcugagc

SEQ ID NO: 1355304 - RNA, 23 nt, Human
cauuacacuugggguuacagacu

SEQ ID NO: 1355305 - RNA, 23 nt, Human
cauuccuaggugguagcaggaca

SEQ ID NO: 1355306 - RNA, 21 nt, Human
ccaaauguuuguguucucagg

SEQ ID NO: 1355307 - RNA, 18 nt, Human
ccagugucuguuaccauc

SEQ ID NO: 1355308 - RNA, 21 nt, Human
ccccaguaccauaauuaccuc

SEQ ID NO: 1355309 - RNA, 21 nt, Human
cuuagggaaguugcagggaaa

SEQ ID NO: 1355310 - RNA, 19 nt, Human
gaaaaaaaauugaagugga

SEQ ID NO: 1355311 - RNA, 18 nt, Human
gaguuucuagaaaaaucc

SEQ ID NO: 1355312 - RNA, 21 nt, Human
gcuuuucuucucuguguguga

SEQ ID NO: 1355313 - RNA, 20 nt, Human
ggcucuugaaaggacaguuu

SEQ ID NO: 1355314 - RNA, 24 nt, Human
gggaaaacggaguaagggaaaugg

SEQ ID NO: 1355315 - RNA, 19 nt, Human
gggucuguauagccaacug

SEQ ID NO: 1355316 - RNA, 19 nt, Human
gguuacagacuccaguguc

SEQ ID NO: 1355317 - RNA, 19 nt, Human
guaagaguccaauuucuuu

SEQ ID NO: 1355318 - RNA, 24 nt, Human
guguucucagggaacacagcacau

SEQ ID NO: 1355319 - RNA, 24 nt, Human
uaaccugguggagaacccgucgca

SEQ ID NO: 1355320 - RNA, 18 nt, Human
uaagcuaauuuucuggcu

SEQ ID NO: 1355321 - RNA, 22 nt, Human
uaccccacccaucuucaagcug

SEQ ID NO: 1355322 - RNA, 19 nt, Human
uauaguguagauuggugaa

SEQ ID NO: 1355323 - RNA, 19 nt, Human
ucaaaaacuugauuuugaa

SEQ ID NO: 1355324 - RNA, 26 nt, Human
uccagguaaauggcucuugaaaggac

SEQ ID NO: 1355325 - RNA, 19 nt, Human
ucucugugugugaugagug

SEQ ID NO: 1355326 - RNA, 21 nt, Human
ugaaaaaaaauugaaguggaa

SEQ ID NO: 1355327 - RNA, 22 nt, Human
ugaaaggacaguuucuagaaaa

SEQ ID NO: 1355328 - RNA, 19 nt, Human
uggcauaaagaagaguagu

SEQ ID NO: 1355329 - RNA, 19 nt, Human
uggcugagcaccaugaccu

SEQ ID NO: 1355330 - RNA, 24 nt, Human
ugggccaagaauucaagccuaagu

SEQ ID NO: 1355331 - RNA, 21 nt, Human
ugugaugaguguuuuucuugg

SEQ ID NO: 1355332 - RNA, 19 nt, Human
uucaugcagaagugagaga

SEQ ID NO: 1355333 - RNA, 23 nt, Human
uucucugugugugaugaguguuu

SEQ ID NO: 1355334 - RNA, 19 nt, Human
uuggugacuucaugcagaa

SEQ ID NO: 1355335 - RNA, 21 nt, Human
aagcggcuccuuuucuccccu

SEQ ID NO: 1355336 - RNA, 22 nt, Human
aaggaggaaagcccccgcagug

SEQ ID NO: 1355337 - RNA, 22 nt, Human
agcaaccaacaaggaggaaagc

SEQ ID NO: 1355338 - RNA, 20 nt, Human
cagcaccaggggcuacgaga

SEQ ID NO: 1355339 - RNA, 20 nt, Human
ccacaguggcaggucccagg

SEQ ID NO: 1355340 - RNA, 18 nt, Human
ccagggaugggcacaggg

SEQ ID NO: 1355341 - RNA, 19 nt, Human
ccaggggcuacgagaggag

SEQ ID NO: 1355342 - RNA, 24 nt, Human
cccacucagcaaccaacaaggagg

SEQ ID NO: 1355343 - RNA, 21 nt, Human
cccccaugcagucagcaccag

SEQ ID NO: 1355344 - RNA, 18 nt, Human
cccgcagugcucggccag

SEQ ID NO: 1355345 - RNA, 19 nt, Human
cccgcgcgcgguccacgug

SEQ ID NO: 1355346 - RNA, 19 nt, Human
ccgcgccaucgccaccagg

SEQ ID NO: 1355347 - RNA, 22 nt, Human
ccuuuucuccccuuggccgccc

SEQ ID NO: 1355348 - RNA, 19 nt, Human
cgccaccagggagcgcccc

SEQ ID NO: 1355349 - RNA, 18 nt, Human
cggccagugccgcgccau

SEQ ID NO: 1355350 - RNA, 25 nt, Human
cuccagcgccagcccccaugcaguc

SEQ ID NO: 1355351 - RNA, 20 nt, Human
gauccugcgugaggcugaag

SEQ ID NO: 1355352 - RNA, 23 nt, Human
gcaaccaacaaggaggaaagccc

SEQ ID NO: 1355353 - RNA, 22 nt, Human
gcggcgcggggaggagccgcac

SEQ ID NO: 1355354 - RNA, 18 nt, Human
gggcacaggggugguaga

SEQ ID NO: 1355355 - RNA, 24 nt, Human
ggggaggagccgcacgccacagug

SEQ ID NO: 1355356 - RNA, 18 nt, Human
ucaggggugagggaaggg

SEQ ID NO: 1355357 - RNA, 21 nt, Human
uggcaagggaggcagaagcgg

SEQ ID NO: 1355358 - RNA, 24 nt, Human
uggcaagggaggcagaagcggcuc

SEQ ID NO: 1355359 - RNA, 21 nt, Human
aaagauguauauucugaugcc

SEQ ID NO: 1355360 - RNA, 20 nt, Human
aaaggauuucccacacagau

SEQ ID NO: 1355361 - RNA, 25 nt, Human
aaaggcuuugccacauucaugacau

SEQ ID NO: 1355362 - RNA, 21 nt, Human
aaccauuauuaccugucuucu

SEQ ID NO: 1355363 - RNA, 22 nt, Human
aagacgcuuuaaaggcuuugcc

SEQ ID NO: 1355364 - RNA, 18 nt, Human
aagccucugacacauaca

SEQ ID NO: 1355365 - RNA, 24 nt, Human
aagucacuauugccaggacagcac

SEQ ID NO: 1355366 - RNA, 23 nt, Human
aaucaccucccaaugggccccac

SEQ ID NO: 1355367 - RNA, 23 nt, Human
aauuuuuucugaagaucuugcca

SEQ ID NO: 1355368 - RNA, 19 nt, Human
acaaauaaaagauuuccca

SEQ ID NO: 1355369 - RNA, 20 nt, Human
acauuuauaugguuucuuuc

SEQ ID NO: 1355370 - RNA, 20 nt, Human
acauuuauaugguuucuuuc

SEQ ID NO: 1355371 - RNA, 19 nt, Human
acucuuuccauuuugaugu

SEQ ID NO: 1355372 - RNA, 27 nt, Human
agaauucuugccacacguauuacacuu

SEQ ID NO: 1355373 - RNA, 24 nt, Human
aggguuucuguccagugugacucc

SEQ ID NO: 1355374 - RNA, 26 nt, Human
aggguuucuguccagugugacuccuu

SEQ ID NO: 1355375 - RNA, 19 nt, Human
agugaauacuagcuuaaaa

SEQ ID NO: 1355376 - RNA, 23 nt, Human
auaaagucucccuucaguuugaa

SEQ ID NO: 1355377 - RNA, 30 nt, Human
aucacauuuauaugguuucuuuccugcauu

SEQ ID NO: 1355378 - RNA, 22 nt, Human
auuacaauuccacagggauuuc

SEQ ID NO: 1355379 - RNA, 18 nt, Human
auucauaaagucucccuu

SEQ ID NO: 1355380 - RNA, 18 nt, Human
caauacuggagauuacaa

SEQ ID NO: 1355381 - RNA, 22 nt, Human
caauacuggagauuacaauucc

SEQ ID NO: 1355382 - RNA, 21 nt, Human
cacauacaucacauugauaug

SEQ ID NO: 1355383 - RNA, 22 nt, Human
cagccagaccucaagagaaguc

SEQ ID NO: 1355384 - RNA, 20 nt, Human
cauucauuacauauguaggg

SEQ ID NO: 1355385 - RNA, 23 nt, Human
cauucauuacauauguaggguug

SEQ ID NO: 1355386 - RNA, 24 nt, Human
cauuucauacaucuaugcccuuuu

SEQ ID NO: 1355387 - RNA, 20 nt, Human
ccaaugggccccaccuccaa

SEQ ID NO: 1355388 - RNA, 22 nt, Human
ccacacucauuacauuugaagg

SEQ ID NO: 1355389 - RNA, 24 nt, Human
ccacagggauuucaagagaagggg

SEQ ID NO: 1355390 - RNA, 24 nt, Human
ccacuuccaugauucaaucaccuc

SEQ ID NO: 1355391 - RNA, 25 nt, Human
ccucugaugauuaauaaggcuggaa

SEQ ID NO: 1355392 - RNA, 24 nt, Human
cucuaguaugaauacucuuuccau

SEQ ID NO: 1355393 - RNA, 18 nt, Human
cuguccagugugacuccu

SEQ ID NO: 1355394 - RNA, 21 nt, Human
cuucuaaacagccagaccuca

SEQ ID NO: 1355395 - RNA, 19 nt, Human
gaacucuaguaaagguuuu

SEQ ID NO: 1355396 - RNA, 21 nt, Human
gaauacucuuuccauuuugau

SEQ ID NO: 1355397 - RNA, 19 nt, Human
gacuaaaggaauucccaca

SEQ ID NO: 1355398 - RNA, 19 nt, Human
gccugagcgacaaauaaaa

SEQ ID NO: 1355399 - RNA, 21 nt, Human
ggaaaacaaccgcccaaaggc

SEQ ID NO: 1355400 - RNA, 25 nt, Human
ggaaaacaaccgcccaaaggcuuug

SEQ ID NO: 1355401 - RNA, 18 nt, Human
ggacaacgucuaaggccu

SEQ ID NO: 1355402 - RNA, 20 nt, Human
gggccccaccuccaauacug

SEQ ID NO: 1355403 - RNA, 18 nt, Human
uaaaaaccuuagcaugca

SEQ ID NO: 1355404 - RNA, 19 nt, Human
uaaaggauuucccacacag

SEQ ID NO: 1355405 - RNA, 21 nt, Human
uaagauggacacgcugacuaa

SEQ ID NO: 1355406 - RNA, 21 nt, Human
uaagauggacacgcugacuaa

SEQ ID NO: 1355407 - RNA, 21 nt, Human
uaauuaccuagauuuacaagu

SEQ ID NO: 1355408 - RNA, 22 nt, Human
uagugaguuccaaugccugggg

SEQ ID NO: 1355409 - RNA, 24 nt, Human
uauacauccuggaauauauauaca

SEQ ID NO: 1355410 - RNA, 19 nt, Human
uauaugauuuccuuucagu

SEQ ID NO: 1355411 - RNA, 20 nt, Human
uaugaauuuuuucugaagau

SEQ ID NO: 1355412 - RNA, 18 nt, Human
uauuguuucucuccacug

SEQ ID NO: 1355413 - RNA, 22 nt, Human
ucacauggugagaaugagggca

SEQ ID NO: 1355414 - RNA, 18 nt, Human
ucagccagacgugacuca

SEQ ID NO: 1355415 - RNA, 23 nt, Human
ucccaaugggccccaccuccaau

SEQ ID NO: 1355416 - RNA, 20 nt, Human
ucuaagauggacacgcugac

SEQ ID NO: 1355417 - RNA, 20 nt, Human
ucuaagauggacacgcugac

SEQ ID NO: 1355418 - RNA, 22 nt, Human
ucuccaguaugaacugucugau

SEQ ID NO: 1355419 - RNA, 20 nt, Human
ucucuccaguaugaacuguc

SEQ ID NO: 1355420 - RNA, 18 nt, Human
ucucuuaugacaaguagu

SEQ ID NO: 1355421 - RNA, 20 nt, Human
ucuguccagugugacuccuu

SEQ ID NO: 1355422 - RNA, 18 nt, Human
ugacacauacauuuauau

SEQ ID NO: 1355423 - RNA, 20 nt, Human
ugacuaaaggauuucccaca

SEQ ID NO: 1355424 - RNA, 19 nt, Human
ugacuauguugaucucuuu

SEQ ID NO: 1355425 - RNA, 21 nt, Human
ugacuuacaagaugugaacua

SEQ ID NO: 1355426 - RNA, 18 nt, Human
ugaguguggagcccugau

SEQ ID NO: 1355427 - RNA, 23 nt, Human
ugaugaacugcaaggugggaacu

SEQ ID NO: 1355428 - RNA, 22 nt, Human
ugaugaagucuaagauggacac

SEQ ID NO: 1355429 - RNA, 19 nt, Human
ugauuguuuucuacauccc

SEQ ID NO: 1355430 - RNA, 19 nt, Human
ugcaagguuucucuacagu

SEQ ID NO: 1355431 - RNA, 24 nt, Human
ugccacauacaucacauuuauaug

SEQ ID NO: 1355432 - RNA, 22 nt, Human
ugccacauucauuacauaugua

SEQ ID NO: 1355433 - RNA, 22 nt, Human
ugccaggacagcaccaagggga

SEQ ID NO: 1355434 - RNA, 24 nt, Human
uggaagacgcuuuaaaggcuuugc

SEQ ID NO: 1355435 - RNA, 20 nt, Human
ugguggaaggcaaagcgggu

SEQ ID NO: 1355436 - RNA, 18 nt, Human
uguaagguuucucuccgg

SEQ ID NO: 1355437 - RNA, 24 nt, Human
uguauacauccuggaauauauaua

SEQ ID NO: 1355438 - RNA, 22 nt, Human
uguauuguuucucuccacugug

SEQ ID NO: 1355439 - RNA, 18 nt, Human
ugucuauugaguguggag

SEQ ID NO: 1355440 - RNA, 27 nt, Human
ugucuuacaaaauaugaauuuuuucug

SEQ ID NO: 1355441 - RNA, 20 nt, Human
uguggagaaacuaaacaacc

SEQ ID NO: 1355442 - RNA, 21 nt, Human
uguggagaaacuaaacaacca

SEQ ID NO: 1355443 - RNA, 21 nt, Human
uuaaaggcuuugccacauuca

SEQ ID NO: 1355444 - RNA, 22 nt, Human
uuaguagugaggcccgaugaaa

SEQ ID NO: 1355445 - RNA, 19 nt, Human
uuccaugauucaaucaccu

SEQ ID NO: 1355446 - RNA, 21 nt, Human
uucccacacucauuacauuua

SEQ ID NO: 1355447 - RNA, 25 nt, Human
uucucuguaguauguauccucugau

SEQ ID NO: 1355448 - RNA, 23 nt, Human
uuguauuguuucucuccacugug

SEQ ID NO: 1355449 - RNA, 19 nt, Human
uuuacugaagaccuugcca

SEQ ID NO: 1355450 - RNA, 19 nt, Human
uuuguaugguuucucucca

SEQ ID NO: 1355451 - RNA, 23 nt, Human
aaacuccugggcuugagcaaucc

SEQ ID NO: 1355452 - RNA, 19 nt, Human
aaagugcuaggauuacagg

SEQ ID NO: 1355453 - RNA, 24 nt, Human
aaagugcuaggauuacagguguga

SEQ ID NO: 1355454 - RNA, 26 nt, Human
aagugcuaggauuacaggugugagcc

SEQ ID NO: 1355455 - RNA, 21 nt, Human
acagacacaugccaagggccu

SEQ ID NO: 1355456 - RNA, 21 nt, Human
acagugaaaggccuguaggga

SEQ ID NO: 1355457 - RNA, 21 nt, Human
acaugagaaaauccaacaguu

SEQ ID NO: 1355458 - RNA, 23 nt, Human
accacugccccuggccuuucaaa

SEQ ID NO: 1355459 - RNA, 25 nt, Human
acccuccugucuuggcuuucuauug

SEQ ID NO: 1355460 - RNA, 19 nt, Human
acuagccuuuuuuuucuuu

SEQ ID NO: 1355461 - RNA, 22 nt, Human
agaguacuuuuuaaucagucuu

SEQ ID NO: 1355462 - RNA, 22 nt, Human
agauuauaggcaugaaccacug

SEQ ID NO: 1355463 - RNA, 20 nt, Human
agcaauccucuugccucggc

SEQ ID NO: 1355464 - RNA, 24 nt, Human
agcuauugcuauucaauggagacg

SEQ ID NO: 1355465 - RNA, 25 nt, Human
agguuggagugcaguggcgcgaucu

SEQ ID NO: 1355466 - RNA, 23 nt, Human
aguagcugggauugcaggcaugu

SEQ ID NO: 1355467 - RNA, 21 nt, Human
agugcaguggcgcgaucucag

SEQ ID NO: 1355468 - RNA, 23 nt, Human
agugcaguggcgcgaucucagcu

SEQ ID NO: 1355469 - RNA, 24 nt, Human
agugcaguggcgcgaucucagcuc

SEQ ID NO: 1355470 - RNA, 20 nt, Human
augguguuucaccauauugg

SEQ ID NO: 1355471 - RNA, 21 nt, Human
auucuccugccucagccuccc

SEQ ID NO: 1355472 - RNA, 24 nt, Human
auuuaacuguucucucuuccauuu

SEQ ID NO: 1355473 - RNA, 23 nt, Human
caaacuccugaccuugugaucca

SEQ ID NO: 1355474 - RNA, 24 nt, Human
caaagugcuaggauuacaggugug

SEQ ID NO: 1355475 - RNA, 21 nt, Human
caacaguugcaaauuaugcca

SEQ ID NO: 1355476 - RNA, 22 nt, Human
caagcaauucuccugccucagc

SEQ ID NO: 1355477 - RNA, 22 nt, Human
caagugacccuccugucuuggc

SEQ ID NO: 1355478 - RNA, 27 nt, Human
caagugacccuccugucuuggcuuucu

SEQ ID NO: 1355479 - RNA, 21 nt, Human
cacacaauccauuuguguggu

SEQ ID NO: 1355480 - RNA, 20 nt, Human
cacaggguccaggcauuucc

SEQ ID NO: 1355481 - RNA, 21 nt, Human
caccauauuggccaggcuggu

SEQ ID NO: 1355482 - RNA, 24 nt, Human
caccauauuggccaggcuggucuc

SEQ ID NO: 1355483 - RNA, 27 nt, Human
caccauauuggccaggcuggucucaaa

SEQ ID NO: 1355484 - RNA, 24 nt, Human
cacccagguuggagugcaguggcg

SEQ ID NO: 1355485 - RNA, 23 nt, Human
caccugccucaaccucccaaagu

SEQ ID NO: 1355486 - RNA, 18 nt, Human
cagcagcacugugccugu

SEQ ID NO: 1355487 - RNA, 21 nt, Human
cagcagcacugugccugucag

SEQ ID NO: 1355488 - RNA, 20 nt, Human
caggaaaagugugugcuaac

SEQ ID NO: 1355489 - RNA, 20 nt, Human
caggcaugugccaccacgcc

SEQ ID NO: 1355490 - RNA, 23 nt, Human
cagucccugaugaacucucuucc

SEQ ID NO: 1355491 - RNA, 20 nt, Human
cagucuuugcuaaacagcag

SEQ ID NO: 1355492 - RNA, 24 nt, Human
cauauuggccaggcuggucucaaa

SEQ ID NO: 1355493 - RNA, 23 nt, Human
caugaaccacugccccuggccuu

SEQ ID NO: 1355494 - RNA, 23 nt, Human
caugaaccacugccccuggccuu

SEQ ID NO: 1355495 - RNA, 21 nt, Human
ccaaagugcuaggauuacagg

SEQ ID NO: 1355496 - RNA, 24 nt, Human
ccaaagugcuaggauuacaggugu

SEQ ID NO: 1355497 - RNA, 20 nt, Human
ccaccacgccuggcuaauuu

SEQ ID NO: 1355498 - RNA, 26 nt, Human
ccaccugccucaaccucccaaagugc

SEQ ID NO: 1355499 - RNA, 23 nt, Human
ccacugcgcccagccaauuacau

SEQ ID NO: 1355500 - RNA, 19 nt, Human
ccccuggccuuucaaaccc

SEQ ID NO: 1355501 - RNA, 23 nt, Human
cccgaguagcugggauugcaggc

SEQ ID NO: 1355502 - RNA, 24 nt, Human
cccgaguagcugggauugcaggca

SEQ ID NO: 1355503 - RNA, 19 nt, Human
cccugaugaacucucuucc

SEQ ID NO: 1355504 - RNA, 24 nt, Human
ccgaguagcugggauugcaggcau

SEQ ID NO: 1355505 - RNA, 24 nt, Human
ccuccuggauucaagcaauucucc

SEQ ID NO: 1355506 - RNA, 19 nt, Human
ccugaccuugugauccacc

SEQ ID NO: 1355507 - RNA, 21 nt, Human
ccugaccuugugauccaccug

SEQ ID NO: 1355508 - RNA, 23 nt, Human
ccuggauucaagcaauucuccug

SEQ ID NO: 1355509 - RNA, 21 nt, Human
ccuuggcacacacaauccauu

SEQ ID NO: 1355510 - RNA, 24 nt, Human
cgcucugucacccagguuggagug

SEQ ID NO: 1355511 - RNA, 25 nt, Human
cuaaagucauggcgugcucuauuuc

SEQ ID NO: 1355512 - RNA, 20 nt, Human
cuacucaagaacauguucca

SEQ ID NO: 1355513 - RNA, 19 nt, Human
cuagugauuugguaggucu

SEQ ID NO: 1355514 - RNA, 27 nt, Human
cucacugcaacaaccucugccuccugg

SEQ ID NO: 1355515 - RNA, 23 nt, Human
cucagccucccgaguagcuggga

SEQ ID NO: 1355516 - RNA, 24 nt, Human
cuccugaccuugugauccaccugc

SEQ ID NO: 1355517 - RNA, 22 nt, Human
cuccugccucagccucccgagu

SEQ ID NO: 1355518 - RNA, 23 nt, Human
cuccugggcuugagcaauccucu

SEQ ID NO: 1355519 - RNA, 24 nt, Human
cucgcucugucacccaagcuggag

SEQ ID NO: 1355520 - RNA, 24 nt, Human
cucgcucugucacccagguuggag

SEQ ID NO: 1355521 - RNA, 26 nt, Human
cucugauuuaacuguucucucuucca

SEQ ID NO: 1355522 - RNA, 24 nt, Human
cugcaacaaccucugccuccugga

SEQ ID NO: 1355523 - RNA, 18 nt, Human
cugcaucgucucuccuac

SEQ ID NO: 1355524 - RNA, 19 nt, Human
cugcaucgucucuccuacg

SEQ ID NO: 1355525 - RNA, 24 nt, Human
cugccucaaccucccaaagugcua

SEQ ID NO: 1355526 - RNA, 23 nt, Human
cugccucagccucccgaguagcu

SEQ ID NO: 1355527 - RNA, 19 nt, Human
cugcgcccagccaauuaca

SEQ ID NO: 1355528 - RNA, 22 nt, Human
gaccuugugauccaccugccuc

SEQ ID NO: 1355529 - RNA, 23 nt, Human
gaccuugugauccaccugccuca

SEQ ID NO: 1355530 - RNA, 25 nt, Human
gagcaauccucuugccucggccucu

SEQ ID NO: 1355531 - RNA, 26 nt, Human
gaguagcuggaacuacagacacaugc

SEQ ID NO: 1355532 - RNA, 18 nt, Human
gauuacaggugugagcca

SEQ ID NO: 1355533 - RNA, 22 nt, Human
gauuacaggugugagccacugc

SEQ ID NO: 1355534 - RNA, 22 nt, Human
gauuacaggugugagccacugc

SEQ ID NO: 1355535 - RNA, 18 nt, Human
gauugcaggcaugugcca

SEQ ID NO: 1355536 - RNA, 23 nt, Human
gccucaaccucccaaagugcuag

SEQ ID NO: 1355537 - RNA, 20 nt, Human
gccucagccucccgaguagc

SEQ ID NO: 1355538 - RNA, 20 nt, Human
gccucggccucuugaguagc

SEQ ID NO: 1355539 - RNA, 21 nt, Human
gccucggccucuugaguagcu

SEQ ID NO: 1355540 - RNA, 25 nt, Human
gcucugucacccaagcuggaguaca

SEQ ID NO: 1355541 - RNA, 19 nt, Human
gcucugucacccagguugg

SEQ ID NO: 1355542 - RNA, 24 nt, Human
gcuggaguacaaauggcaagauca

SEQ ID NO: 1355543 - RNA, 22 nt, Human
ggauuacaggugugagccacug

SEQ ID NO: 1355544 - RNA, 23 nt, Human
ggcuggucucaaacuccugaccu

SEQ ID NO: 1355545 - RNA, 20 nt, Human
ggucucaaacuccugaccuu

SEQ ID NO: 1355546 - RNA, 21 nt, Human
ggucucuaaaucagacaaucu

SEQ ID NO: 1355547 - RNA, 22 nt, Human
gguguuucaccauauuggccag

SEQ ID NO: 1355548 - RNA, 24 nt, Human
guagagcacagcagcacugugccu

SEQ ID NO: 1355549 - RNA, 20 nt, Human
guagcugggauugcaggcau

SEQ ID NO: 1355550 - RNA, 22 nt, Human
gucuuggcuuucuauugugcug

SEQ ID NO: 1355551 - RNA, 24 nt, Human
gugauccaccugccucaaccuccc

SEQ ID NO: 1355552 - RNA, 18 nt, Human
gugcugagauuauaggca

SEQ ID NO: 1355553 - RNA, 19 nt, Human
gugcugagauuauaggcau

SEQ ID NO: 1355554 - RNA, 21 nt, Human
guugauuacugcuagaacuua

SEQ ID NO: 1355555 - RNA, 20 nt, Human
uacagacacaugccaagggc

SEQ ID NO: 1355556 - RNA, 19 nt, Human
uacaggugugagccacugc

SEQ ID NO: 1355557 - RNA, 24 nt, Human
uacaggugugagccacugcgccca

SEQ ID NO: 1355558 - RNA, 24 nt, Human
uagaaacgcuccucaucuaaugaa

SEQ ID NO: 1355559 - RNA, 18 nt, Human
uagagcacagcagcacug

SEQ ID NO: 1355560 - RNA, 28 nt, Human
uagccuuuuuuuucuuuugagacagggu

SEQ ID NO: 1355561 - RNA, 19 nt, Human
uaggauuacaggugugagc

SEQ ID NO: 1355562 - RNA, 21 nt, Human
uaggauuacaggugugagcca

SEQ ID NO: 1355563 - RNA, 22 nt, Human
uaggauuacaggugugagccac

SEQ ID NO: 1355564 - RNA, 22 nt, Human
uaggauuacaggugugagccac

SEQ ID NO: 1355565 - RNA, 24 nt, Human
uaggauuacaggugugagccacug

SEQ ID NO: 1355566 - RNA, 18 nt, Human
uaggcaugaaccacugcc

SEQ ID NO: 1355567 - RNA, 24 nt, Human
uaguagauaugguguuucaccaua

SEQ ID NO: 1355568 - RNA, 18 nt, Human
uaguauagacucucggau

SEQ ID NO: 1355569 - RNA, 19 nt, Human
uauuuugacuuguuggccu

SEQ ID NO: 1355570 - RNA, 19 nt, Human
ucaagcaauucuccugccu

SEQ ID NO: 1355571 - RNA, 24 nt, Human
ucacccagguuggagugcaguggc

SEQ ID NO: 1355572 - RNA, 19 nt, Human
ucacgguuuuguuauucuc

SEQ ID NO: 1355573 - RNA, 20 nt, Human
ucagccucccgaguagcugg

SEQ ID NO: 1355574 - RNA, 20 nt, Human
ucauggucauuuguagagca

SEQ ID NO: 1355575 - RNA, 23 nt, Human
uccaggaaacuggauagaaacgc

SEQ ID NO: 1355576 - RNA, 23 nt, Human
ucccaaagugcuaggauuacagg

SEQ ID NO: 1355577 - RNA, 24 nt, Human
ucccgaguagcugggauugcaggc

SEQ ID NO: 1355578 - RNA, 19 nt, Human
uccuccugagagaauucua

SEQ ID NO: 1355579 - RNA, 21 nt, Human
uccuggauucaagcaauucuc

SEQ ID NO: 1355580 - RNA, 24 nt, Human
uccuggauucaagcaauucuccug

SEQ ID NO: 1355581 - RNA, 24 nt, Human
uccugggcuugagcaauccucuug

SEQ ID NO: 1355582 - RNA, 24 nt, Human
ucgcucugucacccagguuggagu

SEQ ID NO: 1355583 - RNA, 23 nt, Human
ucggccucuugaguagcuggaac

SEQ ID NO: 1355584 - RNA, 22 nt, Human
ucuaaaucagacaaucuuuaau

SEQ ID NO: 1355585 - RNA, 23 nt, Human
ucucaaacuccugggcuugagca

SEQ ID NO: 1355586 - RNA, 23 nt, Human
ucuccaggcaucaagugacccuc

SEQ ID NO: 1355587 - RNA, 24 nt, Human
ucucgcucugucacccaagcugga

SEQ ID NO: 1355588 - RNA, 25 nt, Human
ucucgcucugucacccaagcuggag

SEQ ID NO: 1355589 - RNA, 26 nt, Human
ucucgcucugucacccaagcuggagu

SEQ ID NO: 1355590 - RNA, 19 nt, Human
ucucgcucugucacccagg

SEQ ID NO: 1355591 - RNA, 23 nt, Human
ucucgcucugucacccagguugg

SEQ ID NO: 1355592 - RNA, 24 nt, Human
ucucgcucugucacccagguugga

SEQ ID NO: 1355593 - RNA, 24 nt, Human
ucucuacucugauuuaacuguucu

SEQ ID NO: 1355594 - RNA, 21 nt, Human
ucucuguccaccuccaugguc

SEQ ID NO: 1355595 - RNA, 24 nt, Human
ucugccuccuggauucaagcaauu

SEQ ID NO: 1355596 - RNA, 24 nt, Human
ucugucacccaagcuggaguacaa

SEQ ID NO: 1355597 - RNA, 24 nt, Human
ucugucacccagguuggagugcag

SEQ ID NO: 1355598 - RNA, 18 nt, Human
ucuugaguagcuggaacu

SEQ ID NO: 1355599 - RNA, 20 nt, Human
ucuuggcuuucuauugugcu

SEQ ID NO: 1355600 - RNA, 19 nt, Human
ugaagucagcccugucauc

SEQ ID NO: 1355601 - RNA, 22 nt, Human
ugaauccuacucaagaacaugu

SEQ ID NO: 1355602 - RNA, 22 nt, Human
ugagacagggucucgcucuguc

SEQ ID NO: 1355603 - RNA, 22 nt, Human
ugagacggagucucgcucuguc

SEQ ID NO: 1355604 - RNA, 22 nt, Human
ugagagaauucuauggccacgu

SEQ ID NO: 1355605 - RNA, 21 nt, Human
ugagauuauaggcaugaacca

SEQ ID NO: 1355606 - RNA, 23 nt, Human
ugagauuauaggcaugaaccacu

SEQ ID NO: 1355607 - RNA, 24 nt, Human
ugagauuauaggcaugaaccacug

SEQ ID NO: 1355608 - RNA, 19 nt, Human
ugagcaauccucuugccuc

SEQ ID NO: 1355609 - RNA, 20 nt, Human
ugcaauaagcaugaugacug

SEQ ID NO: 1355610 - RNA, 22 nt, Human
ugcaguggcgcgaucucagcuc

SEQ ID NO: 1355611 - RNA, 24 nt, Human
ugcccauacuuaucuugaucucca

SEQ ID NO: 1355612 - RNA, 19 nt, Human
ugccccuggccuuucaaac

SEQ ID NO: 1355613 - RNA, 24 nt, Human
ugccucaaccucccaaagugcuag

SEQ ID NO: 1355614 - RNA, 24 nt, Human
ugccucagccucccgaguagcugg

SEQ ID NO: 1355615 - RNA, 20 nt, Human
ugccucggccucuugaguaa

SEQ ID NO: 1355616 - RNA, 22 nt, Human
ugccucggccucuugaguagcu

SEQ ID NO: 1355617 - RNA, 20 nt, Human
ugcuacguugcccauacuua

SEQ ID NO: 1355618 - RNA, 24 nt, Human
ugcuaggauuacaggugugagcca

SEQ ID NO: 1355619 - RNA, 21 nt, Human
uggaacuacagacacaugcca

SEQ ID NO: 1355620 - RNA, 23 nt, Human
uggaacuacagacacaugccaag

SEQ ID NO: 1355621 - RNA, 26 nt, Human
uggaacuacagacacaugccaagggc

SEQ ID NO: 1355622 - RNA, 23 nt, Human
uggagugcaguggcgcgaucuca

SEQ ID NO: 1355623 - RNA, 24 nt, Human
uggagugcaguggcgcgaucucag

SEQ ID NO: 1355624 - RNA, 21 nt, Human
uggauucaagcaauucuccug

SEQ ID NO: 1355625 - RNA, 24 nt, Human
uggauucaagcaauucuccugccu

SEQ ID NO: 1355626 - RNA, 24 nt, Human
uggcacacacaauccauuugugug

SEQ ID NO: 1355627 - RNA, 24 nt, Human
uggccaggcuggucucaaacuccu

SEQ ID NO: 1355628 - RNA, 24 nt, Human
uggcgcgaucucagcucacugcaa

SEQ ID NO: 1355629 - RNA, 18 nt, Human
ugggauugcaggcaugug

SEQ ID NO: 1355630 - RNA, 21 nt, Human
ugggauugcaggcaugugcca

SEQ ID NO: 1355631 - RNA, 24 nt, Human
ugggauugcaggcaugugccacca

SEQ ID NO: 1355632 - RNA, 24 nt, Human
ugggcuugagcaauccucuugccu

SEQ ID NO: 1355633 - RNA, 23 nt, Human
uggucucuaaaucagacaaucuu

SEQ ID NO: 1355634 - RNA, 24 nt, Human
ugguguuucaccauauuggccagg

SEQ ID NO: 1355635 - RNA, 18 nt, Human
uguagggaugggccuugc

SEQ ID NO: 1355636 - RNA, 23 nt, Human
uguauaaagccuucugcacaggg

SEQ ID NO: 1355637 - RNA, 21 nt, Human
ugucacccagguuggagugca

SEQ ID NO: 1355638 - RNA, 21 nt, Human
uucaacuuuauuguuccaaac

SEQ ID NO: 1355639 - RNA, 21 nt, Human
uucaagcaauucuccugccuc

SEQ ID NO: 1355640 - RNA, 24 nt, Human
uucaagcaauucuccugccucagc

SEQ ID NO: 1355641 - RNA, 22 nt, Human
uucccauaaaaaucccuguguc

SEQ ID NO: 1355642 - RNA, 22 nt, Human
uugagacagggucucgcucugu

SEQ ID NO: 1355643 - RNA, 23 nt, Human
uugcacccuuuauacacaucaua

SEQ ID NO: 1355644 - RNA, 21 nt, Human
uugcccauacuuaucuugauc

SEQ ID NO: 1355645 - RNA, 24 nt, Human
uuuaacuguucucucuuccauuug

SEQ ID NO: 1355646 - RNA, 26 nt, Human
uuuauaguagauaugguguuucacca

SEQ ID NO: 1355647 - RNA, 22 nt, Human
uuucaccaaagaugaauguuuc

SEQ ID NO: 1355648 - RNA, 24 nt, Human
uuucaccauauuggccaggcuggu

SEQ ID NO: 1355649 - RNA, 19 nt, Human
uuugacuuguuggccuugg

SEQ ID NO: 1355650 - RNA, 22 nt, Human
uuuuguagggaugggccuugcu

SEQ ID NO: 1355651 - RNA, 25 nt, Human
uuuuuuucuuuugagacagggucuc

SEQ ID NO: 1355652 - RNA, 22 nt, Human
uuuuuuuucuuuugagacaggg

SEQ ID NO: 1355653 - RNA, 25 nt, Human
uuuuuuuuuuuugagacggagucuc

SEQ ID NO: 1355654 - RNA, 22 nt, Human
uuuuuuuuuuuuuugagacgga

SEQ ID NO: 1355655 - RNA, 22 nt, Human
aaauauuggagaacuagagacu

SEQ ID NO: 1355656 - RNA, 23 nt, Human
agacugaauuaucgcuuguguaa

SEQ ID NO: 1355657 - RNA, 20 nt, Human
agcaugcaguaucauaaaua

SEQ ID NO: 1355658 - RNA, 22 nt, Human
auuucgauugaagaccuugcca

SEQ ID NO: 1355659 - RNA, 24 nt, Human
cagcauacauaauccaucuguaug

SEQ ID NO: 1355660 - RNA, 19 nt, Human
caguaucauaaauauugga

SEQ ID NO: 1355661 - RNA, 25 nt, Human
cucucucaugaaugaauuaucucau

SEQ ID NO: 1355662 - RNA, 22 nt, Human
cuugugccugaagaccuugcca

SEQ ID NO: 1355663 - RNA, 18 nt, Human
gaccauuuccacaugccc

SEQ ID NO: 1355664 - RNA, 20 nt, Human
gagacugaauuaucgcuugu

SEQ ID NO: 1355665 - RNA, 18 nt, Human
uccauaguaaugguccuu

SEQ ID NO: 1355666 - RNA, 21 nt, Human
ugaauaauagccucagcauac

SEQ ID NO: 1355667 - RNA, 24 nt, Human
ugcuaugauuucucuuuaguaugg

SEQ ID NO: 1355668 - RNA, 23 nt, Human
uggaccuucgacaugcaucgcgu

SEQ ID NO: 1355669 - RNA, 21 nt, Human
uggcaggccucaagagaccug

SEQ ID NO: 1355670 - RNA, 21 nt, Human
uguaagaacucucucaugaau

SEQ ID NO: 1355671 - RNA, 21 nt, Human
ugugccugaagaccuugccac

SEQ ID NO: 1355672 - RNA, 22 nt, Human
uguugauuaaugcuagaacuua

SEQ ID NO: 1355673 - RNA, 23 nt, Human
uuacuaaagaucuuaccacacac

SEQ ID NO: 1355674 - RNA, 21 nt, Human
uuauuacuaaagaucuuacca

SEQ ID NO: 1355675 - RNA, 19 nt, Human
uucauaagguuucucucca

SEQ ID NO: 1355676 - RNA, 20 nt, Human
uucauccaagauguauguuu

SEQ ID NO: 1355677 - RNA, 23 nt, Human
acaaaaauguccacagccagagc

SEQ ID NO: 1355678 - RNA, 22 nt, Human
acagaugugcacuccuagugcc

SEQ ID NO: 1355679 - RNA, 22 nt, Human
acagcagacaaaaauguccaca

SEQ ID NO: 1355680 - RNA, 30 nt, Human
acauggcuuccucccugaggagcaucuccu

SEQ ID NO: 1355681 - RNA, 20 nt, Human
aggagucacuccuuagaacc

SEQ ID NO: 1355682 - RNA, 21 nt, Human
aggccucauggccaagacccu

SEQ ID NO: 1355683 - RNA, 25 nt, Human
aucuuugcucugcgugugcugaaag

SEQ ID NO: 1355684 - RNA, 21 nt, Human
cacuccuuagaaccccgagcg

SEQ ID NO: 1355685 - RNA, 21 nt, Human
cagccuggacuucuguuacca

SEQ ID NO: 1355686 - RNA, 25 nt, Human
cagccuggacuucuguuaccauggg

SEQ ID NO: 1355687 - RNA, 24 nt, Human
ccacagcagacaaaaauguccaca

SEQ ID NO: 1355688 - RNA, 26 nt, Human
ccacgccucuaaacgucccccagacg

SEQ ID NO: 1355689 - RNA, 23 nt, Human
ccacugccaccucugcguccgga

SEQ ID NO: 1355690 - RNA, 22 nt, Human
cccccagacggcauuggggcuc

SEQ ID NO: 1355691 - RNA, 19 nt, Human
cucacccgccacagagcca

SEQ ID NO: 1355692 - RNA, 23 nt, Human
cuuagaaccccgagcggcugucc

SEQ ID NO: 1355693 - RNA, 26 nt, Human
cuuagaaccccgagcggcuguccagg

SEQ ID NO: 1355694 - RNA, 25 nt, Human
gaaucagccucagccuggacuucug

SEQ ID NO: 1355695 - RNA, 19 nt, Human
gcacuccuagugccacgcc

SEQ ID NO: 1355696 - RNA, 20 nt, Human
gcuuccaacgaucuuugcuc

SEQ ID NO: 1355697 - RNA, 22 nt, Human
uauuacacugcccacucacacc

SEQ ID NO: 1355698 - RNA, 19 nt, Human
ucauggccaacuuucucag

SEQ ID NO: 1355699 - RNA, 20 nt, Human
uccaacgaucuuugcucugc

SEQ ID NO: 1355700 - RNA, 22 nt, Human
uccacagccagagcuccaaagc

SEQ ID NO: 1355701 - RNA, 19 nt, Human
ucccacacuggggcuucca

SEQ ID NO: 1355702 - RNA, 21 nt, Human
ucccccagacggcauuggggc

SEQ ID NO: 1355703 - RNA, 18 nt, Human
ucccugaggagcaucucc

SEQ ID NO: 1355704 - RNA, 18 nt, Human
ugucaugcucacagaugu

SEQ ID NO: 1355705 - RNA, 21 nt, Human
aaaaaaaaaacaagaaaaaga

SEQ ID NO: 1355706 - RNA, 20 nt, Human
aaaaaacaagaaaaagaaaa

SEQ ID NO: 1355707 - RNA, 27 nt, Human
aaaaaacaggccaggcacaguggcuca

SEQ ID NO: 1355708 - RNA, 19 nt, Human
aaaaaccuugccacauuca

SEQ ID NO: 1355709 - RNA, 22 nt, Human
aaaaucacaaagagucagccaa

SEQ ID NO: 1355710 - RNA, 21 nt, Human
aaacaggccaggcacaguggc

SEQ ID NO: 1355711 - RNA, 19 nt, Human
aaagugcuggaauuacagg

SEQ ID NO: 1355712 - RNA, 24 nt, Human
aaagugcuggaauuacaggcauga

SEQ ID NO: 1355713 - RNA, 21 nt, Human
aaaucaacaaacucaggucaa

SEQ ID NO: 1355714 - RNA, 25 nt, Human
aaaugcaacuggaacuaacaaacac

SEQ ID NO: 1355715 - RNA, 20 nt, Human
aacacggugaaacccagucu

SEQ ID NO: 1355716 - RNA, 21 nt, Human
aacacggugaaacccagucuc

SEQ ID NO: 1355717 - RNA, 24 nt, Human
aaccugggcgacagagcaagacuc

SEQ ID NO: 1355718 - RNA, 18 nt, Human
aagaaaaagaaaauaaag

SEQ ID NO: 1355719 - RNA, 23 nt, Human
aagaaaaagaaaauaaaggcugg

SEQ ID NO: 1355720 - RNA, 24 nt, Human
aagaaaaucacaaagagucagcca

SEQ ID NO: 1355721 - RNA, 18 nt, Human
aagaaacaaaaaacaggc

SEQ ID NO: 1355722 - RNA, 22 nt, Human
aagaaacaaaaaacaggccagg

SEQ ID NO: 1355723 - RNA, 18 nt, Human
aaggugugauuguugauu

SEQ ID NO: 1355724 - RNA, 26 nt, Human
aagugcuggaauuacaggcaugagcc

SEQ ID NO: 1355725 - RNA, 19 nt, Human
aaguggagguugcagugag

SEQ ID NO: 1355726 - RNA, 18 nt, Human
aauuacaggcaugagcca

SEQ ID NO: 1355727 - RNA, 18 nt, Human
aauugcuugaaccuggga

SEQ ID NO: 1355728 - RNA, 18 nt, Human
aauugcuugaaccuggga

SEQ ID NO: 1355729 - RNA, 24 nt, Human
aauugcuugaaccugggaagugga

SEQ ID NO: 1355730 - RNA, 24 nt, Human
aauugcuugaaccugggaggagga

SEQ ID NO: 1355731 - RNA, 24 nt, Human
acagagcaagacuccaucucaaaa

SEQ ID NO: 1355732 - RNA, 26 nt, Human
acaggccaggcacaguggcucacucc

SEQ ID NO: 1355733 - RNA, 19 nt, Human
accacuguacuuuagccgg

SEQ ID NO: 1355734 - RNA, 18 nt, Human
acccagucucuacuaaaa

SEQ ID NO: 1355735 - RNA, 23 nt, Human
accugggcgacagagcaagacuc

SEQ ID NO: 1355736 - RNA, 18 nt, Human
acugaaaacuuugugaca

SEQ ID NO: 1355737 - RNA, 18 nt, Human
acugcacuccaaccuggg

SEQ ID NO: 1355738 - RNA, 24 nt, Human
acugcacuccaaccugggcgacag

SEQ ID NO: 1355739 - RNA, 22 nt, Human
agaauugcuugaaccugggagg

SEQ ID NO: 1355740 - RNA, 24 nt, Human
agacugaggcaggagaauugcuug

SEQ ID NO: 1355741 - RNA, 24 nt, Human
agagaccauucuggcuaacacggu

SEQ ID NO: 1355742 - RNA, 23 nt, Human
agccaaaaugcaacuggaacuaa

SEQ ID NO: 1355743 - RNA, 24 nt, Human
aggaggagguugcagugagcugag

SEQ ID NO: 1355744 - RNA, 24 nt, Human
aggcacaguggcucacuccuguaa

SEQ ID NO: 1355745 - RNA, 22 nt, Human
aggcaggagaauugcuugaacc

SEQ ID NO: 1355746 - RNA, 22 nt, Human
aggcaggagaauugcuugaacc

SEQ ID NO: 1355747 - RNA, 24 nt, Human
aggcaggagaauugcuugaaccug

SEQ ID NO: 1355748 - RNA, 24 nt, Human
aggcaggagaauugcuugaaccug

SEQ ID NO: 1355749 - RNA, 21 nt, Human
aggcugaggcaggagaauugc

SEQ ID NO: 1355750 - RNA, 24 nt, Human
aggcugaggcaggagaauugcuug

SEQ ID NO: 1355751 - RNA, 18 nt, Human
agugaccuuggacugaag

SEQ ID NO: 1355752 - RNA, 24 nt, Human
aguggcucacuccuguaaucucag

SEQ ID NO: 1355753 - RNA, 24 nt, Human
aucgugccacugcacuccaaccug

SEQ ID NO: 1355754 - RNA, 20 nt, Human
augacaugaccuucuguaaa

SEQ ID NO: 1355755 - RNA, 23 nt, Human
augauuaaaaacauguauaaaua

SEQ ID NO: 1355756 - RNA, 27 nt, Human
caaaaaauuacccaggugugguggcac

SEQ ID NO: 1355757 - RNA, 19 nt, Human
caaaaugcaacuggaacua

SEQ ID NO: 1355758 - RNA, 20 nt, Human
caaagagucagccaaaaugc

SEQ ID NO: 1355759 - RNA, 18 nt, Human
caaagugcuggaauuaca

SEQ ID NO: 1355760 - RNA, 23 nt, Human
caaagugcuggaauuacaggcau

SEQ ID NO: 1355761 - RNA, 24 nt, Human
caaagugcuggaauuacaggcaug

SEQ ID NO: 1355762 - RNA, 20 nt, Human
caacagucuuuagaagucaa

SEQ ID NO: 1355763 - RNA, 24 nt, Human
caacuguagugucagcuacuuggg

SEQ ID NO: 1355764 - RNA, 21 nt, Human
caagacuccaucucaaaaaaa

SEQ ID NO: 1355765 - RNA, 21 nt, Human
caaugugaauuuucuuaugug

SEQ ID NO: 1355766 - RNA, 23 nt, Human
caccaaaaauuaguugaauuucc

SEQ ID NO: 1355767 - RNA, 18 nt, Human
cacgugugaaucauuccc

SEQ ID NO: 1355768 - RNA, 23 nt, Human
cacuccaaccugggcgacagagc

SEQ ID NO: 1355769 - RNA, 24 nt, Human
cacuccuguaaucucagcacuuug

SEQ ID NO: 1355770 - RNA, 23 nt, Human
cacugcacuccaaccugggcgac

SEQ ID NO: 1355771 - RNA, 24 nt, Human
cacugcacuccaaccugggcgaca

SEQ ID NO: 1355772 - RNA, 27 nt, Human
cacugcacuccaaccugggcgacagag

SEQ ID NO: 1355773 - RNA, 18 nt, Human
cagcacuuugggaggugg

SEQ ID NO: 1355774 - RNA, 24 nt, Human
cagguacuuggaaggcugaggcag

SEQ ID NO: 1355775 - RNA, 21 nt, Human
cauaggaugaagcuugacuga

SEQ ID NO: 1355776 - RNA, 23 nt, Human
ccaaaaugcaacuggaacuaaca

SEQ ID NO: 1355777 - RNA, 21 nt, Human
ccacugcacuccaaccugggc

SEQ ID NO: 1355778 - RNA, 24 nt, Human
ccacugcacuccaaccugggcgac

SEQ ID NO: 1355779 - RNA, 20 nt, Human
ccagggagacgagguuccua

SEQ ID NO: 1355780 - RNA, 22 nt, Human
ccaucucaaaaaaaaaacaaga

SEQ ID NO: 1355781 - RNA, 24 nt, Human
ccaucuguuggcuaggcuguucuc

SEQ ID NO: 1355782 - RNA, 24 nt, Human
ccauggcccccagugcaauccucu

SEQ ID NO: 1355783 - RNA, 23 nt, Human
cccgaaagccuugucacaaaccu

SEQ ID NO: 1355784 - RNA, 21 nt, Human
cccugaaugucaauagacccu

SEQ ID NO: 1355785 - RNA, 23 nt, Human
ccuaccugucuuugccucucaaa

SEQ ID NO: 1355786 - RNA, 24 nt, Human
ccugaggaagagccaucccugacu

SEQ ID NO: 1355787 - RNA, 21 nt, Human
ccugggaaguggagguugcag

SEQ ID NO: 1355788 - RNA, 24 nt, Human
cucacuccuguaaucucagcacuu

SEQ ID NO: 1355789 - RNA, 22 nt, Human
cucaggucaaggcugauuugac

SEQ ID NO: 1355790 - RNA, 18 nt, Human
cuccaaugaugugcaaug

SEQ ID NO: 1355791 - RNA, 21 nt, Human
cuccaguaugaauugccuuau

SEQ ID NO: 1355792 - RNA, 23 nt, Human
cuccaucucaaaaaaaaaacaag

SEQ ID NO: 1355793 - RNA, 23 nt, Human
cuccuguaaucucagcacuuugg

SEQ ID NO: 1355794 - RNA, 24 nt, Human
cuccuguaaucucagcacuuuggg

SEQ ID NO: 1355795 - RNA, 20 nt, Human
cucuccagugugaauucuag

SEQ ID NO: 1355796 - RNA, 26 nt, Human
cugagcaggguccaggcauuuccacu

SEQ ID NO: 1355797 - RNA, 18 nt, Human
cuggcuaacacggugaaa

SEQ ID NO: 1355798 - RNA, 21 nt, Human
cuggcuaacacggugaaaccc

SEQ ID NO: 1355799 - RNA, 20 nt, Human
cuguagucccagguacuugg

SEQ ID NO: 1355800 - RNA, 23 nt, Human
cuugauggugaauaaguggugac

SEQ ID NO: 1355801 - RNA, 19 nt, Human
cuuguaagguuucucucca

SEQ ID NO: 1355802 - RNA, 19 nt, Human
cuuguaagguuucucucca

SEQ ID NO: 1355803 - RNA, 19 nt, Human
cuuguaagguuucucucca

SEQ ID NO: 1355804 - RNA, 18 nt, Human
cuuuccucuuccucuucu

SEQ ID NO: 1355805 - RNA, 20 nt, Human
cuuugccucucaaagugcug

SEQ ID NO: 1355806 - RNA, 18 nt, Human
gaaguggagguugcagug

SEQ ID NO: 1355807 - RNA, 21 nt, Human
gaaugucaauagacccugagg

SEQ ID NO: 1355808 - RNA, 21 nt, Human
gaauuacaggcaugagccaug

SEQ ID NO: 1355809 - RNA, 19 nt, Human
gacgagguuccuauaauuc

SEQ ID NO: 1355810 - RNA, 23 nt, Human
gagguugcagugagcugagaucg

SEQ ID NO: 1355811 - RNA, 24 nt, Human
gccacugcacuccaaccugggcga

SEQ ID NO: 1355812 - RNA, 24 nt, Human
gcuaacacggugaaacccagucuc

SEQ ID NO: 1355813 - RNA, 20 nt, Human
gcugagaucgugccacugca

SEQ ID NO: 1355814 - RNA, 24 nt, Human
ggagaugacaccacuguacuuuag

SEQ ID NO: 1355815 - RNA, 23 nt, Human
ggaggaggagguugcagugagcu

SEQ ID NO: 1355816 - RNA, 22 nt, Human
ggagguugcagugagcggagau

SEQ ID NO: 1355817 - RNA, 23 nt, Human
ggagguugcagugagcggagaug

SEQ ID NO: 1355818 - RNA, 22 nt, Human
ggagguugcagugagcugagau

SEQ ID NO: 1355819 - RNA, 24 nt, Human
ggagguugcagugagcugagaucg

SEQ ID NO: 1355820 - RNA, 19 nt, Human
ggguggaucauaaagucag

SEQ ID NO: 1355821 - RNA, 19 nt, Human
guauaaaguccucugagca

SEQ ID NO: 1355822 - RNA, 24 nt, Human
gugacugcccacuaaaggguuugc

SEQ ID NO: 1355823 - RNA, 24 nt, Human
guugcagugagcugagaucgugcc

SEQ ID NO: 1355824 - RNA, 22 nt, Human
uaaagaaacaaaaaacaggcca

SEQ ID NO: 1355825 - RNA, 22 nt, Human
uaacacggugaaacccagucuc

SEQ ID NO: 1355826 - RNA, 24 nt, Human
uaacacggugaaacccagucucua

SEQ ID NO: 1355827 - RNA, 24 nt, Human
uacaggcaugagccauggccccca

SEQ ID NO: 1355828 - RNA, 23 nt, Human
uaccugucuuugccucucaaagu

SEQ ID NO: 1355829 - RNA, 20 nt, Human
uagaauaacagcaccaaaaa

SEQ ID NO: 1355830 - RNA, 19 nt, Human
uauggcuuuucuccagugu

SEQ ID NO: 1355831 - RNA, 24 nt, Human
ucaaagugcuggaauuacaggcau

SEQ ID NO: 1355832 - RNA, 18 nt, Human
ucagaagauagagaccau

SEQ ID NO: 1355833 - RNA, 19 nt, Human
uccaucucaaaaaaaaaac

SEQ ID NO: 1355834 - RNA, 21 nt, Human
ucccuauaccauggauugcuu

SEQ ID NO: 1355835 - RNA, 19 nt, Human
uccuccugagagaauucua

SEQ ID NO: 1355836 - RNA, 23 nt, Human
ucgugccacugcacuccaaccug

SEQ ID NO: 1355837 - RNA, 18 nt, Human
ucucaaaaaaaaaacaag

SEQ ID NO: 1355838 - RNA, 24 nt, Human
ucucaaagugcuggaauuacaggc

SEQ ID NO: 1355839 - RNA, 22 nt, Human
ucucuacuaaaaacacaaaaaa

SEQ ID NO: 1355840 - RNA, 21 nt, Human
ucucuccagugugaauucuag

SEQ ID NO: 1355841 - RNA, 23 nt, Human
ucuggcuaacacggugaaaccca

SEQ ID NO: 1355842 - RNA, 21 nt, Human
ucuguagucccagguacuugg

SEQ ID NO: 1355843 - RNA, 19 nt, Human
ucuguaugguuucucuuca

SEQ ID NO: 1355844 - RNA, 24 nt, Human
ucuguuggcuaggcuguucucaaa

SEQ ID NO: 1355845 - RNA, 23 nt, Human
ugaaaacuuuugucacauuccuc

SEQ ID NO: 1355846 - RNA, 22 nt, Human
ugaaacaacugucuccaaaagg

SEQ ID NO: 1355847 - RNA, 24 nt, Human
ugaaccugggaaguggagguugca

SEQ ID NO: 1355848 - RNA, 24 nt, Human
ugaaccugggaggaggagguugca

SEQ ID NO: 1355849 - RNA, 25 nt, Human
ugacagaccaaaacuccagggagac

SEQ ID NO: 1355850 - RNA, 24 nt, Human
ugacaugaccuucuguaaagaaaa

SEQ ID NO: 1355851 - RNA, 19 nt, Human
ugacuccuuugcuuuccuc

SEQ ID NO: 1355852 - RNA, 22 nt, Human
ugagagaauucuauggccacgu

SEQ ID NO: 1355853 - RNA, 19 nt, Human
ugagaucgugccacugcac

SEQ ID NO: 1355854 - RNA, 22 nt, Human
ugagcugagaucgugccacugc

SEQ ID NO: 1355855 - RNA, 24 nt, Human
ugaggcaggagaauugcuugaacc

SEQ ID NO: 1355856 - RNA, 24 nt, Human
ugaggcaggagaauugcuugaacc

SEQ ID NO: 1355857 - RNA, 25 nt, Human
ugaggcaggagaauugcuugaaccu

SEQ ID NO: 1355858 - RNA, 25 nt, Human
ugaggcaggagaauugcuugaaccu

SEQ ID NO: 1355859 - RNA, 24 nt, Human
ugauuaaaaaccaugucacauuca

SEQ ID NO: 1355860 - RNA, 22 nt, Human
ugauuguugauuaaaaaccaug

SEQ ID NO: 1355861 - RNA, 31 nt, Human
ugcaaaaaccuugucacaaaccuuaccucuu

SEQ ID NO: 1355862 - RNA, 22 nt, Human
ugcaacuggaacuaacaaacac

SEQ ID NO: 1355863 - RNA, 20 nt, Human
uggaaggcugaggcaggaga

SEQ ID NO: 1355864 - RNA, 20 nt, Human
uggaaggcugaggcaggaga

SEQ ID NO: 1355865 - RNA, 18 nt, Human
uggaauuacaggcaugag

SEQ ID NO: 1355866 - RNA, 21 nt, Human
uggaauuacaggcaugagcca

SEQ ID NO: 1355867 - RNA, 22 nt, Human
uggaauuacaggcaugagccau

SEQ ID NO: 1355868 - RNA, 22 nt, Human
uggaauuacaggcaugagccau

SEQ ID NO: 1355869 - RNA, 29 nt, Human
uggaauuacaggcaugagccauggccccc

SEQ ID NO: 1355870 - RNA, 25 nt, Human
uggcccccagugcaauccucuuaac

SEQ ID NO: 1355871 - RNA, 20 nt, Human
uggcccccagugcaauccuu

SEQ ID NO: 1355872 - RNA, 21 nt, Human
uggcuaggcuguucucaaacu

SEQ ID NO: 1355873 - RNA, 21 nt, Human
uggcucacuccuguaaucuca

SEQ ID NO: 1355874 - RNA, 22 nt, Human
uggcucacuccuguaaucucag

SEQ ID NO: 1355875 - RNA, 24 nt, Human
uggcucacuccuguaaucucagca

SEQ ID NO: 1355876 - RNA, 19 nt, Human
ugggaaaaguagcucccau

SEQ ID NO: 1355877 - RNA, 24 nt, Human
ugggaaguggagguugcagugagc

SEQ ID NO: 1355878 - RNA, 24 nt, Human
ugggaggaggagguugcagugagc

SEQ ID NO: 1355879 - RNA, 18 nt, Human
uggggugccacgugugaa

SEQ ID NO: 1355880 - RNA, 23 nt, Human
uguaagguuucucuccacuauga

SEQ ID NO: 1355881 - RNA, 23 nt, Human
uguauaaaguccucugagcaggg

SEQ ID NO: 1355882 - RNA, 23 nt, Human
uguaugguuucucuucaauguga

SEQ ID NO: 1355883 - RNA, 24 nt, Human
ugugaaguaaacgcuuugccacaa

SEQ ID NO: 1355884 - RNA, 22 nt, Human
ugugaauuuugaccaacggucu

SEQ ID NO: 1355885 - RNA, 21 nt, Human
ugugagguuucucuccuguau

SEQ ID NO: 1355886 - RNA, 18 nt, Human
ugugguggcacacaacug

SEQ ID NO: 1355887 - RNA, 24 nt, Human
uguuaaaucaacaaacucagguca

SEQ ID NO: 1355888 - RNA, 23 nt, Human
uuagaagucaauccgcccgccgc

SEQ ID NO: 1355889 - RNA, 21 nt, Human
uucacuguggauucuccaaug

SEQ ID NO: 1355890 - RNA, 24 nt, Human
uugaaccugggaaguggagguugc

SEQ ID NO: 1355891 - RNA, 24 nt, Human
uugaaccugggaggaggagguugc

SEQ ID NO: 1355892 - RNA, 18 nt, Human
uugcagugagcggagaug

SEQ ID NO: 1355893 - RNA, 20 nt, Human
uugcagugagcggagaugac

SEQ ID NO: 1355894 - RNA, 18 nt, Human
uugcagugagcugagauc

SEQ ID NO: 1355895 - RNA, 21 nt, Human
uugcagugagcugagaucgug

SEQ ID NO: 1355896 - RNA, 22 nt, Human
uugcagugagcugagaucgugc

SEQ ID NO: 1355897 - RNA, 24 nt, Human
uugcuugaaccugggaaguggagg

SEQ ID NO: 1355898 - RNA, 18 nt, Human
uugcuugaaccugggagg

SEQ ID NO: 1355899 - RNA, 24 nt, Human
uugcuugaaccugggaggaggagg

SEQ ID NO: 1355900 - RNA, 23 nt, Human
uuggaaggcugaggcaggagaau

SEQ ID NO: 1355901 - RNA, 23 nt, Human
uugggagacugaggcaggagaau

SEQ ID NO: 1355902 - RNA, 19 nt, Human
uuuauaagguuucucucca

SEQ ID NO: 1355903 - RNA, 22 nt, Human
uuuccucuuccucuucuggguu

SEQ ID NO: 1355904 - RNA, 19 nt, Human
uuuguaagguuucucucca

SEQ ID NO: 1355905 - RNA, 24 nt, Human
uuuguuaaagaaacaaaaaacagg

SEQ ID NO: 1355906 - RNA, 21 nt, Human
acacacccucugcuucagcuu

SEQ ID NO: 1355907 - RNA, 19 nt, Human
acuuuccucuuggaucugu

SEQ ID NO: 1355908 - RNA, 20 nt, Human
aggcagccugguacaggcag

SEQ ID NO: 1355909 - RNA, 23 nt, Human
caaauaaauccucaguuguucga

SEQ ID NO: 1355910 - RNA, 24 nt, Human
caucaaguugagacuuuucccaag

SEQ ID NO: 1355911 - RNA, 24 nt, Human
ccccaucaaguugagacuuuuccc

SEQ ID NO: 1355912 - RNA, 20 nt, Human
ccucugcuucagcuugggag

SEQ ID NO: 1355913 - RNA, 24 nt, Human
ccucugcuuugcuguuaucagagg

SEQ ID NO: 1355914 - RNA, 24 nt, Human
cuguucuguuccuccauccucaug

SEQ ID NO: 1355915 - RNA, 22 nt, Human
gagacacgaacacacccucugc

SEQ ID NO: 1355916 - RNA, 24 nt, Human
gagacacgaacacacccucugcuu

SEQ ID NO: 1355917 - RNA, 26 nt, Human
uacuuaaaauauggaaacuaaucaag

SEQ ID NO: 1355918 - RNA, 20 nt, Human
ucaaguugagacuuuuccca

SEQ ID NO: 1355919 - RNA, 24 nt, Human
uccaaguacuuuccucuuggaucu

SEQ ID NO: 1355920 - RNA, 20 nt, Human
uccauccucaugugaguaag

SEQ ID NO: 1355921 - RNA, 20 nt, Human
uccccggaaucuuuucuucc

SEQ ID NO: 1355922 - RNA, 21 nt, Human
uccccggaaucuuuucuucca

SEQ ID NO: 1355923 - RNA, 20 nt, Human
uccucaugugaguaaggguu

SEQ ID NO: 1355924 - RNA, 24 nt, Human
uccucaugugaguaaggguuuugg

SEQ ID NO: 1355925 - RNA, 19 nt, Human
uccucugcuuugcuguuau

SEQ ID NO: 1355926 - RNA, 22 nt, Human
uccuugggucuccucugcuuug

SEQ ID NO: 1355927 - RNA, 24 nt, Human
ugcuguuaucagaggcacuuuugg

SEQ ID NO: 1355928 - RNA, 25 nt, Human
ugucuaaaccacuuucuguuuaccc

SEQ ID NO: 1355929 - RNA, 20 nt, Human
uguucuguuccuccauccuc

SEQ ID NO: 1355930 - RNA, 19 nt, Human
uuagcagugaugcuacccc

SEQ ID NO: 1355931 - RNA, 19 nt, Human
uucauucauugcuuagcag

SEQ ID NO: 1355932 - RNA, 21 nt, Human
uuuggccuuugccaggcagcc

SEQ ID NO: 1355933 - RNA, 21 nt, Human
aaauagcugcacccugacuuu

SEQ ID NO: 1355934 - RNA, 21 nt, Human
aaccucuucguuucucuccug

SEQ ID NO: 1355935 - RNA, 20 nt, Human
aagccacaugcagacccgga

SEQ ID NO: 1355936 - RNA, 18 nt, Human
aagggcaaguuggggggc

SEQ ID NO: 1355937 - RNA, 19 nt, Human
aagggcaaguuggggggcc

SEQ ID NO: 1355938 - RNA, 19 nt, Human
aagggcccuuggaauguca

SEQ ID NO: 1355939 - RNA, 21 nt, Human
acaccagguuccgggccuggu

SEQ ID NO: 1355940 - RNA, 22 nt, Human
acacucaccaucucggcguaca

SEQ ID NO: 1355941 - RNA, 23 nt, Human
acccgcugccuugucuggccuca

SEQ ID NO: 1355942 - RNA, 23 nt, Human
acccgcugccuugucugggggag

SEQ ID NO: 1355943 - RNA, 19 nt, Human
acgcuccguccccacaagc

SEQ ID NO: 1355944 - RNA, 23 nt, Human
acgcugccacagcuccagcacca

SEQ ID NO: 1355945 - RNA, 28 nt, Human
acgcugccacagcuccagcaccacaagc

SEQ ID NO: 1355946 - RNA, 19 nt, Human
agaacugguagccagccca

SEQ ID NO: 1355947 - RNA, 18 nt, Human
agaaggagggcaggacaa

SEQ ID NO: 1355948 - RNA, 20 nt, Human
agagcuccucaggguuuggg

SEQ ID NO: 1355949 - RNA, 21 nt, Human
agcagcggcggcggaaccggc

SEQ ID NO: 1355950 - RNA, 19 nt, Human
agccagugucugaaggcgc

SEQ ID NO: 1355951 - RNA, 20 nt, Human
agcggugcagcaggagccug

SEQ ID NO: 1355952 - RNA, 18 nt, Human
aggaggaggcugcggagc

SEQ ID NO: 1355953 - RNA, 21 nt, Human
agggagcacgguguugaggcg

SEQ ID NO: 1355954 - RNA, 21 nt, Human
agggucuuguuccccaugaca

SEQ ID NO: 1355955 - RNA, 20 nt, Human
agucccugcaucacugugcg

SEQ ID NO: 1355956 - RNA, 20 nt, Human
auagccagaauauuccuagc

SEQ ID NO: 1355957 - RNA, 21 nt, Human
auggcggcaggcccccaggcc

SEQ ID NO: 1355958 - RNA, 19 nt, Human
auggggcugcagaggagcc

SEQ ID NO: 1355959 - RNA, 20 nt, Human
caaggacaggcuuccccguc

SEQ ID NO: 1355960 - RNA, 22 nt, Human
caauagccagaauauuccuagc

SEQ ID NO: 1355961 - RNA, 23 nt, Human
caauagcggugcagcaggagccu

SEQ ID NO: 1355962 - RNA, 24 nt, Human
caccagaaccucuucguuucucuc

SEQ ID NO: 1355963 - RNA, 21 nt, Human
cacugaccuccauagcccgca

SEQ ID NO: 1355964 - RNA, 22 nt, Human
cacugggcuguacggugugcuu

SEQ ID NO: 1355965 - RNA, 18 nt, Human
cagaaggaggugcuggaa

SEQ ID NO: 1355966 - RNA, 22 nt, Human
cagaauauuccuagcaucuugc

SEQ ID NO: 1355967 - RNA, 19 nt, Human
cagagggcgcuugcagucc

SEQ ID NO: 1355968 - RNA, 22 nt, Human
cagagggcgcuugcaguccucu

SEQ ID NO: 1355969 - RNA, 19 nt, Human
cagcagcggcggcggaacc

SEQ ID NO: 1355970 - RNA, 19 nt, Human
cagccagaccauugggggc

SEQ ID NO: 1355971 - RNA, 21 nt, Human
cagccaguccuccgcuguggc

SEQ ID NO: 1355972 - RNA, 19 nt, Human
cagccccugcugcccccac

SEQ ID NO: 1355973 - RNA, 22 nt, Human
cagcgcacuccagaccaccccc

SEQ ID NO: 1355974 - RNA, 18 nt, Human
cagcggcggcggaaccgg

SEQ ID NO: 1355975 - RNA, 24 nt, Human
cagcucccucagcaguuucuccca

SEQ ID NO: 1355976 - RNA, 21 nt, Human
cagcuucugaaugaggacccu

SEQ ID NO: 1355977 - RNA, 22 nt, Human
caggaaauagcugcacccugac

SEQ ID NO: 1355978 - RNA, 23 nt, Human
caggaagaccacccgaaugaagg

SEQ ID NO: 1355979 - RNA, 18 nt, Human
caggaucugauuggacac

SEQ ID NO: 1355980 - RNA, 22 nt, Human
caggggugguuggaaauccguc

SEQ ID NO: 1355981 - RNA, 24 nt, Human
cauagcccgcaggcauugccccuc

SEQ ID NO: 1355982 - RNA, 22 nt, Human
caugcagacccggaggugagcu

SEQ ID NO: 1355983 - RNA, 19 nt, Human
cauguggggccugcagagc

SEQ ID NO: 1355984 - RNA, 23 nt, Human
cauugaggaccccauggccauuc

SEQ ID NO: 1355985 - RNA, 18 nt, Human
ccaacuccuuuacaaggg

SEQ ID NO: 1355986 - RNA, 20 nt, Human
ccacaugcagacccggaggu

SEQ ID NO: 1355987 - RNA, 24 nt, Human
ccacccccgccuguccugcccacc

SEQ ID NO: 1355988 - RNA, 23 nt, Human
ccacuggucuuuauacuuggccu

SEQ ID NO: 1355989 - RNA, 21 nt, Human
ccagaacaaagaaggagggca

SEQ ID NO: 1355990 - RNA, 20 nt, Human
ccagaccauugggggccacc

SEQ ID NO: 1355991 - RNA, 20 nt, Human
ccagcuguccugccagugcc

SEQ ID NO: 1355992 - RNA, 18 nt, Human
ccauucagugaccuggca

SEQ ID NO: 1355993 - RNA, 19 nt, Human
cccacaagcucuccuugcc

SEQ ID NO: 1355994 - RNA, 24 nt, Human
cccacaagcucuccuugccccaga

SEQ ID NO: 1355995 - RNA, 23 nt, Human
cccaggccaggaucuaccagaac

SEQ ID NO: 1355996 - RNA, 18 nt, Human
cccauggccaugucuugc

SEQ ID NO: 1355997 - RNA, 19 nt, Human
ccccagaagucacgcugcc

SEQ ID NO: 1355998 - RNA, 21 nt, Human
ccccagaagucacgcugccac

SEQ ID NO: 1355999 - RNA, 21 nt, Human
cccgcaggcauugccccuccu

SEQ ID NO: 1356000 - RNA, 24 nt, Human
cccugaacugucuguccagacccc

SEQ ID NO: 1356001 - RNA, 23 nt, Human
cccugacuuugggccuccucggg

SEQ ID NO: 1356002 - RNA, 20 nt, Human
cccuuacuguccacugcgug

SEQ ID NO: 1356003 - RNA, 20 nt, Human
cccuuacuguccacugcgug

SEQ ID NO: 1356004 - RNA, 23 nt, Human
ccgucauggggagggucuuguuc

SEQ ID NO: 1356005 - RNA, 18 nt, Human
ccucaauggccauccucu

SEQ ID NO: 1356006 - RNA, 21 nt, Human
ccucaauggccauccucuuua

SEQ ID NO: 1356007 - RNA, 24 nt, Human
ccugaagccgacugccucugaggc

SEQ ID NO: 1356008 - RNA, 24 nt, Human
ccugcagggccagggaauggggcu

SEQ ID NO: 1356009 - RNA, 19 nt, Human
cgcacuccagaccaccccc

SEQ ID NO: 1356010 - RNA, 25 nt, Human
cgcacuccagaccacccccgccugu

SEQ ID NO: 1356011 - RNA, 22 nt, Human
cgccagcagcggcggcggaacc

SEQ ID NO: 1356012 - RNA, 22 nt, Human
cgcccagcgccggcggcggcac

SEQ ID NO: 1356013 - RNA, 22 nt, Human
cgcccucuuccuuccccaacuc

SEQ ID NO: 1356014 - RNA, 23 nt, Human
cgcccucuuccuuccccaacucc

SEQ ID NO: 1356015 - RNA, 23 nt, Human
cucacaggaugccaagaucucgc

SEQ ID NO: 1356016 - RNA, 22 nt, Human
cucaggguuugggugcacuggc

SEQ ID NO: 1356017 - RNA, 19 nt, Human
cucauacacucaccaucuc

SEQ ID NO: 1356018 - RNA, 25 nt, Human
cuccucaggguuugggugcacuggc

SEQ ID NO: 1356019 - RNA, 22 nt, Human
cucgcccuuggccaggcccagc

SEQ ID NO: 1356020 - RNA, 24 nt, Human
cugcagcgcacuccagaccacccc

SEQ ID NO: 1356021 - RNA, 26 nt, Human
cugcccaccguccccaucccacaucg

SEQ ID NO: 1356022 - RNA, 18 nt, Human
cugccuugucuggccuca

SEQ ID NO: 1356023 - RNA, 20 nt, Human
cuggggcugaggguugaggu

SEQ ID NO: 1356024 - RNA, 23 nt, Human
cuucacguucucccgggccucca

SEQ ID NO: 1356025 - RNA, 21 nt, Human
cuuccuguccaggcugguggc

SEQ ID NO: 1356026 - RNA, 21 nt, Human
cuuggggaagccuucaguccc

SEQ ID NO: 1356027 - RNA, 20 nt, Human
cuuuauacuuggccugauuc

SEQ ID NO: 1356028 - RNA, 19 nt, Human
gaacuuggagccgaaggug

SEQ ID NO: 1356029 - RNA, 19 nt, Human
gaggaccccauggccauuc

SEQ ID NO: 1356030 - RNA, 21 nt, Human
gaggaggcugcggagcugcca

SEQ ID NO: 1356031 - RNA, 21 nt, Human
gagggcuguugguagcaggag

SEQ ID NO: 1356032 - RNA, 24 nt, Human
gaggggcaauagcggugcagcagg

SEQ ID NO: 1356033 - RNA, 18 nt, Human
gauacagccccugcugcc

SEQ ID NO: 1356034 - RNA, 22 nt, Human
gauggcggcaggcccccaggcc

SEQ ID NO: 1356035 - RNA, 20 nt, Human
gcaggcccgacggugggauc

SEQ ID NO: 1356036 - RNA, 20 nt, Human
gccacucgcugcuccuuggc

SEQ ID NO: 1356037 - RNA, 23 nt, Human
gccagcaccucaauggccauccu

SEQ ID NO: 1356038 - RNA, 24 nt, Human
gcccuuacuguccacugcgugguu

SEQ ID NO: 1356039 - RNA, 22 nt, Human
gcggugcagcaggagccugcag

SEQ ID NO: 1356040 - RNA, 22 nt, Human
gcucuggggcugaggguugagg

SEQ ID NO: 1356041 - RNA, 21 nt, Human
gcucuuugccacauuugcggc

SEQ ID NO: 1356042 - RNA, 24 nt, Human
gcugcagaggagccagugucugaa

SEQ ID NO: 1356043 - RNA, 20 nt, Human
gcugcagcgcacuccagacc

SEQ ID NO: 1356044 - RNA, 20 nt, Human
gcuggauccuucggauuccg

SEQ ID NO: 1356045 - RNA, 24 nt, Human
gcugggacgcugucccccaaccca

SEQ ID NO: 1356046 - RNA, 24 nt, Human
gcuugcaguccucugccagcuccc

SEQ ID NO: 1356047 - RNA, 18 nt, Human
ggacaaggggcaggcagc

SEQ ID NO: 1356048 - RNA, 21 nt, Human
ggacaaggggcaggcagcgcc

SEQ ID NO: 1356049 - RNA, 21 nt, Human
ggacaccagguuccgggccug

SEQ ID NO: 1356050 - RNA, 21 nt, Human
ggagcagcugcagguccuugc

SEQ ID NO: 1356051 - RNA, 24 nt, Human
ggaggagguugaggcaguucaugc

SEQ ID NO: 1356052 - RNA, 22 nt, Human
ggaggcccaucuggggcucagg

SEQ ID NO: 1356053 - RNA, 20 nt, Human
ggcaggacaaggggcaggca

SEQ ID NO: 1356054 - RNA, 22 nt, Human
ggccagagaagggggcugaggg

SEQ ID NO: 1356055 - RNA, 22 nt, Human
ggcgccagcagcggcggcggaa

SEQ ID NO: 1356056 - RNA, 22 nt, Human
ggcugcagaggagccagugucu

SEQ ID NO: 1356057 - RNA, 26 nt, Human
ggcugguggcuuugggcugauagguc

SEQ ID NO: 1356058 - RNA, 18 nt, Human
gggaauggggcugcagag

SEQ ID NO: 1356059 - RNA, 20 nt, Human
gggcugaggggcaauagcgg

SEQ ID NO: 1356060 - RNA, 20 nt, Human
gggcuuggcuugcuuggccu

SEQ ID NO: 1356061 - RNA, 30 nt, Human
gucacgcugccacagcuccagcaccacaag

SEQ ID NO: 1356062 - RNA, 25 nt, Human
guccacugcgugguucagcuccacc

SEQ ID NO: 1356063 - RNA, 20 nt, Human
gucccgagugaaguggagga

SEQ ID NO: 1356064 - RNA, 22 nt, Human
gugggcuggaugcucuugggga

SEQ ID NO: 1356065 - RNA, 21 nt, Human
gugucugggcccauguggggc

SEQ ID NO: 1356066 - RNA, 24 nt, Human
uaagauaggcagcugcuucucucc

SEQ ID NO: 1356067 - RNA, 19 nt, Human
uacaccagaaccucuucgu

SEQ ID NO: 1356068 - RNA, 21 nt, Human
uagcccgcaggcauugccccu

SEQ ID NO: 1356069 - RNA, 20 nt, Human
uagcugcacccugacuuugg

SEQ ID NO: 1356070 - RNA, 23 nt, Human
uaguaguggggcuuauugaaggu

SEQ ID NO: 1356071 - RNA, 21 nt, Human
uauuucaguggaaaauuacag

SEQ ID NO: 1356072 - RNA, 19 nt, Human
ucacgcugccacagcucca

SEQ ID NO: 1356073 - RNA, 20 nt, Human
ucagcuccccaugguuccug

SEQ ID NO: 1356074 - RNA, 21 nt, Human
ucaguuagucccugcaucacu

SEQ ID NO: 1356075 - RNA, 21 nt, Human
uccagcaccacaagcgguggg

SEQ ID NO: 1356076 - RNA, 21 nt, Human
uccagcuguccugccagugcc

SEQ ID NO: 1356077 - RNA, 26 nt, Human
uccaggaggaauaugggcgcgaugcc

SEQ ID NO: 1356078 - RNA, 21 nt, Human
ucccagcccuccuccucgccc

SEQ ID NO: 1356079 - RNA, 19 nt, Human
uccccacaagcucuccuug

SEQ ID NO: 1356080 - RNA, 21 nt, Human
uccccacuccauacucccagc

SEQ ID NO: 1356081 - RNA, 19 nt, Human
uccgguccuggagauccag

SEQ ID NO: 1356082 - RNA, 21 nt, Human
uccucaggguuugggugcacu

SEQ ID NO: 1356083 - RNA, 24 nt, Human
uccucaggguuugggugcacuggc

SEQ ID NO: 1356084 - RNA, 19 nt, Human
uccucggggccuaaagcgg

SEQ ID NO: 1356085 - RNA, 19 nt, Human
uccuggccagagaaggggg

SEQ ID NO: 1356086 - RNA, 24 nt, Human
uccugucucccuccaccucccagg

SEQ ID NO: 1356087 - RNA, 19 nt, Human
uccuugggcuuggcuugcu

SEQ ID NO: 1356088 - RNA, 25 nt, Human
uccuugggcuuggcuugcuuggccu

SEQ ID NO: 1356089 - RNA, 18 nt, Human
ucgcugcuccuuggccac

SEQ ID NO: 1356090 - RNA, 19 nt, Human
ucucagggccccugugccc

SEQ ID NO: 1356091 - RNA, 22 nt, Human
ucugcagucagacagggcuggg

SEQ ID NO: 1356092 - RNA, 23 nt, Human
ucugcagucagacagggcugggc

SEQ ID NO: 1356093 - RNA, 22 nt, Human
ucugggcccauguggggccugc

SEQ ID NO: 1356094 - RNA, 21 nt, Human
ucuucuccaccgggcuccaga

SEQ ID NO: 1356095 - RNA, 19 nt, Human
ucuuugccacauuugcggc

SEQ ID NO: 1356096 - RNA, 22 nt, Human
ugacauccgagaaguuggggca

SEQ ID NO: 1356097 - RNA, 19 nt, Human
ugaccuggcauccugccag

SEQ ID NO: 1356098 - RNA, 18 nt, Human
ugcagcaggagccugcag

SEQ ID NO: 1356099 - RNA, 19 nt, Human
ugcaggaggaggcugcgga

SEQ ID NO: 1356100 - RNA, 19 nt, Human
ugcaguagaugaagggcaa

SEQ ID NO: 1356101 - RNA, 22 nt, Human
ugcaguccucugccagcucccu

SEQ ID NO: 1356102 - RNA, 21 nt, Human
ugccaagccacaugcagaccc

SEQ ID NO: 1356103 - RNA, 18 nt, Human
ugccagccuugggggcac

SEQ ID NO: 1356104 - RNA, 20 nt, Human
ugccaucccaggggugguug

SEQ ID NO: 1356105 - RNA, 22 nt, Human
ugcguggaauguguuaucucuu

SEQ ID NO: 1356106 - RNA, 24 nt, Human
ugcuucucuauccuggucacuuca

SEQ ID NO: 1356107 - RNA, 22 nt, Human
uggaggaucagcucacaggaug

SEQ ID NO: 1356108 - RNA, 23 nt, Human
uggcggagcagcugcagguccuu

SEQ ID NO: 1356109 - RNA, 29 nt, Human
uggcggcaggcccccaggccccucuucuu

SEQ ID NO: 1356110 - RNA, 23 nt, Human
uggcucagcuccccaugguuccu

SEQ ID NO: 1356111 - RNA, 25 nt, Human
uggcucagcuccccaugguuccuga

SEQ ID NO: 1356112 - RNA, 23 nt, Human
uggcugugguucaggaagaccac

SEQ ID NO: 1356113 - RNA, 22 nt, Human
ugggcuggaugcucuuggggag

SEQ ID NO: 1356114 - RNA, 19 nt, Human
uggggcucagggagcacgg

SEQ ID NO: 1356115 - RNA, 22 nt, Human
uggggcucagggagcacggugu

SEQ ID NO: 1356116 - RNA, 21 nt, Human
ugguaguaguggggcuuauug

SEQ ID NO: 1356117 - RNA, 19 nt, Human
ugguguuguaccagggcac

SEQ ID NO: 1356118 - RNA, 18 nt, Human
uguccaggcugguggcuu

SEQ ID NO: 1356119 - RNA, 19 nt, Human
uguccugcccaccgucccc

SEQ ID NO: 1356120 - RNA, 20 nt, Human
uguccugcccaccgucccca

SEQ ID NO: 1356121 - RNA, 25 nt, Human
uguccugcccaccguccccauccca

SEQ ID NO: 1356122 - RNA, 21 nt, Human
uguccuuguugggggccagcc

SEQ ID NO: 1356123 - RNA, 19 nt, Human
ugucugaaggcgcacaagg

SEQ ID NO: 1356124 - RNA, 23 nt, Human
uguguaugccccauucuuccagg

SEQ ID NO: 1356125 - RNA, 24 nt, Human
uguguaugccccauucuuccaggg

SEQ ID NO: 1356126 - RNA, 24 nt, Human
ugugucacccuggcggagcagcug

SEQ ID NO: 1356127 - RNA, 21 nt, Human
uguugaugucuauguccagga

SEQ ID NO: 1356128 - RNA, 22 nt, Human
uuccgaaggccccaggccagga

SEQ ID NO: 1356129 - RNA, 24 nt, Human
uugcuuggccuuuugggccaguuc

SEQ ID NO: 1356130 - RNA, 21 nt, Human
uuggcuugcuuggccuuuugg

SEQ ID NO: 1356131 - RNA, 23 nt, Human
uugggcuuggcuugcuuggccuu

SEQ ID NO: 1356132 - RNA, 23 nt, Human
uuuaaaguugggcaucaugguac

SEQ ID NO: 1356133 - RNA, 19 nt, Human
uuucggggugugagcuuug

SEQ ID NO: 1356134 - RNA, 22 nt, Human
uuugccuacuccucacugcaga

SEQ ID NO: 1356135 - RNA, 21 nt, Human
uuuucggggugugagcuuugg

SEQ ID NO: 1356136 - RNA, 22 nt, Human
aagcagucaugaguuugcccac

SEQ ID NO: 1356137 - RNA, 22 nt, Human
aagcgauugcccucagcaaacc

SEQ ID NO: 1356138 - RNA, 25 nt, Human
aagggcccugagcuuuacacagccc

SEQ ID NO: 1356139 - RNA, 25 nt, Human
accucaaggagcucagcaccaggaa

SEQ ID NO: 1356140 - RNA, 19 nt, Human
agugagaaggcggguggaa

SEQ ID NO: 1356141 - RNA, 23 nt, Human
cagacaccacuggcagcgacaaa

SEQ ID NO: 1356142 - RNA, 21 nt, Human
cagcaaccuccuucuucuucc

SEQ ID NO: 1356143 - RNA, 23 nt, Human
cagcgacaaaacgccgcauccac

SEQ ID NO: 1356144 - RNA, 23 nt, Human
ccaacagcccagcaccauaccca

SEQ ID NO: 1356145 - RNA, 23 nt, Human
ccgagcccgaaccucuccagaca

SEQ ID NO: 1356146 - RNA, 25 nt, Human
ccucuaguggacaagggcccugagc

SEQ ID NO: 1356147 - RNA, 19 nt, Human
cgagcccgaaccucuccag

SEQ ID NO: 1356148 - RNA, 24 nt, Human
cgccgcauccacguccgaaaacgc

SEQ ID NO: 1356149 - RNA, 25 nt, Human
cuccuucuucuuccuucauugcuuc

SEQ ID NO: 1356150 - RNA, 26 nt, Human
cucuccagacaccacuggcagcgaca

SEQ ID NO: 1356151 - RNA, 20 nt, Human
gaaaauaguggauaacaugg

SEQ ID NO: 1356152 - RNA, 18 nt, Human
gauauccaaggccagcaa

SEQ ID NO: 1356153 - RNA, 22 nt, Human
ggccuucggcucccaacagccc

SEQ ID NO: 1356154 - RNA, 20 nt, Human
ggcucccaacagcccagcac

SEQ ID NO: 1356155 - RNA, 28 nt, Human
uaacauggacuauacgucuuugucucuu

SEQ ID NO: 1356156 - RNA, 21 nt, Human
uaaccucaaggagcucagcac

SEQ ID NO: 1356157 - RNA, 19 nt, Human
uacgucuuugucucuucug

SEQ ID NO: 1356158 - RNA, 19 nt, Human
uagauaaccucaaggagcu

SEQ ID NO: 1356159 - RNA, 21 nt, Human
uaguggauaacauggacuaua

SEQ ID NO: 1356160 - RNA, 21 nt, Human
ucaggggacaccuugccucua

SEQ ID NO: 1356161 - RNA, 22 nt, Human
uccagacaccacuggcagcgac

SEQ ID NO: 1356162 - RNA, 19 nt, Human
ucggcucccaacagcccag

SEQ ID NO: 1356163 - RNA, 23 nt, Human
ucuucugugcucagaaaauagug

SEQ ID NO: 1356164 - RNA, 18 nt, Human
ugagaaggcggguggaag

SEQ ID NO: 1356165 - RNA, 23 nt, Human
ugauauccaaggccagcaaccuc

SEQ ID NO: 1356166 - RNA, 23 nt, Human
ugcccacaucgugcauucaugau

SEQ ID NO: 1356167 - RNA, 24 nt, Human
ugggccuucggcucccaacagccc

SEQ ID NO: 1356168 - RNA, 21 nt, Human
uuaggcaaaagagauagugag

SEQ ID NO: 1356169 - RNA, 22 nt, Human
uuugccaugaaguuuuugaagu

SEQ ID NO: 1356170 - RNA, 19 nt, Human
aauguggggacagugggga

SEQ ID NO: 1356171 - RNA, 19 nt, Human
acauuaauaaaaaaaacca

SEQ ID NO: 1356172 - RNA, 21 nt, Human
agguggcuuuuauuuacagaa

SEQ ID NO: 1356173 - RNA, 21 nt, Human
auaaccccucccaucccuuaa

SEQ ID NO: 1356174 - RNA, 23 nt, Human
gggaagcccgcugaaaacccaga

SEQ ID NO: 1356175 - RNA, 23 nt, Human
ggggacaguggggacuguccaac

SEQ ID NO: 1356176 - RNA, 18 nt, Human
gucccugggaagcccgcu

SEQ ID NO: 1356177 - RNA, 23 nt, Human
uaaaugacaaauaaccccuccca

SEQ ID NO: 1356178 - RNA, 18 nt, Human
ugacaaauaaccccuccc

SEQ ID NO: 1356179 - RNA, 22 nt, Human
ugacaaauaaccccucccaucc

SEQ ID NO: 1356180 - RNA, 24 nt, Human
uggcuuuuauuuacagaauuuaau

SEQ ID NO: 1356181 - RNA, 20 nt, Human
uuacagaauuuaaugugggg

SEQ ID NO: 1356182 - RNA, 20 nt, Human
ccccaccccgcggcaucaga

SEQ ID NO: 1356183 - RNA, 21 nt, Human
ucacagugucauuuacaggca

SEQ ID NO: 1356184 - RNA, 25 nt, Human
uucacagugucauuuacaggcagcc

SEQ ID NO: 1356185 - RNA, 18 nt, Human
aagcucucuccaagucau

SEQ ID NO: 1356186 - RNA, 20 nt, Human
aauuuuuucagugcaaaacc

SEQ ID NO: 1356187 - RNA, 19 nt, Human
accaagcagguaacauucc

SEQ ID NO: 1356188 - RNA, 18 nt, Human
acucacagaccccaaaau

SEQ ID NO: 1356189 - RNA, 22 nt, Human
acucacagaccccaaaauaaaa

SEQ ID NO: 1356190 - RNA, 23 nt, Human
aggcucuuucacguaguuugccu

SEQ ID NO: 1356191 - RNA, 21 nt, Human
agggaaaaaagaaauggaacg

SEQ ID NO: 1356192 - RNA, 19 nt, Human
agugguccaauucagcaau

SEQ ID NO: 1356193 - RNA, 23 nt, Human
auaaaaagcaguucugugcugcc

SEQ ID NO: 1356194 - RNA, 24 nt, Human
aucacaauugcaccaggaaugacc

SEQ ID NO: 1356195 - RNA, 20 nt, Human
augaaauuacuguaccaaag

SEQ ID NO: 1356196 - RNA, 26 nt, Human
caaccaagcagguaacauuguaauga

SEQ ID NO: 1356197 - RNA, 24 nt, Human
caagaaguacuugaguacugaaga

SEQ ID NO: 1356198 - RNA, 24 nt, Human
caaguaccugugauuucauuccug

SEQ ID NO: 1356199 - RNA, 23 nt, Human
caauaguacaaaucaugaguucc

SEQ ID NO: 1356200 - RNA, 21 nt, Human
caauccagacuaaaucccaga

SEQ ID NO: 1356201 - RNA, 21 nt, Human
cacaauccagacuaaauccca

SEQ ID NO: 1356202 - RNA, 21 nt, Human
cacacuuuaauaacgcuauaa

SEQ ID NO: 1356203 - RNA, 24 nt, Human
cagacauaauaauuuuucuguucu

SEQ ID NO: 1356204 - RNA, 19 nt, Human
cagaccccaaaauaaaaag

SEQ ID NO: 1356205 - RNA, 25 nt, Human
cagaccccaaaauaaaaagcaguuc

SEQ ID NO: 1356206 - RNA, 18 nt, Human
cagaguacagcagugggu

SEQ ID NO: 1356207 - RNA, 24 nt, Human
cagcaacaaccaagcagguaacau

SEQ ID NO: 1356208 - RNA, 19 nt, Human
cauaucauugccaugaaua

SEQ ID NO: 1356209 - RNA, 22 nt, Human
ccauucauucuggcuaaagaaa

SEQ ID NO: 1356210 - RNA, 23 nt, Human
cccccaaguaccugugauuucau

SEQ ID NO: 1356211 - RNA, 18 nt, Human
ccgcugccuccgccgugc

SEQ ID NO: 1356212 - RNA, 19 nt, Human
ccgcugccuccgccgugcc

SEQ ID NO: 1356213 - RNA, 20 nt, Human
ccuacacuaauccuagaaac

SEQ ID NO: 1356214 - RNA, 23 nt, Human
ccuaguuuaaagcaccacacaac

SEQ ID NO: 1356215 - RNA, 19 nt, Human
cgccgugcccggggcugcg

SEQ ID NO: 1356216 - RNA, 24 nt, Human
cgggagaggcgcaggacugcggcg

SEQ ID NO: 1356217 - RNA, 28 nt, Human
cggggcugcggagcgggagacaggggcg

SEQ ID NO: 1356218 - RNA, 18 nt, Human
cuaaaacugcaaugaccu

SEQ ID NO: 1356219 - RNA, 26 nt, Human
cucggcgccagccucgugccgguucc

SEQ ID NO: 1356220 - RNA, 18 nt, Human
gaaauggaacguuuacaa

SEQ ID NO: 1356221 - RNA, 23 nt, Human
gaacacagacauaauaauuuuuc

SEQ ID NO: 1356222 - RNA, 31 nt, Human
gcaacaaccaagcagguaacauucccaauuu

SEQ ID NO: 1356223 - RNA, 22 nt, Human
gcaagauugcuaauaccuaaga

SEQ ID NO: 1356224 - RNA, 18 nt, Human
gcccagggcuccgcugcc

SEQ ID NO: 1356225 - RNA, 20 nt, Human
gcccggggcugcggagcggg

SEQ ID NO: 1356226 - RNA, 22 nt, Human
ggagacaggggcgggagaggcg

SEQ ID NO: 1356227 - RNA, 21 nt, Human
gggaaaaaagaaauggaacgu

SEQ ID NO: 1356228 - RNA, 23 nt, Human
gggcgggagaggcgcaggacugc

SEQ ID NO: 1356229 - RNA, 24 nt, Human
gggcgggagaggcgcaggacugcg

SEQ ID NO: 1356230 - RNA, 20 nt, Human
gggcugcggagcgggagaca

SEQ ID NO: 1356231 - RNA, 21 nt, Human
guaccaaagccuuuuuuuccu

SEQ ID NO: 1356232 - RNA, 21 nt, Human
uaaaaagcaguucugugcugc

SEQ ID NO: 1356233 - RNA, 24 nt, Human
uaaaagaauccuuucccauuuaaa

SEQ ID NO: 1356234 - RNA, 23 nt, Human
uaaaaugccaaugagcaucaaaa

SEQ ID NO: 1356235 - RNA, 23 nt, Human
uaacauucccaauuugaguguca

SEQ ID NO: 1356236 - RNA, 24 nt, Human
uaagaaaaauagggccuuaaaaua

SEQ ID NO: 1356237 - RNA, 24 nt, Human
uaauacaguuccacaggguaaauu

SEQ ID NO: 1356238 - RNA, 22 nt, Human
uauaagcaagauugcuaauacc

SEQ ID NO: 1356239 - RNA, 25 nt, Human
uauaagcaagauugcuaauaccuaa

SEQ ID NO: 1356240 - RNA, 18 nt, Human
uaucaagucagcaacaac

SEQ ID NO: 1356241 - RNA, 22 nt, Human
uauuuuacagccauagagauca

SEQ ID NO: 1356242 - RNA, 18 nt, Human
uccacaggguaaauuguc

SEQ ID NO: 1356243 - RNA, 22 nt, Human
uccagacuaaaucccagaagau

SEQ ID NO: 1356244 - RNA, 23 nt, Human
uccaggauuaacccauuaaaaca

SEQ ID NO: 1356245 - RNA, 24 nt, Human
ucccaagggaacacagacauaaua

SEQ ID NO: 1356246 - RNA, 21 nt, Human
ucuuuggcaucugacaggauu

SEQ ID NO: 1356247 - RNA, 19 nt, Human
ugaauacauaucauugcca

SEQ ID NO: 1356248 - RNA, 23 nt, Human
ugaauacauaucauugccaugaa

SEQ ID NO: 1356249 - RNA, 23 nt, Human
ugaccugaugccaugcugaaugg

SEQ ID NO: 1356250 - RNA, 19 nt, Human
ugagucccaagggaacaca

SEQ ID NO: 1356251 - RNA, 23 nt, Human
ugauaguggaccuaguuuaaagc

SEQ ID NO: 1356252 - RNA, 21 nt, Human
ugauuguuguugucacuguuu

SEQ ID NO: 1356253 - RNA, 20 nt, Human
ugcaguugcgugcucuagaa

SEQ ID NO: 1356254 - RNA, 20 nt, Human
ugccagaaaucccaauucag

SEQ ID NO: 1356255 - RNA, 20 nt, Human
ugcccggggcugcggagcgg

SEQ ID NO: 1356256 - RNA, 24 nt, Human
ugcggagcgggagacaggggcggg

SEQ ID NO: 1356257 - RNA, 19 nt, Human
uggcuaaagaaaaaucaca

SEQ ID NO: 1356258 - RNA, 24 nt, Human
uguaaaauaaauacuuuguauccc

SEQ ID NO: 1356259 - RNA, 24 nt, Human
uguacaauuuccaaugagucccaa

SEQ ID NO: 1356260 - RNA, 23 nt, Human
uuacagccauagagaucaauaac

SEQ ID NO: 1356261 - RNA, 20 nt, Human
uucaagaaguacuugaguac

SEQ ID NO: 1356262 - RNA, 19 nt, Human
uuccaggaacacuuagcug

SEQ ID NO: 1356263 - RNA, 23 nt, Human
uucuuuagcaacaaauuaaacca

SEQ ID NO: 1356264 - RNA, 23 nt, Human
uuuuuuuuuuuuuuuuuuaaaag

SEQ ID NO: 1356265 - RNA, 19 nt, Human
aaaaggccacaagccacaa

SEQ ID NO: 1356266 - RNA, 22 nt, Human
aacugcaggcagagcugagagg

SEQ ID NO: 1356267 - RNA, 23 nt, Human
aacugcguaagcacagagaccca

SEQ ID NO: 1356268 - RNA, 23 nt, Human
acaauagcgcgggauauaaaaac

SEQ ID NO: 1356269 - RNA, 22 nt, Human
acgccuucugucgggcgccuua

SEQ ID NO: 1356270 - RNA, 26 nt, Human
agaaccacauaaauaucgaagaaguu

SEQ ID NO: 1356271 - RNA, 22 nt, Human
agaccucacaaccuucacaacu

SEQ ID NO: 1356272 - RNA, 21 nt, Human
agccacaaguuccuuuaaucu

SEQ ID NO: 1356273 - RNA, 19 nt, Human
cacaacacuucaaggagac

SEQ ID NO: 1356274 - RNA, 20 nt, Human
cacaacacuucaaggagacc

SEQ ID NO: 1356275 - RNA, 20 nt, Human
caccuccaccguugcaagaa

SEQ ID NO: 1356276 - RNA, 20 nt, Human
cacuuuucuccccuuccagg

SEQ ID NO: 1356277 - RNA, 19 nt, Human
cagagacccacgcucccuc

SEQ ID NO: 1356278 - RNA, 18 nt, Human
cagcagcgccucaucuca

SEQ ID NO: 1356279 - RNA, 25 nt, Human
cagcaggaaauugcaugaacugagc

SEQ ID NO: 1356280 - RNA, 21 nt, Human
cagcauaaagauuacugugga

SEQ ID NO: 1356281 - RNA, 18 nt, Human
cagccgagcaccuccacc

SEQ ID NO: 1356282 - RNA, 20 nt, Human
caggucaguccccauguuga

SEQ ID NO: 1356283 - RNA, 18 nt, Human
cauugcacaacaagcaac

SEQ ID NO: 1356284 - RNA, 20 nt, Human
cccacgcucccuccuuucca

SEQ ID NO: 1356285 - RNA, 25 nt, Human
cccuaauuagauucuggccugaaac

SEQ ID NO: 1356286 - RNA, 23 nt, Human
ccgcagcagcgccucaucucaca

SEQ ID NO: 1356287 - RNA, 28 nt, Human
ccucccacagcagccggcuguccuuaac

SEQ ID NO: 1356288 - RNA, 22 nt, Human
ccuuucuucucccugaaggagg

SEQ ID NO: 1356289 - RNA, 18 nt, Human
cgccuuauuccuucuuua

SEQ ID NO: 1356290 - RNA, 21 nt, Human
cggcagccguguuggaugcuu

SEQ ID NO: 1356291 - RNA, 24 nt, Human
cggcccuugcacaaaaaggccaca

SEQ ID NO: 1356292 - RNA, 24 nt, Human
cgggauauaaaaacacaagaacca

SEQ ID NO: 1356293 - RNA, 22 nt, Human
cguaagcacagagacccacgcu

SEQ ID NO: 1356294 - RNA, 22 nt, Human
cucacagcucauuaaccgccac

SEQ ID NO: 1356295 - RNA, 23 nt, Human
cugaauagacacauguacaugaa

SEQ ID NO: 1356296 - RNA, 22 nt, Human
cuguccuuaacgcugaugcucc

SEQ ID NO: 1356297 - RNA, 26 nt, Human
cuucacaacugcguaagcacagagac

SEQ ID NO: 1356298 - RNA, 23 nt, Human
gacacauguacaugaagcgccaa

SEQ ID NO: 1356299 - RNA, 23 nt, Human
gagcaccuccaccguugcaagaa

SEQ ID NO: 1356300 - RNA, 19 nt, Human
gaugcuuuucugggcgccu

SEQ ID NO: 1356301 - RNA, 25 nt, Human
gcacaaaaaggccacaagccacaag

SEQ ID NO: 1356302 - RNA, 22 nt, Human
gcagcagcggccgcagcagcgc

SEQ ID NO: 1356303 - RNA, 22 nt, Human
gccggcuguccuuaacgcugau

SEQ ID NO: 1356304 - RNA, 19 nt, Human
gcugccuccuuucuucucc

SEQ ID NO: 1356305 - RNA, 21 nt, Human
ggcucuguagcgauggugacg

SEQ ID NO: 1356306 - RNA, 21 nt, Human
guaucuaugucucuaaugcag

SEQ ID NO: 1356307 - RNA, 23 nt, Human
uaaaaacacaagaaccacauaaa

SEQ ID NO: 1356308 - RNA, 18 nt, Human
uaagacacaauagcgcgg

SEQ ID NO: 1356309 - RNA, 22 nt, Human
uaagcacagagacccacgcucc

SEQ ID NO: 1356310 - RNA, 21 nt, Human
uaaugcagcauaaagauuacu

SEQ ID NO: 1356311 - RNA, 21 nt, Human
uacacuuuucuccccuuccaa

SEQ ID NO: 1356312 - RNA, 21 nt, Human
uaccagccgagcaccuccacc

SEQ ID NO: 1356313 - RNA, 20 nt, Human
uagauucuggccugaaacuu

SEQ ID NO: 1356314 - RNA, 20 nt, Human
ucaacugcaggcagagcuga

SEQ ID NO: 1356315 - RNA, 21 nt, Human
uccacaacaaagacaaacgcc

SEQ ID NO: 1356316 - RNA, 19 nt, Human
uccccuuccaggcggcccu

SEQ ID NO: 1356317 - RNA, 21 nt, Human
uccccuuccaggcggcccuug

SEQ ID NO: 1356318 - RNA, 21 nt, Human
uccgcaaggccugaauagaca

SEQ ID NO: 1356319 - RNA, 24 nt, Human
ucgcugccuccuuucuucucccug

SEQ ID NO: 1356320 - RNA, 22 nt, Human
ucucccugaaggaggugggagu

SEQ ID NO: 1356321 - RNA, 23 nt, Human
ucucugcagcaggaaauugcaug

SEQ ID NO: 1356322 - RNA, 18 nt, Human
ucugcagcaggaaauugc

SEQ ID NO: 1356323 - RNA, 24 nt, Human
ucugcuucgcugccuccuuucuuc

SEQ ID NO: 1356324 - RNA, 23 nt, Human
ucuguagcgauggugacguggaa

SEQ ID NO: 1356325 - RNA, 22 nt, Human
ugaauagacacauguacaugaa

SEQ ID NO: 1356326 - RNA, 28 nt, Human
ugaauagacacauguacaugaagcgcca

SEQ ID NO: 1356327 - RNA, 20 nt, Human
ugcaagaacacaguacagca

SEQ ID NO: 1356328 - RNA, 22 nt, Human
ugcacaacaagcaacacaaaga

SEQ ID NO: 1356329 - RNA, 21 nt, Human
ugcagcaggaaauugcaugaa

SEQ ID NO: 1356330 - RNA, 21 nt, Human
ugccuccuuucuucucccuga

SEQ ID NO: 1356331 - RNA, 18 nt, Human
uggccugaaacuuuuggc

SEQ ID NO: 1356332 - RNA, 25 nt, Human
uuuuauggaugguaggcagagguca

SEQ ID NO: 1356333 - RNA, 22 nt, Human
uuuucauguaaacaguuuugcu

SEQ ID NO: 1356334 - RNA, 23 nt, Human
aaaaaaaaaagaaaaaaaaagaa

SEQ ID NO: 1356335 - RNA, 24 nt, Human
aaaaaaagaaaaaaaaagaaaaag

SEQ ID NO: 1356336 - RNA, 19 nt, Human
aaaaaagaaaaagaaacua

SEQ ID NO: 1356337 - RNA, 23 nt, Human
aaaagaaaaaaaaagaaaaagaa

SEQ ID NO: 1356338 - RNA, 27 nt, Human
aaaagaaaaagaaacuauuaugcagga

SEQ ID NO: 1356339 - RNA, 21 nt, Human
aaaagaaaacauaggcaaaga

SEQ ID NO: 1356340 - RNA, 19 nt, Human
aaaagaagaagaaagagca

SEQ ID NO: 1356341 - RNA, 22 nt, Human
aaaagaagaagaaagagcagaa

SEQ ID NO: 1356342 - RNA, 27 nt, Human
aaaagaagaagaaagagcagaaaagaa

SEQ ID NO: 1356343 - RNA, 23 nt, Human
aaacagaucagucuggaggagac

SEQ ID NO: 1356344 - RNA, 22 nt, Human
aaagaaaaaaaaagaaaaagaa

SEQ ID NO: 1356345 - RNA, 25 nt, Human
aaagaaagaagagguagaggaggau

SEQ ID NO: 1356346 - RNA, 23 nt, Human
aaccuaccccuuuccagccucua

SEQ ID NO: 1356347 - RNA, 25 nt, Human
aacuagcuguccccuucugggccuc

SEQ ID NO: 1356348 - RNA, 18 nt, Human
aagaaaaaaaaagaaaaa

SEQ ID NO: 1356349 - RNA, 26 nt, Human
aagaagaaaagaagaagaaagagcag

SEQ ID NO: 1356350 - RNA, 24 nt, Human
aagaagaagaaagagcagaaaaga

SEQ ID NO: 1356351 - RNA, 25 nt, Human
aagaagaagaaagagcagaaaagaa

SEQ ID NO: 1356352 - RNA, 21 nt, Human
aagacaggagaggaaaaaaga

SEQ ID NO: 1356353 - RNA, 21 nt, Human
aagagcagaaaagaaagaaga

SEQ ID NO: 1356354 - RNA, 22 nt, Human
aagcaauggaguaggagaagga

SEQ ID NO: 1356355 - RNA, 24 nt, Human
aaucgcuugaaccugggaggugga

SEQ ID NO: 1356356 - RNA, 21 nt, Human
aauggauggacagauggaugg

SEQ ID NO: 1356357 - RNA, 24 nt, Human
acuccccagugcaaaaaccuuggc

SEQ ID NO: 1356358 - RNA, 18 nt, Human
acugcacuccagccuggg

SEQ ID NO: 1356359 - RNA, 24 nt, Human
acugcacuccagccugggugacag

SEQ ID NO: 1356360 - RNA, 23 nt, Human
acuuugggggccagcuucuccag

SEQ ID NO: 1356361 - RNA, 23 nt, Human
agaaaagaaaacauaggcaaaga

SEQ ID NO: 1356362 - RNA, 22 nt, Human
agaaaagaaagaagagguagag

SEQ ID NO: 1356363 - RNA, 24 nt, Human
agaaaagaaagaagagguagagga

SEQ ID NO: 1356364 - RNA, 22 nt, Human
agaagaaaagaagaagaaagag

SEQ ID NO: 1356365 - RNA, 24 nt, Human
agaagcucggggcagcugacaccc

SEQ ID NO: 1356366 - RNA, 23 nt, Human
agacaggagaggaaaaaagaaaa

SEQ ID NO: 1356367 - RNA, 26 nt, Human
agacaggagaggaaaaaaggggaccc

SEQ ID NO: 1356368 - RNA, 24 nt, Human
agacugaggcaggagaaucgcuug

SEQ ID NO: 1356369 - RNA, 20 nt, Human
agaugaacagaaacagauca

SEQ ID NO: 1356370 - RNA, 23 nt, Human
agccgggugugguggugcacgcc

SEQ ID NO: 1356371 - RNA, 24 nt, Human
agccugggugacagaacgagacuc

SEQ ID NO: 1356372 - RNA, 21 nt, Human
agcuugccucucccugcucug

SEQ ID NO: 1356373 - RNA, 18 nt, Human
aggaaaaaagaaaagaaa

SEQ ID NO: 1356374 - RNA, 19 nt, Human
aggaguuuuaugcuauaga

SEQ ID NO: 1356375 - RNA, 23 nt, Human
aggcagcugcucugcccuaacuc

SEQ ID NO: 1356376 - RNA, 22 nt, Human
aggcaggagaaucgcuugaacc

SEQ ID NO: 1356377 - RNA, 24 nt, Human
aggcaggagaaucgcuugaaccug

SEQ ID NO: 1356378 - RNA, 18 nt, Human
aggcaggcaggcagcugc

SEQ ID NO: 1356379 - RNA, 20 nt, Human
aggcaggcaggcagcugcuc

SEQ ID NO: 1356380 - RNA, 24 nt, Human
agguggagguugcagugagccaag

SEQ ID NO: 1356381 - RNA, 18 nt, Human
aguccagauacaaaaggg

SEQ ID NO: 1356382 - RNA, 24 nt, Human
aucaugccacugcacuccagccug

SEQ ID NO: 1356383 - RNA, 23 nt, Human
auccuagagucuuucaaaaauga

SEQ ID NO: 1356384 - RNA, 21 nt, Human
augccacugcacuccagccug

SEQ ID NO: 1356385 - RNA, 23 nt, Human
auggaguaggagaaggagaaaaa

SEQ ID NO: 1356386 - RNA, 24 nt, Human
auggcucauacaaaccuaccccuu

SEQ ID NO: 1356387 - RNA, 24 nt, Human
caagaucaugccacugcacuccag

SEQ ID NO: 1356388 - RNA, 22 nt, Human
cacagcuagaaaagggagacac

SEQ ID NO: 1356389 - RNA, 26 nt, Human
cacaguccagauacaaaagggagucu

SEQ ID NO: 1356390 - RNA, 19 nt, Human
cacgccugaaaucccagcu

SEQ ID NO: 1356391 - RNA, 20 nt, Human
cacgccugaaaucccagcua

SEQ ID NO: 1356392 - RNA, 18 nt, Human
cacuccagccugggugac

SEQ ID NO: 1356393 - RNA, 24 nt, Human
cacuccagccugggugacagaacg

SEQ ID NO: 1356394 - RNA, 19 nt, Human
cacugcacuccagccuggg

SEQ ID NO: 1356395 - RNA, 21 nt, Human
cacugcacuccagccugggug

SEQ ID NO: 1356396 - RNA, 22 nt, Human
cacugcacuccagccuggguga

SEQ ID NO: 1356397 - RNA, 23 nt, Human
cacugcacuccagccugggugac

SEQ ID NO: 1356398 - RNA, 24 nt, Human
cacugcacuccagccugggugaca

SEQ ID NO: 1356399 - RNA, 25 nt, Human
cacugcacuccagccugggugacag

SEQ ID NO: 1356400 - RNA, 19 nt, Human
cagaagccuagcagcagag

SEQ ID NO: 1356401 - RNA, 19 nt, Human
cagcaagguacuggcaacc

SEQ ID NO: 1356402 - RNA, 21 nt, Human
cagcaggaacauaucuccaaa

SEQ ID NO: 1356403 - RNA, 20 nt, Human
cagccucuaggccuuugccu

SEQ ID NO: 1356404 - RNA, 20 nt, Human
cagcuucuccagaacucccc

SEQ ID NO: 1356405 - RNA, 21 nt, Human
caggaugcggaggagcccccu

SEQ ID NO: 1356406 - RNA, 23 nt, Human
cagugaggggagaaggcaggcag

SEQ ID NO: 1356407 - RNA, 23 nt, Human
cauaucuccaaaagugugggcca

SEQ ID NO: 1356408 - RNA, 20 nt, Human
ccacugcacuccagccuggg

SEQ ID NO: 1356409 - RNA, 20 nt, Human
ccacugcacuccagccuggg

SEQ ID NO: 1356410 - RNA, 21 nt, Human
ccacugcacuccagccugggu

SEQ ID NO: 1356411 - RNA, 21 nt, Human
ccacugcacuccagccugggu

SEQ ID NO: 1356412 - RNA, 24 nt, Human
ccacugcacuccagccugggugac

SEQ ID NO: 1356413 - RNA, 24 nt, Human
ccauauagccccuccuggccucca

SEQ ID NO: 1356414 - RNA, 20 nt, Human
ccaucuuccugaaccuuucc

SEQ ID NO: 1356415 - RNA, 21 nt, Human
cccccuggcucuaagcuccug

SEQ ID NO: 1356416 - RNA, 19 nt, Human
ccccuagcauccuagaguc

SEQ ID NO: 1356417 - RNA, 20 nt, Human
cccugcucuggauccuccuc

SEQ ID NO: 1356418 - RNA, 18 nt, Human
cccugggagcuguggggc

SEQ ID NO: 1356419 - RNA, 24 nt, Human
ccucaggcaacuagcuguccccuu

SEQ ID NO: 1356420 - RNA, 22 nt, Human
ccugaaaucccagcuacucagg

SEQ ID NO: 1356421 - RNA, 18 nt, Human
ccugaaccuuucccuccu

SEQ ID NO: 1356422 - RNA, 21 nt, Human
ccugggagguggagguugcag

SEQ ID NO: 1356423 - RNA, 22 nt, Human
ccugggugacagaacgagacuc

SEQ ID NO: 1356424 - RNA, 24 nt, Human
cgccugaaaucccagcuacucagg

SEQ ID NO: 1356425 - RNA, 21 nt, Human
cgcuugaaccugggaggugga

SEQ ID NO: 1356426 - RNA, 22 nt, Human
cucccaacugcuggaguagcug

SEQ ID NO: 1356427 - RNA, 22 nt, Human
cuccuggccagcaucagucugc

SEQ ID NO: 1356428 - RNA, 23 nt, Human
cucuacuaaaaauauaaaaaauu

SEQ ID NO: 1356429 - RNA, 24 nt, Human
cuggcucaaggagugaagugggca

SEQ ID NO: 1356430 - RNA, 24 nt, Human
cuggcugggcagaaauagccacac

SEQ ID NO: 1356431 - RNA, 24 nt, Human
cuucuccagaacuccccagugcaa

SEQ ID NO: 1356432 - RNA, 20 nt, Human
cuuugccuaggcuguucccc

SEQ ID NO: 1356433 - RNA, 19 nt, Human
gaaaaaagaaaagaaaaga

SEQ ID NO: 1356434 - RNA, 19 nt, Human
gaaaauauguucaagccuc

SEQ ID NO: 1356435 - RNA, 18 nt, Human
gaagaagaaaagaagaag

SEQ ID NO: 1356436 - RNA, 24 nt, Human
gaagaagaaaagaagaagaaagag

SEQ ID NO: 1356437 - RNA, 19 nt, Human
gaagagcugaggcccagca

SEQ ID NO: 1356438 - RNA, 21 nt, Human
gacagaacgagacuccgucuc

SEQ ID NO: 1356439 - RNA, 20 nt, Human
gagaaaugcacucugguuuu

SEQ ID NO: 1356440 - RNA, 23 nt, Human
gagaaucgcuugaaccugggagg

SEQ ID NO: 1356441 - RNA, 22 nt, Human
gagacaccaacuuaucucccuu

SEQ ID NO: 1356442 - RNA, 22 nt, Human
gagguugcagugagccaagauc

SEQ ID NO: 1356443 - RNA, 19 nt, Human
gaugagggaagaagaaaag

SEQ ID NO: 1356444 - RNA, 23 nt, Human
gauucucuuuaauuucccucuau

SEQ ID NO: 1356445 - RNA, 20 nt, Human
gcagcagaggcuucugggac

SEQ ID NO: 1356446 - RNA, 20 nt, Human
gccaagaucaugccacugca

SEQ ID NO: 1356447 - RNA, 19 nt, Human
gccacugcacuccagccug

SEQ ID NO: 1356448 - RNA, 24 nt, Human
gccacugcacuccagccuggguga

SEQ ID NO: 1356449 - RNA, 19 nt, Human
gccccuccuggccuccagc

SEQ ID NO: 1356450 - RNA, 21 nt, Human
gcucauacaaaccuaccccuu

SEQ ID NO: 1356451 - RNA, 25 nt, Human
ggaagaagaaaagaagaagaaagag

SEQ ID NO: 1356452 - RNA, 19 nt, Human
ggacaggaugcggaggagc

SEQ ID NO: 1356453 - RNA, 19 nt, Human
ggaggcugcuaugaucaug

SEQ ID NO: 1356454 - RNA, 20 nt, Human
ggagguugcagugagccaag

SEQ ID NO: 1356455 - RNA, 24 nt, Human
ggagguugcagugagccaagauca

SEQ ID NO: 1356456 - RNA, 22 nt, Human
ggauggaugaaggagggagggu

SEQ ID NO: 1356457 - RNA, 18 nt, Human
ggauugugagaaggaagg

SEQ ID NO: 1356458 - RNA, 18 nt, Human
ggcagcagaggcuucugg

SEQ ID NO: 1356459 - RNA, 19 nt, Human
ggcccauccaccaaggaug

SEQ ID NO: 1356460 - RNA, 18 nt, Human
gggggccagcuucuccag

SEQ ID NO: 1356461 - RNA, 24 nt, Human
gguggugcacgccugaaaucccag

SEQ ID NO: 1356462 - RNA, 22 nt, Human
guugcaucucccccuggcucua

SEQ ID NO: 1356463 - RNA, 24 nt, Human
guuucuccaaaccuggggagugug

SEQ ID NO: 1356464 - RNA, 19 nt, Human
uaaaaaaaaaaaagaaaaa

SEQ ID NO: 1356465 - RNA, 18 nt, Human
uagccccaaguuccagcc

SEQ ID NO: 1356466 - RNA, 21 nt, Human
ucaagguggaaugaguagaag

SEQ ID NO: 1356467 - RNA, 18 nt, Human
ucacucaaggcuucucuu

SEQ ID NO: 1356468 - RNA, 19 nt, Human
ucagucuggaggagacgga

SEQ ID NO: 1356469 - RNA, 22 nt, Human
ucaguggcuuccuacugcuucc

SEQ ID NO: 1356470 - RNA, 23 nt, Human
ucaugccacugcacuccagccug

SEQ ID NO: 1356471 - RNA, 22 nt, Human
uccacagcuagaaaagggagac

SEQ ID NO: 1356472 - RNA, 19 nt, Human
uccagauacaaaagggagu

SEQ ID NO: 1356473 - RNA, 21 nt, Human
uccagccgugccacuaucucu

SEQ ID NO: 1356474 - RNA, 24 nt, Human
uccagccugggugacagaacgaga

SEQ ID NO: 1356475 - RNA, 21 nt, Human
uccagcucugacacucugcau

SEQ ID NO: 1356476 - RNA, 20 nt, Human
ucccccuggcucuaagcucc

SEQ ID NO: 1356477 - RNA, 25 nt, Human
uccccugcuguugcaucucccccug

SEQ ID NO: 1356478 - RNA, 21 nt, Human
uccucccaugccaggcuucau

SEQ ID NO: 1356479 - RNA, 24 nt, Human
ucgcuugaaccugggagguggagg

SEQ ID NO: 1356480 - RNA, 19 nt, Human
ucucauaaaaaaaaaaaag

SEQ ID NO: 1356481 - RNA, 21 nt, Human
ucuccaaaagugugggccaag

SEQ ID NO: 1356482 - RNA, 22 nt, Human
ucuccaaaagugugggccaagu

SEQ ID NO: 1356483 - RNA, 18 nt, Human
ucucuguguguccucagg

SEQ ID NO: 1356484 - RNA, 24 nt, Human
ugaaccugggagguggagguugca

SEQ ID NO: 1356485 - RNA, 24 nt, Human
ugacacucugcauauucugggaug

SEQ ID NO: 1356486 - RNA, 20 nt, Human
ugaggcaggagaaucgcuug

SEQ ID NO: 1356487 - RNA, 24 nt, Human
ugaggcaggagaaucgcuugaacc

SEQ ID NO: 1356488 - RNA, 24 nt, Human
ugaggcaggagaaucgcuugaacc

SEQ ID NO: 1356489 - RNA, 19 nt, Human
ugaggcccagcaagguacu

SEQ ID NO: 1356490 - RNA, 21 nt, Human
ugaggcccagcaagguacugg

SEQ ID NO: 1356491 - RNA, 18 nt, Human
ugaggggagaaggcaggc

SEQ ID NO: 1356492 - RNA, 24 nt, Human
ugaugagggaagaagaaaagaaga

SEQ ID NO: 1356493 - RNA, 21 nt, Human
ugauucucuuuaauuucccuc

SEQ ID NO: 1356494 - RNA, 21 nt, Human
ugccaaaucucuuccccugcu

SEQ ID NO: 1356495 - RNA, 26 nt, Human
ugcccuugucccugccauuguggccc

SEQ ID NO: 1356496 - RNA, 18 nt, Human
ugcuggaguagcuggcug

SEQ ID NO: 1356497 - RNA, 23 nt, Human
uggaaugaguagaagcucggggc

SEQ ID NO: 1356498 - RNA, 18 nt, Human
uggaggcuaggcccauau

SEQ ID NO: 1356499 - RNA, 22 nt, Human
uggaguaggagaaggagaaaaa

SEQ ID NO: 1356500 - RNA, 22 nt, Human
uggauggacagauggauggaug

SEQ ID NO: 1356501 - RNA, 24 nt, Human
uggauggaugaaggagggagggug

SEQ ID NO: 1356502 - RNA, 19 nt, Human
uggcagcagaggcuucugg

SEQ ID NO: 1356503 - RNA, 20 nt, Human
uggcagcagaggcuucuggg

SEQ ID NO: 1356504 - RNA, 18 nt, Human
uggccaucuuccugaacc

SEQ ID NO: 1356505 - RNA, 22 nt, Human
uggccuccagcuugccucuccc

SEQ ID NO: 1356506 - RNA, 23 nt, Human
uggcucuaagcuccugugcuccu

SEQ ID NO: 1356507 - RNA, 18 nt, Human
ugggagguggagguugca

SEQ ID NO: 1356508 - RNA, 29 nt, Human
ugggagguggagguugcagugacaacggu

SEQ ID NO: 1356509 - RNA, 24 nt, Human
ugggagguggagguugcagugagc

SEQ ID NO: 1356510 - RNA, 18 nt, Human
uguccagcucugacacuc

SEQ ID NO: 1356511 - RNA, 20 nt, Human
uuagccgggugugguggugc

SEQ ID NO: 1356512 - RNA, 22 nt, Human
uuagccgggugugguggugcac

SEQ ID NO: 1356513 - RNA, 24 nt, Human
uuagccgggugugguggugcacgc

SEQ ID NO: 1356514 - RNA, 24 nt, Human
uuccaaugucagccauaggguacc

SEQ ID NO: 1356515 - RNA, 24 nt, Human
uugaaccugggagguggagguugc

SEQ ID NO: 1356516 - RNA, 20 nt, Human
uugcagugagccaagaucau

SEQ ID NO: 1356517 - RNA, 29 nt, Human
aaaauguccuggacuggguggggagggga

SEQ ID NO: 1356518 - RNA, 25 nt, Human
aacaggcagauccaaacauuuauac

SEQ ID NO: 1356519 - RNA, 20 nt, Human
agagaaaaggggggcauggg

SEQ ID NO: 1356520 - RNA, 21 nt, Human
agcgacaaucaacagaaagaa

SEQ ID NO: 1356521 - RNA, 21 nt, Human
agcugguggugcugggcaccu

SEQ ID NO: 1356522 - RNA, 21 nt, Human
aggaaagaccacccaccaaaa

SEQ ID NO: 1356523 - RNA, 21 nt, Human
agggaggagagaaaagggggg

SEQ ID NO: 1356524 - RNA, 20 nt, Human
aucaucaucuucuuccucuu

SEQ ID NO: 1356525 - RNA, 22 nt, Human
aucuucuucaucuucaucuuca

SEQ ID NO: 1356526 - RNA, 25 nt, Human
aucuucuucaucuucaucuucauca

SEQ ID NO: 1356527 - RNA, 19 nt, Human
caccuggcgggugccgcug

SEQ ID NO: 1356528 - RNA, 19 nt, Human
cagccagcuggagcgacaa

SEQ ID NO: 1356529 - RNA, 18 nt, Human
cagcuccuggacucuggg

SEQ ID NO: 1356530 - RNA, 22 nt, Human
caucaucuucuucaucuucauc

SEQ ID NO: 1356531 - RNA, 19 nt, Human
ccagcuccuggacucuggg

SEQ ID NO: 1356532 - RNA, 21 nt, Human
ccccccacauuucauuuuuuu

SEQ ID NO: 1356533 - RNA, 18 nt, Human
ccccugcacgcggccgcg

SEQ ID NO: 1356534 - RNA, 18 nt, Human
cccuucauccuggcccug

SEQ ID NO: 1356535 - RNA, 19 nt, Human
ccuggcccuggugcggucc

SEQ ID NO: 1356536 - RNA, 19 nt, Human
cgacaaucaacagaaagaa

SEQ ID NO: 1356537 - RNA, 19 nt, Human
cgccuccuccuccagcagc

SEQ ID NO: 1356538 - RNA, 24 nt, Human
cgccuccuccuccagcagccccug

SEQ ID NO: 1356539 - RNA, 22 nt, Human
cggccucgagccgccgccuccu

SEQ ID NO: 1356540 - RNA, 21 nt, Human
cuccagacggccucgagccgc

SEQ ID NO: 1356541 - RNA, 24 nt, Human
cuccagcagccccugcacgcggcc

SEQ ID NO: 1356542 - RNA, 27 nt, Human
cuccagcagccccugcacgcggccgcg

SEQ ID NO: 1356543 - RNA, 23 nt, Human
cucgcucuucuccaccucucuug

SEQ ID NO: 1356544 - RNA, 20 nt, Human
cuggcggccggcggcgcccu

SEQ ID NO: 1356545 - RNA, 22 nt, Human
cugguggugcugggcaccugca

SEQ ID NO: 1356546 - RNA, 22 nt, Human
cuucaucaucaucuucuuccuc

SEQ ID NO: 1356547 - RNA, 20 nt, Human
gagccgccgccuccuccucc

SEQ ID NO: 1356548 - RNA, 27 nt, Human
gaggaucuuggggagaugacgacgacg

SEQ ID NO: 1356549 - RNA, 22 nt, Human
ggacuggguggggagggucagc

SEQ ID NO: 1356550 - RNA, 27 nt, Human
ggaggagagaaaaggggggcaugggug

SEQ ID NO: 1356551 - RNA, 20 nt, Human
ggccggcggcgcccguccgg

SEQ ID NO: 1356552 - RNA, 19 nt, Human
ggcgaccgccggcgccgcc

SEQ ID NO: 1356553 - RNA, 25 nt, Human
ggcuggggcaggggugaggcugggc

SEQ ID NO: 1356554 - RNA, 22 nt, Human
ggggguccacuccuugacccuc

SEQ ID NO: 1356555 - RNA, 20 nt, Human
ggguccacuccuugacccuc

SEQ ID NO: 1356556 - RNA, 19 nt, Human
ggugguaggggagggagga

SEQ ID NO: 1356557 - RNA, 21 nt, Human
guccagcuccuggacucuggg

SEQ ID NO: 1356558 - RNA, 19 nt, Human
uaaacaggcagauccaaac

SEQ ID NO: 1356559 - RNA, 22 nt, Human
uccgagacgggugcgcuccaga

SEQ ID NO: 1356560 - RNA, 21 nt, Human
ucucgggcacuucagagcccu

SEQ ID NO: 1356561 - RNA, 21 nt, Human
ucuguuaugagggcugagggu

SEQ ID NO: 1356562 - RNA, 21 nt, Human
ucuucuccaccucucuugcug

SEQ ID NO: 1356563 - RNA, 24 nt, Human
ugacacaucaucuucuucaucuuc

SEQ ID NO: 1356564 - RNA, 22 nt, Human
ugagacagacacaaggggcaaa

SEQ ID NO: 1356565 - RNA, 21 nt, Human
ugagaugggggccggaauggg

SEQ ID NO: 1356566 - RNA, 18 nt, Human
ugaggagcagaugugugu

SEQ ID NO: 1356567 - RNA, 18 nt, Human
uggacuggguggggaggg

SEQ ID NO: 1356568 - RNA, 22 nt, Human
uggacuggguggggagggucag

SEQ ID NO: 1356569 - RNA, 22 nt, Human
uggcgggugccgcugcccgggg

SEQ ID NO: 1356570 - RNA, 23 nt, Human
uggggcaggggugaggcugggcg

SEQ ID NO: 1356571 - RNA, 21 nt, Human
ugggggccggaaugggcuggg

SEQ ID NO: 1356572 - RNA, 22 nt, Human
uggguggggagggucagccacc

SEQ ID NO: 1356573 - RNA, 18 nt, Human
uggugcgguccgcagggg

SEQ ID NO: 1356574 - RNA, 22 nt, Human
uuauacaggaaacaucuggcug

SEQ ID NO: 1356575 - RNA, 20 nt, Human
aagcccaaagccagcggcag

SEQ ID NO: 1356576 - RNA, 18 nt, Human
agcucggggugaaggcgg

SEQ ID NO: 1356577 - RNA, 19 nt, Human
aggaagaggccaccccagg

SEQ ID NO: 1356578 - RNA, 22 nt, Human
aggaagggggccggucccaggc

SEQ ID NO: 1356579 - RNA, 22 nt, Human
aggcauaaauaaaaagcgucca

SEQ ID NO: 1356580 - RNA, 19 nt, Human
aggcugggggcgggcaggg

SEQ ID NO: 1356581 - RNA, 19 nt, Human
agguacuggaacucccagc

SEQ ID NO: 1356582 - RNA, 21 nt, Human
auuuucacccccucccuccac

SEQ ID NO: 1356583 - RNA, 20 nt, Human
cagcggcaggggcucuugac

SEQ ID NO: 1356584 - RNA, 20 nt, Human
caggcugguggggcaggggg

SEQ ID NO: 1356585 - RNA, 21 nt, Human
ccaacagaggcugcccugccc

SEQ ID NO: 1356586 - RNA, 21 nt, Human
ccagacccucaggccaacaga

SEQ ID NO: 1356587 - RNA, 21 nt, Human
ccagccccgcuguuccgcucc

SEQ ID NO: 1356588 - RNA, 22 nt, Human
ccccaggaagggggccgguccc

SEQ ID NO: 1356589 - RNA, 22 nt, Human
cccccagcucugggaguuucca

SEQ ID NO: 1356590 - RNA, 21 nt, Human
cccccggggccgccgccgccg

SEQ ID NO: 1356591 - RNA, 24 nt, Human
cccccggggccgccgccgccgcuc

SEQ ID NO: 1356592 - RNA, 24 nt, Human
ccccggggccgccgccgccgcucc

SEQ ID NO: 1356593 - RNA, 21 nt, Human
cccucucucugccccuuccca

SEQ ID NO: 1356594 - RNA, 23 nt, Human
cccugcccagccccguuccgcag

SEQ ID NO: 1356595 - RNA, 21 nt, Human
cccugcugcccgcuucccucc

SEQ ID NO: 1356596 - RNA, 20 nt, Human
ccgccgcccugcugcccgcu

SEQ ID NO: 1356597 - RNA, 19 nt, Human
ccgccgccgcccugcugcc

SEQ ID NO: 1356598 - RNA, 20 nt, Human
ccgccgccgcccugcugccc

SEQ ID NO: 1356599 - RNA, 22 nt, Human
ccgccgccgcucccagccccgc

SEQ ID NO: 1356600 - RNA, 26 nt, Human
ccgccgccgcucccagccccgcuguu

SEQ ID NO: 1356601 - RNA, 27 nt, Human
cgccauuuucacccccucccuccacuu

SEQ ID NO: 1356602 - RNA, 21 nt, Human
cggccuggguggggaggcugg

SEQ ID NO: 1356603 - RNA, 21 nt, Human
cggggcacucaggcugguggg

SEQ ID NO: 1356604 - RNA, 19 nt, Human
cgugcucccgccgccgccc

SEQ ID NO: 1356605 - RNA, 20 nt, Human
cgugcucccgccgccgcccu

SEQ ID NO: 1356606 - RNA, 18 nt, Human
cucccacacuuucaaugg

SEQ ID NO: 1356607 - RNA, 21 nt, Human
cucccagcucauguguggucg

SEQ ID NO: 1356608 - RNA, 23 nt, Human
cucccagcucauguguggucggc

SEQ ID NO: 1356609 - RNA, 22 nt, Human
cugcugcccgcuucccuccggc

SEQ ID NO: 1356610 - RNA, 18 nt, Human
cuguagccgagaaaaggg

SEQ ID NO: 1356611 - RNA, 19 nt, Human
gaguuuccagucugaugga

SEQ ID NO: 1356612 - RNA, 19 nt, Human
gcggaggaagcccaaagcc

SEQ ID NO: 1356613 - RNA, 19 nt, Human
gcucugggaguuuccaguc

SEQ ID NO: 1356614 - RNA, 20 nt, Human
gcucugggaguuuccagucu

SEQ ID NO: 1356615 - RNA, 19 nt, Human
gcugcccugcccagccccg

SEQ ID NO: 1356616 - RNA, 18 nt, Human
ggaagacucagcccuauc

SEQ ID NO: 1356617 - RNA, 21 nt, Human
ggcagggcagggggaaugggg

SEQ ID NO: 1356618 - RNA, 19 nt, Human
ggcgcccucucucugcccu

SEQ ID NO: 1356619 - RNA, 21 nt, Human
ggcggaggaagcccaaagcca

SEQ ID NO: 1356620 - RNA, 19 nt, Human
ggcugguggggcagggggc

SEQ ID NO: 1356621 - RNA, 18 nt, Human
gggaggcugggggcgggc

SEQ ID NO: 1356622 - RNA, 18 nt, Human
ggucccaggccacggagg

SEQ ID NO: 1356623 - RNA, 20 nt, Human
gguucagaaauuaaaacauu

SEQ ID NO: 1356624 - RNA, 23 nt, Human
guuccgcaggcuaacacuagugc

SEQ ID NO: 1356625 - RNA, 24 nt, Human
ucaggcggaggaagcccaaagcca

SEQ ID NO: 1356626 - RNA, 18 nt, Human
ucuugacccgcuccagcu

SEQ ID NO: 1356627 - RNA, 22 nt, Human
ugccggccuggguggggaggcu

SEQ ID NO: 1356628 - RNA, 22 nt, Human
uggagucaguguccggggcggc

SEQ ID NO: 1356629 - RNA, 21 nt, Human
uggccagguugccggccuggg

SEQ ID NO: 1356630 - RNA, 21 nt, Human
uggccagguugccggccuggg

SEQ ID NO: 1356631 - RNA, 18 nt, Human
uggggaggcccacccagg

SEQ ID NO: 1356632 - RNA, 18 nt, Human
ugggggcgggcagggcag

SEQ ID NO: 1356633 - RNA, 26 nt, Human
ugggggcgggcagggcagggggaaug

SEQ ID NO: 1356634 - RNA, 21 nt, Human
uguagccgagaaaagggcaaa

SEQ ID NO: 1356635 - RNA, 26 nt, Human
uugaggacgugcucccgccgccgccc

SEQ ID NO: 1356636 - RNA, 19 nt, Human
uuuucacccccucccucca

SEQ ID NO: 1356637 - RNA, 21 nt, Human
aacauccuauaacacacagga

SEQ ID NO: 1356638 - RNA, 25 nt, Human
aagccuauuuuacuugugaaacuaa

SEQ ID NO: 1356639 - RNA, 23 nt, Human
acacaaauacucaccaugguuaa

SEQ ID NO: 1356640 - RNA, 24 nt, Human
acacacaggacaggcccccacaac

SEQ ID NO: 1356641 - RNA, 21 nt, Human
acacaggacaggcccccacaa

SEQ ID NO: 1356642 - RNA, 21 nt, Human
agaauuaucuggucccagaug

SEQ ID NO: 1356643 - RNA, 20 nt, Human
agauacacaaauacucacca

SEQ ID NO: 1356644 - RNA, 23 nt, Human
aggaggagcggacgcuguuccag

SEQ ID NO: 1356645 - RNA, 19 nt, Human
aggguccuggcugacuccu

SEQ ID NO: 1356646 - RNA, 22 nt, Human
agugguggggguggaggccagg

SEQ ID NO: 1356647 - RNA, 21 nt, Human
aguuuccuacccgccccccac

SEQ ID NO: 1356648 - RNA, 24 nt, Human
auaacacacaggacaggcccccac

SEQ ID NO: 1356649 - RNA, 20 nt, Human
augaggccaucgaggcccug

SEQ ID NO: 1356650 - RNA, 22 nt, Human
augcauuucuuagaacguaucc

SEQ ID NO: 1356651 - RNA, 23 nt, Human
auggccccccagcuccuccucag

SEQ ID NO: 1356652 - RNA, 24 nt, Human
auggcuggagauacuuuugguugu

SEQ ID NO: 1356653 - RNA, 22 nt, Human
caacucaucugcagggccgccu

SEQ ID NO: 1356654 - RNA, 19 nt, Human
caaggugggccagcagccc

SEQ ID NO: 1356655 - RNA, 22 nt, Human
cacagugguggggguggaggcc

SEQ ID NO: 1356656 - RNA, 19 nt, Human
caccagcagcagauugccu

SEQ ID NO: 1356657 - RNA, 22 nt, Human
caccagcagcagauugccuucu

SEQ ID NO: 1356658 - RNA, 19 nt, Human
cagagaccagagcccuccu

SEQ ID NO: 1356659 - RNA, 24 nt, Human
cagcucugaucguuggaagauaac

SEQ ID NO: 1356660 - RNA, 22 nt, Human
caggacaggcccccacaaccaa

SEQ ID NO: 1356661 - RNA, 19 nt, Human
caggcccccacaaccaaga

SEQ ID NO: 1356662 - RNA, 24 nt, Human
cauccaacuucuuuauguccacag

SEQ ID NO: 1356663 - RNA, 19 nt, Human
ccaccucugagcagugccc

SEQ ID NO: 1356664 - RNA, 21 nt, Human
ccaccucugagcagugccccc

SEQ ID NO: 1356665 - RNA, 20 nt, Human
ccagcugacccauggcaaaa

SEQ ID NO: 1356666 - RNA, 23 nt, Human
cccagugcgagaugaaccucaug

SEQ ID NO: 1356667 - RNA, 22 nt, Human
cccaguuuccuacccgcccccc

SEQ ID NO: 1356668 - RNA, 24 nt, Human
cccauggcaaaagaggcuugggac

SEQ ID NO: 1356669 - RNA, 22 nt, Human
cccauggccccccagcuccucc

SEQ ID NO: 1356670 - RNA, 20 nt, Human
cccguuuccucccagacugg

SEQ ID NO: 1356671 - RNA, 21 nt, Human
ccguggcugucccaaccaugc

SEQ ID NO: 1356672 - RNA, 21 nt, Human
ccguggugccuccguggcugu

SEQ ID NO: 1356673 - RNA, 21 nt, Human
ccuacaguauucaguacaguc

SEQ ID NO: 1356674 - RNA, 21 nt, Human
ccucagagaccagagcccucc

SEQ ID NO: 1356675 - RNA, 22 nt, Human
ccucagccucguugcuguccca

SEQ ID NO: 1356676 - RNA, 23 nt, Human
ccucugagcagugcccccagcuc

SEQ ID NO: 1356677 - RNA, 24 nt, Human
ccucugagcagugcccccagcuca

SEQ ID NO: 1356678 - RNA, 21 nt, Human
ccuuuugugacauuuggccau

SEQ ID NO: 1356679 - RNA, 21 nt, Human
cgaggcccuggaugcugccau

SEQ ID NO: 1356680 - RNA, 21 nt, Human
cgccuaaugaugcauuucuua

SEQ ID NO: 1356681 - RNA, 21 nt, Human
cgccuggagauggaccgccag

SEQ ID NO: 1356682 - RNA, 23 nt, Human
cuagagcacugcugaggugucug

SEQ ID NO: 1356683 - RNA, 20 nt, Human
cucagcuaccucucauccuc

SEQ ID NO: 1356684 - RNA, 22 nt, Human
cucauggccaagcucagcuacc

SEQ ID NO: 1356685 - RNA, 21 nt, Human
gacgcuguuccaguuggauga

SEQ ID NO: 1356686 - RNA, 24 nt, Human
gagagccagcucugaucguuggaa

SEQ ID NO: 1356687 - RNA, 19 nt, Human
gaggagcagcagaggcugg

SEQ ID NO: 1356688 - RNA, 18 nt, Human
gaucguuggaagauaacu

SEQ ID NO: 1356689 - RNA, 21 nt, Human
gcccccagcucacccuggggu

SEQ ID NO: 1356690 - RNA, 20 nt, Human
gccccccagcuccuccucag

SEQ ID NO: 1356691 - RNA, 18 nt, Human
gcgccuggagauggaccg

SEQ ID NO: 1356692 - RNA, 26 nt, Human
gcucugauuggcuaaccucagggugg

SEQ ID NO: 1356693 - RNA, 21 nt, Human
gcugacccauggcaaaagagg

SEQ ID NO: 1356694 - RNA, 22 nt, Human
gcuguuccuccacgcgugcccg

SEQ ID NO: 1356695 - RNA, 20 nt, Human
ggaggugucucauggcagcu

SEQ ID NO: 1356696 - RNA, 19 nt, Human
gggguuggggcugugacag

SEQ ID NO: 1356697 - RNA, 20 nt, Human
gguguacuggcuggaggugg

SEQ ID NO: 1356698 - RNA, 21 nt, Human
gugcccgucucugcaggagga

SEQ ID NO: 1356699 - RNA, 18 nt, Human
guguggcuaggaaagggu

SEQ ID NO: 1356700 - RNA, 22 nt, Human
uaaggugagagccagcucugau

SEQ ID NO: 1356701 - RNA, 19 nt, Human
uaggaaaggguuuguggca

SEQ ID NO: 1356702 - RNA, 21 nt, Human
uaggaaaggguuuguggcaga

SEQ ID NO: 1356703 - RNA, 21 nt, Human
uauaccaucuagguuugugug

SEQ ID NO: 1356704 - RNA, 21 nt, Human
ucccagugcgagaugaaccuc

SEQ ID NO: 1356705 - RNA, 23 nt, Human
ucccagugcgagaugaaccucau

SEQ ID NO: 1356706 - RNA, 21 nt, Human
uccuacccgccccccacuucu

SEQ ID NO: 1356707 - RNA, 22 nt, Human
uccuugaucuuuugggcucagu

SEQ ID NO: 1356708 - RNA, 21 nt, Human
ucucauggcagcugcuccagc

SEQ ID NO: 1356709 - RNA, 18 nt, Human
ucucauggcagcugcucu

SEQ ID NO: 1356710 - RNA, 24 nt, Human
ucucucgaugggcugacuuggccc

SEQ ID NO: 1356711 - RNA, 21 nt, Human
ucugcaaguauuuugacaagg

SEQ ID NO: 1356712 - RNA, 18 nt, Human
ucugcagggccgccugac

SEQ ID NO: 1356713 - RNA, 19 nt, Human
ucugugauugaggauuagc

SEQ ID NO: 1356714 - RNA, 22 nt, Human
ugaaccucauggccaagcucag

SEQ ID NO: 1356715 - RNA, 20 nt, Human
ugagggcugagccuggcugg

SEQ ID NO: 1356716 - RNA, 22 nt, Human
ugcuccagcggauaucccguuu

SEQ ID NO: 1356717 - RNA, 22 nt, Human
uggaagauaacuagagcacugc

SEQ ID NO: 1356718 - RNA, 18 nt, Human
uggcaaaagaggcuuggg

SEQ ID NO: 1356719 - RNA, 19 nt, Human
uggccccccagcuccuccu

SEQ ID NO: 1356720 - RNA, 23 nt, Human
uggcucagcagggaagacccugg

SEQ ID NO: 1356721 - RNA, 18 nt, Human
uggcugacuccuugaucu

SEQ ID NO: 1356722 - RNA, 18 nt, Human
ugggacagguggugacgc

SEQ ID NO: 1356723 - RNA, 19 nt, Human
ugggacagguggugacgcu

SEQ ID NO: 1356724 - RNA, 21 nt, Human
ugucccaaccaugccuuuugu

SEQ ID NO: 1356725 - RNA, 18 nt, Human
ugugauugaggauuagcu

SEQ ID NO: 1356726 - RNA, 21 nt, Human
uguguggcuaggaaaggguuu

SEQ ID NO: 1356727 - RNA, 21 nt, Human
uuaaggcccaguuguggcuac

SEQ ID NO: 1356728 - RNA, 21 nt, Human
uuagauacacaaauacucacc

SEQ ID NO: 1356729 - RNA, 25 nt, Human
uucagcauucaggcagugggugcug

SEQ ID NO: 1356730 - RNA, 18 nt, Human
uugcccuuuugugacauu

SEQ ID NO: 1356731 - RNA, 21 nt, Human
uuugguuagggugcucugaac

SEQ ID NO: 1356732 - RNA, 23 nt, Human
uuuuagauuuccuaaauggacuc

SEQ ID NO: 1356733 - RNA, 21 nt, Human
uuuugguugucacaguggugg

SEQ ID NO: 1356734 - RNA, 24 nt, Human
uuuugguugucacagugguggggg

SEQ ID NO: 1356735 - RNA, 19 nt, Human
aacuucugucucaucaaga

SEQ ID NO: 1356736 - RNA, 19 nt, Human
acccaggcuggagugcagu

SEQ ID NO: 1356737 - RNA, 23 nt, Human
acccaggcuggagugcaguggug

SEQ ID NO: 1356738 - RNA, 18 nt, Human
acucugucacccaggcug

SEQ ID NO: 1356739 - RNA, 25 nt, Human
acucugucacccaggcuggagugca

SEQ ID NO: 1356740 - RNA, 20 nt, Human
acugcaagcuccgccucccg

SEQ ID NO: 1356741 - RNA, 24 nt, Human
acugccccaacagugauucccuuu

SEQ ID NO: 1356742 - RNA, 21 nt, Human
agcuuuuguauacuaagaaca

SEQ ID NO: 1356743 - RNA, 25 nt, Human
aggcuggagugcaguggugccaucu

SEQ ID NO: 1356744 - RNA, 18 nt, Human
aguagcugggacuacagg

SEQ ID NO: 1356745 - RNA, 21 nt, Human
agugcaguggugccaucucag

SEQ ID NO: 1356746 - RNA, 21 nt, Human
auagccccauaauuucugaau

SEQ ID NO: 1356747 - RNA, 22 nt, Human
auggaagacagcauggcccaca

SEQ ID NO: 1356748 - RNA, 21 nt, Human
auucuccugccucagccuccc

SEQ ID NO: 1356749 - RNA, 22 nt, Human
caacagguacauagccccauaa

SEQ ID NO: 1356750 - RNA, 21 nt, Human
cacccaggcuggagugcagug

SEQ ID NO: 1356751 - RNA, 22 nt, Human
cacgccauucuccugccucagc

SEQ ID NO: 1356752 - RNA, 23 nt, Human
cacucugucacccaggcuggagu

SEQ ID NO: 1356753 - RNA, 24 nt, Human
cacucugucacccaggcuggagug

SEQ ID NO: 1356754 - RNA, 23 nt, Human
cccgaguagcugggacuacaggu

SEQ ID NO: 1356755 - RNA, 24 nt, Human
cccgaguagcugggacuacaggug

SEQ ID NO: 1356756 - RNA, 24 nt, Human
ccucccggguucacgccauucucc

SEQ ID NO: 1356757 - RNA, 23 nt, Human
ccugccucagccucccgaguagc

SEQ ID NO: 1356758 - RNA, 21 nt, Human
ccuugcucauccucauuucca

SEQ ID NO: 1356759 - RNA, 20 nt, Human
cgagagcccuagcugccaac

SEQ ID NO: 1356760 - RNA, 23 nt, Human
cgagagcccuagcugccaaccca

SEQ ID NO: 1356761 - RNA, 19 nt, Human
cgccucccggguucacgcc

SEQ ID NO: 1356762 - RNA, 24 nt, Human
cucacucugucacccaggcuggag

SEQ ID NO: 1356763 - RNA, 24 nt, Human
cucagccucccgaguagcugggac

SEQ ID NO: 1356764 - RNA, 21 nt, Human
cucccggguucacgccauucu

SEQ ID NO: 1356765 - RNA, 23 nt, Human
cugccucagccucccgaguagcu

SEQ ID NO: 1356766 - RNA, 21 nt, Human
gagagcccuagcugccaaccc

SEQ ID NO: 1356767 - RNA, 22 nt, Human
gagggacuggccuggaguggga

SEQ ID NO: 1356768 - RNA, 21 nt, Human
gcuggagugcaguggugccag

SEQ ID NO: 1356769 - RNA, 22 nt, Human
ggaagacagcauggcccacaac

SEQ ID NO: 1356770 - RNA, 23 nt, Human
guuugugccuuuggcccaacagg

SEQ ID NO: 1356771 - RNA, 24 nt, Human
ucacccaggcuggagugcaguggu

SEQ ID NO: 1356772 - RNA, 24 nt, Human
ucacucugucacccaggcuggagu

SEQ ID NO: 1356773 - RNA, 18 nt, Human
ucacugcaagcuccgccu

SEQ ID NO: 1356774 - RNA, 19 nt, Human
ucacugcaagcuccgccuc

SEQ ID NO: 1356775 - RNA, 24 nt, Human
ucacugcaagcuccgccucccggg

SEQ ID NO: 1356776 - RNA, 23 nt, Human
ucagccucccgaguagcugggac

SEQ ID NO: 1356777 - RNA, 19 nt, Human
ucagcucacugcaagcucc

SEQ ID NO: 1356778 - RNA, 23 nt, Human
ucccgaguagcugggacuacagg

SEQ ID NO: 1356779 - RNA, 24 nt, Human
ucccgaguagcugggacuacaggu

SEQ ID NO: 1356780 - RNA, 21 nt, Human
ucccggguucacgccauucuc

SEQ ID NO: 1356781 - RNA, 24 nt, Human
ucccggguucacgccauucuccug

SEQ ID NO: 1356782 - RNA, 24 nt, Human
uccugugguagaucagcuaccagg

SEQ ID NO: 1356783 - RNA, 23 nt, Human
ucucacucugucacccaggcugg

SEQ ID NO: 1356784 - RNA, 24 nt, Human
ucucacucugucacccaggcugga

SEQ ID NO: 1356785 - RNA, 26 nt, Human
ucucacucugucacccaggcuggagu

SEQ ID NO: 1356786 - RNA, 27 nt, Human
ucucacucugucacccaggcuggagug

SEQ ID NO: 1356787 - RNA, 24 nt, Human
ucuccugccucagccucccgagua

SEQ ID NO: 1356788 - RNA, 24 nt, Human
ucugucacccaggcuggagugcag

SEQ ID NO: 1356789 - RNA, 18 nt, Human
ugaaagugagggacuggc

SEQ ID NO: 1356790 - RNA, 22 nt, Human
ugagacggagucucacucuguc

SEQ ID NO: 1356791 - RNA, 22 nt, Human
ugcaguggugccaucucagcuc

SEQ ID NO: 1356792 - RNA, 24 nt, Human
ugccccaacagugauucccuuuca

SEQ ID NO: 1356793 - RNA, 24 nt, Human
ugccucagccucccgaguagcugg

SEQ ID NO: 1356794 - RNA, 20 nt, Human
ugccuuuggcccaacaggua

SEQ ID NO: 1356795 - RNA, 19 nt, Human
uggaaaguugggucuuuuu

SEQ ID NO: 1356796 - RNA, 18 nt, Human
uggagugcaguggugcca

SEQ ID NO: 1356797 - RNA, 28 nt, Human
uggagugcaguggugccauccuagcacg

SEQ ID NO: 1356798 - RNA, 23 nt, Human
uggagugcaguggugccaucuca

SEQ ID NO: 1356799 - RNA, 28 nt, Human
uggagugcaguggugccauggcucuagc

SEQ ID NO: 1356800 - RNA, 22 nt, Human
uggcaaagagugaaagugagga

SEQ ID NO: 1356801 - RNA, 23 nt, Human
uggcaaagagugaaagugaggga

SEQ ID NO: 1356802 - RNA, 24 nt, Human
uggugccaucucagcucacugcaa

SEQ ID NO: 1356803 - RNA, 25 nt, Human
uguuucccucuucuuuuauuuuuua

SEQ ID NO: 1356804 - RNA, 25 nt, Human
uugggugacuugauuggcccccucu

SEQ ID NO: 1356805 - RNA, 21 nt, Human
uuugucucugccuacuguccu

SEQ ID NO: 1356806 - RNA, 23 nt, Human
aaaaaagcaccuucauaagaacc

SEQ ID NO: 1356807 - RNA, 21 nt, Human
aaaccugcaggaaaaccaugc

SEQ ID NO: 1356808 - RNA, 21 nt, Human
aagacagguggaucacuugaa

SEQ ID NO: 1356809 - RNA, 19 nt, Human
aagcagaaugucuggaucu

SEQ ID NO: 1356810 - RNA, 19 nt, Human
aaggggaggauucccaagg

SEQ ID NO: 1356811 - RNA, 18 nt, Human
aagugcugggauuacagg

SEQ ID NO: 1356812 - RNA, 19 nt, Human
aagugcugggauuacaggc

SEQ ID NO: 1356813 - RNA, 21 nt, Human
aagugcugggauuacaggcau

SEQ ID NO: 1356814 - RNA, 23 nt, Human
aagugcugggauuacaggcauga

SEQ ID NO: 1356815 - RNA, 26 nt, Human
aagugcugggauuacaggcaugagcc

SEQ ID NO: 1356816 - RNA, 24 nt, Human
aauaagugcugggauuacaggcau

SEQ ID NO: 1356817 - RNA, 30 nt, Human
acaaacacuugaacuuacaguugcacaaaa

SEQ ID NO: 1356818 - RNA, 19 nt, Human
acaacauggcaaaaccuca

SEQ ID NO: 1356819 - RNA, 20 nt, Human
acaagguaauaagauaucac

SEQ ID NO: 1356820 - RNA, 23 nt, Human
acagcagaaagccacacagggca

SEQ ID NO: 1356821 - RNA, 20 nt, Human
acaggcuaaagugcuuugga

SEQ ID NO: 1356822 - RNA, 20 nt, Human
accacacccagcccaaaugg

SEQ ID NO: 1356823 - RNA, 18 nt, Human
accaggugcauuucugag

SEQ ID NO: 1356824 - RNA, 24 nt, Human
acccaggagguagagguugcagug

SEQ ID NO: 1356825 - RNA, 18 nt, Human
acugcacuccagccuggg

SEQ ID NO: 1356826 - RNA, 25 nt, Human
acugcacuccagccuggguaacaag

SEQ ID NO: 1356827 - RNA, 19 nt, Human
acuggauuacgguacuugu

SEQ ID NO: 1356828 - RNA, 22 nt, Human
agaaaaagaaagguaauuagaa

SEQ ID NO: 1356829 - RNA, 29 nt, Human
agacagaaaguauaaggaggagggacccc

SEQ ID NO: 1356830 - RNA, 26 nt, Human
agacagguggaucacuugaagucagg

SEQ ID NO: 1356831 - RNA, 24 nt, Human
agagguugcagugagccaagaucg

SEQ ID NO: 1356832 - RNA, 19 nt, Human
agauucagugcugaaggag

SEQ ID NO: 1356833 - RNA, 18 nt, Human
agcacucugagaaacugg

SEQ ID NO: 1356834 - RNA, 19 nt, Human
agccaccacacccagccca

SEQ ID NO: 1356835 - RNA, 21 nt, Human
agccaccacacccagcccaaa

SEQ ID NO: 1356836 - RNA, 18 nt, Human
agcccuggcacagcagaa

SEQ ID NO: 1356837 - RNA, 24 nt, Human
agccuggguaacaagagggagacu

SEQ ID NO: 1356838 - RNA, 25 nt, Human
agccuggguaacaagagggagacuu

SEQ ID NO: 1356839 - RNA, 18 nt, Human
aggagaaaaagaaaggua

SEQ ID NO: 1356840 - RNA, 19 nt, Human
aggagaaagggagaggccg

SEQ ID NO: 1356841 - RNA, 20 nt, Human
aggagacaggguuugagagc

SEQ ID NO: 1356842 - RNA, 22 nt, Human
aggagacaggguuugagagcag

SEQ ID NO: 1356843 - RNA, 23 nt, Human
aggaguucaagaccagcccggac

SEQ ID NO: 1356844 - RNA, 24 nt, Human
aggauaaggcaggaggauugcuug

SEQ ID NO: 1356845 - RNA, 23 nt, Human
aggcaggaggauugcuugaaccc

SEQ ID NO: 1356846 - RNA, 24 nt, Human
aggcaggaggauugcuugaaccca

SEQ ID NO: 1356847 - RNA, 22 nt, Human
aggcaguguaggccacuguugc

SEQ ID NO: 1356848 - RNA, 19 nt, Human
aggcgacauacauccuccu

SEQ ID NO: 1356849 - RNA, 22 nt, Human
agggaggaucgaaucagaccca

SEQ ID NO: 1356850 - RNA, 24 nt, Human
agguagagguugcagugagccaag

SEQ ID NO: 1356851 - RNA, 24 nt, Human
agugacucucaccuguaaucccag

SEQ ID NO: 1356852 - RNA, 27 nt, Human
agugauauuucucccauuugguaacga

SEQ ID NO: 1356853 - RNA, 18 nt, Human
agugaucgcaguaccugg

SEQ ID NO: 1356854 - RNA, 19 nt, Human
agugcugaaggaggaagag

SEQ ID NO: 1356855 - RNA, 18 nt, Human
agugcugggauuacaggc

SEQ ID NO: 1356856 - RNA, 19 nt, Human
agugcugggauuacaggca

SEQ ID NO: 1356857 - RNA, 20 nt, Human
auaaaagacagcugcccuga

SEQ ID NO: 1356858 - RNA, 23 nt, Human
aucacuugaagucaggaguucaa

SEQ ID NO: 1356859 - RNA, 24 nt, Human
aucgcgccacugcacuccagccug

SEQ ID NO: 1356860 - RNA, 24 nt, Human
augcauuggacaguuugauuguuc

SEQ ID NO: 1356861 - RNA, 19 nt, Human
auugcuugaacccaggagg

SEQ ID NO: 1356862 - RNA, 24 nt, Human
caagaucgcgccacugcacuccag

SEQ ID NO: 1356863 - RNA, 18 nt, Human
caagccccacaggcuaaa

SEQ ID NO: 1356864 - RNA, 25 nt, Human
cacaggaccacaggacuggggugaa

SEQ ID NO: 1356865 - RNA, 18 nt, Human
caccacacccagcccaaa

SEQ ID NO: 1356866 - RNA, 22 nt, Human
caccuguaaucccaguacuuug

SEQ ID NO: 1356867 - RNA, 23 nt, Human
caccuguaaucccaguacuuugg

SEQ ID NO: 1356868 - RNA, 24 nt, Human
caccuguaaucccaguacuuuggg

SEQ ID NO: 1356869 - RNA, 20 nt, Human
cacuaccugaucuccaagcc

SEQ ID NO: 1356870 - RNA, 18 nt, Human
cacugcacuccagccugg

SEQ ID NO: 1356871 - RNA, 19 nt, Human
cacugcacuccagccuggg

SEQ ID NO: 1356872 - RNA, 19 nt, Human
cacugcacuccagccuggg

SEQ ID NO: 1356873 - RNA, 22 nt, Human
cacugcacuccagccuggguaa

SEQ ID NO: 1356874 - RNA, 23 nt, Human
cacugcacuccagccuggguaac

SEQ ID NO: 1356875 - RNA, 24 nt, Human
cacugcacuccagccuggguaaca

SEQ ID NO: 1356876 - RNA, 23 nt, Human
cacuugaagucaggaguucaaga

SEQ ID NO: 1356877 - RNA, 21 nt, Human
cagauuuaauaagaaauuugc

SEQ ID NO: 1356878 - RNA, 20 nt, Human
cagcccggacaacauggcaa

SEQ ID NO: 1356879 - RNA, 19 nt, Human
cagcccuggcacagcagaa

SEQ ID NO: 1356880 - RNA, 20 nt, Human
cagcugcccugaagcagcca

SEQ ID NO: 1356881 - RNA, 21 nt, Human
cagcuggucccuccggggucc

SEQ ID NO: 1356882 - RNA, 20 nt, Human
cagggcgagaucacaggacc

SEQ ID NO: 1356883 - RNA, 24 nt, Human
cagguggaucacuugaagucagga

SEQ ID NO: 1356884 - RNA, 20 nt, Human
caguacuuugggaggcuaag

SEQ ID NO: 1356885 - RNA, 26 nt, Human
caguacuuugggaggcuaagacaggu

SEQ ID NO: 1356886 - RNA, 23 nt, Human
caucuguaaucccagcuacuugg

SEQ ID NO: 1356887 - RNA, 24 nt, Human
caucuguaaucccagcuacuuggg

SEQ ID NO: 1356888 - RNA, 20 nt, Human
cauugucauugauaacaucu

SEQ ID NO: 1356889 - RNA, 19 nt, Human
ccaaaugucccgguuccuc

SEQ ID NO: 1356890 - RNA, 22 nt, Human
ccaaccauuaacaaaaugagcc

SEQ ID NO: 1356891 - RNA, 20 nt, Human
ccacugcacuccagccuggg

SEQ ID NO: 1356892 - RNA, 20 nt, Human
ccacugcacuccagccuggg

SEQ ID NO: 1356893 - RNA, 21 nt, Human
ccacugcacuccagccugggu

SEQ ID NO: 1356894 - RNA, 22 nt, Human
ccacugcacuccagccugggua

SEQ ID NO: 1356895 - RNA, 24 nt, Human
ccacugcacuccagccuggguaac

SEQ ID NO: 1356896 - RNA, 24 nt, Human
cccacagcugcgaccauaaaagac

SEQ ID NO: 1356897 - RNA, 26 nt, Human
cccauuacucccccuuucauuuguuu

SEQ ID NO: 1356898 - RNA, 23 nt, Human
ccccacagcugcgaccauaaaag

SEQ ID NO: 1356899 - RNA, 22 nt, Human
cccccugagccauaaaaccagc

SEQ ID NO: 1356900 - RNA, 18 nt, Human
ccccugagccauaaaacc

SEQ ID NO: 1356901 - RNA, 21 nt, Human
cccuaaaaauuuugagggccc

SEQ ID NO: 1356902 - RNA, 18 nt, Human
ccgacagaaauaucaaac

SEQ ID NO: 1356903 - RNA, 18 nt, Human
ccucagggaugcauucuc

SEQ ID NO: 1356904 - RNA, 19 nt, Human
ccuccggggucccugacuu

SEQ ID NO: 1356905 - RNA, 24 nt, Human
ccugcaggaaaaccaugcccuaaa

SEQ ID NO: 1356906 - RNA, 18 nt, Human
cgagaagucagggacccc

SEQ ID NO: 1356907 - RNA, 25 nt, Human
cgagacucacuaccugaucuccaag

SEQ ID NO: 1356908 - RNA, 26 nt, Human
cgccacugcacuccagccuggguaac

SEQ ID NO: 1356909 - RNA, 21 nt, Human
cucaaguguuccaaucguacu

SEQ ID NO: 1356910 - RNA, 18 nt, Human
cucacuaacagcaugcaa

SEQ ID NO: 1356911 - RNA, 24 nt, Human
cucucaccuguaaucccaguacuu

SEQ ID NO: 1356912 - RNA, 26 nt, Human
cugaagcagccauuucagaggccuac

SEQ ID NO: 1356913 - RNA, 19 nt, Human
cugggucagaauggggagu

SEQ ID NO: 1356914 - RNA, 21 nt, Human
cuguaaucccagcuacuuggg

SEQ ID NO: 1356915 - RNA, 20 nt, Human
cuuaauagaauccuccagca

SEQ ID NO: 1356916 - RNA, 19 nt, Human
cuucuccugguugagcagg

SEQ ID NO: 1356917 - RNA, 23 nt, Human
cuugaagucaggaguucaagacc

SEQ ID NO: 1356918 - RNA, 21 nt, Human
gaaacagguuggagguaggua

SEQ ID NO: 1356919 - RNA, 19 nt, Human
gaaagaagagaaauauggc

SEQ ID NO: 1356920 - RNA, 22 nt, Human
gaagauaagcagcccagacuug

SEQ ID NO: 1356921 - RNA, 21 nt, Human
gagguagagguugcagugagc

SEQ ID NO: 1356922 - RNA, 18 nt, Human
gagguugcagugagccaa

SEQ ID NO: 1356923 - RNA, 18 nt, Human
gaucacuugaagucagga

SEQ ID NO: 1356924 - RNA, 24 nt, Human
gaucacuugaagucaggaguucaa

SEQ ID NO: 1356925 - RNA, 18 nt, Human
gauuacaggcaugagcca

SEQ ID NO: 1356926 - RNA, 21 nt, Human
gauuacaggcaugagccacca

SEQ ID NO: 1356927 - RNA, 22 nt, Human
gauuacaggcaugagccaccac

SEQ ID NO: 1356928 - RNA, 22 nt, Human
gcaggaggauugcuugaaccca

SEQ ID NO: 1356929 - RNA, 24 nt, Human
gcaguccagacauggcaauagcca

SEQ ID NO: 1356930 - RNA, 20 nt, Human
gccaagaucgcgccacugca

SEQ ID NO: 1356931 - RNA, 19 nt, Human
gccacugcacuccagccug

SEQ ID NO: 1356932 - RNA, 24 nt, Human
gccacugcacuccagccuggguaa

SEQ ID NO: 1356933 - RNA, 21 nt, Human
gccuucuucuccugguugagc

SEQ ID NO: 1356934 - RNA, 19 nt, Human
ggagaggccagagaccaaa

SEQ ID NO: 1356935 - RNA, 21 nt, Human
ggaggaagagaagaacagagg

SEQ ID NO: 1356936 - RNA, 19 nt, Human
ggauuacaggcaugagcca

SEQ ID NO: 1356937 - RNA, 24 nt, Human
ggcaucuguaaucccagcuacuug

SEQ ID NO: 1356938 - RNA, 19 nt, Human
ggcgacauacauccuccuc

SEQ ID NO: 1356939 - RNA, 22 nt, Human
ggggagggaguguacaaauagg

SEQ ID NO: 1356940 - RNA, 24 nt, Human
ggggagggaguguacaaauagggu

SEQ ID NO: 1356941 - RNA, 19 nt, Human
gggugcuccugggggagga

SEQ ID NO: 1356942 - RNA, 22 nt, Human
gguaaauggaggcagggcgaga

SEQ ID NO: 1356943 - RNA, 21 nt, Human
gguaauaagauaucacaaggu

SEQ ID NO: 1356944 - RNA, 22 nt, Human
ggucaucuguagcuccaggcau

SEQ ID NO: 1356945 - RNA, 24 nt, Human
gguggcaggcaucuguaaucccag

SEQ ID NO: 1356946 - RNA, 18 nt, Human
guaaagacaggcauagga

SEQ ID NO: 1356947 - RNA, 27 nt, Human
guaaagacaggcauaggaaaucacaag

SEQ ID NO: 1356948 - RNA, 19 nt, Human
guaaagcagaaugucugga

SEQ ID NO: 1356949 - RNA, 21 nt, Human
gugcauuucugaggcacagag

SEQ ID NO: 1356950 - RNA, 19 nt, Human
gugcugggauuacaggcau

SEQ ID NO: 1356951 - RNA, 24 nt, Human
uaaaagacagcugcccugaagcag

SEQ ID NO: 1356952 - RNA, 21 nt, Human
uaaaaucgaucauguauauau

SEQ ID NO: 1356953 - RNA, 23 nt, Human
uaaagugaaaauaaaucucuuag

SEQ ID NO: 1356954 - RNA, 23 nt, Human
uaaauguacaaaaguuagcaaga

SEQ ID NO: 1356955 - RNA, 19 nt, Human
uaacagcaauuaaagugaa

SEQ ID NO: 1356956 - RNA, 23 nt, Human
uaacccagagggaacauuagauc

SEQ ID NO: 1356957 - RNA, 26 nt, Human
uaagacagguggaucacuugaaguca

SEQ ID NO: 1356958 - RNA, 24 nt, Human
uaaggcaggaggauugcuugaacc

SEQ ID NO: 1356959 - RNA, 25 nt, Human
uaaggcaggaggauugcuugaaccc

SEQ ID NO: 1356960 - RNA, 24 nt, Human
uaagugcugggauuacaggcauga

SEQ ID NO: 1356961 - RNA, 24 nt, Human
uacaggcaugagccaccacaccca

SEQ ID NO: 1356962 - RNA, 21 nt, Human
uacgguacuuguaaguuuaau

SEQ ID NO: 1356963 - RNA, 23 nt, Human
uagaaauucuaaaaucugucaaa

SEQ ID NO: 1356964 - RNA, 26 nt, Human
uagaauccuccagcagucaucccucc

SEQ ID NO: 1356965 - RNA, 19 nt, Human
uagguaaacugaaaggcag

SEQ ID NO: 1356966 - RNA, 22 nt, Human
uauauauguuuaacacagaggu

SEQ ID NO: 1356967 - RNA, 25 nt, Human
uauauauguuuaacacagagguauu

SEQ ID NO: 1356968 - RNA, 20 nt, Human
uaugaggccucggagagggg

SEQ ID NO: 1356969 - RNA, 21 nt, Human
uaugaggccucggagaggggg

SEQ ID NO: 1356970 - RNA, 25 nt, Human
uauuucauccccacagcugcgacca

SEQ ID NO: 1356971 - RNA, 23 nt, Human
ucaaacacaaaugcucuacaauu

SEQ ID NO: 1356972 - RNA, 21 nt, Human
ucacagagaucccaugcuuca

SEQ ID NO: 1356973 - RNA, 24 nt, Human
ucacuaccugaucuccaagccaaa

SEQ ID NO: 1356974 - RNA, 18 nt, Human
ucacuguuauccuguucu

SEQ ID NO: 1356975 - RNA, 23 nt, Human
ucacuugaagucaggaguucaag

SEQ ID NO: 1356976 - RNA, 18 nt, Human
ucaggagacaggguuuga

SEQ ID NO: 1356977 - RNA, 21 nt, Human
ucagggaugcauucucuuucu

SEQ ID NO: 1356978 - RNA, 21 nt, Human
ucaggugagugaucgcaguac

SEQ ID NO: 1356979 - RNA, 24 nt, Human
ucagugauauuucucccauuugcu

SEQ ID NO: 1356980 - RNA, 21 nt, Human
uccagggcagacaucacaugu

SEQ ID NO: 1356981 - RNA, 22 nt, Human
uccauauaaaccugcaggaaaa

SEQ ID NO: 1356982 - RNA, 18 nt, Human
uccaugaaaucuucacaa

SEQ ID NO: 1356983 - RNA, 19 nt, Human
uccccacagcugcgaccau

SEQ ID NO: 1356984 - RNA, 21 nt, Human
uccugaggcgacauacauccu

SEQ ID NO: 1356985 - RNA, 23 nt, Human
ucgcgccacugcacuccagccug

SEQ ID NO: 1356986 - RNA, 21 nt, Human
ucuccaagccaaauaacagac

SEQ ID NO: 1356987 - RNA, 19 nt, Human
ucuggaucuacguugauac

SEQ ID NO: 1356988 - RNA, 21 nt, Human
ucuguaaggagaaaaagaaag

SEQ ID NO: 1356989 - RNA, 21 nt, Human
ucuguaaucccagcuacuugg

SEQ ID NO: 1356990 - RNA, 23 nt, Human
ucuucauccccuggcaguggcca

SEQ ID NO: 1356991 - RNA, 23 nt, Human
ugaacucagugcagcccuggcac

SEQ ID NO: 1356992 - RNA, 21 nt, Human
ugaagcagccauuucagaggc

SEQ ID NO: 1356993 - RNA, 18 nt, Human
ugaaggggaggauuccca

SEQ ID NO: 1356994 - RNA, 22 nt, Human
ugacucucaccuguaaucccag

SEQ ID NO: 1356995 - RNA, 24 nt, Human
ugacucucaccuguaaucccagua

SEQ ID NO: 1356996 - RNA, 19 nt, Human
ugacuucccgcaacaucuc

SEQ ID NO: 1356997 - RNA, 20 nt, Human
ugacuucccgcaacaucucu

SEQ ID NO: 1356998 - RNA, 22 nt, Human
ugagccaagaucgcgccacugc

SEQ ID NO: 1356999 - RNA, 21 nt, Human
ugagccaccacacccagccca

SEQ ID NO: 1357000 - RNA, 18 nt, Human
ugagccauaaaaccagca

SEQ ID NO: 1357001 - RNA, 24 nt, Human
ugauauuucucccauuugguaaca

SEQ ID NO: 1357002 - RNA, 24 nt, Human
ugcacaaaacuguugaauuuuaug

SEQ ID NO: 1357003 - RNA, 19 nt, Human
ugcagcagggagcagugac

SEQ ID NO: 1357004 - RNA, 19 nt, Human
ugccaaccauuaacaaaau

SEQ ID NO: 1357005 - RNA, 19 nt, Human
ugccauggcuucagcuggu

SEQ ID NO: 1357006 - RNA, 21 nt, Human
ugcgaccauaaaagacagcug

SEQ ID NO: 1357007 - RNA, 20 nt, Human
ugcuccugggggaggaagaa

SEQ ID NO: 1357008 - RNA, 18 nt, Human
uggagguagguaaagcag

SEQ ID NO: 1357009 - RNA, 21 nt, Human
uggaucacuugaagucaggag

SEQ ID NO: 1357010 - RNA, 24 nt, Human
uggaucacuugaagucaggaguuc

SEQ ID NO: 1357011 - RNA, 27 nt, Human
uggaucacuugaagucaggaguucaag

SEQ ID NO: 1357012 - RNA, 26 nt, Human
uggcaauagccaauuuccaaaguucu

SEQ ID NO: 1357013 - RNA, 19 nt, Human
uggcacagcagaaagccac

SEQ ID NO: 1357014 - RNA, 22 nt, Human
uggcaggcaucuguaaucccag

SEQ ID NO: 1357015 - RNA, 23 nt, Human
uggccaauugguguaaagagaga

SEQ ID NO: 1357016 - RNA, 24 nt, Human
ugggaggcuaagacagguggauca

SEQ ID NO: 1357017 - RNA, 18 nt, Human
ugggauuacaggcaugag

SEQ ID NO: 1357018 - RNA, 19 nt, Human
ugggauuacaggcaugagc

SEQ ID NO: 1357019 - RNA, 22 nt, Human
ugggauuacaggcaugagccac

SEQ ID NO: 1357020 - RNA, 23 nt, Human
ugggauuacaggcaugagccacc

SEQ ID NO: 1357021 - RNA, 24 nt, Human
ugggauuacaggcaugagccacca

SEQ ID NO: 1357022 - RNA, 24 nt, Human
ugggauuacaggcaugagccacca

SEQ ID NO: 1357023 - RNA, 18 nt, Human
ugggauuaguuagauggg

SEQ ID NO: 1357024 - RNA, 23 nt, Human
ugggauuaguuagaugggucucc

SEQ ID NO: 1357025 - RNA, 24 nt, Human
uggggaacuaauaaauguccauga

SEQ ID NO: 1357026 - RNA, 24 nt, Human
ugguggcaggcaucuguaauccca

SEQ ID NO: 1357027 - RNA, 19 nt, Human
ugguugagcagggcaacgg

SEQ ID NO: 1357028 - RNA, 20 nt, Human
ugguugagcagggcaacggu

SEQ ID NO: 1357029 - RNA, 22 nt, Human
ugucccauuacucccccuuuca

SEQ ID NO: 1357030 - RNA, 23 nt, Human
ugucuacuaaauguacaaaaguu

SEQ ID NO: 1357031 - RNA, 23 nt, Human
ugucuggaucuacguugauacug

SEQ ID NO: 1357032 - RNA, 23 nt, Human
uguuccaaucguacugcauuugc

SEQ ID NO: 1357033 - RNA, 21 nt, Human
uguuccuugcugagaaaaaga

SEQ ID NO: 1357034 - RNA, 25 nt, Human
uuaaaguaaagacaggcauaggaaa

SEQ ID NO: 1357035 - RNA, 24 nt, Human
uuauccuguucuuuuuucaaggug

SEQ ID NO: 1357036 - RNA, 26 nt, Human
uucagcuggucccuccggggucccug

SEQ ID NO: 1357037 - RNA, 22 nt, Human
uucauccccacagcugcgacca

SEQ ID NO: 1357038 - RNA, 20 nt, Human
uuccaaaguucuggguguuc

SEQ ID NO: 1357039 - RNA, 21 nt, Human
uucccauacuugcaguccaga

SEQ ID NO: 1357040 - RNA, 22 nt, Human
uugcagugagccaagaucgcgc

SEQ ID NO: 1357041 - RNA, 24 nt, Human
uugcuugaacccaggagguagagg

SEQ ID NO: 1357042 - RNA, 18 nt, Human
uuuccauauaaaccugca

SEQ ID NO: 1357043 - RNA, 19 nt, Human
uuuguggugaaaacauuua

SEQ ID NO: 1357044 - RNA, 23 nt, Human
uuuuccuggaaucaaaaugggag

SEQ ID NO: 1357045 - RNA, 19 nt, Human
aaacugcuuaguuccaacu

SEQ ID NO: 1357046 - RNA, 20 nt, Human
acacugcagggccaccagca

SEQ ID NO: 1357047 - RNA, 21 nt, Human
agacaggcagcuucuccuggg

SEQ ID NO: 1357048 - RNA, 18 nt, Human
aggaaagaauaaaguccg

SEQ ID NO: 1357049 - RNA, 20 nt, Human
agugacaguggcagucagga

SEQ ID NO: 1357050 - RNA, 23 nt, Human
caccagcagcagcugugcacuga

SEQ ID NO: 1357051 - RNA, 20 nt, Human
cagcagcagcugugcacuga

SEQ ID NO: 1357052 - RNA, 24 nt, Human
cagcagcagcugugcacugauguu

SEQ ID NO: 1357053 - RNA, 19 nt, Human
caggaggaggugugucaua

SEQ ID NO: 1357054 - RNA, 26 nt, Human
caggcaucguucauucaacacacauu

SEQ ID NO: 1357055 - RNA, 22 nt, Human
cccagccagccugccacggccg

SEQ ID NO: 1357056 - RNA, 22 nt, Human
ccuagaggaguucugcucugaa

SEQ ID NO: 1357057 - RNA, 25 nt, Human
cuugagugccuacuacaugccaaca

SEQ ID NO: 1357058 - RNA, 18 nt, Human
gccaacacugcuagaugc

SEQ ID NO: 1357059 - RNA, 19 nt, Human
ggcggcagcgcgcugcagc

SEQ ID NO: 1357060 - RNA, 22 nt, Human
guacacugcagggccaccagca

SEQ ID NO: 1357061 - RNA, 18 nt, Human
guggcagucaggaggagg

SEQ ID NO: 1357062 - RNA, 18 nt, Human
uaaaacuggcucccccag

SEQ ID NO: 1357063 - RNA, 22 nt, Human
uacagagccuguuuaccuauga

SEQ ID NO: 1357064 - RNA, 21 nt, Human
uaggagcaagggucaggaaag

SEQ ID NO: 1357065 - RNA, 20 nt, Human
uccuacuauaaaagcgaaau

SEQ ID NO: 1357066 - RNA, 22 nt, Human
uccuuacacgccaccucuugug

SEQ ID NO: 1357067 - RNA, 31 nt, Human
ugaaaacaaaaauuuauugcuucuccuuccc

SEQ ID NO: 1357068 - RNA, 21 nt, Human
ugaauuuacaaaaaaaaggau

SEQ ID NO: 1357069 - RNA, 19 nt, Human
ugacaguggcagucaggag

SEQ ID NO: 1357070 - RNA, 19 nt, Human
ugcuacagagguuuuuuug

SEQ ID NO: 1357071 - RNA, 23 nt, Human
uguagacaggcagcuucuccugg

SEQ ID NO: 1357072 - RNA, 18 nt, Human
uguuuugccuuccuacua

SEQ ID NO: 1357073 - RNA, 24 nt, Human
uuauugcuucuccuuccaaagcuu

SEQ ID NO: 1357074 - RNA, 21 nt, Human
uuccuacuauaaaagcgaaau

SEQ ID NO: 1357075 - RNA, 19 nt, Human
uucuugagugccuacuaca

SEQ ID NO: 1357076 - RNA, 21 nt, Human
uugguuuugagaggcuuuuuu

SEQ ID NO: 1357077 - RNA, 19 nt, Human
uuuacaaaaaaaaggauga

SEQ ID NO: 1357078 - RNA, 21 nt, Human
agaaaccccaaguacuagccc

SEQ ID NO: 1357079 - RNA, 21 nt, Human
agcaggucucuuuagaagccc

SEQ ID NO: 1357080 - RNA, 23 nt, Human
auagcccauccuugucacaaccc

SEQ ID NO: 1357081 - RNA, 19 nt, Human
caaaaagucuccaaauucc

SEQ ID NO: 1357082 - RNA, 23 nt, Human
cacaacccaagaagcaaucccuc

SEQ ID NO: 1357083 - RNA, 22 nt, Human
cauccuugucacaacccaagaa

SEQ ID NO: 1357084 - RNA, 19 nt, Human
cccaagaagcaaucccucc

SEQ ID NO: 1357085 - RNA, 26 nt, Human
ccuauagaaaccccaaguacuagccc

SEQ ID NO: 1357086 - RNA, 20 nt, Human
cugcccccacuccacuccca

SEQ ID NO: 1357087 - RNA, 23 nt, Human
gaaaaagggauauauuuacaaac

SEQ ID NO: 1357088 - RNA, 23 nt, Human
gcaaucccuccauuggccacacu

SEQ ID NO: 1357089 - RNA, 18 nt, Human
uggggucagcccuugccc

SEQ ID NO: 1357090 - RNA, 19 nt, Human
aaaaagaaauacaacauga

SEQ ID NO: 1357091 - RNA, 21 nt, Human
aaaaaucagcagaaauccacu

SEQ ID NO: 1357092 - RNA, 22 nt, Human
aaaagaaacauaggcagauaug

SEQ ID NO: 1357093 - RNA, 20 nt, Human
aaaaggaaggcgaaucaaaa

SEQ ID NO: 1357094 - RNA, 25 nt, Human
aaacaaccaaauccaaaaagacccc

SEQ ID NO: 1357095 - RNA, 23 nt, Human
aaaucacuugaggucaggaguuc

SEQ ID NO: 1357096 - RNA, 25 nt, Human
aaaucacuugaggucaggaguucaa

SEQ ID NO: 1357097 - RNA, 18 nt, Human
aaauuccaacgccaagaa

SEQ ID NO: 1357098 - RNA, 22 nt, Human
aacaacaaaauaggguacugag

SEQ ID NO: 1357099 - RNA, 20 nt, Human
aacaacaacaacaacaaaau

SEQ ID NO: 1357100 - RNA, 18 nt, Human
aacauggugaaaccccgc

SEQ ID NO: 1357101 - RNA, 20 nt, Human
aacauggugaaaccccgccu

SEQ ID NO: 1357102 - RNA, 21 nt, Human
aacauggugaaaccccgccuc

SEQ ID NO: 1357103 - RNA, 21 nt, Human
aaccccgccucuaccaaaaau

SEQ ID NO: 1357104 - RNA, 20 nt, Human
aacucugucucaaacaacaa

SEQ ID NO: 1357105 - RNA, 20 nt, Human
aagugaaaacaggcaaagaa

SEQ ID NO: 1357106 - RNA, 18 nt, Human
aaucacuugaggucagga

SEQ ID NO: 1357107 - RNA, 24 nt, Human
aaucacuugaggucaggaguucaa

SEQ ID NO: 1357108 - RNA, 24 nt, Human
acaaacaucucagcauacaucccu

SEQ ID NO: 1357109 - RNA, 20 nt, Human
acaacaacaacaacaaaaua

SEQ ID NO: 1357110 - RNA, 21 nt, Human
acaaccaaauccaaaaagacc

SEQ ID NO: 1357111 - RNA, 22 nt, Human
acaaccaaauccaaaaagaccc

SEQ ID NO: 1357112 - RNA, 18 nt, Human
acagaggaauuaaaaugg

SEQ ID NO: 1357113 - RNA, 24 nt, Human
accaacauggugaaaccccgccuc

SEQ ID NO: 1357114 - RNA, 19 nt, Human
acugcacuccauccuggca

SEQ ID NO: 1357115 - RNA, 24 nt, Human
acuugaggucaggaguucaagacc

SEQ ID NO: 1357116 - RNA, 22 nt, Human
agaaauccacuaugucaauguc

SEQ ID NO: 1357117 - RNA, 19 nt, Human
agaauucaguaugccuucc

SEQ ID NO: 1357118 - RNA, 23 nt, Human
agccucuagauaagaguuuuacc

SEQ ID NO: 1357119 - RNA, 24 nt, Human
agccugaccaacauggugaaaccc

SEQ ID NO: 1357120 - RNA, 22 nt, Human
agcgcaguggcucacgucugua

SEQ ID NO: 1357121 - RNA, 18 nt, Human
aggaacaccacacucuca

SEQ ID NO: 1357122 - RNA, 18 nt, Human
aggaagcaagcaauguca

SEQ ID NO: 1357123 - RNA, 24 nt, Human
aggaaggcgaaucaaacaaccaaa

SEQ ID NO: 1357124 - RNA, 22 nt, Human
aggacagagacucaacagagga

SEQ ID NO: 1357125 - RNA, 23 nt, Human
aggaggcugaggcaagaggauca

SEQ ID NO: 1357126 - RNA, 18 nt, Human
aggcaagaggaucaccug

SEQ ID NO: 1357127 - RNA, 18 nt, Human
aggcaagaggaucaccug

SEQ ID NO: 1357128 - RNA, 24 nt, Human
aggcaagaggaucaccugagccca

SEQ ID NO: 1357129 - RNA, 23 nt, Human
aggcaggaagcaagcaaugucaa

SEQ ID NO: 1357130 - RNA, 24 nt, Human
aggcggagguugcagugagccaag

SEQ ID NO: 1357131 - RNA, 24 nt, Human
aggcugaggcaagaggaucaccug

SEQ ID NO: 1357132 - RNA, 21 nt, Human
aggucaaggugggcaaaucac

SEQ ID NO: 1357133 - RNA, 23 nt, Human
aggugggcaaaucacuugagguc

SEQ ID NO: 1357134 - RNA, 26 nt, Human
aggugggcaaaucacuugaggucagg

SEQ ID NO: 1357135 - RNA, 18 nt, Human
aguggcucacgucuguag

SEQ ID NO: 1357136 - RNA, 18 nt, Human
auaugguagaaaguauug

SEQ ID NO: 1357137 - RNA, 24 nt, Human
aucacuugaggucaggaguucaag

SEQ ID NO: 1357138 - RNA, 20 nt, Human
aucaucucaucagcaaaauc

SEQ ID NO: 1357139 - RNA, 24 nt, Human
aucgcaccacugcacuccauccug

SEQ ID NO: 1357140 - RNA, 18 nt, Human
auguaucuaucucuauca

SEQ ID NO: 1357141 - RNA, 19 nt, Human
caaaaauuaggcgggugug

SEQ ID NO: 1357142 - RNA, 21 nt, Human
caaacaacaacaacaacaaaa

SEQ ID NO: 1357143 - RNA, 24 nt, Human
caaaucacuugaggucaggaguuc

SEQ ID NO: 1357144 - RNA, 22 nt, Human
caacagaacacaaauaaagaua

SEQ ID NO: 1357145 - RNA, 24 nt, Human
caacauggugaaaccccgccucua

SEQ ID NO: 1357146 - RNA, 24 nt, Human
caaccaaauccaaaaagaccccag

SEQ ID NO: 1357147 - RNA, 24 nt, Human
caagaggaucaccugagcccagga

SEQ ID NO: 1357148 - RNA, 24 nt, Human
caaggugggcaaaucacuugaggu

SEQ ID NO: 1357149 - RNA, 26 nt, Human
caaggugggcaaaucacuugagguca

SEQ ID NO: 1357150 - RNA, 24 nt, Human
cacaaacuccagcggccaccuccc

SEQ ID NO: 1357151 - RNA, 19 nt, Human
cacuaguggccaaugaagu

SEQ ID NO: 1357152 - RNA, 20 nt, Human
cacugcacuccauccuggca

SEQ ID NO: 1357153 - RNA, 21 nt, Human
cacugcacuccauccuggcag

SEQ ID NO: 1357154 - RNA, 23 nt, Human
cacuugaggucaggaguucaaga

SEQ ID NO: 1357155 - RNA, 21 nt, Human
cagcggccaccucccacuucc

SEQ ID NO: 1357156 - RNA, 24 nt, Human
caguacucucaauguuuaguauca

SEQ ID NO: 1357157 - RNA, 19 nt, Human
caguccacagggggaggga

SEQ ID NO: 1357158 - RNA, 21 nt, Human
caucagcaaaaucccaaauca

SEQ ID NO: 1357159 - RNA, 22 nt, Human
cauccaucucuuacguguuucc

SEQ ID NO: 1357160 - RNA, 20 nt, Human
cauggguuuagccucuagau

SEQ ID NO: 1357161 - RNA, 19 nt, Human
ccacugcacuccauccugg

SEQ ID NO: 1357162 - RNA, 19 nt, Human
ccacugcacuccauccugg

SEQ ID NO: 1357163 - RNA, 20 nt, Human
ccacugcacuccauccuggc

SEQ ID NO: 1357164 - RNA, 23 nt, Human
ccacugcacuccauccuggcaga

SEQ ID NO: 1357165 - RNA, 24 nt, Human
ccacugcacuccauccuggcagac

SEQ ID NO: 1357166 - RNA, 22 nt, Human
ccagcgccgcaguccacagggg

SEQ ID NO: 1357167 - RNA, 21 nt, Human
ccgaaagccucgccuuucucc

SEQ ID NO: 1357168 - RNA, 23 nt, Human
ccugaccaacauggugaaacccc

SEQ ID NO: 1357169 - RNA, 24 nt, Human
ccugaccaacauggugaaaccccg

SEQ ID NO: 1357170 - RNA, 22 nt, Human
ccuguaaucugagcuacucagg

SEQ ID NO: 1357171 - RNA, 19 nt, Human
cgaaucaaacaaccaaauc

SEQ ID NO: 1357172 - RNA, 24 nt, Human
cgccuguaaucugagcuacucagg

SEQ ID NO: 1357173 - RNA, 20 nt, Human
cucgcguucccgcggcggcg

SEQ ID NO: 1357174 - RNA, 20 nt, Human
cucuaccaaaaauacaaaaa

SEQ ID NO: 1357175 - RNA, 24 nt, Human
cugagcccaggaggcggagguugc

SEQ ID NO: 1357176 - RNA, 19 nt, Human
gaaaagaaacauaggcaga

SEQ ID NO: 1357177 - RNA, 18 nt, Human
gagcaaaaacucugucuc

SEQ ID NO: 1357178 - RNA, 23 nt, Human
gagguugcagugagccaagaucg

SEQ ID NO: 1357179 - RNA, 23 nt, Human
gaguugcuggagccggacacuug

SEQ ID NO: 1357180 - RNA, 20 nt, Human
gauaagaguuuuaccuuauc

SEQ ID NO: 1357181 - RNA, 24 nt, Human
gaucaccugagcccaggaggcgga

SEQ ID NO: 1357182 - RNA, 20 nt, Human
gccaagaucgcaccacugca

SEQ ID NO: 1357183 - RNA, 24 nt, Human
gcccaggaggcggagguugcagug

SEQ ID NO: 1357184 - RNA, 21 nt, Human
gccucuagauaagaguuuuac

SEQ ID NO: 1357185 - RNA, 22 nt, Human
gcggccacacaaacuccagcgg

SEQ ID NO: 1357186 - RNA, 21 nt, Human
gcgggugugguggcacgcgcc

SEQ ID NO: 1357187 - RNA, 22 nt, Human
ggaggcggagguugcagugagc

SEQ ID NO: 1357188 - RNA, 20 nt, Human
ggagguugcagugagccaag

SEQ ID NO: 1357189 - RNA, 24 nt, Human
ggagguugcagugagccaagaucg

SEQ ID NO: 1357190 - RNA, 19 nt, Human
ggaugcacaaacaucucag

SEQ ID NO: 1357191 - RNA, 25 nt, Human
ggcaaaucacuugaggucaggaguu

SEQ ID NO: 1357192 - RNA, 19 nt, Human
ggcguccacacgccgggca

SEQ ID NO: 1357193 - RNA, 21 nt, Human
ggcugagcgcaguggcucacg

SEQ ID NO: 1357194 - RNA, 22 nt, Human
gggagggaggacgaacaagagg

SEQ ID NO: 1357195 - RNA, 23 nt, Human
ggugugguggcacgcgccuguaa

SEQ ID NO: 1357196 - RNA, 24 nt, Human
guagaaaauuccaacgccaagaaa

SEQ ID NO: 1357197 - RNA, 23 nt, Human
guauaccaaguaccuuacgaaau

SEQ ID NO: 1357198 - RNA, 18 nt, Human
uaaaaagcaguacucuca

SEQ ID NO: 1357199 - RNA, 25 nt, Human
uaaaaagcaguacucucaauguuua

SEQ ID NO: 1357200 - RNA, 24 nt, Human
uaaaaggcaggaagcaagcaaugu

SEQ ID NO: 1357201 - RNA, 23 nt, Human
uaacaaaaacguaauauauggua

SEQ ID NO: 1357202 - RNA, 23 nt, Human
uaaggcauacauaugucaaaaaa

SEQ ID NO: 1357203 - RNA, 24 nt, Human
uacaaaaauuaggcggguguggug

SEQ ID NO: 1357204 - RNA, 22 nt, Human
uacaaaguaaaauuagguggug

SEQ ID NO: 1357205 - RNA, 21 nt, Human
uaccaaaaauacaaaaauuag

SEQ ID NO: 1357206 - RNA, 23 nt, Human
uaccaaguaccuuacgaaauuca

SEQ ID NO: 1357207 - RNA, 20 nt, Human
uacuauguaacgaauacugu

SEQ ID NO: 1357208 - RNA, 22 nt, Human
uagaauuaguuaagaauuacuc

SEQ ID NO: 1357209 - RNA, 24 nt, Human
uaggaggucaaggugggcaaauca

SEQ ID NO: 1357210 - RNA, 22 nt, Human
uaugacuacugcugaaaagcag

SEQ ID NO: 1357211 - RNA, 24 nt, Human
uaugucaaaaaaggaaggcgaauc

SEQ ID NO: 1357212 - RNA, 22 nt, Human
ucaaacaacaacaacaacaaaa

SEQ ID NO: 1357213 - RNA, 26 nt, Human
ucaaacaaccaaauccaaaaagaccc

SEQ ID NO: 1357214 - RNA, 20 nt, Human
ucacuaguggccaaugaagu

SEQ ID NO: 1357215 - RNA, 20 nt, Human
ucagcaaaaucccaaaucaa

SEQ ID NO: 1357216 - RNA, 24 nt, Human
ucaguaacuggauuuuuaaccaaa

SEQ ID NO: 1357217 - RNA, 24 nt, Human
ucaguaugccuuccuacaaaaucu

SEQ ID NO: 1357218 - RNA, 28 nt, Human
ucagucuauuucaaagcauggucccuca

SEQ ID NO: 1357219 - RNA, 19 nt, Human
ucaucagauuuuccaauug

SEQ ID NO: 1357220 - RNA, 22 nt, Human
ucauuggcuuaagaaaucgaaa

SEQ ID NO: 1357221 - RNA, 21 nt, Human
uccgggagcguguggcgucca

SEQ ID NO: 1357222 - RNA, 27 nt, Human
uccuggcagacgagcaaaaggaguuuc

SEQ ID NO: 1357223 - RNA, 23 nt, Human
ucgcaccacugcacuccauccug

SEQ ID NO: 1357224 - RNA, 20 nt, Human
ucuauggcugagcgcagugg

SEQ ID NO: 1357225 - RNA, 18 nt, Human
ucucacucugcagagccc

SEQ ID NO: 1357226 - RNA, 20 nt, Human
ucucacucugcagagcccga

SEQ ID NO: 1357227 - RNA, 22 nt, Human
ucucacucugcagagcccgaaa

SEQ ID NO: 1357228 - RNA, 18 nt, Human
ucucagcauacaucccuc

SEQ ID NO: 1357229 - RNA, 22 nt, Human
ucuuucaaagacaacacaauaa

SEQ ID NO: 1357230 - RNA, 25 nt, Human
ugaaaagcagaaauucauuggcuua

SEQ ID NO: 1357231 - RNA, 25 nt, Human
ugaaaagcagaaauucauuggcuua

SEQ ID NO: 1357232 - RNA, 21 nt, Human
ugacauucaacagaacagcca

SEQ ID NO: 1357233 - RNA, 18 nt, Human
ugaccaacauggugaaac

SEQ ID NO: 1357234 - RNA, 20 nt, Human
ugacuaacuucacuaguggc

SEQ ID NO: 1357235 - RNA, 20 nt, Human
ugaggcaagaggaucaccug

SEQ ID NO: 1357236 - RNA, 24 nt, Human
ugaggcaagaggaucaccugagcc

SEQ ID NO: 1357237 - RNA, 25 nt, Human
ugaggcaagaggaucaccugagccc

SEQ ID NO: 1357238 - RNA, 23 nt, Human
ugcuuaaaguuugcacuacagga

SEQ ID NO: 1357239 - RNA, 23 nt, Human
uggagccggacacuugcuaacuc

SEQ ID NO: 1357240 - RNA, 18 nt, Human
uggaggggaggacagaga

SEQ ID NO: 1357241 - RNA, 20 nt, Human
uggcacgcgccuguaaucug

SEQ ID NO: 1357242 - RNA, 24 nt, Human
ugggcaaaucacuugaggucagga

SEQ ID NO: 1357243 - RNA, 26 nt, Human
ugucaaaaaaggaaggcgaaucaaac

SEQ ID NO: 1357244 - RNA, 22 nt, Human
ugucucaaacaacaacaacaac

SEQ ID NO: 1357245 - RNA, 23 nt, Human
uuaaacaccaguaagauaugaca

SEQ ID NO: 1357246 - RNA, 18 nt, Human
uuaaauacuugauccaac

SEQ ID NO: 1357247 - RNA, 22 nt, Human
uugcagugagccaagaucgcac

SEQ ID NO: 1357248 - RNA, 21 nt, Human
uugcuggagccggacacuugc

SEQ ID NO: 1357249 - RNA, 23 nt, Human
uuuauuaaaagguaaaaggcagg

SEQ ID NO: 1357250 - RNA, 20 nt, Human
aaaggaaggcaaaauuccua

SEQ ID NO: 1357251 - RNA, 24 nt, Human
aacgucaaugaagccuccuggcau

SEQ ID NO: 1357252 - RNA, 23 nt, Human
aaggagguuuguguccagcugga

SEQ ID NO: 1357253 - RNA, 24 nt, Human
agccuccuggcauugucggaaaua

SEQ ID NO: 1357254 - RNA, 22 nt, Human
aggaaaaagcacuacugugaag

SEQ ID NO: 1357255 - RNA, 19 nt, Human
agggagaaauucaaaaaaa

SEQ ID NO: 1357256 - RNA, 19 nt, Human
cacacaaugcuauauucaa

SEQ ID NO: 1357257 - RNA, 18 nt, Human
cacuuuagagagcuggga

SEQ ID NO: 1357258 - RNA, 23 nt, Human
cagcacaauuaggaagagacaau

SEQ ID NO: 1357259 - RNA, 22 nt, Human
cagggccgcggcggacacggcc

SEQ ID NO: 1357260 - RNA, 21 nt, Human
cagucgacuucaacuuaaugc

SEQ ID NO: 1357261 - RNA, 21 nt, Human
cuacaacgucaaugaagccuc

SEQ ID NO: 1357262 - RNA, 24 nt, Human
cucuuaguccugacacccuggagu

SEQ ID NO: 1357263 - RNA, 18 nt, Human
cugcccucugcugggccu

SEQ ID NO: 1357264 - RNA, 20 nt, Human
cugcugggccucuuuggcag

SEQ ID NO: 1357265 - RNA, 24 nt, Human
cugguggacagaagacaaaggaag

SEQ ID NO: 1357266 - RNA, 18 nt, Human
cuuaguccugacacccug

SEQ ID NO: 1357267 - RNA, 22 nt, Human
cuuuuuggcagcauauuuccgg

SEQ ID NO: 1357268 - RNA, 23 nt, Human
gagagaaggccugguggacagaa

SEQ ID NO: 1357269 - RNA, 21 nt, Human
gagguuuguguccagcuggag

SEQ ID NO: 1357270 - RNA, 19 nt, Human
gauucguggacgaagucuc

SEQ ID NO: 1357271 - RNA, 23 nt, Human
gcaacucuggcuugaucuuagaa

SEQ ID NO: 1357272 - RNA, 25 nt, Human
gcagguuaaaaugcaaauccaagug

SEQ ID NO: 1357273 - RNA, 19 nt, Human
gccugguggacagaagaca

SEQ ID NO: 1357274 - RNA, 26 nt, Human
gcucuugggaaaucugcuguuuugug

SEQ ID NO: 1357275 - RNA, 19 nt, Human
ggacagaagacaaaggaag

SEQ ID NO: 1357276 - RNA, 21 nt, Human
uacacaaguuuauuaacacag

SEQ ID NO: 1357277 - RNA, 22 nt, Human
uauugccccucggaccucgcag

SEQ ID NO: 1357278 - RNA, 19 nt, Human
ucaaaaaaaugaugggggu

SEQ ID NO: 1357279 - RNA, 21 nt, Human
ucgcagggccgcggcggacac

SEQ ID NO: 1357280 - RNA, 22 nt, Human
ucucuuaguccugacacccugg

SEQ ID NO: 1357281 - RNA, 23 nt, Human
ugacuucucuuaguccugacacc

SEQ ID NO: 1357282 - RNA, 18 nt, Human
ugagaacugaugggaaag

SEQ ID NO: 1357283 - RNA, 18 nt, Human
ugccaaagucccaacaua

SEQ ID NO: 1357284 - RNA, 22 nt, Human
ugggaaaggugguguggauucg

SEQ ID NO: 1357285 - RNA, 19 nt, Human
ugggaaaucugcuguuuug

SEQ ID NO: 1357286 - RNA, 22 nt, Human
uguggauucguggacgaagucu

SEQ ID NO: 1357287 - RNA, 19 nt, Human
uucucuuaguccugacacc

SEQ ID NO: 1357288 - RNA, 23 nt, Human
uugugggcucuucuuucuuaucu

SEQ ID NO: 1357289 - RNA, 24 nt, Human
uuuugugacuucucuuaguccuga

SEQ ID NO: 1357290 - RNA, 25 nt, Human
aaaaagccauaaagacuuccuuugc

SEQ ID NO: 1357291 - RNA, 24 nt, Human
aaaagggagauuucaugaacagaa

SEQ ID NO: 1357292 - RNA, 26 nt, Human
aaacagcugagaaacaacaaaauucu

SEQ ID NO: 1357293 - RNA, 22 nt, Human
aaacaguaucuuacucacuaau

SEQ ID NO: 1357294 - RNA, 19 nt, Human
aacacccugauaaaaucua

SEQ ID NO: 1357295 - RNA, 22 nt, Human
aagaaugguggggaggaaucac

SEQ ID NO: 1357296 - RNA, 18 nt, Human
aaucaguuuuaaucacug

SEQ ID NO: 1357297 - RNA, 18 nt, Human
acagaaacauugggcucc

SEQ ID NO: 1357298 - RNA, 20 nt, Human
acagacaaaauuuguuuuug

SEQ ID NO: 1357299 - RNA, 22 nt, Human
acagagguuuuuacuuuuuccu

SEQ ID NO: 1357300 - RNA, 18 nt, Human
agaaaaaagccauaaaga

SEQ ID NO: 1357301 - RNA, 23 nt, Human
caaaaacacccugauaaaaucua

SEQ ID NO: 1357302 - RNA, 24 nt, Human
caacacaaccccacaguuguuaua

SEQ ID NO: 1357303 - RNA, 23 nt, Human
caagaauaugguaugccauccca

SEQ ID NO: 1357304 - RNA, 24 nt, Human
cauuaaauugcaucacuaaaaaug

SEQ ID NO: 1357305 - RNA, 21 nt, Human
cccuggguuucacgcauuguu

SEQ ID NO: 1357306 - RNA, 22 nt, Human
cuacucagagcuaacacaacag

SEQ ID NO: 1357307 - RNA, 22 nt, Human
cucagagcuaacacaacagcau

SEQ ID NO: 1357308 - RNA, 19 nt, Human
cuggaaugaauaacugcuc

SEQ ID NO: 1357309 - RNA, 20 nt, Human
cuuugacaaaaacacccuga

SEQ ID NO: 1357310 - RNA, 18 nt, Human
gacaaaaacacccugaua

SEQ ID NO: 1357311 - RNA, 19 nt, Human
uaaaaacaguaucuuacuc

SEQ ID NO: 1357312 - RNA, 21 nt, Human
uaaacaaaucacaaauaacau

SEQ ID NO: 1357313 - RNA, 20 nt, Human
uaaauugcaucacuaaaaau

SEQ ID NO: 1357314 - RNA, 23 nt, Human
uaaccugcuuugacaaaaacacc

SEQ ID NO: 1357315 - RNA, 24 nt, Human
uacuuuauaacucacaaaaauaua

SEQ ID NO: 1357316 - RNA, 20 nt, Human
uagaaaagggcagucagaau

SEQ ID NO: 1357317 - RNA, 21 nt, Human
ucagagcuaacacaacagcau

SEQ ID NO: 1357318 - RNA, 21 nt, Human
ugauagauuuuaagaaccaag

SEQ ID NO: 1357319 - RNA, 19 nt, Human
ugccaucccacccaaacuu

SEQ ID NO: 1357320 - RNA, 22 nt, Human
ugcucaaaaaagcaguacagcu

SEQ ID NO: 1357321 - RNA, 20 nt, Human
uguuaaagguccagcuagaa

SEQ ID NO: 1357322 - RNA, 21 nt, Human
uguuaaagguccagcuagaaa

SEQ ID NO: 1357323 - RNA, 21 nt, Human
uuaagaaccaagaauauggua

SEQ ID NO: 1357324 - RNA, 23 nt, Human
uuaauucucaacacaaccccaca

SEQ ID NO: 1357325 - RNA, 20 nt, Human
uucuaaauucugggacuagu

SEQ ID NO: 1357326 - RNA, 18 nt, Human
uuucaugaacagaaacau

SEQ ID NO: 1357327 - RNA, 22 nt, Human
aaaaaaaaaaaaaauuagccag

SEQ ID NO: 1357328 - RNA, 22 nt, Human
aaaaaaacuaguccgggugugg

SEQ ID NO: 1357329 - RNA, 19 nt, Human
aaagaaaaaaagaaagaaa

SEQ ID NO: 1357330 - RNA, 18 nt, Human
aacauggugaaaccccgc

SEQ ID NO: 1357331 - RNA, 20 nt, Human
aacauggugaaaccccgccu

SEQ ID NO: 1357332 - RNA, 21 nt, Human
aacauggugaaaccccgccuc

SEQ ID NO: 1357333 - RNA, 20 nt, Human
aacauggugaaacccugccu

SEQ ID NO: 1357334 - RNA, 21 nt, Human
aacauggugaaacccugccuc

SEQ ID NO: 1357335 - RNA, 24 nt, Human
aaucacuugaacccgggaggcgga

SEQ ID NO: 1357336 - RNA, 24 nt, Human
aaucacuuguacccgggaggcaga

SEQ ID NO: 1357337 - RNA, 20 nt, Human
acaaugaaaaggccagcugg

SEQ ID NO: 1357338 - RNA, 21 nt, Human
acacaguaucucccccauagc

SEQ ID NO: 1357339 - RNA, 23 nt, Human
acagagagagacacugucucaaa

SEQ ID NO: 1357340 - RNA, 20 nt, Human
acagagcaagacuccgucuc

SEQ ID NO: 1357341 - RNA, 24 nt, Human
acagagcaagacuccgucucagaa

SEQ ID NO: 1357342 - RNA, 23 nt, Human
accccgccucuacuaaaauacaa

SEQ ID NO: 1357343 - RNA, 24 nt, Human
acccugccucuacuaaaaauacaa

SEQ ID NO: 1357344 - RNA, 21 nt, Human
acuaaaauacaaaaaaacuag

SEQ ID NO: 1357345 - RNA, 19 nt, Human
acucguagggcuucucccc

SEQ ID NO: 1357346 - RNA, 24 nt, Human
acugcacuccagccugggcgacag

SEQ ID NO: 1357347 - RNA, 26 nt, Human
acugcacuccagccugggcgacagag

SEQ ID NO: 1357348 - RNA, 24 nt, Human
acugcacucuagccugggugacag

SEQ ID NO: 1357349 - RNA, 26 nt, Human
acugcacucuagccugggugacagag

SEQ ID NO: 1357350 - RNA, 19 nt, Human
agaaauuaaaggccagccu

SEQ ID NO: 1357351 - RNA, 24 nt, Human
agcacuuugggaggccgaggcggg

SEQ ID NO: 1357352 - RNA, 22 nt, Human
agccuggccaacauggugaaac

SEQ ID NO: 1357353 - RNA, 24 nt, Human
agccuggccaacauggugaaaccc

SEQ ID NO: 1357354 - RNA, 24 nt, Human
agccugggcgacagagcaagacuc

SEQ ID NO: 1357355 - RNA, 23 nt, Human
aggaagaccgcaggggagucuga

SEQ ID NO: 1357356 - RNA, 20 nt, Human
aggaggugggagcgguugcu

SEQ ID NO: 1357357 - RNA, 25 nt, Human
aggaggugggagcgguugcugaagc

SEQ ID NO: 1357358 - RNA, 21 nt, Human
aggcagaaguuucagugagcc

SEQ ID NO: 1357359 - RNA, 24 nt, Human
aggcagaaguuucagugagccgag

SEQ ID NO: 1357360 - RNA, 26 nt, Human
aggcagaucgccugauguuaggaguu

SEQ ID NO: 1357361 - RNA, 18 nt, Human
aggcaggagaaucacuug

SEQ ID NO: 1357362 - RNA, 24 nt, Human
aggcaggagaaucacuuguacccg

SEQ ID NO: 1357363 - RNA, 26 nt, Human
aggcaggcagaucgccugauguuagg

SEQ ID NO: 1357364 - RNA, 18 nt, Human
aggccgaggcggguggau

SEQ ID NO: 1357365 - RNA, 21 nt, Human
aggcggagguugcagugagcc

SEQ ID NO: 1357366 - RNA, 24 nt, Human
aggcggagguugcagugagccgag

SEQ ID NO: 1357367 - RNA, 24 nt, Human
aggcggguggauaacgaagucagg

SEQ ID NO: 1357368 - RNA, 25 nt, Human
aggcggugcuggaggaggugggagc

SEQ ID NO: 1357369 - RNA, 24 nt, Human
aggcugagguaggggaaucacuug

SEQ ID NO: 1357370 - RNA, 18 nt, Human
agguaggggaaucacuug

SEQ ID NO: 1357371 - RNA, 24 nt, Human
agguaggggaaucacuugaacccg

SEQ ID NO: 1357372 - RNA, 24 nt, Human
agguugaggcaggagaaucacuug

SEQ ID NO: 1357373 - RNA, 24 nt, Human
aucacugcacuccagccugggcga

SEQ ID NO: 1357374 - RNA, 21 nt, Human
aucgccugauguuaggaguuc

SEQ ID NO: 1357375 - RNA, 24 nt, Human
aucgcuccacugcacucuagccug

SEQ ID NO: 1357376 - RNA, 24 nt, Human
aucugcgcgaaggccuuggcgcac

SEQ ID NO: 1357377 - RNA, 19 nt, Human
augccuguaaucccagcac

SEQ ID NO: 1357378 - RNA, 24 nt, Human
auugcaucacugcacuccagccug

SEQ ID NO: 1357379 - RNA, 18 nt, Human
caaagaaaaaaagaaaga

SEQ ID NO: 1357380 - RNA, 24 nt, Human
caacauggugaaaccccgccucua

SEQ ID NO: 1357381 - RNA, 24 nt, Human
caacauggugaaacccugccucua

SEQ ID NO: 1357382 - RNA, 23 nt, Human
caagacuccgucucagaaaaaaa

SEQ ID NO: 1357383 - RNA, 21 nt, Human
caagcuucucugagccucggu

SEQ ID NO: 1357384 - RNA, 19 nt, Human
caaggcaggcagaucgccu

SEQ ID NO: 1357385 - RNA, 22 nt, Human
cacucggggcagguguagggcc

SEQ ID NO: 1357386 - RNA, 23 nt, Human
cacucggggcagguguagggccg

SEQ ID NO: 1357387 - RNA, 18 nt, Human
cacucuagccugggugac

SEQ ID NO: 1357388 - RNA, 22 nt, Human
cacucuagccugggugacagag

SEQ ID NO: 1357389 - RNA, 19 nt, Human
cacugcacuccagccuggg

SEQ ID NO: 1357390 - RNA, 20 nt, Human
cacugcacuccagccugggc

SEQ ID NO: 1357391 - RNA, 20 nt, Human
cacugcacuccagccugggc

SEQ ID NO: 1357392 - RNA, 20 nt, Human
cacugcacuccagccugggc

SEQ ID NO: 1357393 - RNA, 22 nt, Human
cacugcacuccagccugggcga

SEQ ID NO: 1357394 - RNA, 23 nt, Human
cacugcacuccagccugggcgac

SEQ ID NO: 1357395 - RNA, 24 nt, Human
cacugcacuccagccugggcgaca

SEQ ID NO: 1357396 - RNA, 27 nt, Human
cacugcacuccagccugggcgacagag

SEQ ID NO: 1357397 - RNA, 19 nt, Human
cacugcacucuagccuggg

SEQ ID NO: 1357398 - RNA, 19 nt, Human
cacugcacucuagccuggg

SEQ ID NO: 1357399 - RNA, 22 nt, Human
cacugcacucuagccuggguga

SEQ ID NO: 1357400 - RNA, 23 nt, Human
cacugcacucuagccugggugac

SEQ ID NO: 1357401 - RNA, 24 nt, Human
cacugcacucuagccugggugaca

SEQ ID NO: 1357402 - RNA, 24 nt, Human
cacugcacucuagccugggugaca

SEQ ID NO: 1357403 - RNA, 24 nt, Human
cagaucgccugauguuaggaguuc

SEQ ID NO: 1357404 - RNA, 22 nt, Human
cagcacuuugggaggccgaggc

SEQ ID NO: 1357405 - RNA, 24 nt, Human
cagcacuuugggaggccgaggcgg

SEQ ID NO: 1357406 - RNA, 21 nt, Human
cagcacuuugggaugccaagg

SEQ ID NO: 1357407 - RNA, 24 nt, Human
cagcacuuugggaugccaaggcag

SEQ ID NO: 1357408 - RNA, 21 nt, Human
cagcgguagggcuucuccucc

SEQ ID NO: 1357409 - RNA, 24 nt, Human
cagcuacucgggaggcugagguag

SEQ ID NO: 1357410 - RNA, 22 nt, Human
caggaagcgucggggauaacac

SEQ ID NO: 1357411 - RNA, 21 nt, Human
cagucuuagcccugugucuuc

SEQ ID NO: 1357412 - RNA, 20 nt, Human
caugccuguaaucccagcac

SEQ ID NO: 1357413 - RNA, 24 nt, Human
caugccuguaaucccagcacuuug

SEQ ID NO: 1357414 - RNA, 26 nt, Human
cauugugagguuggaaaggaggcccu

SEQ ID NO: 1357415 - RNA, 20 nt, Human
ccacugcacucuagccuggg

SEQ ID NO: 1357416 - RNA, 20 nt, Human
ccacugcacucuagccuggg

SEQ ID NO: 1357417 - RNA, 20 nt, Human
ccacugcacucuagccuggg

SEQ ID NO: 1357418 - RNA, 20 nt, Human
ccacugcacucuagccuggg

SEQ ID NO: 1357419 - RNA, 21 nt, Human
ccacugcacucuagccugggu

SEQ ID NO: 1357420 - RNA, 24 nt, Human
ccacugcacucuagccugggugac

SEQ ID NO: 1357421 - RNA, 22 nt, Human
ccacugugugcccucaggcaag

SEQ ID NO: 1357422 - RNA, 20 nt, Human
cccacugugugcccucaggc

SEQ ID NO: 1357423 - RNA, 19 nt, Human
cccagcacuuugggaugcc

SEQ ID NO: 1357424 - RNA, 21 nt, Human
cccaggcgcgcugcaccuccg

SEQ ID NO: 1357425 - RNA, 19 nt, Human
cccauagcauugugagguu

SEQ ID NO: 1357426 - RNA, 26 nt, Human
cccuggcugaaagcuuuggagcucau

SEQ ID NO: 1357427 - RNA, 22 nt, Human
ccuagccaacauggugaaaccc

SEQ ID NO: 1357428 - RNA, 23 nt, Human
ccuagccaacauggugaaacccc

SEQ ID NO: 1357429 - RNA, 24 nt, Human
ccuagccaacauggugaaaccccg

SEQ ID NO: 1357430 - RNA, 18 nt, Human
ccuccgggaacugcuguc

SEQ ID NO: 1357431 - RNA, 21 nt, Human
ccuccgggaacugcugucguc

SEQ ID NO: 1357432 - RNA, 22 nt, Human
ccuggccaacauggugaaaccc

SEQ ID NO: 1357433 - RNA, 24 nt, Human
ccuggccaacauggugaaacccug

SEQ ID NO: 1357434 - RNA, 22 nt, Human
ccugggcgacagagcaagacuc

SEQ ID NO: 1357435 - RNA, 22 nt, Human
ccuguaaucccagcacuuuggg

SEQ ID NO: 1357436 - RNA, 20 nt, Human
ccuguagucccagcacuuug

SEQ ID NO: 1357437 - RNA, 21 nt, Human
ccuguagucccagcuacucgg

SEQ ID NO: 1357438 - RNA, 22 nt, Human
ccuguagucccagcuacucggg

SEQ ID NO: 1357439 - RNA, 24 nt, Human
cgagaccauccuagccaacauggu

SEQ ID NO: 1357440 - RNA, 24 nt, Human
cgagauugcaucacugcacuccag

SEQ ID NO: 1357441 - RNA, 24 nt, Human
cgaggcggguggauaacgaaguca

SEQ ID NO: 1357442 - RNA, 23 nt, Human
cgccgcacuuguagggccgcucu

SEQ ID NO: 1357443 - RNA, 23 nt, Human
cgccuguagucccagcuacucgg

SEQ ID NO: 1357444 - RNA, 24 nt, Human
cgccuguagucccagcuacucggg

SEQ ID NO: 1357445 - RNA, 24 nt, Human
cgggaggcggagguugcagugagc

SEQ ID NO: 1357446 - RNA, 22 nt, Human
cggguggauaacgaagucagga

SEQ ID NO: 1357447 - RNA, 18 nt, Human
cucaaagaaaaaaagaaa

SEQ ID NO: 1357448 - RNA, 23 nt, Human
cucagaaaaaaaaaaaaaaaaaa

SEQ ID NO: 1357449 - RNA, 24 nt, Human
cucaggccuguagucccagcacuu

SEQ ID NO: 1357450 - RNA, 24 nt, Human
cucaugccuguaaucccagcacuu

SEQ ID NO: 1357451 - RNA, 23 nt, Human
cuccacugcacucuagccugggu

SEQ ID NO: 1357452 - RNA, 22 nt, Human
cuccccaggcgcgcugcaccuc

SEQ ID NO: 1357453 - RNA, 23 nt, Human
cuccuguaauuuuaacuacucgg

SEQ ID NO: 1357454 - RNA, 20 nt, Human
cucuacuaaaaauacaaaaa

SEQ ID NO: 1357455 - RNA, 20 nt, Human
cugaaggccuugccgcacuc

SEQ ID NO: 1357456 - RNA, 22 nt, Human
cugcaccuccgggaacugcugu

SEQ ID NO: 1357457 - RNA, 21 nt, Human
cuguugacagguuucuccucc

SEQ ID NO: 1357458 - RNA, 19 nt, Human
cuuugggaugccaaggcag

SEQ ID NO: 1357459 - RNA, 19 nt, Human
gaaacccugccucuacuaa

SEQ ID NO: 1357460 - RNA, 19 nt, Human
gaagagcgcgccgcagucc

SEQ ID NO: 1357461 - RNA, 23 nt, Human
gaaguuucagugagccgagaucg

SEQ ID NO: 1357462 - RNA, 24 nt, Human
gacagagcaagacuccgucucaga

SEQ ID NO: 1357463 - RNA, 20 nt, Human
gagaucgcuccacugcacuc

SEQ ID NO: 1357464 - RNA, 18 nt, Human
gaggagaagcugaaggcc

SEQ ID NO: 1357465 - RNA, 18 nt, Human
gaggcggugcuggaggag

SEQ ID NO: 1357466 - RNA, 24 nt, Human
gagguaggggaaucacuugaaccc

SEQ ID NO: 1357467 - RNA, 23 nt, Human
gagguugcagugagccgagauug

SEQ ID NO: 1357468 - RNA, 18 nt, Human
gauaacgaagucaggaga

SEQ ID NO: 1357469 - RNA, 18 nt, Human
gaucgccugauguuagga

SEQ ID NO: 1357470 - RNA, 24 nt, Human
gaucgccugauguuaggaguucga

SEQ ID NO: 1357471 - RNA, 24 nt, Human
gcacuccagccugggcgacagagc

SEQ ID NO: 1357472 - RNA, 24 nt, Human
gccaacauggugaaaccccgccuc

SEQ ID NO: 1357473 - RNA, 22 nt, Human
gccaacauggugaaacccugcc

SEQ ID NO: 1357474 - RNA, 24 nt, Human
gccaacauggugaaacccugccuc

SEQ ID NO: 1357475 - RNA, 18 nt, Human
gcccgugugcacgcgccg

SEQ ID NO: 1357476 - RNA, 18 nt, Human
gcgcggaggagaagcuga

SEQ ID NO: 1357477 - RNA, 20 nt, Human
gcucgcccgugugcgugcgc

SEQ ID NO: 1357478 - RNA, 21 nt, Human
gcugaggagaagcggaaggcc

SEQ ID NO: 1357479 - RNA, 22 nt, Human
ggagguugcagugagccgagau

SEQ ID NO: 1357480 - RNA, 24 nt, Human
ggagguugcagugagccgagauug

SEQ ID NO: 1357481 - RNA, 21 nt, Human
ggaugccaaggcaggcagauc

SEQ ID NO: 1357482 - RNA, 23 nt, Human
ggccuguagucccagcacuuugg

SEQ ID NO: 1357483 - RNA, 23 nt, Human
ggcgcgguggcucaugccuguaa

SEQ ID NO: 1357484 - RNA, 23 nt, Human
ggcugggcgcgguggcucaugcc

SEQ ID NO: 1357485 - RNA, 21 nt, Human
ggcugucaggaugccucuccu

SEQ ID NO: 1357486 - RNA, 23 nt, Human
gggaaucacuugaacccgggagg

SEQ ID NO: 1357487 - RNA, 23 nt, Human
gggaggcugagguaggggaauca

SEQ ID NO: 1357488 - RNA, 23 nt, Human
gguaggagcgguugcugaaggcc

SEQ ID NO: 1357489 - RNA, 23 nt, Human
gguggcucaugccuguaauccca

SEQ ID NO: 1357490 - RNA, 24 nt, Human
gguggcucaugccuguaaucccag

SEQ ID NO: 1357491 - RNA, 24 nt, Human
ggugugguggccgggcgccuguag

SEQ ID NO: 1357492 - RNA, 21 nt, Human
gugaaaccccgccucuacuaa

SEQ ID NO: 1357493 - RNA, 24 nt, Human
guggccgggcgccuguagucccag

SEQ ID NO: 1357494 - RNA, 21 nt, Human
guggugcuggaucagguagga

SEQ ID NO: 1357495 - RNA, 19 nt, Human
guugcagugagccgagauu

SEQ ID NO: 1357496 - RNA, 23 nt, Human
uaacacaguaucucccccauagc

SEQ ID NO: 1357497 - RNA, 24 nt, Human
uaacgaagucaggagaucgagacc

SEQ ID NO: 1357498 - RNA, 24 nt, Human
uaacuacucgggagguugaggcag

SEQ ID NO: 1357499 - RNA, 21 nt, Human
uagccugggugacagagagag

SEQ ID NO: 1357500 - RNA, 24 nt, Human
uagcucaggccuguagucccagca

SEQ ID NO: 1357501 - RNA, 20 nt, Human
ucaaagaaaaaaagaaagaa

SEQ ID NO: 1357502 - RNA, 20 nt, Human
ucacugcacuccagccuggg

SEQ ID NO: 1357503 - RNA, 21 nt, Human
ucacugcacuccagccugggc

SEQ ID NO: 1357504 - RNA, 24 nt, Human
ucacugcacuccagccugggcgac

SEQ ID NO: 1357505 - RNA, 24 nt, Human
ucacuugaacccgggaggcggagg

SEQ ID NO: 1357506 - RNA, 23 nt, Human
ucagaaaaaaaaaaaaaaaaaaa

SEQ ID NO: 1357507 - RNA, 22 nt, Human
ucaggccuguagucccagcacu

SEQ ID NO: 1357508 - RNA, 22 nt, Human
ucaugccuguaaucccagcacu

SEQ ID NO: 1357509 - RNA, 23 nt, Human
uccacggcuucuuggggccucca

SEQ ID NO: 1357510 - RNA, 24 nt, Human
uccacugcacucuagccuggguga

SEQ ID NO: 1357511 - RNA, 24 nt, Human
uccagccugggcgacagagcaaga

SEQ ID NO: 1357512 - RNA, 23 nt, Human
uccccaggcgcgcugcaccuccg

SEQ ID NO: 1357513 - RNA, 20 nt, Human
uccccggugugcacgaugug

SEQ ID NO: 1357514 - RNA, 23 nt, Human
uccgucucagaaaaaaaaaaaaa

SEQ ID NO: 1357515 - RNA, 29 nt, Human
uccgucucagaaaaaaaaaaaaaaaaaaa

SEQ ID NO: 1357516 - RNA, 24 nt, Human
ucgagacagccuggccaacauggu

SEQ ID NO: 1357517 - RNA, 19 nt, Human
ucgccgcacuuguagggcc

SEQ ID NO: 1357518 - RNA, 23 nt, Human
ucgccugauguuaggaguucgag

SEQ ID NO: 1357519 - RNA, 25 nt, Human
ucgggaggcugagguaggggaauca

SEQ ID NO: 1357520 - RNA, 20 nt, Human
ucuagccugggugacagaga

SEQ ID NO: 1357521 - RNA, 20 nt, Human
ucuucuggugcucuauaagc

SEQ ID NO: 1357522 - RNA, 22 nt, Human
ugagccgagaucgcuccacugc

SEQ ID NO: 1357523 - RNA, 22 nt, Human
ugagccgagauugcaucacugc

SEQ ID NO: 1357524 - RNA, 20 nt, Human
ugaggcaggagaaucacuug

SEQ ID NO: 1357525 - RNA, 24 nt, Human
ugaggcaggagaaucacuuguacc

SEQ ID NO: 1357526 - RNA, 20 nt, Human
ugagguaggggaaucacuug

SEQ ID NO: 1357527 - RNA, 21 nt, Human
ugagguaggggaaucacuuga

SEQ ID NO: 1357528 - RNA, 24 nt, Human
ugagguaggggaaucacuugaacc

SEQ ID NO: 1357529 - RNA, 18 nt, Human
ugagucaggcgugggagc

SEQ ID NO: 1357530 - RNA, 21 nt, Human
ugagucaggcgugggagcugg

SEQ ID NO: 1357531 - RNA, 23 nt, Human
ugagucaggcgugggagcugggc

SEQ ID NO: 1357532 - RNA, 21 nt, Human
ugcaucacugcacuccagccu

SEQ ID NO: 1357533 - RNA, 20 nt, Human
ugccaaggcaggcagaucgc

SEQ ID NO: 1357534 - RNA, 21 nt, Human
ugccaaggcaggcagaucgcc

SEQ ID NO: 1357535 - RNA, 23 nt, Human
ugccuguaaucccagcacuuugg

SEQ ID NO: 1357536 - RNA, 23 nt, Human
uggcagggguaaggccgcucucc

SEQ ID NO: 1357537 - RNA, 23 nt, Human
uggccaacauggugaaacccugc

SEQ ID NO: 1357538 - RNA, 24 nt, Human
uggcgcacuggccgcacgcguagu

SEQ ID NO: 1357539 - RNA, 22 nt, Human
uggcucaugccuguaaucccag

SEQ ID NO: 1357540 - RNA, 24 nt, Human
uggcucaugccuguaaucccagca

SEQ ID NO: 1357541 - RNA, 18 nt, Human
uggcuuggguagcagcag

SEQ ID NO: 1357542 - RNA, 22 nt, Human
uggcuuggguagcagcagggcu

SEQ ID NO: 1357543 - RNA, 21 nt, Human
ugggagcugggcaaaggcguc

SEQ ID NO: 1357544 - RNA, 22 nt, Human
ugggaggccgaggcggguggau

SEQ ID NO: 1357545 - RNA, 25 nt, Human
ugguggccgggcgccuguaguccca

SEQ ID NO: 1357546 - RNA, 23 nt, Human
uguagucccagcacuuugggaug

SEQ ID NO: 1357547 - RNA, 18 nt, Human
ugucggaugagcgcggag

SEQ ID NO: 1357548 - RNA, 20 nt, Human
ugugcgugcgcuggugcugc

SEQ ID NO: 1357549 - RNA, 19 nt, Human
uguugagucaggcguggga

SEQ ID NO: 1357550 - RNA, 23 nt, Human
uguugagucaggcgugggagcug

SEQ ID NO: 1357551 - RNA, 24 nt, Human
uuaggcugggcgcgguggcucaug

SEQ ID NO: 1357552 - RNA, 25 nt, Human
uucugcugguccacgcggguuucug

SEQ ID NO: 1357553 - RNA, 24 nt, Human
uugaacccgggaggcggagguugc

SEQ ID NO: 1357554 - RNA, 18 nt, Human
uugcagugagccgagauu

SEQ ID NO: 1357555 - RNA, 20 nt, Human
uugcagugagccgagauugc

SEQ ID NO: 1357556 - RNA, 21 nt, Human
uugcagugagccgagauugca

SEQ ID NO: 1357557 - RNA, 23 nt, Human
uugcaucacugcacuccagccug

SEQ ID NO: 1357558 - RNA, 20 nt, Human
uuucagugagccgagaucgc

SEQ ID NO: 1357559 - RNA, 21 nt, Human
uuucagugagccgagaucgcu

SEQ ID NO: 1357560 - RNA, 21 nt, Human
aaaaaaacauacaaacacauu

SEQ ID NO: 1357561 - RNA, 25 nt, Human
aaacuaauuucacaaacaaccuuua

SEQ ID NO: 1357562 - RNA, 23 nt, Human
aacacagcaguuuagaagauaaa

SEQ ID NO: 1357563 - RNA, 22 nt, Human
aacuaauuucacaaacaaccuu

SEQ ID NO: 1357564 - RNA, 23 nt, Human
acuccugagauucuaaaaaggga

SEQ ID NO: 1357565 - RNA, 23 nt, Human
agacaucugaaacuauuaggcac

SEQ ID NO: 1357566 - RNA, 22 nt, Human
auagaacgcauauuuacuaaca

SEQ ID NO: 1357567 - RNA, 19 nt, Human
cauaucuucaguuacaacc

SEQ ID NO: 1357568 - RNA, 18 nt, Human
cuuucaacacagcaguuu

SEQ ID NO: 1357569 - RNA, 21 nt, Human
gggguguuuuagguaauuuuu

SEQ ID NO: 1357570 - RNA, 20 nt, Human
uaaggcaucaaugauuaaaa

SEQ ID NO: 1357571 - RNA, 20 nt, Human
uaccccacuacuccugagau

SEQ ID NO: 1357572 - RNA, 22 nt, Human
uagaugauucuaagaacagcac

SEQ ID NO: 1357573 - RNA, 19 nt, Human
uaguaaauauucaaacaua

SEQ ID NO: 1357574 - RNA, 24 nt, Human
uauaaaaaacuaagacaucugaaa

SEQ ID NO: 1357575 - RNA, 18 nt, Human
uccaaaauaccuucugac

SEQ ID NO: 1357576 - RNA, 19 nt, Human
uccaaaauaccuucugacc

SEQ ID NO: 1357577 - RNA, 24 nt, Human
uccuaaaaaaaaaacauacaaacu

SEQ ID NO: 1357578 - RNA, 27 nt, Human
uccuccuuaauaugaaacucuuccaaa

SEQ ID NO: 1357579 - RNA, 24 nt, Human
ucuccuaaaaaaaaaacauacaaa

SEQ ID NO: 1357580 - RNA, 21 nt, Human
ucuuccaaaauaccuucugac

SEQ ID NO: 1357581 - RNA, 24 nt, Human
ugaagcaugaacccaggcugagaa

SEQ ID NO: 1357582 - RNA, 20 nt, Human
ugagguguauuaaugaugaa

SEQ ID NO: 1357583 - RNA, 18 nt, Human
ugcuguggagcgcaagug

SEQ ID NO: 1357584 - RNA, 18 nt, Human
uggcacauuauacauaug

SEQ ID NO: 1357585 - RNA, 19 nt, Human
uuagaaaagauguuuucuu

SEQ ID NO: 1357586 - RNA, 22 nt, Human
uuagaaaagauguuuucuuuug

SEQ ID NO: 1357587 - RNA, 18 nt, Human
uuuuaagaacuuaaaauu

SEQ ID NO: 1357588 - RNA, 19 nt, Human
aaaaacaccuaaugggcac

SEQ ID NO: 1357589 - RNA, 19 nt, Human
aaaaauaacugcuuugaac

SEQ ID NO: 1357590 - RNA, 19 nt, Human
aaaccuacacuuguacccc

SEQ ID NO: 1357591 - RNA, 24 nt, Human
aaaccuacacuuguaccccagaac

SEQ ID NO: 1357592 - RNA, 21 nt, Human
aaaccuccugacaacacagcc

SEQ ID NO: 1357593 - RNA, 25 nt, Human
aaagaaaccuccugacaacacagcc

SEQ ID NO: 1357594 - RNA, 23 nt, Human
aaauaaucuguacaacagaccuc

SEQ ID NO: 1357595 - RNA, 22 nt, Human
aacuaaagacaaaguucuacaa

SEQ ID NO: 1357596 - RNA, 19 nt, Human
aagaaaaggaaugagauga

SEQ ID NO: 1357597 - RNA, 19 nt, Human
aagaaagggaggaaagaga

SEQ ID NO: 1357598 - RNA, 20 nt, Human
aagcucccacaggccugagc

SEQ ID NO: 1357599 - RNA, 19 nt, Human
aaugaugaaaacacacgga

SEQ ID NO: 1357600 - RNA, 23 nt, Human
acaccacuauaacccuuuauagc

SEQ ID NO: 1357601 - RNA, 20 nt, Human
accugggcuaugaaauaauc

SEQ ID NO: 1357602 - RNA, 18 nt, Human
acuaaagacaaaguucua

SEQ ID NO: 1357603 - RNA, 26 nt, Human
acucagcagugagcaacacuuauuuu

SEQ ID NO: 1357604 - RNA, 18 nt, Human
agaaagggaggaaagaga

SEQ ID NO: 1357605 - RNA, 23 nt, Human
agaagcucccacaggccugagca

SEQ ID NO: 1357606 - RNA, 24 nt, Human
agacagccaaguaaaaagggccga

SEQ ID NO: 1357607 - RNA, 22 nt, Human
agagacgggauuuccgccaugu

SEQ ID NO: 1357608 - RNA, 18 nt, Human
agccaagcagaacaccag

SEQ ID NO: 1357609 - RNA, 21 nt, Human
agccaagcagaacaccagaaa

SEQ ID NO: 1357610 - RNA, 22 nt, Human
agccuuguaagccaccagacug

SEQ ID NO: 1357611 - RNA, 18 nt, Human
agguauccaguaagaggc

SEQ ID NO: 1357612 - RNA, 20 nt, Human
aguggggaggagccuggccu

SEQ ID NO: 1357613 - RNA, 22 nt, Human
augaugaaaacacacggacacc

SEQ ID NO: 1357614 - RNA, 20 nt, Human
auggaguuggaagccauuau

SEQ ID NO: 1357615 - RNA, 18 nt, Human
caaaugcaaggacauuuu

SEQ ID NO: 1357616 - RNA, 22 nt, Human
caacaacacgcacuggggccuu

SEQ ID NO: 1357617 - RNA, 23 nt, Human
caauaaaaacacaacuauggaua

SEQ ID NO: 1357618 - RNA, 19 nt, Human
caaugagaugaccuuauuu

SEQ ID NO: 1357619 - RNA, 23 nt, Human
cacaauuccagaaaagacugccu

SEQ ID NO: 1357620 - RNA, 22 nt, Human
cacaggccugagcacugggagg

SEQ ID NO: 1357621 - RNA, 23 nt, Human
caccagaaagaacuaccuacgcc

SEQ ID NO: 1357622 - RNA, 27 nt, Human
cacccuucaaagugucugugagccuaa

SEQ ID NO: 1357623 - RNA, 22 nt, Human
cacgcuguuccccaacuucuga

SEQ ID NO: 1357624 - RNA, 18 nt, Human
cagaaagaacuaccuacg

SEQ ID NO: 1357625 - RNA, 22 nt, Human
cagaacaccagaaagaagggag

SEQ ID NO: 1357626 - RNA, 23 nt, Human
cagcauaguaaccuggaauucag

SEQ ID NO: 1357627 - RNA, 19 nt, Human
ccaccagacugacagaaag

SEQ ID NO: 1357628 - RNA, 22 nt, Human
ccaccggcaacaccagccccag

SEQ ID NO: 1357629 - RNA, 26 nt, Human
ccagaaagaacuaccuaacgggggcg

SEQ ID NO: 1357630 - RNA, 24 nt, Human
ccagaaagaacuaccuacgcccca

SEQ ID NO: 1357631 - RNA, 20 nt, Human
cccuguccuggucacccuuc

SEQ ID NO: 1357632 - RNA, 21 nt, Human
ccuacacuuguaccccagaac

SEQ ID NO: 1357633 - RNA, 22 nt, Human
ccuccguuacaaaaguuuaccu

SEQ ID NO: 1357634 - RNA, 23 nt, Human
ccuggcagaagcucccacaggcc

SEQ ID NO: 1357635 - RNA, 20 nt, Human
ccuucuuucccuuuucaucc

SEQ ID NO: 1357636 - RNA, 24 nt, Human
cgaacauacuauuaacaucacugu

SEQ ID NO: 1357637 - RNA, 24 nt, Human
cgccauguugcccacgcuguuccc

SEQ ID NO: 1357638 - RNA, 19 nt, Human
cgggacaauggcaaaagga

SEQ ID NO: 1357639 - RNA, 21 nt, Human
cgggacaauggcaaaaggaga

SEQ ID NO: 1357640 - RNA, 26 nt, Human
cuaaagacaaaguucuacaacaccac

SEQ ID NO: 1357641 - RNA, 20 nt, Human
cugaucccucugccuacucc

SEQ ID NO: 1357642 - RNA, 19 nt, Human
cuggggccuuuuggagggu

SEQ ID NO: 1357643 - RNA, 22 nt, Human
gaacuccuggauucaaauaccu

SEQ ID NO: 1357644 - RNA, 24 nt, Human
gaacugaucccucugccuacucca

SEQ ID NO: 1357645 - RNA, 18 nt, Human
gaagccuuguaagccacc

SEQ ID NO: 1357646 - RNA, 24 nt, Human
gacuuucauuuugugagucaagaa

SEQ ID NO: 1357647 - RNA, 19 nt, Human
gagcauggaaggagggaga

SEQ ID NO: 1357648 - RNA, 19 nt, Human
gaggagccuggccucuccu

SEQ ID NO: 1357649 - RNA, 23 nt, Human
gagggcucuaucuaaggaaaaug

SEQ ID NO: 1357650 - RNA, 21 nt, Human
gaguuucccaccaagacuacc

SEQ ID NO: 1357651 - RNA, 18 nt, Human
gcacuggggccuuuugga

SEQ ID NO: 1357652 - RNA, 20 nt, Human
ggaaggagggagaggaucag

SEQ ID NO: 1357653 - RNA, 18 nt, Human
ggaaugagaugagaagag

SEQ ID NO: 1357654 - RNA, 20 nt, Human
ggagacugagaaaaagaaac

SEQ ID NO: 1357655 - RNA, 22 nt, Human
gggagaggaucaguaaaaacac

SEQ ID NO: 1357656 - RNA, 20 nt, Human
ggugagaagacagacagaaa

SEQ ID NO: 1357657 - RNA, 20 nt, Human
guaaaaacaccuaaugggca

SEQ ID NO: 1357658 - RNA, 22 nt, Human
guccuucuuucccuuuucaucc

SEQ ID NO: 1357659 - RNA, 22 nt, Human
gugagccuaauuugucaugguu

SEQ ID NO: 1357660 - RNA, 24 nt, Human
guggggaggagccuggccucuccu

SEQ ID NO: 1357661 - RNA, 22 nt, Human
uaaaaagaguuucccaccaaga

SEQ ID NO: 1357662 - RNA, 19 nt, Human
uaaaaagggcucccuggca

SEQ ID NO: 1357663 - RNA, 18 nt, Human
uaaaauaaauguuagaaa

SEQ ID NO: 1357664 - RNA, 21 nt, Human
uaaaaugaauauaauaacuuu

SEQ ID NO: 1357665 - RNA, 22 nt, Human
uaaaaugaauauaauaacuuug

SEQ ID NO: 1357666 - RNA, 21 nt, Human
uaacaggcuucaucgcuaguc

SEQ ID NO: 1357667 - RNA, 23 nt, Human
uaaggccagccguggcuacauaa

SEQ ID NO: 1357668 - RNA, 19 nt, Human
uaccuaaaaagaguuuccc

SEQ ID NO: 1357669 - RNA, 19 nt, Human
uaccugggcuaugaaauaa

SEQ ID NO: 1357670 - RNA, 19 nt, Human
uagaaaaagaaaaggaaug

SEQ ID NO: 1357671 - RNA, 19 nt, Human
uagccauaguuuugccucu

SEQ ID NO: 1357672 - RNA, 20 nt, Human
uauacuauaaaugaaauggg

SEQ ID NO: 1357673 - RNA, 24 nt, Human
ucaaauaccugauaauuaaaggau

SEQ ID NO: 1357674 - RNA, 24 nt, Human
ucagaguugagauuuuaagauagu

SEQ ID NO: 1357675 - RNA, 27 nt, Human
ucauccaauaaacccuguccuggucac

SEQ ID NO: 1357676 - RNA, 22 nt, Human
ucccucugccuacuccaaacag

SEQ ID NO: 1357677 - RNA, 18 nt, Human
ucccuggcagaagcuccc

SEQ ID NO: 1357678 - RNA, 21 nt, Human
ugacaacacagccaagcagaa

SEQ ID NO: 1357679 - RNA, 18 nt, Human
ugagaaaaagaaaccucc

SEQ ID NO: 1357680 - RNA, 19 nt, Human
ugagaaaaagaaaccuccu

SEQ ID NO: 1357681 - RNA, 18 nt, Human
ugagaagacagacagaaa

SEQ ID NO: 1357682 - RNA, 20 nt, Human
ugagaagagagaaaaucaga

SEQ ID NO: 1357683 - RNA, 23 nt, Human
ugagaagagagaaaaucagaguu

SEQ ID NO: 1357684 - RNA, 23 nt, Human
ugagaugagaagagagaaaauca

SEQ ID NO: 1357685 - RNA, 21 nt, Human
ugagcaaacuaacaugaaaua

SEQ ID NO: 1357686 - RNA, 24 nt, Human
ugagccuaauuugucaugguugug

SEQ ID NO: 1357687 - RNA, 19 nt, Human
ugauauuuuggcaguuacu

SEQ ID NO: 1357688 - RNA, 18 nt, Human
ugcaaggacauuuuucua

SEQ ID NO: 1357689 - RNA, 25 nt, Human
ugcaaggacauuuuucuagaugcag

SEQ ID NO: 1357690 - RNA, 21 nt, Human
uggaaggagggagaggaucag

SEQ ID NO: 1357691 - RNA, 24 nt, Human
uggaggguggagcauggaaggagg

SEQ ID NO: 1357692 - RNA, 22 nt, Human
uggcagaagcucccacaggccu

SEQ ID NO: 1357693 - RNA, 25 nt, Human
ugggaggaaugcgcacuggggugga

SEQ ID NO: 1357694 - RNA, 23 nt, Human
ugggcacgaggcuuaauaccugg

SEQ ID NO: 1357695 - RNA, 28 nt, Human
ugggguggagccucaggaaguucacgcc

SEQ ID NO: 1357696 - RNA, 23 nt, Human
ugucugugagccuaauuugucau

SEQ ID NO: 1357697 - RNA, 19 nt, Human
ugugcuaucaaaugcaagg

SEQ ID NO: 1357698 - RNA, 23 nt, Human
uguugcagcauaguaaccuggaa

SEQ ID NO: 1357699 - RNA, 19 nt, Human
uuaaaauaaauguuagaaa

SEQ ID NO: 1357700 - RNA, 22 nt, Human
uuaggccaauaaaaaagaacga

SEQ ID NO: 1357701 - RNA, 26 nt, Human
uuccacuaauauuaauuucaagaauc

SEQ ID NO: 1357702 - RNA, 20 nt, Human
uugugaacugaucccucugc

SEQ ID NO: 1357703 - RNA, 20 nt, Human
uuuaaaaugaauauaauaac

SEQ ID NO: 1357704 - RNA, 23 nt, Human
uuugaaaucuguuuuugcugcuu

SEQ ID NO: 1357705 - RNA, 22 nt, Human
aaaaaagggaaagaaacugaca

SEQ ID NO: 1357706 - RNA, 21 nt, Human
aaaacaaacacaugaagcauu

SEQ ID NO: 1357707 - RNA, 24 nt, Human
aaacaaacacaugaagcauuaaga

SEQ ID NO: 1357708 - RNA, 23 nt, Human
aaagaaagcaguugacugugagc

SEQ ID NO: 1357709 - RNA, 21 nt, Human
aacaaaacaaaucuaagagga

SEQ ID NO: 1357710 - RNA, 24 nt, Human
aacaauauccaucccuaaagcaag

SEQ ID NO: 1357711 - RNA, 24 nt, Human
aagaaugaacagagaccuauuagc

SEQ ID NO: 1357712 - RNA, 23 nt, Human
aagccauaaaauauucaagagac

SEQ ID NO: 1357713 - RNA, 20 nt, Human
acaaaacaaaucuaagagga

SEQ ID NO: 1357714 - RNA, 26 nt, Human
acaaacuuuauaaaacuggaccaaaa

SEQ ID NO: 1357715 - RNA, 23 nt, Human
acaacaauauccaucccuaaagc

SEQ ID NO: 1357716 - RNA, 22 nt, Human
acacagauguccuugggacuuu

SEQ ID NO: 1357717 - RNA, 19 nt, Human
acacucauaacccacagca

SEQ ID NO: 1357718 - RNA, 20 nt, Human
accauccaauuaaugcucau

SEQ ID NO: 1357719 - RNA, 19 nt, Human
acccagaaccaccagagaa

SEQ ID NO: 1357720 - RNA, 19 nt, Human
acucuuguccaguucuuga

SEQ ID NO: 1357721 - RNA, 23 nt, Human
acuuaaguuucaagaauugaaga

SEQ ID NO: 1357722 - RNA, 19 nt, Human
agagacaaugaagguagcc

SEQ ID NO: 1357723 - RNA, 21 nt, Human
agcaauuagcaaagaccuaca

SEQ ID NO: 1357724 - RNA, 23 nt, Human
agccaagaaugaacagagaccua

SEQ ID NO: 1357725 - RNA, 19 nt, Human
aguugacugugagcacuug

SEQ ID NO: 1357726 - RNA, 22 nt, Human
aucaugguuagaggccaaguga

SEQ ID NO: 1357727 - RNA, 21 nt, Human
auccugcuucacuaguucuuu

SEQ ID NO: 1357728 - RNA, 21 nt, Human
caaaaagccccauuccugaua

SEQ ID NO: 1357729 - RNA, 27 nt, Human
caaaacaaacacaugaagcauuaagac

SEQ ID NO: 1357730 - RNA, 22 nt, Human
caaaaugucuccaaaaagcccc

SEQ ID NO: 1357731 - RNA, 20 nt, Human
caaauaaacaaaacaaaucu

SEQ ID NO: 1357732 - RNA, 20 nt, Human
caagaaugaacagagaccua

SEQ ID NO: 1357733 - RNA, 24 nt, Human
caagagacaaugaagguagcaaga

SEQ ID NO: 1357734 - RNA, 21 nt, Human
cacugcccucuugugggggag

SEQ ID NO: 1357735 - RNA, 21 nt, Human
cagaagacauaucaaaacaaa

SEQ ID NO: 1357736 - RNA, 20 nt, Human
cagaauaaaaucagaaaguc

SEQ ID NO: 1357737 - RNA, 20 nt, Human
cagcauuccccaugugccuc

SEQ ID NO: 1357738 - RNA, 18 nt, Human
cagccuccaaagggaaaa

SEQ ID NO: 1357739 - RNA, 21 nt, Human
cauuucuuucuguuuugucug

SEQ ID NO: 1357740 - RNA, 18 nt, Human
ccaaaguacuauuuacaa

SEQ ID NO: 1357741 - RNA, 21 nt, Human
ccagaagacauaucaaaacaa

SEQ ID NO: 1357742 - RNA, 23 nt, Human
cccacagcacugucucaccaaac

SEQ ID NO: 1357743 - RNA, 19 nt, Human
ccuccuuuucuucucccca

SEQ ID NO: 1357744 - RNA, 23 nt, Human
ccuuccuuccuugcucauugucc

SEQ ID NO: 1357745 - RNA, 23 nt, Human
cuaaagaaagcaguugacuguga

SEQ ID NO: 1357746 - RNA, 22 nt, Human
cuaccuauuauuccaauugugc

SEQ ID NO: 1357747 - RNA, 22 nt, Human
cuauaucugcagauuuaaaacc

SEQ ID NO: 1357748 - RNA, 25 nt, Human
cucccucacuccaucaauaacauuc

SEQ ID NO: 1357749 - RNA, 20 nt, Human
cucuuagaaggcagcaguuc

SEQ ID NO: 1357750 - RNA, 22 nt, Human
cuuucccucuaccuauuauucc

SEQ ID NO: 1357751 - RNA, 19 nt, Human
gaaauaaagccaagaauga

SEQ ID NO: 1357752 - RNA, 24 nt, Human
gaacagagaccuauuagcaaagaa

SEQ ID NO: 1357753 - RNA, 21 nt, Human
gacaaugaagguagcaagaga

SEQ ID NO: 1357754 - RNA, 22 nt, Human
gauaaauuuccuguagcuuucu

SEQ ID NO: 1357755 - RNA, 25 nt, Human
gccuuccuuccuugcucauuguccu

SEQ ID NO: 1357756 - RNA, 25 nt, Human
gcucauuguccucuucucuuuggcu

SEQ ID NO: 1357757 - RNA, 22 nt, Human
ggaacugagacaugaaugaugg

SEQ ID NO: 1357758 - RNA, 18 nt, Human
ggcaugggguggggaaag

SEQ ID NO: 1357759 - RNA, 22 nt, Human
ggccagaagacauaucaaaaca

SEQ ID NO: 1357760 - RNA, 21 nt, Human
gggacuuucacaauuugaagu

SEQ ID NO: 1357761 - RNA, 20 nt, Human
guagaaccagaauaaaauca

SEQ ID NO: 1357762 - RNA, 22 nt, Human
guagcuuucuuucuauuuuucu

SEQ ID NO: 1357763 - RNA, 19 nt, Human
guccucuucucuuuggcuc

SEQ ID NO: 1357764 - RNA, 23 nt, Human
uaaagccaagaaugaacagagac

SEQ ID NO: 1357765 - RNA, 21 nt, Human
uaaauaucuugauacauacca

SEQ ID NO: 1357766 - RNA, 25 nt, Human
uacagaaugcagcaaucaugguuag

SEQ ID NO: 1357767 - RNA, 24 nt, Human
uacauaccaaugguacccagaacu

SEQ ID NO: 1357768 - RNA, 20 nt, Human
uacccagaaccaccagagaa

SEQ ID NO: 1357769 - RNA, 21 nt, Human
uacccagaaccaccagagaau

SEQ ID NO: 1357770 - RNA, 18 nt, Human
uaccuuaauuccuccaaa

SEQ ID NO: 1357771 - RNA, 25 nt, Human
uacguuuaucuucaccacauagaaa

SEQ ID NO: 1357772 - RNA, 23 nt, Human
uagaaccagaauaaaaucagaaa

SEQ ID NO: 1357773 - RNA, 21 nt, Human
uagagacauuucuuucuguuu

SEQ ID NO: 1357774 - RNA, 23 nt, Human
uagagacauuucuuucuguuuug

SEQ ID NO: 1357775 - RNA, 19 nt, Human
uagaggccaagugaaguag

SEQ ID NO: 1357776 - RNA, 24 nt, Human
uagaguacagcaaguaagauacua

SEQ ID NO: 1357777 - RNA, 22 nt, Human
uagccuaggacaaacuuaaguu

SEQ ID NO: 1357778 - RNA, 23 nt, Human
uaggaaagagcacaguuguccuu

SEQ ID NO: 1357779 - RNA, 22 nt, Human
uagguaccuccacuggagccuu

SEQ ID NO: 1357780 - RNA, 23 nt, Human
uauaucugcagauuuaaaaccuc

SEQ ID NO: 1357781 - RNA, 22 nt, Human
uaucaguaaacaaauuuuccaa

SEQ ID NO: 1357782 - RNA, 23 nt, Human
uauuauuccaauugugcaucaca

SEQ ID NO: 1357783 - RNA, 20 nt, Human
uauuccaauugugcaucacu

SEQ ID NO: 1357784 - RNA, 22 nt, Human
ucaaaaaguaauuguaaaagca

SEQ ID NO: 1357785 - RNA, 18 nt, Human
ucacuaguucuuucccuc

SEQ ID NO: 1357786 - RNA, 28 nt, Human
ucaguguucucucugcucccugucuucu

SEQ ID NO: 1357787 - RNA, 19 nt, Human
uccaaaaagccccauuccu

SEQ ID NO: 1357788 - RNA, 23 nt, Human
uccaaaaugucuccaaaaagccc

SEQ ID NO: 1357789 - RNA, 25 nt, Human
uccaaaaugucuccaaaaagcccca

SEQ ID NO: 1357790 - RNA, 22 nt, Human
ucuauguaccccacauucuaaa

SEQ ID NO: 1357791 - RNA, 23 nt, Human
ucuauguaccccacauucuaaag

SEQ ID NO: 1357792 - RNA, 24 nt, Human
ucuuuguagaaccagaauaaaauc

SEQ ID NO: 1357793 - RNA, 20 nt, Human
ugaaauuaucaggcuauguu

SEQ ID NO: 1357794 - RNA, 22 nt, Human
ugaaguagcagccuccaaaggg

SEQ ID NO: 1357795 - RNA, 22 nt, Human
ugaaguccaaaaugucuccaaa

SEQ ID NO: 1357796 - RNA, 18 nt, Human
ugauuccaggucucuccu

SEQ ID NO: 1357797 - RNA, 20 nt, Human
ugccucuguaccuuaauucu

SEQ ID NO: 1357798 - RNA, 23 nt, Human
uggaauaacaaagagaauuagag

SEQ ID NO: 1357799 - RNA, 23 nt, Human
uggaccaaaaaagggaaagaaac

SEQ ID NO: 1357800 - RNA, 18 nt, Human
ugggggagggcauggggu

SEQ ID NO: 1357801 - RNA, 24 nt, Human
uguccaaugguaagccauaaaaua

SEQ ID NO: 1357802 - RNA, 26 nt, Human
uguuuugucugccuuccuuccuugcu

SEQ ID NO: 1357803 - RNA, 18 nt, Human
uuagaaauaaagccaaga

SEQ ID NO: 1357804 - RNA, 20 nt, Human
uuagcaaagaaaaaaucaug

SEQ ID NO: 1357805 - RNA, 22 nt, Human
uugacugugagcacuuggauuc

SEQ ID NO: 1357806 - RNA, 19 nt, Human
uugugggggagggcauggg

SEQ ID NO: 1357807 - RNA, 21 nt, Human
uuuccuguagcuuucuuucua

SEQ ID NO: 1357808 - RNA, 22 nt, Human
uuuguagaaccagaauaaaauc

SEQ ID NO: 1357809 - RNA, 20 nt, Human
aaacaaacagaaacauggga

SEQ ID NO: 1357810 - RNA, 22 nt, Human
aaacaaacagaaacaugggaca

SEQ ID NO: 1357811 - RNA, 19 nt, Human
aaacagguuucauucugca

SEQ ID NO: 1357812 - RNA, 22 nt, Human
aaacauauacgacugucccucc

SEQ ID NO: 1357813 - RNA, 20 nt, Human
aaagacccagcagcaggagg

SEQ ID NO: 1357814 - RNA, 23 nt, Human
aacuaaaaucccggagaagccca

SEQ ID NO: 1357815 - RNA, 18 nt, Human
aagcugcauucuaccucc

SEQ ID NO: 1357816 - RNA, 18 nt, Human
aaggaccagccccugaag

SEQ ID NO: 1357817 - RNA, 20 nt, Human
aaggaggggucugggcggua

SEQ ID NO: 1357818 - RNA, 24 nt, Human
acauccagcaggagugaccaugcc

SEQ ID NO: 1357819 - RNA, 23 nt, Human
agaaugggagggaaaggaagggc

SEQ ID NO: 1357820 - RNA, 21 nt, Human
agcaacaccuuuauuacuagc

SEQ ID NO: 1357821 - RNA, 23 nt, Human
agccaucucaggauuaaagaccc

SEQ ID NO: 1357822 - RNA, 24 nt, Human
aggaaguccgugcacaggcagauc

SEQ ID NO: 1357823 - RNA, 21 nt, Human
agggggccauggagaaggacc

SEQ ID NO: 1357824 - RNA, 18 nt, Human
aucagacacuugaucuca

SEQ ID NO: 1357825 - RNA, 22 nt, Human
caaaaggcucacugccccaaca

SEQ ID NO: 1357826 - RNA, 20 nt, Human
caaacagaaacaugggacaa

SEQ ID NO: 1357827 - RNA, 20 nt, Human
caaagcaggaucccucccuu

SEQ ID NO: 1357828 - RNA, 24 nt, Human
caacaacuucuauggcuccccaga

SEQ ID NO: 1357829 - RNA, 23 nt, Human
caagaccccugaacacacuagcu

SEQ ID NO: 1357830 - RNA, 22 nt, Human
cacaggcagaucugcuggugcc

SEQ ID NO: 1357831 - RNA, 21 nt, Human
caccaaacagucagcagugcu

SEQ ID NO: 1357832 - RNA, 21 nt, Human
caccagagguuggacagcgcc

SEQ ID NO: 1357833 - RNA, 24 nt, Human
caccaugucccuggauggagagac

SEQ ID NO: 1357834 - RNA, 20 nt, Human
cagcaacaccuuuauuacua

SEQ ID NO: 1357835 - RNA, 19 nt, Human
cagcagugcuucuggauga

SEQ ID NO: 1357836 - RNA, 20 nt, Human
cagccccugaagccaucuca

SEQ ID NO: 1357837 - RNA, 19 nt, Human
caggaucccucccuuguca

SEQ ID NO: 1357838 - RNA, 20 nt, Human
caggcagaucugcuggugcc

SEQ ID NO: 1357839 - RNA, 22 nt, Human
caucaccaacugccgcucacag

SEQ ID NO: 1357840 - RNA, 18 nt, Human
caugcccagccccacacc

SEQ ID NO: 1357841 - RNA, 20 nt, Human
cauuuauauguucuugucug

SEQ ID NO: 1357842 - RNA, 22 nt, Human
ccagacauccagcaggagugac

SEQ ID NO: 1357843 - RNA, 19 nt, Human
ccagugucuaggugucuuc

SEQ ID NO: 1357844 - RNA, 21 nt, Human
ccauggagaaggaccagcccc

SEQ ID NO: 1357845 - RNA, 18 nt, Human
cccacaccugaaauggga

SEQ ID NO: 1357846 - RNA, 22 nt, Human
ccccaacagcaaccaccaaaca

SEQ ID NO: 1357847 - RNA, 19 nt, Human
ccccacaagcucccucccu

SEQ ID NO: 1357848 - RNA, 23 nt, Human
ccccagagcucuccagaucaagu

SEQ ID NO: 1357849 - RNA, 21 nt, Human
ccccugaacacacuagcucug

SEQ ID NO: 1357850 - RNA, 21 nt, Human
ccugaagaccuuucaucaaag

SEQ ID NO: 1357851 - RNA, 19 nt, Human
ccugcagucaggcuguugg

SEQ ID NO: 1357852 - RNA, 21 nt, Human
ccugcagucaggcuguugggc

SEQ ID NO: 1357853 - RNA, 20 nt, Human
ccugcucuggaugagggugg

SEQ ID NO: 1357854 - RNA, 24 nt, Human
ccuggcucuuguucacuccuucca

SEQ ID NO: 1357855 - RNA, 18 nt, Human
ccuugcacugaggcccuc

SEQ ID NO: 1357856 - RNA, 24 nt, Human
cucacugccccaacagcaaccacc

SEQ ID NO: 1357857 - RNA, 21 nt, Human
cucagaauggacaaaaggcuc

SEQ ID NO: 1357858 - RNA, 20 nt, Human
cucauggcccgaguucccaa

SEQ ID NO: 1357859 - RNA, 21 nt, Human
cuccagcuggagaccugggcu

SEQ ID NO: 1357860 - RNA, 25 nt, Human
cuccugaacuaaaaucccggagaag

SEQ ID NO: 1357861 - RNA, 26 nt, Human
cuccuggcucuuguucacuccuucca

SEQ ID NO: 1357862 - RNA, 23 nt, Human
cugaacuaaaaucccggagaagc

SEQ ID NO: 1357863 - RNA, 24 nt, Human
cuggaggcaagaccccugaacaca

SEQ ID NO: 1357864 - RNA, 19 nt, Human
cugguauuucccuaggucc

SEQ ID NO: 1357865 - RNA, 19 nt, Human
cuucucauuuucauccugg

SEQ ID NO: 1357866 - RNA, 23 nt, Human
gaacacacuagcucugaggacac

SEQ ID NO: 1357867 - RNA, 19 nt, Human
gaggagaaaccagcccaau

SEQ ID NO: 1357868 - RNA, 23 nt, Human
gaggggucugggcgguagagcuu

SEQ ID NO: 1357869 - RNA, 19 nt, Human
gaucaugggacugggaagg

SEQ ID NO: 1357870 - RNA, 21 nt, Human
gcaggguugacauucccucca

SEQ ID NO: 1357871 - RNA, 24 nt, Human
gcccaaacaaacagaaacauggga

SEQ ID NO: 1357872 - RNA, 24 nt, Human
gcgaucaugggacugggaaggagg

SEQ ID NO: 1357873 - RNA, 24 nt, Human
ggacugggaaggaggggucugggc

SEQ ID NO: 1357874 - RNA, 23 nt, Human
ggagaaaccagcccaaucucaga

SEQ ID NO: 1357875 - RNA, 24 nt, Human
ggagggaaaggaagggcagaaugg

SEQ ID NO: 1357876 - RNA, 18 nt, Human
ggcuggggcgaucauggg

SEQ ID NO: 1357877 - RNA, 23 nt, Human
ggguuugcaaaauggcugagaua

SEQ ID NO: 1357878 - RNA, 24 nt, Human
guccuucaugcuuccuuccucagu

SEQ ID NO: 1357879 - RNA, 18 nt, Human
guccuugguuuucaccuu

SEQ ID NO: 1357880 - RNA, 22 nt, Human
uaaagacccagcagcaggaggg

SEQ ID NO: 1357881 - RNA, 21 nt, Human
uaaccugagacauucccugaa

SEQ ID NO: 1357882 - RNA, 20 nt, Human
uagcaucugugccuaggaug

SEQ ID NO: 1357883 - RNA, 22 nt, Human
uaggcccugcagaagcaucucc

SEQ ID NO: 1357884 - RNA, 18 nt, Human
uaggugucuucugagguu

SEQ ID NO: 1357885 - RNA, 19 nt, Human
uaggugucuucugagguug

SEQ ID NO: 1357886 - RNA, 23 nt, Human
uauccugaguggcaggcuugggu

SEQ ID NO: 1357887 - RNA, 24 nt, Human
uauuacuagcaaaacccugcagag

SEQ ID NO: 1357888 - RNA, 21 nt, Human
ucacugccccaacagcaacca

SEQ ID NO: 1357889 - RNA, 20 nt, Human
ucagaaugggagggaaagga

SEQ ID NO: 1357890 - RNA, 21 nt, Human
ucauucugcagaaagcuccuu

SEQ ID NO: 1357891 - RNA, 23 nt, Human
uccacaccaggacaacgauuggc

SEQ ID NO: 1357892 - RNA, 18 nt, Human
uccagaccugccccacaa

SEQ ID NO: 1357893 - RNA, 28 nt, Human
uccagcaggagugaccaugcccagcccu

SEQ ID NO: 1357894 - RNA, 21 nt, Human
uccaguagaggccacuggcug

SEQ ID NO: 1357895 - RNA, 19 nt, Human
ucccacaguaguccacacc

SEQ ID NO: 1357896 - RNA, 21 nt, Human
ucccagccagaaacucaggac

SEQ ID NO: 1357897 - RNA, 22 nt, Human
ucccuggauggagagaccccua

SEQ ID NO: 1357898 - RNA, 18 nt, Human
ucccuggucuccuggcuc

SEQ ID NO: 1357899 - RNA, 22 nt, Human
ucccuuguacagcagcugaaac

SEQ ID NO: 1357900 - RNA, 19 nt, Human
uccugcucuggaugagggu

SEQ ID NO: 1357901 - RNA, 22 nt, Human
uccugcucuggaugagggugga

SEQ ID NO: 1357902 - RNA, 18 nt, Human
uccuuguuuggcuuauuu

SEQ ID NO: 1357903 - RNA, 20 nt, Human
ucucaagcugcauucuaccu

SEQ ID NO: 1357904 - RNA, 20 nt, Human
ucucaggauuaaagacccag

SEQ ID NO: 1357905 - RNA, 30 nt, Human
ucugacaacuccuucucauuuucauccuuu

SEQ ID NO: 1357906 - RNA, 22 nt, Human
ucugcuggugccauuacacuaa

SEQ ID NO: 1357907 - RNA, 19 nt, Human
ucuggaugaggguggaaag

SEQ ID NO: 1357908 - RNA, 21 nt, Human
ugagauauguggagggggcca

SEQ ID NO: 1357909 - RNA, 24 nt, Human
ugaggaagucaucaacaccccggc

SEQ ID NO: 1357910 - RNA, 20 nt, Human
ugagggugaggugcugcucc

SEQ ID NO: 1357911 - RNA, 19 nt, Human
ugagguaguacaggaaguc

SEQ ID NO: 1357912 - RNA, 21 nt, Human
ugaggugcugcuccaggauga

SEQ ID NO: 1357913 - RNA, 20 nt, Human
ugauguaggguccauccacc

SEQ ID NO: 1357914 - RNA, 21 nt, Human
ugcaccacgugguggcagcac

SEQ ID NO: 1357915 - RNA, 19 nt, Human
ugcccaaacaaacagaaac

SEQ ID NO: 1357916 - RNA, 19 nt, Human
ugcccaaacaaacagaaac

SEQ ID NO: 1357917 - RNA, 28 nt, Human
ugcccagccccacaccugaaaugggacu

SEQ ID NO: 1357918 - RNA, 18 nt, Human
ugcgauaaggauguuucc

SEQ ID NO: 1357919 - RNA, 20 nt, Human
uggaaaggcuguaccuggua

SEQ ID NO: 1357920 - RNA, 24 nt, Human
uggagaccugggcuccugauacca

SEQ ID NO: 1357921 - RNA, 20 nt, Human
uggagggggccauggagaag

SEQ ID NO: 1357922 - RNA, 21 nt, Human
uggaugaggguggaaaggcug

SEQ ID NO: 1357923 - RNA, 19 nt, Human
uggcucuuguucacuccuu

SEQ ID NO: 1357924 - RNA, 19 nt, Human
uggcuuauuuuugaagcca

SEQ ID NO: 1357925 - RNA, 20 nt, Human
ugggagggaaaggaagggca

SEQ ID NO: 1357926 - RNA, 18 nt, Human
uggucaggaaggaugcuu

SEQ ID NO: 1357927 - RNA, 18 nt, Human
ugucaucuccagaccugc

SEQ ID NO: 1357928 - RNA, 20 nt, Human
ugucaucuccagaccugccc

SEQ ID NO: 1357929 - RNA, 22 nt, Human
uguggagggggccauggagaag

SEQ ID NO: 1357930 - RNA, 21 nt, Human
uguuucauucugaccaggguu

SEQ ID NO: 1357931 - RNA, 18 nt, Human
uuccaggcagccuuccac

SEQ ID NO: 1357932 - RNA, 22 nt, Human
uucccuagguccuugguuuuca

SEQ ID NO: 1357933 - RNA, 24 nt, Human
uucccuagguccuugguuuucacc

SEQ ID NO: 1357934 - RNA, 21 nt, Human
uuccugcagucaggcuguugg

SEQ ID NO: 1357935 - RNA, 20 nt, Human
uucuaccuccugaacuaaaa

SEQ ID NO: 1357936 - RNA, 21 nt, Human
uucucauuuucauccuggagg

SEQ ID NO: 1357937 - RNA, 21 nt, Human
uugaucucaagcugcauucua

SEQ ID NO: 1357938 - RNA, 22 nt, Human
acauuuauuaaggcaaaggcca

SEQ ID NO: 1357939 - RNA, 26 nt, Human
aggugaccuggaaggccuucggccuc

SEQ ID NO: 1357940 - RNA, 26 nt, Human
caagaccccagcucggucccgggugc

SEQ ID NO: 1357941 - RNA, 20 nt, Human
cagaacauggccaaggagcg

SEQ ID NO: 1357942 - RNA, 19 nt, Human
ccagcagaagcuaugaagc

SEQ ID NO: 1357943 - RNA, 18 nt, Human
ccagggccgccccauugg

SEQ ID NO: 1357944 - RNA, 21 nt, Human
ccccagggguccuggguccac

SEQ ID NO: 1357945 - RNA, 24 nt, Human
ccgcucagaacauggccaaggagc

SEQ ID NO: 1357946 - RNA, 23 nt, Human
ccuccaagaccccagcucggucc

SEQ ID NO: 1357947 - RNA, 21 nt, Human
ccuggguccaccccaggccag

SEQ ID NO: 1357948 - RNA, 21 nt, Human
cggucccgggugccaccuccu

SEQ ID NO: 1357949 - RNA, 20 nt, Human
ggguccuggguccaccccag

SEQ ID NO: 1357950 - RNA, 25 nt, Human
uaaggcaaaggccaagcuggccgcu

SEQ ID NO: 1357951 - RNA, 25 nt, Human
uccaagaccccagcucggucccggg

SEQ ID NO: 1357952 - RNA, 22 nt, Human
ucucaggugaccuggaaggccu

SEQ ID NO: 1357953 - RNA, 21 nt, Human
ugaccuggaaggccuucggcc

SEQ ID NO: 1357954 - RNA, 20 nt, Human
ugccaccuccuccgcuucug

SEQ ID NO: 1357955 - RNA, 25 nt, Human
uuaccaccacucagggcacccaggc

SEQ ID NO: 1357956 - RNA, 20 nt, Human
uugcuccacuuuaccaccac

SEQ ID NO: 1357957 - RNA, 22 nt, Human
aaaaaagacauccaggacugua

SEQ ID NO: 1357958 - RNA, 26 nt, Human
aaacacaaaaaaggaaagacauccag

SEQ ID NO: 1357959 - RNA, 19 nt, Human
aaacauaugccucaacaca

SEQ ID NO: 1357960 - RNA, 25 nt, Human
aaagaaaacacaaaaaaggaaagac

SEQ ID NO: 1357961 - RNA, 22 nt, Human
aaagaaagcacaaaaaagacau

SEQ ID NO: 1357962 - RNA, 27 nt, Human
aaagacauccagguuuauggacugaaa

SEQ ID NO: 1357963 - RNA, 24 nt, Human
aaagugcugggauuacaggcguga

SEQ ID NO: 1357964 - RNA, 21 nt, Human
aaauucuuaaccaaacaguuu

SEQ ID NO: 1357965 - RNA, 20 nt, Human
aacacaaaaaaggaaagaca

SEQ ID NO: 1357966 - RNA, 18 nt, Human
aagaaaacacaaaaaagg

SEQ ID NO: 1357967 - RNA, 21 nt, Human
aagcacaaaaaagacauccag

SEQ ID NO: 1357968 - RNA, 21 nt, Human
aagccucuaaacaauuuagug

SEQ ID NO: 1357969 - RNA, 18 nt, Human
aagcugcaggauauaaaa

SEQ ID NO: 1357970 - RNA, 19 nt, Human
aagugcugggauuacaggc

SEQ ID NO: 1357971 - RNA, 19 nt, Human
aagugcugggauuacaggc

SEQ ID NO: 1357972 - RNA, 26 nt, Human
aagugcugggauuacaggcgugagcc

SEQ ID NO: 1357973 - RNA, 18 nt, Human
acgggguuucaccguguu

SEQ ID NO: 1357974 - RNA, 19 nt, Human
acgggguuucaccguguua

SEQ ID NO: 1357975 - RNA, 20 nt, Human
acgggguuucaccguguuag

SEQ ID NO: 1357976 - RNA, 24 nt, Human
acgggguuucaccguguuagccag

SEQ ID NO: 1357977 - RNA, 26 nt, Human
acuggagcaagaaaaggaggcccagu

SEQ ID NO: 1357978 - RNA, 22 nt, Human
agaaagaaauaaagggcaucug

SEQ ID NO: 1357979 - RNA, 19 nt, Human
agagacgggguuucaccgu

SEQ ID NO: 1357980 - RNA, 22 nt, Human
agcaagaaaaggaggcccacuu

SEQ ID NO: 1357981 - RNA, 23 nt, Human
aggugcugacagcgaggagaacc

SEQ ID NO: 1357982 - RNA, 22 nt, Human
aguacuauucauucccaggcac

SEQ ID NO: 1357983 - RNA, 20 nt, Human
aguagagacgggguuucacc

SEQ ID NO: 1357984 - RNA, 21 nt, Human
aguagagacgggguuucaccg

SEQ ID NO: 1357985 - RNA, 23 nt, Human
aguagagacgggguuucaccgug

SEQ ID NO: 1357986 - RNA, 24 nt, Human
aguagagacgggguuucaccgugu

SEQ ID NO: 1357987 - RNA, 21 nt, Human
agugcuguaauaaacaugggg

SEQ ID NO: 1357988 - RNA, 19 nt, Human
aguguuugcuuuuguuuag

SEQ ID NO: 1357989 - RNA, 23 nt, Human
auagugcuguaauaaacaugggg

SEQ ID NO: 1357990 - RNA, 21 nt, Human
auggacacuuauguugauucc

SEQ ID NO: 1357991 - RNA, 21 nt, Human
auugauuuucuuuccuuugga

SEQ ID NO: 1357992 - RNA, 22 nt, Human
caaaaaaggaaagacauccagg

SEQ ID NO: 1357993 - RNA, 24 nt, Human
caaagugcugggauuacaggcgug

SEQ ID NO: 1357994 - RNA, 19 nt, Human
caacaauguuuacuugcaa

SEQ ID NO: 1357995 - RNA, 19 nt, Human
caacauguugacaacuaac

SEQ ID NO: 1357996 - RNA, 21 nt, Human
cacaaaaaaggaaagacaucc

SEQ ID NO: 1357997 - RNA, 21 nt, Human
cacaaaagggcguaaagacac

SEQ ID NO: 1357998 - RNA, 22 nt, Human
cacauuuucuuuauccauucau

SEQ ID NO: 1357999 - RNA, 18 nt, Human
caccguguuagccaggau

SEQ ID NO: 1358000 - RNA, 24 nt, Human
caccguguuagccaggaugguguc

SEQ ID NO: 1358001 - RNA, 24 nt, Human
caggcgugagccaccgugccuggc

SEQ ID NO: 1358002 - RNA, 20 nt, Human
caucugaauuggaaaggaga

SEQ ID NO: 1358003 - RNA, 20 nt, Human
ccaaagugcugggauuacag

SEQ ID NO: 1358004 - RNA, 22 nt, Human
ccaaagugcugggauuacaggc

SEQ ID NO: 1358005 - RNA, 22 nt, Human
ccaaagugcugggauuacaggc

SEQ ID NO: 1358006 - RNA, 24 nt, Human
ccaaagugcugggauuacaggcgu

SEQ ID NO: 1358007 - RNA, 22 nt, Human
ccaccgugccuggccuguggug

SEQ ID NO: 1358008 - RNA, 23 nt, Human
ccaccgugccuggccuguggugu

SEQ ID NO: 1358009 - RNA, 24 nt, Human
cccuccaguugcauucauguugcc

SEQ ID NO: 1358010 - RNA, 24 nt, Human
ccuacagcuaagaucauacugaac

SEQ ID NO: 1358011 - RNA, 20 nt, Human
ccucgugauccgccugucuc

SEQ ID NO: 1358012 - RNA, 22 nt, Human
ccugucucggccucccaaagug

SEQ ID NO: 1358013 - RNA, 21 nt, Human
cgcucccaucaauagugucca

SEQ ID NO: 1358014 - RNA, 24 nt, Human
cgugagccaccgugccuggccugu

SEQ ID NO: 1358015 - RNA, 18 nt, Human
cuccagauggccagccgc

SEQ ID NO: 1358016 - RNA, 24 nt, Human
cuccuggccucgugauccgccugu

SEQ ID NO: 1358017 - RNA, 23 nt, Human
cugaucaacaguguuugcuuuug

SEQ ID NO: 1358018 - RNA, 19 nt, Human
cuggagcaagaaaaggagg

SEQ ID NO: 1358019 - RNA, 23 nt, Human
cugucucggccucccaaagugcu

SEQ ID NO: 1358020 - RNA, 23 nt, Human
gaaagcacaaaaaagacauccag

SEQ ID NO: 1358021 - RNA, 25 nt, Human
gaaauaaacuuaaccgaggaaguaa

SEQ ID NO: 1358022 - RNA, 24 nt, Human
gagacgggguuucaccguguuagc

SEQ ID NO: 1358023 - RNA, 18 nt, Human
gauuacaggcgugagcca

SEQ ID NO: 1358024 - RNA, 21 nt, Human
gauuacaggcgugagccaccg

SEQ ID NO: 1358025 - RNA, 24 nt, Human
gauuacaggcgugagccaccgugc

SEQ ID NO: 1358026 - RNA, 22 nt, Human
gccagccgcucccaucaauagu

SEQ ID NO: 1358027 - RNA, 23 nt, Human
ggaaagacauccagguuuaugga

SEQ ID NO: 1358028 - RNA, 21 nt, Human
ggcaauuagguuagagaaaga

SEQ ID NO: 1358029 - RNA, 24 nt, Human
ggccucgugauccgccugucucgg

SEQ ID NO: 1358030 - RNA, 20 nt, Human
gggggugcagguaaggcuuu

SEQ ID NO: 1358031 - RNA, 23 nt, Human
gggguuucaccguguuagccagg

SEQ ID NO: 1358032 - RNA, 22 nt, Human
ggguuucaccguguuagccagg

SEQ ID NO: 1358033 - RNA, 19 nt, Human
ggugucgaucuccuggccu

SEQ ID NO: 1358034 - RNA, 23 nt, Human
guagagacgggguuucaccgugu

SEQ ID NO: 1358035 - RNA, 22 nt, Human
guauuccauuauauauguaugu

SEQ ID NO: 1358036 - RNA, 23 nt, Human
gucacaauauagugugcucgacc

SEQ ID NO: 1358037 - RNA, 24 nt, Human
uaaaagcaccuuagcugcauauuc

SEQ ID NO: 1358038 - RNA, 20 nt, Human
uaaagacaacccuacagcua

SEQ ID NO: 1358039 - RNA, 33 nt, Human
uaaccaaacaguuuagacucuaguuuauauuuu

SEQ ID NO: 1358040 - RNA, 21 nt, Human
uaagaucauacugaacgugga

SEQ ID NO: 1358041 - RNA, 18 nt, Human
uaaggucucuaccuaaaa

SEQ ID NO: 1358042 - RNA, 24 nt, Human
uaauuaauauucuaaaaugacuca

SEQ ID NO: 1358043 - RNA, 22 nt, Human
uacaggcgugagccaccgugcc

SEQ ID NO: 1358044 - RNA, 23 nt, Human
uacaggcgugagccaccgugccu

SEQ ID NO: 1358045 - RNA, 23 nt, Human
uacucuagcaaugaaauucuuaa

SEQ ID NO: 1358046 - RNA, 18 nt, Human
uagagacgggguuucacc

SEQ ID NO: 1358047 - RNA, 21 nt, Human
uagauuuuuggaaauucaguu

SEQ ID NO: 1358048 - RNA, 24 nt, Human
uauccuacgugauuuacaaauuca

SEQ ID NO: 1358049 - RNA, 24 nt, Human
uauugugaauagugcuguaauaaa

SEQ ID NO: 1358050 - RNA, 22 nt, Human
ucaauuaucuuuagugcuuucu

SEQ ID NO: 1358051 - RNA, 22 nt, Human
ucaccguguuagccaggauggu

SEQ ID NO: 1358052 - RNA, 27 nt, Human
ucaccuaagauaaugcccuccaguugc

SEQ ID NO: 1358053 - RNA, 24 nt, Human
ucccaaagugcugggauuacaggc

SEQ ID NO: 1358054 - RNA, 20 nt, Human
ucccaggcacuuaaauucau

SEQ ID NO: 1358055 - RNA, 20 nt, Human
ucucggccucccaaagugcu

SEQ ID NO: 1358056 - RNA, 22 nt, Human
ucugagaagaaaagucaggaaa

SEQ ID NO: 1358057 - RNA, 24 nt, Human
ucuuggcuauugugaauagugcug

SEQ ID NO: 1358058 - RNA, 25 nt, Human
ugaaagcauuuggcaaaauuaaacg

SEQ ID NO: 1358059 - RNA, 19 nt, Human
ugagaacaaaauguuagau

SEQ ID NO: 1358060 - RNA, 26 nt, Human
ugccucaacacaaaagggcguaaagg

SEQ ID NO: 1358061 - RNA, 21 nt, Human
ugccuggauuuaaguguaaga

SEQ ID NO: 1358062 - RNA, 21 nt, Human
ugcugacagcgaggagaaccc

SEQ ID NO: 1358063 - RNA, 24 nt, Human
ugcugggauuacaggcgugagcca

SEQ ID NO: 1358064 - RNA, 18 nt, Human
uggaaaaggugaaaaaug

SEQ ID NO: 1358065 - RNA, 18 nt, Human
ugggauuacaggcgugag

SEQ ID NO: 1358066 - RNA, 21 nt, Human
ugggauuacaggcgugagcca

SEQ ID NO: 1358067 - RNA, 22 nt, Human
ugggauuacaggcgugagccac

SEQ ID NO: 1358068 - RNA, 23 nt, Human
ugggauuacaggcgugagccacc

SEQ ID NO: 1358069 - RNA, 23 nt, Human
ugggauuacaggcgugagccacc

SEQ ID NO: 1358070 - RNA, 24 nt, Human
ugggauuacaggcgugagccaccg

SEQ ID NO: 1358071 - RNA, 19 nt, Human
ugggggugcagguaaggcu

SEQ ID NO: 1358072 - RNA, 33 nt, Human
uguuaccaugaaaacuggagcaagaaaaggagg

SEQ ID NO: 1358073 - RNA, 21 nt, Human
uuauugagaacaaaauguuag

SEQ ID NO: 1358074 - RNA, 21 nt, Human
uuguauuuuuaaaagcaccuu

SEQ ID NO: 1358075 - RNA, 19 nt, Human
uuucaccguguuagccagg

SEQ ID NO: 1358076 - RNA, 22 nt, Human
aaacagaaguucagagagagcc

SEQ ID NO: 1358077 - RNA, 20 nt, Human
acccgaaggcucccccacuc

SEQ ID NO: 1358078 - RNA, 27 nt, Human
acccgaaggcucccccacuccccauga

SEQ ID NO: 1358079 - RNA, 19 nt, Human
agagccaugaaguuacaug

SEQ ID NO: 1358080 - RNA, 22 nt, Human
aggggaaggaggggggugggau

SEQ ID NO: 1358081 - RNA, 22 nt, Human
auaaagaaacagaaguucagag

SEQ ID NO: 1358082 - RNA, 18 nt, Human
cacacuggacaucuuugc

SEQ ID NO: 1358083 - RNA, 26 nt, Human
cauccuugcuccagcguacccaggag

SEQ ID NO: 1358084 - RNA, 21 nt, Human
ccagaguccucccuaaaggag

SEQ ID NO: 1358085 - RNA, 27 nt, Human
ccaucuuacagauaaagaaacagaagu

SEQ ID NO: 1358086 - RNA, 23 nt, Human
ccgguauuuggacaguuuuccuu

SEQ ID NO: 1358087 - RNA, 23 nt, Human
ccugcggugugggaaccagaggc

SEQ ID NO: 1358088 - RNA, 19 nt, Human
cgaaggcucccccacuccc

SEQ ID NO: 1358089 - RNA, 19 nt, Human
cgugcaaagucucagagcu

SEQ ID NO: 1358090 - RNA, 20 nt, Human
cucccccacuccccaugaga

SEQ ID NO: 1358091 - RNA, 24 nt, Human
gaaguuacaugagauccucuacuu

SEQ ID NO: 1358092 - RNA, 23 nt, Human
gacaucuuugcugucgaucaagg

SEQ ID NO: 1358093 - RNA, 26 nt, Human
gauaaagaaacagaaguucagagaga

SEQ ID NO: 1358094 - RNA, 20 nt, Human
gccguucugccacacccgaa

SEQ ID NO: 1358095 - RNA, 23 nt, Human
ggaggggggugggauggggaggg

SEQ ID NO: 1358096 - RNA, 24 nt, Human
ggaggggggugggauggggaggga

SEQ ID NO: 1358097 - RNA, 19 nt, Human
ggauggggagggagggcgc

SEQ ID NO: 1358098 - RNA, 18 nt, Human
ggggggugggauggggag

SEQ ID NO: 1358099 - RNA, 23 nt, Human
guauuuggacaguuuuccuugag

SEQ ID NO: 1358100 - RNA, 21 nt, Human
gugggauggggagggagggcg

SEQ ID NO: 1358101 - RNA, 19 nt, Human
uacccaggagucgagccgg

SEQ ID NO: 1358102 - RNA, 19 nt, Human
uacuucaggugaucccugc

SEQ ID NO: 1358103 - RNA, 22 nt, Human
uacuucaggugaucccugcggu

SEQ ID NO: 1358104 - RNA, 18 nt, Human
ucccacggagaauggggc

SEQ ID NO: 1358105 - RNA, 22 nt, Human
uccccaugagaaucuaucccac

SEQ ID NO: 1358106 - RNA, 20 nt, Human
ucccccacuccccaugagaa

SEQ ID NO: 1358107 - RNA, 21 nt, Human
ucccccacuccccaugagaau

SEQ ID NO: 1358108 - RNA, 24 nt, Human
uccuugcuccagcguacccaggag

SEQ ID NO: 1358109 - RNA, 24 nt, Human
ucgaggggaaggagggggguggga

SEQ ID NO: 1358110 - RNA, 21 nt, Human
ucugccacacccgaaggcucc

SEQ ID NO: 1358111 - RNA, 19 nt, Human
ugggauggggagggagggc

SEQ ID NO: 1358112 - RNA, 18 nt, Human
uucaggugaucccugcgg

SEQ ID NO: 1358113 - RNA, 23 nt, Human
uucugcucaccuuaugaauucca

SEQ ID NO: 1358114 - RNA, 22 nt, Human
aaacuucuggcagccccagccc

SEQ ID NO: 1358115 - RNA, 19 nt, Human
aagaagaaagcucaaaucu

SEQ ID NO: 1358116 - RNA, 20 nt, Human
aagcagcauaccuuuauaau

SEQ ID NO: 1358117 - RNA, 18 nt, Human
aaggaaaaacuucuggca

SEQ ID NO: 1358118 - RNA, 18 nt, Human
aagugcugaaaccuucuc

SEQ ID NO: 1358119 - RNA, 18 nt, Human
accccccgcgaggcgggg

SEQ ID NO: 1358120 - RNA, 18 nt, Human
accugaauauaaaggccc

SEQ ID NO: 1358121 - RNA, 22 nt, Human
agaaagcagguuauuugcaauc

SEQ ID NO: 1358122 - RNA, 23 nt, Human
agaagaaagcucaaaucuuccga

SEQ ID NO: 1358123 - RNA, 20 nt, Human
agagagaaaagauggcagcu

SEQ ID NO: 1358124 - RNA, 18 nt, Human
aggcaccccccacgagag

SEQ ID NO: 1358125 - RNA, 18 nt, Human
auccccucuuccccccug

SEQ ID NO: 1358126 - RNA, 21 nt, Human
cacccccgcgaggcagggacu

SEQ ID NO: 1358127 - RNA, 18 nt, Human
caccuggaggacuguggg

SEQ ID NO: 1358128 - RNA, 23 nt, Human
cacuggcgccuggaggacugugg

SEQ ID NO: 1358129 - RNA, 21 nt, Human
cagaaagaaagcagguuauuu

SEQ ID NO: 1358130 - RNA, 24 nt, Human
cagaggugggaggcaccccccucu

SEQ ID NO: 1358131 - RNA, 20 nt, Human
cagccccagcccuggggcua

SEQ ID NO: 1358132 - RNA, 20 nt, Human
cagccccagcccuggggcua

SEQ ID NO: 1358133 - RNA, 21 nt, Human
cagcucgggaacagaaagaaa

SEQ ID NO: 1358134 - RNA, 19 nt, Human
cagcuggacuuuuaaccca

SEQ ID NO: 1358135 - RNA, 23 nt, Human
cagcuggacuuuuaacccaaacu

SEQ ID NO: 1358136 - RNA, 18 nt, Human
ccaccuggaggacugugg

SEQ ID NO: 1358137 - RNA, 22 nt, Human
ccagccccugguucccccacug

SEQ ID NO: 1358138 - RNA, 19 nt, Human
cccagcccuggggcuaccc

SEQ ID NO: 1358139 - RNA, 23 nt, Human
ccccacuggcucuuaggaccccc

SEQ ID NO: 1358140 - RNA, 21 nt, Human
cccccacgagaguggggacug

SEQ ID NO: 1358141 - RNA, 19 nt, Human
cccccaucgcagagguggg

SEQ ID NO: 1358142 - RNA, 18 nt, Human
ccccccacgagagugggg

SEQ ID NO: 1358143 - RNA, 18 nt, Human
cccccccgaggcagagau

SEQ ID NO: 1358144 - RNA, 24 nt, Human
ccccccgaggcagagauugagagc

SEQ ID NO: 1358145 - RNA, 23 nt, Human
ccccccggguucuuaggaccccc

SEQ ID NO: 1358146 - RNA, 21 nt, Human
ccccccuggcucuggggaccc

SEQ ID NO: 1358147 - RNA, 23 nt, Human
cccccggguucuuaggaccccca

SEQ ID NO: 1358148 - RNA, 21 nt, Human
cccccuggcucuggggacccc

SEQ ID NO: 1358149 - RNA, 21 nt, Human
cccccuggcucuggggacccc

SEQ ID NO: 1358150 - RNA, 21 nt, Human
cccccuggcucuugggacucc

SEQ ID NO: 1358151 - RNA, 22 nt, Human
cccccuggcucuugggacuccc

SEQ ID NO: 1358152 - RNA, 19 nt, Human
ccccggguucuuaggaccc

SEQ ID NO: 1358153 - RNA, 22 nt, Human
ccccuggcucuggggaccccca

SEQ ID NO: 1358154 - RNA, 22 nt, Human
ccccuggcucuugggacuccca

SEQ ID NO: 1358155 - RNA, 24 nt, Human
ccccuggcugugaguacccccauc

SEQ ID NO: 1358156 - RNA, 25 nt, Human
cccgaggcagagauugagagccagc

SEQ ID NO: 1358157 - RNA, 21 nt, Human
cccuggcucuugggacuccca

SEQ ID NO: 1358158 - RNA, 24 nt, Human
cgggaacagaaagaaagcagguua

SEQ ID NO: 1358159 - RNA, 18 nt, Human
cuaagauccuuaggaccc

SEQ ID NO: 1358160 - RNA, 23 nt, Human
cuacccgaucugacaaagccuuu

SEQ ID NO: 1358161 - RNA, 24 nt, Human
cugagagccagucccucuuccccc

SEQ ID NO: 1358162 - RNA, 21 nt, Human
cugcaagcagcugggagcgcg

SEQ ID NO: 1358163 - RNA, 18 nt, Human
cuucucuuggcuuagcgc

SEQ ID NO: 1358164 - RNA, 25 nt, Human
gaaaaacuucuggcagccccagccc

SEQ ID NO: 1358165 - RNA, 23 nt, Human
gagaaaucuccaucacucuugcc

SEQ ID NO: 1358166 - RNA, 22 nt, Human
gcaggagggggaggcaacccca

SEQ ID NO: 1358167 - RNA, 25 nt, Human
gcugagauccauccccucuuccccc

SEQ ID NO: 1358168 - RNA, 18 nt, Human
gggcccuggcugaggccg

SEQ ID NO: 1358169 - RNA, 21 nt, Human
gggcggggacccggaaacuuu

SEQ ID NO: 1358170 - RNA, 22 nt, Human
gguaugagguguucaagaagaa

SEQ ID NO: 1358171 - RNA, 19 nt, Human
guccgaacgcagcucggga

SEQ ID NO: 1358172 - RNA, 26 nt, Human
gugucuugcaccugcugacaaccuca

SEQ ID NO: 1358173 - RNA, 21 nt, Human
guuaaaggaaaaacuucuggc

SEQ ID NO: 1358174 - RNA, 23 nt, Human
uaagcagcauaccuuuauaaucc

SEQ ID NO: 1358175 - RNA, 18 nt, Human
uacgucucuaaacaacua

SEQ ID NO: 1358176 - RNA, 26 nt, Human
uacgucucuaaacaacuagacagguu

SEQ ID NO: 1358177 - RNA, 27 nt, Human
uagcgcaggagaaaucuccaucacucu

SEQ ID NO: 1358178 - RNA, 19 nt, Human
uaggagcugugggguuucg

SEQ ID NO: 1358179 - RNA, 21 nt, Human
uaguacaagaagcaaauaagc

SEQ ID NO: 1358180 - RNA, 23 nt, Human
ucacucuugccuuuucaguccug

SEQ ID NO: 1358181 - RNA, 18 nt, Human
ucccucuucccccccugg

SEQ ID NO: 1358182 - RNA, 18 nt, Human
ucgcaggagggggaggca

SEQ ID NO: 1358183 - RNA, 19 nt, Human
ucuaaaggauggccccccu

SEQ ID NO: 1358184 - RNA, 23 nt, Human
ucucuaaacaacuagacagguuu

SEQ ID NO: 1358185 - RNA, 26 nt, Human
ucucuaaacaacuagacagguuucua

SEQ ID NO: 1358186 - RNA, 21 nt, Human
ucucuugaucccacuggcgcc

SEQ ID NO: 1358187 - RNA, 22 nt, Human
ugacaaccucaagacaaaccga

SEQ ID NO: 1358188 - RNA, 23 nt, Human
ugagagccagucccucuuccccc

SEQ ID NO: 1358189 - RNA, 20 nt, Human
ugagagcuauccccucuucc

SEQ ID NO: 1358190 - RNA, 20 nt, Human
ugagagcuauccccucuucc

SEQ ID NO: 1358191 - RNA, 23 nt, Human
ugagauccauccccucuuccccc

SEQ ID NO: 1358192 - RNA, 30 nt, Human
ugaugguaagcagcauaccuuuauaauccc

SEQ ID NO: 1358193 - RNA, 23 nt, Human
ugcgugggauuuacaauaagaca

SEQ ID NO: 1358194 - RNA, 21 nt, Human
uggcugugaguacccccaucg

SEQ ID NO: 1358195 - RNA, 22 nt, Human
uuaacccaaacuguggggcccu

SEQ ID NO: 1358196 - RNA, 24 nt, Human
uucuuaggagcugugggguuucgu

SEQ ID NO: 1358197 - RNA, 22 nt, Human
uuucaacaucugcaagcagcug

SEQ ID NO: 1358198 - RNA, 21 nt, Human
acagcggccacgcccuggggc

SEQ ID NO: 1358199 - RNA, 20 nt, Human
agcagcagcgggagguucag

SEQ ID NO: 1358200 - RNA, 24 nt, Human
augaguucggcggccacaguggcc

SEQ ID NO: 1358201 - RNA, 18 nt, Human
cacagcucugccuccugc

SEQ ID NO: 1358202 - RNA, 18 nt, Human
cacagcucugccuccugc

SEQ ID NO: 1358203 - RNA, 20 nt, Human
cagcaccuuggguugggggc

SEQ ID NO: 1358204 - RNA, 22 nt, Human
cagcaccuuggguugggggcgg

SEQ ID NO: 1358205 - RNA, 21 nt, Human
cagcagcagcagcagcagcgg

SEQ ID NO: 1358206 - RNA, 23 nt, Human
cagcagcagcagcagcagcggga

SEQ ID NO: 1358207 - RNA, 20 nt, Human
cagcagcagcagcgggaggu

SEQ ID NO: 1358208 - RNA, 20 nt, Human
cagcggccacgcccuggggc

SEQ ID NO: 1358209 - RNA, 25 nt, Human
cagcgggagguucagcggggucaga

SEQ ID NO: 1358210 - RNA, 20 nt, Human
ccaugcccaucaggguuuau

SEQ ID NO: 1358211 - RNA, 28 nt, Human
cccacagcucugccuccugcugcagagg

SEQ ID NO: 1358212 - RNA, 21 nt, Human
ccuguggccagacagggugga

SEQ ID NO: 1358213 - RNA, 19 nt, Human
ccuuggguugggggcgggg

SEQ ID NO: 1358214 - RNA, 20 nt, Human
cgcccuggggcgguggccug

SEQ ID NO: 1358215 - RNA, 19 nt, Human
cggggcugggcgggacaug

SEQ ID NO: 1358216 - RNA, 20 nt, Human
cuuggguugggggcggggcu

SEQ ID NO: 1358217 - RNA, 20 nt, Human
gcagcagcagcagcgggagg

SEQ ID NO: 1358218 - RNA, 19 nt, Human
gccacaguggcccccagca

SEQ ID NO: 1358219 - RNA, 21 nt, Human
ggggcgguggccugugcagcu

SEQ ID NO: 1358220 - RNA, 18 nt, Human
ggguugggggcggggcug

SEQ ID NO: 1358221 - RNA, 21 nt, Human
ucagcaccuuggguugggggc

SEQ ID NO: 1358222 - RNA, 22 nt, Human
ucccacagcucugccuccugcu

SEQ ID NO: 1358223 - RNA, 24 nt, Human
ucggcggccacaguggcccccagc

SEQ ID NO: 1358224 - RNA, 21 nt, Human
ucuguaacagcggccacgccc

SEQ ID NO: 1358225 - RNA, 21 nt, Human
ugccuguggccagacagggug

SEQ ID NO: 1358226 - RNA, 21 nt, Human
uggaggcggugccuguggcca

SEQ ID NO: 1358227 - RNA, 19 nt, Human
uggguugggggcggggcug

SEQ ID NO: 1358228 - RNA, 21 nt, Human
uggguugggggcggggcuggg

SEQ ID NO: 1358229 - RNA, 22 nt, Human
uggguugggggcggggcugggc

SEQ ID NO: 1358230 - RNA, 20 nt, Human
aaacggguccgcauagucuu

SEQ ID NO: 1358231 - RNA, 23 nt, Human
acccccuuccuccaggggcuauc

SEQ ID NO: 1358232 - RNA, 21 nt, Human
accccuuacuccaaggcccca

SEQ ID NO: 1358233 - RNA, 24 nt, Human
agcucuggaacccccuuccuccag

SEQ ID NO: 1358234 - RNA, 20 nt, Human
aggagaagaaagguuugaaa

SEQ ID NO: 1358235 - RNA, 18 nt, Human
aggcagagaggugguaag

SEQ ID NO: 1358236 - RNA, 24 nt, Human
agggugguggugguggaggucacc

SEQ ID NO: 1358237 - RNA, 21 nt, Human
caaagccggcugcuucccagg

SEQ ID NO: 1358238 - RNA, 20 nt, Human
caaccccuuacuccaaggcc

SEQ ID NO: 1358239 - RNA, 23 nt, Human
caccucugcccuaaggucggaaa

SEQ ID NO: 1358240 - RNA, 21 nt, Human
cagaaucugcgcucgcuucuc

SEQ ID NO: 1358241 - RNA, 20 nt, Human
cagcccggggacggcgccgg

SEQ ID NO: 1358242 - RNA, 21 nt, Human
cagggaccuucucuggggcuc

SEQ ID NO: 1358243 - RNA, 24 nt, Human
cagggauuccucuuuccccagcuc

SEQ ID NO: 1358244 - RNA, 22 nt, Human
ccaccccccaaagccggcugcu

SEQ ID NO: 1358245 - RNA, 23 nt, Human
ccaggagaagaaagguuugaaag

SEQ ID NO: 1358246 - RNA, 18 nt, Human
cccaccccccaaagccgg

SEQ ID NO: 1358247 - RNA, 19 nt, Human
ccccaaagccggcugcuuc

SEQ ID NO: 1358248 - RNA, 18 nt, Human
ccccaggagcccuuuccc

SEQ ID NO: 1358249 - RNA, 24 nt, Human
cccccaaagccggcugcuucccag

SEQ ID NO: 1358250 - RNA, 21 nt, Human
ccccccaaagccggcugcuuc

SEQ ID NO: 1358251 - RNA, 23 nt, Human
ccccccaaagccggcugcuuccc

SEQ ID NO: 1358252 - RNA, 22 nt, Human
ccccuucucuccccacccccca

SEQ ID NO: 1358253 - RNA, 24 nt, Human
ccccuucucuccccaccccccaaa

SEQ ID NO: 1358254 - RNA, 18 nt, Human
cccgagccccuccccuuc

SEQ ID NO: 1358255 - RNA, 20 nt, Human
cccuccccuucucuccccac

SEQ ID NO: 1358256 - RNA, 21 nt, Human
cccuccccuucucuccccacc

SEQ ID NO: 1358257 - RNA, 24 nt, Human
cccuuacuccaaggccccaggagc

SEQ ID NO: 1358258 - RNA, 24 nt, Human
ccuccgacggucugggguggaagu

SEQ ID NO: 1358259 - RNA, 18 nt, Human
ccugcugagccuucgcca

SEQ ID NO: 1358260 - RNA, 22 nt, Human
cggaggcagagaggugguaagg

SEQ ID NO: 1358261 - RNA, 24 nt, Human
cggccuggggacugcacaguuccc

SEQ ID NO: 1358262 - RNA, 22 nt, Human
cggggacggaggcagagaggug

SEQ ID NO: 1358263 - RNA, 24 nt, Human
cuccaggggcuauccuuucucucc

SEQ ID NO: 1358264 - RNA, 19 nt, Human
cuccccaccccccaaagcu

SEQ ID NO: 1358265 - RNA, 18 nt, Human
cucccucccccgucagcc

SEQ ID NO: 1358266 - RNA, 18 nt, Human
cucuccccaccccccaaa

SEQ ID NO: 1358267 - RNA, 20 nt, Human
cucugcccgagccccucccc

SEQ ID NO: 1358268 - RNA, 22 nt, Human
cugaaacucccuaccaucccag

SEQ ID NO: 1358269 - RNA, 23 nt, Human
cuuacuccaaggccccaggagcc

SEQ ID NO: 1358270 - RNA, 20 nt, Human
gaaacucccuaccaucccag

SEQ ID NO: 1358271 - RNA, 19 nt, Human
gaacccccuuccuccaggg

SEQ ID NO: 1358272 - RNA, 18 nt, Human
gagaggguggugguggug

SEQ ID NO: 1358273 - RNA, 19 nt, Human
gagccggggcggccugggg

SEQ ID NO: 1358274 - RNA, 23 nt, Human
gccagucugaaacucccuaccau

SEQ ID NO: 1358275 - RNA, 24 nt, Human
gccagucugaaacucccuaccauc

SEQ ID NO: 1358276 - RNA, 19 nt, Human
gccccaggagcccuuuccc

SEQ ID NO: 1358277 - RNA, 21 nt, Human
gccccaggagcccuuucccuu

SEQ ID NO: 1358278 - RNA, 18 nt, Human
gcuccugaagcuccugcu

SEQ ID NO: 1358279 - RNA, 20 nt, Human
gcucuggaacccccuuccuc

SEQ ID NO: 1358280 - RNA, 18 nt, Human
ggcacagggcuggguaca

SEQ ID NO: 1358281 - RNA, 19 nt, Human
ggcccggagccggggcggc

SEQ ID NO: 1358282 - RNA, 24 nt, Human
gggagagggugguggugguggagg

SEQ ID NO: 1358283 - RNA, 21 nt, Human
ggguggaagucggggacggag

SEQ ID NO: 1358284 - RNA, 22 nt, Human
gucuuccccaaaccucuuacca

SEQ ID NO: 1358285 - RNA, 19 nt, Human
uacuggaucccaggagaag

SEQ ID NO: 1358286 - RNA, 23 nt, Human
uacuggaucccaggagaagaaag

SEQ ID NO: 1358287 - RNA, 21 nt, Human
uagcucuggaacccccuuccu

SEQ ID NO: 1358288 - RNA, 21 nt, Human
ucacagccgggcugugucugc

SEQ ID NO: 1358289 - RNA, 19 nt, Human
uccaaggccccaggagccc

SEQ ID NO: 1358290 - RNA, 23 nt, Human
uccaaggccccaggagcccuuuc

SEQ ID NO: 1358291 - RNA, 24 nt, Human
uccagacaaccccuuacuccaagg

SEQ ID NO: 1358292 - RNA, 21 nt, Human
uccccaaaccucuuaccagac

SEQ ID NO: 1358293 - RNA, 21 nt, Human
uccccaccccccaaagccggc

SEQ ID NO: 1358294 - RNA, 20 nt, Human
ucccccgucagcccggggac

SEQ ID NO: 1358295 - RNA, 18 nt, Human
ucccucugcccgagcccc

SEQ ID NO: 1358296 - RNA, 18 nt, Human
uccucuuuccccagcucc

SEQ ID NO: 1358297 - RNA, 21 nt, Human
ucuccagcuucuacuggaucc

SEQ ID NO: 1358298 - RNA, 25 nt, Human
ugccucuggcccggagccggggcgg

SEQ ID NO: 1358299 - RNA, 20 nt, Human
uggcaagagccacagcccuc

SEQ ID NO: 1358300 - RNA, 19 nt, Human
uggcccggagccggggcgg

SEQ ID NO: 1358301 - RNA, 21 nt, Human
uggggcuccugaagcuccugc

SEQ ID NO: 1358302 - RNA, 23 nt, Human
uuccccagcuccagacaaccccc

SEQ ID NO: 1358303 - RNA, 18 nt, Human
uuccucuuuccccagcuc

SEQ ID NO: 1358304 - RNA, 21 nt, Human
uuccucuuuccccagcuccag

SEQ ID NO: 1358305 - RNA, 24 nt, Human
uuucacagccgggcugugucugcu

SEQ ID NO: 1358306 - RNA, 18 nt, Human
uuucagggaccuucucug

SEQ ID NO: 1358307 - RNA, 22 nt, Human
uuuccccagcuccagacaaccc

SEQ ID NO: 1358308 - RNA, 20 nt, Human
aaaaaaaaaauccaugguga

SEQ ID NO: 1358309 - RNA, 20 nt, Human
aaaacaucacaguuuuaaag

SEQ ID NO: 1358310 - RNA, 23 nt, Human
aaaaggucuaaaaggaguaaaga

SEQ ID NO: 1358311 - RNA, 25 nt, Human
aagagaaaaaggucuaaaaggagua

SEQ ID NO: 1358312 - RNA, 20 nt, Human
aagcagccagggggcucugu

SEQ ID NO: 1358313 - RNA, 20 nt, Human
aaugacagaggaguguggaa

SEQ ID NO: 1358314 - RNA, 24 nt, Human
aaugagaaaggcaggagugaggga

SEQ ID NO: 1358315 - RNA, 18 nt, Human
accacagccaugcuguag

SEQ ID NO: 1358316 - RNA, 23 nt, Human
accacagccaugcuguaggugcu

SEQ ID NO: 1358317 - RNA, 19 nt, Human
acuagggcacauuucuuuu

SEQ ID NO: 1358318 - RNA, 19 nt, Human
acucaugaucggucuccuc

SEQ ID NO: 1358319 - RNA, 23 nt, Human
acuggagucuguggggcuggggu

SEQ ID NO: 1358320 - RNA, 19 nt, Human
agacgaaagcuaucaggcc

SEQ ID NO: 1358321 - RNA, 21 nt, Human
agacgaaagcuaucaggccua

SEQ ID NO: 1358322 - RNA, 25 nt, Human
agcuggaagguggcgcuccgccgac

SEQ ID NO: 1358323 - RNA, 25 nt, Human
aggaagccacuggagucuguggggc

SEQ ID NO: 1358324 - RNA, 20 nt, Human
aggaagcuguggacuggugg

SEQ ID NO: 1358325 - RNA, 21 nt, Human
aggcaauggcagcaguccggc

SEQ ID NO: 1358326 - RNA, 19 nt, Human
aggcaggagugagggaaug

SEQ ID NO: 1358327 - RNA, 22 nt, Human
aggccuuggaggcuuuguaacc

SEQ ID NO: 1358328 - RNA, 18 nt, Human
agggacccaguggggcac

SEQ ID NO: 1358329 - RNA, 22 nt, Human
aggugcucugcguguacaaagu

SEQ ID NO: 1358330 - RNA, 22 nt, Human
agugagugaggucagaaaggga

SEQ ID NO: 1358331 - RNA, 18 nt, Human
agugugcagucaaggcug

SEQ ID NO: 1358332 - RNA, 18 nt, Human
auagagagacgaaagcua

SEQ ID NO: 1358333 - RNA, 19 nt, Human
auguggacuccauggaagg

SEQ ID NO: 1358334 - RNA, 25 nt, Human
caaaaaaaaaauccauggugaacaa

SEQ ID NO: 1358335 - RNA, 18 nt, Human
caagacaaaggcaauggc

SEQ ID NO: 1358336 - RNA, 21 nt, Human
caagaugaucucccacuccaa

SEQ ID NO: 1358337 - RNA, 21 nt, Human
cacccaccgcgaaucugugca

SEQ ID NO: 1358338 - RNA, 25 nt, Human
cacccagcuccccucccagagccag

SEQ ID NO: 1358339 - RNA, 22 nt, Human
cacucaugaucggucuccuccu

SEQ ID NO: 1358340 - RNA, 18 nt, Human
cacuccaaagagaaaaag

SEQ ID NO: 1358341 - RNA, 23 nt, Human
cacuuuagaaaggaagcugugga

SEQ ID NO: 1358342 - RNA, 18 nt, Human
cagaaagacuaaacagcg

SEQ ID NO: 1358343 - RNA, 22 nt, Human
cagaacgaggugaugugugaag

SEQ ID NO: 1358344 - RNA, 23 nt, Human
cagaccccacccuggaggaguua

SEQ ID NO: 1358345 - RNA, 18 nt, Human
cagcccaaccucccgguc

SEQ ID NO: 1358346 - RNA, 18 nt, Human
cagcccccgggcccggcc

SEQ ID NO: 1358347 - RNA, 22 nt, Human
cagcucaagacaaaggcaaugg

SEQ ID NO: 1358348 - RNA, 23 nt, Human
ccaaaaccacuagggcacauuuc

SEQ ID NO: 1358349 - RNA, 22 nt, Human
ccacuccaaagagaaaaagguc

SEQ ID NO: 1358350 - RNA, 20 nt, Human
ccacugcccagaccccaccc

SEQ ID NO: 1358351 - RNA, 20 nt, Human
ccagcuccccucccagagcc

SEQ ID NO: 1358352 - RNA, 21 nt, Human
ccaggccagagugguagagcc

SEQ ID NO: 1358353 - RNA, 25 nt, Human
cccaaaaaaaaaauccauggugaac

SEQ ID NO: 1358354 - RNA, 20 nt, Human
cccacugcccagaccccacc

SEQ ID NO: 1358355 - RNA, 20 nt, Human
ccccaaaaaaaaaauccaug

SEQ ID NO: 1358356 - RNA, 25 nt, Human
ccccacccaccgcgaaucugugcag

SEQ ID NO: 1358357 - RNA, 19 nt, Human
cccccaaaaaaaaaaucca

SEQ ID NO: 1358358 - RNA, 20 nt, Human
cccccaaaaaaaaaauccau

SEQ ID NO: 1358359 - RNA, 20 nt, Human
ccccccaaaaaaaaaaucca

SEQ ID NO: 1358360 - RNA, 21 nt, Human
ccccccccaaaaaaaaaaucc

SEQ ID NO: 1358361 - RNA, 18 nt, Human
cccccgggcccggccacu

SEQ ID NO: 1358362 - RNA, 23 nt, Human
ccuccacauagagagacgaaagc

SEQ ID NO: 1358363 - RNA, 18 nt, Human
ccuccugaacuucccacc

SEQ ID NO: 1358364 - RNA, 18 nt, Human
ccuggguggcuccugccu

SEQ ID NO: 1358365 - RNA, 21 nt, Human
ccuguaagccuugagaaaauu

SEQ ID NO: 1358366 - RNA, 19 nt, Human
cgggguuaauguacagaaa

SEQ ID NO: 1358367 - RNA, 19 nt, Human
cguggggaagcagccaggg

SEQ ID NO: 1358368 - RNA, 22 nt, Human
cuaaacagcgucagucaaagcc

SEQ ID NO: 1358369 - RNA, 21 nt, Human
cuccaaagagaaaaaggucua

SEQ ID NO: 1358370 - RNA, 23 nt, Human
cuccugaggaauguccuggggac

SEQ ID NO: 1358371 - RNA, 19 nt, Human
cugcauguucuccuaagca

SEQ ID NO: 1358372 - RNA, 21 nt, Human
cuggcagcuccccacccaccg

SEQ ID NO: 1358373 - RNA, 21 nt, Human
cuguggcugugacgcacccuu

SEQ ID NO: 1358374 - RNA, 19 nt, Human
cuucucuggagaggccaca

SEQ ID NO: 1358375 - RNA, 25 nt, Human
gaaugaaacagggaaggguggggcu

SEQ ID NO: 1358376 - RNA, 18 nt, Human
gacaaaugagaaaggcag

SEQ ID NO: 1358377 - RNA, 19 nt, Human
gacccaguggggcacccag

SEQ ID NO: 1358378 - RNA, 18 nt, Human
gagaaagucagggaaaag

SEQ ID NO: 1358379 - RNA, 22 nt, Human
gaggcuuuguaaccucucggua

SEQ ID NO: 1358380 - RNA, 19 nt, Human
gagggacccaguggggcac

SEQ ID NO: 1358381 - RNA, 18 nt, Human
gauuacagugugcaguca

SEQ ID NO: 1358382 - RNA, 24 nt, Human
gcccaggcgaggccucacuguggc

SEQ ID NO: 1358383 - RNA, 19 nt, Human
gcgcuucucaaccuacacc

SEQ ID NO: 1358384 - RNA, 21 nt, Human
gcuccugccuccccacugccc

SEQ ID NO: 1358385 - RNA, 21 nt, Human
gcuggggugaagucuccaggg

SEQ ID NO: 1358386 - RNA, 22 nt, Human
ggaaaagcgcagcccccggggg

SEQ ID NO: 1358387 - RNA, 21 nt, Human
ggccauguggacuccauggaa

SEQ ID NO: 1358388 - RNA, 22 nt, Human
gggaaaagcgcagcccccgggc

SEQ ID NO: 1358389 - RNA, 22 nt, Human
ggggcuggggugaagucuccag

SEQ ID NO: 1358390 - RNA, 19 nt, Human
ggugggccccaggccucag

SEQ ID NO: 1358391 - RNA, 19 nt, Human
ggugggcugguggcuggag

SEQ ID NO: 1358392 - RNA, 25 nt, Human
guagagccaccccccaaguugucag

SEQ ID NO: 1358393 - RNA, 19 nt, Human
gugcagccuccaccaaaac

SEQ ID NO: 1358394 - RNA, 22 nt, Human
uaaaauuaaggccccccccccc

SEQ ID NO: 1358395 - RNA, 21 nt, Human
uaaggcccccccccccaaaaa

SEQ ID NO: 1358396 - RNA, 18 nt, Human
uaagugagugaggucaga

SEQ ID NO: 1358397 - RNA, 23 nt, Human
uacagaaagacuaaacagcguca

SEQ ID NO: 1358398 - RNA, 20 nt, Human
uagcaaaauucugugacgug

SEQ ID NO: 1358399 - RNA, 18 nt, Human
uaucaggccuagacaggc

SEQ ID NO: 1358400 - RNA, 24 nt, Human
ucaccuggguggcuccugccuccc

SEQ ID NO: 1358401 - RNA, 19 nt, Human
ucccacccagcuccccucc

SEQ ID NO: 1358402 - RNA, 21 nt, Human
ucccaccuccugaacuuccca

SEQ ID NO: 1358403 - RNA, 26 nt, Human
uccccacugcccagaccccacccugg

SEQ ID NO: 1358404 - RNA, 19 nt, Human
uccccaggugauuacagug

SEQ ID NO: 1358405 - RNA, 22 nt, Human
uccugaacuucccacccagcuc

SEQ ID NO: 1358406 - RNA, 19 nt, Human
uccuggggacgcugggcag

SEQ ID NO: 1358407 - RNA, 24 nt, Human
uccuggggacgcugggcagggugg

SEQ ID NO: 1358408 - RNA, 20 nt, Human
ucgcccaguagacauaccgu

SEQ ID NO: 1358409 - RNA, 23 nt, Human
ucuccagcucaagacaaaggcug

SEQ ID NO: 1358410 - RNA, 18 nt, Human
ucuccuaagcaccugguc

SEQ ID NO: 1358411 - RNA, 21 nt, Human
ugaaacagggaaggguggggc

SEQ ID NO: 1358412 - RNA, 23 nt, Human
ugaaggaaugaaacagggaaggg

SEQ ID NO: 1358413 - RNA, 18 nt, Human
ugagaaaggcaggaguga

SEQ ID NO: 1358414 - RNA, 24 nt, Human
ugagaaaggcaggagugagggaaa

SEQ ID NO: 1358415 - RNA, 22 nt, Human
ugaggaauguccuggggacgcu

SEQ ID NO: 1358416 - RNA, 20 nt, Human
ugaggucagaaagggacaaa

SEQ ID NO: 1358417 - RNA, 25 nt, Human
ugcccaggcgaggccucacuguggc

SEQ ID NO: 1358418 - RNA, 19 nt, Human
ugccucggguucccauuag

SEQ ID NO: 1358419 - RNA, 20 nt, Human
ugccucggguucccauuagg

SEQ ID NO: 1358420 - RNA, 20 nt, Human
ugcguggggaagcagccagg

SEQ ID NO: 1358421 - RNA, 23 nt, Human
uggaggaguuaaaucagcauuug

SEQ ID NO: 1358422 - RNA, 23 nt, Human
uggcuccugccuccccacugccc

SEQ ID NO: 1358423 - RNA, 18 nt, Human
uggcuggaguucuccuug

SEQ ID NO: 1358424 - RNA, 25 nt, Human
ugggagggacccaguggggcaccca

SEQ ID NO: 1358425 - RNA, 21 nt, Human
uggguggcuccugccucccca

SEQ ID NO: 1358426 - RNA, 19 nt, Human
uguccuggggacgcugggc

SEQ ID NO: 1358427 - RNA, 19 nt, Human
uuaggaagcuggaaggugg

SEQ ID NO: 1358428 - RNA, 18 nt, Human
uuccaagaugaucuccca

SEQ ID NO: 1358429 - RNA, 21 nt, Human
uuccaagaugaucucccacuc

SEQ ID NO: 1358430 - RNA, 20 nt, Human
uuccaggcuuggccaccuuc

SEQ ID NO: 1358431 - RNA, 19 nt, Human
aaacauuccugccugcuga

SEQ ID NO: 1358432 - RNA, 19 nt, Human
aaaccaaacuucuccauuu

SEQ ID NO: 1358433 - RNA, 21 nt, Human
aaagcaggguggggcauugcc

SEQ ID NO: 1358434 - RNA, 23 nt, Human
aaagguagauaaauccaugaaga

SEQ ID NO: 1358435 - RNA, 19 nt, Human
aaagugcugggauuacaga

SEQ ID NO: 1358436 - RNA, 24 nt, Human
aaagugcugggauuacagauguga

SEQ ID NO: 1358437 - RNA, 18 nt, Human
aaaugggaaaaacaaacu

SEQ ID NO: 1358438 - RNA, 24 nt, Human
aacaaacucggcccaggauucauc

SEQ ID NO: 1358439 - RNA, 19 nt, Human
aacaaagccaccaggaagu

SEQ ID NO: 1358440 - RNA, 20 nt, Human
aaccaaacuucuccauuucc

SEQ ID NO: 1358441 - RNA, 23 nt, Human
aaccagucuccuaucuuaaaguu

SEQ ID NO: 1358442 - RNA, 20 nt, Human
aaccuggagacagagagggc

SEQ ID NO: 1358443 - RNA, 21 nt, Human
aaccuggagacagagagggcu

SEQ ID NO: 1358444 - RNA, 19 nt, Human
aacucccaucucuacucuc

SEQ ID NO: 1358445 - RNA, 18 nt, Human
aaggcagcuuucuguucc

SEQ ID NO: 1358446 - RNA, 21 nt, Human
aaguagcugggacuacggcau

SEQ ID NO: 1358447 - RNA, 18 nt, Human
aagucaagcugggacacu

SEQ ID NO: 1358448 - RNA, 25 nt, Human
aagucguccucccaccuuggccucc

SEQ ID NO: 1358449 - RNA, 18 nt, Human
aagugcugggauuacaga

SEQ ID NO: 1358450 - RNA, 20 nt, Human
acaccaccacacccagcuaa

SEQ ID NO: 1358451 - RNA, 20 nt, Human
acagaacaggagauucccuc

SEQ ID NO: 1358452 - RNA, 24 nt, Human
acagagcaccugguagaaggggca

SEQ ID NO: 1358453 - RNA, 21 nt, Human
acaguguaaacaaagccacca

SEQ ID NO: 1358454 - RNA, 20 nt, Human
accccaguggcgucuggcau

SEQ ID NO: 1358455 - RNA, 22 nt, Human
acuccagcucacuccucacguu

SEQ ID NO: 1358456 - RNA, 26 nt, Human
acuccugccucaaccuuccaaguagc

SEQ ID NO: 1358457 - RNA, 19 nt, Human
acuggagugcaguggcacg

SEQ ID NO: 1358458 - RNA, 19 nt, Human
agacaaguccccuacccuu

SEQ ID NO: 1358459 - RNA, 18 nt, Human
agagacuucuucagaggg

SEQ ID NO: 1358460 - RNA, 20 nt, Human
agagauguuccucaucucug

SEQ ID NO: 1358461 - RNA, 20 nt, Human
agauaaugucagcaucugug

SEQ ID NO: 1358462 - RNA, 21 nt, Human
agcagucaccagaaccuggag

SEQ ID NO: 1358463 - RNA, 19 nt, Human
agccacaggccccccaccu

SEQ ID NO: 1358464 - RNA, 21 nt, Human
agccacaggccccccaccuug

SEQ ID NO: 1358465 - RNA, 24 nt, Human
agcuaacauuacuaguuacuccgc

SEQ ID NO: 1358466 - RNA, 21 nt, Human
agcucaguggaucccaccccc

SEQ ID NO: 1358467 - RNA, 18 nt, Human
aggaaaaaccagcacaaa

SEQ ID NO: 1358468 - RNA, 20 nt, Human
aggaggccuucucagauagg

SEQ ID NO: 1358469 - RNA, 23 nt, Human
agggaucaaggaucugcaaaggu

SEQ ID NO: 1358470 - RNA, 19 nt, Human
agggguuucuugccagcca

SEQ ID NO: 1358471 - RNA, 19 nt, Human
aggguaucucugaaagaaa

SEQ ID NO: 1358472 - RNA, 21 nt, Human
agugcaguggcacgauuauag

SEQ ID NO: 1358473 - RNA, 23 nt, Human
agugcaguggcacgauuauagcu

SEQ ID NO: 1358474 - RNA, 24 nt, Human
agugcugggauuacagaugugagc

SEQ ID NO: 1358475 - RNA, 22 nt, Human
aucacauccucaaagggaucaa

SEQ ID NO: 1358476 - RNA, 24 nt, Human
aucacauccucaaagggaucaagg

SEQ ID NO: 1358477 - RNA, 24 nt, Human
augaagaugaggaaaaaccagcac

SEQ ID NO: 1358478 - RNA, 20 nt, Human
augccaccagggccuugggu

SEQ ID NO: 1358479 - RNA, 26 nt, Human
auuauacacagccacaggccccccac

SEQ ID NO: 1358480 - RNA, 25 nt, Human
caaacuccugggcucaagucguccu

SEQ ID NO: 1358481 - RNA, 22 nt, Human
caaaguaaaugcuagauggagc

SEQ ID NO: 1358482 - RNA, 20 nt, Human
cacacugugucgucauucug

SEQ ID NO: 1358483 - RNA, 24 nt, Human
cagcccacggagggugagccaaag

SEQ ID NO: 1358484 - RNA, 21 nt, Human
cagccugggauaggcacccuu

SEQ ID NO: 1358485 - RNA, 24 nt, Human
caguguaaacaaagccaccaggaa

SEQ ID NO: 1358486 - RNA, 21 nt, Human
ccaaagugcugggauuacaga

SEQ ID NO: 1358487 - RNA, 22 nt, Human
ccaaagugcugggauuacagau

SEQ ID NO: 1358488 - RNA, 24 nt, Human
ccaaagugcugggauuacagaugu

SEQ ID NO: 1358489 - RNA, 19 nt, Human
ccaucugcuucuugucggg

SEQ ID NO: 1358490 - RNA, 21 nt, Human
cccaacacuugucuccuggcu

SEQ ID NO: 1358491 - RNA, 18 nt, Human
ccccaccuugcacuucca

SEQ ID NO: 1358492 - RNA, 18 nt, Human
ccccucaucuucuuccca

SEQ ID NO: 1358493 - RNA, 19 nt, Human
ccccugaggucugggggug

SEQ ID NO: 1358494 - RNA, 20 nt, Human
ccccugaggucugggggugg

SEQ ID NO: 1358495 - RNA, 24 nt, Human
cccuucaacacuuuuucuggacaa

SEQ ID NO: 1358496 - RNA, 27 nt, Human
cccuucaggucucuccuaccuaacaaa

SEQ ID NO: 1358497 - RNA, 21 nt, Human
cccuuuuccugcuccccucau

SEQ ID NO: 1358498 - RNA, 18 nt, Human
ccuaugccaccagggccu

SEQ ID NO: 1358499 - RNA, 18 nt, Human
ccucaggugccuaugcca

SEQ ID NO: 1358500 - RNA, 26 nt, Human
ccucccaccuuggccucccaaagugc

SEQ ID NO: 1358501 - RNA, 19 nt, Human
ccucuggaaagggugcuga

SEQ ID NO: 1358502 - RNA, 20 nt, Human
ccuggcucuuccaguaccuc

SEQ ID NO: 1358503 - RNA, 18 nt, Human
ccugggcucaagucgucc

SEQ ID NO: 1358504 - RNA, 23 nt, Human
ccuuugaauauccgcuuccucag

SEQ ID NO: 1358505 - RNA, 19 nt, Human
cggcccaggauucaucucc

SEQ ID NO: 1358506 - RNA, 21 nt, Human
cuaacaaaccaaacuucucca

SEQ ID NO: 1358507 - RNA, 25 nt, Human
cucacugcaaacuugaacuucugga

SEQ ID NO: 1358508 - RNA, 19 nt, Human
cucaguggaucccaccccc

SEQ ID NO: 1358509 - RNA, 21 nt, Human
cucaguggaucccacccccac

SEQ ID NO: 1358510 - RNA, 20 nt, Human
cucaguguuucucauguccc

SEQ ID NO: 1358511 - RNA, 21 nt, Human
cucaguguuucucauguccca

SEQ ID NO: 1358512 - RNA, 25 nt, Human
cuccuggcucuuccaguaccucuug

SEQ ID NO: 1358513 - RNA, 25 nt, Human
cuccugggcucaagucguccuccca

SEQ ID NO: 1358514 - RNA, 19 nt, Human
cucuccuaaauuaccccaa

SEQ ID NO: 1358515 - RNA, 18 nt, Human
cugacccagauacuacgc

SEQ ID NO: 1358516 - RNA, 21 nt, Human
cugauccacuucaauucauac

SEQ ID NO: 1358517 - RNA, 21 nt, Human
cugcuccccucaucuucuucc

SEQ ID NO: 1358518 - RNA, 19 nt, Human
cugcucccuccucuugccc

SEQ ID NO: 1358519 - RNA, 20 nt, Human
cuggacuccugccucaaccu

SEQ ID NO: 1358520 - RNA, 19 nt, Human
cuuaaaguucccuaccuuc

SEQ ID NO: 1358521 - RNA, 31 nt, Human
cuucccauccuuugaauauccgcuuccucaa

SEQ ID NO: 1358522 - RNA, 19 nt, Human
cuugccccugaggucuggg

SEQ ID NO: 1358523 - RNA, 18 nt, Human
gaaaaacaaacucggccc

SEQ ID NO: 1358524 - RNA, 20 nt, Human
gaacuucuggacuccugccu

SEQ ID NO: 1358525 - RNA, 21 nt, Human
gacugucauagaaagcaacca

SEQ ID NO: 1358526 - RNA, 22 nt, Human
gagcuguucuuuaauuuguccu

SEQ ID NO: 1358527 - RNA, 21 nt, Human
gaugaggaaaaaccagcacaa

SEQ ID NO: 1358528 - RNA, 18 nt, Human
gauuacagaugugagcca

SEQ ID NO: 1358529 - RNA, 24 nt, Human
gcagcugugggcacagcuucagca

SEQ ID NO: 1358530 - RNA, 18 nt, Human
gcaugccagcgagacaga

SEQ ID NO: 1358531 - RNA, 19 nt, Human
gcccuuuuccugcuccccu

SEQ ID NO: 1358532 - RNA, 22 nt, Human
gcuccaagagagaucaacacag

SEQ ID NO: 1358533 - RNA, 18 nt, Human
gcugaagccagggagcca

SEQ ID NO: 1358534 - RNA, 19 nt, Human
ggaaaaacaaacucggccc

SEQ ID NO: 1358535 - RNA, 22 nt, Human
ggaaaaacaaacucggcccagg

SEQ ID NO: 1358536 - RNA, 19 nt, Human
ggaaaaaccagcacaaaaa

SEQ ID NO: 1358537 - RNA, 21 nt, Human
ggaacucccucuccuagccaa

SEQ ID NO: 1358538 - RNA, 25 nt, Human
ggacaaacagacauaaucuccauaa

SEQ ID NO: 1358539 - RNA, 22 nt, Human
ggacuccugccucaaccuucca

SEQ ID NO: 1358540 - RNA, 21 nt, Human
ggacugugccuugagggacgg

SEQ ID NO: 1358541 - RNA, 24 nt, Human
ggaggggcguuugccauuacugag

SEQ ID NO: 1358542 - RNA, 23 nt, Human
ggcccuuuuccugcuccccucau

SEQ ID NO: 1358543 - RNA, 19 nt, Human
gggaacucccucuccuagc

SEQ ID NO: 1358544 - RNA, 21 nt, Human
gggaagugcaagggguugggg

SEQ ID NO: 1358545 - RNA, 25 nt, Human
gggaggggcguuugccauuacugag

SEQ ID NO: 1358546 - RNA, 21 nt, Human
gugcaaaagacauguuucagu

SEQ ID NO: 1358547 - RNA, 21 nt, Human
guuuuccccuuucuuuuucuu

SEQ ID NO: 1358548 - RNA, 23 nt, Human
uaaacaaagccaccaggaaguuc

SEQ ID NO: 1358549 - RNA, 21 nt, Human
uaaaguucccuaccuucuaga

SEQ ID NO: 1358550 - RNA, 26 nt, Human
uaaauccucugcaaccugauaucccu

SEQ ID NO: 1358551 - RNA, 18 nt, Human
uaacaaaccaaacuucuc

SEQ ID NO: 1358552 - RNA, 26 nt, Human
uaacaaaccaaacuucuccauuuccu

SEQ ID NO: 1358553 - RNA, 19 nt, Human
uacaccacuugaaugugcc

SEQ ID NO: 1358554 - RNA, 19 nt, Human
uacgcuuuucccauccucu

SEQ ID NO: 1358555 - RNA, 24 nt, Human
uacggcauacaccaccacacccag

SEQ ID NO: 1358556 - RNA, 18 nt, Human
uacugaggcuugaguagg

SEQ ID NO: 1358557 - RNA, 21 nt, Human
uagaaagcaaccagucuccua

SEQ ID NO: 1358558 - RNA, 19 nt, Human
uagaggccauuggggcuga

SEQ ID NO: 1358559 - RNA, 26 nt, Human
uaguaaacugcuuuuagcugcaugga

SEQ ID NO: 1358560 - RNA, 23 nt, Human
uaucaggauguguccacuucuug

SEQ ID NO: 1358561 - RNA, 19 nt, Human
uauggaccuuucccugaga

SEQ ID NO: 1358562 - RNA, 22 nt, Human
uauucaaacuggauaaucuaau

SEQ ID NO: 1358563 - RNA, 19 nt, Human
ucacucccacuugcaagca

SEQ ID NO: 1358564 - RNA, 21 nt, Human
ucaguguuucucaugucccau

SEQ ID NO: 1358565 - RNA, 18 nt, Human
ucauagaaagcaaccagu

SEQ ID NO: 1358566 - RNA, 21 nt, Human
uccaagaaacaaaccagaaua

SEQ ID NO: 1358567 - RNA, 22 nt, Human
uccaaguagcugggacuacggc

SEQ ID NO: 1358568 - RNA, 23 nt, Human
uccaaguagcugggacuacggca

SEQ ID NO: 1358569 - RNA, 23 nt, Human
uccaaguagcugggacuacggca

SEQ ID NO: 1358570 - RNA, 22 nt, Human
uccauacaacucccaucucuac

SEQ ID NO: 1358571 - RNA, 20 nt, Human
uccaugaagaugaggaaaaa

SEQ ID NO: 1358572 - RNA, 18 nt, Human
ucccaaagugcugggauu

SEQ ID NO: 1358573 - RNA, 23 nt, Human
ucccaaagugcugggauuacaga

SEQ ID NO: 1358574 - RNA, 19 nt, Human
uccccuacccuuacuucca

SEQ ID NO: 1358575 - RNA, 21 nt, Human
ucccucuggaucugggaucug

SEQ ID NO: 1358576 - RNA, 21 nt, Human
uccucuggaaagggugcugaa

SEQ ID NO: 1358577 - RNA, 21 nt, Human
uccugggcucaagucguccuc

SEQ ID NO: 1358578 - RNA, 22 nt, Human
uccugggcucaagucguccucc

SEQ ID NO: 1358579 - RNA, 24 nt, Human
uccuuggaucucugugcucccccc

SEQ ID NO: 1358580 - RNA, 21 nt, Human
ucucaaacuccugggcucaag

SEQ ID NO: 1358581 - RNA, 18 nt, Human
ucuccauaagccccuuca

SEQ ID NO: 1358582 - RNA, 22 nt, Human
ucucgcucuuucacccagacug

SEQ ID NO: 1358583 - RNA, 24 nt, Human
ucucgcucuuucacccagacugga

SEQ ID NO: 1358584 - RNA, 19 nt, Human
ucucgcuuuuuugcccaga

SEQ ID NO: 1358585 - RNA, 23 nt, Human
ucucgcuuuuuugcccagacugg

SEQ ID NO: 1358586 - RNA, 19 nt, Human
ucucugugccccuggcacu

SEQ ID NO: 1358587 - RNA, 21 nt, Human
ucugcuucuugucgggaccau

SEQ ID NO: 1358588 - RNA, 20 nt, Human
ucugggggugggaaaggcuc

SEQ ID NO: 1358589 - RNA, 20 nt, Human
ucuguagcuuuuaucacauc

SEQ ID NO: 1358590 - RNA, 22 nt, Human
ucuguagcuuuuaucacauccu

SEQ ID NO: 1358591 - RNA, 22 nt, Human
ucuguuuuccccuuucuuuuuc

SEQ ID NO: 1358592 - RNA, 20 nt, Human
ucuucacaacccacagaaca

SEQ ID NO: 1358593 - RNA, 24 nt, Human
ucuugagccucucuguuuggaccc

SEQ ID NO: 1358594 - RNA, 21 nt, Human
ucuugagccucucuguuuucc

SEQ ID NO: 1358595 - RNA, 24 nt, Human
ucuugagccucucuguuuuccccu

SEQ ID NO: 1358596 - RNA, 20 nt, Human
ucuugccccugaggucuggg

SEQ ID NO: 1358597 - RNA, 21 nt, Human
ucuugucgggaccaugacuga

SEQ ID NO: 1358598 - RNA, 25 nt, Human
ucuuucuuuuuaguuuuagagaugg

SEQ ID NO: 1358599 - RNA, 20 nt, Human
ugaaaaaguauaucuggagc

SEQ ID NO: 1358600 - RNA, 23 nt, Human
ugaaaaaguauaucuggagcuaa

SEQ ID NO: 1358601 - RNA, 19 nt, Human
ugaaaccacaaguaauagc

SEQ ID NO: 1358602 - RNA, 20 nt, Human
ugaaaccacaaguaauagca

SEQ ID NO: 1358603 - RNA, 26 nt, Human
ugacugucauagaaagcaaccagucu

SEQ ID NO: 1358604 - RNA, 29 nt, Human
ugagccucucuguuuuccccuuucuuuuu

SEQ ID NO: 1358605 - RNA, 26 nt, Human
ugagcuagcugcaguuuuuuuuuucc

SEQ ID NO: 1358606 - RNA, 25 nt, Human
ugagcuugguggggggaggggcguu

SEQ ID NO: 1358607 - RNA, 19 nt, Human
ugaggcuugaguagguggu

SEQ ID NO: 1358608 - RNA, 21 nt, Human
ugcaaccugauaucccugggc

SEQ ID NO: 1358609 - RNA, 21 nt, Human
ugcaccuaccacacugugucg

SEQ ID NO: 1358610 - RNA, 19 nt, Human
ugcauggagaaauuagggu

SEQ ID NO: 1358611 - RNA, 20 nt, Human
ugccaucugcuucuugucgg

SEQ ID NO: 1358612 - RNA, 21 nt, Human
ugccccuggcacuuaacacag

SEQ ID NO: 1358613 - RNA, 24 nt, Human
ugccucaaccuuccaaguagcugg

SEQ ID NO: 1358614 - RNA, 22 nt, Human
ugcucccacagcuucccaacac

SEQ ID NO: 1358615 - RNA, 18 nt, Human
ugcugggauuacagaugu

SEQ ID NO: 1358616 - RNA, 24 nt, Human
ugcugggauuacagaugugagcca

SEQ ID NO: 1358617 - RNA, 19 nt, Human
ugcuuucuggcuuuugacu

SEQ ID NO: 1358618 - RNA, 19 nt, Human
ugcuuucuggcuuuugacu

SEQ ID NO: 1358619 - RNA, 21 nt, Human
ugcuuuuagcugcauggagaa

SEQ ID NO: 1358620 - RNA, 24 nt, Human
ugcuuuuagcugcauggagaaauu

SEQ ID NO: 1358621 - RNA, 26 nt, Human
uggaacagaguagguucuuaguagau

SEQ ID NO: 1358622 - RNA, 19 nt, Human
uggagugcaguggcacgau

SEQ ID NO: 1358623 - RNA, 19 nt, Human
uggagugcaguggcacgau

SEQ ID NO: 1358624 - RNA, 21 nt, Human
uggagugcaguggcacgauua

SEQ ID NO: 1358625 - RNA, 25 nt, Human
uggcaacagggacaaacagacauaa

SEQ ID NO: 1358626 - RNA, 18 nt, Human
uggcacgauuauagcuca

SEQ ID NO: 1358627 - RNA, 24 nt, Human
uggcacgauuauagcucacugcaa

SEQ ID NO: 1358628 - RNA, 21 nt, Human
uggcaugccagcgagacagaa

SEQ ID NO: 1358629 - RNA, 23 nt, Human
ugggacuacggcauacaccacca

SEQ ID NO: 1358630 - RNA, 18 nt, Human
ugggauuacagaugugag

SEQ ID NO: 1358631 - RNA, 19 nt, Human
ugggauuacagaugugagc

SEQ ID NO: 1358632 - RNA, 21 nt, Human
ugggauuacagaugugagcca

SEQ ID NO: 1358633 - RNA, 22 nt, Human
ugggauuacagaugugagccac

SEQ ID NO: 1358634 - RNA, 22 nt, Human
ugggauuacagaugugagccac

SEQ ID NO: 1358635 - RNA, 27 nt, Human
ugggauuacagaugugagccacuucuc

SEQ ID NO: 1358636 - RNA, 19 nt, Human
uggggucucgcucuuucac

SEQ ID NO: 1358637 - RNA, 19 nt, Human
ugggugcagcccacggagg

SEQ ID NO: 1358638 - RNA, 20 nt, Human
ugguagaaggggcagcugug

SEQ ID NO: 1358639 - RNA, 18 nt, Human
uggucuagcucaguggaa

SEQ ID NO: 1358640 - RNA, 19 nt, Human
ugugccaucugcuucuugu

SEQ ID NO: 1358641 - RNA, 22 nt, Human
ugugcucccacagcuucccaac

SEQ ID NO: 1358642 - RNA, 19 nt, Human
uguuauggggaaaauagag

SEQ ID NO: 1358643 - RNA, 21 nt, Human
uuaaacauuccugccugcuga

SEQ ID NO: 1358644 - RNA, 19 nt, Human
uuaaggcagcuuucuguuc

SEQ ID NO: 1358645 - RNA, 24 nt, Human
uucacaacccacagaacaggagau

SEQ ID NO: 1358646 - RNA, 24 nt, Human
uucaggaaauagaugguguauuca

SEQ ID NO: 1358647 - RNA, 19 nt, Human
uuccagguggggggcucuc

SEQ ID NO: 1358648 - RNA, 22 nt, Human
uucccuucacccuguucacacc

SEQ ID NO: 1358649 - RNA, 28 nt, Human
uuccucaggcuacuucucaguccucuau

SEQ ID NO: 1358650 - RNA, 24 nt, Human
uucuggacuccugccucaaccuuc

SEQ ID NO: 1358651 - RNA, 21 nt, Human
uugaagacauauuuaugccaa

SEQ ID NO: 1358652 - RNA, 18 nt, Human
uugaauauccgcuuccuc

SEQ ID NO: 1358653 - RNA, 24 nt, Human
uugccccugaggucuggggguggg

SEQ ID NO: 1358654 - RNA, 20 nt, Human
uuggaaggugauuucagaau

SEQ ID NO: 1358655 - RNA, 24 nt, Human
uuggaucucugugcucccacagcu

SEQ ID NO: 1358656 - RNA, 18 nt, Human
uuggccucccaaagugcu

SEQ ID NO: 1358657 - RNA, 24 nt, Human
uuggggcugauccacuucaauuca

SEQ ID NO: 1358658 - RNA, 22 nt, Human
uuucccauacaucccucaucag

SEQ ID NO: 1358659 - RNA, 24 nt, Human
uuuccugcuccccucaucuucuuc

SEQ ID NO: 1358660 - RNA, 18 nt, Human
uuuuuauagagauggcgu

SEQ ID NO: 1358661 - RNA, 21 nt, Human
aaaaacaaauagagucgagug

SEQ ID NO: 1358662 - RNA, 24 nt, Human
aaaaaggcaaacaggugucgcgga

SEQ ID NO: 1358663 - RNA, 26 nt, Human
aaaaauaaaugagggaaggagcugac

SEQ ID NO: 1358664 - RNA, 20 nt, Human
aaaacaaauagagucgagug

SEQ ID NO: 1358665 - RNA, 26 nt, Human
aaaaccaacaaccucaugcaguguug

SEQ ID NO: 1358666 - RNA, 20 nt, Human
aaaacgcucuaccccccaca

SEQ ID NO: 1358667 - RNA, 20 nt, Human
aaacaaaaccaacaaccuca

SEQ ID NO: 1358668 - RNA, 23 nt, Human
aaacgaacacccccagcauuggu

SEQ ID NO: 1358669 - RNA, 23 nt, Human
aaagccuccagacaaggcagucc

SEQ ID NO: 1358670 - RNA, 18 nt, Human
aacaaagccuccagacaa

SEQ ID NO: 1358671 - RNA, 18 nt, Human
aacauucccuucuucccu

SEQ ID NO: 1358672 - RNA, 20 nt, Human
aagagagugggcuugaagga

SEQ ID NO: 1358673 - RNA, 19 nt, Human
aaggagcugacgacugggg

SEQ ID NO: 1358674 - RNA, 20 nt, Human
aaggcaccuggagucugggu

SEQ ID NO: 1358675 - RNA, 21 nt, Human
acaaaaccaacaaccucaugc

SEQ ID NO: 1358676 - RNA, 24 nt, Human
acacaacuuaacaaaaagggaacc

SEQ ID NO: 1358677 - RNA, 21 nt, Human
acacaacuuaacaaaaauaaa

SEQ ID NO: 1358678 - RNA, 19 nt, Human
accuuugcaaggcaccugg

SEQ ID NO: 1358679 - RNA, 25 nt, Human
agcagcagcagcagcaauccuggcu

SEQ ID NO: 1358680 - RNA, 20 nt, Human
aggaagaaaaagagaaagaa

SEQ ID NO: 1358681 - RNA, 18 nt, Human
aggaggaagaaaaagaga

SEQ ID NO: 1358682 - RNA, 21 nt, Human
agggaugcuggaaggaaagau

SEQ ID NO: 1358683 - RNA, 20 nt, Human
agguggucaguaaagggaug

SEQ ID NO: 1358684 - RNA, 22 nt, Human
aguaaagggaugcuggaaggaa

SEQ ID NO: 1358685 - RNA, 25 nt, Human
auaaaacaaaacaaaaccaacaacc

SEQ ID NO: 1358686 - RNA, 27 nt, Human
auaaaacaaaacaaaaccaacaaccuc

SEQ ID NO: 1358687 - RNA, 23 nt, Human
augaaucacgugaaagaaaaggc

SEQ ID NO: 1358688 - RNA, 19 nt, Human
auggcucccagcuuccacc

SEQ ID NO: 1358689 - RNA, 18 nt, Human
caaaaauaaaugagggaa

SEQ ID NO: 1358690 - RNA, 23 nt, Human
caaaacaaaaccaacaaccucau

SEQ ID NO: 1358691 - RNA, 20 nt, Human
caaaaccaacaaccucaugc

SEQ ID NO: 1358692 - RNA, 18 nt, Human
caaugaaagggguguugg

SEQ ID NO: 1358693 - RNA, 21 nt, Human
cacaaugccugauccucagga

SEQ ID NO: 1358694 - RNA, 18 nt, Human
cacacaaagcagauuagc

SEQ ID NO: 1358695 - RNA, 19 nt, Human
cacacaacuuaacaaaaau

SEQ ID NO: 1358696 - RNA, 22 nt, Human
cacauggcucccagcuuccacc

SEQ ID NO: 1358697 - RNA, 21 nt, Human
cacccccuuucccucugauuu

SEQ ID NO: 1358698 - RNA, 19 nt, Human
cacccuuugagauccacac

SEQ ID NO: 1358699 - RNA, 23 nt, Human
cacccuuugagauccacacacuu

SEQ ID NO: 1358700 - RNA, 25 nt, Human
cagaagguacauugcuuuuuauaca

SEQ ID NO: 1358701 - RNA, 18 nt, Human
caucauuuucauccagaa

SEQ ID NO: 1358702 - RNA, 19 nt, Human
cccaucuggcuggccugga

SEQ ID NO: 1358703 - RNA, 22 nt, Human
ccccaucauccuuuccauccug

SEQ ID NO: 1358704 - RNA, 21 nt, Human
cccccacauggcucccagcuu

SEQ ID NO: 1358705 - RNA, 22 nt, Human
cccccaucauccuuuccauccu

SEQ ID NO: 1358706 - RNA, 19 nt, Human
cccuaugcacaaacaggau

SEQ ID NO: 1358707 - RNA, 19 nt, Human
cccuucuucccucagaucc

SEQ ID NO: 1358708 - RNA, 21 nt, Human
cccuugcuucccacacacccc

SEQ ID NO: 1358709 - RNA, 20 nt, Human
ccucccucccuugcuuccca

SEQ ID NO: 1358710 - RNA, 20 nt, Human
ccucugauuuguguucugga

SEQ ID NO: 1358711 - RNA, 18 nt, Human
cgagaugaacaaagccuc

SEQ ID NO: 1358712 - RNA, 21 nt, Human
cuaaagugucaauuauuaaac

SEQ ID NO: 1358713 - RNA, 21 nt, Human
cuaccccccacauggcuccca

SEQ ID NO: 1358714 - RNA, 20 nt, Human
cugcaaagaagaugcaagaa

SEQ ID NO: 1358715 - RNA, 23 nt, Human
cuggguuugucauuuaaaguuuu

SEQ ID NO: 1358716 - RNA, 20 nt, Human
gaagaaaaagagaaagaaac

SEQ ID NO: 1358717 - RNA, 18 nt, Human
gaagagagugggcuugaa

SEQ ID NO: 1358718 - RNA, 20 nt, Human
gagaaggaagugggcggagg

SEQ ID NO: 1358719 - RNA, 23 nt, Human
gagggcaauuauuccuccuguga

SEQ ID NO: 1358720 - RNA, 19 nt, Human
gaguggggugcuggugugu

SEQ ID NO: 1358721 - RNA, 20 nt, Human
gcagucccaucuggcuggcc

SEQ ID NO: 1358722 - RNA, 21 nt, Human
ggcaggaguagcagcagcagc

SEQ ID NO: 1358723 - RNA, 19 nt, Human
gggcggagggucaggaagu

SEQ ID NO: 1358724 - RNA, 25 nt, Human
guagcagcagcagcagcaauccugg

SEQ ID NO: 1358725 - RNA, 21 nt, Human
gugggcggagggucaggaagu

SEQ ID NO: 1358726 - RNA, 20 nt, Human
uaaaaacccuaugcacaaaa

SEQ ID NO: 1358727 - RNA, 19 nt, Human
uaaaaacgcucuacccccc

SEQ ID NO: 1358728 - RNA, 21 nt, Human
uaaaaacgcucuaccccccac

SEQ ID NO: 1358729 - RNA, 24 nt, Human
uaaaaauaauucacacaacuuaac

SEQ ID NO: 1358730 - RNA, 23 nt, Human
uaaaauaaaugcuaaugauauuu

SEQ ID NO: 1358731 - RNA, 21 nt, Human
uaaagaacuuuucuccauguc

SEQ ID NO: 1358732 - RNA, 21 nt, Human
uaacaaaaauaaaugagggaa

SEQ ID NO: 1358733 - RNA, 20 nt, Human
uaagacaauauucacuaagc

SEQ ID NO: 1358734 - RNA, 18 nt, Human
uagagucgaguggggugc

SEQ ID NO: 1358735 - RNA, 24 nt, Human
uagagucgaguggggugcuggugu

SEQ ID NO: 1358736 - RNA, 23 nt, Human
uagcagcagcagcagcaauccug

SEQ ID NO: 1358737 - RNA, 18 nt, Human
uaguacagcugaacaccc

SEQ ID NO: 1358738 - RNA, 21 nt, Human
uauaaagauaaauugcacccu

SEQ ID NO: 1358739 - RNA, 18 nt, Human
ucacuaagcccuuugagc

SEQ ID NO: 1358740 - RNA, 24 nt, Human
uccacacacuugauuuacaacuga

SEQ ID NO: 1358741 - RNA, 20 nt, Human
ucccacacaccccaaaaaga

SEQ ID NO: 1358742 - RNA, 23 nt, Human
ucccuugcuucccacacacccca

SEQ ID NO: 1358743 - RNA, 23 nt, Human
ucuaaagugucaauuauuaaaca

SEQ ID NO: 1358744 - RNA, 21 nt, Human
ucugauuuguguucuggaggg

SEQ ID NO: 1358745 - RNA, 22 nt, Human
ucuuagccaauuuguaaaccuu

SEQ ID NO: 1358746 - RNA, 21 nt, Human
ugaaagaaaaggccaaucagu

SEQ ID NO: 1358747 - RNA, 25 nt, Human
ugaaguuguggaggugggagggcuc

SEQ ID NO: 1358748 - RNA, 25 nt, Human
ugagggaaggagcugacgacugggg

SEQ ID NO: 1358749 - RNA, 22 nt, Human
ugaguguaaccaagagguacag

SEQ ID NO: 1358750 - RNA, 23 nt, Human
ugcaagaaacgaacacccccagc

SEQ ID NO: 1358751 - RNA, 24 nt, Human
ugccaggauucagaggcuuuuugg

SEQ ID NO: 1358752 - RNA, 24 nt, Human
ugccccuacagcaguuaaaaacag

SEQ ID NO: 1358753 - RNA, 24 nt, Human
ugccugauccucagguuuuaacau

SEQ ID NO: 1358754 - RNA, 21 nt, Human
uggaaugcugucacacaaagc

SEQ ID NO: 1358755 - RNA, 22 nt, Human
uggaaugcugucacacaaagca

SEQ ID NO: 1358756 - RNA, 19 nt, Human
uggagggagaggggauuau

SEQ ID NO: 1358757 - RNA, 21 nt, Human
uggcucccagcuuccaccugc

SEQ ID NO: 1358758 - RNA, 24 nt, Human
ugguaguacagcugaacacccccu

SEQ ID NO: 1358759 - RNA, 23 nt, Human
uggucaguaaagggaugcuggaa

SEQ ID NO: 1358760 - RNA, 22 nt, Human
uuaaaaacccuaugcacaaaca

SEQ ID NO: 1358761 - RNA, 21 nt, Human
uucaauaguuugcuauuuguu

SEQ ID NO: 1358762 - RNA, 26 nt, Human
uucauacacaaugaucccaaaggagg

SEQ ID NO: 1358763 - RNA, 20 nt, Human
uuuaagaagguauuaagaga

SEQ ID NO: 1358764 - RNA, 24 nt, Human
uuucuaguauauuuauuuacuccu

SEQ ID NO: 1358765 - RNA, 20 nt, Human
caggaaaugcuauagagagc

SEQ ID NO: 1358766 - RNA, 19 nt, Human
cagguaaggcgauaccugc

SEQ ID NO: 1358767 - RNA, 19 nt, Human
ccacugcaccccggcucag

SEQ ID NO: 1358768 - RNA, 20 nt, Human
ccacugcaccccggcucagu

SEQ ID NO: 1358769 - RNA, 21 nt, Human
ccacugcaccccggcucagug

SEQ ID NO: 1358770 - RNA, 19 nt, Human
cucccgcugccacugcacc

SEQ ID NO: 1358771 - RNA, 21 nt, Human
cugcagguuggugggccuggc

SEQ ID NO: 1358772 - RNA, 23 nt, Human
uacucucccgcugccacugcacc

SEQ ID NO: 1358773 - RNA, 22 nt, Human
uagcaaaauaacagcuagaaaa

SEQ ID NO: 1358774 - RNA, 25 nt, Human
ucucccgcugccacugcaccccggc

SEQ ID NO: 1358775 - RNA, 19 nt, Human
ucuuggaauuuagccaggc

SEQ ID NO: 1358776 - RNA, 18 nt, Human
ugccaaauagcaaaauaa

SEQ ID NO: 1358777 - RNA, 20 nt, Human
ugcuauagagagccagucuc

SEQ ID NO: 1358778 - RNA, 18 nt, Human
uuuuuuuuuuuuuuuuug

SEQ ID NO: 1358779 - RNA, 19 nt, Human
uuuuuuuuuuuuuuuuugg

SEQ ID NO: 1358780 - RNA, 20 nt, Human
agagacuaacaaggccugga

SEQ ID NO: 1358781 - RNA, 21 nt, Human
agcccaggggguagcgaaaga

SEQ ID NO: 1358782 - RNA, 23 nt, Human
aggggguagcgaaagagaggagg

SEQ ID NO: 1358783 - RNA, 19 nt, Human
cagcuuccuuggcucuuug

SEQ ID NO: 1358784 - RNA, 24 nt, Human
caucuucgcccaccaccacaggga

SEQ ID NO: 1358785 - RNA, 24 nt, Human
ccauuccggcugggugcccugccu

SEQ ID NO: 1358786 - RNA, 19 nt, Human
cccugccucccuccagccc

SEQ ID NO: 1358787 - RNA, 19 nt, Human
ccucccuccagcccagggg

SEQ ID NO: 1358788 - RNA, 18 nt, Human
ccugccucccuccagccc

SEQ ID NO: 1358789 - RNA, 19 nt, Human
cuacagcuuccuuggcucu

SEQ ID NO: 1358790 - RNA, 20 nt, Human
cuuccagucuuuacauucaa

SEQ ID NO: 1358791 - RNA, 23 nt, Human
gagccuacccguuuuuuuuuuuu

SEQ ID NO: 1358792 - RNA, 20 nt, Human
gggacgcgggggagggagcc

SEQ ID NO: 1358793 - RNA, 21 nt, Human
gguagcgaaagagaggaggga

SEQ ID NO: 1358794 - RNA, 24 nt, Human
guccucuucuacagcuuccuuggc

SEQ ID NO: 1358795 - RNA, 23 nt, Human
uccuaucucacaucuccaguugu

SEQ ID NO: 1358796 - RNA, 23 nt, Human
uccucuucuacagcuuccuuggc

SEQ ID NO: 1358797 - RNA, 21 nt, Human
uccuuggcucuuugugccuau

SEQ ID NO: 1358798 - RNA, 18 nt, Human
ucuccaguuguaugucuc

SEQ ID NO: 1358799 - RNA, 18 nt, Human
ugcccugccucccuccag

SEQ ID NO: 1358800 - RNA, 22 nt, Human
ugcccugccucccuccagccca

SEQ ID NO: 1358801 - RNA, 21 nt, Human
ugccgaagagcugggcauuug

SEQ ID NO: 1358802 - RNA, 24 nt, Human
uuuuuuaagcguccucuucuacag

SEQ ID NO: 1358803 - RNA, 24 nt, Human
aagcaauucacccaccuuggccuc

SEQ ID NO: 1358804 - RNA, 20 nt, Human
aagcugcuaggauuacaggc

SEQ ID NO: 1358805 - RNA, 24 nt, Human
aagcugcuaggauuacaggcauga

SEQ ID NO: 1358806 - RNA, 24 nt, Human
aagucgcugagauuacaggcaugu

SEQ ID NO: 1358807 - RNA, 22 nt, Human
aauucuacuccaggacauacau

SEQ ID NO: 1358808 - RNA, 23 nt, Human
acaggccaucaaacagcagcagc

SEQ ID NO: 1358809 - RNA, 23 nt, Human
accuucucauagaugucuugcua

SEQ ID NO: 1358810 - RNA, 19 nt, Human
acgggguuuugcauguugg

SEQ ID NO: 1358811 - RNA, 22 nt, Human
acgggguuuugcauguuggcca

SEQ ID NO: 1358812 - RNA, 23 nt, Human
acgggguuuugcauguuggccag

SEQ ID NO: 1358813 - RNA, 24 nt, Human
acgggguuuugcauguuggccagg

SEQ ID NO: 1358814 - RNA, 25 nt, Human
acucugucgcccaggcuggacugca

SEQ ID NO: 1358815 - RNA, 24 nt, Human
acugcagugcuacgaucucagcuc

SEQ ID NO: 1358816 - RNA, 18 nt, Human
agagcacaggccaucaaa

SEQ ID NO: 1358817 - RNA, 19 nt, Human
agauuacaggcaugugcca

SEQ ID NO: 1358818 - RNA, 24 nt, Human
agauuacaggcaugugccaucaug

SEQ ID NO: 1358819 - RNA, 21 nt, Human
agcaauucacccaccuuggcc

SEQ ID NO: 1358820 - RNA, 20 nt, Human
agcaauucuccaccucagcc

SEQ ID NO: 1358821 - RNA, 19 nt, Human
aggacauacauugaucuua

SEQ ID NO: 1358822 - RNA, 23 nt, Human
auaguagggaugucugugaauac

SEQ ID NO: 1358823 - RNA, 20 nt, Human
aucugucacccagccuggag

SEQ ID NO: 1358824 - RNA, 20 nt, Human
auuuauaccauuuacuccuc

SEQ ID NO: 1358825 - RNA, 24 nt, Human
auuuuuguauuuuuaguggagacg

SEQ ID NO: 1358826 - RNA, 26 nt, Human
caagcaauucuccaccucagccuccc

SEQ ID NO: 1358827 - RNA, 22 nt, Human
caauggagaaguuuauuaucuu

SEQ ID NO: 1358828 - RNA, 24 nt, Human
caauucacccaccuuggccuccca

SEQ ID NO: 1358829 - RNA, 22 nt, Human
caccuaaaugccaacccagagc

SEQ ID NO: 1358830 - RNA, 24 nt, Human
caccucagccucccaagucgcuga

SEQ ID NO: 1358831 - RNA, 24 nt, Human
cacucugucgcccaggcuggacug

SEQ ID NO: 1358832 - RNA, 23 nt, Human
cacugcaaccucugccuuauggg

SEQ ID NO: 1358833 - RNA, 18 nt, Human
caggacauacauugaucu

SEQ ID NO: 1358834 - RNA, 26 nt, Human
cagugugauucuucaugaggcccaaa

SEQ ID NO: 1358835 - RNA, 21 nt, Human
caugccuggcuaauuuuugua

SEQ ID NO: 1358836 - RNA, 19 nt, Human
caugugccaucaugccugg

SEQ ID NO: 1358837 - RNA, 18 nt, Human
cauguuggccaggcuggu

SEQ ID NO: 1358838 - RNA, 18 nt, Human
cauguuggccaggcuggu

SEQ ID NO: 1358839 - RNA, 18 nt, Human
cauguuggccaggcuggu

SEQ ID NO: 1358840 - RNA, 24 nt, Human
cauguuggccaggcugguuuugaa

SEQ ID NO: 1358841 - RNA, 24 nt, Human
ccaagcugcuaggauuacaggcau

SEQ ID NO: 1358842 - RNA, 23 nt, Human
ccaagucgcugagauuacaggca

SEQ ID NO: 1358843 - RNA, 24 nt, Human
ccaagucgcugagauuacaggcau

SEQ ID NO: 1358844 - RNA, 18 nt, Human
ccaucaaacagcagcagc

SEQ ID NO: 1358845 - RNA, 19 nt, Human
cccaccuuggccucccaag

SEQ ID NO: 1358846 - RNA, 24 nt, Human
ccgcaaaauagucauuaguagcuc

SEQ ID NO: 1358847 - RNA, 24 nt, Human
ccugaccucaagcaauucacccac

SEQ ID NO: 1358848 - RNA, 24 nt, Human
ccuuauggguucaagcaauucucc

SEQ ID NO: 1358849 - RNA, 24 nt, Human
cucaagcaauucacccaccuuggc

SEQ ID NO: 1358850 - RNA, 19 nt, Human
cucacugcaaccucugccu

SEQ ID NO: 1358851 - RNA, 24 nt, Human
cucauaucaccuaaaugccaaccc

SEQ ID NO: 1358852 - RNA, 22 nt, Human
cuccaccucagccucccaaguc

SEQ ID NO: 1358853 - RNA, 21 nt, Human
cucccaagcugcuaggauuac

SEQ ID NO: 1358854 - RNA, 21 nt, Human
cucccaagucgcugagauuac

SEQ ID NO: 1358855 - RNA, 24 nt, Human
cugcaaccucugccuuauggguuc

SEQ ID NO: 1358856 - RNA, 25 nt, Human
cugugaauaaaaucuuccgaagucc

SEQ ID NO: 1358857 - RNA, 18 nt, Human
cuuuuuuuuuuuuuuuug

SEQ ID NO: 1358858 - RNA, 24 nt, Human
gaccucaagcaauucacccaccuu

SEQ ID NO: 1358859 - RNA, 24 nt, Human
gacgggguuuugcauguuggccag

SEQ ID NO: 1358860 - RNA, 23 nt, Human
gagacgggguuuugcauguuggc

SEQ ID NO: 1358861 - RNA, 24 nt, Human
gauuacaggcaugagccuccaugc

SEQ ID NO: 1358862 - RNA, 18 nt, Human
gauuacaggcaugugcca

SEQ ID NO: 1358863 - RNA, 24 nt, Human
gauuacaggcaugugccaucaugc

SEQ ID NO: 1358864 - RNA, 19 nt, Human
gcauguuggccaggcuggu

SEQ ID NO: 1358865 - RNA, 21 nt, Human
ggaaaaccauucaucuguuuc

SEQ ID NO: 1358866 - RNA, 21 nt, Human
ggauuacaggcaugagccucc

SEQ ID NO: 1358867 - RNA, 24 nt, Human
ggauuacaggcaugagccuccaug

SEQ ID NO: 1358868 - RNA, 24 nt, Human
ggcugguuuugaauuccugaccuc

SEQ ID NO: 1358869 - RNA, 22 nt, Human
gggguuuugcauguuggccagg

SEQ ID NO: 1358870 - RNA, 22 nt, Human
guggagacgggguuuugcaugu

SEQ ID NO: 1358871 - RNA, 22 nt, Human
uaaucugucacccagccuggag

SEQ ID NO: 1358872 - RNA, 24 nt, Human
uaauuuuuguauuuuuaguggaga

SEQ ID NO: 1358873 - RNA, 24 nt, Human
uacaggcaugagccuccaugccca

SEQ ID NO: 1358874 - RNA, 22 nt, Human
uacaggcaugugccaucaugcc

SEQ ID NO: 1358875 - RNA, 21 nt, Human
uacauugaucuuauaaauuug

SEQ ID NO: 1358876 - RNA, 18 nt, Human
uaggauuacaggcaugag

SEQ ID NO: 1358877 - RNA, 24 nt, Human
uaggauuacaggcaugagccucca

SEQ ID NO: 1358878 - RNA, 23 nt, Human
uaguggagacgggguuuugcaug

SEQ ID NO: 1358879 - RNA, 18 nt, Human
ucacugcaaccucuaccu

SEQ ID NO: 1358880 - RNA, 24 nt, Human
ucacugcaaccucugccuuauggg

SEQ ID NO: 1358881 - RNA, 24 nt, Human
ucccaagcugcuaggauuacaggc

SEQ ID NO: 1358882 - RNA, 24 nt, Human
ucccaagucgcugagauuacaggc

SEQ ID NO: 1358883 - RNA, 19 nt, Human
uccgaagucccucccucau

SEQ ID NO: 1358884 - RNA, 23 nt, Human
ucgcccaggcuggacugcagugc

SEQ ID NO: 1358885 - RNA, 23 nt, Human
ucucacucugucgcccaggcugg

SEQ ID NO: 1358886 - RNA, 24 nt, Human
ucucacucugucgcccaggcugga

SEQ ID NO: 1358887 - RNA, 26 nt, Human
ucucacucugucgcccaggcuggacu

SEQ ID NO: 1358888 - RNA, 24 nt, Human
ucugucacccagccuggaguguag

SEQ ID NO: 1358889 - RNA, 27 nt, Human
ucuucuucuucuuuuuuuuuuuuuuuu

SEQ ID NO: 1358890 - RNA, 18 nt, Human
ucuuuuuuuuuuuuuuuu

SEQ ID NO: 1358891 - RNA, 24 nt, Human
ugaauuccugaccucaagcaauuc

SEQ ID NO: 1358892 - RNA, 24 nt, Human
ugacacgaucucagcucacugcaa

SEQ ID NO: 1358893 - RNA, 24 nt, Human
ugaccucaagcaauucacccaccu

SEQ ID NO: 1358894 - RNA, 26 nt, Human
ugagacagagucuugcuuaaucuguc

SEQ ID NO: 1358895 - RNA, 21 nt, Human
ugagacgaggucacagagguc

SEQ ID NO: 1358896 - RNA, 18 nt, Human
ugagauuacaggcaugug

SEQ ID NO: 1358897 - RNA, 19 nt, Human
ugagauuacaggcaugugc

SEQ ID NO: 1358898 - RNA, 21 nt, Human
ugagauuacaggcaugugcca

SEQ ID NO: 1358899 - RNA, 21 nt, Human
ugagauuacaggcaugugcca

SEQ ID NO: 1358900 - RNA, 22 nt, Human
ugagauuacaggcaugugccau

SEQ ID NO: 1358901 - RNA, 23 nt, Human
ugagauuacaggcaugugccauc

SEQ ID NO: 1358902 - RNA, 24 nt, Human
ugagauuacaggcaugugccauca

SEQ ID NO: 1358903 - RNA, 24 nt, Human
ugcuacgaucucagcucacugcaa

SEQ ID NO: 1358904 - RNA, 20 nt, Human
ugcuaggauuacaggcauga

SEQ ID NO: 1358905 - RNA, 19 nt, Human
uggaguguagugacacgau

SEQ ID NO: 1358906 - RNA, 23 nt, Human
uggaguguagugacacgaucuca

SEQ ID NO: 1358907 - RNA, 24 nt, Human
uggccaggcugguuuugaauuccu

SEQ ID NO: 1358908 - RNA, 20 nt, Human
uggguucaagcaauucucca

SEQ ID NO: 1358909 - RNA, 19 nt, Human
uguaagagagagaagagua

SEQ ID NO: 1358910 - RNA, 22 nt, Human
uguagugacacgaucucagcuc

SEQ ID NO: 1358911 - RNA, 21 nt, Human
ugucgcccaggcuggacugca

SEQ ID NO: 1358912 - RNA, 28 nt, Human
ugugaauaaaaucuuccgaagucccucc

SEQ ID NO: 1358913 - RNA, 19 nt, Human
uguguagugggaggggcac

SEQ ID NO: 1358914 - RNA, 18 nt, Human
uuaguggagacgggguuu

SEQ ID NO: 1358915 - RNA, 18 nt, Human
uuaguggagacgggguuu

SEQ ID NO: 1358916 - RNA, 23 nt, Human
uuaguggagacgggguuuugcau

SEQ ID NO: 1358917 - RNA, 23 nt, Human
uucaagcaauucuccaccucagc

SEQ ID NO: 1358918 - RNA, 21 nt, Human
uucacccaccuuggccuccca

SEQ ID NO: 1358919 - RNA, 18 nt, Human
uucaucuguuucuucuuc

SEQ ID NO: 1358920 - RNA, 27 nt, Human
uuccugaccucaagcaauucacccacc

SEQ ID NO: 1358921 - RNA, 26 nt, Human
uucuucuuuuuuuuuuuuuuuugaga

SEQ ID NO: 1358922 - RNA, 18 nt, Human
uugcauguuggccaggcu

SEQ ID NO: 1358923 - RNA, 23 nt, Human
uuguauuuuuaguggagacgggg

SEQ ID NO: 1358924 - RNA, 18 nt, Human
uuucuuuuuuuuuuuuug

SEQ ID NO: 1358925 - RNA, 19 nt, Human
uuugagaaggagucucacu

SEQ ID NO: 1358926 - RNA, 21 nt, Human
uuuugaauuccugaccucaag

SEQ ID NO: 1358927 - RNA, 22 nt, Human
uuuugcauguuggccaggcugg

SEQ ID NO: 1358928 - RNA, 21 nt, Human
uuuuuaguggagacgggguuu

SEQ ID NO: 1358929 - RNA, 24 nt, Human
uuuuuaguggagacgggguuuugc

SEQ ID NO: 1358930 - RNA, 20 nt, Human
uuuuuguauuuuuaguggag

SEQ ID NO: 1358931 - RNA, 20 nt, Human
uuuuuuuuuuugagacagag

SEQ ID NO: 1358932 - RNA, 26 nt, Human
uuuuuuuuuuuugagaaggagucuca

SEQ ID NO: 1358933 - RNA, 24 nt, Human
uuuuuuuuuuuugagacagagucu

SEQ ID NO: 1358934 - RNA, 20 nt, Human
aacaauacaauagaacaacu

SEQ ID NO: 1358935 - RNA, 22 nt, Human
aauacauagacucuuuuccuua

SEQ ID NO: 1358936 - RNA, 22 nt, Human
aaugcuuucccacauuccauac

SEQ ID NO: 1358937 - RNA, 19 nt, Human
accaagugcuuacauucac

SEQ ID NO: 1358938 - RNA, 18 nt, Human
aucaagggaugacuguac

SEQ ID NO: 1358939 - RNA, 21 nt, Human
cagagccgagcaccgagcgcc

SEQ ID NO: 1358940 - RNA, 20 nt, Human
cagcgcagguggguggagaa

SEQ ID NO: 1358941 - RNA, 21 nt, Human
cagguccuccggacggcuccc

SEQ ID NO: 1358942 - RNA, 18 nt, Human
cauggcucacggagugcu

SEQ ID NO: 1358943 - RNA, 22 nt, Human
ccaauacccagcagguaucaag

SEQ ID NO: 1358944 - RNA, 21 nt, Human
ccggacggcucccgcugccaa

SEQ ID NO: 1358945 - RNA, 18 nt, Human
ccucugggaagcgcgccu

SEQ ID NO: 1358946 - RNA, 20 nt, Human
cuccucugggaagcgcgccu

SEQ ID NO: 1358947 - RNA, 22 nt, Human
cugccaaugcggguucccgcgg

SEQ ID NO: 1358948 - RNA, 23 nt, Human
gcgggacacaggcugccacggaa

SEQ ID NO: 1358949 - RNA, 22 nt, Human
uaaaagggacuggacauggcuc

SEQ ID NO: 1358950 - RNA, 21 nt, Human
uaaaauuaauaaaugcuuucc

SEQ ID NO: 1358951 - RNA, 23 nt, Human
uaaacaauacaauagaacaacua

SEQ ID NO: 1358952 - RNA, 22 nt, Human
ucaaccacacacuccucuggga

SEQ ID NO: 1358953 - RNA, 25 nt, Human
ugaaacaaagaaacuuuaagggagc

SEQ ID NO: 1358954 - RNA, 22 nt, Human
ugaaacaaagaaacuuuaaugu

SEQ ID NO: 1358955 - RNA, 21 nt, Human
uggaaagaaacugaaauuacu

SEQ ID NO: 1358956 - RNA, 23 nt, Human
uggaaagaaacugaaauuacuua

SEQ ID NO: 1358957 - RNA, 20 nt, Human
uucacagggucuaucuccaa

SEQ ID NO: 1358958 - RNA, 24 nt, Human
uugauaggcugacaauuacugcau

SEQ ID NO: 1358959 - RNA, 24 nt, Human
aaaaggcucaugaccagcucugcc

SEQ ID NO: 1358960 - RNA, 19 nt, Human
aaacugcugggauuacaga

SEQ ID NO: 1358961 - RNA, 22 nt, Human
aagcaguuugccaggacucggg

SEQ ID NO: 1358962 - RNA, 22 nt, Human
aaggcucaugaccagcucugcc

SEQ ID NO: 1358963 - RNA, 24 nt, Human
acuccuggccucaagcgauucucu

SEQ ID NO: 1358964 - RNA, 20 nt, Human
agcuaauaaagaacaaagac

SEQ ID NO: 1358965 - RNA, 20 nt, Human
agcuggccucaaacuccugg

SEQ ID NO: 1358966 - RNA, 24 nt, Human
agcuggccucaaacuccuggccuc

SEQ ID NO: 1358967 - RNA, 22 nt, Human
caaacugcugggauuacagaca

SEQ ID NO: 1358968 - RNA, 20 nt, Human
caagcgauucucuugccuca

SEQ ID NO: 1358969 - RNA, 21 nt, Human
caagcgauucucuugccucag

SEQ ID NO: 1358970 - RNA, 21 nt, Human
ccaaacuugaaaaagaaaauc

SEQ ID NO: 1358971 - RNA, 20 nt, Human
cccaaacuugaaaaagaaaa

SEQ ID NO: 1358972 - RNA, 25 nt, Human
cccaaacuugaaaaagaaaaucuaa

SEQ ID NO: 1358973 - RNA, 24 nt, Human
cccaaacuugugcaaauccaguga

SEQ ID NO: 1358974 - RNA, 18 nt, Human
ccccaggcaagcaguuug

SEQ ID NO: 1358975 - RNA, 20 nt, Human
ccuggccucaagcgauucuc

SEQ ID NO: 1358976 - RNA, 24 nt, Human
cugcaggugaggcacacucagaac

SEQ ID NO: 1358977 - RNA, 18 nt, Human
gauuacagacaucaccau

SEQ ID NO: 1358978 - RNA, 24 nt, Human
gcaaacugcugggauuacagacau

SEQ ID NO: 1358979 - RNA, 20 nt, Human
gggguccuugcuccgggaag

SEQ ID NO: 1358980 - RNA, 18 nt, Human
ucagcuaauaaagaacaa

SEQ ID NO: 1358981 - RNA, 19 nt, Human
ucagcuaauaaagaacaaa

SEQ ID NO: 1358982 - RNA, 19 nt, Human
ucccggacccagguggcuc

SEQ ID NO: 1358983 - RNA, 18 nt, Human
ucguucugcuguccccaa

SEQ ID NO: 1358984 - RNA, 23 nt, Human
ucuugcuaugucacucuagcugg

SEQ ID NO: 1358985 - RNA, 19 nt, Human
ugaaaaagaaaaucuaagu

SEQ ID NO: 1358986 - RNA, 20 nt, Human
ugcugggauuacagacauca

SEQ ID NO: 1358987 - RNA, 20 nt, Human
uggccucaaacuccuggccu

SEQ ID NO: 1358988 - RNA, 18 nt, Human
uggccucaagcgauucuc

SEQ ID NO: 1358989 - RNA, 24 nt, Human
uggccucaagcgauucucuugccu

SEQ ID NO: 1358990 - RNA, 20 nt, Human
ugggauuacagacaucacca

SEQ ID NO: 1358991 - RNA, 21 nt, Human
ugucaagucguucugcugucc

SEQ ID NO: 1358992 - RNA, 21 nt, Human
uuugcaaacugcugggauuac

SEQ ID NO: 1358993 - RNA, 19 nt, Human
aaagcgcugggaccacagg

SEQ ID NO: 1358994 - RNA, 24 nt, Human
aaagcgcugggaccacaggcauga

SEQ ID NO: 1358995 - RNA, 26 nt, Human
aagcgcugggaccacaggcaugagcc

SEQ ID NO: 1358996 - RNA, 24 nt, Human
accauauugaccaggcuggucucg

SEQ ID NO: 1358997 - RNA, 19 nt, Human
agaagccagguuccugaag

SEQ ID NO: 1358998 - RNA, 24 nt, Human
agguuccugaagguuuccugcauc

SEQ ID NO: 1358999 - RNA, 26 nt, Human
auggagcgacagaagcuauggcggag

SEQ ID NO: 1359000 - RNA, 24 nt, Human
augggguuucaccauauugaccag

SEQ ID NO: 1359001 - RNA, 24 nt, Human
caaagaccacugaauccauuuccc

SEQ ID NO: 1359002 - RNA, 24 nt, Human
caaagcgcugggaccacaggcaug

SEQ ID NO: 1359003 - RNA, 23 nt, Human
cacaggcaugagccacugcaccc

SEQ ID NO: 1359004 - RNA, 21 nt, Human
caccauauugaccaggcuggu

SEQ ID NO: 1359005 - RNA, 24 nt, Human
caccauauugaccaggcuggucuc

SEQ ID NO: 1359006 - RNA, 19 nt, Human
cagaagcuauggcggaggc

SEQ ID NO: 1359007 - RNA, 20 nt, Human
cagaagcuauggcggaggca

SEQ ID NO: 1359008 - RNA, 24 nt, Human
cauauugaccaggcuggucucgaa

SEQ ID NO: 1359009 - RNA, 20 nt, Human
cauccucaaagaccacugaa

SEQ ID NO: 1359010 - RNA, 24 nt, Human
ccaaagcgcugggaccacaggcau

SEQ ID NO: 1359011 - RNA, 21 nt, Human
ccacugaauccauuucccggc

SEQ ID NO: 1359012 - RNA, 24 nt, Human
ccagcuaaacuacucccaaaaauu

SEQ ID NO: 1359013 - RNA, 19 nt, Human
cccaugauuugagggaaac

SEQ ID NO: 1359014 - RNA, 19 nt, Human
cccgaccucccuuuggugc

SEQ ID NO: 1359015 - RNA, 20 nt, Human
ccucaaagaccacugaaucc

SEQ ID NO: 1359016 - RNA, 19 nt, Human
ccucgugguccgccugccu

SEQ ID NO: 1359017 - RNA, 21 nt, Human
ccugccucggccucccaaagc

SEQ ID NO: 1359018 - RNA, 25 nt, Human
cggcuuccagguguccuggccuccu

SEQ ID NO: 1359019 - RNA, 24 nt, Human
cuacugaccucgugguccgccugc

SEQ ID NO: 1359020 - RNA, 23 nt, Human
cucaaagaccacugaauccauuu

SEQ ID NO: 1359021 - RNA, 19 nt, Human
cugaagguuuccugcauca

SEQ ID NO: 1359022 - RNA, 23 nt, Human
cugccucggccucccaaagcgcu

SEQ ID NO: 1359023 - RNA, 18 nt, Human
cuggucccucucggggcc

SEQ ID NO: 1359024 - RNA, 23 nt, Human
gaccacaggcaugagccacugca

SEQ ID NO: 1359025 - RNA, 22 nt, Human
gaccucgugguccgccugccuc

SEQ ID NO: 1359026 - RNA, 24 nt, Human
gaccucgugguccgccugccucgg

SEQ ID NO: 1359027 - RNA, 18 nt, Human
gagaugggguuucaccau

SEQ ID NO: 1359028 - RNA, 23 nt, Human
gagaugggguuucaccauauuga

SEQ ID NO: 1359029 - RNA, 22 nt, Human
gccuccucuccacggaucccuc

SEQ ID NO: 1359030 - RNA, 20 nt, Human
ggaccacaggcaugagccac

SEQ ID NO: 1359031 - RNA, 22 nt, Human
ggaccacaggcaugagccacug

SEQ ID NO: 1359032 - RNA, 22 nt, Human
gggguuucaccauauugaccag

SEQ ID NO: 1359033 - RNA, 19 nt, Human
ggucucgaacuacugaccu

SEQ ID NO: 1359034 - RNA, 22 nt, Human
guucccaugauuugagggaaac

SEQ ID NO: 1359035 - RNA, 22 nt, Human
uaaacuacucccaaaaauuuuu

SEQ ID NO: 1359036 - RNA, 19 nt, Human
uaguagagaugggguuuca

SEQ ID NO: 1359037 - RNA, 23 nt, Human
uaguagagaugggguuucaccau

SEQ ID NO: 1359038 - RNA, 26 nt, Human
uaguagagaugggguuucaccauauu

SEQ ID NO: 1359039 - RNA, 23 nt, Human
ucacaucuacauccucaaagacc

SEQ ID NO: 1359040 - RNA, 22 nt, Human
uccaacucuguguccuagguau

SEQ ID NO: 1359041 - RNA, 18 nt, Human
ucccaaagcgcugggacc

SEQ ID NO: 1359042 - RNA, 24 nt, Human
ucccaaagcgcugggaccacaggc

SEQ ID NO: 1359043 - RNA, 18 nt, Human
ucucgaacuacugaccuc

SEQ ID NO: 1359044 - RNA, 21 nt, Human
ucugggaaggauccagcaaag

SEQ ID NO: 1359045 - RNA, 24 nt, Human
ucuucugggaaggauccagcaaag

SEQ ID NO: 1359046 - RNA, 21 nt, Human
ugaccaggcuggucucgaacu

SEQ ID NO: 1359047 - RNA, 21 nt, Human
ugccucggccucccaaagcgc

SEQ ID NO: 1359048 - RNA, 24 nt, Human
ugccucggccucccaaagcgcugg

SEQ ID NO: 1359049 - RNA, 20 nt, Human
ugggaaggauccagcaaagc

SEQ ID NO: 1359050 - RNA, 25 nt, Human
ugggaaggauccagcaaagcccacu

SEQ ID NO: 1359051 - RNA, 21 nt, Human
ugggaccacaggcaugagcca

SEQ ID NO: 1359052 - RNA, 22 nt, Human
ugggaccacaggcaugagccac

SEQ ID NO: 1359053 - RNA, 24 nt, Human
ugggaccacaggcaugagccacug

SEQ ID NO: 1359054 - RNA, 24 nt, Human
ugggaccacaggcaugagccacug

SEQ ID NO: 1359055 - RNA, 26 nt, Human
ugggaccacaggcaugagccacugca

SEQ ID NO: 1359056 - RNA, 24 nt, Human
ugggguuucaccauauugaccagg

SEQ ID NO: 1359057 - RNA, 18 nt, Human
uggugcaagacgcccucg

SEQ ID NO: 1359058 - RNA, 18 nt, Human
uuaguagagaugggguuu

SEQ ID NO: 1359059 - RNA, 22 nt, Human
uuaguagagaugggguuucacc

SEQ ID NO: 1359060 - RNA, 24 nt, Human
uuaguagagaugggguuucaccau

SEQ ID NO: 1359061 - RNA, 21 nt, Human
uuggauucgguggcuucuagg

SEQ ID NO: 1359062 - RNA, 24 nt, Human
uuuuuaguagagaugggguuucac

SEQ ID NO: 1359063 - RNA, 27 nt, Human
uuuuucagaagccagguuccugaaggu

SEQ ID NO: 1359064 - RNA, 23 nt, Human
uuuuuuaguagagaugggguuuc

SEQ ID NO: 1359065 - RNA, 24 nt, Human
uuuuuuuuuuuuuuaguagagaug

SEQ ID NO: 1359066 - RNA, 23 nt, Human
uuuuuuuuuuuuuuuuaguagag

SEQ ID NO: 1359067 - RNA, 23 nt, Human
aaaaagaaaaaaaaaauacagaa

SEQ ID NO: 1359068 - RNA, 19 nt, Human
aaaaauuaggaccaagaua

SEQ ID NO: 1359069 - RNA, 22 nt, Human
aaaagaaaaaaaaaauacagaa

SEQ ID NO: 1359070 - RNA, 18 nt, Human
aaaaugaauggggagaag

SEQ ID NO: 1359071 - RNA, 18 nt, Human
aaaauuagcugggcgugg

SEQ ID NO: 1359072 - RNA, 22 nt, Human
aaacuccgucucuacuaaaaaa

SEQ ID NO: 1359073 - RNA, 24 nt, Human
aaagugcugggauuacaggcguga

SEQ ID NO: 1359074 - RNA, 24 nt, Human
aaagugcugggauuacaggcguga

SEQ ID NO: 1359075 - RNA, 20 nt, Human
aacacgaugaaacuccgucu

SEQ ID NO: 1359076 - RNA, 21 nt, Human
aacacgaugaaacuccgucuc

SEQ ID NO: 1359077 - RNA, 20 nt, Human
aacauagugaagccccgucu

SEQ ID NO: 1359078 - RNA, 21 nt, Human
aacauagugaagccccgucuc

SEQ ID NO: 1359079 - RNA, 20 nt, Human
aacccggaggcgagaucaug

SEQ ID NO: 1359080 - RNA, 18 nt, Human
aagaugccugggauuuug

SEQ ID NO: 1359081 - RNA, 23 nt, Human
aaggaaccagaagaagugaaggc

SEQ ID NO: 1359082 - RNA, 24 nt, Human
aagugauccaccugccuuagccuc

SEQ ID NO: 1359083 - RNA, 18 nt, Human
aagugcuggaauuacagg

SEQ ID NO: 1359084 - RNA, 19 nt, Human
aagugcugggauuacaggc

SEQ ID NO: 1359085 - RNA, 19 nt, Human
aagugcugggauuacaggc

SEQ ID NO: 1359086 - RNA, 19 nt, Human
aagugcugggauuacaggc

SEQ ID NO: 1359087 - RNA, 19 nt, Human
aagugcugggauuacaggc

SEQ ID NO: 1359088 - RNA, 27 nt, Human
aauaacggccgggcacgguggcucaua

SEQ ID NO: 1359089 - RNA, 24 nt, Human
aaucacuugaacccaggaggugga

SEQ ID NO: 1359090 - RNA, 21 nt, Human
aauuacagguaagcuaccgug

SEQ ID NO: 1359091 - RNA, 19 nt, Human
aauugcuugaacccggagg

SEQ ID NO: 1359092 - RNA, 19 nt, Human
acacgaugaaacuccgucu

SEQ ID NO: 1359093 - RNA, 20 nt, Human
acagagcaagacuccgucuc

SEQ ID NO: 1359094 - RNA, 24 nt, Human
acagagcaagacuccgucucaaaa

SEQ ID NO: 1359095 - RNA, 24 nt, Human
acagagcgagacucugucucaaaa

SEQ ID NO: 1359096 - RNA, 18 nt, Human
acaggguuucacuauguu

SEQ ID NO: 1359097 - RNA, 19 nt, Human
acaggguuucacuauguug

SEQ ID NO: 1359098 - RNA, 24 nt, Human
acaggguuucacuauguugcccag

SEQ ID NO: 1359099 - RNA, 20 nt, Human
acauguuaguaugcagcugc

SEQ ID NO: 1359100 - RNA, 18 nt, Human
accagaagaagugaaggc

SEQ ID NO: 1359101 - RNA, 19 nt, Human
accggaagaaaugaaggcu

SEQ ID NO: 1359102 - RNA, 23 nt, Human
accucagccucccaaagugcugg

SEQ ID NO: 1359103 - RNA, 24 nt, Human
accucaucucuacuaaaaauauaa

SEQ ID NO: 1359104 - RNA, 18 nt, Human
acgccacugcacuccagc

SEQ ID NO: 1359105 - RNA, 21 nt, Human
acgccacugcacuccagccug

SEQ ID NO: 1359106 - RNA, 19 nt, Human
acgggguuucaccguguca

SEQ ID NO: 1359107 - RNA, 20 nt, Human
acgggguuucaccgugucag

SEQ ID NO: 1359108 - RNA, 24 nt, Human
acgggguuucaccgugucagccag

SEQ ID NO: 1359109 - RNA, 25 nt, Human
acuauguugcccaggcugguauuga

SEQ ID NO: 1359110 - RNA, 25 nt, Human
acuccgucucuacuaaaaaauacaa

SEQ ID NO: 1359111 - RNA, 22 nt, Human
acugaggcaggagaauggcgug

SEQ ID NO: 1359112 - RNA, 20 nt, Human
acugcaacauccagcuccug

SEQ ID NO: 1359113 - RNA, 24 nt, Human
acugcacuccagccugggcaacag

SEQ ID NO: 1359114 - RNA, 24 nt, Human
acugcacuccagccugggugacag

SEQ ID NO: 1359115 - RNA, 26 nt, Human
acugcacuccagccugggugacagag

SEQ ID NO: 1359116 - RNA, 23 nt, Human
agacaggguuucacuauguugcc

SEQ ID NO: 1359117 - RNA, 19 nt, Human
agaucagaaaaugcuuucc

SEQ ID NO: 1359118 - RNA, 24 nt, Human
agcacuuugggagacugaggcggg

SEQ ID NO: 1359119 - RNA, 20 nt, Human
agcacuuugggaggcuaagg

SEQ ID NO: 1359120 - RNA, 24 nt, Human
agcacuuugggaggcugaggcagg

SEQ ID NO: 1359121 - RNA, 18 nt, Human
agccaagugugguggugc

SEQ ID NO: 1359122 - RNA, 24 nt, Human
agccugaggcaggagaauugcuug

SEQ ID NO: 1359123 - RNA, 24 nt, Human
agccugggcaacagaacaagacuc

SEQ ID NO: 1359124 - RNA, 24 nt, Human
agccugggugacagagcgagacuc

SEQ ID NO: 1359125 - RNA, 21 nt, Human
agcuccuggguucaagugauu

SEQ ID NO: 1359126 - RNA, 27 nt, Human
agcuccuggguucaagugauucuccuu

SEQ ID NO: 1359127 - RNA, 19 nt, Human
agcugggcgugguggcggu

SEQ ID NO: 1359128 - RNA, 19 nt, Human
agcugggugcaguggcuca

SEQ ID NO: 1359129 - RNA, 23 nt, Human
aggaguucaagaccaguguggcc

SEQ ID NO: 1359130 - RNA, 23 nt, Human
aggaguucgagacgaaccuggcc

SEQ ID NO: 1359131 - RNA, 21 nt, Human
aggcaggagaauggcgugaac

SEQ ID NO: 1359132 - RNA, 27 nt, Human
aggcaggagaauggcgugaacccagga

SEQ ID NO: 1359133 - RNA, 24 nt, Human
aggcaggagaauugcuugaacccg

SEQ ID NO: 1359134 - RNA, 18 nt, Human
aggcagguggaucaccug

SEQ ID NO: 1359135 - RNA, 22 nt, Human
aggcagguggaucaccugaggu

SEQ ID NO: 1359136 - RNA, 26 nt, Human
aggcagguggaucaccugaggucagg

SEQ ID NO: 1359137 - RNA, 26 nt, Human
aggcagguggaucacuucaggucagg

SEQ ID NO: 1359138 - RNA, 20 nt, Human
aggcgcccaccaccacgccc

SEQ ID NO: 1359139 - RNA, 24 nt, Human
aggcgggcagaucacgaggucagg

SEQ ID NO: 1359140 - RNA, 19 nt, Human
aggcgugaaccaccgugcc

SEQ ID NO: 1359141 - RNA, 23 nt, Human
aggcgugagccacuguguccggc

SEQ ID NO: 1359142 - RNA, 24 nt, Human
aggcugaagugcaaugcugugauc

SEQ ID NO: 1359143 - RNA, 21 nt, Human
aggcugaggcagguggaucac

SEQ ID NO: 1359144 - RNA, 24 nt, Human
aggcugaggcagguggaucaccug

SEQ ID NO: 1359145 - RNA, 24 nt, Human
aggcuggggcaggagaaucacuug

SEQ ID NO: 1359146 - RNA, 23 nt, Human
aggcuuuucacauucccuucauu

SEQ ID NO: 1359147 - RNA, 24 nt, Human
agguggagcuugcagugagcugag

SEQ ID NO: 1359148 - RNA, 20 nt, Human
agguggagguggcagugaac

SEQ ID NO: 1359149 - RNA, 22 nt, Human
agguggagguggcagugaacag

SEQ ID NO: 1359150 - RNA, 22 nt, Human
agguggaucaccugaggucagg

SEQ ID NO: 1359151 - RNA, 22 nt, Human
aguagcgaugggguuuugccau

SEQ ID NO: 1359152 - RNA, 18 nt, Human
aguagcugggacuacagg

SEQ ID NO: 1359153 - RNA, 18 nt, Human
aguagcugggacuacagg

SEQ ID NO: 1359154 - RNA, 19 nt, Human
aguagcugggacuacaggc

SEQ ID NO: 1359155 - RNA, 19 nt, Human
aguagcugggacuacaggc

SEQ ID NO: 1359156 - RNA, 24 nt, Human
agugcaaugcugugaucuuggcuc

SEQ ID NO: 1359157 - RNA, 20 nt, Human
agugcaguggcgcgaucucg

SEQ ID NO: 1359158 - RNA, 23 nt, Human
agugcaguggcgcgaucucgguu

SEQ ID NO: 1359159 - RNA, 24 nt, Human
agugcaguggcgcgaucucgguuc

SEQ ID NO: 1359160 - RNA, 18 nt, Human
agugcugggauuacaggc

SEQ ID NO: 1359161 - RNA, 18 nt, Human
agugcugggauuacaggc

SEQ ID NO: 1359162 - RNA, 24 nt, Human
aguggcucaugccuguaugcacag

SEQ ID NO: 1359163 - RNA, 24 nt, Human
aguggcucaugccugucaucccag

SEQ ID NO: 1359164 - RNA, 24 nt, Human
aucacgccacugcacuccagccug

SEQ ID NO: 1359165 - RNA, 24 nt, Human
aucacuucaggucaggaguucaag

SEQ ID NO: 1359166 - RNA, 24 nt, Human
aucaugccacugcacuccagccug

SEQ ID NO: 1359167 - RNA, 19 nt, Human
augacacugaaaggaacca

SEQ ID NO: 1359168 - RNA, 24 nt, Human
augccacugcacuccagccugggc

SEQ ID NO: 1359169 - RNA, 21 nt, Human
auggggagaaggccgggugca

SEQ ID NO: 1359170 - RNA, 20 nt, Human
augggguuuugccauguuag

SEQ ID NO: 1359171 - RNA, 24 nt, Human
augggguuuugccauguuagccag

SEQ ID NO: 1359172 - RNA, 18 nt, Human
auucauaggguuuuccuc

SEQ ID NO: 1359173 - RNA, 18 nt, Human
auucuccugccucagccu

SEQ ID NO: 1359174 - RNA, 24 nt, Human
auuuuuguauuuuugguagagaca

SEQ ID NO: 1359175 - RNA, 27 nt, Human
caaaaaaaaagaaaugaacggggagag

SEQ ID NO: 1359176 - RNA, 24 nt, Human
caaagugcugggauuacaggcgug

SEQ ID NO: 1359177 - RNA, 24 nt, Human
caaagugcugggauuacaggcgug

SEQ ID NO: 1359178 - RNA, 24 nt, Human
caacauagugaagccccgucucua

SEQ ID NO: 1359179 - RNA, 21 nt, Human
caagacuccgucucaaaaaaa

SEQ ID NO: 1359180 - RNA, 21 nt, Human
caagcaauucuccugccucag

SEQ ID NO: 1359181 - RNA, 28 nt, Human
caagcaauucuccugccucagucuccca

SEQ ID NO: 1359182 - RNA, 22 nt, Human
caagugauccaccugccuuagc

SEQ ID NO: 1359183 - RNA, 20 nt, Human
caagugauucuccugccuca

SEQ ID NO: 1359184 - RNA, 22 nt, Human
caagugauucuccugccucagc

SEQ ID NO: 1359185 - RNA, 18 nt, Human
caaugccacucagaucag

SEQ ID NO: 1359186 - RNA, 22 nt, Human
cacaaagucacucugaagaaca

SEQ ID NO: 1359187 - RNA, 18 nt, Human
cacaccuguaauccuagg

SEQ ID NO: 1359188 - RNA, 27 nt, Human
cacagcacuuugggaggcugaggcagg

SEQ ID NO: 1359189 - RNA, 20 nt, Human
cacauucccuucauuuacag

SEQ ID NO: 1359190 - RNA, 24 nt, Human
caccaugccuggcuaauuuuugua

SEQ ID NO: 1359191 - RNA, 18 nt, Human
caccgugucagccaggau

SEQ ID NO: 1359192 - RNA, 23 nt, Human
caccgugucagccaggauggucu

SEQ ID NO: 1359193 - RNA, 23 nt, Human
caccugaggucaggaguucgaga

SEQ ID NO: 1359194 - RNA, 20 nt, Human
caccuguaaucccagcuacu

SEQ ID NO: 1359195 - RNA, 24 nt, Human
caccuguaaucccagcuacuuggg

SEQ ID NO: 1359196 - RNA, 21 nt, Human
caccuguagucccagcuacuc

SEQ ID NO: 1359197 - RNA, 24 nt, Human
caccuguagucccagcuacucagg

SEQ ID NO: 1359198 - RNA, 22 nt, Human
cacgccauucuccugcuucagc

SEQ ID NO: 1359199 - RNA, 18 nt, Human
cacuauguugcccaggcu

SEQ ID NO: 1359200 - RNA, 19 nt, Human
cacuauguugcccaggcug

SEQ ID NO: 1359201 - RNA, 31 nt, Human
cacuauguugcccaggcugguauugaacucc

SEQ ID NO: 1359202 - RNA, 22 nt, Human
cacuccagccugggugacagag

SEQ ID NO: 1359203 - RNA, 23 nt, Human
cacuccagccugggugacagagc

SEQ ID NO: 1359204 - RNA, 24 nt, Human
cacuccagccugggugacagagcg

SEQ ID NO: 1359205 - RNA, 21 nt, Human
cacugcaaccuccgccuccca

SEQ ID NO: 1359206 - RNA, 19 nt, Human
cacugcacuccagccuggg

SEQ ID NO: 1359207 - RNA, 19 nt, Human
cacugcacuccagccuggg

SEQ ID NO: 1359208 - RNA, 19 nt, Human
cacugcacuccagccuggg

SEQ ID NO: 1359209 - RNA, 21 nt, Human
cacugcacuccagccugggca

SEQ ID NO: 1359210 - RNA, 22 nt, Human
cacugcacuccagccugggcaa

SEQ ID NO: 1359211 - RNA, 23 nt, Human
cacugcacuccagccugggcaac

SEQ ID NO: 1359212 - RNA, 24 nt, Human
cacugcacuccagccugggcaaca

SEQ ID NO: 1359213 - RNA, 27 nt, Human
cacugcacuccagccugggcaacagaa

SEQ ID NO: 1359214 - RNA, 22 nt, Human
cacugcacuccagccuggguga

SEQ ID NO: 1359215 - RNA, 23 nt, Human
cacugcacuccagccugggugac

SEQ ID NO: 1359216 - RNA, 24 nt, Human
cacugcacuccagccugggugaca

SEQ ID NO: 1359217 - RNA, 25 nt, Human
cacugcacuccagccugggugacag

SEQ ID NO: 1359218 - RNA, 22 nt, Human
cagaacaagacucaucucaaac

SEQ ID NO: 1359219 - RNA, 22 nt, Human
cagcacuuugggagacugaggc

SEQ ID NO: 1359220 - RNA, 24 nt, Human
cagcacuuugggagacugaggcgg

SEQ ID NO: 1359221 - RNA, 24 nt, Human
cagcacuuugggaggcuaaggcag

SEQ ID NO: 1359222 - RNA, 25 nt, Human
cagcacuuugggaggcuaaggcagg

SEQ ID NO: 1359223 - RNA, 24 nt, Human
cagcacuuugggaggcugaggcag

SEQ ID NO: 1359224 - RNA, 26 nt, Human
cagcacuuugggaggcugaggcaggu

SEQ ID NO: 1359225 - RNA, 20 nt, Human
cagccuccugaguagcuggg

SEQ ID NO: 1359226 - RNA, 24 nt, Human
cagcuacuugggaggcuggggcag

SEQ ID NO: 1359227 - RNA, 19 nt, Human
caggagccugaggcaggag

SEQ ID NO: 1359228 - RNA, 29 nt, Human
caggagguggagcuugcagugacaacggu

SEQ ID NO: 1359229 - RNA, 20 nt, Human
caggagguggagguggcagu

SEQ ID NO: 1359230 - RNA, 21 nt, Human
caggcgcccaccaccacgccc

SEQ ID NO: 1359231 - RNA, 24 nt, Human
caggguuucacuauguugcccagg

SEQ ID NO: 1359232 - RNA, 24 nt, Human
cagguggaucacuucaggucagga

SEQ ID NO: 1359233 - RNA, 18 nt, Human
cagugaacagagauggaa

SEQ ID NO: 1359234 - RNA, 24 nt, Human
cauaccuguaaucccagcacuuug

SEQ ID NO: 1359235 - RNA, 24 nt, Human
caugccuguaugcacagcacuuug

SEQ ID NO: 1359236 - RNA, 21 nt, Human
cauguuagccaggcuggucuc

SEQ ID NO: 1359237 - RNA, 24 nt, Human
cauguuagccaggcuggucucgaa

SEQ ID NO: 1359238 - RNA, 22 nt, Human
ccaaagugcugggauuacaggc

SEQ ID NO: 1359239 - RNA, 22 nt, Human
ccaaagugcugggauuacaggc

SEQ ID NO: 1359240 - RNA, 22 nt, Human
ccaaagugcugggauuacaggc

SEQ ID NO: 1359241 - RNA, 22 nt, Human
ccaaagugcugggauuacaggc

SEQ ID NO: 1359242 - RNA, 24 nt, Human
ccaaagugcugggauuacaggcgu

SEQ ID NO: 1359243 - RNA, 24 nt, Human
ccaaagugcugggauuacaggcgu

SEQ ID NO: 1359244 - RNA, 20 nt, Human
ccacugcacuccagccuggg

SEQ ID NO: 1359245 - RNA, 20 nt, Human
ccacugcacuccagccuggg

SEQ ID NO: 1359246 - RNA, 20 nt, Human
ccacugcacuccagccuggg

SEQ ID NO: 1359247 - RNA, 20 nt, Human
ccacugcacuccagccuggg

SEQ ID NO: 1359248 - RNA, 21 nt, Human
ccacugcacuccagccugggc

SEQ ID NO: 1359249 - RNA, 23 nt, Human
ccacugcacuccagccugggcaa

SEQ ID NO: 1359250 - RNA, 24 nt, Human
ccacugcacuccagccugggcaac

SEQ ID NO: 1359251 - RNA, 21 nt, Human
ccacugcacuccagccugggu

SEQ ID NO: 1359252 - RNA, 21 nt, Human
ccacugcacuccagccugggu

SEQ ID NO: 1359253 - RNA, 23 nt, Human
ccacugcacuccagccuggguga

SEQ ID NO: 1359254 - RNA, 23 nt, Human
ccacugcacuccagccuggguga

SEQ ID NO: 1359255 - RNA, 24 nt, Human
ccacugcacuccagccugggugac

SEQ ID NO: 1359256 - RNA, 23 nt, Human
ccauguagcugggauuacaggca

SEQ ID NO: 1359257 - RNA, 24 nt, Human
ccauguagcugggauuacaggcau

SEQ ID NO: 1359258 - RNA, 19 nt, Human
ccauguuagccaggcuggu

SEQ ID NO: 1359259 - RNA, 22 nt, Human
ccauguuagccaggcuggucuc

SEQ ID NO: 1359260 - RNA, 23 nt, Human
ccauguuagccaggcuggucucg

SEQ ID NO: 1359261 - RNA, 21 nt, Human
cccaccaccacgcccagcuag

SEQ ID NO: 1359262 - RNA, 23 nt, Human
cccagguucaagcaauucuccug

SEQ ID NO: 1359263 - RNA, 19 nt, Human
cccauguagcugggauuac

SEQ ID NO: 1359264 - RNA, 23 nt, Human
ccccgucucuacuaaaaauacaa

SEQ ID NO: 1359265 - RNA, 23 nt, Human
cccgaguagcugggacuacaggc

SEQ ID NO: 1359266 - RNA, 24 nt, Human
cccgaguagcugggacuacaggcg

SEQ ID NO: 1359267 - RNA, 26 nt, Human
ccgcccaccucagccucccaaagugc

SEQ ID NO: 1359268 - RNA, 26 nt, Human
ccgccucccagguucaagcaauucuu

SEQ ID NO: 1359269 - RNA, 22 nt, Human
ccucagcgacagagcaagacuc

SEQ ID NO: 1359270 - RNA, 24 nt, Human
ccucccagguucaagcaauucucc

SEQ ID NO: 1359271 - RNA, 24 nt, Human
ccuccuggauucacgccauucucc

SEQ ID NO: 1359272 - RNA, 21 nt, Human
ccugaccucaagugauccacc

SEQ ID NO: 1359273 - RNA, 23 nt, Human
ccugaccucaagugauccaccug

SEQ ID NO: 1359274 - RNA, 23 nt, Human
ccugaccucaagugauccaccug

SEQ ID NO: 1359275 - RNA, 21 nt, Human
ccugaccucaggugaucugcc

SEQ ID NO: 1359276 - RNA, 23 nt, Human
ccugaccucaggugaucugccug

SEQ ID NO: 1359277 - RNA, 22 nt, Human
ccugaggucaggaguucgagac

SEQ ID NO: 1359278 - RNA, 23 nt, Human
ccugaguagcugggacuacaggc

SEQ ID NO: 1359279 - RNA, 24 nt, Human
ccugaguagcugggacuacaggca

SEQ ID NO: 1359280 - RNA, 23 nt, Human
ccugccucagccuccugaguagc

SEQ ID NO: 1359281 - RNA, 24 nt, Human
ccugccucagucucccauguagcu

SEQ ID NO: 1359282 - RNA, 22 nt, Human
ccugccuuggucucccaaagug

SEQ ID NO: 1359283 - RNA, 24 nt, Human
ccugccuuggucucccaaagugcu

SEQ ID NO: 1359284 - RNA, 24 nt, Human
ccugcuucagccucccgaguagcu

SEQ ID NO: 1359285 - RNA, 23 nt, Human
ccuggccaacauagugaagcccc

SEQ ID NO: 1359286 - RNA, 24 nt, Human
ccuggccaacauagugaagccccg

SEQ ID NO: 1359287 - RNA, 23 nt, Human
ccuggcuaacacgaugaaacucc

SEQ ID NO: 1359288 - RNA, 22 nt, Human
ccugggugacagagcgagacuc

SEQ ID NO: 1359289 - RNA, 23 nt, Human
ccuggguucaagugauucuccuc

SEQ ID NO: 1359290 - RNA, 23 nt, Human
ccuggguucaagugauucuccug

SEQ ID NO: 1359291 - RNA, 21 nt, Human
ccuguaaucccagcuacuugg

SEQ ID NO: 1359292 - RNA, 21 nt, Human
ccuguagucccagcuacucag

SEQ ID NO: 1359293 - RNA, 20 nt, Human
ccugucaucccagcacuuug

SEQ ID NO: 1359294 - RNA, 24 nt, Human
cgagacgaaccuggccaacauagu

SEQ ID NO: 1359295 - RNA, 24 nt, Human
cgagaucaugccacugcacuccag

SEQ ID NO: 1359296 - RNA, 30 nt, Human
cgaugggguuuugccauguuagccaggcuu

SEQ ID NO: 1359297 - RNA, 22 nt, Human
cgggcagaucacgaggucagga

SEQ ID NO: 1359298 - RNA, 19 nt, Human
cgugagccacuguguccgg

SEQ ID NO: 1359299 - RNA, 24 nt, Human
cgugauccgcccaccucagccucc

SEQ ID NO: 1359300 - RNA, 19 nt, Human
cuacuaaaaaauacaaaaa

SEQ ID NO: 1359301 - RNA, 23 nt, Human
cucaagugauccaccugccuuag

SEQ ID NO: 1359302 - RNA, 24 nt, Human
cucacugcaaccuccgccucccag

SEQ ID NO: 1359303 - RNA, 24 nt, Human
cucagccuccugaguagcugggac

SEQ ID NO: 1359304 - RNA, 23 nt, Human
cucagucucccauguagcuggga

SEQ ID NO: 1359305 - RNA, 24 nt, Human
cucauaccuguaaucccagcacuu

SEQ ID NO: 1359306 - RNA, 22 nt, Human
cucaucucaaacaacaacaaaa

SEQ ID NO: 1359307 - RNA, 24 nt, Human
cucaugccuguaugcacagcacuu

SEQ ID NO: 1359308 - RNA, 23 nt, Human
cucaugccugucaucccagcacu

SEQ ID NO: 1359309 - RNA, 24 nt, Human
cucaugccugucaucccagcacuu

SEQ ID NO: 1359310 - RNA, 26 nt, Human
cuccugaccucaggugaucugccugc

SEQ ID NO: 1359311 - RNA, 22 nt, Human
cuccugaccucgugauccgccc

SEQ ID NO: 1359312 - RNA, 22 nt, Human
cuccugccucagccuccugagu

SEQ ID NO: 1359313 - RNA, 21 nt, Human
cuccuggauucacgccauucu

SEQ ID NO: 1359314 - RNA, 20 nt, Human
cuccuggguucaagugauuc

SEQ ID NO: 1359315 - RNA, 21 nt, Human
cuccuggguucaagugauucu

SEQ ID NO: 1359316 - RNA, 25 nt, Human
cugaggcaggagaauggcgugaacc

SEQ ID NO: 1359317 - RNA, 23 nt, Human
cugcaaccuccgccucccagguu

SEQ ID NO: 1359318 - RNA, 24 nt, Human
cugcaaccuccgccucccagguuc

SEQ ID NO: 1359319 - RNA, 19 nt, Human
cugcaagcucugccuccug

SEQ ID NO: 1359320 - RNA, 23 nt, Human
cugccucagccuccugaguagcu

SEQ ID NO: 1359321 - RNA, 24 nt, Human
cugccuuggucucccaaagugcug

SEQ ID NO: 1359322 - RNA, 18 nt, Human
cuggcuaacacgaugaaa

SEQ ID NO: 1359323 - RNA, 21 nt, Human
cuguaaucccagcuacuuggg

SEQ ID NO: 1359324 - RNA, 23 nt, Human
cuucaggucaggaguucaagacc

SEQ ID NO: 1359325 - RNA, 21 nt, Human
cuugaacccaggagguggagg

SEQ ID NO: 1359326 - RNA, 19 nt, Human
cuugcagugagcugagauc

SEQ ID NO: 1359327 - RNA, 20 nt, Human
cuuuuuuuuucagauggagu

SEQ ID NO: 1359328 - RNA, 20 nt, Human
gaaaaugaauggggagaagg

SEQ ID NO: 1359329 - RNA, 19 nt, Human
gaaacuccgucucuacuaa

SEQ ID NO: 1359330 - RNA, 22 nt, Human
gaacaaaaaauuaggaccaaga

SEQ ID NO: 1359331 - RNA, 19 nt, Human
gaacaagacucaucucaaa

SEQ ID NO: 1359332 - RNA, 19 nt, Human
gaagaagugaaggcuuugc

SEQ ID NO: 1359333 - RNA, 19 nt, Human
gaagccccgucucuacuaa

SEQ ID NO: 1359334 - RNA, 24 nt, Human
gaaggccgggugcaguggcucaug

SEQ ID NO: 1359335 - RNA, 19 nt, Human
gaagugcuggaauuacagg

SEQ ID NO: 1359336 - RNA, 24 nt, Human
gacagagcaagacuccgucucaaa

SEQ ID NO: 1359337 - RNA, 24 nt, Human
gacagagcgagacucugucucaaa

SEQ ID NO: 1359338 - RNA, 24 nt, Human
gaccucaagugauccaccugccuu

SEQ ID NO: 1359339 - RNA, 24 nt, Human
gaccucaggugaucugccugccuu

SEQ ID NO: 1359340 - RNA, 22 nt, Human
gaccucgugauccgcccaccuc

SEQ ID NO: 1359341 - RNA, 24 nt, Human
gaccucgugauccgcccaccucag

SEQ ID NO: 1359342 - RNA, 19 nt, Human
gacucaucucaaacaacaa

SEQ ID NO: 1359343 - RNA, 19 nt, Human
gacucugucucaaaaagaa

SEQ ID NO: 1359344 - RNA, 23 nt, Human
gagaaucacuugaacccaggagg

SEQ ID NO: 1359345 - RNA, 18 nt, Human
gagaccauccuggcuaac

SEQ ID NO: 1359346 - RNA, 24 nt, Human
gagacgggguuucaccgugucagc

SEQ ID NO: 1359347 - RNA, 23 nt, Human
gagaucacgccacugcacuccag

SEQ ID NO: 1359348 - RNA, 18 nt, Human
gaggcuggggcaggagaa

SEQ ID NO: 1359349 - RNA, 24 nt, Human
gaguagcugggacuacaggcacgc

SEQ ID NO: 1359350 - RNA, 25 nt, Human
gaguagcugggacuacaggcgccca

SEQ ID NO: 1359351 - RNA, 24 nt, Human
gaucaccugaggucaggaguucga

SEQ ID NO: 1359352 - RNA, 18 nt, Human
gaucacuucaggucagga

SEQ ID NO: 1359353 - RNA, 24 nt, Human
gaucacuucaggucaggaguucaa

SEQ ID NO: 1359354 - RNA, 18 nt, Human
gauuacaggcaugugcca

SEQ ID NO: 1359355 - RNA, 22 nt, Human
gauuacaggcaugugccaccau

SEQ ID NO: 1359356 - RNA, 20 nt, Human
gauuacaggcgugaaccacc

SEQ ID NO: 1359357 - RNA, 21 nt, Human
gauuacaggcgugaaccaccg

SEQ ID NO: 1359358 - RNA, 18 nt, Human
gauuacaggcgugagcca

SEQ ID NO: 1359359 - RNA, 21 nt, Human
gauuacaggcgugagccacug

SEQ ID NO: 1359360 - RNA, 24 nt, Human
gauuacaggcgugagccacugugu

SEQ ID NO: 1359361 - RNA, 21 nt, Human
gauucuccugccucagccucc

SEQ ID NO: 1359362 - RNA, 22 nt, Human
gcaaccuccgccucccagguuc

SEQ ID NO: 1359363 - RNA, 24 nt, Human
gcacuccagccugggugacagagc

SEQ ID NO: 1359364 - RNA, 22 nt, Human
gcaggagaaucacuugaaccca

SEQ ID NO: 1359365 - RNA, 22 nt, Human
gcaggagaauggcgugaaccca

SEQ ID NO: 1359366 - RNA, 21 nt, Human
gccaacauagugaagccccgu

SEQ ID NO: 1359367 - RNA, 24 nt, Human
gccaacauagugaagccccgucuc

SEQ ID NO: 1359368 - RNA, 19 nt, Human
gccacugcacuccagccug

SEQ ID NO: 1359369 - RNA, 22 nt, Human
gccacugcacuccagccugggc

SEQ ID NO: 1359370 - RNA, 24 nt, Human
gccacugcacuccagccugggcaa

SEQ ID NO: 1359371 - RNA, 24 nt, Human
gccacugcacuccagccuggguga

SEQ ID NO: 1359372 - RNA, 18 nt, Human
gccacugugggauauggc

SEQ ID NO: 1359373 - RNA, 20 nt, Human
gccauguuagccaggcuggu

SEQ ID NO: 1359374 - RNA, 24 nt, Human
gccucagucucccauguagcuggg

SEQ ID NO: 1359375 - RNA, 22 nt, Human
gccuuggucucccaaagugcug

SEQ ID NO: 1359376 - RNA, 24 nt, Human
gccuuggucucccaaagugcuggg

SEQ ID NO: 1359377 - RNA, 19 nt, Human
gcgagaucaugccacugca

SEQ ID NO: 1359378 - RNA, 20 nt, Human
gcggucaccuguaaucccag

SEQ ID NO: 1359379 - RNA, 24 nt, Human
gcuccuggguucaagugauucucc

SEQ ID NO: 1359380 - RNA, 20 nt, Human
gcugagaucacgccacugca

SEQ ID NO: 1359381 - RNA, 23 nt, Human
gcugguauugaacuccugaccuc

SEQ ID NO: 1359382 - RNA, 23 nt, Human
gcuggucucgaacuccugaccuc

SEQ ID NO: 1359383 - RNA, 19 nt, Human
gcuuuuuuuuucagaugga

SEQ ID NO: 1359384 - RNA, 18 nt, Human
ggagcuugcagugagcug

SEQ ID NO: 1359385 - RNA, 23 nt, Human
ggagcuugcagugagcugagauc

SEQ ID NO: 1359386 - RNA, 24 nt, Human
ggagcuugcagugagcugagauca

SEQ ID NO: 1359387 - RNA, 23 nt, Human
ggagcuugcagugagcuggcuag

SEQ ID NO: 1359388 - RNA, 24 nt, Human
ggagguggcagugaacagagaugg

SEQ ID NO: 1359389 - RNA, 18 nt, Human
ggagucucacucugcugg

SEQ ID NO: 1359390 - RNA, 22 nt, Human
ggaucaccugaggucaggaguu

SEQ ID NO: 1359391 - RNA, 24 nt, Human
ggauggucuugaucuccugaccuc

SEQ ID NO: 1359392 - RNA, 24 nt, Human
ggauuacaggcaugugccaccaug

SEQ ID NO: 1359393 - RNA, 20 nt, Human
ggcacgguggcucauaccug

SEQ ID NO: 1359394 - RNA, 23 nt, Human
ggcacgguggcucauaccuguaa

SEQ ID NO: 1359395 - RNA, 22 nt, Human
ggcaggagaaucacuugaaccc

SEQ ID NO: 1359396 - RNA, 23 nt, Human
ggccgggugcaguggcucaugcc

SEQ ID NO: 1359397 - RNA, 21 nt, Human
ggcggucaccuguaaucccag

SEQ ID NO: 1359398 - RNA, 23 nt, Human
ggcgugguggcggucaccuguaa

SEQ ID NO: 1359399 - RNA, 24 nt, Human
ggcugguauugaacuccugaccuc

SEQ ID NO: 1359400 - RNA, 24 nt, Human
ggcuggucucgaacuccugaccuc

SEQ ID NO: 1359401 - RNA, 22 nt, Human
gggcagaucacgaggucaggag

SEQ ID NO: 1359402 - RNA, 25 nt, Human
gggcagaucacgaggucaggagauu

SEQ ID NO: 1359403 - RNA, 18 nt, Human
gggcaggagaaucacuug

SEQ ID NO: 1359404 - RNA, 23 nt, Human
gggguuucaccgugucagccagg

SEQ ID NO: 1359405 - RNA, 22 nt, Human
gggguuuugccauguuagccag

SEQ ID NO: 1359406 - RNA, 23 nt, Human
gggugcaguggcucaugccugua

SEQ ID NO: 1359407 - RNA, 22 nt, Human
ggguuucaccgugucagccagg

SEQ ID NO: 1359408 - RNA, 20 nt, Human
gguacaguggcguaaucucg

SEQ ID NO: 1359409 - RNA, 19 nt, Human
ggucucgaacuccugaccu

SEQ ID NO: 1359410 - RNA, 21 nt, Human
ggugcaguggcucaugccugu

SEQ ID NO: 1359411 - RNA, 24 nt, Human
gguggcaggcaccuguagucccag

SEQ ID NO: 1359412 - RNA, 24 nt, Human
gguggcggucaccuguaaucccag

SEQ ID NO: 1359413 - RNA, 23 nt, Human
gguggcucauaccuguaauccca

SEQ ID NO: 1359414 - RNA, 24 nt, Human
gguggcucauaccuguaaucccag

SEQ ID NO: 1359415 - RNA, 24 nt, Human
gguggugcacaccuguaauccuag

SEQ ID NO: 1359416 - RNA, 22 nt, Human
ggugugguggcaggcaccugua

SEQ ID NO: 1359417 - RNA, 24 nt, Human
guaauauugacucacaauguccaa

SEQ ID NO: 1359418 - RNA, 18 nt, Human
guagagacaggguuucac

SEQ ID NO: 1359419 - RNA, 22 nt, Human
guagagacaggguuucacuaug

SEQ ID NO: 1359420 - RNA, 23 nt, Human
guagagacgggguuucaccgugu

SEQ ID NO: 1359421 - RNA, 23 nt, Human
guagcgaugggguuuugccaugu

SEQ ID NO: 1359422 - RNA, 22 nt, Human
guagcugggauuacaggcaugu

SEQ ID NO: 1359423 - RNA, 24 nt, Human
gugacagagcgagacucugucuca

SEQ ID NO: 1359424 - RNA, 22 nt, Human
gugauccaccugccuuagccuc

SEQ ID NO: 1359425 - RNA, 24 nt, Human
gugauccgcccaccucagccuccc

SEQ ID NO: 1359426 - RNA, 24 nt, Human
gugauucuccugccucagccuccu

SEQ ID NO: 1359427 - RNA, 20 nt, Human
guggagcuugcagugagcug

SEQ ID NO: 1359428 - RNA, 21 nt, Human
guggaucaccugaggucagga

SEQ ID NO: 1359429 - RNA, 23 nt, Human
guggcucauaccuguaaucccag

SEQ ID NO: 1359430 - RNA, 21 nt, Human
gugggacaacugaaugcuucc

SEQ ID NO: 1359431 - RNA, 24 nt, Human
guuucacuauguugcccaggcugg

SEQ ID NO: 1359432 - RNA, 22 nt, Human
uaacacgaugaaacuccgucuc

SEQ ID NO: 1359433 - RNA, 24 nt, Human
uaacacgaugaaacuccgucucua

SEQ ID NO: 1359434 - RNA, 25 nt, Human
uaacagcugggugcaguggcucaug

SEQ ID NO: 1359435 - RNA, 24 nt, Human
uaaggcagguggaucacuucaggu

SEQ ID NO: 1359436 - RNA, 26 nt, Human
uaaggcagguggaucacuucagguca

SEQ ID NO: 1359437 - RNA, 20 nt, Human
uaaguccuuuugugaauuau

SEQ ID NO: 1359438 - RNA, 23 nt, Human
uaauccuaggaaucuuuuuccuc

SEQ ID NO: 1359439 - RNA, 24 nt, Human
uaauuuuuguauuuuugguagaga

SEQ ID NO: 1359440 - RNA, 20 nt, Human
uaauuuuuuguauuuuuaga

SEQ ID NO: 1359441 - RNA, 22 nt, Human
uaauuuuuuguauuuuuaguag

SEQ ID NO: 1359442 - RNA, 24 nt, Human
uacaaaaggaucugauacaaugga

SEQ ID NO: 1359443 - RNA, 22 nt, Human
uacaggcacgcgccaccaugcc

SEQ ID NO: 1359444 - RNA, 24 nt, Human
uacaggcaugugccaccaugccca

SEQ ID NO: 1359445 - RNA, 23 nt, Human
uacaggcgugagccacugugucc

SEQ ID NO: 1359446 - RNA, 23 nt, Human
uacaggcgugagccacugugucc

SEQ ID NO: 1359447 - RNA, 21 nt, Human
uaccauguggguuucaaugcc

SEQ ID NO: 1359448 - RNA, 23 nt, Human
uaccuguaaucccagcacuuugg

SEQ ID NO: 1359449 - RNA, 24 nt, Human
uaccuguaaucccagcacuuuggg

SEQ ID NO: 1359450 - RNA, 20 nt, Human
uacuguuucucuccagugug

SEQ ID NO: 1359451 - RNA, 22 nt, Human
uagagacaggguuucacuaugu

SEQ ID NO: 1359452 - RNA, 18 nt, Human
uagcaaaucugaaggcuu

SEQ ID NO: 1359453 - RNA, 24 nt, Human
uagccaggcuggucucgaacuccu

SEQ ID NO: 1359454 - RNA, 19 nt, Human
uagccucuggaagugcugg

SEQ ID NO: 1359455 - RNA, 22 nt, Human
uagcgaugggguuuugccaugu

SEQ ID NO: 1359456 - RNA, 25 nt, Human
uaggaccaagauaaauguucuaagu

SEQ ID NO: 1359457 - RNA, 21 nt, Human
uaguagagacgggguuucacc

SEQ ID NO: 1359458 - RNA, 24 nt, Human
uaguagagacgggguuucaccgug

SEQ ID NO: 1359459 - RNA, 26 nt, Human
uaguagagacgggguuucaccguugg

SEQ ID NO: 1359460 - RNA, 24 nt, Human
uaguagcgaugggguuuugccaug

SEQ ID NO: 1359461 - RNA, 18 nt, Human
uauguugcccaggcuggu

SEQ ID NO: 1359462 - RNA, 20 nt, Human
uauguugcccaggcugguau

SEQ ID NO: 1359463 - RNA, 24 nt, Human
uauguugcccaggcugguauugaa

SEQ ID NO: 1359464 - RNA, 21 nt, Human
ucaagugauccaccugccuua

SEQ ID NO: 1359465 - RNA, 19 nt, Human
ucaagugauucuccugccu

SEQ ID NO: 1359466 - RNA, 24 nt, Human
ucaccgugucagccaggauggucu

SEQ ID NO: 1359467 - RNA, 20 nt, Human
ucaccugaggucaggaguuc

SEQ ID NO: 1359468 - RNA, 23 nt, Human
ucaccuguaaucccagcuacuug

SEQ ID NO: 1359469 - RNA, 24 nt, Human
ucacgaggucaggagauugagacc

SEQ ID NO: 1359470 - RNA, 23 nt, Human
ucacgccacugcacuccagccug

SEQ ID NO: 1359471 - RNA, 22 nt, Human
ucacuauguugcccaggcuggu

SEQ ID NO: 1359472 - RNA, 23 nt, Human
ucacucuuguugcccaggcugaa

SEQ ID NO: 1359473 - RNA, 24 nt, Human
ucacugcaacauccagcuccuggg

SEQ ID NO: 1359474 - RNA, 19 nt, Human
ucacugcaaccuccgccuc

SEQ ID NO: 1359475 - RNA, 24 nt, Human
ucacugcaaccuccgccucccagg

SEQ ID NO: 1359476 - RNA, 25 nt, Human
ucacugcaaccuccgccucccaggu

SEQ ID NO: 1359477 - RNA, 26 nt, Human
ucacugcaaccuccgccucccagguu

SEQ ID NO: 1359478 - RNA, 18 nt, Human
ucacugcaagcucugccu

SEQ ID NO: 1359479 - RNA, 19 nt, Human
ucacugcaagcucugccuc

SEQ ID NO: 1359480 - RNA, 23 nt, Human
ucacugcaagcucugccuccugg

SEQ ID NO: 1359481 - RNA, 24 nt, Human
ucacuucaggucaggaguucaaga

SEQ ID NO: 1359482 - RNA, 23 nt, Human
ucagccgggugugguggcaggca

SEQ ID NO: 1359483 - RNA, 18 nt, Human
ucagccucccaaagugcu

SEQ ID NO: 1359484 - RNA, 23 nt, Human
ucagccucccgaguagcugggac

SEQ ID NO: 1359485 - RNA, 23 nt, Human
ucagccuccugaguagcugggac

SEQ ID NO: 1359486 - RNA, 22 nt, Human
ucauacuguuucucuccagugu

SEQ ID NO: 1359487 - RNA, 23 nt, Human
ucaugccacugcacuccagccug

SEQ ID NO: 1359488 - RNA, 23 nt, Human
uccagccugggugacagagcgag

SEQ ID NO: 1359489 - RNA, 24 nt, Human
uccagccugggugacagagcgaga

SEQ ID NO: 1359490 - RNA, 24 nt, Human
ucccaaagugcugggauuacaggc

SEQ ID NO: 1359491 - RNA, 24 nt, Human
ucccaaagugcugggauuacaggc

SEQ ID NO: 1359492 - RNA, 21 nt, Human
ucccagguucaagcaauucuc

SEQ ID NO: 1359493 - RNA, 24 nt, Human
ucccagguucaagcaauucuccug

SEQ ID NO: 1359494 - RNA, 24 nt, Human
ucccauguagcugggauuacaggc

SEQ ID NO: 1359495 - RNA, 24 nt, Human
ucccgaguagcugggacuacaggc

SEQ ID NO: 1359496 - RNA, 21 nt, Human
uccgcccaccucagccuccca

SEQ ID NO: 1359497 - RNA, 24 nt, Human
uccugaguagcugggacuacaggc

SEQ ID NO: 1359498 - RNA, 24 nt, Human
uccuggauucacgccauucuccug

SEQ ID NO: 1359499 - RNA, 21 nt, Human
uccuggguucaagugauucuc

SEQ ID NO: 1359500 - RNA, 24 nt, Human
uccuggguucaagugauucuccug

SEQ ID NO: 1359501 - RNA, 19 nt, Human
ucucagaggguuucucucu

SEQ ID NO: 1359502 - RNA, 23 nt, Human
ucucgaacuccugaccucaggug

SEQ ID NO: 1359503 - RNA, 21 nt, Human
ucucuacuaaaaauacaaaaa

SEQ ID NO: 1359504 - RNA, 21 nt, Human
ucucuacuaaaaauauaaaaa

SEQ ID NO: 1359505 - RNA, 24 nt, Human
ucuggaagugcuggaauuacaggu

SEQ ID NO: 1359506 - RNA, 20 nt, Human
ucugucgccgcuggagugca

SEQ ID NO: 1359507 - RNA, 22 nt, Human
ucugucucaaaaagaaaaaaaa

SEQ ID NO: 1359508 - RNA, 23 nt, Human
ucugucucaaaaagaaaaaaaaa

SEQ ID NO: 1359509 - RNA, 20 nt, Human
ucuuccuguuugaaaggaag

SEQ ID NO: 1359510 - RNA, 18 nt, Human
ucuugcucugucgccgcc

SEQ ID NO: 1359511 - RNA, 20 nt, Human
ucuugcucugucgccgcugg

SEQ ID NO: 1359512 - RNA, 21 nt, Human
ucuugcucugucgccgcugga

SEQ ID NO: 1359513 - RNA, 20 nt, Human
ugaacagagauggaaccacu

SEQ ID NO: 1359514 - RNA, 23 nt, Human
ugaacccaggagguggagguggc

SEQ ID NO: 1359515 - RNA, 21 nt, Human
ugaagaacaugagauaacuuu

SEQ ID NO: 1359516 - RNA, 19 nt, Human
ugaagugcaaugcugugau

SEQ ID NO: 1359517 - RNA, 23 nt, Human
ugaagugcaaugcugugaucuug

SEQ ID NO: 1359518 - RNA, 24 nt, Human
ugaagugcaaugcugugaucuugg

SEQ ID NO: 1359519 - RNA, 24 nt, Human
ugaccucaagugauccaccugccu

SEQ ID NO: 1359520 - RNA, 18 nt, Human
ugaccucaggugaucugc

SEQ ID NO: 1359521 - RNA, 20 nt, Human
ugaccucaggugaucugccu

SEQ ID NO: 1359522 - RNA, 24 nt, Human
ugaccucaggugaucugccugccu

SEQ ID NO: 1359523 - RNA, 22 nt, Human
ugagcugagaucacgccacugc

SEQ ID NO: 1359524 - RNA, 24 nt, Human
ugaggcaggagaauggcgugaacc

SEQ ID NO: 1359525 - RNA, 25 nt, Human
ugaggcaggagaauggcgugaaccc

SEQ ID NO: 1359526 - RNA, 24 nt, Human
ugaggcaggagaauugcuugaacc

SEQ ID NO: 1359527 - RNA, 25 nt, Human
ugaggcaggagaauugcuugaaccc

SEQ ID NO: 1359528 - RNA, 20 nt, Human
ugaggcagguggaucaccug

SEQ ID NO: 1359529 - RNA, 24 nt, Human
ugaggcagguggaucaccugaggu

SEQ ID NO: 1359530 - RNA, 26 nt, Human
ugaggcagguggaucaccugagguca

SEQ ID NO: 1359531 - RNA, 24 nt, Human
ugaggcgggcagaucacgagguca

SEQ ID NO: 1359532 - RNA, 22 nt, Human
ugaguccuuucaugcaccagaa

SEQ ID NO: 1359533 - RNA, 24 nt, Human
ugauccgcccaccucagccuccca

SEQ ID NO: 1359534 - RNA, 23 nt, Human
ugcaaugcugugaucuuggcucc

SEQ ID NO: 1359535 - RNA, 21 nt, Human
ugcaucugaaguugaguggca

SEQ ID NO: 1359536 - RNA, 18 nt, Human
ugccacucagaucagaaa

SEQ ID NO: 1359537 - RNA, 24 nt, Human
ugccacugcacuccagccugggca

SEQ ID NO: 1359538 - RNA, 24 nt, Human
ugccauguuagccaggcuggucuc

SEQ ID NO: 1359539 - RNA, 27 nt, Human
ugccauguuagccaggcuggucucgaa

SEQ ID NO: 1359540 - RNA, 24 nt, Human
ugcccaggcugguauugaacuccu

SEQ ID NO: 1359541 - RNA, 24 nt, Human
ugccucagccuccugaguagcugg

SEQ ID NO: 1359542 - RNA, 24 nt, Human
ugccucagucucccauguagcugg

SEQ ID NO: 1359543 - RNA, 19 nt, Human
ugccuccuggauucacgcc

SEQ ID NO: 1359544 - RNA, 24 nt, Human
ugccugucaucccagcacuuuggg

SEQ ID NO: 1359545 - RNA, 19 nt, Human
ugccuuggucucccaaagu

SEQ ID NO: 1359546 - RNA, 18 nt, Human
ugcuggaauuacagguaa

SEQ ID NO: 1359547 - RNA, 23 nt, Human
ugcugggauuacaggcgugaacc

SEQ ID NO: 1359548 - RNA, 24 nt, Human
ugcugggauuacaggcgugagcca

SEQ ID NO: 1359549 - RNA, 24 nt, Human
ugcuucagccucccgaguagcugg

SEQ ID NO: 1359550 - RNA, 22 nt, Human
uggaagugcuggaauuacaggu

SEQ ID NO: 1359551 - RNA, 20 nt, Human
uggaauuacagguaagcuac

SEQ ID NO: 1359552 - RNA, 21 nt, Human
uggaauuacagguaagcuacc

SEQ ID NO: 1359553 - RNA, 21 nt, Human
uggaauuacagguaagcuacc

SEQ ID NO: 1359554 - RNA, 22 nt, Human
uggaauuacagguaagcuaccg

SEQ ID NO: 1359555 - RNA, 23 nt, Human
uggagugcaguggcgcgaucucg

SEQ ID NO: 1359556 - RNA, 24 nt, Human
uggagugcaguggcgcgaucucgg

SEQ ID NO: 1359557 - RNA, 24 nt, Human
uggaucaccugaggucaggaguuc

SEQ ID NO: 1359558 - RNA, 27 nt, Human
uggaucaccugaggucaggaguucgag

SEQ ID NO: 1359559 - RNA, 24 nt, Human
uggaucacuucaggucaggaguuc

SEQ ID NO: 1359560 - RNA, 20 nt, Human
uggauucacgccauucuccu

SEQ ID NO: 1359561 - RNA, 19 nt, Human
uggcacugagauauuuuau

SEQ ID NO: 1359562 - RNA, 19 nt, Human
uggcaguggaagaaaugaa

SEQ ID NO: 1359563 - RNA, 19 nt, Human
uggcguaaucucgggucac

SEQ ID NO: 1359564 - RNA, 19 nt, Human
uggcuacaaaaggaucuga

SEQ ID NO: 1359565 - RNA, 21 nt, Human
uggcucauaccuguaauccca

SEQ ID NO: 1359566 - RNA, 24 nt, Human
uggcucauaccuguaaucccagca

SEQ ID NO: 1359567 - RNA, 19 nt, Human
uggcucaugccuguaugcc

SEQ ID NO: 1359568 - RNA, 21 nt, Human
uggcucaugccugucauccca

SEQ ID NO: 1359569 - RNA, 24 nt, Human
uggcucaugccugucaucccagca

SEQ ID NO: 1359570 - RNA, 21 nt, Human
ugggacuacaggcacgcgcca

SEQ ID NO: 1359571 - RNA, 22 nt, Human
ugggacuacaggcacgcgccac

SEQ ID NO: 1359572 - RNA, 24 nt, Human
ugggacuacaggcacgcgccacca

SEQ ID NO: 1359573 - RNA, 21 nt, Human
ugggacuacaggcgcccacca

SEQ ID NO: 1359574 - RNA, 24 nt, Human
ugggacuacaggcgcccaccacca

SEQ ID NO: 1359575 - RNA, 24 nt, Human
ugggagacugaggcgggcagauca

SEQ ID NO: 1359576 - RNA, 18 nt, Human
ugggaggcuaaggcaggu

SEQ ID NO: 1359577 - RNA, 24 nt, Human
ugggaggcuaaggcagguggauca

SEQ ID NO: 1359578 - RNA, 24 nt, Human
ugggaggcugaggcagguggauca

SEQ ID NO: 1359579 - RNA, 24 nt, Human
ugggaggcuggggcaggagaauca

SEQ ID NO: 1359580 - RNA, 21 nt, Human
ugggauauggcacaaagucac

SEQ ID NO: 1359581 - RNA, 18 nt, Human
ugggauuacaggcaugug

SEQ ID NO: 1359582 - RNA, 21 nt, Human
ugggauuacaggcaugugcca

SEQ ID NO: 1359583 - RNA, 22 nt, Human
ugggauuacaggcaugugccac

SEQ ID NO: 1359584 - RNA, 24 nt, Human
ugggauuacaggcaugugccacca

SEQ ID NO: 1359585 - RNA, 19 nt, Human
ugggauuacaggcgugaac

SEQ ID NO: 1359586 - RNA, 21 nt, Human
ugggauuacaggcgugaacca

SEQ ID NO: 1359587 - RNA, 22 nt, Human
ugggauuacaggcgugaaccac

SEQ ID NO: 1359588 - RNA, 23 nt, Human
ugggauuacaggcgugaaccacc

SEQ ID NO: 1359589 - RNA, 23 nt, Human
ugggauuacaggcgugaaccacc

SEQ ID NO: 1359590 - RNA, 24 nt, Human
ugggauuacaggcgugaaccaccg

SEQ ID NO: 1359591 - RNA, 21 nt, Human
ugggauuacaggcgugagcca

SEQ ID NO: 1359592 - RNA, 22 nt, Human
ugggauuacaggcgugagccac

SEQ ID NO: 1359593 - RNA, 22 nt, Human
ugggauuacaggcgugagccac

SEQ ID NO: 1359594 - RNA, 22 nt, Human
ugggauuacaggcgugagccac

SEQ ID NO: 1359595 - RNA, 24 nt, Human
ugggauuacaggcgugagccacug

SEQ ID NO: 1359596 - RNA, 26 nt, Human
ugggauuacaggcgugagccacugug

SEQ ID NO: 1359597 - RNA, 23 nt, Human
uggggagaaggccgggugcagug

SEQ ID NO: 1359598 - RNA, 20 nt, Human
uggggcaggagaaucacuug

SEQ ID NO: 1359599 - RNA, 24 nt, Human
uggggcaggagaaucacuugaacc

SEQ ID NO: 1359600 - RNA, 24 nt, Human
ugggguacaguggcguaaucucgg

SEQ ID NO: 1359601 - RNA, 24 nt, Human
ugggguuuugccauguuagccagg

SEQ ID NO: 1359602 - RNA, 23 nt, Human
uggguucaagugauucuccugcc

SEQ ID NO: 1359603 - RNA, 24 nt, Human
uggguucaagugauucuccugccu

SEQ ID NO: 1359604 - RNA, 24 nt, Human
ugguagagacaggguuucacuaug

SEQ ID NO: 1359605 - RNA, 24 nt, Human
ugguggcaggcaccuguaguccca

SEQ ID NO: 1359606 - RNA, 24 nt, Human
ugguggcggucaccuguaauccca

SEQ ID NO: 1359607 - RNA, 22 nt, Human
ugguggugcacaccuguaaucc

SEQ ID NO: 1359608 - RNA, 19 nt, Human
uguagcugggauuacaggc

SEQ ID NO: 1359609 - RNA, 24 nt, Human
uguagcugggauuacaggcaugug

SEQ ID NO: 1359610 - RNA, 21 nt, Human
uguauuuuuaguagcgauggg

SEQ ID NO: 1359611 - RNA, 21 nt, Human
ugucagccaggauggucuuga

SEQ ID NO: 1359612 - RNA, 24 nt, Human
ugucgccgcuggagugcaguggcg

SEQ ID NO: 1359613 - RNA, 23 nt, Human
ugugguggcaggcaccuguaguc

SEQ ID NO: 1359614 - RNA, 24 nt, Human
uguucucagccucagcgacagagc

SEQ ID NO: 1359615 - RNA, 18 nt, Human
uuagccucuggaagugcu

SEQ ID NO: 1359616 - RNA, 18 nt, Human
uuagcugggcgugguggc

SEQ ID NO: 1359617 - RNA, 18 nt, Human
uuaguagagacgggguuu

SEQ ID NO: 1359618 - RNA, 22 nt, Human
uuaguagagacgggguuucacc

SEQ ID NO: 1359619 - RNA, 24 nt, Human
uuaguagagacgggguuucaccgu

SEQ ID NO: 1359620 - RNA, 18 nt, Human
uuaguagcgaugggguuu

SEQ ID NO: 1359621 - RNA, 18 nt, Human
uuaguagcgaugggguuu

SEQ ID NO: 1359622 - RNA, 24 nt, Human
uuaguagcgaugggguuuugccau

SEQ ID NO: 1359623 - RNA, 21 nt, Human
uucaagcaauucuccugccuc

SEQ ID NO: 1359624 - RNA, 25 nt, Human
uucaagcaauucuccugccucaguc

SEQ ID NO: 1359625 - RNA, 21 nt, Human
uucaagugauucuccugccuc

SEQ ID NO: 1359626 - RNA, 23 nt, Human
uucaagugauucuccugccucag

SEQ ID NO: 1359627 - RNA, 24 nt, Human
uucaagugauucuccugccucagc

SEQ ID NO: 1359628 - RNA, 24 nt, Human
uucacucuuguugcccaggcugaa

SEQ ID NO: 1359629 - RNA, 24 nt, Human
uucagccucccgaguagcugggac

SEQ ID NO: 1359630 - RNA, 24 nt, Human
uucaugauacugaaaugcaguaga

SEQ ID NO: 1359631 - RNA, 18 nt, Human
uugcagugagcugagauc

SEQ ID NO: 1359632 - RNA, 20 nt, Human
uugcagugagcugagaucac

SEQ ID NO: 1359633 - RNA, 21 nt, Human
uugcagugagcugagaucacg

SEQ ID NO: 1359634 - RNA, 24 nt, Human
uugccauguuagccaggcuggucu

SEQ ID NO: 1359635 - RNA, 18 nt, Human
uugcccaggcugaagugc

SEQ ID NO: 1359636 - RNA, 25 nt, Human
uugggagacugaggcgggcagauca

SEQ ID NO: 1359637 - RNA, 25 nt, Human
uugggaggcuaaggcagguggauca

SEQ ID NO: 1359638 - RNA, 25 nt, Human
uugggaggcugaggcagguggauca

SEQ ID NO: 1359639 - RNA, 24 nt, Human
uugguagagacaggguuucacuau

SEQ ID NO: 1359640 - RNA, 23 nt, Human
uuguugcccaggcugaagugcaa

SEQ ID NO: 1359641 - RNA, 23 nt, Human
uuucacuauguugcccaggcugg

SEQ ID NO: 1359642 - RNA, 24 nt, Human
uuucacucuuguugcccaggcuga

SEQ ID NO: 1359643 - RNA, 18 nt, Human
uuucaugguacugaaugg

SEQ ID NO: 1359644 - RNA, 19 nt, Human
uuuuccucaggagccugag

SEQ ID NO: 1359645 - RNA, 23 nt, Human
uuuugccauguuagccaggcugg

SEQ ID NO: 1359646 - RNA, 24 nt, Human
uuuuuaguagagacgggguuucac

SEQ ID NO: 1359647 - RNA, 21 nt, Human
uuuuuaguagcgaugggguuu

SEQ ID NO: 1359648 - RNA, 21 nt, Human
uuuuuaguagcgaugggguuu

SEQ ID NO: 1359649 - RNA, 22 nt, Human
uuuuugguagagacaggguuuc

SEQ ID NO: 1359650 - RNA, 24 nt, Human
uuuuugguagagacaggguuucac

SEQ ID NO: 1359651 - RNA, 20 nt, Human
uuuuuguauuuuugguagag

SEQ ID NO: 1359652 - RNA, 23 nt, Human
uuuuuuaguagagacgggguuuc

SEQ ID NO: 1359653 - RNA, 24 nt, Human
uuuuuuguauuuuuaguagcgaug

SEQ ID NO: 1359654 - RNA, 22 nt, Human
uuuuuuguauuuuuuaguagag

SEQ ID NO: 1359655 - RNA, 25 nt, Human
uuuuuuguauuuuuuaguagagacg

SEQ ID NO: 1359656 - RNA, 21 nt, Human
aaacuuguaagagaggauaau

SEQ ID NO: 1359657 - RNA, 22 nt, Human
aacagucaggacccucagcuga

SEQ ID NO: 1359658 - RNA, 24 nt, Human
aagguuuuuagcuucuuugugaug

SEQ ID NO: 1359659 - RNA, 20 nt, Human
acauucaugguuucucuuga

SEQ ID NO: 1359660 - RNA, 22 nt, Human
accuuuucuuccacuugauuga

SEQ ID NO: 1359661 - RNA, 21 nt, Human
acugaagcuugugcaugcauc

SEQ ID NO: 1359662 - RNA, 21 nt, Human
agaacagcaaauauugcagaa

SEQ ID NO: 1359663 - RNA, 18 nt, Human
agaagaggcgcucugaug

SEQ ID NO: 1359664 - RNA, 21 nt, Human
agacagggacauuuaagucug

SEQ ID NO: 1359665 - RNA, 18 nt, Human
agacuguccauucuuaga

SEQ ID NO: 1359666 - RNA, 21 nt, Human
aggagaagaggcgcucugaug

SEQ ID NO: 1359667 - RNA, 21 nt, Human
cacugcguacauucauagggu

SEQ ID NO: 1359668 - RNA, 22 nt, Human
cacuugaggaggcagacugucc

SEQ ID NO: 1359669 - RNA, 24 nt, Human
cagcucgucaaagucaaaguccag

SEQ ID NO: 1359670 - RNA, 24 nt, Human
cauuucauccauuugaucuucaau

SEQ ID NO: 1359671 - RNA, 20 nt, Human
ccagcuuuguuccauugcug

SEQ ID NO: 1359672 - RNA, 24 nt, Human
cccacacugcguacauucauaggg

SEQ ID NO: 1359673 - RNA, 20 nt, Human
cuaccaugcauucaaaggug

SEQ ID NO: 1359674 - RNA, 19 nt, Human
cugcugccuuuuguucagc

SEQ ID NO: 1359675 - RNA, 20 nt, Human
cuugugcaugcaucacauag

SEQ ID NO: 1359676 - RNA, 20 nt, Human
gaagguucugggcagaccug

SEQ ID NO: 1359677 - RNA, 24 nt, Human
gaggucuguuggauuuugcuugag

SEQ ID NO: 1359678 - RNA, 23 nt, Human
gcagaacagcaaauauugcagaa

SEQ ID NO: 1359679 - RNA, 21 nt, Human
gccaugguuuucagcuccauc

SEQ ID NO: 1359680 - RNA, 19 nt, Human
ggccccuacugggaagugc

SEQ ID NO: 1359681 - RNA, 20 nt, Human
ggguucgaacauccuccuuu

SEQ ID NO: 1359682 - RNA, 19 nt, Human
gucugcagaaguuucugcu

SEQ ID NO: 1359683 - RNA, 20 nt, Human
uaacagucaggacccucagc

SEQ ID NO: 1359684 - RNA, 25 nt, Human
uaguuagccauuuugucuaaucuuu

SEQ ID NO: 1359685 - RNA, 20 nt, Human
uauccagaaugcauucuuau

SEQ ID NO: 1359686 - RNA, 18 nt, Human
ucaccagcaggggcugca

SEQ ID NO: 1359687 - RNA, 21 nt, Human
uccuuuggaggagaagaggcg

SEQ ID NO: 1359688 - RNA, 19 nt, Human
ucuacacuguuuauucuag

SEQ ID NO: 1359689 - RNA, 22 nt, Human
ucucuugauuguguguccuacc

SEQ ID NO: 1359690 - RNA, 24 nt, Human
ucugaagccuucuucucucagcuc

SEQ ID NO: 1359691 - RNA, 22 nt, Human
ugaaucagcuacugaagcuuuu

SEQ ID NO: 1359692 - RNA, 21 nt, Human
ugaggugucaguuggccccua

SEQ ID NO: 1359693 - RNA, 23 nt, Human
ugccugauccuuccucuggaagc

SEQ ID NO: 1359694 - RNA, 23 nt, Human
ugcguacauucauaggguuuuuu

SEQ ID NO: 1359695 - RNA, 27 nt, Human
ugcucugguuucuccccaucuuugugg

SEQ ID NO: 1359696 - RNA, 18 nt, Human
ugcugggaggacugcuac

SEQ ID NO: 1359697 - RNA, 18 nt, Human
ugggcagaccugaagggu

SEQ ID NO: 1359698 - RNA, 20 nt, Human
uggugugguuguccuuucug

SEQ ID NO: 1359699 - RNA, 23 nt, Human
uggugugguuguccuuucuguuu

SEQ ID NO: 1359700 - RNA, 24 nt, Human
uguuguugccugauccuuccucug

SEQ ID NO: 1359701 - RNA, 18 nt, Human
uguuuguuaguuuuccuu

SEQ ID NO: 1359702 - RNA, 25 nt, Human
uuaagucugcagaaguuucugcugc

SEQ ID NO: 1359703 - RNA, 20 nt, Human
uuagaucucaaacuccaugc

SEQ ID NO: 1359704 - RNA, 21 nt, Human
uuagaucucaaacuccaugcu

SEQ ID NO: 1359705 - RNA, 21 nt, Human
uucagcuauccagaaugcauu

SEQ ID NO: 1359706 - RNA, 21 nt, Human
uucugcucugguuucucccca

SEQ ID NO: 1359707 - RNA, 21 nt, Human
uuggugugguuguccuuucug

SEQ ID NO: 1359708 - RNA, 19 nt, Human
uuguaagagaggauaaugc

SEQ ID NO: 1359709 - RNA, 20 nt, Human
uuguaagagaggauaaugcu

SEQ ID NO: 1359710 - RNA, 24 nt, Human
uuguugccugauccuuccucugga

SEQ ID NO: 1359711 - RNA, 23 nt, Human
uuugaucuucaauuacugauacc

SEQ ID NO: 1359712 - RNA, 21 nt, Human
uuugugguuuuaucuacuuuu

SEQ ID NO: 1359713 - RNA, 21 nt, Human
aaaagaagagaaauuauggaa

SEQ ID NO: 1359714 - RNA, 21 nt, Human
aaauauccagcaaagcccacu

SEQ ID NO: 1359715 - RNA, 20 nt, Human
aagcaagcugaaugcuuucc

SEQ ID NO: 1359716 - RNA, 22 nt, Human
aagcaagcugaaugcuuuccca

SEQ ID NO: 1359717 - RNA, 22 nt, Human
aaguucacagccacauccuuaa

SEQ ID NO: 1359718 - RNA, 21 nt, Human
acacuccugaaguuucuccug

SEQ ID NO: 1359719 - RNA, 25 nt, Human
acccgagucgaaauccgcgcaugac

SEQ ID NO: 1359720 - RNA, 21 nt, Human
auagcuucuuaauuauuuaaa

SEQ ID NO: 1359721 - RNA, 23 nt, Human
auguucuggucuuuccacuuuuu

SEQ ID NO: 1359722 - RNA, 19 nt, Human
cacuccugaaguuucuccu

SEQ ID NO: 1359723 - RNA, 18 nt, Human
cagaucccaaccgccgcc

SEQ ID NO: 1359724 - RNA, 19 nt, Human
caguuaauuguuuacauuc

SEQ ID NO: 1359725 - RNA, 27 nt, Human
cauacggauucucucucguaugagucc

SEQ ID NO: 1359726 - RNA, 20 nt, Human
cauccuuaaaagccacuggg

SEQ ID NO: 1359727 - RNA, 23 nt, Human
cauucuuagggcgccucuccucu

SEQ ID NO: 1359728 - RNA, 22 nt, Human
cccacaaugcuuacauucuuag

SEQ ID NO: 1359729 - RNA, 22 nt, Human
ccccacagaccgcugcuccucc

SEQ ID NO: 1359730 - RNA, 24 nt, Human
ccccacagaccgcugcuccuccua

SEQ ID NO: 1359731 - RNA, 21 nt, Human
ccucccguggcccccgcacaa

SEQ ID NO: 1359732 - RNA, 19 nt, Human
cggagcugcacaaaagggc

SEQ ID NO: 1359733 - RNA, 22 nt, Human
cuccacugugaguccuuuuaga

SEQ ID NO: 1359734 - RNA, 21 nt, Human
cuccagugugaauuuuuucau

SEQ ID NO: 1359735 - RNA, 20 nt, Human
cugggaaauauccagcaaag

SEQ ID NO: 1359736 - RNA, 19 nt, Human
cugugacacuccugaaguu

SEQ ID NO: 1359737 - RNA, 23 nt, Human
cuuagggcgccucuccucugugc

SEQ ID NO: 1359738 - RNA, 22 nt, Human
gaacugggguaaaaguuucucc

SEQ ID NO: 1359739 - RNA, 19 nt, Human
gaggcugugggccccacag

SEQ ID NO: 1359740 - RNA, 20 nt, Human
gcagauaugaaugcuuuccc

SEQ ID NO: 1359741 - RNA, 22 nt, Human
gccccacagaccgcugcuccuc

SEQ ID NO: 1359742 - RNA, 20 nt, Human
gucgggcugcgggcgcggag

SEQ ID NO: 1359743 - RNA, 21 nt, Human
uagggcgccucuccucugugc

SEQ ID NO: 1359744 - RNA, 24 nt, Human
ucacacacaaagcugucacaugau

SEQ ID NO: 1359745 - RNA, 18 nt, Human
ucccaaccgccgcccucg

SEQ ID NO: 1359746 - RNA, 18 nt, Human
ucccuguagagauucuuc

SEQ ID NO: 1359747 - RNA, 22 nt, Human
ucuccacaaugacugucuucuu

SEQ ID NO: 1359748 - RNA, 24 nt, Human
ucuccaguguguguccuucccaag

SEQ ID NO: 1359749 - RNA, 18 nt, Human
ucuccugggguuuuggua

SEQ ID NO: 1359750 - RNA, 19 nt, Human
ucugaagacuuucccacau

SEQ ID NO: 1359751 - RNA, 23 nt, Human
ucugacggcuuucccacauugcu

SEQ ID NO: 1359752 - RNA, 21 nt, Human
ucugggaaauauccagcaaag

SEQ ID NO: 1359753 - RNA, 28 nt, Human
ucugugcaacuuucauguauuugaaaag

SEQ ID NO: 1359754 - RNA, 18 nt, Human
ugaggcugaucugacggc

SEQ ID NO: 1359755 - RNA, 21 nt, Human
uggcagauaugaaugcuuucc

SEQ ID NO: 1359756 - RNA, 20 nt, Human
ugggccccacagaccgcugc

SEQ ID NO: 1359757 - RNA, 21 nt, Human
ugugaauuuuuucauguguuu

SEQ ID NO: 1359758 - RNA, 19 nt, Human
uguucuggucuuuccacuu

SEQ ID NO: 1359759 - RNA, 22 nt, Human
uguucuggucuuuccacuuuuu

SEQ ID NO: 1359760 - RNA, 20 nt, Human
uguuuugcauguauucaaac

SEQ ID NO: 1359761 - RNA, 23 nt, Human
uuaauuguuuacauucauuauuu

SEQ ID NO: 1359762 - RNA, 22 nt, Human
uucauagaguuucugccaagug

SEQ ID NO: 1359763 - RNA, 24 nt, Human
uucaugauauugaaaagaacugga

SEQ ID NO: 1359764 - RNA, 23 nt, Human
uucauguguuugaaauaacuugg

SEQ ID NO: 1359765 - RNA, 21 nt, Human
uucccuguagagauucuucug

SEQ ID NO: 1359766 - RNA, 20 nt, Human
uucuggucuuuccacuuuuu

SEQ ID NO: 1359767 - RNA, 22 nt, Human
uugaaugcuuguuugcauuccu

SEQ ID NO: 1359768 - RNA, 22 nt, Human
uugcauuccuuacauucauagg

SEQ ID NO: 1359769 - RNA, 21 nt, Human
uuggcagaauaaaaguguuuc

SEQ ID NO: 1359770 - RNA, 19 nt, Human
uuuauaggguuucucucca

SEQ ID NO: 1359771 - RNA, 22 nt, Human
aaacccaaaacacacaacacga

SEQ ID NO: 1359772 - RNA, 19 nt, Human
aagccugagaaaacccaaa

SEQ ID NO: 1359773 - RNA, 24 nt, Human
acacacaguguguuguuucugacc

SEQ ID NO: 1359774 - RNA, 23 nt, Human
acccaaaacacacaacacgauuu

SEQ ID NO: 1359775 - RNA, 23 nt, Human
acucugaggugcauucacugagg

SEQ ID NO: 1359776 - RNA, 24 nt, Human
agaaaacccaaaacacacaacacg

SEQ ID NO: 1359777 - RNA, 23 nt, Human
agagcuggagucccaccuugagc

SEQ ID NO: 1359778 - RNA, 24 nt, Human
agauggcuguuuacuucagcuugg

SEQ ID NO: 1359779 - RNA, 22 nt, Human
agcuuggccuucugugcaaaca

SEQ ID NO: 1359780 - RNA, 25 nt, Human
aggaggccccugagaacugcgggac

SEQ ID NO: 1359781 - RNA, 23 nt, Human
aggccccuuuucugcuggaaaug

SEQ ID NO: 1359782 - RNA, 21 nt, Human
aggugagcuuccaggaguagu

SEQ ID NO: 1359783 - RNA, 24 nt, Human
auucacugaggugagcuuccagga

SEQ ID NO: 1359784 - RNA, 21 nt, Human
caaagcugcugugcugaaugc

SEQ ID NO: 1359785 - RNA, 20 nt, Human
caagcaggaggccccugaga

SEQ ID NO: 1359786 - RNA, 24 nt, Human
caagccugagaaaacccaaaacac

SEQ ID NO: 1359787 - RNA, 22 nt, Human
cacacagaagccgccacagcca

SEQ ID NO: 1359788 - RNA, 23 nt, Human
cacacagaagccgccacagccag

SEQ ID NO: 1359789 - RNA, 20 nt, Human
cacacagaagccgccacagg

SEQ ID NO: 1359790 - RNA, 20 nt, Human
caccauguaguucccaaggu

SEQ ID NO: 1359791 - RNA, 18 nt, Human
caccucaaagcugcugug

SEQ ID NO: 1359792 - RNA, 21 nt, Human
cacgugcgugacaggcagagc

SEQ ID NO: 1359793 - RNA, 20 nt, Human
cagcacuccauccagagaaa

SEQ ID NO: 1359794 - RNA, 18 nt, Human
cagcauucugaggacguu

SEQ ID NO: 1359795 - RNA, 24 nt, Human
ccaccaggcccuguauucgcggca

SEQ ID NO: 1359796 - RNA, 22 nt, Human
cccaagugaacuuccacagcac

SEQ ID NO: 1359797 - RNA, 21 nt, Human
cccaccagcccugggccucug

SEQ ID NO: 1359798 - RNA, 23 nt, Human
cccuuuucugcuggaaauggucu

SEQ ID NO: 1359799 - RNA, 21 nt, Human
ccugagaaaacccaaaacaca

SEQ ID NO: 1359800 - RNA, 19 nt, Human
cgcggcagcucuuggacuc

SEQ ID NO: 1359801 - RNA, 18 nt, Human
cgcuccggcccaccagcc

SEQ ID NO: 1359802 - RNA, 19 nt, Human
cgcuccggcccaccagccc

SEQ ID NO: 1359803 - RNA, 23 nt, Human
cgugauuuauaaaauacccagau

SEQ ID NO: 1359804 - RNA, 19 nt, Human
cgugcgugacaggcagagc

SEQ ID NO: 1359805 - RNA, 23 nt, Human
cucaagcaggaggccccugagaa

SEQ ID NO: 1359806 - RNA, 21 nt, Human
cucguaguuuaucaagcaauu

SEQ ID NO: 1359807 - RNA, 21 nt, Human
cucuucauuuuaaaaaaagga

SEQ ID NO: 1359808 - RNA, 19 nt, Human
cuggaaauggucuuuuccc

SEQ ID NO: 1359809 - RNA, 21 nt, Human
cuggcacacagaagccgccac

SEQ ID NO: 1359810 - RNA, 21 nt, Human
gauggcuguuuacuucagcuu

SEQ ID NO: 1359811 - RNA, 18 nt, Human
gccacgcuuccacaggac

SEQ ID NO: 1359812 - RNA, 18 nt, Human
gccacgcuuccacaggac

SEQ ID NO: 1359813 - RNA, 18 nt, Human
gccacgcuuccacaggac

SEQ ID NO: 1359814 - RNA, 18 nt, Human
gcucaagcaggaggcccc

SEQ ID NO: 1359815 - RNA, 28 nt, Human
gcuggcugguggcuauggggugaggaag

SEQ ID NO: 1359816 - RNA, 22 nt, Human
ggacaaaucuuaggauauucuu

SEQ ID NO: 1359817 - RNA, 19 nt, Human
ggaggccccugagaacugc

SEQ ID NO: 1359818 - RNA, 22 nt, Human
guccaaacccgagaaaccucaa

SEQ ID NO: 1359819 - RNA, 21 nt, Human
gugggcuucuccgcagagcuc

SEQ ID NO: 1359820 - RNA, 22 nt, Human
guggggcagcuggcacacagaa

SEQ ID NO: 1359821 - RNA, 20 nt, Human
guuguuucugaccuuugccc

SEQ ID NO: 1359822 - RNA, 20 nt, Human
uaaaaagagagugagccaau

SEQ ID NO: 1359823 - RNA, 28 nt, Human
uaagcagaaaucaucaacaaucaacggg

SEQ ID NO: 1359824 - RNA, 18 nt, Human
uaagcgcacacgugcgug

SEQ ID NO: 1359825 - RNA, 20 nt, Human
uacuucagcuuggccuucug

SEQ ID NO: 1359826 - RNA, 19 nt, Human
uaggagagucuuagugaug

SEQ ID NO: 1359827 - RNA, 21 nt, Human
uauaaaauacccagauggcug

SEQ ID NO: 1359828 - RNA, 23 nt, Human
uauaaauaacuugccauuaaaaa

SEQ ID NO: 1359829 - RNA, 20 nt, Human
uauggggugaggaagguccg

SEQ ID NO: 1359830 - RNA, 19 nt, Human
uccaagccugagaaaaccc

SEQ ID NO: 1359831 - RNA, 23 nt, Human
uccaagccugagaaaacccaaaa

SEQ ID NO: 1359832 - RNA, 24 nt, Human
uccacaggacggcaagcgcagacg

SEQ ID NO: 1359833 - RNA, 24 nt, Human
uccaugaaucaaggugaauuuccg

SEQ ID NO: 1359834 - RNA, 18 nt, Human
ucccaaggucagcaccuu

SEQ ID NO: 1359835 - RNA, 18 nt, Human
uccgcagagcucaagcag

SEQ ID NO: 1359836 - RNA, 21 nt, Human
ucgcggcagcucuuggacucu

SEQ ID NO: 1359837 - RNA, 21 nt, Human
ucucagagcuggcuguuugca

SEQ ID NO: 1359838 - RNA, 19 nt, Human
ucuccgcagagcucaagca

SEQ ID NO: 1359839 - RNA, 22 nt, Human
ucugacuagaugaggccggggc

SEQ ID NO: 1359840 - RNA, 23 nt, Human
ucuggacggucagcauucugagg

SEQ ID NO: 1359841 - RNA, 25 nt, Human
ucuuggacucugaggugcauucacu

SEQ ID NO: 1359842 - RNA, 19 nt, Human
ugaaagccuggaccccacc

SEQ ID NO: 1359843 - RNA, 18 nt, Human
ugaaucaaggugaauuuc

SEQ ID NO: 1359844 - RNA, 22 nt, Human
ugacaggcagagccacgcuucc

SEQ ID NO: 1359845 - RNA, 22 nt, Human
ugacaggcagagccacgcuucc

SEQ ID NO: 1359846 - RNA, 22 nt, Human
ugacaggcagagccacgcuucc

SEQ ID NO: 1359847 - RNA, 22 nt, Human
ugagaaaacccaaaacacacaa

SEQ ID NO: 1359848 - RNA, 28 nt, Human
ugaugugcacuaagcgcacacgugcggu

SEQ ID NO: 1359849 - RNA, 22 nt, Human
ugcuggcugguggcuauggggu

SEQ ID NO: 1359850 - RNA, 18 nt, Human
uggauuuuacaagcuggc

SEQ ID NO: 1359851 - RNA, 19 nt, Human
uuagcagaaaucuuuuaaa

SEQ ID NO: 1359852 - RNA, 19 nt, Human
uugaaagccuggaccccac

SEQ ID NO: 1359853 - RNA, 20 nt, Human
uuuuuugucaacaugaauag

SEQ ID NO: 1359854 - RNA, 18 nt, Human
aaaagagaaacaagaaga

SEQ ID NO: 1359855 - RNA, 23 nt, Human
aaaauauucaauaacacuaaaau

SEQ ID NO: 1359856 - RNA, 23 nt, Human
aaagugcgggauuacagguguga

SEQ ID NO: 1359857 - RNA, 19 nt, Human
aagcaccacauucucaaau

SEQ ID NO: 1359858 - RNA, 19 nt, Human
aaugaaaaauggaacaggg

SEQ ID NO: 1359859 - RNA, 21 nt, Human
acaagaagaauauuaaacagu

SEQ ID NO: 1359860 - RNA, 21 nt, Human
acagaaauaaucccagugcuu

SEQ ID NO: 1359861 - RNA, 22 nt, Human
acauacuauucacugagaaaau

SEQ ID NO: 1359862 - RNA, 21 nt, Human
acauuggccaggcuggucucg

SEQ ID NO: 1359863 - RNA, 24 nt, Human
accuugugaucugcccgccucagc

SEQ ID NO: 1359864 - RNA, 25 nt, Human
acucugucccccaggcuggagugca

SEQ ID NO: 1359865 - RNA, 21 nt, Human
agaaauaaucccagugcuuua

SEQ ID NO: 1359866 - RNA, 23 nt, Human
agagaauuuaucagugaauggga

SEQ ID NO: 1359867 - RNA, 21 nt, Human
agcaccacauucucaaauagc

SEQ ID NO: 1359868 - RNA, 21 nt, Human
aggcagcaucucccuuuuagc

SEQ ID NO: 1359869 - RNA, 25 nt, Human
aggcuggagugcaguggcacaaucu

SEQ ID NO: 1359870 - RNA, 24 nt, Human
aggugacuauaauauuuuauucau

SEQ ID NO: 1359871 - RNA, 18 nt, Human
aguagcugggacuacagg

SEQ ID NO: 1359872 - RNA, 19 nt, Human
aguagcugggacuacaggc

SEQ ID NO: 1359873 - RNA, 21 nt, Human
agugcaguggcacaaucucag

SEQ ID NO: 1359874 - RNA, 24 nt, Human
agugcaguggcacaaucucaguuc

SEQ ID NO: 1359875 - RNA, 18 nt, Human
auauaucucccuaagcau

SEQ ID NO: 1359876 - RNA, 24 nt, Human
augggguuucaccacauuggccag

SEQ ID NO: 1359877 - RNA, 23 nt, Human
auuagcuacagaaauaaucccag

SEQ ID NO: 1359878 - RNA, 24 nt, Human
auuuuuguguuuuuaguagagaug

SEQ ID NO: 1359879 - RNA, 23 nt, Human
caaagugcgggauuacaggugug

SEQ ID NO: 1359880 - RNA, 24 nt, Human
caaagugcgggauuacagguguga

SEQ ID NO: 1359881 - RNA, 18 nt, Human
caaauacucaucaagguc

SEQ ID NO: 1359882 - RNA, 24 nt, Human
caaauacucaucaaggucaaagau

SEQ ID NO: 1359883 - RNA, 23 nt, Human
caaccuccaccucccggguucaa

SEQ ID NO: 1359884 - RNA, 22 nt, Human
caagugauuuuccugccucagc

SEQ ID NO: 1359885 - RNA, 24 nt, Human
cacauuggccaggcuggucucgaa

SEQ ID NO: 1359886 - RNA, 21 nt, Human
caccacauuggccaggcuggu

SEQ ID NO: 1359887 - RNA, 24 nt, Human
caccacauuggccaggcuggucuc

SEQ ID NO: 1359888 - RNA, 27 nt, Human
caccacauuggccaggcuggucucgaa

SEQ ID NO: 1359889 - RNA, 23 nt, Human
caccauaccuggcuaauuuuugu

SEQ ID NO: 1359890 - RNA, 22 nt, Human
cacuaaaauaacuguaagucag

SEQ ID NO: 1359891 - RNA, 24 nt, Human
cacucugucccccaggcuggagug

SEQ ID NO: 1359892 - RNA, 21 nt, Human
cacugcaaccuccaccucccg

SEQ ID NO: 1359893 - RNA, 23 nt, Human
cacugcaaccuccaccucccggg

SEQ ID NO: 1359894 - RNA, 21 nt, Human
cagcaaccaaucaaagacuga

SEQ ID NO: 1359895 - RNA, 20 nt, Human
cagcuaauucuacuaaggcc

SEQ ID NO: 1359896 - RNA, 20 nt, Human
ccaaagugcgggauuacagg

SEQ ID NO: 1359897 - RNA, 23 nt, Human
ccaaagugcgggauuacaggugu

SEQ ID NO: 1359898 - RNA, 24 nt, Human
ccaccucccggguucaagugauuu

SEQ ID NO: 1359899 - RNA, 24 nt, Human
cccaaagugcgggauuacaggugu

SEQ ID NO: 1359900 - RNA, 19 nt, Human
ccccaggcuggagugcagu

SEQ ID NO: 1359901 - RNA, 23 nt, Human
cccgaguagcugggacuacaggc

SEQ ID NO: 1359902 - RNA, 24 nt, Human
cccgaguagcugggacuacaggcg

SEQ ID NO: 1359903 - RNA, 23 nt, Human
cccggguucaagugauuuuccuc

SEQ ID NO: 1359904 - RNA, 23 nt, Human
cccggguucaagugauuuuccug

SEQ ID NO: 1359905 - RNA, 22 nt, Human
ccgcggccgcuaccuccagagc

SEQ ID NO: 1359906 - RNA, 18 nt, Human
ccucccaaagugcgggau

SEQ ID NO: 1359907 - RNA, 20 nt, Human
ccucccggguucaagugauu

SEQ ID NO: 1359908 - RNA, 27 nt, Human
ccucucagcaaccaaucaaagacugag

SEQ ID NO: 1359909 - RNA, 23 nt, Human
ccugccucagccucccgaguagc

SEQ ID NO: 1359910 - RNA, 24 nt, Human
ccugccucagccucccgaguagcu

SEQ ID NO: 1359911 - RNA, 24 nt, Human
cgggauuacaggugugagccacag

SEQ ID NO: 1359912 - RNA, 24 nt, Human
cggguucaagugauuuuccugccu

SEQ ID NO: 1359913 - RNA, 21 nt, Human
cuaaaauaacuguaagucagc

SEQ ID NO: 1359914 - RNA, 24 nt, Human
cucacucugucccccaggcuggag

SEQ ID NO: 1359915 - RNA, 24 nt, Human
cucagccucccgaguagcugggac

SEQ ID NO: 1359916 - RNA, 24 nt, Human
cuccugaccuugugaucugcccgc

SEQ ID NO: 1359917 - RNA, 18 nt, Human
cugcaaccuccaccuccc

SEQ ID NO: 1359918 - RNA, 23 nt, Human
cugcaaccuccaccucccggguu

SEQ ID NO: 1359919 - RNA, 24 nt, Human
cugcaaccuccaccucccggguuc

SEQ ID NO: 1359920 - RNA, 19 nt, Human
cuuuagaaauacuuaauua

SEQ ID NO: 1359921 - RNA, 18 nt, Human
cuuuuagccccgcccucc

SEQ ID NO: 1359922 - RNA, 24 nt, Human
gaaucuugcaaaaauuaaaaaccc

SEQ ID NO: 1359923 - RNA, 24 nt, Human
gaccuugugaucugcccgccucag

SEQ ID NO: 1359924 - RNA, 24 nt, Human
gacuacaggcgcccgccaccauac

SEQ ID NO: 1359925 - RNA, 20 nt, Human
gagaugggguuucaccacau

SEQ ID NO: 1359926 - RNA, 24 nt, Human
gagaugggguuucaccacauuggc

SEQ ID NO: 1359927 - RNA, 25 nt, Human
gaguagcugggacuacaggcgcccg

SEQ ID NO: 1359928 - RNA, 22 nt, Human
gauaaaagagaaacaagaagaa

SEQ ID NO: 1359929 - RNA, 20 nt, Human
gaugguagaaugccaggacc

SEQ ID NO: 1359930 - RNA, 18 nt, Human
gauuacaggugugagcca

SEQ ID NO: 1359931 - RNA, 22 nt, Human
gauuacaggugugagccacagc

SEQ ID NO: 1359932 - RNA, 21 nt, Human
gauuuuccugccucagccucc

SEQ ID NO: 1359933 - RNA, 22 nt, Human
gccucagccucccaaagugcgg

SEQ ID NO: 1359934 - RNA, 19 nt, Human
gcuggagugcaguggcaca

SEQ ID NO: 1359935 - RNA, 24 nt, Human
ggaaaacucaccaauuuguaaaag

SEQ ID NO: 1359936 - RNA, 25 nt, Human
ggacaggacauguggaagaagagaa

SEQ ID NO: 1359937 - RNA, 23 nt, Human
ggaggaggcguuugcuaaacggg

SEQ ID NO: 1359938 - RNA, 23 nt, Human
ggcuggucucgaacuccugaccu

SEQ ID NO: 1359939 - RNA, 18 nt, Human
gggauuacaggugugagc

SEQ ID NO: 1359940 - RNA, 18 nt, Human
gggauuacaggugugagc

SEQ ID NO: 1359941 - RNA, 20 nt, Human
gggauuacaggugugagcca

SEQ ID NO: 1359942 - RNA, 21 nt, Human
gggauuacaggugugagccac

SEQ ID NO: 1359943 - RNA, 25 nt, Human
gggauuacaggugugagccacagcg

SEQ ID NO: 1359944 - RNA, 18 nt, Human
gggguuucaccacauugg

SEQ ID NO: 1359945 - RNA, 22 nt, Human
gggguuucaccacauuggccag

SEQ ID NO: 1359946 - RNA, 22 nt, Human
ggguucaagugauuuuccugcc

SEQ ID NO: 1359947 - RNA, 23 nt, Human
ggguucaagugauuuuccugccu

SEQ ID NO: 1359948 - RNA, 22 nt, Human
ggguuucaccacauuggccagg

SEQ ID NO: 1359949 - RNA, 20 nt, Human
ggucucgaacuccugaccuu

SEQ ID NO: 1359950 - RNA, 21 nt, Human
guagaaugccaggaccuuuug

SEQ ID NO: 1359951 - RNA, 24 nt, Human
gugaucugcccgccucagccuccc

SEQ ID NO: 1359952 - RNA, 24 nt, Human
gugauuuuccugccucagccuccc

SEQ ID NO: 1359953 - RNA, 23 nt, Human
uaaaaacccuguaucaucaucaa

SEQ ID NO: 1359954 - RNA, 20 nt, Human
uaaaauuucuaagccacuau

SEQ ID NO: 1359955 - RNA, 18 nt, Human
uaaacggaugggaacugg

SEQ ID NO: 1359956 - RNA, 21 nt, Human
uaacacuaaaauauagaauau

SEQ ID NO: 1359957 - RNA, 22 nt, Human
uaauuuuuguguuuuuaguaga

SEQ ID NO: 1359958 - RNA, 24 nt, Human
uaauuuuuguguuuuuaguagaga

SEQ ID NO: 1359959 - RNA, 22 nt, Human
uacacagauaaaagagaaacaa

SEQ ID NO: 1359960 - RNA, 23 nt, Human
uacaggugugagccacagcgccc

SEQ ID NO: 1359961 - RNA, 18 nt, Human
uacuaaggccauauuaaa

SEQ ID NO: 1359962 - RNA, 18 nt, Human
uagaaaacaaaggccacu

SEQ ID NO: 1359963 - RNA, 23 nt, Human
uagaaugccaggaccuuuuguga

SEQ ID NO: 1359964 - RNA, 25 nt, Human
uagaaugccaggaccuuuugugaua

SEQ ID NO: 1359965 - RNA, 25 nt, Human
uagccaccgauuacauuucacacua

SEQ ID NO: 1359966 - RNA, 20 nt, Human
uagccccgccucucagcaac

SEQ ID NO: 1359967 - RNA, 23 nt, Human
uagccccgccucucagcaaccaa

SEQ ID NO: 1359968 - RNA, 19 nt, Human
uaguagagaugggguuuca

SEQ ID NO: 1359969 - RNA, 23 nt, Human
uaguagagaugggguuucaccac

SEQ ID NO: 1359970 - RNA, 25 nt, Human
uaguagagaugggguuucaccacau

SEQ ID NO: 1359971 - RNA, 22 nt, Human
uaugaaauuugauuuucaauga

SEQ ID NO: 1359972 - RNA, 21 nt, Human
uauuuuauucaucuauuuuca

SEQ ID NO: 1359973 - RNA, 19 nt, Human
ucaagugauuuuccugccu

SEQ ID NO: 1359974 - RNA, 23 nt, Human
ucacugcaaccuccaccucccgg

SEQ ID NO: 1359975 - RNA, 23 nt, Human
ucacugcaaccuccaccucccgg

SEQ ID NO: 1359976 - RNA, 24 nt, Human
ucacugcaaccuccaccucccggg

SEQ ID NO: 1359977 - RNA, 25 nt, Human
ucacugcaaccuccaccucccgggu

SEQ ID NO: 1359978 - RNA, 26 nt, Human
ucacugcaaccuccaccucccggguu

SEQ ID NO: 1359979 - RNA, 23 nt, Human
ucagccucccgaguagcugggac

SEQ ID NO: 1359980 - RNA, 22 nt, Human
ucccaaagugcgggauuacagg

SEQ ID NO: 1359981 - RNA, 24 nt, Human
ucccccaggcuggagugcaguggc

SEQ ID NO: 1359982 - RNA, 24 nt, Human
ucccgaguagcugggacuacaggc

SEQ ID NO: 1359983 - RNA, 18 nt, Human
ucccggguucaagugauu

SEQ ID NO: 1359984 - RNA, 24 nt, Human
ucccggguucaagugauuuuccug

SEQ ID NO: 1359985 - RNA, 27 nt, Human
ucucaaauagcuaugguaagaucaaau

SEQ ID NO: 1359986 - RNA, 21 nt, Human
ucucacucugucccccaggcu

SEQ ID NO: 1359987 - RNA, 23 nt, Human
ucucacucugucccccaggcugg

SEQ ID NO: 1359988 - RNA, 24 nt, Human
ucucacucugucccccaggcugga

SEQ ID NO: 1359989 - RNA, 19 nt, Human
ucucgaacuccugaccuug

SEQ ID NO: 1359990 - RNA, 21 nt, Human
ucugcccgccucagccuccca

SEQ ID NO: 1359991 - RNA, 19 nt, Human
ucugucccccaggcuggag

SEQ ID NO: 1359992 - RNA, 24 nt, Human
ucugucccccaggcuggagugcag

SEQ ID NO: 1359993 - RNA, 22 nt, Human
ugagaaaauagaauggcaaaga

SEQ ID NO: 1359994 - RNA, 22 nt, Human
ugagacagagucucacucuguc

SEQ ID NO: 1359995 - RNA, 26 nt, Human
ugagacagagucucacucuguccccc

SEQ ID NO: 1359996 - RNA, 24 nt, Human
ugccucagccucccgaguagcugg

SEQ ID NO: 1359997 - RNA, 18 nt, Human
uggagugcaguggcacaa

SEQ ID NO: 1359998 - RNA, 23 nt, Human
uggagugcaguggcacaaucuca

SEQ ID NO: 1359999 - RNA, 24 nt, Human
uggagugcaguggcacaaucucag

SEQ ID NO: 1360000 - RNA, 24 nt, Human
uggcacaaucucaguucacugcaa

SEQ ID NO: 1360001 - RNA, 24 nt, Human
uggccaggcuggucucgaacuccu

SEQ ID NO: 1360002 - RNA, 21 nt, Human
ugggacuacaggcgcccgcca

SEQ ID NO: 1360003 - RNA, 22 nt, Human
ugggacuacaggcgcccgccac

SEQ ID NO: 1360004 - RNA, 24 nt, Human
ugggacuacaggcgcccgccacca

SEQ ID NO: 1360005 - RNA, 25 nt, Human
ugggacuacaggcgcccgccaccau

SEQ ID NO: 1360006 - RNA, 24 nt, Human
ugggguuucaccacauuggccagg

SEQ ID NO: 1360007 - RNA, 19 nt, Human
ugucaaggacaggacaugu

SEQ ID NO: 1360008 - RNA, 19 nt, Human
uguggaagaagagaagcca

SEQ ID NO: 1360009 - RNA, 21 nt, Human
uuaaaacgaugagaauguagc

SEQ ID NO: 1360010 - RNA, 18 nt, Human
uuaguagagaugggguuu

SEQ ID NO: 1360011 - RNA, 22 nt, Human
uuaguagagaugggguuucacc

SEQ ID NO: 1360012 - RNA, 24 nt, Human
uuaguagagaugggguuucaccac

SEQ ID NO: 1360013 - RNA, 25 nt, Human
uuaguagagaugggguuucaccaca

SEQ ID NO: 1360014 - RNA, 24 nt, Human
uuauauacugcgaugacauucagc

SEQ ID NO: 1360015 - RNA, 21 nt, Human
uucaagugauuuuccugccuc

SEQ ID NO: 1360016 - RNA, 23 nt, Human
uucaagugauuuuccugccucag

SEQ ID NO: 1360017 - RNA, 24 nt, Human
uucaagugauuuuccugccucagc

SEQ ID NO: 1360018 - RNA, 19 nt, Human
uucacugagaaaauagaau

SEQ ID NO: 1360019 - RNA, 26 nt, Human
uuuccuuuuuccuuuuuuuuucuuuu

SEQ ID NO: 1360020 - RNA, 27 nt, Human
uuuccuuuuuccuuuuuuuuucuuuuu

SEQ ID NO: 1360021 - RNA, 27 nt, Human
uuugaucaagggccacuauuuccucuu

SEQ ID NO: 1360022 - RNA, 24 nt, Human
uuuguguuuuuaguagagaugggg

SEQ ID NO: 1360023 - RNA, 24 nt, Human
uuuuuaguagagaugggguuucac

SEQ ID NO: 1360024 - RNA, 18 nt, Human
uuuuuccuuuuuuuuucu

SEQ ID NO: 1360025 - RNA, 20 nt, Human
uuuuuguguuuuuaguagag

SEQ ID NO: 1360026 - RNA, 26 nt, Human
uuuuuuuuucuuuuuuuuuuuugggg

SEQ ID NO: 1360027 - RNA, 26 nt, Human
uuuuuuuuuuuugagacagagucuca

SEQ ID NO: 1360028 - RNA, 19 nt, Human
aaccccaugaaccauccuc

SEQ ID NO: 1360029 - RNA, 20 nt, Human
aaccccaugaaccauccucc

SEQ ID NO: 1360030 - RNA, 20 nt, Human
aagcugccuugggggugagc

SEQ ID NO: 1360031 - RNA, 21 nt, Human
aauggcaucagccccaaguga

SEQ ID NO: 1360032 - RNA, 18 nt, Human
acaggaauccgucagugg

SEQ ID NO: 1360033 - RNA, 18 nt, Human
acgaggcgguguggagca

SEQ ID NO: 1360034 - RNA, 20 nt, Human
agaggcugaggagcuuccuu

SEQ ID NO: 1360035 - RNA, 22 nt, Human
agcauuucuagggcugaggcag

SEQ ID NO: 1360036 - RNA, 19 nt, Human
agccagcucucuuccugcc

SEQ ID NO: 1360037 - RNA, 24 nt, Human
aggaucauuuuucucugguuauca

SEQ ID NO: 1360038 - RNA, 18 nt, Human
auaaggguuagugguguu

SEQ ID NO: 1360039 - RNA, 19 nt, Human
auccagguugaauugugcc

SEQ ID NO: 1360040 - RNA, 20 nt, Human
auuuccagaaccucuucucc

SEQ ID NO: 1360041 - RNA, 18 nt, Human
caacacgaggcggugugg

SEQ ID NO: 1360042 - RNA, 19 nt, Human
caccuacggcgcgaugggu

SEQ ID NO: 1360043 - RNA, 19 nt, Human
caccuuggaaaaagaaaaa

SEQ ID NO: 1360044 - RNA, 19 nt, Human
caggaggaccccagugaug

SEQ ID NO: 1360045 - RNA, 23 nt, Human
caggccccgaggagaaucuucca

SEQ ID NO: 1360046 - RNA, 25 nt, Human
cagggccagccccaaggcucuugca

SEQ ID NO: 1360047 - RNA, 21 nt, Human
caucccgcaagcuuucaggcc

SEQ ID NO: 1360048 - RNA, 18 nt, Human
ccacucguccucucacaa

SEQ ID NO: 1360049 - RNA, 20 nt, Human
ccaggccuuuuuugacaaga

SEQ ID NO: 1360050 - RNA, 24 nt, Human
ccagguuuggacugguacacgggc

SEQ ID NO: 1360051 - RNA, 25 nt, Human
cccaugaaccauccucugcccaagg

SEQ ID NO: 1360052 - RNA, 21 nt, Human
ccccgcauacccaacaauugg

SEQ ID NO: 1360053 - RNA, 18 nt, Human
ccuagaucuacaaacaga

SEQ ID NO: 1360054 - RNA, 23 nt, Human
cgcgcgcauuugguuuuguuguu

SEQ ID NO: 1360055 - RNA, 23 nt, Human
cgugggcaccuuggaaaaagaaa

SEQ ID NO: 1360056 - RNA, 20 nt, Human
cugcaugcagacaggcugag

SEQ ID NO: 1360057 - RNA, 23 nt, Human
cugggucccaucccucccagguu

SEQ ID NO: 1360058 - RNA, 18 nt, Human
cuugcugcuggugcaagu

SEQ ID NO: 1360059 - RNA, 22 nt, Human
gaccauaguauucaaugauccg

SEQ ID NO: 1360060 - RNA, 23 nt, Human
gacugggccugaggaggaggagu

SEQ ID NO: 1360061 - RNA, 18 nt, Human
gcacagagaggcgacuag

SEQ ID NO: 1360062 - RNA, 18 nt, Human
gccccgaggagaaucuuc

SEQ ID NO: 1360063 - RNA, 20 nt, Human
gccugcuuucccagauggag

SEQ ID NO: 1360064 - RNA, 19 nt, Human
gcucccuccuaccuccaag

SEQ ID NO: 1360065 - RNA, 19 nt, Human
ggaaaaagaaaaacuuaau

SEQ ID NO: 1360066 - RNA, 18 nt, Human
ggaggaagaagcugccuu

SEQ ID NO: 1360067 - RNA, 18 nt, Human
ggagugcgauaaccccau

SEQ ID NO: 1360068 - RNA, 22 nt, Human
ggauaccacaggggagaaacag

SEQ ID NO: 1360069 - RNA, 19 nt, Human
ggauaugcacaccgucccu

SEQ ID NO: 1360070 - RNA, 23 nt, Human
ggcaguccauugucagcuggugu

SEQ ID NO: 1360071 - RNA, 18 nt, Human
ggccugaggaggaggagu

SEQ ID NO: 1360072 - RNA, 24 nt, Human
ggccugaggaggaggaguuauuca

SEQ ID NO: 1360073 - RNA, 22 nt, Human
ggcucccuccuaccuccaagga

SEQ ID NO: 1360074 - RNA, 23 nt, Human
gggccagccccaaggcucuugca

SEQ ID NO: 1360075 - RNA, 23 nt, Human
gguuauagaaaaggggaaaggga

SEQ ID NO: 1360076 - RNA, 18 nt, Human
guugcagaggccacucgu

SEQ ID NO: 1360077 - RNA, 20 nt, Human
uaaaauggcaucagccccaa

SEQ ID NO: 1360078 - RNA, 23 nt, Human
uaaaauggcaucagccccaagug

SEQ ID NO: 1360079 - RNA, 20 nt, Human
uaagguagcugugaguaagc

SEQ ID NO: 1360080 - RNA, 24 nt, Human
uacacgggcuacuuuucugauguu

SEQ ID NO: 1360081 - RNA, 18 nt, Human
uaccacaggggagaaaca

SEQ ID NO: 1360082 - RNA, 22 nt, Human
uaccacaggggagaaacaggag

SEQ ID NO: 1360083 - RNA, 22 nt, Human
uacgugucuuccagccagcucu

SEQ ID NO: 1360084 - RNA, 18 nt, Human
uaggagaaauuggcccag

SEQ ID NO: 1360085 - RNA, 18 nt, Human
uaggcgagaucagugacc

SEQ ID NO: 1360086 - RNA, 19 nt, Human
uaggcggagguaugcggca

SEQ ID NO: 1360087 - RNA, 18 nt, Human
ucagggccagccccaagg

SEQ ID NO: 1360088 - RNA, 22 nt, Human
ucagugaccgaugugcaugcac

SEQ ID NO: 1360089 - RNA, 18 nt, Human
ucccagauggaggggugg

SEQ ID NO: 1360090 - RNA, 23 nt, Human
uccccauauccacaggaauccgu

SEQ ID NO: 1360091 - RNA, 21 nt, Human
ucccucuugaucuucaggggg

SEQ ID NO: 1360092 - RNA, 19 nt, Human
ugaaccauccucugcccaa

SEQ ID NO: 1360093 - RNA, 21 nt, Human
ugacaagacacaauugaggua

SEQ ID NO: 1360094 - RNA, 19 nt, Human
ugccuugggggugagcuug

SEQ ID NO: 1360095 - RNA, 21 nt, Human
ugcugaguaucacaguguagg

SEQ ID NO: 1360096 - RNA, 22 nt, Human
ugcugggucccaucccucccag

SEQ ID NO: 1360097 - RNA, 18 nt, Human
uggacugguacacgggcc

SEQ ID NO: 1360098 - RNA, 22 nt, Human
uggaggaagaagcugccuuggg

SEQ ID NO: 1360099 - RNA, 22 nt, Human
uggaggcauugacuguuagggu

SEQ ID NO: 1360100 - RNA, 22 nt, Human
uggaggggugguagguccacug

SEQ ID NO: 1360101 - RNA, 26 nt, Human
uggaggggugguagguccacugggga

SEQ ID NO: 1360102 - RNA, 21 nt, Human
uggcaguccauugucagcugg

SEQ ID NO: 1360103 - RNA, 19 nt, Human
uggcccagacaaacacuua

SEQ ID NO: 1360104 - RNA, 21 nt, Human
ugggauaccacaggggagaaa

SEQ ID NO: 1360105 - RNA, 22 nt, Human
ugggaugccuguaaguaagggg

SEQ ID NO: 1360106 - RNA, 20 nt, Human
ugguaaguguccaggacugc

SEQ ID NO: 1360107 - RNA, 19 nt, Human
ugguuggaacccggagagc

SEQ ID NO: 1360108 - RNA, 22 nt, Human
uguuaggguuuggugacggguu

SEQ ID NO: 1360109 - RNA, 24 nt, Human
uguucacucauaaagcucccccgc

SEQ ID NO: 1360110 - RNA, 23 nt, Human
uuaagacagcaauuggagauguu

SEQ ID NO: 1360111 - RNA, 27 nt, Human
uuagaaggagaccaggcuccagggggu

SEQ ID NO: 1360112 - RNA, 21 nt, Human
uuccagccagcucucuuccug

SEQ ID NO: 1360113 - RNA, 21 nt, Human
uuccccauauccacaggaauc

SEQ ID NO: 1360114 - RNA, 26 nt, Human
uuccugaggagugaaagugagucugg

SEQ ID NO: 1360115 - RNA, 21 nt, Human
uugaucuucaggggguacgug

SEQ ID NO: 1360116 - RNA, 22 nt, Human
uugcgcgagcauuucuagggcu

SEQ ID NO: 1360117 - RNA, 20 nt, Human
uugcugggucccaucccucc

SEQ ID NO: 1360118 - RNA, 24 nt, Human
uugcugggucccaucccucccagg

SEQ ID NO: 1360119 - RNA, 19 nt, Human
uugggggugagcuugaccc

SEQ ID NO: 1360120 - RNA, 18 nt, Human
uugguuggaacccggaga

SEQ ID NO: 1360121 - RNA, 24 nt, Human
uuucugauguuugaagcgauuucc

SEQ ID NO: 1360122 - RNA, 23 nt, Human
aaaugaagagaucucugaggucc

SEQ ID NO: 1360123 - RNA, 18 nt, Human
aacccugagccccugagc

SEQ ID NO: 1360124 - RNA, 24 nt, Human
aagagaagcugagccauugcaaug

SEQ ID NO: 1360125 - RNA, 30 nt, Human
acacagcaugcuguucucccuguacccccu

SEQ ID NO: 1360126 - RNA, 18 nt, Human
agagcgcccuggguucuu

SEQ ID NO: 1360127 - RNA, 21 nt, Human
agaguaguaucccccacacag

SEQ ID NO: 1360128 - RNA, 21 nt, Human
agccauugcaaugaguccaga

SEQ ID NO: 1360129 - RNA, 24 nt, Human
agcgcccuggguucuuuuccccag

SEQ ID NO: 1360130 - RNA, 25 nt, Human
aggagauggggugggggcuggucaa

SEQ ID NO: 1360131 - RNA, 20 nt, Human
aggugucggugaggggugga

SEQ ID NO: 1360132 - RNA, 28 nt, Human
cagcccuacuggagacgggcugugugac

SEQ ID NO: 1360133 - RNA, 24 nt, Human
caugcuguucucccuguaccccca

SEQ ID NO: 1360134 - RNA, 20 nt, Human
ccccugagcucaagugcagg

SEQ ID NO: 1360135 - RNA, 18 nt, Human
cccugagccccugagcuc

SEQ ID NO: 1360136 - RNA, 21 nt, Human
cccugaggaggacugcagagg

SEQ ID NO: 1360137 - RNA, 20 nt, Human
ccuggcuugagcuucaucgg

SEQ ID NO: 1360138 - RNA, 18 nt, Human
cggagaggagauggggug

SEQ ID NO: 1360139 - RNA, 24 nt, Human
cgguagcggggcugggguggacac

SEQ ID NO: 1360140 - RNA, 21 nt, Human
gaaggugcaggagagagucca

SEQ ID NO: 1360141 - RNA, 19 nt, Human
gagaggagauggggugggg

SEQ ID NO: 1360142 - RNA, 24 nt, Human
gagcgggguccuggggguccuguu

SEQ ID NO: 1360143 - RNA, 25 nt, Human
gcccuggguucuuuuccccagcccu

SEQ ID NO: 1360144 - RNA, 23 nt, Human
gcucaagugcagggauggccggu

SEQ ID NO: 1360145 - RNA, 19 nt, Human
gcugggguggacaccgggg

SEQ ID NO: 1360146 - RNA, 25 nt, Human
ggagaggagauggggugggggcugg

SEQ ID NO: 1360147 - RNA, 22 nt, Human
ggcaggcgugucagcacaaccc

SEQ ID NO: 1360148 - RNA, 22 nt, Human
gggcauagagaagacagguugg

SEQ ID NO: 1360149 - RNA, 23 nt, Human
gguccuguugggcccugaggagg

SEQ ID NO: 1360150 - RNA, 22 nt, Human
ggugaagaaggugcaggagaga

SEQ ID NO: 1360151 - RNA, 23 nt, Human
gugaagcaggugauggggacccu

SEQ ID NO: 1360152 - RNA, 23 nt, Human
uccagauuugcagaaagagcugu

SEQ ID NO: 1360153 - RNA, 20 nt, Human
uccugcaggggcuacagaug

SEQ ID NO: 1360154 - RNA, 18 nt, Human
ugaagcaggugaugggga

SEQ ID NO: 1360155 - RNA, 24 nt, Human
ugcagaaagagcuguuaaucagug

SEQ ID NO: 1360156 - RNA, 21 nt, Human
ugccuggagguuuauggacag

SEQ ID NO: 1360157 - RNA, 22 nt, Human
ugccuggagguuuauggacagg

SEQ ID NO: 1360158 - RNA, 18 nt, Human
uggacggugaagaaggug

SEQ ID NO: 1360159 - RNA, 25 nt, Human
uggcacuuguggcagaggguucccc

SEQ ID NO: 1360160 - RNA, 21 nt, Human
uggcagaggguuccaaaguca

SEQ ID NO: 1360161 - RNA, 18 nt, Human
ugggagcgggguccuggg

SEQ ID NO: 1360162 - RNA, 21 nt, Human
ugggagcgggguccugggggu

SEQ ID NO: 1360163 - RNA, 24 nt, Human
uggggugggggcuggucaaagcag

SEQ ID NO: 1360164 - RNA, 22 nt, Human
ugugaaaugaagagaucucuga

SEQ ID NO: 1360165 - RNA, 21 nt, Human
uucaccugugaaaugaagaga

SEQ ID NO: 1360166 - RNA, 20 nt, Human
aaacagaacaauccuguggu

SEQ ID NO: 1360167 - RNA, 18 nt, Human
acagacacccugucccuc

SEQ ID NO: 1360168 - RNA, 19 nt, Human
acccugucccucccuccuc

SEQ ID NO: 1360169 - RNA, 23 nt, Human
acccugucccucccuccucacca

SEQ ID NO: 1360170 - RNA, 22 nt, Human
acggaggcccauucaacacugg

SEQ ID NO: 1360171 - RNA, 25 nt, Human
acuucacacaucccugggagguggg

SEQ ID NO: 1360172 - RNA, 21 nt, Human
agauuuccagcugcucagaca

SEQ ID NO: 1360173 - RNA, 20 nt, Human
agccaucagugggaggaaga

SEQ ID NO: 1360174 - RNA, 18 nt, Human
agcccaggagacccugcc

SEQ ID NO: 1360175 - RNA, 18 nt, Human
agcccaggagacccugcc

SEQ ID NO: 1360176 - RNA, 22 nt, Human
aggaaacugaggcuggcccaau

SEQ ID NO: 1360177 - RNA, 23 nt, Human
aggggcaggcccagcuggggccc

SEQ ID NO: 1360178 - RNA, 22 nt, Human
caaugccacagggccaggggca

SEQ ID NO: 1360179 - RNA, 18 nt, Human
cacaagaggaauuacugc

SEQ ID NO: 1360180 - RNA, 20 nt, Human
cacccugucccucccuccuc

SEQ ID NO: 1360181 - RNA, 21 nt, Human
cacccugucccucccuccuca

SEQ ID NO: 1360182 - RNA, 23 nt, Human
cacccugucccucccuccucacc

SEQ ID NO: 1360183 - RNA, 20 nt, Human
cacuccccauuuaggauccc

SEQ ID NO: 1360184 - RNA, 25 nt, Human
cagacccaggcccacaacgucucca

SEQ ID NO: 1360185 - RNA, 23 nt, Human
cagcccaggcuuguggacagcag

SEQ ID NO: 1360186 - RNA, 21 nt, Human
cagccgcugcgagcacgccug

SEQ ID NO: 1360187 - RNA, 22 nt, Human
caggcuggugggccuuuaaggc

SEQ ID NO: 1360188 - RNA, 23 nt, Human
cagguuguguggagcugaguggu

SEQ ID NO: 1360189 - RNA, 19 nt, Human
ccaaagcgggugcagggac

SEQ ID NO: 1360190 - RNA, 21 nt, Human
ccaaugccacagggccagggg

SEQ ID NO: 1360191 - RNA, 18 nt, Human
cccaacucuggaagccga

SEQ ID NO: 1360192 - RNA, 26 nt, Human
cccacaacgucuccacuggcauccgu

SEQ ID NO: 1360193 - RNA, 24 nt, Human
cccacaagaggaauuacugccucu

SEQ ID NO: 1360194 - RNA, 19 nt, Human
cccaccuccucggcccuga

SEQ ID NO: 1360195 - RNA, 22 nt, Human
cccaccuccucggcccugacuc

SEQ ID NO: 1360196 - RNA, 19 nt, Human
cccagggcguggcaugggg

SEQ ID NO: 1360197 - RNA, 21 nt, Human
cccuguugccguccacucccc

SEQ ID NO: 1360198 - RNA, 20 nt, Human
ccgcugcgagcacgccuggu

SEQ ID NO: 1360199 - RNA, 22 nt, Human
ccugacuucacacaucccuggg

SEQ ID NO: 1360200 - RNA, 21 nt, Human
ccugcaccggaggacguccuc

SEQ ID NO: 1360201 - RNA, 27 nt, Human
ccugggagguggguggaacugccuucc

SEQ ID NO: 1360202 - RNA, 23 nt, Human
ccuuccgcccuguugccguccac

SEQ ID NO: 1360203 - RNA, 19 nt, Human
ccuugccaauuccccccca

SEQ ID NO: 1360204 - RNA, 21 nt, Human
cgugcccacucccaccuccuc

SEQ ID NO: 1360205 - RNA, 18 nt, Human
cucccaccuccucggccc

SEQ ID NO: 1360206 - RNA, 24 nt, Human
cucccaccuccucggcccugacuc

SEQ ID NO: 1360207 - RNA, 19 nt, Human
cuccccauuuaggauccca

SEQ ID NO: 1360208 - RNA, 19 nt, Human
cugccggaguccugaccca

SEQ ID NO: 1360209 - RNA, 21 nt, Human
cugugguaggacaacagccau

SEQ ID NO: 1360210 - RNA, 19 nt, Human
cuuccugacccaacucugg

SEQ ID NO: 1360211 - RNA, 19 nt, Human
gacccaacucuggaagccg

SEQ ID NO: 1360212 - RNA, 23 nt, Human
gagugggcagcagacccaggccc

SEQ ID NO: 1360213 - RNA, 21 nt, Human
gcagaaccuugcccacaagag

SEQ ID NO: 1360214 - RNA, 22 nt, Human
gcagggacgggccgagggggcu

SEQ ID NO: 1360215 - RNA, 21 nt, Human
gcaggggacaggggcggaggu

SEQ ID NO: 1360216 - RNA, 18 nt, Human
gcccugcgcccacacaca

SEQ ID NO: 1360217 - RNA, 21 nt, Human
ggcagggggcaggggacaggg

SEQ ID NO: 1360218 - RNA, 21 nt, Human
gggacaggggcggagguagaa

SEQ ID NO: 1360219 - RNA, 22 nt, Human
gggcagcagacccaggcccaca

SEQ ID NO: 1360220 - RNA, 25 nt, Human
gggcaggcuggugggccuuuaaggc

SEQ ID NO: 1360221 - RNA, 18 nt, Human
gggcaggggacaggggcg

SEQ ID NO: 1360222 - RNA, 24 nt, Human
gggccaggggcaggcccagcuggg

SEQ ID NO: 1360223 - RNA, 23 nt, Human
gggggcagggggcaggggacagg

SEQ ID NO: 1360224 - RNA, 21 nt, Human
gggugcagggacgggccgagg

SEQ ID NO: 1360225 - RNA, 20 nt, Human
gguuguguggagcugagugg

SEQ ID NO: 1360226 - RNA, 21 nt, Human
guggugugagccucacccugc

SEQ ID NO: 1360227 - RNA, 25 nt, Human
ucaacacugggcagacacacucagc

SEQ ID NO: 1360228 - RNA, 22 nt, Human
ucagauuuccagcugcucagac

SEQ ID NO: 1360229 - RNA, 18 nt, Human
uccacuggcauccguagg

SEQ ID NO: 1360230 - RNA, 21 nt, Human
ucccacaagacaggccuuccu

SEQ ID NO: 1360231 - RNA, 18 nt, Human
ucccuccucaccagcccc

SEQ ID NO: 1360232 - RNA, 22 nt, Human
uccucaccagccccugcccccu

SEQ ID NO: 1360233 - RNA, 23 nt, Human
uccucaccagccccugcccccuc

SEQ ID NO: 1360234 - RNA, 21 nt, Human
uccugacccaacucuggaagc

SEQ ID NO: 1360235 - RNA, 21 nt, Human
uccugaggacauggauggggg

SEQ ID NO: 1360236 - RNA, 19 nt, Human
ugaauagagacguccugca

SEQ ID NO: 1360237 - RNA, 21 nt, Human
ugaauagagacguccugcacc

SEQ ID NO: 1360238 - RNA, 23 nt, Human
ugacacaaagugcauuuaaagag

SEQ ID NO: 1360239 - RNA, 23 nt, Human
ugacagaugaggaaacugaggcu

SEQ ID NO: 1360240 - RNA, 21 nt, Human
ugacccaacucuggaagccga

SEQ ID NO: 1360241 - RNA, 18 nt, Human
ugacuucacacaucccug

SEQ ID NO: 1360242 - RNA, 20 nt, Human
ugcccacaagaggaauuacu

SEQ ID NO: 1360243 - RNA, 23 nt, Human
ugcccacucccaccuccucggcc

SEQ ID NO: 1360244 - RNA, 18 nt, Human
ugcccccuccaaccaguu

SEQ ID NO: 1360245 - RNA, 19 nt, Human
ugccggaguccugacccac

SEQ ID NO: 1360246 - RNA, 24 nt, Human
ugccggcacccugaacucgguccc

SEQ ID NO: 1360247 - RNA, 19 nt, Human
ugcuaagugagagauguuc

SEQ ID NO: 1360248 - RNA, 18 nt, Human
ugggaggaagaguccggg

SEQ ID NO: 1360249 - RNA, 22 nt, Human
ugggaggaagaguccgggcagg

SEQ ID NO: 1360250 - RNA, 23 nt, Human
uggguggaacugccuucccauuu

SEQ ID NO: 1360251 - RNA, 19 nt, Human
uguccccgugcccacuccc

SEQ ID NO: 1360252 - RNA, 20 nt, Human
uguggacagcagggcucggc

SEQ ID NO: 1360253 - RNA, 19 nt, Human
uguguggagcugaguggug

SEQ ID NO: 1360254 - RNA, 25 nt, Human
uuguguggagcugaguggugugagc

SEQ ID NO: 1360255 - RNA, 22 nt, Human
aaaaagaaaaaaaaaggcaagg

SEQ ID NO: 1360256 - RNA, 19 nt, Human
aaaaagagacagugagaga

SEQ ID NO: 1360257 - RNA, 25 nt, Human
aagaaaaaaaaaggcaaggcgccgg

SEQ ID NO: 1360258 - RNA, 22 nt, Human
aagcaaguugccaagaaagccc

SEQ ID NO: 1360259 - RNA, 21 nt, Human
aagcccgcuggccaaguucgg

SEQ ID NO: 1360260 - RNA, 22 nt, Human
aagcucccagcagcagcaacuu

SEQ ID NO: 1360261 - RNA, 21 nt, Human
aagcugcacccagcgccuugg

SEQ ID NO: 1360262 - RNA, 21 nt, Human
aaggcaaggcgccgggagcac

SEQ ID NO: 1360263 - RNA, 22 nt, Human
aaguucuugggcagcagaagag

SEQ ID NO: 1360264 - RNA, 25 nt, Human
acagugagagaaagaaaaagaaaaa

SEQ ID NO: 1360265 - RNA, 23 nt, Human
acuuggguucuucuggcauuuuu

SEQ ID NO: 1360266 - RNA, 25 nt, Human
agaaaaaaaaaggcaaggcgccggg

SEQ ID NO: 1360267 - RNA, 19 nt, Human
agaaaaagaaaaaaaaagg

SEQ ID NO: 1360268 - RNA, 23 nt, Human
agaaaaagaaaaaaaaaggcaag

SEQ ID NO: 1360269 - RNA, 18 nt, Human
agaaggaggagcagguag

SEQ ID NO: 1360270 - RNA, 18 nt, Human
aggagccucccaaagucc

SEQ ID NO: 1360271 - RNA, 22 nt, Human
aggcaaggcgccgggagcacag

SEQ ID NO: 1360272 - RNA, 25 nt, Human
cacccaccccaaguucuugggcagc

SEQ ID NO: 1360273 - RNA, 21 nt, Human
caccccaaguucuugggcagc

SEQ ID NO: 1360274 - RNA, 25 nt, Human
cagaaggaggagcagguagggaaau

SEQ ID NO: 1360275 - RNA, 22 nt, Human
cagcucaagcucccagcagcag

SEQ ID NO: 1360276 - RNA, 23 nt, Human
caggcagauuccaaaggcuuggg

SEQ ID NO: 1360277 - RNA, 18 nt, Human
ccaggguuccauggagaa

SEQ ID NO: 1360278 - RNA, 24 nt, Human
cccaaaacugagcacauaagccuu

SEQ ID NO: 1360279 - RNA, 18 nt, Human
ccuccuucccuccuuucc

SEQ ID NO: 1360280 - RNA, 19 nt, Human
ccuccuucccuccuuucca

SEQ ID NO: 1360281 - RNA, 26 nt, Human
ccugaggcugccugacucuaaacccu

SEQ ID NO: 1360282 - RNA, 22 nt, Human
ccuuacaccgugacaaugacua

SEQ ID NO: 1360283 - RNA, 23 nt, Human
cgcccaugaagaccaguccaucu

SEQ ID NO: 1360284 - RNA, 22 nt, Human
cucagaccucucucuuuagaac

SEQ ID NO: 1360285 - RNA, 20 nt, Human
cuccuucccuccuuuccauc

SEQ ID NO: 1360286 - RNA, 21 nt, Human
cugggggucucggggaaagcu

SEQ ID NO: 1360287 - RNA, 19 nt, Human
cuuaagaccuccguggaga

SEQ ID NO: 1360288 - RNA, 21 nt, Human
gacucuaaacccuuuuggcug

SEQ ID NO: 1360289 - RNA, 19 nt, Human
gcagcagaagaggucauag

SEQ ID NO: 1360290 - RNA, 21 nt, Human
gccgggagcacagugggucca

SEQ ID NO: 1360291 - RNA, 24 nt, Human
gcguccccaaaacugagcacauaa

SEQ ID NO: 1360292 - RNA, 26 nt, Human
gcucacaggagccucccaaaguccuu

SEQ ID NO: 1360293 - RNA, 22 nt, Human
gcuugugugugcgugcgugugu

SEQ ID NO: 1360294 - RNA, 23 nt, Human
ggcacucuggggugcgcgccgau

SEQ ID NO: 1360295 - RNA, 23 nt, Human
gggcacucuggggugcgcgcccc

SEQ ID NO: 1360296 - RNA, 22 nt, Human
gugacaaugacuaagccuuuaa

SEQ ID NO: 1360297 - RNA, 22 nt, Human
gugaugauuuuucagauuuugg

SEQ ID NO: 1360298 - RNA, 21 nt, Human
gugugugcgugcgugugugug

SEQ ID NO: 1360299 - RNA, 18 nt, Human
gugugugugugugugugu

SEQ ID NO: 1360300 - RNA, 19 nt, Human
uaaaauaaacagugucugc

SEQ ID NO: 1360301 - RNA, 23 nt, Human
uacacaacuccuagccugcagga

SEQ ID NO: 1360302 - RNA, 24 nt, Human
uauuucaaugguuuuugguuacau

SEQ ID NO: 1360303 - RNA, 21 nt, Human
ucagcucucaacaaucccaca

SEQ ID NO: 1360304 - RNA, 21 nt, Human
uccaucugggggucucgggga

SEQ ID NO: 1360305 - RNA, 21 nt, Human
ucccgcacaaccaagcuccag

SEQ ID NO: 1360306 - RNA, 23 nt, Human
ucccgcacaaccaagcuccagca

SEQ ID NO: 1360307 - RNA, 20 nt, Human
ucuccaguuaccacccaccc

SEQ ID NO: 1360308 - RNA, 21 nt, Human
ucuccaguuaccacccacccc

SEQ ID NO: 1360309 - RNA, 24 nt, Human
ugaagaccaguccaucucagcuca

SEQ ID NO: 1360310 - RNA, 20 nt, Human
ugagugcuugugugugcgug

SEQ ID NO: 1360311 - RNA, 19 nt, Human
ugcagucacuuuuuuaagc

SEQ ID NO: 1360312 - RNA, 25 nt, Human
ugcgugcgugugugugugugugugg

SEQ ID NO: 1360313 - RNA, 21 nt, Human
ugcgugugugugugugugugu

SEQ ID NO: 1360314 - RNA, 21 nt, Human
ugcgugugugugugugugugu

SEQ ID NO: 1360315 - RNA, 19 nt, Human
uggagcguccccaaaacug

SEQ ID NO: 1360316 - RNA, 20 nt, Human
ugucucugccuuaagaccuc

SEQ ID NO: 1360317 - RNA, 21 nt, Human
ugugcgugcgugugugugugu

SEQ ID NO: 1360318 - RNA, 30 nt, Human
ugugugcgugcgugugugugugugugugug

SEQ ID NO: 1360319 - RNA, 20 nt, Human
ugugugugcgugcgugugug

SEQ ID NO: 1360320 - RNA, 21 nt, Human
ugugugugcgugcgugugugu

SEQ ID NO: 1360321 - RNA, 21 nt, Human
ugugugugcgugcgugugugu

SEQ ID NO: 1360322 - RNA, 22 nt, Human
uguguguguguguguguccgag

SEQ ID NO: 1360323 - RNA, 18 nt, Human
ugugugugugugugugug

SEQ ID NO: 1360324 - RNA, 24 nt, Human
uguuuuauuauuccagaauuuuuu

SEQ ID NO: 1360325 - RNA, 20 nt, Human
uuaaaugaauaugacuuggg

SEQ ID NO: 1360326 - RNA, 24 nt, Human
uucuuugcagcugaucacuuugau

SEQ ID NO: 1360327 - RNA, 24 nt, Human
uugcauucagaauaaagauucuau

SEQ ID NO: 1360328 - RNA, 20 nt, Human
uuuacuuuuauuucaauggu

SEQ ID NO: 1360329 - RNA, 18 nt, Human
aacucagguguccuccuc

SEQ ID NO: 1360330 - RNA, 22 nt, Human
aagaaccucgacacuggcaccg

SEQ ID NO: 1360331 - RNA, 18 nt, Human
acacccacaccggaacgc

SEQ ID NO: 1360332 - RNA, 22 nt, Human
acccacaccggaacgcaacauc

SEQ ID NO: 1360333 - RNA, 20 nt, Human
accuggcucucgucggggac

SEQ ID NO: 1360334 - RNA, 21 nt, Human
agaaccucgacacuggcaccg

SEQ ID NO: 1360335 - RNA, 25 nt, Human
agagacguaaacucagguguccucc

SEQ ID NO: 1360336 - RNA, 23 nt, Human
agcuaagcagaaagaaccucgac

SEQ ID NO: 1360337 - RNA, 18 nt, Human
caaaacgcagauggcgga

SEQ ID NO: 1360338 - RNA, 19 nt, Human
cagauggcggaguuaagug

SEQ ID NO: 1360339 - RNA, 19 nt, Human
cagcugaggugagcagcag

SEQ ID NO: 1360340 - RNA, 21 nt, Human
cagguguccuccuccguaguc

SEQ ID NO: 1360341 - RNA, 22 nt, Human
cccacacccacaccggaacgca

SEQ ID NO: 1360342 - RNA, 20 nt, Human
cgcggccuacggggauuuau

SEQ ID NO: 1360343 - RNA, 20 nt, Human
cggaggcacacccacaccca

SEQ ID NO: 1360344 - RNA, 19 nt, Human
cuccuccguagucggcucc

SEQ ID NO: 1360345 - RNA, 22 nt, Human
gaggcacacccacacccacacc

SEQ ID NO: 1360346 - RNA, 20 nt, Human
gcucaaaacgcagauggcgg

SEQ ID NO: 1360347 - RNA, 21 nt, Human
gcuuccacgcaugcuacugcg

SEQ ID NO: 1360348 - RNA, 27 nt, Human
ggcacacccacacccacaccggaacgc

SEQ ID NO: 1360349 - RNA, 22 nt, Human
guaaacucagguguccuccucc

SEQ ID NO: 1360350 - RNA, 18 nt, Human
uccacgcaugcuacugcg

SEQ ID NO: 1360351 - RNA, 24 nt, Human
uccacgcaugcuacugcgugcucc

SEQ ID NO: 1360352 - RNA, 22 nt, Human
ucccucaacaaacaagaucagc

SEQ ID NO: 1360353 - RNA, 25 nt, Human
ucccucaacaaacaagaucagcagc

SEQ ID NO: 1360354 - RNA, 21 nt, Human
ucggaggcacacccacaccca

SEQ ID NO: 1360355 - RNA, 22 nt, Human
uggaagagacguaaacucaggu

SEQ ID NO: 1360356 - RNA, 23 nt, Human
uggaagagacguaaacucaggug

SEQ ID NO: 1360357 - RNA, 21 nt, Human
uucaauuuuauuauaguccca

SEQ ID NO: 1360358 - RNA, 21 nt, Human
uuuauccgcagcccccggauc

SEQ ID NO: 1360359 - RNA, 27 nt, Human
aaaccgccccauacaagagggccccgg

SEQ ID NO: 1360360 - RNA, 20 nt, Human
aaagugcugggauugcaggc

SEQ ID NO: 1360361 - RNA, 22 nt, Human
aaagugcugggauugcaggcgu

SEQ ID NO: 1360362 - RNA, 24 nt, Human
aaagugcugggauugcaggcguga

SEQ ID NO: 1360363 - RNA, 23 nt, Human
aaaugacccuuugauuaugaagc

SEQ ID NO: 1360364 - RNA, 22 nt, Human
aagaagucaauccauccaaagc

SEQ ID NO: 1360365 - RNA, 24 nt, Human
aagaagucaauccauccaaagcca

SEQ ID NO: 1360366 - RNA, 23 nt, Human
aagaauggccccagaacaggaca

SEQ ID NO: 1360367 - RNA, 21 nt, Human
aagaggccccggccugggccc

SEQ ID NO: 1360368 - RNA, 22 nt, Human
aagcugcccuuguccgggggcc

SEQ ID NO: 1360369 - RNA, 28 nt, Human
aaguaucagaggacugcaacauaaaacc

SEQ ID NO: 1360370 - RNA, 22 nt, Human
aagucaauccauccaaagccag

SEQ ID NO: 1360371 - RNA, 24 nt, Human
aagucaauccauccaaagccagaa

SEQ ID NO: 1360372 - RNA, 25 nt, Human
aagugauccucccaccuuggccucc

SEQ ID NO: 1360373 - RNA, 19 nt, Human
aagugcugggauugcaggc

SEQ ID NO: 1360374 - RNA, 19 nt, Human
aagugcugggauugcaggc

SEQ ID NO: 1360375 - RNA, 26 nt, Human
aagugcugggauugcaggcgugagcc

SEQ ID NO: 1360376 - RNA, 24 nt, Human
aauaagaaacaagacuuuccauca

SEQ ID NO: 1360377 - RNA, 19 nt, Human
acaaaccagaaaaugaccc

SEQ ID NO: 1360378 - RNA, 22 nt, Human
acaggaaaaaacagcgccugga

SEQ ID NO: 1360379 - RNA, 21 nt, Human
acaguaucuuuccugucuuuc

SEQ ID NO: 1360380 - RNA, 23 nt, Human
acagugcuggggcaacccugugc

SEQ ID NO: 1360381 - RNA, 23 nt, Human
acccugccugccaggcacucagc

SEQ ID NO: 1360382 - RNA, 19 nt, Human
acccugugccuacacaaaa

SEQ ID NO: 1360383 - RNA, 22 nt, Human
acggucuuccccacacuccuga

SEQ ID NO: 1360384 - RNA, 24 nt, Human
agaaaaugacccuuugauuaugaa

SEQ ID NO: 1360385 - RNA, 18 nt, Human
agacaggguuucacccau

SEQ ID NO: 1360386 - RNA, 23 nt, Human
agagcagugguacaaucacagcu

SEQ ID NO: 1360387 - RNA, 25 nt, Human
agaggcaggcccgaccccccaaggg

SEQ ID NO: 1360388 - RNA, 26 nt, Human
agccaaccuaagaggcaggaugaugc

SEQ ID NO: 1360389 - RNA, 22 nt, Human
agccacaguccaaaaauacuaa

SEQ ID NO: 1360390 - RNA, 25 nt, Human
aggaaaaaacagcgccuggacagga

SEQ ID NO: 1360391 - RNA, 23 nt, Human
agggaaaagguggaaacuccuga

SEQ ID NO: 1360392 - RNA, 24 nt, Human
aggguuucacccauguugcccagg

SEQ ID NO: 1360393 - RNA, 20 nt, Human
aguaucugggacuacaggcg

SEQ ID NO: 1360394 - RNA, 19 nt, Human
aucaacccucccuccgucc

SEQ ID NO: 1360395 - RNA, 20 nt, Human
augggccggguuuccgugac

SEQ ID NO: 1360396 - RNA, 23 nt, Human
caaauuuacuacuuagaguacag

SEQ ID NO: 1360397 - RNA, 18 nt, Human
caacccucccuccgucca

SEQ ID NO: 1360398 - RNA, 19 nt, Human
caagugauccucccaccuu

SEQ ID NO: 1360399 - RNA, 27 nt, Human
caagugauccucccaccuuggccuccu

SEQ ID NO: 1360400 - RNA, 22 nt, Human
caagugauccuccugccucagc

SEQ ID NO: 1360401 - RNA, 27 nt, Human
caagugauccuccugccucagcuuccu

SEQ ID NO: 1360402 - RNA, 23 nt, Human
caauacaccuggcucucaucauc

SEQ ID NO: 1360403 - RNA, 18 nt, Human
cacacgguuucaguuacc

SEQ ID NO: 1360404 - RNA, 21 nt, Human
cacacugccccaggcuggcca

SEQ ID NO: 1360405 - RNA, 20 nt, Human
caccacacgcaggccucagc

SEQ ID NO: 1360406 - RNA, 18 nt, Human
caccuuuggucgacgguc

SEQ ID NO: 1360407 - RNA, 23 nt, Human
cacgcaggccucagccaaccuaa

SEQ ID NO: 1360408 - RNA, 24 nt, Human
cacugugaggacacugggguugcu

SEQ ID NO: 1360409 - RNA, 22 nt, Human
cagaaagaaucaagaagucaau

SEQ ID NO: 1360410 - RNA, 18 nt, Human
cagaagguucucacuucc

SEQ ID NO: 1360411 - RNA, 19 nt, Human
cagccccucacaacagucc

SEQ ID NO: 1360412 - RNA, 21 nt, Human
cagcucacugcagacuuaacc

SEQ ID NO: 1360413 - RNA, 20 nt, Human
cagcuuccugaguaucuggg

SEQ ID NO: 1360414 - RNA, 23 nt, Human
caggacaguggugaugcuggcga

SEQ ID NO: 1360415 - RNA, 22 nt, Human
caggagacgcccccacagggcu

SEQ ID NO: 1360416 - RNA, 25 nt, Human
caggguuucacccauguugcccagg

SEQ ID NO: 1360417 - RNA, 19 nt, Human
caucgcggugauguggugc

SEQ ID NO: 1360418 - RNA, 23 nt, Human
cauguugcccaggcuggucuuga

SEQ ID NO: 1360419 - RNA, 24 nt, Human
cauguugcccaggcuggucuugaa

SEQ ID NO: 1360420 - RNA, 23 nt, Human
ccacccccaggggugcucggagg

SEQ ID NO: 1360421 - RNA, 24 nt, Human
ccaccguaugcuccuucccauccc

SEQ ID NO: 1360422 - RNA, 22 nt, Human
ccagaaagaaucaagaagucaa

SEQ ID NO: 1360423 - RNA, 22 nt, Human
ccaggcccucaagagcugggaa

SEQ ID NO: 1360424 - RNA, 19 nt, Human
ccauccacgccacccugcc

SEQ ID NO: 1360425 - RNA, 21 nt, Human
ccauguugcccaggcuggucu

SEQ ID NO: 1360426 - RNA, 23 nt, Human
cccauguugcccaggcuggucuu

SEQ ID NO: 1360427 - RNA, 26 nt, Human
cccauguugcccaggcuggucuugaa

SEQ ID NO: 1360428 - RNA, 22 nt, Human
ccccacagggcuggagcuucua

SEQ ID NO: 1360429 - RNA, 20 nt, Human
ccccacgcucgccucccucc

SEQ ID NO: 1360430 - RNA, 21 nt, Human
cccccacagggcuggagcuuc

SEQ ID NO: 1360431 - RNA, 19 nt, Human
cccgggccugggcacuccc

SEQ ID NO: 1360432 - RNA, 19 nt, Human
cccugccaggcugugcugc

SEQ ID NO: 1360433 - RNA, 20 nt, Human
cccugccugccaggcacuca

SEQ ID NO: 1360434 - RNA, 21 nt, Human
ccgccccauacaagagggccc

SEQ ID NO: 1360435 - RNA, 18 nt, Human
ccgcugcgcccagccugu

SEQ ID NO: 1360436 - RNA, 21 nt, Human
ccgcugcgcccagccuguuua

SEQ ID NO: 1360437 - RNA, 21 nt, Human
ccgggggccgcggcuggaagc

SEQ ID NO: 1360438 - RNA, 28 nt, Human
ccgucggcauggucuguuguguuccccc

SEQ ID NO: 1360439 - RNA, 23 nt, Human
ccuaaagugcugggauugcaggc

SEQ ID NO: 1360440 - RNA, 24 nt, Human
ccuagccucaagugauccucccac

SEQ ID NO: 1360441 - RNA, 18 nt, Human
ccucccaccuuggccucc

SEQ ID NO: 1360442 - RNA, 22 nt, Human
ccucccaccuuggccuccuaaa

SEQ ID NO: 1360443 - RNA, 22 nt, Human
ccuccugccucagcuuccugag

SEQ ID NO: 1360444 - RNA, 24 nt, Human
ccugaguaucugggacuacaggcg

SEQ ID NO: 1360445 - RNA, 18 nt, Human
ccugccaggcugugcugc

SEQ ID NO: 1360446 - RNA, 24 nt, Human
ccugccucagcuuccugaguaucu

SEQ ID NO: 1360447 - RNA, 19 nt, Human
ccuggacaggauucgggac

SEQ ID NO: 1360448 - RNA, 24 nt, Human
ccuggccaggugagggcgaucacu

SEQ ID NO: 1360449 - RNA, 22 nt, Human
ccuggcccugguuccuuuuggu

SEQ ID NO: 1360450 - RNA, 19 nt, Human
ccugugucccugccugucu

SEQ ID NO: 1360451 - RNA, 18 nt, Human
ccuuuaagggaaaaggug

SEQ ID NO: 1360452 - RNA, 21 nt, Human
cguacaggaaaaaacagcgcc

SEQ ID NO: 1360453 - RNA, 18 nt, Human
cguccacgcaaaaaacaa

SEQ ID NO: 1360454 - RNA, 23 nt, Human
cguccugagagaccacugaacac

SEQ ID NO: 1360455 - RNA, 24 nt, Human
cuaaagugcugggauugcaggcgu

SEQ ID NO: 1360456 - RNA, 24 nt, Human
cuacccaggagacgcccccacagg

SEQ ID NO: 1360457 - RNA, 24 nt, Human
cucaagugauccucccaccuuggc

SEQ ID NO: 1360458 - RNA, 20 nt, Human
cucaagugauccuccugccu

SEQ ID NO: 1360459 - RNA, 24 nt, Human
cucaagugauccuccugccucagc

SEQ ID NO: 1360460 - RNA, 21 nt, Human
cucacaacagucccccuuaca

SEQ ID NO: 1360461 - RNA, 18 nt, Human
cucacacugccccaggcu

SEQ ID NO: 1360462 - RNA, 24 nt, Human
cucacuuccuacuuuguguuccac

SEQ ID NO: 1360463 - RNA, 18 nt, Human
cucagacuugaucacagg

SEQ ID NO: 1360464 - RNA, 22 nt, Human
cucagccaaccuaagaggcagg

SEQ ID NO: 1360465 - RNA, 19 nt, Human
cuccugaccuauaagaaaa

SEQ ID NO: 1360466 - RNA, 22 nt, Human
cucuggcucaagugauccuccu

SEQ ID NO: 1360467 - RNA, 23 nt, Human
cugccugccaggcacucagcagc

SEQ ID NO: 1360468 - RNA, 18 nt, Human
cuggaagcucuugguccc

SEQ ID NO: 1360469 - RNA, 22 nt, Human
cuggccaccguaugcuccuucc

SEQ ID NO: 1360470 - RNA, 19 nt, Human
cugggacaucaacccuccc

SEQ ID NO: 1360471 - RNA, 18 nt, Human
gaaaaaacagcgccugga

SEQ ID NO: 1360472 - RNA, 22 nt, Human
gaaaaaacagcgccuggacagg

SEQ ID NO: 1360473 - RNA, 21 nt, Human
gaacacggcccaggggucuuc

SEQ ID NO: 1360474 - RNA, 21 nt, Human
gacagccagaacuccaccccc

SEQ ID NO: 1360475 - RNA, 24 nt, Human
gagcagccguccugcugggacauc

SEQ ID NO: 1360476 - RNA, 23 nt, Human
gagugcggugcgagcggagaggc

SEQ ID NO: 1360477 - RNA, 21 nt, Human
gaugggaagaggccccggccu

SEQ ID NO: 1360478 - RNA, 23 nt, Human
gauguggugcuuggguccaagaa

SEQ ID NO: 1360479 - RNA, 22 nt, Human
gcaacauaaaaccgccccauac

SEQ ID NO: 1360480 - RNA, 18 nt, Human
gcaggcccgacccgggcc

SEQ ID NO: 1360481 - RNA, 20 nt, Human
gccccggccucgaagacaag

SEQ ID NO: 1360482 - RNA, 24 nt, Human
gcccugguuccuuuugguuacaga

SEQ ID NO: 1360483 - RNA, 21 nt, Human
gccggggucucgggcggagcu

SEQ ID NO: 1360484 - RNA, 24 nt, Human
gccucagcuuccugaguaucuggg

SEQ ID NO: 1360485 - RNA, 19 nt, Human
gcggagcuggcuggcacag

SEQ ID NO: 1360486 - RNA, 21 nt, Human
gcucagggccccugccaggcu

SEQ ID NO: 1360487 - RNA, 23 nt, Human
gcuggucuugaacuccuagccuc

SEQ ID NO: 1360488 - RNA, 22 nt, Human
ggaagcauuugugcacagcccc

SEQ ID NO: 1360489 - RNA, 19 nt, Human
ggagcuggcuggcacagaa

SEQ ID NO: 1360490 - RNA, 21 nt, Human
ggcaaaaccagaaagaaucaa

SEQ ID NO: 1360491 - RNA, 22 nt, Human
ggccgcggcuggaagcucuugg

SEQ ID NO: 1360492 - RNA, 19 nt, Human
ggccugggcccgggagcuc

SEQ ID NO: 1360493 - RNA, 21 nt, Human
ggcucaagugauccuccugcc

SEQ ID NO: 1360494 - RNA, 22 nt, Human
ggcugagaacuccgcucagggc

SEQ ID NO: 1360495 - RNA, 24 nt, Human
ggcuggucuugaacuccuagccuc

SEQ ID NO: 1360496 - RNA, 24 nt, Human
gggccgcggcuggaagcucuuggu

SEQ ID NO: 1360497 - RNA, 23 nt, Human
guagagacaggguuucacccaug

SEQ ID NO: 1360498 - RNA, 24 nt, Human
gugauccuccugccucagcuuccu

SEQ ID NO: 1360499 - RNA, 23 nt, Human
gugguacaaucacagcucacugc

SEQ ID NO: 1360500 - RNA, 24 nt, Human
uaaagugcugggauugcaggcgug

SEQ ID NO: 1360501 - RNA, 23 nt, Human
uaaccucuggcucaagugauccu

SEQ ID NO: 1360502 - RNA, 19 nt, Human
uaagaaaaacagccagaug

SEQ ID NO: 1360503 - RNA, 22 nt, Human
uaagaaacaagacuuuccauca

SEQ ID NO: 1360504 - RNA, 28 nt, Human
uaaggacaccacacgcaggcuggagacc

SEQ ID NO: 1360505 - RNA, 22 nt, Human
uacgaauacaaacacgaaaaca

SEQ ID NO: 1360506 - RNA, 23 nt, Human
uacguacaggaaaaaacagcgcc

SEQ ID NO: 1360507 - RNA, 20 nt, Human
uacuuuguguuccacuuuuu

SEQ ID NO: 1360508 - RNA, 23 nt, Human
uagagacaggguuucacccaugu

SEQ ID NO: 1360509 - RNA, 20 nt, Human
uagccucaagugauccuccc

SEQ ID NO: 1360510 - RNA, 19 nt, Human
ucaaaggaaaugaacuggc

SEQ ID NO: 1360511 - RNA, 25 nt, Human
ucaagugauccucccaccuuggccu

SEQ ID NO: 1360512 - RNA, 22 nt, Human
ucaauccauccaaagccagaag

SEQ ID NO: 1360513 - RNA, 30 nt, Human
ucaauccauccaaagccagaagguucucaa

SEQ ID NO: 1360514 - RNA, 22 nt, Human
ucacaacagucccccuuacaca

SEQ ID NO: 1360515 - RNA, 18 nt, Human
ucacaguaagcucacgcc

SEQ ID NO: 1360516 - RNA, 23 nt, Human
ucacugcagacuuaaccucuggc

SEQ ID NO: 1360517 - RNA, 21 nt, Human
ucagaaaguaucagaggacug

SEQ ID NO: 1360518 - RNA, 19 nt, Human
uccacgguggcugcgucac

SEQ ID NO: 1360519 - RNA, 20 nt, Human
uccagaaauaaaccauucau

SEQ ID NO: 1360520 - RNA, 22 nt, Human
ucccaguuucuccaaugguucu

SEQ ID NO: 1360521 - RNA, 24 nt, Human
uccggcucuguugcucaggcugga

SEQ ID NO: 1360522 - RNA, 24 nt, Human
uccuaaagugcugggauugcaggc

SEQ ID NO: 1360523 - RNA, 24 nt, Human
uccugaguaucugggacuacaggc

SEQ ID NO: 1360524 - RNA, 23 nt, Human
ucgacggucuuccccacacuccu

SEQ ID NO: 1360525 - RNA, 24 nt, Human
ucgcggugauguggugcuuggguc

SEQ ID NO: 1360526 - RNA, 19 nt, Human
ucuaaggacaccacacgca

SEQ ID NO: 1360527 - RNA, 18 nt, Human
ucucuccauccugcauuc

SEQ ID NO: 1360528 - RNA, 19 nt, Human
ucucuggccuggcccuggu

SEQ ID NO: 1360529 - RNA, 22 nt, Human
ucuggcucaagugauccuccug

SEQ ID NO: 1360530 - RNA, 21 nt, Human
ucuugaacuccuagccucaag

SEQ ID NO: 1360531 - RNA, 21 nt, Human
ugaauuucucuuuaaagcuuu

SEQ ID NO: 1360532 - RNA, 23 nt, Human
ugacccacaggcaacuuuggcac

SEQ ID NO: 1360533 - RNA, 22 nt, Human
ugaccuauaagaaaaacagcca

SEQ ID NO: 1360534 - RNA, 26 nt, Human
ugaccuauaagaaaaacagccagaug

SEQ ID NO: 1360535 - RNA, 22 nt, Human
ugagacaggguccggcucuguu

SEQ ID NO: 1360536 - RNA, 24 nt, Human
ugcacgggucacugcguccaggcc

SEQ ID NO: 1360537 - RNA, 22 nt, Human
ugcacugugaggacacuggggu

SEQ ID NO: 1360538 - RNA, 18 nt, Human
ugcagaaacacccuccua

SEQ ID NO: 1360539 - RNA, 19 nt, Human
ugcaggcgugagccgcugc

SEQ ID NO: 1360540 - RNA, 23 nt, Human
ugccaggcacucagcagccaucu

SEQ ID NO: 1360541 - RNA, 24 nt, Human
ugcccaggcuggucuugaacuccu

SEQ ID NO: 1360542 - RNA, 21 nt, Human
ugccccacgcucgccucccuc

SEQ ID NO: 1360543 - RNA, 24 nt, Human
ugccccacgcucgccucccuccca

SEQ ID NO: 1360544 - RNA, 18 nt, Human
ugccggggucucgggcgg

SEQ ID NO: 1360545 - RNA, 24 nt, Human
ugccucagcuuccugaguaucugg

SEQ ID NO: 1360546 - RNA, 20 nt, Human
ugcgucacggcucacgugca

SEQ ID NO: 1360547 - RNA, 21 nt, Human
ugcucggaggggcucgcggcc

SEQ ID NO: 1360548 - RNA, 23 nt, Human
uggaaacuccugaccuauaagaa

SEQ ID NO: 1360549 - RNA, 20 nt, Human
uggcacagacgggcugagaa

SEQ ID NO: 1360550 - RNA, 25 nt, Human
uggccuggcccugguuccuuuuggu

SEQ ID NO: 1360551 - RNA, 24 nt, Human
ugggacuacaggcgggugacacca

SEQ ID NO: 1360552 - RNA, 18 nt, Human
ugggauugcaggcgugag

SEQ ID NO: 1360553 - RNA, 19 nt, Human
ugggauugcaggcgugagc

SEQ ID NO: 1360554 - RNA, 20 nt, Human
ugggauugcaggcgugagcc

SEQ ID NO: 1360555 - RNA, 20 nt, Human
ugggauugcaggcgugagcc

SEQ ID NO: 1360556 - RNA, 21 nt, Human
ugggauugcaggcgugagccg

SEQ ID NO: 1360557 - RNA, 22 nt, Human
ugggucagagugcggugcgagc

SEQ ID NO: 1360558 - RNA, 24 nt, Human
ugguacaaucacagcucacugcag

SEQ ID NO: 1360559 - RNA, 18 nt, Human
uggugaugcuggcgacuc

SEQ ID NO: 1360560 - RNA, 18 nt, Human
uggugcgagccuaacugc

SEQ ID NO: 1360561 - RNA, 25 nt, Human
uguagagacaggguuucacccaugu

SEQ ID NO: 1360562 - RNA, 18 nt, Human
ugugaggacacugggguu

SEQ ID NO: 1360563 - RNA, 20 nt, Human
uuaagaauggccccagaaca

SEQ ID NO: 1360564 - RNA, 20 nt, Human
uuacagaaugguaucagggc

SEQ ID NO: 1360565 - RNA, 28 nt, Human
uucaggcaaaaccagaaagaaucaagaa

SEQ ID NO: 1360566 - RNA, 21 nt, Human
uuccagaaauaaaccauucau

SEQ ID NO: 1360567 - RNA, 23 nt, Human
uuccagaaauaaaccauucauga

SEQ ID NO: 1360568 - RNA, 19 nt, Human
uucucuggccuggcccugg

SEQ ID NO: 1360569 - RNA, 23 nt, Human
uucugcacaaagcauuuucaaaa

SEQ ID NO: 1360570 - RNA, 23 nt, Human
uugcucaggcuggagagcagugg

SEQ ID NO: 1360571 - RNA, 24 nt, Human
uugcucaggcuggagagcaguggu

SEQ ID NO: 1360572 - RNA, 18 nt, Human
uuggccuccuaaagugcu

SEQ ID NO: 1360573 - RNA, 23 nt, Human
uuucacccauguugcccaggcug

SEQ ID NO: 1360574 - RNA, 24 nt, Human
uuucacccauguugcccaggcugg

SEQ ID NO: 1360575 - RNA, 25 nt, Human
uuuguagagacaggguuucacccau

SEQ ID NO: 1360576 - RNA, 22 nt, Human
uuuguguuccacuuuuuuuuuu

SEQ ID NO: 1360577 - RNA, 23 nt, Human
uuuuuuuuuuuucaaaggaaaug

SEQ ID NO: 1360578 - RNA, 20 nt, Human
aacaugguuccuggaggagg

SEQ ID NO: 1360579 - RNA, 21 nt, Human
aagcuccaaacaugguuccug

SEQ ID NO: 1360580 - RNA, 19 nt, Human
aauaauaaugugguuucuu

SEQ ID NO: 1360581 - RNA, 19 nt, Human
accagccccaaguagggcc

SEQ ID NO: 1360582 - RNA, 19 nt, Human
agcagcaugaaucaguuuc

SEQ ID NO: 1360583 - RNA, 18 nt, Human
agucagggucuugaugug

SEQ ID NO: 1360584 - RNA, 24 nt, Human
aguucagauuuaaacucuguuuca

SEQ ID NO: 1360585 - RNA, 20 nt, Human
aucuuuggcaucauuucuag

SEQ ID NO: 1360586 - RNA, 19 nt, Human
auggagcaugugguggacc

SEQ ID NO: 1360587 - RNA, 22 nt, Human
caaauguuguauuugaaacauc

SEQ ID NO: 1360588 - RNA, 23 nt, Human
caaggcauauuaaaacuucugag

SEQ ID NO: 1360589 - RNA, 20 nt, Human
caaguagggccgagcgguag

SEQ ID NO: 1360590 - RNA, 25 nt, Human
cacauuuaaaugaccaggaucaucu

SEQ ID NO: 1360591 - RNA, 25 nt, Human
cagcaguccgagcugccaaccaauu

SEQ ID NO: 1360592 - RNA, 22 nt, Human
caguccgagcugccaaccaauu

SEQ ID NO: 1360593 - RNA, 22 nt, Human
caucaagugcauuaggaucuuu

SEQ ID NO: 1360594 - RNA, 21 nt, Human
ccacuggaaacaauggaccac

SEQ ID NO: 1360595 - RNA, 22 nt, Human
ccacuuuagaaagcuucucuua

SEQ ID NO: 1360596 - RNA, 18 nt, Human
ccuccaggaccagcccca

SEQ ID NO: 1360597 - RNA, 24 nt, Human
ccuccaggaccagccccaaguagg

SEQ ID NO: 1360598 - RNA, 20 nt, Human
ccuccauagcgccaagcugc

SEQ ID NO: 1360599 - RNA, 22 nt, Human
ccuccauagcgccaagcugcuc

SEQ ID NO: 1360600 - RNA, 21 nt, Human
ccuucagaaugugggguuggg

SEQ ID NO: 1360601 - RNA, 19 nt, Human
cuccauagcgccaagcugc

SEQ ID NO: 1360602 - RNA, 21 nt, Human
cuccuccaggaccagccccaa

SEQ ID NO: 1360603 - RNA, 21 nt, Human
cugacccaacggugagggacc

SEQ ID NO: 1360604 - RNA, 24 nt, Human
cugauucucacuuucaaaauauau

SEQ ID NO: 1360605 - RNA, 19 nt, Human
cugcuugggcuuccuccuc

SEQ ID NO: 1360606 - RNA, 20 nt, Human
gaggaauaaagccggggcca

SEQ ID NO: 1360607 - RNA, 22 nt, Human
gaucagucaaaguugcuuuuga

SEQ ID NO: 1360608 - RNA, 22 nt, Human
gcaccauuuuccgauugacugu

SEQ ID NO: 1360609 - RNA, 19 nt, Human
gcaguccgagcugccaacc

SEQ ID NO: 1360610 - RNA, 19 nt, Human
gcauauuaaaacuucugag

SEQ ID NO: 1360611 - RNA, 21 nt, Human
ggaaacaucauccuacggucc

SEQ ID NO: 1360612 - RNA, 19 nt, Human
ggaaauaaccugcuuuuga

SEQ ID NO: 1360613 - RNA, 20 nt, Human
ggaggagguugggggaaagg

SEQ ID NO: 1360614 - RNA, 21 nt, Human
ggagguugggggaaaggaggu

SEQ ID NO: 1360615 - RNA, 20 nt, Human
gggguugggguaaaauccag

SEQ ID NO: 1360616 - RNA, 24 nt, Human
gguaagcucuuccuuuguuuuguc

SEQ ID NO: 1360617 - RNA, 18 nt, Human
guugggguaaaauccagg

SEQ ID NO: 1360618 - RNA, 19 nt, Human
guuucuuucuccuucuaag

SEQ ID NO: 1360619 - RNA, 23 nt, Human
guuucuuucuccuucuaaggcuu

SEQ ID NO: 1360620 - RNA, 19 nt, Human
uaaaucauugagguuucuu

SEQ ID NO: 1360621 - RNA, 22 nt, Human
uacaaaauacuguccugagaac

SEQ ID NO: 1360622 - RNA, 22 nt, Human
uacuguccugagaacuguaauu

SEQ ID NO: 1360623 - RNA, 21 nt, Human
uacuuaaacugaaaaugagau

SEQ ID NO: 1360624 - RNA, 21 nt, Human
uagcagcaugaaucaguuucu

SEQ ID NO: 1360625 - RNA, 19 nt, Human
uagggccgagcgguagcgc

SEQ ID NO: 1360626 - RNA, 19 nt, Human
uauggcgaacgcucucugc

SEQ ID NO: 1360627 - RNA, 20 nt, Human
uauuugaaacaucaagugca

SEQ ID NO: 1360628 - RNA, 22 nt, Human
ucagaaggagcccugugagcau

SEQ ID NO: 1360629 - RNA, 23 nt, Human
ucaggcacauuuaaaugaccagg

SEQ ID NO: 1360630 - RNA, 23 nt, Human
ucagguagugcugccacaauucu

SEQ ID NO: 1360631 - RNA, 24 nt, Human
ucaguuucuucaaagcuccuuugg

SEQ ID NO: 1360632 - RNA, 19 nt, Human
uccacuggaaacaauggac

SEQ ID NO: 1360633 - RNA, 18 nt, Human
ucccauggagaugagagg

SEQ ID NO: 1360634 - RNA, 21 nt, Human
ucccuugauagaaaauaaccu

SEQ ID NO: 1360635 - RNA, 19 nt, Human
uccgauugacuguucacuu

SEQ ID NO: 1360636 - RNA, 18 nt, Human
uccuccaggaccagcccc

SEQ ID NO: 1360637 - RNA, 23 nt, Human
ucuaucagaauuagaauaaaauc

SEQ ID NO: 1360638 - RNA, 19 nt, Human
ucugaguucugcuggucca

SEQ ID NO: 1360639 - RNA, 23 nt, Human
ucugaguucugcugguccagaca

SEQ ID NO: 1360640 - RNA, 20 nt, Human
ucuggauguucaguagcagg

SEQ ID NO: 1360641 - RNA, 24 nt, Human
ucuucaagcacagcagccugaucu

SEQ ID NO: 1360642 - RNA, 19 nt, Human
ucuucuucaagaucuuugg

SEQ ID NO: 1360643 - RNA, 19 nt, Human
ucuuucuccuucuaaggcu

SEQ ID NO: 1360644 - RNA, 24 nt, Human
ugagaaaaguguaaucacuuaagu

SEQ ID NO: 1360645 - RNA, 19 nt, Human
ugagaucagucaaaguugc

SEQ ID NO: 1360646 - RNA, 24 nt, Human
ugaugguccagaggauucccuggg

SEQ ID NO: 1360647 - RNA, 25 nt, Human
ugauuuucuuuaucauucagaacuu

SEQ ID NO: 1360648 - RNA, 19 nt, Human
ugcaaauggagcauguggu

SEQ ID NO: 1360649 - RNA, 23 nt, Human
ugcucuggcggucaccgcaguua

SEQ ID NO: 1360650 - RNA, 24 nt, Human
uggauagauguuucucauugcaaa

SEQ ID NO: 1360651 - RNA, 18 nt, Human
uggaugaaaguaaggagg

SEQ ID NO: 1360652 - RNA, 25 nt, Human
ugggggaaaggagguccucuucucg

SEQ ID NO: 1360653 - RNA, 21 nt, Human
ugguucuccucuuuuauuggu

SEQ ID NO: 1360654 - RNA, 22 nt, Human
uguauuugaaacaucaagugca

SEQ ID NO: 1360655 - RNA, 22 nt, Human
ugucagaaggagcccugugagc

SEQ ID NO: 1360656 - RNA, 20 nt, Human
ugucucauacucucagguaa

SEQ ID NO: 1360657 - RNA, 23 nt, Human
uguggaggaagagcugaaucagg

SEQ ID NO: 1360658 - RNA, 22 nt, Human
uguuguauuugaaacaucaagu

SEQ ID NO: 1360659 - RNA, 19 nt, Human
uuagaauaaaaucugucuu

SEQ ID NO: 1360660 - RNA, 21 nt, Human
uuagaauaaaaucugucuucc

SEQ ID NO: 1360661 - RNA, 23 nt, Human
uucaagcacagcagccugaucuu

SEQ ID NO: 1360662 - RNA, 22 nt, Human
uucagaugaaggcugacccaac

SEQ ID NO: 1360663 - RNA, 19 nt, Human
uuccuuuguuuuguccacu

SEQ ID NO: 1360664 - RNA, 25 nt, Human
uugcaaauggagcaugugguggacc

SEQ ID NO: 1360665 - RNA, 20 nt, Human
uugggguaaaauccaggucu

SEQ ID NO: 1360666 - RNA, 20 nt, Human
aggaggguguuguggcaguu

SEQ ID NO: 1360667 - RNA, 18 nt, Human
aggcacugacagccuccg

SEQ ID NO: 1360668 - RNA, 22 nt, Human
auaagcccccacccagaagcuc

SEQ ID NO: 1360669 - RNA, 22 nt, Human
ccuccagcucccccaugccugg

SEQ ID NO: 1360670 - RNA, 19 nt, Human
cgucuugccccuguaggac

SEQ ID NO: 1360671 - RNA, 22 nt, Human
cuccagcucccccaugccuggu

SEQ ID NO: 1360672 - RNA, 24 nt, Human
cuccagcucccccaugccuggucc

SEQ ID NO: 1360673 - RNA, 20 nt, Human
cucccccaugccugguccug

SEQ ID NO: 1360674 - RNA, 23 nt, Human
cucccucuguucuagucccugcc

SEQ ID NO: 1360675 - RNA, 21 nt, Human
cugaggaggguguuguggcag

SEQ ID NO: 1360676 - RNA, 18 nt, Human
gacuggggguggauaggg

SEQ ID NO: 1360677 - RNA, 24 nt, Human
gagauaagcccccacccagaagcu

SEQ ID NO: 1360678 - RNA, 21 nt, Human
gcccuggggacugggggugga

SEQ ID NO: 1360679 - RNA, 21 nt, Human
ggggacuggggguggauaggg

SEQ ID NO: 1360680 - RNA, 25 nt, Human
guccuugcgaggcacaugucgaggg

SEQ ID NO: 1360681 - RNA, 23 nt, Human
uccugggggaggagauaagcccc

SEQ ID NO: 1360682 - RNA, 22 nt, Human
ucuagucccugccuccagcucc

SEQ ID NO: 1360683 - RNA, 18 nt, Human
ucuccagguggcucccuc

SEQ ID NO: 1360684 - RNA, 21 nt, Human
ugccccuguaggacaggggcu

SEQ ID NO: 1360685 - RNA, 27 nt, Human
uggcucccucuguucuagucccugccu

SEQ ID NO: 1360686 - RNA, 27 nt, Human
aaaaagagaaauauuuaaaauugacua

SEQ ID NO: 1360687 - RNA, 20 nt, Human
aaaaauaaauccuagacuua

SEQ ID NO: 1360688 - RNA, 22 nt, Human
aaaacuccaaguuccaagccuc

SEQ ID NO: 1360689 - RNA, 25 nt, Human
aaauaaauccuagacuuaacacuga

SEQ ID NO: 1360690 - RNA, 19 nt, Human
aacaagaauaauuuaggac

SEQ ID NO: 1360691 - RNA, 19 nt, Human
aacacagucaaaccauauc

SEQ ID NO: 1360692 - RNA, 18 nt, Human
aaggacuuacaagagcaa

SEQ ID NO: 1360693 - RNA, 20 nt, Human
aaguaaucaagaaaaaccag

SEQ ID NO: 1360694 - RNA, 25 nt, Human
aauuaccucccacuaggucccuccc

SEQ ID NO: 1360695 - RNA, 19 nt, Human
acaacggggguagaggaau

SEQ ID NO: 1360696 - RNA, 18 nt, Human
acacggcagcaaagaggg

SEQ ID NO: 1360697 - RNA, 18 nt, Human
accaaaaauaucaaaaca

SEQ ID NO: 1360698 - RNA, 22 nt, Human
acucacaguucugcauggcuuc

SEQ ID NO: 1360699 - RNA, 18 nt, Human
agaaaaaccagcuuuagg

SEQ ID NO: 1360700 - RNA, 19 nt, Human
agaagcuuuaaaaagagaa

SEQ ID NO: 1360701 - RNA, 22 nt, Human
agcaagcaauggauaaucucaa

SEQ ID NO: 1360702 - RNA, 22 nt, Human
aggaaaaaaauaaacaauguga

SEQ ID NO: 1360703 - RNA, 24 nt, Human
aggaaaaaaauaaacaaugugaag

SEQ ID NO: 1360704 - RNA, 19 nt, Human
aggaaaaugcaagugagaa

SEQ ID NO: 1360705 - RNA, 21 nt, Human
aggcagaggcucccaaaccuc

SEQ ID NO: 1360706 - RNA, 21 nt, Human
aucguucugucccugaccccu

SEQ ID NO: 1360707 - RNA, 18 nt, Human
augacaccaaaaauauca

SEQ ID NO: 1360708 - RNA, 21 nt, Human
augagaacagcagcauggggg

SEQ ID NO: 1360709 - RNA, 20 nt, Human
auguauguguguuuauguau

SEQ ID NO: 1360710 - RNA, 23 nt, Human
caaauucuuaacucauuccaaca

SEQ ID NO: 1360711 - RNA, 22 nt, Human
caagaauaauuuaggacuucca

SEQ ID NO: 1360712 - RNA, 23 nt, Human
caagaauaauuuaggacuuccaa

SEQ ID NO: 1360713 - RNA, 23 nt, Human
caccaaaaauaucaaaacacaac

SEQ ID NO: 1360714 - RNA, 21 nt, Human
cagcaaaaauugagcuucuca

SEQ ID NO: 1360715 - RNA, 18 nt, Human
cagcuggagucagagcaa

SEQ ID NO: 1360716 - RNA, 21 nt, Human
cagggcagcaaaaauugagcu

SEQ ID NO: 1360717 - RNA, 23 nt, Human
ccaaaaauggggcuacaggcccc

SEQ ID NO: 1360718 - RNA, 21 nt, Human
ccaaauucuuaacucauucca

SEQ ID NO: 1360719 - RNA, 24 nt, Human
ccuagacuuaacacugauaagaaa

SEQ ID NO: 1360720 - RNA, 25 nt, Human
ccuugcugacaaaaaauaaauccua

SEQ ID NO: 1360721 - RNA, 23 nt, Human
cguucugucccugaccccuccca

SEQ ID NO: 1360722 - RNA, 21 nt, Human
cucaaaacuccaaguuccaag

SEQ ID NO: 1360723 - RNA, 19 nt, Human
gaaguaaacacauccuucu

SEQ ID NO: 1360724 - RNA, 21 nt, Human
gagccuguaaaaucaaaacca

SEQ ID NO: 1360725 - RNA, 21 nt, Human
gcaaaaauugagcuucucaag

SEQ ID NO: 1360726 - RNA, 24 nt, Human
ggaaaaggaaguaaacacauccuu

SEQ ID NO: 1360727 - RNA, 18 nt, Human
ggaaaaugcaagugagaa

SEQ ID NO: 1360728 - RNA, 20 nt, Human
ggcagcaaaaauugagcuuc

SEQ ID NO: 1360729 - RNA, 22 nt, Human
uaaaaucugacauccgauauug

SEQ ID NO: 1360730 - RNA, 19 nt, Human
uaaacacauccuucuucac

SEQ ID NO: 1360731 - RNA, 20 nt, Human
uaagccaauggaggauacca

SEQ ID NO: 1360732 - RNA, 21 nt, Human
uaaggccccuaccaucuggcu

SEQ ID NO: 1360733 - RNA, 21 nt, Human
uaaugggugcuacauguaugu

SEQ ID NO: 1360734 - RNA, 22 nt, Human
uaaugggugcuacauguaugug

SEQ ID NO: 1360735 - RNA, 21 nt, Human
uaauuaccucccacuaggucc

SEQ ID NO: 1360736 - RNA, 18 nt, Human
uacaaggaaacugauguu

SEQ ID NO: 1360737 - RNA, 22 nt, Human
uacauguauguguguuuaugua

SEQ ID NO: 1360738 - RNA, 23 nt, Human
uaccucccacuaggucccuccca

SEQ ID NO: 1360739 - RNA, 19 nt, Human
uaggaaaaugcaagugaga

SEQ ID NO: 1360740 - RNA, 22 nt, Human
uaggaaaaugcaagugagaauu

SEQ ID NO: 1360741 - RNA, 23 nt, Human
uaggugccacugcaggagcuggg

SEQ ID NO: 1360742 - RNA, 23 nt, Human
uauaaaaccaccagaucuuguga

SEQ ID NO: 1360743 - RNA, 21 nt, Human
uaucaaaacacaacaggaggc

SEQ ID NO: 1360744 - RNA, 22 nt, Human
ucaaaaccaaguuaauuacugc

SEQ ID NO: 1360745 - RNA, 21 nt, Human
ucaugaauaggcugaggugaa

SEQ ID NO: 1360746 - RNA, 20 nt, Human
ucaugagaacagcagcaugg

SEQ ID NO: 1360747 - RNA, 21 nt, Human
uccaaaaauggggcuacaggc

SEQ ID NO: 1360748 - RNA, 24 nt, Human
uccaaagaauagauaaggccccua

SEQ ID NO: 1360749 - RNA, 25 nt, Human
uccaaagaauagauaaggccccuac

SEQ ID NO: 1360750 - RNA, 20 nt, Human
uccuacugcucuaggcccag

SEQ ID NO: 1360751 - RNA, 21 nt, Human
ucuagcucuuuuguuauauug

SEQ ID NO: 1360752 - RNA, 23 nt, Human
ucucauguacucacuuuuuaaaa

SEQ ID NO: 1360753 - RNA, 21 nt, Human
ugaagauauucccuuccuuua

SEQ ID NO: 1360754 - RNA, 25 nt, Human
ugacucacaguucugcauggcuugg

SEQ ID NO: 1360755 - RNA, 21 nt, Human
ugaggugaacagugacucucc

SEQ ID NO: 1360756 - RNA, 20 nt, Human
ugcucuaggcccagcuuagc

SEQ ID NO: 1360757 - RNA, 24 nt, Human
uggcagcaagcaauggauaaucuc

SEQ ID NO: 1360758 - RNA, 19 nt, Human
uggcugguuugcagaaggu

SEQ ID NO: 1360759 - RNA, 23 nt, Human
ugggagaaauuguccaaaaaugg

SEQ ID NO: 1360760 - RNA, 19 nt, Human
uggguaaauaaacccauca

SEQ ID NO: 1360761 - RNA, 23 nt, Human
uggguaaauaaacccaucacaaa

SEQ ID NO: 1360762 - RNA, 21 nt, Human
ugggugcuacauguaugugug

SEQ ID NO: 1360763 - RNA, 19 nt, Human
ugguaggguuuauauagua

SEQ ID NO: 1360764 - RNA, 21 nt, Human
uguauguguguuuauguaugu

SEQ ID NO: 1360765 - RNA, 18 nt, Human
uguguguuuauguaugua

SEQ ID NO: 1360766 - RNA, 18 nt, Human
uguguguuuauguaugua

SEQ ID NO: 1360767 - RNA, 20 nt, Human
uguguuuauguauguacaua

SEQ ID NO: 1360768 - RNA, 22 nt, Human
uuaagcccagaguuuacacugg

SEQ ID NO: 1360769 - RNA, 21 nt, Human
uuagggagcuaucuguggaag

SEQ ID NO: 1360770 - RNA, 23 nt, Human
uuaggugccacugcaggagcugg

SEQ ID NO: 1360771 - RNA, 19 nt, Human
uuccaacggucccccaaau

SEQ ID NO: 1360772 - RNA, 22 nt, Human
uucuucagggcagcaaaaauug

SEQ ID NO: 1360773 - RNA, 18 nt, Human
uugcagaaggucacugca

SEQ ID NO: 1360774 - RNA, 24 nt, Human
uuggcagaagcuuuaaaaagagaa

SEQ ID NO: 1360775 - RNA, 23 nt, Human
uuuaaaaucugacauccgauauu

SEQ ID NO: 1360776 - RNA, 20 nt, Human
uuugcagaaggucacugcau

SEQ ID NO: 1360777 - RNA, 20 nt, Human
aauccuacuucugccauuua

SEQ ID NO: 1360778 - RNA, 18 nt, Human
aauccuggucucuccuac

SEQ ID NO: 1360779 - RNA, 19 nt, Human
accgcucccgccaauccug

SEQ ID NO: 1360780 - RNA, 24 nt, Human
caggauccuccaccucccguugcu

SEQ ID NO: 1360781 - RNA, 20 nt, Human
ccaggauccuccaccucccg

SEQ ID NO: 1360782 - RNA, 21 nt, Human
ccaucccuuccuuuucgcccu

SEQ ID NO: 1360783 - RNA, 29 nt, Human
ccccucgcugcuguguauucuccuugcag

SEQ ID NO: 1360784 - RNA, 18 nt, Human
ccccucucuuccucucuc

SEQ ID NO: 1360785 - RNA, 20 nt, Human
ccccucucuuccucucuccc

SEQ ID NO: 1360786 - RNA, 23 nt, Human
cccgccccgcgucagcgcagaag

SEQ ID NO: 1360787 - RNA, 20 nt, Human
ccguugcuuugccucuccuc

SEQ ID NO: 1360788 - RNA, 18 nt, Human
ccuccaggauccuccacc

SEQ ID NO: 1360789 - RNA, 22 nt, Human
ccucccguugcuuugccucucc

SEQ ID NO: 1360790 - RNA, 23 nt, Human
ccucgcugcuguguauucuccuu

SEQ ID NO: 1360791 - RNA, 22 nt, Human
ccucuggccgucagcuuccagg

SEQ ID NO: 1360792 - RNA, 21 nt, Human
ccuuccuuuucgcccuccccg

SEQ ID NO: 1360793 - RNA, 20 nt, Human
ccuugcagacaccuccagga

SEQ ID NO: 1360794 - RNA, 19 nt, Human
cgccccgcccccgggugcc

SEQ ID NO: 1360795 - RNA, 19 nt, Human
cgccccgcccccgggugcc

SEQ ID NO: 1360796 - RNA, 21 nt, Human
cuuagacuaucacauccugcc

SEQ ID NO: 1360797 - RNA, 22 nt, Human
cuugcagacaccuccaggaucc

SEQ ID NO: 1360798 - RNA, 21 nt, Human
cuuguucauuuguaacaucag

SEQ ID NO: 1360799 - RNA, 19 nt, Human
gcagaagucgcuggguccg

SEQ ID NO: 1360800 - RNA, 21 nt, Human
gccacaucgggucgccccgcc

SEQ ID NO: 1360801 - RNA, 20 nt, Human
uagcugugcgaucuugaaca

SEQ ID NO: 1360802 - RNA, 19 nt, Human
ucaggaacugcuucuuuuc

SEQ ID NO: 1360803 - RNA, 23 nt, Human
ucaggaacugcuucuuuuccucc

SEQ ID NO: 1360804 - RNA, 22 nt, Human
uccccgccacaucgggucgccc

SEQ ID NO: 1360805 - RNA, 19 nt, Human
ucccucuggccgucagcuu

SEQ ID NO: 1360806 - RNA, 21 nt, Human
ucccucuggccgucagcuucc

SEQ ID NO: 1360807 - RNA, 23 nt, Human
uccuccuucucucuucuagaaga

SEQ ID NO: 1360808 - RNA, 22 nt, Human
uccuugcagacaccuccaggau

SEQ ID NO: 1360809 - RNA, 21 nt, Human
ucgccccgcccccgggugccu

SEQ ID NO: 1360810 - RNA, 22 nt, Human
ucgcugcuguguauucuccuug

SEQ ID NO: 1360811 - RNA, 20 nt, Human
ucuccuacuccuccccgcca

SEQ ID NO: 1360812 - RNA, 22 nt, Human
ucuccuacuccuccccgccaca

SEQ ID NO: 1360813 - RNA, 20 nt, Human
ucucugggagauccuuguuc

SEQ ID NO: 1360814 - RNA, 20 nt, Human
ugcuuugccucuccucugug

SEQ ID NO: 1360815 - RNA, 20 nt, Human
uggagaaaagaaaauagggu

SEQ ID NO: 1360816 - RNA, 24 nt, Human
ugugaccacccuucccucccucug

SEQ ID NO: 1360817 - RNA, 26 nt, Human
ugugaccacccuucccucccucuggc

SEQ ID NO: 1360818 - RNA, 22 nt, Human
uucccuggguucacaauccuac

SEQ ID NO: 1360819 - RNA, 24 nt, Human
uuccuccuucucucuucuagaaga

SEQ ID NO: 1360820 - RNA, 19 nt, Human
uuuaaagaggaaaaaaaau

SEQ ID NO: 1360821 - RNA, 23 nt, Human
uuuuccuccuucucucuucuaga

SEQ ID NO: 1360822 - RNA, 19 nt, Human
acaugcuuggagcuuagga

SEQ ID NO: 1360823 - RNA, 22 nt, Human
agacagguuuauugacacuccu

SEQ ID NO: 1360824 - RNA, 23 nt, Human
aggagggccccgggguucugggg

SEQ ID NO: 1360825 - RNA, 19 nt, Human
aggaugggggcuccugggc

SEQ ID NO: 1360826 - RNA, 20 nt, Human
aggcagcagauccgugauua

SEQ ID NO: 1360827 - RNA, 21 nt, Human
aggcagggcuaggaccaggcc

SEQ ID NO: 1360828 - RNA, 23 nt, Human
aggcagggcuaggaccaggccca

SEQ ID NO: 1360829 - RNA, 18 nt, Human
aggcccaggugggcgggc

SEQ ID NO: 1360830 - RNA, 18 nt, Human
aggccuccccucacccag

SEQ ID NO: 1360831 - RNA, 22 nt, Human
aggcugagcaggagcccggggc

SEQ ID NO: 1360832 - RNA, 20 nt, Human
cacaguggccgaggcagggc

SEQ ID NO: 1360833 - RNA, 20 nt, Human
cacuaacccucuugcacccc

SEQ ID NO: 1360834 - RNA, 21 nt, Human
cacuaacccucuugcaccccc

SEQ ID NO: 1360835 - RNA, 22 nt, Human
cagcagagagggagacccaggg

SEQ ID NO: 1360836 - RNA, 23 nt, Human
cagcggccucuccagccccagcc

SEQ ID NO: 1360837 - RNA, 19 nt, Human
caguggccgaggcagggcu

SEQ ID NO: 1360838 - RNA, 25 nt, Human
cauggcccccagaugaggacccaag

SEQ ID NO: 1360839 - RNA, 26 nt, Human
cauucagacugguggucaggagaccc

SEQ ID NO: 1360840 - RNA, 22 nt, Human
cccagggcaggggggagccuca

SEQ ID NO: 1360841 - RNA, 25 nt, Human
ccccagaugaggacccaagcuccug

SEQ ID NO: 1360842 - RNA, 18 nt, Human
cccuccugcucccuuccc

SEQ ID NO: 1360843 - RNA, 25 nt, Human
ccugcaccacacgccuucccaggaa

SEQ ID NO: 1360844 - RNA, 24 nt, Human
ccuucagucaagacagcugggagg

SEQ ID NO: 1360845 - RNA, 24 nt, Human
cgaggcagggcuaggaccaggccc

SEQ ID NO: 1360846 - RNA, 19 nt, Human
cugcaccacacgccuuccc

SEQ ID NO: 1360847 - RNA, 22 nt, Human
cugcucccuucccacaugcagg

SEQ ID NO: 1360848 - RNA, 20 nt, Human
cuucccaggaaggccucccc

SEQ ID NO: 1360849 - RNA, 21 nt, Human
cuugcacccccuuccugaucc

SEQ ID NO: 1360850 - RNA, 23 nt, Human
gaccaggcccaggugggcgggca

SEQ ID NO: 1360851 - RNA, 23 nt, Human
gagagcaggagggccccgggguu

SEQ ID NO: 1360852 - RNA, 18 nt, Human
gagcaggagggccccggg

SEQ ID NO: 1360853 - RNA, 20 nt, Human
gaggagcaccucugccuggc

SEQ ID NO: 1360854 - RNA, 24 nt, Human
ggagcagcagagagggagacccag

SEQ ID NO: 1360855 - RNA, 22 nt, Human
ggagggccccgggguucugggg

SEQ ID NO: 1360856 - RNA, 26 nt, Human
ggccgaggcagggcuaggaccaggcc

SEQ ID NO: 1360857 - RNA, 21 nt, Human
gggagcagcagagagggagac

SEQ ID NO: 1360858 - RNA, 26 nt, Human
ggggaaggggcccagggcaggggaaa

SEQ ID NO: 1360859 - RNA, 23 nt, Human
ggggagccucauacgagucuggc

SEQ ID NO: 1360860 - RNA, 24 nt, Human
ggugccacugugagcacaggccug

SEQ ID NO: 1360861 - RNA, 23 nt, Human
gguucuggggagcagcagagagg

SEQ ID NO: 1360862 - RNA, 21 nt, Human
uaggaugggggcuccugggca

SEQ ID NO: 1360863 - RNA, 22 nt, Human
uaggaugggggcuccugggcag

SEQ ID NO: 1360864 - RNA, 20 nt, Human
ucacccagccaggcccuccu

SEQ ID NO: 1360865 - RNA, 23 nt, Human
ucccagagcgaucuuuaggaccc

SEQ ID NO: 1360866 - RNA, 23 nt, Human
ucccaggaaggccuccccucacc

SEQ ID NO: 1360867 - RNA, 20 nt, Human
uccugggcaguggggaaggg

SEQ ID NO: 1360868 - RNA, 24 nt, Human
ucuccagccccagcccccaggacc

SEQ ID NO: 1360869 - RNA, 19 nt, Human
ucuggcuggcacaaggcug

SEQ ID NO: 1360870 - RNA, 22 nt, Human
ugagcaggagcccggggcucac

SEQ ID NO: 1360871 - RNA, 24 nt, Human
ugaggagcaccucugccuggccca

SEQ ID NO: 1360872 - RNA, 24 nt, Human
ugcuggugccacugugagcacagg

SEQ ID NO: 1360873 - RNA, 21 nt, Human
ugcuuggagcuuaggaugggg

SEQ ID NO: 1360874 - RNA, 22 nt, Human
uggcccagacaugcuuggagcu

SEQ ID NO: 1360875 - RNA, 18 nt, Human
ugggacgcuggcucccag

SEQ ID NO: 1360876 - RNA, 18 nt, Human
ugggcaguggggaagggg

SEQ ID NO: 1360877 - RNA, 19 nt, Human
ugggcaguggggaaggggc

SEQ ID NO: 1360878 - RNA, 18 nt, Human
uguggagagcaggagggc

SEQ ID NO: 1360879 - RNA, 21 nt, Human
uuaggaccccuucugcucccc

SEQ ID NO: 1360880 - RNA, 25 nt, Human
uugcacccccuuccugauccucgug

SEQ ID NO: 1360881 - RNA, 19 nt, Human
uuuaggaccccuucugcuc

SEQ ID NO: 1360882 - RNA, 23 nt, Human
uuuuuuuuuuuuuuuuucgcacu

SEQ ID NO: 1360883 - RNA, 25 nt, Human
uuuuuuuuuuuuuuuuucgcacuga

SEQ ID NO: 1360884 - RNA, 27 nt, Human
uuuuuuuuuuuuuuuuuuuuuucgggg

SEQ ID NO: 1360885 - RNA, 24 nt, Human
aaaaauauacaauaauuaaccuuc

SEQ ID NO: 1360886 - RNA, 18 nt, Human
aaacagacuugacugaaa

SEQ ID NO: 1360887 - RNA, 26 nt, Human
aauuauaaagcuuuucugccauagga

SEQ ID NO: 1360888 - RNA, 19 nt, Human
acaguggcugcuacccauu

SEQ ID NO: 1360889 - RNA, 28 nt, Human
acauuucugaagaagcaaacaaacagac

SEQ ID NO: 1360890 - RNA, 24 nt, Human
accaaauucucuuuaaggacauag

SEQ ID NO: 1360891 - RNA, 22 nt, Human
agauuauacucuuauaagugua

SEQ ID NO: 1360892 - RNA, 28 nt, Human
auuauauuuccuuucucugaccuucagg

SEQ ID NO: 1360893 - RNA, 23 nt, Human
auuuccuuucucugcucauaauu

SEQ ID NO: 1360894 - RNA, 23 nt, Human
caaaaaacguguuauauacuuaa

SEQ ID NO: 1360895 - RNA, 22 nt, Human
caauaagcacauuuuuucaaau

SEQ ID NO: 1360896 - RNA, 26 nt, Human
cagcauugaacagacuugccugaaag

SEQ ID NO: 1360897 - RNA, 21 nt, Human
ccacaguggauggagcagcac

SEQ ID NO: 1360898 - RNA, 19 nt, Human
gaaagcaaacaaauaacuu

SEQ ID NO: 1360899 - RNA, 19 nt, Human
gcaaacaaacagacuugac

SEQ ID NO: 1360900 - RNA, 24 nt, Human
gcaauuauaaagcuuuucugccau

SEQ ID NO: 1360901 - RNA, 19 nt, Human
guggauggagcagcacaag

SEQ ID NO: 1360902 - RNA, 23 nt, Human
uaaaaaacauuucugaagaagca

SEQ ID NO: 1360903 - RNA, 23 nt, Human
uaaaaauaucuuuuauucuucaa

SEQ ID NO: 1360904 - RNA, 21 nt, Human
uacagaauuagaguuccauga

SEQ ID NO: 1360905 - RNA, 19 nt, Human
uacagcauugaacagacuu

SEQ ID NO: 1360906 - RNA, 21 nt, Human
uaccacaucaaccaaauuacc

SEQ ID NO: 1360907 - RNA, 21 nt, Human
uauacuuaaauaaauguguua

SEQ ID NO: 1360908 - RNA, 20 nt, Human
ucaaauagccguagucuaac

SEQ ID NO: 1360909 - RNA, 20 nt, Human
ucaguguuuucauuucagcu

SEQ ID NO: 1360910 - RNA, 22 nt, Human
ucaucauaaaaauaucuuuuau

SEQ ID NO: 1360911 - RNA, 22 nt, Human
uccaaauacaagcaacaguaaa

SEQ ID NO: 1360912 - RNA, 23 nt, Human
ucugaagaagcaaacaaacagac

SEQ ID NO: 1360913 - RNA, 22 nt, Human
ugaaagcaaacaaauaacuuua

SEQ ID NO: 1360914 - RNA, 24 nt, Human
ugaagaagcaaacaaacagacuug

SEQ ID NO: 1360915 - RNA, 21 nt, Human
ugagauuguaaaaaacauuuc

SEQ ID NO: 1360916 - RNA, 22 nt, Human
ugaguccaaauacaagcaacag

SEQ ID NO: 1360917 - RNA, 19 nt, Human
ugccauaggauauaaucca

SEQ ID NO: 1360918 - RNA, 20 nt, Human
uggaauaacaaaauauagua

SEQ ID NO: 1360919 - RNA, 19 nt, Human
uggacaguggcugcuaccc

SEQ ID NO: 1360920 - RNA, 21 nt, Human
uguaaaaaacauuucugaaga

SEQ ID NO: 1360921 - RNA, 18 nt, Human
uuacucucaucauaaaaa

SEQ ID NO: 1360922 - RNA, 24 nt, Human
uuagaguuuacaacuauuuuaaug

SEQ ID NO: 1360923 - RNA, 18 nt, Human
uuauagaaaugaauccau

SEQ ID NO: 1360924 - RNA, 24 nt, Human
uuauauuuccuuucucugcucaua

SEQ ID NO: 1360925 - RNA, 20 nt, Human
uuccuuucucugcucauaau

SEQ ID NO: 1360926 - RNA, 23 nt, Human
uugggucaugauuucaaaacauu

SEQ ID NO: 1360927 - RNA, 26 nt, Human
uuucugccauaggauauaauccacag

SEQ ID NO: 1360928 - RNA, 23 nt, Human
uuuucaguguuuucauuucagcu

SEQ ID NO: 1360929 - RNA, 18 nt, Human
uuuuuuuuuuuuuuuuug

SEQ ID NO: 1360930 - RNA, 23 nt, Human
agaaaauggaacaucucaaauau

SEQ ID NO: 1360931 - RNA, 23 nt, Human
caaaaacaucuccacacuguucc

SEQ ID NO: 1360932 - RNA, 23 nt, Human
caagacaaaaacaucuccacacu

SEQ ID NO: 1360933 - RNA, 20 nt, Human
cucuggguggcacagacggc

SEQ ID NO: 1360934 - RNA, 23 nt, Human
cucuggguggcacagacggcugc

SEQ ID NO: 1360935 - RNA, 22 nt, Human
gugaaucuuuuauuuggacaag

SEQ ID NO: 1360936 - RNA, 21 nt, Human
uagcggcccgccggcucuggg

SEQ ID NO: 1360937 - RNA, 20 nt, Human
uauacagaaaauggaacauc

SEQ ID NO: 1360938 - RNA, 21 nt, Human
ucuccggggaccuagcggccc

SEQ ID NO: 1360939 - RNA, 21 nt, Human
uuuuuuuuuuuuacuggugaa

SEQ ID NO: 1360940 - RNA, 19 nt, Human
uuuuuuuuuuuuuuacugg

SEQ ID NO: 1360941 - RNA, 24 nt, Human
cagaggucuuuuuuuuuuuuuaaa

SEQ ID NO: 1360942 - RNA, 21 nt, Human
aaaaagaacucucucugugag

SEQ ID NO: 1360943 - RNA, 21 nt, Human
aaacaacaacaaaaagaacuc

SEQ ID NO: 1360944 - RNA, 18 nt, Human
aaaugaaggagcuuugua

SEQ ID NO: 1360945 - RNA, 19 nt, Human
aaggagcuuuguaaauuuu

SEQ ID NO: 1360946 - RNA, 19 nt, Human
aauuucugcccaggaucuc

SEQ ID NO: 1360947 - RNA, 21 nt, Human
acaaaucucucucaaauguau

SEQ ID NO: 1360948 - RNA, 23 nt, Human
acacuccaucaccagugccgccu

SEQ ID NO: 1360949 - RNA, 21 nt, Human
acacuggguacaucucccagu

SEQ ID NO: 1360950 - RNA, 22 nt, Human
acagugaaacgcacccucucca

SEQ ID NO: 1360951 - RNA, 18 nt, Human
acccacaaagcaagaccu

SEQ ID NO: 1360952 - RNA, 26 nt, Human
acccauccccguccccaccccccccu

SEQ ID NO: 1360953 - RNA, 23 nt, Human
accccccccuccaccgcugggcc

SEQ ID NO: 1360954 - RNA, 24 nt, Human
acccuggccuggaccuccagcccu

SEQ ID NO: 1360955 - RNA, 22 nt, Human
acuccaucaccagugccgccuu

SEQ ID NO: 1360956 - RNA, 18 nt, Human
agaagccggaguuggccc

SEQ ID NO: 1360957 - RNA, 21 nt, Human
agaagggcccagaacucagua

SEQ ID NO: 1360958 - RNA, 20 nt, Human
agauuuccuccaagccacau

SEQ ID NO: 1360959 - RNA, 21 nt, Human
agcaugguccaugcugcagcc

SEQ ID NO: 1360960 - RNA, 21 nt, Human
aggagggaggggggcgcaggc

SEQ ID NO: 1360961 - RNA, 21 nt, Human
aguggagagucucaucccgug

SEQ ID NO: 1360962 - RNA, 23 nt, Human
aucccaaccuaccucccagucuu

SEQ ID NO: 1360963 - RNA, 27 nt, Human
auccccguccccaccccccccuccacc

SEQ ID NO: 1360964 - RNA, 21 nt, Human
auccgggagggaagcuccggc

SEQ ID NO: 1360965 - RNA, 20 nt, Human
augccuuuugccagcugcag

SEQ ID NO: 1360966 - RNA, 22 nt, Human
cacacuccaucaccagugccgc

SEQ ID NO: 1360967 - RNA, 24 nt, Human
cacacuccaucaccagugccgccu

SEQ ID NO: 1360968 - RNA, 22 nt, Human
cacccacccacaaagcaagacc

SEQ ID NO: 1360969 - RNA, 24 nt, Human
caccccccccuccaccgcugggcc

SEQ ID NO: 1360970 - RNA, 20 nt, Human
cacccuggccuggaccucca

SEQ ID NO: 1360971 - RNA, 19 nt, Human
cacgauaaaggaaggagag

SEQ ID NO: 1360972 - RNA, 22 nt, Human
cagaagggcccagaacucagua

SEQ ID NO: 1360973 - RNA, 20 nt, Human
cagagcaggcugucuccccu

SEQ ID NO: 1360974 - RNA, 23 nt, Human
cagagcugcggccugacugacgc

SEQ ID NO: 1360975 - RNA, 19 nt, Human
cagcgggcggagaggaggg

SEQ ID NO: 1360976 - RNA, 19 nt, Human
cagcugcagugagauucug

SEQ ID NO: 1360977 - RNA, 18 nt, Human
cagcugcuguggucagag

SEQ ID NO: 1360978 - RNA, 19 nt, Human
cauccccguccccaccccc

SEQ ID NO: 1360979 - RNA, 22 nt, Human
ccacaccccacagugaaacgca

SEQ ID NO: 1360980 - RNA, 24 nt, Human
ccacagugaaacgcacccucucca

SEQ ID NO: 1360981 - RNA, 18 nt, Human
ccacccccggauuuuccc

SEQ ID NO: 1360982 - RNA, 28 nt, Human
ccagaggccccacacuccaucaccaggg

SEQ ID NO: 1360983 - RNA, 19 nt, Human
cccagaggccccacacucc

SEQ ID NO: 1360984 - RNA, 21 nt, Human
cccccccuccaccgcugggcc

SEQ ID NO: 1360985 - RNA, 23 nt, Human
cccccccuccaccgcugggccca

SEQ ID NO: 1360986 - RNA, 21 nt, Human
ccccccuccaccgcugggccc

SEQ ID NO: 1360987 - RNA, 23 nt, Human
ccccguccccaccccccccucca

SEQ ID NO: 1360988 - RNA, 19 nt, Human
cccgggcggcgaggcgggg

SEQ ID NO: 1360989 - RNA, 18 nt, Human
cccuucacagcugcugug

SEQ ID NO: 1360990 - RNA, 25 nt, Human
ccuccagcccuguuagggcuaaggc

SEQ ID NO: 1360991 - RNA, 19 nt, Human
ccuggccuggaccuccagc

SEQ ID NO: 1360992 - RNA, 19 nt, Human
ccuugcccaccacuuucuu

SEQ ID NO: 1360993 - RNA, 18 nt, Human
ccuuuugccagcugcagu

SEQ ID NO: 1360994 - RNA, 25 nt, Human
cgcaagcccgcgggucuugggccuc

SEQ ID NO: 1360995 - RNA, 21 nt, Human
cgcacccucuccagcucacug

SEQ ID NO: 1360996 - RNA, 18 nt, Human
cggccagcgggcggagag

SEQ ID NO: 1360997 - RNA, 23 nt, Human
cgucagggccccgugacccaucc

SEQ ID NO: 1360998 - RNA, 21 nt, Human
cuccaagccacaugaggacuc

SEQ ID NO: 1360999 - RNA, 21 nt, Human
cuccacaccccacagugaaac

SEQ ID NO: 1361000 - RNA, 20 nt, Human
cucuagcuucagggcgccag

SEQ ID NO: 1361001 - RNA, 18 nt, Human
cucuccagcucacugagc

SEQ ID NO: 1361002 - RNA, 23 nt, Human
cugaaacaucuauuagacguugg

SEQ ID NO: 1361003 - RNA, 22 nt, Human
cugcaauuuuauuuuaauuuga

SEQ ID NO: 1361004 - RNA, 21 nt, Human
cuggaccgacgggccucuaga

SEQ ID NO: 1361005 - RNA, 20 nt, Human
cuucacagcugcugugguca

SEQ ID NO: 1361006 - RNA, 19 nt, Human
cuucccagaggccccacac

SEQ ID NO: 1361007 - RNA, 24 nt, Human
cuuggagaucccuggcggccaccc

SEQ ID NO: 1361008 - RNA, 19 nt, Human
gagagcuggccaaugccuu

SEQ ID NO: 1361009 - RNA, 18 nt, Human
gagaggagggaggggggc

SEQ ID NO: 1361010 - RNA, 20 nt, Human
gcagaagccggaguuggccc

SEQ ID NO: 1361011 - RNA, 22 nt, Human
gcagaaucuuuagacuacacag

SEQ ID NO: 1361012 - RNA, 22 nt, Human
gcauccauccccagccugggau

SEQ ID NO: 1361013 - RNA, 18 nt, Human
gccgcccgcgcucggguu

SEQ ID NO: 1361014 - RNA, 18 nt, Human
gccuggaccuccagcccu

SEQ ID NO: 1361015 - RNA, 19 nt, Human
gccuuuugccagcugcagu

SEQ ID NO: 1361016 - RNA, 22 nt, Human
ggccagcgggcggagaggaggg

SEQ ID NO: 1361017 - RNA, 18 nt, Human
ggccccgugacccauccc

SEQ ID NO: 1361018 - RNA, 23 nt, Human
gggaagcuccggccgcccagccc

SEQ ID NO: 1361019 - RNA, 19 nt, Human
ggguuuuccgcagcggagc

SEQ ID NO: 1361020 - RNA, 23 nt, Human
ggugggggagaccuaaacucaag

SEQ ID NO: 1361021 - RNA, 19 nt, Human
guccccaccccccccucca

SEQ ID NO: 1361022 - RNA, 18 nt, Human
uaaaggaaggagagaagg

SEQ ID NO: 1361023 - RNA, 20 nt, Human
uaaaggaaggagagaagggg

SEQ ID NO: 1361024 - RNA, 19 nt, Human
uaacugcgggacccgucag

SEQ ID NO: 1361025 - RNA, 22 nt, Human
uaaggccacuuacagaggcuga

SEQ ID NO: 1361026 - RNA, 22 nt, Human
ucaauaaacaacaacaaaaaga

SEQ ID NO: 1361027 - RNA, 23 nt, Human
ucaauaaacaacaacaaaaagaa

SEQ ID NO: 1361028 - RNA, 21 nt, Human
ucaccagugccgccuuggagg

SEQ ID NO: 1361029 - RNA, 20 nt, Human
ucacccuggccuggaccucc

SEQ ID NO: 1361030 - RNA, 18 nt, Human
uccaucaccagugccgcc

SEQ ID NO: 1361031 - RNA, 25 nt, Human
uccaucaccagugccgccuuggagg

SEQ ID NO: 1361032 - RNA, 20 nt, Human
uccauccccagccugggaug

SEQ ID NO: 1361033 - RNA, 20 nt, Human
uccaugcugcagccucagag

SEQ ID NO: 1361034 - RNA, 18 nt, Human
ucccaaccuaccucccag

SEQ ID NO: 1361035 - RNA, 21 nt, Human
ucccagauggcaguggagagu

SEQ ID NO: 1361036 - RNA, 20 nt, Human
uccccaccccccccuccacc

SEQ ID NO: 1361037 - RNA, 28 nt, Human
uccccaccccccccuccaccgcugggcc

SEQ ID NO: 1361038 - RNA, 22 nt, Human
uccccguccccaccccccccuc

SEQ ID NO: 1361039 - RNA, 18 nt, Human
ucccuggcggccaccccc

SEQ ID NO: 1361040 - RNA, 24 nt, Human
ucccuggcggccacccccggauuu

SEQ ID NO: 1361041 - RNA, 19 nt, Human
uccgcagcggagcuccgag

SEQ ID NO: 1361042 - RNA, 20 nt, Human
ucucccagucacccuggccu

SEQ ID NO: 1361043 - RNA, 21 nt, Human
ucuuaggggcccuugcccacc

SEQ ID NO: 1361044 - RNA, 20 nt, Human
ucuuggguuugccaagacac

SEQ ID NO: 1361045 - RNA, 22 nt, Human
ugaaaaaauaggaacucgggca

SEQ ID NO: 1361046 - RNA, 21 nt, Human
ugaccaaaaugcagcuucaac

SEQ ID NO: 1361047 - RNA, 23 nt, Human
ugacccauccccguccccacccc

SEQ ID NO: 1361048 - RNA, 21 nt, Human
ugagaaauaaagauuuccucc

SEQ ID NO: 1361049 - RNA, 21 nt, Human
ugaggagacaacaaaccucgg

SEQ ID NO: 1361050 - RNA, 18 nt, Human
ugaggugguaggaguuca

SEQ ID NO: 1361051 - RNA, 24 nt, Human
ugaguaaagggauuucugagagcu

SEQ ID NO: 1361052 - RNA, 19 nt, Human
ugcccgcaugcaggucagg

SEQ ID NO: 1361053 - RNA, 19 nt, Human
uggcagcugggggugagga

SEQ ID NO: 1361054 - RNA, 24 nt, Human
uggccuggaccuccagcccuguua

SEQ ID NO: 1361055 - RNA, 19 nt, Human
uggcugagggaagaaaggg

SEQ ID NO: 1361056 - RNA, 22 nt, Human
ugggaaaaauuaaauaugggug

SEQ ID NO: 1361057 - RNA, 18 nt, Human
uguuuggucuugcuucuu

SEQ ID NO: 1361058 - RNA, 21 nt, Human
uucaauaaacaacaacaaaaa

SEQ ID NO: 1361059 - RNA, 20 nt, Human
uucacagcugcuguggucag

SEQ ID NO: 1361060 - RNA, 18 nt, Human
uucccuggcgcaucccgg

SEQ ID NO: 1361061 - RNA, 18 nt, Human
uuucuuggguuugccaag

SEQ ID NO: 1361062 - RNA, 18 nt, Human
uuucuuggguuugccaag

SEQ ID NO: 1361063 - RNA, 20 nt, Human
aaacaaagacaauuaacaug

SEQ ID NO: 1361064 - RNA, 21 nt, Human
acagggaagcuuacaacaaaa

SEQ ID NO: 1361065 - RNA, 21 nt, Human
accagagggagaaacaaagac

SEQ ID NO: 1361066 - RNA, 24 nt, Human
acuuaaguuuucucuacuuauaac

SEQ ID NO: 1361067 - RNA, 20 nt, Human
agacaggaucucacgggauu

SEQ ID NO: 1361068 - RNA, 25 nt, Human
agagggagagaggacacagggaagc

SEQ ID NO: 1361069 - RNA, 18 nt, Human
aggggagggggaagggag

SEQ ID NO: 1361070 - RNA, 21 nt, Human
auguuaggaauguuuuaagca

SEQ ID NO: 1361071 - RNA, 20 nt, Human
caaaggagacaggaucucac

SEQ ID NO: 1361072 - RNA, 24 nt, Human
caauauuauucauccaggaccaaa

SEQ ID NO: 1361073 - RNA, 21 nt, Human
cacagcuuucugagccccuac

SEQ ID NO: 1361074 - RNA, 26 nt, Human
caguacaaagcuuucacagcguggaa

SEQ ID NO: 1361075 - RNA, 23 nt, Human
caugucucagaucuugaggaaaa

SEQ ID NO: 1361076 - RNA, 20 nt, Human
ccagcuggaaccuccucuca

SEQ ID NO: 1361077 - RNA, 22 nt, Human
cccagcuggaaccuccucucac

SEQ ID NO: 1361078 - RNA, 21 nt, Human
cugagccccuacuugacccag

SEQ ID NO: 1361079 - RNA, 18 nt, Human
cuuuuaacauuccuuuua

SEQ ID NO: 1361080 - RNA, 20 nt, Human
gcuuuauuaagcagagugac

SEQ ID NO: 1361081 - RNA, 22 nt, Human
ggaaaugagugaguuucacagc

SEQ ID NO: 1361082 - RNA, 22 nt, Human
gggaagaaaacacaggcgcaaa

SEQ ID NO: 1361083 - RNA, 18 nt, Human
ggggaagggagagaggga

SEQ ID NO: 1361084 - RNA, 22 nt, Human
uaaacucucuaaggcaggaaau

SEQ ID NO: 1361085 - RNA, 22 nt, Human
uaaggucugcuggucacagaaa

SEQ ID NO: 1361086 - RNA, 22 nt, Human
uagcuuucuuggggaagaaaac

SEQ ID NO: 1361087 - RNA, 23 nt, Human
uauguguggugggaagauguuac

SEQ ID NO: 1361088 - RNA, 22 nt, Human
ucaauauuauucauccaggacc

SEQ ID NO: 1361089 - RNA, 18 nt, Human
ucauccaggaccaaagua

SEQ ID NO: 1361090 - RNA, 19 nt, Human
uccuugaaaauacuucucc

SEQ ID NO: 1361091 - RNA, 18 nt, Human
ucuccuucauagcggaga

SEQ ID NO: 1361092 - RNA, 19 nt, Human
ucugagccccuacuugacc

SEQ ID NO: 1361093 - RNA, 21 nt, Human
ugacccaggaagcccagcugg

SEQ ID NO: 1361094 - RNA, 20 nt, Human
ugagccccuacuugacccag

SEQ ID NO: 1361095 - RNA, 24 nt, Human
ugaggaaaacuggaauuguaacuu

SEQ ID NO: 1361096 - RNA, 22 nt, Human
ugagugaguuucacagcuuucu

SEQ ID NO: 1361097 - RNA, 22 nt, Human
ugcagcgggauggcaaaggaga

SEQ ID NO: 1361098 - RNA, 20 nt, Human
uggaaccuccucucacuuuc

SEQ ID NO: 1361099 - RNA, 18 nt, Human
uggaaggggucccgagcg

SEQ ID NO: 1361100 - RNA, 26 nt, Human
ugggcuuuuaacauuccuuuuaguuu

SEQ ID NO: 1361101 - RNA, 21 nt, Human
uguggugggaagauguuacca

SEQ ID NO: 1361102 - RNA, 20 nt, Human
uucaggggagggggaaggga

SEQ ID NO: 1361103 - RNA, 22 nt, Human
uuucaggggagggggaagggag

SEQ ID NO: 1361104 - RNA, 19 nt, Human
aaacaaugacuaaaugagc

SEQ ID NO: 1361105 - RNA, 23 nt, Human
aaagaaugagcccagagccugag

SEQ ID NO: 1361106 - RNA, 21 nt, Human
aaagcauuggcaaagccagca

SEQ ID NO: 1361107 - RNA, 21 nt, Human
aaagcuuugcaugcauuuguu

SEQ ID NO: 1361108 - RNA, 22 nt, Human
aaagggggauuuucagcagcug

SEQ ID NO: 1361109 - RNA, 22 nt, Human
aaagugucucacccaaauccua

SEQ ID NO: 1361110 - RNA, 23 nt, Human
aacacaggcagcuuuucucagca

SEQ ID NO: 1361111 - RNA, 18 nt, Human
aacccaaggcccuagcag

SEQ ID NO: 1361112 - RNA, 18 nt, Human
aacccacucgcuuucccu

SEQ ID NO: 1361113 - RNA, 20 nt, Human
aacuccuuggcuuaccuagu

SEQ ID NO: 1361114 - RNA, 21 nt, Human
aagaaugaaaaugagaaaaau

SEQ ID NO: 1361115 - RNA, 23 nt, Human
aagcaguggccuccuggucagcu

SEQ ID NO: 1361116 - RNA, 19 nt, Human
aagccagcacaucugugac

SEQ ID NO: 1361117 - RNA, 21 nt, Human
aagccugccugcagggccgcc

SEQ ID NO: 1361118 - RNA, 21 nt, Human
aaggaagcuccaguuguagcc

SEQ ID NO: 1361119 - RNA, 26 nt, Human
aagugucucacccaaauccuacagcc

SEQ ID NO: 1361120 - RNA, 23 nt, Human
aauuuuuuuaaucaucagcugcu

SEQ ID NO: 1361121 - RNA, 28 nt, Human
acacaccccaagagguagagggaacgcc

SEQ ID NO: 1361122 - RNA, 19 nt, Human
acauccacccaauccacac

SEQ ID NO: 1361123 - RNA, 21 nt, Human
accacagcaacacaggcagcu

SEQ ID NO: 1361124 - RNA, 18 nt, Human
acccggaagcuggcucug

SEQ ID NO: 1361125 - RNA, 24 nt, Human
acccuagagaaucuucacuggaua

SEQ ID NO: 1361126 - RNA, 25 nt, Human
acgcaaggcuacacaccaugcacac

SEQ ID NO: 1361127 - RNA, 22 nt, Human
acucaggcccuaggcucugcag

SEQ ID NO: 1361128 - RNA, 21 nt, Human
agaaagacauauccuuccuaa

SEQ ID NO: 1361129 - RNA, 25 nt, Human
agaaagacauauccuuccuaacuca

SEQ ID NO: 1361130 - RNA, 19 nt, Human
agaaucagaaagcauggug

SEQ ID NO: 1361131 - RNA, 19 nt, Human
agaucucugcacacggugc

SEQ ID NO: 1361132 - RNA, 21 nt, Human
agcaaauagccaaaaacauaa

SEQ ID NO: 1361133 - RNA, 21 nt, Human
agcagagggagcuucucuaga

SEQ ID NO: 1361134 - RNA, 18 nt, Human
agccaaaaacauaacugc

SEQ ID NO: 1361135 - RNA, 20 nt, Human
agcccaccaacaaaaauuug

SEQ ID NO: 1361136 - RNA, 25 nt, Human
agcuggcuugaagccccugaauggu

SEQ ID NO: 1361137 - RNA, 20 nt, Human
aggagcccaucccugugcuc

SEQ ID NO: 1361138 - RNA, 22 nt, Human
aggagcuacgucaguuaaggca

SEQ ID NO: 1361139 - RNA, 21 nt, Human
aggcaaagaaugagcccagag

SEQ ID NO: 1361140 - RNA, 19 nt, Human
aggcagcuuucuagucuuu

SEQ ID NO: 1361141 - RNA, 20 nt, Human
aggcagggaugcugaggaug

SEQ ID NO: 1361142 - RNA, 21 nt, Human
aggcaucgugagacacaggug

SEQ ID NO: 1361143 - RNA, 23 nt, Human
aggcgcagguccacuagggcgug

SEQ ID NO: 1361144 - RNA, 20 nt, Human
aggugccagaaaugucaaaa

SEQ ID NO: 1361145 - RNA, 20 nt, Human
agugugcucuuuuacccuug

SEQ ID NO: 1361146 - RNA, 22 nt, Human
auaauucauuuguaucaacaaa

SEQ ID NO: 1361147 - RNA, 22 nt, Human
auaccagagccaauucagaaga

SEQ ID NO: 1361148 - RNA, 18 nt, Human
aucgauacuaugucaguu

SEQ ID NO: 1361149 - RNA, 23 nt, Human
augaggcugcaggagcugaggaa

SEQ ID NO: 1361150 - RNA, 24 nt, Human
caaacaaacaaugcauuauugucc

SEQ ID NO: 1361151 - RNA, 24 nt, Human
caaggaaaagugucucacccaaau

SEQ ID NO: 1361152 - RNA, 23 nt, Human
caauauguaaaacaagacugccu

SEQ ID NO: 1361153 - RNA, 26 nt, Human
cacaaauggcagcucacaaauauucc

SEQ ID NO: 1361154 - RNA, 19 nt, Human
cacaccguggagcaaugug

SEQ ID NO: 1361155 - RNA, 20 nt, Human
cacaccguggagcaaugugg

SEQ ID NO: 1361156 - RNA, 24 nt, Human
caccugcagaugccgcacucagca

SEQ ID NO: 1361157 - RNA, 25 nt, Human
caccugucagcauagcucggccgcu

SEQ ID NO: 1361158 - RNA, 24 nt, Human
cacucuggaaacacucaaccuaag

SEQ ID NO: 1361159 - RNA, 21 nt, Human
cacugugcuggcuugggggau

SEQ ID NO: 1361160 - RNA, 21 nt, Human
cagacacaggcggguuagggc

SEQ ID NO: 1361161 - RNA, 22 nt, Human
cagcagaaccagaggugccaga

SEQ ID NO: 1361162 - RNA, 22 nt, Human
cagcauagcucggccgcuucug

SEQ ID NO: 1361163 - RNA, 23 nt, Human
cagcucacaaauauuccucuaaa

SEQ ID NO: 1361164 - RNA, 25 nt, Human
caguacuacugugugaucauaugaa

SEQ ID NO: 1361165 - RNA, 18 nt, Human
caguggccuccuggucag

SEQ ID NO: 1361166 - RNA, 19 nt, Human
caguggccuccuggucagc

SEQ ID NO: 1361167 - RNA, 28 nt, Human
caucaacuuuccuuccucaugaucugca

SEQ ID NO: 1361168 - RNA, 23 nt, Human
caugccauugcuacccggaagcu

SEQ ID NO: 1361169 - RNA, 22 nt, Human
ccaagagguagauaucgucacc

SEQ ID NO: 1361170 - RNA, 20 nt, Human
ccagaccacuccuccacucc

SEQ ID NO: 1361171 - RNA, 23 nt, Human
cccaagagguagauaucgucacc

SEQ ID NO: 1361172 - RNA, 25 nt, Human
cccacauauggauauauuagaaaaa

SEQ ID NO: 1361173 - RNA, 18 nt, Human
cccaucaagccugccugc

SEQ ID NO: 1361174 - RNA, 22 nt, Human
cccccauuuugcagauggggaa

SEQ ID NO: 1361175 - RNA, 21 nt, Human
ccccgugggcuggcuuuccug

SEQ ID NO: 1361176 - RNA, 23 nt, Human
cccgugccaaggcgugacuagga

SEQ ID NO: 1361177 - RNA, 24 nt, Human
cccgugccaaggcgugacuaggac

SEQ ID NO: 1361178 - RNA, 20 nt, Human
cccugcuucuauaagcugca

SEQ ID NO: 1361179 - RNA, 19 nt, Human
ccuaagcccuggaugcagg

SEQ ID NO: 1361180 - RNA, 23 nt, Human
ccuagaaacgccuucucggcuga

SEQ ID NO: 1361181 - RNA, 21 nt, Human
ccuagggaggcaucaggcacu

SEQ ID NO: 1361182 - RNA, 24 nt, Human
ccuagggugacaugacagcccaua

SEQ ID NO: 1361183 - RNA, 22 nt, Human
ccucaagagacgugcaaaccaa

SEQ ID NO: 1361184 - RNA, 19 nt, Human
ccucagccuaagaagucca

SEQ ID NO: 1361185 - RNA, 22 nt, Human
ccuccagccuggaacccaaggc

SEQ ID NO: 1361186 - RNA, 24 nt, Human
ccuccagccuggaacccaaggccc

SEQ ID NO: 1361187 - RNA, 21 nt, Human
ccucccuuaaaauucagcaga

SEQ ID NO: 1361188 - RNA, 19 nt, Human
ccugaccugaaccgggugu

SEQ ID NO: 1361189 - RNA, 19 nt, Human
ccugcauuccuccagccug

SEQ ID NO: 1361190 - RNA, 23 nt, Human
ccugcauuccuccagccuggaac

SEQ ID NO: 1361191 - RNA, 22 nt, Human
ccugcugggggggcagggcagg

SEQ ID NO: 1361192 - RNA, 24 nt, Human
ccuggaacccaaggcccuagcagg

SEQ ID NO: 1361193 - RNA, 18 nt, Human
ccuggaccaagaggaaca

SEQ ID NO: 1361194 - RNA, 20 nt, Human
ccuggaccaagaggaacagc

SEQ ID NO: 1361195 - RNA, 23 nt, Human
ccugugaugacuggaaccggggc

SEQ ID NO: 1361196 - RNA, 27 nt, Human
ccuuccuaacucaugcuccaaauaccu

SEQ ID NO: 1361197 - RNA, 19 nt, Human
cgaaagcauuggcaaagcc

SEQ ID NO: 1361198 - RNA, 23 nt, Human
cgaaagcauuggcaaagccagca

SEQ ID NO: 1361199 - RNA, 22 nt, Human
cgacaguacccuagggugacug

SEQ ID NO: 1361200 - RNA, 23 nt, Human
cgucacccccauuuugcagaugg

SEQ ID NO: 1361201 - RNA, 25 nt, Human
cuaaaacuaguacuauggaauagaa

SEQ ID NO: 1361202 - RNA, 21 nt, Human
cuaaagccuaugcgaagccca

SEQ ID NO: 1361203 - RNA, 24 nt, Human
cuacacaccaugcacaccuccacu

SEQ ID NO: 1361204 - RNA, 21 nt, Human
cucaaccuaagcccuggaugc

SEQ ID NO: 1361205 - RNA, 29 nt, Human
cucacagacacgcaaggcuacacaccauu

SEQ ID NO: 1361206 - RNA, 26 nt, Human
cucagcaucacggaccccuccgaggg

SEQ ID NO: 1361207 - RNA, 21 nt, Human
cuccaaauaccuaucggucca

SEQ ID NO: 1361208 - RNA, 23 nt, Human
cuccauacagccuagggccccuc

SEQ ID NO: 1361209 - RNA, 23 nt, Human
cugcacacggugcuucaugcccu

SEQ ID NO: 1361210 - RNA, 22 nt, Human
cuggaccaagaggaacagcaac

SEQ ID NO: 1361211 - RNA, 21 nt, Human
cuggcuugaagccccugaaug

SEQ ID NO: 1361212 - RNA, 18 nt, Human
cuguuggcucucagcagc

SEQ ID NO: 1361213 - RNA, 20 nt, Human
cuuaacuuuguguacauacc

SEQ ID NO: 1361214 - RNA, 20 nt, Human
cuuagauuacuucuguguug

SEQ ID NO: 1361215 - RNA, 23 nt, Human
cuucaaaauauugacuguacaaa

SEQ ID NO: 1361216 - RNA, 20 nt, Human
cuugaagccccugaaugguc

SEQ ID NO: 1361217 - RNA, 22 nt, Human
cuuucccuccuuaaauuaccuc

SEQ ID NO: 1361218 - RNA, 23 nt, Human
gaaaagcuuuacuaacacagccc

SEQ ID NO: 1361219 - RNA, 18 nt, Human
gaaaggugggaaagacag

SEQ ID NO: 1361220 - RNA, 20 nt, Human
gaagcagaagcuaauugaaa

SEQ ID NO: 1361221 - RNA, 19 nt, Human
gacaagaaaauuucugagc

SEQ ID NO: 1361222 - RNA, 23 nt, Human
gaccucaagcugcaucuuccaaa

SEQ ID NO: 1361223 - RNA, 21 nt, Human
gagcugaggaaggaaggccug

SEQ ID NO: 1361224 - RNA, 23 nt, Human
gagcugaggaaggaaggccuggg

SEQ ID NO: 1361225 - RNA, 21 nt, Human
gcaauucaaaacuuggcgcuc

SEQ ID NO: 1361226 - RNA, 21 nt, Human
gcagaugugcugggcgcuccc

SEQ ID NO: 1361227 - RNA, 25 nt, Human
gcauuccuccagccuggaacccaag

SEQ ID NO: 1361228 - RNA, 18 nt, Human
ggaaagacagacaggaag

SEQ ID NO: 1361229 - RNA, 23 nt, Human
ggcgcagguccacuagggcgugc

SEQ ID NO: 1361230 - RNA, 21 nt, Human
ggcucuccuagaagcucuggg

SEQ ID NO: 1361231 - RNA, 24 nt, Human
ggcuggcuuuccuggaagaagucc

SEQ ID NO: 1361232 - RNA, 20 nt, Human
gggcaucuuugcucucuccu

SEQ ID NO: 1361233 - RNA, 18 nt, Human
gggggauccugugaugac

SEQ ID NO: 1361234 - RNA, 23 nt, Human
gggggcagggcagggcugugagc

SEQ ID NO: 1361235 - RNA, 24 nt, Human
ggggggcagggcagggcugugagc

SEQ ID NO: 1361236 - RNA, 20 nt, Human
gucauccauugaauggucug

SEQ ID NO: 1361237 - RNA, 22 nt, Human
guccacacagccaccauauccu

SEQ ID NO: 1361238 - RNA, 21 nt, Human
guccagucccccagaccucaa

SEQ ID NO: 1361239 - RNA, 19 nt, Human
gucgagauauuccaguacu

SEQ ID NO: 1361240 - RNA, 22 nt, Human
gugcugggcgcucccaucaagc

SEQ ID NO: 1361241 - RNA, 19 nt, Human
gugggcggccugggccagc

SEQ ID NO: 1361242 - RNA, 20 nt, Human
uaaaacccacucgcuuuccc

SEQ ID NO: 1361243 - RNA, 19 nt, Human
uaaacuaggaugaggcugc

SEQ ID NO: 1361244 - RNA, 18 nt, Human
uaacuccuuggcuuaccu

SEQ ID NO: 1361245 - RNA, 19 nt, Human
uacagccuagggccccucu

SEQ ID NO: 1361246 - RNA, 25 nt, Human
uacccagugaaaagcuuuacuaaca

SEQ ID NO: 1361247 - RNA, 20 nt, Human
uaccuugcuucacacuuugg

SEQ ID NO: 1361248 - RNA, 21 nt, Human
uaccuugcuucacacuuuggu

SEQ ID NO: 1361249 - RNA, 18 nt, Human
uagagcugucuuguaacu

SEQ ID NO: 1361250 - RNA, 19 nt, Human
uagcaggcaggcuguuugc

SEQ ID NO: 1361251 - RNA, 21 nt, Human
uagccaaaaacauaacugcau

SEQ ID NO: 1361252 - RNA, 21 nt, Human
uagcucggccgcuucugcccc

SEQ ID NO: 1361253 - RNA, 21 nt, Human
uaggaccagaagaaucagaaa

SEQ ID NO: 1361254 - RNA, 26 nt, Human
uaggaccagaagaaucagaaagcuga

SEQ ID NO: 1361255 - RNA, 22 nt, Human
uaggcucugcaguacgcucuuc

SEQ ID NO: 1361256 - RNA, 23 nt, Human
ucaaaaaauaucuagucauucca

SEQ ID NO: 1361257 - RNA, 19 nt, Human
ucaaacaguugaaugucgu

SEQ ID NO: 1361258 - RNA, 20 nt, Human
ucacuauaugguggcagaau

SEQ ID NO: 1361259 - RNA, 19 nt, Human
ucacuuaggagcuacguca

SEQ ID NO: 1361260 - RNA, 23 nt, Human
ucagcagccuggaaugccagcuc

SEQ ID NO: 1361261 - RNA, 21 nt, Human
ucaguccagucccccagaccu

SEQ ID NO: 1361262 - RNA, 21 nt, Human
uccaaauaccuaucgguccaa

SEQ ID NO: 1361263 - RNA, 18 nt, Human
uccaaggaccccucuugc

SEQ ID NO: 1361264 - RNA, 20 nt, Human
uccacacagccaccauaucc

SEQ ID NO: 1361265 - RNA, 21 nt, Human
uccacacagccaccauauccu

SEQ ID NO: 1361266 - RNA, 18 nt, Human
ucccacaagucagccagg

SEQ ID NO: 1361267 - RNA, 18 nt, Human
ucccuccaggucuguuuc

SEQ ID NO: 1361268 - RNA, 18 nt, Human
uccuggagaacagcuuug

SEQ ID NO: 1361269 - RNA, 19 nt, Human
uccuggccaaacaaaaaaa

SEQ ID NO: 1361270 - RNA, 20 nt, Human
ucuaaagccuaugcgaagcc

SEQ ID NO: 1361271 - RNA, 22 nt, Human
ucuagagcugucuuguaacucc

SEQ ID NO: 1361272 - RNA, 22 nt, Human
ucucugccaccuugaacuacag

SEQ ID NO: 1361273 - RNA, 23 nt, Human
ucugcaguacgcucuucccacaa

SEQ ID NO: 1361274 - RNA, 19 nt, Human
ucugugaacaucacuuagg

SEQ ID NO: 1361275 - RNA, 21 nt, Human
ucuuagucuauggggcucucc

SEQ ID NO: 1361276 - RNA, 21 nt, Human
ugacaugacagcccauauauc

SEQ ID NO: 1361277 - RNA, 19 nt, Human
ugacugugggcggccuggg

SEQ ID NO: 1361278 - RNA, 22 nt, Human
ugagaguagcaacauagaggca

SEQ ID NO: 1361279 - RNA, 21 nt, Human
ugagcccagagccugagauuc

SEQ ID NO: 1361280 - RNA, 23 nt, Human
ugagcccagagccugagauucaa

SEQ ID NO: 1361281 - RNA, 19 nt, Human
ugagggugaggcccugcug

SEQ ID NO: 1361282 - RNA, 22 nt, Human
ugagggugaggcccugcugggg

SEQ ID NO: 1361283 - RNA, 18 nt, Human
ugcaccugcagaugccgc

SEQ ID NO: 1361284 - RNA, 22 nt, Human
ugcaggaggcagggaugcugag

SEQ ID NO: 1361285 - RNA, 22 nt, Human
ugcucagagagaugggacucca

SEQ ID NO: 1361286 - RNA, 25 nt, Human
ugcugggaugugcuaaugccuaggg

SEQ ID NO: 1361287 - RNA, 19 nt, Human
uggaaacacucaaccuaag

SEQ ID NO: 1361288 - RNA, 22 nt, Human
uggaaacacucaaccuaagccc

SEQ ID NO: 1361289 - RNA, 19 nt, Human
uggaaaggugggaaagaca

SEQ ID NO: 1361290 - RNA, 21 nt, Human
uggaauagaaaaggaaaagug

SEQ ID NO: 1361291 - RNA, 24 nt, Human
uggaaugccagcucucaugcccuc

SEQ ID NO: 1361292 - RNA, 20 nt, Human
uggaccaagaggaacagcaa

SEQ ID NO: 1361293 - RNA, 24 nt, Human
uggagaaagacauauccuuccuaa

SEQ ID NO: 1361294 - RNA, 20 nt, Human
uggagaacagcuuugcuauu

SEQ ID NO: 1361295 - RNA, 22 nt, Human
uggagugcagagggauuggcau

SEQ ID NO: 1361296 - RNA, 19 nt, Human
uggauguccuuuccuggag

SEQ ID NO: 1361297 - RNA, 19 nt, Human
uggauuaaaucucuugagc

SEQ ID NO: 1361298 - RNA, 22 nt, Human
uggcagaggcaaagaaugagcc

SEQ ID NO: 1361299 - RNA, 22 nt, Human
uggcguaacucagcaucacgga

SEQ ID NO: 1361300 - RNA, 19 nt, Human
ugggcccccggaucuaugu

SEQ ID NO: 1361301 - RNA, 24 nt, Human
ugggcgcucccaucaagccugccu

SEQ ID NO: 1361302 - RNA, 23 nt, Human
uggggaaaaauccagaaaagggg

SEQ ID NO: 1361303 - RNA, 20 nt, Human
uggggaugacccugcacugc

SEQ ID NO: 1361304 - RNA, 20 nt, Human
uggucucuucugaacacacc

SEQ ID NO: 1361305 - RNA, 24 nt, Human
ugguggaguccgaaagcauuggcc

SEQ ID NO: 1361306 - RNA, 23 nt, Human
uguaaaacaagacugccuuguuu

SEQ ID NO: 1361307 - RNA, 21 nt, Human
uguaacuccuuggcuuaccua

SEQ ID NO: 1361308 - RNA, 21 nt, Human
uguccuguaagcagagggagc

SEQ ID NO: 1361309 - RNA, 19 nt, Human
ugugguggaggcauuauga

SEQ ID NO: 1361310 - RNA, 18 nt, Human
uguuugcuugcuugugug

SEQ ID NO: 1361311 - RNA, 23 nt, Human
uuaaacacaaauggcagcucaca

SEQ ID NO: 1361312 - RNA, 23 nt, Human
uuagagaaagcuggauuaaaucu

SEQ ID NO: 1361313 - RNA, 21 nt, Human
uuagagugcugggaugugcua

SEQ ID NO: 1361314 - RNA, 19 nt, Human
uuagauuacuucuguguug

SEQ ID NO: 1361315 - RNA, 19 nt, Human
uuaguccucagccuaagaa

SEQ ID NO: 1361316 - RNA, 18 nt, Human
uuccaaaauuccauggau

SEQ ID NO: 1361317 - RNA, 19 nt, Human
uucuuguccacacagccac

SEQ ID NO: 1361318 - RNA, 19 nt, Human
uugaauggucuguuccuga

SEQ ID NO: 1361319 - RNA, 24 nt, Human
uugaccaaaauagcaguaauuuca

SEQ ID NO: 1361320 - RNA, 18 nt, Human
uugauagaacaagcaaaa

SEQ ID NO: 1361321 - RNA, 19 nt, Human
uuuauuaguuuuaucuuug

SEQ ID NO: 1361322 - RNA, 21 nt, Human
uuuguaucaacaaacaaacaa

SEQ ID NO: 1361323 - RNA, 20 nt, Human
aaacaaaaucgaggcaggga

SEQ ID NO: 1361324 - RNA, 22 nt, Human
aaggagauggaucuaucccagg

SEQ ID NO: 1361325 - RNA, 24 nt, Human
acaaaacucuggaaccuccagcag

SEQ ID NO: 1361326 - RNA, 20 nt, Human
accagcguuagcuguaauga

SEQ ID NO: 1361327 - RNA, 24 nt, Human
accccucaucagagccgaaagccg

SEQ ID NO: 1361328 - RNA, 23 nt, Human
agaaaaaagagcuggaaaaaaga

SEQ ID NO: 1361329 - RNA, 22 nt, Human
agaaggagauggaucuauccca

SEQ ID NO: 1361330 - RNA, 25 nt, Human
agaaggagauggaucuaucccaggg

SEQ ID NO: 1361331 - RNA, 19 nt, Human
agaauggagaggaaagaag

SEQ ID NO: 1361332 - RNA, 23 nt, Human
agagccgaaagccggcaagagcc

SEQ ID NO: 1361333 - RNA, 23 nt, Human
agcugaccugaaaugcccacccc

SEQ ID NO: 1361334 - RNA, 18 nt, Human
agggagccgggagccagc

SEQ ID NO: 1361335 - RNA, 24 nt, Human
aguggggaguggagccuucggagg

SEQ ID NO: 1361336 - RNA, 18 nt, Human
aguguuauucacggauga

SEQ ID NO: 1361337 - RNA, 19 nt, Human
aucuugacaaguggcggag

SEQ ID NO: 1361338 - RNA, 22 nt, Human
caaaacucuggaaccuccagca

SEQ ID NO: 1361339 - RNA, 19 nt, Human
caaaaucgaggcagggaca

SEQ ID NO: 1361340 - RNA, 21 nt, Human
caaaggucauuugcgcuuuuc

SEQ ID NO: 1361341 - RNA, 27 nt, Human
caagagccauucaucagccgaccuggu

SEQ ID NO: 1361342 - RNA, 22 nt, Human
cacagccagguccagcucgccc

SEQ ID NO: 1361343 - RNA, 23 nt, Human
cacagccagguccagcucgcccc

SEQ ID NO: 1361344 - RNA, 18 nt, Human
caccccccauuuuguugg

SEQ ID NO: 1361345 - RNA, 18 nt, Human
cacugccaccuccucggg

SEQ ID NO: 1361346 - RNA, 22 nt, Human
cacuucuagcccaaacuuugga

SEQ ID NO: 1361347 - RNA, 24 nt, Human
cagaccccucaucagagccgaaag

SEQ ID NO: 1361348 - RNA, 23 nt, Human
cccaccaggggcugguaaggaag

SEQ ID NO: 1361349 - RNA, 19 nt, Human
ccccgaaaacuccggcccg

SEQ ID NO: 1361350 - RNA, 20 nt, Human
ccccgaaaacuccggcccgg

SEQ ID NO: 1361351 - RNA, 21 nt, Human
ccccucaucagagccgaaagc

SEQ ID NO: 1361352 - RNA, 22 nt, Human
cccuucucgccuuccuccuccc

SEQ ID NO: 1361353 - RNA, 20 nt, Human
ccgccgccuuggaggaggcu

SEQ ID NO: 1361354 - RNA, 22 nt, Human
ccuaacucacacaauguagcac

SEQ ID NO: 1361355 - RNA, 23 nt, Human
ccuccccgguccucccgcucgcg

SEQ ID NO: 1361356 - RNA, 22 nt, Human
ccucgggugacucagcugaccu

SEQ ID NO: 1361357 - RNA, 21 nt, Human
ccuggggggcagacaauuguu

SEQ ID NO: 1361358 - RNA, 22 nt, Human
ccuggggggcagacaauuguuc

SEQ ID NO: 1361359 - RNA, 21 nt, Human
ccuuccuccucccucgccucc

SEQ ID NO: 1361360 - RNA, 23 nt, Human
cgaaagaacacuguggaaaggaa

SEQ ID NO: 1361361 - RNA, 18 nt, Human
cgacucuagauucuuccc

SEQ ID NO: 1361362 - RNA, 23 nt, Human
cgcuuacuaccaagacuucucua

SEQ ID NO: 1361363 - RNA, 21 nt, Human
cggccugguccgccgccuugg

SEQ ID NO: 1361364 - RNA, 23 nt, Human
cgggagccagcgcugcgguggga

SEQ ID NO: 1361365 - RNA, 22 nt, Human
cguagacaguaagagggagucu

SEQ ID NO: 1361366 - RNA, 21 nt, Human
cucccggguccgccccuggcc

SEQ ID NO: 1361367 - RNA, 21 nt, Human
cugaaaaacuuugaaucucau

SEQ ID NO: 1361368 - RNA, 19 nt, Human
cugaaccccgaaaacuccg

SEQ ID NO: 1361369 - RNA, 22 nt, Human
cugcagacagggggcgggagcu

SEQ ID NO: 1361370 - RNA, 24 nt, Human
cugcagugcccaccaggggcuggu

SEQ ID NO: 1361371 - RNA, 19 nt, Human
cuggaggggccggcgggcg

SEQ ID NO: 1361372 - RNA, 20 nt, Human
cuuacgaucauguccggauu

SEQ ID NO: 1361373 - RNA, 27 nt, Human
cuuuccgucacuagcgccccgagagcc

SEQ ID NO: 1361374 - RNA, 19 nt, Human
cuuuuuuuuucccucccac

SEQ ID NO: 1361375 - RNA, 24 nt, Human
gacgaaagaacacuguggaaagga

SEQ ID NO: 1361376 - RNA, 18 nt, Human
gaggaaagaagaguagua

SEQ ID NO: 1361377 - RNA, 21 nt, Human
gaucuggcccuucucgccuuc

SEQ ID NO: 1361378 - RNA, 22 nt, Human
gcaaacaaaaucgaggcaggga

SEQ ID NO: 1361379 - RNA, 22 nt, Human
gccaagauuuauuaccauuucu

SEQ ID NO: 1361380 - RNA, 22 nt, Human
gccccgagagccgggucggguu

SEQ ID NO: 1361381 - RNA, 20 nt, Human
gcccuucucgccuuccuccu

SEQ ID NO: 1361382 - RNA, 20 nt, Human
ggacucccggguccgccccu

SEQ ID NO: 1361383 - RNA, 23 nt, Human
ggccuaggugcuugaaccugggg

SEQ ID NO: 1361384 - RNA, 25 nt, Human
ggccuaggugcuugaaccugggggg

SEQ ID NO: 1361385 - RNA, 18 nt, Human
ggccugguccgccgccuu

SEQ ID NO: 1361386 - RNA, 19 nt, Human
ggccugguccgccgccuug

SEQ ID NO: 1361387 - RNA, 24 nt, Human
gggggagggcuuuccugcagacag

SEQ ID NO: 1361388 - RNA, 19 nt, Human
gggggcgggagcuagggag

SEQ ID NO: 1361389 - RNA, 21 nt, Human
gguaaggaagucugaguguuu

SEQ ID NO: 1361390 - RNA, 22 nt, Human
guaaugaggauucuagaaaaaa

SEQ ID NO: 1361391 - RNA, 18 nt, Human
gucugaguguuuacugcc

SEQ ID NO: 1361392 - RNA, 18 nt, Human
gugcuugaaccugggggg

SEQ ID NO: 1361393 - RNA, 20 nt, Human
guggcggagcggaggaguca

SEQ ID NO: 1361394 - RNA, 22 nt, Human
uaagaaggaacugggcuagaga

SEQ ID NO: 1361395 - RNA, 24 nt, Human
uaagaaggaacugggcuagagaca

SEQ ID NO: 1361396 - RNA, 23 nt, Human
uaaggaagucugaguguuuacug

SEQ ID NO: 1361397 - RNA, 18 nt, Human
uagaaaaaagagcuggaa

SEQ ID NO: 1361398 - RNA, 18 nt, Human
uauaauaauaagaauggc

SEQ ID NO: 1361399 - RNA, 18 nt, Human
ucagaggcucugcaaagg

SEQ ID NO: 1361400 - RNA, 19 nt, Human
ucccuucccuguccaaagg

SEQ ID NO: 1361401 - RNA, 23 nt, Human
uccugcagacagggggcgggagc

SEQ ID NO: 1361402 - RNA, 22 nt, Human
ucggagcuacaaaacucuggaa

SEQ ID NO: 1361403 - RNA, 23 nt, Human
ucugaggggagaauggagaggaa

SEQ ID NO: 1361404 - RNA, 25 nt, Human
ugaaucucauguaagaaggaacugg

SEQ ID NO: 1361405 - RNA, 25 nt, Human
ugaggauucuagaaaaaagagcugg

SEQ ID NO: 1361406 - RNA, 19 nt, Human
ugccaccuccucgggugac

SEQ ID NO: 1361407 - RNA, 18 nt, Human
ugcugcagugcccaccag

SEQ ID NO: 1361408 - RNA, 21 nt, Human
ugcuugaaccuggggggcaga

SEQ ID NO: 1361409 - RNA, 18 nt, Human
uggaaaggaaggcgcggg

SEQ ID NO: 1361410 - RNA, 24 nt, Human
uggaggaggcuggaggggccggcg

SEQ ID NO: 1361411 - RNA, 21 nt, Human
uggcccuucucgccuuccucc

SEQ ID NO: 1361412 - RNA, 18 nt, Human
uggcggagcggaggaguc

SEQ ID NO: 1361413 - RNA, 21 nt, Human
ugggcuagagacaggagccaa

SEQ ID NO: 1361414 - RNA, 21 nt, Human
uggggaguggagccuucggag

SEQ ID NO: 1361415 - RNA, 24 nt, Human
ugucuugcacugccaccuccucgg

SEQ ID NO: 1361416 - RNA, 20 nt, Human
ugugggaacuaggccacaaa

SEQ ID NO: 1361417 - RNA, 22 nt, Human
uuaccagcguuagcuguaauga

SEQ ID NO: 1361418 - RNA, 20 nt, Human
uucccuguccaaaggucauu

SEQ ID NO: 1361419 - RNA, 25 nt, Human
uugaaccuggggggcagacaauugu

SEQ ID NO: 1361420 - RNA, 23 nt, Human
uugcacugccaccuccucgggug

SEQ ID NO: 1361421 - RNA, 22 nt, Human
aaaaacaggagauucuagccua

SEQ ID NO: 1361422 - RNA, 22 nt, Human
aaaacaaauauauauuggcuug

SEQ ID NO: 1361423 - RNA, 20 nt, Human
aaacacauaggaggagcugc

SEQ ID NO: 1361424 - RNA, 24 nt, Human
aaacacgaucuuguauaacugaca

SEQ ID NO: 1361425 - RNA, 22 nt, Human
aaccaccuuccaguacuaaccc

SEQ ID NO: 1361426 - RNA, 24 nt, Human
aacuuuauaaacagaauucuggcu

SEQ ID NO: 1361427 - RNA, 23 nt, Human
aagaaauggaauaucuaacaagu

SEQ ID NO: 1361428 - RNA, 18 nt, Human
aagcagauagaucccaaa

SEQ ID NO: 1361429 - RNA, 18 nt, Human
aagcagauagaucccaaa

SEQ ID NO: 1361430 - RNA, 19 nt, Human
aagcagauagaucccaaaa

SEQ ID NO: 1361431 - RNA, 23 nt, Human
aagcagauagaucccaaaacaga

SEQ ID NO: 1361432 - RNA, 18 nt, Human
aaguguuaacaaagugga

SEQ ID NO: 1361433 - RNA, 25 nt, Human
aauaucuaacaaguucuuaggugac

SEQ ID NO: 1361434 - RNA, 24 nt, Human
aaugugcugagauuauaggcguga

SEQ ID NO: 1361435 - RNA, 23 nt, Human
acaaaacaaauauauauuggcuu

SEQ ID NO: 1361436 - RNA, 26 nt, Human
acaaaguggagucacucaugccaaau

SEQ ID NO: 1361437 - RNA, 20 nt, Human
acacaaacuuuggagaacac

SEQ ID NO: 1361438 - RNA, 21 nt, Human
acacugcugcuccaaaaaaua

SEQ ID NO: 1361439 - RNA, 21 nt, Human
accacaucaguggacgugcac

SEQ ID NO: 1361440 - RNA, 26 nt, Human
acuaaaacacauaggaggagcugguc

SEQ ID NO: 1361441 - RNA, 22 nt, Human
agauuauaggcgugagccaccg

SEQ ID NO: 1361442 - RNA, 19 nt, Human
aggcgugagccaccgugcc

SEQ ID NO: 1361443 - RNA, 23 nt, Human
aggcgugagccaccgugccuggc

SEQ ID NO: 1361444 - RNA, 21 nt, Human
aggugacgggggcaggggggc

SEQ ID NO: 1361445 - RNA, 21 nt, Human
auagaucccaaaacagacgag

SEQ ID NO: 1361446 - RNA, 20 nt, Human
aucaauaagaaaucagauaa

SEQ ID NO: 1361447 - RNA, 23 nt, Human
aucaauaagaaaucagauaaagc

SEQ ID NO: 1361448 - RNA, 26 nt, Human
aucacauguuuccaacuuaaccuaga

SEQ ID NO: 1361449 - RNA, 23 nt, Human
augaccgaaucaccuaauaggcc

SEQ ID NO: 1361450 - RNA, 21 nt, Human
caaaccagaggucaggaaagc

SEQ ID NO: 1361451 - RNA, 25 nt, Human
caaaccccuggguucaagugauccu

SEQ ID NO: 1361452 - RNA, 22 nt, Human
caagugauccuccugccucagc

SEQ ID NO: 1361453 - RNA, 27 nt, Human
caagugauccuccugccucagccuccc

SEQ ID NO: 1361454 - RNA, 27 nt, Human
caagugauccuccugccucagccuccc

SEQ ID NO: 1361455 - RNA, 24 nt, Human
caaugugcugagauuauaggcgug

SEQ ID NO: 1361456 - RNA, 26 nt, Human
ccaaaacagacgaguuuuuccuaaaa

SEQ ID NO: 1361457 - RNA, 24 nt, Human
ccaaugugcugagauuauaggcgu

SEQ ID NO: 1361458 - RNA, 20 nt, Human
ccacagcagcuccugaaaca

SEQ ID NO: 1361459 - RNA, 19 nt, Human
ccaccuuccaguacuaacc

SEQ ID NO: 1361460 - RNA, 24 nt, Human
cccaacacuauugcaccagggauu

SEQ ID NO: 1361461 - RNA, 24 nt, Human
cccacagcagcuccugaaacaguu

SEQ ID NO: 1361462 - RNA, 19 nt, Human
cccagaaaaaaauuacguc

SEQ ID NO: 1361463 - RNA, 23 nt, Human
cccaggucagagggcagaagagc

SEQ ID NO: 1361464 - RNA, 20 nt, Human
cccgcaacacugcugcucca

SEQ ID NO: 1361465 - RNA, 22 nt, Human
cccgcaacacugcugcuccaaa

SEQ ID NO: 1361466 - RNA, 18 nt, Human
cccuggguucaagugauc

SEQ ID NO: 1361467 - RNA, 24 nt, Human
cccuggguucaagugauccuccug

SEQ ID NO: 1361468 - RNA, 23 nt, Human
ccgaaucaccuaauaggccccaa

SEQ ID NO: 1361469 - RNA, 21 nt, Human
ccucccgcaacacugcugcuc

SEQ ID NO: 1361470 - RNA, 25 nt, Human
ccugaguaaauucccuuguguuucu

SEQ ID NO: 1361471 - RNA, 21 nt, Human
ccugccucagccucccaaugu

SEQ ID NO: 1361472 - RNA, 22 nt, Human
ccuggguucaagugauccuccu

SEQ ID NO: 1361473 - RNA, 23 nt, Human
ccuggguucaagugauccuccug

SEQ ID NO: 1361474 - RNA, 19 nt, Human
cgucaacgcuaacaaaaca

SEQ ID NO: 1361475 - RNA, 21 nt, Human
cuaacacacaaacuuuggaga

SEQ ID NO: 1361476 - RNA, 23 nt, Human
cuaacccccaaauucuuuuuacu

SEQ ID NO: 1361477 - RNA, 19 nt, Human
cuauggauuaagccaagag

SEQ ID NO: 1361478 - RNA, 23 nt, Human
cucaaaccagaggucaggaaagc

SEQ ID NO: 1361479 - RNA, 20 nt, Human
cuccugaaacaguucuggaa

SEQ ID NO: 1361480 - RNA, 23 nt, Human
cugccucagccucccaaugugcu

SEQ ID NO: 1361481 - RNA, 24 nt, Human
gaaucaccuaauaggccccaacuc

SEQ ID NO: 1361482 - RNA, 18 nt, Human
gauuauaggcgugagcca

SEQ ID NO: 1361483 - RNA, 24 nt, Human
gauuauaggcgugagccaccgugc

SEQ ID NO: 1361484 - RNA, 20 nt, Human
gcaaagaaaagaaacacgau

SEQ ID NO: 1361485 - RNA, 20 nt, Human
gcaggggggcaaagaaaaga

SEQ ID NO: 1361486 - RNA, 24 nt, Human
gcuccaaaaaauaucaauaagaaa

SEQ ID NO: 1361487 - RNA, 23 nt, Human
ggcugagaaguacaagaccauga

SEQ ID NO: 1361488 - RNA, 23 nt, Human
gggcagaagagcaagagacggug

SEQ ID NO: 1361489 - RNA, 23 nt, Human
gggcaggggggcaaagaaaagaa

SEQ ID NO: 1361490 - RNA, 18 nt, Human
ggggcaaagaaaagaaac

SEQ ID NO: 1361491 - RNA, 21 nt, Human
ggguucaagugauccuccugc

SEQ ID NO: 1361492 - RNA, 27 nt, Human
ggugacgggggcaggggggcaaagaaa

SEQ ID NO: 1361493 - RNA, 19 nt, Human
gucaggaaagccuucccag

SEQ ID NO: 1361494 - RNA, 24 nt, Human
gugauccuccugccucagccuccc

SEQ ID NO: 1361495 - RNA, 21 nt, Human
gugcugagauuauaggcguga

SEQ ID NO: 1361496 - RNA, 19 nt, Human
uaaaacacauaggaggagc

SEQ ID NO: 1361497 - RNA, 27 nt, Human
uaaaaugacaguguuuuaaccugagua

SEQ ID NO: 1361498 - RNA, 19 nt, Human
uaacaaaguggagucacuc

SEQ ID NO: 1361499 - RNA, 22 nt, Human
uaacaaaguggagucacucaug

SEQ ID NO: 1361500 - RNA, 22 nt, Human
uaacacacaaacuuuggagaac

SEQ ID NO: 1361501 - RNA, 23 nt, Human
uaacacacaaacuuuggagaaca

SEQ ID NO: 1361502 - RNA, 23 nt, Human
uaaccaacuacaaugcaaacaag

SEQ ID NO: 1361503 - RNA, 24 nt, Human
uaaccuaaccacuccccucaucaa

SEQ ID NO: 1361504 - RNA, 26 nt, Human
uaagaaagcagauagaucccaaaaca

SEQ ID NO: 1361505 - RNA, 20 nt, Human
uaagaaaucagauaaagcaa

SEQ ID NO: 1361506 - RNA, 18 nt, Human
uaaguuucuaacacacaa

SEQ ID NO: 1361507 - RNA, 20 nt, Human
uacaaugcaaacaagcaaaa

SEQ ID NO: 1361508 - RNA, 22 nt, Human
uagaacaaggccucuccccguc

SEQ ID NO: 1361509 - RNA, 18 nt, Human
uagccuaccugagucaga

SEQ ID NO: 1361510 - RNA, 19 nt, Human
uauaaccaacuacaaugca

SEQ ID NO: 1361511 - RNA, 20 nt, Human
uauaacuaacccacucccaa

SEQ ID NO: 1361512 - RNA, 23 nt, Human
uauaggcgugagccaccgugccu

SEQ ID NO: 1361513 - RNA, 26 nt, Human
uauauauauacacuucccaaccaccu

SEQ ID NO: 1361514 - RNA, 19 nt, Human
ucaagugauccuccugccu

SEQ ID NO: 1361515 - RNA, 18 nt, Human
ucacuguaucuuuuuuua

SEQ ID NO: 1361516 - RNA, 24 nt, Human
ucccaaugugcugagauuauaggc

SEQ ID NO: 1361517 - RNA, 27 nt, Human
uccuccugccucagccucccaaugugc

SEQ ID NO: 1361518 - RNA, 21 nt, Human
ucuaacacacaaacuuuggag

SEQ ID NO: 1361519 - RNA, 23 nt, Human
ucuuguauaacugacaauggcua

SEQ ID NO: 1361520 - RNA, 24 nt, Human
ugaccgaaucaccuaauaggcccc

SEQ ID NO: 1361521 - RNA, 19 nt, Human
ugaccucccgcaacacugc

SEQ ID NO: 1361522 - RNA, 21 nt, Human
ugagauuauaggcgugagcca

SEQ ID NO: 1361523 - RNA, 22 nt, Human
ugagauuauaggcgugagccac

SEQ ID NO: 1361524 - RNA, 23 nt, Human
ugagauuauaggcgugagccacc

SEQ ID NO: 1361525 - RNA, 23 nt, Human
ugagauuauaggcgugagccacc

SEQ ID NO: 1361526 - RNA, 24 nt, Human
ugagauuauaggcgugagccaccg

SEQ ID NO: 1361527 - RNA, 18 nt, Human
ugagcccacaagcuauag

SEQ ID NO: 1361528 - RNA, 24 nt, Human
ugcacugaccuccuucucccacag

SEQ ID NO: 1361529 - RNA, 24 nt, Human
ugccucagccucccaaugugcuga

SEQ ID NO: 1361530 - RNA, 22 nt, Human
uggagaacacauucaaaccaca

SEQ ID NO: 1361531 - RNA, 20 nt, Human
uggcuugaauauaaaaugac

SEQ ID NO: 1361532 - RNA, 20 nt, Human
ugggaauaauaaccuuucaa

SEQ ID NO: 1361533 - RNA, 19 nt, Human
uggguucaagugauccucc

SEQ ID NO: 1361534 - RNA, 20 nt, Human
uggguucaagugauccuccu

SEQ ID NO: 1361535 - RNA, 23 nt, Human
uggguucaagugauccuccugcc

SEQ ID NO: 1361536 - RNA, 24 nt, Human
uggguucaagugauccuccugccu

SEQ ID NO: 1361537 - RNA, 25 nt, Human
uuaacccuuauaaaaaaaaaguaaa

SEQ ID NO: 1361538 - RNA, 19 nt, Human
uucaaaccacaucagugga

SEQ ID NO: 1361539 - RNA, 21 nt, Human
uucaagugauccuccugccuc

SEQ ID NO: 1361540 - RNA, 23 nt, Human
uucaagugauccuccugccucag

SEQ ID NO: 1361541 - RNA, 24 nt, Human
uucaagugauccuccugccucagc

SEQ ID NO: 1361542 - RNA, 21 nt, Human
uucauuuuacaucaucccagg

SEQ ID NO: 1361543 - RNA, 20 nt, Human
uugaaaaucuaaagaguuug

SEQ ID NO: 1361544 - RNA, 28 nt, Human
uuuuuuaauguuaucacauguuuccaac

SEQ ID NO: 1361545 - RNA, 26 nt, Human
aaacuacacaaccucaagggcaggcu

SEQ ID NO: 1361546 - RNA, 23 nt, Human
aaaggaaacugaagugcauuucu

SEQ ID NO: 1361547 - RNA, 22 nt, Human
aaagugcugggacuguaagcgu

SEQ ID NO: 1361548 - RNA, 24 nt, Human
aaagugcugggacuguaagcguga

SEQ ID NO: 1361549 - RNA, 22 nt, Human
aacccugcuccuugaugaccac

SEQ ID NO: 1361550 - RNA, 22 nt, Human
aagcacccucuagagugcagcc

SEQ ID NO: 1361551 - RNA, 23 nt, Human
aagcgugagccacugugcccggc

SEQ ID NO: 1361552 - RNA, 21 nt, Human
aagcucaagugauccuccugc

SEQ ID NO: 1361553 - RNA, 22 nt, Human
aagcucaagugauccuccugcc

SEQ ID NO: 1361554 - RNA, 19 nt, Human
aagugcugggacuguaagc

SEQ ID NO: 1361555 - RNA, 26 nt, Human
aagugcugggacuguaagcgugagcc

SEQ ID NO: 1361556 - RNA, 22 nt, Human
aaguguuucuaagguccaaaac

SEQ ID NO: 1361557 - RNA, 22 nt, Human
acaauuaauuuuaccaccauuu

SEQ ID NO: 1361558 - RNA, 23 nt, Human
accccaucucuacuaaaaauaca

SEQ ID NO: 1361559 - RNA, 23 nt, Human
accucagccucuugaguagcugg

SEQ ID NO: 1361560 - RNA, 26 nt, Human
acucuguugcccaggcuggagugaca

SEQ ID NO: 1361561 - RNA, 20 nt, Human
acugaagugcauuucuuaga

SEQ ID NO: 1361562 - RNA, 24 nt, Human
agaagacuacaaguucugugaggg

SEQ ID NO: 1361563 - RNA, 18 nt, Human
agacucucuugaagauuu

SEQ ID NO: 1361564 - RNA, 24 nt, Human
agcagccaggguggaagugggggc

SEQ ID NO: 1361565 - RNA, 19 nt, Human
agcugcaggccuccagggg

SEQ ID NO: 1361566 - RNA, 20 nt, Human
aggagguggggaggggaugg

SEQ ID NO: 1361567 - RNA, 18 nt, Human
agggaauggugaggaugg

SEQ ID NO: 1361568 - RNA, 19 nt, Human
agguggggaggggauggcu

SEQ ID NO: 1361569 - RNA, 19 nt, Human
agugacaccugagccugug

SEQ ID NO: 1361570 - RNA, 24 nt, Human
agugauucuccugccucagccucc

SEQ ID NO: 1361571 - RNA, 21 nt, Human
agugcaguggugcgaucacag

SEQ ID NO: 1361572 - RNA, 24 nt, Human
agugcaguggugcgaucacagcuc

SEQ ID NO: 1361573 - RNA, 18 nt, Human
aguucugugagggcaggg

SEQ ID NO: 1361574 - RNA, 25 nt, Human
caaacuccuaagcucaagugauccu

SEQ ID NO: 1361575 - RNA, 22 nt, Human
caaagcacccucuagagugcag

SEQ ID NO: 1361576 - RNA, 22 nt, Human
caacaccuggcuaauuuuugua

SEQ ID NO: 1361577 - RNA, 23 nt, Human
caagggcaaagggccagcagcca

SEQ ID NO: 1361578 - RNA, 20 nt, Human
caagugauucuccugccuca

SEQ ID NO: 1361579 - RNA, 22 nt, Human
caagugauucuccugccucagc

SEQ ID NO: 1361580 - RNA, 24 nt, Human
cacaauuuagggcuuuuucugucc

SEQ ID NO: 1361581 - RNA, 24 nt, Human
cacccgagcuggagugcaguggug

SEQ ID NO: 1361582 - RNA, 24 nt, Human
cacucuguugcccaggcuggagug

SEQ ID NO: 1361583 - RNA, 19 nt, Human
cacugugcccggccagaau

SEQ ID NO: 1361584 - RNA, 23 nt, Human
cagcaugggggagggaauggugg

SEQ ID NO: 1361585 - RNA, 20 nt, Human
cagccuccugaguagcuggg

SEQ ID NO: 1361586 - RNA, 18 nt, Human
caggagguggggagggga

SEQ ID NO: 1361587 - RNA, 18 nt, Human
caggcuuuguugagcccc

SEQ ID NO: 1361588 - RNA, 19 nt, Human
caggguggaagugggggca

SEQ ID NO: 1361589 - RNA, 21 nt, Human
cagguggagcugaugguggca

SEQ ID NO: 1361590 - RNA, 22 nt, Human
cagguuucugcuggaagcauca

SEQ ID NO: 1361591 - RNA, 19 nt, Human
cagugugcacaugcacaug

SEQ ID NO: 1361592 - RNA, 27 nt, Human
cauggucagguaucugucggcugggac

SEQ ID NO: 1361593 - RNA, 20 nt, Human
cauuuuacauaaaaggaaac

SEQ ID NO: 1361594 - RNA, 23 nt, Human
ccagaaucaaucuuuuuuuuuuu

SEQ ID NO: 1361595 - RNA, 19 nt, Human
ccaggguggaagugggggc

SEQ ID NO: 1361596 - RNA, 23 nt, Human
cccaaguaccuccccacuguccu

SEQ ID NO: 1361597 - RNA, 29 nt, Human
cccaaguaccuccccacuguccucuccac

SEQ ID NO: 1361598 - RNA, 21 nt, Human
cccacauagcuugugcaucuu

SEQ ID NO: 1361599 - RNA, 19 nt, Human
cccagguggagcugauggu

SEQ ID NO: 1361600 - RNA, 22 nt, Human
ccccacuguccucuccacucug

SEQ ID NO: 1361601 - RNA, 23 nt, Human
ccccgguucaagugauucuccuc

SEQ ID NO: 1361602 - RNA, 23 nt, Human
ccccgguucaagugauucuccug

SEQ ID NO: 1361603 - RNA, 18 nt, Human
cccuuucuucuuucaggc

SEQ ID NO: 1361604 - RNA, 24 nt, Human
ccucucaccucagccucuugagua

SEQ ID NO: 1361605 - RNA, 20 nt, Human
ccugccggguaacucagagu

SEQ ID NO: 1361606 - RNA, 23 nt, Human
ccugccucagccuccugaguagc

SEQ ID NO: 1361607 - RNA, 20 nt, Human
ccugcuggguaccucaaccc

SEQ ID NO: 1361608 - RNA, 21 nt, Human
ccugcuggguaccucaaccca

SEQ ID NO: 1361609 - RNA, 20 nt, Human
ccugcuggguaccucaaccu

SEQ ID NO: 1361610 - RNA, 19 nt, Human
ccuugaacuccugggcuca

SEQ ID NO: 1361611 - RNA, 21 nt, Human
ccuugaacuccugggcucacu

SEQ ID NO: 1361612 - RNA, 24 nt, Human
cggagucucacucuguugcccagg

SEQ ID NO: 1361613 - RNA, 24 nt, Human
cggggucucacuggguugcccagg

SEQ ID NO: 1361614 - RNA, 24 nt, Human
cucaagugauccuccugccugagu

SEQ ID NO: 1361615 - RNA, 23 nt, Human
cucaccucagccucuugaguagc

SEQ ID NO: 1361616 - RNA, 24 nt, Human
cucaccucagccucuugaguagcu

SEQ ID NO: 1361617 - RNA, 24 nt, Human
cucacucuguugcccaggcuggag

SEQ ID NO: 1361618 - RNA, 25 nt, Human
cucacugcaaccuccaacuccccgg

SEQ ID NO: 1361619 - RNA, 24 nt, Human
cucagccucuugaguagcugggac

SEQ ID NO: 1361620 - RNA, 18 nt, Human
cuccccgguucaagugau

SEQ ID NO: 1361621 - RNA, 23 nt, Human
cuccccgguucaagugauucucc

SEQ ID NO: 1361622 - RNA, 22 nt, Human
cuccugggcucacuugcuccuc

SEQ ID NO: 1361623 - RNA, 24 nt, Human
cucuugaguagcugggaccacagg

SEQ ID NO: 1361624 - RNA, 23 nt, Human
cugccucagccuccugaguagcu

SEQ ID NO: 1361625 - RNA, 18 nt, Human
cugcuggguaccucaacc

SEQ ID NO: 1361626 - RNA, 18 nt, Human
cugcuggguaccucaacc

SEQ ID NO: 1361627 - RNA, 27 nt, Human
cuuaagauccuacugcagaaaccuuuu

SEQ ID NO: 1361628 - RNA, 23 nt, Human
cuugaagauuuucuaaugccuag

SEQ ID NO: 1361629 - RNA, 19 nt, Human
cuugcgcgaagauagucac

SEQ ID NO: 1361630 - RNA, 24 nt, Human
cuugcuccucucaccucagccucu

SEQ ID NO: 1361631 - RNA, 22 nt, Human
cuuuggacggaaguggggugga

SEQ ID NO: 1361632 - RNA, 19 nt, Human
gaacacccaaguaccuccc

SEQ ID NO: 1361633 - RNA, 26 nt, Human
gaacacuuaagggucccaacaucuga

SEQ ID NO: 1361634 - RNA, 18 nt, Human
gacacaguggagaucaag

SEQ ID NO: 1361635 - RNA, 18 nt, Human
gacuguaagcgugagcca

SEQ ID NO: 1361636 - RNA, 21 nt, Human
gacuguaagcgugagccacug

SEQ ID NO: 1361637 - RNA, 24 nt, Human
gagcugcuuguaggaaacgcuggc

SEQ ID NO: 1361638 - RNA, 27 nt, Human
gaguagcugggaccacaggcacauguc

SEQ ID NO: 1361639 - RNA, 21 nt, Human
gagugacauaaucucggcuca

SEQ ID NO: 1361640 - RNA, 24 nt, Human
gagugcaguggugcgaucacagcu

SEQ ID NO: 1361641 - RNA, 20 nt, Human
gaguucccuccuucugcccc

SEQ ID NO: 1361642 - RNA, 22 nt, Human
gcaaccuccaacuccccgguuc

SEQ ID NO: 1361643 - RNA, 20 nt, Human
gcagccuugaacuccugggc

SEQ ID NO: 1361644 - RNA, 23 nt, Human
ggaaaccucucauggagcugcuu

SEQ ID NO: 1361645 - RNA, 21 nt, Human
ggcaggcugugguacggggcu

SEQ ID NO: 1361646 - RNA, 21 nt, Human
ggcauccuuuggaccccacug

SEQ ID NO: 1361647 - RNA, 18 nt, Human
gggcaaagggccagcagc

SEQ ID NO: 1361648 - RNA, 19 nt, Human
gggcaggagguggggaggg

SEQ ID NO: 1361649 - RNA, 21 nt, Human
gggcaggagguggggagggga

SEQ ID NO: 1361650 - RNA, 30 nt, Human
gggcaggagguggggaggggauggcuggaa

SEQ ID NO: 1361651 - RNA, 20 nt, Human
ggggagggaauggugaggau

SEQ ID NO: 1361652 - RNA, 22 nt, Human
gggucucacuggguugcccagg

SEQ ID NO: 1361653 - RNA, 21 nt, Human
gguggugacgguggcugugca

SEQ ID NO: 1361654 - RNA, 21 nt, Human
gguucaagugauucuccugcc

SEQ ID NO: 1361655 - RNA, 21 nt, Human
guaggaaacgcuggcuggcug

SEQ ID NO: 1361656 - RNA, 24 nt, Human
gugauucuccugccucagccuccu

SEQ ID NO: 1361657 - RNA, 19 nt, Human
gugcacucacuugagggca

SEQ ID NO: 1361658 - RNA, 23 nt, Human
gugguuccuaacucuccccagaa

SEQ ID NO: 1361659 - RNA, 21 nt, Human
guugcccaggcuagucucaaa

SEQ ID NO: 1361660 - RNA, 18 nt, Human
uaaaaggaaacugaagug

SEQ ID NO: 1361661 - RNA, 23 nt, Human
uaaacuacacaaccucaagggca

SEQ ID NO: 1361662 - RNA, 24 nt, Human
uaaagugcugggacuguaagcgug

SEQ ID NO: 1361663 - RNA, 22 nt, Human
uaagacggagucucacucuguu

SEQ ID NO: 1361664 - RNA, 18 nt, Human
uaagauccuacugcagaa

SEQ ID NO: 1361665 - RNA, 23 nt, Human
uaagugguuccuaacucucccca

SEQ ID NO: 1361666 - RNA, 24 nt, Human
uagcauuuuaaguggaaaccucuc

SEQ ID NO: 1361667 - RNA, 19 nt, Human
uagggugccugggacacag

SEQ ID NO: 1361668 - RNA, 20 nt, Human
uagguggugacgguggcugu

SEQ ID NO: 1361669 - RNA, 23 nt, Human
uagguggugacgguggcuguggu

SEQ ID NO: 1361670 - RNA, 26 nt, Human
uaucuaaacuacacaaccucaagggc

SEQ ID NO: 1361671 - RNA, 22 nt, Human
uaugaagccugcuggguaccuc

SEQ ID NO: 1361672 - RNA, 18 nt, Human
ucaagagcagucuggacu

SEQ ID NO: 1361673 - RNA, 18 nt, Human
ucaagugauccuccugcc

SEQ ID NO: 1361674 - RNA, 19 nt, Human
ucaagugauucuccugccu

SEQ ID NO: 1361675 - RNA, 24 nt, Human
ucacucuguugcccaggcuggagu

SEQ ID NO: 1361676 - RNA, 19 nt, Human
ucacugcaaccuccaacuc

SEQ ID NO: 1361677 - RNA, 24 nt, Human
ucacugcaaccuccaacuccccgg

SEQ ID NO: 1361678 - RNA, 27 nt, Human
ucacugcaaccuccaacuccccgguuc

SEQ ID NO: 1361679 - RNA, 19 nt, Human
ucacuugagggcagagauc

SEQ ID NO: 1361680 - RNA, 20 nt, Human
ucagccuccugaguagcugg

SEQ ID NO: 1361681 - RNA, 23 nt, Human
ucagccucuugaguagcugggac

SEQ ID NO: 1361682 - RNA, 24 nt, Human
ucauugcagccuugaacuccuggg

SEQ ID NO: 1361683 - RNA, 19 nt, Human
uccagguuucugcuggaag

SEQ ID NO: 1361684 - RNA, 21 nt, Human
uccccgguucaagugauucuc

SEQ ID NO: 1361685 - RNA, 24 nt, Human
uccccgguucaagugauucuccug

SEQ ID NO: 1361686 - RNA, 22 nt, Human
uccuuaagugguuccuaacucu

SEQ ID NO: 1361687 - RNA, 26 nt, Human
uccuugcagacaucugucauggcacg

SEQ ID NO: 1361688 - RNA, 18 nt, Human
ucuagagugcagccagcu

SEQ ID NO: 1361689 - RNA, 23 nt, Human
ucucacucuguugcccaggcugg

SEQ ID NO: 1361690 - RNA, 24 nt, Human
ucucacucuguugcccaggcugga

SEQ ID NO: 1361691 - RNA, 25 nt, Human
ucucacucuguugcccaggcuggag

SEQ ID NO: 1361692 - RNA, 26 nt, Human
ucucacucuguugcccaggcuggagu

SEQ ID NO: 1361693 - RNA, 25 nt, Human
ucucacucuugucacccgagcugga

SEQ ID NO: 1361694 - RNA, 19 nt, Human
ucucacuggguugcccagg

SEQ ID NO: 1361695 - RNA, 22 nt, Human
ucuccacucuguccuuccuaca

SEQ ID NO: 1361696 - RNA, 24 nt, Human
ucuccugccucagccuccugagua

SEQ ID NO: 1361697 - RNA, 19 nt, Human
ucucuacuaaaaauacaga

SEQ ID NO: 1361698 - RNA, 21 nt, Human
ucugccccugcuggacaaaug

SEQ ID NO: 1361699 - RNA, 27 nt, Human
ucugucggcugggacaaaccggggucc

SEQ ID NO: 1361700 - RNA, 22 nt, Human
ucuguugcccaggcuggaguga

SEQ ID NO: 1361701 - RNA, 24 nt, Human
ucuugaguagcugggaccacaggc

SEQ ID NO: 1361702 - RNA, 19 nt, Human
ugaaaccccaucucuacua

SEQ ID NO: 1361703 - RNA, 18 nt, Human
ugaaagacucaacgaacc

SEQ ID NO: 1361704 - RNA, 25 nt, Human
ugaacuccugggcucacuugcuccu

SEQ ID NO: 1361705 - RNA, 18 nt, Human
ugaauaaaccagguccua

SEQ ID NO: 1361706 - RNA, 19 nt, Human
ugagaugucaucguaccga

SEQ ID NO: 1361707 - RNA, 21 nt, Human
ugagauuccaagaaaagucuu

SEQ ID NO: 1361708 - RNA, 18 nt, Human
ugaguuaaacccugcucc

SEQ ID NO: 1361709 - RNA, 19 nt, Human
ugaguucccuccuucugcc

SEQ ID NO: 1361710 - RNA, 20 nt, Human
ugauucuccugccucagccu

SEQ ID NO: 1361711 - RNA, 19 nt, Human
ugccccacugagccaucug

SEQ ID NO: 1361712 - RNA, 24 nt, Human
ugccucagccuccugaguagcugg

SEQ ID NO: 1361713 - RNA, 19 nt, Human
ugccugggacacaguggag

SEQ ID NO: 1361714 - RNA, 20 nt, Human
ugcugcuuaaagaacuuaag

SEQ ID NO: 1361715 - RNA, 21 nt, Human
uggaagugggggcaggaggug

SEQ ID NO: 1361716 - RNA, 19 nt, Human
uggagugcaguggugcgau

SEQ ID NO: 1361717 - RNA, 21 nt, Human
uggagugcaguggugcgauca

SEQ ID NO: 1361718 - RNA, 21 nt, Human
uggcuggacuccugauucuuu

SEQ ID NO: 1361719 - RNA, 18 nt, Human
ugggacaaaccucccagg

SEQ ID NO: 1361720 - RNA, 21 nt, Human
ugggacuguaagcgugagcca

SEQ ID NO: 1361721 - RNA, 22 nt, Human
ugggacuguaagcgugagccac

SEQ ID NO: 1361722 - RNA, 24 nt, Human
ugggacuguaagcgugagccacug

SEQ ID NO: 1361723 - RNA, 20 nt, Human
uggggaggggauggcuggac

SEQ ID NO: 1361724 - RNA, 21 nt, Human
uggggcagaagacuacaaguu

SEQ ID NO: 1361725 - RNA, 24 nt, Human
uggguugcccaggcuagucucaaa

SEQ ID NO: 1361726 - RNA, 24 nt, Human
uuaaagugcugggacuguaagcgu

SEQ ID NO: 1361727 - RNA, 21 nt, Human
uucaagugauucuccugccuc

SEQ ID NO: 1361728 - RNA, 23 nt, Human
uucaagugauucuccugccucag

SEQ ID NO: 1361729 - RNA, 24 nt, Human
uucaagugauucuccugccucagc

SEQ ID NO: 1361730 - RNA, 23 nt, Human
uuccaagaaaagucuuauuucag

SEQ ID NO: 1361731 - RNA, 20 nt, Human
uugaacacccaaguaccucc

SEQ ID NO: 1361732 - RNA, 22 nt, Human
uugaagauuuucuaaugccuag

SEQ ID NO: 1361733 - RNA, 18 nt, Human
uugagggcagagaucaga

SEQ ID NO: 1361734 - RNA, 23 nt, Human
uugcagccuugaacuccugggcu

SEQ ID NO: 1361735 - RNA, 23 nt, Human
uugucacccgagcuggagugcag

SEQ ID NO: 1361736 - RNA, 21 nt, Human
uuguugagccccagguggagc

SEQ ID NO: 1361737 - RNA, 24 nt, Human
uuucuauuucaagagcagucugga

SEQ ID NO: 1361738 - RNA, 22 nt, Human
aaagucccauggcgagugccag

SEQ ID NO: 1361739 - RNA, 22 nt, Human
aaucuuacuucccuaaccucac

SEQ ID NO: 1361740 - RNA, 24 nt, Human
aaugcagugguauggucucggcuc

SEQ ID NO: 1361741 - RNA, 20 nt, Human
acaaccaugaauccuacaua

SEQ ID NO: 1361742 - RNA, 18 nt, Human
acacaggugugugccacc

SEQ ID NO: 1361743 - RNA, 18 nt, Human
acauugacaagcaagugu

SEQ ID NO: 1361744 - RNA, 24 nt, Human
accacguuggccaggcuggucuug

SEQ ID NO: 1361745 - RNA, 24 nt, Human
acccaggcuggaaugcagugguau

SEQ ID NO: 1361746 - RNA, 20 nt, Human
acgagguuucaccacguugg

SEQ ID NO: 1361747 - RNA, 24 nt, Human
acgagguuucaccacguuggccag

SEQ ID NO: 1361748 - RNA, 20 nt, Human
acucuguggaaagguugggg

SEQ ID NO: 1361749 - RNA, 19 nt, Human
acuuggggaacuuuucugu

SEQ ID NO: 1361750 - RNA, 23 nt, Human
agagcuacuuacgauuuagauaa

SEQ ID NO: 1361751 - RNA, 18 nt, Human
agcaggaugugggugggg

SEQ ID NO: 1361752 - RNA, 19 nt, Human
agcuguaacacucaccgca

SEQ ID NO: 1361753 - RNA, 22 nt, Human
aggaaggcugggcugggacagc

SEQ ID NO: 1361754 - RNA, 24 nt, Human
aggugauccgcccacuuuggccuc

SEQ ID NO: 1361755 - RNA, 27 nt, Human
agguguggagggaaaggugugggcagg

SEQ ID NO: 1361756 - RNA, 21 nt, Human
agguucaagugauucuccugc

SEQ ID NO: 1361757 - RNA, 22 nt, Human
agguucaagugauucuccugcc

SEQ ID NO: 1361758 - RNA, 23 nt, Human
agguucaagugauucuccugccu

SEQ ID NO: 1361759 - RNA, 18 nt, Human
aguagcugggagugcagg

SEQ ID NO: 1361760 - RNA, 24 nt, Human
agugguauggucucggcucacugc

SEQ ID NO: 1361761 - RNA, 21 nt, Human
aucagcacucugugucuagcu

SEQ ID NO: 1361762 - RNA, 23 nt, Human
auggcagagcacacacagauaga

SEQ ID NO: 1361763 - RNA, 22 nt, Human
auggggacuuggggaacuuuuc

SEQ ID NO: 1361764 - RNA, 23 nt, Human
caaccucuaccucccagguucaa

SEQ ID NO: 1361765 - RNA, 22 nt, Human
caagugauucuccugccugagc

SEQ ID NO: 1361766 - RNA, 24 nt, Human
caauuuuuguauuuuuaguauaga

SEQ ID NO: 1361767 - RNA, 22 nt, Human
cacacaggugugugccaccaca

SEQ ID NO: 1361768 - RNA, 24 nt, Human
cacaggugugugccaccacaccca

SEQ ID NO: 1361769 - RNA, 21 nt, Human
caccacguuggccaggcuggu

SEQ ID NO: 1361770 - RNA, 23 nt, Human
caccacguuggccaggcuggucu

SEQ ID NO: 1361771 - RNA, 24 nt, Human
caccacguuggccaggcuggucuu

SEQ ID NO: 1361772 - RNA, 27 nt, Human
caccacguuggccaggcuggucuugaa

SEQ ID NO: 1361773 - RNA, 23 nt, Human
caccagaaggaaccagcagcucc

SEQ ID NO: 1361774 - RNA, 19 nt, Human
caccagaaggaagaaacuc

SEQ ID NO: 1361775 - RNA, 21 nt, Human
caccagaaggaagaaacucca

SEQ ID NO: 1361776 - RNA, 20 nt, Human
caccaggcacccccauucau

SEQ ID NO: 1361777 - RNA, 24 nt, Human
caccgaucugcgcucugucaaaac

SEQ ID NO: 1361778 - RNA, 24 nt, Human
cacguuggccaggcuggucuugaa

SEQ ID NO: 1361779 - RNA, 23 nt, Human
cacugaccugcagcccccaggac

SEQ ID NO: 1361780 - RNA, 21 nt, Human
cacugcaaccucuaccuccca

SEQ ID NO: 1361781 - RNA, 24 nt, Human
cagauagaccaaagguaaugccag

SEQ ID NO: 1361782 - RNA, 21 nt, Human
cagcagcuccagacacgccac

SEQ ID NO: 1361783 - RNA, 21 nt, Human
cagcgagaccaagaacccacc

SEQ ID NO: 1361784 - RNA, 20 nt, Human
cagcuccacuuuucccuccu

SEQ ID NO: 1361785 - RNA, 23 nt, Human
caggcacccccauucaucagucc

SEQ ID NO: 1361786 - RNA, 27 nt, Human
cauugacaagcaagugugucauaacca

SEQ ID NO: 1361787 - RNA, 20 nt, Human
ccaccacacccagccaauuu

SEQ ID NO: 1361788 - RNA, 26 nt, Human
ccagaaggaaccagcagcuccagaca

SEQ ID NO: 1361789 - RNA, 24 nt, Human
ccagacacaccaucuuuaagaacu

SEQ ID NO: 1361790 - RNA, 20 nt, Human
ccaugccuucacucuccagu

SEQ ID NO: 1361791 - RNA, 27 nt, Human
cccaccagaaggaagaaacuccagaca

SEQ ID NO: 1361792 - RNA, 23 nt, Human
cccagguucaagugauucuccuc

SEQ ID NO: 1361793 - RNA, 23 nt, Human
cccagguucaagugauucuccug

SEQ ID NO: 1361794 - RNA, 19 nt, Human
ccccgugcauagacagggu

SEQ ID NO: 1361795 - RNA, 23 nt, Human
cccgaguagcugggagugcaggu

SEQ ID NO: 1361796 - RNA, 21 nt, Human
ccgaucugcgcucugucaaaa

SEQ ID NO: 1361797 - RNA, 19 nt, Human
ccucaggugauccgcccac

SEQ ID NO: 1361798 - RNA, 24 nt, Human
ccucccagguucaagugauucucc

SEQ ID NO: 1361799 - RNA, 21 nt, Human
ccucuuuggcauuggcgucca

SEQ ID NO: 1361800 - RNA, 20 nt, Human
ccugcuaggguccccuuuca

SEQ ID NO: 1361801 - RNA, 24 nt, Human
ccuggccucaggugauccgcccac

SEQ ID NO: 1361802 - RNA, 19 nt, Human
ccuggugauuagaaugagg

SEQ ID NO: 1361803 - RNA, 19 nt, Human
ccuguccauccucacacuu

SEQ ID NO: 1361804 - RNA, 18 nt, Human
ccuguggucagguuggag

SEQ ID NO: 1361805 - RNA, 18 nt, Human
cgaacccaccagaaggaa

SEQ ID NO: 1361806 - RNA, 19 nt, Human
cgagaccaagaacccacca

SEQ ID NO: 1361807 - RNA, 24 nt, Human
cgagguuucaccacguuggccagg

SEQ ID NO: 1361808 - RNA, 24 nt, Human
cgcucugucacccaggcuggaaug

SEQ ID NO: 1361809 - RNA, 20 nt, Human
cggggagguguggagggaaa

SEQ ID NO: 1361810 - RNA, 22 nt, Human
cguuggccaggcuggucuugaa

SEQ ID NO: 1361811 - RNA, 19 nt, Human
cuagcagcccucgcucacu

SEQ ID NO: 1361812 - RNA, 22 nt, Human
cuauuccaaagaggacuguggu

SEQ ID NO: 1361813 - RNA, 24 nt, Human
cucacugcaaccucuaccucccag

SEQ ID NO: 1361814 - RNA, 19 nt, Human
cucccagguucaagugauu

SEQ ID NO: 1361815 - RNA, 21 nt, Human
cucgcucugucacccaggcug

SEQ ID NO: 1361816 - RNA, 22 nt, Human
cucucuguaaaacggaccaauc

SEQ ID NO: 1361817 - RNA, 22 nt, Human
cucucuguaaaauggaccaauc

SEQ ID NO: 1361818 - RNA, 23 nt, Human
cucugucacccaggcuggaaugc

SEQ ID NO: 1361819 - RNA, 27 nt, Human
cucuuuggcauuggcguccacucuggg

SEQ ID NO: 1361820 - RNA, 19 nt, Human
cugaagccagugagaccac

SEQ ID NO: 1361821 - RNA, 20 nt, Human
cugaagccagugagaccacg

SEQ ID NO: 1361822 - RNA, 25 nt, Human
cugaagccagugagaccacgaaccc

SEQ ID NO: 1361823 - RNA, 23 nt, Human
cugcaaccucuaccucccagguu

SEQ ID NO: 1361824 - RNA, 24 nt, Human
cugcaaccucuaccucccagguuc

SEQ ID NO: 1361825 - RNA, 23 nt, Human
cugccugagccucccgaguagcu

SEQ ID NO: 1361826 - RNA, 19 nt, Human
cuggaaugcagugguaugg

SEQ ID NO: 1361827 - RNA, 19 nt, Human
cuguaaaacggaccaauca

SEQ ID NO: 1361828 - RNA, 19 nt, Human
cuguaaaauggaccaauca

SEQ ID NO: 1361829 - RNA, 20 nt, Human
cugucaaaacggaccaauca

SEQ ID NO: 1361830 - RNA, 20 nt, Human
cuugcuacaaccaugaaucc

SEQ ID NO: 1361831 - RNA, 23 nt, Human
cuugcugcugcucacucucuggg

SEQ ID NO: 1361832 - RNA, 23 nt, Human
cuuuaugagcuguaacacucacc

SEQ ID NO: 1361833 - RNA, 21 nt, Human
gaagaaacuccagacacaucu

SEQ ID NO: 1361834 - RNA, 24 nt, Human
gaagccggcuggacuucuccuacc

SEQ ID NO: 1361835 - RNA, 23 nt, Human
gaccacgaacccaccagaaggaa

SEQ ID NO: 1361836 - RNA, 20 nt, Human
gagaccacgaacccaccaga

SEQ ID NO: 1361837 - RNA, 23 nt, Human
gagcacacacagauagaccaaag

SEQ ID NO: 1361838 - RNA, 19 nt, Human
gaucagaaugacaagcccc

SEQ ID NO: 1361839 - RNA, 21 nt, Human
gccccugaaggagaaacggca

SEQ ID NO: 1361840 - RNA, 24 nt, Human
gccucaccaggcacccccauucau

SEQ ID NO: 1361841 - RNA, 19 nt, Human
gcgccgccuuuaugagcug

SEQ ID NO: 1361842 - RNA, 24 nt, Human
gcuagguuucauugcacugaccug

SEQ ID NO: 1361843 - RNA, 20 nt, Human
gcugggacagcagccugugg

SEQ ID NO: 1361844 - RNA, 23 nt, Human
gcuggucuugaacuccuggccuc

SEQ ID NO: 1361845 - RNA, 21 nt, Human
ggcugggacagcagccugugg

SEQ ID NO: 1361846 - RNA, 24 nt, Human
ggcuggucuugaacuccuggccuc

SEQ ID NO: 1361847 - RNA, 19 nt, Human
ggugggugccgggaggccc

SEQ ID NO: 1361848 - RNA, 22 nt, Human
gucaaaacggaccaaucagcuc

SEQ ID NO: 1361849 - RNA, 21 nt, Human
gugaaggguaguuuuaagaca

SEQ ID NO: 1361850 - RNA, 24 nt, Human
gugauucuccugccugagccuccc

SEQ ID NO: 1361851 - RNA, 23 nt, Human
guggagggaaaggugugggcagg

SEQ ID NO: 1361852 - RNA, 20 nt, Human
uaaaauggaccaaucagcaa

SEQ ID NO: 1361853 - RNA, 24 nt, Human
uaaaauggaccaaucagcaggaug

SEQ ID NO: 1361854 - RNA, 18 nt, Human
uaacacucaccgcaaaag

SEQ ID NO: 1361855 - RNA, 19 nt, Human
uaacacucaccgcaaaagu

SEQ ID NO: 1361856 - RNA, 22 nt, Human
uaaggguaagagccagugggcu

SEQ ID NO: 1361857 - RNA, 22 nt, Human
uaccucccagguucaagugauu

SEQ ID NO: 1361858 - RNA, 31 nt, Human
uacucugcuuccuugugaaggguaguuuuaa

SEQ ID NO: 1361859 - RNA, 19 nt, Human
uaggguccccuuucacgcu

SEQ ID NO: 1361860 - RNA, 20 nt, Human
uaggugcugcaaagucccau

SEQ ID NO: 1361861 - RNA, 24 nt, Human
uaguauagacgagguuucaccacg

SEQ ID NO: 1361862 - RNA, 19 nt, Human
uaucugaaggaacaaacuc

SEQ ID NO: 1361863 - RNA, 19 nt, Human
ucaagugauucuccugccu

SEQ ID NO: 1361864 - RNA, 20 nt, Human
ucaccaggcacccccauuca

SEQ ID NO: 1361865 - RNA, 19 nt, Human
ucacccaggcuggaaugca

SEQ ID NO: 1361866 - RNA, 20 nt, Human
ucacucucggugccucuuug

SEQ ID NO: 1361867 - RNA, 23 nt, Human
ucacugcaaccucuaccucccag

SEQ ID NO: 1361868 - RNA, 24 nt, Human
ucacugcaaccucuaccucccagg

SEQ ID NO: 1361869 - RNA, 21 nt, Human
ucagcaagugccugcugggcu

SEQ ID NO: 1361870 - RNA, 22 nt, Human
uccagacacaccaucuuuaaga

SEQ ID NO: 1361871 - RNA, 22 nt, Human
uccagacacgccaccuuuaaga

SEQ ID NO: 1361872 - RNA, 23 nt, Human
uccagcgugggucuccaaacuug

SEQ ID NO: 1361873 - RNA, 21 nt, Human
ucccagguucaagugauucuc

SEQ ID NO: 1361874 - RNA, 24 nt, Human
ucccagguucaagugauucuccug

SEQ ID NO: 1361875 - RNA, 23 nt, Human
ucccgaguagcugggagugcagg

SEQ ID NO: 1361876 - RNA, 24 nt, Human
ucccgaguagcugggagugcaggu

SEQ ID NO: 1361877 - RNA, 21 nt, Human
uccucacacuugcuacaacca

SEQ ID NO: 1361878 - RNA, 23 nt, Human
uccucacacuugcuacaaccaug

SEQ ID NO: 1361879 - RNA, 20 nt, Human
uccuuggcugaccugcagga

SEQ ID NO: 1361880 - RNA, 19 nt, Human
ucucgcucugucacccagg

SEQ ID NO: 1361881 - RNA, 23 nt, Human
ucucgcucugucacccaggcugg

SEQ ID NO: 1361882 - RNA, 24 nt, Human
ucucgcucugucacccaggcugga

SEQ ID NO: 1361883 - RNA, 26 nt, Human
ucucgcucugucacccaggcuggaau

SEQ ID NO: 1361884 - RNA, 27 nt, Human
ucucgcucugucacccaggcuggaaug

SEQ ID NO: 1361885 - RNA, 21 nt, Human
ucucuggggcuggcugaggcc

SEQ ID NO: 1361886 - RNA, 24 nt, Human
ucugucacccaggcuggaaugcag

SEQ ID NO: 1361887 - RNA, 20 nt, Human
ucuugaacuccuggccucag

SEQ ID NO: 1361888 - RNA, 22 nt, Human
ugaaggaacaaacuccagacac

SEQ ID NO: 1361889 - RNA, 21 nt, Human
ugagaaaauggaaggucagag

SEQ ID NO: 1361890 - RNA, 23 nt, Human
ugagaaaauggaaggucagagaa

SEQ ID NO: 1361891 - RNA, 23 nt, Human
ugagaagacugcugagaucagaa

SEQ ID NO: 1361892 - RNA, 18 nt, Human
ugagaccacgaacccacc

SEQ ID NO: 1361893 - RNA, 19 nt, Human
ugagaccacgaacccacca

SEQ ID NO: 1361894 - RNA, 21 nt, Human
ugagaccacgaacccaccaga

SEQ ID NO: 1361895 - RNA, 24 nt, Human
ugagagaagccggcuggacuucuc

SEQ ID NO: 1361896 - RNA, 23 nt, Human
ugagcuguaacacucaccgcgaa

SEQ ID NO: 1361897 - RNA, 23 nt, Human
ugauguguggacucuguggaaag

SEQ ID NO: 1361898 - RNA, 23 nt, Human
ugcagcccccaggacuguccccu

SEQ ID NO: 1361899 - RNA, 18 nt, Human
ugcagugguauggucucg

SEQ ID NO: 1361900 - RNA, 22 nt, Human
ugcagugguauggucucggcuc

SEQ ID NO: 1361901 - RNA, 19 nt, Human
ugcccaagcuaggugcugc

SEQ ID NO: 1361902 - RNA, 24 nt, Human
ugccugagccucccgaguagcugg

SEQ ID NO: 1361903 - RNA, 21 nt, Human
ugcuacaaccaugaauccuac

SEQ ID NO: 1361904 - RNA, 20 nt, Human
uggaaugcagugguaugguc

SEQ ID NO: 1361905 - RNA, 23 nt, Human
uggaaugcagugguauggucucg

SEQ ID NO: 1361906 - RNA, 24 nt, Human
uggaaugcagugguauggucucgg

SEQ ID NO: 1361907 - RNA, 21 nt, Human
uggacacacaggugugugcca

SEQ ID NO: 1361908 - RNA, 23 nt, Human
uggacacacaggugugugccacc

SEQ ID NO: 1361909 - RNA, 24 nt, Human
uggccaggcuggucuugaacuccu

SEQ ID NO: 1361910 - RNA, 18 nt, Human
uggccucaggugauccgc

SEQ ID NO: 1361911 - RNA, 24 nt, Human
uggccucaggugauccgcccacuu

SEQ ID NO: 1361912 - RNA, 22 nt, Human
uggggcuggcugaggccggagc

SEQ ID NO: 1361913 - RNA, 22 nt, Human
uguaaaacggaccaaucagcuc

SEQ ID NO: 1361914 - RNA, 20 nt, Human
ugucauaaccauguugcaac

SEQ ID NO: 1361915 - RNA, 19 nt, Human
ugucuaaagacacccaagu

SEQ ID NO: 1361916 - RNA, 25 nt, Human
ugugcgcacacacggguucuaggug

SEQ ID NO: 1361917 - RNA, 23 nt, Human
ugugcgccgccuuuaugagcugu

SEQ ID NO: 1361918 - RNA, 24 nt, Human
ugugucuagcuaaagguuuguaaa

SEQ ID NO: 1361919 - RNA, 20 nt, Human
ugugugccaccacacccagc

SEQ ID NO: 1361920 - RNA, 24 nt, Human
uucaagugauucuccugccugagc

SEQ ID NO: 1361921 - RNA, 22 nt, Human
uuccuacacgcuuccuuggcug

SEQ ID NO: 1361922 - RNA, 23 nt, Human
uucuaaaucagcucuaaggccac

SEQ ID NO: 1361923 - RNA, 25 nt, Human
uugaagucagcgagaccacgaaccc

SEQ ID NO: 1361924 - RNA, 21 nt, Human
uugcugcugcucacucucugg

SEQ ID NO: 1361925 - RNA, 22 nt, Human
uuguauuuuuaguauagacgag

SEQ ID NO: 1361926 - RNA, 21 nt, Human
uuucaccacguuggccaggcu

SEQ ID NO: 1361927 - RNA, 24 nt, Human
uuuuuaguauagacgagguuucac

SEQ ID NO: 1361928 - RNA, 23 nt, Human
uuuuuguauuuuuaguauagacg

SEQ ID NO: 1361929 - RNA, 21 nt, Human
aaaacagcagaaagguuaaag

SEQ ID NO: 1361930 - RNA, 20 nt, Human
aaaagaaacuucaacugccu

SEQ ID NO: 1361931 - RNA, 24 nt, Human
aaaaugcaagaauaaaauggaaca

SEQ ID NO: 1361932 - RNA, 21 nt, Human
aaacaaaaaguuggagguagc

SEQ ID NO: 1361933 - RNA, 22 nt, Human
aaagaaaaaucagggaaaagga

SEQ ID NO: 1361934 - RNA, 20 nt, Human
aaagaaacuucaacugccuc

SEQ ID NO: 1361935 - RNA, 19 nt, Human
aaagauacccacucugucc

SEQ ID NO: 1361936 - RNA, 22 nt, Human
aaagauacccacucuguccaca

SEQ ID NO: 1361937 - RNA, 22 nt, Human
aaaggacacaaaagaaacuuca

SEQ ID NO: 1361938 - RNA, 24 nt, Human
aaaggacacaaaagaaacuucaac

SEQ ID NO: 1361939 - RNA, 23 nt, Human
aaaggcuguccagacagcucugg

SEQ ID NO: 1361940 - RNA, 24 nt, Human
aaagucucuccacuguguccacac

SEQ ID NO: 1361941 - RNA, 22 nt, Human
aacuucccuguuguuaggggga

SEQ ID NO: 1361942 - RNA, 20 nt, Human
aagaaaaaucagggaaaagg

SEQ ID NO: 1361943 - RNA, 19 nt, Human
aagaagaguaagagcaaga

SEQ ID NO: 1361944 - RNA, 22 nt, Human
aagauacauagcucagccaugg

SEQ ID NO: 1361945 - RNA, 23 nt, Human
aaugcaagaauaaaauggaacaa

SEQ ID NO: 1361946 - RNA, 21 nt, Human
aauggauucagugaucauagu

SEQ ID NO: 1361947 - RNA, 18 nt, Human
acacaacgaggcaggcac

SEQ ID NO: 1361948 - RNA, 26 nt, Human
acacaacgaggcaggcacuguggccc

SEQ ID NO: 1361949 - RNA, 20 nt, Human
acagacaauaaacaacuaag

SEQ ID NO: 1361950 - RNA, 18 nt, Human
acagcuucauuugcagag

SEQ ID NO: 1361951 - RNA, 23 nt, Human
acaggaaaggcuguccagacagc

SEQ ID NO: 1361952 - RNA, 19 nt, Human
acugcagcugccacaugcc

SEQ ID NO: 1361953 - RNA, 21 nt, Human
acugugugcugggcacugcuc

SEQ ID NO: 1361954 - RNA, 20 nt, Human
agacaggauugggagcuggg

SEQ ID NO: 1361955 - RNA, 24 nt, Human
agacaggauugggagcugggagug

SEQ ID NO: 1361956 - RNA, 23 nt, Human
agacggucuugaaggucuagaac

SEQ ID NO: 1361957 - RNA, 22 nt, Human
agagaaguauucagggcccaga

SEQ ID NO: 1361958 - RNA, 21 nt, Human
agagcaacccauugucuaagg

SEQ ID NO: 1361959 - RNA, 19 nt, Human
agagcaagagccuuggcug

SEQ ID NO: 1361960 - RNA, 18 nt, Human
agagccugaaggccagug

SEQ ID NO: 1361961 - RNA, 20 nt, Human
agauacccacucuguccaca

SEQ ID NO: 1361962 - RNA, 21 nt, Human
agcauucuaggcagagggaaa

SEQ ID NO: 1361963 - RNA, 21 nt, Human
agccauggaguucacagcuuc

SEQ ID NO: 1361964 - RNA, 22 nt, Human
agcuaguucugaacuuuuccuc

SEQ ID NO: 1361965 - RNA, 24 nt, Human
aggaaagagcauucuaggcagagg

SEQ ID NO: 1361966 - RNA, 23 nt, Human
aggcaaaaauaaaauggagggac

SEQ ID NO: 1361967 - RNA, 20 nt, Human
aggcaaaggugguggaaugg

SEQ ID NO: 1361968 - RNA, 26 nt, Human
aggcaggaagugguagaaaggggacc

SEQ ID NO: 1361969 - RNA, 23 nt, Human
aggcuuagaagucacacuaaaau

SEQ ID NO: 1361970 - RNA, 20 nt, Human
aguaucccugguccccaccu

SEQ ID NO: 1361971 - RNA, 25 nt, Human
auaaaauggaacaauagaguauguc

SEQ ID NO: 1361972 - RNA, 23 nt, Human
auaaagagcagauuuauguccca

SEQ ID NO: 1361973 - RNA, 23 nt, Human
caaaagaaacuucaacugccuca

SEQ ID NO: 1361974 - RNA, 23 nt, Human
caagaagagccugaaggccagug

SEQ ID NO: 1361975 - RNA, 19 nt, Human
caagaagguuuagguggga

SEQ ID NO: 1361976 - RNA, 26 nt, Human
caagaagguuuaggugggaaagccaa

SEQ ID NO: 1361977 - RNA, 21 nt, Human
caagcauugaccugagacagg

SEQ ID NO: 1361978 - RNA, 27 nt, Human
caagucccaugaaagaaaaaucaggga

SEQ ID NO: 1361979 - RNA, 22 nt, Human
cacaaaagaaacuucaacugcc

SEQ ID NO: 1361980 - RNA, 21 nt, Human
cacaaugugaccaagaauuga

SEQ ID NO: 1361981 - RNA, 22 nt, Human
cacacuaaaaucagguugaauc

SEQ ID NO: 1361982 - RNA, 23 nt, Human
cacucuguccacaaaaauggcuu

SEQ ID NO: 1361983 - RNA, 20 nt, Human
cagacaauaaacaacuaagc

SEQ ID NO: 1361984 - RNA, 21 nt, Human
cagcagaaagguuaaagucaa

SEQ ID NO: 1361985 - RNA, 23 nt, Human
caggggcuucaaggaaaccucaa

SEQ ID NO: 1361986 - RNA, 18 nt, Human
cagugcagagcaacccau

SEQ ID NO: 1361987 - RNA, 19 nt, Human
cauaaggccuggcauguag

SEQ ID NO: 1361988 - RNA, 18 nt, Human
caugggcccuauuccaag

SEQ ID NO: 1361989 - RNA, 26 nt, Human
ccagacagcucuggggagaggccaga

SEQ ID NO: 1361990 - RNA, 19 nt, Human
ccugaaggccaguguagcu

SEQ ID NO: 1361991 - RNA, 19 nt, Human
cgaggcaggcacuguggcc

SEQ ID NO: 1361992 - RNA, 18 nt, Human
cgugcaugccaaagaugg

SEQ ID NO: 1361993 - RNA, 18 nt, Human
cucauuuaucuccucccc

SEQ ID NO: 1361994 - RNA, 22 nt, Human
cuccuccccuuacacagcaguc

SEQ ID NO: 1361995 - RNA, 23 nt, Human
cucugugaccuugagaaucuuau

SEQ ID NO: 1361996 - RNA, 23 nt, Human
cugagacaggauugggagcuggg

SEQ ID NO: 1361997 - RNA, 23 nt, Human
cugcagcuagaaaaaugcaagaa

SEQ ID NO: 1361998 - RNA, 20 nt, Human
cugugugcugggcacugcuc

SEQ ID NO: 1361999 - RNA, 22 nt, Human
cugugugcugggcacugcucuu

SEQ ID NO: 1362000 - RNA, 19 nt, Human
gaaagaaaaaucagggaaa

SEQ ID NO: 1362001 - RNA, 27 nt, Human
gaacuggggccaggagccugucaucuc

SEQ ID NO: 1362002 - RNA, 22 nt, Human
gaaguagacucuuuuauacaga

SEQ ID NO: 1362003 - RNA, 20 nt, Human
gaaucccagcucuaucacuu

SEQ ID NO: 1362004 - RNA, 24 nt, Human
gacaggauugggagcugggaguga

SEQ ID NO: 1362005 - RNA, 24 nt, Human
gaccuauuaucucucucaagcauu

SEQ ID NO: 1362006 - RNA, 22 nt, Human
gaguagaaauaaaguugguaug

SEQ ID NO: 1362007 - RNA, 18 nt, Human
gaguagaaaugauacacg

SEQ ID NO: 1362008 - RNA, 22 nt, Human
gauauaaaggacacaaaagaaa

SEQ ID NO: 1362009 - RNA, 20 nt, Human
gcaaguucuucaagacucaa

SEQ ID NO: 1362010 - RNA, 18 nt, Human
gcuagaaaaaugcaagaa

SEQ ID NO: 1362011 - RNA, 24 nt, Human
gcucaagaagagccugaaggccag

SEQ ID NO: 1362012 - RNA, 19 nt, Human
ggagccugucaucucaauu

SEQ ID NO: 1362013 - RNA, 23 nt, Human
ggcaggcacuguggcccaggugg

SEQ ID NO: 1362014 - RNA, 21 nt, Human
gggaaacacaaaugugaaggc

SEQ ID NO: 1362015 - RNA, 22 nt, Human
gggaagaagaguaagagcaaga

SEQ ID NO: 1362016 - RNA, 22 nt, Human
gucagagaaguauucagggccc

SEQ ID NO: 1362017 - RNA, 23 nt, Human
gucagagaaguauucagggccca

SEQ ID NO: 1362018 - RNA, 19 nt, Human
guccagacagcucugggga

SEQ ID NO: 1362019 - RNA, 20 nt, Human
uaaaaaucugccacauaaau

SEQ ID NO: 1362020 - RNA, 20 nt, Human
uaagagcaagaagguuuagg

SEQ ID NO: 1362021 - RNA, 19 nt, Human
uaagggacaacauauaaua

SEQ ID NO: 1362022 - RNA, 20 nt, Human
uacugcagcugccacaugcc

SEQ ID NO: 1362023 - RNA, 19 nt, Human
uagaagaacugguccucau

SEQ ID NO: 1362024 - RNA, 23 nt, Human
uagagaguccaauauaagaaaau

SEQ ID NO: 1362025 - RNA, 19 nt, Human
uagaguaugucuggucucc

SEQ ID NO: 1362026 - RNA, 18 nt, Human
uagcagcugaugauaugg

SEQ ID NO: 1362027 - RNA, 24 nt, Human
uagcuaauuuacuaauuaauucac

SEQ ID NO: 1362028 - RNA, 23 nt, Human
uaggaccaauaugaaagguguuc

SEQ ID NO: 1362029 - RNA, 22 nt, Human
uagggccagcugaccauuuccu

SEQ ID NO: 1362030 - RNA, 24 nt, Human
uaguaaucuuucuguuauuggucc

SEQ ID NO: 1362031 - RNA, 21 nt, Human
uaguucugaacuuuuccuccu

SEQ ID NO: 1362032 - RNA, 20 nt, Human
uaguuguugugucuccucau

SEQ ID NO: 1362033 - RNA, 23 nt, Human
uaugcacuauuucaaucugugua

SEQ ID NO: 1362034 - RNA, 25 nt, Human
uaugucccagggaaacuguaucuug

SEQ ID NO: 1362035 - RNA, 25 nt, Human
ucaaagacagccucucuaagagggu

SEQ ID NO: 1362036 - RNA, 23 nt, Human
ucagccauggaguucacagcuuc

SEQ ID NO: 1362037 - RNA, 23 nt, Human
ucagucucaacagugcuauucug

SEQ ID NO: 1362038 - RNA, 23 nt, Human
uccacaaaaauggcuuaucagca

SEQ ID NO: 1362039 - RNA, 23 nt, Human
uccacauacugcagcugccacaa

SEQ ID NO: 1362040 - RNA, 20 nt, Human
uccacuauccuuccaaaaau

SEQ ID NO: 1362041 - RNA, 18 nt, Human
uccaguuuccaacuucug

SEQ ID NO: 1362042 - RNA, 24 nt, Human
ucccauuucugagagcaagagcug

SEQ ID NO: 1362043 - RNA, 24 nt, Human
ucucaggggcuucaaggaaaccuc

SEQ ID NO: 1362044 - RNA, 18 nt, Human
ucuccacacuucauuugg

SEQ ID NO: 1362045 - RNA, 23 nt, Human
ucuguuucauauuuaacaaaacc

SEQ ID NO: 1362046 - RNA, 23 nt, Human
ugaaagaaaaaucagggaaaagg

SEQ ID NO: 1362047 - RNA, 18 nt, Human
ugaaggcuuugaguagaa

SEQ ID NO: 1362048 - RNA, 19 nt, Human
ugaccaaaauguccccaca

SEQ ID NO: 1362049 - RNA, 22 nt, Human
ugagaggccugaaggaaagugc

SEQ ID NO: 1362050 - RNA, 22 nt, Human
ugcaagaauaaaauggaacaau

SEQ ID NO: 1362051 - RNA, 22 nt, Human
ugcagcuagaaaaaugcaagaa

SEQ ID NO: 1362052 - RNA, 21 nt, Human
ugccacaugcccuuguagagc

SEQ ID NO: 1362053 - RNA, 20 nt, Human
ugcccagcugggaacugggg

SEQ ID NO: 1362054 - RNA, 20 nt, Human
uggaagaaggaauagaucau

SEQ ID NO: 1362055 - RNA, 24 nt, Human
uggaagaaggaauagaucauauug

SEQ ID NO: 1362056 - RNA, 19 nt, Human
uggagcaugauuaggauaa

SEQ ID NO: 1362057 - RNA, 23 nt, Human
uggagguagcaagaauggaagaa

SEQ ID NO: 1362058 - RNA, 26 nt, Human
uggagguagcaagaauggaagaagga

SEQ ID NO: 1362059 - RNA, 23 nt, Human
uggcuggucauugagaggccuga

SEQ ID NO: 1362060 - RNA, 21 nt, Human
ugggaaaacagcagaaagguu

SEQ ID NO: 1362061 - RNA, 18 nt, Human
ugggaaagccaaauggca

SEQ ID NO: 1362062 - RNA, 21 nt, Human
ugggauuucuuaaaaccuuuu

SEQ ID NO: 1362063 - RNA, 21 nt, Human
ugguggaaugggcuagcauga

SEQ ID NO: 1362064 - RNA, 21 nt, Human
ugugaaccacaagcuuaugca

SEQ ID NO: 1362065 - RNA, 21 nt, Human
ugugcugggcacugcucuuga

SEQ ID NO: 1362066 - RNA, 21 nt, Human
uguguacaggcaauucccaug

SEQ ID NO: 1362067 - RNA, 23 nt, Human
uguguacaggcaauucccaugca

SEQ ID NO: 1362068 - RNA, 21 nt, Human
uguguagaggccuggaggcca

SEQ ID NO: 1362069 - RNA, 18 nt, Human
uguuagggggauauaaag

SEQ ID NO: 1362070 - RNA, 24 nt, Human
uguuucccauuucugagagcaaga

SEQ ID NO: 1362071 - RNA, 19 nt, Human
uuaaacauucuugaacuga

SEQ ID NO: 1362072 - RNA, 25 nt, Human
uuauuugaaaauuugaggaaagagc

SEQ ID NO: 1362073 - RNA, 22 nt, Human
uuccuccugucuuguuucaauu

SEQ ID NO: 1362074 - RNA, 24 nt, Human
uucuucaucugaaaaaaggaguua

SEQ ID NO: 1362075 - RNA, 24 nt, Human
uugaacugauaguuggaaaacaaa

SEQ ID NO: 1362076 - RNA, 23 nt, Human
uuuaauauuucauuaccagugaa

SEQ ID NO: 1362077 - RNA, 19 nt, Human
uuuauacagaguggucaaa

SEQ ID NO: 1362078 - RNA, 20 nt, Human
uuuggcauauuuuagcuaau

SEQ ID NO: 1362079 - RNA, 26 nt, Human
uuuuaugugaauguacacaaugaaug

SEQ ID NO: 1362080 - RNA, 20 nt, Human
aagaagaggauccuccaggu

SEQ ID NO: 1362081 - RNA, 21 nt, Human
caagaagaggauccuccaggu

SEQ ID NO: 1362082 - RNA, 22 nt, Human
cuguagcugcugccaccaagaa

SEQ ID NO: 1362083 - RNA, 22 nt, Human
gcugccaccaagaagaggaucc

SEQ ID NO: 1362084 - RNA, 18 nt, Human
ugccaccaagaagaggau

SEQ ID NO: 1362085 - RNA, 18 nt, Human
ugggacuagggagccucc

SEQ ID NO: 1362086 - RNA, 22 nt, Human
aaaucauaaaaaguacuggaau

SEQ ID NO: 1362087 - RNA, 21 nt, Human
agacuguuuacuggcucgauu

SEQ ID NO: 1362088 - RNA, 18 nt, Human
aggcaggucgccgccgga

SEQ ID NO: 1362089 - RNA, 22 nt, Human
ccugguaaaggccuccagaacc

SEQ ID NO: 1362090 - RNA, 18 nt, Human
cggccgggaaggcgacgg

SEQ ID NO: 1362091 - RNA, 21 nt, Human
cugguaaaggccuccagaacc

SEQ ID NO: 1362092 - RNA, 22 nt, Human
ucagaggcaggucgccgccgga

SEQ ID NO: 1362093 - RNA, 23 nt, Human
uggaaugaaaauacagguagugg

SEQ ID NO: 1362094 - RNA, 24 nt, Human
uuacuggcucgauucuagcucugu

SEQ ID NO: 1362095 - RNA, 22 nt, Human
aauuaagauuuuuagccaaaau

SEQ ID NO: 1362096 - RNA, 23 nt, Human
accucaaucuuuuccucuuugaa

SEQ ID NO: 1362097 - RNA, 22 nt, Human
agcuacuaagauauucuuacac

SEQ ID NO: 1362098 - RNA, 19 nt, Human
ccucaaucuuuuccucuuu

SEQ ID NO: 1362099 - RNA, 27 nt, Human
cuacagguggacagaacagcgcgaguc

SEQ ID NO: 1362100 - RNA, 18 nt, Human
gacacuggcaggcacugg

SEQ ID NO: 1362101 - RNA, 25 nt, Human
gacagaacaacuccuaggaaaggga

SEQ ID NO: 1362102 - RNA, 25 nt, Human
uauuauaaugaugaacgagacaaaa

SEQ ID NO: 1362103 - RNA, 18 nt, Human
ucaaaaguaaauuuggcu

SEQ ID NO: 1362104 - RNA, 19 nt, Human
ucuccuggagcucagaagc

SEQ ID NO: 1362105 - RNA, 20 nt, Human
ucuccuggagcucagaagcu

SEQ ID NO: 1362106 - RNA, 23 nt, Human
ugguggcacacaucucuaguccc

SEQ ID NO: 1362107 - RNA, 18 nt, Human
uguuuauuuaucaaacag

SEQ ID NO: 1362108 - RNA, 18 nt, Human
uuccagugaguaccucaa

SEQ ID NO: 1362109 - RNA, 18 nt, Human
uuggccgggcaugguggc

SEQ ID NO: 1362110 - RNA, 24 nt, Human
uuuuuuuuuuuuuuuuuuaacuug

SEQ ID NO: 1362111 - RNA, 23 nt, Human
aaaaaacagcacagcaaaguuac

SEQ ID NO: 1362112 - RNA, 20 nt, Human
aaaaauucuccuuugcauca

SEQ ID NO: 1362113 - RNA, 20 nt, Human
aaaaggccaagaugccuaca

SEQ ID NO: 1362114 - RNA, 22 nt, Human
aaaaggccaagaugccuacaaa

SEQ ID NO: 1362115 - RNA, 24 nt, Human
aaaaggccaagaugccuacaaaag

SEQ ID NO: 1362116 - RNA, 24 nt, Human
aaaaggccaagaugccuacaaaag

SEQ ID NO: 1362117 - RNA, 21 nt, Human
aaagcacucugucaaagccaa

SEQ ID NO: 1362118 - RNA, 20 nt, Human
aaagccaaauauccuccagg

SEQ ID NO: 1362119 - RNA, 20 nt, Human
aagaaaaaugcugccuccug

SEQ ID NO: 1362120 - RNA, 19 nt, Human
aagaugccuacaaaaguaa

SEQ ID NO: 1362121 - RNA, 23 nt, Human
aauacucuggauucuuaaguaac

SEQ ID NO: 1362122 - RNA, 21 nt, Human
acuuugaaaaauaguauagga

SEQ ID NO: 1362123 - RNA, 20 nt, Human
agaaagcaaaucugcagcaa

SEQ ID NO: 1362124 - RNA, 22 nt, Human
agcaauguccuuaauacccacu

SEQ ID NO: 1362125 - RNA, 20 nt, Human
agcacucugucaaagccaaa

SEQ ID NO: 1362126 - RNA, 21 nt, Human
agcucgucccggccggcugcc

SEQ ID NO: 1362127 - RNA, 21 nt, Human
aggcauaauaaugaucuuccu

SEQ ID NO: 1362128 - RNA, 21 nt, Human
aguaucuacagaagaauaagc

SEQ ID NO: 1362129 - RNA, 21 nt, Human
aucacuucaucaucaggaaac

SEQ ID NO: 1362130 - RNA, 23 nt, Human
aucaucaggaaacaguuccaagg

SEQ ID NO: 1362131 - RNA, 24 nt, Human
augcugccuccugaagauguauuc

SEQ ID NO: 1362132 - RNA, 22 nt, Human
auguuucagauguacacugagu

SEQ ID NO: 1362133 - RNA, 22 nt, Human
caacacgauaaaaauucuccuu

SEQ ID NO: 1362134 - RNA, 21 nt, Human
cacauuccaaacccaagacac

SEQ ID NO: 1362135 - RNA, 23 nt, Human
cacauuccaaacccaagacacua

SEQ ID NO: 1362136 - RNA, 20 nt, Human
cagacaacugcucaaaaaac

SEQ ID NO: 1362137 - RNA, 20 nt, Human
cagauguacacugaguauuu

SEQ ID NO: 1362138 - RNA, 19 nt, Human
cagcaaaguuacccuccgc

SEQ ID NO: 1362139 - RNA, 22 nt, Human
cagcaauguccuuaauacccac

SEQ ID NO: 1362140 - RNA, 23 nt, Human
cagcaguauuucuauaauaaugc

SEQ ID NO: 1362141 - RNA, 22 nt, Human
caguuucuguuacaacuaggga

SEQ ID NO: 1362142 - RNA, 25 nt, Human
cauucuacugccaucccaaauauaa

SEQ ID NO: 1362143 - RNA, 22 nt, Human
cauucucaaaacaaaaccugag

SEQ ID NO: 1362144 - RNA, 21 nt, Human
ccaaauauccuccaggaacuc

SEQ ID NO: 1362145 - RNA, 20 nt, Human
ccacaauuccuucuccaaau

SEQ ID NO: 1362146 - RNA, 22 nt, Human
cccaagacacuaauacucugga

SEQ ID NO: 1362147 - RNA, 25 nt, Human
cccaagacacuaauacucuggauuc

SEQ ID NO: 1362148 - RNA, 21 nt, Human
ccccggcgucucggcgggacc

SEQ ID NO: 1362149 - RNA, 18 nt, Human
cgccaaccccagcccagg

SEQ ID NO: 1362150 - RNA, 20 nt, Human
cgucccggccggcugcccca

SEQ ID NO: 1362151 - RNA, 19 nt, Human
cuguucccaacauguuucc

SEQ ID NO: 1362152 - RNA, 22 nt, Human
cuuccaucuuguuugcugccac

SEQ ID NO: 1362153 - RNA, 21 nt, Human
gaagauguauucccuaacucc

SEQ ID NO: 1362154 - RNA, 20 nt, Human
gagcacaaaccaaaccauaa

SEQ ID NO: 1362155 - RNA, 20 nt, Human
gcaagguccuguacggggua

SEQ ID NO: 1362156 - RNA, 19 nt, Human
gccaaauauccuccaggaa

SEQ ID NO: 1362157 - RNA, 23 nt, Human
gccagcguuccaccaaccaguuu

SEQ ID NO: 1362158 - RNA, 24 nt, Human
guccaaaacacuuuuggaccccaa

SEQ ID NO: 1362159 - RNA, 24 nt, Human
gucguguuucagcuccggcgccag

SEQ ID NO: 1362160 - RNA, 23 nt, Human
gugaacucgccaaccccagccca

SEQ ID NO: 1362161 - RNA, 19 nt, Human
guuuccuucacgucguguu

SEQ ID NO: 1362162 - RNA, 21 nt, Human
uaaccauaacccucagucuuc

SEQ ID NO: 1362163 - RNA, 21 nt, Human
uaauguacuuauuguacaucc

SEQ ID NO: 1362164 - RNA, 19 nt, Human
uacacaguuuucauuggaa

SEQ ID NO: 1362165 - RNA, 21 nt, Human
uacccacucuaugaugucuuc

SEQ ID NO: 1362166 - RNA, 20 nt, Human
uauugcaaaucacuucauca

SEQ ID NO: 1362167 - RNA, 21 nt, Human
ucaaagcacucugucaaagcc

SEQ ID NO: 1362168 - RNA, 22 nt, Human
ucaaagcacucugucaaagcca

SEQ ID NO: 1362169 - RNA, 20 nt, Human
ucaaagcacucugucaaagg

SEQ ID NO: 1362170 - RNA, 18 nt, Human
ucaauuguuucuucagua

SEQ ID NO: 1362171 - RNA, 20 nt, Human
uccaaauaaaccugcaucga

SEQ ID NO: 1362172 - RNA, 22 nt, Human
uccaaggccugcucauagcaac

SEQ ID NO: 1362173 - RNA, 18 nt, Human
uccaauguccaaaacacu

SEQ ID NO: 1362174 - RNA, 19 nt, Human
uccacaauuccuucuccaa

SEQ ID NO: 1362175 - RNA, 23 nt, Human
uccaccaaccaguuugcaacacg

SEQ ID NO: 1362176 - RNA, 24 nt, Human
uccaccaaccaguuugcaacacga

SEQ ID NO: 1362177 - RNA, 19 nt, Human
ucccaacauguuuccucac

SEQ ID NO: 1362178 - RNA, 20 nt, Human
ucccuauucuguaaaaucga

SEQ ID NO: 1362179 - RNA, 23 nt, Human
uccuggacgcccagacagugcuc

SEQ ID NO: 1362180 - RNA, 21 nt, Human
ucgaugcuacacuuccaggga

SEQ ID NO: 1362181 - RNA, 27 nt, Human
ucgccaaccccagcccaggcggaagcu

SEQ ID NO: 1362182 - RNA, 22 nt, Human
ucugcaaggaccgcgacaccag

SEQ ID NO: 1362183 - RNA, 21 nt, Human
ugaaaaguguguacugaaaag

SEQ ID NO: 1362184 - RNA, 23 nt, Human
ugagagcaucaagcucuucagcc

SEQ ID NO: 1362185 - RNA, 24 nt, Human
ugcaaggaccgcgacaccagcucg

SEQ ID NO: 1362186 - RNA, 18 nt, Human
ugcaucgacaguuucugu

SEQ ID NO: 1362187 - RNA, 18 nt, Human
uggagcacaaaccaaacc

SEQ ID NO: 1362188 - RNA, 22 nt, Human
uggagcacaaaccaaaccauaa

SEQ ID NO: 1362189 - RNA, 23 nt, Human
uggcaaauggauaccagcaaugu

SEQ ID NO: 1362190 - RNA, 24 nt, Human
uguucaucaucaagcuggagcaca

SEQ ID NO: 1362191 - RNA, 21 nt, Human
uuaccagcuuuuaaauguucu

SEQ ID NO: 1362192 - RNA, 25 nt, Human
uuagcaaacaugcuuaguauuccag

SEQ ID NO: 1362193 - RNA, 23 nt, Human
uucagcuccggcgccaggcugag

SEQ ID NO: 1362194 - RNA, 19 nt, Human
uuccaaggccugcucauag

SEQ ID NO: 1362195 - RNA, 21 nt, Human
uugcaacacgauaaaaauucu

SEQ ID NO: 1362196 - RNA, 21 nt, Human
uugcugcauuauaaauuguau

SEQ ID NO: 1362197 - RNA, 18 nt, Human
uuuaagaaaaaaggccaa

SEQ ID NO: 1362198 - RNA, 24 nt, Human
uuuacacaguuuucauuggaaaac

SEQ ID NO: 1362199 - RNA, 22 nt, Human
uuucacaauuagcacuuucacc

SEQ ID NO: 1362200 - RNA, 25 nt, Human
uuucaguguuucccaauuacaaguu

SEQ ID NO: 1362201 - RNA, 19 nt, Human
uuuguacuuguugaugcuc

SEQ ID NO: 1362202 - RNA, 22 nt, Human
uuuuugcaacauccauuucaca

SEQ ID NO: 1362203 - RNA, 25 nt, Human
aaaagaacaaaacuggaggcaucac

SEQ ID NO: 1362204 - RNA, 26 nt, Human
aaacaucaugguacugguaccaaaac

SEQ ID NO: 1362205 - RNA, 20 nt, Human
aacagagcccucagaaauaa

SEQ ID NO: 1362206 - RNA, 21 nt, Human
aagcaggagaaggaaauaaag

SEQ ID NO: 1362207 - RNA, 24 nt, Human
aaggcuacaguaaccaaaacauca

SEQ ID NO: 1362208 - RNA, 19 nt, Human
acacuaauaacagacaaac

SEQ ID NO: 1362209 - RNA, 23 nt, Human
acagagcccucagaaauaaugcc

SEQ ID NO: 1362210 - RNA, 23 nt, Human
agaaaaccccaucgucucagccc

SEQ ID NO: 1362211 - RNA, 19 nt, Human
aggauucccuauuuaauaa

SEQ ID NO: 1362212 - RNA, 27 nt, Human
aguaacaagugaauuuuacaaaagaaa

SEQ ID NO: 1362213 - RNA, 19 nt, Human
auggaacagaacagagccc

SEQ ID NO: 1362214 - RNA, 24 nt, Human
caaaaaucacaagcauucuuauac

SEQ ID NO: 1362215 - RNA, 25 nt, Human
caaaacaucaugguacugguaccaa

SEQ ID NO: 1362216 - RNA, 20 nt, Human
caaacagagagccaaaucau

SEQ ID NO: 1362217 - RNA, 23 nt, Human
caaacuauacuacaaggcuacag

SEQ ID NO: 1362218 - RNA, 24 nt, Human
caaccaagcaaucaggagugccaa

SEQ ID NO: 1362219 - RNA, 22 nt, Human
caagcaaucaggagugccaaga

SEQ ID NO: 1362220 - RNA, 22 nt, Human
caagugaauuuuacaaaagaaa

SEQ ID NO: 1362221 - RNA, 18 nt, Human
cacuaauaacagacaaac

SEQ ID NO: 1362222 - RNA, 27 nt, Human
cacuccuauucaacauaguguuggaag

SEQ ID NO: 1362223 - RNA, 18 nt, Human
cagagucucaggauacaa

SEQ ID NO: 1362224 - RNA, 18 nt, Human
cagcacaaaaacuguacu

SEQ ID NO: 1362225 - RNA, 18 nt, Human
cauacugcccaagguaau

SEQ ID NO: 1362226 - RNA, 20 nt, Human
cauauguagaaagccaaaac

SEQ ID NO: 1362227 - RNA, 21 nt, Human
ccaaaagaacaaaacuggagg

SEQ ID NO: 1362228 - RNA, 19 nt, Human
cccaaaaucuccuuaaccu

SEQ ID NO: 1362229 - RNA, 29 nt, Human
cccaaaaucuccuuaaccugauaagcaac

SEQ ID NO: 1362230 - RNA, 21 nt, Human
cccaucgucucagcccaaaau

SEQ ID NO: 1362231 - RNA, 27 nt, Human
ccccaucaagcuaccaaugacuuucuu

SEQ ID NO: 1362232 - RNA, 20 nt, Human
ccccgcaccccacaacaggc

SEQ ID NO: 1362233 - RNA, 23 nt, Human
ccccgcaccccacaacaggcccu

SEQ ID NO: 1362234 - RNA, 19 nt, Human
ccccucuccccgcaccccc

SEQ ID NO: 1362235 - RNA, 20 nt, Human
ccgcaccccacaacaggccc

SEQ ID NO: 1362236 - RNA, 24 nt, Human
cuaugagugagaacaugugguguu

SEQ ID NO: 1362237 - RNA, 21 nt, Human
cucauugccaagucaucccua

SEQ ID NO: 1362238 - RNA, 18 nt, Human
cugagaaugaugguuucc

SEQ ID NO: 1362239 - RNA, 24 nt, Human
cugcacccauuaacucaucauuua

SEQ ID NO: 1362240 - RNA, 21 nt, Human
cuuucuucacagaauuggaaa

SEQ ID NO: 1362241 - RNA, 23 nt, Human
gaaauaaaagaggauacaaagaa

SEQ ID NO: 1362242 - RNA, 20 nt, Human
gaguuuguuuguuuuuuuuu

SEQ ID NO: 1362243 - RNA, 18 nt, Human
gcccaaaaucuccuuaac

SEQ ID NO: 1362244 - RNA, 23 nt, Human
gcccaaaaucuccuuaaccugau

SEQ ID NO: 1362245 - RNA, 24 nt, Human
gcccacuuguugauuggguuguuu

SEQ ID NO: 1362246 - RNA, 30 nt, Human
ggaaaaaacuacuuuaaaguucauauggaa

SEQ ID NO: 1362247 - RNA, 24 nt, Human
ggaaaggauucccuauuuaauaaa

SEQ ID NO: 1362248 - RNA, 19 nt, Human
ggaauccaacuuacaaggg

SEQ ID NO: 1362249 - RNA, 23 nt, Human
ggccagggcaaucaagcaggaga

SEQ ID NO: 1362250 - RNA, 22 nt, Human
guaaaacacaacuuuggucuga

SEQ ID NO: 1362251 - RNA, 20 nt, Human
gucuuauagaagaaucuuga

SEQ ID NO: 1362252 - RNA, 20 nt, Human
guucauuguagauucuggau

SEQ ID NO: 1362253 - RNA, 23 nt, Human
uaacagacaaacagagagccaaa

SEQ ID NO: 1362254 - RNA, 22 nt, Human
uaaccagcacuucagucuuaua

SEQ ID NO: 1362255 - RNA, 23 nt, Human
uaagccaaaagaacaaaacugga

SEQ ID NO: 1362256 - RNA, 19 nt, Human
uacaaagaaauggaagaac

SEQ ID NO: 1362257 - RNA, 20 nt, Human
uaccugacuucaaacuauac

SEQ ID NO: 1362258 - RNA, 21 nt, Human
uagauucuggauauuagcccu

SEQ ID NO: 1362259 - RNA, 19 nt, Human
uagauugcaaaaaucacca

SEQ ID NO: 1362260 - RNA, 21 nt, Human
uaggaaaagaggaagucaaau

SEQ ID NO: 1362261 - RNA, 26 nt, Human
uaucccuccccucuccccgcacccca

SEQ ID NO: 1362262 - RNA, 22 nt, Human
uauuuaauaaauggugguggaa

SEQ ID NO: 1362263 - RNA, 25 nt, Human
ucagaugaguagauugcaaaaauca

SEQ ID NO: 1362264 - RNA, 24 nt, Human
uccccgcaccccacaacaggcccu

SEQ ID NO: 1362265 - RNA, 19 nt, Human
uccccucuccccgcacccc

SEQ ID NO: 1362266 - RNA, 21 nt, Human
ugacaaaccugacaaaaacaa

SEQ ID NO: 1362267 - RNA, 20 nt, Human
ugagaacaugugguguuugg

SEQ ID NO: 1362268 - RNA, 24 nt, Human
ugagaaugaugguuuccagcuuca

SEQ ID NO: 1362269 - RNA, 19 nt, Human
ugagugaacucccauucac

SEQ ID NO: 1362270 - RNA, 23 nt, Human
ugagugaacucccauucacaauu

SEQ ID NO: 1362271 - RNA, 19 nt, Human
ugagugagaacauguggug

SEQ ID NO: 1362272 - RNA, 24 nt, Human
ugagugagaacaugugguguuugg

SEQ ID NO: 1362273 - RNA, 23 nt, Human
ugaguucauuguagauucuggau

SEQ ID NO: 1362274 - RNA, 26 nt, Human
ugcaaaaaucacaagcauucuuauac

SEQ ID NO: 1362275 - RNA, 30 nt, Human
ugccaagaucgcaugauuuauguaaaacaa

SEQ ID NO: 1362276 - RNA, 20 nt, Human
ugccaagucaucccuaagcc

SEQ ID NO: 1362277 - RNA, 19 nt, Human
ugccauguuggugugcugc

SEQ ID NO: 1362278 - RNA, 21 nt, Human
uggaaccaaaagagagcccuc

SEQ ID NO: 1362279 - RNA, 21 nt, Human
uggaaccaaaagagagcccuc

SEQ ID NO: 1362280 - RNA, 20 nt, Human
uggccagggcaaucaagcag

SEQ ID NO: 1362281 - RNA, 21 nt, Human
ugguuuccagcuucacccaug

SEQ ID NO: 1362282 - RNA, 23 nt, Human
uguaaaacacaacuuuggucuga

SEQ ID NO: 1362283 - RNA, 19 nt, Human
ugugcaaaaaucacaagga

SEQ ID NO: 1362284 - RNA, 18 nt, Human
uguuacguauguauacau

SEQ ID NO: 1362285 - RNA, 22 nt, Human
uguugauuggguuguuuuuuuc

SEQ ID NO: 1362286 - RNA, 26 nt, Human
uuauacacuaauaacagacaaacaga

SEQ ID NO: 1362287 - RNA, 24 nt, Human
uucauuguagauucuggauauuag

SEQ ID NO: 1362288 - RNA, 20 nt, Human
uugccaagucaucccuaagc

SEQ ID NO: 1362289 - RNA, 21 nt, Human
uuuccagcuucacccauguuc

SEQ ID NO: 1362290 - RNA, 18 nt, Human
aaucaccgagagaaagag

SEQ ID NO: 1362291 - RNA, 22 nt, Human
aauccgugggggcgucucccuc

SEQ ID NO: 1362292 - RNA, 22 nt, Human
acugucccgcccucaccggaaa

SEQ ID NO: 1362293 - RNA, 22 nt, Human
aggcugggaagugggagcgcgg

SEQ ID NO: 1362294 - RNA, 19 nt, Human
agugcccaccugggcgccc

SEQ ID NO: 1362295 - RNA, 19 nt, Human
cacacaccccugccucucc

SEQ ID NO: 1362296 - RNA, 18 nt, Human
cacaguaaccaccggggu

SEQ ID NO: 1362297 - RNA, 19 nt, Human
cacccucauucccaaaaag

SEQ ID NO: 1362298 - RNA, 19 nt, Human
cagcgcucggucggcggcu

SEQ ID NO: 1362299 - RNA, 24 nt, Human
ccaugcacugagcugcgauccuuc

SEQ ID NO: 1362300 - RNA, 19 nt, Human
cccaccugggcgcccucuc

SEQ ID NO: 1362301 - RNA, 19 nt, Human
ccccugccucuccucgccc

SEQ ID NO: 1362302 - RNA, 25 nt, Human
ccgaacguuaguaagcauaaugaca

SEQ ID NO: 1362303 - RNA, 20 nt, Human
ccgagagaaagaggaggugu

SEQ ID NO: 1362304 - RNA, 21 nt, Human
ccgcacacucgcacgcguccg

SEQ ID NO: 1362305 - RNA, 19 nt, Human
ccgccgccgccgucgucca

SEQ ID NO: 1362306 - RNA, 18 nt, Human
ccggugcuguccuccagg

SEQ ID NO: 1362307 - RNA, 20 nt, Human
ccuccaggcugggaaguggg

SEQ ID NO: 1362308 - RNA, 23 nt, Human
ccuccaggcugggaagugggagc

SEQ ID NO: 1362309 - RNA, 19 nt, Human
ccuuccccgcuucccgccg

SEQ ID NO: 1362310 - RNA, 22 nt, Human
cgagcagaccagacugucccgc

SEQ ID NO: 1362311 - RNA, 24 nt, Human
cgcacacucgcacgcguccgcgcg

SEQ ID NO: 1362312 - RNA, 20 nt, Human
cgcacgcguccgcgcggccg

SEQ ID NO: 1362313 - RNA, 21 nt, Human
cgcuuucgccgccgccgccgu

SEQ ID NO: 1362314 - RNA, 23 nt, Human
cgcuuucgccgccgccgccgucg

SEQ ID NO: 1362315 - RNA, 24 nt, Human
cggaaacaaguuggcuccgggguc

SEQ ID NO: 1362316 - RNA, 20 nt, Human
cgugagaaguugcgagugcc

SEQ ID NO: 1362317 - RNA, 21 nt, Human
cugagcugcgauccuuccccg

SEQ ID NO: 1362318 - RNA, 19 nt, Human
cuuccccgcuucccgccgc

SEQ ID NO: 1362319 - RNA, 18 nt, Human
gaagaagccagaggaccc

SEQ ID NO: 1362320 - RNA, 18 nt, Human
gaggcgccccgggcuccc

SEQ ID NO: 1362321 - RNA, 23 nt, Human
gcacacucgcacgcguccgcgcg

SEQ ID NO: 1362322 - RNA, 20 nt, Human
gcgauccuuccccgcuuccc

SEQ ID NO: 1362323 - RNA, 24 nt, Human
gcgcggcggggcgaauccgugggg

SEQ ID NO: 1362324 - RNA, 23 nt, Human
ggacagccagcgcucggucggcg

SEQ ID NO: 1362325 - RNA, 19 nt, Human
ggccggugcuguccuccag

SEQ ID NO: 1362326 - RNA, 22 nt, Human
gggcuugugagggaaggaaggc

SEQ ID NO: 1362327 - RNA, 18 nt, Human
ggggucacuuggucuugc

SEQ ID NO: 1362328 - RNA, 20 nt, Human
uacgcgagcacaguaaccac

SEQ ID NO: 1362329 - RNA, 21 nt, Human
ucaacggcgacgguugccaag

SEQ ID NO: 1362330 - RNA, 27 nt, Human
ucauccgcuuucgccgccgccgccguc

SEQ ID NO: 1362331 - RNA, 21 nt, Human
uccaggcugggaagugggagc

SEQ ID NO: 1362332 - RNA, 18 nt, Human
ucccgccgcagcucggag

SEQ ID NO: 1362333 - RNA, 22 nt, Human
uccgcacacucgcacgcguccg

SEQ ID NO: 1362334 - RNA, 24 nt, Human
uccgcacacucgcacgcguccgcg

SEQ ID NO: 1362335 - RNA, 18 nt, Human
uccgcgcggccgacccau

SEQ ID NO: 1362336 - RNA, 23 nt, Human
uccgugccgcgaggcgccccggg

SEQ ID NO: 1362337 - RNA, 24 nt, Human
uccgugggggcgucucccuccguc

SEQ ID NO: 1362338 - RNA, 23 nt, Human
ucgccgccgccgccgucguccac

SEQ ID NO: 1362339 - RNA, 22 nt, Human
ucucuuccagguugcuaauacg

SEQ ID NO: 1362340 - RNA, 19 nt, Human
ugccauucuggcccagacc

SEQ ID NO: 1362341 - RNA, 19 nt, Human
ugcgguugagcaucucgcc

SEQ ID NO: 1362342 - RNA, 20 nt, Human
ugcgguugagcaucucgccc

SEQ ID NO: 1362343 - RNA, 24 nt, Human
uggcgccugcgggggagccgguuu

SEQ ID NO: 1362344 - RNA, 22 nt, Human
ugggaagaagccagaggacccg

SEQ ID NO: 1362345 - RNA, 19 nt, Human
ugggaagugggagcgcggu

SEQ ID NO: 1362346 - RNA, 19 nt, Human
ugggaagugggagcgcggu

SEQ ID NO: 1362347 - RNA, 22 nt, Human
ugucccgcccucaccggaaaca

SEQ ID NO: 1362348 - RNA, 19 nt, Human
uguugggggucacuugguc

SEQ ID NO: 1362349 - RNA, 22 nt, Human
uuucgccgccgccgccgucguc

SEQ ID NO: 1362350 - RNA, 19 nt, Human
aaaaaugugaggguucugg

SEQ ID NO: 1362351 - RNA, 23 nt, Human
aaauccuaggcuucaccugaaac

SEQ ID NO: 1362352 - RNA, 21 nt, Human
aacagcagcacguuaacaaaa

SEQ ID NO: 1362353 - RNA, 24 nt, Human
aacccauagcagaugggcagcccc

SEQ ID NO: 1362354 - RNA, 23 nt, Human
aagacaugacucaaaaugaaaua

SEQ ID NO: 1362355 - RNA, 22 nt, Human
aagcugcaggugaaaccuccau

SEQ ID NO: 1362356 - RNA, 23 nt, Human
acaaaacgaaaauguggggcccc

SEQ ID NO: 1362357 - RNA, 18 nt, Human
acaaagcagacugaaagc

SEQ ID NO: 1362358 - RNA, 18 nt, Human
acacaaacacuugaaccc

SEQ ID NO: 1362359 - RNA, 18 nt, Human
acaggguuucaccauguu

SEQ ID NO: 1362360 - RNA, 21 nt, Human
acaggguuucaccauguuggc

SEQ ID NO: 1362361 - RNA, 24 nt, Human
acaggguuucaccauguuggccag

SEQ ID NO: 1362362 - RNA, 20 nt, Human
acagugacaaagauaaaauu

SEQ ID NO: 1362363 - RNA, 24 nt, Human
accauguuggccaggcuggucucg

SEQ ID NO: 1362364 - RNA, 19 nt, Human
acuagcagggacuacaggc

SEQ ID NO: 1362365 - RNA, 19 nt, Human
acuguucugaaauggggau

SEQ ID NO: 1362366 - RNA, 21 nt, Human
agaaaacuguucugaaauggg

SEQ ID NO: 1362367 - RNA, 24 nt, Human
agacccccacaggcacccugguga

SEQ ID NO: 1362368 - RNA, 20 nt, Human
agagacugccuugcccaugg

SEQ ID NO: 1362369 - RNA, 19 nt, Human
agccacagccaucuggacc

SEQ ID NO: 1362370 - RNA, 24 nt, Human
agcucuaucacccaggcuggagug

SEQ ID NO: 1362371 - RNA, 25 nt, Human
aggaaacagcagcacguuaacaaaa

SEQ ID NO: 1362372 - RNA, 19 nt, Human
aggaaaccgaggucuggag

SEQ ID NO: 1362373 - RNA, 20 nt, Human
aggccacuggcacagcaggg

SEQ ID NO: 1362374 - RNA, 20 nt, Human
aggccccugccccaacccau

SEQ ID NO: 1362375 - RNA, 21 nt, Human
aggcugagagcuggcaccaca

SEQ ID NO: 1362376 - RNA, 25 nt, Human
aggcuggagugcaguggcgcgaucu

SEQ ID NO: 1362377 - RNA, 24 nt, Human
aggcugggagcuagcagagaccua

SEQ ID NO: 1362378 - RNA, 19 nt, Human
agguggcucaccaggcagg

SEQ ID NO: 1362379 - RNA, 24 nt, Human
agugagaggaauaccugggagaga

SEQ ID NO: 1362380 - RNA, 20 nt, Human
agugcaguggcgcgaucucg

SEQ ID NO: 1362381 - RNA, 23 nt, Human
agugcaguggcgcgaucucggcu

SEQ ID NO: 1362382 - RNA, 24 nt, Human
agugcaguggcgcgaucucggcuc

SEQ ID NO: 1362383 - RNA, 22 nt, Human
auccacauaauguaaucgcacc

SEQ ID NO: 1362384 - RNA, 18 nt, Human
auggggcugcuuuuagac

SEQ ID NO: 1362385 - RNA, 21 nt, Human
caaaacacagugacaaagaua

SEQ ID NO: 1362386 - RNA, 21 nt, Human
caaaacgaaaauguggggccc

SEQ ID NO: 1362387 - RNA, 20 nt, Human
caagcgauucuccugccuca

SEQ ID NO: 1362388 - RNA, 22 nt, Human
cacaacuugcugggauuccaga

SEQ ID NO: 1362389 - RNA, 23 nt, Human
caccacacacugguuucuaaauc

SEQ ID NO: 1362390 - RNA, 22 nt, Human
caccagcccugcauccuggacc

SEQ ID NO: 1362391 - RNA, 24 nt, Human
caccagcccugcauccuggaccac

SEQ ID NO: 1362392 - RNA, 21 nt, Human
caccauguuggccaggcuggu

SEQ ID NO: 1362393 - RNA, 24 nt, Human
caccauguuggccaggcuggucuc

SEQ ID NO: 1362394 - RNA, 27 nt, Human
caccauguuggccaggcuggucucgaa

SEQ ID NO: 1362395 - RNA, 24 nt, Human
cacccaggcuggagugcaguggcg

SEQ ID NO: 1362396 - RNA, 18 nt, Human
caccugugacaccagccc

SEQ ID NO: 1362397 - RNA, 23 nt, Human
cacucuggagcagcucucgggcc

SEQ ID NO: 1362398 - RNA, 19 nt, Human
cagacaaagcagacugaaa

SEQ ID NO: 1362399 - RNA, 21 nt, Human
cagacauucuaacugcuuucc

SEQ ID NO: 1362400 - RNA, 20 nt, Human
cagacugaaagcugcaggug

SEQ ID NO: 1362401 - RNA, 19 nt, Human
cagaugggcagcccccggg

SEQ ID NO: 1362402 - RNA, 21 nt, Human
cagccuaagugauccacauaa

SEQ ID NO: 1362403 - RNA, 24 nt, Human
caggguuucaccauguuggccagg

SEQ ID NO: 1362404 - RNA, 21 nt, Human
caguauuacuuuuuacagaac

SEQ ID NO: 1362405 - RNA, 18 nt, Human
cauccucaaacaucagac

SEQ ID NO: 1362406 - RNA, 24 nt, Human
cauguuggccaggcuggucucgaa

SEQ ID NO: 1362407 - RNA, 23 nt, Human
ccacagacugccaucuuagccuu

SEQ ID NO: 1362408 - RNA, 19 nt, Human
ccacagccaucuggaccca

SEQ ID NO: 1362409 - RNA, 22 nt, Human
ccacaggccccugccccaaccc

SEQ ID NO: 1362410 - RNA, 19 nt, Human
ccacauguugugcuccagg

SEQ ID NO: 1362411 - RNA, 22 nt, Human
ccacauguugugcuccaggccu

SEQ ID NO: 1362412 - RNA, 23 nt, Human
ccaccgagagaggcuccaaguac

SEQ ID NO: 1362413 - RNA, 22 nt, Human
ccacgcccagcuaauuuuugua

SEQ ID NO: 1362414 - RNA, 18 nt, Human
ccacuggcacagcagggc

SEQ ID NO: 1362415 - RNA, 18 nt, Human
ccagaagacaugacucaa

SEQ ID NO: 1362416 - RNA, 24 nt, Human
ccagagccccacugguauccguac

SEQ ID NO: 1362417 - RNA, 18 nt, Human
ccaugaaauugcaauucc

SEQ ID NO: 1362418 - RNA, 19 nt, Human
cccaagaggguagguggcu

SEQ ID NO: 1362419 - RNA, 20 nt, Human
cccacaggccccugccccaa

SEQ ID NO: 1362420 - RNA, 20 nt, Human
cccagguucaagcgauucuc

SEQ ID NO: 1362421 - RNA, 23 nt, Human
cccagguucaagcgauucuccug

SEQ ID NO: 1362422 - RNA, 19 nt, Human
ccccacugguauccguacc

SEQ ID NO: 1362423 - RNA, 19 nt, Human
ccccgagacccgaggccca

SEQ ID NO: 1362424 - RNA, 23 nt, Human
ccccgagacccgaggcccaacuc

SEQ ID NO: 1362425 - RNA, 20 nt, Human
ccccugccccaacccauagc

SEQ ID NO: 1362426 - RNA, 19 nt, Human
cccgagacccgaggcccaa

SEQ ID NO: 1362427 - RNA, 18 nt, Human
cccugccccaacccauag

SEQ ID NO: 1362428 - RNA, 18 nt, Human
ccgcuccugacacccaca

SEQ ID NO: 1362429 - RNA, 24 nt, Human
ccguaccacgcuguuccuggcugu

SEQ ID NO: 1362430 - RNA, 21 nt, Human
ccuccagcucuaucacccagg

SEQ ID NO: 1362431 - RNA, 18 nt, Human
ccugagagauuuucuagc

SEQ ID NO: 1362432 - RNA, 18 nt, Human
ccugauccugaaaugaca

SEQ ID NO: 1362433 - RNA, 20 nt, Human
ccuggaccacuuagaagcuc

SEQ ID NO: 1362434 - RNA, 28 nt, Human
ccuuucccaaaaggaggaugucucuaaa

SEQ ID NO: 1362435 - RNA, 22 nt, Human
cgccuccacgcccagcuaauuu

SEQ ID NO: 1362436 - RNA, 19 nt, Human
cgcgccuccacgcccagcu

SEQ ID NO: 1362437 - RNA, 19 nt, Human
cgcuguuccuggcuguggc

SEQ ID NO: 1362438 - RNA, 23 nt, Human
cuaaaucucuggcuuggauuuua

SEQ ID NO: 1362439 - RNA, 22 nt, Human
cuagcagggacuacaggcacgc

SEQ ID NO: 1362440 - RNA, 22 nt, Human
cuccccgguuuuagaagugacu

SEQ ID NO: 1362441 - RNA, 27 nt, Human
cucuacuggucacacaccugugacacc

SEQ ID NO: 1362442 - RNA, 23 nt, Human
cucuaucacccaggcuggagugc

SEQ ID NO: 1362443 - RNA, 21 nt, Human
cugagagauuuucuagcccag

SEQ ID NO: 1362444 - RNA, 28 nt, Human
cugauagacaacuaaaugcccaagaggg

SEQ ID NO: 1362445 - RNA, 20 nt, Human
cugccucacccucuugacua

SEQ ID NO: 1362446 - RNA, 22 nt, Human
cugcugggcccacauguugugc

SEQ ID NO: 1362447 - RNA, 19 nt, Human
cuggagcagcucucgggcc

SEQ ID NO: 1362448 - RNA, 24 nt, Human
cuucccagguucaagcgauucucc

SEQ ID NO: 1362449 - RNA, 18 nt, Human
cuucugggcacaaagccc

SEQ ID NO: 1362450 - RNA, 21 nt, Human
gacccgaggcccaacucggca

SEQ ID NO: 1362451 - RNA, 22 nt, Human
gaggcaacuucauccaaacuga

SEQ ID NO: 1362452 - RNA, 19 nt, Human
gccacagccaucuggaccc

SEQ ID NO: 1362453 - RNA, 22 nt, Human
gcccagcuaauuuuuguauuuu

SEQ ID NO: 1362454 - RNA, 19 nt, Human
gccccgagacccgaggccc

SEQ ID NO: 1362455 - RNA, 18 nt, Human
gccuagagccccgagacc

SEQ ID NO: 1362456 - RNA, 21 nt, Human
gccuuauuucccaagcguggg

SEQ ID NO: 1362457 - RNA, 21 nt, Human
gcgcauguuccuaacgugccc

SEQ ID NO: 1362458 - RNA, 22 nt, Human
gcuacuucggcuucccagguuc

SEQ ID NO: 1362459 - RNA, 23 nt, Human
gcucaccaggcaggacuggcuac

SEQ ID NO: 1362460 - RNA, 19 nt, Human
gcucuaucacccaggcugg

SEQ ID NO: 1362461 - RNA, 22 nt, Human
gcucuaucacccaggcuggagu

SEQ ID NO: 1362462 - RNA, 19 nt, Human
gcuggagugcaguggcgcg

SEQ ID NO: 1362463 - RNA, 22 nt, Human
gcugggcccacauguugugcuc

SEQ ID NO: 1362464 - RNA, 22 nt, Human
ggaaaagaccagagccccacug

SEQ ID NO: 1362465 - RNA, 22 nt, Human
ggaaggugccacacggugcugg

SEQ ID NO: 1362466 - RNA, 18 nt, Human
ggaagguucccuuugcac

SEQ ID NO: 1362467 - RNA, 21 nt, Human
ggacuggucuuugcacacugu

SEQ ID NO: 1362468 - RNA, 19 nt, Human
ggagcagggugugacuggc

SEQ ID NO: 1362469 - RNA, 25 nt, Human
ggcauccucccacaggccccugccc

SEQ ID NO: 1362470 - RNA, 21 nt, Human
ggccgcauuccagccacagcc

SEQ ID NO: 1362471 - RNA, 19 nt, Human
gggaugccuucuuccugga

SEQ ID NO: 1362472 - RNA, 23 nt, Human
gggaugccuucuuccuggaaacc

SEQ ID NO: 1362473 - RNA, 22 nt, Human
ggguuucaccauguuggccagg

SEQ ID NO: 1362474 - RNA, 21 nt, Human
ggugcagauacugaggacugg

SEQ ID NO: 1362475 - RNA, 23 nt, Human
gguucuggggaaggugccacacg

SEQ ID NO: 1362476 - RNA, 21 nt, Human
gguuuuagaagugacuucucc

SEQ ID NO: 1362477 - RNA, 21 nt, Human
guagagacaggguuucaccau

SEQ ID NO: 1362478 - RNA, 18 nt, Human
guccucucaggcauggag

SEQ ID NO: 1362479 - RNA, 23 nt, Human
gugacuucucccauccccaccga

SEQ ID NO: 1362480 - RNA, 22 nt, Human
uaaaccuauaugaggggacuga

SEQ ID NO: 1362481 - RNA, 22 nt, Human
uaacaaaaauuaguaacagaca

SEQ ID NO: 1362482 - RNA, 23 nt, Human
uaacaaaaauuaguaacagacau

SEQ ID NO: 1362483 - RNA, 21 nt, Human
uaagauaaaagccaaaacuuu

SEQ ID NO: 1362484 - RNA, 22 nt, Human
uaagugaaauaagauaaaagcc

SEQ ID NO: 1362485 - RNA, 26 nt, Human
uaagugaaauaagauaaaagccaaaa

SEQ ID NO: 1362486 - RNA, 23 nt, Human
uaauuuuuguauuuuuguagaga

SEQ ID NO: 1362487 - RNA, 19 nt, Human
uacaaaccacagacugcca

SEQ ID NO: 1362488 - RNA, 22 nt, Human
uacaggcacgcgccuccacgcc

SEQ ID NO: 1362489 - RNA, 21 nt, Human
uaccaagucucguggucuucu

SEQ ID NO: 1362490 - RNA, 18 nt, Human
uaccugggagagagacug

SEQ ID NO: 1362491 - RNA, 23 nt, Human
uacuggucacacaccugugacac

SEQ ID NO: 1362492 - RNA, 21 nt, Human
uagagacaggguuucaccaug

SEQ ID NO: 1362493 - RNA, 22 nt, Human
uagagacaggguuucaccaugu

SEQ ID NO: 1362494 - RNA, 21 nt, Human
uagcagaugggcagcccccuc

SEQ ID NO: 1362495 - RNA, 18 nt, Human
uagcagggacuacaggca

SEQ ID NO: 1362496 - RNA, 18 nt, Human
uaguuggcacccacccuc

SEQ ID NO: 1362497 - RNA, 23 nt, Human
uauuccaggaaacaacaaucaaa

SEQ ID NO: 1362498 - RNA, 22 nt, Human
ucacacaccugugacaccagcc

SEQ ID NO: 1362499 - RNA, 22 nt, Human
ucacccaggcuggagugcagug

SEQ ID NO: 1362500 - RNA, 21 nt, Human
ucaggccacuggcacagcagg

SEQ ID NO: 1362501 - RNA, 19 nt, Human
ucauuaggaaccaugaaau

SEQ ID NO: 1362502 - RNA, 27 nt, Human
ucauucauucaugcauucauucauucc

SEQ ID NO: 1362503 - RNA, 24 nt, Human
uccagcucuaucacccaggcugga

SEQ ID NO: 1362504 - RNA, 25 nt, Human
uccagcucuaucacccaggcuggag

SEQ ID NO: 1362505 - RNA, 21 nt, Human
uccaggccuagggcaggaggu

SEQ ID NO: 1362506 - RNA, 21 nt, Human
ucccagguucaagcgauucuc

SEQ ID NO: 1362507 - RNA, 24 nt, Human
ucccagguucaagcgauucuccug

SEQ ID NO: 1362508 - RNA, 19 nt, Human
ucccuccagcucuaucacc

SEQ ID NO: 1362509 - RNA, 21 nt, Human
uccuggaccacuuagaagcuc

SEQ ID NO: 1362510 - RNA, 23 nt, Human
uccugggggagugcagaccccca

SEQ ID NO: 1362511 - RNA, 22 nt, Human
ucuaaaucucuggcuuggauuu

SEQ ID NO: 1362512 - RNA, 24 nt, Human
ucuaucacccaggcuggagugcag

SEQ ID NO: 1362513 - RNA, 21 nt, Human
ucucaggaggauaccuugacc

SEQ ID NO: 1362514 - RNA, 20 nt, Human
ucuccgggugguucuaacuc

SEQ ID NO: 1362515 - RNA, 22 nt, Human
ucucuaaauccaaaccuaguug

SEQ ID NO: 1362516 - RNA, 18 nt, Human
ucucucaggaggauaccu

SEQ ID NO: 1362517 - RNA, 24 nt, Human
ucuugacuagcagggacuacaggc

SEQ ID NO: 1362518 - RNA, 19 nt, Human
ugaaagaaggaagagaggg

SEQ ID NO: 1362519 - RNA, 28 nt, Human
ugaaauaagugaaauaagauaaaagcca

SEQ ID NO: 1362520 - RNA, 19 nt, Human
ugaagacagugacugcaga

SEQ ID NO: 1362521 - RNA, 20 nt, Human
ugacaccagcccugcauccu

SEQ ID NO: 1362522 - RNA, 21 nt, Human
ugagagauuuucuagcccagc

SEQ ID NO: 1362523 - RNA, 20 nt, Human
ugagcaggaggggcaggcgc

SEQ ID NO: 1362524 - RNA, 18 nt, Human
ugauagacaacuaaaugc

SEQ ID NO: 1362525 - RNA, 24 nt, Human
ugauagacaacuaaaugcccaaga

SEQ ID NO: 1362526 - RNA, 23 nt, Human
ugcaauuccucggggaaggagcg

SEQ ID NO: 1362527 - RNA, 19 nt, Human
ugccacacggugcuggggg

SEQ ID NO: 1362528 - RNA, 20 nt, Human
ugccauggaaggcugggagc

SEQ ID NO: 1362529 - RNA, 21 nt, Human
ugccauggaaggcugggagcu

SEQ ID NO: 1362530 - RNA, 28 nt, Human
ugccucacccucuugacuagcagggacu

SEQ ID NO: 1362531 - RNA, 23 nt, Human
ugccugaaugagauguaggaaac

SEQ ID NO: 1362532 - RNA, 23 nt, Human
uggaccacuuagaagcucagcuu

SEQ ID NO: 1362533 - RNA, 23 nt, Human
uggagugcaguggcgcgaucucg

SEQ ID NO: 1362534 - RNA, 24 nt, Human
uggagugcaguggcgcgaucucgg

SEQ ID NO: 1362535 - RNA, 23 nt, Human
uggccaggcuggucucgaacucc

SEQ ID NO: 1362536 - RNA, 19 nt, Human
uggcucaccaggcaggacu

SEQ ID NO: 1362537 - RNA, 21 nt, Human
ugggaaaagaccagagcccca

SEQ ID NO: 1362538 - RNA, 19 nt, Human
uggggaacacacaaacacu

SEQ ID NO: 1362539 - RNA, 20 nt, Human
ugguauccguaccacgcugu

SEQ ID NO: 1362540 - RNA, 24 nt, Human
uguagagacaggguuucaccaugu

SEQ ID NO: 1362541 - RNA, 18 nt, Human
uguauugauggggcugcu

SEQ ID NO: 1362542 - RNA, 23 nt, Human
uguggaugaggaaaccgaggucu

SEQ ID NO: 1362543 - RNA, 18 nt, Human
uguugugcuccaggccua

SEQ ID NO: 1362544 - RNA, 22 nt, Human
uguugugcuccaggccuagggc

SEQ ID NO: 1362545 - RNA, 22 nt, Human
uuaacaaaaauuaguaacagac

SEQ ID NO: 1362546 - RNA, 23 nt, Human
uuaacaaaaauuaguaacagaca

SEQ ID NO: 1362547 - RNA, 21 nt, Human
uucaagcgauucuccugccuc

SEQ ID NO: 1362548 - RNA, 23 nt, Human
uucaagcgauucuccugccucac

SEQ ID NO: 1362549 - RNA, 23 nt, Human
uuccagccacagccaucuggacc

SEQ ID NO: 1362550 - RNA, 19 nt, Human
uugacuagcagggacuaca

SEQ ID NO: 1362551 - RNA, 21 nt, Human
uugaggcaacuucauccaaac

SEQ ID NO: 1362552 - RNA, 21 nt, Human
uuggggaaaagcuguagaaac

SEQ ID NO: 1362553 - RNA, 24 nt, Human
uuguagagacaggguuucaccaug

SEQ ID NO: 1362554 - RNA, 24 nt, Human
uuucaccauguuggccaggcuggu

SEQ ID NO: 1362555 - RNA, 20 nt, Human
uuucccauuuuguggaugag

SEQ ID NO: 1362556 - RNA, 21 nt, Human
uuuccuuucccaaaaggagga

SEQ ID NO: 1362557 - RNA, 18 nt, Human
uuuguagagacaggguuu

SEQ ID NO: 1362558 - RNA, 24 nt, Human
uuuguagagacaggguuucaccau

SEQ ID NO: 1362559 - RNA, 23 nt, Human
uuuuuguagagacaggguuucac

SEQ ID NO: 1362560 - RNA, 25 nt, Human
aaaaagaacaaaaagaagaaaacaa

SEQ ID NO: 1362561 - RNA, 18 nt, Human
aaaagaagaaaacaaaua

SEQ ID NO: 1362562 - RNA, 22 nt, Human
aaagaacaaaaagaagaaaaca

SEQ ID NO: 1362563 - RNA, 19 nt, Human
aagaagaaaacaaauaaaa

SEQ ID NO: 1362564 - RNA, 20 nt, Human
aagaagaaaacaaauaaaau

SEQ ID NO: 1362565 - RNA, 22 nt, Human
aagaagaaaacaaauaaaauuu

SEQ ID NO: 1362566 - RNA, 23 nt, Human
aagaagaaaacaaauaaaauuuc

SEQ ID NO: 1362567 - RNA, 25 nt, Human
aaggagcugcuacagggaaacaggc

SEQ ID NO: 1362568 - RNA, 22 nt, Human
aaugggucaaaauccaaaaucc

SEQ ID NO: 1362569 - RNA, 18 nt, Human
acacacacgcacacacac

SEQ ID NO: 1362570 - RNA, 23 nt, Human
accaaggaaauuaccuaaaacaa

SEQ ID NO: 1362571 - RNA, 18 nt, Human
agcaaaaagaacaaaaag

SEQ ID NO: 1362572 - RNA, 23 nt, Human
agcaaaaagaacaaaaagaagaa

SEQ ID NO: 1362573 - RNA, 25 nt, Human
agcaaaaagaacaaaaagaagaaaa

SEQ ID NO: 1362574 - RNA, 23 nt, Human
caacauggaaugaacauauuccc

SEQ ID NO: 1362575 - RNA, 19 nt, Human
cacaccacacagaaauaag

SEQ ID NO: 1362576 - RNA, 28 nt, Human
cacgcacacacacaaaguuuggaauuuu

SEQ ID NO: 1362577 - RNA, 23 nt, Human
cacuuuucuccuucuccagcaau

SEQ ID NO: 1362578 - RNA, 23 nt, Human
cagaaagaaagcuggggccagua

SEQ ID NO: 1362579 - RNA, 21 nt, Human
cagagguaauuugagguuuac

SEQ ID NO: 1362580 - RNA, 22 nt, Human
cagcaauaaggagcugcuacag

SEQ ID NO: 1362581 - RNA, 19 nt, Human
ccccauugcccucauaagc

SEQ ID NO: 1362582 - RNA, 22 nt, Human
ccucuggcuaagagauccagag

SEQ ID NO: 1362583 - RNA, 19 nt, Human
cuuacuuguaaaaaaaauc

SEQ ID NO: 1362584 - RNA, 22 nt, Human
gaagaaaacaaauaaaauuuca

SEQ ID NO: 1362585 - RNA, 21 nt, Human
gagcugcuacagggaaacagg

SEQ ID NO: 1362586 - RNA, 23 nt, Human
gcacuuuucuccuucuccagcaa

SEQ ID NO: 1362587 - RNA, 23 nt, Human
gcccuggacuauaaggacuucug

SEQ ID NO: 1362588 - RNA, 18 nt, Human
ggcccuggacuauaagga

SEQ ID NO: 1362589 - RNA, 24 nt, Human
guuuggaauuuuauccuacauaug

SEQ ID NO: 1362590 - RNA, 18 nt, Human
uaaaauggaggucaaaga

SEQ ID NO: 1362591 - RNA, 18 nt, Human
uaaaauuucacaccacac

SEQ ID NO: 1362592 - RNA, 19 nt, Human
uaaauaugcugcuuugcca

SEQ ID NO: 1362593 - RNA, 25 nt, Human
uaacagaaagaaagcuggggccaga

SEQ ID NO: 1362594 - RNA, 20 nt, Human
uacagggaaacaggcccugg

SEQ ID NO: 1362595 - RNA, 22 nt, Human
uacauauaagcaaaaagaacaa

SEQ ID NO: 1362596 - RNA, 26 nt, Human
uaccaaggaaauuaccuaaaacaaag

SEQ ID NO: 1362597 - RNA, 24 nt, Human
uauacacacacgcacacacacaaa

SEQ ID NO: 1362598 - RNA, 22 nt, Human
uauauggauguauguauacaca

SEQ ID NO: 1362599 - RNA, 21 nt, Human
ucaaaauccaaaauccaauga

SEQ ID NO: 1362600 - RNA, 21 nt, Human
ucccaugcaaaugugugaaag

SEQ ID NO: 1362601 - RNA, 26 nt, Human
ugcuaacagaaagaaagcuggggcca

SEQ ID NO: 1362602 - RNA, 25 nt, Human
uguauacacacacgcacacacacag

SEQ ID NO: 1362603 - RNA, 22 nt, Human
uguauacacacacgcacacagu

SEQ ID NO: 1362604 - RNA, 20 nt, Human
uuccucuggcuaagagaucc

SEQ ID NO: 1362605 - RNA, 25 nt, Human
uuccucuggcuaagagauccagagg

SEQ ID NO: 1362606 - RNA, 18 nt, Human
aaaaaaaaaaaaaaaagc

SEQ ID NO: 1362607 - RNA, 20 nt, Human
aaaaaaaaaaaagcugccau

SEQ ID NO: 1362608 - RNA, 26 nt, Human
aaaaaaaaauccuuucuuucuacaga

SEQ ID NO: 1362609 - RNA, 21 nt, Human
aaacauccuaaaaagaaaaag

SEQ ID NO: 1362610 - RNA, 22 nt, Human
aaagaaaaagaaaaaaaaaucc

SEQ ID NO: 1362611 - RNA, 20 nt, Human
aaagcuuccccaugucacuu

SEQ ID NO: 1362612 - RNA, 30 nt, Human
aaagguaccucaacaaaagcacaucaaggg

SEQ ID NO: 1362613 - RNA, 26 nt, Human
aacaauaaaaggagaaccuuaagaga

SEQ ID NO: 1362614 - RNA, 20 nt, Human
aagcgcagaugccugggacc

SEQ ID NO: 1362615 - RNA, 24 nt, Human
aaggcaucauugucccuugccuaa

SEQ ID NO: 1362616 - RNA, 23 nt, Human
aauuaccucucccuugucuccac

SEQ ID NO: 1362617 - RNA, 21 nt, Human
aauugcuuauuuuuauuuuuu

SEQ ID NO: 1362618 - RNA, 20 nt, Human
accucaacaaaagcacauca

SEQ ID NO: 1362619 - RNA, 23 nt, Human
agaacgucuccacauaaaacucu

SEQ ID NO: 1362620 - RNA, 21 nt, Human
aggcauucaacaagaggaaac

SEQ ID NO: 1362621 - RNA, 22 nt, Human
aggcauucaacaagaggaaaca

SEQ ID NO: 1362622 - RNA, 24 nt, Human
agguaccuuuuaugaaaaggacuu

SEQ ID NO: 1362623 - RNA, 21 nt, Human
agguacguacuacucuaccuu

SEQ ID NO: 1362624 - RNA, 20 nt, Human
aucaccauagacaaguuuuu

SEQ ID NO: 1362625 - RNA, 18 nt, Human
auccaucuuuccuuccaa

SEQ ID NO: 1362626 - RNA, 21 nt, Human
caacaagaggaaacagguacc

SEQ ID NO: 1362627 - RNA, 22 nt, Human
caacacgucucuuaaaaugcuc

SEQ ID NO: 1362628 - RNA, 24 nt, Human
caagcgcagaugccugggacccug

SEQ ID NO: 1362629 - RNA, 24 nt, Human
caauaaaaggagaaccuuaagaga

SEQ ID NO: 1362630 - RNA, 22 nt, Human
cacauaaaacucuuaacaccuu

SEQ ID NO: 1362631 - RNA, 23 nt, Human
cauuaugcuucucuaaagggcua

SEQ ID NO: 1362632 - RNA, 21 nt, Human
ccaugucacuucucaaacauc

SEQ ID NO: 1362633 - RNA, 18 nt, Human
cuaaaaagaaaaagaaaa

SEQ ID NO: 1362634 - RNA, 21 nt, Human
cuaaaaagaaaaagaaaaaaa

SEQ ID NO: 1362635 - RNA, 25 nt, Human
cuagauuacaaaaagucaaagccaa

SEQ ID NO: 1362636 - RNA, 18 nt, Human
cucaaaaaaaaaaaaaaa

SEQ ID NO: 1362637 - RNA, 23 nt, Human
cuccacauaaaacucuuaacacc

SEQ ID NO: 1362638 - RNA, 21 nt, Human
cuccuagauuacaaaaaguca

SEQ ID NO: 1362639 - RNA, 28 nt, Human
gauaacaauaaaaggagaaccgguaccc

SEQ ID NO: 1362640 - RNA, 19 nt, Human
gaugauaacaauaaaagga

SEQ ID NO: 1362641 - RNA, 23 nt, Human
gucacuucucaaacauccuaaaa

SEQ ID NO: 1362642 - RNA, 19 nt, Human
guccaaggcaucauugucc

SEQ ID NO: 1362643 - RNA, 23 nt, Human
gucuccacauaaaacucuuaaca

SEQ ID NO: 1362644 - RNA, 21 nt, Human
uaauagaaaccggagcugcug

SEQ ID NO: 1362645 - RNA, 18 nt, Human
uaccucaacaaaagcaca

SEQ ID NO: 1362646 - RNA, 22 nt, Human
uagcaagugugccuuauuuucu

SEQ ID NO: 1362647 - RNA, 19 nt, Human
uauaugaauuacguaugua

SEQ ID NO: 1362648 - RNA, 24 nt, Human
ucaaaaaaaaaaaaaaaaaagcuu

SEQ ID NO: 1362649 - RNA, 28 nt, Human
ucaaacauccuaaaaagaaaaagaaaaa

SEQ ID NO: 1362650 - RNA, 22 nt, Human
ucaaauccacauucggccgcgc

SEQ ID NO: 1362651 - RNA, 23 nt, Human
ucagcaagccuuaucaauaauac

SEQ ID NO: 1362652 - RNA, 23 nt, Human
ucauuucuacuucucacacaugc

SEQ ID NO: 1362653 - RNA, 23 nt, Human
uccgucucaaaaaaaaaaaaaaa

SEQ ID NO: 1362654 - RNA, 26 nt, Human
uccgucucaaaaaaaaaaaaaaaaaa

SEQ ID NO: 1362655 - RNA, 27 nt, Human
uccuaaaaagaaaaagaaaaaaaaauc

SEQ ID NO: 1362656 - RNA, 24 nt, Human
ucuauauacaacacgucucuuaaa

SEQ ID NO: 1362657 - RNA, 18 nt, Human
ucucaaaaaaaaaaaaaa

SEQ ID NO: 1362658 - RNA, 30 nt, Human
ucucaaacauccuaaaaagaaaaagaaaag

SEQ ID NO: 1362659 - RNA, 22 nt, Human
ucuccacauaaaacucuuaaca

SEQ ID NO: 1362660 - RNA, 21 nt, Human
ucugaacuucaagucaccaua

SEQ ID NO: 1362661 - RNA, 18 nt, Human
ucuuccuugcuuaguaga

SEQ ID NO: 1362662 - RNA, 23 nt, Human
ugaaagguaccucaacaaaagca

SEQ ID NO: 1362663 - RNA, 20 nt, Human
ugagaaggccaaauuuaaug

SEQ ID NO: 1362664 - RNA, 20 nt, Human
uggcagccggauggaugcga

SEQ ID NO: 1362665 - RNA, 28 nt, Human
ugucaagauaaagaaaacucagcauucc

SEQ ID NO: 1362666 - RNA, 25 nt, Human
uuaaucaccauagacaaguuuuuac

SEQ ID NO: 1362667 - RNA, 25 nt, Human
uuagucaaacagucuuaccaguacc

SEQ ID NO: 1362668 - RNA, 19 nt, Human
uucaaguuaaguccacagu

SEQ ID NO: 1362669 - RNA, 18 nt, Human
uucacauagcaagugugc

SEQ ID NO: 1362670 - RNA, 21 nt, Human
uucggccgcgcugccaccugc

SEQ ID NO: 1362671 - RNA, 22 nt, Human
uucuacagagguacguacuacu

SEQ ID NO: 1362672 - RNA, 25 nt, Human
uuuaacauuuuuaauaaaucucuca

SEQ ID NO: 1362673 - RNA, 18 nt, Human
uuuacaagaacgucucca

SEQ ID NO: 1362674 - RNA, 25 nt, Human
acagcucuggccacgcuggcgggag

SEQ ID NO: 1362675 - RNA, 19 nt, Human
agagcagcgguagcacacc

SEQ ID NO: 1362676 - RNA, 21 nt, Human
agagcagcgguagcacaccgg

SEQ ID NO: 1362677 - RNA, 21 nt, Human
agagcagcgguagcacaccgg

SEQ ID NO: 1362678 - RNA, 19 nt, Human
agaggaaggaggaaggacg

SEQ ID NO: 1362679 - RNA, 23 nt, Human
agcccucagcuuugggagggccc

SEQ ID NO: 1362680 - RNA, 19 nt, Human
aggcagggguggacucccg

SEQ ID NO: 1362681 - RNA, 22 nt, Human
aucccagcccuucccuccccug

SEQ ID NO: 1362682 - RNA, 18 nt, Human
caaaagcacaagaaugca

SEQ ID NO: 1362683 - RNA, 23 nt, Human
caaaagcacaagaaugcaaaccg

SEQ ID NO: 1362684 - RNA, 20 nt, Human
caccaggccuuaccuggcug

SEQ ID NO: 1362685 - RNA, 22 nt, Human
cagcacgcagcucccgccuucc

SEQ ID NO: 1362686 - RNA, 26 nt, Human
cagcccuucccuccccuggcaccucc

SEQ ID NO: 1362687 - RNA, 18 nt, Human
cagcucccgccuucccgc

SEQ ID NO: 1362688 - RNA, 19 nt, Human
ccaccacugaggcaggggu

SEQ ID NO: 1362689 - RNA, 21 nt, Human
ccacgggcugcagcccucagc

SEQ ID NO: 1362690 - RNA, 20 nt, Human
ccauguccgcgcgccgcccc

SEQ ID NO: 1362691 - RNA, 23 nt, Human
cccaccacugaggcaggggugga

SEQ ID NO: 1362692 - RNA, 24 nt, Human
cccaccacugaggcagggguggac

SEQ ID NO: 1362693 - RNA, 27 nt, Human
cccagcgccguggccuccaggucuccg

SEQ ID NO: 1362694 - RNA, 18 nt, Human
ccccucggcgccccccgg

SEQ ID NO: 1362695 - RNA, 21 nt, Human
cccucagcuuugggagggccc

SEQ ID NO: 1362696 - RNA, 22 nt, Human
cccuccccuggcaccucccaaa

SEQ ID NO: 1362697 - RNA, 23 nt, Human
cccuccccuggcaccucccaaaa

SEQ ID NO: 1362698 - RNA, 22 nt, Human
ccgcucaggagcugccgccgcc

SEQ ID NO: 1362699 - RNA, 23 nt, Human
ccgcucaggagcugccgccgccu

SEQ ID NO: 1362700 - RNA, 19 nt, Human
ccgggauccggccccccuc

SEQ ID NO: 1362701 - RNA, 21 nt, Human
ccucaccaggccuuaccuggc

SEQ ID NO: 1362702 - RNA, 22 nt, Human
ccuccauguccgcgcgccgccc

SEQ ID NO: 1362703 - RNA, 24 nt, Human
ccuccauguccgcgcgccgccccu

SEQ ID NO: 1362704 - RNA, 18 nt, Human
ccuggugacuuccuggug

SEQ ID NO: 1362705 - RNA, 25 nt, Human
cgccguggccuccaggucuccgcag

SEQ ID NO: 1362706 - RNA, 23 nt, Human
cgcgcgccgccccucggcgcccc

SEQ ID NO: 1362707 - RNA, 23 nt, Human
cggugcgacagcucuggccacgc

SEQ ID NO: 1362708 - RNA, 22 nt, Human
cucaggagcugccgccgccucc

SEQ ID NO: 1362709 - RNA, 24 nt, Human
cucugaggccccacgggcugcagc

SEQ ID NO: 1362710 - RNA, 26 nt, Human
cuggcaccaguggcgccgcagcuuuc

SEQ ID NO: 1362711 - RNA, 22 nt, Human
cuggccaaccaagaggccaagu

SEQ ID NO: 1362712 - RNA, 18 nt, Human
cuggccacgcuggcggga

SEQ ID NO: 1362713 - RNA, 24 nt, Human
cuggugacuuccuggugggccugg

SEQ ID NO: 1362714 - RNA, 19 nt, Human
cuuuuaauccugaacauuc

SEQ ID NO: 1362715 - RNA, 20 nt, Human
gaggaaggacgcucacggug

SEQ ID NO: 1362716 - RNA, 21 nt, Human
gccuggccaaccaagaggcca

SEQ ID NO: 1362717 - RNA, 18 nt, Human
gccuucccgcucaggagc

SEQ ID NO: 1362718 - RNA, 20 nt, Human
ggagaggaaggaggaaggaa

SEQ ID NO: 1362719 - RNA, 22 nt, Human
ggagcugccgccgccuccgccu

SEQ ID NO: 1362720 - RNA, 22 nt, Human
guagagcagcgguagcacaccg

SEQ ID NO: 1362721 - RNA, 20 nt, Human
ucccagauucagcuugucuc

SEQ ID NO: 1362722 - RNA, 24 nt, Human
ucccagcaucccagcccuucccuc

SEQ ID NO: 1362723 - RNA, 18 nt, Human
ucccagcccuucccuccc

SEQ ID NO: 1362724 - RNA, 19 nt, Human
uccggccccccucucggcc

SEQ ID NO: 1362725 - RNA, 18 nt, Human
ugacucuggcaccagugg

SEQ ID NO: 1362726 - RNA, 18 nt, Human
ugccagcaacaacagguc

SEQ ID NO: 1362727 - RNA, 18 nt, Human
uggcagcccggagaggaa

SEQ ID NO: 1362728 - RNA, 26 nt, Human
uuaauccugaacauucuugaagcaug

SEQ ID NO: 1362729 - RNA, 21 nt, Human
uugguagagcagcgguagcuu

SEQ ID NO: 1362730 - RNA, 21 nt, Human
aaagugccugguccuccaagc

SEQ ID NO: 1362731 - RNA, 21 nt, Human
aacccucauuuaaacccucuc

SEQ ID NO: 1362732 - RNA, 23 nt, Human
aacccucuccccgcaaccuucua

SEQ ID NO: 1362733 - RNA, 19 nt, Human
aagcgcaucuccugaacaa

SEQ ID NO: 1362734 - RNA, 22 nt, Human
aagcgcaucuccugaacaauuc

SEQ ID NO: 1362735 - RNA, 20 nt, Human
accccaaacaccaaaggcuc

SEQ ID NO: 1362736 - RNA, 24 nt, Human
acccucauuuaaacccucuccccg

SEQ ID NO: 1362737 - RNA, 19 nt, Human
aggaaaccccaaacaccaa

SEQ ID NO: 1362738 - RNA, 21 nt, Human
aggaaaccccaaacaccaaag

SEQ ID NO: 1362739 - RNA, 23 nt, Human
caacuuacucaacacuccuccca

SEQ ID NO: 1362740 - RNA, 22 nt, Human
caccccaagcgcaucuccugaa

SEQ ID NO: 1362741 - RNA, 27 nt, Human
cacuccucccacuucaggaaaccccaa

SEQ ID NO: 1362742 - RNA, 26 nt, Human
cacuuccuuccccugggucaguccca

SEQ ID NO: 1362743 - RNA, 20 nt, Human
cagcccacgaacugcccuuc

SEQ ID NO: 1362744 - RNA, 22 nt, Human
cagcccacgaacugcccuuccu

SEQ ID NO: 1362745 - RNA, 18 nt, Human
cagcgccgccgcccccgc

SEQ ID NO: 1362746 - RNA, 22 nt, Human
cagucccaggauaucuaccccc

SEQ ID NO: 1362747 - RNA, 27 nt, Human
ccaaaggcuccccagucacucucaggg

SEQ ID NO: 1362748 - RNA, 20 nt, Human
cccacgaacugcccuuccuc

SEQ ID NO: 1362749 - RNA, 23 nt, Human
cccacuucaggaaaccccaaaca

SEQ ID NO: 1362750 - RNA, 21 nt, Human
ccccaaacaccaaaggcuccc

SEQ ID NO: 1362751 - RNA, 22 nt, Human
ccccaaacaccaaaggcucccc

SEQ ID NO: 1362752 - RNA, 18 nt, Human
ccccacaggcuccccaga

SEQ ID NO: 1362753 - RNA, 21 nt, Human
ccccccacaggcuccccagac

SEQ ID NO: 1362754 - RNA, 19 nt, Human
cccccgcgccgcuggccgc

SEQ ID NO: 1362755 - RNA, 19 nt, Human
ccccugggucagucccagg

SEQ ID NO: 1362756 - RNA, 23 nt, Human
cccgcaaccuucuacaggccauc

SEQ ID NO: 1362757 - RNA, 21 nt, Human
cccgcaggcgaagggccgcag

SEQ ID NO: 1362758 - RNA, 21 nt, Human
cccgcgccgcuggccgccgcg

SEQ ID NO: 1362759 - RNA, 26 nt, Human
cccugggucagucccaggauaucuac

SEQ ID NO: 1362760 - RNA, 19 nt, Human
cccuugccgcacuccccgc

SEQ ID NO: 1362761 - RNA, 18 nt, Human
ccgcaaccuucuacaggc

SEQ ID NO: 1362762 - RNA, 20 nt, Human
ccgccgcgugcgcgcgccgg

SEQ ID NO: 1362763 - RNA, 19 nt, Human
ccgcgccgcuggccgccgc

SEQ ID NO: 1362764 - RNA, 20 nt, Human
ccgcgccgcuggccgccgcg

SEQ ID NO: 1362765 - RNA, 20 nt, Human
ccgcuggccgccgcgugcgc

SEQ ID NO: 1362766 - RNA, 25 nt, Human
ccucccacuucaggaaaccccaaac

SEQ ID NO: 1362767 - RNA, 23 nt, Human
ccugaacaauucuuccguggagg

SEQ ID NO: 1362768 - RNA, 21 nt, Human
cgcacgaagcccuugccgcac

SEQ ID NO: 1362769 - RNA, 20 nt, Human
cgccgccgcccccgcgccgc

SEQ ID NO: 1362770 - RNA, 22 nt, Human
cgcuggccgccgcgugcgcgcg

SEQ ID NO: 1362771 - RNA, 20 nt, Human
cuccccgcaggcgaagggcu

SEQ ID NO: 1362772 - RNA, 20 nt, Human
cugaaggccucgccgcacuc

SEQ ID NO: 1362773 - RNA, 21 nt, Human
gcagcgccgccgcccccgcgc

SEQ ID NO: 1362774 - RNA, 19 nt, Human
gccgcacucgccacagccg

SEQ ID NO: 1362775 - RNA, 21 nt, Human
gccgcacucgccacagccgug

SEQ ID NO: 1362776 - RNA, 20 nt, Human
ggcuccccagacggcagccu

SEQ ID NO: 1362777 - RNA, 23 nt, Human
uacucaacacuccucccacuuca

SEQ ID NO: 1362778 - RNA, 26 nt, Human
uauagcaccgggaaagaccaacuuac

SEQ ID NO: 1362779 - RNA, 22 nt, Human
ucaggaaaccccaaacaccaaa

SEQ ID NO: 1362780 - RNA, 18 nt, Human
ucccacuucaggaaaccc

SEQ ID NO: 1362781 - RNA, 21 nt, Human
ucccacuucaggaaaccccaa

SEQ ID NO: 1362782 - RNA, 25 nt, Human
uccccacuuccuuccccugggucag

SEQ ID NO: 1362783 - RNA, 21 nt, Human
uccccagacggcagccucccg

SEQ ID NO: 1362784 - RNA, 22 nt, Human
uccccagacggcagccucccgc

SEQ ID NO: 1362785 - RNA, 21 nt, Human
uccccagucacucucagauug

SEQ ID NO: 1362786 - RNA, 26 nt, Human
ucuaccccccacaggcuccccagacg

SEQ ID NO: 1362787 - RNA, 20 nt, Human
ucuccugaacaauucuuccg

SEQ ID NO: 1362788 - RNA, 22 nt, Human
ugccgcacucgccacagccgug

SEQ ID NO: 1362789 - RNA, 20 nt, Human
ugucccucccgccccuuccc

SEQ ID NO: 1362790 - RNA, 22 nt, Human
uucccaccccagcccacgaacu

SEQ ID NO: 1362791 - RNA, 22 nt, Human
uugccgcacuccccgcaggcug

SEQ ID NO: 1362792 - RNA, 19 nt, Human
aaaaacacgacucuccacc

SEQ ID NO: 1362793 - RNA, 24 nt, Human
aaaaacacgacucuccaccaugug

SEQ ID NO: 1362794 - RNA, 25 nt, Human
aaaaaccaaagugccaguacaggca

SEQ ID NO: 1362795 - RNA, 19 nt, Human
aaaaagaaauucuuagccc

SEQ ID NO: 1362796 - RNA, 24 nt, Human
aaacaaguuucuuuuaauguuccu

SEQ ID NO: 1362797 - RNA, 23 nt, Human
aaacaggcuacguuucaguccuu

SEQ ID NO: 1362798 - RNA, 21 nt, Human
aaagucuuucccuucucuagc

SEQ ID NO: 1362799 - RNA, 22 nt, Human
aacaguguccagaguuaccacc

SEQ ID NO: 1362800 - RNA, 27 nt, Human
aacuuuuugcuuucucccuuuucuccu

SEQ ID NO: 1362801 - RNA, 18 nt, Human
aagaaaaaugaaucccau

SEQ ID NO: 1362802 - RNA, 20 nt, Human
aagccaccuaaggggcugcc

SEQ ID NO: 1362803 - RNA, 18 nt, Human
aaggggcugccucgacug

SEQ ID NO: 1362804 - RNA, 19 nt, Human
aagguuugaaauacugguu

SEQ ID NO: 1362805 - RNA, 18 nt, Human
aaguagguacaagaucag

SEQ ID NO: 1362806 - RNA, 20 nt, Human
aagucaaaaacaaaaaccaa

SEQ ID NO: 1362807 - RNA, 20 nt, Human
aauaacuauagaacagaaac

SEQ ID NO: 1362808 - RNA, 23 nt, Human
acaaaacaccaagcucacaccac

SEQ ID NO: 1362809 - RNA, 24 nt, Human
acaaaacaccaagcucacaccaca

SEQ ID NO: 1362810 - RNA, 19 nt, Human
acaccacaaaacaaagaau

SEQ ID NO: 1362811 - RNA, 18 nt, Human
acauuguuuuaauuugcu

SEQ ID NO: 1362812 - RNA, 22 nt, Human
accaaagugccaguacaggcau

SEQ ID NO: 1362813 - RNA, 22 nt, Human
accaagcucacaccacaugcac

SEQ ID NO: 1362814 - RNA, 18 nt, Human
accacaugcacaccacaa

SEQ ID NO: 1362815 - RNA, 21 nt, Human
accacaugcacaccacaaaac

SEQ ID NO: 1362816 - RNA, 22 nt, Human
accacaugcacaccacaaaaca

SEQ ID NO: 1362817 - RNA, 26 nt, Human
accucggugaccugaugaauacacug

SEQ ID NO: 1362818 - RNA, 22 nt, Human
acugcaagcucugacagccagg

SEQ ID NO: 1362819 - RNA, 19 nt, Human
acugcagcuccuagcagcu

SEQ ID NO: 1362820 - RNA, 18 nt, Human
acuuguggaccuccccuc

SEQ ID NO: 1362821 - RNA, 19 nt, Human
acuuuggcaucucugugaa

SEQ ID NO: 1362822 - RNA, 23 nt, Human
agaaauccaagccaggucaaacc

SEQ ID NO: 1362823 - RNA, 24 nt, Human
agauuguuuguguaauuuuuccug

SEQ ID NO: 1362824 - RNA, 22 nt, Human
aggaagagguuuuuuauuuggc

SEQ ID NO: 1362825 - RNA, 19 nt, Human
aggcauagacagggaaacc

SEQ ID NO: 1362826 - RNA, 22 nt, Human
agggaaaaggggagguugggga

SEQ ID NO: 1362827 - RNA, 19 nt, Human
agggauacauuugucuggc

SEQ ID NO: 1362828 - RNA, 22 nt, Human
agggguuucucccgaggcuuca

SEQ ID NO: 1362829 - RNA, 24 nt, Human
aguagcauuauacaaacaaguuuc

SEQ ID NO: 1362830 - RNA, 26 nt, Human
agucaaaaacaaaaaccaaagugcca

SEQ ID NO: 1362831 - RNA, 24 nt, Human
agucaagucaaaaacaaaaaccaa

SEQ ID NO: 1362832 - RNA, 18 nt, Human
aguugcugcuugaagcac

SEQ ID NO: 1362833 - RNA, 20 nt, Human
auaacuauagaacagaaaca

SEQ ID NO: 1362834 - RNA, 22 nt, Human
aucgcuguaacucaauuucacc

SEQ ID NO: 1362835 - RNA, 18 nt, Human
auuaaagcaaugaguuca

SEQ ID NO: 1362836 - RNA, 19 nt, Human
auugucuuuguuguacugu

SEQ ID NO: 1362837 - RNA, 20 nt, Human
auuuguuuggggauuucuuu

SEQ ID NO: 1362838 - RNA, 21 nt, Human
caaaaacacgacucuccacca

SEQ ID NO: 1362839 - RNA, 21 nt, Human
caaaaacccacagccccuaag

SEQ ID NO: 1362840 - RNA, 21 nt, Human
caaaaacccacagccccuaag

SEQ ID NO: 1362841 - RNA, 23 nt, Human
caaaaacccacagccccuaagaa

SEQ ID NO: 1362842 - RNA, 22 nt, Human
caaaacaccaagcucacaccac

SEQ ID NO: 1362843 - RNA, 18 nt, Human
caaaaucagaguauccag

SEQ ID NO: 1362844 - RNA, 26 nt, Human
caaaaucagaguauccagaaauccaa

SEQ ID NO: 1362845 - RNA, 18 nt, Human
caaacacgggggccaucc

SEQ ID NO: 1362846 - RNA, 24 nt, Human
caaacauauuuauuuuuuauucug

SEQ ID NO: 1362847 - RNA, 23 nt, Human
caaacccagccuuuuucugcagu

SEQ ID NO: 1362848 - RNA, 21 nt, Human
caaagugccaguacaggcaug

SEQ ID NO: 1362849 - RNA, 22 nt, Human
caaauaaagacucaggauuaaa

SEQ ID NO: 1362850 - RNA, 21 nt, Human
caacacugggaucacuggugc

SEQ ID NO: 1362851 - RNA, 19 nt, Human
caacauaguuccuagagga

SEQ ID NO: 1362852 - RNA, 20 nt, Human
caacugccugccuauuuauu

SEQ ID NO: 1362853 - RNA, 24 nt, Human
caagcaauucaagucaagucaaaa

SEQ ID NO: 1362854 - RNA, 20 nt, Human
caagccaggucaaaccaaaa

SEQ ID NO: 1362855 - RNA, 21 nt, Human
caagcuggccagaguccccug

SEQ ID NO: 1362856 - RNA, 25 nt, Human
caagucaaaaacaaaaaccaaagug

SEQ ID NO: 1362857 - RNA, 23 nt, Human
caagucaagucaaaaacaaaaac

SEQ ID NO: 1362858 - RNA, 25 nt, Human
cacaaaaacacgacucuccaccaug

SEQ ID NO: 1362859 - RNA, 18 nt, Human
cacaccacaaaacaaaga

SEQ ID NO: 1362860 - RNA, 21 nt, Human
cacaccacaaaacaaagaaug

SEQ ID NO: 1362861 - RNA, 24 nt, Human
caccaaaccagaaucaaaaccaaa

SEQ ID NO: 1362862 - RNA, 21 nt, Human
caccacaugcacaccacaaaa

SEQ ID NO: 1362863 - RNA, 23 nt, Human
caccacaugcacaccacaaaacc

SEQ ID NO: 1362864 - RNA, 21 nt, Human
caccagcuguaaccaaguguc

SEQ ID NO: 1362865 - RNA, 21 nt, Human
cacugcugcugccugcccucu

SEQ ID NO: 1362866 - RNA, 23 nt, Human
cagaaauccaagccaggucaaac

SEQ ID NO: 1362867 - RNA, 25 nt, Human
cagacaaaacuccucagacaccaga

SEQ ID NO: 1362868 - RNA, 18 nt, Human
cagcacaggagggguugg

SEQ ID NO: 1362869 - RNA, 19 nt, Human
cagcagcacaggagggguu

SEQ ID NO: 1362870 - RNA, 22 nt, Human
cagcagcacaggagggguuggc

SEQ ID NO: 1362871 - RNA, 22 nt, Human
cagccaguacaacugcagcucc

SEQ ID NO: 1362872 - RNA, 20 nt, Human
cagccccuaagaauucucuc

SEQ ID NO: 1362873 - RNA, 21 nt, Human
caggacgagucacagacaaaa

SEQ ID NO: 1362874 - RNA, 21 nt, Human
caggaugacagucuggggucc

SEQ ID NO: 1362875 - RNA, 23 nt, Human
cagggccccacaguuuggguuaa

SEQ ID NO: 1362876 - RNA, 23 nt, Human
caggucaaaccaaaaccaaagua

SEQ ID NO: 1362877 - RNA, 22 nt, Human
caggugcuugagggagcagggg

SEQ ID NO: 1362878 - RNA, 18 nt, Human
caguauacugcugcucuc

SEQ ID NO: 1362879 - RNA, 25 nt, Human
caguugcugccaaggcccucaaaca

SEQ ID NO: 1362880 - RNA, 19 nt, Human
caugaugagcuucugcaug

SEQ ID NO: 1362881 - RNA, 25 nt, Human
caugcacaccacaaaacaaagaaug

SEQ ID NO: 1362882 - RNA, 18 nt, Human
caugugauccccaauacc

SEQ ID NO: 1362883 - RNA, 21 nt, Human
ccaaaccagaaucaaaaccaa

SEQ ID NO: 1362884 - RNA, 21 nt, Human
ccaaagugccaguacaggcau

SEQ ID NO: 1362885 - RNA, 20 nt, Human
ccaagccaggucaaaccaaa

SEQ ID NO: 1362886 - RNA, 20 nt, Human
ccaagucagccacaaacacc

SEQ ID NO: 1362887 - RNA, 18 nt, Human
ccaccuuugucauguccc

SEQ ID NO: 1362888 - RNA, 20 nt, Human
ccagaaucaaaaccaaaauc

SEQ ID NO: 1362889 - RNA, 24 nt, Human
ccagcagcacaggagggguuggcu

SEQ ID NO: 1362890 - RNA, 20 nt, Human
ccaguacaggcaugccgugg

SEQ ID NO: 1362891 - RNA, 21 nt, Human
ccagugcauguuccucuagcc

SEQ ID NO: 1362892 - RNA, 24 nt, Human
ccauccuuccuccaucacuugucc

SEQ ID NO: 1362893 - RNA, 23 nt, Human
cccaaacccaccaagguggaagc

SEQ ID NO: 1362894 - RNA, 22 nt, Human
cccacauauccaguauagucca

SEQ ID NO: 1362895 - RNA, 29 nt, Human
ccccaauaccuuugccgucuucuguaccc

SEQ ID NO: 1362896 - RNA, 21 nt, Human
cccccagaguucaauaggccc

SEQ ID NO: 1362897 - RNA, 18 nt, Human
ccccccuuuucccuugcc

SEQ ID NO: 1362898 - RNA, 25 nt, Human
cccccuuuucccuugccucuuuggg

SEQ ID NO: 1362899 - RNA, 25 nt, Human
ccccuuuucccuugccucuuugggg

SEQ ID NO: 1362900 - RNA, 26 nt, Human
cccgaauuaaagcaaugaguucagcc

SEQ ID NO: 1362901 - RNA, 19 nt, Human
cccuggggaaacgaucugg

SEQ ID NO: 1362902 - RNA, 22 nt, Human
ccgccuuugugaccucauacaa

SEQ ID NO: 1362903 - RNA, 19 nt, Human
ccuacaaugaggguuuuaa

SEQ ID NO: 1362904 - RNA, 23 nt, Human
ccucccucugccuggagaaaguc

SEQ ID NO: 1362905 - RNA, 20 nt, Human
ccuuucccaguuaagagaau

SEQ ID NO: 1362906 - RNA, 25 nt, Human
cggaagggggcagaugcugcuuuuu

SEQ ID NO: 1362907 - RNA, 25 nt, Human
cgucuugugcccauguggcaggccc

SEQ ID NO: 1362908 - RNA, 18 nt, Human
cucacaccacaugcacac

SEQ ID NO: 1362909 - RNA, 21 nt, Human
cucccgaggcuucaccuccuc

SEQ ID NO: 1362910 - RNA, 22 nt, Human
cucuccaccaugugcccauccu

SEQ ID NO: 1362911 - RNA, 18 nt, Human
cucugugcccacauaucc

SEQ ID NO: 1362912 - RNA, 23 nt, Human
cugcaagcucugacagccaggcu

SEQ ID NO: 1362913 - RNA, 24 nt, Human
cugcaagcucugacagccaggcug

SEQ ID NO: 1362914 - RNA, 20 nt, Human
cugcugccugcccucuuagc

SEQ ID NO: 1362915 - RNA, 21 nt, Human
cugcugcugccugcccucuua

SEQ ID NO: 1362916 - RNA, 21 nt, Human
cuggacuuucuucuuuucccu

SEQ ID NO: 1362917 - RNA, 21 nt, Human
cuggucuuaggcuccgguaga

SEQ ID NO: 1362918 - RNA, 18 nt, Human
cugugauguguucauccc

SEQ ID NO: 1362919 - RNA, 21 nt, Human
cuucaccuccucucuugucua

SEQ ID NO: 1362920 - RNA, 24 nt, Human
cuucggggucacucugcagggguu

SEQ ID NO: 1362921 - RNA, 21 nt, Human
cuugaagcacccuucaccuuu

SEQ ID NO: 1362922 - RNA, 18 nt, Human
cuuguuaccuccacacuu

SEQ ID NO: 1362923 - RNA, 21 nt, Human
cuuuccuuuaacucaugaaag

SEQ ID NO: 1362924 - RNA, 18 nt, Human
gaacaugagcaacuggug

SEQ ID NO: 1362925 - RNA, 20 nt, Human
gaccucauaccauauuuccc

SEQ ID NO: 1362926 - RNA, 22 nt, Human
gagaaguggcgaccucauacca

SEQ ID NO: 1362927 - RNA, 21 nt, Human
gagaauuuucacuuuuagugg

SEQ ID NO: 1362928 - RNA, 20 nt, Human
gagauucuggaugagcccaa

SEQ ID NO: 1362929 - RNA, 18 nt, Human
gagcaggggggcugucac

SEQ ID NO: 1362930 - RNA, 18 nt, Human
gagggagcaggggggcug

SEQ ID NO: 1362931 - RNA, 19 nt, Human
gagggguuucucccgaggc

SEQ ID NO: 1362932 - RNA, 19 nt, Human
gaguauacauacaauaagc

SEQ ID NO: 1362933 - RNA, 21 nt, Human
gagucacagacaaaacuccuc

SEQ ID NO: 1362934 - RNA, 24 nt, Human
gauaagcacacugauuacacugcc

SEQ ID NO: 1362935 - RNA, 19 nt, Human
gcacagccaguacaacugc

SEQ ID NO: 1362936 - RNA, 23 nt, Human
gccacucauuaucuuuccaguuu

SEQ ID NO: 1362937 - RNA, 20 nt, Human
gccaucuuuucacucucuga

SEQ ID NO: 1362938 - RNA, 18 nt, Human
gccccaccaaguaauugu

SEQ ID NO: 1362939 - RNA, 23 nt, Human
gcuauuucuaauaacugugaugu

SEQ ID NO: 1362940 - RNA, 22 nt, Human
gcucacaccacaugcacaccac

SEQ ID NO: 1362941 - RNA, 20 nt, Human
gcugugguggauccagguug

SEQ ID NO: 1362942 - RNA, 19 nt, Human
gcuucagcaacagugucca

SEQ ID NO: 1362943 - RNA, 23 nt, Human
ggaauuccccaaacccaccaagg

SEQ ID NO: 1362944 - RNA, 21 nt, Human
ggcucuuuggagguccuugag

SEQ ID NO: 1362945 - RNA, 21 nt, Human
gggaaaaggggagguugggga

SEQ ID NO: 1362946 - RNA, 20 nt, Human
gggagcaggggggcugucac

SEQ ID NO: 1362947 - RNA, 18 nt, Human
gggagguuggggagaaac

SEQ ID NO: 1362948 - RNA, 22 nt, Human
ggggaacagcuggaccuugucu

SEQ ID NO: 1362949 - RNA, 20 nt, Human
ggguuuucugggcuuggucu

SEQ ID NO: 1362950 - RNA, 24 nt, Human
ggugcuugagggagcaggggggcu

SEQ ID NO: 1362951 - RNA, 18 nt, Human
guccaaaauuuaagaaaa

SEQ ID NO: 1362952 - RNA, 19 nt, Human
guuggcuucccccuucugg

SEQ ID NO: 1362953 - RNA, 20 nt, Human
uaagagagcuuuccuguauc

SEQ ID NO: 1362954 - RNA, 22 nt, Human
uaagccaccuaaggggcugccu

SEQ ID NO: 1362955 - RNA, 19 nt, Human
uaagccuccaccugcccag

SEQ ID NO: 1362956 - RNA, 21 nt, Human
uaauugcugcagcuaacaggu

SEQ ID NO: 1362957 - RNA, 27 nt, Human
uacacguucucccuuuuuccaaugggg

SEQ ID NO: 1362958 - RNA, 21 nt, Human
uacaguauuuucucauacagu

SEQ ID NO: 1362959 - RNA, 22 nt, Human
uacauacaauaagccucacaca

SEQ ID NO: 1362960 - RNA, 21 nt, Human
uacccugcacaucucucuucu

SEQ ID NO: 1362961 - RNA, 21 nt, Human
uaccugggagcgcucucagga

SEQ ID NO: 1362962 - RNA, 19 nt, Human
uacugcugcucucucaggg

SEQ ID NO: 1362963 - RNA, 24 nt, Human
uagcaaguaguccaaggccagucu

SEQ ID NO: 1362964 - RNA, 24 nt, Human
uagcaauacaccuacaaugagggu

SEQ ID NO: 1362965 - RNA, 19 nt, Human
uagccaccagggccaggug

SEQ ID NO: 1362966 - RNA, 23 nt, Human
uagcccaaauaacacauggccaa

SEQ ID NO: 1362967 - RNA, 19 nt, Human
uagcuaauacugcaaaguu

SEQ ID NO: 1362968 - RNA, 23 nt, Human
uaguuguuuagagagguaggcca

SEQ ID NO: 1362969 - RNA, 21 nt, Human
uauuuuagccaccagggccag

SEQ ID NO: 1362970 - RNA, 19 nt, Human
ucaaaaguggggagccucu

SEQ ID NO: 1362971 - RNA, 21 nt, Human
ucaaauggagugggcaaguuc

SEQ ID NO: 1362972 - RNA, 24 nt, Human
ucaagacaaaacaccaagcucaca

SEQ ID NO: 1362973 - RNA, 21 nt, Human
ucaaugguuauauggggauuu

SEQ ID NO: 1362974 - RNA, 21 nt, Human
ucacaccacaugcacaccaca

SEQ ID NO: 1362975 - RNA, 22 nt, Human
ucacaccacaugcacaccacaa

SEQ ID NO: 1362976 - RNA, 24 nt, Human
ucacuagcaauacaccuacaauga

SEQ ID NO: 1362977 - RNA, 23 nt, Human
ucagccacaaacaccagcccauu

SEQ ID NO: 1362978 - RNA, 19 nt, Human
ucagccacugcauugaucc

SEQ ID NO: 1362979 - RNA, 22 nt, Human
ucaguccaauaacccuucugcc

SEQ ID NO: 1362980 - RNA, 23 nt, Human
ucaguccaauaacccuucugcca

SEQ ID NO: 1362981 - RNA, 18 nt, Human
ucaguguaaauguuuaca

SEQ ID NO: 1362982 - RNA, 24 nt, Human
uccacaaacuccuccuucagcugc

SEQ ID NO: 1362983 - RNA, 26 nt, Human
uccacaaacuccuccuucagcugcua

SEQ ID NO: 1362984 - RNA, 21 nt, Human
uccacagucugcaaaaaccca

SEQ ID NO: 1362985 - RNA, 26 nt, Human
uccauccuuccuccaucacuuguccu

SEQ ID NO: 1362986 - RNA, 27 nt, Human
ucccccagaguucaauaggcccuuuuc

SEQ ID NO: 1362987 - RNA, 19 nt, Human
ucccgaggcuucaccuccu

SEQ ID NO: 1362988 - RNA, 22 nt, Human
ucccuugccucuuuggggggac

SEQ ID NO: 1362989 - RNA, 21 nt, Human
uccuucagcugcuagcaagua

SEQ ID NO: 1362990 - RNA, 21 nt, Human
uccuugagcccagucccccuc

SEQ ID NO: 1362991 - RNA, 26 nt, Human
uccuugaucaucuauuuguaggcagu

SEQ ID NO: 1362992 - RNA, 21 nt, Human
ucuccugucuuauaaacuagg

SEQ ID NO: 1362993 - RNA, 21 nt, Human
ucugcaaaaacccacagcccc

SEQ ID NO: 1362994 - RNA, 23 nt, Human
ucugcaguuuucuucuaaugucu

SEQ ID NO: 1362995 - RNA, 23 nt, Human
ucuggcuucagcaacagugucca

SEQ ID NO: 1362996 - RNA, 23 nt, Human
ucuggugcuggcagauucagcuc

SEQ ID NO: 1362997 - RNA, 20 nt, Human
ucuuguggguugacaaagcu

SEQ ID NO: 1362998 - RNA, 21 nt, Human
ucuuguggguugacaaagcuu

SEQ ID NO: 1362999 - RNA, 23 nt, Human
ugaagggcugguacacaaaaaca

SEQ ID NO: 1363000 - RNA, 21 nt, Human
ugacauacuuucccuaaacua

SEQ ID NO: 1363001 - RNA, 18 nt, Human
ugagcagggccccuuccu

SEQ ID NO: 1363002 - RNA, 21 nt, Human
ugagccucuaagucagugcag

SEQ ID NO: 1363003 - RNA, 21 nt, Human
ugaguagcauuauacaaacaa

SEQ ID NO: 1363004 - RNA, 19 nt, Human
ugaguugaagugcccuggg

SEQ ID NO: 1363005 - RNA, 23 nt, Human
ugcaggaauuccccaaacccacc

SEQ ID NO: 1363006 - RNA, 21 nt, Human
ugccaagggagggguuucucc

SEQ ID NO: 1363007 - RNA, 18 nt, Human
ugccagggggaacagcug

SEQ ID NO: 1363008 - RNA, 21 nt, Human
ugccagguugagcagggcccc

SEQ ID NO: 1363009 - RNA, 21 nt, Human
ugcccuggggaaacgaucugg

SEQ ID NO: 1363010 - RNA, 23 nt, Human
ugccuggagaaaguccuuuucuu

SEQ ID NO: 1363011 - RNA, 21 nt, Human
ugcgucacuguuuuggcaagg

SEQ ID NO: 1363012 - RNA, 19 nt, Human
ugcucaggaugacagucug

SEQ ID NO: 1363013 - RNA, 22 nt, Human
uggaaaccauuuuccaaauaaa

SEQ ID NO: 1363014 - RNA, 21 nt, Human
uggaagcucacugguguccuc

SEQ ID NO: 1363015 - RNA, 21 nt, Human
uggacucaaaaguggggagcc

SEQ ID NO: 1363016 - RNA, 20 nt, Human
uggcagaggcgcaagcacug

SEQ ID NO: 1363017 - RNA, 21 nt, Human
uggccaacccacuucuaaugu

SEQ ID NO: 1363018 - RNA, 20 nt, Human
uggccagaguccccugcagg

SEQ ID NO: 1363019 - RNA, 23 nt, Human
uggccuagggauacauuugucug

SEQ ID NO: 1363020 - RNA, 20 nt, Human
uggccuucugggcucuccuc

SEQ ID NO: 1363021 - RNA, 21 nt, Human
uggcugcacaagcaucaaauc

SEQ ID NO: 1363022 - RNA, 18 nt, Human
uggguugacaaagcugcu

SEQ ID NO: 1363023 - RNA, 19 nt, Human
uguaaccaagugucuaugu

SEQ ID NO: 1363024 - RNA, 21 nt, Human
uguaugccagggggaacagcu

SEQ ID NO: 1363025 - RNA, 23 nt, Human
ugucagaucagguagccccaggg

SEQ ID NO: 1363026 - RNA, 22 nt, Human
uguggaccuccccucuaauuaa

SEQ ID NO: 1363027 - RNA, 20 nt, Human
uguggccuucugggcucucc

SEQ ID NO: 1363028 - RNA, 22 nt, Human
ugugggguuuccauacugcuuc

SEQ ID NO: 1363029 - RNA, 19 nt, Human
uguuauacaacuucugucc

SEQ ID NO: 1363030 - RNA, 18 nt, Human
uuaaaacuccaacugcca

SEQ ID NO: 1363031 - RNA, 22 nt, Human
uuaaaugagcugccaagggagg

SEQ ID NO: 1363032 - RNA, 22 nt, Human
uuaauccuguuucuugacauac

SEQ ID NO: 1363033 - RNA, 24 nt, Human
uuacacugcaagcucugacagcca

SEQ ID NO: 1363034 - RNA, 27 nt, Human
uuacaguauuuucucauacagugucgu

SEQ ID NO: 1363035 - RNA, 21 nt, Human
uuagagcuugcggcuuuucag

SEQ ID NO: 1363036 - RNA, 24 nt, Human
uuauuuugugucugauccauguuu

SEQ ID NO: 1363037 - RNA, 21 nt, Human
uucaagugauuccugaccuag

SEQ ID NO: 1363038 - RNA, 20 nt, Human
uucaguuuucaccaaaccag

SEQ ID NO: 1363039 - RNA, 18 nt, Human
uucaucccugcaaaccca

SEQ ID NO: 1363040 - RNA, 22 nt, Human
uuccaaguagcccaaauaacac

SEQ ID NO: 1363041 - RNA, 19 nt, Human
uuccaguauacugcugcuc

SEQ ID NO: 1363042 - RNA, 19 nt, Human
uucccuugccucuuugggg

SEQ ID NO: 1363043 - RNA, 23 nt, Human
uuccuguaucgguuuagccuuug

SEQ ID NO: 1363044 - RNA, 19 nt, Human
uugcugggauccccauuca

SEQ ID NO: 1363045 - RNA, 18 nt, Human
uugcuuucucccuuuucu

SEQ ID NO: 1363046 - RNA, 20 nt, Human
uuggaaauucuggugcuggc

SEQ ID NO: 1363047 - RNA, 21 nt, Human
uuggagguccuugagcccagu

SEQ ID NO: 1363048 - RNA, 20 nt, Human
uuggggagaaacugagaagg

SEQ ID NO: 1363049 - RNA, 18 nt, Human
uuucaaaaauggugguug

SEQ ID NO: 1363050 - RNA, 23 nt, Human
uuuccaccguggacacaaacagg

SEQ ID NO: 1363051 - RNA, 24 nt, Human
uuuccauacugcuucuaauaauug

SEQ ID NO: 1363052 - RNA, 23 nt, Human
uuucuccugucuuauaaacuagg

SEQ ID NO: 1363053 - RNA, 23 nt, Human
uuucuuuuucuucuguucuaguu

SEQ ID NO: 1363054 - RNA, 22 nt, Human
uuugcuuucucccuuuucuccu

SEQ ID NO: 1363055 - RNA, 21 nt, Human
uuuggcaagggcugacaaaug

SEQ ID NO: 1363056 - RNA, 22 nt, Human
uuuguggccuucugggcucucc

SEQ ID NO: 1363057 - RNA, 24 nt, Human
uuuuacacggcugugguggaucca

SEQ ID NO: 1363058 - RNA, 20 nt, Human
uuuuccacaaacuccuccuu

SEQ ID NO: 1363059 - RNA, 23 nt, Human
uuuuccacaaacuccuccuucag

SEQ ID NO: 1363060 - RNA, 23 nt, Human
uuuugcuuucucccuuuucuccu

SEQ ID NO: 1363061 - RNA, 27 nt, Human
aaacaaaaacgagggcugacugggacc

SEQ ID NO: 1363062 - RNA, 21 nt, Human
aaacaaaagcccuugcguagc

SEQ ID NO: 1363063 - RNA, 20 nt, Human
aaaccgguggccaggaggaa

SEQ ID NO: 1363064 - RNA, 20 nt, Human
aaagucacugguuuaauauc

SEQ ID NO: 1363065 - RNA, 20 nt, Human
aaccccaucaauucagucag

SEQ ID NO: 1363066 - RNA, 18 nt, Human
aacuggaagcuuggggac

SEQ ID NO: 1363067 - RNA, 22 nt, Human
aagaagcaugaauaagacaggc

SEQ ID NO: 1363068 - RNA, 24 nt, Human
aagacaggacauggggcucacaga

SEQ ID NO: 1363069 - RNA, 21 nt, Human
aaggggccucgggccuccugu

SEQ ID NO: 1363070 - RNA, 18 nt, Human
acaaaggucaaauccugg

SEQ ID NO: 1363071 - RNA, 21 nt, Human
acacaaauuaaacaaaaacga

SEQ ID NO: 1363072 - RNA, 18 nt, Human
acagcuucuacagggcca

SEQ ID NO: 1363073 - RNA, 19 nt, Human
acaggcggggcauaacagu

SEQ ID NO: 1363074 - RNA, 22 nt, Human
agacagguauuccacaaccugg

SEQ ID NO: 1363075 - RNA, 22 nt, Human
agagggaggccugggcucugag

SEQ ID NO: 1363076 - RNA, 20 nt, Human
agagguauugcagcaugcug

SEQ ID NO: 1363077 - RNA, 22 nt, Human
agcaaaaugacugggguccuca

SEQ ID NO: 1363078 - RNA, 20 nt, Human
agcagcucuugccagccagu

SEQ ID NO: 1363079 - RNA, 19 nt, Human
agcagggaugugugggggg

SEQ ID NO: 1363080 - RNA, 22 nt, Human
agccagugcugaggcucugaca

SEQ ID NO: 1363081 - RNA, 19 nt, Human
agccuggcugauggaaucc

SEQ ID NO: 1363082 - RNA, 18 nt, Human
aggcugggucuucaggug

SEQ ID NO: 1363083 - RNA, 20 nt, Human
agggcugacugggaccagga

SEQ ID NO: 1363084 - RNA, 24 nt, Human
agguggugucccugcacaucugcu

SEQ ID NO: 1363085 - RNA, 25 nt, Human
agucacugguuuaauaucuugggaa

SEQ ID NO: 1363086 - RNA, 22 nt, Human
aguggcguaggcugcaagagga

SEQ ID NO: 1363087 - RNA, 19 nt, Human
auuuaugaaaugcuuccuu

SEQ ID NO: 1363088 - RNA, 21 nt, Human
cacuguacugcuucacagagc

SEQ ID NO: 1363089 - RNA, 24 nt, Human
cagagguauugcagcaugcuguug

SEQ ID NO: 1363090 - RNA, 24 nt, Human
cagccagugacacuaccccuuccu

SEQ ID NO: 1363091 - RNA, 19 nt, Human
cagcugggcuucccagggg

SEQ ID NO: 1363092 - RNA, 18 nt, Human
cagguaaaagaagcauga

SEQ ID NO: 1363093 - RNA, 21 nt, Human
caucgacaugaacaaacaaaa

SEQ ID NO: 1363094 - RNA, 19 nt, Human
caugugccacgucaccucc

SEQ ID NO: 1363095 - RNA, 18 nt, Human
ccacccagggcagagcca

SEQ ID NO: 1363096 - RNA, 26 nt, Human
ccacgaagaaagguuuaaagaauccc

SEQ ID NO: 1363097 - RNA, 21 nt, Human
ccacgucaccucccuugucug

SEQ ID NO: 1363098 - RNA, 22 nt, Human
ccagcucaguggagugagacac

SEQ ID NO: 1363099 - RNA, 24 nt, Human
ccagcucaguggagugagacacug

SEQ ID NO: 1363100 - RNA, 19 nt, Human
cccaacuggaagcuugggg

SEQ ID NO: 1363101 - RNA, 21 nt, Human
cccccaugugccacgucaccu

SEQ ID NO: 1363102 - RNA, 20 nt, Human
cccuacagguaaaagaagca

SEQ ID NO: 1363103 - RNA, 18 nt, Human
cccucccagccuccaacc

SEQ ID NO: 1363104 - RNA, 23 nt, Human
cccucugggaucuccaccaucca

SEQ ID NO: 1363105 - RNA, 21 nt, Human
cccugcacaucugcuuugcag

SEQ ID NO: 1363106 - RNA, 22 nt, Human
ccuacagguaaaagaagcauga

SEQ ID NO: 1363107 - RNA, 20 nt, Human
ccuagagaagucacaaagcu

SEQ ID NO: 1363108 - RNA, 18 nt, Human
ccucauuauggaagaaca

SEQ ID NO: 1363109 - RNA, 22 nt, Human
ccucggcaggguggggagaagg

SEQ ID NO: 1363110 - RNA, 23 nt, Human
ccucgggccuccuguagcucugc

SEQ ID NO: 1363111 - RNA, 22 nt, Human
ccucuggcugggaccucagccc

SEQ ID NO: 1363112 - RNA, 19 nt, Human
ccucugggaucuccaccau

SEQ ID NO: 1363113 - RNA, 21 nt, Human
ccucugggaucuccaccaucc

SEQ ID NO: 1363114 - RNA, 24 nt, Human
ccugaagcaccacuaaaaugcuag

SEQ ID NO: 1363115 - RNA, 25 nt, Human
ccugggcccugucaacccucccaga

SEQ ID NO: 1363116 - RNA, 22 nt, Human
ccuucaacaaacacuuaaaaaa

SEQ ID NO: 1363117 - RNA, 22 nt, Human
cgacaugaacaaacaaaagccc

SEQ ID NO: 1363118 - RNA, 23 nt, Human
cucacaggguccugacaaaggcc

SEQ ID NO: 1363119 - RNA, 25 nt, Human
cucccuagcaauggcugaccucuag

SEQ ID NO: 1363120 - RNA, 18 nt, Human
cucuggucaggggagggg

SEQ ID NO: 1363121 - RNA, 20 nt, Human
cugaagcugcaacucucugc

SEQ ID NO: 1363122 - RNA, 19 nt, Human
cugacaaccucggcagggu

SEQ ID NO: 1363123 - RNA, 23 nt, Human
cugagggucuacaggccagaggg

SEQ ID NO: 1363124 - RNA, 22 nt, Human
cuggcugggaccucagccccca

SEQ ID NO: 1363125 - RNA, 23 nt, Human
cugggcucugaggccugugccug

SEQ ID NO: 1363126 - RNA, 19 nt, Human
cugugccuguguggccucu

SEQ ID NO: 1363127 - RNA, 21 nt, Human
gaagaaagguuuaaagaaucc

SEQ ID NO: 1363128 - RNA, 24 nt, Human
gaaggggccucgggccuccuguag

SEQ ID NO: 1363129 - RNA, 22 nt, Human
gaagucacaaagcucacaccca

SEQ ID NO: 1363130 - RNA, 18 nt, Human
gacaugaacaaacaaaag

SEQ ID NO: 1363131 - RNA, 20 nt, Human
gaccuggagccuggcugaug

SEQ ID NO: 1363132 - RNA, 20 nt, Human
gauccacucaagaccucaca

SEQ ID NO: 1363133 - RNA, 18 nt, Human
gcaggcugggucuucagg

SEQ ID NO: 1363134 - RNA, 18 nt, Human
gccaggaggaguucuuga

SEQ ID NO: 1363135 - RNA, 18 nt, Human
gccaggauuuaaagucac

SEQ ID NO: 1363136 - RNA, 19 nt, Human
gccucgggccuccuguagc

SEQ ID NO: 1363137 - RNA, 19 nt, Human
gcucugaggccugugccug

SEQ ID NO: 1363138 - RNA, 20 nt, Human
gcugggcagggacgcugcgg

SEQ ID NO: 1363139 - RNA, 21 nt, Human
ggaaaagcagauccacucaag

SEQ ID NO: 1363140 - RNA, 28 nt, Human
ggaaagagcagaaaaucaaccgguaccc

SEQ ID NO: 1363141 - RNA, 19 nt, Human
ggagaaggccagacucagg

SEQ ID NO: 1363142 - RNA, 22 nt, Human
ggcagagucaccggggcuggcc

SEQ ID NO: 1363143 - RNA, 19 nt, Human
ggccagagggaggccuggg

SEQ ID NO: 1363144 - RNA, 21 nt, Human
ggcccagccccccccaggaag

SEQ ID NO: 1363145 - RNA, 23 nt, Human
ggccucagcugggcuuccuuggc

SEQ ID NO: 1363146 - RNA, 18 nt, Human
ggcugccacccagggcag

SEQ ID NO: 1363147 - RNA, 20 nt, Human
gggaagacuauaacacaaug

SEQ ID NO: 1363148 - RNA, 18 nt, Human
ggggaccuggagccuggc

SEQ ID NO: 1363149 - RNA, 18 nt, Human
guggugucccugcacauc

SEQ ID NO: 1363150 - RNA, 22 nt, Human
guuaaaaacaucgacaugaaca

SEQ ID NO: 1363151 - RNA, 23 nt, Human
guuaaaaacaucgacaugaacaa

SEQ ID NO: 1363152 - RNA, 21 nt, Human
uaaaaaaaaaucccuacaggu

SEQ ID NO: 1363153 - RNA, 23 nt, Human
uaaaaacaucgacaugaacaaac

SEQ ID NO: 1363154 - RNA, 27 nt, Human
uaaaagaagcaugaauaagacaggcgg

SEQ ID NO: 1363155 - RNA, 20 nt, Human
uaaacaaaaacgagggcuga

SEQ ID NO: 1363156 - RNA, 19 nt, Human
uaaguacagaagucacuaa

SEQ ID NO: 1363157 - RNA, 23 nt, Human
uacagggcagggaagacuauaac

SEQ ID NO: 1363158 - RNA, 24 nt, Human
uacugcuucacagagcuguuacag

SEQ ID NO: 1363159 - RNA, 19 nt, Human
uagagauaugugugcuucg

SEQ ID NO: 1363160 - RNA, 21 nt, Human
uagcuuaauaauuccaaggua

SEQ ID NO: 1363161 - RNA, 23 nt, Human
uaggcugcaagaggacaagcuaa

SEQ ID NO: 1363162 - RNA, 22 nt, Human
uaucccagaugaugguaauaug

SEQ ID NO: 1363163 - RNA, 23 nt, Human
uaucccagaugaugguaauaugc

SEQ ID NO: 1363164 - RNA, 22 nt, Human
uauggaagaacaaauagcuuua

SEQ ID NO: 1363165 - RNA, 21 nt, Human
uaugucauccuucaacaaaca

SEQ ID NO: 1363166 - RNA, 22 nt, Human
uaugucauccuucaacaaacac

SEQ ID NO: 1363167 - RNA, 19 nt, Human
ucacaaagcucacacccag

SEQ ID NO: 1363168 - RNA, 19 nt, Human
ucacagagcuguuacaggg

SEQ ID NO: 1363169 - RNA, 22 nt, Human
ucacuggcuucagccuccucuc

SEQ ID NO: 1363170 - RNA, 23 nt, Human
ucaggcucagcucuaagugcugu

SEQ ID NO: 1363171 - RNA, 22 nt, Human
ucagguggugucccugcacauc

SEQ ID NO: 1363172 - RNA, 20 nt, Human
uccaccauccacaguguguu

SEQ ID NO: 1363173 - RNA, 24 nt, Human
uccagaugaugcuuacucccuggc

SEQ ID NO: 1363174 - RNA, 23 nt, Human
ucccuagcaauggcugaccucua

SEQ ID NO: 1363175 - RNA, 21 nt, Human
ucuacaggccagagggaggcc

SEQ ID NO: 1363176 - RNA, 22 nt, Human
ucucgccuaagagagucucuca

SEQ ID NO: 1363177 - RNA, 25 nt, Human
ucuuugggugggagcaagauccagg

SEQ ID NO: 1363178 - RNA, 24 nt, Human
ugaaaagaguacaucagaagcuaa

SEQ ID NO: 1363179 - RNA, 19 nt, Human
ugaaauaccacaacagcag

SEQ ID NO: 1363180 - RNA, 21 nt, Human
ugaaaugggggcaaugucccc

SEQ ID NO: 1363181 - RNA, 19 nt, Human
ugaacaaacaaaagcccuu

SEQ ID NO: 1363182 - RNA, 19 nt, Human
ugaacaaacaaaagcccuu

SEQ ID NO: 1363183 - RNA, 20 nt, Human
ugaacaggaaggggccucgg

SEQ ID NO: 1363184 - RNA, 20 nt, Human
ugacaaaggccacuuccagc

SEQ ID NO: 1363185 - RNA, 18 nt, Human
ugaccucuagcauacucu

SEQ ID NO: 1363186 - RNA, 18 nt, Human
ugagugauccuggcuucc

SEQ ID NO: 1363187 - RNA, 23 nt, Human
ugauuuacaugcuuauuuuccuu

SEQ ID NO: 1363188 - RNA, 23 nt, Human
ugcauuauaguuaaaaacaucga

SEQ ID NO: 1363189 - RNA, 23 nt, Human
ugccacgucaccucccuugucug

SEQ ID NO: 1363190 - RNA, 21 nt, Human
ugcuguggcugagaauuuucc

SEQ ID NO: 1363191 - RNA, 23 nt, Human
uggaagcuuggggaccuggagcc

SEQ ID NO: 1363192 - RNA, 20 nt, Human
uggaucacugagcacagcuu

SEQ ID NO: 1363193 - RNA, 20 nt, Human
uggcagcugggcuucccagg

SEQ ID NO: 1363194 - RNA, 24 nt, Human
uggcagcugggcuucccaggggcu

SEQ ID NO: 1363195 - RNA, 21 nt, Human
uggccaaacccaacuggaagc

SEQ ID NO: 1363196 - RNA, 22 nt, Human
uggccaaacccaacuggaagcu

SEQ ID NO: 1363197 - RNA, 20 nt, Human
uggcguaggcugcaagagga

SEQ ID NO: 1363198 - RNA, 18 nt, Human
uggcuaaagggcacagag

SEQ ID NO: 1363199 - RNA, 21 nt, Human
uggcuaaagggcacagagugg

SEQ ID NO: 1363200 - RNA, 19 nt, Human
uggcugaccucuagcauac

SEQ ID NO: 1363201 - RNA, 21 nt, Human
uggcugauggaauccacaaag

SEQ ID NO: 1363202 - RNA, 22 nt, Human
ugggaaagagcagaaaaucaac

SEQ ID NO: 1363203 - RNA, 23 nt, Human
ugggaagauguccauuuuuugga

SEQ ID NO: 1363204 - RNA, 24 nt, Human
ugggaagauguccauuuuuuggau

SEQ ID NO: 1363205 - RNA, 19 nt, Human
ugggaccaggagagugagu

SEQ ID NO: 1363206 - RNA, 21 nt, Human
ugggagcaagauccaggcauc

SEQ ID NO: 1363207 - RNA, 23 nt, Human
ugggagcaagauccaggcaucag

SEQ ID NO: 1363208 - RNA, 18 nt, Human
ugggcucugaggccugug

SEQ ID NO: 1363209 - RNA, 24 nt, Human
uggggugggaagauguccauuuuu

SEQ ID NO: 1363210 - RNA, 19 nt, Human
ugucaacccucccagaaau

SEQ ID NO: 1363211 - RNA, 23 nt, Human
uguccccuaggccuuuuccuccu

SEQ ID NO: 1363212 - RNA, 18 nt, Human
uguguggggggguggcaa

SEQ ID NO: 1363213 - RNA, 18 nt, Human
uguuuguggguaaugaca

SEQ ID NO: 1363214 - RNA, 25 nt, Human
uuaaaaaauguuugaaaaccccauc

SEQ ID NO: 1363215 - RNA, 18 nt, Human
uuccuuggcagugucugu

SEQ ID NO: 1363216 - RNA, 23 nt, Human
uugcaacaucuugcugaggacug

SEQ ID NO: 1363217 - RNA, 22 nt, Human
uuuguagagagguggcagcugg

SEQ ID NO: 1363218 - RNA, 22 nt, Human
aaagaggcaaaaggagcccaaa

SEQ ID NO: 1363219 - RNA, 20 nt, Human
aaccucugccuccuggcuuc

SEQ ID NO: 1363220 - RNA, 24 nt, Human
aacuaaggucaggaguuugagacc

SEQ ID NO: 1363221 - RNA, 19 nt, Human
aacugcaaccucugccucc

SEQ ID NO: 1363222 - RNA, 24 nt, Human
aauuuuguauuuuuaguagaaaug

SEQ ID NO: 1363223 - RNA, 21 nt, Human
acacuguuuugauuauuauag

SEQ ID NO: 1363224 - RNA, 24 nt, Human
accauguuggucaggcuggucuug

SEQ ID NO: 1363225 - RNA, 21 nt, Human
acugcaaccucugccuccugg

SEQ ID NO: 1363226 - RNA, 23 nt, Human
acugcaaccucugccuccuggcu

SEQ ID NO: 1363227 - RNA, 24 nt, Human
acuucaaccucccaaaaugcugag

SEQ ID NO: 1363228 - RNA, 21 nt, Human
agaagguggaagggcaaagag

SEQ ID NO: 1363229 - RNA, 24 nt, Human
agagauucuccucccucagccucc

SEQ ID NO: 1363230 - RNA, 20 nt, Human
agcacaauuuguugaaaaua

SEQ ID NO: 1363231 - RNA, 18 nt, Human
aggccgaggugggcagau

SEQ ID NO: 1363232 - RNA, 22 nt, Human
aggugggcagaucaacuaaggu

SEQ ID NO: 1363233 - RNA, 22 nt, Human
aguagaaaugggguuucaccau

SEQ ID NO: 1363234 - RNA, 23 nt, Human
aguagcugggauuacaggcaugu

SEQ ID NO: 1363235 - RNA, 18 nt, Human
agugcaauggugugaucu

SEQ ID NO: 1363236 - RNA, 22 nt, Human
aguggcuuaugccuguaauccc

SEQ ID NO: 1363237 - RNA, 24 nt, Human
aguggcuuaugccuguaaucccgg

SEQ ID NO: 1363238 - RNA, 20 nt, Human
aucaacuaaggucaggaguu

SEQ ID NO: 1363239 - RNA, 20 nt, Human
augccuguaaucccggcacu

SEQ ID NO: 1363240 - RNA, 23 nt, Human
augggguuucaccauguugguca

SEQ ID NO: 1363241 - RNA, 24 nt, Human
augggguuucaccauguuggucag

SEQ ID NO: 1363242 - RNA, 23 nt, Human
auuaauuuuuuuuuuauuauuau

SEQ ID NO: 1363243 - RNA, 24 nt, Human
auuaauuuuuuuuuuauuauuauu

SEQ ID NO: 1363244 - RNA, 18 nt, Human
auuagauuuggucagaug

SEQ ID NO: 1363245 - RNA, 18 nt, Human
caaaaugcugaguuuaca

SEQ ID NO: 1363246 - RNA, 21 nt, Human
caccauguuggucaggcuggu

SEQ ID NO: 1363247 - RNA, 23 nt, Human
caccauguuggucaggcuggucu

SEQ ID NO: 1363248 - RNA, 24 nt, Human
caccauguuggucaggcuggucuu

SEQ ID NO: 1363249 - RNA, 24 nt, Human
cacucuuguugccuaggcuggagu

SEQ ID NO: 1363250 - RNA, 24 nt, Human
cacuucaaccucccaaaaugcuga

SEQ ID NO: 1363251 - RNA, 24 nt, Human
cagaucaacuaaggucaggaguuu

SEQ ID NO: 1363252 - RNA, 24 nt, Human
cauguuggucaggcuggucuugaa

SEQ ID NO: 1363253 - RNA, 20 nt, Human
ccacuaugcccagcccaauc

SEQ ID NO: 1363254 - RNA, 26 nt, Human
ccacuucaaccucccaaagggcccuc

SEQ ID NO: 1363255 - RNA, 19 nt, Human
cccaaugcuaucccucccc

SEQ ID NO: 1363256 - RNA, 20 nt, Human
ccccaccacaguccccagaa

SEQ ID NO: 1363257 - RNA, 23 nt, Human
cccgaguagcugggauuacaggc

SEQ ID NO: 1363258 - RNA, 24 nt, Human
cccgaguagcugggauuacaggca

SEQ ID NO: 1363259 - RNA, 23 nt, Human
ccgaguagcugggauuacaggca

SEQ ID NO: 1363260 - RNA, 24 nt, Human
ccgaguagcugggauuacaggcau

SEQ ID NO: 1363261 - RNA, 19 nt, Human
ccuaggcuggagugcaaug

SEQ ID NO: 1363262 - RNA, 28 nt, Human
ccuccagcuucguucuuuuugggccgcc

SEQ ID NO: 1363263 - RNA, 19 nt, Human
ccucccccaucccccgacc

SEQ ID NO: 1363264 - RNA, 24 nt, Human
ccuccuggcuucaagagauucucc

SEQ ID NO: 1363265 - RNA, 24 nt, Human
ccugaccucaggugauccacccac

SEQ ID NO: 1363266 - RNA, 22 nt, Human
ccuguaaucccggcacuuuggg

SEQ ID NO: 1363267 - RNA, 24 nt, Human
cgaggugggcagaucaacuaaggu

SEQ ID NO: 1363268 - RNA, 26 nt, Human
cgaggugggcagaucaacuaagguca

SEQ ID NO: 1363269 - RNA, 23 nt, Human
cgcuauuuuggaucucuuucaca

SEQ ID NO: 1363270 - RNA, 24 nt, Human
cggcacuuugggaggccgaggugg

SEQ ID NO: 1363271 - RNA, 24 nt, Human
cuaacugcaaccucugccuccugg

SEQ ID NO: 1363272 - RNA, 22 nt, Human
cuaugcccagcccaaucauaug

SEQ ID NO: 1363273 - RNA, 23 nt, Human
cuauuuguaguuuauugagcauu

SEQ ID NO: 1363274 - RNA, 24 nt, Human
cucagccucccgaguagcugggau

SEQ ID NO: 1363275 - RNA, 18 nt, Human
cucccaaucuguggcuug

SEQ ID NO: 1363276 - RNA, 23 nt, Human
cucccaaugcuaucccuccccca

SEQ ID NO: 1363277 - RNA, 19 nt, Human
cucccccaucccccgaccc

SEQ ID NO: 1363278 - RNA, 23 nt, Human
cucccucagccucccgaguagcu

SEQ ID NO: 1363279 - RNA, 23 nt, Human
cucccucagccucccgaguagcu

SEQ ID NO: 1363280 - RNA, 18 nt, Human
cucuuguugccuaggcug

SEQ ID NO: 1363281 - RNA, 25 nt, Human
cugcaacaguuuuacaucuuccccu

SEQ ID NO: 1363282 - RNA, 23 nt, Human
cugcaaccucugccuccuggcuu

SEQ ID NO: 1363283 - RNA, 24 nt, Human
cugcacccacuaacucgucaucua

SEQ ID NO: 1363284 - RNA, 26 nt, Human
cuuaggauuuucuauauacaggaucc

SEQ ID NO: 1363285 - RNA, 23 nt, Human
cuuauaaucuuauagcauuugcu

SEQ ID NO: 1363286 - RNA, 21 nt, Human
cuucaagagauucuccucccu

SEQ ID NO: 1363287 - RNA, 22 nt, Human
cuuguugccuaggcuggagugc

SEQ ID NO: 1363288 - RNA, 24 nt, Human
cuuguugccuaggcuggagugcaa

SEQ ID NO: 1363289 - RNA, 21 nt, Human
cuuuauauauguuccuggauu

SEQ ID NO: 1363290 - RNA, 23 nt, Human
cuuugggaggccgaggugggcag

SEQ ID NO: 1363291 - RNA, 24 nt, Human
gaaaugggguuucaccauguuggu

SEQ ID NO: 1363292 - RNA, 19 nt, Human
gaaguccaagaucaaggug

SEQ ID NO: 1363293 - RNA, 24 nt, Human
gaccucaggugauccacccacuuc

SEQ ID NO: 1363294 - RNA, 25 nt, Human
gaguagcugggauuacaggcaugug

SEQ ID NO: 1363295 - RNA, 24 nt, Human
gaucaacuaaggucaggaguuuga

SEQ ID NO: 1363296 - RNA, 18 nt, Human
gauuacaggcaugugcca

SEQ ID NO: 1363297 - RNA, 24 nt, Human
gauuacaggcaugugccaccaugc

SEQ ID NO: 1363298 - RNA, 21 nt, Human
gauuuuuuuuuuuuuuuaaga

SEQ ID NO: 1363299 - RNA, 18 nt, Human
gauuuuuuuuuuuuuuuu

SEQ ID NO: 1363300 - RNA, 23 nt, Human
gcacuuugggaggccgagguggg

SEQ ID NO: 1363301 - RNA, 19 nt, Human
gcagcuaaaaaaucugugc

SEQ ID NO: 1363302 - RNA, 24 nt, Human
gccuaggcuggagugcaauggugu

SEQ ID NO: 1363303 - RNA, 19 nt, Human
gccuguaaucccggcacuu

SEQ ID NO: 1363304 - RNA, 25 nt, Human
gcuaaaaaaucugugcuuaacccaa

SEQ ID NO: 1363305 - RNA, 20 nt, Human
gcugaguuuacaagcuugaa

SEQ ID NO: 1363306 - RNA, 24 nt, Human
gcuggagugcaauggugugaucug

SEQ ID NO: 1363307 - RNA, 23 nt, Human
gcuggucuugaacuccugaccuc

SEQ ID NO: 1363308 - RNA, 22 nt, Human
ggaagggcaaagaggcaaaagg

SEQ ID NO: 1363309 - RNA, 24 nt, Human
ggauuacaggcaugugccaccaug

SEQ ID NO: 1363310 - RNA, 19 nt, Human
ggauuugcaaauauuuucu

SEQ ID NO: 1363311 - RNA, 18 nt, Human
ggcaaagaggcaaaagga

SEQ ID NO: 1363312 - RNA, 25 nt, Human
ggcagaucaacuaaggucaggaguu

SEQ ID NO: 1363313 - RNA, 22 nt, Human
ggcuggagugcaauggugugau

SEQ ID NO: 1363314 - RNA, 24 nt, Human
ggcuggucuugaacuccugaccuc

SEQ ID NO: 1363315 - RNA, 22 nt, Human
gggguuucaccauguuggucag

SEQ ID NO: 1363316 - RNA, 23 nt, Human
gggguuucaccauguuggucagg

SEQ ID NO: 1363317 - RNA, 19 nt, Human
ggucaggaguuugagacca

SEQ ID NO: 1363318 - RNA, 19 nt, Human
ggucuugaacuccugaccu

SEQ ID NO: 1363319 - RNA, 23 nt, Human
ggugcaguggcuuaugccuguaa

SEQ ID NO: 1363320 - RNA, 18 nt, Human
guagcugggauuacaggc

SEQ ID NO: 1363321 - RNA, 20 nt, Human
guagcugggauuacaggcau

SEQ ID NO: 1363322 - RNA, 24 nt, Human
gugauccacccacuucaaccuccc

SEQ ID NO: 1363323 - RNA, 22 nt, Human
guggaagggcaaagaggcaaaa

SEQ ID NO: 1363324 - RNA, 23 nt, Human
uaaaaguagugagacaugacuuc

SEQ ID NO: 1363325 - RNA, 23 nt, Human
uaacuauaggcuuuucauaaaug

SEQ ID NO: 1363326 - RNA, 19 nt, Human
uaacugcaaccucugccuc

SEQ ID NO: 1363327 - RNA, 21 nt, Human
uaacugcaaccucugccuccu

SEQ ID NO: 1363328 - RNA, 23 nt, Human
uaacugcaaccucugccuccugg

SEQ ID NO: 1363329 - RNA, 24 nt, Human
uaacugcaaccucugccuccuggc

SEQ ID NO: 1363330 - RNA, 18 nt, Human
uaagugggcugggugcag

SEQ ID NO: 1363331 - RNA, 21 nt, Human
uaauuuuguauuuuuaguaga

SEQ ID NO: 1363332 - RNA, 19 nt, Human
uacaauugaauugccucag

SEQ ID NO: 1363333 - RNA, 24 nt, Human
uacaggcaugugccaccaugccca

SEQ ID NO: 1363334 - RNA, 22 nt, Human
uagaaaugggguuucaccaugu

SEQ ID NO: 1363335 - RNA, 23 nt, Human
uagcaugggguauuaaauuucuu

SEQ ID NO: 1363336 - RNA, 24 nt, Human
uaguagaaaugggguuucaccaug

SEQ ID NO: 1363337 - RNA, 25 nt, Human
uaguagaaaugggguuucaccaugu

SEQ ID NO: 1363338 - RNA, 20 nt, Human
uaugccuguaaucccggcac

SEQ ID NO: 1363339 - RNA, 24 nt, Human
uaugccuguaaucccggcacuuug

SEQ ID NO: 1363340 - RNA, 23 nt, Human
uaugguguuaacuauaggcuuuu

SEQ ID NO: 1363341 - RNA, 18 nt, Human
ucaacauuuuguaguuga

SEQ ID NO: 1363342 - RNA, 19 nt, Human
ucaacuaaggucaggaguu

SEQ ID NO: 1363343 - RNA, 22 nt, Human
ucacucuuguugccuaggcugg

SEQ ID NO: 1363344 - RNA, 23 nt, Human
ucacucuuguugccuaggcugga

SEQ ID NO: 1363345 - RNA, 20 nt, Human
ucagaugcuuuuucuguacc

SEQ ID NO: 1363346 - RNA, 20 nt, Human
ucagccucccgaguagcugg

SEQ ID NO: 1363347 - RNA, 21 nt, Human
ucaugcacuggcuagaacccc

SEQ ID NO: 1363348 - RNA, 25 nt, Human
uccaagaucaaggugccaguaaggc

SEQ ID NO: 1363349 - RNA, 18 nt, Human
ucccaaugcuaucccucc

SEQ ID NO: 1363350 - RNA, 21 nt, Human
ucccccaucccccgaccccac

SEQ ID NO: 1363351 - RNA, 24 nt, Human
ucccgaguagcugggauuacaggc

SEQ ID NO: 1363352 - RNA, 24 nt, Human
ucccucagccucccgaguagcugg

SEQ ID NO: 1363353 - RNA, 24 nt, Human
ucucccaaucuguggcuugacuuu

SEQ ID NO: 1363354 - RNA, 23 nt, Human
ucucccaaugcuaucccuccccc

SEQ ID NO: 1363355 - RNA, 19 nt, Human
ucuccucccucagccuccc

SEQ ID NO: 1363356 - RNA, 23 nt, Human
ucugcaacaguuuuacaucuucc

SEQ ID NO: 1363357 - RNA, 21 nt, Human
ucuucuuugguaaaaugauga

SEQ ID NO: 1363358 - RNA, 23 nt, Human
ucuugaacuccugaccucaggug

SEQ ID NO: 1363359 - RNA, 19 nt, Human
ucuuguugccuaggcugga

SEQ ID NO: 1363360 - RNA, 19 nt, Human
ugaaccacuaugcccagcc

SEQ ID NO: 1363361 - RNA, 23 nt, Human
ugaacugacuauaaaugugaagg

SEQ ID NO: 1363362 - RNA, 21 nt, Human
ugaccucaggugauccaccca

SEQ ID NO: 1363363 - RNA, 22 nt, Human
ugaccucaggugauccacccac

SEQ ID NO: 1363364 - RNA, 24 nt, Human
ugaccucaggugauccacccacuu

SEQ ID NO: 1363365 - RNA, 19 nt, Human
ugaguguauaaaucuggua

SEQ ID NO: 1363366 - RNA, 20 nt, Human
ugagugugaguccuccagcc

SEQ ID NO: 1363367 - RNA, 23 nt, Human
ugagugugaguccuccagcuucg

SEQ ID NO: 1363368 - RNA, 20 nt, Human
ugccuaggcuggagugcaau

SEQ ID NO: 1363369 - RNA, 24 nt, Human
ugccuaggcuggagugcaauggug

SEQ ID NO: 1363370 - RNA, 23 nt, Human
ugccuguaaucccggcacuuugg

SEQ ID NO: 1363371 - RNA, 23 nt, Human
ugccuguaaucccggcacuuugg

SEQ ID NO: 1363372 - RNA, 19 nt, Human
uggagugcaauggugugau

SEQ ID NO: 1363373 - RNA, 22 nt, Human
uggagugcaauggugugaucug

SEQ ID NO: 1363374 - RNA, 23 nt, Human
uggagugcaauggugugaucugg

SEQ ID NO: 1363375 - RNA, 22 nt, Human
uggaucucuuucacaggaauuu

SEQ ID NO: 1363376 - RNA, 23 nt, Human
uggaucucuuucacaggaauuuu

SEQ ID NO: 1363377 - RNA, 20 nt, Human
uggcuuaugccuguaauccc

SEQ ID NO: 1363378 - RNA, 24 nt, Human
uggcuuaugccuguaaucccggca

SEQ ID NO: 1363379 - RNA, 20 nt, Human
uggcuucaagagauucuccu

SEQ ID NO: 1363380 - RNA, 22 nt, Human
ugggaaguccaagaucaaggug

SEQ ID NO: 1363381 - RNA, 24 nt, Human
ugggaaguccaagaucaaggugcc

SEQ ID NO: 1363382 - RNA, 20 nt, Human
ugggaggccgaggugggcag

SEQ ID NO: 1363383 - RNA, 24 nt, Human
ugggaggccgaggugggcagauca

SEQ ID NO: 1363384 - RNA, 18 nt, Human
ugggauuacaggcaugug

SEQ ID NO: 1363385 - RNA, 21 nt, Human
ugggauuacaggcaugugcca

SEQ ID NO: 1363386 - RNA, 22 nt, Human
ugggauuacaggcaugugccac

SEQ ID NO: 1363387 - RNA, 24 nt, Human
ugggauuacaggcaugugccacca

SEQ ID NO: 1363388 - RNA, 24 nt, Human
ugggcagaucaacuaaggucagga

SEQ ID NO: 1363389 - RNA, 20 nt, Human
ugggcugggugcaguggcuu

SEQ ID NO: 1363390 - RNA, 24 nt, Human
ugggguuucaccauguuggucagg

SEQ ID NO: 1363391 - RNA, 24 nt, Human
uggucaggcuggucuugaacuccu

SEQ ID NO: 1363392 - RNA, 25 nt, Human
uguauaaauucuuuuuauauguaga

SEQ ID NO: 1363393 - RNA, 20 nt, Human
ugucuucuuuaauuucucuc

SEQ ID NO: 1363394 - RNA, 23 nt, Human
ugugcagguuaguuacauaugua

SEQ ID NO: 1363395 - RNA, 22 nt, Human
uguuuugauuauuauagcuuua

SEQ ID NO: 1363396 - RNA, 21 nt, Human
uguuuugugcugcuauaacag

SEQ ID NO: 1363397 - RNA, 23 nt, Human
uuaaauuccugggauaaucccau

SEQ ID NO: 1363398 - RNA, 18 nt, Human
uuaguagaaaugggguuu

SEQ ID NO: 1363399 - RNA, 22 nt, Human
uuaguagaaaugggguuucacc

SEQ ID NO: 1363400 - RNA, 24 nt, Human
uuaguagaaaugggguuucaccau

SEQ ID NO: 1363401 - RNA, 19 nt, Human
uucaaccucccaaaaugcu

SEQ ID NO: 1363402 - RNA, 24 nt, Human
uucacucuuguugccuaggcugga

SEQ ID NO: 1363403 - RNA, 22 nt, Human
uugaaccacuaugcccagccca

SEQ ID NO: 1363404 - RNA, 19 nt, Human
uugcccauuuaaaaauggg

SEQ ID NO: 1363405 - RNA, 18 nt, Human
uugccuaggcuggagugc

SEQ ID NO: 1363406 - RNA, 25 nt, Human
uugggaggccgaggugggcagauca

SEQ ID NO: 1363407 - RNA, 25 nt, Human
uugguaaaaugaugauucaaauuuu

SEQ ID NO: 1363408 - RNA, 23 nt, Human
uuguauuuuuaguagaaaugggg

SEQ ID NO: 1363409 - RNA, 24 nt, Human
uuucaccauguuggucaggcuggu

SEQ ID NO: 1363410 - RNA, 24 nt, Human
uuucacucuuguugccuaggcugg

SEQ ID NO: 1363411 - RNA, 22 nt, Human
uuucucauugcuuuuuccugac

SEQ ID NO: 1363412 - RNA, 22 nt, Human
uuugcaaauauuuucucccaau

SEQ ID NO: 1363413 - RNA, 25 nt, Human
uuuggucagaugcuuuuucuguacc

SEQ ID NO: 1363414 - RNA, 18 nt, Human
uuuuguauuuuuaguaga

SEQ ID NO: 1363415 - RNA, 24 nt, Human
uuuuuaguagaaaugggguuucac

SEQ ID NO: 1363416 - RNA, 21 nt, Human
uuuuuuauucauuuggaauua

SEQ ID NO: 1363417 - RNA, 20 nt, Human
aaacaacaacaaaaacaaga

SEQ ID NO: 1363418 - RNA, 26 nt, Human
aacaaccuuguagaacacacaagagc

SEQ ID NO: 1363419 - RNA, 19 nt, Human
aaccaaacagguucuaaaa

SEQ ID NO: 1363420 - RNA, 23 nt, Human
aaggaaaacaacaacaaaaacaa

SEQ ID NO: 1363421 - RNA, 25 nt, Human
aaguagaaaauaaaagaaggaggga

SEQ ID NO: 1363422 - RNA, 18 nt, Human
agaaaagaaagcacugag

SEQ ID NO: 1363423 - RNA, 18 nt, Human
agaaggagggaguaagag

SEQ ID NO: 1363424 - RNA, 27 nt, Human
agaaggagggaguaagagcggacagaa

SEQ ID NO: 1363425 - RNA, 20 nt, Human
agaggccccuggggagggug

SEQ ID NO: 1363426 - RNA, 24 nt, Human
agcaagcaaugaugaacuguguaa

SEQ ID NO: 1363427 - RNA, 24 nt, Human
aguaaguagaaaauaaaagaagga

SEQ ID NO: 1363428 - RNA, 22 nt, Human
auuuauucuuaaccaaacaggu

SEQ ID NO: 1363429 - RNA, 19 nt, Human
caacaacaaaaacaagaua

SEQ ID NO: 1363430 - RNA, 23 nt, Human
caagagcccccucagagaacugg

SEQ ID NO: 1363431 - RNA, 19 nt, Human
gaaaauaaaagaaggaggg

SEQ ID NO: 1363432 - RNA, 22 nt, Human
gaacacacaagagcccccucag

SEQ ID NO: 1363433 - RNA, 23 nt, Human
gagggaguaagagcggacagaag

SEQ ID NO: 1363434 - RNA, 19 nt, Human
gagggugugucuggcagcu

SEQ ID NO: 1363435 - RNA, 27 nt, Human
guagaacacacaagagcccccucagag

SEQ ID NO: 1363436 - RNA, 18 nt, Human
uaaaagaaggagggagua

SEQ ID NO: 1363437 - RNA, 18 nt, Human
uaaccaaacagguucuaa

SEQ ID NO: 1363438 - RNA, 22 nt, Human
uaauauacaccaugaacaaccu

SEQ ID NO: 1363439 - RNA, 20 nt, Human
uagaacacacaagagccccc

SEQ ID NO: 1363440 - RNA, 21 nt, Human
ucacucugcaccugcaccgcg

SEQ ID NO: 1363441 - RNA, 24 nt, Human
ucacucugcaccugcaccgcggaa

SEQ ID NO: 1363442 - RNA, 23 nt, Human
ucagugcauauuguuaaaaggaa

SEQ ID NO: 1363443 - RNA, 26 nt, Human
uccccggaugaauagagaggccccug

SEQ ID NO: 1363444 - RNA, 19 nt, Human
ugaacaaccuuguagaaca

SEQ ID NO: 1363445 - RNA, 24 nt, Human
ugaacaaccuuguagaacacacaa

SEQ ID NO: 1363446 - RNA, 20 nt, Human
ugaggacacaaacagccagu

SEQ ID NO: 1363447 - RNA, 19 nt, Human
uggggagggugugucuggc

SEQ ID NO: 1363448 - RNA, 22 nt, Human
aaagaggaggccuggggacagc

SEQ ID NO: 1363449 - RNA, 20 nt, Human
aagaaggaaaaaugggacau

SEQ ID NO: 1363450 - RNA, 23 nt, Human
aagcagaaccacagauaauaaag

SEQ ID NO: 1363451 - RNA, 18 nt, Human
agaaccacagauaauaaa

SEQ ID NO: 1363452 - RNA, 19 nt, Human
agccccgcccucccugcac

SEQ ID NO: 1363453 - RNA, 22 nt, Human
aggccuggggacagcugaggug

SEQ ID NO: 1363454 - RNA, 19 nt, Human
auaauaaagaaagaggagg

SEQ ID NO: 1363455 - RNA, 19 nt, Human
ccccgcccucccugcaccu

SEQ ID NO: 1363456 - RNA, 23 nt, Human
cccucccugcaccugcuccugac

SEQ ID NO: 1363457 - RNA, 18 nt, Human
ccugcaccugcuccugac

SEQ ID NO: 1363458 - RNA, 18 nt, Human
ccuuccuccuuccuuucc

SEQ ID NO: 1363459 - RNA, 25 nt, Human
cgcccucccugcaccugcuccugac

SEQ ID NO: 1363460 - RNA, 22 nt, Human
gaggugcuggcgaggagggaga

SEQ ID NO: 1363461 - RNA, 24 nt, Human
gcccucccugcaccugcuccugac

SEQ ID NO: 1363462 - RNA, 27 nt, Human
ggaaaaaugggacauucaggaacuugu

SEQ ID NO: 1363463 - RNA, 23 nt, Human
ggaaaauuugccuuccuccuucc

SEQ ID NO: 1363464 - RNA, 22 nt, Human
uaggaaaguuccuaguaauuag

SEQ ID NO: 1363465 - RNA, 19 nt, Human
ucuugcacaggagguccag

SEQ ID NO: 1363466 - RNA, 22 nt, Human
ugagcugaugaggaagccccgc

SEQ ID NO: 1363467 - RNA, 22 nt, Human
ugaugaggaagccccgcccucc

SEQ ID NO: 1363468 - RNA, 21 nt, Human
ugggacauucaggaacuugua

SEQ ID NO: 1363469 - RNA, 20 nt, Human
uggggacagcugaggugcug

SEQ ID NO: 1363470 - RNA, 24 nt, Human
uuccuccuuccuuuccuaccacaa

SEQ ID NO: 1363471 - RNA, 23 nt, Human
uuugccuuccuccuuccuuuccu

SEQ ID NO: 1363472 - RNA, 19 nt, Human
cccugagaucccagcuggg

SEQ ID NO: 1363473 - RNA, 24 nt, Human
aaccugggcucucuucuuaggagc

SEQ ID NO: 1363474 - RNA, 20 nt, Human
acaaaccauccugugaagcc

SEQ ID NO: 1363475 - RNA, 20 nt, Human
acugcaccagcugcagggag

SEQ ID NO: 1363476 - RNA, 22 nt, Human
acugccucagcucagcacagcu

SEQ ID NO: 1363477 - RNA, 24 nt, Human
acugccucagcucagcacagcugc

SEQ ID NO: 1363478 - RNA, 21 nt, Human
agauggugaagguguaaccag

SEQ ID NO: 1363479 - RNA, 22 nt, Human
agcacagcugccuccuuccuca

SEQ ID NO: 1363480 - RNA, 20 nt, Human
auggugacucgacucuugag

SEQ ID NO: 1363481 - RNA, 19 nt, Human
auguggccugugacagagc

SEQ ID NO: 1363482 - RNA, 21 nt, Human
caagaagaggauccuucaggu

SEQ ID NO: 1363483 - RNA, 18 nt, Human
caagugggcuggccuucu

SEQ ID NO: 1363484 - RNA, 21 nt, Human
caccucaggcccagacugcac

SEQ ID NO: 1363485 - RNA, 24 nt, Human
cacugccucagcucagcacagcug

SEQ ID NO: 1363486 - RNA, 18 nt, Human
cagcacagcugccuccuu

SEQ ID NO: 1363487 - RNA, 23 nt, Human
cagcacagcugccuccuuccuca

SEQ ID NO: 1363488 - RNA, 24 nt, Human
cagcacagcugccuccuuccucag

SEQ ID NO: 1363489 - RNA, 22 nt, Human
caucacauccacucaaagcccu

SEQ ID NO: 1363490 - RNA, 18 nt, Human
ccauggagaagacaaacc

SEQ ID NO: 1363491 - RNA, 21 nt, Human
cccaggcuucuucaccucagg

SEQ ID NO: 1363492 - RNA, 21 nt, Human
ccccaggcuucuucaccucag

SEQ ID NO: 1363493 - RNA, 21 nt, Human
ccuccuuccucaggcuuucug

SEQ ID NO: 1363494 - RNA, 23 nt, Human
ccuccuuccucaggcuuucugga

SEQ ID NO: 1363495 - RNA, 21 nt, Human
cgacucuugagggacggguug

SEQ ID NO: 1363496 - RNA, 20 nt, Human
cgcacaguaauacacagccg

SEQ ID NO: 1363497 - RNA, 22 nt, Human
cgcacaguaauacacagccgug

SEQ ID NO: 1363498 - RNA, 21 nt, Human
cucagcucagcacagcugccu

SEQ ID NO: 1363499 - RNA, 24 nt, Human
cucgcacaguaauacacagccgug

SEQ ID NO: 1363500 - RNA, 21 nt, Human
cucggccguguccucagccuu

SEQ ID NO: 1363501 - RNA, 24 nt, Human
gagcucagcuucagggagaacugg

SEQ ID NO: 1363502 - RNA, 20 nt, Human
gagugggcaccuguugcugc

SEQ ID NO: 1363503 - RNA, 26 nt, Human
gcucagcuucagggagaagggaacgc

SEQ ID NO: 1363504 - RNA, 22 nt, Human
gcugccaucaagaagaggaucc

SEQ ID NO: 1363505 - RNA, 23 nt, Human
ggucacagagcucagcuucaggg

SEQ ID NO: 1363506 - RNA, 24 nt, Human
uaauacacagccguguccgcggcg

SEQ ID NO: 1363507 - RNA, 22 nt, Human
uaggagaccuucacugaggccc

SEQ ID NO: 1363508 - RNA, 22 nt, Human
uaggggcuucuccagaggaggg

SEQ ID NO: 1363509 - RNA, 24 nt, Human
ucaaagcccuguccaggggucuau

SEQ ID NO: 1363510 - RNA, 24 nt, Human
ugacagacguguccauggagaaga

SEQ ID NO: 1363511 - RNA, 23 nt, Human
ugauauggugacucgacucuuga

SEQ ID NO: 1363512 - RNA, 19 nt, Human
ugccucagcucagcacagc

SEQ ID NO: 1363513 - RNA, 19 nt, Human
uucagguccaguccauggu

SEQ ID NO: 1363514 - RNA, 18 nt, Human
uuccucaggcuuucugaa

SEQ ID NO: 1363515 - RNA, 24 nt, Human
uucgcacaguaauacucggccgug

SEQ ID NO: 1363516 - RNA, 21 nt, Human
aagcacucucuaagacugcuu

SEQ ID NO: 1363517 - RNA, 22 nt, Human
acugccucagcugccuugggcu

SEQ ID NO: 1363518 - RNA, 20 nt, Human
agaacaaucacagagacaaa

SEQ ID NO: 1363519 - RNA, 21 nt, Human
agccuuggcgacaggaaaaga

SEQ ID NO: 1363520 - RNA, 20 nt, Human
aggagaaaaagaauacacag

SEQ ID NO: 1363521 - RNA, 21 nt, Human
aggcaagcuggguuuuaggcu

SEQ ID NO: 1363522 - RNA, 19 nt, Human
aguagccaauagccuaaaa

SEQ ID NO: 1363523 - RNA, 26 nt, Human
agucugguggcugaggacuuacacuu

SEQ ID NO: 1363524 - RNA, 23 nt, Human
cacuuucuucuguccucucauga

SEQ ID NO: 1363525 - RNA, 20 nt, Human
caggaaaagaaaaaaaaaaa

SEQ ID NO: 1363526 - RNA, 19 nt, Human
ccccuucucuguucugacu

SEQ ID NO: 1363527 - RNA, 20 nt, Human
cccguggugcaguauaacag

SEQ ID NO: 1363528 - RNA, 22 nt, Human
ccuccaccagggccagccccaa

SEQ ID NO: 1363529 - RNA, 19 nt, Human
cggucagacccacccucuc

SEQ ID NO: 1363530 - RNA, 21 nt, Human
cuagaagcaggugaguagcaa

SEQ ID NO: 1363531 - RNA, 25 nt, Human
cuagcagcaagaagucacuuucuuc

SEQ ID NO: 1363532 - RNA, 24 nt, Human
cuccuccaccagggccagccccaa

SEQ ID NO: 1363533 - RNA, 22 nt, Human
cucucacccuugacacuccaaa

SEQ ID NO: 1363534 - RNA, 20 nt, Human
cucuguucugacuucucuca

SEQ ID NO: 1363535 - RNA, 18 nt, Human
cugggcuccuccaccagg

SEQ ID NO: 1363536 - RNA, 23 nt, Human
gaacuuaauucacuccagaacaa

SEQ ID NO: 1363537 - RNA, 18 nt, Human
gccucagcugccuugggc

SEQ ID NO: 1363538 - RNA, 20 nt, Human
gccuugggcuucaugcccug

SEQ ID NO: 1363539 - RNA, 24 nt, Human
gcgacaggaaaagaaaaaaaaaaa

SEQ ID NO: 1363540 - RNA, 19 nt, Human
ggccaaggcuuuguuagaa

SEQ ID NO: 1363541 - RNA, 22 nt, Human
gguggcugaggacuuacacuuu

SEQ ID NO: 1363542 - RNA, 22 nt, Human
uaacagucugguggcugaggac

SEQ ID NO: 1363543 - RNA, 20 nt, Human
uaacuugaagaccuggccuc

SEQ ID NO: 1363544 - RNA, 18 nt, Human
uaaguugacuuuuaauga

SEQ ID NO: 1363545 - RNA, 19 nt, Human
uagaagcaggugaguagca

SEQ ID NO: 1363546 - RNA, 22 nt, Human
uagagguucugcuguuauuucc

SEQ ID NO: 1363547 - RNA, 22 nt, Human
uagcagcaagaagucacuuucu

SEQ ID NO: 1363548 - RNA, 21 nt, Human
ucaaaacuagcagcaagaagu

SEQ ID NO: 1363549 - RNA, 20 nt, Human
ucacagagacaaagacaggc

SEQ ID NO: 1363550 - RNA, 19 nt, Human
uccuucaaaacuagcagca

SEQ ID NO: 1363551 - RNA, 19 nt, Human
ucucuguucugacuucucu

SEQ ID NO: 1363552 - RNA, 22 nt, Human
ucugcgauacaauguccuucaa

SEQ ID NO: 1363553 - RNA, 21 nt, Human
ucuuuaguucgagguagaggu

SEQ ID NO: 1363554 - RNA, 19 nt, Human
ugacacuccaaauugugcu

SEQ ID NO: 1363555 - RNA, 21 nt, Human
ugagcuagaagcaggugagua

SEQ ID NO: 1363556 - RNA, 23 nt, Human
ugcccugggcuccuccaccaggg

SEQ ID NO: 1363557 - RNA, 23 nt, Human
uggccucugcgauacaauguccu

SEQ ID NO: 1363558 - RNA, 22 nt, Human
uggcgacaggaaaagaaaaaaa

SEQ ID NO: 1363559 - RNA, 25 nt, Human
uggguuuuuuuuccccuucucuguu

SEQ ID NO: 1363560 - RNA, 19 nt, Human
uggugcaguauaacagucu

SEQ ID NO: 1363561 - RNA, 18 nt, Human
ugugcugggaguggccaa

SEQ ID NO: 1363562 - RNA, 20 nt, Human
uucucuucaugccccucuca

SEQ ID NO: 1363563 - RNA, 21 nt, Human
uugggcuucaugcccugggcu

SEQ ID NO: 1363564 - RNA, 21 nt, Human
uuuuccccuucucuguucuga

SEQ ID NO: 1363565 - RNA, 22 nt, Human
aaaaaaaaaaaaaaaagcaaag

SEQ ID NO: 1363566 - RNA, 26 nt, Human
aaaaaaaaaaaaaaaagcaaagcaaa

SEQ ID NO: 1363567 - RNA, 22 nt, Human
aaaaaaaaaaagcaaagcaaag

SEQ ID NO: 1363568 - RNA, 22 nt, Human
aaaaaagcaaagcaaagcaaag

SEQ ID NO: 1363569 - RNA, 21 nt, Human
aaaaguucuucucuagaagaa

SEQ ID NO: 1363570 - RNA, 25 nt, Human
aaacaaaaaaaauauuauuuucuga

SEQ ID NO: 1363571 - RNA, 18 nt, Human
aaacaaacaaagaaaacc

SEQ ID NO: 1363572 - RNA, 20 nt, Human
aaacaaacaaagaaaacccu

SEQ ID NO: 1363573 - RNA, 24 nt, Human
aaagugcugggauuacagguguga

SEQ ID NO: 1363574 - RNA, 19 nt, Human
aacaaagaaaacccuagcc

SEQ ID NO: 1363575 - RNA, 21 nt, Human
aagcaaagcaaagcaaaguaa

SEQ ID NO: 1363576 - RNA, 20 nt, Human
aagcaaggugugcuauugug

SEQ ID NO: 1363577 - RNA, 24 nt, Human
aagcucuaagucccuggaucagcc

SEQ ID NO: 1363578 - RNA, 22 nt, Human
aagggaagaaagcaaacugaag

SEQ ID NO: 1363579 - RNA, 20 nt, Human
aaguagcugggacuacaggc

SEQ ID NO: 1363580 - RNA, 20 nt, Human
aaguagcugggacuacaggc

SEQ ID NO: 1363581 - RNA, 24 nt, Human
aaguagcugggacuacaggcgugc

SEQ ID NO: 1363582 - RNA, 18 nt, Human
aagugcugggauuacagg

SEQ ID NO: 1363583 - RNA, 19 nt, Human
aagugcugggauuacaggu

SEQ ID NO: 1363584 - RNA, 20 nt, Human
aaugcaguggugcaaucuug

SEQ ID NO: 1363585 - RNA, 24 nt, Human
aaugcaguggugcaaucuuggcuc

SEQ ID NO: 1363586 - RNA, 22 nt, Human
accauguuggccaggauggucu

SEQ ID NO: 1363587 - RNA, 21 nt, Human
agaaaacccuagccugguucc

SEQ ID NO: 1363588 - RNA, 19 nt, Human
agaagagauccuuggggga

SEQ ID NO: 1363589 - RNA, 19 nt, Human
aggcccaaacaaacaaaga

SEQ ID NO: 1363590 - RNA, 19 nt, Human
aggugugagacaccgcgcc

SEQ ID NO: 1363591 - RNA, 24 nt, Human
aguaaacaccuccaucuuauguaa

SEQ ID NO: 1363592 - RNA, 21 nt, Human
aguaaguggucuccagugaaa

SEQ ID NO: 1363593 - RNA, 24 nt, Human
auacaaaaaaaaaaaaaaaaaaaa

SEQ ID NO: 1363594 - RNA, 22 nt, Human
aucaguuacucuccacugugaa

SEQ ID NO: 1363595 - RNA, 24 nt, Human
augugguuucaccauguuggccag

SEQ ID NO: 1363596 - RNA, 21 nt, Human
auucuccugccucagccuccc

SEQ ID NO: 1363597 - RNA, 23 nt, Human
caaacaaacaaagaaaacccuag

SEQ ID NO: 1363598 - RNA, 24 nt, Human
caaacaaacaaagaaaacccuagc

SEQ ID NO: 1363599 - RNA, 25 nt, Human
caaacugaaggcuuuaucacauuca

SEQ ID NO: 1363600 - RNA, 18 nt, Human
caaaguaaguggucucca

SEQ ID NO: 1363601 - RNA, 24 nt, Human
caaagugcugggauuacaggugug

SEQ ID NO: 1363602 - RNA, 22 nt, Human
caagcaauucuccugccucagc

SEQ ID NO: 1363603 - RNA, 27 nt, Human
caagcaauucuccugccucagccuccc

SEQ ID NO: 1363604 - RNA, 22 nt, Human
caccaccaugcccagcuaauuu

SEQ ID NO: 1363605 - RNA, 18 nt, Human
caccauguuggccaggau

SEQ ID NO: 1363606 - RNA, 22 nt, Human
caccauguuggccaggaugguc

SEQ ID NO: 1363607 - RNA, 23 nt, Human
caccauguuggccaggauggucu

SEQ ID NO: 1363608 - RNA, 24 nt, Human
caccauguuggccaggauggucuu

SEQ ID NO: 1363609 - RNA, 21 nt, Human
caccucaggaaaagccaugaa

SEQ ID NO: 1363610 - RNA, 21 nt, Human
cacucauaggguuugucucca

SEQ ID NO: 1363611 - RNA, 24 nt, Human
cacuucagccucccaaagugcugg

SEQ ID NO: 1363612 - RNA, 19 nt, Human
cagccaccucaggaaaagc

SEQ ID NO: 1363613 - RNA, 19 nt, Human
ccaaacaaacaaagaaaac

SEQ ID NO: 1363614 - RNA, 20 nt, Human
ccaaagugcugggauuacag

SEQ ID NO: 1363615 - RNA, 21 nt, Human
ccaaagugcugggauuacagg

SEQ ID NO: 1363616 - RNA, 21 nt, Human
ccaaagugcugggauuacagg

SEQ ID NO: 1363617 - RNA, 24 nt, Human
ccaaagugcugggauuacaggugu

SEQ ID NO: 1363618 - RNA, 18 nt, Human
ccacugugaacuguacaa

SEQ ID NO: 1363619 - RNA, 23 nt, Human
ccagcuaauuuuugcauuuugua

SEQ ID NO: 1363620 - RNA, 23 nt, Human
ccauaaaacccaaaaccggauuu

SEQ ID NO: 1363621 - RNA, 23 nt, Human
cccaaguagcugggacuacaggc

SEQ ID NO: 1363622 - RNA, 24 nt, Human
cccaaguagcugggacuacaggcg

SEQ ID NO: 1363623 - RNA, 23 nt, Human
cccacacuuacuacauucauaga

SEQ ID NO: 1363624 - RNA, 22 nt, Human
ccccuggcuaaaggccuuccca

SEQ ID NO: 1363625 - RNA, 26 nt, Human
ccgccuccuggguucaagcaauucuu

SEQ ID NO: 1363626 - RNA, 19 nt, Human
ccuccgccuccuggguuca

SEQ ID NO: 1363627 - RNA, 24 nt, Human
ccuccuggguucaagcaauucucc

SEQ ID NO: 1363628 - RNA, 23 nt, Human
ccugccucagccucccaaguagc

SEQ ID NO: 1363629 - RNA, 18 nt, Human
ccuggcuaaaggccuucc

SEQ ID NO: 1363630 - RNA, 23 nt, Human
ccuggguucaagcaauucuccug

SEQ ID NO: 1363631 - RNA, 24 nt, Human
cgugaucugcccacuucagccucc

SEQ ID NO: 1363632 - RNA, 23 nt, Human
cgugcaccaccaugcccagcuaa

SEQ ID NO: 1363633 - RNA, 24 nt, Human
cucagccucccaaguagcugggac

SEQ ID NO: 1363634 - RNA, 21 nt, Human
cuccuggguucaagcaauucu

SEQ ID NO: 1363635 - RNA, 22 nt, Human
cucuugaccucgugaucugccc

SEQ ID NO: 1363636 - RNA, 23 nt, Human
cugccucagccucccaaguagcu

SEQ ID NO: 1363637 - RNA, 20 nt, Human
cugcuauauacuucagcagc

SEQ ID NO: 1363638 - RNA, 19 nt, Human
cugugcgcuagaguucccc

SEQ ID NO: 1363639 - RNA, 20 nt, Human
cuucagcagccugccuuuag

SEQ ID NO: 1363640 - RNA, 19 nt, Human
gacauuuuccugauuuuuc

SEQ ID NO: 1363641 - RNA, 23 nt, Human
gaccccuggcuaaaggccuuccc

SEQ ID NO: 1363642 - RNA, 24 nt, Human
gaccucgugaucugcccacuucag

SEQ ID NO: 1363643 - RNA, 24 nt, Human
gacuacaggcgugcaccaccaugc

SEQ ID NO: 1363644 - RNA, 18 nt, Human
gauuacaggugugagaca

SEQ ID NO: 1363645 - RNA, 22 nt, Human
gauuacaggugugagacaccgc

SEQ ID NO: 1363646 - RNA, 18 nt, Human
ggaagaaagcaaacugaa

SEQ ID NO: 1363647 - RNA, 24 nt, Human
ggacuacaggcgugcaccaccaug

SEQ ID NO: 1363648 - RNA, 22 nt, Human
ggauugcugcuauauacuucag

SEQ ID NO: 1363649 - RNA, 21 nt, Human
gguuucaccauguuggccagg

SEQ ID NO: 1363650 - RNA, 21 nt, Human
guagaaaugugguuucaccau

SEQ ID NO: 1363651 - RNA, 20 nt, Human
gugaaauaccuaacuguacc

SEQ ID NO: 1363652 - RNA, 24 nt, Human
gugaucugcccacuucagccuccc

SEQ ID NO: 1363653 - RNA, 19 nt, Human
guuucaccauguuggccag

SEQ ID NO: 1363654 - RNA, 22 nt, Human
uaacagaauaaaaacguuuuga

SEQ ID NO: 1363655 - RNA, 22 nt, Human
uaacuguaccuuagggucuggu

SEQ ID NO: 1363656 - RNA, 27 nt, Human
uaaguaaacaccuccaucuuauguaaa

SEQ ID NO: 1363657 - RNA, 22 nt, Human
uaagucccuggaucagccugca

SEQ ID NO: 1363658 - RNA, 20 nt, Human
uaaguuuugacuuaacuuca

SEQ ID NO: 1363659 - RNA, 25 nt, Human
uaaucuggagaaauguuuuagccau

SEQ ID NO: 1363660 - RNA, 20 nt, Human
uaauuuuugcauuuuguaga

SEQ ID NO: 1363661 - RNA, 19 nt, Human
uaccuccgccuccuggguu

SEQ ID NO: 1363662 - RNA, 19 nt, Human
uagaguuccccacacuuac

SEQ ID NO: 1363663 - RNA, 19 nt, Human
uagccauaaaacccaaaac

SEQ ID NO: 1363664 - RNA, 19 nt, Human
ucaagcaauucuccugccu

SEQ ID NO: 1363665 - RNA, 24 nt, Human
ucaccauguuggccaggauggucu

SEQ ID NO: 1363666 - RNA, 18 nt, Human
ucacugcuaccuccgccu

SEQ ID NO: 1363667 - RNA, 23 nt, Human
ucacugcuaccuccgccuccugg

SEQ ID NO: 1363668 - RNA, 24 nt, Human
ucacugcuaccuccgccuccuggg

SEQ ID NO: 1363669 - RNA, 27 nt, Human
ucacugcuaccuccgccuccuggguuc

SEQ ID NO: 1363670 - RNA, 20 nt, Human
ucagccucccaaguagcugg

SEQ ID NO: 1363671 - RNA, 21 nt, Human
ucauacaaaaaaaaaaaaaaa

SEQ ID NO: 1363672 - RNA, 24 nt, Human
ucauacaaaaaaaaaaaaaaaaaa

SEQ ID NO: 1363673 - RNA, 23 nt, Human
uccagccaccucaggaaaagcca

SEQ ID NO: 1363674 - RNA, 23 nt, Human
ucccaaagugcugggauuacagg

SEQ ID NO: 1363675 - RNA, 24 nt, Human
ucccaaguagcugggacuacaggc

SEQ ID NO: 1363676 - RNA, 25 nt, Human
uccccacacuuacuacauucauaga

SEQ ID NO: 1363677 - RNA, 24 nt, Human
uccgccuccuggguucaagcaauu

SEQ ID NO: 1363678 - RNA, 21 nt, Human
uccuggguucaagcaauucuc

SEQ ID NO: 1363679 - RNA, 24 nt, Human
uccuggguucaagcaauucuccug

SEQ ID NO: 1363680 - RNA, 21 nt, Human
uccuugggggaaacugaauuu

SEQ ID NO: 1363681 - RNA, 21 nt, Human
ucuacagggcucaagaagggg

SEQ ID NO: 1363682 - RNA, 21 nt, Human
ucuccaaaaggaaaaccauaa

SEQ ID NO: 1363683 - RNA, 26 nt, Human
ucuccugccucagccucccaaguagc

SEQ ID NO: 1363684 - RNA, 24 nt, Human
ucugacuuuuuagcaaggucucaa

SEQ ID NO: 1363685 - RNA, 21 nt, Human
ucugcccacuucagccuccca

SEQ ID NO: 1363686 - RNA, 21 nt, Human
ucugugauggguaagugaagc

SEQ ID NO: 1363687 - RNA, 24 nt, Human
ucuugcaguguaacauagcuaucu

SEQ ID NO: 1363688 - RNA, 22 nt, Human
ugagacaccgcgcccagccucc

SEQ ID NO: 1363689 - RNA, 24 nt, Human
ugaucugcccacuucagccuccca

SEQ ID NO: 1363690 - RNA, 19 nt, Human
ugcaggcaagagagcuggg

SEQ ID NO: 1363691 - RNA, 22 nt, Human
ugcaguggugcaaucuuggcuc

SEQ ID NO: 1363692 - RNA, 21 nt, Human
ugcccaaagguuuucccacac

SEQ ID NO: 1363693 - RNA, 24 nt, Human
ugccucagccucccaaguagcugg

SEQ ID NO: 1363694 - RNA, 23 nt, Human
ugcgcuagaguuccccacacuua

SEQ ID NO: 1363695 - RNA, 24 nt, Human
ugcugggauuacaggugugagaca

SEQ ID NO: 1363696 - RNA, 24 nt, Human
uggaaugcaguggugcaaucuugg

SEQ ID NO: 1363697 - RNA, 23 nt, Human
uggagucuugcuuuguggccaug

SEQ ID NO: 1363698 - RNA, 22 nt, Human
uggauaucugcccaaagguuuu

SEQ ID NO: 1363699 - RNA, 25 nt, Human
uggcagcgucuuaacucuuggaaac

SEQ ID NO: 1363700 - RNA, 24 nt, Human
uggccaggauggucuugaucucuu

SEQ ID NO: 1363701 - RNA, 21 nt, Human
ugggacuacaggcgugcacca

SEQ ID NO: 1363702 - RNA, 24 nt, Human
ugggacuacaggcgugcaccacca

SEQ ID NO: 1363703 - RNA, 25 nt, Human
ugggacuacaggcgugcaccaccau

SEQ ID NO: 1363704 - RNA, 18 nt, Human
ugggauuacaggugugag

SEQ ID NO: 1363705 - RNA, 18 nt, Human
ugggauuacaggugugag

SEQ ID NO: 1363706 - RNA, 19 nt, Human
ugggauuacaggugugaga

SEQ ID NO: 1363707 - RNA, 21 nt, Human
ugggauuacaggugugagaca

SEQ ID NO: 1363708 - RNA, 22 nt, Human
ugggauuacaggugugagacac

SEQ ID NO: 1363709 - RNA, 23 nt, Human
ugggauuacaggugugagacacc

SEQ ID NO: 1363710 - RNA, 24 nt, Human
ugggauuacaggugugagacaccg

SEQ ID NO: 1363711 - RNA, 23 nt, Human
uggguaagugaagccauaagcca

SEQ ID NO: 1363712 - RNA, 21 nt, Human
uggguucaagcaauucuccug

SEQ ID NO: 1363713 - RNA, 23 nt, Human
uggguucaagcaauucuccugcc

SEQ ID NO: 1363714 - RNA, 24 nt, Human
uggguucaagcaauucuccugccu

SEQ ID NO: 1363715 - RNA, 23 nt, Human
uggugccaugaaaugcaucuaaa

SEQ ID NO: 1363716 - RNA, 19 nt, Human
ugguuucaccauguuggcc

SEQ ID NO: 1363717 - RNA, 18 nt, Human
ugucauauauauauauau

SEQ ID NO: 1363718 - RNA, 20 nt, Human
ugugaagaauuuauagacua

SEQ ID NO: 1363719 - RNA, 21 nt, Human
ugugauggguaagugaagcca

SEQ ID NO: 1363720 - RNA, 24 nt, Human
ugugguuucaccauguuggccagg

SEQ ID NO: 1363721 - RNA, 19 nt, Human
uguugaaugaaagaugacu

SEQ ID NO: 1363722 - RNA, 21 nt, Human
uguuuuagccauaaaacccaa

SEQ ID NO: 1363723 - RNA, 19 nt, Human
uuaaucuacacaaagacuc

SEQ ID NO: 1363724 - RNA, 20 nt, Human
uuacaggugugagacaccgc

SEQ ID NO: 1363725 - RNA, 22 nt, Human
uuagccauaaaacccaaaaccg

SEQ ID NO: 1363726 - RNA, 21 nt, Human
uucaagcaauucuccugccuc

SEQ ID NO: 1363727 - RNA, 24 nt, Human
uucaagcaauucuccugccucagc

SEQ ID NO: 1363728 - RNA, 20 nt, Human
uucccacacucauuacacuc

SEQ ID NO: 1363729 - RNA, 19 nt, Human
uugacauuuaaguuuugac

SEQ ID NO: 1363730 - RNA, 24 nt, Human
uuguagaaaugugguuucaccaug

SEQ ID NO: 1363731 - RNA, 19 nt, Human
uuucaccauguuggccagg

SEQ ID NO: 1363732 - RNA, 20 nt, Human
uuucaccauguuggccagga

SEQ ID NO: 1363733 - RNA, 19 nt, Human
uuucugauuugguugugua

SEQ ID NO: 1363734 - RNA, 19 nt, Human
uuugguuguguaaucgugg

SEQ ID NO: 1363735 - RNA, 19 nt, Human
uuuguagaaaugugguuuc

SEQ ID NO: 1363736 - RNA, 24 nt, Human
uuuguagaaaugugguuucaccau

SEQ ID NO: 1363737 - RNA, 22 nt, Human
uuuugacuuaacuucaggagau

SEQ ID NO: 1363738 - RNA, 21 nt, Human
uuuugucauauauauauauau

SEQ ID NO: 1363739 - RNA, 20 nt, Human
aaaacuugguucaaacagau

SEQ ID NO: 1363740 - RNA, 21 nt, Human
aaaagaaaacuugguucaaaa

SEQ ID NO: 1363741 - RNA, 21 nt, Human
aaagaaggcaauccgaaugaa

SEQ ID NO: 1363742 - RNA, 24 nt, Human
aaagauaucaccagaagcuacgua

SEQ ID NO: 1363743 - RNA, 18 nt, Human
aaagcuccuacaugccuu

SEQ ID NO: 1363744 - RNA, 21 nt, Human
aagaaagcuccuacaugccuu

SEQ ID NO: 1363745 - RNA, 20 nt, Human
aauagaccuguuguugcaaa

SEQ ID NO: 1363746 - RNA, 24 nt, Human
agaucauuucuggcaagaaagcuc

SEQ ID NO: 1363747 - RNA, 21 nt, Human
agcaagugggagaagaaaaga

SEQ ID NO: 1363748 - RNA, 22 nt, Human
aggacaaaugcugacuuuggca

SEQ ID NO: 1363749 - RNA, 23 nt, Human
aucacagguagaagaccugccag

SEQ ID NO: 1363750 - RNA, 23 nt, Human
caaaaccagucaaaauccuacca

SEQ ID NO: 1363751 - RNA, 20 nt, Human
caaacagaucacacaaggga

SEQ ID NO: 1363752 - RNA, 28 nt, Human
caaacagaucacacaagggaacccagga

SEQ ID NO: 1363753 - RNA, 23 nt, Human
cacaaggaaauugaaagaaggca

SEQ ID NO: 1363754 - RNA, 19 nt, Human
cacaagggaacccaggaca

SEQ ID NO: 1363755 - RNA, 30 nt, Human
cacacaaaaaucuugguaaaagaacuagaa

SEQ ID NO: 1363756 - RNA, 24 nt, Human
cagcgauguucugcuggcuguggu

SEQ ID NO: 1363757 - RNA, 20 nt, Human
ccccauguccucgcacacca

SEQ ID NO: 1363758 - RNA, 21 nt, Human
ccccauguccucgcacaccaa

SEQ ID NO: 1363759 - RNA, 19 nt, Human
gaacccaggacaaaugcug

SEQ ID NO: 1363760 - RNA, 21 nt, Human
gaagcccaaacugcugagcaa

SEQ ID NO: 1363761 - RNA, 21 nt, Human
gcgauguucugcuggcugugg

SEQ ID NO: 1363762 - RNA, 21 nt, Human
gcgauguucugcuggcugugg

SEQ ID NO: 1363763 - RNA, 21 nt, Human
gcugugguaaaaggugggagg

SEQ ID NO: 1363764 - RNA, 19 nt, Human
uaaagagaaaguuaagagu

SEQ ID NO: 1363765 - RNA, 21 nt, Human
uaggugguaccccaugucccc

SEQ ID NO: 1363766 - RNA, 18 nt, Human
ucacauccaucaccauuu

SEQ ID NO: 1363767 - RNA, 20 nt, Human
ugaaaagauaucaccagaag

SEQ ID NO: 1363768 - RNA, 22 nt, Human
uggaagcccaaacugcugagca

SEQ ID NO: 1363769 - RNA, 20 nt, Human
uggcaagaaagcuccuacau

SEQ ID NO: 1363770 - RNA, 24 nt, Human
ugggagaagaaaagaaaacuuggu

SEQ ID NO: 1363771 - RNA, 25 nt, Human
uucuuagccuugaagaagcaucuua

SEQ ID NO: 1363772 - RNA, 25 nt, Human
aaaacaaaaacaaaaagaagcagca

SEQ ID NO: 1363773 - RNA, 23 nt, Human
aaacaaaaacaaaaagaagcagc

SEQ ID NO: 1363774 - RNA, 19 nt, Human
aacauccuguccuccagga

SEQ ID NO: 1363775 - RNA, 21 nt, Human
aagggaaaaaagguuaacaaa

SEQ ID NO: 1363776 - RNA, 23 nt, Human
aauuucuaccccugucauuaaaa

SEQ ID NO: 1363777 - RNA, 18 nt, Human
acaaaaagaagcagcaac

SEQ ID NO: 1363778 - RNA, 24 nt, Human
acauccuguccuccaggaguucca

SEQ ID NO: 1363779 - RNA, 21 nt, Human
acuuauagagcuggaaagaga

SEQ ID NO: 1363780 - RNA, 24 nt, Human
agaaaauccccucuggggccugaa

SEQ ID NO: 1363781 - RNA, 19 nt, Human
agaaaugaaugacuagaua

SEQ ID NO: 1363782 - RNA, 21 nt, Human
agaaucacccagaaaaucccc

SEQ ID NO: 1363783 - RNA, 21 nt, Human
agaaucacccagaaaauccuu

SEQ ID NO: 1363784 - RNA, 19 nt, Human
caaaaagaagcagcaacuu

SEQ ID NO: 1363785 - RNA, 26 nt, Human
caaaacaaaaacaaaaagaagcagca

SEQ ID NO: 1363786 - RNA, 26 nt, Human
caaaucccuggccugaaugcaaaucu

SEQ ID NO: 1363787 - RNA, 23 nt, Human
caagcagauaucugccuggagga

SEQ ID NO: 1363788 - RNA, 25 nt, Human
cacucaaaacaaaaacaaaaagaag

SEQ ID NO: 1363789 - RNA, 22 nt, Human
cagaaaauccccucuggggccu

SEQ ID NO: 1363790 - RNA, 20 nt, Human
cagccuagggaaagucaucc

SEQ ID NO: 1363791 - RNA, 18 nt, Human
cagggucauguucugccc

SEQ ID NO: 1363792 - RNA, 22 nt, Human
ccacauguaucgcguucaucuc

SEQ ID NO: 1363793 - RNA, 19 nt, Human
ccacccaaacugaggcaaa

SEQ ID NO: 1363794 - RNA, 24 nt, Human
ccauucccaugagaggcuuuccua

SEQ ID NO: 1363795 - RNA, 18 nt, Human
cccccgagacccugccag

SEQ ID NO: 1363796 - RNA, 23 nt, Human
cccccgagacccugccagcugag

SEQ ID NO: 1363797 - RNA, 26 nt, Human
cccccgagacccugccagcugagguc

SEQ ID NO: 1363798 - RNA, 22 nt, Human
cccucuggggccugaacuucug

SEQ ID NO: 1363799 - RNA, 23 nt, Human
cgagacccugccagcugaggucc

SEQ ID NO: 1363800 - RNA, 24 nt, Human
cuaagauugguuucagaaguguca

SEQ ID NO: 1363801 - RNA, 21 nt, Human
cucaaaacaaaaacaaaaaga

SEQ ID NO: 1363802 - RNA, 21 nt, Human
cucagccuagggaaagucauc

SEQ ID NO: 1363803 - RNA, 18 nt, Human
cugaggcaaaccacaggc

SEQ ID NO: 1363804 - RNA, 21 nt, Human
cuggaacccccuuggcuaugc

SEQ ID NO: 1363805 - RNA, 24 nt, Human
cuggaacccccuuggcuaugccca

SEQ ID NO: 1363806 - RNA, 18 nt, Human
cuucaaaaaauucuguuc

SEQ ID NO: 1363807 - RNA, 22 nt, Human
cuuuuuuuuccucuuucuuaaa

SEQ ID NO: 1363808 - RNA, 27 nt, Human
gacaacuuuucaacagggaggucccac

SEQ ID NO: 1363809 - RNA, 22 nt, Human
gaucacucaaaacaaaaacaaa

SEQ ID NO: 1363810 - RNA, 20 nt, Human
gauuuuuccuucuuaaggga

SEQ ID NO: 1363811 - RNA, 19 nt, Human
gcauucucucuggggagaa

SEQ ID NO: 1363812 - RNA, 20 nt, Human
gcccuggaacccccuuggcu

SEQ ID NO: 1363813 - RNA, 19 nt, Human
ggcacuucaaaaaauucug

SEQ ID NO: 1363814 - RNA, 21 nt, Human
ggcaggacaacuuuucaacag

SEQ ID NO: 1363815 - RNA, 19 nt, Human
guuuaaagcccccgagacc

SEQ ID NO: 1363816 - RNA, 18 nt, Human
uaaaagucauucuuuccc

SEQ ID NO: 1363817 - RNA, 25 nt, Human
uaaagcccccgagacccugccagcu

SEQ ID NO: 1363818 - RNA, 20 nt, Human
uaacaaggcacuucaaaaaa

SEQ ID NO: 1363819 - RNA, 22 nt, Human
uaagggaaaaaagguuaacaaa

SEQ ID NO: 1363820 - RNA, 25 nt, Human
uaccccuaaucuuggaaaugccauu

SEQ ID NO: 1363821 - RNA, 19 nt, Human
uaucgcguucaucucucua

SEQ ID NO: 1363822 - RNA, 19 nt, Human
uaugcaagaaauaugaaca

SEQ ID NO: 1363823 - RNA, 25 nt, Human
ucacucaaaacaaaaacaaaaagaa

SEQ ID NO: 1363824 - RNA, 22 nt, Human
ucagccucuugcucccaauuuc

SEQ ID NO: 1363825 - RNA, 21 nt, Human
ucucuaguggcauucucucug

SEQ ID NO: 1363826 - RNA, 19 nt, Human
ugaaaaacauccuguccuc

SEQ ID NO: 1363827 - RNA, 20 nt, Human
ugaaaaacauccuguccucc

SEQ ID NO: 1363828 - RNA, 24 nt, Human
ugaaaaacauccuguccuccagga

SEQ ID NO: 1363829 - RNA, 24 nt, Human
ugaaacaaagaaucacccagaaaa

SEQ ID NO: 1363830 - RNA, 26 nt, Human
ugaaacaaagaaucacccagaaaauc

SEQ ID NO: 1363831 - RNA, 24 nt, Human
ugacuagauaaaugacuggaaaua

SEQ ID NO: 1363832 - RNA, 20 nt, Human
ugagguccagccauaagcag

SEQ ID NO: 1363833 - RNA, 19 nt, Human
uggaaagagacauaagccu

SEQ ID NO: 1363834 - RNA, 25 nt, Human
uggaaagagacauaagccuaugaua

SEQ ID NO: 1363835 - RNA, 23 nt, Human
uggaaaugccauucccaugagag

SEQ ID NO: 1363836 - RNA, 23 nt, Human
uggaucacucaaaacaaaaacaa

SEQ ID NO: 1363837 - RNA, 18 nt, Human
uguucugcccccucucua

SEQ ID NO: 1363838 - RNA, 20 nt, Human
uguucugcccccucucuagu

SEQ ID NO: 1363839 - RNA, 22 nt, Human
uuaaauuuugucaaggguccac

SEQ ID NO: 1363840 - RNA, 22 nt, Human
uuuaaagcccccgagacccugc

SEQ ID NO: 1363841 - RNA, 25 nt, Human
aggagcugcgcagucgcaccgagcc

SEQ ID NO: 1363842 - RNA, 24 nt, Human
cacacgcaggcuuccccgcccccu

SEQ ID NO: 1363843 - RNA, 22 nt, Human
caccgagcccggaacggacccu

SEQ ID NO: 1363844 - RNA, 22 nt, Human
cacgcaggcuuccccgcccccu

SEQ ID NO: 1363845 - RNA, 21 nt, Human
cagaaccggguccagagccgg

SEQ ID NO: 1363846 - RNA, 24 nt, Human
cagaaccggguccagagccgggga

SEQ ID NO: 1363847 - RNA, 23 nt, Human
cagagccggggagggggcgggcu

SEQ ID NO: 1363848 - RNA, 18 nt, Human
ccaccgaggaagcgccga

SEQ ID NO: 1363849 - RNA, 23 nt, Human
cccgcccccugcggggaggagac

SEQ ID NO: 1363850 - RNA, 18 nt, Human
ccgagcugcgcacacgca

SEQ ID NO: 1363851 - RNA, 19 nt, Human
cgacccggggaagccaccg

SEQ ID NO: 1363852 - RNA, 22 nt, Human
gaaccggguccagagccgggga

SEQ ID NO: 1363853 - RNA, 21 nt, Human
gaagucuccccgaacuuaccu

SEQ ID NO: 1363854 - RNA, 22 nt, Human
gcagucgcaccgagcccggaac

SEQ ID NO: 1363855 - RNA, 20 nt, Human
ggaacggacccucccacaga

SEQ ID NO: 1363856 - RNA, 24 nt, Human
gggaagccaccgaggaagcgccga

SEQ ID NO: 1363857 - RNA, 19 nt, Human
gugcaugggcugcuguggu

SEQ ID NO: 1363858 - RNA, 25 nt, Human
uauauaucuuucauuaugccaucuu

SEQ ID NO: 1363859 - RNA, 24 nt, Human
uccaagagaagacaggagacugcc

SEQ ID NO: 1363860 - RNA, 21 nt, Human
ucugugugcaugggcugcugu

SEQ ID NO: 1363861 - RNA, 21 nt, Human
uugcuaaacugucuucugcau

SEQ ID NO: 1363862 - RNA, 21 nt, Human
aaaaaaagagaaagaaaagga

SEQ ID NO: 1363863 - RNA, 20 nt, Human
aaaaaagagaaagaaaagga

SEQ ID NO: 1363864 - RNA, 23 nt, Human
aaaagagaaagaaaaggaaagag

SEQ ID NO: 1363865 - RNA, 21 nt, Human
acucugaaaaaaagagaaaga

SEQ ID NO: 1363866 - RNA, 24 nt, Human
acuguacuccagccugggcaacag

SEQ ID NO: 1363867 - RNA, 25 nt, Human
acuguacuccagccugggcaacaga

SEQ ID NO: 1363868 - RNA, 20 nt, Human
agaagaaggaggaaggaaag

SEQ ID NO: 1363869 - RNA, 18 nt, Human
agagaaagaaaaggaaag

SEQ ID NO: 1363870 - RNA, 20 nt, Human
agagaaagaaaaggaaagag

SEQ ID NO: 1363871 - RNA, 18 nt, Human
agagagaagaaggaggaa

SEQ ID NO: 1363872 - RNA, 24 nt, Human
agccugggcaacagagugcaacuc

SEQ ID NO: 1363873 - RNA, 24 nt, Human
aucgugccacuguacuccagccug

SEQ ID NO: 1363874 - RNA, 18 nt, Human
cacuguacuccagccugg

SEQ ID NO: 1363875 - RNA, 19 nt, Human
cacuguacuccagccuggg

SEQ ID NO: 1363876 - RNA, 20 nt, Human
cacuguacuccagccugggc

SEQ ID NO: 1363877 - RNA, 21 nt, Human
cacuguacuccagccugggca

SEQ ID NO: 1363878 - RNA, 23 nt, Human
cacuguacuccagccugggcaac

SEQ ID NO: 1363879 - RNA, 24 nt, Human
cacuguacuccagccugggcaaca

SEQ ID NO: 1363880 - RNA, 20 nt, Human
ccacuguacuccagccuggg

SEQ ID NO: 1363881 - RNA, 20 nt, Human
ccacuguacuccagccuggg

SEQ ID NO: 1363882 - RNA, 21 nt, Human
ccacuguacuccagccugggc

SEQ ID NO: 1363883 - RNA, 22 nt, Human
ccacuguacuccagccugggca

SEQ ID NO: 1363884 - RNA, 23 nt, Human
ccacuguacuccagccugggcaa

SEQ ID NO: 1363885 - RNA, 24 nt, Human
ccacuguacuccagccugggcaac

SEQ ID NO: 1363886 - RNA, 21 nt, Human
gcaacagagugcaacucugaa

SEQ ID NO: 1363887 - RNA, 22 nt, Human
gccacuguacuccagccugggc

SEQ ID NO: 1363888 - RNA, 23 nt, Human
gccacuguacuccagccugggca

SEQ ID NO: 1363889 - RNA, 24 nt, Human
gccacuguacuccagccugggcaa

SEQ ID NO: 1363890 - RNA, 27 nt, Human
ggcaacagagugcaacucugaaaaaaa

SEQ ID NO: 1363891 - RNA, 24 nt, Human
guacuccagccugggcaacagagu

SEQ ID NO: 1363892 - RNA, 22 nt, Human
uacuccagccugggcaacagag

SEQ ID NO: 1363893 - RNA, 24 nt, Human
uacuccagccugggcaacagagug

SEQ ID NO: 1363894 - RNA, 23 nt, Human
ucgugccacuguacuccagccug

SEQ ID NO: 1363895 - RNA, 18 nt, Human
ucugaaaaaaagagaaag

SEQ ID NO: 1363896 - RNA, 22 nt, Human
ucugaaaaaaagagaaagaaaa

SEQ ID NO: 1363897 - RNA, 20 nt, Human
ugaaaaaaagagaaagaaaa

SEQ ID NO: 1363898 - RNA, 23 nt, Human
ugaaaaaaagagaaagaaaagga

SEQ ID NO: 1363899 - RNA, 21 nt, Human
ugcaacucugaaaaaaagaga

SEQ ID NO: 1363900 - RNA, 24 nt, Human
aaaaaaaaaaaccguagcugagga

SEQ ID NO: 1363901 - RNA, 19 nt, Human
aacagagucaccuugcugg

SEQ ID NO: 1363902 - RNA, 23 nt, Human
aagaacaguugcucucuccucuc

SEQ ID NO: 1363903 - RNA, 18 nt, Human
aagcaccagggaccuaca

SEQ ID NO: 1363904 - RNA, 24 nt, Human
aagguaagcaaauagccaagacca

SEQ ID NO: 1363905 - RNA, 20 nt, Human
aagugcaguacuggaagcac

SEQ ID NO: 1363906 - RNA, 22 nt, Human
acacagcccucuccugagcccu

SEQ ID NO: 1363907 - RNA, 18 nt, Human
acagugugagccuagaau

SEQ ID NO: 1363908 - RNA, 18 nt, Human
acuggaagcaccagggac

SEQ ID NO: 1363909 - RNA, 20 nt, Human
acuggcagggucccagggcu

SEQ ID NO: 1363910 - RNA, 23 nt, Human
agauacaucuagaccagagcuga

SEQ ID NO: 1363911 - RNA, 18 nt, Human
aggaagggaaaaaaaaag

SEQ ID NO: 1363912 - RNA, 24 nt, Human
aggcagccggaacuuggucuugau

SEQ ID NO: 1363913 - RNA, 24 nt, Human
aggggugaagugcuucugccuccg

SEQ ID NO: 1363914 - RNA, 18 nt, Human
agguaagcaaauagccaa

SEQ ID NO: 1363915 - RNA, 22 nt, Human
agguucuuggcacgauuggcuu

SEQ ID NO: 1363916 - RNA, 20 nt, Human
aguacuggaagcaccaggga

SEQ ID NO: 1363917 - RNA, 22 nt, Human
augaggucaagggcagggcccc

SEQ ID NO: 1363918 - RNA, 24 nt, Human
caaaaaggaagggaaaaaaaaaga

SEQ ID NO: 1363919 - RNA, 21 nt, Human
cagcccucuccugagcccuug

SEQ ID NO: 1363920 - RNA, 21 nt, Human
cagguccuccaagaucuucuc

SEQ ID NO: 1363921 - RNA, 22 nt, Human
caguacuggaagcaccagggac

SEQ ID NO: 1363922 - RNA, 20 nt, Human
caucuagaccagagcugacc

SEQ ID NO: 1363923 - RNA, 23 nt, Human
ccaaaaaaaaaaaaaaaaaaaaa

SEQ ID NO: 1363924 - RNA, 23 nt, Human
ccccugccaaaaaaaaaaaaaaa

SEQ ID NO: 1363925 - RNA, 25 nt, Human
cccugagcugacccuuggugacccu

SEQ ID NO: 1363926 - RNA, 23 nt, Human
cccugccaaaaaaaaaaaaaaaa

SEQ ID NO: 1363927 - RNA, 19 nt, Human
cccuuccaggggcagagga

SEQ ID NO: 1363928 - RNA, 18 nt, Human
ccuagcccugagcugacc

SEQ ID NO: 1363929 - RNA, 19 nt, Human
ccucaagagcuggggcgga

SEQ ID NO: 1363930 - RNA, 20 nt, Human
ccucuuacccuuaucacuaa

SEQ ID NO: 1363931 - RNA, 18 nt, Human
ccugcgcuuuugucuuga

SEQ ID NO: 1363932 - RNA, 23 nt, Human
cuagaaugaaaugggcagagaaa

SEQ ID NO: 1363933 - RNA, 21 nt, Human
cucaucccucugggcucuagu

SEQ ID NO: 1363934 - RNA, 20 nt, Human
cucucuccucucaucccucu

SEQ ID NO: 1363935 - RNA, 23 nt, Human
cuuaucaagauccagguccucca

SEQ ID NO: 1363936 - RNA, 21 nt, Human
cuuaucacuagggcacagcug

SEQ ID NO: 1363937 - RNA, 26 nt, Human
cuugacaaggacagugugagccuaga

SEQ ID NO: 1363938 - RNA, 22 nt, Human
gaccaugggccugcaaaaagga

SEQ ID NO: 1363939 - RNA, 19 nt, Human
gaccuagugcccauagugg

SEQ ID NO: 1363940 - RNA, 19 nt, Human
gacucugaggggugaagug

SEQ ID NO: 1363941 - RNA, 18 nt, Human
gagaagaccucugcucuu

SEQ ID NO: 1363942 - RNA, 19 nt, Human
gaggucaagggcagggccc

SEQ ID NO: 1363943 - RNA, 21 nt, Human
gccaaaaaaaaaaaaaaaaaa

SEQ ID NO: 1363944 - RNA, 20 nt, Human
gccaauuccagguccacugg

SEQ ID NO: 1363945 - RNA, 18 nt, Human
gcggugcagcacuccugg

SEQ ID NO: 1363946 - RNA, 21 nt, Human
ggagcagaugaggucaagggc

SEQ ID NO: 1363947 - RNA, 22 nt, Human
ggcaaagugcaguacuggaagc

SEQ ID NO: 1363948 - RNA, 19 nt, Human
ggccuggagcccgaggggg

SEQ ID NO: 1363949 - RNA, 22 nt, Human
gggaaaaaaaaagaaagaacag

SEQ ID NO: 1363950 - RNA, 28 nt, Human
guccccugccaaaaaaaaaaaaaaaaaa

SEQ ID NO: 1363951 - RNA, 19 nt, Human
gugauggccagguucuugg

SEQ ID NO: 1363952 - RNA, 24 nt, Human
uaagccuagauacaucuagaccag

SEQ ID NO: 1363953 - RNA, 27 nt, Human
uacaguaagaggaaagggaggugguac

SEQ ID NO: 1363954 - RNA, 22 nt, Human
uagauacaucuagaccagagcu

SEQ ID NO: 1363955 - RNA, 18 nt, Human
uagcccugagcugacccu

SEQ ID NO: 1363956 - RNA, 26 nt, Human
ucaccuugcuggcagcuuuuugcgcu

SEQ ID NO: 1363957 - RNA, 18 nt, Human
ucacuagggcacagcugg

SEQ ID NO: 1363958 - RNA, 19 nt, Human
ucaggaaaugaagucaaag

SEQ ID NO: 1363959 - RNA, 21 nt, Human
uccuccaagaucuucucauca

SEQ ID NO: 1363960 - RNA, 19 nt, Human
ucugcagagagugguuggu

SEQ ID NO: 1363961 - RNA, 18 nt, Human
ugagagagcaacacagcc

SEQ ID NO: 1363962 - RNA, 19 nt, Human
ugagagagcaacacagccc

SEQ ID NO: 1363963 - RNA, 21 nt, Human
ugagccugacaucucuccucu

SEQ ID NO: 1363964 - RNA, 24 nt, Human
ugaggaaagaaggugaagaguugg

SEQ ID NO: 1363965 - RNA, 18 nt, Human
ugcuucagagggccuugc

SEQ ID NO: 1363966 - RNA, 20 nt, Human
uggaaaugguuuuuccuagc

SEQ ID NO: 1363967 - RNA, 19 nt, Human
uggcacaaguagaaagauc

SEQ ID NO: 1363968 - RNA, 20 nt, Human
uggccagguucuuggcacga

SEQ ID NO: 1363969 - RNA, 21 nt, Human
uggcuugguggcgaacaacca

SEQ ID NO: 1363970 - RNA, 22 nt, Human
uguacaaaaaagugggccccca

SEQ ID NO: 1363971 - RNA, 23 nt, Human
aaaaaacaaaaaacccaaacugc

SEQ ID NO: 1363972 - RNA, 18 nt, Human
aaaaaacccaaacugcaa

SEQ ID NO: 1363973 - RNA, 18 nt, Human
aaaaaacccaaacugcaa

SEQ ID NO: 1363974 - RNA, 21 nt, Human
aaaaaacccaaacugcaaagg

SEQ ID NO: 1363975 - RNA, 22 nt, Human
aaaaaacccaaacugcaaaggc

SEQ ID NO: 1363976 - RNA, 21 nt, Human
aaaaaagaaggagaagucugg

SEQ ID NO: 1363977 - RNA, 20 nt, Human
aaaacacacagagcaaauaa

SEQ ID NO: 1363978 - RNA, 24 nt, Human
aaaaccuugucucuccaaaaaaca

SEQ ID NO: 1363979 - RNA, 24 nt, Human
aaacgcacaucaacaaacacacaa

SEQ ID NO: 1363980 - RNA, 22 nt, Human
aaacuggaacaaggaaaaacaa

SEQ ID NO: 1363981 - RNA, 20 nt, Human
aacauggcaaaaccuugucu

SEQ ID NO: 1363982 - RNA, 19 nt, Human
aaccccggcaaugaaacuc

SEQ ID NO: 1363983 - RNA, 21 nt, Human
aagaggaguauguugccagug

SEQ ID NO: 1363984 - RNA, 24 nt, Human
aagaugcagccaaauguggaacua

SEQ ID NO: 1363985 - RNA, 20 nt, Human
aaggaaaaacaaaaaccaga

SEQ ID NO: 1363986 - RNA, 21 nt, Human
aaggaccuguacugcucaccu

SEQ ID NO: 1363987 - RNA, 23 nt, Human
acaaaaacacacagagcaaauaa

SEQ ID NO: 1363988 - RNA, 27 nt, Human
acaaaaaccagauaugguaugugucug

SEQ ID NO: 1363989 - RNA, 18 nt, Human
acacacagagcaaauaac

SEQ ID NO: 1363990 - RNA, 23 nt, Human
agaguagauaugggaagggccaa

SEQ ID NO: 1363991 - RNA, 23 nt, Human
agccugggcaacauggcaaaacc

SEQ ID NO: 1363992 - RNA, 24 nt, Human
agccugggcaacauggcaaaaccu

SEQ ID NO: 1363993 - RNA, 22 nt, Human
aggaaaaacaaaaaccagauau

SEQ ID NO: 1363994 - RNA, 22 nt, Human
aggaacaguacagaaauguggg

SEQ ID NO: 1363995 - RNA, 23 nt, Human
aggaguccgagaccagccugggc

SEQ ID NO: 1363996 - RNA, 24 nt, Human
aggcaugguggcucaugccuguaa

SEQ ID NO: 1363997 - RNA, 20 nt, Human
agggcaaaaaagaaggagaa

SEQ ID NO: 1363998 - RNA, 18 nt, Human
agguggguucagugggga

SEQ ID NO: 1363999 - RNA, 27 nt, Human
agugacagaaacuggaacaaggaaaaa

SEQ ID NO: 1364000 - RNA, 19 nt, Human
agugcacaggguuuggcaa

SEQ ID NO: 1364001 - RNA, 24 nt, Human
aguggcuguugcccuccuccagcc

SEQ ID NO: 1364002 - RNA, 25 nt, Human
auaugcacaaacgcacaucaacaaa

SEQ ID NO: 1364003 - RNA, 21 nt, Human
aucccauccuauccuuacccu

SEQ ID NO: 1364004 - RNA, 22 nt, Human
aucuguaauggagaaaacccac

SEQ ID NO: 1364005 - RNA, 19 nt, Human
augaaacucacgcauaugc

SEQ ID NO: 1364006 - RNA, 26 nt, Human
augaaacucacgcauaugcacaaacg

SEQ ID NO: 1364007 - RNA, 22 nt, Human
caaaaaacccaaacugcaaagg

SEQ ID NO: 1364008 - RNA, 18 nt, Human
caaaaaccagauauggua

SEQ ID NO: 1364009 - RNA, 21 nt, Human
caaauguggaacuaagguggg

SEQ ID NO: 1364010 - RNA, 22 nt, Human
caacauggcaaaaccuugucuc

SEQ ID NO: 1364011 - RNA, 24 nt, Human
caacauggcaaaaccuugucucuc

SEQ ID NO: 1364012 - RNA, 20 nt, Human
caacuaggcagugacagaaa

SEQ ID NO: 1364013 - RNA, 20 nt, Human
caagaugcagccaaaugugg

SEQ ID NO: 1364014 - RNA, 24 nt, Human
caaugaaacucacgcauaugcaca

SEQ ID NO: 1364015 - RNA, 19 nt, Human
cacacaacuaggcagugac

SEQ ID NO: 1364016 - RNA, 23 nt, Human
caggccaggcaugguggcucaug

SEQ ID NO: 1364017 - RNA, 18 nt, Human
caugccuguaauccuggg

SEQ ID NO: 1364018 - RNA, 24 nt, Human
cauggagcaacgccuuaugugaau

SEQ ID NO: 1364019 - RNA, 20 nt, Human
cauugaguaaagagcagggu

SEQ ID NO: 1364020 - RNA, 23 nt, Human
ccaaccccggcaaugaaacucac

SEQ ID NO: 1364021 - RNA, 27 nt, Human
ccacaauugugccccaaccccggccgg

SEQ ID NO: 1364022 - RNA, 25 nt, Human
ccaggaguccgagaccagccugggc

SEQ ID NO: 1364023 - RNA, 23 nt, Human
ccccaaccccggcaaugaaacuc

SEQ ID NO: 1364024 - RNA, 22 nt, Human
ccuacaaguccaugugugcuga

SEQ ID NO: 1364025 - RNA, 24 nt, Human
ccucauggccccaguccacaauug

SEQ ID NO: 1364026 - RNA, 21 nt, Human
ccugggcaacauggcaaaacc

SEQ ID NO: 1364027 - RNA, 24 nt, Human
ccugggcaacauggcaaaaccuug

SEQ ID NO: 1364028 - RNA, 24 nt, Human
cuaaaacucaaaccuacuacguac

SEQ ID NO: 1364029 - RNA, 24 nt, Human
cucaugccuguaauccugggauuu

SEQ ID NO: 1364030 - RNA, 23 nt, Human
cuccaaaaaacaaaaaacccaaa

SEQ ID NO: 1364031 - RNA, 24 nt, Human
cucuccaaaaaacaaaaaacccaa

SEQ ID NO: 1364032 - RNA, 22 nt, Human
cugaagucccuauagcaaccac

SEQ ID NO: 1364033 - RNA, 22 nt, Human
cugccucccaugugaccauuca

SEQ ID NO: 1364034 - RNA, 24 nt, Human
cuggaacaaggaaaaacaaaaacc

SEQ ID NO: 1364035 - RNA, 24 nt, Human
cuggaguuggcauaauucaagaug

SEQ ID NO: 1364036 - RNA, 21 nt, Human
cuguacugcucaccuauacau

SEQ ID NO: 1364037 - RNA, 18 nt, Human
cuguugcccuccuccagc

SEQ ID NO: 1364038 - RNA, 20 nt, Human
cuguugcccuccuccagccc

SEQ ID NO: 1364039 - RNA, 22 nt, Human
cuugucucuccaaaaaacaaaa

SEQ ID NO: 1364040 - RNA, 24 nt, Human
gcaaaaaagaaggagaagucugga

SEQ ID NO: 1364041 - RNA, 20 nt, Human
gcaaaaccuugucucuccaa

SEQ ID NO: 1364042 - RNA, 22 nt, Human
gccaggcaugguggcucaugcc

SEQ ID NO: 1364043 - RNA, 22 nt, Human
gcccaggaguccgagaccagcc

SEQ ID NO: 1364044 - RNA, 21 nt, Human
ggaacuaagguggguucagug

SEQ ID NO: 1364045 - RNA, 20 nt, Human
ggcaauaaaucuguaaugga

SEQ ID NO: 1364046 - RNA, 23 nt, Human
ggcuguugcccuccuccagcccu

SEQ ID NO: 1364047 - RNA, 20 nt, Human
gggaagggccaagaggagua

SEQ ID NO: 1364048 - RNA, 24 nt, Human
gggaagggccaagaggaguauguu

SEQ ID NO: 1364049 - RNA, 18 nt, Human
ggguugggccugauaagg

SEQ ID NO: 1364050 - RNA, 24 nt, Human
gguggcucaugccuguaauccugg

SEQ ID NO: 1364051 - RNA, 21 nt, Human
gguggcugcugggccuaaaac

SEQ ID NO: 1364052 - RNA, 23 nt, Human
gguggcugcugggccuaaaacuc

SEQ ID NO: 1364053 - RNA, 18 nt, Human
uaaagcucuccauauagc

SEQ ID NO: 1364054 - RNA, 25 nt, Human
uaaaucuguaauggagaaaacccac

SEQ ID NO: 1364055 - RNA, 23 nt, Human
uaaguggcucaagugauguuuau

SEQ ID NO: 1364056 - RNA, 19 nt, Human
uacccuuagagguacgugc

SEQ ID NO: 1364057 - RNA, 23 nt, Human
uacguaaacuugacauacguagu

SEQ ID NO: 1364058 - RNA, 18 nt, Human
uacguagggcccaaaggu

SEQ ID NO: 1364059 - RNA, 19 nt, Human
uaguugacacauaauaauu

SEQ ID NO: 1364060 - RNA, 23 nt, Human
uauagcaaccaccuuacucuuca

SEQ ID NO: 1364061 - RNA, 25 nt, Human
uauuaaaaacccaaauugcaggcca

SEQ ID NO: 1364062 - RNA, 23 nt, Human
uauuccucucuguuucuuugccc

SEQ ID NO: 1364063 - RNA, 21 nt, Human
ucacccucuucccaugcuccc

SEQ ID NO: 1364064 - RNA, 20 nt, Human
ucagcucacccucuucccuc

SEQ ID NO: 1364065 - RNA, 22 nt, Human
ucaugugacauauuccagcugu

SEQ ID NO: 1364066 - RNA, 23 nt, Human
uccaaaaaacaaaaaacccaaac

SEQ ID NO: 1364067 - RNA, 20 nt, Human
uccaugugugcugaaguccc

SEQ ID NO: 1364068 - RNA, 22 nt, Human
ucccaugugaccauucacccga

SEQ ID NO: 1364069 - RNA, 23 nt, Human
ucccuauagcaaccaccuuacuc

SEQ ID NO: 1364070 - RNA, 18 nt, Human
ucccugaggggauaaagc

SEQ ID NO: 1364071 - RNA, 23 nt, Human
ucgaugccaauacagagugcaca

SEQ ID NO: 1364072 - RNA, 23 nt, Human
ucuccaaaaaacaaaaaacccaa

SEQ ID NO: 1364073 - RNA, 23 nt, Human
ucuguaauggagaaaaccggggc

SEQ ID NO: 1364074 - RNA, 24 nt, Human
ugaaagaaccuggaggcuauuaaa

SEQ ID NO: 1364075 - RNA, 22 nt, Human
ugacagaaacuggaacaaggaa

SEQ ID NO: 1364076 - RNA, 18 nt, Human
ugacuagcugagcgacaa

SEQ ID NO: 1364077 - RNA, 23 nt, Human
ugagcccaggaguccgagaccag

SEQ ID NO: 1364078 - RNA, 24 nt, Human
ugccccaaccccggcaaugaaacu

SEQ ID NO: 1364079 - RNA, 20 nt, Human
uggaacaaggaaaaacaaaa

SEQ ID NO: 1364080 - RNA, 22 nt, Human
uggaacaaggaaaaacaaaaac

SEQ ID NO: 1364081 - RNA, 22 nt, Human
uggcucaugccuguaauccugg

SEQ ID NO: 1364082 - RNA, 21 nt, Human
uggcuugagcccaggaguccg

SEQ ID NO: 1364083 - RNA, 21 nt, Human
ugggaagggccaagaggagua

SEQ ID NO: 1364084 - RNA, 19 nt, Human
ugguaauagauaugaacac

SEQ ID NO: 1364085 - RNA, 22 nt, Human
ugguggcucaugccuguaaucc

SEQ ID NO: 1364086 - RNA, 27 nt, Human
ugucccuguugcuaucaggugauugau

SEQ ID NO: 1364087 - RNA, 21 nt, Human
ugugucuggggaaagaggggu

SEQ ID NO: 1364088 - RNA, 22 nt, Human
uuacauaucaaggaccuguacu

SEQ ID NO: 1364089 - RNA, 20 nt, Human
uuaugugaauauuccucucu

SEQ ID NO: 1364090 - RNA, 25 nt, Human
uucaaagugaaaauauuugcuucuu

SEQ ID NO: 1364091 - RNA, 20 nt, Human
uucccaugcucccucccugg

SEQ ID NO: 1364092 - RNA, 21 nt, Human
uugguaauagauaugaacacc

SEQ ID NO: 1364093 - RNA, 24 nt, Human
aaagugcugggauuauaggcguga

SEQ ID NO: 1364094 - RNA, 20 nt, Human
aaccucugccuccuggcuuc

SEQ ID NO: 1364095 - RNA, 19 nt, Human
aagugcugggauuauaggc

SEQ ID NO: 1364096 - RNA, 19 nt, Human
aagugcugggauuauaggc

SEQ ID NO: 1364097 - RNA, 26 nt, Human
aagugcugggauuauaggcgugagcc

SEQ ID NO: 1364098 - RNA, 21 nt, Human
acaggcacucaccaccaugcc

SEQ ID NO: 1364099 - RNA, 24 nt, Human
acccuggaucccuccuccccaccu

SEQ ID NO: 1364100 - RNA, 23 nt, Human
accucagccucccaaagugcugg

SEQ ID NO: 1364101 - RNA, 18 nt, Human
acgcugcaggcaccaccu

SEQ ID NO: 1364102 - RNA, 18 nt, Human
acgggguuucuccauguu

SEQ ID NO: 1364103 - RNA, 19 nt, Human
acgggguuucuccauguug

SEQ ID NO: 1364104 - RNA, 24 nt, Human
acgggguuucuccauguugcccag

SEQ ID NO: 1364105 - RNA, 21 nt, Human
acugacacccuucuggugguc

SEQ ID NO: 1364106 - RNA, 23 nt, Human
acugcaaccucugccuccuggcu

SEQ ID NO: 1364107 - RNA, 21 nt, Human
agagaaaggguggaggcugcc

SEQ ID NO: 1364108 - RNA, 23 nt, Human
agauguauuuuuguuuuuuucuc

SEQ ID NO: 1364109 - RNA, 20 nt, Human
agcagguggagcauccaagc

SEQ ID NO: 1364110 - RNA, 24 nt, Human
aggugauccgcccaccucagccuc

SEQ ID NO: 1364111 - RNA, 20 nt, Human
agguggcccaaggguagagg

SEQ ID NO: 1364112 - RNA, 19 nt, Human
agguugccaggccuugccc

SEQ ID NO: 1364113 - RNA, 21 nt, Human
aguagcugggauuacaggcac

SEQ ID NO: 1364114 - RNA, 20 nt, Human
agugauucuccugccucagc

SEQ ID NO: 1364115 - RNA, 24 nt, Human
agugauucuccugccucagccucc

SEQ ID NO: 1364116 - RNA, 24 nt, Human
caaagugcugggauuauaggcgug

SEQ ID NO: 1364117 - RNA, 23 nt, Human
caacagccugucccaaauagccu

SEQ ID NO: 1364118 - RNA, 23 nt, Human
cacccuggaucccuccuccccac

SEQ ID NO: 1364119 - RNA, 25 nt, Human
cacccuggaucccuccuccccaccu

SEQ ID NO: 1364120 - RNA, 25 nt, Human
caccgaguuagcuggggagcucacu

SEQ ID NO: 1364121 - RNA, 26 nt, Human
caccugcuccugccacggccccucug

SEQ ID NO: 1364122 - RNA, 21 nt, Human
cacugacacccuucugguggu

SEQ ID NO: 1364123 - RNA, 18 nt, Human
cacugcaaccucugccuc

SEQ ID NO: 1364124 - RNA, 21 nt, Human
cacugcaaccucugccuccug

SEQ ID NO: 1364125 - RNA, 20 nt, Human
cacugccccgagauacgaga

SEQ ID NO: 1364126 - RNA, 18 nt, Human
cagcaacagccuguccca

SEQ ID NO: 1364127 - RNA, 20 nt, Human
cagcacuugggcagcaggug

SEQ ID NO: 1364128 - RNA, 21 nt, Human
cagcacuugggcagcaggugg

SEQ ID NO: 1364129 - RNA, 26 nt, Human
cagcagguggagcauccaagccuccu

SEQ ID NO: 1364130 - RNA, 23 nt, Human
cagcugcuggggcuggugggggu

SEQ ID NO: 1364131 - RNA, 23 nt, Human
caucucugaccccguucuugucu

SEQ ID NO: 1364132 - RNA, 23 nt, Human
cauguugcccaggcuggucucaa

SEQ ID NO: 1364133 - RNA, 24 nt, Human
cauguugcccaggcuggucucaaa

SEQ ID NO: 1364134 - RNA, 21 nt, Human
cauugggcuuugcaggccagg

SEQ ID NO: 1364135 - RNA, 22 nt, Human
ccaaagugcugggauuauaggc

SEQ ID NO: 1364136 - RNA, 24 nt, Human
ccaaagugcugggauuauaggcgu

SEQ ID NO: 1364137 - RNA, 23 nt, Human
ccaagccuccuguggccacgggc

SEQ ID NO: 1364138 - RNA, 19 nt, Human
ccacaaggacccccuccuc

SEQ ID NO: 1364139 - RNA, 24 nt, Human
ccacagccugauucucugaucugg

SEQ ID NO: 1364140 - RNA, 21 nt, Human
ccaccacccacuucuucuaag

SEQ ID NO: 1364141 - RNA, 18 nt, Human
ccagagccuggcacagag

SEQ ID NO: 1364142 - RNA, 18 nt, Human
ccaggcuggagugaaaug

SEQ ID NO: 1364143 - RNA, 24 nt, Human
ccauguugcccaggcuggucucaa

SEQ ID NO: 1364144 - RNA, 23 nt, Human
cccaaggguagagggcagagcac

SEQ ID NO: 1364145 - RNA, 21 nt, Human
ccccagaggcuuugguuucag

SEQ ID NO: 1364146 - RNA, 22 nt, Human
ccccggcccgagugcagaccuc

SEQ ID NO: 1364147 - RNA, 23 nt, Human
cccgaccccagcacuugggcagc

SEQ ID NO: 1364148 - RNA, 23 nt, Human
cccgaguagcugggauuacaggc

SEQ ID NO: 1364149 - RNA, 24 nt, Human
cccgaguagcugggauuacaggca

SEQ ID NO: 1364150 - RNA, 26 nt, Human
cccuccuccccaccugccacccgagg

SEQ ID NO: 1364151 - RNA, 20 nt, Human
cccugagccacccacucuuc

SEQ ID NO: 1364152 - RNA, 20 nt, Human
cccuggaucccuccucccca

SEQ ID NO: 1364153 - RNA, 22 nt, Human
cccuuuuccucagcaguguccc

SEQ ID NO: 1364154 - RNA, 23 nt, Human
ccgaguagcugggauuacaggca

SEQ ID NO: 1364155 - RNA, 26 nt, Human
ccgcccaccucagccucccaaagugc

SEQ ID NO: 1364156 - RNA, 19 nt, Human
ccgcccgccuccuggcugc

SEQ ID NO: 1364157 - RNA, 24 nt, Human
ccuccuggcuucuagugauucucc

SEQ ID NO: 1364158 - RNA, 21 nt, Human
ccucuuuaauaaaaagggugu

SEQ ID NO: 1364159 - RNA, 24 nt, Human
ccugaacucaggugauccgcccac

SEQ ID NO: 1364160 - RNA, 23 nt, Human
ccuggcuucuagugauucuccug

SEQ ID NO: 1364161 - RNA, 20 nt, Human
ccugggcacugaggggcugu

SEQ ID NO: 1364162 - RNA, 23 nt, Human
ccuggucaaagccuccuuuuucc

SEQ ID NO: 1364163 - RNA, 20 nt, Human
ccuuugagagccaaggugga

SEQ ID NO: 1364164 - RNA, 19 nt, Human
cgcugcaggcaccaccugc

SEQ ID NO: 1364165 - RNA, 20 nt, Human
cgcugcaggcaccaccugcu

SEQ ID NO: 1364166 - RNA, 23 nt, Human
cggacagauggacagaugaauca

SEQ ID NO: 1364167 - RNA, 24 nt, Human
cgggguuucuccauguugcccagg

SEQ ID NO: 1364168 - RNA, 21 nt, Human
cguggccacaaggacccccuc

SEQ ID NO: 1364169 - RNA, 27 nt, Human
cuagugauucuccugccucagccuccc

SEQ ID NO: 1364170 - RNA, 24 nt, Human
cucacugcaaccucugccuccugg

SEQ ID NO: 1364171 - RNA, 23 nt, Human
cucagccucccgaguagcuggga

SEQ ID NO: 1364172 - RNA, 19 nt, Human
cuccauguugcccaggcug

SEQ ID NO: 1364173 - RNA, 24 nt, Human
cuccauguugcccaggcuggucuc

SEQ ID NO: 1364174 - RNA, 18 nt, Human
cuccugccacggccccuc

SEQ ID NO: 1364175 - RNA, 22 nt, Human
cuccugccucagccucccgagu

SEQ ID NO: 1364176 - RNA, 23 nt, Human
cuccugcggguggcagcgggggc

SEQ ID NO: 1364177 - RNA, 20 nt, Human
cuccuuuuuccacccgcucc

SEQ ID NO: 1364178 - RNA, 21 nt, Human
cucuuguuguccaggcuggag

SEQ ID NO: 1364179 - RNA, 19 nt, Human
cugcaaccucugccuccug

SEQ ID NO: 1364180 - RNA, 23 nt, Human
cugcaaccucugccuccuggcuu

SEQ ID NO: 1364181 - RNA, 23 nt, Human
cugccucagccucccgaguagcu

SEQ ID NO: 1364182 - RNA, 27 nt, Human
cuggaauaaaugaaccaaacucaggug

SEQ ID NO: 1364183 - RNA, 19 nt, Human
cuggggcuggugggggugg

SEQ ID NO: 1364184 - RNA, 25 nt, Human
cugucccuaugggagaacauuuugu

SEQ ID NO: 1364185 - RNA, 22 nt, Human
cuugcucuuguuguccaggcug

SEQ ID NO: 1364186 - RNA, 24 nt, Human
cuugcucuuguuguccaggcugga

SEQ ID NO: 1364187 - RNA, 26 nt, Human
gaaaagagggacacagucuuugucgg

SEQ ID NO: 1364188 - RNA, 23 nt, Human
gaaacgggguuucuccauguugc

SEQ ID NO: 1364189 - RNA, 24 nt, Human
gaacucaggugauccgcccaccuc

SEQ ID NO: 1364190 - RNA, 18 nt, Human
gacacccuucuggugguc

SEQ ID NO: 1364191 - RNA, 19 nt, Human
gacagcaacagccuguccc

SEQ ID NO: 1364192 - RNA, 22 nt, Human
gacagcaacagccugucccaaa

SEQ ID NO: 1364193 - RNA, 19 nt, Human
gaccugggcacugaggggc

SEQ ID NO: 1364194 - RNA, 27 nt, Human
gagaacaauggaaaggacgcugcaggc

SEQ ID NO: 1364195 - RNA, 20 nt, Human
gaggcugucguggccacaag

SEQ ID NO: 1364196 - RNA, 25 nt, Human
gaguagcugggauuacaggcacuca

SEQ ID NO: 1364197 - RNA, 20 nt, Human
gaucccuccuccccaccugc

SEQ ID NO: 1364198 - RNA, 21 nt, Human
gaucugccgucccaucggggg

SEQ ID NO: 1364199 - RNA, 24 nt, Human
gauuacaggcacucaccaccaugc

SEQ ID NO: 1364200 - RNA, 18 nt, Human
gauuauaggcgugagcca

SEQ ID NO: 1364201 - RNA, 21 nt, Human
gauuauaggcgugagccaccg

SEQ ID NO: 1364202 - RNA, 24 nt, Human
gauuauaggcgugagccaccguac

SEQ ID NO: 1364203 - RNA, 25 nt, Human
gcagaaggggagggagcccaauccg

SEQ ID NO: 1364204 - RNA, 22 nt, Human
gcaggggucggaggcugagugu

SEQ ID NO: 1364205 - RNA, 23 nt, Human
gccacgggcuucaccccacccug

SEQ ID NO: 1364206 - RNA, 20 nt, Human
gccaggugggcucugcagug

SEQ ID NO: 1364207 - RNA, 20 nt, Human
gccucagccucccgaguagc

SEQ ID NO: 1364208 - RNA, 23 nt, Human
gccuggcuaauuuuuuguauuuu

SEQ ID NO: 1364209 - RNA, 21 nt, Human
gcucacugcaaccucugccuc

SEQ ID NO: 1364210 - RNA, 21 nt, Human
gcucuuguuguccaggcugga

SEQ ID NO: 1364211 - RNA, 18 nt, Human
gcugcaggcaccaccugc

SEQ ID NO: 1364212 - RNA, 20 nt, Human
gcugcuggggcugguggggg

SEQ ID NO: 1364213 - RNA, 24 nt, Human
ggacagauggacagaugaaucaaa

SEQ ID NO: 1364214 - RNA, 21 nt, Human
ggagcauccaagccuccugug

SEQ ID NO: 1364215 - RNA, 18 nt, Human
ggaucccuccuccccacc

SEQ ID NO: 1364216 - RNA, 20 nt, Human
ggcagagcacccccaguggg

SEQ ID NO: 1364217 - RNA, 21 nt, Human
ggcagcugcaggggucggagg

SEQ ID NO: 1364218 - RNA, 21 nt, Human
gggcagcagguggcccaaggg

SEQ ID NO: 1364219 - RNA, 19 nt, Human
ggggagggagcccaauccg

SEQ ID NO: 1364220 - RNA, 18 nt, Human
ggggggcagcugcagggg

SEQ ID NO: 1364221 - RNA, 23 nt, Human
gggguuucuccauguugcccagg

SEQ ID NO: 1364222 - RNA, 23 nt, Human
ggucggaggcugagugugucagg

SEQ ID NO: 1364223 - RNA, 20 nt, Human
gguugguggggggcagcugc

SEQ ID NO: 1364224 - RNA, 24 nt, Human
gugauccgcccaccucagccuccc

SEQ ID NO: 1364225 - RNA, 24 nt, Human
gugauucuccugccucagccuccc

SEQ ID NO: 1364226 - RNA, 22 nt, Human
guggccacgggcuucaccccac

SEQ ID NO: 1364227 - RNA, 22 nt, Human
guuucaggcugugucugucccc

SEQ ID NO: 1364228 - RNA, 18 nt, Human
uaaagcagcugcuggggc

SEQ ID NO: 1364229 - RNA, 22 nt, Human
uaauuuuuuguauuuuuaguag

SEQ ID NO: 1364230 - RNA, 24 nt, Human
uaguagaaacgggguuucuccaug

SEQ ID NO: 1364231 - RNA, 20 nt, Human
ucaacacaauguacccacag

SEQ ID NO: 1364232 - RNA, 21 nt, Human
ucacagggccuagggcgggcg

SEQ ID NO: 1364233 - RNA, 19 nt, Human
ucacugcaaccucugccuc

SEQ ID NO: 1364234 - RNA, 23 nt, Human
ucacugcaaccucugccuccugg

SEQ ID NO: 1364235 - RNA, 24 nt, Human
ucacugcaaccucugccuccuggc

SEQ ID NO: 1364236 - RNA, 18 nt, Human
ucagccucccaaagugcu

SEQ ID NO: 1364237 - RNA, 20 nt, Human
ucagccucccgaguagcugg

SEQ ID NO: 1364238 - RNA, 24 nt, Human
ucccaaagugcugggauuauaggc

SEQ ID NO: 1364239 - RNA, 19 nt, Human
ucccaaauagccuucccgu

SEQ ID NO: 1364240 - RNA, 24 nt, Human
ucccgaguagcugggauuacaggc

SEQ ID NO: 1364241 - RNA, 26 nt, Human
ucccucuuuaauaaaaagggugucca

SEQ ID NO: 1364242 - RNA, 23 nt, Human
uccgcacggugacacuuuugggg

SEQ ID NO: 1364243 - RNA, 21 nt, Human
uccgcccaccucagccuccca

SEQ ID NO: 1364244 - RNA, 21 nt, Human
uccugcggguggcagcggggg

SEQ ID NO: 1364245 - RNA, 20 nt, Human
uccuuuuuccacccgcuccu

SEQ ID NO: 1364246 - RNA, 25 nt, Human
ucgagauggagaaaagagggacaca

SEQ ID NO: 1364247 - RNA, 25 nt, Human
ucuaagucagggcugaggagaaauc

SEQ ID NO: 1364248 - RNA, 26 nt, Human
ucuaagucagggcugaggagaaaucc

SEQ ID NO: 1364249 - RNA, 23 nt, Human
ucuagugauucuccugccucagc

SEQ ID NO: 1364250 - RNA, 24 nt, Human
ucucaacacaauguacccacagcc

SEQ ID NO: 1364251 - RNA, 19 nt, Human
ucugcagugacucuucagg

SEQ ID NO: 1364252 - RNA, 23 nt, Human
ucuugcucuuguuguccaggcug

SEQ ID NO: 1364253 - RNA, 24 nt, Human
ucuugcucuuguuguccaggcugg

SEQ ID NO: 1364254 - RNA, 25 nt, Human
ucuugcucuuguuguccaggcugga

SEQ ID NO: 1364255 - RNA, 18 nt, Human
ugaacucaggugauccgc

SEQ ID NO: 1364256 - RNA, 20 nt, Human
ugaauggugggguugguggg

SEQ ID NO: 1364257 - RNA, 24 nt, Human
ugauccgcccaccucagccuccca

SEQ ID NO: 1364258 - RNA, 20 nt, Human
ugauucuccugccucagccu

SEQ ID NO: 1364259 - RNA, 21 nt, Human
ugcagcuggaauaaaugaacc

SEQ ID NO: 1364260 - RNA, 25 nt, Human
ugcauuuggucggagggcuguaggu

SEQ ID NO: 1364261 - RNA, 26 nt, Human
ugccagcuuggggaggcccagggacg

SEQ ID NO: 1364262 - RNA, 24 nt, Human
ugcccaggcuggucucaaacuccu

SEQ ID NO: 1364263 - RNA, 24 nt, Human
ugccucagccucccgaguagcugg

SEQ ID NO: 1364264 - RNA, 20 nt, Human
ugcucggcagacagcaacag

SEQ ID NO: 1364265 - RNA, 24 nt, Human
ugcucuuguuguccaggcuggagu

SEQ ID NO: 1364266 - RNA, 18 nt, Human
ugcuggggcugguggggg

SEQ ID NO: 1364267 - RNA, 23 nt, Human
ugcuggggcugguggggguggag

SEQ ID NO: 1364268 - RNA, 20 nt, Human
uggaaaggacgcugcaggca

SEQ ID NO: 1364269 - RNA, 20 nt, Human
uggaagcugcagggaaggga

SEQ ID NO: 1364270 - RNA, 22 nt, Human
uggaauaaaugaaccaaacuca

SEQ ID NO: 1364271 - RNA, 22 nt, Human
uggagaaaagagggacacaguc

SEQ ID NO: 1364272 - RNA, 21 nt, Human
uggcugcccacuguccaucua

SEQ ID NO: 1364273 - RNA, 20 nt, Human
uggcuucuagugauucuccu

SEQ ID NO: 1364274 - RNA, 19 nt, Human
ugggauuacaggcacucac

SEQ ID NO: 1364275 - RNA, 21 nt, Human
ugggauuacaggcacucacca

SEQ ID NO: 1364276 - RNA, 22 nt, Human
ugggauuacaggcacucaccac

SEQ ID NO: 1364277 - RNA, 24 nt, Human
ugggauuacaggcacucaccacca

SEQ ID NO: 1364278 - RNA, 18 nt, Human
ugggauuauaggcgugag

SEQ ID NO: 1364279 - RNA, 21 nt, Human
ugggauuauaggcgugagcca

SEQ ID NO: 1364280 - RNA, 22 nt, Human
ugggauuauaggcgugagccac

SEQ ID NO: 1364281 - RNA, 23 nt, Human
ugggauuauaggcgugagccacc

SEQ ID NO: 1364282 - RNA, 23 nt, Human
ugggauuauaggcgugagccacc

SEQ ID NO: 1364283 - RNA, 24 nt, Human
ugggauuauaggcgugagccaccg

SEQ ID NO: 1364284 - RNA, 19 nt, Human
uggggcuggugggggugga

SEQ ID NO: 1364285 - RNA, 22 nt, Human
uggggcugguggggguggaggc

SEQ ID NO: 1364286 - RNA, 18 nt, Human
ugggguugguggggggca

SEQ ID NO: 1364287 - RNA, 19 nt, Human
ugggguugguggggggcag

SEQ ID NO: 1364288 - RNA, 24 nt, Human
ugguggggggcagcugcagggguc

SEQ ID NO: 1364289 - RNA, 20 nt, Human
uggugggguugguggggggc

SEQ ID NO: 1364290 - RNA, 21 nt, Human
uguccaggcuggagugaaaug

SEQ ID NO: 1364291 - RNA, 24 nt, Human
uguccaggcuggagugaaauggca

SEQ ID NO: 1364292 - RNA, 21 nt, Human
ugugaccgaccaccacuuacc

SEQ ID NO: 1364293 - RNA, 19 nt, Human
uguugucggggcgccagcu

SEQ ID NO: 1364294 - RNA, 22 nt, Human
uuaguagaaacgggguuucucc

SEQ ID NO: 1364295 - RNA, 24 nt, Human
uuaguagaaacgggguuucuccau

SEQ ID NO: 1364296 - RNA, 19 nt, Human
uucagagcaugcauuaaag

SEQ ID NO: 1364297 - RNA, 20 nt, Human
uucgagauggagaaaagagg

SEQ ID NO: 1364298 - RNA, 18 nt, Human
uucuagugauucuccugc

SEQ ID NO: 1364299 - RNA, 23 nt, Human
uucuagugauucuccugccucag

SEQ ID NO: 1364300 - RNA, 26 nt, Human
uucucccuuuuccucagcaguguccc

SEQ ID NO: 1364301 - RNA, 23 nt, Human
uugcucuuguuguccaggcugga

SEQ ID NO: 1364302 - RNA, 18 nt, Human
uugguggggggcagcugc

SEQ ID NO: 1364303 - RNA, 23 nt, Human
uuguauuuuuaguagaaacgggg

SEQ ID NO: 1364304 - RNA, 21 nt, Human
uuguccaggcuggagugaaau

SEQ ID NO: 1364305 - RNA, 20 nt, Human
uugucggggcgccagcuguc

SEQ ID NO: 1364306 - RNA, 21 nt, Human
uuguuguccaggcuggaguga

SEQ ID NO: 1364307 - RNA, 23 nt, Human
uuucuccauguugcccaggcugg

SEQ ID NO: 1364308 - RNA, 19 nt, Human
uuuuuguauuuuuaguaga

SEQ ID NO: 1364309 - RNA, 20 nt, Human
uuuuuguuuuuuucucccuu

SEQ ID NO: 1364310 - RNA, 18 nt, Human
uuuuuuguauuuuuagua

SEQ ID NO: 1364311 - RNA, 24 nt, Human
aaaaggcaggacagaauuacaaug

SEQ ID NO: 1364312 - RNA, 19 nt, Human
aaaauccacccgagugcac

SEQ ID NO: 1364313 - RNA, 19 nt, Human
aaacccacagaaaauccac

SEQ ID NO: 1364314 - RNA, 18 nt, Human
aaaggcugcucaggcagg

SEQ ID NO: 1364315 - RNA, 18 nt, Human
aaaguccuucagcuucuc

SEQ ID NO: 1364316 - RNA, 18 nt, Human
aaauggagggacugccca

SEQ ID NO: 1364317 - RNA, 21 nt, Human
aaccaggaaggagccauagcc

SEQ ID NO: 1364318 - RNA, 23 nt, Human
aaccaggaaggagccauagccca

SEQ ID NO: 1364319 - RNA, 21 nt, Human
aacccugguucccccagcccc

SEQ ID NO: 1364320 - RNA, 28 nt, Human
aagagcagcaaggagcugaccgguaccc

SEQ ID NO: 1364321 - RNA, 19 nt, Human
aagcggcuguuugaggagc

SEQ ID NO: 1364322 - RNA, 22 nt, Human
aagcugacacccgcuguccuga

SEQ ID NO: 1364323 - RNA, 21 nt, Human
aagcuggucuccacacagugc

SEQ ID NO: 1364324 - RNA, 19 nt, Human
aaggagacgcgcugcugcu

SEQ ID NO: 1364325 - RNA, 21 nt, Human
aaggagacgcgcugcugcugc

SEQ ID NO: 1364326 - RNA, 20 nt, Human
acacaugcacacauggcuac

SEQ ID NO: 1364327 - RNA, 18 nt, Human
acaugggggucaggcaag

SEQ ID NO: 1364328 - RNA, 21 nt, Human
acccacagaaaauccacccga

SEQ ID NO: 1364329 - RNA, 23 nt, Human
acccagagccucacuuguucagg

SEQ ID NO: 1364330 - RNA, 23 nt, Human
acccgagugcacugagcacgcca

SEQ ID NO: 1364331 - RNA, 21 nt, Human
acccugguucccccagccccc

SEQ ID NO: 1364332 - RNA, 21 nt, Human
accuugauggccuucuugcug

SEQ ID NO: 1364333 - RNA, 21 nt, Human
accuugcuccugcuccuucug

SEQ ID NO: 1364334 - RNA, 24 nt, Human
acucccugcuuccucucuagcccc

SEQ ID NO: 1364335 - RNA, 21 nt, Human
acugacuuccgcaaccaccug

SEQ ID NO: 1364336 - RNA, 19 nt, Human
agaaguccagagcucuaca

SEQ ID NO: 1364337 - RNA, 22 nt, Human
agacagaaguccccgccccagc

SEQ ID NO: 1364338 - RNA, 24 nt, Human
agagcagggguugggcagaaagca

SEQ ID NO: 1364339 - RNA, 20 nt, Human
agaggcacggggaaauggag

SEQ ID NO: 1364340 - RNA, 19 nt, Human
agcaaggagcugacagagc

SEQ ID NO: 1364341 - RNA, 18 nt, Human
agcagaccugcagggccc

SEQ ID NO: 1364342 - RNA, 20 nt, Human
agcagcgcuggguacaagcu

SEQ ID NO: 1364343 - RNA, 18 nt, Human
agcagcuuguccuggcug

SEQ ID NO: 1364344 - RNA, 18 nt, Human
agccaccucccagccacc

SEQ ID NO: 1364345 - RNA, 22 nt, Human
agccgggagguggggaacaggg

SEQ ID NO: 1364346 - RNA, 25 nt, Human
agcuguguggccucaagccagccuu

SEQ ID NO: 1364347 - RNA, 21 nt, Human
aggaagaaaaaggcaggacag

SEQ ID NO: 1364348 - RNA, 23 nt, Human
aggaagaaaaaggcaggacagaa

SEQ ID NO: 1364349 - RNA, 26 nt, Human
aggaaggagccauagcccaggcagga

SEQ ID NO: 1364350 - RNA, 20 nt, Human
aggaaugaggaacccagagc

SEQ ID NO: 1364351 - RNA, 20 nt, Human
aggacacaggggcaugggga

SEQ ID NO: 1364352 - RNA, 21 nt, Human
aggagccaccucccagccacc

SEQ ID NO: 1364353 - RNA, 24 nt, Human
aggagcuggggguggugguggggg

SEQ ID NO: 1364354 - RNA, 18 nt, Human
aggcaaaagcagcgcugg

SEQ ID NO: 1364355 - RNA, 22 nt, Human
aggcaagggcucugaagucagg

SEQ ID NO: 1364356 - RNA, 22 nt, Human
aggcaggagggcugaggaccuc

SEQ ID NO: 1364357 - RNA, 20 nt, Human
agggaagcaggucugagcaa

SEQ ID NO: 1364358 - RNA, 19 nt, Human
agggcugaggaccucuggu

SEQ ID NO: 1364359 - RNA, 25 nt, Human
auacagcagugaagcugaaaugaaa

SEQ ID NO: 1364360 - RNA, 22 nt, Human
aucagcugccaccccaucccag

SEQ ID NO: 1364361 - RNA, 22 nt, Human
auccaguccuccugguguguga

SEQ ID NO: 1364362 - RNA, 20 nt, Human
augaggaacccagagccuca

SEQ ID NO: 1364363 - RNA, 20 nt, Human
caagcacuucacagccccuc

SEQ ID NO: 1364364 - RNA, 25 nt, Human
caauggccugcaccuggcuccggcu

SEQ ID NO: 1364365 - RNA, 19 nt, Human
cacccugcagagcuggacc

SEQ ID NO: 1364366 - RNA, 23 nt, Human
caccuccccucaaacgaggagcc

SEQ ID NO: 1364367 - RNA, 23 nt, Human
cacgcacacaggaaaguccuuca

SEQ ID NO: 1364368 - RNA, 25 nt, Human
cacuccccagcccuccaaggccacu

SEQ ID NO: 1364369 - RNA, 20 nt, Human
cacugagcacgccagaaauc

SEQ ID NO: 1364370 - RNA, 24 nt, Human
cacuuaacaaacccacagaaaauc

SEQ ID NO: 1364371 - RNA, 20 nt, Human
cagagaugccuggagggaaa

SEQ ID NO: 1364372 - RNA, 24 nt, Human
cagagcaacggcccaagucugggu

SEQ ID NO: 1364373 - RNA, 22 nt, Human
cagagcugccaggccaggcccu

SEQ ID NO: 1364374 - RNA, 20 nt, Human
cagcauccaguccuccuggu

SEQ ID NO: 1364375 - RNA, 18 nt, Human
cagccucagaggcacggg

SEQ ID NO: 1364376 - RNA, 19 nt, Human
cagccuccucugggggaca

SEQ ID NO: 1364377 - RNA, 18 nt, Human
caggacacaggggcaugg

SEQ ID NO: 1364378 - RNA, 20 nt, Human
cagggcuggaggggaggagg

SEQ ID NO: 1364379 - RNA, 21 nt, Human
caggggccagcuggcaagagc

SEQ ID NO: 1364380 - RNA, 20 nt, Human
cagggucgaggaguugacgg

SEQ ID NO: 1364381 - RNA, 19 nt, Human
caucccagucagccuccuc

SEQ ID NO: 1364382 - RNA, 19 nt, Human
caugacacuccccagcccu

SEQ ID NO: 1364383 - RNA, 21 nt, Human
caugacacuccccagcccucc

SEQ ID NO: 1364384 - RNA, 22 nt, Human
caugugcccuaggggaagcagg

SEQ ID NO: 1364385 - RNA, 24 nt, Human
ccaaggcccuccgaccgcaggcuc

SEQ ID NO: 1364386 - RNA, 21 nt, Human
ccagagccucacuuguucagg

SEQ ID NO: 1364387 - RNA, 22 nt, Human
ccagcuuucgcuccuucaugcu

SEQ ID NO: 1364388 - RNA, 19 nt, Human
ccaggauggccaagggaug

SEQ ID NO: 1364389 - RNA, 23 nt, Human
ccaggccgggccucccgcccaca

SEQ ID NO: 1364390 - RNA, 22 nt, Human
ccagggcccgcucaccuugcuc

SEQ ID NO: 1364391 - RNA, 21 nt, Human
ccagucauccucguccuccuc

SEQ ID NO: 1364392 - RNA, 21 nt, Human
cccacagaaaauccacccgag

SEQ ID NO: 1364393 - RNA, 22 nt, Human
cccacccccaugacacucccca

SEQ ID NO: 1364394 - RNA, 19 nt, Human
cccagagccucacuuguuc

SEQ ID NO: 1364395 - RNA, 20 nt, Human
cccaguagccucaggacaca

SEQ ID NO: 1364396 - RNA, 20 nt, Human
ccccaagaggcucagagggc

SEQ ID NO: 1364397 - RNA, 25 nt, Human
ccccacccccaugacacuccccagc

SEQ ID NO: 1364398 - RNA, 19 nt, Human
ccccacccugcagagcugg

SEQ ID NO: 1364399 - RNA, 21 nt, Human
ccccacgcuggggaggccaga

SEQ ID NO: 1364400 - RNA, 18 nt, Human
ccccaugacacuccccag

SEQ ID NO: 1364401 - RNA, 22 nt, Human
ccccaugacacuccccagcccu

SEQ ID NO: 1364402 - RNA, 19 nt, Human
cccccaagucccucuucug

SEQ ID NO: 1364403 - RNA, 22 nt, Human
cccccaugacacuccccagccc

SEQ ID NO: 1364404 - RNA, 21 nt, Human
cccccuaggauucccagucau

SEQ ID NO: 1364405 - RNA, 19 nt, Human
cccccugcacaccuccugc

SEQ ID NO: 1364406 - RNA, 22 nt, Human
cccccuggcuccuggcccaugu

SEQ ID NO: 1364407 - RNA, 21 nt, Human
ccccucggcccugccuucugg

SEQ ID NO: 1364408 - RNA, 20 nt, Human
ccccugagcuagccaugcuc

SEQ ID NO: 1364409 - RNA, 30 nt, Human; identical to SEQ ID NO: 504575

SEQ ID NO: 1364410 - RNA, 24 nt, Human
cccgcccacaccccucggcccugc

SEQ ID NO: 1364411 - RNA, 21 nt, Human
cccucaaacgaggagccccac

SEQ ID NO: 1364412 - RNA, 19 nt, Human
cccuccgaccgcaggcucc

SEQ ID NO: 1364413 - RNA, 20 nt, Human
cccuggacuggagccgggag

SEQ ID NO: 1364414 - RNA, 18 nt, Human
ccgcaaccaccugagcgc

SEQ ID NO: 1364415 - RNA, 23 nt, Human
ccucccgagccgagccaccccag

SEQ ID NO: 1364416 - RNA, 19 nt, Human
ccucccgcccacaccccuc

SEQ ID NO: 1364417 - RNA, 21 nt, Human
ccucugguggcagcccagggc

SEQ ID NO: 1364418 - RNA, 18 nt, Human
ccugcacaccuccugcuu

SEQ ID NO: 1364419 - RNA, 24 nt, Human
ccugcaccuggcuccggcucugcu

SEQ ID NO: 1364420 - RNA, 25 nt, Human
ccuggcccaugugcugguccccugg

SEQ ID NO: 1364421 - RNA, 18 nt, Human
ccugggagggccaggaug

SEQ ID NO: 1364422 - RNA, 22 nt, Human
ccuucugcuucuucuucuccag

SEQ ID NO: 1364423 - RNA, 23 nt, Human
ccuucuggccauacagguucuag

SEQ ID NO: 1364424 - RNA, 23 nt, Human
cgcagcuuggccuugccgaugcc

SEQ ID NO: 1364425 - RNA, 20 nt, Human
cggcccagggcgggcagcgg

SEQ ID NO: 1364426 - RNA, 25 nt, Human
cuacaggggccgcgguuggccaggg

SEQ ID NO: 1364427 - RNA, 20 nt, Human
cuacaguuugaaagccacua

SEQ ID NO: 1364428 - RNA, 21 nt, Human
cucaaaaccauagugcccagg

SEQ ID NO: 1364429 - RNA, 21 nt, Human
cucagaggcacggggaaaugg

SEQ ID NO: 1364430 - RNA, 21 nt, Human
cucaguagggacaggcccuau

SEQ ID NO: 1364431 - RNA, 18 nt, Human
cuccacuauggcucccaa

SEQ ID NO: 1364432 - RNA, 19 nt, Human
cuccacuauggcucccaaa

SEQ ID NO: 1364433 - RNA, 21 nt, Human
cuccuccccagcauccagucc

SEQ ID NO: 1364434 - RNA, 20 nt, Human
cuccugucacaguuugagcu

SEQ ID NO: 1364435 - RNA, 19 nt, Human
cucggcccugccuucuggc

SEQ ID NO: 1364436 - RNA, 23 nt, Human
cucucaguagggacaggcccuau

SEQ ID NO: 1364437 - RNA, 23 nt, Human
cucucccacaucaucaggggcac

SEQ ID NO: 1364438 - RNA, 19 nt, Human
cugacacacgggcaaaggc

SEQ ID NO: 1364439 - RNA, 18 nt, Human
cugagcccauguuccucu

SEQ ID NO: 1364440 - RNA, 22 nt, Human
cugcucaggcagggcuggggaa

SEQ ID NO: 1364441 - RNA, 20 nt, Human
cugcucuaccugcugggaga

SEQ ID NO: 1364442 - RNA, 18 nt, Human
cuggauccuguggcgggg

SEQ ID NO: 1364443 - RNA, 21 nt, Human
cuguaccugugucugaugccc

SEQ ID NO: 1364444 - RNA, 22 nt, Human
cuguaccugugucugaugcccu

SEQ ID NO: 1364445 - RNA, 24 nt, Human
cugugugcagauacucccugcuuc

SEQ ID NO: 1364446 - RNA, 24 nt, Human
cuuccucucuagcccccacccugc

SEQ ID NO: 1364447 - RNA, 20 nt, Human
cuuggcacuggagaacaccu

SEQ ID NO: 1364448 - RNA, 24 nt, Human
cuuggccuugccgaugcccccagc

SEQ ID NO: 1364449 - RNA, 24 nt, Human
gaaacccugguucccccagccccc

SEQ ID NO: 1364450 - RNA, 20 nt, Human
gaagacauacuucuuguacc

SEQ ID NO: 1364451 - RNA, 23 nt, Human
gacacaggggcauggggacuacc

SEQ ID NO: 1364452 - RNA, 24 nt, Human
gagaacaccuguggacacagggac

SEQ ID NO: 1364453 - RNA, 24 nt, Human
gagcagcaaggagcugacagagcu

SEQ ID NO: 1364454 - RNA, 18 nt, Human
gagcagggguugggcaga

SEQ ID NO: 1364455 - RNA, 19 nt, Human
gagccugcugggagggaag

SEQ ID NO: 1364456 - RNA, 18 nt, Human
gagcugggggugguggug

SEQ ID NO: 1364457 - RNA, 21 nt, Human
gcacuggagaacaccugugga

SEQ ID NO: 1364458 - RNA, 18 nt, Human
gcagccagcagaccugca

SEQ ID NO: 1364459 - RNA, 18 nt, Human
gcagcccagggcuuccag

SEQ ID NO: 1364460 - RNA, 24 nt, Human
gcagcgcuggguacaagcucaaaa

SEQ ID NO: 1364461 - RNA, 19 nt, Human
gcaggggccagcuggcaag

SEQ ID NO: 1364462 - RNA, 21 nt, Human
gccaaggagaccuucucucca

SEQ ID NO: 1364463 - RNA, 20 nt, Human
gcccaagucugggucugggg

SEQ ID NO: 1364464 - RNA, 22 nt, Human
gcccacaccccucggcccugcc

SEQ ID NO: 1364465 - RNA, 26 nt, Human
gccuggagggaaaaggcugagugagg

SEQ ID NO: 1364466 - RNA, 18 nt, Human
gccugggccaaggagacc

SEQ ID NO: 1364467 - RNA, 21 nt, Human
gccugggcgagaagaaagccc

SEQ ID NO: 1364468 - RNA, 18 nt, Human
gcgcgggcauccugugug

SEQ ID NO: 1364469 - RNA, 23 nt, Human
gcuccugcuccuucugcuucuuc

SEQ ID NO: 1364470 - RNA, 20 nt, Human
gcuguguggccucaagccag

SEQ ID NO: 1364471 - RNA, 25 nt, Human
ggaaacccugguucccccagccccc

SEQ ID NO: 1364472 - RNA, 18 nt, Human
ggaaugaggaacccagag

SEQ ID NO: 1364473 - RNA, 21 nt, Human
ggaccucugguggcagcccag

SEQ ID NO: 1364474 - RNA, 18 nt, Human
ggacuggagccgggaggu

SEQ ID NO: 1364475 - RNA, 24 nt, Human
ggacuggagccgggagguggggaa

SEQ ID NO: 1364476 - RNA, 18 nt, Human
ggagaccuucucuccaau

SEQ ID NO: 1364477 - RNA, 19 nt, Human
ggagcugacagagcugaug

SEQ ID NO: 1364478 - RNA, 22 nt, Human
ggagcugggggugguggugggg

SEQ ID NO: 1364479 - RNA, 21 nt, Human
ggagggcugaggaccucuggu

SEQ ID NO: 1364480 - RNA, 21 nt, Human
ggaggggaggaggcgaucuug

SEQ ID NO: 1364481 - RNA, 23 nt, Human
ggauccuguggcgggggcgucuc

SEQ ID NO: 1364482 - RNA, 19 nt, Human
ggcacggggaaauggaggg

SEQ ID NO: 1364483 - RNA, 18 nt, Human
ggcaggaagaggguggag

SEQ ID NO: 1364484 - RNA, 25 nt, Human
ggcugaccauugccuuggaccgcuc

SEQ ID NO: 1364485 - RNA, 18 nt, Human
ggcugcugcgguggcggc

SEQ ID NO: 1364486 - RNA, 19 nt, Human
gggaaauggagggacugcc

SEQ ID NO: 1364487 - RNA, 21 nt, Human
gggcagccucagaggcacggg

SEQ ID NO: 1364488 - RNA, 21 nt, Human
gggccccaagaggcucagagg

SEQ ID NO: 1364489 - RNA, 18 nt, Human
gggccccucaccagcccc

SEQ ID NO: 1364490 - RNA, 18 nt, Human
ggggaacagggcaaggag

SEQ ID NO: 1364491 - RNA, 23 nt, Human
ggggucgaccacuucccugggag

SEQ ID NO: 1364492 - RNA, 22 nt, Human
ggguacuuggcacuggagaaca

SEQ ID NO: 1364493 - RNA, 19 nt, Human
gggugguggugggggcggu

SEQ ID NO: 1364494 - RNA, 22 nt, Human
ggugggagugggggugcacugg

SEQ ID NO: 1364495 - RNA, 22 nt, Human
ggugggggcgguggggguggug

SEQ ID NO: 1364496 - RNA, 20 nt, Human
gguggugggggcgguggggg

SEQ ID NO: 1364497 - RNA, 23 nt, Human
guaccugugucugaugcccuggg

SEQ ID NO: 1364498 - RNA, 25 nt, Human
gucaccuccccucaaacgaggagcc

SEQ ID NO: 1364499 - RNA, 23 nt, Human
guccagggggcggugcuugcucu

SEQ ID NO: 1364500 - RNA, 19 nt, Human
guggcgcaggcugggugga

SEQ ID NO: 1364501 - RNA, 21 nt, Human
guggcugcugcgguggcggca

SEQ ID NO: 1364502 - RNA, 18 nt, Human
guuccgucacccccuccc

SEQ ID NO: 1364503 - RNA, 18 nt, Human
uacacaugcacacauggc

SEQ ID NO: 1364504 - RNA, 23 nt, Human
uacagcagugaagcugaaaugaa

SEQ ID NO: 1364505 - RNA, 22 nt, Human
uaccuacagaggugacaugggg

SEQ ID NO: 1364506 - RNA, 23 nt, Human
uaggggaagcaggggccagcugg

SEQ ID NO: 1364507 - RNA, 18 nt, Human
ucagagcaacggcccaag

SEQ ID NO: 1364508 - RNA, 24 nt, Human
ucagagcaacggcccaagucuggg

SEQ ID NO: 1364509 - RNA, 24 nt, Human
ucagagccucagucgaucccugac

SEQ ID NO: 1364510 - RNA, 22 nt, Human
ucagaggcacggggaaauggag

SEQ ID NO: 1364511 - RNA, 23 nt, Human
ucaggagcugggggugguggugg

SEQ ID NO: 1364512 - RNA, 19 nt, Human
ucagggcuggaggggagga

SEQ ID NO: 1364513 - RNA, 18 nt, Human
uccaaggccacuguguuu

SEQ ID NO: 1364514 - RNA, 23 nt, Human
uccagcuuucgcuccuucaugcu

SEQ ID NO: 1364515 - RNA, 21 nt, Human
ucccaaaccaggaaggagcca

SEQ ID NO: 1364516 - RNA, 22 nt, Human
ucccaaaccaggaaggagccau

SEQ ID NO: 1364517 - RNA, 22 nt, Human
ucccagucauccucguccuccu

SEQ ID NO: 1364518 - RNA, 21 nt, Human
uccccacccccaugacacucc

SEQ ID NO: 1364519 - RNA, 18 nt, Human
uccccagcauccaguccu

SEQ ID NO: 1364520 - RNA, 24 nt, Human
uccccagcccuccaaggccacugu

SEQ ID NO: 1364521 - RNA, 21 nt, Human
ucccugcacucucaguaggga

SEQ ID NO: 1364522 - RNA, 22 nt, Human
ucccugcuuccucucuagcccc

SEQ ID NO: 1364523 - RNA, 21 nt, Human
uccucugccuguggcugcugc

SEQ ID NO: 1364524 - RNA, 26 nt, Human
ucgcuccuucaugcugcgcagcuugg

SEQ ID NO: 1364525 - RNA, 23 nt, Human
ucggcccugccuucuggccauac

SEQ ID NO: 1364526 - RNA, 23 nt, Human
ucuagcccccacccugcagagcu

SEQ ID NO: 1364527 - RNA, 21 nt, Human
ucuccaauggccugcaccugg

SEQ ID NO: 1364528 - RNA, 24 nt, Human
ucuccaauggccugcaccuggcuc

SEQ ID NO: 1364529 - RNA, 25 nt, Human
ucuccaauggccugcaccuggcucc

SEQ ID NO: 1364530 - RNA, 28 nt, Human
ucuccacacagugcugguuccgucaccc

SEQ ID NO: 1364531 - RNA, 26 nt, Human
ucucuaaaaauaucucaggaggcugc

SEQ ID NO: 1364532 - RNA, 18 nt, Human
ucugguggcagcccaggg

SEQ ID NO: 1364533 - RNA, 19 nt, Human
ucugguggcagcccagggc

SEQ ID NO: 1364534 - RNA, 23 nt, Human
ugaaauggaaacuauucaaaaaa

SEQ ID NO: 1364535 - RNA, 20 nt, Human
ugaagagauccgacaucaag

SEQ ID NO: 1364536 - RNA, 21 nt, Human
ugaagagcagcaaggagcuga

SEQ ID NO: 1364537 - RNA, 21 nt, Human
ugacacacgggcaaaggcucc

SEQ ID NO: 1364538 - RNA, 18 nt, Human
ugacacuccccagcccuc

SEQ ID NO: 1364539 - RNA, 22 nt, Human
ugacacuccccagcccuccaag

SEQ ID NO: 1364540 - RNA, 22 nt, Human
ugagaaagcggcuguuugagga

SEQ ID NO: 1364541 - RNA, 19 nt, Human
ugagcuuagagaggaaagc

SEQ ID NO: 1364542 - RNA, 18 nt, Human
ugagggugguugguggga

SEQ ID NO: 1364543 - RNA, 23 nt, Human
ugaugagaaagcggcuguuugag

SEQ ID NO: 1364544 - RNA, 23 nt, Human
ugcaccuggcuccggcucugcuc

SEQ ID NO: 1364545 - RNA, 18 nt, Human
ugcaggcgcucuggagca

SEQ ID NO: 1364546 - RNA, 23 nt, Human
ugccagggccgaucuuggugcca

SEQ ID NO: 1364547 - RNA, 20 nt, Human
ugcccuaggggaagcagggg

SEQ ID NO: 1364548 - RNA, 21 nt, Human
ugcccuggguccccacuaagc

SEQ ID NO: 1364549 - RNA, 21 nt, Human
ugcccuugaucuucucaaucu

SEQ ID NO: 1364550 - RNA, 21 nt, Human
ugccuccuacccuugcgccuc

SEQ ID NO: 1364551 - RNA, 18 nt, Human
ugccuggggucacagagc

SEQ ID NO: 1364552 - RNA, 20 nt, Human
ugccuuggaccgcucuuggc

SEQ ID NO: 1364553 - RNA, 20 nt, Human
ugcgguggcggcagaggagg

SEQ ID NO: 1364554 - RNA, 24 nt, Human
ugcuccccacccccugcacaccuc

SEQ ID NO: 1364555 - RNA, 24 nt, Human
ugcuccugcuccuucugcuucuuc

SEQ ID NO: 1364556 - RNA, 20 nt, Human
ugcucugacagucucaguug

SEQ ID NO: 1364557 - RNA, 20 nt, Human
ugcugcugcugucguccugc

SEQ ID NO: 1364558 - RNA, 18 nt, Human
ugcugggaagacccccaa

SEQ ID NO: 1364559 - RNA, 19 nt, Human
ugcuuggcaggaagagggu

SEQ ID NO: 1364560 - RNA, 20 nt, Human
uggaccccugagcuagccuc

SEQ ID NO: 1364561 - RNA, 25 nt, Human
uggauccuguggcgggggcgucucu

SEQ ID NO: 1364562 - RNA, 19 nt, Human
uggcaagagcagggguugg

SEQ ID NO: 1364563 - RNA, 21 nt, Human
uggcacuggagaacaccugug

SEQ ID NO: 1364564 - RNA, 22 nt, Human
uggcagcccagggcuuccagca

SEQ ID NO: 1364565 - RNA, 22 nt, Human
uggccaagggauggugaauauu

SEQ ID NO: 1364566 - RNA, 21 nt, Human
uggccuucuugcugcccuuga

SEQ ID NO: 1364567 - RNA, 21 nt, Human
uggcgcaggcuggguggagcc

SEQ ID NO: 1364568 - RNA, 24 nt, Human
uggcggcagaggagggauggaguc

SEQ ID NO: 1364569 - RNA, 18 nt, Human
uggcgggggcgucucugc

SEQ ID NO: 1364570 - RNA, 21 nt, Human
uggcucccuguccccaccccc

SEQ ID NO: 1364571 - RNA, 21 nt, Human
ugggagggccaggauggccaa

SEQ ID NO: 1364572 - RNA, 19 nt, Human
ugggcacugaugagaaagc

SEQ ID NO: 1364573 - RNA, 18 nt, Human
ugggcagcagggcagaga

SEQ ID NO: 1364574 - RNA, 19 nt, Human
ugggcugcuccccaccccc

SEQ ID NO: 1364575 - RNA, 22 nt, Human
uggggaggccagaccuuugaag

SEQ ID NO: 1364576 - RNA, 18 nt, Human
uggguacaagcucaaaac

SEQ ID NO: 1364577 - RNA, 23 nt, Human
ugguggcagcccagggcuuccag

SEQ ID NO: 1364578 - RNA, 22 nt, Human
uggugggggcgguggggguggu

SEQ ID NO: 1364579 - RNA, 21 nt, Human
ugguuggugggaaacccuggu

SEQ ID NO: 1364580 - RNA, 19 nt, Human
ugucauggagcccccuagg

SEQ ID NO: 1364581 - RNA, 18 nt, Human
uguccaagagccugcugg

SEQ ID NO: 1364582 - RNA, 24 nt, Human
uguccaagagccugcugggaggga

SEQ ID NO: 1364583 - RNA, 24 nt, Human
uguccccacccccaugacacuccc

SEQ ID NO: 1364584 - RNA, 21 nt, Human
uuacacaugcacacauggcua

SEQ ID NO: 1364585 - RNA, 23 nt, Human
uucaaaaaauugagaauuucuga

SEQ ID NO: 1364586 - RNA, 22 nt, Human
uucuccugggagggccaggaug

SEQ ID NO: 1364587 - RNA, 22 nt, Human
uugauggccuucuugcugcccu

SEQ ID NO: 1364588 - RNA, 22 nt, Human
uugccagggccgaucuuggugc

SEQ ID NO: 1364589 - RNA, 18 nt, Human
uugcugggaagaccccca

SEQ ID NO: 1364590 - RNA, 22 nt, Human
uuggugugccguuuucucugga

SEQ ID NO: 1364591 - RNA, 19 nt, Human
uugugccacuucuggaugc

SEQ ID NO: 1364592 - RNA, 22 nt, Human
accuuaagacaauguuaacagg

SEQ ID NO: 1364593 - RNA, 20 nt, Human
agaaguugccagcugcauuu

SEQ ID NO: 1364594 - RNA, 18 nt, Human
aggagcagacagacagca

SEQ ID NO: 1364595 - RNA, 19 nt, Human
agugcuugccagacuggcu

SEQ ID NO: 1364596 - RNA, 20 nt, Human
caagcugcgggcagagcuga

SEQ ID NO: 1364597 - RNA, 20 nt, Human
caccugggggagaaguugcc

SEQ ID NO: 1364598 - RNA, 21 nt, Human
cagcaggugggccagcccuuc

SEQ ID NO: 1364599 - RNA, 24 nt, Human
cagcccuugggacacuccugcccc

SEQ ID NO: 1364600 - RNA, 21 nt, Human
cagcucuuguuuugccagggg

SEQ ID NO: 1364601 - RNA, 20 nt, Human
ccagacuggcuugagcagca

SEQ ID NO: 1364602 - RNA, 23 nt, Human
ccaggggagagacauguacaagc

SEQ ID NO: 1364603 - RNA, 18 nt, Human
cgcucagagcgggaagag

SEQ ID NO: 1364604 - RNA, 21 nt, Human
cucuccccagaaggaccucga

SEQ ID NO: 1364605 - RNA, 21 nt, Human
cucuguccacuuacacucucc

SEQ ID NO: 1364606 - RNA, 19 nt, Human
gacacggugaacgaagggu

SEQ ID NO: 1364607 - RNA, 18 nt, Human
gacauguacaagcugcgg

SEQ ID NO: 1364608 - RNA, 18 nt, Human
gaccucgaggcugggcug

SEQ ID NO: 1364609 - RNA, 23 nt, Human
gagcaaaggccggcagcaggggg

SEQ ID NO: 1364610 - RNA, 20 nt, Human
gccagcccuugggacacucc

SEQ ID NO: 1364611 - RNA, 22 nt, Human
ggagagacauguacaagcugcg

SEQ ID NO: 1364612 - RNA, 25 nt, Human
gggaaggcaccugggggagaaguug

SEQ ID NO: 1364613 - RNA, 19 nt, Human
gggcagagcugaaucgcuc

SEQ ID NO: 1364614 - RNA, 20 nt, Human
guccacuuacacucucccca

SEQ ID NO: 1364615 - RNA, 22 nt, Human
uaggaggagcagacagacagca

SEQ ID NO: 1364616 - RNA, 25 nt, Human
uaggaggagcagacagacagcaggu

SEQ ID NO: 1364617 - RNA, 20 nt, Human
uauuuugagagauguuggaa

SEQ ID NO: 1364618 - RNA, 19 nt, Human
ugaugauuaaaacagaauc

SEQ ID NO: 1364619 - RNA, 24 nt, Human
ugaugauuaaaacagaaucuuggu

SEQ ID NO: 1364620 - RNA, 18 nt, Human
ugccaggggagagacaug

SEQ ID NO: 1364621 - RNA, 25 nt, Human
uggaagaaaacaauguaaaugauga

SEQ ID NO: 1364622 - RNA, 26 nt, Human
uggguuagggaggguauacgaggggg

SEQ ID NO: 1364623 - RNA, 20 nt, Human
uguaaaugaugauuaaaaca

SEQ ID NO: 1364624 - RNA, 20 nt, Human
uuaaaacagaaucuugguuc

SEQ ID NO: 1364625 - RNA, 21 nt, Human
uuaaaacagaaucuugguuca

SEQ ID NO: 1364626 - RNA, 25 nt, Human
uuugagagauguuggaagugaagga

SEQ ID NO: 1364627 - RNA, 18 nt, Human
uuuguucuuacucagaac

SEQ ID NO: 1364628 - RNA, 22 nt, Human
uuuuauuuugagagauguugga

SEQ ID NO: 1364629 - RNA, 23 nt, Human
aaaaaaaccagaccaccacuggg

SEQ ID NO: 1364630 - RNA, 20 nt, Human
aaaacaaaagcugacagaaa

SEQ ID NO: 1364631 - RNA, 22 nt, Human
aaaacaaaagcugacagaaaga

SEQ ID NO: 1364632 - RNA, 19 nt, Human
aaauggccauacaauccug

SEQ ID NO: 1364633 - RNA, 20 nt, Human
aacagaagaaccauguugga

SEQ ID NO: 1364634 - RNA, 20 nt, Human
aagcaggggcaggacacacg

SEQ ID NO: 1364635 - RNA, 21 nt, Human
acaaaagcugacagaaagacg

SEQ ID NO: 1364636 - RNA, 22 nt, Human
acaaugccaagcacacccaugc

SEQ ID NO: 1364637 - RNA, 22 nt, Human
acagaaagacggaugcugaaaa

SEQ ID NO: 1364638 - RNA, 22 nt, Human
acagaagaaccauguuggaugg

SEQ ID NO: 1364639 - RNA, 23 nt, Human
acauaagacccuccccgcugacu

SEQ ID NO: 1364640 - RNA, 23 nt, Human
acccuagauucucugggacucac

SEQ ID NO: 1364641 - RNA, 23 nt, Human
acgucgcgucgccgccgccgccc

SEQ ID NO: 1364642 - RNA, 22 nt, Human
agaaaagagaugacacugagaa

SEQ ID NO: 1364643 - RNA, 20 nt, Human
agaaggugcucaacaggccc

SEQ ID NO: 1364644 - RNA, 22 nt, Human
agaucuuucccaaaccugaaau

SEQ ID NO: 1364645 - RNA, 23 nt, Human
agcaacagaacgccgacuccagc

SEQ ID NO: 1364646 - RNA, 18 nt, Human
agcgccucucaaaggagu

SEQ ID NO: 1364647 - RNA, 21 nt, Human
agcuuugggaucuagucucag

SEQ ID NO: 1364648 - RNA, 23 nt, Human
aggcauucugagcuuugggaucu

SEQ ID NO: 1364649 - RNA, 20 nt, Human
agggauggggcgcccauucu

SEQ ID NO: 1364650 - RNA, 21 nt, Human
auaaaacaaaagcugacagaa

SEQ ID NO: 1364651 - RNA, 21 nt, Human
auaagacccuccccgcugacu

SEQ ID NO: 1364652 - RNA, 22 nt, Human
aucucugauaaaacaaaagcug

SEQ ID NO: 1364653 - RNA, 19 nt, Human
caaaaaaaaccagaccacc

SEQ ID NO: 1364654 - RNA, 20 nt, Human
caaaaccagaguucugcagg

SEQ ID NO: 1364655 - RNA, 19 nt, Human
caagauggggaccugauua

SEQ ID NO: 1364656 - RNA, 21 nt, Human
cacaaaaaaaaccagaccacc

SEQ ID NO: 1364657 - RNA, 21 nt, Human
cacacaggccucaaccggggc

SEQ ID NO: 1364658 - RNA, 18 nt, Human
cacaguuugcaacaggau

SEQ ID NO: 1364659 - RNA, 18 nt, Human
cacauccccccuugccau

SEQ ID NO: 1364660 - RNA, 23 nt, Human
caccagaagcaacagaacgccga

SEQ ID NO: 1364661 - RNA, 19 nt, Human
cacgauuccugggccuggc

SEQ ID NO: 1364662 - RNA, 20 nt, Human
cagaaggugcucaacaggcc

SEQ ID NO: 1364663 - RNA, 21 nt, Human
cagaaggugcucaacaggccc

SEQ ID NO: 1364664 - RNA, 22 nt, Human
cagagugauuccuggagaugca

SEQ ID NO: 1364665 - RNA, 18 nt, Human
cagcacacaggccucaac

SEQ ID NO: 1364666 - RNA, 25 nt, Human
cagcaggaagaaugauuucugugac

SEQ ID NO: 1364667 - RNA, 20 nt, Human
caggugguagcucucaucuc

SEQ ID NO: 1364668 - RNA, 23 nt, Human
caucucacaaaaaaaaccagacc

SEQ ID NO: 1364669 - RNA, 23 nt, Human
caucuuaucucugauaaaacaaa

SEQ ID NO: 1364670 - RNA, 18 nt, Human
cauggguccucuggacac

SEQ ID NO: 1364671 - RNA, 23 nt, Human
ccagcugccuaaccuugaccaag

SEQ ID NO: 1364672 - RNA, 21 nt, Human
ccaggugguagcucucaucuc

SEQ ID NO: 1364673 - RNA, 26 nt, Human
ccagucacuucagaucaguuaauucu

SEQ ID NO: 1364674 - RNA, 20 nt, Human
ccagucuguaccacgacagc

SEQ ID NO: 1364675 - RNA, 23 nt, Human
cccagaagcccaaacuucucagc

SEQ ID NO: 1364676 - RNA, 21 nt, Human
cccccgccgccuccuccuccu

SEQ ID NO: 1364677 - RNA, 23 nt, Human
cccgggccccgcgcggccccgag

SEQ ID NO: 1364678 - RNA, 18 nt, Human
cccuugaggagaaguugu

SEQ ID NO: 1364679 - RNA, 25 nt, Human
cccuugaggagaaguugugggggug

SEQ ID NO: 1364680 - RNA, 27 nt, Human
cccuugaggagaaguuguggggguggg

SEQ ID NO: 1364681 - RNA, 18 nt, Human
ccggccuccuggaccccc

SEQ ID NO: 1364682 - RNA, 21 nt, Human
ccuccuggacccccgccgccu

SEQ ID NO: 1364683 - RNA, 22 nt, Human
ccugacucugauggaaugugcu

SEQ ID NO: 1364684 - RNA, 21 nt, Human
ccuggacccccgccgccuccu

SEQ ID NO: 1364685 - RNA, 23 nt, Human
ccuggcccuguucacaguagcac

SEQ ID NO: 1364686 - RNA, 22 nt, Human
ccuugaggagaaguuguggggg

SEQ ID NO: 1364687 - RNA, 21 nt, Human
cgauggugggucaaaaccaga

SEQ ID NO: 1364688 - RNA, 18 nt, Human
cgcgucgccgccgccgcc

SEQ ID NO: 1364689 - RNA, 28 nt, Human
cggccuccuggacccccgccgccuccuu

SEQ ID NO: 1364690 - RNA, 22 nt, Human
cgucgcgucgccgccgccgccc

SEQ ID NO: 1364691 - RNA, 24 nt, Human
cuaacuuacuggcucucauuucac

SEQ ID NO: 1364692 - RNA, 19 nt, Human
cucacaaaaaaaaccagac

SEQ ID NO: 1364693 - RNA, 25 nt, Human
cucacaaaaaaaaccagaccaccac

SEQ ID NO: 1364694 - RNA, 20 nt, Human
cugaaaaccagccauauggu

SEQ ID NO: 1364695 - RNA, 26 nt, Human
cugaaaaccagccauaugguggacac

SEQ ID NO: 1364696 - RNA, 21 nt, Human
gacuggcucccagcagguaga

SEQ ID NO: 1364697 - RNA, 20 nt, Human
gcacccuagauucucuggga

SEQ ID NO: 1364698 - RNA, 21 nt, Human
gccagucuguaccacgacagc

SEQ ID NO: 1364699 - RNA, 20 nt, Human
gcccgggccccgcgcggccc

SEQ ID NO: 1364700 - RNA, 27 nt, Human
gcuuaaggccccuuccaacugccaguc

SEQ ID NO: 1364701 - RNA, 18 nt, Human
ggauuucaacccagaagc

SEQ ID NO: 1364702 - RNA, 22 nt, Human
ggcagaaaagagaugacacuga

SEQ ID NO: 1364703 - RNA, 20 nt, Human
ggggugggccugguggggag

SEQ ID NO: 1364704 - RNA, 23 nt, Human
gggugggccugguggggagggcg

SEQ ID NO: 1364705 - RNA, 20 nt, Human
gucgccgccgccgcccgggc

SEQ ID NO: 1364706 - RNA, 19 nt, Human
guggaacagaagaaccaug

SEQ ID NO: 1364707 - RNA, 23 nt, Human
uaaaacaaaagcugacagaaaga

SEQ ID NO: 1364708 - RNA, 19 nt, Human
uaaaaggucaugagcucug

SEQ ID NO: 1364709 - RNA, 21 nt, Human
uaacauaagacccuccccgcu

SEQ ID NO: 1364710 - RNA, 30 nt, Human
uacaagcuagaaaacuccagcucuggcacc

SEQ ID NO: 1364711 - RNA, 22 nt, Human
uaccacgacagcagugcugugg

SEQ ID NO: 1364712 - RNA, 20 nt, Human
uagaauugagcaugcccucc

SEQ ID NO: 1364713 - RNA, 19 nt, Human
uagauucucugggacucac

SEQ ID NO: 1364714 - RNA, 21 nt, Human
uagcucucaucucaucucaca

SEQ ID NO: 1364715 - RNA, 25 nt, Human
ucaccccucccagucacuucagauc

SEQ ID NO: 1364716 - RNA, 24 nt, Human
ucaccugauaacauaagacccucc

SEQ ID NO: 1364717 - RNA, 24 nt, Human
ucagaggcauucugagcuuuggga

SEQ ID NO: 1364718 - RNA, 23 nt, Human
ucagcacacaggccucaaccggg

SEQ ID NO: 1364719 - RNA, 20 nt, Human
ucaguuucuagcucuuccca

SEQ ID NO: 1364720 - RNA, 22 nt, Human
ucaguuucuagcucuucccaua

SEQ ID NO: 1364721 - RNA, 19 nt, Human
uccagauuuacaagcuaga

SEQ ID NO: 1364722 - RNA, 21 nt, Human
ucccaucccuguaucaugucc

SEQ ID NO: 1364723 - RNA, 22 nt, Human
ucccaucccuguaucauguccu

SEQ ID NO: 1364724 - RNA, 22 nt, Human
ucccugcccugcacccuagauu

SEQ ID NO: 1364725 - RNA, 18 nt, Human
uccuugguuccacauccc

SEQ ID NO: 1364726 - RNA, 23 nt, Human
ucgccgccgccgcccgggccccg

SEQ ID NO: 1364727 - RNA, 25 nt, Human
ucgcgacgucgcgucgccgccgccg

SEQ ID NO: 1364728 - RNA, 18 nt, Human
ucgcgucgccgccgccgc

SEQ ID NO: 1364729 - RNA, 24 nt, Human
ucucagaggcauucugagcuuugg

SEQ ID NO: 1364730 - RNA, 19 nt, Human
ucucugggacucacugcag

SEQ ID NO: 1364731 - RNA, 21 nt, Human
ucuggcacucagcacacaggc

SEQ ID NO: 1364732 - RNA, 25 nt, Human
ucugucuuuaagauucccguacuug

SEQ ID NO: 1364733 - RNA, 25 nt, Human
ucugugacaggaucaacuaacuuac

SEQ ID NO: 1364734 - RNA, 21 nt, Human
ugaccaagauggggaccugau

SEQ ID NO: 1364735 - RNA, 27 nt, Human
ugacuccugcucccugcccugcacccu

SEQ ID NO: 1364736 - RNA, 24 nt, Human
ugagacaggcugaaugcagagaau

SEQ ID NO: 1364737 - RNA, 25 nt, Human
ugagcaugcccuccuuucccauccc

SEQ ID NO: 1364738 - RNA, 22 nt, Human
ugagcgcaccauuccgaugcuu

SEQ ID NO: 1364739 - RNA, 18 nt, Human
ugaggagaaguugugggg

SEQ ID NO: 1364740 - RNA, 19 nt, Human
ugauucugguucucagagg

SEQ ID NO: 1364741 - RNA, 20 nt, Human
ugccaagcacacccaugcca

SEQ ID NO: 1364742 - RNA, 22 nt, Human
ugccaggcaguccuccugggcc

SEQ ID NO: 1364743 - RNA, 22 nt, Human
ugccagucuguaccacgacagc

SEQ ID NO: 1364744 - RNA, 25 nt, Human
uggaacagaagaaccauguuggaug

SEQ ID NO: 1364745 - RNA, 19 nt, Human
uggaaguuccagguggugc

SEQ ID NO: 1364746 - RNA, 20 nt, Human
uggcagaaaagagaugacac

SEQ ID NO: 1364747 - RNA, 19 nt, Human
uggccaggggucaauggga

SEQ ID NO: 1364748 - RNA, 18 nt, Human
uggcuggaugacuuuuag

SEQ ID NO: 1364749 - RNA, 20 nt, Human
ugggagccucucuuuuuccu

SEQ ID NO: 1364750 - RNA, 20 nt, Human
uggggagggcgauaggcugg

SEQ ID NO: 1364751 - RNA, 22 nt, Human
ugggggugggccugguggggag

SEQ ID NO: 1364752 - RNA, 19 nt, Human
ugugaaguuguuuuguuuu

SEQ ID NO: 1364753 - RNA, 19 nt, Human
ugugggggugggccuggug

SEQ ID NO: 1364754 - RNA, 24 nt, Human
uguuuuguuuuccucucucuuucc

SEQ ID NO: 1364755 - RNA, 23 nt, Human
uuaaaugcuaauacaaaaacauc

SEQ ID NO: 1364756 - RNA, 19 nt, Human
uucacaguuugcaacagga

SEQ ID NO: 1364757 - RNA, 22 nt, Human
uuccuggagaugcaaucuggga

SEQ ID NO: 1364758 - RNA, 19 nt, Human
uuccuucgguggcucuggc

SEQ ID NO: 1364759 - RNA, 18 nt, Human
uucucaccagaagcaaca

SEQ ID NO: 1364760 - RNA, 22 nt, Human
uugugggggugggccugguggg

SEQ ID NO: 1364761 - RNA, 18 nt, Human
uuuccaggugguagcucu

SEQ ID NO: 1364762 - RNA, 23 nt, Human
aaaaaaaaacaacaacuagagga

SEQ ID NO: 1364763 - RNA, 21 nt, Human
aaaaaaaacaacaacuagagg

SEQ ID NO: 1364764 - RNA, 22 nt, Human
aaaaaaaacaacaacuagagga

SEQ ID NO: 1364765 - RNA, 26 nt, Human
aaaaaacuuggucucagacccuagac

SEQ ID NO: 1364766 - RNA, 22 nt, Human
aaagaaaacaagccagcgaggg

SEQ ID NO: 1364767 - RNA, 24 nt, Human
aaagugcugggauuacaggcauga

SEQ ID NO: 1364768 - RNA, 19 nt, Human
aacacuuuggugaggcuga

SEQ ID NO: 1364769 - RNA, 22 nt, Human
aacacuuuggugaggcugaggc

SEQ ID NO: 1364770 - RNA, 20 nt, Human
aaccccuccccgaaaaaaaa

SEQ ID NO: 1364771 - RNA, 20 nt, Human
aagcccaggaguucgagacc

SEQ ID NO: 1364772 - RNA, 23 nt, Human
aagcgcuggcucggccaggugug

SEQ ID NO: 1364773 - RNA, 19 nt, Human
aaguagcugggauuacagg

SEQ ID NO: 1364774 - RNA, 25 nt, Human
aaguagcugggauuacaggcgcccg

SEQ ID NO: 1364775 - RNA, 19 nt, Human
aagugcugggauuacaggc

SEQ ID NO: 1364776 - RNA, 21 nt, Human
aagugcugggauuacaggcau

SEQ ID NO: 1364777 - RNA, 26 nt, Human
aagugcugggauuacaggcaugagcc

SEQ ID NO: 1364778 - RNA, 19 nt, Human
acaccacugcacuccagag

SEQ ID NO: 1364779 - RNA, 20 nt, Human
acaccacugcacuccagagc

SEQ ID NO: 1364780 - RNA, 20 nt, Human
acagcugaccccacacagcu

SEQ ID NO: 1364781 - RNA, 23 nt, Human
acaggcgcccgccaccacgcccg

SEQ ID NO: 1364782 - RNA, 19 nt, Human
acaggguuucgccaugcug

SEQ ID NO: 1364783 - RNA, 20 nt, Human
acaggguuucgccaugcugg

SEQ ID NO: 1364784 - RNA, 24 nt, Human
acaggguuucgccaugcuggccag

SEQ ID NO: 1364785 - RNA, 22 nt, Human
acccucacccccaggagccugc

SEQ ID NO: 1364786 - RNA, 23 nt, Human
acuaguucuucuuaccugggaag

SEQ ID NO: 1364787 - RNA, 20 nt, Human
agagggcagagacgguuggg

SEQ ID NO: 1364788 - RNA, 24 nt, Human
agaugggaggaucaccugagccug

SEQ ID NO: 1364789 - RNA, 19 nt, Human
agauuagacccuaagaggu

SEQ ID NO: 1364790 - RNA, 19 nt, Human
agauuuuuccccugccucc

SEQ ID NO: 1364791 - RNA, 19 nt, Human
agccaccgcacccagccca

SEQ ID NO: 1364792 - RNA, 20 nt, Human
agcgcuggcucggccaggug

SEQ ID NO: 1364793 - RNA, 21 nt, Human
agcgcuggcucggccaggugu

SEQ ID NO: 1364794 - RNA, 21 nt, Human
agcuggcccauggggaaccug

SEQ ID NO: 1364795 - RNA, 20 nt, Human
agcuugcaaaccuugggagu

SEQ ID NO: 1364796 - RNA, 19 nt, Human
aggagugugccuuggcccc

SEQ ID NO: 1364797 - RNA, 19 nt, Human
aggaguucgagaccagccu

SEQ ID NO: 1364798 - RNA, 18 nt, Human
aggcaacguacaugugcc

SEQ ID NO: 1364799 - RNA, 19 nt, Human
aggcagaagagucauuuaa

SEQ ID NO: 1364800 - RNA, 24 nt, Human
aggcagaagagucauuuaagccca

SEQ ID NO: 1364801 - RNA, 18 nt, Human
aggcaggcugagauggga

SEQ ID NO: 1364802 - RNA, 22 nt, Human
aggcaggggcagcagaagaggg

SEQ ID NO: 1364803 - RNA, 24 nt, Human
aggcugagaugggaggaucaccug

SEQ ID NO: 1364804 - RNA, 25 nt, Human
aggcuggagugcaguggcgugaucu

SEQ ID NO: 1364805 - RNA, 24 nt, Human
aggugauccacccgccgcagccuc

SEQ ID NO: 1364806 - RNA, 24 nt, Human
agucauuuaagcccaggaguucga

SEQ ID NO: 1364807 - RNA, 19 nt, Human
agugcaguggcgugaucuc

SEQ ID NO: 1364808 - RNA, 20 nt, Human
agugcaguggcgugaucucg

SEQ ID NO: 1364809 - RNA, 23 nt, Human
agugcaguggcgugaucucggcu

SEQ ID NO: 1364810 - RNA, 24 nt, Human
agugcaguggcgugaucucggcuc

SEQ ID NO: 1364811 - RNA, 18 nt, Human
agugcugggauuacaggc

SEQ ID NO: 1364812 - RNA, 20 nt, Human
aucacaccacugcacuccag

SEQ ID NO: 1364813 - RNA, 22 nt, Human
augagccaccgcacccagccca

SEQ ID NO: 1364814 - RNA, 26 nt, Human
caaaagaaaacaagccagcgagggca

SEQ ID NO: 1364815 - RNA, 23 nt, Human
caaagugcugggauuacaggcau

SEQ ID NO: 1364816 - RNA, 24 nt, Human
caaagugcugggauuacaggcaug

SEQ ID NO: 1364817 - RNA, 25 nt, Human
caacacuuuggugaggcugaggcag

SEQ ID NO: 1364818 - RNA, 22 nt, Human
caaguaauucuccugccucagc

SEQ ID NO: 1364819 - RNA, 27 nt, Human
caaguaauucuccugccucagccuccc

SEQ ID NO: 1364820 - RNA, 24 nt, Human
cacaccaguaaucccaacacuuug

SEQ ID NO: 1364821 - RNA, 18 nt, Human
cacaccuguagucccagc

SEQ ID NO: 1364822 - RNA, 22 nt, Human
cacagcucaauccucaguguuu

SEQ ID NO: 1364823 - RNA, 24 nt, Human
caccacgcccggcuaauuuuugua

SEQ ID NO: 1364824 - RNA, 23 nt, Human
caccaguaaucccaacacuuugg

SEQ ID NO: 1364825 - RNA, 23 nt, Human
cacccgccgcagccucucaaagu

SEQ ID NO: 1364826 - RNA, 18 nt, Human
caccgcacccagcccagg

SEQ ID NO: 1364827 - RNA, 19 nt, Human
caccgcacccagcccaggc

SEQ ID NO: 1364828 - RNA, 20 nt, Human
caccgcacccagcccaggcc

SEQ ID NO: 1364829 - RNA, 18 nt, Human
caccuggucucccggggc

SEQ ID NO: 1364830 - RNA, 23 nt, Human
caccuguagucccagcuacucgg

SEQ ID NO: 1364831 - RNA, 21 nt, Human
cacugaguggccuugggcaag

SEQ ID NO: 1364832 - RNA, 18 nt, Human
cacugcaacuucugccuc

SEQ ID NO: 1364833 - RNA, 21 nt, Human
cacugcaacuucugccuccca

SEQ ID NO: 1364834 - RNA, 23 nt, Human
cagacccucacccccaggagccu

SEQ ID NO: 1364835 - RNA, 18 nt, Human
cagcaaaaacagacucag

SEQ ID NO: 1364836 - RNA, 21 nt, Human
cagcaaaaacagacucagaca

SEQ ID NO: 1364837 - RNA, 25 nt, Human
cagcaaaaacagacucagacagacc

SEQ ID NO: 1364838 - RNA, 28 nt, Human
cagcaaaaacagacucagacagacccuc

SEQ ID NO: 1364839 - RNA, 30 nt, Human; identical to SEQ ID NO: 1298694

SEQ ID NO: 1364840 - RNA, 25 nt, Human
caggagccugcucccaaccggggcc

SEQ ID NO: 1364841 - RNA, 21 nt, Human
caggcgcccgccaccacgccc

SEQ ID NO: 1364842 - RNA, 24 nt, Human
caggguuucgccaugcuggccagg

SEQ ID NO: 1364843 - RNA, 23 nt, Human
cagugccggguucugucuggaag

SEQ ID NO: 1364844 - RNA, 21 nt, Human
cagugcugccacaaagcccug

SEQ ID NO: 1364845 - RNA, 24 nt, Human
caugcuggccaggcugaucucaaa

SEQ ID NO: 1364846 - RNA, 22 nt, Human
caugugccuggcagcacagcug

SEQ ID NO: 1364847 - RNA, 18 nt, Human
ccaaaagaaaacaagcca

SEQ ID NO: 1364848 - RNA, 22 nt, Human
ccaaaagaaaacaagccagcga

SEQ ID NO: 1364849 - RNA, 22 nt, Human
ccaaguagcugggauuacaggc

SEQ ID NO: 1364850 - RNA, 18 nt, Human
ccaccgcacccagcccag

SEQ ID NO: 1364851 - RNA, 20 nt, Human
ccaggaguucgagaccagcc

SEQ ID NO: 1364852 - RNA, 22 nt, Human
ccaugcuggccaggcugaucuc

SEQ ID NO: 1364853 - RNA, 23 nt, Human
cccaaguagcugggauuacaggc

SEQ ID NO: 1364854 - RNA, 23 nt, Human
cccaaguagcugggauuacaggc

SEQ ID NO: 1364855 - RNA, 22 nt, Human
cccaggcuggagugcaguggcg

SEQ ID NO: 1364856 - RNA, 20 nt, Human
cccagguucaaguaauucuc

SEQ ID NO: 1364857 - RNA, 23 nt, Human
cccagguucaaguaauucuccug

SEQ ID NO: 1364858 - RNA, 19 nt, Human
ccccaggagccugcuccca

SEQ ID NO: 1364859 - RNA, 20 nt, Human
cccccaggagccugcuccca

SEQ ID NO: 1364860 - RNA, 19 nt, Human
ccccugccuccugggcaga

SEQ ID NO: 1364861 - RNA, 22 nt, Human
cccgaaaaaaaaagaaagaaaa

SEQ ID NO: 1364862 - RNA, 20 nt, Human
cccuagaccuuauuagcagg

SEQ ID NO: 1364863 - RNA, 19 nt, Human
ccgaaaaaaaaagaaagaa

SEQ ID NO: 1364864 - RNA, 22 nt, Human
ccgcacccagcccaggcccguc

SEQ ID NO: 1364865 - RNA, 24 nt, Human
ccgccgcagccucucaaagugcug

SEQ ID NO: 1364866 - RNA, 24 nt, Human
ccucccagguucaaguaauucucc

SEQ ID NO: 1364867 - RNA, 21 nt, Human
ccuccccgaaaaaaaaagaaa

SEQ ID NO: 1364868 - RNA, 23 nt, Human
ccugccucagccucccaaguagc

SEQ ID NO: 1364869 - RNA, 18 nt, Human
ccugcucccaaccggggc

SEQ ID NO: 1364870 - RNA, 18 nt, Human
ccuggccucaggugaucc

SEQ ID NO: 1364871 - RNA, 22 nt, Human
ccuggccucaggugauccaccc

SEQ ID NO: 1364872 - RNA, 23 nt, Human
ccuggccucaggugauccacccg

SEQ ID NO: 1364873 - RNA, 21 nt, Human
ccuguagucccagcuacucgg

SEQ ID NO: 1364874 - RNA, 24 nt, Human
ccuguggcugggagcccaugaggc

SEQ ID NO: 1364875 - RNA, 22 nt, Human
ccuuauuagcaggcccuuccua

SEQ ID NO: 1364876 - RNA, 23 nt, Human
ccuugcucugucgcccaggcugg

SEQ ID NO: 1364877 - RNA, 24 nt, Human
ccuugcucugucgcccaggcugga

SEQ ID NO: 1364878 - RNA, 24 nt, Human
cgccaugcuggccaggcugaucuc

SEQ ID NO: 1364879 - RNA, 21 nt, Human
cggauuuccucaucugcgggg

SEQ ID NO: 1364880 - RNA, 18 nt, Human
cuagagcagcaaaaacag

SEQ ID NO: 1364881 - RNA, 19 nt, Human
cuaggaaacagggagaucc

SEQ ID NO: 1364882 - RNA, 28 nt, Human
cuaugacccugcuaugguuugaauguuu

SEQ ID NO: 1364883 - RNA, 24 nt, Human
cuauggacuucccagccuccagag

SEQ ID NO: 1364884 - RNA, 20 nt, Human
cucacaccuguagucccagc

SEQ ID NO: 1364885 - RNA, 23 nt, Human
cucacaccuguagucccagcuac

SEQ ID NO: 1364886 - RNA, 24 nt, Human
cucacugcaacuucugccucccag

SEQ ID NO: 1364887 - RNA, 24 nt, Human
cucacugcaacuucugccucccag

SEQ ID NO: 1364888 - RNA, 23 nt, Human
cucacugggcucugggcccucca

SEQ ID NO: 1364889 - RNA, 26 nt, Human
cucagacccuagaccuuauuagcagg

SEQ ID NO: 1364890 - RNA, 24 nt, Human
cucagccucccaaguagcugggau

SEQ ID NO: 1364891 - RNA, 20 nt, Human
cuccugggcagagauucugg

SEQ ID NO: 1364892 - RNA, 18 nt, Human
cucuccuagucugcccca

SEQ ID NO: 1364893 - RNA, 18 nt, Human
cucucuccccucacuccu

SEQ ID NO: 1364894 - RNA, 23 nt, Human
cugcaacuucugccucccagguu

SEQ ID NO: 1364895 - RNA, 24 nt, Human
cugcaacuucugccucccagguuc

SEQ ID NO: 1364896 - RNA, 23 nt, Human
cugccucagccucccaaguagcu

SEQ ID NO: 1364897 - RNA, 20 nt, Human
cugcugucuuucuguuucug

SEQ ID NO: 1364898 - RNA, 20 nt, Human
cuggaagccuucuuggggcc

SEQ ID NO: 1364899 - RNA, 25 nt, Human
cuggcccauggggaaccuguggcug

SEQ ID NO: 1364900 - RNA, 21 nt, Human
cuucagccuucuuccuaaauc

SEQ ID NO: 1364901 - RNA, 25 nt, Human
gaagcgcuggcucggccaggugugg

SEQ ID NO: 1364902 - RNA, 24 nt, Human
gacccugcuaugguuugggguagc

SEQ ID NO: 1364903 - RNA, 21 nt, Human
gacucacaccuguagucccag

SEQ ID NO: 1364904 - RNA, 20 nt, Human
gagaaggaacucuguagcuc

SEQ ID NO: 1364905 - RNA, 21 nt, Human
gagacagagccuugcucuguc

SEQ ID NO: 1364906 - RNA, 21 nt, Human
gagccugcucccaaccggggc

SEQ ID NO: 1364907 - RNA, 20 nt, Human
gagcgccagagugagauccu

SEQ ID NO: 1364908 - RNA, 19 nt, Human
gaggcaggggcagcagaag

SEQ ID NO: 1364909 - RNA, 18 nt, Human
gauuacaggcaugagcca

SEQ ID NO: 1364910 - RNA, 22 nt, Human
gauuacaggcaugagccaccgc

SEQ ID NO: 1364911 - RNA, 23 nt, Human
gauuacaggcaugagccaccgca

SEQ ID NO: 1364912 - RNA, 18 nt, Human
gauuacaggcgcccgcca

SEQ ID NO: 1364913 - RNA, 21 nt, Human
gcaaaaacagacucagacaga

SEQ ID NO: 1364914 - RNA, 22 nt, Human
gcaacuucugccucccagguuc

SEQ ID NO: 1364915 - RNA, 21 nt, Human
gcagcacagcugaccccacac

SEQ ID NO: 1364916 - RNA, 25 nt, Human
gcaggggcagcagaagagggcagag

SEQ ID NO: 1364917 - RNA, 22 nt, Human
gcccaggaguucgagaccagcc

SEQ ID NO: 1364918 - RNA, 20 nt, Human
gcccaggcuggagugcagug

SEQ ID NO: 1364919 - RNA, 24 nt, Human
gcccaggcuggagugcaguggcgu

SEQ ID NO: 1364920 - RNA, 22 nt, Human
gcccggcuaauuuuuguauuuu

SEQ ID NO: 1364921 - RNA, 25 nt, Human
gcucugucgcccaggcuggagugca

SEQ ID NO: 1364922 - RNA, 19 nt, Human
gcuggagugcaguggcgug

SEQ ID NO: 1364923 - RNA, 18 nt, Human
ggaagcucuccaccuggc

SEQ ID NO: 1364924 - RNA, 18 nt, Human
ggagagcacuaguguguc

SEQ ID NO: 1364925 - RNA, 19 nt, Human
ggagccugcucccaaccgg

SEQ ID NO: 1364926 - RNA, 20 nt, Human
ggaggcguaaagcuggccca

SEQ ID NO: 1364927 - RNA, 24 nt, Human
ggaucaccugagccugagaggcag

SEQ ID NO: 1364928 - RNA, 22 nt, Human
ggauuacaggcaugagccaccg

SEQ ID NO: 1364929 - RNA, 18 nt, Human
ggcccgucuuuccucucc

SEQ ID NO: 1364930 - RNA, 23 nt, Human
ggcgacagagcuacaggagugug

SEQ ID NO: 1364931 - RNA, 22 nt, Human
ggcuggagugcaguggcgugau

SEQ ID NO: 1364932 - RNA, 18 nt, Human
gggaaaaaaaaacaacaa

SEQ ID NO: 1364933 - RNA, 18 nt, Human
gggcagagauucuggaga

SEQ ID NO: 1364934 - RNA, 20 nt, Human
ggucucagacccuagaccuu

SEQ ID NO: 1364935 - RNA, 22 nt, Human
ggucucagacccuagaccuuau

SEQ ID NO: 1364936 - RNA, 24 nt, Human
ggugacucacaccuguagucccag

SEQ ID NO: 1364937 - RNA, 24 nt, Human
guaauucuccugccucagccuccc

SEQ ID NO: 1364938 - RNA, 18 nt, Human
guagcugggauuacaggc

SEQ ID NO: 1364939 - RNA, 24 nt, Human
gucauuuaagcccaggaguucgag

SEQ ID NO: 1364940 - RNA, 24 nt, Human
gugauccacccgccgcagccucuc

SEQ ID NO: 1364941 - RNA, 18 nt, Human
uaacuuaccccgucucag

SEQ ID NO: 1364942 - RNA, 23 nt, Human
uaagcccaggaguucgagaccag

SEQ ID NO: 1364943 - RNA, 20 nt, Human
uaauucuccugccucagccu

SEQ ID NO: 1364944 - RNA, 22 nt, Human
uaauuuuuguauuuuuauuaga

SEQ ID NO: 1364945 - RNA, 24 nt, Human
uacaggcaugagccaccgcaccca

SEQ ID NO: 1364946 - RNA, 23 nt, Human
uacaggcgcccgccaccacgccc

SEQ ID NO: 1364947 - RNA, 20 nt, Human
uacagugccggguucugucu

SEQ ID NO: 1364948 - RNA, 23 nt, Human
uaccccgucucagggaucuugcu

SEQ ID NO: 1364949 - RNA, 20 nt, Human
uagacacaggguuucgccau

SEQ ID NO: 1364950 - RNA, 22 nt, Human
uaggggcugagauuagaaaaaa

SEQ ID NO: 1364951 - RNA, 24 nt, Human
uauuagacacaggguuucgccaug

SEQ ID NO: 1364952 - RNA, 23 nt, Human
ucaaacaccuggccucaggugau

SEQ ID NO: 1364953 - RNA, 23 nt, Human
ucaaagugcugggauuacaggca

SEQ ID NO: 1364954 - RNA, 24 nt, Human
ucaaagugcugggauuacaggcau

SEQ ID NO: 1364955 - RNA, 23 nt, Human
ucacaccacugcacuccagagcg

SEQ ID NO: 1364956 - RNA, 24 nt, Human
ucaccugagccugagaggcagagu

SEQ ID NO: 1364957 - RNA, 21 nt, Human
ucacucaaccgcuccugccua

SEQ ID NO: 1364958 - RNA, 19 nt, Human
ucacucuguccucugucau

SEQ ID NO: 1364959 - RNA, 19 nt, Human
ucacugcaacuucugccuc

SEQ ID NO: 1364960 - RNA, 24 nt, Human
ucacugcaacuucugccucccagg

SEQ ID NO: 1364961 - RNA, 25 nt, Human
ucacugcaacuucugccucccaggu

SEQ ID NO: 1364962 - RNA, 18 nt, Human
ucagccucccaaguagcu

SEQ ID NO: 1364963 - RNA, 21 nt, Human
ucaggccacgagggcucugcc

SEQ ID NO: 1364964 - RNA, 22 nt, Human
ucauuuaagcccaggaguucga

SEQ ID NO: 1364965 - RNA, 27 nt, Human
uccacacucuagcuucaggacaucggg

SEQ ID NO: 1364966 - RNA, 24 nt, Human
ucccaaguagcugggauuacaggc

SEQ ID NO: 1364967 - RNA, 19 nt, Human
ucccagccuccagagcucu

SEQ ID NO: 1364968 - RNA, 24 nt, Human
ucccagccuccagagcucugagcc

SEQ ID NO: 1364969 - RNA, 21 nt, Human
ucccagguucaaguaauucuc

SEQ ID NO: 1364970 - RNA, 24 nt, Human
ucccagguucaaguaauucuccug

SEQ ID NO: 1364971 - RNA, 21 nt, Human
uccccgaaaaaaaaagaaaga

SEQ ID NO: 1364972 - RNA, 24 nt, Human
uccccgaaaaaaaaagaaagaaaa

SEQ ID NO: 1364973 - RNA, 18 nt, Human
ucccuggggcagggagcu

SEQ ID NO: 1364974 - RNA, 24 nt, Human
ucgcccaggcuggagugcaguggc

SEQ ID NO: 1364975 - RNA, 23 nt, Human
ucggccaggugugggggcucaca

SEQ ID NO: 1364976 - RNA, 24 nt, Human
ucucaaagugcugggauuacaggc

SEQ ID NO: 1364977 - RNA, 26 nt, Human
ucuccugccucagccucccaaguagc

SEQ ID NO: 1364978 - RNA, 24 nt, Human
ucugucgcccaggcuggagugcag

SEQ ID NO: 1364979 - RNA, 29 nt, Human
ugaaaugaggcaacguacaugugccccug

SEQ ID NO: 1364980 - RNA, 22 nt, Human
ugaaaugcgauugccacuguaa

SEQ ID NO: 1364981 - RNA, 26 nt, Human
ugaccccacacagcucaauccucagu

SEQ ID NO: 1364982 - RNA, 20 nt, Human
ugagaugggaggaucaccug

SEQ ID NO: 1364983 - RNA, 21 nt, Human
ugagaugggaggaucaccuga

SEQ ID NO: 1364984 - RNA, 24 nt, Human
ugagaugggaggaucaccugagcc

SEQ ID NO: 1364985 - RNA, 20 nt, Human
ugagccaauacauuucuguu

SEQ ID NO: 1364986 - RNA, 21 nt, Human
ugcaaugaucccuaaucacac

SEQ ID NO: 1364987 - RNA, 22 nt, Human
ugcaguggcgugaucucggcuc

SEQ ID NO: 1364988 - RNA, 24 nt, Human
ugccucagccucccaaguagcugg

SEQ ID NO: 1364989 - RNA, 22 nt, Human
ugccuccugggcagagauucug

SEQ ID NO: 1364990 - RNA, 24 nt, Human
ugcucugucgcccaggcuggagug

SEQ ID NO: 1364991 - RNA, 19 nt, Human
uggagugcaguggcgugau

SEQ ID NO: 1364992 - RNA, 23 nt, Human
uggagugcaguggcgugaucucg

SEQ ID NO: 1364993 - RNA, 24 nt, Human
uggagugcaguggcgugaucucgg

SEQ ID NO: 1364994 - RNA, 21 nt, Human
uggcagcacagcugaccccac

SEQ ID NO: 1364995 - RNA, 23 nt, Human
uggcaugguaauggaaaccugcu

SEQ ID NO: 1364996 - RNA, 23 nt, Human
uggccucaggugauccacccgcc

SEQ ID NO: 1364997 - RNA, 21 nt, Human
uggccugccuggcgugagcuc

SEQ ID NO: 1364998 - RNA, 20 nt, Human
uggcgugaucucggcucacu

SEQ ID NO: 1364999 - RNA, 18 nt, Human
uggcugggagcccaugag

SEQ ID NO: 1365000 - RNA, 18 nt, Human
ugggauuacaggcaugag

SEQ ID NO: 1365001 - RNA, 19 nt, Human
ugggauuacaggcaugagc

SEQ ID NO: 1365002 - RNA, 21 nt, Human
ugggauuacaggcaugagcca

SEQ ID NO: 1365003 - RNA, 22 nt, Human
ugggauuacaggcaugagccac

SEQ ID NO: 1365004 - RNA, 23 nt, Human
ugggauuacaggcaugagccacc

SEQ ID NO: 1365005 - RNA, 24 nt, Human
ugggauuacaggcaugagccaccg

SEQ ID NO: 1365006 - RNA, 24 nt, Human
ugggauuacaggcaugagccaccg

SEQ ID NO: 1365007 - RNA, 26 nt, Human
ugggauuacaggcaugagccaccgca

SEQ ID NO: 1365008 - RNA, 21 nt, Human
ugggauuacaggcgcccgcca

SEQ ID NO: 1365009 - RNA, 22 nt, Human
ugggauuacaggcgcccgccac

SEQ ID NO: 1365010 - RNA, 24 nt, Human
ugggauuacaggcgcccgccacca

SEQ ID NO: 1365011 - RNA, 24 nt, Human
uggugacucacaccuguaguccca

SEQ ID NO: 1365012 - RNA, 24 nt, Human
ugucaugggaagaugcagaagggu

SEQ ID NO: 1365013 - RNA, 24 nt, Human
ugucugggugagaaggaacucugu

SEQ ID NO: 1365014 - RNA, 24 nt, Human
uuauuagacacaggguuucgccau

SEQ ID NO: 1365015 - RNA, 21 nt, Human
uucaaguaauucuccugccuc

SEQ ID NO: 1365016 - RNA, 23 nt, Human
uucaaguaauucuccugccucag

SEQ ID NO: 1365017 - RNA, 24 nt, Human
uucaaguaauucuccugccucagc

SEQ ID NO: 1365018 - RNA, 22 nt, Human
uuccuaagcacaaauuagguuu

SEQ ID NO: 1365019 - RNA, 24 nt, Human
uugaaaugcgauugccacuguaac

SEQ ID NO: 1365020 - RNA, 24 nt, Human
uugcucugucgcccaggcuggagu

SEQ ID NO: 1365021 - RNA, 26 nt, Human
uuggugaggcugaggcagaagaguca

SEQ ID NO: 1365022 - RNA, 21 nt, Human
uuucgccaugcuggccaggcu

SEQ ID NO: 1365023 - RNA, 22 nt, Human
uuucuggcuuaggcccacuggc

SEQ ID NO: 1365024 - RNA, 20 nt, Human
uuuuguauuuuuauuagaca

SEQ ID NO: 1365025 - RNA, 24 nt, Human
uuuuuauuagacacaggguuucgc

SEQ ID NO: 1365026 - RNA, 18 nt, Human
uuuuuguauuuuuauuag

SEQ ID NO: 1365027 - RNA, 23 nt, Human
aaacccagccugggaggagcugu

SEQ ID NO: 1365028 - RNA, 20 nt, Human
aaagagggccugcaggggug

SEQ ID NO: 1365029 - RNA, 23 nt, Human
aaccacuuugccccaaacccagc

SEQ ID NO: 1365030 - RNA, 20 nt, Human
aaccuccgccuccugaauuc

SEQ ID NO: 1365031 - RNA, 22 nt, Human
aagaccagcaagagggccggga

SEQ ID NO: 1365032 - RNA, 23 nt, Human
aagaccagcaagagggccgggac

SEQ ID NO: 1365033 - RNA, 25 nt, Human
aagcaauccuccugccucagccucc

SEQ ID NO: 1365034 - RNA, 18 nt, Human
acacaggcagaggacacc

SEQ ID NO: 1365035 - RNA, 18 nt, Human
accauguuggccaggcug

SEQ ID NO: 1365036 - RNA, 21 nt, Human
acccagagccuuguguguccc

SEQ ID NO: 1365037 - RNA, 20 nt, Human
acccgcugccacccucccca

SEQ ID NO: 1365038 - RNA, 22 nt, Human
acccgcugccacccuccccacc

SEQ ID NO: 1365039 - RNA, 23 nt, Human
acccgcugccacccuccccaccg

SEQ ID NO: 1365040 - RNA, 22 nt, Human
acccgucucuccccuuccauca

SEQ ID NO: 1365041 - RNA, 19 nt, Human
agacagacaucuggauucu

SEQ ID NO: 1365042 - RNA, 24 nt, Human
agaggaacccacacagaacccaga

SEQ ID NO: 1365043 - RNA, 23 nt, Human
agcaaccacuuugccccaaaccc

SEQ ID NO: 1365044 - RNA, 18 nt, Human
agccccucucccugccuc

SEQ ID NO: 1365045 - RNA, 19 nt, Human
aggaaggaggggguggagg

SEQ ID NO: 1365046 - RNA, 20 nt, Human
aggaaggaggggguggaggg

SEQ ID NO: 1365047 - RNA, 21 nt, Human
aggaaggaggggguggagggc

SEQ ID NO: 1365048 - RNA, 25 nt, Human
aggaaucagcgugggugaucacggg

SEQ ID NO: 1365049 - RNA, 21 nt, Human
agggaggaaggagggggugga

SEQ ID NO: 1365050 - RNA, 23 nt, Human
agggccugcaggggugucccagg

SEQ ID NO: 1365051 - RNA, 22 nt, Human
aguagagaugggguuucaccau

SEQ ID NO: 1365052 - RNA, 20 nt, Human
agugcaguggcacaaucucg

SEQ ID NO: 1365053 - RNA, 24 nt, Human
agugcaguggcacaaucucggcuc

SEQ ID NO: 1365054 - RNA, 19 nt, Human
auccgugagaggaacccac

SEQ ID NO: 1365055 - RNA, 23 nt, Human
auccuccccaacccugggcgcca

SEQ ID NO: 1365056 - RNA, 21 nt, Human
auccuccugccucagccuccc

SEQ ID NO: 1365057 - RNA, 22 nt, Human
augggguuucaccauguuggcc

SEQ ID NO: 1365058 - RNA, 23 nt, Human
augggguuucaccauguuggcca

SEQ ID NO: 1365059 - RNA, 24 nt, Human
augggguuucaccauguuggccag

SEQ ID NO: 1365060 - RNA, 19 nt, Human
augugagcgcacacguaug

SEQ ID NO: 1365061 - RNA, 20 nt, Human
caaccuccgccuccugaauu

SEQ ID NO: 1365062 - RNA, 21 nt, Human
caagaccagcaagagggccgg

SEQ ID NO: 1365063 - RNA, 22 nt, Human
caagcaauccuccugccucagc

SEQ ID NO: 1365064 - RNA, 27 nt, Human
caagcaauccuccugccucagccuccc

SEQ ID NO: 1365065 - RNA, 26 nt, Human
caagcuccugaccucaggugauccaa

SEQ ID NO: 1365066 - RNA, 21 nt, Human
caagucccccccuuccacccc

SEQ ID NO: 1365067 - RNA, 22 nt, Human
cacagcccaggugugcuggucc

SEQ ID NO: 1365068 - RNA, 22 nt, Human
cacagccucacgugcaggugga

SEQ ID NO: 1365069 - RNA, 21 nt, Human
caccauguuggccaggcuggu

SEQ ID NO: 1365070 - RNA, 24 nt, Human
caccauguuggccaggcuggucuc

SEQ ID NO: 1365071 - RNA, 27 nt, Human
cacccccucccugcaggcuccacagcc

SEQ ID NO: 1365072 - RNA, 27 nt, Human
cacuuugccccaaacccagccugggag

SEQ ID NO: 1365073 - RNA, 22 nt, Human
cagcuacacccccaagagcagg

SEQ ID NO: 1365074 - RNA, 24 nt, Human
cagcucuccauccuccccaacccu

SEQ ID NO: 1365075 - RNA, 18 nt, Human
caggcuccacagcccagg

SEQ ID NO: 1365076 - RNA, 23 nt, Human
caggguuucagacccagggaacc

SEQ ID NO: 1365077 - RNA, 20 nt, Human
caggugccacacacacaugg

SEQ ID NO: 1365078 - RNA, 24 nt, Human
caggugccacacacacauggggug

SEQ ID NO: 1365079 - RNA, 18 nt, Human
cagguggagagacagaca

SEQ ID NO: 1365080 - RNA, 24 nt, Human
caggugugcugguccccagcucuc

SEQ ID NO: 1365081 - RNA, 21 nt, Human
caugucucgccagggaggaag

SEQ ID NO: 1365082 - RNA, 23 nt, Human
cauguuggccaggcuggucucaa

SEQ ID NO: 1365083 - RNA, 18 nt, Human
ccaacccugggcgccagc

SEQ ID NO: 1365084 - RNA, 22 nt, Human
ccaacgugcccacaggguccua

SEQ ID NO: 1365085 - RNA, 25 nt, Human
ccaauagcaaccacuuugccccaaa

SEQ ID NO: 1365086 - RNA, 23 nt, Human
ccaggacccgucucuccccuucc

SEQ ID NO: 1365087 - RNA, 24 nt, Human
ccagggaggaaggaggggguggag

SEQ ID NO: 1365088 - RNA, 19 nt, Human
cccacacagaacccagagc

SEQ ID NO: 1365089 - RNA, 20 nt, Human
cccacgcuggagugcagugg

SEQ ID NO: 1365090 - RNA, 21 nt, Human
ccccaaacccagccugggagg

SEQ ID NO: 1365091 - RNA, 19 nt, Human
cccccuuccacccccuccc

SEQ ID NO: 1365092 - RNA, 24 nt, Human
ccccgccucgggagccccucuccu

SEQ ID NO: 1365093 - RNA, 22 nt, Human
ccccucccugcaggcuccacag

SEQ ID NO: 1365094 - RNA, 25 nt, Human
ccccucccugcaggcuccacagccc

SEQ ID NO: 1365095 - RNA, 21 nt, Human
ccccuuccacccccucccugc

SEQ ID NO: 1365096 - RNA, 18 nt, Human
cccgcugccacccucccc

SEQ ID NO: 1365097 - RNA, 21 nt, Human
cccgcugccacccuccccacc

SEQ ID NO: 1365098 - RNA, 21 nt, Human
cccugggcgccagcuacaccc

SEQ ID NO: 1365099 - RNA, 22 nt, Human
cccugggcgccagcuacacccc

SEQ ID NO: 1365100 - RNA, 27 nt, Human
ccgccuccugaauucaagcaauccuuu

SEQ ID NO: 1365101 - RNA, 19 nt, Human
ccgcugccacccuccccac

SEQ ID NO: 1365102 - RNA, 21 nt, Human
ccuccauguuucuacuuggcc

SEQ ID NO: 1365103 - RNA, 22 nt, Human
ccuccauguuucuacuuggccu

SEQ ID NO: 1365104 - RNA, 25 nt, Human
ccuccugccucagccucccugguag

SEQ ID NO: 1365105 - RNA, 19 nt, Human
ccuccuguuccucuugagg

SEQ ID NO: 1365106 - RNA, 24 nt, Human
ccugaccucaggugauccacccac

SEQ ID NO: 1365107 - RNA, 23 nt, Human
ccugguagcugggacuacaggug

SEQ ID NO: 1365108 - RNA, 24 nt, Human
cgccuccugaauucaagcaauccu

SEQ ID NO: 1365109 - RNA, 20 nt, Human
cgcugccagccauggaauua

SEQ ID NO: 1365110 - RNA, 22 nt, Human
cggaggggcuggaagaagggga

SEQ ID NO: 1365111 - RNA, 21 nt, Human
cguaugucgcacauguaugug

SEQ ID NO: 1365112 - RNA, 22 nt, Human
cgucucuccccuuccaucaggg

SEQ ID NO: 1365113 - RNA, 24 nt, Human
cucagccucccugguagcugggac

SEQ ID NO: 1365114 - RNA, 20 nt, Human
cuccagcggggauggcaguu

SEQ ID NO: 1365115 - RNA, 18 nt, Human
cuccaggacccgucucuc

SEQ ID NO: 1365116 - RNA, 24 nt, Human
cugcaaccuccgccuccugaauuc

SEQ ID NO: 1365117 - RNA, 23 nt, Human
cugccucagccucccugguagcu

SEQ ID NO: 1365118 - RNA, 23 nt, Human
cuucaagucccccccuuccaccc

SEQ ID NO: 1365119 - RNA, 24 nt, Human
cuucaagucccccccuuccacccc

SEQ ID NO: 1365120 - RNA, 24 nt, Human
cuuguaguagagaugggguuucac

SEQ ID NO: 1365121 - RNA, 19 nt, Human
cuuugccccaaacccagcc

SEQ ID NO: 1365122 - RNA, 21 nt, Human
gaauagaagcugggcuucaag

SEQ ID NO: 1365123 - RNA, 18 nt, Human
gacccgucucuccccuuc

SEQ ID NO: 1365124 - RNA, 19 nt, Human
gacccgucucuccccuucc

SEQ ID NO: 1365125 - RNA, 22 nt, Human
gaccucaggugauccacccacc

SEQ ID NO: 1365126 - RNA, 21 nt, Human
gacuacaggugcacaccacca

SEQ ID NO: 1365127 - RNA, 21 nt, Human
gagacagacagacaucuggau

SEQ ID NO: 1365128 - RNA, 20 nt, Human
gagagaaagagggccugcag

SEQ ID NO: 1365129 - RNA, 20 nt, Human
gagaugggguuucaccaugu

SEQ ID NO: 1365130 - RNA, 24 nt, Human
gagaugggguuucaccauguuggc

SEQ ID NO: 1365131 - RNA, 19 nt, Human
gaggaaggaggggguggag

SEQ ID NO: 1365132 - RNA, 22 nt, Human
gcaaccuccgccuccugaauuc

SEQ ID NO: 1365133 - RNA, 22 nt, Human
gcccaauagcaaccacuuugcc

SEQ ID NO: 1365134 - RNA, 26 nt, Human
gcgcacacguaugucgcacauguaug

SEQ ID NO: 1365135 - RNA, 19 nt, Human
gcuccccugggcaggcugg

SEQ ID NO: 1365136 - RNA, 19 nt, Human
gcugcaaccuccgccuccu

SEQ ID NO: 1365137 - RNA, 19 nt, Human
gcuggagugcaguggcaca

SEQ ID NO: 1365138 - RNA, 23 nt, Human
gcuggucucaagcuccugaccuc

SEQ ID NO: 1365139 - RNA, 21 nt, Human
gcuucaagucccccccuucca

SEQ ID NO: 1365140 - RNA, 23 nt, Human
ggacccccuccauguuucuacuu

SEQ ID NO: 1365141 - RNA, 21 nt, Human
ggcgccccuuggagagaaaga

SEQ ID NO: 1365142 - RNA, 24 nt, Human
ggcuggucucaagcuccugaccuc

SEQ ID NO: 1365143 - RNA, 24 nt, Human
gggaggucaccaagcuggguagga

SEQ ID NO: 1365144 - RNA, 21 nt, Human
ggggaagugucuggcaugugg

SEQ ID NO: 1365145 - RNA, 19 nt, Human
ggggcuggaagaaggggaa

SEQ ID NO: 1365146 - RNA, 19 nt, Human
gggguggaccgagcaaggc

SEQ ID NO: 1365147 - RNA, 22 nt, Human
gggguuucaccauguuggccag

SEQ ID NO: 1365148 - RNA, 23 nt, Human
guagagaugggguuucaccaugu

SEQ ID NO: 1365149 - RNA, 24 nt, Human
guaguagagaugggguuucaccau

SEQ ID NO: 1365150 - RNA, 23 nt, Human
gucccccccuuccacccccuccc

SEQ ID NO: 1365151 - RNA, 24 nt, Human
uaauuucuguacuuguaguagaga

SEQ ID NO: 1365152 - RNA, 28 nt, Human
uacuaggccccccaggagaaagggcucc

SEQ ID NO: 1365153 - RNA, 22 nt, Human
uagagaugggguuucaccaugu

SEQ ID NO: 1365154 - RNA, 21 nt, Human
uaguagagaugggguuucacc

SEQ ID NO: 1365155 - RNA, 23 nt, Human
uaguagagaugggguuucaccau

SEQ ID NO: 1365156 - RNA, 24 nt, Human
uaguagagaugggguuucaccaug

SEQ ID NO: 1365157 - RNA, 26 nt, Human
uaguagagaugggguuucaccauguu

SEQ ID NO: 1365158 - RNA, 21 nt, Human
ucccagaaguggggauugaga

SEQ ID NO: 1365159 - RNA, 21 nt, Human
uccccaacccugggcgccagc

SEQ ID NO: 1365160 - RNA, 20 nt, Human
ucccugccuccccacggagg

SEQ ID NO: 1365161 - RNA, 21 nt, Human
ucccuggccacaugucucgcc

SEQ ID NO: 1365162 - RNA, 22 nt, Human
ucccugguagcugggacuacag

SEQ ID NO: 1365163 - RNA, 24 nt, Human
ucccugguagcugggacuacaggu

SEQ ID NO: 1365164 - RNA, 18 nt, Human
ucgcccacgcuggagugc

SEQ ID NO: 1365165 - RNA, 19 nt, Human
ucgcugcaaccuccgccuc

SEQ ID NO: 1365166 - RNA, 22 nt, Human
ucgcugcaaccuccgccuccug

SEQ ID NO: 1365167 - RNA, 23 nt, Human
ucgcugcaaccuccgccuccuga

SEQ ID NO: 1365168 - RNA, 27 nt, Human
ucgcugcaaccuccgccuccugaauuc

SEQ ID NO: 1365169 - RNA, 19 nt, Human
ucuccauccuccccaaccc

SEQ ID NO: 1365170 - RNA, 18 nt, Human
ucucuccccuuccaucag

SEQ ID NO: 1365171 - RNA, 24 nt, Human
ucugucgcccacgcuggagugcag

SEQ ID NO: 1365172 - RNA, 18 nt, Human
ucuugcucugucgcccac

SEQ ID NO: 1365173 - RNA, 23 nt, Human
ucuugcucugucgcccacgcugg

SEQ ID NO: 1365174 - RNA, 24 nt, Human
ucuugcucugucgcccacgcugga

SEQ ID NO: 1365175 - RNA, 21 nt, Human
ugaauucaagcaauccuccug

SEQ ID NO: 1365176 - RNA, 24 nt, Human
ugaauucaagcaauccuccugccu

SEQ ID NO: 1365177 - RNA, 19 nt, Human
ugaccucaggugauccacc

SEQ ID NO: 1365178 - RNA, 21 nt, Human
ugaccucaggugauccaccca

SEQ ID NO: 1365179 - RNA, 22 nt, Human
ugagggaggucaccaagcuggg

SEQ ID NO: 1365180 - RNA, 22 nt, Human
ugcaguggcacaaucucggcuc

SEQ ID NO: 1365181 - RNA, 19 nt, Human
ugccacacacacauggggu

SEQ ID NO: 1365182 - RNA, 19 nt, Human
ugccauggcaccuucaggg

SEQ ID NO: 1365183 - RNA, 24 nt, Human
ugccucagccucccugguagcugg

SEQ ID NO: 1365184 - RNA, 27 nt, Human
ugcuccagcggggauggcagugcuccu

SEQ ID NO: 1365185 - RNA, 24 nt, Human
ugcucugucgcccacgcuggagug

SEQ ID NO: 1365186 - RNA, 21 nt, Human
uggaaaucagauccgugagag

SEQ ID NO: 1365187 - RNA, 22 nt, Human
uggaagaaggggaagugucugg

SEQ ID NO: 1365188 - RNA, 23 nt, Human
uggagugcaguggcacaaucucg

SEQ ID NO: 1365189 - RNA, 24 nt, Human
uggagugcaguggcacaaucucgg

SEQ ID NO: 1365190 - RNA, 24 nt, Human
uggcacaaucucggcucgcugcaa

SEQ ID NO: 1365191 - RNA, 21 nt, Human
uggcagugcucccacuccucc

SEQ ID NO: 1365192 - RNA, 24 nt, Human
uggccaggcuggucucaagcuccu

SEQ ID NO: 1365193 - RNA, 22 nt, Human
ugggacuacaggugcacaccac

SEQ ID NO: 1365194 - RNA, 24 nt, Human
ugggacuacaggugcacaccacca

SEQ ID NO: 1365195 - RNA, 21 nt, Human
ugggaggagcugucugucuug

SEQ ID NO: 1365196 - RNA, 22 nt, Human
ugggguggaccgagcaaggcca

SEQ ID NO: 1365197 - RNA, 24 nt, Human
ugggguuucaccauguuggccagg

SEQ ID NO: 1365198 - RNA, 26 nt, Human
ugguagcugggacuacaggugcacac

SEQ ID NO: 1365199 - RNA, 20 nt, Human
ugguccccagcucuccaucc

SEQ ID NO: 1365200 - RNA, 22 nt, Human
ugucccagggcaggugccacac

SEQ ID NO: 1365201 - RNA, 22 nt, Human
ugucuugccauggcaccuucag

SEQ ID NO: 1365202 - RNA, 21 nt, Human
uucaagcaauccuccugccuc

SEQ ID NO: 1365203 - RNA, 24 nt, Human
uucaagcaauccuccugccucagc

SEQ ID NO: 1365204 - RNA, 24 nt, Human
uuucaccauguuggccaggcuggu

SEQ ID NO: 1365205 - RNA, 27 nt, Human
aaaaagcaccugcugcaccauaagccc

SEQ ID NO: 1365206 - RNA, 22 nt, Human
aaacaugaagaaaacggccugg

SEQ ID NO: 1365207 - RNA, 23 nt, Human
aaaccacacccccuguuccaacc

SEQ ID NO: 1365208 - RNA, 24 nt, Human
aaaguuuuauccgcuuucccauau

SEQ ID NO: 1365209 - RNA, 18 nt, Human
aagaacacccacaccccc

SEQ ID NO: 1365210 - RNA, 21 nt, Human
aagaaccagcucccagaaacc

SEQ ID NO: 1365211 - RNA, 22 nt, Human
aaggcagagagcugauggacug

SEQ ID NO: 1365212 - RNA, 22 nt, Human
aagggaacuucugggaccagcc

SEQ ID NO: 1365213 - RNA, 21 nt, Human
aaggugcuccagcgcaccaag

SEQ ID NO: 1365214 - RNA, 20 nt, Human
acaaacacaggcugugggcu

SEQ ID NO: 1365215 - RNA, 19 nt, Human
acacaggcugugggcugga

SEQ ID NO: 1365216 - RNA, 18 nt, Human
acaguaggcucgggaaug

SEQ ID NO: 1365217 - RNA, 20 nt, Human
accugggaugggguggggac

SEQ ID NO: 1365218 - RNA, 28 nt, Human
agaaaccacacccccuguuccaaccccc

SEQ ID NO: 1365219 - RNA, 24 nt, Human
agacgggcaccgagccacacuccc

SEQ ID NO: 1365220 - RNA, 19 nt, Human
aggaaacaaguguguccac

SEQ ID NO: 1365221 - RNA, 20 nt, Human
aggacucagaggaacuggca

SEQ ID NO: 1365222 - RNA, 21 nt, Human
aucuuuuaugugcugaaccag

SEQ ID NO: 1365223 - RNA, 21 nt, Human
auggaauuaagaaaaacaugc

SEQ ID NO: 1365224 - RNA, 24 nt, Human
auguuaggacacacccccaccugc

SEQ ID NO: 1365225 - RNA, 24 nt, Human
auuuggucuccaggugucaccuuu

SEQ ID NO: 1365226 - RNA, 20 nt, Human
cacacccccaccugcccucu

SEQ ID NO: 1365227 - RNA, 21 nt, Human
cacacccccuguuccaacccc

SEQ ID NO: 1365228 - RNA, 23 nt, Human
caccacgccagggugggcagggu

SEQ ID NO: 1365229 - RNA, 26 nt, Human
caccauaagcccaggaauguggcagc

SEQ ID NO: 1365230 - RNA, 24 nt, Human
cacccccuguuccaacccccagcc

SEQ ID NO: 1365231 - RNA, 20 nt, Human
cagcucccagaaaccacacc

SEQ ID NO: 1365232 - RNA, 22 nt, Human
cagcucccagaaaccacacccc

SEQ ID NO: 1365233 - RNA, 22 nt, Human
cauugccaucuccaagugcucu

SEQ ID NO: 1365234 - RNA, 21 nt, Human
ccacacccccuguuccaaccc

SEQ ID NO: 1365235 - RNA, 24 nt, Human
ccagaaaccacacccccuguucca

SEQ ID NO: 1365236 - RNA, 19 nt, Human
ccaggggucuggugucuuc

SEQ ID NO: 1365237 - RNA, 19 nt, Human
ccaguccccaggggguugc

SEQ ID NO: 1365238 - RNA, 23 nt, Human
ccagugcaaugaaaguuuuaucc

SEQ ID NO: 1365239 - RNA, 18 nt, Human
ccauggaauuaagaaaaa

SEQ ID NO: 1365240 - RNA, 21 nt, Human
cccacacccccuuguuacccu

SEQ ID NO: 1365241 - RNA, 18 nt, Human
cccagaaaccacaccccc

SEQ ID NO: 1365242 - RNA, 26 nt, Human
cccagccuggcuugagcguggggugg

SEQ ID NO: 1365243 - RNA, 24 nt, Human
ccccagaccuuuauaugcuucaga

SEQ ID NO: 1365244 - RNA, 21 nt, Human
cccccuguuccaacccccagc

SEQ ID NO: 1365245 - RNA, 20 nt, Human
cccuugguucucucugcagu

SEQ ID NO: 1365246 - RNA, 23 nt, Human
ccucaggagccugcuugugcucc

SEQ ID NO: 1365247 - RNA, 18 nt, Human
ccuggggucagccaggug

SEQ ID NO: 1365248 - RNA, 19 nt, Human
cggcaggcagccagccucc

SEQ ID NO: 1365249 - RNA, 20 nt, Human
cucccagaaaccacaccccc

SEQ ID NO: 1365250 - RNA, 24 nt, Human
cugauuuggaauuuaacauuuucc

SEQ ID NO: 1365251 - RNA, 25 nt, Human
cuggagccgggugggcagggcugca

SEQ ID NO: 1365252 - RNA, 22 nt, Human
cuuggcuuugugaggaaacgag

SEQ ID NO: 1365253 - RNA, 22 nt, Human
gaaccagcucccagaaaccaca

SEQ ID NO: 1365254 - RNA, 18 nt, Human
gaaccgaguguguccagg

SEQ ID NO: 1365255 - RNA, 18 nt, Human
gaagggucucaaguccag

SEQ ID NO: 1365256 - RNA, 19 nt, Human
gagcugacacuccacaaau

SEQ ID NO: 1365257 - RNA, 24 nt, Human
gagcugacacuccacaaaugaugc

SEQ ID NO: 1365258 - RNA, 20 nt, Human
gauguggcagcugcagcagg

SEQ ID NO: 1365259 - RNA, 21 nt, Human
gcaagcugggcaccccagggg

SEQ ID NO: 1365260 - RNA, 21 nt, Human
gcaaggcugaaaagaacaccc

SEQ ID NO: 1365261 - RNA, 25 nt, Human
gcaaggcugaaaagaacacccacac

SEQ ID NO: 1365262 - RNA, 21 nt, Human
gcacccacaugcuuagauagc

SEQ ID NO: 1365263 - RNA, 22 nt, Human
gcagagagcugauggacugucg

SEQ ID NO: 1365264 - RNA, 18 nt, Human
gcagcugcagcgggcuug

SEQ ID NO: 1365265 - RNA, 18 nt, Human
gcagcuguagcgggcuug

SEQ ID NO: 1365266 - RNA, 22 nt, Human
gccagggugggcaggguucugg

SEQ ID NO: 1365267 - RNA, 19 nt, Human
gccuggcuugagcgugggg

SEQ ID NO: 1365268 - RNA, 19 nt, Human
gcucccggcaggcagccag

SEQ ID NO: 1365269 - RNA, 23 nt, Human
ggaccuggggucagccagguggu

SEQ ID NO: 1365270 - RNA, 24 nt, Human
ggaccuggggucagccagguggug

SEQ ID NO: 1365271 - RNA, 19 nt, Human
ggacucagaggaacuggca

SEQ ID NO: 1365272 - RNA, 21 nt, Human
ggaggcggagcacugcugggg

SEQ ID NO: 1365273 - RNA, 21 nt, Human
ggaguuagggacuugggaggg

SEQ ID NO: 1365274 - RNA, 23 nt, Human
ggcaguuugugguuccugauuug

SEQ ID NO: 1365275 - RNA, 18 nt, Human
gggaccuggggucagcca

SEQ ID NO: 1365276 - RNA, 19 nt, Human
gggaugggguggggacagg

SEQ ID NO: 1365277 - RNA, 20 nt, Human
gggcaccgagccacacuccc

SEQ ID NO: 1365278 - RNA, 21 nt, Human
gggcaggguucuggagacggg

SEQ ID NO: 1365279 - RNA, 18 nt, Human
gggucucaaguccaggua

SEQ ID NO: 1365280 - RNA, 21 nt, Human
gggugggacuguguuggccag

SEQ ID NO: 1365281 - RNA, 22 nt, Human
ggugugaagggucucaagucca

SEQ ID NO: 1365282 - RNA, 18 nt, Human
gucaccuuucugccaugu

SEQ ID NO: 1365283 - RNA, 22 nt, Human
gucuucuucuguucuucaugcc

SEQ ID NO: 1365284 - RNA, 20 nt, Human
gugaccucugcaguacuccu

SEQ ID NO: 1365285 - RNA, 18 nt, Human
gugcucccggcaggcaga

SEQ ID NO: 1365286 - RNA, 19 nt, Human
gugcucccggcaggcagcc

SEQ ID NO: 1365287 - RNA, 22 nt, Human
guucugugacuucccugugacc

SEQ ID NO: 1365288 - RNA, 23 nt, Human
uaagaaaaacaugcaaaaauaau

SEQ ID NO: 1365289 - RNA, 21 nt, Human
uaagaaccagcucccagaaac

SEQ ID NO: 1365290 - RNA, 18 nt, Human
uaagggaguuagggacuu

SEQ ID NO: 1365291 - RNA, 18 nt, Human
uagcucgguggugaacag

SEQ ID NO: 1365292 - RNA, 24 nt, Human
uaguauuuugcagaugcuuuucuc

SEQ ID NO: 1365293 - RNA, 21 nt, Human
uccccaggcagcucucaggcu

SEQ ID NO: 1365294 - RNA, 22 nt, Human
uccccaggcagcucucaggcuc

SEQ ID NO: 1365295 - RNA, 19 nt, Human
ucccugcuucccacagcca

SEQ ID NO: 1365296 - RNA, 18 nt, Human
uccgcaggaccccgacca

SEQ ID NO: 1365297 - RNA, 25 nt, Human
uccugcauuuggucuccagguguca

SEQ ID NO: 1365298 - RNA, 22 nt, Human
ucuucuucuguucuucaugccc

SEQ ID NO: 1365299 - RNA, 25 nt, Human
ugaaaagaacacccacacccccuug

SEQ ID NO: 1365300 - RNA, 20 nt, Human
ugacaauaucuggcuggaag

SEQ ID NO: 1365301 - RNA, 22 nt, Human
ugacaauaucuggcuggaaggc

SEQ ID NO: 1365302 - RNA, 18 nt, Human
ugacuucccugugaccuc

SEQ ID NO: 1365303 - RNA, 19 nt, Human
ugaggaaacaagugugucc

SEQ ID NO: 1365304 - RNA, 20 nt, Human
ugaugcuggagccggguggg

SEQ ID NO: 1365305 - RNA, 24 nt, Human
ugcaaugacaauaucuggcuggaa

SEQ ID NO: 1365306 - RNA, 20 nt, Human
ugcauuuggucuccaggugu

SEQ ID NO: 1365307 - RNA, 22 nt, Human
ugcugcaccauaagcccaggaa

SEQ ID NO: 1365308 - RNA, 22 nt, Human
uggaggcggagcacugcugggg

SEQ ID NO: 1365309 - RNA, 18 nt, Human
uggauuuggccugaaggc

SEQ ID NO: 1365310 - RNA, 21 nt, Human
uggcagcugcagcagguuugg

SEQ ID NO: 1365311 - RNA, 21 nt, Human
uggccagaggccgagaggagg

SEQ ID NO: 1365312 - RNA, 20 nt, Human
uggcuugagcgugggguggg

SEQ ID NO: 1365313 - RNA, 23 nt, Human
ugggaccagccuugaaagauggg

SEQ ID NO: 1365314 - RNA, 18 nt, Human
ugggaugggguggggaca

SEQ ID NO: 1365315 - RNA, 18 nt, Human
ugggaugggguggggaca

SEQ ID NO: 1365316 - RNA, 21 nt, Human
uggggucagccagguggugac

SEQ ID NO: 1365317 - RNA, 21 nt, Human
uggggugggugggaggcaagc

SEQ ID NO: 1365318 - RNA, 21 nt, Human
uggggugugaagggucucaag

SEQ ID NO: 1365319 - RNA, 22 nt, Human
ugggugggaggcaagcugggca

SEQ ID NO: 1365320 - RNA, 23 nt, Human
uggugaccugggauggggugggg

SEQ ID NO: 1365321 - RNA, 21 nt, Human
uggugucuuccccaggcagcu

SEQ ID NO: 1365322 - RNA, 24 nt, Human
uguccagggauguggcagcuguag

SEQ ID NO: 1365323 - RNA, 19 nt, Human
ugugaagggucucaagucc

SEQ ID NO: 1365324 - RNA, 18 nt, Human
ugugagguucagcauugc

SEQ ID NO: 1365325 - RNA, 21 nt, Human
ugugagguucagcauugccau

SEQ ID NO: 1365326 - RNA, 24 nt, Human
uguggcagcugcagcagguuuggc

SEQ ID NO: 1365327 - RNA, 24 nt, Human
uguggcagcugcagcgggcuuggc

SEQ ID NO: 1365328 - RNA, 26 nt, Human
ugugugggcaaagggaacuucuggga

SEQ ID NO: 1365329 - RNA, 19 nt, Human
uuacaaacacaggcugugg

SEQ ID NO: 1365330 - RNA, 19 nt, Human
uuccaacccccagccuggc

SEQ ID NO: 1365331 - RNA, 23 nt, Human
uuccagugcaaugaaaguuuuau

SEQ ID NO: 1365332 - RNA, 24 nt, Human
uucccauauaaaaauucuucccac

SEQ ID NO: 1365333 - RNA, 22 nt, Human
uuccccaggcagcucucaggcu

SEQ ID NO: 1365334 - RNA, 20 nt, Human
uucuucuguucuucaugccc

SEQ ID NO: 1365335 - RNA, 27 nt, Human
uugaaaaaagcaccugcugcaccauaa

SEQ ID NO: 1365336 - RNA, 23 nt, Human
uugaugugcacucccccagaccu

SEQ ID NO: 1365337 - RNA, 24 nt, Human
uuggaggcggagcacugcuggggu

SEQ ID NO: 1365338 - RNA, 23 nt, Human
uuuauccgcuuucccauauaaaa

SEQ ID NO: 1365339 - RNA, 25 nt, Human
uuucuggucaugaugagcuuccacu

SEQ ID NO: 1365340 - RNA, 19 nt, Human
aaaaaaaaaaagaaaaaga

SEQ ID NO: 1365341 - RNA, 22 nt, Human
aaaaaaaaaagaaaaagaaaag

SEQ ID NO: 1365342 - RNA, 22 nt, Human
aaaagaaaaagaaaagcuuucc

SEQ ID NO: 1365343 - RNA, 22 nt, Human
aaaagcccugcacccacaaagg

SEQ ID NO: 1365344 - RNA, 20 nt, Human
aaacaggggcccgucuuccc

SEQ ID NO: 1365345 - RNA, 19 nt, Human
aaacugaaacugaaggcca

SEQ ID NO: 1365346 - RNA, 20 nt, Human
aaagaaaagcuuuccuggug

SEQ ID NO: 1365347 - RNA, 25 nt, Human
aaaggcaccaucugcucucagaaac

SEQ ID NO: 1365348 - RNA, 21 nt, Human
aacucugggcaaaguggggcc

SEQ ID NO: 1365349 - RNA, 23 nt, Human
aagaaaacagaagagaaguuuca

SEQ ID NO: 1365350 - RNA, 20 nt, Human
aagaugccgauggguuacaa

SEQ ID NO: 1365351 - RNA, 26 nt, Human
aagcuugcucgccagggcacaccgcc

SEQ ID NO: 1365352 - RNA, 21 nt, Human
aaguccaagaacuaaagcuga

SEQ ID NO: 1365353 - RNA, 21 nt, Human
aaguggggccagggaggucac

SEQ ID NO: 1365354 - RNA, 18 nt, Human
aauggccucacaggaggg

SEQ ID NO: 1365355 - RNA, 23 nt, Human
acaaaccucugcacaccccagag

SEQ ID NO: 1365356 - RNA, 21 nt, Human
acagccaaagaaaacagaaga

SEQ ID NO: 1365357 - RNA, 20 nt, Human
accccagccugcccaagggc

SEQ ID NO: 1365358 - RNA, 18 nt, Human
acgggaggcgccugcagg

SEQ ID NO: 1365359 - RNA, 22 nt, Human
agacagaggccacccaggccca

SEQ ID NO: 1365360 - RNA, 18 nt, Human
agagcugggaugcagggc

SEQ ID NO: 1365361 - RNA, 19 nt, Human
agaggaugauaggacuugu

SEQ ID NO: 1365362 - RNA, 19 nt, Human
agauggcaaacaggggccc

SEQ ID NO: 1365363 - RNA, 22 nt, Human
agcacguggcaaacgcgcagug

SEQ ID NO: 1365364 - RNA, 18 nt, Human
agcaggcagucuggggag

SEQ ID NO: 1365365 - RNA, 20 nt, Human
agcccugcacccacaaaggc

SEQ ID NO: 1365366 - RNA, 24 nt, Human
agcugcccgcccccaccgugcccc

SEQ ID NO: 1365367 - RNA, 24 nt, Human
agcuuccacaaggaaccugacggg

SEQ ID NO: 1365368 - RNA, 18 nt, Human
aggcagucuggggagggg

SEQ ID NO: 1365369 - RNA, 22 nt, Human
aggcugacaauuuccacaaaag

SEQ ID NO: 1365370 - RNA, 20 nt, Human
agggacuaaacgagcagcaa

SEQ ID NO: 1365371 - RNA, 22 nt, Human
agggagaaguuugaaaaacugg

SEQ ID NO: 1365372 - RNA, 26 nt, Human
agugcucagccugcugcaccacggau

SEQ ID NO: 1365373 - RNA, 19 nt, Human
aucucccuauuucucucca

SEQ ID NO: 1365374 - RNA, 25 nt, Human
caaagaacgcacuccuggcaagcga

SEQ ID NO: 1365375 - RNA, 18 nt, Human
caaaggcaccaucugcuc

SEQ ID NO: 1365376 - RNA, 28 nt, Human
cacaaaagcccugcacccacaaaggcac

SEQ ID NO: 1365377 - RNA, 19 nt, Human
cacacgcagcaggcucggc

SEQ ID NO: 1365378 - RNA, 24 nt, Human
caccacggaugaggggagcuucca

SEQ ID NO: 1365379 - RNA, 21 nt, Human
cacccacucacccucccacag

SEQ ID NO: 1365380 - RNA, 25 nt, Human
caccccagccugcccaagggccugg

SEQ ID NO: 1365381 - RNA, 24 nt, Human
caccccucuguccugucuacaaau

SEQ ID NO: 1365382 - RNA, 21 nt, Human
cacccucccacagggaacacc

SEQ ID NO: 1365383 - RNA, 24 nt, Human
cacugccaaugcccaagguuaccu

SEQ ID NO: 1365384 - RNA, 23 nt, Human
cacugcguucucaugcuggguuu

SEQ ID NO: 1365385 - RNA, 23 nt, Human
cacugcguucucaugcuggguuu

SEQ ID NO: 1365386 - RNA, 25 nt, Human
cacugcguucucaugcuggguuuuu

SEQ ID NO: 1365387 - RNA, 22 nt, Human
cacuuuguuauuuuucacaaag

SEQ ID NO: 1365388 - RNA, 21 nt, Human
cagaugcacauaauaaccuug

SEQ ID NO: 1365389 - RNA, 21 nt, Human
cagcaggggcagggggcaggc

SEQ ID NO: 1365390 - RNA, 18 nt, Human
cagcccagcgcgacacgg

SEQ ID NO: 1365391 - RNA, 21 nt, Human
cagccucugaaacgagcucaa

SEQ ID NO: 1365392 - RNA, 22 nt, Human
caggagagacgaacaugcccgg

SEQ ID NO: 1365393 - RNA, 22 nt, Human
cagggcacaccgcccguaacac

SEQ ID NO: 1365394 - RNA, 21 nt, Human
cagggcauuuuucaacaaaga

SEQ ID NO: 1365395 - RNA, 18 nt, Human
cagggggcaggcaccccu

SEQ ID NO: 1365396 - RNA, 23 nt, Human
ccagcccagcgcgacacggccuc

SEQ ID NO: 1365397 - RNA, 21 nt, Human
cccagagcugggaugcagggc

SEQ ID NO: 1365398 - RNA, 25 nt, Human
cccagccugcccaagggccugggag

SEQ ID NO: 1365399 - RNA, 18 nt, Human
cccaggagccuugugggg

SEQ ID NO: 1365400 - RNA, 21 nt, Human
ccccaccgugccccacaccca

SEQ ID NO: 1365401 - RNA, 19 nt, Human
ccccaugcuauacgugcuc

SEQ ID NO: 1365402 - RNA, 20 nt, Human
cccccgagauggcaaacagg

SEQ ID NO: 1365403 - RNA, 21 nt, Human
ccccugggcauuugguggggc

SEQ ID NO: 1365404 - RNA, 20 nt, Human
cccggaggcccaggagccuu

SEQ ID NO: 1365405 - RNA, 24 nt, Human
cccguaacacccacugcaggggca

SEQ ID NO: 1365406 - RNA, 25 nt, Human
ccgcccccaccgugccccacaccca

SEQ ID NO: 1365407 - RNA, 23 nt, Human
ccguaacacccacugcaggggca

SEQ ID NO: 1365408 - RNA, 20 nt, Human
ccucacccacucacccuccc

SEQ ID NO: 1365409 - RNA, 24 nt, Human
ccucacccacucacccucccacag

SEQ ID NO: 1365410 - RNA, 21 nt, Human
ccugaccccaaccguuaccac

SEQ ID NO: 1365411 - RNA, 26 nt, Human
ccugaccccaaccguuaccacccgac

SEQ ID NO: 1365412 - RNA, 21 nt, Human
ccugguucggcugauacagcc

SEQ ID NO: 1365413 - RNA, 22 nt, Human
cgcacuccuggcaagcgagucu

SEQ ID NO: 1365414 - RNA, 20 nt, Human
cgcccguaacacccacugca

SEQ ID NO: 1365415 - RNA, 19 nt, Human
cgcgacacggccucuguac

SEQ ID NO: 1365416 - RNA, 23 nt, Human
cggcugauacagccaaagaaaac

SEQ ID NO: 1365417 - RNA, 21 nt, Human
cucacccucccacagggaaca

SEQ ID NO: 1365418 - RNA, 23 nt, Human
cuccugguucggcugauacagcc

SEQ ID NO: 1365419 - RNA, 24 nt, Human
cugcacccacaaaggcaccaucug

SEQ ID NO: 1365420 - RNA, 18 nt, Human
cugcguucucaugcuggg

SEQ ID NO: 1365421 - RNA, 19 nt, Human
cuuccuggaugagaaacug

SEQ ID NO: 1365422 - RNA, 23 nt, Human
cuucuugggggccccaugggccc

SEQ ID NO: 1365423 - RNA, 23 nt, Human
cuugaauuugcuggggccuggga

SEQ ID NO: 1365424 - RNA, 23 nt, Human
cuugccccugggcauuugguggg

SEQ ID NO: 1365425 - RNA, 21 nt, Human
gaaaucaaggcaggccaggga

SEQ ID NO: 1365426 - RNA, 21 nt, Human
gaggggaugccggacucugcc

SEQ ID NO: 1365427 - RNA, 20 nt, Human
gcacguggcaaacgcgcagu

SEQ ID NO: 1365428 - RNA, 18 nt, Human
gcaggcuccagcugcucc

SEQ ID NO: 1365429 - RNA, 19 nt, Human
gcccgcccccaccgugccc

SEQ ID NO: 1365430 - RNA, 22 nt, Human
gccucacccacucacccuccca

SEQ ID NO: 1365431 - RNA, 18 nt, Human
gcugcaccacggaugagg

SEQ ID NO: 1365432 - RNA, 20 nt, Human
ggagaaguuugaaaaacugg

SEQ ID NO: 1365433 - RNA, 20 nt, Human
ggaggggaugccggacucug

SEQ ID NO: 1365434 - RNA, 19 nt, Human
ggaugccggacucugcccg

SEQ ID NO: 1365435 - RNA, 19 nt, Human
ggcaaaguggggccaggga

SEQ ID NO: 1365436 - RNA, 21 nt, Human
gggacuaaacgagcagcaaag

SEQ ID NO: 1365437 - RNA, 23 nt, Human
gggcacagaacugaggucagggg

SEQ ID NO: 1365438 - RNA, 20 nt, Human
gguguuuaaaaaaaaaaaaa

SEQ ID NO: 1365439 - RNA, 18 nt, Human
gucaccuuaaaauaaauu

SEQ ID NO: 1365440 - RNA, 21 nt, Human
gucgcagcccaggccucuccu

SEQ ID NO: 1365441 - RNA, 20 nt, Human
gugccagcaggggcaggggg

SEQ ID NO: 1365442 - RNA, 24 nt, Human
guggccucugccgucaccccagcc

SEQ ID NO: 1365443 - RNA, 25 nt, Human
guguuuaaaaaaaaaaaaaaaagaa

SEQ ID NO: 1365444 - RNA, 22 nt, Human
uaagaaaguauuaaacuucugu

SEQ ID NO: 1365445 - RNA, 22 nt, Human
uaagaaccaaaaguucgaaugc

SEQ ID NO: 1365446 - RNA, 22 nt, Human
uagaagacacuggaauggccuc

SEQ ID NO: 1365447 - RNA, 24 nt, Human
uagcuauaccuggggggaccccaa

SEQ ID NO: 1365448 - RNA, 19 nt, Human
uauuuugcauguuauuaac

SEQ ID NO: 1365449 - RNA, 18 nt, Human
ucacccacucacccuccc

SEQ ID NO: 1365450 - RNA, 19 nt, Human
ucagccucugaaacgagcu

SEQ ID NO: 1365451 - RNA, 22 nt, Human
uccacaaaagcccugcacccac

SEQ ID NO: 1365452 - RNA, 23 nt, Human
ucccacagggaacacccccgaga

SEQ ID NO: 1365453 - RNA, 22 nt, Human
ucccuggagacacaaaccucug

SEQ ID NO: 1365454 - RNA, 20 nt, Human
uccguggggaagguagcggg

SEQ ID NO: 1365455 - RNA, 20 nt, Human
uccuggaagaugccgauggg

SEQ ID NO: 1365456 - RNA, 19 nt, Human
ucgauuuuaaaaaggaucc

SEQ ID NO: 1365457 - RNA, 21 nt, Human
ucgcagcccaggccucuccug

SEQ ID NO: 1365458 - RNA, 20 nt, Human
ucuacaaaugcuguggcuca

SEQ ID NO: 1365459 - RNA, 24 nt, Human
ucucagagaugcaaagacagaggc

SEQ ID NO: 1365460 - RNA, 25 nt, Human
ucuccaagcaagcucacaucaaccc

SEQ ID NO: 1365461 - RNA, 18 nt, Human
ucucccuauuucucucca

SEQ ID NO: 1365462 - RNA, 25 nt, Human
ucucuggagcuucaaagcugcucuu

SEQ ID NO: 1365463 - RNA, 18 nt, Human
ucugccgucaccccagcc

SEQ ID NO: 1365464 - RNA, 25 nt, Human
ucuugccccugggcauuuggugggg

SEQ ID NO: 1365465 - RNA, 21 nt, Human
ucuuggcccagcacagaccuu

SEQ ID NO: 1365466 - RNA, 21 nt, Human
ugaauuugcuggggccuggga

SEQ ID NO: 1365467 - RNA, 22 nt, Human
ugacaauuuccacaaaagcccu

SEQ ID NO: 1365468 - RNA, 23 nt, Human
ugagaaacugaaacugaaggcca

SEQ ID NO: 1365469 - RNA, 24 nt, Human
ugagcagaggaugauaggacuugu

SEQ ID NO: 1365470 - RNA, 18 nt, Human
ugcaccacggaugagggg

SEQ ID NO: 1365471 - RNA, 22 nt, Human
ugcacccacaaaggcaccaucu

SEQ ID NO: 1365472 - RNA, 18 nt, Human
ugcagggcugcaggggug

SEQ ID NO: 1365473 - RNA, 19 nt, Human
ugccagcaggggcaggggg

SEQ ID NO: 1365474 - RNA, 21 nt, Human
ugccccacacccaccuuggaa

SEQ ID NO: 1365475 - RNA, 27 nt, Human
ugcugcaacuguuuacauguauuggga

SEQ ID NO: 1365476 - RNA, 19 nt, Human
ugcuggggccugggaaggu

SEQ ID NO: 1365477 - RNA, 20 nt, Human
ugcuggggccugggaagguc

SEQ ID NO: 1365478 - RNA, 18 nt, Human
ugcuguggccucugccgu

SEQ ID NO: 1365479 - RNA, 24 nt, Human
uggaaaaauaacagaugcacauaa

SEQ ID NO: 1365480 - RNA, 21 nt, Human
uggagaguccgcuucuugggg

SEQ ID NO: 1365481 - RNA, 23 nt, Human
uggagcuucaaagcugcucuugg

SEQ ID NO: 1365482 - RNA, 19 nt, Human
uggcacacgccccagucuc

SEQ ID NO: 1365483 - RNA, 19 nt, Human
uggccucugccgucacccc

SEQ ID NO: 1365484 - RNA, 20 nt, Human
uggggaggggaugccggacu

SEQ ID NO: 1365485 - RNA, 24 nt, Human
ugggggccccaugggcccccacuu

SEQ ID NO: 1365486 - RNA, 22 nt, Human
uggugcuguggccucugccguc

SEQ ID NO: 1365487 - RNA, 23 nt, Human
ugguggggcacagaacugagguc

SEQ ID NO: 1365488 - RNA, 23 nt, Human
uguggggaagggagccggguuuu

SEQ ID NO: 1365489 - RNA, 18 nt, Human
uguggggacucagccucu

SEQ ID NO: 1365490 - RNA, 24 nt, Human
uuaaaaaaaaaaaaaaaagaaaaa

SEQ ID NO: 1365491 - RNA, 22 nt, Human
uuaccacccgacuccuucucag

SEQ ID NO: 1365492 - RNA, 24 nt, Human
uuccugaccccaaccguuaccacc

SEQ ID NO: 1365493 - RNA, 21 nt, Human
uugguggggcacagaacugag

SEQ ID NO: 1365494 - RNA, 26 nt, Human
uuuaaaaaaaaaaaaaaaagaaaaag

SEQ ID NO: 1365495 - RNA, 21 nt, Human
uuucgcuucagggcauuuuuc

SEQ ID NO: 1365496 - RNA, 27 nt, Human
uuuuucaacaaagaacgcacuccuggg

SEQ ID NO: 1365497 - RNA, 24 nt, Human
aaaaaacaaaaagaguugacaggu

SEQ ID NO: 1365498 - RNA, 18 nt, Human
aaaauuagcugggcaugg

SEQ ID NO: 1365499 - RNA, 19 nt, Human
aaagugcuggaauuauagg

SEQ ID NO: 1365500 - RNA, 24 nt, Human
aaagugcuggaauuauaggcauga

SEQ ID NO: 1365501 - RNA, 20 nt, Human
aaagugcugggauuacaggc

SEQ ID NO: 1365502 - RNA, 24 nt, Human
aaagugcugggauuacaggccuga

SEQ ID NO: 1365503 - RNA, 19 nt, Human
aacacagugaaaccccauc

SEQ ID NO: 1365504 - RNA, 20 nt, Human
aacacagugaaaccccaucu

SEQ ID NO: 1365505 - RNA, 21 nt, Human
aacacagugaaaccccaucuc

SEQ ID NO: 1365506 - RNA, 21 nt, Human
aacacagugaaaccccaucuc

SEQ ID NO: 1365507 - RNA, 19 nt, Human
aacaugaugaaaccccauc

SEQ ID NO: 1365508 - RNA, 20 nt, Human
aacaugaugaaaccccaucu

SEQ ID NO: 1365509 - RNA, 20 nt, Human
aacaugaugaaaccccaucu

SEQ ID NO: 1365510 - RNA, 21 nt, Human
aacaugaugaaaccccaucuc

SEQ ID NO: 1365511 - RNA, 23 nt, Human
aagaaucacuugaaccugggagg

SEQ ID NO: 1365512 - RNA, 22 nt, Human
aagccuuggcaaagcucacaug

SEQ ID NO: 1365513 - RNA, 26 nt, Human
aagugcuggaauuauaggcaugagcc

SEQ ID NO: 1365514 - RNA, 19 nt, Human
aagugcugggauuacaggc

SEQ ID NO: 1365515 - RNA, 19 nt, Human
aagugcugggauuacaggc

SEQ ID NO: 1365516 - RNA, 26 nt, Human
aagugcugggauuacaggccugagcc

SEQ ID NO: 1365517 - RNA, 24 nt, Human
aaucacuugaaccugggaggcgga

SEQ ID NO: 1365518 - RNA, 21 nt, Human
aauuauaggcaugagccaccg

SEQ ID NO: 1365519 - RNA, 24 nt, Human
aauuauaggcaugagccaccgugc

SEQ ID NO: 1365520 - RNA, 19 nt, Human
acaagagugaaacuccauc

SEQ ID NO: 1365521 - RNA, 20 nt, Human
acaagagugaaacuccaucu

SEQ ID NO: 1365522 - RNA, 21 nt, Human
acaagagugaaacuccaucuc

SEQ ID NO: 1365523 - RNA, 19 nt, Human
acaagugcgaaaccccauc

SEQ ID NO: 1365524 - RNA, 18 nt, Human
acaaugucuguaaucugu

SEQ ID NO: 1365525 - RNA, 20 nt, Human
acacuguaauucaaaggaua

SEQ ID NO: 1365526 - RNA, 26 nt, Human
acagaacaggacagggauuuucaaag

SEQ ID NO: 1365527 - RNA, 24 nt, Human
acagcacuccagccugggugaaag

SEQ ID NO: 1365528 - RNA, 21 nt, Human
accagucuggcaaacaugaug

SEQ ID NO: 1365529 - RNA, 22 nt, Human
accauugcacuccagccugggc

SEQ ID NO: 1365530 - RNA, 24 nt, Human
accccaucucuacuaaaaauacaa

SEQ ID NO: 1365531 - RNA, 24 nt, Human
accccaucucuacuaaaaauacaa

SEQ ID NO: 1365532 - RNA, 18 nt, Human
acgggguuucacuauguu

SEQ ID NO: 1365533 - RNA, 23 nt, Human
acgggguuucacuauguuggcca

SEQ ID NO: 1365534 - RNA, 24 nt, Human
acgggguuucacuauguuggccag

SEQ ID NO: 1365535 - RNA, 24 nt, Human
acuauguuggccaggauggucuug

SEQ ID NO: 1365536 - RNA, 25 nt, Human
acuccagccugggugacaagaguga

SEQ ID NO: 1365537 - RNA, 18 nt, Human
agaagccuuggcaaagcu

SEQ ID NO: 1365538 - RNA, 23 nt, Human
agaaguugcagugagcugagauc

SEQ ID NO: 1365539 - RNA, 24 nt, Human
agaaguugcagugagcugagaucg

SEQ ID NO: 1365540 - RNA, 18 nt, Human
agacaauccaccugccuu

SEQ ID NO: 1365541 - RNA, 18 nt, Human
agacaauccaccugccuu

SEQ ID NO: 1365542 - RNA, 24 nt, Human
agcacuuuaggaugccgagguggg

SEQ ID NO: 1365543 - RNA, 24 nt, Human
agcacuuugggaggccgagguggg

SEQ ID NO: 1365544 - RNA, 19 nt, Human
agcagaaauugggcauaag

SEQ ID NO: 1365545 - RNA, 23 nt, Human
agccgggcaugguggcgggugcc

SEQ ID NO: 1365546 - RNA, 24 nt, Human
agccugggugaaagaccgagacuc

SEQ ID NO: 1365547 - RNA, 20 nt, Human
agcugggcaugguggugggc

SEQ ID NO: 1365548 - RNA, 24 nt, Human
aggaagcugaggcaggagaauggu

SEQ ID NO: 1365549 - RNA, 21 nt, Human
aggaguuggagaccagucugg

SEQ ID NO: 1365550 - RNA, 22 nt, Human
aggcagaagaaucacuugaacc

SEQ ID NO: 1365551 - RNA, 24 nt, Human
aggcagaagaaucacuugaaccug

SEQ ID NO: 1365552 - RNA, 20 nt, Human
aggcagaaguugcagugagc

SEQ ID NO: 1365553 - RNA, 24 nt, Human
aggcagaaguugcagugagcugag

SEQ ID NO: 1365554 - RNA, 18 nt, Human
aggcaggagaauggcuug

SEQ ID NO: 1365555 - RNA, 18 nt, Human
aggcaggagaauggugug

SEQ ID NO: 1365556 - RNA, 21 nt, Human
aggcaggagaauggugugaac

SEQ ID NO: 1365557 - RNA, 22 nt, Human
aggcaggagaauggugugaacc

SEQ ID NO: 1365558 - RNA, 24 nt, Human
aggcaggagaauggugugaaccug

SEQ ID NO: 1365559 - RNA, 19 nt, Human
aggcaugagccaccgugcc

SEQ ID NO: 1365560 - RNA, 20 nt, Human
aggcaugagccaccgugccu

SEQ ID NO: 1365561 - RNA, 23 nt, Human
aggcaugagccaccgugccuggc

SEQ ID NO: 1365562 - RNA, 21 nt, Human
aggccgaggugggcggaucac

SEQ ID NO: 1365563 - RNA, 24 nt, Human
aggcggagguugcagugagccgag

SEQ ID NO: 1365564 - RNA, 24 nt, Human
aggcugaggcagaagaaucacuug

SEQ ID NO: 1365565 - RNA, 24 nt, Human
aggcugaggcaggagaauggcuug

SEQ ID NO: 1365566 - RNA, 18 nt, Human
aggguuucuguccaguau

SEQ ID NO: 1365567 - RNA, 23 nt, Human
aggugauggauacuuuacccuaa

SEQ ID NO: 1365568 - RNA, 24 nt, Human
aggugcgguggcucacgccuguaa

SEQ ID NO: 1365569 - RNA, 21 nt, Human
agguggagguugcagugagcc

SEQ ID NO: 1365570 - RNA, 24 nt, Human
agguggagguugcagugagccgag

SEQ ID NO: 1365571 - RNA, 24 nt, Human
aggugggcggaucacaaggucagg

SEQ ID NO: 1365572 - RNA, 20 nt, Human
aguaagugacugaaggcugc

SEQ ID NO: 1365573 - RNA, 19 nt, Human
aguaaucccagcuacucgg

SEQ ID NO: 1365574 - RNA, 24 nt, Human
agucuggcaaacaugaugaaaccc

SEQ ID NO: 1365575 - RNA, 24 nt, Human
agugcugggauuacaggccugagc

SEQ ID NO: 1365576 - RNA, 24 nt, Human
aguggcgcaugccuguaaucccag

SEQ ID NO: 1365577 - RNA, 22 nt, Human
auauuguaggccugaaucaaaa

SEQ ID NO: 1365578 - RNA, 24 nt, Human
aucgugccacagcacuccagccug

SEQ ID NO: 1365579 - RNA, 24 nt, Human
aucgugccauugcacuccagccug

SEQ ID NO: 1365580 - RNA, 24 nt, Human
auugcacuccagccugggcaacaa

SEQ ID NO: 1365581 - RNA, 21 nt, Human
auugcacuccagccuggguga

SEQ ID NO: 1365582 - RNA, 24 nt, Human
auuguaccauugcacuccagccug

SEQ ID NO: 1365583 - RNA, 23 nt, Human
caaaaaacaaaaagaguugacag

SEQ ID NO: 1365584 - RNA, 24 nt, Human
caaagugcuggaauuauaggcaug

SEQ ID NO: 1365585 - RNA, 20 nt, Human
caagcuccuuucacuccaaa

SEQ ID NO: 1365586 - RNA, 22 nt, Human
cacagcacuccagccuggguga

SEQ ID NO: 1365587 - RNA, 24 nt, Human
cacagcacuccagccugggugaaa

SEQ ID NO: 1365588 - RNA, 23 nt, Human
caccaguaaucccagcuacucgg

SEQ ID NO: 1365589 - RNA, 24 nt, Human
caccaguaaucccagcuacucggg

SEQ ID NO: 1365590 - RNA, 24 nt, Human
cacgccuguaaucccagcacuuug

SEQ ID NO: 1365591 - RNA, 18 nt, Human
cacuauguuggccaggau

SEQ ID NO: 1365592 - RNA, 24 nt, Human
cacuauguuggccaggauggucuu

SEQ ID NO: 1365593 - RNA, 20 nt, Human
cacuccagccugggcaacaa

SEQ ID NO: 1365594 - RNA, 22 nt, Human
cacuccagccugggcaacaagu

SEQ ID NO: 1365595 - RNA, 23 nt, Human
cacuccagccugggcaacaagug

SEQ ID NO: 1365596 - RNA, 18 nt, Human
cacuccagccugggugaa

SEQ ID NO: 1365597 - RNA, 20 nt, Human
cacuccagccugggugaaag

SEQ ID NO: 1365598 - RNA, 23 nt, Human
cacuccagccugggugacaagag

SEQ ID NO: 1365599 - RNA, 24 nt, Human
cacuccagccugggugacaagagu

SEQ ID NO: 1365600 - RNA, 25 nt, Human
cacuccagccugggugacaagagug

SEQ ID NO: 1365601 - RNA, 21 nt, Human
cacuugaaccugggaggcgga

SEQ ID NO: 1365602 - RNA, 24 nt, Human
cagaugauccgccugccuuggccc

SEQ ID NO: 1365603 - RNA, 24 nt, Human
cagcacuuuaggaugccgaggugg

SEQ ID NO: 1365604 - RNA, 24 nt, Human
cagcacuuugggaggccgaggugg

SEQ ID NO: 1365605 - RNA, 26 nt, Human
cagcaugaauuaucgccaugucucuu

SEQ ID NO: 1365606 - RNA, 24 nt, Human
cagcuacucgggaggcugaggcag

SEQ ID NO: 1365607 - RNA, 24 nt, Human
caguuacuugagaggcugaggcag

SEQ ID NO: 1365608 - RNA, 24 nt, Human
caugccuguaaucccaguuacuug

SEQ ID NO: 1365609 - RNA, 23 nt, Human
caugccugucaucucagcacuuu

SEQ ID NO: 1365610 - RNA, 22 nt, Human
caugguggcgggugccuguagu

SEQ ID NO: 1365611 - RNA, 18 nt, Human
cauugcacuccagccugg

SEQ ID NO: 1365612 - RNA, 19 nt, Human
cauugcacuccagccuggg

SEQ ID NO: 1365613 - RNA, 19 nt, Human
cauugcacuccagccuggg

SEQ ID NO: 1365614 - RNA, 21 nt, Human
cauugcacuccagccugggca

SEQ ID NO: 1365615 - RNA, 24 nt, Human
cauugcacuccagccugggcaaca

SEQ ID NO: 1365616 - RNA, 21 nt, Human
cauugcacuccagccugggug

SEQ ID NO: 1365617 - RNA, 22 nt, Human
cauugcacuccagccuggguga

SEQ ID NO: 1365618 - RNA, 24 nt, Human
cauugcacuccagccugggugaca

SEQ ID NO: 1365619 - RNA, 25 nt, Human
cauugcacuccagccugggugacaa

SEQ ID NO: 1365620 - RNA, 22 nt, Human
ccaaagugcuggaauuauaggc

SEQ ID NO: 1365621 - RNA, 24 nt, Human
ccaaagugcuggaauuauaggcau

SEQ ID NO: 1365622 - RNA, 20 nt, Human
ccacagcacuccagccuggg

SEQ ID NO: 1365623 - RNA, 21 nt, Human
ccacagcacuccagccugggu

SEQ ID NO: 1365624 - RNA, 21 nt, Human
ccacagcacuccagccugggu

SEQ ID NO: 1365625 - RNA, 23 nt, Human
ccacagcacuccagccuggguga

SEQ ID NO: 1365626 - RNA, 21 nt, Human
ccagccugggugaaagaccga

SEQ ID NO: 1365627 - RNA, 23 nt, Human
ccaggcccaugguguggcgcugg

SEQ ID NO: 1365628 - RNA, 18 nt, Human
ccauugcacuccagccug

SEQ ID NO: 1365629 - RNA, 20 nt, Human
ccauugcacuccagccuggg

SEQ ID NO: 1365630 - RNA, 20 nt, Human
ccauugcacuccagccuggg

SEQ ID NO: 1365631 - RNA, 21 nt, Human
ccauugcacuccagccugggc

SEQ ID NO: 1365632 - RNA, 23 nt, Human
ccauugcacuccagccugggcaa

SEQ ID NO: 1365633 - RNA, 24 nt, Human
ccauugcacuccagccugggcaac

SEQ ID NO: 1365634 - RNA, 21 nt, Human
ccauugcacuccagccugggu

SEQ ID NO: 1365635 - RNA, 21 nt, Human
ccauugcacuccagccugggu

SEQ ID NO: 1365636 - RNA, 22 nt, Human
ccauugcacuccagccugggug

SEQ ID NO: 1365637 - RNA, 24 nt, Human
ccauugcacuccagccugggugac

SEQ ID NO: 1365638 - RNA, 23 nt, Human
ccccugauuugcgugaacuccug

SEQ ID NO: 1365639 - RNA, 24 nt, Human
cccggcuaacacagugaaacccca

SEQ ID NO: 1365640 - RNA, 23 nt, Human
ccucagguggggacaagaagugg

SEQ ID NO: 1365641 - RNA, 21 nt, Human
ccugaccucagacaauccacc

SEQ ID NO: 1365642 - RNA, 23 nt, Human
ccugaccucagacaauccaccug

SEQ ID NO: 1365643 - RNA, 18 nt, Human
ccugaccucagaugaucc

SEQ ID NO: 1365644 - RNA, 21 nt, Human
ccugaccucagaugauccgcc

SEQ ID NO: 1365645 - RNA, 23 nt, Human
ccugaccucagaugauccgccug

SEQ ID NO: 1365646 - RNA, 22 nt, Human
ccugccuuggcccuccaaagug

SEQ ID NO: 1365647 - RNA, 19 nt, Human
ccugggaggcggagguugc

SEQ ID NO: 1365648 - RNA, 21 nt, Human
ccugggagguggagguugcag

SEQ ID NO: 1365649 - RNA, 22 nt, Human
ccuguaaucccagcacuuuggg

SEQ ID NO: 1365650 - RNA, 22 nt, Human
ccuguaaucccaguuacuugag

SEQ ID NO: 1365651 - RNA, 21 nt, Human
ccuguagucccagcuacucag

SEQ ID NO: 1365652 - RNA, 24 nt, Human
cgagguggguggaccaucugaggu

SEQ ID NO: 1365653 - RNA, 23 nt, Human
cgccuguaaucccagcacuuugg

SEQ ID NO: 1365654 - RNA, 22 nt, Human
cggcuaacacagugaaacccca

SEQ ID NO: 1365655 - RNA, 24 nt, Human
cgggguuucacuauguuggccagg

SEQ ID NO: 1365656 - RNA, 19 nt, Human
cuaggcuuccagggggucc

SEQ ID NO: 1365657 - RNA, 22 nt, Human
cuaguaauagauuucaauaaga

SEQ ID NO: 1365658 - RNA, 18 nt, Human
cucaaaaacugagcuccc

SEQ ID NO: 1365659 - RNA, 22 nt, Human
cucacgccuguaaucccagcac

SEQ ID NO: 1365660 - RNA, 24 nt, Human
cucacgccuguaaucccagcacuu

SEQ ID NO: 1365661 - RNA, 24 nt, Human
cucaugccugucaucucagcacuu

SEQ ID NO: 1365662 - RNA, 22 nt, Human
cuccugaccucagacaauccac

SEQ ID NO: 1365663 - RNA, 26 nt, Human
cuccugaccucagaugauccgccugc

SEQ ID NO: 1365664 - RNA, 21 nt, Human
cugcaggucacagggccacag

SEQ ID NO: 1365665 - RNA, 23 nt, Human
cuggcaaacaugaugaaacccca

SEQ ID NO: 1365666 - RNA, 18 nt, Human
cugucugccuguggauuu

SEQ ID NO: 1365667 - RNA, 18 nt, Human
gaaagugcugggauuaca

SEQ ID NO: 1365668 - RNA, 21 nt, Human
gaccaucugaggucaggaguu

SEQ ID NO: 1365669 - RNA, 21 nt, Human
gaccaucugaggucaggaguu

SEQ ID NO: 1365670 - RNA, 23 nt, Human
gaccaucugaggucaggaguugg

SEQ ID NO: 1365671 - RNA, 24 nt, Human
gaccaucugaggucaggaguugga

SEQ ID NO: 1365672 - RNA, 23 nt, Human
gaccucagacaauccaccugccu

SEQ ID NO: 1365673 - RNA, 24 nt, Human
gaccucagaugauccgccugccuu

SEQ ID NO: 1365674 - RNA, 23 nt, Human
gagaucgugccacagcacuccag

SEQ ID NO: 1365675 - RNA, 23 nt, Human
gagauuguaccauugcacuccag

SEQ ID NO: 1365676 - RNA, 24 nt, Human
gaggugggcggaucacaaggucag

SEQ ID NO: 1365677 - RNA, 23 nt, Human
gagguggguggaccaucugaggu

SEQ ID NO: 1365678 - RNA, 25 nt, Human
gagguggguggaccaucugagguca

SEQ ID NO: 1365679 - RNA, 23 nt, Human
gagguugcagugagccgagaucg

SEQ ID NO: 1365680 - RNA, 23 nt, Human
gagguugcagugagccgagauug

SEQ ID NO: 1365681 - RNA, 18 nt, Human
gauuacaggccugagcca

SEQ ID NO: 1365682 - RNA, 22 nt, Human
gauuacaggccugagccacugc

SEQ ID NO: 1365683 - RNA, 23 nt, Human
gauuacaggccugagccacugca

SEQ ID NO: 1365684 - RNA, 21 nt, Human
gcaaacaugaugaaaccccau

SEQ ID NO: 1365685 - RNA, 18 nt, Human
gcaaagcucacaugaccu

SEQ ID NO: 1365686 - RNA, 23 nt, Human
gcagaagaaucacuugaaccugg

SEQ ID NO: 1365687 - RNA, 19 nt, Human
gccacagcacuccagccug

SEQ ID NO: 1365688 - RNA, 19 nt, Human
gccauugcacuccagccug

SEQ ID NO: 1365689 - RNA, 24 nt, Human
gccauugcacuccagccuggguga

SEQ ID NO: 1365690 - RNA, 20 nt, Human
gccuguaaucccaguuacuu

SEQ ID NO: 1365691 - RNA, 26 nt, Human
ggacaagaaguggaaaccuaugcaga

SEQ ID NO: 1365692 - RNA, 20 nt, Human
ggagguugcagugagccgag

SEQ ID NO: 1365693 - RNA, 22 nt, Human
ggagguugcagugagccgagau

SEQ ID NO: 1365694 - RNA, 22 nt, Human
ggagguugcagugagccgagau

SEQ ID NO: 1365695 - RNA, 24 nt, Human
ggagguugcagugagccgagaucg

SEQ ID NO: 1365696 - RNA, 24 nt, Human
ggagguugcagugagccgagauug

SEQ ID NO: 1365697 - RNA, 24 nt, Human
ggauggucuugaacuccugaccuc

SEQ ID NO: 1365698 - RNA, 18 nt, Human
ggccaggagaagccuugg

SEQ ID NO: 1365699 - RNA, 21 nt, Human
ggccaggugcgguggcucacg

SEQ ID NO: 1365700 - RNA, 18 nt, Human
ggcccuccaaagugcugg

SEQ ID NO: 1365701 - RNA, 21 nt, Human
ggcggaucacaaggucaggag

SEQ ID NO: 1365702 - RNA, 21 nt, Human
ggcucaugccugucaucucag

SEQ ID NO: 1365703 - RNA, 20 nt, Human
gggaggccgaggugggcgga

SEQ ID NO: 1365704 - RNA, 24 nt, Human
gggcgucguggcucaugccuguca

SEQ ID NO: 1365705 - RNA, 23 nt, Human
gggguuucacuauguuggccagg

SEQ ID NO: 1365706 - RNA, 22 nt, Human
ggguuucacuauguuggccagg

SEQ ID NO: 1365707 - RNA, 21 nt, Human
gguggaccaucugaggucagg

SEQ ID NO: 1365708 - RNA, 23 nt, Human
gguggcucacgccuguaauccca

SEQ ID NO: 1365709 - RNA, 24 nt, Human
gguggcucacgccuguaaucccag

SEQ ID NO: 1365710 - RNA, 23 nt, Human
guagaguuccucuucagcaugaa

SEQ ID NO: 1365711 - RNA, 18 nt, Human
gucagggcucgaucuuua

SEQ ID NO: 1365712 - RNA, 25 nt, Human
gugaaagaccgagacuccaucuaca

SEQ ID NO: 1365713 - RNA, 24 nt, Human
gugaaccugggagguggagguugc

SEQ ID NO: 1365714 - RNA, 19 nt, Human
guggcauaauggccaggug

SEQ ID NO: 1365715 - RNA, 21 nt, Human
guggcgcugggcugucugccu

SEQ ID NO: 1365716 - RNA, 23 nt, Human
guggcucacgccuguaaucccag

SEQ ID NO: 1365717 - RNA, 22 nt, Human
guggcucaugccugucaucuca

SEQ ID NO: 1365718 - RNA, 19 nt, Human
guugcagugagccgagauu

SEQ ID NO: 1365719 - RNA, 24 nt, Human
guugcagugagcugagaucgugcc

SEQ ID NO: 1365720 - RNA, 20 nt, Human
uaaaugcuagaggugaugga

SEQ ID NO: 1365721 - RNA, 24 nt, Human
uaacugaaguaucagcaaacugaa

SEQ ID NO: 1365722 - RNA, 26 nt, Human
uaagaaaaaaaauuuaagcuauggga

SEQ ID NO: 1365723 - RNA, 21 nt, Human
uaagcggcucggacccucagc

SEQ ID NO: 1365724 - RNA, 22 nt, Human
uacaggccugagccacugcacc

SEQ ID NO: 1365725 - RNA, 24 nt, Human
uaccauugcacuccagccugggca

SEQ ID NO: 1365726 - RNA, 20 nt, Human
uaccugcaggucacagggcc

SEQ ID NO: 1365727 - RNA, 21 nt, Human
uagaauggaacagaacaggaa

SEQ ID NO: 1365728 - RNA, 21 nt, Human
uagccgggcaugguggcgggu

SEQ ID NO: 1365729 - RNA, 24 nt, Human
uaguggcgcaugccuguaauccca

SEQ ID NO: 1365730 - RNA, 24 nt, Human
uaguuaaaggcuuucccacauuca

SEQ ID NO: 1365731 - RNA, 18 nt, Human
ucacaaggucaggagauu

SEQ ID NO: 1365732 - RNA, 22 nt, Human
ucacaaggucaggagauugacc

SEQ ID NO: 1365733 - RNA, 23 nt, Human
ucacacacgcaaaaaaaggagga

SEQ ID NO: 1365734 - RNA, 24 nt, Human
ucacuugaaccugggaggcggagg

SEQ ID NO: 1365735 - RNA, 25 nt, Human
ucacuugaaccugggaggcggaggu

SEQ ID NO: 1365736 - RNA, 18 nt, Human
ucagaguccagggcuagu

SEQ ID NO: 1365737 - RNA, 24 nt, Human
ucagaguccagggcuaguuaaagg

SEQ ID NO: 1365738 - RNA, 19 nt, Human
ucagggcucgaucuuuaac

SEQ ID NO: 1365739 - RNA, 21 nt, Human
ucaguguacuuuauucaucca

SEQ ID NO: 1365740 - RNA, 20 nt, Human
uccacagcgagugcccccgc

SEQ ID NO: 1365741 - RNA, 19 nt, Human
uccagccugggugacaaga

SEQ ID NO: 1365742 - RNA, 21 nt, Human
ucccugagugagcaauuccua

SEQ ID NO: 1365743 - RNA, 18 nt, Human
ucggacccucagcuggac

SEQ ID NO: 1365744 - RNA, 21 nt, Human
ucucuacuaaaaauacaaaaa

SEQ ID NO: 1365745 - RNA, 22 nt, Human
ucucuacuaaaaauacaaaaaa

SEQ ID NO: 1365746 - RNA, 20 nt, Human
ucugaggucaggaguuggag

SEQ ID NO: 1365747 - RNA, 23 nt, Human
ucugaggucaggaguuggagacc

SEQ ID NO: 1365748 - RNA, 19 nt, Human
ugaaaccccaucucuacua

SEQ ID NO: 1365749 - RNA, 19 nt, Human
ugaaaccccaucucuacua

SEQ ID NO: 1365750 - RNA, 18 nt, Human
ugaaagaccgagacucca

SEQ ID NO: 1365751 - RNA, 24 nt, Human
ugaaccugggaggcggagguugca

SEQ ID NO: 1365752 - RNA, 19 nt, Human
ugaaccugggagguggagg

SEQ ID NO: 1365753 - RNA, 24 nt, Human
ugaaccugggagguggagguugca

SEQ ID NO: 1365754 - RNA, 21 nt, Human
ugaaguaucagcaaacugaaa

SEQ ID NO: 1365755 - RNA, 23 nt, Human
ugacaugaggccaggagaagccu

SEQ ID NO: 1365756 - RNA, 18 nt, Human
ugaccucagaugauccgc

SEQ ID NO: 1365757 - RNA, 22 nt, Human
ugaccuucaagcuccuuucacu

SEQ ID NO: 1365758 - RNA, 22 nt, Human
ugagaacuuguggcugggcguc

SEQ ID NO: 1365759 - RNA, 24 nt, Human
ugagaggcugaggcagaagaauca

SEQ ID NO: 1365760 - RNA, 24 nt, Human
ugagaucgugccauugcacuccag

SEQ ID NO: 1365761 - RNA, 22 nt, Human
ugagcaauuccuaucccucuua

SEQ ID NO: 1365762 - RNA, 22 nt, Human
ugagccgagaucgugccacagc

SEQ ID NO: 1365763 - RNA, 22 nt, Human
ugagccgagauuguaccauugc

SEQ ID NO: 1365764 - RNA, 24 nt, Human
ugaggcagaagaaucacuugaacc

SEQ ID NO: 1365765 - RNA, 24 nt, Human
ugaggcagaagaaucacuugaacc

SEQ ID NO: 1365766 - RNA, 20 nt, Human
ugaggcaggagaauggcuuc

SEQ ID NO: 1365767 - RNA, 24 nt, Human
ugaggcaggagaauggugugaacc

SEQ ID NO: 1365768 - RNA, 24 nt, Human
ugaggcaggagaauggugugaacc

SEQ ID NO: 1365769 - RNA, 19 nt, Human
ugcacuccagccugggcaa

SEQ ID NO: 1365770 - RNA, 22 nt, Human
ugcacuccagccugggcaacaa

SEQ ID NO: 1365771 - RNA, 22 nt, Human
ugcacuccagccugggugacaa

SEQ ID NO: 1365772 - RNA, 23 nt, Human
ugcacuccagccugggugacaag

SEQ ID NO: 1365773 - RNA, 24 nt, Human
ugcaugagagggucgugaucgauu

SEQ ID NO: 1365774 - RNA, 20 nt, Human
ugccacagcacuccagccug

SEQ ID NO: 1365775 - RNA, 23 nt, Human
ugccauauaaggcauaaagauau

SEQ ID NO: 1365776 - RNA, 22 nt, Human
ugccauauucuucacacuugua

SEQ ID NO: 1365777 - RNA, 22 nt, Human
ugccuguaaucccaguuacuug

SEQ ID NO: 1365778 - RNA, 23 nt, Human
ugccuguaaucccaguuacuuga

SEQ ID NO: 1365779 - RNA, 24 nt, Human
ugccuguagucccagcuacucagg

SEQ ID NO: 1365780 - RNA, 19 nt, Human
uggaagcagaaauugggca

SEQ ID NO: 1365781 - RNA, 18 nt, Human
uggaauuauaggcaugag

SEQ ID NO: 1365782 - RNA, 21 nt, Human
uggaauuauaggcaugagcca

SEQ ID NO: 1365783 - RNA, 22 nt, Human
uggaauuauaggcaugagccac

SEQ ID NO: 1365784 - RNA, 23 nt, Human
uggaauuauaggcaugagccacc

SEQ ID NO: 1365785 - RNA, 24 nt, Human
uggaauuauaggcaugagccaccg

SEQ ID NO: 1365786 - RNA, 23 nt, Human
uggaccaucugaggucaggaguu

SEQ ID NO: 1365787 - RNA, 27 nt, Human
uggaccaucugaggucaggaguuggag

SEQ ID NO: 1365788 - RNA, 22 nt, Human
uggagguggugguaaaagcacu

SEQ ID NO: 1365789 - RNA, 21 nt, Human
uggcaaagcucacaugaccuu

SEQ ID NO: 1365790 - RNA, 19 nt, Human
uggcaaagugacaaguaga

SEQ ID NO: 1365791 - RNA, 24 nt, Human
uggccaggauggucuugaacuccu

SEQ ID NO: 1365792 - RNA, 24 nt, Human
uggccaggugcgguggcucacgcc

SEQ ID NO: 1365793 - RNA, 21 nt, Human
uggcgcaugccuguaauccca

SEQ ID NO: 1365794 - RNA, 22 nt, Human
uggcgcaugccuguaaucccag

SEQ ID NO: 1365795 - RNA, 24 nt, Human
uggcgggugccuguagucccagcu

SEQ ID NO: 1365796 - RNA, 22 nt, Human
uggcucacgccuguaaucccag

SEQ ID NO: 1365797 - RNA, 24 nt, Human
uggcucacgccuguaaucccagca

SEQ ID NO: 1365798 - RNA, 24 nt, Human
uggcugggcgucguggcucaugcc

SEQ ID NO: 1365799 - RNA, 20 nt, Human
uggcuugauaccaggaggca

SEQ ID NO: 1365800 - RNA, 23 nt, Human
ugggaacaauucaacucauuugc

SEQ ID NO: 1365801 - RNA, 19 nt, Human
ugggaggccgaggugggcg

SEQ ID NO: 1365802 - RNA, 24 nt, Human
ugggaggccgaggugggcggauca

SEQ ID NO: 1365803 - RNA, 29 nt, Human
ugggaggcggagguugcagugacaacggu

SEQ ID NO: 1365804 - RNA, 24 nt, Human
ugggaggcggagguugcagugagc

SEQ ID NO: 1365805 - RNA, 18 nt, Human
ugggagguggagguugca

SEQ ID NO: 1365806 - RNA, 29 nt, Human
ugggagguggagguugcagugacaacggu

SEQ ID NO: 1365807 - RNA, 24 nt, Human
ugggagguggagguugcagugagc

SEQ ID NO: 1365808 - RNA, 19 nt, Human
ugggauuacaggccugagc

SEQ ID NO: 1365809 - RNA, 21 nt, Human
ugggauuacaggccugagcca

SEQ ID NO: 1365810 - RNA, 22 nt, Human
ugggauuacaggccugagccac

SEQ ID NO: 1365811 - RNA, 22 nt, Human
ugggauuacaggccugagccac

SEQ ID NO: 1365812 - RNA, 24 nt, Human
ugggauuacaggccugagccacug

SEQ ID NO: 1365813 - RNA, 24 nt, Human
ugggauuacaggccugagccacug

SEQ ID NO: 1365814 - RNA, 23 nt, Human
ugggcaacaagugcgaaacccca

SEQ ID NO: 1365815 - RNA, 24 nt, Human
uggguggaccaucugaggucagga

SEQ ID NO: 1365816 - RNA, 24 nt, Human
ugguggcgggugccuguaguccca

SEQ ID NO: 1365817 - RNA, 24 nt, Human
uggugugaaccugggagguggagg

SEQ ID NO: 1365818 - RNA, 21 nt, Human
uguaggguuucuguccaguau

SEQ ID NO: 1365819 - RNA, 25 nt, Human
uguccaguauaaauuauguguaaua

SEQ ID NO: 1365820 - RNA, 19 nt, Human
uguggcaaccauauaaacg

SEQ ID NO: 1365821 - RNA, 22 nt, Human
uguggcugggcgucguggcuca

SEQ ID NO: 1365822 - RNA, 22 nt, Human
uuaaaguuaguggcauaauggc

SEQ ID NO: 1365823 - RNA, 22 nt, Human
uuagaauggaacagaacaggac

SEQ ID NO: 1365824 - RNA, 24 nt, Human
uuagccgggcaugguggcgggugc

SEQ ID NO: 1365825 - RNA, 18 nt, Human
uuagcugggcaugguggu

SEQ ID NO: 1365826 - RNA, 24 nt, Human
uuagcugggcaugguggugggcac

SEQ ID NO: 1365827 - RNA, 20 nt, Human
uucauacauuuccaggguuu

SEQ ID NO: 1365828 - RNA, 24 nt, Human
uuccucagacgggguuucacuaug

SEQ ID NO: 1365829 - RNA, 21 nt, Human
uucuauacaaugucuguaauc

SEQ ID NO: 1365830 - RNA, 24 nt, Human
uugaaccugggaggcggagguugc

SEQ ID NO: 1365831 - RNA, 25 nt, Human
uugagaggcugaggcagaagaauca

SEQ ID NO: 1365832 - RNA, 18 nt, Human
uugcagugagccgagauc

SEQ ID NO: 1365833 - RNA, 22 nt, Human
uugcagugagccgagaucgugc

SEQ ID NO: 1365834 - RNA, 23 nt, Human
uugcagugagccgagaucgugcc

SEQ ID NO: 1365835 - RNA, 19 nt, Human
uugcagugagccgagauug

SEQ ID NO: 1365836 - RNA, 22 nt, Human
uugcagugagccgagauuguac

SEQ ID NO: 1365837 - RNA, 18 nt, Human
uugcagugagcugagauc

SEQ ID NO: 1365838 - RNA, 21 nt, Human
uugcagugagcugagaucgug

SEQ ID NO: 1365839 - RNA, 22 nt, Human
uugcagugagcugagaucgugc

SEQ ID NO: 1365840 - RNA, 18 nt, Human
uuggagccuguaagcggc

SEQ ID NO: 1365841 - RNA, 25 nt, Human
uugggaggccgaggugggcggauca

SEQ ID NO: 1365842 - RNA, 23 nt, Human
uuguaccauugcacuccagccug

SEQ ID NO: 1365843 - RNA, 18 nt, Human
uuuacuucuucuuucuuu

SEQ ID NO: 1365844 - RNA, 19 nt, Human
uuucacuauguuggccagg

SEQ ID NO: 1365845 - RNA, 24 nt, Human
uuucauacauuuccaggguuucac

SEQ ID NO: 1365846 - RNA, 20 nt, Human
aaaaacaaauaaggccugac

SEQ ID NO: 1365847 - RNA, 26 nt, Human
aaacaaacaaaacuccacagaaacaa

SEQ ID NO: 1365848 - RNA, 19 nt, Human
aaacaaaucacagacacuu

SEQ ID NO: 1365849 - RNA, 21 nt, Human
aaacaaaucacagacacuuua

SEQ ID NO: 1365850 - RNA, 21 nt, Human
aaagcuugggagcacaaccaa

SEQ ID NO: 1365851 - RNA, 19 nt, Human
aaagguggaugugugggcu

SEQ ID NO: 1365852 - RNA, 20 nt, Human
aaaguccagauucagugugg

SEQ ID NO: 1365853 - RNA, 24 nt, Human
aacaaaauuuacaucaaccaauaa

SEQ ID NO: 1365854 - RNA, 21 nt, Human
aacaaacaaaacuccacagaa

SEQ ID NO: 1365855 - RNA, 23 nt, Human
aaccaaacccacagaugggccua

SEQ ID NO: 1365856 - RNA, 27 nt, Human
aaccucucccucuuucuccccacccac

SEQ ID NO: 1365857 - RNA, 25 nt, Human
aagcaggaauuuuacuugcacaugg

SEQ ID NO: 1365858 - RNA, 22 nt, Human
aagccuccgauacaaucacuua

SEQ ID NO: 1365859 - RNA, 18 nt, Human
aaguacacaaaaaucuca

SEQ ID NO: 1365860 - RNA, 20 nt, Human
aaguaguaagaagugucaga

SEQ ID NO: 1365861 - RNA, 24 nt, Human
aaucacagacacuuuaaaaagucc

SEQ ID NO: 1365862 - RNA, 24 nt, Human
acaugaagucuuuugaaagcacca

SEQ ID NO: 1365863 - RNA, 21 nt, Human
accucucccucuuucucccca

SEQ ID NO: 1365864 - RNA, 22 nt, Human
agaauaaagguggauguguggg

SEQ ID NO: 1365865 - RNA, 25 nt, Human
agcaaaacaaacaaaacuccacaga

SEQ ID NO: 1365866 - RNA, 26 nt, Human
agcaaaacaaacaaaacuccacagaa

SEQ ID NO: 1365867 - RNA, 21 nt, Human
aggccugacaacaaaucggaa

SEQ ID NO: 1365868 - RNA, 21 nt, Human
aguaagaagugucagaaaaga

SEQ ID NO: 1365869 - RNA, 20 nt, Human
augcacacagccccagaugu

SEQ ID NO: 1365870 - RNA, 22 nt, Human
auugcugaaagagcgcaggucu

SEQ ID NO: 1365871 - RNA, 24 nt, Human
caaaaaacaaauaaggccugacaa

SEQ ID NO: 1365872 - RNA, 23 nt, Human
caaaaagcaaaacaaacaaaacu

SEQ ID NO: 1365873 - RNA, 24 nt, Human
caaaaagcaaaacaaacaaaacuc

SEQ ID NO: 1365874 - RNA, 24 nt, Human
caaaacaaacaaaacuccacagaa

SEQ ID NO: 1365875 - RNA, 21 nt, Human
caaacaaaacuccacagaaac

SEQ ID NO: 1365876 - RNA, 23 nt, Human
caaguggacauagaaccucuccc

SEQ ID NO: 1365877 - RNA, 23 nt, Human
caaucacuuacaaaaaacaaaua

SEQ ID NO: 1365878 - RNA, 26 nt, Human
cacaaccaagaaaugguuaauggaac

SEQ ID NO: 1365879 - RNA, 23 nt, Human
cacagaugggccuaagccucuga

SEQ ID NO: 1365880 - RNA, 24 nt, Human
caccaguguuaggacagggucccc

SEQ ID NO: 1365881 - RNA, 23 nt, Human
cacccacaaauggugucccucca

SEQ ID NO: 1365882 - RNA, 19 nt, Human
cagcuccuuauuacagggg

SEQ ID NO: 1365883 - RNA, 22 nt, Human
cagugaaaaaaaaauguaaagc

SEQ ID NO: 1365884 - RNA, 21 nt, Human
cauagaaccucucccucuuuc

SEQ ID NO: 1365885 - RNA, 23 nt, Human
cauggcagucuacaaaaagcaaa

SEQ ID NO: 1365886 - RNA, 20 nt, Human
ccaaacccacagaugggccu

SEQ ID NO: 1365887 - RNA, 22 nt, Human
ccaaagauaacaauguucguaa

SEQ ID NO: 1365888 - RNA, 19 nt, Human
cccacagaugggccuaagc

SEQ ID NO: 1365889 - RNA, 19 nt, Human
cccaccugaccguccucuc

SEQ ID NO: 1365890 - RNA, 19 nt, Human
cccucuuucuccccaccca

SEQ ID NO: 1365891 - RNA, 25 nt, Human
ccguccucucauuacuccuggcuac

SEQ ID NO: 1365892 - RNA, 18 nt, Human
cggaauguuucaaacaaa

SEQ ID NO: 1365893 - RNA, 21 nt, Human
cgucuggcccagcagccacac

SEQ ID NO: 1365894 - RNA, 24 nt, Human
cuacaaaaagcaaaacaaacaaaa

SEQ ID NO: 1365895 - RNA, 19 nt, Human
cucucccucuuucucccca

SEQ ID NO: 1365896 - RNA, 21 nt, Human
cucucccucuuucuccccacc

SEQ ID NO: 1365897 - RNA, 21 nt, Human
cuggugacggagaagaauaaa

SEQ ID NO: 1365898 - RNA, 23 nt, Human
gaaaaaaaaauguaaagcuugag

SEQ ID NO: 1365899 - RNA, 19 nt, Human
gacaggguccccugaggcc

SEQ ID NO: 1365900 - RNA, 21 nt, Human
gagucaauucugaaacgcccu

SEQ ID NO: 1365901 - RNA, 19 nt, Human
gaguuuguuuauuuucuuc

SEQ ID NO: 1365902 - RNA, 25 nt, Human
gcaaaacaaacaaaacuccacagaa

SEQ ID NO: 1365903 - RNA, 25 nt, Human
gcaguggaaaugagucaauucugaa

SEQ ID NO: 1365904 - RNA, 18 nt, Human
ggagaguauuuguagcug

SEQ ID NO: 1365905 - RNA, 20 nt, Human
guaaagaugcacacagcccc

SEQ ID NO: 1365906 - RNA, 24 nt, Human
guaaagcuugagaaauucuccaag

SEQ ID NO: 1365907 - RNA, 18 nt, Human
uaaacaaaucacagacac

SEQ ID NO: 1365908 - RNA, 22 nt, Human
uaagccucugagucauuggcaa

SEQ ID NO: 1365909 - RNA, 22 nt, Human
uacaaaaagcaaaacaaacaaa

SEQ ID NO: 1365910 - RNA, 18 nt, Human
uauuucaccacuugagag

SEQ ID NO: 1365911 - RNA, 19 nt, Human
ucagaagggucucuccagc

SEQ ID NO: 1365912 - RNA, 20 nt, Human
uccacacaacuuaagccucc

SEQ ID NO: 1365913 - RNA, 23 nt, Human
uccccacccacaaaugguguccc

SEQ ID NO: 1365914 - RNA, 18 nt, Human
ucccucuuucuccccacc

SEQ ID NO: 1365915 - RNA, 21 nt, Human
ucuacaaaaagcaaaacaaac

SEQ ID NO: 1365916 - RNA, 21 nt, Human
ucucccucuuucuccccaccc

SEQ ID NO: 1365917 - RNA, 19 nt, Human
ugaaagcaccaggccucua

SEQ ID NO: 1365918 - RNA, 24 nt, Human
ugaauagugugucuccauuuguaa

SEQ ID NO: 1365919 - RNA, 23 nt, Human
ugaggccccgcugaugguggagg

SEQ ID NO: 1365920 - RNA, 25 nt, Human
ugaggccccgcugaugguggagggu

SEQ ID NO: 1365921 - RNA, 21 nt, Human
ugccagaggaaguucagggag

SEQ ID NO: 1365922 - RNA, 23 nt, Human
ugcugaaagagcgcaggucuugg

SEQ ID NO: 1365923 - RNA, 26 nt, Human
uggaggguccucagaagggucucucc

SEQ ID NO: 1365924 - RNA, 20 nt, Human
ugggagcacaaccaagaaau

SEQ ID NO: 1365925 - RNA, 18 nt, Human
ugguaaaaacauuaacga

SEQ ID NO: 1365926 - RNA, 18 nt, Human
uggugucccuccacuucu

SEQ ID NO: 1365927 - RNA, 22 nt, Human
uguauucaugaacacugcuuuu

SEQ ID NO: 1365928 - RNA, 22 nt, Human
ugucuugcaaacaaaucagagc

SEQ ID NO: 1365929 - RNA, 18 nt, Human
uguggaggcuccaggaaa

SEQ ID NO: 1365930 - RNA, 19 nt, Human
uguggaggcuccaggaaag

SEQ ID NO: 1365931 - RNA, 18 nt, Human
uugcugaaagagcgcagg

SEQ ID NO: 1365932 - RNA, 24 nt, Human
uuuagagauucacacuuuccugag

SEQ ID NO: 1365933 - RNA, 22 nt, Human
uuuauuuucuucagugaaaaaa

SEQ ID NO: 1365934 - RNA, 22 nt, Human
uuuguggaggcuccaggaaagc

SEQ ID NO: 1365935 - RNA, 23 nt, Human
aaaaacagcccaaugauucacac

SEQ ID NO: 1365936 - RNA, 21 nt, Human
aaagucaagauaaucaguaug

SEQ ID NO: 1365937 - RNA, 21 nt, Human
acacaacuagcaaagcaaacc

SEQ ID NO: 1365938 - RNA, 24 nt, Human
cacacaacuagcaaagcaaaccaa

SEQ ID NO: 1365939 - RNA, 23 nt, Human
cagacuacucagugaaggaaccu

SEQ ID NO: 1365940 - RNA, 21 nt, Human
cagauggaauagauucaacuc

SEQ ID NO: 1365941 - RNA, 23 nt, Human
ccaacaucaaucuaggagguaaa

SEQ ID NO: 1365942 - RNA, 26 nt, Human
ccaccaccggggccaccacgaccuaa

SEQ ID NO: 1365943 - RNA, 23 nt, Human
cccaccaccaccggggccaccac

SEQ ID NO: 1365944 - RNA, 23 nt, Human
cccagaugaauuuuaauuuuguu

SEQ ID NO: 1365945 - RNA, 18 nt, Human
cccggagcccaccaccac

SEQ ID NO: 1365946 - RNA, 18 nt, Human
cgcccggagcccaccacc

SEQ ID NO: 1365947 - RNA, 19 nt, Human
gccauucagaaauaaaagg

SEQ ID NO: 1365948 - RNA, 22 nt, Human
ggaauagauucaacucuauaaa

SEQ ID NO: 1365949 - RNA, 18 nt, Human
ggcaaauauugaagucag

SEQ ID NO: 1365950 - RNA, 18 nt, Human
ggcaaauauugaagucag

SEQ ID NO: 1365951 - RNA, 24 nt, Human
uaacaguggcucuaaaaacagccc

SEQ ID NO: 1365952 - RNA, 20 nt, Human
uaagauaguuacauagggac

SEQ ID NO: 1365953 - RNA, 18 nt, Human
uaaggauacuauaccaac

SEQ ID NO: 1365954 - RNA, 27 nt, Human
uagcacugaaacacuggguuuggauau

SEQ ID NO: 1365955 - RNA, 19 nt, Human
uauuaaggauacuauacca

SEQ ID NO: 1365956 - RNA, 21 nt, Human
uccaauccauuuucuucccca

SEQ ID NO: 1365957 - RNA, 23 nt, Human
ugguuuuugauauuuugauguuc

SEQ ID NO: 1365958 - RNA, 22 nt, Human
uguauacauaaauggcuuuaua

SEQ ID NO: 1365959 - RNA, 24 nt, Human
uguuauuuuuauugaguuuucaaa

SEQ ID NO: 1365960 - RNA, 21 nt, Human
uuaaguacacaauuuguaaau

SEQ ID NO: 1365961 - RNA, 24 nt, Human
uucacacaacuagcaaagcaaacc

SEQ ID NO: 1365962 - RNA, 21 nt, Human
uuccccaguauuucacuugua

SEQ ID NO: 1365963 - RNA, 24 nt, Human
uuuggcaaauauugaagucagaug

SEQ ID NO: 1365964 - RNA, 21 nt, Human
uuuuuuuuuuuuuuucccaga

SEQ ID NO: 1365965 - RNA, 22 nt, Human
uuuuuuuuuuuuuuuuucccag

SEQ ID NO: 1365966 - RNA, 19 nt, Human
aaaaacagagaggaggagg

SEQ ID NO: 1365967 - RNA, 23 nt, Human
aaaaacagagaggaggaggcaag

SEQ ID NO: 1365968 - RNA, 20 nt, Human
aaaaucccugaguaggccaa

SEQ ID NO: 1365969 - RNA, 22 nt, Human
aaacaaauaaaaacagagagga

SEQ ID NO: 1365970 - RNA, 19 nt, Human
aaagaaauaaaaaucccug

SEQ ID NO: 1365971 - RNA, 21 nt, Human
aaagcuuuuguagguugagaa

SEQ ID NO: 1365972 - RNA, 20 nt, Human
aaauaaacuacucauguuaa

SEQ ID NO: 1365973 - RNA, 28 nt, Human
aacaaauaaaaacagagaggaggaggcc

SEQ ID NO: 1365974 - RNA, 19 nt, Human
aaccugugcaacacagugc

SEQ ID NO: 1365975 - RNA, 21 nt, Human
aaugacaaagagucacagcac

SEQ ID NO: 1365976 - RNA, 23 nt, Human
aauguacaucuaagacagaugac

SEQ ID NO: 1365977 - RNA, 21 nt, Human
aauuacccuucaaaagacgau

SEQ ID NO: 1365978 - RNA, 18 nt, Human
acaaauaaaaacagagag

SEQ ID NO: 1365979 - RNA, 18 nt, Human
acacacacagacacauac

SEQ ID NO: 1365980 - RNA, 19 nt, Human
acacacacagacacauaca

SEQ ID NO: 1365981 - RNA, 19 nt, Human
acagacacauacacaaaca

SEQ ID NO: 1365982 - RNA, 22 nt, Human
acagagaggaggaggcaagaga

SEQ ID NO: 1365983 - RNA, 19 nt, Human
acauaacccagaaaacaga

SEQ ID NO: 1365984 - RNA, 25 nt, Human
agaaaggaaauuacccuucaaaaga

SEQ ID NO: 1365985 - RNA, 22 nt, Human
agaaauaugcuauucccaaacc

SEQ ID NO: 1365986 - RNA, 21 nt, Human
agaaauucuccuucuuucagu

SEQ ID NO: 1365987 - RNA, 22 nt, Human
agacaacagauacauaacccag

SEQ ID NO: 1365988 - RNA, 26 nt, Human
agacaacuaauccagaagcuguagca

SEQ ID NO: 1365989 - RNA, 24 nt, Human
agacacauacacaaacacacuuau

SEQ ID NO: 1365990 - RNA, 25 nt, Human
agacacauacacaaacacacuuauu

SEQ ID NO: 1365991 - RNA, 20 nt, Human
aggaggcaagagauaacaag

SEQ ID NO: 1365992 - RNA, 18 nt, Human
aggcaagagauaacaagg

SEQ ID NO: 1365993 - RNA, 24 nt, Human
aggcagaaaggaaauuacccuuca

SEQ ID NO: 1365994 - RNA, 18 nt, Human
aguuaccagcagggaaag

SEQ ID NO: 1365995 - RNA, 19 nt, Human
auaaauuugugaaaacaga

SEQ ID NO: 1365996 - RNA, 21 nt, Human
auaagaagguguccccaaaaa

SEQ ID NO: 1365997 - RNA, 23 nt, Human
auacacacacagacacauacaca

SEQ ID NO: 1365998 - RNA, 21 nt, Human
auauuucauauauaucauaca

SEQ ID NO: 1365999 - RNA, 21 nt, Human
aucacugaaaacagacaccac

SEQ ID NO: 1366000 - RNA, 20 nt, Human
augucacacacuccucuaac

SEQ ID NO: 1366001 - RNA, 25 nt, Human
caaauaaaaacagagaggaggaggc

SEQ ID NO: 1366002 - RNA, 22 nt, Human
cacagacacauacacaaacaca

SEQ ID NO: 1366003 - RNA, 22 nt, Human
cacauacacaaacacacuuauu

SEQ ID NO: 1366004 - RNA, 28 nt, Human
cacauacacaaacacacuuauuuguaua

SEQ ID NO: 1366005 - RNA, 24 nt, Human
cagaaaacagauuauccaagacaa

SEQ ID NO: 1366006 - RNA, 25 nt, Human
cagaaagaaugaaagcaugcuggau

SEQ ID NO: 1366007 - RNA, 24 nt, Human
cauaacccagaaaacagauuaucc

SEQ ID NO: 1366008 - RNA, 25 nt, Human
cauaacccagaaaacagauuaucca

SEQ ID NO: 1366009 - RNA, 19 nt, Human
cauauauaucauacauaug

SEQ ID NO: 1366010 - RNA, 23 nt, Human
cauauugccaaacuaaugccuaa

SEQ ID NO: 1366011 - RNA, 21 nt, Human
ccaacaaaaauaaacuacuca

SEQ ID NO: 1366012 - RNA, 21 nt, Human
cccaaaccauaaaugucacac

SEQ ID NO: 1366013 - RNA, 23 nt, Human
cccagaaaacagauuauccaaga

SEQ ID NO: 1366014 - RNA, 20 nt, Human
ccuccauaagaagguguccc

SEQ ID NO: 1366015 - RNA, 18 nt, Human
ccucuaacuggaaauaga

SEQ ID NO: 1366016 - RNA, 23 nt, Human
cuaagauaggcacucaauaaaua

SEQ ID NO: 1366017 - RNA, 22 nt, Human
cucaagaacauaaaaaguuuuc

SEQ ID NO: 1366018 - RNA, 22 nt, Human
cuccauaagaagguguccccaa

SEQ ID NO: 1366019 - RNA, 20 nt, Human
gaaauaugcuauucccaaag

SEQ ID NO: 1366020 - RNA, 24 nt, Human
gacaacagauacauaacccagaaa

SEQ ID NO: 1366021 - RNA, 21 nt, Human
gcaagguauuuauuuggcuaa

SEQ ID NO: 1366022 - RNA, 19 nt, Human
gccaaagacaacagauaca

SEQ ID NO: 1366023 - RNA, 18 nt, Human
uaaaaacagagaggagga

SEQ ID NO: 1366024 - RNA, 19 nt, Human
uaaaauauucuuacacucu

SEQ ID NO: 1366025 - RNA, 23 nt, Human
uaaaaugacaaagagucacagca

SEQ ID NO: 1366026 - RNA, 21 nt, Human
uaagaaaaaauccuucaaaac

SEQ ID NO: 1366027 - RNA, 23 nt, Human
uacacacacagacacauacacaa

SEQ ID NO: 1366028 - RNA, 18 nt, Human
uagaaauucuccuucuuu

SEQ ID NO: 1366029 - RNA, 22 nt, Human
uagaaauucuccuucuuucagu

SEQ ID NO: 1366030 - RNA, 21 nt, Human
uagacaacuaauccagaagcu

SEQ ID NO: 1366031 - RNA, 22 nt, Human
uaggccaaagacaacagauaca

SEQ ID NO: 1366032 - RNA, 20 nt, Human
uagguugagaaaaacuuccu

SEQ ID NO: 1366033 - RNA, 19 nt, Human
uauaaaagaaugagguaaa

SEQ ID NO: 1366034 - RNA, 27 nt, Human
uauaaaaugaauacacacacagacaca

SEQ ID NO: 1366035 - RNA, 19 nt, Human
uauauacaucauacauaua

SEQ ID NO: 1366036 - RNA, 23 nt, Human
uauauacaucauacauauacaga

SEQ ID NO: 1366037 - RNA, 28 nt, Human
uauauaucauacauaugacauauauaca

SEQ ID NO: 1366038 - RNA, 18 nt, Human
uauauguauauggcauau

SEQ ID NO: 1366039 - RNA, 20 nt, Human
uauauguauauggcauaugu

SEQ ID NO: 1366040 - RNA, 21 nt, Human
uauauguauauggcauaugug

SEQ ID NO: 1366041 - RNA, 24 nt, Human
uaugaaaaaccuugaaaacaaaua

SEQ ID NO: 1366042 - RNA, 21 nt, Human
uauucagaaagaaugaaagca

SEQ ID NO: 1366043 - RNA, 19 nt, Human
uauucuuacacucuggagc

SEQ ID NO: 1366044 - RNA, 22 nt, Human
uauuucaaaucagacaagguug

SEQ ID NO: 1366045 - RNA, 22 nt, Human
uccagaagcuguagcacaguua

SEQ ID NO: 1366046 - RNA, 22 nt, Human
ucccugaguaggccaaagacaa

SEQ ID NO: 1366047 - RNA, 21 nt, Human
ucuggaaggacacauaccaaa

SEQ ID NO: 1366048 - RNA, 24 nt, Human
ucuuuguaauagagaagugaaaau

SEQ ID NO: 1366049 - RNA, 20 nt, Human
ugaaaacaaauaaaaacaga

SEQ ID NO: 1366050 - RNA, 23 nt, Human
ugaaaacagagcaucacuauuuc

SEQ ID NO: 1366051 - RNA, 22 nt, Human
ugaaaagauaaauuugugaaaa

SEQ ID NO: 1366052 - RNA, 19 nt, Human
ugaaaauauuuccuucacu

SEQ ID NO: 1366053 - RNA, 24 nt, Human
ugaaagcaaaggcauaucauaguc

SEQ ID NO: 1366054 - RNA, 22 nt, Human
ugaaauagccaucacugaaaac

SEQ ID NO: 1366055 - RNA, 23 nt, Human
ugaaauagccaucacugaaaaca

SEQ ID NO: 1366056 - RNA, 24 nt, Human
ugacaaauaaauguacaucuaaga

SEQ ID NO: 1366057 - RNA, 18 nt, Human
ugacauauauacaucaua

SEQ ID NO: 1366058 - RNA, 23 nt, Human
ugacauauauacaucauacauau

SEQ ID NO: 1366059 - RNA, 19 nt, Human
ugagaaaaacuuccugaaa

SEQ ID NO: 1366060 - RNA, 19 nt, Human
uggcaagguauuuauuugg

SEQ ID NO: 1366061 - RNA, 26 nt, Human
ugguauauauguauauggcauaugug

SEQ ID NO: 1366062 - RNA, 18 nt, Human
ugucaauuucuuauuuuu

SEQ ID NO: 1366063 - RNA, 18 nt, Human
ugugcaacacagugcaca

SEQ ID NO: 1366064 - RNA, 21 nt, Human
uuacccuucaaaagacgauuu

SEQ ID NO: 1366065 - RNA, 21 nt, Human
uuccuguuugcugaugaacuu

SEQ ID NO: 1366066 - RNA, 23 nt, Human
uuccuguuugcugaugaacuuuu

SEQ ID NO: 1366067 - RNA, 21 nt, Human
uuccuucacuuuuuuguuucc

SEQ ID NO: 1366068 - RNA, 20 nt, Human
uuguauaaaaugaauacaca

SEQ ID NO: 1366069 - RNA, 22 nt, Human
uuuuaagaauuuggagacaauu

SEQ ID NO: 1366070 - RNA, 22 nt, Human
uuuucaaacuccuccauaagaa

SEQ ID NO: 1366071 - RNA, 20 nt, Human
aaagaaacaggagcugauga

SEQ ID NO: 1366072 - RNA, 21 nt, Human
aaauagcccuuaaaucugggc

SEQ ID NO: 1366073 - RNA, 23 nt, Human
aagaacagaaaaacaguauaccu

SEQ ID NO: 1366074 - RNA, 19 nt, Human
aagaagcagauugcugcuu

SEQ ID NO: 1366075 - RNA, 20 nt, Human
aagaagcagauugcugcuuu

SEQ ID NO: 1366076 - RNA, 21 nt, Human
aagaaugcaacauuccugaca

SEQ ID NO: 1366077 - RNA, 22 nt, Human
aagcuuucuuucuugagggauc

SEQ ID NO: 1366078 - RNA, 18 nt, Human
agaugucaaugaaaacug

SEQ ID NO: 1366079 - RNA, 18 nt, Human
agcgagugacagaaaugc

SEQ ID NO: 1366080 - RNA, 23 nt, Human
agcgagugacagaaaugcaguag

SEQ ID NO: 1366081 - RNA, 22 nt, Human
aguguccuuuucagcgagugac

SEQ ID NO: 1366082 - RNA, 21 nt, Human
aguuaaggaaagcuugugggu

SEQ ID NO: 1366083 - RNA, 22 nt, Human
auuuucuggcaagaagcagauu

SEQ ID NO: 1366084 - RNA, 22 nt, Human
caaaacccuguuguagagcaaa

SEQ ID NO: 1366085 - RNA, 22 nt, Human
caagaacagaaaaacaguauac

SEQ ID NO: 1366086 - RNA, 24 nt, Human
caagaacagaaaaacaguauaccu

SEQ ID NO: 1366087 - RNA, 21 nt, Human
caaggggugauuuugcccuuu

SEQ ID NO: 1366088 - RNA, 21 nt, Human
cagcaugaaaacgaacuaaca

SEQ ID NO: 1366089 - RNA, 20 nt, Human
caggagcugaugagaaguuc

SEQ ID NO: 1366090 - RNA, 18 nt, Human
caguagguagucucuuuc

SEQ ID NO: 1366091 - RNA, 21 nt, Human
caugaaaacgaacuaacacag

SEQ ID NO: 1366092 - RNA, 19 nt, Human
ccccuucuacccuaccuca

SEQ ID NO: 1366093 - RNA, 18 nt, Human
cccuuaaaucugggcccc

SEQ ID NO: 1366094 - RNA, 19 nt, Human
ccuaaaaagccccauggca

SEQ ID NO: 1366095 - RNA, 19 nt, Human
ccugacuccuugacuuugu

SEQ ID NO: 1366096 - RNA, 18 nt, Human
ccugggcauaauguagaa

SEQ ID NO: 1366097 - RNA, 18 nt, Human
ccuucuacccuaccucag

SEQ ID NO: 1366098 - RNA, 23 nt, Human
cgucuugcagcugaauaucuaaa

SEQ ID NO: 1366099 - RNA, 19 nt, Human
cuaccucagcauggugugg

SEQ ID NO: 1366100 - RNA, 20 nt, Human
cucagguaugucuuuaucag

SEQ ID NO: 1366101 - RNA, 19 nt, Human
cuccuuuccuagagaugaa

SEQ ID NO: 1366102 - RNA, 22 nt, Human
cugggccccuucauagcucaga

SEQ ID NO: 1366103 - RNA, 18 nt, Human
cuugcugugcccugucca

SEQ ID NO: 1366104 - RNA, 20 nt, Human
gaaauaacaagaacagaaaa

SEQ ID NO: 1366105 - RNA, 22 nt, Human
gaaauaagaaugcaacauuccu

SEQ ID NO: 1366106 - RNA, 23 nt, Human
gcacauuuagggugucaaaaaua

SEQ ID NO: 1366107 - RNA, 21 nt, Human
ggaaauaacaagaacagaaaa

SEQ ID NO: 1366108 - RNA, 19 nt, Human
gggccucugccugacuccu

SEQ ID NO: 1366109 - RNA, 19 nt, Human
gguguucuggccagacuga

SEQ ID NO: 1366110 - RNA, 23 nt, Human
guagagcaaaguccaggcuuguu

SEQ ID NO: 1366111 - RNA, 21 nt, Human
gucucuuucuccuuuccuaga

SEQ ID NO: 1366112 - RNA, 21 nt, Human
guggaacuauagguccaauaa

SEQ ID NO: 1366113 - RNA, 21 nt, Human
uaaaaagccccauggcaaggg

SEQ ID NO: 1366114 - RNA, 21 nt, Human
uaaaguaucaauugccugaaa

SEQ ID NO: 1366115 - RNA, 19 nt, Human
uaacaagaacagaaaaaca

SEQ ID NO: 1366116 - RNA, 21 nt, Human
uagagcaaaguccaggcuugu

SEQ ID NO: 1366117 - RNA, 18 nt, Human
uagguagucucuuucucc

SEQ ID NO: 1366118 - RNA, 20 nt, Human
ucagaagaaccugggcauaa

SEQ ID NO: 1366119 - RNA, 22 nt, Human
ucagaagaaccugggcauaaug

SEQ ID NO: 1366120 - RNA, 21 nt, Human
ucauucuggaaaaggcucugc

SEQ ID NO: 1366121 - RNA, 20 nt, Human
uccuagagaugaaaagaaac

SEQ ID NO: 1366122 - RNA, 24 nt, Human
uccuugcugugcccuguccaggga

SEQ ID NO: 1366123 - RNA, 22 nt, Human
uccuuuccuagagaugaaaaga

SEQ ID NO: 1366124 - RNA, 23 nt, Human
ucuccaaaagaugucaaugaaaa

SEQ ID NO: 1366125 - RNA, 22 nt, Human
ugaaaacgaacuaacacaguug

SEQ ID NO: 1366126 - RNA, 18 nt, Human
ugagaacaagaucuacag

SEQ ID NO: 1366127 - RNA, 20 nt, Human
ugccccuucuacccuaccuc

SEQ ID NO: 1366128 - RNA, 18 nt, Human
ugcugaagcucucugggc

SEQ ID NO: 1366129 - RNA, 23 nt, Human
ugcugaagcucucugggcuuuau

SEQ ID NO: 1366130 - RNA, 22 nt, Human
ugcuuuauccuaaaaagcccca

SEQ ID NO: 1366131 - RNA, 20 nt, Human
uggcaagggccucugccuga

SEQ ID NO: 1366132 - RNA, 23 nt, Human
uggggaaauaagaaugcaacauu

SEQ ID NO: 1366133 - RNA, 26 nt, Human
uggucauaccacucccuaugcaaaac

SEQ ID NO: 1366134 - RNA, 22 nt, Human
uguggacaaauggguuuaucua

SEQ ID NO: 1366135 - RNA, 22 nt, Human
uuccugacaucauggaggccca

SEQ ID NO: 1366136 - RNA, 24 nt, Human
uuuguggacaaauggguuuaucua

SEQ ID NO: 1366137 - RNA, 22 nt, Human
aaaaaguauuaugcugaaagca

SEQ ID NO: 1366138 - RNA, 22 nt, Human
aaucuuucugcaaauaaaaaac

SEQ ID NO: 1366139 - RNA, 25 nt, Human
cacacaaaacaugaaaauaucaaac

SEQ ID NO: 1366140 - RNA, 25 nt, Human
cauaagcacacaaaacaugaaaaua

SEQ ID NO: 1366141 - RNA, 23 nt, Human
cuugaaaauaucuuucaacauuu

SEQ ID NO: 1366142 - RNA, 24 nt, Human
uaaaaaauauggcaaacuaaccug

SEQ ID NO: 1366143 - RNA, 21 nt, Human
uaaaaaguauuaugcugaaag

SEQ ID NO: 1366144 - RNA, 18 nt, Human
uacagagacaaaugaugg

SEQ ID NO: 1366145 - RNA, 19 nt, Human
uaucaaacugaaaacuagu

SEQ ID NO: 1366146 - RNA, 19 nt, Human
ucuuucugcaaauaaaaaa

SEQ ID NO: 1366147 - RNA, 20 nt, Human
ugagaagauucaggcagcuc

SEQ ID NO: 1366148 - RNA, 22 nt, Human
ugugagaagauucaggcagcuc

SEQ ID NO: 1366149 - RNA, 23 nt, Human
uuaaccauaagcacacaaaacau

SEQ ID NO: 1366150 - RNA, 25 nt, Human
uucugcaaauaaaaaacaaaaacag

SEQ ID NO: 1366151 - RNA, 23 nt, Human
uuuuuuggccaugauuauacuga

SEQ ID NO: 1366152 - RNA, 20 nt, Human
aaaaaaaacuaaagaggcac

SEQ ID NO: 1366153 - RNA, 22 nt, Human
aaaaaaaacuaaagaggcacaa

SEQ ID NO: 1366154 - RNA, 27 nt, Human
aaaaaaacuaaagaggcacaacaacua

SEQ ID NO: 1366155 - RNA, 20 nt, Human
aaacgaauacaguuaaccua

SEQ ID NO: 1366156 - RNA, 21 nt, Human
aaacugcaaauaacucaaaua

SEQ ID NO: 1366157 - RNA, 21 nt, Human
aaagagagaguacugguugcc

SEQ ID NO: 1366158 - RNA, 20 nt, Human
aaaggcauuuucagaaagcu

SEQ ID NO: 1366159 - RNA, 23 nt, Human
aacaaaacauaaaaugugaauaa

SEQ ID NO: 1366160 - RNA, 25 nt, Human
aagaauggauaaauaauuugugaua

SEQ ID NO: 1366161 - RNA, 21 nt, Human
aaguggccgaggaaggaacag

SEQ ID NO: 1366162 - RNA, 19 nt, Human
aaguuguauugacuggaag

SEQ ID NO: 1366163 - RNA, 24 nt, Human
aaucucugccuccauugucaccuc

SEQ ID NO: 1366164 - RNA, 23 nt, Human
acacaccaagcauacugccaccu

SEQ ID NO: 1366165 - RNA, 19 nt, Human
acacaccuaaguccaaauc

SEQ ID NO: 1366166 - RNA, 21 nt, Human
accaucuuccccugauguguc

SEQ ID NO: 1366167 - RNA, 23 nt, Human
accuaagccaguugacccagaaa

SEQ ID NO: 1366168 - RNA, 20 nt, Human
accuaccagaaaggcuccaa

SEQ ID NO: 1366169 - RNA, 18 nt, Human
accucggggccuuugcac

SEQ ID NO: 1366170 - RNA, 22 nt, Human
acuaaagaggcacaacaacuaa

SEQ ID NO: 1366171 - RNA, 18 nt, Human
acucauggguuucugggc

SEQ ID NO: 1366172 - RNA, 19 nt, Human
acuccccaaacacccuggu

SEQ ID NO: 1366173 - RNA, 22 nt, Human
agaagccagauauucuaggccu

SEQ ID NO: 1366174 - RNA, 18 nt, Human
agcaaccuggaugaaccu

SEQ ID NO: 1366175 - RNA, 20 nt, Human
aggccccagguucugcccaa

SEQ ID NO: 1366176 - RNA, 20 nt, Human
agguguuguaguacuuagaa

SEQ ID NO: 1366177 - RNA, 23 nt, Human
aguuacuggggguuaggacuucg

SEQ ID NO: 1366178 - RNA, 21 nt, Human
auacugggcaccaagaggcca

SEQ ID NO: 1366179 - RNA, 26 nt, Human
aucaaaaaaaacuaaagaggcacaac

SEQ ID NO: 1366180 - RNA, 23 nt, Human
augaaguucagauacacacaccu

SEQ ID NO: 1366181 - RNA, 26 nt, Human
auucacaguuacuggggguuaggacu

SEQ ID NO: 1366182 - RNA, 21 nt, Human
caaaacauaaaaugugaauaa

SEQ ID NO: 1366183 - RNA, 21 nt, Human
caaaugcaaccugagacccug

SEQ ID NO: 1366184 - RNA, 21 nt, Human
caacacaccaagcauacugcc

SEQ ID NO: 1366185 - RNA, 20 nt, Human
caacagaaauguguuguguc

SEQ ID NO: 1366186 - RNA, 19 nt, Human
cacaaaauaaaauggagaa

SEQ ID NO: 1366187 - RNA, 20 nt, Human
cacacaccuaaguccaaauc

SEQ ID NO: 1366188 - RNA, 21 nt, Human
cacacugcauccaaacaaaau

SEQ ID NO: 1366189 - RNA, 22 nt, Human
cacagcaggcuguguggagaaa

SEQ ID NO: 1366190 - RNA, 18 nt, Human
caccaagcauacugccac

SEQ ID NO: 1366191 - RNA, 20 nt, Human
caccacacacuguugucacu

SEQ ID NO: 1366192 - RNA, 24 nt, Human
caccacacacuguugucacucaga

SEQ ID NO: 1366193 - RNA, 21 nt, Human
caccccaugaagcugcaccca

SEQ ID NO: 1366194 - RNA, 21 nt, Human
caccuaccagaaaggcuccaa

SEQ ID NO: 1366195 - RNA, 19 nt, Human
caccucaccaucuuccccu

SEQ ID NO: 1366196 - RNA, 19 nt, Human
cacugcauccaaacaaaau

SEQ ID NO: 1366197 - RNA, 24 nt, Human
cagaagaauggauaaauaauuugu

SEQ ID NO: 1366198 - RNA, 20 nt, Human
cagagcccugggcaaagguu

SEQ ID NO: 1366199 - RNA, 19 nt, Human
cagcaaaggugagcaagca

SEQ ID NO: 1366200 - RNA, 21 nt, Human
cagcagaaaaaugcauauuga

SEQ ID NO: 1366201 - RNA, 21 nt, Human
cagguuaaaacaaauuuauga

SEQ ID NO: 1366202 - RNA, 20 nt, Human
cauaacacucagucggcgca

SEQ ID NO: 1366203 - RNA, 20 nt, Human
ccaaaauaagaggaacacau

SEQ ID NO: 1366204 - RNA, 20 nt, Human
ccaagccuuccucgcccucc

SEQ ID NO: 1366205 - RNA, 18 nt, Human
ccaccccaugaagcugca

SEQ ID NO: 1366206 - RNA, 22 nt, Human
ccagccuuuucugaaggggaga

SEQ ID NO: 1366207 - RNA, 19 nt, Human
cccaaaugucaucugacca

SEQ ID NO: 1366208 - RNA, 21 nt, Human
ccccacgccaagccuuccucg

SEQ ID NO: 1366209 - RNA, 28 nt, Human
ccccacgccaagccuuccucgcccuccc

SEQ ID NO: 1366210 - RNA, 18 nt, Human
ccccagguucugcccaaa

SEQ ID NO: 1366211 - RNA, 21 nt, Human
ccccaugaagcugcacccagg

SEQ ID NO: 1366212 - RNA, 20 nt, Human
ccccuacccccuuaaugacu

SEQ ID NO: 1366213 - RNA, 21 nt, Human
ccccuuauucacuccccaaac

SEQ ID NO: 1366214 - RNA, 23 nt, Human
ccuaaacugcaaauaacucaaau

SEQ ID NO: 1366215 - RNA, 22 nt, Human
ccuaagccaguugacccagaaa

SEQ ID NO: 1366216 - RNA, 19 nt, Human
ccugagacccugagccaga

SEQ ID NO: 1366217 - RNA, 22 nt, Human
ccugcagagccacgggugggga

SEQ ID NO: 1366218 - RNA, 19 nt, Human
ccugcagauaucauccuuc

SEQ ID NO: 1366219 - RNA, 22 nt, Human
ccuguagguuuaaacauuuuca

SEQ ID NO: 1366220 - RNA, 23 nt, Human
ccuguccucaaauaucccugcag

SEQ ID NO: 1366221 - RNA, 18 nt, Human
ccuuccucgcccuccccu

SEQ ID NO: 1366222 - RNA, 22 nt, Human
cgccaagccuuccucgcccucc

SEQ ID NO: 1366223 - RNA, 18 nt, Human
cgcccuccccuccagccu

SEQ ID NO: 1366224 - RNA, 23 nt, Human
cgggcguccccacgccaagccuu

SEQ ID NO: 1366225 - RNA, 22 nt, Human
cuaaucuugaggaaacagacac

SEQ ID NO: 1366226 - RNA, 23 nt, Human
cuaaucuugaggaaacagacaca

SEQ ID NO: 1366227 - RNA, 21 nt, Human
cuacuuuuaauaacaccaugg

SEQ ID NO: 1366228 - RNA, 21 nt, Human
cuccucugagcacucuucccc

SEQ ID NO: 1366229 - RNA, 23 nt, Human
cugaaaccuguaggggaggcucc

SEQ ID NO: 1366230 - RNA, 27 nt, Human
cugccaaccuccccaauagccguggga

SEQ ID NO: 1366231 - RNA, 21 nt, Human
cugcugaggaagacucauggg

SEQ ID NO: 1366232 - RNA, 20 nt, Human
cuggaugaaccucacaagca

SEQ ID NO: 1366233 - RNA, 23 nt, Human
cuggcugcucgauauguuaguuu

SEQ ID NO: 1366234 - RNA, 23 nt, Human
cuggucaccuuccugcuccucca

SEQ ID NO: 1366235 - RNA, 20 nt, Human
cuuccucgcccuccccucca

SEQ ID NO: 1366236 - RNA, 20 nt, Human
gaaaagauccaaaggccuuu

SEQ ID NO: 1366237 - RNA, 19 nt, Human
gaacauaguucaacccaua

SEQ ID NO: 1366238 - RNA, 19 nt, Human
gaagcugcacccagguucc

SEQ ID NO: 1366239 - RNA, 18 nt, Human
gaagggguugagguccuc

SEQ ID NO: 1366240 - RNA, 22 nt, Human
gaauccugucuucccagguuga

SEQ ID NO: 1366241 - RNA, 23 nt, Human
gacggggcagggggaaaggguga

SEQ ID NO: 1366242 - RNA, 20 nt, Human
gacguggggagagaagccag

SEQ ID NO: 1366243 - RNA, 21 nt, Human
gagaauuugaaacauucugcu

SEQ ID NO: 1366244 - RNA, 21 nt, Human
gagacaggccccagguucugc

SEQ ID NO: 1366245 - RNA, 24 nt, Human
gaggaaacagacacauccaaauug

SEQ ID NO: 1366246 - RNA, 19 nt, Human
gaggccaaugagaguagga

SEQ ID NO: 1366247 - RNA, 24 nt, Human
gaucaaauggccauuuauggagaa

SEQ ID NO: 1366248 - RNA, 23 nt, Human
gauggaaauguucaacauuugau

SEQ ID NO: 1366249 - RNA, 19 nt, Human
gcagaauaccuggaacuca

SEQ ID NO: 1366250 - RNA, 19 nt, Human
gcccuccccuccagccuuu

SEQ ID NO: 1366251 - RNA, 18 nt, Human
gcgcggccgggcugcggg

SEQ ID NO: 1366252 - RNA, 18 nt, Human
gcugaggaagacucaugg

SEQ ID NO: 1366253 - RNA, 24 nt, Human
ggaagacucauggguuucugggcg

SEQ ID NO: 1366254 - RNA, 20 nt, Human
ggaggaaguuguuaagcuuu

SEQ ID NO: 1366255 - RNA, 23 nt, Human
ggagugaacucucuggggugaug

SEQ ID NO: 1366256 - RNA, 21 nt, Human
ggcauaaauuuccacagguag

SEQ ID NO: 1366257 - RNA, 19 nt, Human
ggccgggcugcggguggcc

SEQ ID NO: 1366258 - RNA, 18 nt, Human
ggccuuacaacuuuccug

SEQ ID NO: 1366259 - RNA, 24 nt, Human
ggcugcggguggccgggguccccg

SEQ ID NO: 1366260 - RNA, 21 nt, Human
gggcagggggaaagggugagg

SEQ ID NO: 1366261 - RNA, 24 nt, Human
gggcugcggguggccggggucccc

SEQ ID NO: 1366262 - RNA, 19 nt, Human
gggguugagguccucgucc

SEQ ID NO: 1366263 - RNA, 23 nt, Human
ggguuaggacuucgacauaucuu

SEQ ID NO: 1366264 - RNA, 24 nt, Human
guaaccucagacagcagcucaaau

SEQ ID NO: 1366265 - RNA, 25 nt, Human
guuccagagucuuuuaaaaauguca

SEQ ID NO: 1366266 - RNA, 22 nt, Human
uaaaaugugaauaaaagacuug

SEQ ID NO: 1366267 - RNA, 19 nt, Human
uaacacaccacacacuguu

SEQ ID NO: 1366268 - RNA, 19 nt, Human
uaacucaaauauucagcag

SEQ ID NO: 1366269 - RNA, 20 nt, Human
uaacuugauugcaucagcaa

SEQ ID NO: 1366270 - RNA, 24 nt, Human
uaaguccaaaucacacugcaucca

SEQ ID NO: 1366271 - RNA, 23 nt, Human
uaagucuuagaggguuacuuggg

SEQ ID NO: 1366272 - RNA, 23 nt, Human
uacacacaccuaaguccaaauca

SEQ ID NO: 1366273 - RNA, 26 nt, Human
uacacugcuagguuuauaccaagaga

SEQ ID NO: 1366274 - RNA, 18 nt, Human
uacaugucaagaagauaa

SEQ ID NO: 1366275 - RNA, 25 nt, Human
uaccuggaacucauauauugcugac

SEQ ID NO: 1366276 - RNA, 21 nt, Human
uacuucaaugugcaucucugu

SEQ ID NO: 1366277 - RNA, 18 nt, Human
uaucauugucacaguucu

SEQ ID NO: 1366278 - RNA, 20 nt, Human
uaucuaaaaaauucacaaaa

SEQ ID NO: 1366279 - RNA, 18 nt, Human
ucaaaaaaaacuaaagag

SEQ ID NO: 1366280 - RNA, 21 nt, Human
ucagccccauuggcaguugcu

SEQ ID NO: 1366281 - RNA, 24 nt, Human
ucagccccauuggcaguugcucag

SEQ ID NO: 1366282 - RNA, 18 nt, Human
ucauagaagaguuuccuu

SEQ ID NO: 1366283 - RNA, 22 nt, Human
uccaaucucugccuccauuguc

SEQ ID NO: 1366284 - RNA, 18 nt, Human
uccccgagcgggggaagg

SEQ ID NO: 1366285 - RNA, 18 nt, Human
ucccugcagauaucaucc

SEQ ID NO: 1366286 - RNA, 20 nt, Human
uccuaaccacucauaaugac

SEQ ID NO: 1366287 - RNA, 25 nt, Human
ucugacuucuccucugagcacucuu

SEQ ID NO: 1366288 - RNA, 20 nt, Human
ucugccaaccuccccaauag

SEQ ID NO: 1366289 - RNA, 19 nt, Human
ucugggcgcagcgcggccg

SEQ ID NO: 1366290 - RNA, 19 nt, Human
ucuucuaagcuuccugagu

SEQ ID NO: 1366291 - RNA, 20 nt, Human
ugaaacauucucaggugcuc

SEQ ID NO: 1366292 - RNA, 26 nt, Human
ugaaagcacaaugcaaugccacuaca

SEQ ID NO: 1366293 - RNA, 23 nt, Human
ugacaaaggaugaaguucagaua

SEQ ID NO: 1366294 - RNA, 22 nt, Human
ugaccugcagagacugugugag

SEQ ID NO: 1366295 - RNA, 19 nt, Human
ugaggaaacagacacaucc

SEQ ID NO: 1366296 - RNA, 19 nt, Human
ugaggaacauaguucaacc

SEQ ID NO: 1366297 - RNA, 18 nt, Human
ugagguccucguccggga

SEQ ID NO: 1366298 - RNA, 21 nt, Human
ugcaccagacggggcaggggg

SEQ ID NO: 1366299 - RNA, 19 nt, Human
ugccucaggauugguaagu

SEQ ID NO: 1366300 - RNA, 22 nt, Human
uggauaacacaagccaaagaga

SEQ ID NO: 1366301 - RNA, 20 nt, Human
uggauaacacaagccaaagg

SEQ ID NO: 1366302 - RNA, 18 nt, Human
uggccgaggaaggaacag

SEQ ID NO: 1366303 - RNA, 18 nt, Human
uggccgggguccccgagc

SEQ ID NO: 1366304 - RNA, 20 nt, Human
uggcugcagggagcaagugg

SEQ ID NO: 1366305 - RNA, 18 nt, Human
ugggagguacaaucccac

SEQ ID NO: 1366306 - RNA, 21 nt, Human
ugggcgcagcgcggccgggcu

SEQ ID NO: 1366307 - RNA, 21 nt, Human
ugguggcugcagggagcaagu

SEQ ID NO: 1366308 - RNA, 25 nt, Human
ugguugagggauuguuuuggagcac

SEQ ID NO: 1366309 - RNA, 18 nt, Human
ugucacaguucuggaugc

SEQ ID NO: 1366310 - RNA, 18 nt, Human
ugucacaguucuggaugc

SEQ ID NO: 1366311 - RNA, 20 nt, Human
ugucacaguucuggaugcuu

SEQ ID NO: 1366312 - RNA, 21 nt, Human
ugugaauaaaagacuugaaua

SEQ ID NO: 1366313 - RNA, 23 nt, Human
ugugcaccagacggggcaggggg

SEQ ID NO: 1366314 - RNA, 21 nt, Human
uguggcaacuguggucacugu

SEQ ID NO: 1366315 - RNA, 24 nt, Human
uuaaaucuuuuggagaaauuugaa

SEQ ID NO: 1366316 - RNA, 19 nt, Human
uuagucagcagaaaaaugc

SEQ ID NO: 1366317 - RNA, 20 nt, Human
uucaacccauaacacucagu

SEQ ID NO: 1366318 - RNA, 20 nt, Human
uucacaaaauagucacccau

SEQ ID NO: 1366319 - RNA, 19 nt, Human
uuccccuuauucacucccc

SEQ ID NO: 1366320 - RNA, 18 nt, Human
uuccugcuccuccaacac

SEQ ID NO: 1366321 - RNA, 22 nt, Human
uugaaaagcugggaagaaaagu

SEQ ID NO: 1366322 - RNA, 19 nt, Human
uugaggaaacagacacauc

SEQ ID NO: 1366323 - RNA, 19 nt, Human
uuucacaggacaugggaaa

SEQ ID NO: 1366324 - RNA, 18 nt, Human
uuuccugucucccacugg

SEQ ID NO: 1366325 - RNA, 24 nt, Human
uuuccugucucccacuggugcaaa

SEQ ID NO: 1366326 - RNA, 24 nt, Human
uuucugugagccugaauauuuuua

SEQ ID NO: 1366327 - RNA, 26 nt, Human
uuuggccccuccucugacuucucccc

SEQ ID NO: 1366328 - RNA, 19 nt, Human
uuuuauuuucacaggacau

SEQ ID NO: 1366329 - RNA, 19 nt, Human
aaaguccugucuggcucuu

SEQ ID NO: 1366330 - RNA, 23 nt, Human
aaccaccagcaggagaaaacaaa

SEQ ID NO: 1366331 - RNA, 21 nt, Human
aagcugccaguugcaaagucc

SEQ ID NO: 1366332 - RNA, 21 nt, Human
acaggugugauaaguuuccau

SEQ ID NO: 1366333 - RNA, 18 nt, Human
acauuuuuuaaacaaaac

SEQ ID NO: 1366334 - RNA, 20 nt, Human
accucacugccagaaaagag

SEQ ID NO: 1366335 - RNA, 23 nt, Human
aggaacaguuguaccgaaucuug

SEQ ID NO: 1366336 - RNA, 22 nt, Human
agggagcgugaaagacucaaag

SEQ ID NO: 1366337 - RNA, 24 nt, Human
auggagcaagaugugcccacaaga

SEQ ID NO: 1366338 - RNA, 21 nt, Human
cacugccagaaaagagaaugg

SEQ ID NO: 1366339 - RNA, 24 nt, Human
cagaaaagagaauggugcucaaau

SEQ ID NO: 1366340 - RNA, 19 nt, Human
cagaaugcccccuaccucu

SEQ ID NO: 1366341 - RNA, 20 nt, Human
cagaaugcccccuaccucuc

SEQ ID NO: 1366342 - RNA, 19 nt, Human
cagcaggagaaaacaaagg

SEQ ID NO: 1366343 - RNA, 21 nt, Human
cagcaggagaaaacaaaggga

SEQ ID NO: 1366344 - RNA, 23 nt, Human
cagcaggagaaaacaaagggaaa

SEQ ID NO: 1366345 - RNA, 19 nt, Human
cagccucagucaggaauga

SEQ ID NO: 1366346 - RNA, 22 nt, Human
caggaaugacaggaauaccugc

SEQ ID NO: 1366347 - RNA, 20 nt, Human
cagggacccugacauugggg

SEQ ID NO: 1366348 - RNA, 24 nt, Human
caucuaccuggauaagggcuccga

SEQ ID NO: 1366349 - RNA, 21 nt, Human
cauuguauuggaggauaaugg

SEQ ID NO: 1366350 - RNA, 23 nt, Human
cauuuuucagaaugcccccuacc

SEQ ID NO: 1366351 - RNA, 21 nt, Human
ccaaaaagaccugauuuuacc

SEQ ID NO: 1366352 - RNA, 22 nt, Human
ccaccagcaggagaaaacaaag

SEQ ID NO: 1366353 - RNA, 23 nt, Human
ccagaaggcaugggcauuguauu

SEQ ID NO: 1366354 - RNA, 23 nt, Human
ccccuuccaaaaagaccugauuu

SEQ ID NO: 1366355 - RNA, 20 nt, Human
cccuaacucaauaccggaaa

SEQ ID NO: 1366356 - RNA, 21 nt, Human
cucaauaccggaaaacggaca

SEQ ID NO: 1366357 - RNA, 19 nt, Human
cuccgagcuacagggaccc

SEQ ID NO: 1366358 - RNA, 20 nt, Human
cuugaagugaagaagaaagu

SEQ ID NO: 1366359 - RNA, 21 nt, Human
gaauuuaacucugaaccacca

SEQ ID NO: 1366360 - RNA, 22 nt, Human
ggacugaaggggcuaaccauga

SEQ ID NO: 1366361 - RNA, 24 nt, Human
uaaacaaaacuuagcugaaagccc

SEQ ID NO: 1366362 - RNA, 26 nt, Human
uaaacaaaacuuagcugaaagcccca

SEQ ID NO: 1366363 - RNA, 21 nt, Human
uacauaguguucacugggcag

SEQ ID NO: 1366364 - RNA, 19 nt, Human
ucuagagguggaggucuua

SEQ ID NO: 1366365 - RNA, 18 nt, Human
ugaagugaagaagaaagu

SEQ ID NO: 1366366 - RNA, 19 nt, Human
ugaauuggcaaaaaaaaaa

SEQ ID NO: 1366367 - RNA, 21 nt, Human
ugaauuggcaaaaaaaaaacc

SEQ ID NO: 1366368 - RNA, 22 nt, Human
ugaauuggcaaaaaaaaaaccc

SEQ ID NO: 1366369 - RNA, 20 nt, Human
ugauaaguuuccauaaaaac

SEQ ID NO: 1366370 - RNA, 23 nt, Human
ugccagaaaagagaauggugcuc

SEQ ID NO: 1366371 - RNA, 23 nt, Human
uuaaacaaaacuuagcugaaagc

SEQ ID NO: 1366372 - RNA, 22 nt, Human
uucagaagaagggagcgugaaa

SEQ ID NO: 1366373 - RNA, 19 nt, Human
uucagaaugcccccuaccu

SEQ ID NO: 1366374 - RNA, 20 nt, Human
uuguacauaugaaugaaauc

SEQ ID NO: 1366375 - RNA, 19 nt, Human
uuuaccucacugccagaaa

SEQ ID NO: 1366376 - RNA, 24 nt, Human
uuuguuguacauaugaaugaaauc

SEQ ID NO: 1366377 - RNA, 22 nt, Human
uuuuuuaaacaaaacuuagcug

SEQ ID NO: 1366378 - RNA, 21 nt, Human
aaacgcauagaaagcacuugc

SEQ ID NO: 1366379 - RNA, 19 nt, Human
aaacggcucagcccaggaa

SEQ ID NO: 1366380 - RNA, 21 nt, Human
aaagcacuugcugcaccccug

SEQ ID NO: 1366381 - RNA, 22 nt, Human
aaccugccgucuuugccacuuc

SEQ ID NO: 1366382 - RNA, 24 nt, Human
aaggagccggcccauccugcaggc

SEQ ID NO: 1366383 - RNA, 19 nt, Human
accaaggugaccagggggc

SEQ ID NO: 1366384 - RNA, 22 nt, Human
acccagguccucugaccuccuc

SEQ ID NO: 1366385 - RNA, 18 nt, Human
accccaugcuuccagccu

SEQ ID NO: 1366386 - RNA, 20 nt, Human
accggcuucccagccuugac

SEQ ID NO: 1366387 - RNA, 23 nt, Human
accucaccauucucagccuccag

SEQ ID NO: 1366388 - RNA, 24 nt, Human
accucagccccguccuuccuccag

SEQ ID NO: 1366389 - RNA, 23 nt, Human
accucuuuccuccucucuguccc

SEQ ID NO: 1366390 - RNA, 21 nt, Human
accugccgucuuugccacuuc

SEQ ID NO: 1366391 - RNA, 18 nt, Human
agccaggccuccugccug

SEQ ID NO: 1366392 - RNA, 23 nt, Human
agccaggccuccugccugaccuc

SEQ ID NO: 1366393 - RNA, 19 nt, Human
aggcagccugaauggggag

SEQ ID NO: 1366394 - RNA, 21 nt, Human
aggcagccugaauggggaggu

SEQ ID NO: 1366395 - RNA, 23 nt, Human
aggccuccugccugaccucccag

SEQ ID NO: 1366396 - RNA, 23 nt, Human
agggagggcccagaaccccaggg

SEQ ID NO: 1366397 - RNA, 25 nt, Human
aggugccaggucccaggucacuggu

SEQ ID NO: 1366398 - RNA, 21 nt, Human
aguugggggaagacagggcug

SEQ ID NO: 1366399 - RNA, 20 nt, Human
aucuccuccaggcaccccca

SEQ ID NO: 1366400 - RNA, 21 nt, Human
cacacacacgaccuugaugcc

SEQ ID NO: 1366401 - RNA, 20 nt, Human
cacagagccucccucacucc

SEQ ID NO: 1366402 - RNA, 20 nt, Human
caccccuggaaucucuugaa

SEQ ID NO: 1366403 - RNA, 21 nt, Human
cacccucccuccaaacggcuc

SEQ ID NO: 1366404 - RNA, 22 nt, Human
cacccucccuccaaacggcuca

SEQ ID NO: 1366405 - RNA, 20 nt, Human
cagagccucccucacuccuc

SEQ ID NO: 1366406 - RNA, 22 nt, Human
cagccucuuccacucccugccc

SEQ ID NO: 1366407 - RNA, 25 nt, Human
cagcugugcccacccucccuccaaa

SEQ ID NO: 1366408 - RNA, 18 nt, Human
caggcacccccaguucuc

SEQ ID NO: 1366409 - RNA, 24 nt, Human
caggcaucuucucacucccauuuu

SEQ ID NO: 1366410 - RNA, 18 nt, Human
cagggagggcccagaacc

SEQ ID NO: 1366411 - RNA, 24 nt, Human
caguggucacagcaggcccagcug

SEQ ID NO: 1366412 - RNA, 19 nt, Human
cauagaaagcacuugcugc

SEQ ID NO: 1366413 - RNA, 25 nt, Human
cauagaaagcacuugcugcaccccc

SEQ ID NO: 1366414 - RNA, 23 nt, Human
cauucagcaucuccuccaggcac

SEQ ID NO: 1366415 - RNA, 24 nt, Human
ccagcagagaucauaucccaggcc

SEQ ID NO: 1366416 - RNA, 22 nt, Human
ccagggaccccugcuccccgag

SEQ ID NO: 1366417 - RNA, 23 nt, Human
ccagguccaccugggccucccug

SEQ ID NO: 1366418 - RNA, 23 nt, Human
ccaguggcucucucaguuucucu

SEQ ID NO: 1366419 - RNA, 21 nt, Human
ccaugucagccaggcccuggg

SEQ ID NO: 1366420 - RNA, 24 nt, Human
cccagaaccccagggacucucagg

SEQ ID NO: 1366421 - RNA, 22 nt, Human
cccagccuugaccaccaguggc

SEQ ID NO: 1366422 - RNA, 21 nt, Human
cccagcugugcccacccuccc

SEQ ID NO: 1366423 - RNA, 31 nt, Human
cccaggacccuggaccucaccauucucaggg

SEQ ID NO: 1366424 - RNA, 21 nt, Human
ccccaaggacuucacguccuc

SEQ ID NO: 1366425 - RNA, 22 nt, Human
ccccaaggacuucacguccucc

SEQ ID NO: 1366426 - RNA, 21 nt, Human
ccccagguccaccugggccuc

SEQ ID NO: 1366427 - RNA, 20 nt, Human
cccccacccacacacacgac

SEQ ID NO: 1366428 - RNA, 19 nt, Human
ccccugacugugccugaga

SEQ ID NO: 1366429 - RNA, 19 nt, Human
cccguccuuccuccaggca

SEQ ID NO: 1366430 - RNA, 23 nt, Human
cccuucauccuccuuuagggccc

SEQ ID NO: 1366431 - RNA, 22 nt, Human
cccuugauggcagggagggccc

SEQ ID NO: 1366432 - RNA, 19 nt, Human
ccuccaaacggcucagccc

SEQ ID NO: 1366433 - RNA, 21 nt, Human
ccuccaaccucagccccugac

SEQ ID NO: 1366434 - RNA, 20 nt, Human
ccuccaggcacccccaguuc

SEQ ID NO: 1366435 - RNA, 19 nt, Human
ccucccuuguuuuucuucc

SEQ ID NO: 1366436 - RNA, 21 nt, Human
ccuccucuccucuucccuccc

SEQ ID NO: 1366437 - RNA, 18 nt, Human
ccucucugucccuugccu

SEQ ID NO: 1366438 - RNA, 21 nt, Human
ccucuggaucuccugaagcga

SEQ ID NO: 1366439 - RNA, 22 nt, Human
ccucuggaucuccugaagcgaa

SEQ ID NO: 1366440 - RNA, 22 nt, Human
ccucuuuccuccucucuguccc

SEQ ID NO: 1366441 - RNA, 18 nt, Human
ccugaagcgaagaagaaa

SEQ ID NO: 1366442 - RNA, 21 nt, Human
ccuggggcucugggcacagcc

SEQ ID NO: 1366443 - RNA, 25 nt, Human
ccuuaguugggggaagaccgggguc

SEQ ID NO: 1366444 - RNA, 20 nt, Human
ccuuuagggccccaggaccc

SEQ ID NO: 1366445 - RNA, 20 nt, Human
cgaagaagaaagaaacccau

SEQ ID NO: 1366446 - RNA, 22 nt, Human
cucaccauucucagccuccagg

SEQ ID NO: 1366447 - RNA, 19 nt, Human
cucaguuucucugucacau

SEQ ID NO: 1366448 - RNA, 19 nt, Human
cuccaaccucagccccuga

SEQ ID NO: 1366449 - RNA, 21 nt, Human
cuccagggaccccugcucccc

SEQ ID NO: 1366450 - RNA, 23 nt, Human
cuccccgagggaccucuuuccuc

SEQ ID NO: 1366451 - RNA, 18 nt, Human
cucccucacuccucagug

SEQ ID NO: 1366452 - RNA, 19 nt, Human
cuccuccaaccucagcccc

SEQ ID NO: 1366453 - RNA, 21 nt, Human
cuccucucuccauagaugucc

SEQ ID NO: 1366454 - RNA, 25 nt, Human
cucgccaggcaucuucucacuccca

SEQ ID NO: 1366455 - RNA, 21 nt, Human
cucuuccacucccugcccuuc

SEQ ID NO: 1366456 - RNA, 20 nt, Human
cugaagcgaagaagaaagaa

SEQ ID NO: 1366457 - RNA, 20 nt, Human
cugcugcccaccaccucagc

SEQ ID NO: 1366458 - RNA, 24 nt, Human
cugcugcccaccaccucagccccg

SEQ ID NO: 1366459 - RNA, 20 nt, Human
cuggaaggggaucuucacua

SEQ ID NO: 1366460 - RNA, 18 nt, Human
cugugccugagaccugcu

SEQ ID NO: 1366461 - RNA, 19 nt, Human
cuuaaagaugacuccaucc

SEQ ID NO: 1366462 - RNA, 21 nt, Human
cuuagcuuggagccaggaggu

SEQ ID NO: 1366463 - RNA, 24 nt, Human
cuuagcuuggagccaggaggugga

SEQ ID NO: 1366464 - RNA, 21 nt, Human
cuucauucagcaucuccucca

SEQ ID NO: 1366465 - RNA, 20 nt, Human
cuuccagccucgucugcucc

SEQ ID NO: 1366466 - RNA, 21 nt, Human
cuugaauccaggagguggagg

SEQ ID NO: 1366467 - RNA, 22 nt, Human
gaagugaagcuucaagggucca

SEQ ID NO: 1366468 - RNA, 24 nt, Human
gaagugaagcuucaaggguccagg

SEQ ID NO: 1366469 - RNA, 21 nt, Human
gagggcccagaaccccaggga

SEQ ID NO: 1366470 - RNA, 22 nt, Human
gauggcagggagggcccagaac

SEQ ID NO: 1366471 - RNA, 23 nt, Human
gcccauggggccuugggcauccu

SEQ ID NO: 1366472 - RNA, 21 nt, Human
gccuuaguugggggaagacag

SEQ ID NO: 1366473 - RNA, 20 nt, Human
gcuccccuucucuuuccucc

SEQ ID NO: 1366474 - RNA, 19 nt, Human
gcucucucaguuucucugu

SEQ ID NO: 1366475 - RNA, 19 nt, Human
gcugcccaccaccucagcc

SEQ ID NO: 1366476 - RNA, 21 nt, Human
gcugugcccacccucccucca

SEQ ID NO: 1366477 - RNA, 24 nt, Human
gcuuccagccucgucugcuccccu

SEQ ID NO: 1366478 - RNA, 19 nt, Human
gcuuuucugccaaagggac

SEQ ID NO: 1366479 - RNA, 18 nt, Human
ggagaguguggcggccuc

SEQ ID NO: 1366480 - RNA, 21 nt, Human
ggagggcccagaaccccaggg

SEQ ID NO: 1366481 - RNA, 27 nt, Human
ggccuuaguugggggaagacagggcug

SEQ ID NO: 1366482 - RNA, 18 nt, Human
ggugaggguacaggagag

SEQ ID NO: 1366483 - RNA, 21 nt, Human
guccaggagguucgcugucau

SEQ ID NO: 1366484 - RNA, 22 nt, Human
guggaggcugcccccacccaca

SEQ ID NO: 1366485 - RNA, 18 nt, Human
guggcccauggggccuug

SEQ ID NO: 1366486 - RNA, 22 nt, Human
guggcccauggggccuugggca

SEQ ID NO: 1366487 - RNA, 18 nt, Human
uaaaccaggugccagguc

SEQ ID NO: 1366488 - RNA, 18 nt, Human
uagcaucucuccucucuc

SEQ ID NO: 1366489 - RNA, 21 nt, Human
uagcuuggagccaggaggugg

SEQ ID NO: 1366490 - RNA, 22 nt, Human
uaguccucacccagguccucug

SEQ ID NO: 1366491 - RNA, 25 nt, Human
ucacagcaggcccagcugugcccac

SEQ ID NO: 1366492 - RNA, 22 nt, Human
ucacaucuggagcaaugguagg

SEQ ID NO: 1366493 - RNA, 24 nt, Human
ucagagccagcagagaucauaucc

SEQ ID NO: 1366494 - RNA, 21 nt, Human
uccaaacggcucagcccagga

SEQ ID NO: 1366495 - RNA, 18 nt, Human
uccaaccucagccccuga

SEQ ID NO: 1366496 - RNA, 19 nt, Human
uccaggagguggaggcugc

SEQ ID NO: 1366497 - RNA, 22 nt, Human
ucccaguggucacagcaggccc

SEQ ID NO: 1366498 - RNA, 20 nt, Human
ucccccagguccaccugggc

SEQ ID NO: 1366499 - RNA, 19 nt, Human
uccccgagggaccucuuuc

SEQ ID NO: 1366500 - RNA, 19 nt, Human
uccccuucucuuuccuccu

SEQ ID NO: 1366501 - RNA, 25 nt, Human
ucccugucacugcugcccaccaccu

SEQ ID NO: 1366502 - RNA, 19 nt, Human
uccggguagcaucucuccu

SEQ ID NO: 1366503 - RNA, 24 nt, Human
ucgcugagagcucagguccugggu

SEQ ID NO: 1366504 - RNA, 24 nt, Human
ugaagaaacgcauagaaagcacuu

SEQ ID NO: 1366505 - RNA, 21 nt, Human
ugaagcgaagaagaaagaaac

SEQ ID NO: 1366506 - RNA, 25 nt, Human
ugaccucccagccucuuccacuccc

SEQ ID NO: 1366507 - RNA, 23 nt, Human
ugaccuccucuccucuucccucc

SEQ ID NO: 1366508 - RNA, 19 nt, Human
ugacuuagcuuggagccag

SEQ ID NO: 1366509 - RNA, 24 nt, Human
ugacuugcagagugagcucggccu

SEQ ID NO: 1366510 - RNA, 18 nt, Human
ugcacgagaccgucuugc

SEQ ID NO: 1366511 - RNA, 23 nt, Human
ugcgugaugaagaggcugugcac

SEQ ID NO: 1366512 - RNA, 25 nt, Human
ugcuccccuucucuuuccuccucca

SEQ ID NO: 1366513 - RNA, 21 nt, Human
ugcuuccagccucgucugcuc

SEQ ID NO: 1366514 - RNA, 22 nt, Human
uggaucuuaaacagcaugcaaa

SEQ ID NO: 1366515 - RNA, 20 nt, Human
uggcagggagggcccagaac

SEQ ID NO: 1366516 - RNA, 23 nt, Human
uggccaaaaccucgccaggcauc

SEQ ID NO: 1366517 - RNA, 22 nt, Human
uggcggccucccccggcugcac

SEQ ID NO: 1366518 - RNA, 21 nt, Human
ugggccucccugucacugcug

SEQ ID NO: 1366519 - RNA, 21 nt, Human
ugugcccacccucccuccaaa

SEQ ID NO: 1366520 - RNA, 21 nt, Human
uuaguugggggaagacagggc

SEQ ID NO: 1366521 - RNA, 18 nt, Human
uucccagccuugaccacc

SEQ ID NO: 1366522 - RNA, 25 nt, Human
uucccagccuugaccaccaguggcu

SEQ ID NO: 1366523 - RNA, 19 nt, Human
uuccugccugcgcugggga

SEQ ID NO: 1366524 - RNA, 20 nt, Human
uuccugccugcgcuggggag

SEQ ID NO: 1366525 - RNA, 22 nt, Human
uuuccuccuccaaccucagccc

SEQ ID NO: 1366526 - RNA, 22 nt, Human
uuuuccuggggcucugggcaca

SEQ ID NO: 1366527 - RNA, 21 nt, Human
aaauacuuucuuccuggggcu

SEQ ID NO: 1366528 - RNA, 18 nt, Human
aagaagacugguucaucu

SEQ ID NO: 1366529 - RNA, 20 nt, Human
aaugcccaucaacccuuugc

SEQ ID NO: 1366530 - RNA, 25 nt, Human
acagacagacagugcugaguugggg

SEQ ID NO: 1366531 - RNA, 19 nt, Human
acggugguggcggcggcgg

SEQ ID NO: 1366532 - RNA, 19 nt, Human
acggugguggcggcggcgg

SEQ ID NO: 1366533 - RNA, 24 nt, Human
acuucacuccacugaaaucugguu

SEQ ID NO: 1366534 - RNA, 18 nt, Human
agaaagcaagcuaaccug

SEQ ID NO: 1366535 - RNA, 20 nt, Human
aggaucuuuuucucagaggg

SEQ ID NO: 1366536 - RNA, 22 nt, Human
aggaucuuuuucucagagggug

SEQ ID NO: 1366537 - RNA, 23 nt, Human
aggauggaggauuuagggaggaa

SEQ ID NO: 1366538 - RNA, 27 nt, Human
agggaggaagaaagcaagcuaaccugg

SEQ ID NO: 1366539 - RNA, 23 nt, Human
auaaaaggcuguucucagcacca

SEQ ID NO: 1366540 - RNA, 18 nt, Human
aucugguuggguaugaga

SEQ ID NO: 1366541 - RNA, 22 nt, Human
caaaacagccacccagauaagu

SEQ ID NO: 1366542 - RNA, 19 nt, Human
caaguuacagaaaacgcaa

SEQ ID NO: 1366543 - RNA, 21 nt, Human
cacggggcuuguuggcaggca

SEQ ID NO: 1366544 - RNA, 23 nt, Human
cacugcauuaccuggccaaaggc

SEQ ID NO: 1366545 - RNA, 24 nt, Human
cagaaaacgcaaauuuucauagca

SEQ ID NO: 1366546 - RNA, 20 nt, Human
cagugcugaguuggggaggu

SEQ ID NO: 1366547 - RNA, 25 nt, Human
cauugggucucucugaaaaaggccc

SEQ ID NO: 1366548 - RNA, 19 nt, Human
ccacccagauaaguccaug

SEQ ID NO: 1366549 - RNA, 24 nt, Human
cccacgcaucuagccuucugggca

SEQ ID NO: 1366550 - RNA, 21 nt, Human
cccaucacccgucccucugaa

SEQ ID NO: 1366551 - RNA, 24 nt, Human
ccccauaaaaggcuguucucagca

SEQ ID NO: 1366552 - RNA, 22 nt, Human
cccgucccucugaagaagcacg

SEQ ID NO: 1366553 - RNA, 21 nt, Human
cccuuugcgugcuguugcugc

SEQ ID NO: 1366554 - RNA, 18 nt, Human
cggugguggcggcggcgg

SEQ ID NO: 1366555 - RNA, 19 nt, Human
cuguucucagcaccaacau

SEQ ID NO: 1366556 - RNA, 18 nt, Human
gaaagauuaagguuccca

SEQ ID NO: 1366557 - RNA, 21 nt, Human
gaagaagacugguucaucuuc

SEQ ID NO: 1366558 - RNA, 18 nt, Human
gacccgaagcagggaggc

SEQ ID NO: 1366559 - RNA, 18 nt, Human
gaggauggaggauuuagg

SEQ ID NO: 1366560 - RNA, 21 nt, Human
gcacagacagacagugcugag

SEQ ID NO: 1366561 - RNA, 21 nt, Human
gcccauggcucagugcaagcc

SEQ ID NO: 1366562 - RNA, 21 nt, Human
ggaccugaauacuccuacccc

SEQ ID NO: 1366563 - RNA, 20 nt, Human
ggcggcggcggugguggcgg

SEQ ID NO: 1366564 - RNA, 21 nt, Human
gggcuuguucugacccgaagc

SEQ ID NO: 1366565 - RNA, 23 nt, Human
gguagugaggggaagaagacugg

SEQ ID NO: 1366566 - RNA, 23 nt, Human
gguggcggcggcggugguggcgg

SEQ ID NO: 1366567 - RNA, 25 nt, Human
gguggcggcggcggugguggcggug

SEQ ID NO: 1366568 - RNA, 19 nt, Human
ggugguggcggcggcggug

SEQ ID NO: 1366569 - RNA, 23 nt, Human
ggugguggcggcggcgguggugg

SEQ ID NO: 1366570 - RNA, 18 nt, Human
gugaauuaucuggaccag

SEQ ID NO: 1366571 - RNA, 20 nt, Human
guggcggcggcggugguggc

SEQ ID NO: 1366572 - RNA, 23 nt, Human
gugguggcggcggcggugguggc

SEQ ID NO: 1366573 - RNA, 26 nt, Human
uacggugguggcggcggcggugguga

SEQ ID NO: 1366574 - RNA, 21 nt, Human
uacucuugcugcugcugcugc

SEQ ID NO: 1366575 - RNA, 18 nt, Human
uaggaaggacgcaaagua

SEQ ID NO: 1366576 - RNA, 24 nt, Human
ucaauaaugagaggaaaaugcacc

SEQ ID NO: 1366577 - RNA, 20 nt, Human
ucacauuucucucuggcugu

SEQ ID NO: 1366578 - RNA, 22 nt, Human
uccauguggaaccuccucugug

SEQ ID NO: 1366579 - RNA, 21 nt, Human
ucccauaggaucacauccucc

SEQ ID NO: 1366580 - RNA, 21 nt, Human
uccgguggaaugaaggacaag

SEQ ID NO: 1366581 - RNA, 24 nt, Human
uccuccuccugcaccgccuuugac

SEQ ID NO: 1366582 - RNA, 19 nt, Human
ucguauguggcuccucccc

SEQ ID NO: 1366583 - RNA, 20 nt, Human
ucucugaaaaaggcccuuaa

SEQ ID NO: 1366584 - RNA, 21 nt, Human
ucuucuccugcucugccuucu

SEQ ID NO: 1366585 - RNA, 21 nt, Human
ucuugcugcugcugcugcugc

SEQ ID NO: 1366586 - RNA, 22 nt, Human
ucuugcugcugcugcugcugcc

SEQ ID NO: 1366587 - RNA, 21 nt, Human
ugaagaagcacgcacacucca

SEQ ID NO: 1366588 - RNA, 21 nt, Human
ugacccgaagcagggaggcag

SEQ ID NO: 1366589 - RNA, 25 nt, Human
ugcucugccuucuugauaaacacuc

SEQ ID NO: 1366590 - RNA, 21 nt, Human
ugcugcugcugcugcugcugc

SEQ ID NO: 1366591 - RNA, 21 nt, Human
ugcugcugcugcugcugcugc

SEQ ID NO: 1366592 - RNA, 21 nt, Human
ugcugcugcugcugcugcugc

SEQ ID NO: 1366593 - RNA, 21 nt, Human
ugcugcugcugcugcugcugc

SEQ ID NO: 1366594 - RNA, 21 nt, Human
ugcugcugcugcugcugcugc

SEQ ID NO: 1366595 - RNA, 21 nt, Human
ugcugcugcugcugcugcugc

SEQ ID NO: 1366596 - RNA, 21 nt, Human
ugcugcugcugcugcugcugc

SEQ ID NO: 1366597 - RNA, 21 nt, Human
uggaaugaaggacaagagaag

SEQ ID NO: 1366598 - RNA, 22 nt, Human
uggaggauuuagggaggaagaa

SEQ ID NO: 1366599 - RNA, 18 nt, Human
uggccaaaggccuuuggc

SEQ ID NO: 1366600 - RNA, 24 nt, Human
uggcggcggcggugguggcggugg

SEQ ID NO: 1366601 - RNA, 29 nt, Human
uggcggcggcggugguggcgguggcuggu

SEQ ID NO: 1366602 - RNA, 21 nt, Human
uggggcuuguucugacccgaa

SEQ ID NO: 1366603 - RNA, 18 nt, Human
ugguggcggcggcggugg

SEQ ID NO: 1366604 - RNA, 25 nt, Human
ugucugaggaucuuuuucucagaga

SEQ ID NO: 1366605 - RNA, 24 nt, Human
uuaucuggaccagauccuccuccu

SEQ ID NO: 1366606 - RNA, 18 nt, Human
uuccuuguuguguucaga

SEQ ID NO: 1366607 - RNA, 21 nt, Human
uuggggaggugggucuguggg

SEQ ID NO: 1366608 - RNA, 20 nt, Human
uuucucagaggguggggaug

SEQ ID NO: 1366609 - RNA, 19 nt, Human
uuuuagaaaagaaagauua

SEQ ID NO: 1366610 - RNA, 24 nt, Human
aaccaaguccacuccuggccagua

SEQ ID NO: 1366611 - RNA, 19 nt, Human
aaccaaugagaagguagcc

SEQ ID NO: 1366612 - RNA, 21 nt, Human
aaccagaugcccgggagccug

SEQ ID NO: 1366613 - RNA, 21 nt, Human
acagcccaagccguagaagcc

SEQ ID NO: 1366614 - RNA, 19 nt, Human
acgaaggcgcaguccucgc

SEQ ID NO: 1366615 - RNA, 19 nt, Human
agaccagcccuccucccca

SEQ ID NO: 1366616 - RNA, 18 nt, Human
agccagaggcaccaggcc

SEQ ID NO: 1366617 - RNA, 21 nt, Human
agcccuaaccaaguccacucu

SEQ ID NO: 1366618 - RNA, 23 nt, Human
agccuggccaguggaaguagccc

SEQ ID NO: 1366619 - RNA, 19 nt, Human
agcgguggcugcagcccuc

SEQ ID NO: 1366620 - RNA, 21 nt, Human
aggcagcgccccgacuggaag

SEQ ID NO: 1366621 - RNA, 19 nt, Human
agggaagggaagggguggg

SEQ ID NO: 1366622 - RNA, 19 nt, Human
aggggccugggcccggggc

SEQ ID NO: 1366623 - RNA, 18 nt, Human
aucuccucaggccacuag

SEQ ID NO: 1366624 - RNA, 20 nt, Human
caaccagaugcccgggagcc

SEQ ID NO: 1366625 - RNA, 18 nt, Human
caccaggcccuagcgggg

SEQ ID NO: 1366626 - RNA, 21 nt, Human
caccggucgccgauccagccc

SEQ ID NO: 1366627 - RNA, 20 nt, Human
cagcccaagccguagaagcc

SEQ ID NO: 1366628 - RNA, 22 nt, Human
cagcccaagccguagaagccgg

SEQ ID NO: 1366629 - RNA, 26 nt, Human
cagcccuccuccccaggcugggguca

SEQ ID NO: 1366630 - RNA, 19 nt, Human
cagcugacagcugaggggc

SEQ ID NO: 1366631 - RNA, 18 nt, Human
ccacaccggcggcgacag

SEQ ID NO: 1366632 - RNA, 21 nt, Human
cccccgccgggaggagcccau

SEQ ID NO: 1366633 - RNA, 25 nt, Human
ccccugaggagcggagaccagcccu

SEQ ID NO: 1366634 - RNA, 24 nt, Human
cccucccaucuuuggccaaugaga

SEQ ID NO: 1366635 - RNA, 20 nt, Human
cccuggaggucccgcggcgu

SEQ ID NO: 1366636 - RNA, 19 nt, Human
ccgcugccgcagucggcgc

SEQ ID NO: 1366637 - RNA, 18 nt, Human
ccgcugccgcagucgggg

SEQ ID NO: 1366638 - RNA, 23 nt, Human
ccucaggccacuagagucgcccc

SEQ ID NO: 1366639 - RNA, 23 nt, Human
ccucgaccaacgggaugggcccu

SEQ ID NO: 1366640 - RNA, 22 nt, Human
ccuggccaguggaaguagcccc

SEQ ID NO: 1366641 - RNA, 23 nt, Human
ccuggccaguggaaguagccccg

SEQ ID NO: 1366642 - RNA, 18 nt, Human
ccuugcacuggccacacc

SEQ ID NO: 1366643 - RNA, 18 nt, Human
cgacaguacuugccgcgg

SEQ ID NO: 1366644 - RNA, 21 nt, Human
cgcaaccuccgcuagccgcgc

SEQ ID NO: 1366645 - RNA, 23 nt, Human
cgccagagcacacugcuccaauc

SEQ ID NO: 1366646 - RNA, 18 nt, Human
cgcggcauggcggacagc

SEQ ID NO: 1366647 - RNA, 21 nt, Human
cgcgguagcccggcucgcagg

SEQ ID NO: 1366648 - RNA, 22 nt, Human
cggccgaggggggagcagcccu

SEQ ID NO: 1366649 - RNA, 19 nt, Human
cgggaugggcccuucccgc

SEQ ID NO: 1366650 - RNA, 23 nt, Human
cggucgccgauccagcccgcguu

SEQ ID NO: 1366651 - RNA, 22 nt, Human
cguguggggcagugggaggcca

SEQ ID NO: 1366652 - RNA, 18 nt, Human
cugacagcugaggggccu

SEQ ID NO: 1366653 - RNA, 22 nt, Human
cugagccaaugagacgcaaccu

SEQ ID NO: 1366654 - RNA, 23 nt, Human
cugcaggccugagcacaguccgc

SEQ ID NO: 1366655 - RNA, 23 nt, Human
cugcgaagcugagggagcugcgc

SEQ ID NO: 1366656 - RNA, 21 nt, Human
cugucuggucggagcgcucca

SEQ ID NO: 1366657 - RNA, 20 nt, Human
gacagcgguggcugcagccc

SEQ ID NO: 1366658 - RNA, 18 nt, Human
gacaugguuacaggcaug

SEQ ID NO: 1366659 - RNA, 19 nt, Human
gagccuccagccagaggca

SEQ ID NO: 1366660 - RNA, 21 nt, Human
gagccuccagccagaggcacc

SEQ ID NO: 1366661 - RNA, 22 nt, Human
gagcggcugcaggaccugagcc

SEQ ID NO: 1366662 - RNA, 20 nt, Human
gccacuagagucgccccugg

SEQ ID NO: 1366663 - RNA, 24 nt, Human
gccagagcacacugcuccaaucca

SEQ ID NO: 1366664 - RNA, 21 nt, Human
gcgcggugcccggccaauagg

SEQ ID NO: 1366665 - RNA, 21 nt, Human
gcgcugguugguuucuaggug

SEQ ID NO: 1366666 - RNA, 23 nt, Human
gcggagaccagcccuccucccca

SEQ ID NO: 1366667 - RNA, 18 nt, Human
ggagcagcccugcugggg

SEQ ID NO: 1366668 - RNA, 20 nt, Human
ggcagcugcaggccugagca

SEQ ID NO: 1366669 - RNA, 21 nt, Human
ggcgcugcgaagcugagggag

SEQ ID NO: 1366670 - RNA, 23 nt, Human
gggagccuccagccagaggcacc

SEQ ID NO: 1366671 - RNA, 26 nt, Human
gggcagaagugccucuggcugcaacc

SEQ ID NO: 1366672 - RNA, 18 nt, Human
gggcagugggaggccauc

SEQ ID NO: 1366673 - RNA, 24 nt, Human
ggggagaggcagcccgggcagaag

SEQ ID NO: 1366674 - RNA, 20 nt, Human
gggguggcgggcggcgcugc

SEQ ID NO: 1366675 - RNA, 24 nt, Human
gguggcaggcaccagugaccgggu

SEQ ID NO: 1366676 - RNA, 18 nt, Human
guggaguccgggcgggca

SEQ ID NO: 1366677 - RNA, 22 nt, Human
uaagaaagcuuuggccaagccc

SEQ ID NO: 1366678 - RNA, 19 nt, Human
uacaucuccucaggccacu

SEQ ID NO: 1366679 - RNA, 20 nt, Human
uagguggcaggcaccaguga

SEQ ID NO: 1366680 - RNA, 21 nt, Human
ucaaccagaugcccgggagcc

SEQ ID NO: 1366681 - RNA, 24 nt, Human
ucaggccacuagagucgccccugg

SEQ ID NO: 1366682 - RNA, 19 nt, Human
uccagcccgcguugcagcg

SEQ ID NO: 1366683 - RNA, 23 nt, Human
ucgcaguguccgcugccgcaguc

SEQ ID NO: 1366684 - RNA, 19 nt, Human
ucuauugggacggccaagg

SEQ ID NO: 1366685 - RNA, 19 nt, Human
ucuggcugcaaccaaugag

SEQ ID NO: 1366686 - RNA, 28 nt, Human
ugaccgggucgcacgugucccguacucg

SEQ ID NO: 1366687 - RNA, 22 nt, Human
ugagccaaugagacgcaaccuc

SEQ ID NO: 1366688 - RNA, 20 nt, Human
ugcaggccugagcacagucc

SEQ ID NO: 1366689 - RNA, 23 nt, Human
ugcaggccugagcacaguccgcg

SEQ ID NO: 1366690 - RNA, 19 nt, Human
ugcccgggagccuggccag

SEQ ID NO: 1366691 - RNA, 24 nt, Human
ugcuggcccuugcacuggccacac

SEQ ID NO: 1366692 - RNA, 19 nt, Human
uggcaggcaccagugaccg

SEQ ID NO: 1366693 - RNA, 23 nt, Human
ugggacggacuaagccccugagg

SEQ ID NO: 1366694 - RNA, 19 nt, Human
ugggaggccaucaaaacca

SEQ ID NO: 1366695 - RNA, 21 nt, Human
uggggucaaccagaugcccgg

SEQ ID NO: 1366696 - RNA, 18 nt, Human
uguccucguggcagcugc

SEQ ID NO: 1366697 - RNA, 20 nt, Human
uuaagaaagcuuuggccaag

SEQ ID NO: 1366698 - RNA, 25 nt, Human
aucuucauuccccugcaguuaagag

SEQ ID NO: 1366699 - RNA, 25 nt, Human
ccugcaguuaagagaaaccgggguc

SEQ ID NO: 1366700 - RNA, 20 nt, Human
uaagaaacagcuuaggauga

SEQ ID NO: 1366701 - RNA, 22 nt, Human
uaucuggaaacuuaauguagaa

SEQ ID NO: 1366702 - RNA, 21 nt, Human
ucagaagccuuaucuggaaac

SEQ ID NO: 1366703 - RNA, 20 nt, Human
ucuucauuccccugcaguua

SEQ ID NO: 1366704 - RNA, 23 nt, Human
ugucgaggacuagaaaucuucau

SEQ ID NO: 1366705 - RNA, 21 nt, Human
aaguugcuuuuugcuccccca

SEQ ID NO: 1366706 - RNA, 23 nt, Human
agaguggggccuuggguuccccg

SEQ ID NO: 1366707 - RNA, 18 nt, Human
agcgagaguggggccuug

SEQ ID NO: 1366708 - RNA, 24 nt, Human
agggggcagauccagaacagagca

SEQ ID NO: 1366709 - RNA, 21 nt, Human
aguaaagggggcagauccaga

SEQ ID NO: 1366710 - RNA, 22 nt, Human
aguaaagggggcagauccagaa

SEQ ID NO: 1366711 - RNA, 22 nt, Human
cauuuuaauuuggggugggggu

SEQ ID NO: 1366712 - RNA, 23 nt, Human
ccagaacagagcagaaacgguga

SEQ ID NO: 1366713 - RNA, 23 nt, Human
ccugugaacacuggagaacugga

SEQ ID NO: 1366714 - RNA, 25 nt, Human
ccuuggggaccagccaggcugaccc

SEQ ID NO: 1366715 - RNA, 25 nt, Human
cucccccauccuaaugccuugggga

SEQ ID NO: 1366716 - RNA, 23 nt, Human
gacuggggcaagaaagaaggggc

SEQ ID NO: 1366717 - RNA, 25 nt, Human
ggggaccagccaggcugacccaaau

SEQ ID NO: 1366718 - RNA, 24 nt, Human
uaacauuuuaauuugggguggggg

SEQ ID NO: 1366719 - RNA, 19 nt, Human
uaaugccuuggggaccagc

SEQ ID NO: 1366720 - RNA, 20 nt, Human
ucaccugugaacacuggaga

SEQ ID NO: 1366721 - RNA, 24 nt, Human
uccagaacagagcagaaacgguga

SEQ ID NO: 1366722 - RNA, 18 nt, Human
uccagcagcuuaacauuu

SEQ ID NO: 1366723 - RNA, 21 nt, Human
ugggguggggguggaagaaaa

SEQ ID NO: 1366724 - RNA, 18 nt, Human
aacccugagccccugagc

SEQ ID NO: 1366725 - RNA, 23 nt, Human
aagcagugugucccucagggagc

SEQ ID NO: 1366726 - RNA, 22 nt, Human
aaugaagagaucucugaggucc

SEQ ID NO: 1366727 - RNA, 30 nt, Human; identical to SEQ ID NO: 1360125

SEQ ID NO: 1366728 - RNA, 18 nt, Human
agagcgcccuggguucuu

SEQ ID NO: 1366729 - RNA, 21 nt, Human
agaguaguaucccccacacag

SEQ ID NO: 1366730 - RNA, 21 nt, Human
agccauugcaaugaguccaga

SEQ ID NO: 1366731 - RNA, 24 nt, Human
agcgcccuggguucuuuuccccag

SEQ ID NO: 1366732 - RNA, 25 nt, Human
aggagauggggugggggcuggucaa

SEQ ID NO: 1366733 - RNA, 23 nt, Human
aggaggagugacagggaggccug

SEQ ID NO: 1366734 - RNA, 19 nt, Human
aggcuggaagagaaccuga

SEQ ID NO: 1366735 - RNA, 24 nt, Human
agugacagggaggccuggauggug

SEQ ID NO: 1366736 - RNA, 19 nt, Human
caccugugaaaugaagaga

SEQ ID NO: 1366737 - RNA, 28 nt, Human
cagcccuacuggagacgggcugugugac

SEQ ID NO: 1366738 - RNA, 19 nt, Human
cagggaggccuggauggug

SEQ ID NO: 1366739 - RNA, 24 nt, Human
caugcuguucucccuguaccccca

SEQ ID NO: 1366740 - RNA, 20 nt, Human
ccccugagcucaagugcagg

SEQ ID NO: 1366741 - RNA, 18 nt, Human
cccugagccccugagcuc

SEQ ID NO: 1366742 - RNA, 18 nt, Human
cccuggacccuggggccu

SEQ ID NO: 1366743 - RNA, 19 nt, Human
cccuggacccuggggccuc

SEQ ID NO: 1366744 - RNA, 20 nt, Human
cccuggacccuggggccucc

SEQ ID NO: 1366745 - RNA, 20 nt, Human
ccuggcuugagcuucaucgg

SEQ ID NO: 1366746 - RNA, 24 nt, Human
cgguagcggggcugggguggacac

SEQ ID NO: 1366747 - RNA, 21 nt, Human
gaagguguaggagagagucca

SEQ ID NO: 1366748 - RNA, 19 nt, Human
gagaggagauggggugggg

SEQ ID NO: 1366749 - RNA, 20 nt, Human
gagguccccaggaggaguga

SEQ ID NO: 1366750 - RNA, 19 nt, Human
gcccuggacccuggggccc

SEQ ID NO: 1366751 - RNA, 19 nt, Human
gcccuggacccuggggccu

SEQ ID NO: 1366752 - RNA, 25 nt, Human
gcccuggguucuuuuccccagcccu

SEQ ID NO: 1366753 - RNA, 23 nt, Human
gcucaagugcagggauggccggu

SEQ ID NO: 1366754 - RNA, 19 nt, Human
gcugggguggacaccgggg

SEQ ID NO: 1366755 - RNA, 25 nt, Human
ggagaggagauggggugggggcugg

SEQ ID NO: 1366756 - RNA, 22 nt, Human
gggcauagagaagacagguugg

SEQ ID NO: 1366757 - RNA, 22 nt, Human
gguguuggugagggguggacag

SEQ ID NO: 1366758 - RNA, 23 nt, Human
gugaagcaggugauggggacccu

SEQ ID NO: 1366759 - RNA, 24 nt, Human
guucucccuguacccccaggggcu

SEQ ID NO: 1366760 - RNA, 19 nt, Human
uagcacucugggugcccuu

SEQ ID NO: 1366761 - RNA, 23 nt, Human
uccagauuugcagaaagagcugu

SEQ ID NO: 1366762 - RNA, 21 nt, Human
ugaaaugaagagaucucugag

SEQ ID NO: 1366763 - RNA, 18 nt, Human
ugaagcaggugaugggga

SEQ ID NO: 1366764 - RNA, 18 nt, Human
ugagguccccaggaggag

SEQ ID NO: 1366765 - RNA, 24 nt, Human
ugcagaaagagcuguuaaucagug

SEQ ID NO: 1366766 - RNA, 18 nt, Human
ugcccuggacccuggggc

SEQ ID NO: 1366767 - RNA, 21 nt, Human
ugccuggaggucuauggacag

SEQ ID NO: 1366768 - RNA, 25 nt, Human
ugccuggaggucuauggacaggcug

SEQ ID NO: 1366769 - RNA, 20 nt, Human
uggaagagaaccugagccau

SEQ ID NO: 1366770 - RNA, 18 nt, Human
uggacccuggggccuccc

SEQ ID NO: 1366771 - RNA, 19 nt, Human
uggaugguggagaaggugu

SEQ ID NO: 1366772 - RNA, 21 nt, Human
uggcagagggucccaaaguca

SEQ ID NO: 1366773 - RNA, 18 nt, Human
ugggagcgggguccuggg

SEQ ID NO: 1366774 - RNA, 24 nt, Human
uggggugggggcuggucaaagcag

SEQ ID NO: 1366775 - RNA, 22 nt, Human
ugugaaaugaagagaucucuga

SEQ ID NO: 1366776 - RNA, 18 nt, Human
uuauggcagaggguccca

SEQ ID NO: 1366777 - RNA, 23 nt, Human
uuccugcagaggcuacagaugug

SEQ ID NO: 1366778 - RNA, 26 nt, Human
aaaacaaaaacaaaaacaaauuccca

SEQ ID NO: 1366779 - RNA, 24 nt, Human
aaaacgagucuacacaaaaaccug

SEQ ID NO: 1366780 - RNA, 24 nt, Human
aaacaaaaacaaaaacaaauuccc

SEQ ID NO: 1366781 - RNA, 21 nt, Human
aaacaaacaggauguaacccc

SEQ ID NO: 1366782 - RNA, 23 nt, Human
aaagaaaugacaacacccacuaa

SEQ ID NO: 1366783 - RNA, 21 nt, Human
aaaguaaaagucacugcaagc

SEQ ID NO: 1366784 - RNA, 19 nt, Human
aaagugcggggauuacaga

SEQ ID NO: 1366785 - RNA, 23 nt, Human
aaaugcugcuuguacaaucuaag

SEQ ID NO: 1366786 - RNA, 25 nt, Human
aacacaaaaaacaaaaacaaaaaca

SEQ ID NO: 1366787 - RNA, 21 nt, Human
aacacacugaugaacauacaa

SEQ ID NO: 1366788 - RNA, 18 nt, Human
aacagucuucucaaaugu

SEQ ID NO: 1366789 - RNA, 19 nt, Human
aacaguuuggcaguuucuu

SEQ ID NO: 1366790 - RNA, 19 nt, Human
aacaugaugaaaccccauc

SEQ ID NO: 1366791 - RNA, 20 nt, Human
aacaugaugaaaccccaucu

SEQ ID NO: 1366792 - RNA, 21 nt, Human
aacaugaugaaaccccaucuc

SEQ ID NO: 1366793 - RNA, 21 nt, Human
aacaugaugaaaccccaucuc

SEQ ID NO: 1366794 - RNA, 22 nt, Human
aacuccagccugggugacagag

SEQ ID NO: 1366795 - RNA, 22 nt, Human
aagaaaaccacuagaacuaaaa

SEQ ID NO: 1366796 - RNA, 21 nt, Human
aagcagauucauggcacacaa

SEQ ID NO: 1366797 - RNA, 18 nt, Human
aagcaguccucccacuuc

SEQ ID NO: 1366798 - RNA, 20 nt, Human
aagccaaaauacaaaauagc

SEQ ID NO: 1366799 - RNA, 24 nt, Human
aagcgauucuccugccuuggccuc

SEQ ID NO: 1366800 - RNA, 18 nt, Human
aaggaacaaagcuuaaac

SEQ ID NO: 1366801 - RNA, 18 nt, Human
aaggaacccaaacagaag

SEQ ID NO: 1366802 - RNA, 18 nt, Human
aaggugcuccacaucacu

SEQ ID NO: 1366803 - RNA, 24 nt, Human
aaguaacugggauuacaggcgugu

SEQ ID NO: 1366804 - RNA, 25 nt, Human
aaguaacugggauuacaggcgugug

SEQ ID NO: 1366805 - RNA, 21 nt, Human
aagugacccaccauggagggu

SEQ ID NO: 1366806 - RNA, 22 nt, Human
aauauaaacaacuuuaaaauga

SEQ ID NO: 1366807 - RNA, 21 nt, Human
aauguugccuucaaacugggu

SEQ ID NO: 1366808 - RNA, 24 nt, Human
aauugcuugaaacugggaggugga

SEQ ID NO: 1366809 - RNA, 19 nt, Human
acaaaaaacaaaaacaaaa

SEQ ID NO: 1366810 - RNA, 24 nt, Human
acaaagugcggggauuacagaugu

SEQ ID NO: 1366811 - RNA, 22 nt, Human
acaaccucugccucccagguuc

SEQ ID NO: 1366812 - RNA, 21 nt, Human
acaauguugccuucaaacugg

SEQ ID NO: 1366813 - RNA, 28 nt, Human
acacaaaaaacaaaaacaaaagggaccc

SEQ ID NO: 1366814 - RNA, 23 nt, Human
acccacgcauaaagggacacaua

SEQ ID NO: 1366815 - RNA, 20 nt, Human
acccauuagcuaaaaugcaa

SEQ ID NO: 1366816 - RNA, 24 nt, Human
accccaucucuacuaaaaauacaa

SEQ ID NO: 1366817 - RNA, 19 nt, Human
accucaagugacccaccau

SEQ ID NO: 1366818 - RNA, 25 nt, Human
acucaggcuggagugcagcaacagu

SEQ ID NO: 1366819 - RNA, 23 nt, Human
acuccagccugggugacagagcg

SEQ ID NO: 1366820 - RNA, 18 nt, Human
acucugucacucaggcug

SEQ ID NO: 1366821 - RNA, 25 nt, Human
acucugucacucaggcuggagugca

SEQ ID NO: 1366822 - RNA, 27 nt, Human
acucuguugcccaggcuggagugcaau

SEQ ID NO: 1366823 - RNA, 23 nt, Human
acuuccuuucuaaaaauaagaaa

SEQ ID NO: 1366824 - RNA, 19 nt, Human
agacacaaggaacccaaac

SEQ ID NO: 1366825 - RNA, 23 nt, Human
agcacccugaccauaugccccac

SEQ ID NO: 1366826 - RNA, 24 nt, Human
agcacuuugggaggccgaggcagg

SEQ ID NO: 1366827 - RNA, 24 nt, Human
agccuggccaacaugaugaaaccc

SEQ ID NO: 1366828 - RNA, 19 nt, Human
aggaacucuuauucauugu

SEQ ID NO: 1366829 - RNA, 26 nt, Human
aggcaggcaaaugacuggaggccagg

SEQ ID NO: 1366830 - RNA, 25 nt, Human
aggccgaggcaggcaaaugacugga

SEQ ID NO: 1366831 - RNA, 20 nt, Human
agguggaggcuguaaugagc

SEQ ID NO: 1366832 - RNA, 25 nt, Human
agucuacacaaaaaccugcacauag

SEQ ID NO: 1366833 - RNA, 23 nt, Human
agugcaauggugugaucuuggcu

SEQ ID NO: 1366834 - RNA, 24 nt, Human
agugcaauggugugaucuuggcuc

SEQ ID NO: 1366835 - RNA, 23 nt, Human
auagaacacugcucagccauaaa

SEQ ID NO: 1366836 - RNA, 24 nt, Human
aucuuuaggguguuuaggugggag

SEQ ID NO: 1366837 - RNA, 26 nt, Human
caaaaaauaacuuuccaaaugagaac

SEQ ID NO: 1366838 - RNA, 19 nt, Human
caaacacaaaaaacaaaaa

SEQ ID NO: 1366839 - RNA, 20 nt, Human
caaacacaaaaaacaaaaac

SEQ ID NO: 1366840 - RNA, 28 nt, Human
caaacacaaaaaacaaaaacaaaaacaa

SEQ ID NO: 1366841 - RNA, 22 nt, Human
caaagugcggggauuacagaug

SEQ ID NO: 1366842 - RNA, 24 nt, Human
caaaugacuggaggccaggaguuc

SEQ ID NO: 1366843 - RNA, 20 nt, Human
caaaugagaacugaguaagg

SEQ ID NO: 1366844 - RNA, 20 nt, Human
caaccucugccucccagguu

SEQ ID NO: 1366845 - RNA, 23 nt, Human
caacuuuauucaugauagcccca

SEQ ID NO: 1366846 - RNA, 22 nt, Human
caagcgauucuccugccuuggc

SEQ ID NO: 1366847 - RNA, 27 nt, Human
caagcgauucuccugccuuggccuccc

SEQ ID NO: 1366848 - RNA, 21 nt, Human
cacaaaaaacaaaaacaaaaa

SEQ ID NO: 1366849 - RNA, 19 nt, Human
cacaauguugccuucaaac

SEQ ID NO: 1366850 - RNA, 19 nt, Human
cacaucuguaaucccagcu

SEQ ID NO: 1366851 - RNA, 24 nt, Human
cacuaaguuggccaggcuaaucuu

SEQ ID NO: 1366852 - RNA, 23 nt, Human
cacuagaacuaaaauucuggaca

SEQ ID NO: 1366853 - RNA, 18 nt, Human
cacuauaacuccagccug

SEQ ID NO: 1366854 - RNA, 24 nt, Human
cacuauaacuccagccugggugac

SEQ ID NO: 1366855 - RNA, 23 nt, Human
cacucugucacucaggcuggagu

SEQ ID NO: 1366856 - RNA, 24 nt, Human
cacucugucacucaggcuggagug

SEQ ID NO: 1366857 - RNA, 24 nt, Human
cacucuguugcccaggcuggagug

SEQ ID NO: 1366858 - RNA, 22 nt, Human
cacugcaggcuugacuucccag

SEQ ID NO: 1366859 - RNA, 22 nt, Human
cacugcucagccauaaaaagga

SEQ ID NO: 1366860 - RNA, 24 nt, Human
cagagucucacucuguugcccagg

SEQ ID NO: 1366861 - RNA, 24 nt, Human
cagcacuuugggaggccgaggcag

SEQ ID NO: 1366862 - RNA, 25 nt, Human
cagcacuuugggaggccgaggcagg

SEQ ID NO: 1366863 - RNA, 21 nt, Human
cagcagcuaggcuaaagcagg

SEQ ID NO: 1366864 - RNA, 23 nt, Human
cagccaccacaccuagccuauuc

SEQ ID NO: 1366865 - RNA, 24 nt, Human
caggcaaaugacuggaggccagga

SEQ ID NO: 1366866 - RNA, 22 nt, Human
caguagagccggaguuucacua

SEQ ID NO: 1366867 - RNA, 18 nt, Human
cauacugcuucucagagu

SEQ ID NO: 1366868 - RNA, 21 nt, Human
cauauagaaaaaaagaugaga

SEQ ID NO: 1366869 - RNA, 23 nt, Human
cauauagaaaaaaagaugagacu

SEQ ID NO: 1366870 - RNA, 23 nt, Human
caucuguaaucccagcuacucgg

SEQ ID NO: 1366871 - RNA, 20 nt, Human
caugagaauugcuugaaacu

SEQ ID NO: 1366872 - RNA, 22 nt, Human
ccaaguaacugggauuacaggc

SEQ ID NO: 1366873 - RNA, 24 nt, Human
ccaaguaacugggauuacaggcgu

SEQ ID NO: 1366874 - RNA, 20 nt, Human
ccacaauauucagcaaucag

SEQ ID NO: 1366875 - RNA, 19 nt, Human
ccagacaccucaccaauga

SEQ ID NO: 1366876 - RNA, 20 nt, Human
cccaaacagaaggaaauuca

SEQ ID NO: 1366877 - RNA, 19 nt, Human
cccaaguaacugggauuac

SEQ ID NO: 1366878 - RNA, 24 nt, Human
cccaaguaacugggauuacaggcg

SEQ ID NO: 1366879 - RNA, 22 nt, Human
cccacaugacagaagcuuaagu

SEQ ID NO: 1366880 - RNA, 20 nt, Human
cccaggcucaagcaguccuc

SEQ ID NO: 1366881 - RNA, 23 nt, Human
cccagguucaagcgauucuccug

SEQ ID NO: 1366882 - RNA, 20 nt, Human
cccuugcacuccguaagcag

SEQ ID NO: 1366883 - RNA, 21 nt, Human
ccgauaauuuaggggaaacuc

SEQ ID NO: 1366884 - RNA, 19 nt, Human
ccucccacuucagccucac

SEQ ID NO: 1366885 - RNA, 21 nt, Human
ccucccacuucagccucacaa

SEQ ID NO: 1366886 - RNA, 24 nt, Human
ccucccagguucaagcgauucucc

SEQ ID NO: 1366887 - RNA, 21 nt, Human
ccugaccucaagugacccacc

SEQ ID NO: 1366888 - RNA, 24 nt, Human
ccuggccaacaugaugaaacccca

SEQ ID NO: 1366889 - RNA, 18 nt, Human
ccugggugacagagcgac

SEQ ID NO: 1366890 - RNA, 20 nt, Human
ccuguaaucccagcacuuug

SEQ ID NO: 1366891 - RNA, 20 nt, Human
ccuucaaguaacacagaagu

SEQ ID NO: 1366892 - RNA, 20 nt, Human
ccuugcacuccguaagcagc

SEQ ID NO: 1366893 - RNA, 23 nt, Human
ccuugguauuuacccaaaggagc

SEQ ID NO: 1366894 - RNA, 26 nt, Human
cgaggcaggcaaaugacuggaggcca

SEQ ID NO: 1366895 - RNA, 23 nt, Human
cggaguuucacuaaguuggccag

SEQ ID NO: 1366896 - RNA, 24 nt, Human
cggaguuucacuaaguuggccagg

SEQ ID NO: 1366897 - RNA, 24 nt, Human
cuauaacuccagccugggugacag

SEQ ID NO: 1366898 - RNA, 25 nt, Human
cucaaacacaaaaaacaaaaacaaa

SEQ ID NO: 1366899 - RNA, 24 nt, Human
cucaagcaguccucccacuucagc

SEQ ID NO: 1366900 - RNA, 24 nt, Human
cucaagugacccaccauggagggu

SEQ ID NO: 1366901 - RNA, 24 nt, Human
cucacucugucacucaggcuggag

SEQ ID NO: 1366902 - RNA, 24 nt, Human
cucacucuguugcccaggcuggag

SEQ ID NO: 1366903 - RNA, 18 nt, Human
cucacugcaggcuugacu

SEQ ID NO: 1366904 - RNA, 25 nt, Human
cucagaguucucccuugcacucccu

SEQ ID NO: 1366905 - RNA, 18 nt, Human
cuccaaugacggcugggg

SEQ ID NO: 1366906 - RNA, 20 nt, Human
cuccucuauacuauaggucc

SEQ ID NO: 1366907 - RNA, 21 nt, Human
cugaccauaugccccacuccc

SEQ ID NO: 1366908 - RNA, 24 nt, Human
cugcucagccauaaaaaggaacag

SEQ ID NO: 1366909 - RNA, 18 nt, Human
cuggagugcagcaacagu

SEQ ID NO: 1366910 - RNA, 21 nt, Human
cuguaaucccagcuacucggg

SEQ ID NO: 1366911 - RNA, 24 nt, Human
cugucucaaacacaaaaaacaaaa

SEQ ID NO: 1366912 - RNA, 19 nt, Human
cuuacugcaaaucucccuc

SEQ ID NO: 1366913 - RNA, 24 nt, Human
gaaauucaccaucacugcuuccuu

SEQ ID NO: 1366914 - RNA, 20 nt, Human
gaguuccagaccagccuggc

SEQ ID NO: 1366915 - RNA, 18 nt, Human
gauuacagaugucagcca

SEQ ID NO: 1366916 - RNA, 18 nt, Human
gauuacaggcgugugcca

SEQ ID NO: 1366917 - RNA, 24 nt, Human
gccaacaugaugaaaccccaucuc

SEQ ID NO: 1366918 - RNA, 24 nt, Human
gcccaggcuggagugcaauggugu

SEQ ID NO: 1366919 - RNA, 19 nt, Human
gccuguaaucccagcacuu

SEQ ID NO: 1366920 - RNA, 22 nt, Human
gccuuccucccagggaagauuc

SEQ ID NO: 1366921 - RNA, 20 nt, Human
gcuaaaaugcaagagugaca

SEQ ID NO: 1366922 - RNA, 23 nt, Human
gcuaaucuugaacuccugaccuc

SEQ ID NO: 1366923 - RNA, 21 nt, Human
gcucacugcaggcuugacuuc

SEQ ID NO: 1366924 - RNA, 21 nt, Human
gcucgcuacaaccucugccuc

SEQ ID NO: 1366925 - RNA, 22 nt, Human
gcuggagugcagcaacagucag

SEQ ID NO: 1366926 - RNA, 27 nt, Human
ggacagaaaauccagacaccucaccaa

SEQ ID NO: 1366927 - RNA, 20 nt, Human
ggagcugaaaacgagucuaa

SEQ ID NO: 1366928 - RNA, 24 nt, Human
ggaggcuguaaugagcugggauca

SEQ ID NO: 1366929 - RNA, 19 nt, Human
ggcaguuucuuccaaaacu

SEQ ID NO: 1366930 - RNA, 24 nt, Human
ggcuaaucuugaacuccugaccuc

SEQ ID NO: 1366931 - RNA, 21 nt, Human
ggcugaugccuguaaucccag

SEQ ID NO: 1366932 - RNA, 22 nt, Human
ggcuggagugcaauggugugau

SEQ ID NO: 1366933 - RNA, 18 nt, Human
gggaaggagaaucuucac

SEQ ID NO: 1366934 - RNA, 23 nt, Human
gggauuacagaugucagccacca

SEQ ID NO: 1366935 - RNA, 22 nt, Human
ggggauuacagaugucagccac

SEQ ID NO: 1366936 - RNA, 20 nt, Human
ggguauuggcaucaccaaga

SEQ ID NO: 1366937 - RNA, 24 nt, Human
gggugugguggcugaugccuguaa

SEQ ID NO: 1366938 - RNA, 21 nt, Human
ggugcacaucuguaaucccag

SEQ ID NO: 1366939 - RNA, 24 nt, Human
gguggcugaugccuguaaucccag

SEQ ID NO: 1366940 - RNA, 24 nt, Human
gguggugcacaucuguaaucccag

SEQ ID NO: 1366941 - RNA, 20 nt, Human
guccuaccaauucaauguga

SEQ ID NO: 1366942 - RNA, 18 nt, Human
gucuucucaaaugugggg

SEQ ID NO: 1366943 - RNA, 21 nt, Human
gugaaaaaugucuacaacuua

SEQ ID NO: 1366944 - RNA, 24 nt, Human
uaaaaauaagaaaaccacuagaac

SEQ ID NO: 1366945 - RNA, 23 nt, Human
uaaaagucacugcaagcuuacac

SEQ ID NO: 1366946 - RNA, 22 nt, Human
uaaagcaggauaugagcacccu

SEQ ID NO: 1366947 - RNA, 18 nt, Human
uaaagggacacauacucu

SEQ ID NO: 1366948 - RNA, 19 nt, Human
uaaauucugaaacaaacag

SEQ ID NO: 1366949 - RNA, 19 nt, Human
uaacagggcugugcgagaa

SEQ ID NO: 1366950 - RNA, 24 nt, Human
uaacuccagccugggugacagagc

SEQ ID NO: 1366951 - RNA, 18 nt, Human
uaagaaaaccacuagaac

SEQ ID NO: 1366952 - RNA, 22 nt, Human
uaagaaaaccacuagaacuaaa

SEQ ID NO: 1366953 - RNA, 22 nt, Human
uaauuuuugcauuuucaguaga

SEQ ID NO: 1366954 - RNA, 22 nt, Human
uacagaugucagccaccacacc

SEQ ID NO: 1366955 - RNA, 18 nt, Human
uacaggaggggaaggaga

SEQ ID NO: 1366956 - RNA, 19 nt, Human
uacaggcgugugccacacc

SEQ ID NO: 1366957 - RNA, 25 nt, Human
uacugacagaaaaugaucuuuaggg

SEQ ID NO: 1366958 - RNA, 23 nt, Human
uagccccaaacuagaaacagccc

SEQ ID NO: 1366959 - RNA, 19 nt, Human
uauauacugacagaaaaug

SEQ ID NO: 1366960 - RNA, 19 nt, Human
ucacgucacuauaacucca

SEQ ID NO: 1366961 - RNA, 24 nt, Human
ucacgucacuauaacuccagccug

SEQ ID NO: 1366962 - RNA, 24 nt, Human
ucacuauaacuccagccuggguga

SEQ ID NO: 1366963 - RNA, 18 nt, Human
ucacucaggcuggagugc

SEQ ID NO: 1366964 - RNA, 24 nt, Human
ucacucugucacucaggcuggagu

SEQ ID NO: 1366965 - RNA, 24 nt, Human
ucacucuguugcccaggcuggagu

SEQ ID NO: 1366966 - RNA, 23 nt, Human
ucacugcaggcuugacuucccag

SEQ ID NO: 1366967 - RNA, 24 nt, Human
ucacugcaggcuugacuucccagg

SEQ ID NO: 1366968 - RNA, 23 nt, Human
uccaaaugagaacugaguaaggg

SEQ ID NO: 1366969 - RNA, 18 nt, Human
uccagccugggugacaga

SEQ ID NO: 1366970 - RNA, 22 nt, Human
uccagccugggugacagagcga

SEQ ID NO: 1366971 - RNA, 24 nt, Human
ucccaaguaacugggauuacaggc

SEQ ID NO: 1366972 - RNA, 21 nt, Human
ucccagguucaagcgauucuc

SEQ ID NO: 1366973 - RNA, 24 nt, Human
ucccagguucaagcgauucuccug

SEQ ID NO: 1366974 - RNA, 22 nt, Human
uccucccacuucagccucacaa

SEQ ID NO: 1366975 - RNA, 22 nt, Human
uccucuauacuauagguccuac

SEQ ID NO: 1366976 - RNA, 24 nt, Human
uccuuccuauacuuccuuucuaaa

SEQ ID NO: 1366977 - RNA, 19 nt, Human
ucgcuacaaccucugccuc

SEQ ID NO: 1366978 - RNA, 24 nt, Human
ucgcuacaaccucugccucccagg

SEQ ID NO: 1366979 - RNA, 25 nt, Human
ucgcuacaaccucugccucccaggu

SEQ ID NO: 1366980 - RNA, 23 nt, Human
ucucacucugucacucaggcugg

SEQ ID NO: 1366981 - RNA, 24 nt, Human
ucucacucugucacucaggcugga

SEQ ID NO: 1366982 - RNA, 23 nt, Human
ucucacucuguugcccaggcugg

SEQ ID NO: 1366983 - RNA, 24 nt, Human
ucucacucuguugcccaggcugga

SEQ ID NO: 1366984 - RNA, 26 nt, Human
ucucacucuguugcccaggcuggagu

SEQ ID NO: 1366985 - RNA, 21 nt, Human
ucucuacuaaaaauacaaaaa

SEQ ID NO: 1366986 - RNA, 21 nt, Human
ucuguaaucccagcuacucgg

SEQ ID NO: 1366987 - RNA, 24 nt, Human
ucugucacucaggcuggagugcag

SEQ ID NO: 1366988 - RNA, 18 nt, Human
ucuguugcccaggcugga

SEQ ID NO: 1366989 - RNA, 24 nt, Human
ucuguugcccaggcuggagugcaa

SEQ ID NO: 1366990 - RNA, 21 nt, Human
ucuugaacuccugaccucaag

SEQ ID NO: 1366991 - RNA, 20 nt, Human
ucuugauuuucauauaauca

SEQ ID NO: 1366992 - RNA, 22 nt, Human
ucuugauuuucauauaaucagg

SEQ ID NO: 1366993 - RNA, 23 nt, Human
ugaaacaaacaggauguaacccc

SEQ ID NO: 1366994 - RNA, 23 nt, Human
ugaaacaaacaggauguaacccc

SEQ ID NO: 1366995 - RNA, 30 nt, Human
ugaaacaaacaggauguaaccccaaaaaag

SEQ ID NO: 1366996 - RNA, 19 nt, Human
ugaaaccccaucucuacua

SEQ ID NO: 1366997 - RNA, 21 nt, Human
ugaaacugggagguggaggcu

SEQ ID NO: 1366998 - RNA, 21 nt, Human
ugacagaaaaugaucuuuagg

SEQ ID NO: 1366999 - RNA, 33 nt, Human
ugacauacauaccauucuccucuauacuauaau

SEQ ID NO: 1367000 - RNA, 25 nt, Human
ugacuucccaggcucaagcaguccu

SEQ ID NO: 1367001 - RNA, 20 nt, Human
ugagacagggucucacucug

SEQ ID NO: 1367002 - RNA, 21 nt, Human
ugagacagggucucacucugu

SEQ ID NO: 1367003 - RNA, 22 nt, Human
ugagacagggucucacucuguc

SEQ ID NO: 1367004 - RNA, 23 nt, Human
ugaggcaugagaauugcuugaaa

SEQ ID NO: 1367005 - RNA, 25 nt, Human
ugauacacuuaacauuuauucaccu

SEQ ID NO: 1367006 - RNA, 23 nt, Human
ugcaauggugugaucuuggcucc

SEQ ID NO: 1367007 - RNA, 19 nt, Human
ugcacuccguaagcagcag

SEQ ID NO: 1367008 - RNA, 21 nt, Human
ugcaggaggcaggcuauggga

SEQ ID NO: 1367009 - RNA, 18 nt, Human
ugcccaggcuggagugca

SEQ ID NO: 1367010 - RNA, 21 nt, Human
ugcccaggcuggagugcaaug

SEQ ID NO: 1367011 - RNA, 24 nt, Human
ugcccaggcuggagugcaauggug

SEQ ID NO: 1367012 - RNA, 23 nt, Human
ugccuguaaucccagcacuuugg

SEQ ID NO: 1367013 - RNA, 23 nt, Human
ugccuguaaucccagcacuuugg

SEQ ID NO: 1367014 - RNA, 24 nt, Human
ugccuguaaucccagcacuuuggg

SEQ ID NO: 1367015 - RNA, 21 nt, Human
uggacaugcauauagaaaaaa

SEQ ID NO: 1367016 - RNA, 24 nt, Human
uggaggguuuuaaauucugaaaca

SEQ ID NO: 1367017 - RNA, 19 nt, Human
uggagugcaauggugugau

SEQ ID NO: 1367018 - RNA, 23 nt, Human
uggagugcaauggugugaucuug

SEQ ID NO: 1367019 - RNA, 24 nt, Human
uggagugcaauggugugaucuugg

SEQ ID NO: 1367020 - RNA, 21 nt, Human
uggcaaaaugcugcuuguaca

SEQ ID NO: 1367021 - RNA, 19 nt, Human
uggcagauuaaguauauga

SEQ ID NO: 1367022 - RNA, 24 nt, Human
uggccaggcuaaucuugaacuccu

SEQ ID NO: 1367023 - RNA, 23 nt, Human
uggccucccaaguaacugggauu

SEQ ID NO: 1367024 - RNA, 22 nt, Human
uggcugaugccuguaaucccag

SEQ ID NO: 1367025 - RNA, 24 nt, Human
uggcugaugccuguaaucccagca

SEQ ID NO: 1367026 - RNA, 19 nt, Human
ugggaggccgaggcaggca

SEQ ID NO: 1367027 - RNA, 23 nt, Human
ugggaggccgaggcaggcaaaug

SEQ ID NO: 1367028 - RNA, 24 nt, Human
ugggagguggaggcuguaaugagc

SEQ ID NO: 1367029 - RNA, 18 nt, Human
ugggauuacaggcgugug

SEQ ID NO: 1367030 - RNA, 19 nt, Human
ugggauuacaggcgugugc

SEQ ID NO: 1367031 - RNA, 21 nt, Human
ugggauuacaggcgugugcca

SEQ ID NO: 1367032 - RNA, 22 nt, Human
ugggauuacaggcgugugccac

SEQ ID NO: 1367033 - RNA, 18 nt, Human
ugggugugguggcugaug

SEQ ID NO: 1367034 - RNA, 24 nt, Human
ugguggcugaugccuguaauccca

SEQ ID NO: 1367035 - RNA, 24 nt, Human
ugguggugcacaucuguaauccca

SEQ ID NO: 1367036 - RNA, 22 nt, Human
uguaaucccagcuacucgggaa

SEQ ID NO: 1367037 - RNA, 19 nt, Human
uguacaaucuaagggaugg

SEQ ID NO: 1367038 - RNA, 20 nt, Human
uguugcccaggcuggagugc

SEQ ID NO: 1367039 - RNA, 18 nt, Human
uuacccaaaggagcugaa

SEQ ID NO: 1367040 - RNA, 18 nt, Human
uuaguuguucaccuaaca

SEQ ID NO: 1367041 - RNA, 20 nt, Human
uucaagcgauucuccugccu

SEQ ID NO: 1367042 - RNA, 24 nt, Human
uucaagcgauucuccugccuuggc

SEQ ID NO: 1367043 - RNA, 22 nt, Human
uucaaguaacacagaaguagug

SEQ ID NO: 1367044 - RNA, 25 nt, Human
uucccaggcucaagcaguccuccca

SEQ ID NO: 1367045 - RNA, 21 nt, Human
uuccuuaugcuucccccuuca

SEQ ID NO: 1367046 - RNA, 27 nt, Human
uuccuucaauagcaaagagugaugcaa

SEQ ID NO: 1367047 - RNA, 21 nt, Human
uugaaacugggagguggaggc

SEQ ID NO: 1367048 - RNA, 20 nt, Human
uugauuuugacagagucuca

SEQ ID NO: 1367049 - RNA, 18 nt, Human
uugcccaggcuggagugc

SEQ ID NO: 1367050 - RNA, 24 nt, Human
uugcuugaaacugggagguggagg

SEQ ID NO: 1367051 - RNA, 18 nt, Human
uuggagccuuccucccag

SEQ ID NO: 1367052 - RNA, 21 nt, Human
uuucacuaaguuggccaggcu

SEQ ID NO: 1367053 - RNA, 24 nt, Human
uuuuuuuuucugagacagggucuc

SEQ ID NO: 1367054 - RNA, 20 nt, Human
aaacggaaucacagcaaagu

SEQ ID NO: 1367055 - RNA, 23 nt, Human
aaggggccugagcugggcagggc

SEQ ID NO: 1367056 - RNA, 24 nt, Human
aaggggccugagcugggcagggcu

SEQ ID NO: 1367057 - RNA, 21 nt, Human
acacugggccccggacccagc

SEQ ID NO: 1367058 - RNA, 22 nt, Human
acauacauccacacgcaccucc

SEQ ID NO: 1367059 - RNA, 23 nt, Human
acaugugcacaccacauacagug

SEQ ID NO: 1367060 - RNA, 21 nt, Human
accaaagccgccccagccuug

SEQ ID NO: 1367061 - RNA, 20 nt, Human
acgugcggcggcggcggcgg

SEQ ID NO: 1367062 - RNA, 19 nt, Human
agcacauuccugagcgcug

SEQ ID NO: 1367063 - RNA, 21 nt, Human
agcccucaccgcccccaccua

SEQ ID NO: 1367064 - RNA, 21 nt, Human
agccgccccagccuuggcccc

SEQ ID NO: 1367065 - RNA, 21 nt, Human
agcugcuggugcugccagggc

SEQ ID NO: 1367066 - RNA, 19 nt, Human
aggagagguaaccacagca

SEQ ID NO: 1367067 - RNA, 25 nt, Human
agggggcaggggcgucggcaucagg

SEQ ID NO: 1367068 - RNA, 24 nt, Human
auagaacaaauauuuacagauaca

SEQ ID NO: 1367069 - RNA, 21 nt, Human
caaagccgccccagccuuggc

SEQ ID NO: 1367070 - RNA, 27 nt, Human
caaccucaauggggaaggaaaggggcu

SEQ ID NO: 1367071 - RNA, 21 nt, Human
caacguggagcccucaccgcc

SEQ ID NO: 1367072 - RNA, 21 nt, Human
cacauacauccacacgcaccu

SEQ ID NO: 1367073 - RNA, 23 nt, Human
cacccuggauccuugggcugcuc

SEQ ID NO: 1367074 - RNA, 18 nt, Human
cacggugaagggcagggc

SEQ ID NO: 1367075 - RNA, 22 nt, Human
cagcucuggaguucccugcacc

SEQ ID NO: 1367076 - RNA, 20 nt, Human
caggcugcuguuuggcagcu

SEQ ID NO: 1367077 - RNA, 22 nt, Human
cauacauccacacgcaccuccc

SEQ ID NO: 1367078 - RNA, 29 nt, Human
caugugcacaccacauacauccacacgca

SEQ ID NO: 1367079 - RNA, 18 nt, Human
ccaggccuggcuguggag

SEQ ID NO: 1367080 - RNA, 21 nt, Human
ccccagccuuggccccuaggc

SEQ ID NO: 1367081 - RNA, 18 nt, Human
cccccaccuaccccaacc

SEQ ID NO: 1367082 - RNA, 21 nt, Human
cccccaccuaccccaaccuca

SEQ ID NO: 1367083 - RNA, 22 nt, Human
cccccaccuaccccaaccucaa

SEQ ID NO: 1367084 - RNA, 19 nt, Human
cccggggucccagcagggc

SEQ ID NO: 1367085 - RNA, 24 nt, Human
cccucaccgcccccaccuacccca

SEQ ID NO: 1367086 - RNA, 25 nt, Human
cccugcccggcaggcugcuguuugg

SEQ ID NO: 1367087 - RNA, 26 nt, Human
cccugcccggcaggcugcuguuuggc

SEQ ID NO: 1367088 - RNA, 22 nt, Human
ccgcccccaccuaccccaaccu

SEQ ID NO: 1367089 - RNA, 23 nt, Human
ccgcccccaccuaccccaaccuc

SEQ ID NO: 1367090 - RNA, 24 nt, Human
ccggagcacauuccugagcgcuga

SEQ ID NO: 1367091 - RNA, 23 nt, Human
ccucaauggggaaggaaaggggc

SEQ ID NO: 1367092 - RNA, 22 nt, Human
ccucuggccacaugugcacacc

SEQ ID NO: 1367093 - RNA, 23 nt, Human
cgcccccaccuaccccaaccuca

SEQ ID NO: 1367094 - RNA, 20 nt, Human
cgcgcacacaccucuggcca

SEQ ID NO: 1367095 - RNA, 22 nt, Human
cgcuacacugggccccggaccc

SEQ ID NO: 1367096 - RNA, 19 nt, Human
cggcggcggcgauccgggc

SEQ ID NO: 1367097 - RNA, 24 nt, Human
cuaugugccugcuccaggaguccc

SEQ ID NO: 1367098 - RNA, 25 nt, Human
cuccuuucuuuggcuuagaaguggg

SEQ ID NO: 1367099 - RNA, 24 nt, Human
cucuuccucgcugcuuacuccggg

SEQ ID NO: 1367100 - RNA, 21 nt, Human
cuggaguucccugcacccugg

SEQ ID NO: 1367101 - RNA, 21 nt, Human
cuggccccugugcuggcagga

SEQ ID NO: 1367102 - RNA, 20 nt, Human
cugggcagggcugcccgggc

SEQ ID NO: 1367103 - RNA, 18 nt, Human
cuggggcugcucccugcc

SEQ ID NO: 1367104 - RNA, 23 nt, Human
cuuggccccuaggccgccugggg

SEQ ID NO: 1367105 - RNA, 23 nt, Human
cuugggaccagugcugcucuucc

SEQ ID NO: 1367106 - RNA, 21 nt, Human
gaaggaagggccaggaaaagg

SEQ ID NO: 1367107 - RNA, 22 nt, Human
gaaguggggaaggaagggccag

SEQ ID NO: 1367108 - RNA, 18 nt, Human
gacugugugugugcugag

SEQ ID NO: 1367109 - RNA, 22 nt, Human
gagcugcuggugcugccagggc

SEQ ID NO: 1367110 - RNA, 24 nt, Human
gauuauggcuucagcacucugccg

SEQ ID NO: 1367111 - RNA, 23 nt, Human
gccccagccuuggccccuaggcc

SEQ ID NO: 1367112 - RNA, 21 nt, Human
gccccugugcuggcaggagcu

SEQ ID NO: 1367113 - RNA, 19 nt, Human
gcgcacacaccucuggcca

SEQ ID NO: 1367114 - RNA, 20 nt, Human
gcggcggcggcggcgauccg

SEQ ID NO: 1367115 - RNA, 24 nt, Human
gcggcggcggcggcgauccgggcg

SEQ ID NO: 1367116 - RNA, 22 nt, Human
gcuccaggagucccuggccccu

SEQ ID NO: 1367117 - RNA, 20 nt, Human
gcuugggaccagugcugcuc

SEQ ID NO: 1367118 - RNA, 22 nt, Human
ggagcccucaccgcccccaccu

SEQ ID NO: 1367119 - RNA, 21 nt, Human
ggccaggccuggcuguggagu

SEQ ID NO: 1367120 - RNA, 22 nt, Human
ggccugagcugggcagggcugc

SEQ ID NO: 1367121 - RNA, 22 nt, Human
ggcggcaaggagagguaaccac

SEQ ID NO: 1367122 - RNA, 18 nt, Human
ggcggcggcggcggcgau

SEQ ID NO: 1367123 - RNA, 22 nt, Human
ggcucacuaugugccugcucca

SEQ ID NO: 1367124 - RNA, 24 nt, Human
gggaaggaaaggggccugagcugg

SEQ ID NO: 1367125 - RNA, 24 nt, Human
gggaccagugcugcucuuccucgc

SEQ ID NO: 1367126 - RNA, 18 nt, Human
gggcagggcugcccgggc

SEQ ID NO: 1367127 - RNA, 19 nt, Human
gggcagugggaggugggca

SEQ ID NO: 1367128 - RNA, 18 nt, Human
gggcugggguacaggagc

SEQ ID NO: 1367129 - RNA, 24 nt, Human
ggggacaggcgcuacacugggccc

SEQ ID NO: 1367130 - RNA, 18 nt, Human
gguacaggagcaccugcc

SEQ ID NO: 1367131 - RNA, 19 nt, Human
gugcggcggcggcggcggc

SEQ ID NO: 1367132 - RNA, 22 nt, Human
gugcugcucuuccucgcugcuu

SEQ ID NO: 1367133 - RNA, 22 nt, Human
uacacugggccccggacccagc

SEQ ID NO: 1367134 - RNA, 22 nt, Human
uacaggagcaccugccucuccu

SEQ ID NO: 1367135 - RNA, 20 nt, Human
uauagaacaaauauuuacag

SEQ ID NO: 1367136 - RNA, 22 nt, Human
ucaccgcccccaccuaccccaa

SEQ ID NO: 1367137 - RNA, 19 nt, Human
ucccugcacccuggauccu

SEQ ID NO: 1367138 - RNA, 21 nt, Human
ucccugcacccuggauccuug

SEQ ID NO: 1367139 - RNA, 27 nt, Human
ucccugcccggcaggcugcuguuuggc

SEQ ID NO: 1367140 - RNA, 19 nt, Human
uccuugggcugcucucacu

SEQ ID NO: 1367141 - RNA, 22 nt, Human
ucgcgcacacaccucuggccac

SEQ ID NO: 1367142 - RNA, 22 nt, Human
ugaagggcagggccaggccugg

SEQ ID NO: 1367143 - RNA, 18 nt, Human
ugacagggcggcaaggag

SEQ ID NO: 1367144 - RNA, 23 nt, Human
ugagcuggaccgggaggccucuc

SEQ ID NO: 1367145 - RNA, 23 nt, Human
ugaguaccugggcgucagccaag

SEQ ID NO: 1367146 - RNA, 24 nt, Human
ugccagggcguguuggccaggaau

SEQ ID NO: 1367147 - RNA, 23 nt, Human
ugcggcggcggcggcggcgaucc

SEQ ID NO: 1367148 - RNA, 21 nt, Human
ugcugccagggcguguuggcc

SEQ ID NO: 1367149 - RNA, 21 nt, Human
uggagcccucaccgcccccac

SEQ ID NO: 1367150 - RNA, 23 nt, Human
uggcaagagcugcuggggacguc

SEQ ID NO: 1367151 - RNA, 18 nt, Human
uggcaagagcugcuggug

SEQ ID NO: 1367152 - RNA, 20 nt, Human
uggccccuaggccgccuggg

SEQ ID NO: 1367153 - RNA, 24 nt, Human
uggccccuaggccgccuggggacu

SEQ ID NO: 1367154 - RNA, 24 nt, Human
uggccuggggcugcucccugcccg

SEQ ID NO: 1367155 - RNA, 24 nt, Human
uggcuggggacaggcgcuacacug

SEQ ID NO: 1367156 - RNA, 20 nt, Human
ugggaggugggcagcucugg

SEQ ID NO: 1367157 - RNA, 21 nt, Human
ugggaggugggcagcucugga

SEQ ID NO: 1367158 - RNA, 22 nt, Human
ugggaggugggcagcucuggag

SEQ ID NO: 1367159 - RNA, 24 nt, Human
ugggaggugggcagcucuggaguu

SEQ ID NO: 1367160 - RNA, 20 nt, Human
ugggcagggcugcccgggcu

SEQ ID NO: 1367161 - RNA, 18 nt, Human
uggggaaggaaaggggcc

SEQ ID NO: 1367162 - RNA, 20 nt, Human
uggggauuauggcuucagca

SEQ ID NO: 1367163 - RNA, 19 nt, Human
ugggguacaggagcaccug

SEQ ID NO: 1367164 - RNA, 21 nt, Human
ugggguacaggagcaccugcc

SEQ ID NO: 1367165 - RNA, 23 nt, Human
ugguuggggauuauggcuucagc

SEQ ID NO: 1367166 - RNA, 21 nt, Human
ugucuggcgggaggcucauuc

SEQ ID NO: 1367167 - RNA, 24 nt, Human
ugucuggcgggaggcucauucucu

SEQ ID NO: 1367168 - RNA, 25 nt, Human
ugugcacaccacauacauccacacg

SEQ ID NO: 1367169 - RNA, 18 nt, Human
ugugcugagggggcagug

SEQ ID NO: 1367170 - RNA, 24 nt, Human
uguggagugggccagcugaguacc

SEQ ID NO: 1367171 - RNA, 22 nt, Human
uucccugcacccuggauccuug

SEQ ID NO: 1367172 - RNA, 18 nt, Human
aaaacccaaaaggggcua

SEQ ID NO: 1367173 - RNA, 18 nt, Human
aaaauaccauagaccggg

SEQ ID NO: 1367174 - RNA, 26 nt, Human
aaaauccuuccaaacuccaaaguaau

SEQ ID NO: 1367175 - RNA, 21 nt, Human
aaauggaauuggaggguaccc

SEQ ID NO: 1367176 - RNA, 21 nt, Human
aacacagugggacccccaccu

SEQ ID NO: 1367177 - RNA, 19 nt, Human
aauaccauagaccgggugg

SEQ ID NO: 1367178 - RNA, 23 nt, Human
acacacacacucaguccacaaua

SEQ ID NO: 1367179 - RNA, 20 nt, Human
accauagaccggguggcuca

SEQ ID NO: 1367180 - RNA, 24 nt, Human
agaagucuucuguguugagaccga

SEQ ID NO: 1367181 - RNA, 22 nt, Human
agaguagacagaaagaagcaag

SEQ ID NO: 1367182 - RNA, 21 nt, Human
agauaauguugaaauggaauu

SEQ ID NO: 1367183 - RNA, 22 nt, Human
agcaagaacucugugucucuaa

SEQ ID NO: 1367184 - RNA, 24 nt, Human
agcacuuugggaggccaagguggg

SEQ ID NO: 1367185 - RNA, 24 nt, Human
agccauagacaauauguaaacuaa

SEQ ID NO: 1367186 - RNA, 21 nt, Human
auaccucccaaaggccccacc

SEQ ID NO: 1367187 - RNA, 22 nt, Human
aucccauuugugaggguuccac

SEQ ID NO: 1367188 - RNA, 25 nt, Human
augaaguucucauaaaaacccaaaa

SEQ ID NO: 1367189 - RNA, 24 nt, Human
augaugugauucucucaccaaaug

SEQ ID NO: 1367190 - RNA, 25 nt, Human
auggcauucuucuugcugugucccc

SEQ ID NO: 1367191 - RNA, 22 nt, Human
caaaaauaccauagaccgggug

SEQ ID NO: 1367192 - RNA, 21 nt, Human
cacgaacuaaauaccucccaa

SEQ ID NO: 1367193 - RNA, 18 nt, Human
cacucaguccacaauacc

SEQ ID NO: 1367194 - RNA, 21 nt, Human
cagaaguucuggaggcccaga

SEQ ID NO: 1367195 - RNA, 20 nt, Human
cagauggcauucuucuugcu

SEQ ID NO: 1367196 - RNA, 24 nt, Human
cagcacuuugggaggccaaggugg

SEQ ID NO: 1367197 - RNA, 19 nt, Human
cagcccuacccuccaaucu

SEQ ID NO: 1367198 - RNA, 20 nt, Human
caggccagauuugacccaca

SEQ ID NO: 1367199 - RNA, 23 nt, Human
cagugggacccccaccucuacaa

SEQ ID NO: 1367200 - RNA, 22 nt, Human
cauaaaaacccaaaaggggcua

SEQ ID NO: 1367201 - RNA, 18 nt, Human
caugcgcaggaugugcag

SEQ ID NO: 1367202 - RNA, 23 nt, Human
cauuuaaacuauauuuaucuuug

SEQ ID NO: 1367203 - RNA, 22 nt, Human
ccacaaugucucuguagcagcu

SEQ ID NO: 1367204 - RNA, 18 nt, Human
ccagggaggguagagggg

SEQ ID NO: 1367205 - RNA, 19 nt, Human
ccagggaggguagaggggc

SEQ ID NO: 1367206 - RNA, 20 nt, Human
ccagggaggguagaggggcu

SEQ ID NO: 1367207 - RNA, 21 nt, Human
ccaggguuccaucauggucaa

SEQ ID NO: 1367208 - RNA, 21 nt, Human
ccagugcucuuuacuccuucc

SEQ ID NO: 1367209 - RNA, 27 nt, Human
cccaccucuacaaaauuuuuuuuaaaa

SEQ ID NO: 1367210 - RNA, 19 nt, Human
cccuccaaucuccagggag

SEQ ID NO: 1367211 - RNA, 20 nt, Human
cccuccaaucuccagggagg

SEQ ID NO: 1367212 - RNA, 21 nt, Human
ccucacacauuugcucacaga

SEQ ID NO: 1367213 - RNA, 19 nt, Human
ccucccaaaggccccaccu

SEQ ID NO: 1367214 - RNA, 26 nt, Human
ccucuuguuagcuucaggaugggggc

SEQ ID NO: 1367215 - RNA, 20 nt, Human
ccugcagaaaacauucugag

SEQ ID NO: 1367216 - RNA, 24 nt, Human
ccugugagaucugaguuaucucca

SEQ ID NO: 1367217 - RNA, 21 nt, Human
cucuuguuagcuucaggaugg

SEQ ID NO: 1367218 - RNA, 18 nt, Human
cuggucuccauaaacacc

SEQ ID NO: 1367219 - RNA, 22 nt, Human
cuguagcagcuacucaauucug

SEQ ID NO: 1367220 - RNA, 20 nt, Human
cugugucucuaaucccauuu

SEQ ID NO: 1367221 - RNA, 22 nt, Human
cuuccuggcauauaauuccuaa

SEQ ID NO: 1367222 - RNA, 24 nt, Human
cuuucagcccuacccuccaaucuc

SEQ ID NO: 1367223 - RNA, 26 nt, Human
cuuucuauccuuuuagugauuacucu

SEQ ID NO: 1367224 - RNA, 21 nt, Human
gaaacccucacacauuugcuc

SEQ ID NO: 1367225 - RNA, 20 nt, Human
gaacccaaagagggguggug

SEQ ID NO: 1367226 - RNA, 21 nt, Human
gacuaguuuggccaacacagu

SEQ ID NO: 1367227 - RNA, 19 nt, Human
gagggacaguccuggagac

SEQ ID NO: 1367228 - RNA, 19 nt, Human
gauuacucuagaguuaauc

SEQ ID NO: 1367229 - RNA, 21 nt, Human
gcacguggggagaaauccaca

SEQ ID NO: 1367230 - RNA, 24 nt, Human
gccauggugguuugcugcaccuau

SEQ ID NO: 1367231 - RNA, 21 nt, Human
ggagggacaguccuggagacu

SEQ ID NO: 1367232 - RNA, 26 nt, Human
ggguggugggaaucccaacuugaagc

SEQ ID NO: 1367233 - RNA, 22 nt, Human
guggcucccagcacuuugggag

SEQ ID NO: 1367234 - RNA, 24 nt, Human
uaaacaccaaggcaggauuagaag

SEQ ID NO: 1367235 - RNA, 18 nt, Human
uaaauguaaagaaguuaa

SEQ ID NO: 1367236 - RNA, 18 nt, Human
uaaccuguguuuuucccc

SEQ ID NO: 1367237 - RNA, 22 nt, Human
uaauauaaauuacaaagaccug

SEQ ID NO: 1367238 - RNA, 22 nt, Human
uacccaccugauauccacagca

SEQ ID NO: 1367239 - RNA, 21 nt, Human
uagguggcaggccagauuuga

SEQ ID NO: 1367240 - RNA, 24 nt, Human
uaguuuggccaacacagugggacc

SEQ ID NO: 1367241 - RNA, 20 nt, Human
uauuuacuaaaauagguggc

SEQ ID NO: 1367242 - RNA, 22 nt, Human
uauuuuauuuccuuucuccuuc

SEQ ID NO: 1367243 - RNA, 22 nt, Human
ucagaacucucuuccagcuuuu

SEQ ID NO: 1367244 - RNA, 23 nt, Human
ucccccaucagaacucucuucca

SEQ ID NO: 1367245 - RNA, 22 nt, Human
ucgauccugcuuccuggcauau

SEQ ID NO: 1367246 - RNA, 24 nt, Human
ucuaguguagaucugcuggugaug

SEQ ID NO: 1367247 - RNA, 25 nt, Human
ucucauaguucuagaggcuggguuc

SEQ ID NO: 1367248 - RNA, 20 nt, Human
ucucauaguucuagaggcuu

SEQ ID NO: 1367249 - RNA, 20 nt, Human
ucuccauaaacaccaaggcu

SEQ ID NO: 1367250 - RNA, 19 nt, Human
ucucuguagcagcuacuca

SEQ ID NO: 1367251 - RNA, 23 nt, Human
ucucuguagcagcuacucaauuc

SEQ ID NO: 1367252 - RNA, 21 nt, Human
ucugcuggugaugaauucuaa

SEQ ID NO: 1367253 - RNA, 23 nt, Human
ucuggaggcccagacuugcaacu

SEQ ID NO: 1367254 - RNA, 22 nt, Human
ucuuccagcuuucuguguugcu

SEQ ID NO: 1367255 - RNA, 23 nt, Human
ugaagcuagugggucagaaguuc

SEQ ID NO: 1367256 - RNA, 23 nt, Human
ugagaagaaacccucacacauuu

SEQ ID NO: 1367257 - RNA, 21 nt, Human
ugagaaggacuacccuagaua

SEQ ID NO: 1367258 - RNA, 24 nt, Human
ugagaccgacccagcuggugucca

SEQ ID NO: 1367259 - RNA, 21 nt, Human
ugauugagaaggacuacccuu

SEQ ID NO: 1367260 - RNA, 18 nt, Human
ugccuuagcacagauguc

SEQ ID NO: 1367261 - RNA, 19 nt, Human
ugcuaaugaguugacugau

SEQ ID NO: 1367262 - RNA, 21 nt, Human
ugcuuccagcugggauaauuu

SEQ ID NO: 1367263 - RNA, 23 nt, Human
uggcacguggggagaaauccaca

SEQ ID NO: 1367264 - RNA, 24 nt, Human
uggcagagaguagacagaaagaag

SEQ ID NO: 1367265 - RNA, 20 nt, Human
uggccaacacagugggaccc

SEQ ID NO: 1367266 - RNA, 22 nt, Human
ugggaggccaaggugggacuag

SEQ ID NO: 1367267 - RNA, 24 nt, Human
uggggaacacacacacucagucca

SEQ ID NO: 1367268 - RNA, 21 nt, Human
uggugaagacccucuuccugg

SEQ ID NO: 1367269 - RNA, 20 nt, Human
ugguguccacugcagaacug

SEQ ID NO: 1367270 - RNA, 23 nt, Human
ugugaugaucacuguuguagagu

SEQ ID NO: 1367271 - RNA, 25 nt, Human
uguuuuacacaguucacauuauuuu

SEQ ID NO: 1367272 - RNA, 20 nt, Human
uguuuuggcaauuuuuccuu

SEQ ID NO: 1367273 - RNA, 24 nt, Human
uuacacagguaaacgugugccaug

SEQ ID NO: 1367274 - RNA, 22 nt, Human
uuagcuucaggaugggggcugg

SEQ ID NO: 1367275 - RNA, 24 nt, Human
uuccuaaaauccuuccaaacucca

SEQ ID NO: 1367276 - RNA, 23 nt, Human
uucuagaggcuggguucuauaga

SEQ ID NO: 1367277 - RNA, 19 nt, Human
uugcugcaccuaucaauau

SEQ ID NO: 1367278 - RNA, 18 nt, Human
uuguuuuuugguauugau

SEQ ID NO: 1367279 - RNA, 19 nt, Human
aaaacacaggccccugagc

SEQ ID NO: 1367280 - RNA, 22 nt, Human
aaacagccaaugcaauuaaagc

SEQ ID NO: 1367281 - RNA, 24 nt, Human
aaagccagcaagagggagggauaa

SEQ ID NO: 1367282 - RNA, 19 nt, Human
aaagugcucucccaccucc

SEQ ID NO: 1367283 - RNA, 19 nt, Human
aacacugccccucuccucu

SEQ ID NO: 1367284 - RNA, 21 nt, Human
aagcgcuaacccagaaaacgg

SEQ ID NO: 1367285 - RNA, 19 nt, Human
aaugcaauuaaagccuaag

SEQ ID NO: 1367286 - RNA, 19 nt, Human
accacagucaccuccccug

SEQ ID NO: 1367287 - RNA, 22 nt, Human
accacagucaccuccccugacc

SEQ ID NO: 1367288 - RNA, 19 nt, Human
accugcagaggcuggaaca

SEQ ID NO: 1367289 - RNA, 20 nt, Human
acucagccaaugaaaagggc

SEQ ID NO: 1367290 - RNA, 19 nt, Human
acucuguuuuuccucagcc

SEQ ID NO: 1367291 - RNA, 22 nt, Human
acucuguuuuuccucagccccg

SEQ ID NO: 1367292 - RNA, 22 nt, Human
agagggagaggguuugagggcc

SEQ ID NO: 1367293 - RNA, 21 nt, Human
agaguggaauugggggccagu

SEQ ID NO: 1367294 - RNA, 23 nt, Human
agcgaggaggugaggccugggca

SEQ ID NO: 1367295 - RNA, 18 nt, Human
agcuuaggugccgcucgg

SEQ ID NO: 1367296 - RNA, 18 nt, Human
aggagggagaaggggcag

SEQ ID NO: 1367297 - RNA, 20 nt, Human
aggagggagaaggggcagug

SEQ ID NO: 1367298 - RNA, 18 nt, Human
aggcagagagggagaggg

SEQ ID NO: 1367299 - RNA, 18 nt, Human
aggcagagagggagaggg

SEQ ID NO: 1367300 - RNA, 18 nt, Human
aggggguggggugugcuu

SEQ ID NO: 1367301 - RNA, 24 nt, Human
agugcacagagcucucaggaggga

SEQ ID NO: 1367302 - RNA, 21 nt, Human
agugcaguccuugaagagugu

SEQ ID NO: 1367303 - RNA, 19 nt, Human
augaaaagggcuggccaca

SEQ ID NO: 1367304 - RNA, 20 nt, Human
caacagcagggaacucagcc

SEQ ID NO: 1367305 - RNA, 21 nt, Human
caccacgcacaacagcaggga

SEQ ID NO: 1367306 - RNA, 23 nt, Human
caccauaagaaacagccaaugca

SEQ ID NO: 1367307 - RNA, 22 nt, Human
cacccaccugcucaggcugagc

SEQ ID NO: 1367308 - RNA, 22 nt, Human
cacccucaagccuagggguugg

SEQ ID NO: 1367309 - RNA, 24 nt, Human
caccugcagaggcuggaacagcag

SEQ ID NO: 1367310 - RNA, 20 nt, Human
cacgcacaacagcagggaac

SEQ ID NO: 1367311 - RNA, 23 nt, Human
cagccaccaucaccuugucccuu

SEQ ID NO: 1367312 - RNA, 22 nt, Human
caggaggccaagcugggguugu

SEQ ID NO: 1367313 - RNA, 22 nt, Human
caggccccugagccuugcaccc

SEQ ID NO: 1367314 - RNA, 19 nt, Human
ccagccacauacaagguca

SEQ ID NO: 1367315 - RNA, 24 nt, Human
ccccaaacccagugcacagagcuc

SEQ ID NO: 1367316 - RNA, 23 nt, Human
ccccaugaucccgugaacaucca

SEQ ID NO: 1367317 - RNA, 26 nt, Human
ccccugagccuugcacccaccugcuc

SEQ ID NO: 1367318 - RNA, 21 nt, Human
cccucucccuucuuuccuccc

SEQ ID NO: 1367319 - RNA, 22 nt, Human
cccuucuuuccucccugguucc

SEQ ID NO: 1367320 - RNA, 22 nt, Human
ccuaucucugcagggccuggga

SEQ ID NO: 1367321 - RNA, 18 nt, Human
ccucugcgguagcaucag

SEQ ID NO: 1367322 - RNA, 21 nt, Human
ccuucuuuccucccugguucc

SEQ ID NO: 1367323 - RNA, 18 nt, Human
cgaggccacuaccuggcu

SEQ ID NO: 1367324 - RNA, 19 nt, Human
cgaggccacuaccuggcug

SEQ ID NO: 1367325 - RNA, 23 nt, Human
cuccacccucaagccuagggguu

SEQ ID NO: 1367326 - RNA, 22 nt, Human
cucccucucccuucuuuccucc

SEQ ID NO: 1367327 - RNA, 19 nt, Human
cucucccuucuuuccuccc

SEQ ID NO: 1367328 - RNA, 21 nt, Human
cucucccuucuuuccucccug

SEQ ID NO: 1367329 - RNA, 22 nt, Human
cucugcucaccuugcagcuuca

SEQ ID NO: 1367330 - RNA, 20 nt, Human
cucugggcaggucugccuuc

SEQ ID NO: 1367331 - RNA, 24 nt, Human
cugcuuccgagcccugggcauccu

SEQ ID NO: 1367332 - RNA, 22 nt, Human
cuggaacagcaggaguguggag

SEQ ID NO: 1367333 - RNA, 23 nt, Human
cuggaacagcaggaguguggagg

SEQ ID NO: 1367334 - RNA, 18 nt, Human
cuguagcauccuccuuac

SEQ ID NO: 1367335 - RNA, 22 nt, Human
cuugaaacauccaaucaagcgc

SEQ ID NO: 1367336 - RNA, 18 nt, Human
cuuuguggguguuuugua

SEQ ID NO: 1367337 - RNA, 24 nt, Human
cuuuuuuucuuucugcaguuccuu

SEQ ID NO: 1367338 - RNA, 22 nt, Human
gagccuagaagggacccugagg

SEQ ID NO: 1367339 - RNA, 19 nt, Human
gagcgugaccaccuccaug

SEQ ID NO: 1367340 - RNA, 21 nt, Human
gagcgugaccaccuccaugcc

SEQ ID NO: 1367341 - RNA, 21 nt, Human
gaggccaagcugggguugugg

SEQ ID NO: 1367342 - RNA, 18 nt, Human
gaggugaggccugggcag

SEQ ID NO: 1367343 - RNA, 21 nt, Human
gaggugaggccugggcaggag

SEQ ID NO: 1367344 - RNA, 19 nt, Human
gcaaauccagaugacuugc

SEQ ID NO: 1367345 - RNA, 21 nt, Human
gccuaagcccuucuuuguucc

SEQ ID NO: 1367346 - RNA, 19 nt, Human
gccuaaggugggccuggga

SEQ ID NO: 1367347 - RNA, 22 nt, Human
gccucauccccaaacccagugc

SEQ ID NO: 1367348 - RNA, 20 nt, Human
gccuggcucuccacccucaa

SEQ ID NO: 1367349 - RNA, 23 nt, Human
gccuggcucuccacccucaagcc

SEQ ID NO: 1367350 - RNA, 19 nt, Human
gcgcuaacccagaaaacgg

SEQ ID NO: 1367351 - RNA, 21 nt, Human
gcuggcgccucauccccaaac

SEQ ID NO: 1367352 - RNA, 21 nt, Human
ggcagugcaguccuugaagag

SEQ ID NO: 1367353 - RNA, 23 nt, Human
ggugggaacacugccccucuccu

SEQ ID NO: 1367354 - RNA, 24 nt, Human
guggguguuuuguauuuuaaagag

SEQ ID NO: 1367355 - RNA, 22 nt, Human
uaaaagcccuccagcaaagcca

SEQ ID NO: 1367356 - RNA, 19 nt, Human
uaaagagccacgcuggugc

SEQ ID NO: 1367357 - RNA, 21 nt, Human
uaacaccauaagaaacagcca

SEQ ID NO: 1367358 - RNA, 24 nt, Human
uaacagcacucaggccggaacuca

SEQ ID NO: 1367359 - RNA, 18 nt, Human
uaagaaacagccaaugca

SEQ ID NO: 1367360 - RNA, 22 nt, Human
uacagccaccaucaccuugucc

SEQ ID NO: 1367361 - RNA, 21 nt, Human
uaccuggcugcucauugagcc

SEQ ID NO: 1367362 - RNA, 22 nt, Human
uagcuaaagaacauguuucagg

SEQ ID NO: 1367363 - RNA, 18 nt, Human
ucaggaggggagagugga

SEQ ID NO: 1367364 - RNA, 21 nt, Human
uccccaaacccagugcacaga

SEQ ID NO: 1367365 - RNA, 21 nt, Human
uccccugaccaggcuggcgcc

SEQ ID NO: 1367366 - RNA, 21 nt, Human
ucccuaagccugaggccucca

SEQ ID NO: 1367367 - RNA, 19 nt, Human
ucccuucuuuccucccugg

SEQ ID NO: 1367368 - RNA, 23 nt, Human
ucucaugggugcccaggccuucu

SEQ ID NO: 1367369 - RNA, 20 nt, Human
ucucccaccuccaaucucuc

SEQ ID NO: 1367370 - RNA, 25 nt, Human
ucucccuucuuuccucccugguucc

SEQ ID NO: 1367371 - RNA, 19 nt, Human
ucugcccucugcgguagca

SEQ ID NO: 1367372 - RNA, 28 nt, Human
ucuggcaaaacugaagugaauucucaga

SEQ ID NO: 1367373 - RNA, 21 nt, Human
ucuguagcauccuccuuacug

SEQ ID NO: 1367374 - RNA, 22 nt, Human
ugaaaagggcuggccacagguu

SEQ ID NO: 1367375 - RNA, 26 nt, Human
ugaaaagggcuggccacagguucuca

SEQ ID NO: 1367376 - RNA, 18 nt, Human
ugacagaaauggggaaac

SEQ ID NO: 1367377 - RNA, 23 nt, Human
ugaccaggcuggcgccucauccc

SEQ ID NO: 1367378 - RNA, 18 nt, Human
ugaggcccggcuucuuuc

SEQ ID NO: 1367379 - RNA, 21 nt, Human
ugaggguggugcaugacuguc

SEQ ID NO: 1367380 - RNA, 20 nt, Human
ugcagaaagaccagggcccu

SEQ ID NO: 1367381 - RNA, 20 nt, Human
ugccccaugaucccgugaac

SEQ ID NO: 1367382 - RNA, 21 nt, Human
ugccucugcucaccuugcagc

SEQ ID NO: 1367383 - RNA, 24 nt, Human
ugccucugcucaccuugcagcuuu

SEQ ID NO: 1367384 - RNA, 24 nt, Human
ugcucaccuugcagcuucaccugc

SEQ ID NO: 1367385 - RNA, 19 nt, Human
ugcuggagcaggugggugg

SEQ ID NO: 1367386 - RNA, 19 nt, Human
uggaaccucccucucccuu

SEQ ID NO: 1367387 - RNA, 21 nt, Human
uggcaccacgcacaacagcag

SEQ ID NO: 1367388 - RNA, 21 nt, Human
ugggagccuagaagggacccu

SEQ ID NO: 1367389 - RNA, 24 nt, Human
ugggcacagccagguuuggugcug

SEQ ID NO: 1367390 - RNA, 18 nt, Human
ugggcaggagcggacagc

SEQ ID NO: 1367391 - RNA, 19 nt, Human
uggggcugggccuccaagc

SEQ ID NO: 1367392 - RNA, 25 nt, Human
uggggcugggccuccaagcccuugg

SEQ ID NO: 1367393 - RNA, 21 nt, Human
uguggaggugacggcaucauu

SEQ ID NO: 1367394 - RNA, 18 nt, Human
uguggggaaugggcacag

SEQ ID NO: 1367395 - RNA, 21 nt, Human
uguggggaaugggcacagcca

SEQ ID NO: 1367396 - RNA, 20 nt, Human
uucacuaacaccauaagaaa

SEQ ID NO: 1367397 - RNA, 24 nt, Human
uuccugugcuggagcaggugggug

SEQ ID NO: 1367398 - RNA, 19 nt, Human
uucggaaggccuuugaccc

SEQ ID NO: 1367399 - RNA, 21 nt, Human
uucuguagcauccuccuuacu

SEQ ID NO: 1367400 - RNA, 19 nt, Human
uuggggaagaaucccucug

SEQ ID NO: 1367401 - RNA, 20 nt, Human
uuggggaagaaucccucugg

SEQ ID NO: 1367402 - RNA, 18 nt, Human
uuguuuuguuuuuauaua

SEQ ID NO: 1367403 - RNA, 21 nt, Human
uuucaggguuuuuggcuuugu

SEQ ID NO: 1367404 - RNA, 21 nt, Human
uuugcaaaauucacuaacacc

SEQ ID NO: 1367405 - RNA, 19 nt, Human
aaagacuacucccagcuaa

SEQ ID NO: 1367406 - RNA, 19 nt, Human
aaggaggagggccccaagg

SEQ ID NO: 1367407 - RNA, 22 nt, Human
aaucuggucacugcccaugguc

SEQ ID NO: 1367408 - RNA, 19 nt, Human
acacagucaacucucccac

SEQ ID NO: 1367409 - RNA, 20 nt, Human
accuuggccuaucuucaguc

SEQ ID NO: 1367410 - RNA, 21 nt, Human
acucugagagacaguaucaaa

SEQ ID NO: 1367411 - RNA, 22 nt, Human
agaaggccuagaacguguagag

SEQ ID NO: 1367412 - RNA, 19 nt, Human
agagguggugaagggggcg

SEQ ID NO: 1367413 - RNA, 22 nt, Human
aggccuagaacguguagaggug

SEQ ID NO: 1367414 - RNA, 26 nt, Human
aggggcgguggugggggcggcggcgg

SEQ ID NO: 1367415 - RNA, 21 nt, Human
agguggcgauggcggcagggg

SEQ ID NO: 1367416 - RNA, 19 nt, Human
agguggugaagggggcggu

SEQ ID NO: 1367417 - RNA, 22 nt, Human
agucugaaguugcacucuuaug

SEQ ID NO: 1367418 - RNA, 25 nt, Human
auggcggcaggggcggugguggggg

SEQ ID NO: 1367419 - RNA, 21 nt, Human
auggcggcaggggcggugguu

SEQ ID NO: 1367420 - RNA, 22 nt, Human
cacaaacccuaaaguccaugug

SEQ ID NO: 1367421 - RNA, 18 nt, Human
cacaacuuuaaagcuauc

SEQ ID NO: 1367422 - RNA, 19 nt, Human
cacugucaaagacuacucc

SEQ ID NO: 1367423 - RNA, 19 nt, Human
cagcccuggacagagagcc

SEQ ID NO: 1367424 - RNA, 20 nt, Human
caggggcgguggugggggcg

SEQ ID NO: 1367425 - RNA, 24 nt, Human
caugugcagucuccauguucaagu

SEQ ID NO: 1367426 - RNA, 20 nt, Human
ccagcuaaucuuuacuguca

SEQ ID NO: 1367427 - RNA, 28 nt, Human
cccacugccgaacuugcuccccuuucaa

SEQ ID NO: 1367428 - RNA, 24 nt, Human
cccccucugauacagcagagguug

SEQ ID NO: 1367429 - RNA, 23 nt, Human
cgaccuuggccuaucuucagucu

SEQ ID NO: 1367430 - RNA, 25 nt, Human
cggcaggggcgguggugggggcggc

SEQ ID NO: 1367431 - RNA, 25 nt, Human
cuaaaaaaacacaaaugugagaaua

SEQ ID NO: 1367432 - RNA, 18 nt, Human
cucauacauucuaggauu

SEQ ID NO: 1367433 - RNA, 23 nt, Human
cuggcuauguucucacuguagcu

SEQ ID NO: 1367434 - RNA, 19 nt, Human
gaauccauuucuucaccaa

SEQ ID NO: 1367435 - RNA, 22 nt, Human
gacucacuggccccuccaggac

SEQ ID NO: 1367436 - RNA, 21 nt, Human
gagagccugcaaacgaguuuc

SEQ ID NO: 1367437 - RNA, 18 nt, Human
gagguggcgauggcggca

SEQ ID NO: 1367438 - RNA, 24 nt, Human
gcaaacgaguuuccuuaugccuaa

SEQ ID NO: 1367439 - RNA, 21 nt, Human
gcagucuccauguucaaguau

SEQ ID NO: 1367440 - RNA, 23 nt, Human
gcggcggcgaaggcccccucuga

SEQ ID NO: 1367441 - RNA, 24 nt, Human
gcggcggcggcgaaggcccccucu

SEQ ID NO: 1367442 - RNA, 29 nt, Human
ggggcgguggugggggcggcggcggcgac

SEQ ID NO: 1367443 - RNA, 20 nt, Human
gggggcggcggcggcgaagg

SEQ ID NO: 1367444 - RNA, 22 nt, Human
gucaacucucccacugccgaac

SEQ ID NO: 1367445 - RNA, 21 nt, Human
gugaaggaggagggccccaag

SEQ ID NO: 1367446 - RNA, 26 nt, Human
guggcgauggcggcaggggcgguggu

SEQ ID NO: 1367447 - RNA, 22 nt, Human
uaaaagucuguuucaggacaac

SEQ ID NO: 1367448 - RNA, 21 nt, Human
uaaaauaaacauaccuaagac

SEQ ID NO: 1367449 - RNA, 24 nt, Human
uaaaauaaacauaccuaagacuca

SEQ ID NO: 1367450 - RNA, 23 nt, Human
uaagacucacuggccccuccagg

SEQ ID NO: 1367451 - RNA, 23 nt, Human
uacuuggugucaugcccuuggac

SEQ ID NO: 1367452 - RNA, 20 nt, Human
uagcuuccguuuaucccaca

SEQ ID NO: 1367453 - RNA, 22 nt, Human
uccaggacaggaagcagcccug

SEQ ID NO: 1367454 - RNA, 24 nt, Human
ucuaaaaaaacacaaaugugagag

SEQ ID NO: 1367455 - RNA, 19 nt, Human
ucuacuuggugucaugccc

SEQ ID NO: 1367456 - RNA, 22 nt, Human
ucuuauguaaccgaauccauuu

SEQ ID NO: 1367457 - RNA, 18 nt, Human
ugaaauugucuuugggac

SEQ ID NO: 1367458 - RNA, 18 nt, Human
ugaaggaggagggcccca

SEQ ID NO: 1367459 - RNA, 21 nt, Human
ugaagggggcggugaaggagg

SEQ ID NO: 1367460 - RNA, 26 nt, Human
ugagaucagugacgaccuuggccucc

SEQ ID NO: 1367461 - RNA, 21 nt, Human
ugcccuuggacaggcuggcca

SEQ ID NO: 1367462 - RNA, 19 nt, Human
ugccuaaugucugaacuuc

SEQ ID NO: 1367463 - RNA, 18 nt, Human
ugggacuggcuauguucu

SEQ ID NO: 1367464 - RNA, 20 nt, Human
ugggggcggcggcggcgaag

SEQ ID NO: 1367465 - RNA, 21 nt, Human
ugggggcggcggcggcgaagg

SEQ ID NO: 1367466 - RNA, 18 nt, Human
uggugggggcggcggcgg

SEQ ID NO: 1367467 - RNA, 18 nt, Human
uguucucacuguagcuuc

SEQ ID NO: 1367468 - RNA, 24 nt, Human
uucucauacauucuaggauuucau

SEQ ID NO: 1367469 - RNA, 19 nt, Human
aaaaaaaaauucaggcuga

SEQ ID NO: 1367470 - RNA, 18 nt, Human
aaaaauaaaccuccccac

SEQ ID NO: 1367471 - RNA, 18 nt, Human
aaauaaaccuccccaccu

SEQ ID NO: 1367472 - RNA, 22 nt, Human
aaccuccgccucccagguuccc

SEQ ID NO: 1367473 - RNA, 24 nt, Human
aagaaugacuuaacacucuuaaau

SEQ ID NO: 1367474 - RNA, 22 nt, Human
aauaaugaugacagaaaaagaa

SEQ ID NO: 1367475 - RNA, 19 nt, Human
aaucagauuaccuaaaaug

SEQ ID NO: 1367476 - RNA, 20 nt, Human
acacaaauagcuuacagaca

SEQ ID NO: 1367477 - RNA, 19 nt, Human
acacuacaaaacaaucuac

SEQ ID NO: 1367478 - RNA, 24 nt, Human
accauguuggccgggcuggucuug

SEQ ID NO: 1367479 - RNA, 25 nt, Human
acccacccucuccccuugaaucccc

SEQ ID NO: 1367480 - RNA, 27 nt, Human
acccacccucuccccuugaauccccaa

SEQ ID NO: 1367481 - RNA, 23 nt, Human
accucacccagccuucucucuca

SEQ ID NO: 1367482 - RNA, 23 nt, Human
agaaaaaguuuuaagguaaauaa

SEQ ID NO: 1367483 - RNA, 24 nt, Human
agaagguuucaccauguuggccgg

SEQ ID NO: 1367484 - RNA, 24 nt, Human
agcgauucuccugccucagccucc

SEQ ID NO: 1367485 - RNA, 19 nt, Human
aggagccaccucacccagc

SEQ ID NO: 1367486 - RNA, 18 nt, Human
aggcaucccacacugaug

SEQ ID NO: 1367487 - RNA, 20 nt, Human
aggcaugcaccaccaagccc

SEQ ID NO: 1367488 - RNA, 25 nt, Human
aggcuggagugcaguggcacaaucu

SEQ ID NO: 1367489 - RNA, 19 nt, Human
agggugcugggaauacagg

SEQ ID NO: 1367490 - RNA, 24 nt, Human
aggugaucuacccaccucagccuc

SEQ ID NO: 1367491 - RNA, 22 nt, Human
agguuucaccauguuggccggg

SEQ ID NO: 1367492 - RNA, 22 nt, Human
agucugggucaggugccccucu

SEQ ID NO: 1367493 - RNA, 20 nt, Human
agugcaguggcacaaucucg

SEQ ID NO: 1367494 - RNA, 24 nt, Human
agugcaguggcacaaucucggcuc

SEQ ID NO: 1367495 - RNA, 21 nt, Human
aguggcuaggauuacaggcau

SEQ ID NO: 1367496 - RNA, 23 nt, Human
caaaacacacaaauagcuuacag

SEQ ID NO: 1367497 - RNA, 22 nt, Human
caagcgauucuccugccucagc

SEQ ID NO: 1367498 - RNA, 24 nt, Human
caccaagcccagcuaauuuucgua

SEQ ID NO: 1367499 - RNA, 21 nt, Human
caccauguuggccgggcuggu

SEQ ID NO: 1367500 - RNA, 23 nt, Human
caccauguuggccgggcuggucu

SEQ ID NO: 1367501 - RNA, 24 nt, Human
caccauguuggccgggcuggucuu

SEQ ID NO: 1367502 - RNA, 19 nt, Human
cacccucuacccacccucu

SEQ ID NO: 1367503 - RNA, 22 nt, Human
caccucacccagccuucucucu

SEQ ID NO: 1367504 - RNA, 22 nt, Human
caccucacccagccuucucucu

SEQ ID NO: 1367505 - RNA, 24 nt, Human
caccucagccucccagggugcugg

SEQ ID NO: 1367506 - RNA, 18 nt, Human
caccugagcaguauacau

SEQ ID NO: 1367507 - RNA, 21 nt, Human
cacugcaaccuccgccuccca

SEQ ID NO: 1367508 - RNA, 19 nt, Human
caggagccaccucacccag

SEQ ID NO: 1367509 - RNA, 23 nt, Human
caugcaccaccaagcccagcuaa

SEQ ID NO: 1367510 - RNA, 24 nt, Human
cauguuggccgggcuggucuugag

SEQ ID NO: 1367511 - RNA, 23 nt, Human
ccaagcccagcuaauuuucguac

SEQ ID NO: 1367512 - RNA, 21 nt, Human
ccacccucuccccuugaaucc

SEQ ID NO: 1367513 - RNA, 19 nt, Human
ccagggugcugggaauaca

SEQ ID NO: 1367514 - RNA, 20 nt, Human
cccaauaucuaacaugaucc

SEQ ID NO: 1367515 - RNA, 25 nt, Human
cccaauaucuaacaugaucccuaac

SEQ ID NO: 1367516 - RNA, 18 nt, Human
cccacccucuccccuuga

SEQ ID NO: 1367517 - RNA, 25 nt, Human
cccacccucuccccuugaaucccca

SEQ ID NO: 1367518 - RNA, 20 nt, Human
cccagguucaagcgauucuc

SEQ ID NO: 1367519 - RNA, 23 nt, Human
cccagguucaagcgauucuccug

SEQ ID NO: 1367520 - RNA, 18 nt, Human
ccccucuuauguacucac

SEQ ID NO: 1367521 - RNA, 18 nt, Human
ccucccuaguggcuagga

SEQ ID NO: 1367522 - RNA, 23 nt, Human
ccucuuauguacucacucaagcc

SEQ ID NO: 1367523 - RNA, 23 nt, Human
ccugccucagccucccuaguggc

SEQ ID NO: 1367524 - RNA, 24 nt, Human
ccugccucagccucccuaguggcu

SEQ ID NO: 1367525 - RNA, 21 nt, Human
cggcuaagcauuuacaaaugc

SEQ ID NO: 1367526 - RNA, 19 nt, Human
cuaagcauuuacaaaugcu

SEQ ID NO: 1367527 - RNA, 22 nt, Human
cuaaucuuaauacagaacagaa

SEQ ID NO: 1367528 - RNA, 26 nt, Human
cuacaacugaaguaauuuccuggaac

SEQ ID NO: 1367529 - RNA, 23 nt, Human
cuaguggcuaggauuacaggcau

SEQ ID NO: 1367530 - RNA, 24 nt, Human
cucacugcaaccuccgccucccag

SEQ ID NO: 1367531 - RNA, 23 nt, Human
cuccccaccucccauaaaaaaau

SEQ ID NO: 1367532 - RNA, 22 nt, Human
cucccuaccagacccuaagcuc

SEQ ID NO: 1367533 - RNA, 24 nt, Human
cuccgccucccagguucccagguu

SEQ ID NO: 1367534 - RNA, 19 nt, Human
cugaaggcaucccacacug

SEQ ID NO: 1367535 - RNA, 23 nt, Human
cugaccucaggugaucuacccac

SEQ ID NO: 1367536 - RNA, 23 nt, Human
cugcaaccuccgccucccagguu

SEQ ID NO: 1367537 - RNA, 24 nt, Human
cugcaaccuccgccucccagguuc

SEQ ID NO: 1367538 - RNA, 23 nt, Human
cugcaauuuaaaaaauaaaccuc

SEQ ID NO: 1367539 - RNA, 18 nt, Human
cuucaggagucaguucaa

SEQ ID NO: 1367540 - RNA, 23 nt, Human
cuuuaguggugaugugugagauu

SEQ ID NO: 1367541 - RNA, 24 nt, Human
cuuuuaguagaaagaagguuucac

SEQ ID NO: 1367542 - RNA, 21 nt, Human
gaagguuucaccauguuggcc

SEQ ID NO: 1367543 - RNA, 21 nt, Human
gaagguuucaccauguuggcc

SEQ ID NO: 1367544 - RNA, 24 nt, Human
gaagguuucaccauguuggccggg

SEQ ID NO: 1367545 - RNA, 24 nt, Human
gaccucaggugaucuacccaccuc

SEQ ID NO: 1367546 - RNA, 23 nt, Human
gauggcaugagcugaaggcaucc

SEQ ID NO: 1367547 - RNA, 24 nt, Human
gcgauucuccugccucagccuccc

SEQ ID NO: 1367548 - RNA, 19 nt, Human
gcuggagugcaguggcaca

SEQ ID NO: 1367549 - RNA, 22 nt, Human
ggauuacaggcaugcaccacca

SEQ ID NO: 1367550 - RNA, 24 nt, Human
ggcuggucuugagcugcugaccuc

SEQ ID NO: 1367551 - RNA, 19 nt, Human
ggucuugagcugcugaccu

SEQ ID NO: 1367552 - RNA, 21 nt, Human
guccaaucuuaugauguacag

SEQ ID NO: 1367553 - RNA, 24 nt, Human
gugaucuacccaccucagccuccc

SEQ ID NO: 1367554 - RNA, 21 nt, Human
gugcugggaauacaggcagga

SEQ ID NO: 1367555 - RNA, 20 nt, Human
guggcuaggauuacaggcau

SEQ ID NO: 1367556 - RNA, 24 nt, Human
guucccagguucaagcgauucucc

SEQ ID NO: 1367557 - RNA, 24 nt, Human
guugucuguuguccaggcuggagu

SEQ ID NO: 1367558 - RNA, 19 nt, Human
uaaaaaauaaaccucccca

SEQ ID NO: 1367559 - RNA, 25 nt, Human
uaaaaaauaaaccuccccaccuccc

SEQ ID NO: 1367560 - RNA, 19 nt, Human
uaaaccuccccaccuccca

SEQ ID NO: 1367561 - RNA, 18 nt, Human
uaaacgaaguucaaaugu

SEQ ID NO: 1367562 - RNA, 23 nt, Human
uaacaugaucccuaacacggcua

SEQ ID NO: 1367563 - RNA, 25 nt, Human
uaacaugaucccuaacacggcuaaa

SEQ ID NO: 1367564 - RNA, 24 nt, Human
uaacuucauuuucaaccaguuuuc

SEQ ID NO: 1367565 - RNA, 23 nt, Human
uaagaaugacuuaacacucuuaa

SEQ ID NO: 1367566 - RNA, 23 nt, Human
uaagguaaauaauauuucugucc

SEQ ID NO: 1367567 - RNA, 22 nt, Human
uaagugaacaaaaaaaaauacu

SEQ ID NO: 1367568 - RNA, 21 nt, Human
uaccaaaaaaaaaaaagauuc

SEQ ID NO: 1367569 - RNA, 20 nt, Human
uacccaccucagccucccag

SEQ ID NO: 1367570 - RNA, 21 nt, Human
uaggauuacaggcaugcacca

SEQ ID NO: 1367571 - RNA, 24 nt, Human
uaggauuacaggcaugcaccacca

SEQ ID NO: 1367572 - RNA, 21 nt, Human
uagguuauuggggaacagaug

SEQ ID NO: 1367573 - RNA, 24 nt, Human
uaguagaaagaagguuucaccaug

SEQ ID NO: 1367574 - RNA, 24 nt, Human
uaguggcuaggauuacaggcaugc

SEQ ID NO: 1367575 - RNA, 19 nt, Human
uaugcagaaaucagauuac

SEQ ID NO: 1367576 - RNA, 19 nt, Human
uauguacucacucaagcca

SEQ ID NO: 1367577 - RNA, 23 nt, Human
ucaaaacacacaaauagcuuaca

SEQ ID NO: 1367578 - RNA, 19 nt, Human
ucacugcaaccuccgccuc

SEQ ID NO: 1367579 - RNA, 24 nt, Human
ucacugcaaccuccgccucccagg

SEQ ID NO: 1367580 - RNA, 25 nt, Human
ucacugcaaccuccgccucccaggu

SEQ ID NO: 1367581 - RNA, 21 nt, Human
ucagccucccagggugcuggg

SEQ ID NO: 1367582 - RNA, 23 nt, Human
uccauuacuucugguaacaaugg

SEQ ID NO: 1367583 - RNA, 24 nt, Human
ucccagggugcugggaauacaggc

SEQ ID NO: 1367584 - RNA, 22 nt, Human
ucccagguucaagcgauucucc

SEQ ID NO: 1367585 - RNA, 24 nt, Human
ucccagguucaagcgauucuccug

SEQ ID NO: 1367586 - RNA, 25 nt, Human
ucccagguucaagcgauucuccugg

SEQ ID NO: 1367587 - RNA, 20 nt, Human
ucccauaaaaaaauaaauua

SEQ ID NO: 1367588 - RNA, 18 nt, Human
ucccucacccucuaccca

SEQ ID NO: 1367589 - RNA, 25 nt, Human
ucuaauacuaaucuuaauacagaac

SEQ ID NO: 1367590 - RNA, 21 nt, Human
ucuacccaccucagccuccca

SEQ ID NO: 1367591 - RNA, 22 nt, Human
ucuacccaccucagccucccag

SEQ ID NO: 1367592 - RNA, 20 nt, Human
ucuccaaaauuuugaauaga

SEQ ID NO: 1367593 - RNA, 25 nt, Human
ucuccugccucagccucccuagugg

SEQ ID NO: 1367594 - RNA, 18 nt, Human
ucuguuguccaggcugga

SEQ ID NO: 1367595 - RNA, 21 nt, Human
ucuuaauacagaacagaaauu

SEQ ID NO: 1367596 - RNA, 30 nt, Human
ucuugcuuuguugucuguuguccaggcugg

SEQ ID NO: 1367597 - RNA, 22 nt, Human
ucuuugguuacgaguaaguucu

SEQ ID NO: 1367598 - RNA, 21 nt, Human
ugaauaaacuguccaauguaa

SEQ ID NO: 1367599 - RNA, 21 nt, Human
ugaccucaggugaucuaccca

SEQ ID NO: 1367600 - RNA, 24 nt, Human
ugaccucaggugaucuacccaccu

SEQ ID NO: 1367601 - RNA, 24 nt, Human
ugaucuacccaccucagccuccca

SEQ ID NO: 1367602 - RNA, 24 nt, Human
ugccucagccucccuaguggcuag

SEQ ID NO: 1367603 - RNA, 25 nt, Human
ugcuuaguuuuuaacaucauccauu

SEQ ID NO: 1367604 - RNA, 23 nt, Human
uggaacaaaacuuaaaguacaaa

SEQ ID NO: 1367605 - RNA, 23 nt, Human
uggacucuugcuuuguugucugu

SEQ ID NO: 1367606 - RNA, 23 nt, Human
uggagugcaguggcacaaucucg

SEQ ID NO: 1367607 - RNA, 24 nt, Human
uggagugcaguggcacaaucucgg

SEQ ID NO: 1367608 - RNA, 24 nt, Human
uggcacaaucucggcucacugcaa

SEQ ID NO: 1367609 - RNA, 24 nt, Human
uggccgggcuggucuugagcugcu

SEQ ID NO: 1367610 - RNA, 22 nt, Human
ugggaauacaggcaggagccac

SEQ ID NO: 1367611 - RNA, 24 nt, Human
ugggaauacaggcaggagccaccu

SEQ ID NO: 1367612 - RNA, 23 nt, Human
ugguaagcauacccuuacuuuuc

SEQ ID NO: 1367613 - RNA, 20 nt, Human
uguccaggcuggagugcagu

SEQ ID NO: 1367614 - RNA, 21 nt, Human
uguccaggcuggagugcagug

SEQ ID NO: 1367615 - RNA, 22 nt, Human
uguccaggcuggagugcagugg

SEQ ID NO: 1367616 - RNA, 24 nt, Human
uguccaggcuggagugcaguggca

SEQ ID NO: 1367617 - RNA, 21 nt, Human
uguuaguaaagggugccaaua

SEQ ID NO: 1367618 - RNA, 19 nt, Human
uguuguccaggcuggagug

SEQ ID NO: 1367619 - RNA, 21 nt, Human
uguuguccaggcuggagugca

SEQ ID NO: 1367620 - RNA, 24 nt, Human
uuaguagaaagaagguuucaccau

SEQ ID NO: 1367621 - RNA, 23 nt, Human
uuauguacucacucaagccauaa

SEQ ID NO: 1367622 - RNA, 21 nt, Human
uucaagcgauucuccugccuc

SEQ ID NO: 1367623 - RNA, 23 nt, Human
uucaagcgauucuccugccucag

SEQ ID NO: 1367624 - RNA, 24 nt, Human
uucaagcgauucuccugccucagc

SEQ ID NO: 1367625 - RNA, 24 nt, Human
uuggacugcaauuuaaaaaauaaa

SEQ ID NO: 1367626 - RNA, 24 nt, Human
uuguccaggcuggagugcaguggc

SEQ ID NO: 1367627 - RNA, 21 nt, Human
uugucuguuguccaggcugga

SEQ ID NO: 1367628 - RNA, 24 nt, Human
uuguugucuguuguccaggcugga

SEQ ID NO: 1367629 - RNA, 20 nt, Human
uuuaaaaaauaaaccucccc

SEQ ID NO: 1367630 - RNA, 22 nt, Human
uuuacacuacaauaugcagaaa

SEQ ID NO: 1367631 - RNA, 24 nt, Human
uuucaccauguuggccgggcuggu

SEQ ID NO: 1367632 - RNA, 22 nt, Human
uuucuggccucugacauaaguu

SEQ ID NO: 1367633 - RNA, 24 nt, Human
uuuguugucuguuguccaggcugg

SEQ ID NO: 1367634 - RNA, 27 nt, Human
uuuuuacacuacaauaugcagaaauca

SEQ ID NO: 1367635 - RNA, 26 nt, Human
aaaacaaaacaaaacaaaacaaaacu

SEQ ID NO: 1367636 - RNA, 18 nt, Human
aaacaaaacaaaacaaaa

SEQ ID NO: 1367637 - RNA, 22 nt, Human
aaacaaaacaaaacaaaacaaa

SEQ ID NO: 1367638 - RNA, 22 nt, Human
aaacaaaacaaaacaaaacaaa

SEQ ID NO: 1367639 - RNA, 24 nt, Human
aacacagcucucaaacgugcagcu

SEQ ID NO: 1367640 - RNA, 20 nt, Human
aacagggugaaaccuugucu

SEQ ID NO: 1367641 - RNA, 21 nt, Human
aacagggugaaaccuugucuc

SEQ ID NO: 1367642 - RNA, 24 nt, Human
aaucacuugaacccaagaggucga

SEQ ID NO: 1367643 - RNA, 21 nt, Human
acaaaacaaaacaaaacaaaa

SEQ ID NO: 1367644 - RNA, 21 nt, Human
acaaaacaaaacaaaacaaaa

SEQ ID NO: 1367645 - RNA, 23 nt, Human
acaaaacaaaacaaaacaaaacu

SEQ ID NO: 1367646 - RNA, 22 nt, Human
acacagcucucaaacgugcagc

SEQ ID NO: 1367647 - RNA, 24 nt, Human
acagagcgagacucugucucaaaa

SEQ ID NO: 1367648 - RNA, 21 nt, Human
acagagggcacucuguccuga

SEQ ID NO: 1367649 - RNA, 24 nt, Human
accacugcauucuagucugggcga

SEQ ID NO: 1367650 - RNA, 22 nt, Human
accagacacagagggcacucug

SEQ ID NO: 1367651 - RNA, 20 nt, Human
accagccuugccaacagggu

SEQ ID NO: 1367652 - RNA, 24 nt, Human
accuugucucuacuaaaaguacaa

SEQ ID NO: 1367653 - RNA, 24 nt, Human
acugcauucuagucugggcgacag

SEQ ID NO: 1367654 - RNA, 24 nt, Human
agacucugucucaaaaauuaaaaa

SEQ ID NO: 1367655 - RNA, 22 nt, Human
agaggucgagguugcagugagc

SEQ ID NO: 1367656 - RNA, 24 nt, Human
agcacuucgggaggccgagguggg

SEQ ID NO: 1367657 - RNA, 21 nt, Human
aggaguuugagaccagccuug

SEQ ID NO: 1367658 - RNA, 18 nt, Human
aggcaggagaaucacuug

SEQ ID NO: 1367659 - RNA, 23 nt, Human
aggcaggagaaucacuugaaccc

SEQ ID NO: 1367660 - RNA, 24 nt, Human
aggcaggagaaucacuugaaccca

SEQ ID NO: 1367661 - RNA, 21 nt, Human
aggccgaggugggcagaucac

SEQ ID NO: 1367662 - RNA, 24 nt, Human
aggcugaggcaggagaaucacuug

SEQ ID NO: 1367663 - RNA, 20 nt, Human
aggucgagguugcagugagc

SEQ ID NO: 1367664 - RNA, 24 nt, Human
aggucgagguugcagugagcugag

SEQ ID NO: 1367665 - RNA, 26 nt, Human
aggugggcagaucaccuggcgucagg

SEQ ID NO: 1367666 - RNA, 19 nt, Human
aguccuccacuuaggagua

SEQ ID NO: 1367667 - RNA, 24 nt, Human
agucugggcgacagagcgagacuc

SEQ ID NO: 1367668 - RNA, 20 nt, Human
augcguggugaugggcaccu

SEQ ID NO: 1367669 - RNA, 24 nt, Human
auugcaccacugcauucuagucug

SEQ ID NO: 1367670 - RNA, 21 nt, Human
caaaacaaaacaaaacaaaac

SEQ ID NO: 1367671 - RNA, 24 nt, Human
caaaacaaaacaaaacaaaacaaa

SEQ ID NO: 1367672 - RNA, 22 nt, Human
caaaacaaaacaaaacaaaacu

SEQ ID NO: 1367673 - RNA, 19 nt, Human
caaaacaaaacaaaacuca

SEQ ID NO: 1367674 - RNA, 23 nt, Human
caaaacaaaacaaaacucauagg

SEQ ID NO: 1367675 - RNA, 24 nt, Human
caacagggugaaaccuugucucua

SEQ ID NO: 1367676 - RNA, 19 nt, Human
cacaaugcaggaucagaau

SEQ ID NO: 1367677 - RNA, 23 nt, Human
caccuauaaucccagccacuugg

SEQ ID NO: 1367678 - RNA, 24 nt, Human
caccuauaaucccagccacuuggg

SEQ ID NO: 1367679 - RNA, 19 nt, Human
cacugcauucuagucuggg

SEQ ID NO: 1367680 - RNA, 22 nt, Human
cacugcauucuagucugggcga

SEQ ID NO: 1367681 - RNA, 23 nt, Human
cacugcauucuagucugggcgac

SEQ ID NO: 1367682 - RNA, 24 nt, Human
cacugcauucuagucugggcgaca

SEQ ID NO: 1367683 - RNA, 24 nt, Human
cagaucaccuggcgucaggaguuu

SEQ ID NO: 1367684 - RNA, 21 nt, Human
cagcacuucgggaggccgagg

SEQ ID NO: 1367685 - RNA, 24 nt, Human
cagcacuucgggaggccgaggugg

SEQ ID NO: 1367686 - RNA, 24 nt, Human
cagccacuugggaggcugaggcag

SEQ ID NO: 1367687 - RNA, 18 nt, Human
caucaugguggcucccgc

SEQ ID NO: 1367688 - RNA, 23 nt, Human
cauucuagucugggcgacagagc

SEQ ID NO: 1367689 - RNA, 22 nt, Human
ccaagaggucgagguugcagug

SEQ ID NO: 1367690 - RNA, 19 nt, Human
ccacugcauucuagucugg

SEQ ID NO: 1367691 - RNA, 20 nt, Human
ccacugcauucuagucuggg

SEQ ID NO: 1367692 - RNA, 20 nt, Human
ccacugcauucuagucuggg

SEQ ID NO: 1367693 - RNA, 21 nt, Human
ccacugcauucuagucugggc

SEQ ID NO: 1367694 - RNA, 21 nt, Human
ccacugcauucuagucugggc

SEQ ID NO: 1367695 - RNA, 24 nt, Human
ccacugcauucuagucugggcgac

SEQ ID NO: 1367696 - RNA, 24 nt, Human
ccccagcuccuuuuuuggggccgc

SEQ ID NO: 1367697 - RNA, 24 nt, Human
cccgccuguaaucccagcacuucg

SEQ ID NO: 1367698 - RNA, 23 nt, Human
ccuauaaucccagccacuuggga

SEQ ID NO: 1367699 - RNA, 18 nt, Human
ccuccacuuaggaguaga

SEQ ID NO: 1367700 - RNA, 19 nt, Human
ccugaugcuagaauucuuc

SEQ ID NO: 1367701 - RNA, 23 nt, Human
ccuggcgucaggaguuugagacc

SEQ ID NO: 1367702 - RNA, 20 nt, Human
ccuguaaucccagcacuucg

SEQ ID NO: 1367703 - RNA, 22 nt, Human
ccuguaaucccagcacuucggg

SEQ ID NO: 1367704 - RNA, 24 nt, Human
ccuugccaacagggugaaaccuug

SEQ ID NO: 1367705 - RNA, 19 nt, Human
cgaggugggcagaucaccu

SEQ ID NO: 1367706 - RNA, 20 nt, Human
cgaggugggcagaucaccug

SEQ ID NO: 1367707 - RNA, 25 nt, Human
cgaggugggcagaucaccuggcguc

SEQ ID NO: 1367708 - RNA, 24 nt, Human
cgagguugcagugagcugagauug

SEQ ID NO: 1367709 - RNA, 24 nt, Human
cuaacugccauacuucccuuuaga

SEQ ID NO: 1367710 - RNA, 24 nt, Human
cucccgccuguaaucccagcacuu

SEQ ID NO: 1367711 - RNA, 21 nt, Human
cugagaaucaccaccagacac

SEQ ID NO: 1367712 - RNA, 21 nt, Human
cugggcgacagagcgagacuc

SEQ ID NO: 1367713 - RNA, 24 nt, Human
cugucucaaaaauuaaaaacaaaa

SEQ ID NO: 1367714 - RNA, 19 nt, Human
gaaaccuugucucuacuaa

SEQ ID NO: 1367715 - RNA, 19 nt, Human
gaaucacuugaacccaaga

SEQ ID NO: 1367716 - RNA, 24 nt, Human
gacagagcgagacucugucucaaa

SEQ ID NO: 1367717 - RNA, 20 nt, Human
gagauugcaccacugcauuc

SEQ ID NO: 1367718 - RNA, 29 nt, Human
gaggucgagguugcagugagcugagauug

SEQ ID NO: 1367719 - RNA, 21 nt, Human
gagguugcagugagcugagau

SEQ ID NO: 1367720 - RNA, 23 nt, Human
gagguugcagugagcugagauug

SEQ ID NO: 1367721 - RNA, 24 nt, Human
gagguugcagugagcugagauugg

SEQ ID NO: 1367722 - RNA, 24 nt, Human
gaucaccuggcgucaggaguuuga

SEQ ID NO: 1367723 - RNA, 22 nt, Human
gcaggagaaucacuugaaccca

SEQ ID NO: 1367724 - RNA, 19 nt, Human
gcaggaucagaaugugaug

SEQ ID NO: 1367725 - RNA, 24 nt, Human
gcauucuagucugggcgacagagc

SEQ ID NO: 1367726 - RNA, 24 nt, Human
gccaacagggugaaaccuugucuc

SEQ ID NO: 1367727 - RNA, 24 nt, Human
gcgacagagcgagacucugucuca

SEQ ID NO: 1367728 - RNA, 20 nt, Human
ggaaaugcucauuaaaguaa

SEQ ID NO: 1367729 - RNA, 22 nt, Human
ggaauucucucagccuuguccu

SEQ ID NO: 1367730 - RNA, 25 nt, Human
ggcagaucaccuggcgucaggaguu

SEQ ID NO: 1367731 - RNA, 19 nt, Human
gggaggccgaggugggcag

SEQ ID NO: 1367732 - RNA, 23 nt, Human
gggaggccgaggugggcagauca

SEQ ID NO: 1367733 - RNA, 24 nt, Human
gggcaccuauaaucccagccacuu

SEQ ID NO: 1367734 - RNA, 24 nt, Human
gguggcucccgccuguaaucccag

SEQ ID NO: 1367735 - RNA, 19 nt, Human
guugcagugagcugagauu

SEQ ID NO: 1367736 - RNA, 21 nt, Human
guugcagugagcugagauugc

SEQ ID NO: 1367737 - RNA, 20 nt, Human
guuggcuccuuccaccuuuu

SEQ ID NO: 1367738 - RNA, 24 nt, Human
uaaaaacaaaacaaaacaaaacaa

SEQ ID NO: 1367739 - RNA, 19 nt, Human
uacuuuaaucuucagcaac

SEQ ID NO: 1367740 - RNA, 23 nt, Human
uagaaagggccagucaugagaua

SEQ ID NO: 1367741 - RNA, 23 nt, Human
uauugaagagcucugguacucaa

SEQ ID NO: 1367742 - RNA, 23 nt, Human
ucaccuggcgucaggaguuugag

SEQ ID NO: 1367743 - RNA, 23 nt, Human
ucagcaacacaucaguaacacag

SEQ ID NO: 1367744 - RNA, 20 nt, Human
uccaccuuuuuggugagacu

SEQ ID NO: 1367745 - RNA, 18 nt, Human
ucccagccacuugggagg

SEQ ID NO: 1367746 - RNA, 21 nt, Human
ucuagucugggcgacagagcg

SEQ ID NO: 1367747 - RNA, 23 nt, Human
ucuagucugggcgacagagcgag

SEQ ID NO: 1367748 - RNA, 24 nt, Human
ucuagucugggcgacagagcgaga

SEQ ID NO: 1367749 - RNA, 21 nt, Human
ucucuacuaaaaguacaaaaa

SEQ ID NO: 1367750 - RNA, 22 nt, Human
ugaaaguccuccacuuaggagu

SEQ ID NO: 1367751 - RNA, 23 nt, Human
ugagaccagccuugccaacaggg

SEQ ID NO: 1367752 - RNA, 19 nt, Human
ugagauaggcucaugaaag

SEQ ID NO: 1367753 - RNA, 22 nt, Human
ugagcugagauugcaccacugc

SEQ ID NO: 1367754 - RNA, 24 nt, Human
ugaggcaggagaaucacuugaacc

SEQ ID NO: 1367755 - RNA, 25 nt, Human
ugaggcaggagaaucacuugaaccc

SEQ ID NO: 1367756 - RNA, 23 nt, Human
ugccaacagggugaaaccuuguc

SEQ ID NO: 1367757 - RNA, 21 nt, Human
ugccauacuucccuuuagaaa

SEQ ID NO: 1367758 - RNA, 21 nt, Human
uggcucccgccuguaauccca

SEQ ID NO: 1367759 - RNA, 22 nt, Human
uggcucccgccuguaaucccag

SEQ ID NO: 1367760 - RNA, 24 nt, Human
uggcucccgccuguaaucccagca

SEQ ID NO: 1367761 - RNA, 19 nt, Human
ugggaggcugaggcaggag

SEQ ID NO: 1367762 - RNA, 24 nt, Human
ugggaggcugaggcaggagaauca

SEQ ID NO: 1367763 - RNA, 24 nt, Human
ugggcagaucaccuggcgucagga

SEQ ID NO: 1367764 - RNA, 26 nt, Human
uggggcaagcuguucacaacgguucu

SEQ ID NO: 1367765 - RNA, 24 nt, Human
ugguggcucccgccuguaauccca

SEQ ID NO: 1367766 - RNA, 24 nt, Human
uguccuuucccuggggcaagcugu

SEQ ID NO: 1367767 - RNA, 25 nt, Human
ugucucaaaaauuaaaaacaaaaca

SEQ ID NO: 1367768 - RNA, 24 nt, Human
ugucugagaaucaccaccagacac

SEQ ID NO: 1367769 - RNA, 26 nt, Human
uuaaaaacaaaacaaaacaaaacaaa

SEQ ID NO: 1367770 - RNA, 25 nt, Human
uuaaucuucagcaacacaucaguaa

SEQ ID NO: 1367771 - RNA, 19 nt, Human
uugcagugagcugagauug

SEQ ID NO: 1367772 - RNA, 22 nt, Human
uugcagugagcugagauugcac

SEQ ID NO: 1367773 - RNA, 25 nt, Human
uugggaggcugaggcaggagaauca

SEQ ID NO: 1367774 - RNA, 23 nt, Human
uuuugugucucgguuggcuccuu

SEQ ID NO: 1367775 - RNA, 22 nt, Human
aaacccagccucccccuccuca

SEQ ID NO: 1367776 - RNA, 22 nt, Human
aaacccagccucccccuccuca

SEQ ID NO: 1367777 - RNA, 24 nt, Human
aaaucguuccagaccuccacauag

SEQ ID NO: 1367778 - RNA, 24 nt, Human
aaaucguuccagaccuccacauag

SEQ ID NO: 1367779 - RNA, 23 nt, Human
aacacaauuacccacacgcagca

SEQ ID NO: 1367780 - RNA, 19 nt, Human
aacccgcuccugcuccucc

SEQ ID NO: 1367781 - RNA, 19 nt, Human
aacccgcuccugcuccucc

SEQ ID NO: 1367782 - RNA, 18 nt, Human
aagaacccgcuccugcuc

SEQ ID NO: 1367783 - RNA, 18 nt, Human
aagaacccgcuccugcuc

SEQ ID NO: 1367784 - RNA, 18 nt, Human
aagagcugcgugaggagg

SEQ ID NO: 1367785 - RNA, 18 nt, Human
aagagcugcgugaggagg

SEQ ID NO: 1367786 - RNA, 18 nt, Human
aagcgaaaaagguuuccg

SEQ ID NO: 1367787 - RNA, 18 nt, Human
aagcgaaaaagguuuccg

SEQ ID NO: 1367788 - RNA, 19 nt, Human
aagugcuguuuccgccugg

SEQ ID NO: 1367789 - RNA, 19 nt, Human
aagugcuguuuccgccugg

SEQ ID NO: 1367790 - RNA, 23 nt, Human
accccaagcgaaaaagguuuccg

SEQ ID NO: 1367791 - RNA, 23 nt, Human
accccaagcgaaaaagguuuccg

SEQ ID NO: 1367792 - RNA, 18 nt, Human
accgggccagaaaagcuc

SEQ ID NO: 1367793 - RNA, 18 nt, Human
accgggccagaaaagcuc

SEQ ID NO: 1367794 - RNA, 21 nt, Human
acgcagcaagggggugcggag

SEQ ID NO: 1367795 - RNA, 21 nt, Human
agaugccuggugaugcagggg

SEQ ID NO: 1367796 - RNA, 22 nt, Human
agcgaaaaagguuuccgaggac

SEQ ID NO: 1367797 - RNA, 22 nt, Human
agcgaaaaagguuuccgaggac

SEQ ID NO: 1367798 - RNA, 23 nt, Human
agcgguucaugaaaucguuccag

SEQ ID NO: 1367799 - RNA, 23 nt, Human
agcgguucaugaaaucguuccag

SEQ ID NO: 1367800 - RNA, 23 nt, Human
aggcaggcccccgucugucucca

SEQ ID NO: 1367801 - RNA, 23 nt, Human
aggcaggcccccgucugucucca

SEQ ID NO: 1367802 - RNA, 22 nt, Human
aggcgcuggaggcucuuccgcc

SEQ ID NO: 1367803 - RNA, 22 nt, Human
aggcgcuggaggcucuuccgcc

SEQ ID NO: 1367804 - RNA, 24 nt, Human
agggcaggcaggcagcugggaagg

SEQ ID NO: 1367805 - RNA, 24 nt, Human
agggcaggcaggcagcugggaagg

SEQ ID NO: 1367806 - RNA, 18 nt, Human
agugauaaaaacccagcc

SEQ ID NO: 1367807 - RNA, 18 nt, Human
agugauaaaaacccagcc

SEQ ID NO: 1367808 - RNA, 23 nt, Human
auaaaaacccagccucccccucc

SEQ ID NO: 1367809 - RNA, 19 nt, Human
aucugccgcuuccccucca

SEQ ID NO: 1367810 - RNA, 19 nt, Human
aucugccgcuuccccucca

SEQ ID NO: 1367811 - RNA, 19 nt, Human
augccuggugaugcagggg

SEQ ID NO: 1367812 - RNA, 18 nt, Human
caagucccggagugggaa

SEQ ID NO: 1367813 - RNA, 19 nt, Human
caagucccggagugggaag

SEQ ID NO: 1367814 - RNA, 18 nt, Human
caaguccuggagugggaa

SEQ ID NO: 1367815 - RNA, 25 nt, Human
cacgcugucgccgccgccgccgccc

SEQ ID NO: 1367816 - RNA, 25 nt, Human
cacgcugucgccgccgccgccgccc

SEQ ID NO: 1367817 - RNA, 18 nt, Human
cagcacuggcugagauga

SEQ ID NO: 1367818 - RNA, 22 nt, Human
cagcagaagccucucgaagcug

SEQ ID NO: 1367819 - RNA, 22 nt, Human
cagcagaagccucucgaagcug

SEQ ID NO: 1367820 - RNA, 20 nt, Human
caggccucggcaaagaugcc

SEQ ID NO: 1367821 - RNA, 20 nt, Human
caggccucggcaaagaugcc

SEQ ID NO: 1367822 - RNA, 21 nt, Human
cauguacuggcagacagcgug

SEQ ID NO: 1367823 - RNA, 21 nt, Human
cauguacuggcagacagcgug

SEQ ID NO: 1367824 - RNA, 19 nt, Human
ccagaaaagcucaacgaug

SEQ ID NO: 1367825 - RNA, 19 nt, Human
ccagaaaagcucaacgaug

SEQ ID NO: 1367826 - RNA, 21 nt, Human
ccagguagcgaagaacccgcu

SEQ ID NO: 1367827 - RNA, 21 nt, Human
ccagguagcgaagaacccgcu

SEQ ID NO: 1367828 - RNA, 25 nt, Human
cccaagcgaaaaagguuuccgagga

SEQ ID NO: 1367829 - RNA, 25 nt, Human
cccaagcgaaaaagguuuccgagga

SEQ ID NO: 1367830 - RNA, 20 nt, Human
cccacacgcagcaagggggu

SEQ ID NO: 1367831 - RNA, 23 nt, Human
ccccaaaacacaauuacccacac

SEQ ID NO: 1367832 - RNA, 22 nt, Human
cccccaaaacacaauuacccac

SEQ ID NO: 1367833 - RNA, 18 nt, Human
ccccccagccuggcuccu

SEQ ID NO: 1367834 - RNA, 25 nt, Human
ccccuuggccuugggcacgaggucu

SEQ ID NO: 1367835 - RNA, 25 nt, Human
ccccuuggccuugggcacgaggucu

SEQ ID NO: 1367836 - RNA, 21 nt, Human
cccuccucacuugagcuucag

SEQ ID NO: 1367837 - RNA, 21 nt, Human
cccuccucacuugagcuucag

SEQ ID NO: 1367838 - RNA, 20 nt, Human
ccgccgccgccgcccggcag

SEQ ID NO: 1367839 - RNA, 20 nt, Human
ccgccgccgccgcccggcag

SEQ ID NO: 1367840 - RNA, 21 nt, Human
ccgccgccuccgggccgcacu

SEQ ID NO: 1367841 - RNA, 21 nt, Human
ccgccgccuccgggccgcacu

SEQ ID NO: 1367842 - RNA, 18 nt, Human
ccgccuggaagccgagag

SEQ ID NO: 1367843 - RNA, 18 nt, Human
ccgccuggaagccgagag

SEQ ID NO: 1367844 - RNA, 24 nt, Human
ccgcggggccgccaucagcugugc

SEQ ID NO: 1367845 - RNA, 23 nt, Human
ccgggccagaaaagcucaacgau

SEQ ID NO: 1367846 - RNA, 23 nt, Human
ccgggccagaaaagcucaacgau

SEQ ID NO: 1367847 - RNA, 21 nt, Human
ccuccagguagcgaagaaccc

SEQ ID NO: 1367848 - RNA, 21 nt, Human
ccuccagguagcgaagaaccc

SEQ ID NO: 1367849 - RNA, 19 nt, Human
ccucccccuccucacuuga

SEQ ID NO: 1367850 - RNA, 19 nt, Human
ccucccccuccucacuuga

SEQ ID NO: 1367851 - RNA, 23 nt, Human
ccugcagccugggccaggaggac

SEQ ID NO: 1367852 - RNA, 20 nt, Human
cgccagcgucuguugacugc

SEQ ID NO: 1367853 - RNA, 21 nt, Human
cgccagcgucuguugacugcc

SEQ ID NO: 1367854 - RNA, 21 nt, Human
cgccagcgucuguugacugcc

SEQ ID NO: 1367855 - RNA, 19 nt, Human
cgccgccgcccggcagggc

SEQ ID NO: 1367856 - RNA, 25 nt, Human
cgccuugcuccugcccucauccucc

SEQ ID NO: 1367857 - RNA, 23 nt, Human
cgcggggccgccaucagcugugc

SEQ ID NO: 1367858 - RNA, 23 nt, Human
cgcugucgccgccgccgccgccc

SEQ ID NO: 1367859 - RNA, 23 nt, Human
cgcugucgccgccgccgccgccc

SEQ ID NO: 1367860 - RNA, 21 nt, Human
cgcuugaggacggcucgcaga

SEQ ID NO: 1367861 - RNA, 21 nt, Human
cgcuugaggacggcucgcaga

SEQ ID NO: 1367862 - RNA, 24 nt, Human
cggcaggaaauccaggugccgauu

SEQ ID NO: 1367863 - RNA, 24 nt, Human
cggcaggaaauccaggugccgauu

SEQ ID NO: 1367864 - RNA, 21 nt, Human
cucaacgaugaagaaacagga

SEQ ID NO: 1367865 - RNA, 21 nt, Human
cucaacgaugaagaaacagga

SEQ ID NO: 1367866 - RNA, 23 nt, Human
cuccgcgccuugcuccugcccuc

SEQ ID NO: 1367867 - RNA, 23 nt, Human
cuccgcgccuugcuccugcccuc

SEQ ID NO: 1367868 - RNA, 19 nt, Human
cuccugcagccugggccag

SEQ ID NO: 1367869 - RNA, 23 nt, Human
cugagcaggggcugggaccaaga

SEQ ID NO: 1367870 - RNA, 23 nt, Human
cugagcaggggcugggaccaaga

SEQ ID NO: 1367871 - RNA, 19 nt, Human
cugccaagagcugcgugag

SEQ ID NO: 1367872 - RNA, 19 nt, Human
cugccaagagcugcgugag

SEQ ID NO: 1367873 - RNA, 24 nt, Human
cugcgugaggagggggcagaguga

SEQ ID NO: 1367874 - RNA, 24 nt, Human
cugcgugaggagggggcagaguga

SEQ ID NO: 1367875 - RNA, 23 nt, Human
cuggaggcucuuccgccccuugg

SEQ ID NO: 1367876 - RNA, 23 nt, Human
cuggaggcucuuccgccccuugg

SEQ ID NO: 1367877 - RNA, 18 nt, Human
cugggaggggcugagcag

SEQ ID NO: 1367878 - RNA, 18 nt, Human
cugggaggggcugagcag

SEQ ID NO: 1367879 - RNA, 19 nt, Human
cuucaccugggagcuggcu

SEQ ID NO: 1367880 - RNA, 19 nt, Human
cuucaccugggagcuggcu

SEQ ID NO: 1367881 - RNA, 23 nt, Human
cuucaucugccgcuuccccucca

SEQ ID NO: 1367882 - RNA, 23 nt, Human
cuucaucugccgcuuccccucca

SEQ ID NO: 1367883 - RNA, 24 nt, Human
gaagaaacaggaacaugcccaggu

SEQ ID NO: 1367884 - RNA, 19 nt, Human
gaagcacucgcggggugua

SEQ ID NO: 1367885 - RNA, 19 nt, Human
gaagcacucgcggggugua

SEQ ID NO: 1367886 - RNA, 18 nt, Human
gaagugcuguuuccgccu

SEQ ID NO: 1367887 - RNA, 18 nt, Human
gaagugcuguuuccgccu

SEQ ID NO: 1367888 - RNA, 22 nt, Human
gacaggagcagccccggcggca

SEQ ID NO: 1367889 - RNA, 22 nt, Human
gacaggagcagccccggcggca

SEQ ID NO: 1367890 - RNA, 22 nt, Human
gagcugcgugaggagggggcag

SEQ ID NO: 1367891 - RNA, 22 nt, Human
gagcugcgugaggagggggcag

SEQ ID NO: 1367892 - RNA, 18 nt, Human
gagcugggauggcauggg

SEQ ID NO: 1367893 - RNA, 18 nt, Human
gagcugggauggcauggg

SEQ ID NO: 1367894 - RNA, 20 nt, Human
gaggagggggcagagugaga

SEQ ID NO: 1367895 - RNA, 22 nt, Human
gagugggaagcuuggagcuggg

SEQ ID NO: 1367896 - RNA, 22 nt, Human
gagugggaagcuuggagcuggg

SEQ ID NO: 1367897 - RNA, 19 nt, Human
gccagcgucuguugacugc

SEQ ID NO: 1367898 - RNA, 23 nt, Human
gccgcacucgggguucuccagcg

SEQ ID NO: 1367899 - RNA, 23 nt, Human
gccgcacucgggguucuccagcg

SEQ ID NO: 1367900 - RNA, 23 nt, Human
gccuugcuccugcccucauccuc

SEQ ID NO: 1367901 - RNA, 18 nt, Human
gcggacaggagcagcccc

SEQ ID NO: 1367902 - RNA, 18 nt, Human
gcggacaggagcagcccc

SEQ ID NO: 1367903 - RNA, 21 nt, Human
gcggaggccccccagccuggc

SEQ ID NO: 1367904 - RNA, 23 nt, Human
ggagcagccccggcggcaggaaa

SEQ ID NO: 1367905 - RNA, 23 nt, Human
ggagcagccccggcggcaggaaa

SEQ ID NO: 1367906 - RNA, 23 nt, Human
ggaugcggcugcgcuugaggacg

SEQ ID NO: 1367907 - RNA, 23 nt, Human
ggaugcggcugcgcuugaggacg

SEQ ID NO: 1367908 - RNA, 19 nt, Human
gggcagagugagagagacc

SEQ ID NO: 1367909 - RNA, 19 nt, Human
gggcaggcaggcagcuggg

SEQ ID NO: 1367910 - RNA, 19 nt, Human
gggcaggcaggcagcuggg

SEQ ID NO: 1367911 - RNA, 20 nt, Human
gguuuuucucuccaaaaggg

SEQ ID NO: 1367912 - RNA, 20 nt, Human
gguuuuucucuccaaaaggg

SEQ ID NO: 1367913 - RNA, 22 nt, Human
gugagagagaccaccccaagcg

SEQ ID NO: 1367914 - RNA, 22 nt, Human
uaaaaacccagccucccccucc

SEQ ID NO: 1367915 - RNA, 19 nt, Human
uacaacaaaucacaccaaa

SEQ ID NO: 1367916 - RNA, 19 nt, Human
uacaacaaaucacaccaaa

SEQ ID NO: 1367917 - RNA, 21 nt, Human
uacaacaaaucacaccaaauu

SEQ ID NO: 1367918 - RNA, 21 nt, Human
uacaacaaaucacaccaaauu

SEQ ID NO: 1367919 - RNA, 22 nt, Human
uacaacaaaucacaccaaauuc

SEQ ID NO: 1367920 - RNA, 22 nt, Human
uacaacaaaucacaccaaauuc

SEQ ID NO: 1367921 - RNA, 19 nt, Human
uacacggccuggggggaca

SEQ ID NO: 1367922 - RNA, 19 nt, Human
uacacggccuggggggaca

SEQ ID NO: 1367923 - RNA, 26 nt, Human
uauuaaauuccccacuuucccccaaa

SEQ ID NO: 1367924 - RNA, 23 nt, Human
ucacaccaaauucauuaaaagug

SEQ ID NO: 1367925 - RNA, 23 nt, Human
ucacaccaaauucauuaaaagug

SEQ ID NO: 1367926 - RNA, 19 nt, Human
ucagcacuggccgagauga

SEQ ID NO: 1367927 - RNA, 22 nt, Human
ucaucugccgcuuccccuccag

SEQ ID NO: 1367928 - RNA, 22 nt, Human
ucaucugccgcuuccccuccag

SEQ ID NO: 1367929 - RNA, 21 nt, Human
uccaaaagggaaauuuaaaaa

SEQ ID NO: 1367930 - RNA, 21 nt, Human
uccaaaagggaaauuuaaaaa

SEQ ID NO: 1367931 - RNA, 20 nt, Human
uccauggggaugcggcugcg

SEQ ID NO: 1367932 - RNA, 20 nt, Human
uccauggggaugcggcugcg

SEQ ID NO: 1367933 - RNA, 21 nt, Human
ucccccaaaacacaauuaccc

SEQ ID NO: 1367934 - RNA, 22 nt, Human
ucccccaaaacacaauuaccca

SEQ ID NO: 1367935 - RNA, 26 nt, Human
ucgcacgcugucgccgccgccgccgg

SEQ ID NO: 1367936 - RNA, 26 nt, Human
ucgcacgcugucgccgccgccgccgg

SEQ ID NO: 1367937 - RNA, 19 nt, Human
ucgccgccgccgccgcccg

SEQ ID NO: 1367938 - RNA, 19 nt, Human
ucgccgccgccgccgcccg

SEQ ID NO: 1367939 - RNA, 19 nt, Human
ucuccagcgcgaccauggc

SEQ ID NO: 1367940 - RNA, 19 nt, Human
ucuccagcgcgaccauggc

SEQ ID NO: 1367941 - RNA, 25 nt, Human
ugaagaaacaggaacaugcccaggu

SEQ ID NO: 1367942 - RNA, 19 nt, Human
ugagagagaccaccccaag

SEQ ID NO: 1367943 - RNA, 19 nt, Human
ugagagagaccaccccaag

SEQ ID NO: 1367944 - RNA, 21 nt, Human
ugagagagaccaccccaagcg

SEQ ID NO: 1367945 - RNA, 19 nt, Human
ugaggagggggcagaguga

SEQ ID NO: 1367946 - RNA, 20 nt, Human
ugaggagggggcagagugaa

SEQ ID NO: 1367947 - RNA, 21 nt, Human
ugaggagggggcagagugaga

SEQ ID NO: 1367948 - RNA, 28 nt, Human
ugauaaaaacccagccucccccuccuca

SEQ ID NO: 1367949 - RNA, 28 nt, Human
ugauaaaaacccagccucccccuccuca

SEQ ID NO: 1367950 - RNA, 22 nt, Human
ugaugcagggggugccaagucc

SEQ ID NO: 1367951 - RNA, 22 nt, Human
ugaugcagggggugccaagucc

SEQ ID NO: 1367952 - RNA, 22 nt, Human
ugcaggccucggcaaagaugcc

SEQ ID NO: 1367953 - RNA, 22 nt, Human
ugcaggccucggcaaagaugcc

SEQ ID NO: 1367954 - RNA, 21 nt, Human
ugcagggggugccaagucccc

SEQ ID NO: 1367955 - RNA, 21 nt, Human
ugcagggggugccaagucccc

SEQ ID NO: 1367956 - RNA, 18 nt, Human
ugccaaguccccauccuc

SEQ ID NO: 1367957 - RNA, 18 nt, Human
ugccaaguccccauccuc

SEQ ID NO: 1367958 - RNA, 18 nt, Human
ugccagagcaccagaaau

SEQ ID NO: 1367959 - RNA, 18 nt, Human
ugccuggugaugcagggg

SEQ ID NO: 1367960 - RNA, 18 nt, Human
ugccuggugaugcagggg

SEQ ID NO: 1367961 - RNA, 21 nt, Human
ugccuggugaugcagggggug

SEQ ID NO: 1367962 - RNA, 18 nt, Human
ugcuccugcccucauccu

SEQ ID NO: 1367963 - RNA, 18 nt, Human
ugcuccugcccucauccu

SEQ ID NO: 1367964 - RNA, 21 nt, Human
uggaagccgagagucucuuca

SEQ ID NO: 1367965 - RNA, 21 nt, Human
uggaagccgagagucucuuca

SEQ ID NO: 1367966 - RNA, 22 nt, Human
uggcagacagcgugcagcagaa

SEQ ID NO: 1367967 - RNA, 22 nt, Human
uggcagacagcgugcagcagaa

SEQ ID NO: 1367968 - RNA, 21 nt, Human
uggcugggcgagguggcagcg

SEQ ID NO: 1367969 - RNA, 21 nt, Human
uggcugggcgagguggcagcg

SEQ ID NO: 1367970 - RNA, 22 nt, Human
uggcugggcgagguggcagcgg

SEQ ID NO: 1367971 - RNA, 22 nt, Human
uggcugggcgagguggcagcgg

SEQ ID NO: 1367972 - RNA, 22 nt, Human
uggcugggcgagguggcagcgg

SEQ ID NO: 1367973 - RNA, 22 nt, Human
uggcugggcgagguggcagcgg

SEQ ID NO: 1367974 - RNA, 24 nt, Human
uggcugggcgagguggcagcgggg

SEQ ID NO: 1367975 - RNA, 24 nt, Human
uggcugggcgagguggcagcgggg

SEQ ID NO: 1367976 - RNA, 18 nt, Human
ugggaaggggcagcagcc

SEQ ID NO: 1367977 - RNA, 18 nt, Human
ugggaaggggcagcagcc

SEQ ID NO: 1367978 - RNA, 20 nt, Human
ugggaaggggcagcagccgc

SEQ ID NO: 1367979 - RNA, 20 nt, Human
ugggaaggggcagcagccgc

SEQ ID NO: 1367980 - RNA, 23 nt, Human
ugggaggggcugagcaggggcug

SEQ ID NO: 1367981 - RNA, 23 nt, Human
ugggaggggcugagcaggggcug

SEQ ID NO: 1367982 - RNA, 23 nt, Human
ugggaggggcugagcaggggcug

SEQ ID NO: 1367983 - RNA, 23 nt, Human
ugggaggggcugagcaggggcug

SEQ ID NO: 1367984 - RNA, 24 nt, Human
ugggaggggcugagcaggggcugg

SEQ ID NO: 1367985 - RNA, 24 nt, Human
ugggaggggcugagcaggggcugg

SEQ ID NO: 1367986 - RNA, 18 nt, Human
ugguuuuucucuccaaaa

SEQ ID NO: 1367987 - RNA, 18 nt, Human
ugguuuuucucuccaaaa

SEQ ID NO: 1367988 - RNA, 21 nt, Human
uuccauggggaugcggcugcg

SEQ ID NO: 1367989 - RNA, 21 nt, Human
uuccauggggaugcggcugcg

SEQ ID NO: 1367990 - RNA, 24 nt, Human
uucucuccaaaagggaaauuuaaa

SEQ ID NO: 1367991 - RNA, 24 nt, Human
uucucuccaaaagggaaauuuaaa

SEQ ID NO: 1367992 - RNA, 22 nt, Human
uuuuugguuuuucucuccaaaa

SEQ ID NO: 1367993 - RNA, 22 nt, Human
uuuuugguuuuucucuccaaaa

SEQ ID NO: 1367994 - RNA, 18 nt, Human
uuuuuuuuuuuuuuuuug

SEQ ID NO: 1367995 - RNA, 22 nt, Human
uuuuuuuuuuuuuuuuugccag

SEQ ID NO: 1367996 - RNA, 21 nt, Human
aaacaaacgaaaccuguucuc

SEQ ID NO: 1367997 - RNA, 23 nt, Human
aagaacguggaggggagggggcg

SEQ ID NO: 1367998 - RNA, 20 nt, Human
aagcucguccugucccccuc

SEQ ID NO: 1367999 - RNA, 21 nt, Human
aaggggaaagggccuccccgg

SEQ ID NO: 1368000 - RNA, 19 nt, Human
aaggggggguccaggcagg

SEQ ID NO: 1368001 - RNA, 20 nt, Human
accgcgggcguaaaacaaac

SEQ ID NO: 1368002 - RNA, 21 nt, Human
acuaaaccccagauacacucc

SEQ ID NO: 1368003 - RNA, 18 nt, Human
acuccuggcugccccccc

SEQ ID NO: 1368004 - RNA, 22 nt, Human
agacaaagaccaggcagcugga

SEQ ID NO: 1368005 - RNA, 22 nt, Human
agaggggcaggacggcugcagg

SEQ ID NO: 1368006 - RNA, 20 nt, Human
agcauuuauuaggcaacugc

SEQ ID NO: 1368007 - RNA, 20 nt, Human
agccccagcggugaaguccc

SEQ ID NO: 1368008 - RNA, 20 nt, Human
agcucguccugucccccucu

SEQ ID NO: 1368009 - RNA, 26 nt, Human
agcuggaccucgggcagccucgacca

SEQ ID NO: 1368010 - RNA, 21 nt, Human
aggaagaacguggaggggagg

SEQ ID NO: 1368011 - RNA, 27 nt, Human
aggaagaacguggaggggagggggcgg

SEQ ID NO: 1368012 - RNA, 23 nt, Human
aggcagcuggaccucgggcagcc

SEQ ID NO: 1368013 - RNA, 18 nt, Human
aggcaggaggugcgguga

SEQ ID NO: 1368014 - RNA, 18 nt, Human
aggcccagagaggggcag

SEQ ID NO: 1368015 - RNA, 23 nt, Human
agucuggcgcuggccgggguggg

SEQ ID NO: 1368016 - RNA, 18 nt, Human
caaaacagacuaaacccc

SEQ ID NO: 1368017 - RNA, 23 nt, Human
caaaacagacuaaaccccagaua

SEQ ID NO: 1368018 - RNA, 19 nt, Human
caagcucguccuguccccc

SEQ ID NO: 1368019 - RNA, 24 nt, Human
cacacucuauuugagagaugggga

SEQ ID NO: 1368020 - RNA, 19 nt, Human
cacagcaacggccauuaga

SEQ ID NO: 1368021 - RNA, 22 nt, Human
cacagcaacggccauuagagcc

SEQ ID NO: 1368022 - RNA, 22 nt, Human
cacaggggagcggaaccggggg

SEQ ID NO: 1368023 - RNA, 22 nt, Human
caccccaggacagccccagcgg

SEQ ID NO: 1368024 - RNA, 20 nt, Human
caccggcccaguucgcccac

SEQ ID NO: 1368025 - RNA, 23 nt, Human
cagacuaaaccccagauacacuc

SEQ ID NO: 1368026 - RNA, 20 nt, Human
cagccucgaccacccagggc

SEQ ID NO: 1368027 - RNA, 22 nt, Human
cagcggugaaguccuccccauu

SEQ ID NO: 1368028 - RNA, 21 nt, Human
cagcuccugggggcuccagga

SEQ ID NO: 1368029 - RNA, 20 nt, Human
caggacagccccagcgguga

SEQ ID NO: 1368030 - RNA, 22 nt, Human
ccaccggcccaguucgcccacc

SEQ ID NO: 1368031 - RNA, 20 nt, Human
ccagagacccauaaagccca

SEQ ID NO: 1368032 - RNA, 18 nt, Human
cccauccaggaugugagg

SEQ ID NO: 1368033 - RNA, 20 nt, Human
ccccacaggggagcggaacc

SEQ ID NO: 1368034 - RNA, 19 nt, Human
ccccccagccccuucccgg

SEQ ID NO: 1368035 - RNA, 20 nt, Human
cccccucuccgcccuguccc

SEQ ID NO: 1368036 - RNA, 20 nt, Human
ccccuucccggaaggccuca

SEQ ID NO: 1368037 - RNA, 20 nt, Human
cccuggaagggcccaaggug

SEQ ID NO: 1368038 - RNA, 24 nt, Human
ccugggaguuaauggcuccccucu

SEQ ID NO: 1368039 - RNA, 22 nt, Human
ccugucccccucuccgcccugc

SEQ ID NO: 1368040 - RNA, 24 nt, Human
cgaccacccagggcagaggucagg

SEQ ID NO: 1368041 - RNA, 18 nt, Human
cgcccuggaagggcccaa

SEQ ID NO: 1368042 - RNA, 19 nt, Human
cguggaggggagggggcgg

SEQ ID NO: 1368043 - RNA, 18 nt, Human
cuccuagauccgugacuc

SEQ ID NO: 1368044 - RNA, 24 nt, Human
cucucccagcuccugggggcuccc

SEQ ID NO: 1368045 - RNA, 18 nt, Human
cucugugcgaccgucucc

SEQ ID NO: 1368046 - RNA, 22 nt, Human
cuggaccucgggcagccucgac

SEQ ID NO: 1368047 - RNA, 20 nt, Human
cuggcgccucgguuucccca

SEQ ID NO: 1368048 - RNA, 18 nt, Human
cugucccccucuccgccc

SEQ ID NO: 1368049 - RNA, 21 nt, Human
cugugccagggaagggggggu

SEQ ID NO: 1368050 - RNA, 23 nt, Human
cuuuacugccacgcaucagugcc

SEQ ID NO: 1368051 - RNA, 22 nt, Human
gaacguggaggggagggggcgg

SEQ ID NO: 1368052 - RNA, 24 nt, Human
gaaguccuccccauuccaguaccu

SEQ ID NO: 1368053 - RNA, 18 nt, Human
gagccgccucccccgccg

SEQ ID NO: 1368054 - RNA, 18 nt, Human
gccagcuggccagggcgg

SEQ ID NO: 1368055 - RNA, 20 nt, Human
gccccacaggggucugaccg

SEQ ID NO: 1368056 - RNA, 20 nt, Human
gcccuggaagggcccaaggu

SEQ ID NO: 1368057 - RNA, 24 nt, Human
gcggaaccgggggccagagaccca

SEQ ID NO: 1368058 - RNA, 19 nt, Human
gcggcagccgggccggggu

SEQ ID NO: 1368059 - RNA, 19 nt, Human
gcgguucuuagccgggggg

SEQ ID NO: 1368060 - RNA, 21 nt, Human
gcuccccucuccaaccccaac

SEQ ID NO: 1368061 - RNA, 27 nt, Human
gcuccccucuccaaccccaaccuuggc

SEQ ID NO: 1368062 - RNA, 20 nt, Human
gcuggggcccccgcaggucc

SEQ ID NO: 1368063 - RNA, 20 nt, Human
ggaaggggggguccaggcag

SEQ ID NO: 1368064 - RNA, 23 nt, Human
ggagcggaaccgggggccagaga

SEQ ID NO: 1368065 - RNA, 24 nt, Human
ggaggaagaacguggaggggaggg

SEQ ID NO: 1368066 - RNA, 18 nt, Human
ggaggggagggggcggca

SEQ ID NO: 1368067 - RNA, 18 nt, Human
ggcuccaggagucccuug

SEQ ID NO: 1368068 - RNA, 20 nt, Human
gggcggcagccgggccgggg

SEQ ID NO: 1368069 - RNA, 21 nt, Human
gggcguaaaacaaacgaaacc

SEQ ID NO: 1368070 - RNA, 26 nt, Human
gggcugcgcucccuccaggggcuuca

SEQ ID NO: 1368071 - RNA, 18 nt, Human
ggggaaacugaggcccag

SEQ ID NO: 1368072 - RNA, 23 nt, Human
ggggagggggcggcagccgggcc

SEQ ID NO: 1368073 - RNA, 23 nt, Human
ggggggcugcguaacgaaggacc

SEQ ID NO: 1368074 - RNA, 29 nt, Human
guaaaacaaacgaaaccuguucucccucc

SEQ ID NO: 1368075 - RNA, 21 nt, Human
gucucguucugagguucuggg

SEQ ID NO: 1368076 - RNA, 23 nt, Human
gugcuggccucuacgugcgguuc

SEQ ID NO: 1368077 - RNA, 18 nt, Human
uaaaacaaacgaaaccug

SEQ ID NO: 1368078 - RNA, 25 nt, Human
uaaaacaaacgaaaccuguucuccc

SEQ ID NO: 1368079 - RNA, 20 nt, Human
uaaaccccagauacacuccu

SEQ ID NO: 1368080 - RNA, 25 nt, Human
uaaaccccagauacacuccuagauc

SEQ ID NO: 1368081 - RNA, 21 nt, Human
uaccugagggccccacacccc

SEQ ID NO: 1368082 - RNA, 19 nt, Human
uaccuggcgccucgguuuc

SEQ ID NO: 1368083 - RNA, 19 nt, Human
uagauccgugacucgguga

SEQ ID NO: 1368084 - RNA, 21 nt, Human
uauuugagagauggggaaacu

SEQ ID NO: 1368085 - RNA, 25 nt, Human
uccaaaaucgaggcguccgcagggc

SEQ ID NO: 1368086 - RNA, 24 nt, Human
uccccauuccaguaccugcugccu

SEQ ID NO: 1368087 - RNA, 21 nt, Human
ucccccgccagcagcuggggc

SEQ ID NO: 1368088 - RNA, 23 nt, Human
ucccuccaggggcugcaggagga

SEQ ID NO: 1368089 - RNA, 18 nt, Human
uccgccucucccagcucc

SEQ ID NO: 1368090 - RNA, 23 nt, Human
ucuaccugagggccccacacccc

SEQ ID NO: 1368091 - RNA, 21 nt, Human
ucuccaaccccaaccuuggcu

SEQ ID NO: 1368092 - RNA, 22 nt, Human
ucucccagcuccugggggcucc

SEQ ID NO: 1368093 - RNA, 19 nt, Human
ucucccuccguccuggagc

SEQ ID NO: 1368094 - RNA, 24 nt, Human
ucugucucugugcgaccgucuccc

SEQ ID NO: 1368095 - RNA, 20 nt, Human
ugaaggggaaagggccuccc

SEQ ID NO: 1368096 - RNA, 23 nt, Human
ugaggcaggaggugcggugaggu

SEQ ID NO: 1368097 - RNA, 18 nt, Human
ugagggccccacaccccu

SEQ ID NO: 1368098 - RNA, 22 nt, Human
ugagguuucuuguaggggcugu

SEQ ID NO: 1368099 - RNA, 22 nt, Human
ugccccggccccacaggggucu

SEQ ID NO: 1368100 - RNA, 19 nt, Human
ugcccggcucacuuuugca

SEQ ID NO: 1368101 - RNA, 21 nt, Human
ugcccggcucacuuuugcagc

SEQ ID NO: 1368102 - RNA, 20 nt, Human
uggaggggagggggcggcag

SEQ ID NO: 1368103 - RNA, 18 nt, Human
uggccugggaguuaaugg

SEQ ID NO: 1368104 - RNA, 26 nt, Human
uggcuccccucuccaaccccaaccuu

SEQ ID NO: 1368105 - RNA, 18 nt, Human
uggcugcccccccagccc

SEQ ID NO: 1368106 - RNA, 21 nt, Human
ugggaacaaaacagacuaaac

SEQ ID NO: 1368107 - RNA, 23 nt, Human
ugggauguccccgcagcagcagg

SEQ ID NO: 1368108 - RNA, 18 nt, Human
ugggccuccaauacacag

SEQ ID NO: 1368109 - RNA, 24 nt, Human
uuaauggcuccccucuccaacccc

SEQ ID NO: 1368110 - RNA, 19 nt, Human
uuacugcuggcuuuguugc

SEQ ID NO: 1368111 - RNA, 18 nt, Human
uuccccauccaggaugug

SEQ ID NO: 1368112 - RNA, 23 nt, Human
aaaaaauauaaugaaacuccaaa

SEQ ID NO: 1368113 - RNA, 27 nt, Human
aaaacaaaaaauauaaugaaacuccaa

SEQ ID NO: 1368114 - RNA, 22 nt, Human
aaaacaaauucuuuucuuugga

SEQ ID NO: 1368115 - RNA, 23 nt, Human
aaaauaaaggcaguccauaggaa

SEQ ID NO: 1368116 - RNA, 26 nt, Human
aaacagaaaaugauuaaaggggaccc

SEQ ID NO: 1368117 - RNA, 23 nt, Human
aaacagaaaaugauuaaaguuca

SEQ ID NO: 1368118 - RNA, 19 nt, Human
aaagaaaccuugggggagg

SEQ ID NO: 1368119 - RNA, 20 nt, Human
aaagaaaccuugggggaggg

SEQ ID NO: 1368120 - RNA, 21 nt, Human
aaaguucaugaaaaaaaaacu

SEQ ID NO: 1368121 - RNA, 19 nt, Human
aaccauuaaaacaaauucu

SEQ ID NO: 1368122 - RNA, 25 nt, Human
aaccccgucucuacuaaaaauacaa

SEQ ID NO: 1368123 - RNA, 21 nt, Human
aagaaguauauuuaaacaaaa

SEQ ID NO: 1368124 - RNA, 22 nt, Human
aagaaucaauguucaaccacca

SEQ ID NO: 1368125 - RNA, 19 nt, Human
aagaucaaccaauuugcuc

SEQ ID NO: 1368126 - RNA, 21 nt, Human
aagcaaaugaccuuaggucua

SEQ ID NO: 1368127 - RNA, 24 nt, Human
aaucccuugaacccgggaggugga

SEQ ID NO: 1368128 - RNA, 22 nt, Human
aaugaaaaagccugaagaggga

SEQ ID NO: 1368129 - RNA, 24 nt, Human
acaaaaacaccaagcucuccucuc

SEQ ID NO: 1368130 - RNA, 23 nt, Human
accuguggucucagcuacucggg

SEQ ID NO: 1368131 - RNA, 20 nt, Human
acuaaaauaaaggcagucca

SEQ ID NO: 1368132 - RNA, 25 nt, Human
agaaaaugauuaaaguucaugaaaa

SEQ ID NO: 1368133 - RNA, 22 nt, Human
agaaaugcccaaauaaaaaaaa

SEQ ID NO: 1368134 - RNA, 21 nt, Human
agaacaauuaaauacaaagca

SEQ ID NO: 1368135 - RNA, 24 nt, Human
agcacuuugggaggccgagguggg

SEQ ID NO: 1368136 - RNA, 21 nt, Human
aggcagaaucccuugaacccg

SEQ ID NO: 1368137 - RNA, 22 nt, Human
aggcaguccauaggaagccuca

SEQ ID NO: 1368138 - RNA, 21 nt, Human
aggccgaggugggcggaucac

SEQ ID NO: 1368139 - RNA, 21 nt, Human
aggcugaggcagaaucccuug

SEQ ID NO: 1368140 - RNA, 20 nt, Human
auggcacuuuacaccccaaa

SEQ ID NO: 1368141 - RNA, 24 nt, Human
caacaaauucuaauaaggccaaaa

SEQ ID NO: 1368142 - RNA, 21 nt, Human
caccaccaugugugaagcccc

SEQ ID NO: 1368143 - RNA, 23 nt, Human
caccuguggucucagcuacucgg

SEQ ID NO: 1368144 - RNA, 24 nt, Human
caccuguggucucagcuacucggg

SEQ ID NO: 1368145 - RNA, 24 nt, Human
cacgccuguaaucccagcacuuug

SEQ ID NO: 1368146 - RNA, 24 nt, Human
cagcacuuugggaggccgaggugg

SEQ ID NO: 1368147 - RNA, 24 nt, Human
cagcuacucgggaggcugaggcag

SEQ ID NO: 1368148 - RNA, 23 nt, Human
caggccgggggugguggcucacg

SEQ ID NO: 1368149 - RNA, 28 nt, Human
ccaacaaucucccuuaacauucucauuc

SEQ ID NO: 1368150 - RNA, 19 nt, Human
ccauucugguuacuuggca

SEQ ID NO: 1368151 - RNA, 23 nt, Human
ccccaaacgagcaaaaguaacaa

SEQ ID NO: 1368152 - RNA, 21 nt, Human
cccgggagguggagguugcag

SEQ ID NO: 1368153 - RNA, 24 nt, Human
ccucucugaaaauacaggccgggg

SEQ ID NO: 1368154 - RNA, 21 nt, Human
ccuguggucucagcuacucgg

SEQ ID NO: 1368155 - RNA, 22 nt, Human
cgaggugggcggaucacguggu

SEQ ID NO: 1368156 - RNA, 24 nt, Human
cgccuguaaucccagcacuuuggg

SEQ ID NO: 1368157 - RNA, 19 nt, Human
cgggagguggagguugcag

SEQ ID NO: 1368158 - RNA, 18 nt, Human
cgucucuacuaaaccccg

SEQ ID NO: 1368159 - RNA, 24 nt, Human
cguggucaggagugauccgucucu

SEQ ID NO: 1368160 - RNA, 22 nt, Human
cucacgccuguaaucccagcac

SEQ ID NO: 1368161 - RNA, 24 nt, Human
cucacgccuguaaucccagcacuu

SEQ ID NO: 1368162 - RNA, 21 nt, Human
cuuagagcuccaacaacucuc

SEQ ID NO: 1368163 - RNA, 21 nt, Human
cuugaacccgggagguggagg

SEQ ID NO: 1368164 - RNA, 23 nt, Human
gaggugggcggaucacgugguca

SEQ ID NO: 1368165 - RNA, 19 nt, Human
ggaggggugauagggaagg

SEQ ID NO: 1368166 - RNA, 22 nt, Human
ggcggaucacguggucaggagu

SEQ ID NO: 1368167 - RNA, 21 nt, Human
ggcucacgccuguaaucccag

SEQ ID NO: 1368168 - RNA, 24 nt, Human
ggcugaggcagaaucccuugaacc

SEQ ID NO: 1368169 - RNA, 20 nt, Human
gggaggccgaggugggcgga

SEQ ID NO: 1368170 - RNA, 23 nt, Human
gggaggggugauagggaagggga

SEQ ID NO: 1368171 - RNA, 19 nt, Human
gggggaggggugauaggga

SEQ ID NO: 1368172 - RNA, 24 nt, Human
gggggaggggugauagggaagggg

SEQ ID NO: 1368173 - RNA, 25 nt, Human
gggggaggggugauagggaagggga

SEQ ID NO: 1368174 - RNA, 23 nt, Human
ggggugguggcucacgccuguaa

SEQ ID NO: 1368175 - RNA, 20 nt, Human
gggugaggugauguaaaccu

SEQ ID NO: 1368176 - RNA, 24 nt, Human
gguggcucacgccuguaaucccag

SEQ ID NO: 1368177 - RNA, 23 nt, Human
uaaaaaaaaauuccagaauugaa

SEQ ID NO: 1368178 - RNA, 24 nt, Human
uaaaauguaucaguccacaaaaca

SEQ ID NO: 1368179 - RNA, 22 nt, Human
uaaacaaaauuuaauacaacca

SEQ ID NO: 1368180 - RNA, 23 nt, Human
uaacuaagaacaauuaaauacaa

SEQ ID NO: 1368181 - RNA, 21 nt, Human
uaagauagauauuugucugaa

SEQ ID NO: 1368182 - RNA, 20 nt, Human
uacacaauuuaagaagggga

SEQ ID NO: 1368183 - RNA, 18 nt, Human
uacaccccaaacgagcaa

SEQ ID NO: 1368184 - RNA, 18 nt, Human
uagaggaaaaacagaaaa

SEQ ID NO: 1368185 - RNA, 20 nt, Human
uagauugaaaaaaaaguuga

SEQ ID NO: 1368186 - RNA, 24 nt, Human
uagcaaacucaucucuucugaccu

SEQ ID NO: 1368187 - RNA, 20 nt, Human
uagccgggugugguggcacg

SEQ ID NO: 1368188 - RNA, 20 nt, Human
uagcuagucaaaccuacugc

SEQ ID NO: 1368189 - RNA, 22 nt, Human
uaggaaacaaauaugaaccuua

SEQ ID NO: 1368190 - RNA, 24 nt, Human
uauaaaagaaucaauguucaacca

SEQ ID NO: 1368191 - RNA, 21 nt, Human
uaucaaaaaauaaaaacaaaa

SEQ ID NO: 1368192 - RNA, 23 nt, Human
uaucaaaaaauaaaaacaaaaaa

SEQ ID NO: 1368193 - RNA, 19 nt, Human
ucaauaaaaauuuaaauaa

SEQ ID NO: 1368194 - RNA, 21 nt, Human
ucacguggucaggagugaucc

SEQ ID NO: 1368195 - RNA, 24 nt, Human
ucagugggaagauuacaguagaaa

SEQ ID NO: 1368196 - RNA, 24 nt, Human
ucaucuaggaaauaaaaagguuac

SEQ ID NO: 1368197 - RNA, 19 nt, Human
ucccugaguauuuacauca

SEQ ID NO: 1368198 - RNA, 24 nt, Human
ucccuugaacccgggagguggagg

SEQ ID NO: 1368199 - RNA, 23 nt, Human
ucuaaagugucucuggaauuauu

SEQ ID NO: 1368200 - RNA, 26 nt, Human
ucuagaaucaugaauugaagauuauu

SEQ ID NO: 1368201 - RNA, 25 nt, Human
ucucuacuaaaaauacaaaaaaauu

SEQ ID NO: 1368202 - RNA, 24 nt, Human
ugaaaaaaaaguugaaauagcacu

SEQ ID NO: 1368203 - RNA, 22 nt, Human
ugaaacuccaaacauccaacaa

SEQ ID NO: 1368204 - RNA, 27 nt, Human
ugaaauagcacuagagaacuuaaggca

SEQ ID NO: 1368205 - RNA, 23 nt, Human
ugacaauaaugauagcuagcuag

SEQ ID NO: 1368206 - RNA, 21 nt, Human
ugaggcagaaucccuugaacc

SEQ ID NO: 1368207 - RNA, 22 nt, Human
ugaggcagaaucccuugaaccc

SEQ ID NO: 1368208 - RNA, 23 nt, Human
ugaggugauguaaaccuggcuuu

SEQ ID NO: 1368209 - RNA, 21 nt, Human
uggcaccacaaaaacaccaag

SEQ ID NO: 1368210 - RNA, 24 nt, Human
uggcacgcaccuguggucucagcu

SEQ ID NO: 1368211 - RNA, 24 nt, Human
uggcucacgccuguaaucccagca

SEQ ID NO: 1368212 - RNA, 19 nt, Human
ugggaggccgaggugggcg

SEQ ID NO: 1368213 - RNA, 24 nt, Human
ugggaggccgaggugggcggauca

SEQ ID NO: 1368214 - RNA, 22 nt, Human
ugggcggaucacguggucagga

SEQ ID NO: 1368215 - RNA, 24 nt, Human
ugguggcucacgccuguaauccca

SEQ ID NO: 1368216 - RNA, 19 nt, Human
uguaagauagauauuuguc

SEQ ID NO: 1368217 - RNA, 18 nt, Human
ugugguggcacgcaccug

SEQ ID NO: 1368218 - RNA, 23 nt, Human
ugugguggcacgcaccugugguc

SEQ ID NO: 1368219 - RNA, 19 nt, Human
uguucaaccaccaccaugu

SEQ ID NO: 1368220 - RNA, 18 nt, Human
uuagccgggugugguggc

SEQ ID NO: 1368221 - RNA, 20 nt, Human
uuagccgggugugguggcac

SEQ ID NO: 1368222 - RNA, 22 nt, Human
uuagccgggugugguggcacgc

SEQ ID NO: 1368223 - RNA, 22 nt, Human
uugaaaccauuaaaacaaauuc

SEQ ID NO: 1368224 - RNA, 24 nt, Human
uugaacccgggagguggagguugc

SEQ ID NO: 1368225 - RNA, 31 nt, Human
uuggcaccacaaaaacaccaagcucuccucc

SEQ ID NO: 1368226 - RNA, 25 nt, Human
uugggaggccgaggugggcggauca

SEQ ID NO: 1368227 - RNA, 24 nt, Human
uugggggaggggugauagggaagg

SEQ ID NO: 1368228 - RNA, 22 nt, Human
aagauauuuauugaggguuuac

SEQ ID NO: 1368229 - RNA, 24 nt, Human
agcuggcucggaccuguccaccuc

SEQ ID NO: 1368230 - RNA, 24 nt, Human
agcugugccguguggcugaggagu

SEQ ID NO: 1368231 - RNA, 24 nt, Human
agguagcugcuggccacguacuug

SEQ ID NO: 1368232 - RNA, 24 nt, Human
ccccugggauccugcagcuccagg

SEQ ID NO: 1368233 - RNA, 21 nt, Human
cccuguggguggggugggggc

SEQ ID NO: 1368234 - RNA, 19 nt, Human
ccugugggugggguggggg

SEQ ID NO: 1368235 - RNA, 21 nt, Human
cgagaagggcugaauggcuug

SEQ ID NO: 1368236 - RNA, 26 nt, Human
cgagaagggcugaauggcuugggaug

SEQ ID NO: 1368237 - RNA, 22 nt, Human
cuccccugggauccugcagcuc

SEQ ID NO: 1368238 - RNA, 25 nt, Human
cuccccugggauccugcagcuccag

SEQ ID NO: 1368239 - RNA, 23 nt, Human
cugcaggggccacugacuucucc

SEQ ID NO: 1368240 - RNA, 23 nt, Human
cugggauccugcagcuccaggcc

SEQ ID NO: 1368241 - RNA, 25 nt, Human
cugggauccugcagcuccaggcccc

SEQ ID NO: 1368242 - RNA, 23 nt, Human
gccccuguggguggggugggggc

SEQ ID NO: 1368243 - RNA, 22 nt, Human
gcucuguuuggagggcgugguc

SEQ ID NO: 1368244 - RNA, 20 nt, Human
ggauccugcagcuccaggcc

SEQ ID NO: 1368245 - RNA, 26 nt, Human
ggguacagcgagaagggcugaauggc

SEQ ID NO: 1368246 - RNA, 18 nt, Human
ggguggggugggggcugg

SEQ ID NO: 1368247 - RNA, 18 nt, Human
gucuucuccacgcucugg

SEQ ID NO: 1368248 - RNA, 26 nt, Human
uacagcgagaagggcugaauggcuug

SEQ ID NO: 1368249 - RNA, 19 nt, Human
ucaggcucagguagcugcu

SEQ ID NO: 1368250 - RNA, 23 nt, Human
ucaggcucagguagcugcuggcc

SEQ ID NO: 1368251 - RNA, 19 nt, Human
uccccugggauccugcagc

SEQ ID NO: 1368252 - RNA, 23 nt, Human
uccccugggauccugcagcucca

SEQ ID NO: 1368253 - RNA, 24 nt, Human
uccccugggauccugcagcuccag

SEQ ID NO: 1368254 - RNA, 22 nt, Human
ugacaaagauauuuauugaggg

SEQ ID NO: 1368255 - RNA, 18 nt, Human
ugcagagagagaccccuc

SEQ ID NO: 1368256 - RNA, 24 nt, Human
ugcagcuccaggccccugugggug

SEQ ID NO: 1368257 - RNA, 22 nt, Human
uggguacagcgagaagggcuga

SEQ ID NO: 1368258 - RNA, 20 nt, Human
uggguggggugggggcugga

SEQ ID NO: 1368259 - RNA, 18 nt, Human
ugugccguguggcugagg

SEQ ID NO: 1368260 - RNA, 21 nt, Human
uuggagggcguggucuucucc

SEQ ID NO: 1368261 - RNA, 18 nt, Human
aagaggcucucugccuuu

SEQ ID NO: 1368262 - RNA, 20 nt, Human
acccagagagcugagaagag

SEQ ID NO: 1368263 - RNA, 21 nt, Human
acccagagagcugagaagagu

SEQ ID NO: 1368264 - RNA, 20 nt, Human
agagcugagaagaguagcug

SEQ ID NO: 1368265 - RNA, 21 nt, Human
agaguagcugugaggcucagg

SEQ ID NO: 1368266 - RNA, 18 nt, Human
cagcuccccucagccugu

SEQ ID NO: 1368267 - RNA, 22 nt, Human
ccagacccagagagcugagaag

SEQ ID NO: 1368268 - RNA, 18 nt, Human
cccuaacccugcuccccu

SEQ ID NO: 1368269 - RNA, 19 nt, Human
cccuaacccugcuccccuu

SEQ ID NO: 1368270 - RNA, 18 nt, Human
cccucagccuguucuccu

SEQ ID NO: 1368271 - RNA, 24 nt, Human
ccggguagcaccucagcuccucuc

SEQ ID NO: 1368272 - RNA, 18 nt, Human
ccuaacccugcuccccuu

SEQ ID NO: 1368273 - RNA, 20 nt, Human
ccucagccuguucuccuucc

SEQ ID NO: 1368274 - RNA, 21 nt, Human
ccuguucuccuuccagaccca

SEQ ID NO: 1368275 - RNA, 20 nt, Human
cuccccucagccuguucucc

SEQ ID NO: 1368276 - RNA, 21 nt, Human
cuccggguagcaccucagcuc

SEQ ID NO: 1368277 - RNA, 19 nt, Human
cuccucucagcuccccuca

SEQ ID NO: 1368278 - RNA, 18 nt, Human
cuuucaggaacagcccua

SEQ ID NO: 1368279 - RNA, 18 nt, Human
gagaagaguagcugugag

SEQ ID NO: 1368280 - RNA, 21 nt, Human
gaguagcugugaggcucaggg

SEQ ID NO: 1368281 - RNA, 18 nt, Human
gccucagauucccaagug

SEQ ID NO: 1368282 - RNA, 18 nt, Human
ggcaggugggggugaaug

SEQ ID NO: 1368283 - RNA, 22 nt, Human
ggccggggccuggggggacgaa

SEQ ID NO: 1368284 - RNA, 19 nt, Human
ggccuggggggacgaaggu

SEQ ID NO: 1368285 - RNA, 18 nt, Human
gggccggggccugggggg

SEQ ID NO: 1368286 - RNA, 22 nt, Human
gggccuggggggacgaaggugg

SEQ ID NO: 1368287 - RNA, 20 nt, Human
ggggggacgaaggugguaug

SEQ ID NO: 1368288 - RNA, 19 nt, Human
uaaaaauaaugagagccag

SEQ ID NO: 1368289 - RNA, 19 nt, Human
ucaaaguuuuaacauaaaa

SEQ ID NO: 1368290 - RNA, 23 nt, Human
ucagcuccccucagccuguucuc

SEQ ID NO: 1368291 - RNA, 23 nt, Human
ucagcuccucucagcuccccuca

SEQ ID NO: 1368292 - RNA, 18 nt, Human
ucaggaacagcccuaacc

SEQ ID NO: 1368293 - RNA, 23 nt, Human
ugagagccaggaguggggccggg

SEQ ID NO: 1368294 - RNA, 22 nt, Human
ugccucagauucccaagugggc

SEQ ID NO: 1368295 - RNA, 22 nt, Human
uggcacacaggccucacccucc

SEQ ID NO: 1368296 - RNA, 26 nt, Human
ugggcaggugggggugaauggggcuc

SEQ ID NO: 1368297 - RNA, 19 nt, Human
uggggccggggccuggggg

SEQ ID NO: 1368298 - RNA, 23 nt, Human
uggggccggggccuggggggacg

SEQ ID NO: 1368299 - RNA, 19 nt, Human
ugggggugaauggggcucc

SEQ ID NO: 1368300 - RNA, 20 nt, Human
uucccaagugggcagguggg

SEQ ID NO: 1368301 - RNA, 20 nt, Human
cagucccuggggugcgaaaa

SEQ ID NO: 1368302 - RNA, 24 nt, Human
ccaggagcagucccuggggugcga

SEQ ID NO: 1368303 - RNA, 25 nt, Human
cucaauaauuauauauaaaauugcu

SEQ ID NO: 1368304 - RNA, 20 nt, Human
cucuucauugcagacaugua

SEQ ID NO: 1368305 - RNA, 22 nt, Human
cuuuccuucuuucccuuuuucu

SEQ ID NO: 1368306 - RNA, 20 nt, Human
gcaguuuuuccaauuggugu

SEQ ID NO: 1368307 - RNA, 20 nt, Human
ucauuuguauuuucucagca

SEQ ID NO: 1368308 - RNA, 20 nt, Human
ucucaugguaauccaaaugg

SEQ ID NO: 1368309 - RNA, 24 nt, Human
uucuuucccuuuuucucaugguaa

SEQ ID NO: 1368310 - RNA, 27 nt, Human
uugauagucuuuucauuuguauuuucu

SEQ ID NO: 1368311 - RNA, 25 nt, Human
aaaaaccacuaccguucauuaaguc

SEQ ID NO: 1368312 - RNA, 22 nt, Human
aaaaaugaaguuaaagcucaga

SEQ ID NO: 1368313 - RNA, 18 nt, Human
aacagaaaaccacagacu

SEQ ID NO: 1368314 - RNA, 24 nt, Human
aagcagcuuuaaaauccuccggga

SEQ ID NO: 1368315 - RNA, 20 nt, Human
aaugcacauuuucuuggguu

SEQ ID NO: 1368316 - RNA, 28 nt, Human
acacauuuccaagcaggucuugaccccg

SEQ ID NO: 1368317 - RNA, 22 nt, Human
acagcagaggagccugagugcc

SEQ ID NO: 1368318 - RNA, 21 nt, Human
acuaccguucauuaagucacc

SEQ ID NO: 1368319 - RNA, 21 nt, Human
acuuggccauuuuuaauccaa

SEQ ID NO: 1368320 - RNA, 21 nt, Human
agaaacuuuuuucuccuucag

SEQ ID NO: 1368321 - RNA, 24 nt, Human
agaaaguguaggggacuuaaacaa

SEQ ID NO: 1368322 - RNA, 24 nt, Human
agaaauacacauuuccaagcaggu

SEQ ID NO: 1368323 - RNA, 18 nt, Human
agcccugggccaaguuuc

SEQ ID NO: 1368324 - RNA, 20 nt, Human
agcccugggccaaguuuccc

SEQ ID NO: 1368325 - RNA, 25 nt, Human
agcuuuaagaauuauauucucuaau

SEQ ID NO: 1368326 - RNA, 21 nt, Human
aggaaggaggcaaaauccuuc

SEQ ID NO: 1368327 - RNA, 22 nt, Human
aggaugaccugguugauagucu

SEQ ID NO: 1368328 - RNA, 22 nt, Human
agugaguuucuuguaaucucag

SEQ ID NO: 1368329 - RNA, 23 nt, Human
auagaaacaagcuucuucuacau

SEQ ID NO: 1368330 - RNA, 18 nt, Human
auguucaccgacuuggaa

SEQ ID NO: 1368331 - RNA, 24 nt, Human
auucagacugcuucaacagaaaac

SEQ ID NO: 1368332 - RNA, 27 nt, Human
auucccagguucuaaugcacauuuucu

SEQ ID NO: 1368333 - RNA, 19 nt, Human
auuuaguggcauucuccuu

SEQ ID NO: 1368334 - RNA, 23 nt, Human
caacaagaagaggaaacauuuuc

SEQ ID NO: 1368335 - RNA, 24 nt, Human
caacaagaagaggaaacauuuuca

SEQ ID NO: 1368336 - RNA, 24 nt, Human
cacagcaaaaacccaccuuuaaag

SEQ ID NO: 1368337 - RNA, 18 nt, Human
cacugacaacaccuuugc

SEQ ID NO: 1368338 - RNA, 19 nt, Human
cagaaucuucagauucucc

SEQ ID NO: 1368339 - RNA, 21 nt, Human
cagcagaggagccugagugcc

SEQ ID NO: 1368340 - RNA, 22 nt, Human
cagcaggaaggaggcaaaaucc

SEQ ID NO: 1368341 - RNA, 19 nt, Human
caggaccaggguuaugcug

SEQ ID NO: 1368342 - RNA, 27 nt, Human
caguuuaagcucauuugagaaacuuuu

SEQ ID NO: 1368343 - RNA, 20 nt, Human
cauccucugggucaucuccc

SEQ ID NO: 1368344 - RNA, 18 nt, Human
caucuugggaaaauuguu

SEQ ID NO: 1368345 - RNA, 23 nt, Human
ccacccucaugaccuaucaucuc

SEQ ID NO: 1368346 - RNA, 18 nt, Human
ccagcucuuuuucccaca

SEQ ID NO: 1368347 - RNA, 22 nt, Human
ccgaaagacaaacaaaugguga

SEQ ID NO: 1368348 - RNA, 19 nt, Human
ccucaugaccuaucaucuc

SEQ ID NO: 1368349 - RNA, 19 nt, Human
ccucuggacacaauuccug

SEQ ID NO: 1368350 - RNA, 27 nt, Human
ccugagcccugggccaaguuucccaga

SEQ ID NO: 1368351 - RNA, 21 nt, Human
ccuucagaguaccguauucau

SEQ ID NO: 1368352 - RNA, 20 nt, Human
cgacuuggaagcaaucagca

SEQ ID NO: 1368353 - RNA, 22 nt, Human
cuagauggcuaaacaacaaaca

SEQ ID NO: 1368354 - RNA, 21 nt, Human
cucgcgguaauacccucucca

SEQ ID NO: 1368355 - RNA, 21 nt, Human
cugcaaauuucuuuggauuac

SEQ ID NO: 1368356 - RNA, 22 nt, Human
cugucacuacccuaauaagccc

SEQ ID NO: 1368357 - RNA, 19 nt, Human
cuuccagcucuuuuuccca

SEQ ID NO: 1368358 - RNA, 20 nt, Human
cuuggcauccucugggucau

SEQ ID NO: 1368359 - RNA, 23 nt, Human
cuuuaaaagcugucccacacgca

SEQ ID NO: 1368360 - RNA, 22 nt, Human
gaucaugguguaaguagauuca

SEQ ID NO: 1368361 - RNA, 20 nt, Human
gauuauggaaaaggccucuc

SEQ ID NO: 1368362 - RNA, 23 nt, Human
gccaucuucccauuguaucaucc

SEQ ID NO: 1368363 - RNA, 21 nt, Human
gccaugguaucauaaagcugg

SEQ ID NO: 1368364 - RNA, 23 nt, Human
gcuuaaagaaucacagaacuuag

SEQ ID NO: 1368365 - RNA, 22 nt, Human
gggugaggguaagaucaggugg

SEQ ID NO: 1368366 - RNA, 18 nt, Human
gguagugagcagagauug

SEQ ID NO: 1368367 - RNA, 20 nt, Human
uaaaauacaugcugcuguga

SEQ ID NO: 1368368 - RNA, 24 nt, Human
uaaacaacaaacauguauuucuca

SEQ ID NO: 1368369 - RNA, 20 nt, Human
uaaagcagcuuuaaaauccu

SEQ ID NO: 1368370 - RNA, 23 nt, Human
uaaaucacuugcaguuuaagcuc

SEQ ID NO: 1368371 - RNA, 19 nt, Human
uaacuacuccaagugacug

SEQ ID NO: 1368372 - RNA, 20 nt, Human
uaacuuuucaacaagaagag

SEQ ID NO: 1368373 - RNA, 19 nt, Human
uaccguucauuaagucacc

SEQ ID NO: 1368374 - RNA, 19 nt, Human
uacuggauagaaacaagcu

SEQ ID NO: 1368375 - RNA, 24 nt, Human
uagaaacaagcuucuucuacauuc

SEQ ID NO: 1368376 - RNA, 18 nt, Human
uauucauuuaucacagca

SEQ ID NO: 1368377 - RNA, 19 nt, Human
ucaacaagaagaggaaaca

SEQ ID NO: 1368378 - RNA, 19 nt, Human
ucaacagaaaaccacagac

SEQ ID NO: 1368379 - RNA, 21 nt, Human
ucacuuuucuuacauuaucuc

SEQ ID NO: 1368380 - RNA, 20 nt, Human
ucaggaacacuggaugcaag

SEQ ID NO: 1368381 - RNA, 19 nt, Human
ucaggugggaauccauacu

SEQ ID NO: 1368382 - RNA, 20 nt, Human
uccaaacaaauuugccaaua

SEQ ID NO: 1368383 - RNA, 18 nt, Human
uccacagcagugaguuuc

SEQ ID NO: 1368384 - RNA, 20 nt, Human
uccagaaucuucagauucuc

SEQ ID NO: 1368385 - RNA, 18 nt, Human
uccauggccacagcagag

SEQ ID NO: 1368386 - RNA, 22 nt, Human
uccauggccacagcagaggagc

SEQ ID NO: 1368387 - RNA, 21 nt, Human
ucccagguucuaaugcacauu

SEQ ID NO: 1368388 - RNA, 28 nt, Human
ucccagguucuaaugcacauuuucuugg

SEQ ID NO: 1368389 - RNA, 18 nt, Human
uccccgaaagacaaacaa

SEQ ID NO: 1368390 - RNA, 19 nt, Human
ucccuuggaagccagcagc

SEQ ID NO: 1368391 - RNA, 20 nt, Human
uccuggaggcuggaaaguuc

SEQ ID NO: 1368392 - RNA, 24 nt, Human
ucuugaggggugaggguaagauca

SEQ ID NO: 1368393 - RNA, 21 nt, Human
ucuugggaaaauuguugugag

SEQ ID NO: 1368394 - RNA, 22 nt, Human
ucuuggguucuguuugcuuguu

SEQ ID NO: 1368395 - RNA, 19 nt, Human
ucuuuuuauuuugggcaau

SEQ ID NO: 1368396 - RNA, 18 nt, Human
ugaacaaaacaguugaau

SEQ ID NO: 1368397 - RNA, 20 nt, Human
ugaacuagacaaugaauccc

SEQ ID NO: 1368398 - RNA, 19 nt, Human
ugaaugaccgauuucucuu

SEQ ID NO: 1368399 - RNA, 25 nt, Human
ugaauuugcauuucuugaaguuucu

SEQ ID NO: 1368400 - RNA, 27 nt, Human
ugacaacaccuuugccuuggcauccuc

SEQ ID NO: 1368401 - RNA, 26 nt, Human
ugacugagaaaaacuuaaauuagcau

SEQ ID NO: 1368402 - RNA, 22 nt, Human
ugagaaaaacuuaaauuagcau

SEQ ID NO: 1368403 - RNA, 23 nt, Human
ugagaaaauuuacaaaaacaaga

SEQ ID NO: 1368404 - RNA, 21 nt, Human
ugagacacgaguugggagucc

SEQ ID NO: 1368405 - RNA, 24 nt, Human
ugagcagagauuggagaacaagcc

SEQ ID NO: 1368406 - RNA, 18 nt, Human
ugagggcagaaacaaucu

SEQ ID NO: 1368407 - RNA, 23 nt, Human
ugagucuugggcaaaaacaacag

SEQ ID NO: 1368408 - RNA, 22 nt, Human
ugcaggcaacuuauccauuugu

SEQ ID NO: 1368409 - RNA, 22 nt, Human
uggaucccuaaggcaaguguuu

SEQ ID NO: 1368410 - RNA, 19 nt, Human
uggcauguggaucccuaag

SEQ ID NO: 1368411 - RNA, 21 nt, Human
uggcauguggaucccuaaggc

SEQ ID NO: 1368412 - RNA, 20 nt, Human
ugggaaaauuguugugagcc

SEQ ID NO: 1368413 - RNA, 23 nt, Human
ugggcaaaaacaacagauuugca

SEQ ID NO: 1368414 - RNA, 21 nt, Human
ugguagugagcagagauugga

SEQ ID NO: 1368415 - RNA, 19 nt, Human
ugugagccuuuccaggcug

SEQ ID NO: 1368416 - RNA, 23 nt, Human
uguuugcuuaaagaaucacagaa

SEQ ID NO: 1368417 - RNA, 18 nt, Human
uuaaaagacagcaaugaa

SEQ ID NO: 1368418 - RNA, 25 nt, Human
uuaauccucaaaacaacuagaggua

SEQ ID NO: 1368419 - RNA, 19 nt, Human
uuacuggauagaaacaagc

SEQ ID NO: 1368420 - RNA, 19 nt, Human
uuauggaaaaggccucucu

SEQ ID NO: 1368421 - RNA, 18 nt, Human
uucaucuauugcaaagac

SEQ ID NO: 1368422 - RNA, 21 nt, Human
uuccagcacgaccagacaucu

SEQ ID NO: 1368423 - RNA, 20 nt, Human
uuccauggccacagcagagg

SEQ ID NO: 1368424 - RNA, 18 nt, Human
uuccugagcccugggcca

SEQ ID NO: 1368425 - RNA, 18 nt, Human
uuccugagcccugggcca

SEQ ID NO: 1368426 - RNA, 21 nt, Human
uuccugagcccugggccaagu

SEQ ID NO: 1368427 - RNA, 25 nt, Human
uuccuuucuugcagcucaucaagug

SEQ ID NO: 1368428 - RNA, 18 nt, Human
uucuuccagcacgaccag

SEQ ID NO: 1368429 - RNA, 20 nt, Human
uucuuuggauuacccuuuuu

SEQ ID NO: 1368430 - RNA, 23 nt, Human
uugccgugucuuguaaaucgcac

SEQ ID NO: 1368431 - RNA, 23 nt, Human
uuguugugagccuuuccaggcug

SEQ ID NO: 1368432 - RNA, 25 nt, Human
uuuaagcucauuugagaaacuuuuu

SEQ ID NO: 1368433 - RNA, 24 nt, Human
uuuccagaaucuucagauucucca

SEQ ID NO: 1368434 - RNA, 18 nt, Human
uuugcuggaauauauuuu

SEQ ID NO: 1368435 - RNA, 23 nt, Human
acuggguacagggagaagggcug

SEQ ID NO: 1368436 - RNA, 24 nt, Human
agcuggcucggaccuguccaccuc

SEQ ID NO: 1368437 - RNA, 24 nt, Human
agcugugccguguggcugaggagu

SEQ ID NO: 1368438 - RNA, 20 nt, Human
cagagagagacgccuccccu

SEQ ID NO: 1368439 - RNA, 24 nt, Human
ccccugggauccugcagcuccagg

SEQ ID NO: 1368440 - RNA, 22 nt, Human
ccccuguggguggggugggggc

SEQ ID NO: 1368441 - RNA, 21 nt, Human
cccuguggguggggugggggc

SEQ ID NO: 1368442 - RNA, 19 nt, Human
ccugugggugggguggggg

SEQ ID NO: 1368443 - RNA, 22 nt, Human
cuccccugggauccugcagcuc

SEQ ID NO: 1368444 - RNA, 20 nt, Human
ggauccugcagcuccaggcc

SEQ ID NO: 1368445 - RNA, 19 nt, Human
ggguggggugggggcuggg

SEQ ID NO: 1368446 - RNA, 19 nt, Human
uccccugggauccugcagc

SEQ ID NO: 1368447 - RNA, 23 nt, Human
uccccugggauccugcagcucca

SEQ ID NO: 1368448 - RNA, 24 nt, Human
uccccugggauccugcagcuccag

SEQ ID NO: 1368449 - RNA, 21 nt, Human
ugaggguuuacuggguacagg

SEQ ID NO: 1368450 - RNA, 24 nt, Human
ugcagcuccaggccccugugggug

SEQ ID NO: 1368451 - RNA, 22 nt, Human
ugggauccugcagcuccaggcc

SEQ ID NO: 1368452 - RNA, 24 nt, Human
ugggauccugcagcuccaggcccc

SEQ ID NO: 1368453 - RNA, 22 nt, Human
uggguacagggagaagggcugg

SEQ ID NO: 1368454 - RNA, 19 nt, Human
uggguggggugggggcugg

SEQ ID NO: 1368455 - RNA, 18 nt, Human
ugugccguguggcugagg

SEQ ID NO: 1368456 - RNA, 19 nt, Human
aaaaacucagccagguccc

SEQ ID NO: 1368457 - RNA, 22 nt, Human
aaagaccccccaccacccacuc

SEQ ID NO: 1368458 - RNA, 18 nt, Human
aaccaccccacagccacc

SEQ ID NO: 1368459 - RNA, 20 nt, Human
aacccaaagaccccccacca

SEQ ID NO: 1368460 - RNA, 18 nt, Human
aacccccucucuagcuga

SEQ ID NO: 1368461 - RNA, 22 nt, Human
aacccugguuccgaagcccagg

SEQ ID NO: 1368462 - RNA, 26 nt, Human
aagaccccccaccacccacuccacag

SEQ ID NO: 1368463 - RNA, 22 nt, Human
aagcaaccaccccacagccacc

SEQ ID NO: 1368464 - RNA, 22 nt, Human
aagccugcugcuggcuaagcag

SEQ ID NO: 1368465 - RNA, 20 nt, Human
aaggacaggagccccuucug

SEQ ID NO: 1368466 - RNA, 22 nt, Human
aaggcacuguccaugcacuucc

SEQ ID NO: 1368467 - RNA, 27 nt, Human
aaggcacuguccaugcacuuccaacug

SEQ ID NO: 1368468 - RNA, 24 nt, Human
acccaaagaccccccaccacccac

SEQ ID NO: 1368469 - RNA, 20 nt, Human
acccagcccaugcuacgugg

SEQ ID NO: 1368470 - RNA, 24 nt, Human
acccaucaaguaaaucacccucuu

SEQ ID NO: 1368471 - RNA, 25 nt, Human
acucacugcccagaugcucccgggg

SEQ ID NO: 1368472 - RNA, 20 nt, Human
agaacugaggcacagagcca

SEQ ID NO: 1368473 - RNA, 18 nt, Human
agacaggcuggacacagc

SEQ ID NO: 1368474 - RNA, 20 nt, Human
agacaggcuggacacagcuc

SEQ ID NO: 1368475 - RNA, 25 nt, Human
agacaggcuggacacagcuggggac

SEQ ID NO: 1368476 - RNA, 21 nt, Human
agaccaagaaggccuugggca

SEQ ID NO: 1368477 - RNA, 21 nt, Human
agagauccccccucaacauca

SEQ ID NO: 1368478 - RNA, 19 nt, Human
agagccaagaaggucaggg

SEQ ID NO: 1368479 - RNA, 20 nt, Human
agauccuguggauggcggcu

SEQ ID NO: 1368480 - RNA, 24 nt, Human
agcauguaaacccaaagacccccc

SEQ ID NO: 1368481 - RNA, 21 nt, Human
aggaggaugcugaggugauuc

SEQ ID NO: 1368482 - RNA, 25 nt, Human
aggcaagggaaaaacucagccaggu

SEQ ID NO: 1368483 - RNA, 21 nt, Human
aggcaggaccaaacguaccca

SEQ ID NO: 1368484 - RNA, 18 nt, Human
aggcaggcaggcugggga

SEQ ID NO: 1368485 - RNA, 21 nt, Human
aggccaagccucuccaagcau

SEQ ID NO: 1368486 - RNA, 21 nt, Human
aggcugcuggggucaggaugu

SEQ ID NO: 1368487 - RNA, 22 nt, Human
aggcuggacacagcuggggaca

SEQ ID NO: 1368488 - RNA, 21 nt, Human
agggagauccuguggauggcg

SEQ ID NO: 1368489 - RNA, 23 nt, Human
aggucuccugagugcccuaccag

SEQ ID NO: 1368490 - RNA, 25 nt, Human
auguaaacccaaagaccccccacca

SEQ ID NO: 1368491 - RNA, 21 nt, Human
caaccaccccacagccaccug

SEQ ID NO: 1368492 - RNA, 23 nt, Human
caacgagggcagcuucagguccc

SEQ ID NO: 1368493 - RNA, 22 nt, Human
caagaaggccuugggcaugaug

SEQ ID NO: 1368494 - RNA, 18 nt, Human
caauccgcaugggggccc

SEQ ID NO: 1368495 - RNA, 26 nt, Human
cacagcaacacucaagagagcagcug

SEQ ID NO: 1368496 - RNA, 19 nt, Human
cacagucccccuugucuuc

SEQ ID NO: 1368497 - RNA, 23 nt, Human
cacagucccccuugucuucugcc

SEQ ID NO: 1368498 - RNA, 21 nt, Human
caccagccccaaccacaaguc

SEQ ID NO: 1368499 - RNA, 21 nt, Human
caccagcguggccugacagcg

SEQ ID NO: 1368500 - RNA, 22 nt, Human
caccccaugaagcaaccacccc

SEQ ID NO: 1368501 - RNA, 23 nt, Human
caccccaugaagcaaccacccca

SEQ ID NO: 1368502 - RNA, 21 nt, Human
cacccccccaagcuuucaccc

SEQ ID NO: 1368503 - RNA, 18 nt, Human
cacccuucccgcccagcu

SEQ ID NO: 1368504 - RNA, 19 nt, Human
cacccuucccgcccagcuc

SEQ ID NO: 1368505 - RNA, 21 nt, Human
cacccuucccgcccagcucaa

SEQ ID NO: 1368506 - RNA, 19 nt, Human
caccguggccuccacacag

SEQ ID NO: 1368507 - RNA, 19 nt, Human
caccucaucccugaagcuc

SEQ ID NO: 1368508 - RNA, 23 nt, Human
cacuuacgcagguggaugagggg

SEQ ID NO: 1368509 - RNA, 23 nt, Human
cagagcaucccucaugcccuggc

SEQ ID NO: 1368510 - RNA, 25 nt, Human
cagcaacacucaagagagcagcuga

SEQ ID NO: 1368511 - RNA, 21 nt, Human
cagcacacccaccccaccuug

SEQ ID NO: 1368512 - RNA, 24 nt, Human
cagcacacccaccccaccuugcag

SEQ ID NO: 1368513 - RNA, 22 nt, Human
cagcagcauguaaacccaaaga

SEQ ID NO: 1368514 - RNA, 18 nt, Human
cagccacagcaacacuca

SEQ ID NO: 1368515 - RNA, 22 nt, Human
cagccacagcaacacucaagag

SEQ ID NO: 1368516 - RNA, 19 nt, Human
cagccccucuccuggccac

SEQ ID NO: 1368517 - RNA, 22 nt, Human
cagccuucaaacaacaguagcc

SEQ ID NO: 1368518 - RNA, 27 nt, Human
cagcguacggccggcacaagagaggcu

SEQ ID NO: 1368519 - RNA, 20 nt, Human
cagcuucaggucccaggacc

SEQ ID NO: 1368520 - RNA, 24 nt, Human
caggcaggaccaaacguacccauc

SEQ ID NO: 1368521 - RNA, 18 nt, Human
caggcuggggacagugag

SEQ ID NO: 1368522 - RNA, 18 nt, Human
caggggcaccaagagcua

SEQ ID NO: 1368523 - RNA, 21 nt, Human
cagggugccccauaacccuga

SEQ ID NO: 1368524 - RNA, 20 nt, Human
cagggugccccauaacccuu

SEQ ID NO: 1368525 - RNA, 21 nt, Human
caggucccaggaccgugcccc

SEQ ID NO: 1368526 - RNA, 20 nt, Human
cagugggcuucuaaguuugg

SEQ ID NO: 1368527 - RNA, 24 nt, Human
ccaccguggccuccacacagcuag

SEQ ID NO: 1368528 - RNA, 26 nt, Human
ccacgcuaccuucaggcugaugucug

SEQ ID NO: 1368529 - RNA, 21 nt, Human
ccagcagcauguaaacccaaa

SEQ ID NO: 1368530 - RNA, 19 nt, Human
ccagcccagagcaucccuc

SEQ ID NO: 1368531 - RNA, 20 nt, Human
ccaggcaagggaaaaacuca

SEQ ID NO: 1368532 - RNA, 23 nt, Human
cccaaagaccccccaccacccac

SEQ ID NO: 1368533 - RNA, 26 nt, Human
cccaaagaccccccaccacccacucc

SEQ ID NO: 1368534 - RNA, 18 nt, Human
cccaaccacaagucccac

SEQ ID NO: 1368535 - RNA, 24 nt, Human
cccacagccaccugggucucugcu

SEQ ID NO: 1368536 - RNA, 25 nt, Human
cccaccuucuacaugcuccugaccc

SEQ ID NO: 1368537 - RNA, 18 nt, Human
ccccaaggaaaguucucu

SEQ ID NO: 1368538 - RNA, 19 nt, Human
ccccaccacccacuccaca

SEQ ID NO: 1368539 - RNA, 21 nt, Human
ccccagcacacccaccccacc

SEQ ID NO: 1368540 - RNA, 20 nt, Human
ccccaguaacucagaccugg

SEQ ID NO: 1368541 - RNA, 20 nt, Human
ccccauaacccugacacgga

SEQ ID NO: 1368542 - RNA, 24 nt, Human
cccccaguaacucagaccugguuu

SEQ ID NO: 1368543 - RNA, 19 nt, Human
ccccccaccacccacucca

SEQ ID NO: 1368544 - RNA, 22 nt, Human
ccccccaccacccacuccacag

SEQ ID NO: 1368545 - RNA, 19 nt, Human
cccccugcgcccaggcucu

SEQ ID NO: 1368546 - RNA, 24 nt, Human
cccggggcugagccagcccagagc

SEQ ID NO: 1368547 - RNA, 21 nt, Human
ccgggccagcagcaggaccuc

SEQ ID NO: 1368548 - RNA, 18 nt, Human
ccgugccugggggggcuc

SEQ ID NO: 1368549 - RNA, 24 nt, Human
ccuagaccuggcccugcagccaac

SEQ ID NO: 1368550 - RNA, 30 nt, Human
ccucaacaucauguggccaugcccccaguu

SEQ ID NO: 1368551 - RNA, 19 nt, Human
ccucaugacaggucuggga

SEQ ID NO: 1368552 - RNA, 22 nt, Human
ccucaugcccuggccccuagac

SEQ ID NO: 1368553 - RNA, 26 nt, Human
ccucucuagcugagggaaagauuugc

SEQ ID NO: 1368554 - RNA, 21 nt, Human
ccuggccacacaccagcccca

SEQ ID NO: 1368555 - RNA, 23 nt, Human
ccuggccacacaccagccccaac

SEQ ID NO: 1368556 - RNA, 21 nt, Human
cgacucaggcucucucggcag

SEQ ID NO: 1368557 - RNA, 18 nt, Human
cggcacaggcccagggcu

SEQ ID NO: 1368558 - RNA, 24 nt, Human
cggcguccagcauuucaaggaagg

SEQ ID NO: 1368559 - RNA, 24 nt, Human
cggcucuacuggugaagaccaaga

SEQ ID NO: 1368560 - RNA, 22 nt, Human
cucaugcccuggccccuagacc

SEQ ID NO: 1368561 - RNA, 18 nt, Human
cuccacaggacacccccc

SEQ ID NO: 1368562 - RNA, 24 nt, Human
cuccacaggacacccccccaagcu

SEQ ID NO: 1368563 - RNA, 18 nt, Human
cucccuccccuccaccaa

SEQ ID NO: 1368564 - RNA, 24 nt, Human
cuccugaccccccagggcccgggg

SEQ ID NO: 1368565 - RNA, 24 nt, Human
cuccuggccacacaccagccccaa

SEQ ID NO: 1368566 - RNA, 21 nt, Human
cucggggcccccagggugccc

SEQ ID NO: 1368567 - RNA, 18 nt, Human
cugcaccccaggcccaag

SEQ ID NO: 1368568 - RNA, 20 nt, Human
cugcaccccaggcccaagcc

SEQ ID NO: 1368569 - RNA, 18 nt, Human
cugcagccaacugccagg

SEQ ID NO: 1368570 - RNA, 18 nt, Human
cugccaggucuccugagg

SEQ ID NO: 1368571 - RNA, 21 nt, Human
cugcugcucaggcccagcagc

SEQ ID NO: 1368572 - RNA, 20 nt, Human
cugcuggcuaagcagguuga

SEQ ID NO: 1368573 - RNA, 23 nt, Human
cuggacacagcuggggacaggag

SEQ ID NO: 1368574 - RNA, 21 nt, Human
cuggccccuagaccuggcccc

SEQ ID NO: 1368575 - RNA, 21 nt, Human
cuggccccuagaccuggcccu

SEQ ID NO: 1368576 - RNA, 20 nt, Human
cugggggggcucccaggcag

SEQ ID NO: 1368577 - RNA, 20 nt, Human
cuguccaugcacuuccaacu

SEQ ID NO: 1368578 - RNA, 23 nt, Human
cuugagacaccaggcaacacagg

SEQ ID NO: 1368579 - RNA, 20 nt, Human
gaaacaccuccagggcaugc

SEQ ID NO: 1368580 - RNA, 24 nt, Human
gaagcccaggggcaccaagagcua

SEQ ID NO: 1368581 - RNA, 20 nt, Human
gacacagcuggggacaggag

SEQ ID NO: 1368582 - RNA, 22 nt, Human
gacacccccccaagcuuucacu

SEQ ID NO: 1368583 - RNA, 22 nt, Human
gagaugaagggaaacccugguu

SEQ ID NO: 1368584 - RNA, 20 nt, Human
gagggcagcuucagguccca

SEQ ID NO: 1368585 - RNA, 19 nt, Human
gcagcacucagaaagugcc

SEQ ID NO: 1368586 - RNA, 21 nt, Human
gcaggggcucacccuucccgc

SEQ ID NO: 1368587 - RNA, 21 nt, Human
gccaggaggaaugcagagacc

SEQ ID NO: 1368588 - RNA, 22 nt, Human
gccaggaggaaugcagagaccu

SEQ ID NO: 1368589 - RNA, 18 nt, Human
gcucucucccuccccucc

SEQ ID NO: 1368590 - RNA, 19 nt, Human
gcucucucccuccccucca

SEQ ID NO: 1368591 - RNA, 20 nt, Human
gcuggacacagcuggggaca

SEQ ID NO: 1368592 - RNA, 21 nt, Human
gcuugcucauauuuaauuagc

SEQ ID NO: 1368593 - RNA, 24 nt, Human
ggaccaaacguacccaucaaguaa

SEQ ID NO: 1368594 - RNA, 23 nt, Human
ggagccccuucugaauccugcuc

SEQ ID NO: 1368595 - RNA, 18 nt, Human
ggauguggcucccucccc

SEQ ID NO: 1368596 - RNA, 18 nt, Human
gggcccccagggugcccc

SEQ ID NO: 1368597 - RNA, 22 nt, Human
gguggacaggcuucaggguggc

SEQ ID NO: 1368598 - RNA, 27 nt, Human
guaaacccaaagaccccccaccaccca

SEQ ID NO: 1368599 - RNA, 20 nt, Human
guccccagcacacccacccc

SEQ ID NO: 1368600 - RNA, 20 nt, Human
guggaugaggggagagccuu

SEQ ID NO: 1368601 - RNA, 23 nt, Human
uaaauccccaaggaaaguucucu

SEQ ID NO: 1368602 - RNA, 18 nt, Human
uaaggcacuguccaugca

SEQ ID NO: 1368603 - RNA, 23 nt, Human
uagagggcgcccaggugauggug

SEQ ID NO: 1368604 - RNA, 21 nt, Human
uagcccccugcgcccaggcuc

SEQ ID NO: 1368605 - RNA, 18 nt, Human
uagggcauuguucacuga

SEQ ID NO: 1368606 - RNA, 21 nt, Human
uaggugacacgcacccagccc

SEQ ID NO: 1368607 - RNA, 23 nt, Human
ucaacaucauguggccaugcccc

SEQ ID NO: 1368608 - RNA, 20 nt, Human
ucacccuucccgcccagcuc

SEQ ID NO: 1368609 - RNA, 21 nt, Human
ucagaauguagcgaugacccc

SEQ ID NO: 1368610 - RNA, 19 nt, Human
uccacaggacaccccccca

SEQ ID NO: 1368611 - RNA, 23 nt, Human
uccacaggacacccccccaagcu

SEQ ID NO: 1368612 - RNA, 22 nt, Human
uccagcugcagcacgaugucgg

SEQ ID NO: 1368613 - RNA, 18 nt, Human
uccagugggcuucuaagu

SEQ ID NO: 1368614 - RNA, 18 nt, Human
uccccaaggaaaguucuc

SEQ ID NO: 1368615 - RNA, 18 nt, Human
ucccgggucacugagaug

SEQ ID NO: 1368616 - RNA, 25 nt, Human
ucccugaagcucucucccuccccuc

SEQ ID NO: 1368617 - RNA, 18 nt, Human
uccgcaugggggcccggg

SEQ ID NO: 1368618 - RNA, 22 nt, Human
uccucaugacaggucugggagg

SEQ ID NO: 1368619 - RNA, 19 nt, Human
uccuggccacacaccagcc

SEQ ID NO: 1368620 - RNA, 24 nt, Human
ucggcagccacagcaacacucaag

SEQ ID NO: 1368621 - RNA, 22 nt, Human
ucuucugccagccccucuccug

SEQ ID NO: 1368622 - RNA, 21 nt, Human
ugaaaccuuugaggcagguac

SEQ ID NO: 1368623 - RNA, 20 nt, Human
ugaacccccuguggcccacc

SEQ ID NO: 1368624 - RNA, 19 nt, Human
ugaagacccaccugcuggc

SEQ ID NO: 1368625 - RNA, 22 nt, Human
ugacccccaguaacucagaccu

SEQ ID NO: 1368626 - RNA, 21 nt, Human
ugacgccgagagcaggauggc

SEQ ID NO: 1368627 - RNA, 24 nt, Human
ugagagaacugaggcacagagcca

SEQ ID NO: 1368628 - RNA, 27 nt, Human
ugagagccaaauucagaucuggucaga

SEQ ID NO: 1368629 - RNA, 19 nt, Human
ugagaugaagggaaacccu

SEQ ID NO: 1368630 - RNA, 21 nt, Human
ugagaugaagggaaacccugg

SEQ ID NO: 1368631 - RNA, 24 nt, Human
ugaggugauucuagucucaaaaac

SEQ ID NO: 1368632 - RNA, 18 nt, Human
ugauuguguccuaugacc

SEQ ID NO: 1368633 - RNA, 20 nt, Human
ugauuuguuccagaccuuuc

SEQ ID NO: 1368634 - RNA, 19 nt, Human
ugccaggaggaaugcagag

SEQ ID NO: 1368635 - RNA, 22 nt, Human
ugccaggucuccugagugcccu

SEQ ID NO: 1368636 - RNA, 19 nt, Human
ugccccaacugccuggcua

SEQ ID NO: 1368637 - RNA, 21 nt, Human
ugccuugccaaacucaccagc

SEQ ID NO: 1368638 - RNA, 24 nt, Human
ugcucugggcaucugugccuugcc

SEQ ID NO: 1368639 - RNA, 24 nt, Human
uggcaucagcauuucugauugugu

SEQ ID NO: 1368640 - RNA, 24 nt, Human
uggcccaccuucuacaugcuccug

SEQ ID NO: 1368641 - RNA, 20 nt, Human
uggccccuagaccuggcccu

SEQ ID NO: 1368642 - RNA, 19 nt, Human
uggcuaagcagguugaggc

SEQ ID NO: 1368643 - RNA, 21 nt, Human
uggcuccuuggauggggcucc

SEQ ID NO: 1368644 - RNA, 21 nt, Human
ugggaggcuggcacuguuuuc

SEQ ID NO: 1368645 - RNA, 22 nt, Human
ugggcuucuaaguuuggggggc

SEQ ID NO: 1368646 - RNA, 22 nt, Human
uggggacagugagguggaggca

SEQ ID NO: 1368647 - RNA, 24 nt, Human
uggggacagugagguggaggcagc

SEQ ID NO: 1368648 - RNA, 24 nt, Human
uguaaacccaaagaccccccacca

SEQ ID NO: 1368649 - RNA, 18 nt, Human
uguccaugcacuuccaac

SEQ ID NO: 1368650 - RNA, 19 nt, Human
ugucguccagcugcagcac

SEQ ID NO: 1368651 - RNA, 22 nt, Human
ugucuucugccagccccucucc

SEQ ID NO: 1368652 - RNA, 18 nt, Human
uguggagacccaugcaga

SEQ ID NO: 1368653 - RNA, 19 nt, Human
uucuaaacagggucccaca

SEQ ID NO: 1368654 - RNA, 21 nt, Human
uugggauuuuucagaguuucc

SEQ ID NO: 1368655 - RNA, 18 nt, Human
uugguccgucuaccgggc

SEQ ID NO: 1368656 - RNA, 23 nt, Human
uugguccgucuaccgggccagca

SEQ ID NO: 1368657 - RNA, 24 nt, Human
uuucagaguuuccggcagaaguuc

SEQ ID NO: 1368658 - RNA, 20 nt, Human
uuuggggggcaggggcgguu

SEQ ID NO: 1368659 - RNA, 19 nt, Human
agagcaacauccagacucc

SEQ ID NO: 1368660 - RNA, 19 nt, Human
agcugccaaggagauccug

SEQ ID NO: 1368661 - RNA, 22 nt, Human
agcuuagaagaugccaucagug

SEQ ID NO: 1368662 - RNA, 21 nt, Human
caacauccagacuccagaaua

SEQ ID NO: 1368663 - RNA, 23 nt, Human
cagcacacucugucugagcaaca

SEQ ID NO: 1368664 - RNA, 18 nt, Human
caggccguccacaaacuu

SEQ ID NO: 1368665 - RNA, 25 nt, Human
cccuucuguucugagaugggggugg

SEQ ID NO: 1368666 - RNA, 22 nt, Human
ccuucuguucugagaugggggu

SEQ ID NO: 1368667 - RNA, 19 nt, Human
cucuggcuucccacccuuc

SEQ ID NO: 1368668 - RNA, 21 nt, Human
cucuggcuucccacccuucug

SEQ ID NO: 1368669 - RNA, 20 nt, Human
gaggcucuggcuucccaccc

SEQ ID NO: 1368670 - RNA, 19 nt, Human
ggcaguuaucucaucuuug

SEQ ID NO: 1368671 - RNA, 19 nt, Human
uaaaggucuuuacagagca

SEQ ID NO: 1368672 - RNA, 24 nt, Human
uagaagaugccaucagugacaaac

SEQ ID NO: 1368673 - RNA, 22 nt, Human
uccagaauacagcugccaagga

SEQ ID NO: 1368674 - RNA, 19 nt, Human
ucuguucugagaugggggu

SEQ ID NO: 1368675 - RNA, 18 nt, Human
ugagaugggggugguggg

SEQ ID NO: 1368676 - RNA, 20 nt, Human
ugagauggggguggugggca

SEQ ID NO: 1368677 - RNA, 20 nt, Human
uucaccuugaugcccagcac

SEQ ID NO: 1368678 - RNA, 24 nt, Human
aaaaaaaaagacuucacccaacua

SEQ ID NO: 1368679 - RNA, 19 nt, Human
aaaaagacuucacccaacu

SEQ ID NO: 1368680 - RNA, 24 nt, Human
aaaacaaacaaaaaaaaagacuuc

SEQ ID NO: 1368681 - RNA, 24 nt, Human
aaacaaacaaaaaaaaagacuuca

SEQ ID NO: 1368682 - RNA, 22 nt, Human
aacaagagugaaacuccgucua

SEQ ID NO: 1368683 - RNA, 23 nt, Human
aacaccccuccccugggaaacca

SEQ ID NO: 1368684 - RNA, 19 nt, Human
aacacggucaaaccccauc

SEQ ID NO: 1368685 - RNA, 20 nt, Human
aacacggucaaaccccaucu

SEQ ID NO: 1368686 - RNA, 21 nt, Human
aacacggucaaaccccaucuc

SEQ ID NO: 1368687 - RNA, 18 nt, Human
aacccuggggcagcuggc

SEQ ID NO: 1368688 - RNA, 18 nt, Human
aagcaggcgagaaucacc

SEQ ID NO: 1368689 - RNA, 20 nt, Human
aagcaggcgagaaucaccag

SEQ ID NO: 1368690 - RNA, 19 nt, Human
aaucacaaggugugggccu

SEQ ID NO: 1368691 - RNA, 21 nt, Human
acaaacaaaaaaaaagacuuc

SEQ ID NO: 1368692 - RNA, 20 nt, Human
acaagagugaaacuccgucu

SEQ ID NO: 1368693 - RNA, 26 nt, Human
acagagcccccagcaggcugucgcca

SEQ ID NO: 1368694 - RNA, 23 nt, Human
accacaccucccuugggccccaa

SEQ ID NO: 1368695 - RNA, 24 nt, Human
accaggggaagaacccuggggcag

SEQ ID NO: 1368696 - RNA, 24 nt, Human
accccaucucuacuaaaaauacaa

SEQ ID NO: 1368697 - RNA, 18 nt, Human
accucccuugggccccaa

SEQ ID NO: 1368698 - RNA, 25 nt, Human
acuccagccugggcaacaagaguga

SEQ ID NO: 1368699 - RNA, 18 nt, Human
acuucacuccagccuggg

SEQ ID NO: 1368700 - RNA, 25 nt, Human
acuucacuccagccugggcaacaag

SEQ ID NO: 1368701 - RNA, 24 nt, Human
agacaacaccccuccccugggaaa

SEQ ID NO: 1368702 - RNA, 21 nt, Human
agagugaaacuccgucuaaaa

SEQ ID NO: 1368703 - RNA, 24 nt, Human
agcacuuugggaggccgagguggg

SEQ ID NO: 1368704 - RNA, 21 nt, Human
agcaugguuugcaguaagaag

SEQ ID NO: 1368705 - RNA, 23 nt, Human
agccaggcgugguagugggugcc

SEQ ID NO: 1368706 - RNA, 22 nt, Human
agcuggggugagggguggugcc

SEQ ID NO: 1368707 - RNA, 23 nt, Human
aggaagagggggcagcccucgag

SEQ ID NO: 1368708 - RNA, 19 nt, Human
aggcagaggccuuggggau

SEQ ID NO: 1368709 - RNA, 21 nt, Human
aggccgagguggguggaucac

SEQ ID NO: 1368710 - RNA, 21 nt, Human
aggucccaagucccucugccu

SEQ ID NO: 1368711 - RNA, 24 nt, Human
agguggguggaucacgaggucagg

SEQ ID NO: 1368712 - RNA, 20 nt, Human
aguaagaagggcagagccag

SEQ ID NO: 1368713 - RNA, 27 nt, Human
aguaagaagggcagagccagggagaga

SEQ ID NO: 1368714 - RNA, 24 nt, Human
auccagggugugugggcugggaug

SEQ ID NO: 1368715 - RNA, 19 nt, Human
augaguaguggcccuccac

SEQ ID NO: 1368716 - RNA, 21 nt, Human
caaaaaaaaagacuucaccca

SEQ ID NO: 1368717 - RNA, 24 nt, Human
cacaccuauaaucccagcacuuug

SEQ ID NO: 1368718 - RNA, 22 nt, Human
cacagaaaacucagcagccuaa

SEQ ID NO: 1368719 - RNA, 26 nt, Human
cacagaaaacucagcagccuaaaccg

SEQ ID NO: 1368720 - RNA, 25 nt, Human
caccaagauccgucagaagcagcag

SEQ ID NO: 1368721 - RNA, 21 nt, Human
cacccaacuaacugugcuugu

SEQ ID NO: 1368722 - RNA, 18 nt, Human
caccccuccccugggaaa

SEQ ID NO: 1368723 - RNA, 27 nt, Human
caccuacagaacauuaagaugccagca

SEQ ID NO: 1368724 - RNA, 19 nt, Human
caccuauaaucccagcacu

SEQ ID NO: 1368725 - RNA, 24 nt, Human
caccuauaaucccagcacuuuggg

SEQ ID NO: 1368726 - RNA, 22 nt, Human
caccucccuugggccccaaccc

SEQ ID NO: 1368727 - RNA, 23 nt, Human
cacuccagccugggcaacaagag

SEQ ID NO: 1368728 - RNA, 24 nt, Human
cacuccagccugggcaacaagagu

SEQ ID NO: 1368729 - RNA, 25 nt, Human
cacuccagccugggcaacaagagug

SEQ ID NO: 1368730 - RNA, 24 nt, Human
cacuucacuccagccugggcaaca

SEQ ID NO: 1368731 - RNA, 20 nt, Human
cagagcucaggcugggcugu

SEQ ID NO: 1368732 - RNA, 24 nt, Human
cagcacuuugggaggccgaggugg

SEQ ID NO: 1368733 - RNA, 23 nt, Human
cagcaggcagcuggggugagggg

SEQ ID NO: 1368734 - RNA, 25 nt, Human
cagccccauucucccaggucccaag

SEQ ID NO: 1368735 - RNA, 21 nt, Human
cagccuaaaccgaccauggaa

SEQ ID NO: 1368736 - RNA, 23 nt, Human
cagcuggcuugucccagccaugc

SEQ ID NO: 1368737 - RNA, 23 nt, Human
caggccaagcuucucagagccac

SEQ ID NO: 1368738 - RNA, 24 nt, Human
caguaagaagggcagagccaggga

SEQ ID NO: 1368739 - RNA, 25 nt, Human
cauucuguguucugcaggcuggaag

SEQ ID NO: 1368740 - RNA, 20 nt, Human
ccacuucacuccagccuggg

SEQ ID NO: 1368741 - RNA, 22 nt, Human
ccacuucacuccagccugggca

SEQ ID NO: 1368742 - RNA, 23 nt, Human
ccacuucacuccagccugggcaa

SEQ ID NO: 1368743 - RNA, 24 nt, Human
ccacuucacuccagccugggcaac

SEQ ID NO: 1368744 - RNA, 20 nt, Human
cccacagccaggaauggagc

SEQ ID NO: 1368745 - RNA, 27 nt, Human
cccagccuugcccccauuaccgguucc

SEQ ID NO: 1368746 - RNA, 22 nt, Human
cccagcuccaggacgccggggc

SEQ ID NO: 1368747 - RNA, 18 nt, Human
ccccagaugacaccacac

SEQ ID NO: 1368748 - RNA, 24 nt, Human
ccccagaugacaccacaccucccu

SEQ ID NO: 1368749 - RNA, 18 nt, Human
ccccagcaggcugucgcc

SEQ ID NO: 1368750 - RNA, 19 nt, Human
ccccauucucccagguccc

SEQ ID NO: 1368751 - RNA, 22 nt, Human
cccccagcuccaggacgccggg

SEQ ID NO: 1368752 - RNA, 22 nt, Human
cccgaagccuccucucagcccc

SEQ ID NO: 1368753 - RNA, 24 nt, Human
ccgaagccuccucucagccccauu

SEQ ID NO: 1368754 - RNA, 23 nt, Human
ccuaaaccgaccauggaagaggc

SEQ ID NO: 1368755 - RNA, 21 nt, Human
ccuccagcgcgcaguagaggc

SEQ ID NO: 1368756 - RNA, 19 nt, Human
ccugagugcaccaaauaug

SEQ ID NO: 1368757 - RNA, 20 nt, Human
ccugcugccugcccaggucu

SEQ ID NO: 1368758 - RNA, 24 nt, Human
ccuggcuaacacggucaaacccca

SEQ ID NO: 1368759 - RNA, 22 nt, Human
ccuguagucccagcuacuaggg

SEQ ID NO: 1368760 - RNA, 24 nt, Human
ccuugggccccaacccgaagccuc

SEQ ID NO: 1368761 - RNA, 24 nt, Human
cgagaccauccuggcuaacacggu

SEQ ID NO: 1368762 - RNA, 24 nt, Human
cgagguggguggaucacgagguca

SEQ ID NO: 1368763 - RNA, 18 nt, Human
cuaaaacaaacaaaaaaa

SEQ ID NO: 1368764 - RNA, 19 nt, Human
cuaaaacaaacaaaaaaaa

SEQ ID NO: 1368765 - RNA, 24 nt, Human
cuaaaacaaacaaaaaaaaagacu

SEQ ID NO: 1368766 - RNA, 22 nt, Human
cucacaccuauaaucccagcac

SEQ ID NO: 1368767 - RNA, 24 nt, Human
cucacaccuauaaucccagcacuu

SEQ ID NO: 1368768 - RNA, 22 nt, Human
cuccagcgcgcaguagaggccc

SEQ ID NO: 1368769 - RNA, 23 nt, Human
cuccccagaugacaccacaccuc

SEQ ID NO: 1368770 - RNA, 21 nt, Human
cuccucucagccccauucucc

SEQ ID NO: 1368771 - RNA, 23 nt, Human
cucgggggagucuggggacaguc

SEQ ID NO: 1368772 - RNA, 24 nt, Human
cucucagccccauucucccagguc

SEQ ID NO: 1368773 - RNA, 19 nt, Human
cucuugacuagaccccaca

SEQ ID NO: 1368774 - RNA, 19 nt, Human
cugcccuuccagacaacac

SEQ ID NO: 1368775 - RNA, 18 nt, Human
cuggcuaacacggucaaa

SEQ ID NO: 1368776 - RNA, 23 nt, Human
cuggcuaacacggucaaacccca

SEQ ID NO: 1368777 - RNA, 19 nt, Human
cuuccagacaacaccccuc

SEQ ID NO: 1368778 - RNA, 19 nt, Human
gaaguaaacaucaucuucu

SEQ ID NO: 1368779 - RNA, 19 nt, Human
gacgccggggcuggcaggu

SEQ ID NO: 1368780 - RNA, 18 nt, Human
gagaggcagaggccuugg

SEQ ID NO: 1368781 - RNA, 18 nt, Human
gagguugcagugagccaa

SEQ ID NO: 1368782 - RNA, 19 nt, Human
gagguugcagugagccaag

SEQ ID NO: 1368783 - RNA, 19 nt, Human
gaugagaaagcaggcgaga

SEQ ID NO: 1368784 - RNA, 20 nt, Human
gccacagagcccccagcagg

SEQ ID NO: 1368785 - RNA, 22 nt, Human
gccacuucacuccagccugggc

SEQ ID NO: 1368786 - RNA, 21 nt, Human
gccagcaaccggcccggcgcg

SEQ ID NO: 1368787 - RNA, 19 nt, Human
gccuaaaccgaccauggaa

SEQ ID NO: 1368788 - RNA, 23 nt, Human
gccucugacucaugaaaucccgg

SEQ ID NO: 1368789 - RNA, 24 nt, Human
gccuggagguugcagugagccaag

SEQ ID NO: 1368790 - RNA, 21 nt, Human
gcuacuagggaggcugaggcu

SEQ ID NO: 1368791 - RNA, 19 nt, Human
gcugcagaagcacauccug

SEQ ID NO: 1368792 - RNA, 22 nt, Human
gcugcaucugaaccugcccuuc

SEQ ID NO: 1368793 - RNA, 18 nt, Human
ggaagcacagaaaacuca

SEQ ID NO: 1368794 - RNA, 19 nt, Human
ggagagccaggcagccuga

SEQ ID NO: 1368795 - RNA, 24 nt, Human
ggaggcugaggcuggccuggaggu

SEQ ID NO: 1368796 - RNA, 20 nt, Human
ggagguugcagugagccaag

SEQ ID NO: 1368797 - RNA, 20 nt, Human
ggagguugcagugagccaag

SEQ ID NO: 1368798 - RNA, 24 nt, Human
ggagguugcagugagccaagguca

SEQ ID NO: 1368799 - RNA, 24 nt, Human
ggcaccuuguguuuauuggaaaua

SEQ ID NO: 1368800 - RNA, 21 nt, Human
ggcccggcgcgguggcucaca

SEQ ID NO: 1368801 - RNA, 18 nt, Human
ggccugagccugcugccu

SEQ ID NO: 1368802 - RNA, 21 nt, Human
ggccuggagguugcagugagc

SEQ ID NO: 1368803 - RNA, 20 nt, Human
ggcgacaggagaggcccugc

SEQ ID NO: 1368804 - RNA, 21 nt, Human
ggcucacaccuauaaucccag

SEQ ID NO: 1368805 - RNA, 25 nt, Human
ggcuggaagcauggggcaggcugcu

SEQ ID NO: 1368806 - RNA, 21 nt, Human
ggcugucgccacuugugucca

SEQ ID NO: 1368807 - RNA, 22 nt, Human
ggggaagaacccuggggcagcu

SEQ ID NO: 1368808 - RNA, 20 nt, Human
ggggagucgggacuuccagg

SEQ ID NO: 1368809 - RNA, 21 nt, Human
ggggcuggcaggucugggggg

SEQ ID NO: 1368810 - RNA, 20 nt, Human
ggucccaagucccucugccu

SEQ ID NO: 1368811 - RNA, 22 nt, Human
ggugagggguggugccucugac

SEQ ID NO: 1368812 - RNA, 21 nt, Human
gguggaucacgaggucaggag

SEQ ID NO: 1368813 - RNA, 24 nt, Human
gguggauccacaaggcgggcuccc

SEQ ID NO: 1368814 - RNA, 24 nt, Human
gucacgccacuucacuccagccug

SEQ ID NO: 1368815 - RNA, 22 nt, Human
gugggcugggaugccccagccu

SEQ ID NO: 1368816 - RNA, 23 nt, Human
uaaggcacagcaugguuugcagu

SEQ ID NO: 1368817 - RNA, 18 nt, Human
uagaccccacagccagga

SEQ ID NO: 1368818 - RNA, 22 nt, Human
uagaccccacagccaggacccu

SEQ ID NO: 1368819 - RNA, 22 nt, Human
uagcccccagcuccaggacgcc

SEQ ID NO: 1368820 - RNA, 25 nt, Human
uaggcugcagaagcacauccugugu

SEQ ID NO: 1368821 - RNA, 24 nt, Human
uagugggugccuguagucccagcu

SEQ ID NO: 1368822 - RNA, 18 nt, Human
ucaccaggggaagaaccc

SEQ ID NO: 1368823 - RNA, 18 nt, Human
ucacgaggucaggagauc

SEQ ID NO: 1368824 - RNA, 24 nt, Human
ucacgaggucaggagaucgagacc

SEQ ID NO: 1368825 - RNA, 20 nt, Human
ucacucggagagccaggcag

SEQ ID NO: 1368826 - RNA, 18 nt, Human
uccacaaggcgggcuccc

SEQ ID NO: 1368827 - RNA, 24 nt, Human
uccagacaacaccccuccccuggg

SEQ ID NO: 1368828 - RNA, 22 nt, Human
ucccacccagagcucaggcugg

SEQ ID NO: 1368829 - RNA, 23 nt, Human
ucccacccagagcucaggcuggg

SEQ ID NO: 1368830 - RNA, 22 nt, Human
uccccagaugacaccacaccuu

SEQ ID NO: 1368831 - RNA, 20 nt, Human
uccccugggaaaccaauggg

SEQ ID NO: 1368832 - RNA, 25 nt, Human
uccuccaggaucuugugguccucca

SEQ ID NO: 1368833 - RNA, 23 nt, Human
ucgguggggugugguggauccac

SEQ ID NO: 1368834 - RNA, 24 nt, Human
ucucgggggagucuggggacaguc

SEQ ID NO: 1368835 - RNA, 19 nt, Human
ucucuacuaaaaauacaaa

SEQ ID NO: 1368836 - RNA, 18 nt, Human
ucuuucuguggccuugcu

SEQ ID NO: 1368837 - RNA, 25 nt, Human
ugacaccacaccucccuugggcccc

SEQ ID NO: 1368838 - RNA, 22 nt, Human
ugagaaagcaggcgagaaucaa

SEQ ID NO: 1368839 - RNA, 20 nt, Human
ugagccugcugccugcccag

SEQ ID NO: 1368840 - RNA, 23 nt, Human
ugaggcuggccuggagguugccg

SEQ ID NO: 1368841 - RNA, 19 nt, Human
ugaguaguggcccuccacu

SEQ ID NO: 1368842 - RNA, 24 nt, Human
ugagugcaccaaauauggaggcug

SEQ ID NO: 1368843 - RNA, 22 nt, Human
ugaguuggcagcaguggcauau

SEQ ID NO: 1368844 - RNA, 19 nt, Human
ugaucccacugguucuugg

SEQ ID NO: 1368845 - RNA, 20 nt, Human
ugccggggcuggcaggucuc

SEQ ID NO: 1368846 - RNA, 24 nt, Human
ugccucuaaaucuggaaggcugca

SEQ ID NO: 1368847 - RNA, 21 nt, Human
ugccucugacucaugaaaucc

SEQ ID NO: 1368848 - RNA, 23 nt, Human
ugccuguagucccagcuacuagg

SEQ ID NO: 1368849 - RNA, 24 nt, Human
ugccuguagucccagcuacuaggg

SEQ ID NO: 1368850 - RNA, 23 nt, Human
uggaagaggcugagaggcagagg

SEQ ID NO: 1368851 - RNA, 20 nt, Human
uggagguugcagugagccaa

SEQ ID NO: 1368852 - RNA, 21 nt, Human
uggagguugcagugagccaag

SEQ ID NO: 1368853 - RNA, 22 nt, Human
uggcagcaguggcauaucauag

SEQ ID NO: 1368854 - RNA, 22 nt, Human
uggcucacaccuauaaucccag

SEQ ID NO: 1368855 - RNA, 24 nt, Human
uggcucacaccuauaaucccagca

SEQ ID NO: 1368856 - RNA, 23 nt, Human
ugggaggccgagguggguggauc

SEQ ID NO: 1368857 - RNA, 24 nt, Human
ugggaggccgagguggguggauca

SEQ ID NO: 1368858 - RNA, 25 nt, Human
ugggcgccuccacucagccacuguc

SEQ ID NO: 1368859 - RNA, 18 nt, Human
uggggcaggcugcuuucc

SEQ ID NO: 1368860 - RNA, 21 nt, Human
ugggggcagaggaugaguugg

SEQ ID NO: 1368861 - RNA, 24 nt, Human
ugggggcagaggaugaguuggcag

SEQ ID NO: 1368862 - RNA, 22 nt, Human
uggggugagggguggugccucu

SEQ ID NO: 1368863 - RNA, 24 nt, Human
ugguagugggugccuguaguccca

SEQ ID NO: 1368864 - RNA, 21 nt, Human
uguagaaagagguugcauccc

SEQ ID NO: 1368865 - RNA, 21 nt, Human
uguccucccagugccucuaaa

SEQ ID NO: 1368866 - RNA, 19 nt, Human
ugugggcugggaugcccca

SEQ ID NO: 1368867 - RNA, 18 nt, Human
ugugguggauccacaagg

SEQ ID NO: 1368868 - RNA, 23 nt, Human
uguguagcuuaugcagcuucuag

SEQ ID NO: 1368869 - RNA, 21 nt, Human
uucccacccagagcucaggcu

SEQ ID NO: 1368870 - RNA, 22 nt, Human
uucugcaggcuggaagcauggg

SEQ ID NO: 1368871 - RNA, 18 nt, Human
uucuguggccuugcuggg

SEQ ID NO: 1368872 - RNA, 21 nt, Human
uucuguguucugcaggcugga

SEQ ID NO: 1368873 - RNA, 22 nt, Human
uugacuagaccccacagccagg

SEQ ID NO: 1368874 - RNA, 20 nt, Human
uugcagugagccaaggucac

SEQ ID NO: 1368875 - RNA, 19 nt, Human
uuggaaauauuccaccuac

SEQ ID NO: 1368876 - RNA, 19 nt, Human
uuggaaauauuccaccuca

SEQ ID NO: 1368877 - RNA, 25 nt, Human
uugggaggccgagguggguggauca

SEQ ID NO: 1368878 - RNA, 19 nt, Human
uugggccccaacccgaagc

SEQ ID NO: 1368879 - RNA, 22 nt, Human
aaaagcaacuguccuaaaaaac

SEQ ID NO: 1368880 - RNA, 26 nt, Human
aaagaaaaaaaagcaacuguccuaaa

SEQ ID NO: 1368881 - RNA, 19 nt, Human
aaagugccgggauuacagg

SEQ ID NO: 1368882 - RNA, 23 nt, Human
aaagugccgggauuacaggcauu

SEQ ID NO: 1368883 - RNA, 19 nt, Human
aaagugcugggauuacagg

SEQ ID NO: 1368884 - RNA, 24 nt, Human
aaagugcugggauuacaggcuuga

SEQ ID NO: 1368885 - RNA, 22 nt, Human
aaauaaccccaaaaccauaccc

SEQ ID NO: 1368886 - RNA, 25 nt, Human
aaauaaccccaaaaccauacccaaa

SEQ ID NO: 1368887 - RNA, 20 nt, Human
aaccaaauaaccccaaaacc

SEQ ID NO: 1368888 - RNA, 20 nt, Human
aaccaaauaaccccaaaacc

SEQ ID NO: 1368889 - RNA, 21 nt, Human
aaccaaauaaccccaaaacca

SEQ ID NO: 1368890 - RNA, 23 nt, Human
aaccaaauaaccccaaaaccaua

SEQ ID NO: 1368891 - RNA, 22 nt, Human
aaccuccugccucccaguaccc

SEQ ID NO: 1368892 - RNA, 22 nt, Human
aaccuuagcugcaaaaccuaaa

SEQ ID NO: 1368893 - RNA, 22 nt, Human
aacugcacacagcugaagaaaa

SEQ ID NO: 1368894 - RNA, 22 nt, Human
aagcaacauagugagaucccaa

SEQ ID NO: 1368895 - RNA, 22 nt, Human
aagcagcacaaccacuuaaacc

SEQ ID NO: 1368896 - RNA, 22 nt, Human
aaggccuuucaucccaucccca

SEQ ID NO: 1368897 - RNA, 20 nt, Human
aagggccauccauaccagca

SEQ ID NO: 1368898 - RNA, 19 nt, Human
aagugcugggauuacaggc

SEQ ID NO: 1368899 - RNA, 19 nt, Human
aagugcugggauuacaggc

SEQ ID NO: 1368900 - RNA, 26 nt, Human
aagugcugggauuacaggcuugagcc

SEQ ID NO: 1368901 - RNA, 22 nt, Human
acaaccaaauaaccccaaaacc

SEQ ID NO: 1368902 - RNA, 24 nt, Human
acaggguauugcuauguuggccag

SEQ ID NO: 1368903 - RNA, 19 nt, Human
acagguuuucuucaaauag

SEQ ID NO: 1368904 - RNA, 21 nt, Human
accauacccaaaaauacacug

SEQ ID NO: 1368905 - RNA, 24 nt, Human
acccaggcuggagugcaguggcau

SEQ ID NO: 1368906 - RNA, 23 nt, Human
accccaaaaccauacccaaaaau

SEQ ID NO: 1368907 - RNA, 25 nt, Human
acccgccucaaccucccaaagugcc

SEQ ID NO: 1368908 - RNA, 20 nt, Human
accuggcacaguggcucaca

SEQ ID NO: 1368909 - RNA, 21 nt, Human
acgccaggcuaauuuuuguau

SEQ ID NO: 1368910 - RNA, 25 nt, Human
acucugucacccaggcuggagugca

SEQ ID NO: 1368911 - RNA, 21 nt, Human
acugaacuccagccuggacug

SEQ ID NO: 1368912 - RNA, 19 nt, Human
acugcacacagcugaagaa

SEQ ID NO: 1368913 - RNA, 22 nt, Human
acuguagucccagcuacucugg

SEQ ID NO: 1368914 - RNA, 22 nt, Human
agaggacuucucacuccuguaa

SEQ ID NO: 1368915 - RNA, 23 nt, Human
agcagcacaaccacuuaaacccc

SEQ ID NO: 1368916 - RNA, 24 nt, Human
aggauggcaugaggccaggaguuc

SEQ ID NO: 1368917 - RNA, 19 nt, Human
aggcuggagugcaguggca

SEQ ID NO: 1368918 - RNA, 18 nt, Human
aggugauccacccgccuc

SEQ ID NO: 1368919 - RNA, 19 nt, Human
agguguucaaggcugcagu

SEQ ID NO: 1368920 - RNA, 21 nt, Human
agguucaagugauucuccugc

SEQ ID NO: 1368921 - RNA, 22 nt, Human
agguucaagugauucuccugcc

SEQ ID NO: 1368922 - RNA, 23 nt, Human
agguucaagugauucuccugccu

SEQ ID NO: 1368923 - RNA, 22 nt, Human
aguagagguaggguuucgccau

SEQ ID NO: 1368924 - RNA, 18 nt, Human
aguagcugggauuacaga

SEQ ID NO: 1368925 - RNA, 24 nt, Human
agugauucuccugccucagccucc

SEQ ID NO: 1368926 - RNA, 20 nt, Human
agugcaguggcauggucucg

SEQ ID NO: 1368927 - RNA, 23 nt, Human
agugcaguggcauggucucggcu

SEQ ID NO: 1368928 - RNA, 24 nt, Human
agugcaguggcauggucucggcuc

SEQ ID NO: 1368929 - RNA, 24 nt, Human
aguggcauggucucggcucacugc

SEQ ID NO: 1368930 - RNA, 22 nt, Human
aucccauccccacuucccuuca

SEQ ID NO: 1368931 - RNA, 21 nt, Human
auccuaagaauuaaagagaau

SEQ ID NO: 1368932 - RNA, 19 nt, Human
auuacaggugccugccacc

SEQ ID NO: 1368933 - RNA, 18 nt, Human
auucuccugccucagccu

SEQ ID NO: 1368934 - RNA, 24 nt, Human
auuuuuguauuuuuaguagaggua

SEQ ID NO: 1368935 - RNA, 19 nt, Human
auuuuuuuuuuuuaccuug

SEQ ID NO: 1368936 - RNA, 21 nt, Human
caaacuggaccuagagacuag

SEQ ID NO: 1368937 - RNA, 26 nt, Human
caaagugccgggauuacaggcauuuu

SEQ ID NO: 1368938 - RNA, 24 nt, Human
caaagugcugggauuacaggcuug

SEQ ID NO: 1368939 - RNA, 25 nt, Human
caaauaaccccaaaaccauacccaa

SEQ ID NO: 1368940 - RNA, 24 nt, Human
caacaggcaaaaaaauauauacaa

SEQ ID NO: 1368941 - RNA, 24 nt, Human
caacaucccaagaaaaagaguaac

SEQ ID NO: 1368942 - RNA, 19 nt, Human
caaccaaauaaccccaaaa

SEQ ID NO: 1368943 - RNA, 22 nt, Human
caaccaaauaaccccaaaacca

SEQ ID NO: 1368944 - RNA, 24 nt, Human
caacucagccucccaaagugcugg

SEQ ID NO: 1368945 - RNA, 23 nt, Human
caacugcuuaauaggcaucaccc

SEQ ID NO: 1368946 - RNA, 24 nt, Human
caagaggauggcaugaggccagga

SEQ ID NO: 1368947 - RNA, 22 nt, Human
caagcaauucuccugccuuagc

SEQ ID NO: 1368948 - RNA, 20 nt, Human
caagugauucuccugccuca

SEQ ID NO: 1368949 - RNA, 22 nt, Human
caagugauucuccugccucagc

SEQ ID NO: 1368950 - RNA, 26 nt, Human
cacagcugaagaaaaaagaaaaaaaa

SEQ ID NO: 1368951 - RNA, 24 nt, Human
caccaagcuuggguaauuuuugua

SEQ ID NO: 1368952 - RNA, 24 nt, Human
caccacgccaggcuaauuuuugua

SEQ ID NO: 1368953 - RNA, 23 nt, Human
cacccgccucaaccucccaaagu

SEQ ID NO: 1368954 - RNA, 18 nt, Human
cacuacaacuuccuucag

SEQ ID NO: 1368955 - RNA, 22 nt, Human
cacucugucacccaggcuggag

SEQ ID NO: 1368956 - RNA, 23 nt, Human
cacucugucacccaggcuggagu

SEQ ID NO: 1368957 - RNA, 25 nt, Human
cacugaacuccagccuggacuguga

SEQ ID NO: 1368958 - RNA, 21 nt, Human
cacugcaaccuccgccucccg

SEQ ID NO: 1368959 - RNA, 23 nt, Human
cacugcaaccuccgccucccggg

SEQ ID NO: 1368960 - RNA, 21 nt, Human
cagcacaaccacuuaaacccc

SEQ ID NO: 1368961 - RNA, 20 nt, Human
cagccuccugaguagcuggg

SEQ ID NO: 1368962 - RNA, 19 nt, Human
caggaucuuccacucauuu

SEQ ID NO: 1368963 - RNA, 24 nt, Human
caggguauugcuauguuggccagg

SEQ ID NO: 1368964 - RNA, 19 nt, Human
caggugccugccaccacgc

SEQ ID NO: 1368965 - RNA, 21 nt, Human
cauagcaacaugagaagcagg

SEQ ID NO: 1368966 - RNA, 24 nt, Human
cauagugagaucccaacucuaaaa

SEQ ID NO: 1368967 - RNA, 24 nt, Human
cauguuggccaggcugggcucgaa

SEQ ID NO: 1368968 - RNA, 24 nt, Human
ccaaagugccgggauuacaggcau

SEQ ID NO: 1368969 - RNA, 19 nt, Human
ccaaagugcugggauuaca

SEQ ID NO: 1368970 - RNA, 22 nt, Human
ccaaagugcugggauuacaggc

SEQ ID NO: 1368971 - RNA, 23 nt, Human
ccaaagugcugggauuacaggcu

SEQ ID NO: 1368972 - RNA, 20 nt, Human
ccaaauaaccccaaaaccau

SEQ ID NO: 1368973 - RNA, 20 nt, Human
ccaagaaaaagaguaacuuc

SEQ ID NO: 1368974 - RNA, 19 nt, Human
ccacaguaacuuaagaucu

SEQ ID NO: 1368975 - RNA, 22 nt, Human
ccacccaacucagccucccaaa

SEQ ID NO: 1368976 - RNA, 26 nt, Human
ccacccgccucaaccucccaaagugc

SEQ ID NO: 1368977 - RNA, 19 nt, Human
ccacugaacuccagccugg

SEQ ID NO: 1368978 - RNA, 19 nt, Human
ccacugaacuccagccugg

SEQ ID NO: 1368979 - RNA, 21 nt, Human
ccacugaacuccagccuggac

SEQ ID NO: 1368980 - RNA, 26 nt, Human
ccacuggacauaaccguaauuuguau

SEQ ID NO: 1368981 - RNA, 22 nt, Human
ccauguuggccaggcugggcuc

SEQ ID NO: 1368982 - RNA, 21 nt, Human
cccaaaaccauacccaaaaau

SEQ ID NO: 1368983 - RNA, 24 nt, Human
cccaaagugcugggauuacaggcu

SEQ ID NO: 1368984 - RNA, 20 nt, Human
cccagguucaagugauucuc

SEQ ID NO: 1368985 - RNA, 23 nt, Human
cccagguucaagugauucuccuc

SEQ ID NO: 1368986 - RNA, 22 nt, Human
cccauccccacuucccuucaga

SEQ ID NO: 1368987 - RNA, 19 nt, Human
ccccaaaaccauacccaaa

SEQ ID NO: 1368988 - RNA, 23 nt, Human
ccccaaaaccauacccaaaaaua

SEQ ID NO: 1368989 - RNA, 23 nt, Human
cccggguucaagcaauucuccug

SEQ ID NO: 1368990 - RNA, 24 nt, Human
ccgcccagguucaagugauucucc

SEQ ID NO: 1368991 - RNA, 27 nt, Human
ccgccucccggguucaagcaauucuuu

SEQ ID NO: 1368992 - RNA, 18 nt, Human
ccucccaguacccaggau

SEQ ID NO: 1368993 - RNA, 24 nt, Human
ccucccggguucaagcaauucucc

SEQ ID NO: 1368994 - RNA, 22 nt, Human
ccugaccucaggugauccaccc

SEQ ID NO: 1368995 - RNA, 26 nt, Human
ccugaccucaggugauccacccgccu

SEQ ID NO: 1368996 - RNA, 19 nt, Human
ccugaguagcugggauuac

SEQ ID NO: 1368997 - RNA, 23 nt, Human
ccugccucagccuccugaguagc

SEQ ID NO: 1368998 - RNA, 24 nt, Human
ccugccucagccuccugaguagcu

SEQ ID NO: 1368999 - RNA, 19 nt, Human
ccugcguaguugggauuac

SEQ ID NO: 1369000 - RNA, 22 nt, Human
ccugcguaguugggauuacagg

SEQ ID NO: 1369001 - RNA, 24 nt, Human
ccugcguaguugggauuacaggug

SEQ ID NO: 1369002 - RNA, 24 nt, Human
cgacuguagucccagcuacucugg

SEQ ID NO: 1369003 - RNA, 27 nt, Human
cgccauguuggccaggcugggcucgaa

SEQ ID NO: 1369004 - RNA, 24 nt, Human
cgccucaaccucccaaagugccgg

SEQ ID NO: 1369005 - RNA, 30 nt, Human
cgggauuacaggcauuuuaacaacaaccaa

SEQ ID NO: 1369006 - RNA, 25 nt, Human
cguaguugggauuacaggugccugc

SEQ ID NO: 1369007 - RNA, 22 nt, Human
cuacaauaccagcugaggcaag

SEQ ID NO: 1369008 - RNA, 18 nt, Human
cuagccaaggccucugca

SEQ ID NO: 1369009 - RNA, 27 nt, Human
cuauaaaauaccuaaaaacuuguuuuc

SEQ ID NO: 1369010 - RNA, 20 nt, Human
cucaccaugcaagagaggac

SEQ ID NO: 1369011 - RNA, 22 nt, Human
cucacuccuguaaacucaaaua

SEQ ID NO: 1369012 - RNA, 24 nt, Human
cucacucugucacccaggcuggag

SEQ ID NO: 1369013 - RNA, 24 nt, Human
cucacugcaaccuccgccucccgg

SEQ ID NO: 1369014 - RNA, 18 nt, Human
cucacugcaaccuuugcc

SEQ ID NO: 1369015 - RNA, 23 nt, Human
cucagccuccugaguagcuggga

SEQ ID NO: 1369016 - RNA, 22 nt, Human
cuccugccucagccuccugagu

SEQ ID NO: 1369017 - RNA, 21 nt, Human
cugaagaaaaaagaaaaaaaa

SEQ ID NO: 1369018 - RNA, 23 nt, Human
cugcaaccuccgccucccggguu

SEQ ID NO: 1369019 - RNA, 24 nt, Human
cugcaaccuccgccucccggguuc

SEQ ID NO: 1369020 - RNA, 24 nt, Human
cugcaaccuuugccgcccagguuc

SEQ ID NO: 1369021 - RNA, 19 nt, Human
cuggagugcaguggcaugg

SEQ ID NO: 1369022 - RNA, 21 nt, Human
cuuucaucccauccccacuuc

SEQ ID NO: 1369023 - RNA, 19 nt, Human
cuuugagacaggguauugc

SEQ ID NO: 1369024 - RNA, 19 nt, Human
gaaaucgaaaagucuagug

SEQ ID NO: 1369025 - RNA, 24 nt, Human
gaccucaggugauccacccgccuc

SEQ ID NO: 1369026 - RNA, 24 nt, Human
gaguagcugggauuacagacacac

SEQ ID NO: 1369027 - RNA, 22 nt, Human
gaucaacugaggucaacauccc

SEQ ID NO: 1369028 - RNA, 24 nt, Human
gauggcaugaggccaggaguucaa

SEQ ID NO: 1369029 - RNA, 24 nt, Human
gaugucaggugauccacccaacuc

SEQ ID NO: 1369030 - RNA, 18 nt, Human
gauuacagacacacacca

SEQ ID NO: 1369031 - RNA, 18 nt, Human
gauuacaggcuugagcca

SEQ ID NO: 1369032 - RNA, 21 nt, Human
gauuacaggcuugagccacca

SEQ ID NO: 1369033 - RNA, 24 nt, Human
gauuacaggcuugagccaccauac

SEQ ID NO: 1369034 - RNA, 18 nt, Human
gauuacaggugccugcca

SEQ ID NO: 1369035 - RNA, 24 nt, Human
gcaugaggccaggaguucaagacc

SEQ ID NO: 1369036 - RNA, 24 nt, Human
gcccagguucaagugauucuccug

SEQ ID NO: 1369037 - RNA, 19 nt, Human
gcuauguuggccaggcuag

SEQ ID NO: 1369038 - RNA, 24 nt, Human
gcucagguguucaaggcugcagug

SEQ ID NO: 1369039 - RNA, 19 nt, Human
gcuggagugcaguggcaug

SEQ ID NO: 1369040 - RNA, 21 nt, Human
gcugggauuacaggcuugagc

SEQ ID NO: 1369041 - RNA, 23 nt, Human
gcugggcucgaacuccugaccuc

SEQ ID NO: 1369042 - RNA, 24 nt, Human
ggagugccauuggcgcgaucucgg

SEQ ID NO: 1369043 - RNA, 19 nt, Human
ggauuacaggcuugagcca

SEQ ID NO: 1369044 - RNA, 19 nt, Human
ggccaggcugggcucgaac

SEQ ID NO: 1369045 - RNA, 24 nt, Human
ggcugggcucgaacuccugaccuc

SEQ ID NO: 1369046 - RNA, 22 nt, Human
ggguauugcuauguuggccagg

SEQ ID NO: 1369047 - RNA, 21 nt, Human
ggguuucgccauguuggccag

SEQ ID NO: 1369048 - RNA, 22 nt, Human
ggguuucgccauguuggccagg

SEQ ID NO: 1369049 - RNA, 23 nt, Human
guaaacacuaaguaacucaaaug

SEQ ID NO: 1369050 - RNA, 18 nt, Human
guaggguuucgccauguu

SEQ ID NO: 1369051 - RNA, 23 nt, Human
guaggguuucgccauguuggcca

SEQ ID NO: 1369052 - RNA, 24 nt, Human
guaggguuucgccauguuggccag

SEQ ID NO: 1369053 - RNA, 18 nt, Human
guaguaaacaagugcugg

SEQ ID NO: 1369054 - RNA, 20 nt, Human
guaguugggauuacaggugc

SEQ ID NO: 1369055 - RNA, 29 nt, Human
gucacuuggugauaccacuggggugugcc

SEQ ID NO: 1369056 - RNA, 24 nt, Human
gugauccacccaacucagccuccc

SEQ ID NO: 1369057 - RNA, 24 nt, Human
gugauccacccgccucaaccuccc

SEQ ID NO: 1369058 - RNA, 23 nt, Human
gugauucuccugccucagccucc

SEQ ID NO: 1369059 - RNA, 23 nt, Human
uaaaaccugaucaacugagguca

SEQ ID NO: 1369060 - RNA, 20 nt, Human
uaaauggcuucuuuguucca

SEQ ID NO: 1369061 - RNA, 24 nt, Human
uaacaggccauauuuaauuaaaaa

SEQ ID NO: 1369062 - RNA, 20 nt, Human
uaaccaacaccagucaaugc

SEQ ID NO: 1369063 - RNA, 19 nt, Human
uaauuuaaaagauggaaaa

SEQ ID NO: 1369064 - RNA, 23 nt, Human
uaauuuuuguauuuuuaguagag

SEQ ID NO: 1369065 - RNA, 19 nt, Human
uacaauaccagcugaggca

SEQ ID NO: 1369066 - RNA, 22 nt, Human
uacaggcuugagccaccauacc

SEQ ID NO: 1369067 - RNA, 24 nt, Human
uacaggugccugccaccacgccag

SEQ ID NO: 1369068 - RNA, 18 nt, Human
uacccaggaucuuccacu

SEQ ID NO: 1369069 - RNA, 22 nt, Human
uagaaaacuaaaauuagccagg

SEQ ID NO: 1369070 - RNA, 22 nt, Human
uagagguaggguuucgccaugu

SEQ ID NO: 1369071 - RNA, 21 nt, Human
uagcugcaaaaccuaaaaauc

SEQ ID NO: 1369072 - RNA, 24 nt, Human
uaggguuucgccauguuggccagg

SEQ ID NO: 1369073 - RNA, 24 nt, Human
uaguagagguaggguuucgccaug

SEQ ID NO: 1369074 - RNA, 21 nt, Human
uauaaaauaccuaaaaacuug

SEQ ID NO: 1369075 - RNA, 24 nt, Human
uauguuggccaggcuagucucaaa

SEQ ID NO: 1369076 - RNA, 20 nt, Human
uauuucaguguaccaaguau

SEQ ID NO: 1369077 - RNA, 18 nt, Human
ucaaaacauuuucugcag

SEQ ID NO: 1369078 - RNA, 21 nt, Human
ucaaaugccuugauauguaau

SEQ ID NO: 1369079 - RNA, 29 nt, Human
ucaacaggcaaaaaaauauauacaacagg

SEQ ID NO: 1369080 - RNA, 21 nt, Human
ucaacucaaauaugcaaccuc

SEQ ID NO: 1369081 - RNA, 19 nt, Human
ucaagugauucuccugccu

SEQ ID NO: 1369082 - RNA, 24 nt, Human
ucacccaggcuggagugcaguggc

SEQ ID NO: 1369083 - RNA, 24 nt, Human
ucacucugucacccaggcuggagu

SEQ ID NO: 1369084 - RNA, 23 nt, Human
ucacugcaaccuccgccucccgg

SEQ ID NO: 1369085 - RNA, 24 nt, Human
ucacugcaaccuccgccucccggg

SEQ ID NO: 1369086 - RNA, 25 nt, Human
ucacugcaaccuccgccucccgggu

SEQ ID NO: 1369087 - RNA, 26 nt, Human
ucacugcaaccuccgccucccggguu

SEQ ID NO: 1369088 - RNA, 18 nt, Human
ucacugcaaccuuugccg

SEQ ID NO: 1369089 - RNA, 21 nt, Human
ucacugcaaccuuugccgccc

SEQ ID NO: 1369090 - RNA, 24 nt, Human
ucacugcaaccuuugccgcccagg

SEQ ID NO: 1369091 - RNA, 25 nt, Human
ucacugcaaccuuugccgggguccc

SEQ ID NO: 1369092 - RNA, 26 nt, Human
ucacugcaaccuuugccgggguccuc

SEQ ID NO: 1369093 - RNA, 18 nt, Human
ucagccucccaaagugcu

SEQ ID NO: 1369094 - RNA, 20 nt, Human
ucagccuccugaguagcugg

SEQ ID NO: 1369095 - RNA, 27 nt, Human
ucaguauauagguggccuuacaaggcc

SEQ ID NO: 1369096 - RNA, 18 nt, Human
ucaucaaaaucaacaggc

SEQ ID NO: 1369097 - RNA, 22 nt, Human
ucauucccucgcugccuacuau

SEQ ID NO: 1369098 - RNA, 21 nt, Human
uccacccgccucaaccuccca

SEQ ID NO: 1369099 - RNA, 19 nt, Human
uccagccuggacugugaga

SEQ ID NO: 1369100 - RNA, 24 nt, Human
ucccaaagugccgggauuacaggc

SEQ ID NO: 1369101 - RNA, 24 nt, Human
ucccaaagugcugggauuacaggc

SEQ ID NO: 1369102 - RNA, 19 nt, Human
ucccagcuacucuggagga

SEQ ID NO: 1369103 - RNA, 21 nt, Human
ucccggguucaagcaauucuc

SEQ ID NO: 1369104 - RNA, 24 nt, Human
ucccggguucaagcaauucuccug

SEQ ID NO: 1369105 - RNA, 24 nt, Human
uccgccucccggguucaagcaauu

SEQ ID NO: 1369106 - RNA, 18 nt, Human
uccugaguagcugggauu

SEQ ID NO: 1369107 - RNA, 24 nt, Human
uccugcguaguugggauuacaggu

SEQ ID NO: 1369108 - RNA, 19 nt, Human
ucgccauguuggccaggcu

SEQ ID NO: 1369109 - RNA, 22 nt, Human
ucgcugccuacuauaaaccuua

SEQ ID NO: 1369110 - RNA, 23 nt, Human
ucucacucugucacccaggcugg

SEQ ID NO: 1369111 - RNA, 24 nt, Human
ucucacucugucacccaggcugga

SEQ ID NO: 1369112 - RNA, 26 nt, Human
ucucacucugucacccaggcuggagu

SEQ ID NO: 1369113 - RNA, 27 nt, Human
ucucacucugucacccaggcuggagug

SEQ ID NO: 1369114 - RNA, 21 nt, Human
ucuccugccuuagccuccugc

SEQ ID NO: 1369115 - RNA, 24 nt, Human
ucugucacccaggcuggagugcag

SEQ ID NO: 1369116 - RNA, 22 nt, Human
ugaagaaaaaagaaaaaaaagc

SEQ ID NO: 1369117 - RNA, 24 nt, Human
ugaagcagcacaaccacuuaaacc

SEQ ID NO: 1369118 - RNA, 19 nt, Human
ugaauggagugccauuggc

SEQ ID NO: 1369119 - RNA, 20 nt, Human
ugaauggagugccauuggcg

SEQ ID NO: 1369120 - RNA, 20 nt, Human
ugacauucacaaccacuccu

SEQ ID NO: 1369121 - RNA, 21 nt, Human
ugaccucaggugauccacccg

SEQ ID NO: 1369122 - RNA, 24 nt, Human
ugaccucaggugauccacccgccu

SEQ ID NO: 1369123 - RNA, 22 nt, Human
ugagacaggguauugcuauguu

SEQ ID NO: 1369124 - RNA, 26 nt, Human
ugaggcaagaggauggcaugaggcca

SEQ ID NO: 1369125 - RNA, 18 nt, Human
ugaggcacacugacugga

SEQ ID NO: 1369126 - RNA, 20 nt, Human
ugauucacuacaacuuccuu

SEQ ID NO: 1369127 - RNA, 19 nt, Human
ugcaaggauguaauuuaaa

SEQ ID NO: 1369128 - RNA, 23 nt, Human
ugcaauauaugcuuauuucucuu

SEQ ID NO: 1369129 - RNA, 19 nt, Human
ugcacacagcugaagaaaa

SEQ ID NO: 1369130 - RNA, 19 nt, Human
ugcagaaaaucuugaaauc

SEQ ID NO: 1369131 - RNA, 25 nt, Human
ugccgggauuacaggcauuuuaaca

SEQ ID NO: 1369132 - RNA, 24 nt, Human
ugccucagccuccugaguagcugg

SEQ ID NO: 1369133 - RNA, 20 nt, Human
ugccuuagccuccugcguag

SEQ ID NO: 1369134 - RNA, 24 nt, Human
ugcuauguuggccaggcuagucuc

SEQ ID NO: 1369135 - RNA, 20 nt, Human
uggagugcaguggcaugguc

SEQ ID NO: 1369136 - RNA, 23 nt, Human
uggagugcaguggcauggucucg

SEQ ID NO: 1369137 - RNA, 24 nt, Human
uggagugcaguggcauggucucgg

SEQ ID NO: 1369138 - RNA, 20 nt, Human
uggagugccauuggcgcgau

SEQ ID NO: 1369139 - RNA, 18 nt, Human
uggcacaguggcucacac

SEQ ID NO: 1369140 - RNA, 19 nt, Human
uggcauggucucggcucac

SEQ ID NO: 1369141 - RNA, 24 nt, Human
uggccaggcuagucucaaacuccu

SEQ ID NO: 1369142 - RNA, 24 nt, Human
uggccaggcugggcucgaacuccu

SEQ ID NO: 1369143 - RNA, 21 nt, Human
ugggauuacagacacacacca

SEQ ID NO: 1369144 - RNA, 24 nt, Human
ugggauuacagacacacaccacca

SEQ ID NO: 1369145 - RNA, 18 nt, Human
ugggauuacaggcuugag

SEQ ID NO: 1369146 - RNA, 21 nt, Human
ugggauuacaggcuugagcca

SEQ ID NO: 1369147 - RNA, 22 nt, Human
ugggauuacaggcuugagccac

SEQ ID NO: 1369148 - RNA, 24 nt, Human
ugggauuacaggcuugagccacca

SEQ ID NO: 1369149 - RNA, 25 nt, Human
ugggauuacaggcuugagccaccau

SEQ ID NO: 1369150 - RNA, 21 nt, Human
ugggauuacaggugccugcca

SEQ ID NO: 1369151 - RNA, 22 nt, Human
ugggauuacaggugccugccac

SEQ ID NO: 1369152 - RNA, 24 nt, Human
ugggauuacaggugccugccacca

SEQ ID NO: 1369153 - RNA, 27 nt, Human
uuaaacccccgggucaugaaaacauua

SEQ ID NO: 1369154 - RNA, 26 nt, Human
uuaaauguuccccaucucaccaugca

SEQ ID NO: 1369155 - RNA, 24 nt, Human
uuagccuccugcguaguugggauu

SEQ ID NO: 1369156 - RNA, 18 nt, Human
uuaguagagguaggguuu

SEQ ID NO: 1369157 - RNA, 22 nt, Human
uuaguagagguaggguuucgcc

SEQ ID NO: 1369158 - RNA, 24 nt, Human
uuaguagagguaggguuucgccau

SEQ ID NO: 1369159 - RNA, 24 nt, Human
uucaagcaauucuccugccuuagc

SEQ ID NO: 1369160 - RNA, 21 nt, Human
uucaagugauucuccugccuc

SEQ ID NO: 1369161 - RNA, 23 nt, Human
uucaagugauucuccugccucag

SEQ ID NO: 1369162 - RNA, 24 nt, Human
uucaagugauucuccugccucagc

SEQ ID NO: 1369163 - RNA, 24 nt, Human
uucccuuuuauaaauggcuucuuu

SEQ ID NO: 1369164 - RNA, 22 nt, Human
uugagacaggguauugcuaugu

SEQ ID NO: 1369165 - RNA, 22 nt, Human
uuuaaaagauggaaaaggugac

SEQ ID NO: 1369166 - RNA, 21 nt, Human
uuucgccauguuggccaggcu

SEQ ID NO: 1369167 - RNA, 23 nt, Human
uuuuuaguagagguaggguuucg

SEQ ID NO: 1369168 - RNA, 24 nt, Human
uuuuuaguagagguaggguuucgc

SEQ ID NO: 1369169 - RNA, 22 nt, Human
uuuuuauccuaagaauuaaaga

SEQ ID NO: 1369170 - RNA, 20 nt, Human
uuuuuguauuuuuaguagag

SEQ ID NO: 1369171 - RNA, 21 nt, Human
uuuuuuucuuuuuuuuuccag

SEQ ID NO: 1369172 - RNA, 24 nt, Human
aaaaaacauucaaauuaauucaua

SEQ ID NO: 1369173 - RNA, 25 nt, Human
aaccugagcgggguguccuggaagc

SEQ ID NO: 1369174 - RNA, 20 nt, Human
aagaggccuuuaggacucug

SEQ ID NO: 1369175 - RNA, 25 nt, Human
aagcgauccucccaccucggccuuc

SEQ ID NO: 1369176 - RNA, 21 nt, Human
aaggaucaugggguuaaggau

SEQ ID NO: 1369177 - RNA, 20 nt, Human
aagugcauuccaggccagga

SEQ ID NO: 1369178 - RNA, 18 nt, Human
acagauccaccucagaau

SEQ ID NO: 1369179 - RNA, 18 nt, Human
acagcugacuguaaguga

SEQ ID NO: 1369180 - RNA, 21 nt, Human
acgagccgugcagccuagagc

SEQ ID NO: 1369181 - RNA, 19 nt, Human
acuucagggacaccagggg

SEQ ID NO: 1369182 - RNA, 18 nt, Human
agacaaaguuuugccaug

SEQ ID NO: 1369183 - RNA, 26 nt, Human
agacaggaaggaaacacuaaagccag

SEQ ID NO: 1369184 - RNA, 23 nt, Human
agacagggaugccuccgagguug

SEQ ID NO: 1369185 - RNA, 18 nt, Human
agaggaagggggggaggg

SEQ ID NO: 1369186 - RNA, 20 nt, Human
agaggaagggggggaggggc

SEQ ID NO: 1369187 - RNA, 21 nt, Human
agaggaagggggggaggggca

SEQ ID NO: 1369188 - RNA, 20 nt, Human
agcaccacagauacugcggg

SEQ ID NO: 1369189 - RNA, 19 nt, Human
agccaccacacuuagccug

SEQ ID NO: 1369190 - RNA, 23 nt, Human
agccgagugagcagcguucagga

SEQ ID NO: 1369191 - RNA, 19 nt, Human
aggaagggggggaggggca

SEQ ID NO: 1369192 - RNA, 20 nt, Human
aggaagggggggaggggcag

SEQ ID NO: 1369193 - RNA, 24 nt, Human
aggaggccagagcaggcaagaggc

SEQ ID NO: 1369194 - RNA, 23 nt, Human
aggaggccagagcaggcaguggg

SEQ ID NO: 1369195 - RNA, 18 nt, Human
aggccagagcaggcaaga

SEQ ID NO: 1369196 - RNA, 18 nt, Human
agugcugggacuacaggc

SEQ ID NO: 1369197 - RNA, 24 nt, Human
auuugucacuagaagcccauugug

SEQ ID NO: 1369198 - RNA, 27 nt, Human
caagcgauccucccaccucggccuucc

SEQ ID NO: 1369199 - RNA, 23 nt, Human
caauaggacaacgggcauggccc

SEQ ID NO: 1369200 - RNA, 25 nt, Human
cacacuuagccugucggaguccuuu

SEQ ID NO: 1369201 - RNA, 21 nt, Human
cacagugaggucucaagacaa

SEQ ID NO: 1369202 - RNA, 25 nt, Human
caccacagauacugcgggcaaaucu

SEQ ID NO: 1369203 - RNA, 22 nt, Human
cagaaggacgcaggagaggggu

SEQ ID NO: 1369204 - RNA, 22 nt, Human
cagacacaaccucucagcccca

SEQ ID NO: 1369205 - RNA, 23 nt, Human
cagagcaccacagauacugcggg

SEQ ID NO: 1369206 - RNA, 18 nt, Human
cagagcaggcaagaggcc

SEQ ID NO: 1369207 - RNA, 18 nt, Human
cagugacguggggaaaac

SEQ ID NO: 1369208 - RNA, 20 nt, Human
cauguugcccaggcaggucc

SEQ ID NO: 1369209 - RNA, 24 nt, Human
cauguugcccaggcagguccugaa

SEQ ID NO: 1369210 - RNA, 21 nt, Human
ccagagcaccacagauacugc

SEQ ID NO: 1369211 - RNA, 22 nt, Human
ccaggaaaggagaaggagcccc

SEQ ID NO: 1369212 - RNA, 19 nt, Human
ccauguugcccaggcaggu

SEQ ID NO: 1369213 - RNA, 20 nt, Human
ccauguugcccaggcagguc

SEQ ID NO: 1369214 - RNA, 21 nt, Human
cccccaggccgcuugcacagu

SEQ ID NO: 1369215 - RNA, 23 nt, Human
cccgagugcugggacuacaggca

SEQ ID NO: 1369216 - RNA, 24 nt, Human
cccgagugcugggacuacaggcau

SEQ ID NO: 1369217 - RNA, 20 nt, Human
cccgccacgcccccaggccg

SEQ ID NO: 1369218 - RNA, 23 nt, Human
ccgagugcugggacuacaggcau

SEQ ID NO: 1369219 - RNA, 20 nt, Human
ccgccacgcccccaggccgc

SEQ ID NO: 1369220 - RNA, 22 nt, Human
ccgccacgcccccaggccgcuu

SEQ ID NO: 1369221 - RNA, 20 nt, Human
ccucagaauuuuuauuuuua

SEQ ID NO: 1369222 - RNA, 25 nt, Human
ccucccaccucggccuucccgagug

SEQ ID NO: 1369223 - RNA, 22 nt, Human
ccuccccgccacgcccccaggc

SEQ ID NO: 1369224 - RNA, 19 nt, Human
ccuccgagguugacaugaa

SEQ ID NO: 1369225 - RNA, 20 nt, Human
ccugggcucaagcgauccuc

SEQ ID NO: 1369226 - RNA, 20 nt, Human
ccuugacgaggggaggugga

SEQ ID NO: 1369227 - RNA, 24 nt, Human
cgagugagcagcguucaggagucc

SEQ ID NO: 1369228 - RNA, 19 nt, Human
cgagugcugggacuacagg

SEQ ID NO: 1369229 - RNA, 24 nt, Human
cgagugcugggacuacaggcauga

SEQ ID NO: 1369230 - RNA, 19 nt, Human
cgccacgcccccaggccgc

SEQ ID NO: 1369231 - RNA, 22 nt, Human
cgcccccaggccgcuugcacag

SEQ ID NO: 1369232 - RNA, 27 nt, Human
cgguauggagggugugggccgcacacg

SEQ ID NO: 1369233 - RNA, 21 nt, Human
cuaaagccagcacaggguguc

SEQ ID NO: 1369234 - RNA, 22 nt, Human
cuaaagccagcacagggugucc

SEQ ID NO: 1369235 - RNA, 23 nt, Human
cuaaagccagcacaggguguccc

SEQ ID NO: 1369236 - RNA, 24 nt, Human
cucaagcgauccucccaccucggc

SEQ ID NO: 1369237 - RNA, 22 nt, Human
cucccgggcauccccauccugg

SEQ ID NO: 1369238 - RNA, 22 nt, Human
cucuggggagaagaagucggca

SEQ ID NO: 1369239 - RNA, 23 nt, Human
cuggcugagcucaggagaguggg

SEQ ID NO: 1369240 - RNA, 20 nt, Human
cugggaaggaucaugggguu

SEQ ID NO: 1369241 - RNA, 20 nt, Human
gaaaggagaaggagccccca

SEQ ID NO: 1369242 - RNA, 19 nt, Human
gacgaggggagguggaggg

SEQ ID NO: 1369243 - RNA, 21 nt, Human
gacuacaggcaugagccacca

SEQ ID NO: 1369244 - RNA, 27 nt, Human
gagaauggugagaggaggccgguaccc

SEQ ID NO: 1369245 - RNA, 18 nt, Human
gagggugugggggugggc

SEQ ID NO: 1369246 - RNA, 19 nt, Human
gaucaugggguuaaggaug

SEQ ID NO: 1369247 - RNA, 22 nt, Human
gcauccccauccuggaagagac

SEQ ID NO: 1369248 - RNA, 18 nt, Human
gccacgcccccaggccgc

SEQ ID NO: 1369249 - RNA, 20 nt, Human
gcucuggggagaagaagucg

SEQ ID NO: 1369250 - RNA, 19 nt, Human
ggaagggggggaggggcag

SEQ ID NO: 1369251 - RNA, 21 nt, Human
ggacgcaggagaggggucagc

SEQ ID NO: 1369252 - RNA, 19 nt, Human
ggacuacaggcaugagcca

SEQ ID NO: 1369253 - RNA, 21 nt, Human
ggagaggggucagcuauaaug

SEQ ID NO: 1369254 - RNA, 20 nt, Human
ggcauggcccucccugaugg

SEQ ID NO: 1369255 - RNA, 22 nt, Human
gggcauccccauccuggaagag

SEQ ID NO: 1369256 - RNA, 18 nt, Human
gggcccagagcaccacag

SEQ ID NO: 1369257 - RNA, 26 nt, Human
ggggagguggagggagcaaggugaca

SEQ ID NO: 1369258 - RNA, 18 nt, Human
gggugugggggugggcgg

SEQ ID NO: 1369259 - RNA, 19 nt, Human
gggugugggggugggcggu

SEQ ID NO: 1369260 - RNA, 18 nt, Human
gguccugaacuccugggc

SEQ ID NO: 1369261 - RNA, 24 nt, Human
gugacgggaaggaugcagaaggga

SEQ ID NO: 1369262 - RNA, 19 nt, Human
gugcugggacuacaggcau

SEQ ID NO: 1369263 - RNA, 18 nt, Human
guuauaaaagccaggcuc

SEQ ID NO: 1369264 - RNA, 18 nt, Human
uaaggcaggcagaaccug

SEQ ID NO: 1369265 - RNA, 20 nt, Human
uaaggcaggcagaaccugag

SEQ ID NO: 1369266 - RNA, 19 nt, Human
uacagauccaccucagaau

SEQ ID NO: 1369267 - RNA, 21 nt, Human
uacaggcaugagccaccacac

SEQ ID NO: 1369268 - RNA, 24 nt, Human
uccaggccaggaagcauacgaggc

SEQ ID NO: 1369269 - RNA, 21 nt, Human
uccccgccacgcccccaggcc

SEQ ID NO: 1369270 - RNA, 23 nt, Human
ucccgagugcugggacuacaggc

SEQ ID NO: 1369271 - RNA, 20 nt, Human
ucccggggcaagugcauucc

SEQ ID NO: 1369272 - RNA, 19 nt, Human
uccuccuccuccuccccgc

SEQ ID NO: 1369273 - RNA, 21 nt, Human
uccuccuccuccuccccgcca

SEQ ID NO: 1369274 - RNA, 18 nt, Human
uccugaacuccugggcuc

SEQ ID NO: 1369275 - RNA, 23 nt, Human
uccugaacuccugggcucaagcg

SEQ ID NO: 1369276 - RNA, 21 nt, Human
uccugggcucaagcgauccuc

SEQ ID NO: 1369277 - RNA, 22 nt, Human
uccugggcucaagcgauccucc

SEQ ID NO: 1369278 - RNA, 24 nt, Human
uccugggcucaagcgauccuccca

SEQ ID NO: 1369279 - RNA, 18 nt, Human
ucucgaaggccacuauca

SEQ ID NO: 1369280 - RNA, 25 nt, Human
ugaacuccugggcucaagcgauccu

SEQ ID NO: 1369281 - RNA, 21 nt, Human
ugacagaaggacgcaggagag

SEQ ID NO: 1369282 - RNA, 22 nt, Human
ugagcgggguguccuggaagcc

SEQ ID NO: 1369283 - RNA, 21 nt, Human
ugagcucaggagagugggcac

SEQ ID NO: 1369284 - RNA, 31 nt, Human
ugccauguugcccaggcagguccugaacucc

SEQ ID NO: 1369285 - RNA, 21 nt, Human
uggagggugugggggugggcg

SEQ ID NO: 1369286 - RNA, 19 nt, Human
uggcaagaggaaggggggg

SEQ ID NO: 1369287 - RNA, 22 nt, Human
uggcaagaggaagggggggagg

SEQ ID NO: 1369288 - RNA, 21 nt, Human
uggcaagcaguuuggacaggu

SEQ ID NO: 1369289 - RNA, 21 nt, Human
uggcagagaauggugagagga

SEQ ID NO: 1369290 - RNA, 20 nt, Human
uggcuggcaguggaaggcag

SEQ ID NO: 1369291 - RNA, 18 nt, Human
ugggacuacaggcaugag

SEQ ID NO: 1369292 - RNA, 22 nt, Human
ugggacuacaggcaugagccac

SEQ ID NO: 1369293 - RNA, 24 nt, Human
ugggacuacaggcaugagccacca

SEQ ID NO: 1369294 - RNA, 24 nt, Human
ugggacuacaggcaugagccacca

SEQ ID NO: 1369295 - RNA, 23 nt, Human
ugggcucuuggaugucgugguuu

SEQ ID NO: 1369296 - RNA, 24 nt, Human
uggggaaaacgguauggaggguga

SEQ ID NO: 1369297 - RNA, 18 nt, Human
ugugacgggaaggaugca

SEQ ID NO: 1369298 - RNA, 19 nt, Human
ugugugacgggaaggaugc

SEQ ID NO: 1369299 - RNA, 18 nt, Human
uugauaauaaggugacuu

SEQ ID NO: 1369300 - RNA, 19 nt, Human
uuuggcaagaggaaggggg

SEQ ID NO: 1369301 - RNA, 19 nt, Human
uuuugccauguugcccagg

SEQ ID NO: 1369302 - RNA, 21 nt, Human
aaaaaaaccaggaaucaaaaa

SEQ ID NO: 1369303 - RNA, 18 nt, Human
aaaaaacaaaaaaaccag

SEQ ID NO: 1369304 - RNA, 28 nt, Human
aaaaaacaaaaaaaccaggaaucaaaag

SEQ ID NO: 1369305 - RNA, 23 nt, Human
aaaaaaccaggaaucaaaaacca

SEQ ID NO: 1369306 - RNA, 25 nt, Human
aaaaauaccccaaacaaaaaacaaa

SEQ ID NO: 1369307 - RNA, 21 nt, Human
aaaacaaaaaaaccaggaauc

SEQ ID NO: 1369308 - RNA, 24 nt, Human
aaaaggacauucccaauuucaacc

SEQ ID NO: 1369309 - RNA, 20 nt, Human
aaaauaccucaagauauuuu

SEQ ID NO: 1369310 - RNA, 23 nt, Human
aaacaaaaaaaccaggaaucaaa

SEQ ID NO: 1369311 - RNA, 24 nt, Human
aaacaaaaaacaaaaaaaccagga

SEQ ID NO: 1369312 - RNA, 23 nt, Human
aaagauauguuacccauuacucc

SEQ ID NO: 1369313 - RNA, 21 nt, Human
aaaugaccgaaaaaugcugaa

SEQ ID NO: 1369314 - RNA, 20 nt, Human
aaaugcaaaaucaaaugacc

SEQ ID NO: 1369315 - RNA, 22 nt, Human
aacaccagcacgcggcaagaga

SEQ ID NO: 1369316 - RNA, 20 nt, Human
aacaucugaacuccaacgcc

SEQ ID NO: 1369317 - RNA, 22 nt, Human
aaccaagcaaauuaaaaucaaa

SEQ ID NO: 1369318 - RNA, 21 nt, Human
aaccacuaaugguaaaaaucu

SEQ ID NO: 1369319 - RNA, 25 nt, Human
aacuguuuuccaauuugcucuccac

SEQ ID NO: 1369320 - RNA, 18 nt, Human
aagaacagcuaggauaca

SEQ ID NO: 1369321 - RNA, 23 nt, Human
aauauucuccucuuuugcacugu

SEQ ID NO: 1369322 - RNA, 25 nt, Human
acaaaaaaaccaggaaucaaaaacc

SEQ ID NO: 1369323 - RNA, 21 nt, Human
acaagaggaaauauucuccuc

SEQ ID NO: 1369324 - RNA, 25 nt, Human
acacacauacauaaacauacauaca

SEQ ID NO: 1369325 - RNA, 22 nt, Human
acauacccacacacauacauaa

SEQ ID NO: 1369326 - RNA, 19 nt, Human
acccauuacuccagcauga

SEQ ID NO: 1369327 - RNA, 19 nt, Human
accccgccucucccucucc

SEQ ID NO: 1369328 - RNA, 22 nt, Human
acgacggcggcggcggcggcuu

SEQ ID NO: 1369329 - RNA, 19 nt, Human
agaaguucuucugggucug

SEQ ID NO: 1369330 - RNA, 23 nt, Human
agcuacaauaguaagauccaacc

SEQ ID NO: 1369331 - RNA, 23 nt, Human
aggaaucaaaaaccaaaacaccc

SEQ ID NO: 1369332 - RNA, 24 nt, Human
aggguauagugagcagcuacaaua

SEQ ID NO: 1369333 - RNA, 18 nt, Human
agguagguucaaggccaa

SEQ ID NO: 1369334 - RNA, 25 nt, Human
auacacacauacccacacacauaca

SEQ ID NO: 1369335 - RNA, 19 nt, Human
auacucacuuuccauuaau

SEQ ID NO: 1369336 - RNA, 21 nt, Human
aucucuucagauuugaaaucc

SEQ ID NO: 1369337 - RNA, 18 nt, Human
auggagaacauccuucuc

SEQ ID NO: 1369338 - RNA, 24 nt, Human
augucuguaaaacuuuggaaccac

SEQ ID NO: 1369339 - RNA, 19 nt, Human
auuguuggucuugcaccuu

SEQ ID NO: 1369340 - RNA, 26 nt, Human
caaaaaaaccaggaaucaaaaaccaa

SEQ ID NO: 1369341 - RNA, 20 nt, Human
caaaaaacaaaaaaaccagg

SEQ ID NO: 1369342 - RNA, 24 nt, Human
caaaaaacaaaaaaaccaggaauc

SEQ ID NO: 1369343 - RNA, 27 nt, Human
caaaaaacaaaaaaaccaggaaucaaa

SEQ ID NO: 1369344 - RNA, 23 nt, Human
caaaaaccaaaacacccucaaac

SEQ ID NO: 1369345 - RNA, 26 nt, Human
caaaaauaccccaaacaaaaaacaaa

SEQ ID NO: 1369346 - RNA, 24 nt, Human
caaaacacccucaaacugcaccaa

SEQ ID NO: 1369347 - RNA, 23 nt, Human
caaaauaccucaagauauuuuaa

SEQ ID NO: 1369348 - RNA, 23 nt, Human
caaaccacuaaugguaaaaaucu

SEQ ID NO: 1369349 - RNA, 21 nt, Human
caagaaaagcacaagaggaaa

SEQ ID NO: 1369350 - RNA, 25 nt, Human
caagaaaagcacaagaggaaauauu

SEQ ID NO: 1369351 - RNA, 25 nt, Human
caagcugagggaacaaaaucuuaca

SEQ ID NO: 1369352 - RNA, 19 nt, Human
caauuucaaccuugcugaa

SEQ ID NO: 1369353 - RNA, 19 nt, Human
cacacauacccacacacau

SEQ ID NO: 1369354 - RNA, 20 nt, Human
cacacauacccacacacaua

SEQ ID NO: 1369355 - RNA, 22 nt, Human
cacacauacccacacacauaca

SEQ ID NO: 1369356 - RNA, 27 nt, Human
cacauacccacacacauacauaaacau

SEQ ID NO: 1369357 - RNA, 21 nt, Human
caccaaaaauaccccaaacaa

SEQ ID NO: 1369358 - RNA, 21 nt, Human
caccaauacuucauauuuuga

SEQ ID NO: 1369359 - RNA, 19 nt, Human
cacuguauacacacauacc

SEQ ID NO: 1369360 - RNA, 19 nt, Human
cagagguagguucaaggcc

SEQ ID NO: 1369361 - RNA, 19 nt, Human
caugccagcuuccaaaaac

SEQ ID NO: 1369362 - RNA, 25 nt, Human
caugucuguaaaacuuuggaaccac

SEQ ID NO: 1369363 - RNA, 22 nt, Human
ccaaaacacccucaaacugcac

SEQ ID NO: 1369364 - RNA, 24 nt, Human
ccaaaacacccucaaacugcacca

SEQ ID NO: 1369365 - RNA, 24 nt, Human
ccaaaacacccucaaacugcacca

SEQ ID NO: 1369366 - RNA, 21 nt, Human
ccaguggcaaaauaccucaag

SEQ ID NO: 1369367 - RNA, 26 nt, Human
cccaaacaaaaaacaaaaaggaguuc

SEQ ID NO: 1369368 - RNA, 21 nt, Human
cccaauuucaaccuugcugaa

SEQ ID NO: 1369369 - RNA, 24 nt, Human
cccacacacauacauaaacauaca

SEQ ID NO: 1369370 - RNA, 24 nt, Human
ccccaaacaaaaaacaaaaaaacc

SEQ ID NO: 1369371 - RNA, 18 nt, Human
ccccgccucucccucucc

SEQ ID NO: 1369372 - RNA, 26 nt, Human
ccccgccugcuuugcgcaucccucuu

SEQ ID NO: 1369373 - RNA, 23 nt, Human
ccucagccgagacagagaaagac

SEQ ID NO: 1369374 - RNA, 23 nt, Human
cgaaaaaugcugaacaaacagca

SEQ ID NO: 1369375 - RNA, 22 nt, Human
cgacggcggcggcggcggcggc

SEQ ID NO: 1369376 - RNA, 18 nt, Human
cgccucucccucuccggg

SEQ ID NO: 1369377 - RNA, 21 nt, Human
cgggagcagauccacgugaua

SEQ ID NO: 1369378 - RNA, 22 nt, Human
cuagguggaagaugaggaagaa

SEQ ID NO: 1369379 - RNA, 24 nt, Human
cuccacuguauacacacauaccca

SEQ ID NO: 1369380 - RNA, 22 nt, Human
cuuaccuccaaguccucuuaaa

SEQ ID NO: 1369381 - RNA, 23 nt, Human
cuuuugcacuguuauuuuauuuu

SEQ ID NO: 1369382 - RNA, 20 nt, Human
gaaaagcacaagaggaaaua

SEQ ID NO: 1369383 - RNA, 19 nt, Human
gaccccgccucucccucuc

SEQ ID NO: 1369384 - RNA, 23 nt, Human
gacggcggcggcggcggcggcgg

SEQ ID NO: 1369385 - RNA, 29 nt, Human
gagggaacaaaaucuuacaaaaggaggga

SEQ ID NO: 1369386 - RNA, 18 nt, Human
gccagcuuccaaaaacca

SEQ ID NO: 1369387 - RNA, 21 nt, Human
gccgaccccgccucucccucu

SEQ ID NO: 1369388 - RNA, 18 nt, Human
gcggcaagagaaagaugg

SEQ ID NO: 1369389 - RNA, 21 nt, Human
gcggcaagagaaagauggcug

SEQ ID NO: 1369390 - RNA, 21 nt, Human
gcggcggcggcggcgggagca

SEQ ID NO: 1369391 - RNA, 18 nt, Human
gcuaaacucuauauggag

SEQ ID NO: 1369392 - RNA, 19 nt, Human
gcugccucagccgagacag

SEQ ID NO: 1369393 - RNA, 23 nt, Human
gggaaaagaaaaguaacaaaugu

SEQ ID NO: 1369394 - RNA, 23 nt, Human
guaaaaaucucuucagauuugaa

SEQ ID NO: 1369395 - RNA, 24 nt, Human
guaaaaaucucuucagauuugaaa

SEQ ID NO: 1369396 - RNA, 18 nt, Human
gugauacagccgaccccg

SEQ ID NO: 1369397 - RNA, 18 nt, Human
gugucuuacggggggaaa

SEQ ID NO: 1369398 - RNA, 25 nt, Human
uaaaauaaauugagguguuuggaug

SEQ ID NO: 1369399 - RNA, 21 nt, Human
uaaggcaaccauaccaaagau

SEQ ID NO: 1369400 - RNA, 20 nt, Human
uaaguuaaucuaaggcaacc

SEQ ID NO: 1369401 - RNA, 24 nt, Human
uacaccaaaaauaccccaaacaaa

SEQ ID NO: 1369402 - RNA, 26 nt, Human
uacauacaccaaaaauaccccaaaca

SEQ ID NO: 1369403 - RNA, 27 nt, Human
uacccacacacauacauaaacauacau

SEQ ID NO: 1369404 - RNA, 20 nt, Human
uaccccaaacaaaaaacaaa

SEQ ID NO: 1369405 - RNA, 22 nt, Human
uaccccaaacaaaaaacaaaaa

SEQ ID NO: 1369406 - RNA, 19 nt, Human
uaccugcuguuaagaacag

SEQ ID NO: 1369407 - RNA, 18 nt, Human
uacuguguuuuaccagug

SEQ ID NO: 1369408 - RNA, 21 nt, Human
uagcaaaaaguaagcuucuau

SEQ ID NO: 1369409 - RNA, 24 nt, Human
uagcuugacacaaaaguugguagc

SEQ ID NO: 1369410 - RNA, 19 nt, Human
uauaaaacauaacaggaaa

SEQ ID NO: 1369411 - RNA, 21 nt, Human
uauacaaaauauuuauauuac

SEQ ID NO: 1369412 - RNA, 22 nt, Human
uauuagacagcaagagggaaac

SEQ ID NO: 1369413 - RNA, 21 nt, Human
uauuguuggucuugcaccuua

SEQ ID NO: 1369414 - RNA, 21 nt, Human
uauuuucuaaauuuuguccuu

SEQ ID NO: 1369415 - RNA, 21 nt, Human
ucaaaaaccaaaacacccuca

SEQ ID NO: 1369416 - RNA, 19 nt, Human
ucagccgagacagagaaag

SEQ ID NO: 1369417 - RNA, 19 nt, Human
uccaugccagcuuccaaaa

SEQ ID NO: 1369418 - RNA, 19 nt, Human
ucuacuggggagggaggag

SEQ ID NO: 1369419 - RNA, 18 nt, Human
ucuagcuugacacaaaag

SEQ ID NO: 1369420 - RNA, 21 nt, Human
ucucaagcuagguggaagaug

SEQ ID NO: 1369421 - RNA, 26 nt, Human
ucuccggggcagccuaucccgggagc

SEQ ID NO: 1369422 - RNA, 25 nt, Human
ucuucugggucugacuagguaaguu

SEQ ID NO: 1369423 - RNA, 20 nt, Human
ugaaaaacaggcauuuuugu

SEQ ID NO: 1369424 - RNA, 27 nt, Human
ugaaauccaagauacuccuccggccgg

SEQ ID NO: 1369425 - RNA, 20 nt, Human
ugaaaucuaccaaacuguaa

SEQ ID NO: 1369426 - RNA, 25 nt, Human
ugaaaucuaccaaacuguaacauca

SEQ ID NO: 1369427 - RNA, 21 nt, Human
ugaacuaguaacaggugaugu

SEQ ID NO: 1369428 - RNA, 19 nt, Human
ugaagaugaaguuguuccu

SEQ ID NO: 1369429 - RNA, 19 nt, Human
ugaccaggccauuuggaga

SEQ ID NO: 1369430 - RNA, 19 nt, Human
ugaggaaauccuccuaggg

SEQ ID NO: 1369431 - RNA, 22 nt, Human
ugaggaagaauauuaccaaaag

SEQ ID NO: 1369432 - RNA, 24 nt, Human
ugccucagccgagacagagaaaga

SEQ ID NO: 1369433 - RNA, 18 nt, Human
ugcuuugcgcaucccucu

SEQ ID NO: 1369434 - RNA, 24 nt, Human
uggaugaaaaaaaauacaagagcu

SEQ ID NO: 1369435 - RNA, 24 nt, Human
uggcuguaacaaaugcugauauag

SEQ ID NO: 1369436 - RNA, 19 nt, Human
ugggaggaagugcaaaaug

SEQ ID NO: 1369437 - RNA, 22 nt, Human
ugggaggaagugcaaaaugcaa

SEQ ID NO: 1369438 - RNA, 21 nt, Human
uggggagggaggaggauaaau

SEQ ID NO: 1369439 - RNA, 26 nt, Human
uguauacacacauacccacacacaua

SEQ ID NO: 1369440 - RNA, 26 nt, Human
uguauacacacauacccacacacaua

SEQ ID NO: 1369441 - RNA, 21 nt, Human
uuagugcuaguggcggcaggu

SEQ ID NO: 1369442 - RNA, 23 nt, Human
uuauucuaagcaugcaggagggu

SEQ ID NO: 1369443 - RNA, 22 nt, Human
uucaaccuugcugaaaaacagg

SEQ ID NO: 1369444 - RNA, 19 nt, Human
uuccucaagcugagggaac

SEQ ID NO: 1369445 - RNA, 20 nt, Human
uugaugaugggccaggaaau

SEQ ID NO: 1369446 - RNA, 18 nt, Human
uuggucuugcaccuuaga

SEQ ID NO: 1369447 - RNA, 23 nt, Human
uuuccaauuugcucuccacugua

SEQ ID NO: 1369448 - RNA, 24 nt, Human
uuuuuauuucuacuggggagggag

SEQ ID NO: 1369449 - RNA, 23 nt, Human
aagaagccccugucccugccuca

SEQ ID NO: 1369450 - RNA, 22 nt, Human
aaguaggggcuccucuuccagg

SEQ ID NO: 1369451 - RNA, 24 nt, Human
accacccacccagcauaccucccc

SEQ ID NO: 1369452 - RNA, 23 nt, Human
accagaaccuguuccuacucuga

SEQ ID NO: 1369453 - RNA, 20 nt, Human
accccaggaacacccaagcc

SEQ ID NO: 1369454 - RNA, 23 nt, Human
accccaggaacacccaagccuua

SEQ ID NO: 1369455 - RNA, 22 nt, Human
acccccccuuaauccccucccg

SEQ ID NO: 1369456 - RNA, 21 nt, Human
acccuggggugccugcuguga

SEQ ID NO: 1369457 - RNA, 24 nt, Human
agcuguguguacccaagaagcccc

SEQ ID NO: 1369458 - RNA, 21 nt, Human
aggggccgcuacuggcccccc

SEQ ID NO: 1369459 - RNA, 19 nt, Human
agugggugaccagcuagcu

SEQ ID NO: 1369460 - RNA, 23 nt, Human
augcaggcgccguuucugcauug

SEQ ID NO: 1369461 - RNA, 18 nt, Human
caacagucaccgcccaag

SEQ ID NO: 1369462 - RNA, 23 nt, Human
cacagguacucugcaggaccccc

SEQ ID NO: 1369463 - RNA, 24 nt, Human
caccgagcgaugcaggcgccguuu

SEQ ID NO: 1369464 - RNA, 20 nt, Human
cacuucgcacugccuaagug

SEQ ID NO: 1369465 - RNA, 24 nt, Human
caggaaaugcuauagagagccaau

SEQ ID NO: 1369466 - RNA, 22 nt, Human
caggcaccaacagucaccgccc

SEQ ID NO: 1369467 - RNA, 19 nt, Human
cagguaaggcgauaccugc

SEQ ID NO: 1369468 - RNA, 21 nt, Human
caguggggcaucuugcuccag

SEQ ID NO: 1369469 - RNA, 19 nt, Human
cccaagaagccccuguccc

SEQ ID NO: 1369470 - RNA, 24 nt, Human
cccacccagcauaccuccccaggc

SEQ ID NO: 1369471 - RNA, 25 nt, Human
cccacccagcauaccuccccaggca

SEQ ID NO: 1369472 - RNA, 21 nt, Human
cccagcauaccuccccaggca

SEQ ID NO: 1369473 - RNA, 18 nt, Human
ccccacacccaguggggc

SEQ ID NO: 1369474 - RNA, 18 nt, Human
ccccaggcagcgcccagg

SEQ ID NO: 1369475 - RNA, 18 nt, Human
ccccauacaggcagcucc

SEQ ID NO: 1369476 - RNA, 23 nt, Human
ccccuccugccugcuugcugccc

SEQ ID NO: 1369477 - RNA, 21 nt, Human
cccggggaggccccuccugcc

SEQ ID NO: 1369478 - RNA, 22 nt, Human
cccuaagggucagaugggcuuc

SEQ ID NO: 1369479 - RNA, 20 nt, Human
cccuccuguguccugccugc

SEQ ID NO: 1369480 - RNA, 21 nt, Human
cccugguccugcccacccccc

SEQ ID NO: 1369481 - RNA, 21 nt, Human
ccgcaaacucagggaucacca

SEQ ID NO: 1369482 - RNA, 18 nt, Human
ccgcuacuggccccccuc

SEQ ID NO: 1369483 - RNA, 21 nt, Human
ccuccgggacugccuggggcc

SEQ ID NO: 1369484 - RNA, 18 nt, Human
ccucggcaaggacaaggc

SEQ ID NO: 1369485 - RNA, 22 nt, Human
ccucuuccagguccgccuucug

SEQ ID NO: 1369486 - RNA, 19 nt, Human
ccugcagccucuucugccu

SEQ ID NO: 1369487 - RNA, 21 nt, Human
ccugcagccucuucugccucu

SEQ ID NO: 1369488 - RNA, 21 nt, Human
ccugcccuugcaccccaggaa

SEQ ID NO: 1369489 - RNA, 23 nt, Human
ccugcccuuguaccccaggaacc

SEQ ID NO: 1369490 - RNA, 23 nt, Human
ccugcugugaggccuuacugccc

SEQ ID NO: 1369491 - RNA, 20 nt, Human
ccuggagacaggccccugga

SEQ ID NO: 1369492 - RNA, 24 nt, Human
ccuggccuugccuugagaguuggc

SEQ ID NO: 1369493 - RNA, 18 nt, Human
ccuggggugccugcugug

SEQ ID NO: 1369494 - RNA, 20 nt, Human
ccuggugcuggcuguucccc

SEQ ID NO: 1369495 - RNA, 18 nt, Human
ccugucccuuucuccccu

SEQ ID NO: 1369496 - RNA, 19 nt, Human
ccuugagaguuggcugcaa

SEQ ID NO: 1369497 - RNA, 20 nt, Human
cgcaaacucagggaucacca

SEQ ID NO: 1369498 - RNA, 25 nt, Human
cggcaaaguuguucuucggggucug

SEQ ID NO: 1369499 - RNA, 18 nt, Human
cggccaagcagggcugcu

SEQ ID NO: 1369500 - RNA, 21 nt, Human
cggccacccggggaggccccu

SEQ ID NO: 1369501 - RNA, 26 nt, Human
cuaaccacccacccagcauaccuccc

SEQ ID NO: 1369502 - RNA, 18 nt, Human
cuaaguguggugggcuuu

SEQ ID NO: 1369503 - RNA, 23 nt, Human
cuccgggacugccuggggccucu

SEQ ID NO: 1369504 - RNA, 23 nt, Human
cucuguagcaucucagggcaguc

SEQ ID NO: 1369505 - RNA, 19 nt, Human
cugcagccucuucugccuc

SEQ ID NO: 1369506 - RNA, 23 nt, Human
cugcagccucuucugccucucgg

SEQ ID NO: 1369507 - RNA, 23 nt, Human
cugcagcucuugggucugcagga

SEQ ID NO: 1369508 - RNA, 21 nt, Human
cugcagguuggugggccuggc

SEQ ID NO: 1369509 - RNA, 22 nt, Human
cugccaggcugcucuugaucgu

SEQ ID NO: 1369510 - RNA, 20 nt, Human
cuggccugcccuugcacccc

SEQ ID NO: 1369511 - RNA, 23 nt, Human
cuggggccuggccuugccuugag

SEQ ID NO: 1369512 - RNA, 22 nt, Human
cuggggggaaucaaugugguuc

SEQ ID NO: 1369513 - RNA, 23 nt, Human
cuucggggucugcuucagugccg

SEQ ID NO: 1369514 - RNA, 18 nt, Human
cuugggucugcaggaggu

SEQ ID NO: 1369515 - RNA, 22 nt, Human
gagcccagggcuccgugggcag

SEQ ID NO: 1369516 - RNA, 19 nt, Human
gaggccccuccugccugcu

SEQ ID NO: 1369517 - RNA, 20 nt, Human
gaggguuagggcugggcuga

SEQ ID NO: 1369518 - RNA, 20 nt, Human
gcagaaggugccaugagccc

SEQ ID NO: 1369519 - RNA, 22 nt, Human
gccaucccuccuguguccugcc

SEQ ID NO: 1369520 - RNA, 24 nt, Human
gcccacccccccuuaauccccucc

SEQ ID NO: 1369521 - RNA, 26 nt, Human
gcccaggccaauguggggaagagggc

SEQ ID NO: 1369522 - RNA, 20 nt, Human
gcccuggagacaggccccug

SEQ ID NO: 1369523 - RNA, 19 nt, Human
gccuuggaggguucugggg

SEQ ID NO: 1369524 - RNA, 18 nt, Human
gcuccaggccuggucucg

SEQ ID NO: 1369525 - RNA, 22 nt, Human
gcugguugcgcugcugaaagug

SEQ ID NO: 1369526 - RNA, 23 nt, Human
ggaaggggcaggaucauuggggg

SEQ ID NO: 1369527 - RNA, 20 nt, Human
ggaggagggaggucugggga

SEQ ID NO: 1369528 - RNA, 18 nt, Human
ggcggccacccggggagc

SEQ ID NO: 1369529 - RNA, 20 nt, Human
ggggcaggaucauugggggg

SEQ ID NO: 1369530 - RNA, 18 nt, Human
ggggugugccgccgcccc

SEQ ID NO: 1369531 - RNA, 20 nt, Human
ggguuagggcugggcugagg

SEQ ID NO: 1369532 - RNA, 23 nt, Human
gucauggggcccuuagggugcag

SEQ ID NO: 1369533 - RNA, 19 nt, Human
gucccuuucuccccucuga

SEQ ID NO: 1369534 - RNA, 18 nt, Human
guccugcccacccccccu

SEQ ID NO: 1369535 - RNA, 19 nt, Human
guccugcccacccccccuu

SEQ ID NO: 1369536 - RNA, 21 nt, Human
guggagaccuuggggaaaugc

SEQ ID NO: 1369537 - RNA, 22 nt, Human
uagagcguggccgucaucugcu

SEQ ID NO: 1369538 - RNA, 20 nt, Human
uagcucaaagcaccgagcga

SEQ ID NO: 1369539 - RNA, 19 nt, Human
uaucaugagcccuggagac

SEQ ID NO: 1369540 - RNA, 18 nt, Human
ucaacauaguggaagcug

SEQ ID NO: 1369541 - RNA, 24 nt, Human
ucaugagcccuggagacaggcccc

SEQ ID NO: 1369542 - RNA, 21 nt, Human
uccccaggcagcgcccaggcc

SEQ ID NO: 1369543 - RNA, 20 nt, Human
ucccuaggcggccacccggg

SEQ ID NO: 1369544 - RNA, 22 nt, Human
ucccuaggcggccacccgggga

SEQ ID NO: 1369545 - RNA, 19 nt, Human
ucccugggaaagcuagcuu

SEQ ID NO: 1369546 - RNA, 18 nt, Human
ucccugguccugcccacc

SEQ ID NO: 1369547 - RNA, 19 nt, Human
ucccugguccugcccaccc

SEQ ID NO: 1369548 - RNA, 21 nt, Human
uccgggacugccuggggccuc

SEQ ID NO: 1369549 - RNA, 18 nt, Human
uccuccgggacugccugg

SEQ ID NO: 1369550 - RNA, 23 nt, Human
uccucuuccagguccgccuucug

SEQ ID NO: 1369551 - RNA, 23 nt, Human
uccugcccacccccccuuaaucc

SEQ ID NO: 1369552 - RNA, 18 nt, Human
uccugcugguugcgcugc

SEQ ID NO: 1369553 - RNA, 18 nt, Human
ucugccucucggcaaagu

SEQ ID NO: 1369554 - RNA, 19 nt, Human
ucuuggaauuuagccaggc

SEQ ID NO: 1369555 - RNA, 19 nt, Human
ugagcccagggcuccgugg

SEQ ID NO: 1369556 - RNA, 21 nt, Human
ugaggguuagggcugggcuga

SEQ ID NO: 1369557 - RNA, 21 nt, Human
ugaucgugaccccacacccag

SEQ ID NO: 1369558 - RNA, 22 nt, Human
ugcaagucagacccuacaaggc

SEQ ID NO: 1369559 - RNA, 18 nt, Human
ugccaaauagcaaaauaa

SEQ ID NO: 1369560 - RNA, 21 nt, Human
ugcccacccccccuuaauccc

SEQ ID NO: 1369561 - RNA, 26 nt, Human
ugcccacccccccuuaauccccuccc

SEQ ID NO: 1369562 - RNA, 18 nt, Human
ugcccuggugcuggcugu

SEQ ID NO: 1369563 - RNA, 22 nt, Human
ugccuggggccucuggcucccu

SEQ ID NO: 1369564 - RNA, 19 nt, Human
ugcgucuaaccacccaccc

SEQ ID NO: 1369565 - RNA, 21 nt, Human
uggagacaggccccuggagcu

SEQ ID NO: 1369566 - RNA, 24 nt, Human
ugggcagugccaucccuccugugu

SEQ ID NO: 1369567 - RNA, 23 nt, Human
uggggugccugcugugaggccuu

SEQ ID NO: 1369568 - RNA, 19 nt, Human
uggugaggguuagggcugg

SEQ ID NO: 1369569 - RNA, 21 nt, Human
uguccugcugguugcgcugcu

SEQ ID NO: 1369570 - RNA, 21 nt, Human
ugugccgccgcccccaucugc

SEQ ID NO: 1369571 - RNA, 19 nt, Human
uuaccuggccugcccuugc

SEQ ID NO: 1369572 - RNA, 21 nt, Human
uuagaggccucugcuuucucc

SEQ ID NO: 1369573 - RNA, 22 nt, Human
uuccccauacaggcagcuccug

SEQ ID NO: 1369574 - RNA, 22 nt, Human
uuccuccucuguaaagggaagc

SEQ ID NO: 1369575 - RNA, 18 nt, Human
uucgcaggggaaggggca

SEQ ID NO: 1369576 - RNA, 19 nt, Human
uugaaggagccgggcuggg

SEQ ID NO: 1369577 - RNA, 23 nt, Human
uugaucgugaccccacacccagu

SEQ ID NO: 1369578 - RNA, 24 nt, Human
uugccuugagaguuggcugcaagu

SEQ ID NO: 1369579 - RNA, 18 nt, Human
uugcuccaggccuggucu

SEQ ID NO: 1369580 - RNA, 18 nt, Human
aaacucaaucggcacuau

SEQ ID NO: 1369581 - RNA, 18 nt, Human
aacaagauccucccccug

SEQ ID NO: 1369582 - RNA, 19 nt, Human
aacugggcccacccaaagc

SEQ ID NO: 1369583 - RNA, 19 nt, Human
aagcucccccgcucugccu

SEQ ID NO: 1369584 - RNA, 19 nt, Human
agcacacacacauaugugc

SEQ ID NO: 1369585 - RNA, 25 nt, Human
aggacuguacuuugcuggacguggc

SEQ ID NO: 1369586 - RNA, 24 nt, Human
aguaagauuaaacugcccuauuuc

SEQ ID NO: 1369587 - RNA, 18 nt, Human
aguaggcucugccacugg

SEQ ID NO: 1369588 - RNA, 21 nt, Human
aguuauuucuuugacuauuac

SEQ ID NO: 1369589 - RNA, 21 nt, Human
cacacauaugugcacaaacac

SEQ ID NO: 1369590 - RNA, 19 nt, Human
cacggcaugaacggucacc

SEQ ID NO: 1369591 - RNA, 23 nt, Human
cacuucccgggcuccccacuccc

SEQ ID NO: 1369592 - RNA, 23 nt, Human
cagaacuucagaacacacggcau

SEQ ID NO: 1369593 - RNA, 23 nt, Human
cagcaagcucccccgcucugccu

SEQ ID NO: 1369594 - RNA, 18 nt, Human
ccaaagcaaaaaaaaaaa

SEQ ID NO: 1369595 - RNA, 22 nt, Human
ccaaagcaaaaaaaaaaaaaaa

SEQ ID NO: 1369596 - RNA, 26 nt, Human
ccaaagcaaaaaaaaaaaaaaaaaaa

SEQ ID NO: 1369597 - RNA, 23 nt, Human
ccacccaaagcaaaaaaaaaaaa

SEQ ID NO: 1369598 - RNA, 22 nt, Human
cccaaagcaaaaaaaaaaaaaa

SEQ ID NO: 1369599 - RNA, 23 nt, Human
cccaaagcaaaaaaaaaaaaaaa

SEQ ID NO: 1369600 - RNA, 20 nt, Human
ccccugaaaaaugccgacuu

SEQ ID NO: 1369601 - RNA, 22 nt, Human
cccgcucugccuccugcggccc

SEQ ID NO: 1369602 - RNA, 24 nt, Human
ccgcucagguuaaaagagccacgu

SEQ ID NO: 1369603 - RNA, 19 nt, Human
ccuccgggccccugucacc

SEQ ID NO: 1369604 - RNA, 21 nt, Human
ccuguguaggcagccauguuu

SEQ ID NO: 1369605 - RNA, 18 nt, Human
ccuucuucgcuuugagaa

SEQ ID NO: 1369606 - RNA, 22 nt, Human
cgcccgacacuucccgggcucc

SEQ ID NO: 1369607 - RNA, 21 nt, Human
cgcucugccuccugcggccca

SEQ ID NO: 1369608 - RNA, 20 nt, Human
cgggccccugucaccuccuc

SEQ ID NO: 1369609 - RNA, 18 nt, Human
cuauuccuuuuucuuagc

SEQ ID NO: 1369610 - RNA, 24 nt, Human
cuccacacgcccgacacuucccgg

SEQ ID NO: 1369611 - RNA, 22 nt, Human
cugauucucucuacuuucucac

SEQ ID NO: 1369612 - RNA, 18 nt, Human
gaacggucacccuccucu

SEQ ID NO: 1369613 - RNA, 23 nt, Human
gcaaaaaaaaaaaaaaaaaaaaa

SEQ ID NO: 1369614 - RNA, 19 nt, Human
gccauguuuucucuccagu

SEQ ID NO: 1369615 - RNA, 25 nt, Human
gcgguuccuguguaggcagccaugu

SEQ ID NO: 1369616 - RNA, 20 nt, Human
gcucccccgcucugccuccu

SEQ ID NO: 1369617 - RNA, 19 nt, Human
gcucucgggagauucaccc

SEQ ID NO: 1369618 - RNA, 23 nt, Human
guaacaagauccucccccugaaa

SEQ ID NO: 1369619 - RNA, 21 nt, Human
gucuugagcggugcugguauc

SEQ ID NO: 1369620 - RNA, 27 nt, Human
uaacaagauccucccccugaaaaaugc

SEQ ID NO: 1369621 - RNA, 19 nt, Human
uaguaggcucugccacugg

SEQ ID NO: 1369622 - RNA, 24 nt, Human
uauaagcacacacacauaugugca

SEQ ID NO: 1369623 - RNA, 25 nt, Human
ucagaacacacggcaugaacgguca

SEQ ID NO: 1369624 - RNA, 19 nt, Human
ucccgggcuccccacuccc

SEQ ID NO: 1369625 - RNA, 20 nt, Human
ucccgggcuccccacucccu

SEQ ID NO: 1369626 - RNA, 22 nt, Human
ucccuccgggccccugucaccu

SEQ ID NO: 1369627 - RNA, 21 nt, Human
uccuccgugguucagugugcu

SEQ ID NO: 1369628 - RNA, 24 nt, Human
ucgguaacaagauccucccccuga

SEQ ID NO: 1369629 - RNA, 18 nt, Human
ucuguaccuuuacuccuc

SEQ ID NO: 1369630 - RNA, 19 nt, Human
ugcacaaacaccaauauuc

SEQ ID NO: 1369631 - RNA, 23 nt, Human
ugcaucugaaacucaaucggcac

SEQ ID NO: 1369632 - RNA, 23 nt, Human
ugcuuugaaucucuaugucuaaa

SEQ ID NO: 1369633 - RNA, 26 nt, Human
uuagcagucacccauaaaacgcaaac

SEQ ID NO: 1369634 - RNA, 25 nt, Human
uucaaggguuauaagcacacacaca

SEQ ID NO: 1369635 - RNA, 23 nt, Human
uucccgggcuccccacucccucc

SEQ ID NO: 1369636 - RNA, 26 nt, Human
uuucucacugaugucauuuauucgau

SEQ ID NO: 1369637 - RNA, 21 nt, Human
aaaccaauaacgcauggacaa

SEQ ID NO: 1369638 - RNA, 19 nt, Human
aacaaaaucaccacugcca

SEQ ID NO: 1369639 - RNA, 18 nt, Human
aagaaagcacuacaugcg

SEQ ID NO: 1369640 - RNA, 23 nt, Human
aagaaguacucugucaacagcca

SEQ ID NO: 1369641 - RNA, 25 nt, Human
agaaaucagaaguuuccacggccuu

SEQ ID NO: 1369642 - RNA, 23 nt, Human
agacugagaagcccaagaaguac

SEQ ID NO: 1369643 - RNA, 24 nt, Human
agagguagaguagcuggauuaaag

SEQ ID NO: 1369644 - RNA, 26 nt, Human
aguaauaaaaauauaaaaaauauauc

SEQ ID NO: 1369645 - RNA, 20 nt, Human
auccccaacaagaaucagcc

SEQ ID NO: 1369646 - RNA, 24 nt, Human
caaguaacucuuuccugcuccaaa

SEQ ID NO: 1369647 - RNA, 24 nt, Human
cacggccuugcauuuccaauggug

SEQ ID NO: 1369648 - RNA, 23 nt, Human
cacucccaacucugauaaaguuu

SEQ ID NO: 1369649 - RNA, 22 nt, Human
cauuuuugcuauaagcugaaga

SEQ ID NO: 1369650 - RNA, 25 nt, Human
cucaaugcuuuuucucacauagacu

SEQ ID NO: 1369651 - RNA, 21 nt, Human
cucccaacucugauaaaguuu

SEQ ID NO: 1369652 - RNA, 20 nt, Human
cugaaaaucaaauccuuuuc

SEQ ID NO: 1369653 - RNA, 20 nt, Human
gaaucagcuuuucacacuca

SEQ ID NO: 1369654 - RNA, 23 nt, Human
gaucauuuuugcuauaagcugaa

SEQ ID NO: 1369655 - RNA, 22 nt, Human
ggacaaccauguuagugggcca

SEQ ID NO: 1369656 - RNA, 21 nt, Human
gggauccccaacaagaaucag

SEQ ID NO: 1369657 - RNA, 20 nt, Human
gguccaaagaaagcacuaca

SEQ ID NO: 1369658 - RNA, 18 nt, Human
gguuuggcaaucuuccua

SEQ ID NO: 1369659 - RNA, 23 nt, Human
gucuaggguuuuugaaaccaccc

SEQ ID NO: 1369660 - RNA, 19 nt, Human
guuuguuccaauccauuuu

SEQ ID NO: 1369661 - RNA, 18 nt, Human
uaacacucccaacucuga

SEQ ID NO: 1369662 - RNA, 28 nt, Human
uaauaaaaauauaaaaaauauaucaugu

SEQ ID NO: 1369663 - RNA, 23 nt, Human
uacaaaauauuuacaccaugucu

SEQ ID NO: 1369664 - RNA, 21 nt, Human
uacaaagaacaaaaucaccac

SEQ ID NO: 1369665 - RNA, 22 nt, Human
uagaagaagaaaucagaaguuu

SEQ ID NO: 1369666 - RNA, 19 nt, Human
uagcuaacuucaauguugc

SEQ ID NO: 1369667 - RNA, 18 nt, Human
uaguagaagaagaaaucc

SEQ ID NO: 1369668 - RNA, 25 nt, Human
uaguaggauuuuauacuaccuuuug

SEQ ID NO: 1369669 - RNA, 21 nt, Human
ucaaacagcuguacaaagaac

SEQ ID NO: 1369670 - RNA, 25 nt, Human
ucaaugcuuucaugugaugccauca

SEQ ID NO: 1369671 - RNA, 21 nt, Human
ucagcaggguucuauuggucc

SEQ ID NO: 1369672 - RNA, 22 nt, Human
ucaugagcugcaucagaacccu

SEQ ID NO: 1369673 - RNA, 23 nt, Human
uccaagacugagaagcccaagaa

SEQ ID NO: 1369674 - RNA, 18 nt, Human
ucucuuacugacucuuuu

SEQ ID NO: 1369675 - RNA, 24 nt, Human
ucuuaaauauaagccaauacucuu

SEQ ID NO: 1369676 - RNA, 24 nt, Human
ucuuccuaacacucccaacucuga

SEQ ID NO: 1369677 - RNA, 27 nt, Human
ugagaagcccaagaaguacucugucaa

SEQ ID NO: 1369678 - RNA, 22 nt, Human
ugccagcaaguaacucuuuccu

SEQ ID NO: 1369679 - RNA, 18 nt, Human
ugcuagcauuacaaacca

SEQ ID NO: 1369680 - RNA, 21 nt, Human
ugcucaaugcuuuuucucaca

SEQ ID NO: 1369681 - RNA, 21 nt, Human
uguacaaagaacaaaaucacc

SEQ ID NO: 1369682 - RNA, 28 nt, Human
uuaagauaaaguuugguuuuugguucau

SEQ ID NO: 1369683 - RNA, 22 nt, Human
uuaguagaagaagaaaucagaa

SEQ ID NO: 1369684 - RNA, 24 nt, Human
uucaauguugcuccuaggcugagu

SEQ ID NO: 1369685 - RNA, 19 nt, Human
uugaaaccacccaaagauc

SEQ ID NO: 1369686 - RNA, 24 nt, Human
uuugcuauaagcugaagaucuuuc

SEQ ID NO: 1369687 - RNA, 23 nt, Human
uuuguuccaauccauuuucauga

SEQ ID NO: 1369688 - RNA, 24 nt, Human
aaagugcugagauuagaggcguga

SEQ ID NO: 1369689 - RNA, 22 nt, Human
aaguagcugggauuacaggcac

SEQ ID NO: 1369690 - RNA, 27 nt, Human
aaguagcugggauuacaggcaccuguc

SEQ ID NO: 1369691 - RNA, 26 nt, Human
aagugcugagauuagaggcgugagcc

SEQ ID NO: 1369692 - RNA, 21 nt, Human
acaggcaccugucaccaugcc

SEQ ID NO: 1369693 - RNA, 21 nt, Human
aggcccgaauacagccggcag

SEQ ID NO: 1369694 - RNA, 25 nt, Human
aggcuggagugcaguggcacgaucu

SEQ ID NO: 1369695 - RNA, 20 nt, Human
aguccaguccaaggcccgaa

SEQ ID NO: 1369696 - RNA, 23 nt, Human
agugauucucaugccucggccuc

SEQ ID NO: 1369697 - RNA, 24 nt, Human
agugauucucaugccucggccucc

SEQ ID NO: 1369698 - RNA, 21 nt, Human
agugcaguggcacgaucucag

SEQ ID NO: 1369699 - RNA, 23 nt, Human
agugcaguggcacgaucucagcu

SEQ ID NO: 1369700 - RNA, 22 nt, Human
augccucggccucccaaguagc

SEQ ID NO: 1369701 - RNA, 23 nt, Human
augccucggccucccaaguagcu

SEQ ID NO: 1369702 - RNA, 24 nt, Human
caaagugcugagauuagaggcgug

SEQ ID NO: 1369703 - RNA, 22 nt, Human
caagugauucucaugccucggc

SEQ ID NO: 1369704 - RNA, 28 nt, Human
caagugauucucaugccucggccuccca

SEQ ID NO: 1369705 - RNA, 21 nt, Human
cacugcaaccuccgccucccg

SEQ ID NO: 1369706 - RNA, 23 nt, Human
cacugcaaccuccgccucccggg

SEQ ID NO: 1369707 - RNA, 28 nt, Human
caggaaccccaccgucccaaccuucagg

SEQ ID NO: 1369708 - RNA, 24 nt, Human
cauguuggccaggcuggucuugaa

SEQ ID NO: 1369709 - RNA, 22 nt, Human
ccaaagugcugagauuagaggc

SEQ ID NO: 1369710 - RNA, 24 nt, Human
ccaaagugcugagauuagaggcgu

SEQ ID NO: 1369711 - RNA, 23 nt, Human
ccaaguagcugggauuacaggca

SEQ ID NO: 1369712 - RNA, 19 nt, Human
ccauguuggccaggcuggu

SEQ ID NO: 1369713 - RNA, 21 nt, Human
ccauguuggccaggcuggucu

SEQ ID NO: 1369714 - RNA, 21 nt, Human
ccauguuggccaggcuggucu

SEQ ID NO: 1369715 - RNA, 23 nt, Human
cccaaguagcugggauuacaggc

SEQ ID NO: 1369716 - RNA, 24 nt, Human
cccaaguagcugggauuacaggca

SEQ ID NO: 1369717 - RNA, 20 nt, Human
cccggguucaagugauucuc

SEQ ID NO: 1369718 - RNA, 23 nt, Human
cccggguucaagugauucucaug

SEQ ID NO: 1369719 - RNA, 24 nt, Human
ccgccucccggguucaagugauuc

SEQ ID NO: 1369720 - RNA, 21 nt, Human
ccguagcuucucaguccaguc

SEQ ID NO: 1369721 - RNA, 18 nt, Human
ccugaccucagaugaucc

SEQ ID NO: 1369722 - RNA, 24 nt, Human
cgcucuggugcccaggcuggagug

SEQ ID NO: 1369723 - RNA, 24 nt, Human
cucacugcaaccuccgccucccgg

SEQ ID NO: 1369724 - RNA, 25 nt, Human
cucaugccucggccucccaaguagc

SEQ ID NO: 1369725 - RNA, 24 nt, Human
cuccauguuggccaggcuggucuu

SEQ ID NO: 1369726 - RNA, 20 nt, Human
cucccggguucaagugauuc

SEQ ID NO: 1369727 - RNA, 24 nt, Human
cucggccucccaaguagcugggau

SEQ ID NO: 1369728 - RNA, 23 nt, Human
cugcaaccuccgccucccggguu

SEQ ID NO: 1369729 - RNA, 24 nt, Human
cugcaaccuccgccucccggguuc

SEQ ID NO: 1369730 - RNA, 19 nt, Human
cuggugcccaggcuggagu

SEQ ID NO: 1369731 - RNA, 21 nt, Human
cugguggccgcgccaccuucc

SEQ ID NO: 1369732 - RNA, 26 nt, Human
gaauacagccggcaggaaccccaccg

SEQ ID NO: 1369733 - RNA, 23 nt, Human
gaccucagaugauccgcugucuu

SEQ ID NO: 1369734 - RNA, 18 nt, Human
gacggagucucgcucugg

SEQ ID NO: 1369735 - RNA, 24 nt, Human
gauuacaggcaccugucaccaugc

SEQ ID NO: 1369736 - RNA, 18 nt, Human
gauuagaggcgugagcca

SEQ ID NO: 1369737 - RNA, 19 nt, Human
gcccaggcuggagugcagu

SEQ ID NO: 1369738 - RNA, 21 nt, Human
gccucggccucccaaguagcu

SEQ ID NO: 1369739 - RNA, 19 nt, Human
gcuggagugcaguggcacg

SEQ ID NO: 1369740 - RNA, 23 nt, Human
gcuggucuugaacuccugaccuc

SEQ ID NO: 1369741 - RNA, 19 nt, Human
ggagucucgcucuggugcc

SEQ ID NO: 1369742 - RNA, 24 nt, Human
ggcuggucuugaacuccugaccuc

SEQ ID NO: 1369743 - RNA, 22 nt, Human
gggguuucuccauguuggccag

SEQ ID NO: 1369744 - RNA, 23 nt, Human
gggguuucuccauguuggccagg

SEQ ID NO: 1369745 - RNA, 22 nt, Human
ggguuucuccauguuggccagg

SEQ ID NO: 1369746 - RNA, 19 nt, Human
ggucuugaacuccugaccu

SEQ ID NO: 1369747 - RNA, 18 nt, Human
guagcugggauuacaggc

SEQ ID NO: 1369748 - RNA, 24 nt, Human
gucucgcucuggugcccaggcugg

SEQ ID NO: 1369749 - RNA, 24 nt, Human
gugcccaggcuggagugcaguggc

SEQ ID NO: 1369750 - RNA, 22 nt, Human
uacaggcaccugucaccaugcc

SEQ ID NO: 1369751 - RNA, 19 nt, Human
uagcuucucaguccagucc

SEQ ID NO: 1369752 - RNA, 23 nt, Human
ucacugcaaccuccgccucccgg

SEQ ID NO: 1369753 - RNA, 24 nt, Human
ucacugcaaccuccgccucccggg

SEQ ID NO: 1369754 - RNA, 25 nt, Human
ucacugcaaccuccgccucccgggu

SEQ ID NO: 1369755 - RNA, 27 nt, Human
ucacugcaaccuccgccucccggguuc

SEQ ID NO: 1369756 - RNA, 24 nt, Human
ucccaaagugcugagauuagaggc

SEQ ID NO: 1369757 - RNA, 24 nt, Human
ucccaaguagcugggauuacaggc

SEQ ID NO: 1369758 - RNA, 21 nt, Human
ucccggguucaagugauucuc

SEQ ID NO: 1369759 - RNA, 24 nt, Human
ucccggguucaagugauucucaug

SEQ ID NO: 1369760 - RNA, 19 nt, Human
ucuccaccguagcuucuca

SEQ ID NO: 1369761 - RNA, 23 nt, Human
ucucgcucuggugcccaggcugg

SEQ ID NO: 1369762 - RNA, 24 nt, Human
ucucgcucuggugcccaggcugga

SEQ ID NO: 1369763 - RNA, 22 nt, Human
ucuggugcccaggcuggagugc

SEQ ID NO: 1369764 - RNA, 24 nt, Human
ucuggugcccaggcuggagugcag

SEQ ID NO: 1369765 - RNA, 21 nt, Human
ucuucggccucccaaagugcu

SEQ ID NO: 1369766 - RNA, 19 nt, Human
ugaccucagaugauccgcu

SEQ ID NO: 1369767 - RNA, 22 nt, Human
ugaccucagaugauccgcuguc

SEQ ID NO: 1369768 - RNA, 23 nt, Human
ugaccucagaugauccgcugucu

SEQ ID NO: 1369769 - RNA, 22 nt, Human
ugcaguggcacgaucucagcuc

SEQ ID NO: 1369770 - RNA, 18 nt, Human
ugcccaggcuggagugca

SEQ ID NO: 1369771 - RNA, 21 nt, Human
ugcccaggcuggagugcagug

SEQ ID NO: 1369772 - RNA, 22 nt, Human
ugcccaggcuggagugcagugg

SEQ ID NO: 1369773 - RNA, 24 nt, Human
ugcccaggcuggagugcaguggca

SEQ ID NO: 1369774 - RNA, 21 nt, Human
ugccguggcccugaggccagc

SEQ ID NO: 1369775 - RNA, 21 nt, Human
ugccucggccucccaaguagc

SEQ ID NO: 1369776 - RNA, 24 nt, Human
ugccucggccucccaaguagcugg

SEQ ID NO: 1369777 - RNA, 23 nt, Human
uggagugcaguggcacgaucuca

SEQ ID NO: 1369778 - RNA, 24 nt, Human
uggagugcaguggcacgaucucag

SEQ ID NO: 1369779 - RNA, 24 nt, Human
uggcacgaucucagcucacugcaa

SEQ ID NO: 1369780 - RNA, 24 nt, Human
uggccaggcuggucuugaacuccu

SEQ ID NO: 1369781 - RNA, 22 nt, Human
ugggauuacaggcaccugucac

SEQ ID NO: 1369782 - RNA, 24 nt, Human
ugggauuacaggcaccugucacca

SEQ ID NO: 1369783 - RNA, 25 nt, Human
ugggauuacaggcaccugucaccau

SEQ ID NO: 1369784 - RNA, 21 nt, Human
uucaagugauucucaugccuc

SEQ ID NO: 1369785 - RNA, 21 nt, Human
uuucuccauguuggccaggcu

SEQ ID NO: 1369786 - RNA, 20 nt, Human
aagacaacuuggcuucugag

SEQ ID NO: 1369787 - RNA, 18 nt, Human
aagacacugagcacagcc

SEQ ID NO: 1369788 - RNA, 24 nt, Human
aagacacugagcacagcccagagc

SEQ ID NO: 1369789 - RNA, 20 nt, Human
aagagaacagagcggcacug

SEQ ID NO: 1369790 - RNA, 18 nt, Human
aagagacacuccagaggc

SEQ ID NO: 1369791 - RNA, 20 nt, Human
aaggaaagagaacagagcgg

SEQ ID NO: 1369792 - RNA, 18 nt, Human
aaggagaagagaugggga

SEQ ID NO: 1369793 - RNA, 19 nt, Human
aaguccucucucccuccac

SEQ ID NO: 1369794 - RNA, 18 nt, Human
aauucuaaaucaaaucac

SEQ ID NO: 1369795 - RNA, 21 nt, Human
aauucucucuagagaagagac

SEQ ID NO: 1369796 - RNA, 21 nt, Human
acacaaaagaaaggaaagcug

SEQ ID NO: 1369797 - RNA, 19 nt, Human
acaguagucagucucagcu

SEQ ID NO: 1369798 - RNA, 21 nt, Human
acaguuucucucuuucugccu

SEQ ID NO: 1369799 - RNA, 20 nt, Human
acaugaaaauuuccagaaau

SEQ ID NO: 1369800 - RNA, 18 nt, Human
accccagcuuuagcuacu

SEQ ID NO: 1369801 - RNA, 18 nt, Human
accccuccuacgcggacu

SEQ ID NO: 1369802 - RNA, 21 nt, Human
acucugacaguuucucucuuu

SEQ ID NO: 1369803 - RNA, 19 nt, Human
agaacuggcugaaacaaga

SEQ ID NO: 1369804 - RNA, 21 nt, Human
agaaggugauaaaaagagcac

SEQ ID NO: 1369805 - RNA, 19 nt, Human
agagaagagacacuccaga

SEQ ID NO: 1369806 - RNA, 18 nt, Human
agaggaagaagaggggga

SEQ ID NO: 1369807 - RNA, 21 nt, Human
agccacaugucucaccaggaa

SEQ ID NO: 1369808 - RNA, 20 nt, Human
agcccagagccaauaaaaga

SEQ ID NO: 1369809 - RNA, 18 nt, Human
agccuagaaggcagagca

SEQ ID NO: 1369810 - RNA, 22 nt, Human
agcuacugcaauuaugauuuuu

SEQ ID NO: 1369811 - RNA, 21 nt, Human
agcuugccgagggaugguggg

SEQ ID NO: 1369812 - RNA, 21 nt, Human
aggaagaagagggggaguggg

SEQ ID NO: 1369813 - RNA, 21 nt, Human
auaagauucagaggaagaagc

SEQ ID NO: 1369814 - RNA, 21 nt, Human
augcaguugggcugaccugac

SEQ ID NO: 1369815 - RNA, 24 nt, Human
augcuucccugguuuuagcacaca

SEQ ID NO: 1369816 - RNA, 24 nt, Human
caaagacacugagcacagcccagu

SEQ ID NO: 1369817 - RNA, 18 nt, Human
caaagcucugaugaagaa

SEQ ID NO: 1369818 - RNA, 18 nt, Human
caaaguaggagagaggcc

SEQ ID NO: 1369819 - RNA, 24 nt, Human
caaaucccaccaaaguccugacuc

SEQ ID NO: 1369820 - RNA, 21 nt, Human
caaaugauucauuuuccuaac

SEQ ID NO: 1369821 - RNA, 21 nt, Human
caaggcccugccaccuggcuu

SEQ ID NO: 1369822 - RNA, 22 nt, Human
cacaacagugaaaauuagugac

SEQ ID NO: 1369823 - RNA, 21 nt, Human
cacaaggguggcaggaggagg

SEQ ID NO: 1369824 - RNA, 23 nt, Human
cacacaaaagaaaggaaagcugc

SEQ ID NO: 1369825 - RNA, 19 nt, Human
cacccaugagagaugacuc

SEQ ID NO: 1369826 - RNA, 22 nt, Human
cacugggauuugaaaggggaac

SEQ ID NO: 1369827 - RNA, 19 nt, Human
cagaaaacacacaaaagaa

SEQ ID NO: 1369828 - RNA, 22 nt, Human
cagaggaaagcccaucucccuc

SEQ ID NO: 1369829 - RNA, 21 nt, Human
cagcuuuggggucuccagaaa

SEQ ID NO: 1369830 - RNA, 19 nt, Human
caggaguugggguggcacg

SEQ ID NO: 1369831 - RNA, 20 nt, Human
cagggucacauguggguuuc

SEQ ID NO: 1369832 - RNA, 23 nt, Human
caucucccuccagcuuugggguc

SEQ ID NO: 1369833 - RNA, 23 nt, Human
cauuuggccagccuggcuuuacu

SEQ ID NO: 1369834 - RNA, 19 nt, Human
ccacugcacugaggggggu

SEQ ID NO: 1369835 - RNA, 20 nt, Human
cccagagccaauaaaagauc

SEQ ID NO: 1369836 - RNA, 21 nt, Human
ccccugcaacuuugcggauuu

SEQ ID NO: 1369837 - RNA, 18 nt, Human
cccuccuacgcggacucc

SEQ ID NO: 1369838 - RNA, 21 nt, Human
cccugccaccuggcuuuacaa

SEQ ID NO: 1369839 - RNA, 19 nt, Human
ccucaagaucuuuguuucc

SEQ ID NO: 1369840 - RNA, 18 nt, Human
ccuccuacgcggacucca

SEQ ID NO: 1369841 - RNA, 22 nt, Human
ccugcagaacuggcugaaacaa

SEQ ID NO: 1369842 - RNA, 19 nt, Human
ccuguggcagguucuggga

SEQ ID NO: 1369843 - RNA, 18 nt, Human
cggcaguauucucggcug

SEQ ID NO: 1369844 - RNA, 19 nt, Human
cucacuccauuucauugaa

SEQ ID NO: 1369845 - RNA, 22 nt, Human
cuccagaaagaggcuggauuuc

SEQ ID NO: 1369846 - RNA, 24 nt, Human
cuccuacgcggacuccagucacau

SEQ ID NO: 1369847 - RNA, 20 nt, Human
cuccuggcagagggugagug

SEQ ID NO: 1369848 - RNA, 24 nt, Human
cucugaggccaaagacacugagca

SEQ ID NO: 1369849 - RNA, 19 nt, Human
cucuugagugggugcccag

SEQ ID NO: 1369850 - RNA, 23 nt, Human
cugcagccuaggggacagggcug

SEQ ID NO: 1369851 - RNA, 26 nt, Human
cugguccuaguccacaaggguggcag

SEQ ID NO: 1369852 - RNA, 22 nt, Human
cugugaguuaagccacaugucu

SEQ ID NO: 1369853 - RNA, 22 nt, Human
cuuuccuaaugcacaguaguca

SEQ ID NO: 1369854 - RNA, 23 nt, Human
cuuuccuugccucuucauaaaag

SEQ ID NO: 1369855 - RNA, 20 nt, Human
gaagaagagggggaguggga

SEQ ID NO: 1369856 - RNA, 18 nt, Human
gaagaggggagggcuucc

SEQ ID NO: 1369857 - RNA, 21 nt, Human
gaggggaaggaaagagaacag

SEQ ID NO: 1369858 - RNA, 22 nt, Human
gcagaaggaugagguggugagc

SEQ ID NO: 1369859 - RNA, 20 nt, Human
gcaguugggcugaccugaca

SEQ ID NO: 1369860 - RNA, 22 nt, Human
gccuaggggacagggcugcuug

SEQ ID NO: 1369861 - RNA, 19 nt, Human
ggaaaccugugaguuaagc

SEQ ID NO: 1369862 - RNA, 18 nt, Human
ggaaagcccaucucccuc

SEQ ID NO: 1369863 - RNA, 19 nt, Human
ggaaggaaagagaacagag

SEQ ID NO: 1369864 - RNA, 18 nt, Human
ggcgauauucagggguca

SEQ ID NO: 1369865 - RNA, 24 nt, Human
gggcuucccucaucuuccucaaga

SEQ ID NO: 1369866 - RNA, 20 nt, Human
ggggacugugaagaggggag

SEQ ID NO: 1369867 - RNA, 23 nt, Human
gggugaguggggaccuacgaggu

SEQ ID NO: 1369868 - RNA, 18 nt, Human
ggguuuccccuuuccuug

SEQ ID NO: 1369869 - RNA, 21 nt, Human
ggugaguggggaccuacgagg

SEQ ID NO: 1369870 - RNA, 18 nt, Human
gugaaauuauacucugac

SEQ ID NO: 1369871 - RNA, 20 nt, Human
gugcuggggcuccccaaggc

SEQ ID NO: 1369872 - RNA, 18 nt, Human
uaaaaagagcacucuuga

SEQ ID NO: 1369873 - RNA, 22 nt, Human
uaagaacacagaaaacacacaa

SEQ ID NO: 1369874 - RNA, 18 nt, Human
uaaguccucucucccucc

SEQ ID NO: 1369875 - RNA, 21 nt, Human
uaauuuccccucgauuccaca

SEQ ID NO: 1369876 - RNA, 21 nt, Human
uacacggccaauacuaacgcc

SEQ ID NO: 1369877 - RNA, 19 nt, Human
uaccaaaaucagggucaca

SEQ ID NO: 1369878 - RNA, 22 nt, Human
uaugaaacugaaaaucaaauca

SEQ ID NO: 1369879 - RNA, 22 nt, Human
ucaaucuguuggguaagaccuc

SEQ ID NO: 1369880 - RNA, 24 nt, Human
ucacauguggguuuccccuuuccu

SEQ ID NO: 1369881 - RNA, 21 nt, Human
ucaccaggaauaauuuaugcc

SEQ ID NO: 1369882 - RNA, 19 nt, Human
ucagcucuccugccuuacu

SEQ ID NO: 1369883 - RNA, 24 nt, Human
uccaaaugauucauuuuccuaccg

SEQ ID NO: 1369884 - RNA, 18 nt, Human
uccacaggagggaagacc

SEQ ID NO: 1369885 - RNA, 19 nt, Human
ucccaagucagcucuccug

SEQ ID NO: 1369886 - RNA, 19 nt, Human
uccccaaggcccugccacc

SEQ ID NO: 1369887 - RNA, 25 nt, Human
uccccaaggcccugccaccuggcuu

SEQ ID NO: 1369888 - RNA, 19 nt, Human
uccccagggaaauccugcc

SEQ ID NO: 1369889 - RNA, 23 nt, Human
uccccagggaaauccugccuccg

SEQ ID NO: 1369890 - RNA, 20 nt, Human
uccuguggcagguucuggga

SEQ ID NO: 1369891 - RNA, 18 nt, Human
ucugccucuucccucugc

SEQ ID NO: 1369892 - RNA, 20 nt, Human
ugaagaaacaagacuccuug

SEQ ID NO: 1369893 - RNA, 20 nt, Human
ugaagaggggagggcuuccc

SEQ ID NO: 1369894 - RNA, 20 nt, Human
ugaccugacaaagcccccag

SEQ ID NO: 1369895 - RNA, 18 nt, Human
ugacgcggagccgccccu

SEQ ID NO: 1369896 - RNA, 19 nt, Human
ugacucaaugccaaggccu

SEQ ID NO: 1369897 - RNA, 22 nt, Human
ugagaaaaagcaauagaugggg

SEQ ID NO: 1369898 - RNA, 20 nt, Human
ugagcacagcccagagccaa

SEQ ID NO: 1369899 - RNA, 23 nt, Human
ugagcacagcccagagccaauaa

SEQ ID NO: 1369900 - RNA, 24 nt, Human
ugagcuugccgagggaugguggga

SEQ ID NO: 1369901 - RNA, 22 nt, Human
ugaggagcccccacuggcuuca

SEQ ID NO: 1369902 - RNA, 19 nt, Human
ugaguccaucugacuuaag

SEQ ID NO: 1369903 - RNA, 19 nt, Human
ugagugaagacuuucccca

SEQ ID NO: 1369904 - RNA, 18 nt, Human
ugaugaagaaacaagacu

SEQ ID NO: 1369905 - RNA, 18 nt, Human
ugcaugcaguugggcuga

SEQ ID NO: 1369906 - RNA, 20 nt, Human
ugcauucaagcuucugcagc

SEQ ID NO: 1369907 - RNA, 18 nt, Human
ugccaaggccugaaguua

SEQ ID NO: 1369908 - RNA, 20 nt, Human
ugcuggggcuccccaaggcc

SEQ ID NO: 1369909 - RNA, 20 nt, Human
ugcuuguucaguuauuacug

SEQ ID NO: 1369910 - RNA, 18 nt, Human
uggcagagggugaguggg

SEQ ID NO: 1369911 - RNA, 25 nt, Human
uggcagagggugaguggggaccuuc

SEQ ID NO: 1369912 - RNA, 21 nt, Human
uggcaggaggaggguggaggc

SEQ ID NO: 1369913 - RNA, 22 nt, Human
uggcaggaggaggguggaggcu

SEQ ID NO: 1369914 - RNA, 23 nt, Human
uggccagccuggcuuuacuaaca

SEQ ID NO: 1369915 - RNA, 20 nt, Human
uggcugagcucuccugggcu

SEQ ID NO: 1369916 - RNA, 22 nt, Human
ugggaagggggcucccuguugg

SEQ ID NO: 1369917 - RNA, 20 nt, Human
ugggaugaagccuagaaggc

SEQ ID NO: 1369918 - RNA, 20 nt, Human
ugggcugaccugacaaagcc

SEQ ID NO: 1369919 - RNA, 20 nt, Human
uggggcuccccaaggcccug

SEQ ID NO: 1369920 - RNA, 18 nt, Human
ugggguggcacgucacca

SEQ ID NO: 1369921 - RNA, 22 nt, Human
ugucagcgaagcucugagugaa

SEQ ID NO: 1369922 - RNA, 22 nt, Human
ugucuguuuaaacacugaacuc

SEQ ID NO: 1369923 - RNA, 27 nt, Human
uguuuaaacacugaacucugguguuga

SEQ ID NO: 1369924 - RNA, 24 nt, Human
uuagcuccuggcagagggugagug

SEQ ID NO: 1369925 - RNA, 27 nt, Human
uuagcuccuggcagagggugagugggg

SEQ ID NO: 1369926 - RNA, 22 nt, Human
uucagaggaagaagcuuaugaa

SEQ ID NO: 1369927 - RNA, 25 nt, Human
uuccccuuuccuugccucuucauaa

SEQ ID NO: 1369928 - RNA, 24 nt, Human
uuuggugcaucccuuuguuucugu

SEQ ID NO: 1369929 - RNA, 19 nt, Human
aaagcacagcaugacuuca

SEQ ID NO: 1369930 - RNA, 19 nt, Human
aacaagccccauccucaga

SEQ ID NO: 1369931 - RNA, 22 nt, Human
aacucuuccccccacuccucug

SEQ ID NO: 1369932 - RNA, 21 nt, Human
agaggaaguaacuggcccaag

SEQ ID NO: 1369933 - RNA, 20 nt, Human
agcaaacaaguccgugagag

SEQ ID NO: 1369934 - RNA, 20 nt, Human
agcaucuaccauuccaaagc

SEQ ID NO: 1369935 - RNA, 25 nt, Human
agcaucuaccauuccaaagcacagc

SEQ ID NO: 1369936 - RNA, 23 nt, Human
agcuuugcacagagagggcagcc

SEQ ID NO: 1369937 - RNA, 23 nt, Human
aggccacccugagcaggccccag

SEQ ID NO: 1369938 - RNA, 19 nt, Human
caccaacaagccccauccu

SEQ ID NO: 1369939 - RNA, 22 nt, Human
caccaacaagccccauccucag

SEQ ID NO: 1369940 - RNA, 24 nt, Human
caccucauuucacaccaacaagcc

SEQ ID NO: 1369941 - RNA, 24 nt, Human
cacuccucugcccaaaacuccacc

SEQ ID NO: 1369942 - RNA, 23 nt, Human
cagcaaacaaguccgugagagca

SEQ ID NO: 1369943 - RNA, 19 nt, Human
caggaaggucuuccgggca

SEQ ID NO: 1369944 - RNA, 21 nt, Human
cauccuaggcccugacugccc

SEQ ID NO: 1369945 - RNA, 23 nt, Human
ccaaagcacagcaugacuucauc

SEQ ID NO: 1369946 - RNA, 19 nt, Human
ccaccgccacagcacuucg

SEQ ID NO: 1369947 - RNA, 23 nt, Human
ccaggccacccugagcaggcccc

SEQ ID NO: 1369948 - RNA, 19 nt, Human
ccccacuccucugcccaaa

SEQ ID NO: 1369949 - RNA, 19 nt, Human
ccccacuccucugcccaaa

SEQ ID NO: 1369950 - RNA, 20 nt, Human
ccccacuccucugcccaaaa

SEQ ID NO: 1369951 - RNA, 18 nt, Human
ccccgcugugcugcccga

SEQ ID NO: 1369952 - RNA, 19 nt, Human
ccccgcugugcugcccgag

SEQ ID NO: 1369953 - RNA, 19 nt, Human
cuccucugcccaaaacucc

SEQ ID NO: 1369954 - RNA, 22 nt, Human
cucggcuuuucaccugcuccuc

SEQ ID NO: 1369955 - RNA, 22 nt, Human
cugcccaaaacuccaccgccac

SEQ ID NO: 1369956 - RNA, 25 nt, Human
cuuccccccacuccucugcccaaaa

SEQ ID NO: 1369957 - RNA, 22 nt, Human
gagucccagccccgcugugcug

SEQ ID NO: 1369958 - RNA, 19 nt, Human
gcacuucggcaggcucggc

SEQ ID NO: 1369959 - RNA, 18 nt, Human
gcaggcucggcuuuucac

SEQ ID NO: 1369960 - RNA, 21 nt, Human
ggggggcugcugcccagggag

SEQ ID NO: 1369961 - RNA, 21 nt, Human
gucuuccgggcaggggcacag

SEQ ID NO: 1369962 - RNA, 23 nt, Human
gugagucccagccccgcugugcu

SEQ ID NO: 1369963 - RNA, 22 nt, Human
gugcugcccgaggguagaggag

SEQ ID NO: 1369964 - RNA, 19 nt, Human
guuccaggccacccugagc

SEQ ID NO: 1369965 - RNA, 20 nt, Human
uagagugagucccagccccg

SEQ ID NO: 1369966 - RNA, 22 nt, Human
uagagugagucccagccccgcu

SEQ ID NO: 1369967 - RNA, 23 nt, Human
uagagugagucccagccccgcug

SEQ ID NO: 1369968 - RNA, 21 nt, Human
ucauuucacaccaacaagccc

SEQ ID NO: 1369969 - RNA, 18 nt, Human
uccaaagcacagcaugac

SEQ ID NO: 1369970 - RNA, 19 nt, Human
uccuaggcccugacugccc

SEQ ID NO: 1369971 - RNA, 22 nt, Human
uccuaggcccugacugcccacc

SEQ ID NO: 1369972 - RNA, 24 nt, Human
uccucugcccaaaacuccaccgcc

SEQ ID NO: 1369973 - RNA, 19 nt, Human
ucuaccauuccaaagcaca

SEQ ID NO: 1369974 - RNA, 22 nt, Human
ucugcagcagcccggcuggccc

SEQ ID NO: 1369975 - RNA, 24 nt, Human
ucugcggagggucggguucugggg

SEQ ID NO: 1369976 - RNA, 19 nt, Human
ugcccaaaacuccaccgcc

SEQ ID NO: 1369977 - RNA, 26 nt, Human
ugcccaaaacuccaccgccacagcac

SEQ ID NO: 1369978 - RNA, 19 nt, Human
ugcggagggucggguucug

SEQ ID NO: 1369979 - RNA, 18 nt, Human
uggaagcuggggggcugc

SEQ ID NO: 1369980 - RNA, 23 nt, Human
uggggggcugcugcccagggagg

SEQ ID NO: 1369981 - RNA, 19 nt, Human
ugugcugcccgaggguaga

SEQ ID NO: 1369982 - RNA, 22 nt, Human
uuaaaagugagaaacucuuccc

SEQ ID NO: 1369983 - RNA, 21 nt, Human
uuccgggcaggggcacagcuu

SEQ ID NO: 1369984 - RNA, 19 nt, Human
uugcacagagagggcagcc

SEQ ID NO: 1369985 - RNA, 25 nt, Human
aaagcaaaugaggcagaaaggcccc

SEQ ID NO: 1369986 - RNA, 26 nt, Human
aaagcaaaugaggcagaaaggccccg

SEQ ID NO: 1369987 - RNA, 23 nt, Human
aacuaauuuuauuuuauuuuuua

SEQ ID NO: 1369988 - RNA, 20 nt, Human
aagaaguacaaaagauucug

SEQ ID NO: 1369989 - RNA, 21 nt, Human
aagcugagagaacacuccacg

SEQ ID NO: 1369990 - RNA, 21 nt, Human
acagaaucacccacauccugg

SEQ ID NO: 1369991 - RNA, 23 nt, Human
acccccgccccagguccuggcuc

SEQ ID NO: 1369992 - RNA, 22 nt, Human
agccugagcuugcuuacagccc

SEQ ID NO: 1369993 - RNA, 19 nt, Human
aggccccggccccaccccc

SEQ ID NO: 1369994 - RNA, 21 nt, Human
augugcagcagcagcagcagg

SEQ ID NO: 1369995 - RNA, 19 nt, Human
caagaaguacaaaagauuc

SEQ ID NO: 1369996 - RNA, 21 nt, Human
cacaccugcucccugacccca

SEQ ID NO: 1369997 - RNA, 18 nt, Human
caccgccugcuguggcau

SEQ ID NO: 1369998 - RNA, 23 nt, Human
caccugcucccugaccccagucu

SEQ ID NO: 1369999 - RNA, 26 nt, Human
cagcagcagcagcaggggcuuuagcu

SEQ ID NO: 1370000 - RNA, 21 nt, Human
cagcagcagcaggggcuuuag

SEQ ID NO: 1370001 - RNA, 20 nt, Human
cagcccaggcgcgggcccgg

SEQ ID NO: 1370002 - RNA, 23 nt, Human
cagcccaggcgcgggcccgggcc

SEQ ID NO: 1370003 - RNA, 19 nt, Human
cagcccccaccgccugcug

SEQ ID NO: 1370004 - RNA, 20 nt, Human
ccacaggcaagcccagcugc

SEQ ID NO: 1370005 - RNA, 18 nt, Human
ccagcagucccauagcua

SEQ ID NO: 1370006 - RNA, 23 nt, Human
cccacaggguuggagaggcaguc

SEQ ID NO: 1370007 - RNA, 18 nt, Human
ccccacccccgccccagg

SEQ ID NO: 1370008 - RNA, 18 nt, Human
cccccaccgccugcugug

SEQ ID NO: 1370009 - RNA, 22 nt, Human
cccccgccccagguccuggcuc

SEQ ID NO: 1370010 - RNA, 21 nt, Human
ccccggccccacccccgcccc

SEQ ID NO: 1370011 - RNA, 18 nt, Human
ccccugggcuggccuggg

SEQ ID NO: 1370012 - RNA, 20 nt, Human
cccgccaagucuccugucca

SEQ ID NO: 1370013 - RNA, 19 nt, Human
ccuccacaggcaagcccag

SEQ ID NO: 1370014 - RNA, 23 nt, Human
ccuccccagguacagaaucaccc

SEQ ID NO: 1370015 - RNA, 22 nt, Human
ccucugccccugaccccugggc

SEQ ID NO: 1370016 - RNA, 24 nt, Human
ccugaccccagucuuggcucaugc

SEQ ID NO: 1370017 - RNA, 24 nt, Human
ccugaccccugggcuggccuggga

SEQ ID NO: 1370018 - RNA, 18 nt, Human
ccuggacuaggagccagc

SEQ ID NO: 1370019 - RNA, 21 nt, Human
ccugggccgggagccgggggc

SEQ ID NO: 1370020 - RNA, 19 nt, Human
cuccacaggcaagcccagc

SEQ ID NO: 1370021 - RNA, 23 nt, Human
cuccacaggcaagcccagcugcu

SEQ ID NO: 1370022 - RNA, 24 nt, Human
cucugccccugaccccugggcugg

SEQ ID NO: 1370023 - RNA, 20 nt, Human
cugaccccugggcuggccuu

SEQ ID NO: 1370024 - RNA, 21 nt, Human
cugaggugugcaccucugccc

SEQ ID NO: 1370025 - RNA, 20 nt, Human
cuggagcaucucccgccaag

SEQ ID NO: 1370026 - RNA, 19 nt, Human
cugugaaacaucauuuuau

SEQ ID NO: 1370027 - RNA, 24 nt, Human
cuuacagcccacaggguuggagag

SEQ ID NO: 1370028 - RNA, 26 nt, Human
cuuucauugaaagcaaaugaggcaga

SEQ ID NO: 1370029 - RNA, 24 nt, Human
gaaagcaaaugaggcagaaaggcc

SEQ ID NO: 1370030 - RNA, 27 nt, Human
gaccuaagcugagagaaccggggguuc

SEQ ID NO: 1370031 - RNA, 20 nt, Human
gagcuugcuuacagcccaca

SEQ ID NO: 1370032 - RNA, 20 nt, Human
gcccacggaaccgucccagg

SEQ ID NO: 1370033 - RNA, 20 nt, Human
gcccgggccgggggagccug

SEQ ID NO: 1370034 - RNA, 22 nt, Human
gcccgggccgggggagccuggg

SEQ ID NO: 1370035 - RNA, 22 nt, Human
gccugggccgggagccgggggc

SEQ ID NO: 1370036 - RNA, 19 nt, Human
gcgaagcgcggcgcagccc

SEQ ID NO: 1370037 - RNA, 20 nt, Human
gcgccggacacguugcgaag

SEQ ID NO: 1370038 - RNA, 19 nt, Human
ggagaggcagucauacccc

SEQ ID NO: 1370039 - RNA, 22 nt, Human
ggagcaucucccgccaagucuc

SEQ ID NO: 1370040 - RNA, 21 nt, Human
ggagccugggccgggagccgg

SEQ ID NO: 1370041 - RNA, 21 nt, Human
ggcccgggccgggggagccug

SEQ ID NO: 1370042 - RNA, 24 nt, Human
ggcugcuuugaggcuuucauugaa

SEQ ID NO: 1370043 - RNA, 21 nt, Human
gggauguuagcuuugucugca

SEQ ID NO: 1370044 - RNA, 21 nt, Human
gucagagauagccuccccagg

SEQ ID NO: 1370045 - RNA, 22 nt, Human
gugugcaccucugccccugacc

SEQ ID NO: 1370046 - RNA, 23 nt, Human
uaagcugagagaacacuccacga

SEQ ID NO: 1370047 - RNA, 23 nt, Human
ucauacccccaugauuccuggac

SEQ ID NO: 1370048 - RNA, 31 nt, Human
ucauugaaagcaaaugaggcagaaaggcccc

SEQ ID NO: 1370049 - RNA, 23 nt, Human
uccccacgcagcccccaccgccu

SEQ ID NO: 1370050 - RNA, 22 nt, Human
ucccugaccccagucuuggcuc

SEQ ID NO: 1370051 - RNA, 20 nt, Human
ugaaagcaaaugaggcagaa

SEQ ID NO: 1370052 - RNA, 20 nt, Human
ugagagaacacuccacgaug

SEQ ID NO: 1370053 - RNA, 24 nt, Human
ugccccugaccccugggcuggccu

SEQ ID NO: 1370054 - RNA, 21 nt, Human
uggccugggaguguccccugu

SEQ ID NO: 1370055 - RNA, 19 nt, Human
uggcucaugcugaggugug

SEQ ID NO: 1370056 - RNA, 22 nt, Human
ugggauguuagcuuugucugca

SEQ ID NO: 1370057 - RNA, 22 nt, Human
ugggccgggagccgggggccag

SEQ ID NO: 1370058 - RNA, 20 nt, Human
ugucugggauguuagcuuug

SEQ ID NO: 1370059 - RNA, 18 nt, Human
ugugaaacaucauuuuau

SEQ ID NO: 1370060 - RNA, 19 nt, Human
uucaaacucgaggaagggg

SEQ ID NO: 1370061 - RNA, 21 nt, Human
uuugucugcagggguucccag

SEQ ID NO: 1370062 - RNA, 19 nt, Human
aaaauacucucauguccuc

SEQ ID NO: 1370063 - RNA, 28 nt, Human
aaaauacucucauguccucucagagccu

SEQ ID NO: 1370064 - RNA, 24 nt, Human
aaagaggaggucagucuccagagg

SEQ ID NO: 1370065 - RNA, 21 nt, Human
aaagcacuuuugcauccugug

SEQ ID NO: 1370066 - RNA, 22 nt, Human
aaaugacaacaucccuuuccca

SEQ ID NO: 1370067 - RNA, 22 nt, Human
aaccucuccuuggccuccucug

SEQ ID NO: 1370068 - RNA, 19 nt, Human
aagaauguguuagacuugg

SEQ ID NO: 1370069 - RNA, 21 nt, Human
aagagggagaaacaauaaggc

SEQ ID NO: 1370070 - RNA, 25 nt, Human
aagagggagaaacaauaaggcacag

SEQ ID NO: 1370071 - RNA, 21 nt, Human
aaguggcucauuuggggagaa

SEQ ID NO: 1370072 - RNA, 25 nt, Human
aaucaccagguuaggccaggaagaa

SEQ ID NO: 1370073 - RNA, 19 nt, Human
aaucuuggaauaacaauau

SEQ ID NO: 1370074 - RNA, 24 nt, Human
acaaacaaccucuccuuggccucc

SEQ ID NO: 1370075 - RNA, 21 nt, Human
acaaagagaagagggagaaac

SEQ ID NO: 1370076 - RNA, 24 nt, Human
acaaagagaagagggagaaacaau

SEQ ID NO: 1370077 - RNA, 21 nt, Human
acccuuggccucagguggcca

SEQ ID NO: 1370078 - RNA, 21 nt, Human
accuuugcccuuucucuggcu

SEQ ID NO: 1370079 - RNA, 22 nt, Human
accuuugcccuuucucuggcuu

SEQ ID NO: 1370080 - RNA, 19 nt, Human
agagcuggaaggaguggua

SEQ ID NO: 1370081 - RNA, 20 nt, Human
agaggaaacacaggugcugg

SEQ ID NO: 1370082 - RNA, 24 nt, Human
agaggaaaguggcucauuugggga

SEQ ID NO: 1370083 - RNA, 18 nt, Human
agccucuagccuucuccu

SEQ ID NO: 1370084 - RNA, 18 nt, Human
agcggugcuagagaccug

SEQ ID NO: 1370085 - RNA, 24 nt, Human
agcuugaggggucuucccagacac

SEQ ID NO: 1370086 - RNA, 18 nt, Human
aggaaaacugaggcucag

SEQ ID NO: 1370087 - RNA, 24 nt, Human
aggaaaacugaggcucagacagaa

SEQ ID NO: 1370088 - RNA, 24 nt, Human
aggagguuuggaggcaggggucca

SEQ ID NO: 1370089 - RNA, 23 nt, Human
aggcacaggaaagaggaggucag

SEQ ID NO: 1370090 - RNA, 21 nt, Human
agggcugggcugagcuguggg

SEQ ID NO: 1370091 - RNA, 22 nt, Human
agggcugggcugagcugugggu

SEQ ID NO: 1370092 - RNA, 22 nt, Human
agggugccaguggagaguggcg

SEQ ID NO: 1370093 - RNA, 19 nt, Human
aggugcuggaggauuaccu

SEQ ID NO: 1370094 - RNA, 19 nt, Human
agguggaggcugaggaaag

SEQ ID NO: 1370095 - RNA, 20 nt, Human
agucaccauggcugaauugg

SEQ ID NO: 1370096 - RNA, 25 nt, Human
agugccacccuuggccucagguggc

SEQ ID NO: 1370097 - RNA, 21 nt, Human
augagaaaacugagacccaga

SEQ ID NO: 1370098 - RNA, 22 nt, Human
auggaagcgucuucagaaauca

SEQ ID NO: 1370099 - RNA, 20 nt, Human
caacucccgguccaacuccu

SEQ ID NO: 1370100 - RNA, 20 nt, Human
cacaagcgccugacccaggg

SEQ ID NO: 1370101 - RNA, 22 nt, Human
cacagcaaguuagaggaaacac

SEQ ID NO: 1370102 - RNA, 22 nt, Human
cacagucauaaagaauguguua

SEQ ID NO: 1370103 - RNA, 20 nt, Human
cacauuugaguguagggucc

SEQ ID NO: 1370104 - RNA, 22 nt, Human
caccauggcugaauugggguuc

SEQ ID NO: 1370105 - RNA, 23 nt, Human
cacccguguuuacuuccuucagu

SEQ ID NO: 1370106 - RNA, 25 nt, Human
caccugcaaggacaagaaucagaga

SEQ ID NO: 1370107 - RNA, 23 nt, Human
caccuggagaggaaaguggcuca

SEQ ID NO: 1370108 - RNA, 23 nt, Human
cagaagagcuggaaggaguggua

SEQ ID NO: 1370109 - RNA, 24 nt, Human
cagcaagauaacuaaagacacuaa

SEQ ID NO: 1370110 - RNA, 19 nt, Human
cagcaccaccuuuugacaa

SEQ ID NO: 1370111 - RNA, 18 nt, Human
cagcagaagagcuggaag

SEQ ID NO: 1370112 - RNA, 20 nt, Human
cagcuuaggggagcaggccc

SEQ ID NO: 1370113 - RNA, 23 nt, Human
cagcuuaggggagcaggcccugu

SEQ ID NO: 1370114 - RNA, 20 nt, Human
caggcuucccagcuuagggg

SEQ ID NO: 1370115 - RNA, 19 nt, Human
caggguagcuuccugggcu

SEQ ID NO: 1370116 - RNA, 21 nt, Human
caguggcgaacaaagagaaga

SEQ ID NO: 1370117 - RNA, 22 nt, Human
caucccuuucccauccagcaag

SEQ ID NO: 1370118 - RNA, 18 nt, Human
cauccugggcuggcaucc

SEQ ID NO: 1370119 - RNA, 21 nt, Human
ccagacacccguguuuacuuc

SEQ ID NO: 1370120 - RNA, 20 nt, Human
ccagcaagauaacuaaagac

SEQ ID NO: 1370121 - RNA, 19 nt, Human
ccaguggcgaacaaagaga

SEQ ID NO: 1370122 - RNA, 18 nt, Human
ccccugaaccuccugggg

SEQ ID NO: 1370123 - RNA, 23 nt, Human
cccugagaacaggaacuacucau

SEQ ID NO: 1370124 - RNA, 23 nt, Human
ccuaaaauggguaccugcuaccc

SEQ ID NO: 1370125 - RNA, 22 nt, Human
ccucagguggccaauucagucc

SEQ ID NO: 1370126 - RNA, 19 nt, Human
ccugucucuucucugugcc

SEQ ID NO: 1370127 - RNA, 18 nt, Human
ccuuaccaguuugacauc

SEQ ID NO: 1370128 - RNA, 18 nt, Human
ccuugcccucacuuugca

SEQ ID NO: 1370129 - RNA, 22 nt, Human
ccuuuguuuguuaacugcucuu

SEQ ID NO: 1370130 - RNA, 21 nt, Human
cgcguggaggugaagaacaga

SEQ ID NO: 1370131 - RNA, 23 nt, Human
cucagcccuuaccaguuugaccg

SEQ ID NO: 1370132 - RNA, 18 nt, Human
cuccacaagcgccugacc

SEQ ID NO: 1370133 - RNA, 22 nt, Human
cuccacacugggccuugcccuc

SEQ ID NO: 1370134 - RNA, 21 nt, Human
cuccugggugggucaggggug

SEQ ID NO: 1370135 - RNA, 21 nt, Human
cuccuuggccuccucugugcc

SEQ ID NO: 1370136 - RNA, 20 nt, Human
cucugugccagggcugggcc

SEQ ID NO: 1370137 - RNA, 20 nt, Human
cugcuaccugccuucaccug

SEQ ID NO: 1370138 - RNA, 19 nt, Human
cuggcauauugcaugccug

SEQ ID NO: 1370139 - RNA, 22 nt, Human
cuuuccuguggcucuagccagc

SEQ ID NO: 1370140 - RNA, 21 nt, Human
cuuuguuuguuaacugcucuu

SEQ ID NO: 1370141 - RNA, 18 nt, Human
gagcagcuuuagccagga

SEQ ID NO: 1370142 - RNA, 20 nt, Human
gagcagcuuuagccaggaga

SEQ ID NO: 1370143 - RNA, 19 nt, Human
gagcaggcccuguccucca

SEQ ID NO: 1370144 - RNA, 20 nt, Human
gagccuccugaaugcucuuu

SEQ ID NO: 1370145 - RNA, 18 nt, Human
gagguuggagugccaccc

SEQ ID NO: 1370146 - RNA, 22 nt, Human
gcagaggaucugggauuugggg

SEQ ID NO: 1370147 - RNA, 18 nt, Human
gccuccucugugccucag

SEQ ID NO: 1370148 - RNA, 19 nt, Human
gcugaauugggguucaauc

SEQ ID NO: 1370149 - RNA, 18 nt, Human
gcuguugucuguaguucu

SEQ ID NO: 1370150 - RNA, 22 nt, Human
ggaaagggggucccugggugcu

SEQ ID NO: 1370151 - RNA, 19 nt, Human
ggaggcugaggaaaggggg

SEQ ID NO: 1370152 - RNA, 21 nt, Human
ggcacaucugcuaccugccuu

SEQ ID NO: 1370153 - RNA, 20 nt, Human
ggcugugggccauuuuugga

SEQ ID NO: 1370154 - RNA, 19 nt, Human
gggcaggucacagcagaag

SEQ ID NO: 1370155 - RNA, 18 nt, Human
gggcugggcugagcugug

SEQ ID NO: 1370156 - RNA, 26 nt, Human
uaaaauggguaccugcuacccaagug

SEQ ID NO: 1370157 - RNA, 25 nt, Human
uaaauccuguuuagaauuuaaaaaa

SEQ ID NO: 1370158 - RNA, 22 nt, Human
uacaugcgaagcccucucucca

SEQ ID NO: 1370159 - RNA, 21 nt, Human
uagcaaaaugauagaaauuuu

SEQ ID NO: 1370160 - RNA, 21 nt, Human
uagcuuccugggcugugggcc

SEQ ID NO: 1370161 - RNA, 21 nt, Human
uaguuugcuuuugagucuggu

SEQ ID NO: 1370162 - RNA, 18 nt, Human
uauuucagagcucggccu

SEQ ID NO: 1370163 - RNA, 22 nt, Human
ucagagcucggccugagaucuc

SEQ ID NO: 1370164 - RNA, 21 nt, Human
ucagccucuagccuucuccuu

SEQ ID NO: 1370165 - RNA, 21 nt, Human
ucaguccugggcuuuacugca

SEQ ID NO: 1370166 - RNA, 26 nt, Human
ucaucuuauccagcuggcuccucuua

SEQ ID NO: 1370167 - RNA, 18 nt, Human
uccccugaaccuccuggg

SEQ ID NO: 1370168 - RNA, 20 nt, Human
ucccucagccucuagccuuc

SEQ ID NO: 1370169 - RNA, 18 nt, Human
ucccugaggucaccgccc

SEQ ID NO: 1370170 - RNA, 20 nt, Human
ucccugggugcugccaggcc

SEQ ID NO: 1370171 - RNA, 18 nt, Human
uccugggcuuuacugcag

SEQ ID NO: 1370172 - RNA, 19 nt, Human
uccuugugggguccuuuau

SEQ ID NO: 1370173 - RNA, 21 nt, Human
ucuagccuucuccuuucaucc

SEQ ID NO: 1370174 - RNA, 21 nt, Human
ucucaggugccucugggcugg

SEQ ID NO: 1370175 - RNA, 24 nt, Human
ucuccugagacagacugaagaggc

SEQ ID NO: 1370176 - RNA, 20 nt, Human
ucugagugaucuggcauuuu

SEQ ID NO: 1370177 - RNA, 24 nt, Human
ucuggugcagccuuccaacuggca

SEQ ID NO: 1370178 - RNA, 21 nt, Human
ugaaaggagcuuuccguccua

SEQ ID NO: 1370179 - RNA, 23 nt, Human
ugaaugcaugcaugaacaaacaa

SEQ ID NO: 1370180 - RNA, 25 nt, Human
ugacaacaucccuuucccauccagc

SEQ ID NO: 1370181 - RNA, 21 nt, Human
ugacccaggguaccucucccu

SEQ ID NO: 1370182 - RNA, 19 nt, Human
ugagaaaacugagacccag

SEQ ID NO: 1370183 - RNA, 21 nt, Human
ugagacagacugaagaggccc

SEQ ID NO: 1370184 - RNA, 21 nt, Human
ugagaugcucacagucauaaa

SEQ ID NO: 1370185 - RNA, 23 nt, Human
ugagaugcucacagucauaaaga

SEQ ID NO: 1370186 - RNA, 19 nt, Human
ugaggaaagggggucccug

SEQ ID NO: 1370187 - RNA, 21 nt, Human
ugaggcuagucuuccagcugg

SEQ ID NO: 1370188 - RNA, 22 nt, Human
ugaggggucuucccagacaccc

SEQ ID NO: 1370189 - RNA, 21 nt, Human
ugcaaaauacucucauguccu

SEQ ID NO: 1370190 - RNA, 22 nt, Human
ugcaaggacaagaaucagagac

SEQ ID NO: 1370191 - RNA, 24 nt, Human
ugcagaggaucugggauuuggggg

SEQ ID NO: 1370192 - RNA, 24 nt, Human
ugcagcuugaggggucuucccaga

SEQ ID NO: 1370193 - RNA, 19 nt, Human
ugcaugccugaaggcagag

SEQ ID NO: 1370194 - RNA, 18 nt, Human
ugccucugggcuggcccu

SEQ ID NO: 1370195 - RNA, 18 nt, Human
ugcgaagcccucucucca

SEQ ID NO: 1370196 - RNA, 18 nt, Human
uggaaagauaaacugaau

SEQ ID NO: 1370197 - RNA, 18 nt, Human
uggaaagauaaacugaau

SEQ ID NO: 1370198 - RNA, 20 nt, Human
uggacagaacccaaauuguu

SEQ ID NO: 1370199 - RNA, 21 nt, Human
uggagaguggcguacuuccuc

SEQ ID NO: 1370200 - RNA, 19 nt, Human
uggcuucuggcccuuuccu

SEQ ID NO: 1370201 - RNA, 19 nt, Human
ugugccagaaaugacaaca

SEQ ID NO: 1370202 - RNA, 23 nt, Human
uguguaggccaaggagggugcca

SEQ ID NO: 1370203 - RNA, 23 nt, Human
ugugucacggaugaaugcaugca

SEQ ID NO: 1370204 - RNA, 22 nt, Human
uguuuauggaguccucaguagg

SEQ ID NO: 1370205 - RNA, 19 nt, Human
uuauggaguccucaguagg

SEQ ID NO: 1370206 - RNA, 24 nt, Human
uuccuguggcucuagccagccuuu

SEQ ID NO: 1370207 - RNA, 22 nt, Human
uucuauuuucccugacgucacu

SEQ ID NO: 1370208 - RNA, 22 nt, Human
uugagucuggugcagccuucca

SEQ ID NO: 1370209 - RNA, 18 nt, Human
uugcacauuugaguguag

SEQ ID NO: 1370210 - RNA, 20 nt, Human
uugcauggaaauagggaguu

SEQ ID NO: 1370211 - RNA, 19 nt, Human
uuuaggcuugugcaagagg

SEQ ID NO: 1370212 - RNA, 23 nt, Human
uuuucuguucuauuuucccugac

SEQ ID NO: 1370213 - RNA, 18 nt, Human
uuuugcauccugugggcu

SEQ ID NO: 1370214 - RNA, 20 nt, Human
aaaaaaaaaaaaacaaaaaa

SEQ ID NO: 1370215 - RNA, 26 nt, Human
aaaaaaaaacaaaaaaaaaaccccca

SEQ ID NO: 1370216 - RNA, 24 nt, Human
aaaaaaacaaaaaaaaaaccccca

SEQ ID NO: 1370217 - RNA, 30 nt, Human
aaaaaacaaaaaaaaaacccccacaaaaaa

SEQ ID NO: 1370218 - RNA, 21 nt, Human
aaaaaauucccugauucauca

SEQ ID NO: 1370219 - RNA, 28 nt, Human
aaaacaaaaaaaaaacccccacaaaaaa

SEQ ID NO: 1370220 - RNA, 26 nt, Human
aaacaacaacaaaaaaaaaaaaacaa

SEQ ID NO: 1370221 - RNA, 21 nt, Human
aacaacaaaaaaaaaaaaacc

SEQ ID NO: 1370222 - RNA, 18 nt, Human
aaccauauuuuuagaagu

SEQ ID NO: 1370223 - RNA, 21 nt, Human
aacgugaaaaagggguaucaa

SEQ ID NO: 1370224 - RNA, 21 nt, Human
aagaaacagcuggagacagaa

SEQ ID NO: 1370225 - RNA, 21 nt, Human
aagacagaggauccaccgaac

SEQ ID NO: 1370226 - RNA, 19 nt, Human
aagaccaugacaaguuugc

SEQ ID NO: 1370227 - RNA, 23 nt, Human
aagcagaucugguaggcuuagaa

SEQ ID NO: 1370228 - RNA, 23 nt, Human
aagcaggagagcagguuccaaga

SEQ ID NO: 1370229 - RNA, 18 nt, Human
aagcugccuuccucaaag

SEQ ID NO: 1370230 - RNA, 23 nt, Human
aagcuuuugaugaugugucuaau

SEQ ID NO: 1370231 - RNA, 22 nt, Human
aaucaugauccaucccaccuuu

SEQ ID NO: 1370232 - RNA, 22 nt, Human
acaaaaaaaaaacccccacaaa

SEQ ID NO: 1370233 - RNA, 27 nt, Human
acaacaacaaaaaaaaaaaaacaaaaa

SEQ ID NO: 1370234 - RNA, 19 nt, Human
acaacacaacuauaaaaac

SEQ ID NO: 1370235 - RNA, 23 nt, Human
acacaacuauaaaaacaaaccuc

SEQ ID NO: 1370236 - RNA, 27 nt, Human
accaaaauacuguauggguuacucuga

SEQ ID NO: 1370237 - RNA, 21 nt, Human
accacuuacauuuuguaauaa

SEQ ID NO: 1370238 - RNA, 19 nt, Human
acccccacaaaaaaaguac

SEQ ID NO: 1370239 - RNA, 18 nt, Human
accccucccuuccaccuc

SEQ ID NO: 1370240 - RNA, 19 nt, Human
acuaccuucgccuuccuag

SEQ ID NO: 1370241 - RNA, 22 nt, Human
acuauaaaaacaaaccucucaa

SEQ ID NO: 1370242 - RNA, 19 nt, Human
agaaaaaccuauacucaga

SEQ ID NO: 1370243 - RNA, 18 nt, Human
agacagaaaggauggacc

SEQ ID NO: 1370244 - RNA, 21 nt, Human
agacagaaaggauggaccagg

SEQ ID NO: 1370245 - RNA, 22 nt, Human
agacaucuguaaauggagaaaa

SEQ ID NO: 1370246 - RNA, 24 nt, Human
agagacaagaagcugcaguacaug

SEQ ID NO: 1370247 - RNA, 19 nt, Human
agcaggagagcagguucca

SEQ ID NO: 1370248 - RNA, 19 nt, Human
agccaccuugcugccaucc

SEQ ID NO: 1370249 - RNA, 21 nt, Human
agccaccuugcugccauccca

SEQ ID NO: 1370250 - RNA, 22 nt, Human
agggaccagcaagcaggagagc

SEQ ID NO: 1370251 - RNA, 18 nt, Human
aguacauguccaaagaua

SEQ ID NO: 1370252 - RNA, 18 nt, Human
aguuacaaagacagagga

SEQ ID NO: 1370253 - RNA, 24 nt, Human
auaaaaacaaaccucucaaacuca

SEQ ID NO: 1370254 - RNA, 19 nt, Human
auaaaaugcauuggucccc

SEQ ID NO: 1370255 - RNA, 21 nt, Human
auagcauuggaaguaaaaacc

SEQ ID NO: 1370256 - RNA, 24 nt, Human
auaguaaccucuaagcauuuuucc

SEQ ID NO: 1370257 - RNA, 20 nt, Human
aucccuagccaaaaaaggaa

SEQ ID NO: 1370258 - RNA, 21 nt, Human
auggcccaaaaacaacaacaa

SEQ ID NO: 1370259 - RNA, 23 nt, Human
caaaaaaaaaaaaacaaaaaaaa

SEQ ID NO: 1370260 - RNA, 19 nt, Human
caaaaaaaaaacccccaca

SEQ ID NO: 1370261 - RNA, 20 nt, Human
caaaauaguaaccucuaagc

SEQ ID NO: 1370262 - RNA, 18 nt, Human
caaagcaggggcauccca

SEQ ID NO: 1370263 - RNA, 21 nt, Human
caaaguguagugagaccucaa

SEQ ID NO: 1370264 - RNA, 21 nt, Human
caacaaaaaaaaaaaaacaaa

SEQ ID NO: 1370265 - RNA, 23 nt, Human
caagaauaaaaauaagcuuuuga

SEQ ID NO: 1370266 - RNA, 20 nt, Human
caccuugcugccaucccacu

SEQ ID NO: 1370267 - RNA, 21 nt, Human
cacuguacaccaacucaaggc

SEQ ID NO: 1370268 - RNA, 20 nt, Human
cagaaaaaaacucaacuuug

SEQ ID NO: 1370269 - RNA, 19 nt, Human
caggagccaccuugcugcc

SEQ ID NO: 1370270 - RNA, 19 nt, Human
cagggaccagcaagcagga

SEQ ID NO: 1370271 - RNA, 24 nt, Human
cauucuaaaauuacuuugguuuua

SEQ ID NO: 1370272 - RNA, 20 nt, Human
ccacuuacauuuuguaauaa

SEQ ID NO: 1370273 - RNA, 22 nt, Human
ccaguaauccaaaacagagaca

SEQ ID NO: 1370274 - RNA, 19 nt, Human
cccaaaaacaacaacaaaa

SEQ ID NO: 1370275 - RNA, 23 nt, Human
cccaaaaacaacaacaaaaaaaa

SEQ ID NO: 1370276 - RNA, 22 nt, Human
ccccucagaauaagaucacagu

SEQ ID NO: 1370277 - RNA, 20 nt, Human
ccccucccuuccaccucuaa

SEQ ID NO: 1370278 - RNA, 22 nt, Human
ccuugcugccaucccacuccuc

SEQ ID NO: 1370279 - RNA, 22 nt, Human
cucaugcauguacuacaaaauc

SEQ ID NO: 1370280 - RNA, 22 nt, Human
cugccaucccacuccucaucca

SEQ ID NO: 1370281 - RNA, 21 nt, Human
cuuggagaccccucccuucca

SEQ ID NO: 1370282 - RNA, 19 nt, Human
cuuuagcuaccaccucucc

SEQ ID NO: 1370283 - RNA, 20 nt, Human
gaccuuacccugucuuauag

SEQ ID NO: 1370284 - RNA, 20 nt, Human
gcacaucuguuaucuauuca

SEQ ID NO: 1370285 - RNA, 18 nt, Human
gcacugcuuccauucuuc

SEQ ID NO: 1370286 - RNA, 21 nt, Human
gcagagacuucauagcauugg

SEQ ID NO: 1370287 - RNA, 21 nt, Human
gccaucuuguuuuaaucugac

SEQ ID NO: 1370288 - RNA, 21 nt, Human
gcugcaguacauguccaaaga

SEQ ID NO: 1370289 - RNA, 20 nt, Human
ggaaauggaaguggguccca

SEQ ID NO: 1370290 - RNA, 22 nt, Human
ggagaccccucccuuccaccuc

SEQ ID NO: 1370291 - RNA, 23 nt, Human
ggcccaaaaacaacaacaaaaaa

SEQ ID NO: 1370292 - RNA, 25 nt, Human
guaauacaacacaacuauaaaaaca

SEQ ID NO: 1370293 - RNA, 23 nt, Human
guaggcuuagaaauggcccaaaa

SEQ ID NO: 1370294 - RNA, 24 nt, Human
uaaaaggacuucgaaaacuguaaa

SEQ ID NO: 1370295 - RNA, 21 nt, Human
uaaaaugcauugguccccugg

SEQ ID NO: 1370296 - RNA, 25 nt, Human
uaacauaugaagaaauaucaaacac

SEQ ID NO: 1370297 - RNA, 29 nt, Human
uaacauaugaagaaauaucaaacacccuc

SEQ ID NO: 1370298 - RNA, 21 nt, Human
uaaccucaguuacaaagacag

SEQ ID NO: 1370299 - RNA, 21 nt, Human
uaaccucuaagcauuuuuccc

SEQ ID NO: 1370300 - RNA, 18 nt, Human
uaaguuucuuucauuuuc

SEQ ID NO: 1370301 - RNA, 22 nt, Human
uacaaaaucgccaagugaccac

SEQ ID NO: 1370302 - RNA, 19 nt, Human
uacauacauaacaaaugug

SEQ ID NO: 1370303 - RNA, 21 nt, Human
uacgcacacauaaggaaacac

SEQ ID NO: 1370304 - RNA, 20 nt, Human
uacucuaggucuccagagca

SEQ ID NO: 1370305 - RNA, 21 nt, Human
uagcauuggaaguaaaaacca

SEQ ID NO: 1370306 - RNA, 18 nt, Human
uaucaaacacccuauucc

SEQ ID NO: 1370307 - RNA, 21 nt, Human
uaugguaacuacagaaaaaaa

SEQ ID NO: 1370308 - RNA, 22 nt, Human
uaugucacucauucuaaaauua

SEQ ID NO: 1370309 - RNA, 24 nt, Human
uauuacuacaaauacaauauacaa

SEQ ID NO: 1370310 - RNA, 19 nt, Human
ucaaauuuaucugcaguua

SEQ ID NO: 1370311 - RNA, 23 nt, Human
uccaaacuuggagaccccucccu

SEQ ID NO: 1370312 - RNA, 21 nt, Human
uccacugccacaggagccacc

SEQ ID NO: 1370313 - RNA, 18 nt, Human
uccacuuagguaagaaaa

SEQ ID NO: 1370314 - RNA, 26 nt, Human
uccauggcugaagucaaagcaggggc

SEQ ID NO: 1370315 - RNA, 24 nt, Human
ucccacuccucauccauggcugaa

SEQ ID NO: 1370316 - RNA, 21 nt, Human
ucgccaagugaccacuuacau

SEQ ID NO: 1370317 - RNA, 27 nt, Human
ucuguaaauggagaaaaaccggggucc

SEQ ID NO: 1370318 - RNA, 24 nt, Human
ugaagaaauaucaaacacccuauu

SEQ ID NO: 1370319 - RNA, 23 nt, Human
ugaauauggacgcacaauuuacc

SEQ ID NO: 1370320 - RNA, 23 nt, Human
ugaauuaaaagcugccuuccuca

SEQ ID NO: 1370321 - RNA, 20 nt, Human
ugacaaaaugaauauggacg

SEQ ID NO: 1370322 - RNA, 19 nt, Human
ugacacuaaauuccuaugu

SEQ ID NO: 1370323 - RNA, 19 nt, Human
ugaccaaaauacuguaugg

SEQ ID NO: 1370324 - RNA, 25 nt, Human
ugauagcacuauaaagucgaagucu

SEQ ID NO: 1370325 - RNA, 18 nt, Human
ugcagagacuucauagca

SEQ ID NO: 1370326 - RNA, 22 nt, Human
ugcauuacauaaauuacaugua

SEQ ID NO: 1370327 - RNA, 19 nt, Human
ugccauggucaagaaacag

SEQ ID NO: 1370328 - RNA, 21 nt, Human
uggaaggugagcauccuagga

SEQ ID NO: 1370329 - RNA, 21 nt, Human
uggaauauuacuacaaauaca

SEQ ID NO: 1370330 - RNA, 18 nt, Human
uggagaccccucccuucc

SEQ ID NO: 1370331 - RNA, 19 nt, Human
uggagccagaacacugcca

SEQ ID NO: 1370332 - RNA, 18 nt, Human
uggauaaccuuacaugaa

SEQ ID NO: 1370333 - RNA, 21 nt, Human
uggcacaacgugaaaaagggg

SEQ ID NO: 1370334 - RNA, 20 nt, Human
uggcauuuucugccaaagug

SEQ ID NO: 1370335 - RNA, 18 nt, Human
uggccauggcacuguaca

SEQ ID NO: 1370336 - RNA, 19 nt, Human
uggcccaaaaacaacaaca

SEQ ID NO: 1370337 - RNA, 23 nt, Human
uggcccaaaaacaacaacaaaaa

SEQ ID NO: 1370338 - RNA, 28 nt, Human
ugguuuuaagaucaaauagucuuucaaa

SEQ ID NO: 1370339 - RNA, 22 nt, Human
uguacaccaacucaaggcacuu

SEQ ID NO: 1370340 - RNA, 21 nt, Human
ugucuuauaggcgauacaacu

SEQ ID NO: 1370341 - RNA, 21 nt, Human
uuacaaagacagaggauccac

SEQ ID NO: 1370342 - RNA, 20 nt, Human
uuccugaccaaaauacugua

SEQ ID NO: 1370343 - RNA, 21 nt, Human
uucuccccucagaauaagauc

SEQ ID NO: 1370344 - RNA, 23 nt, Human
uugacacuaaauuccuauguaau

SEQ ID NO: 1370345 - RNA, 21 nt, Human
uugcaauguacgcacacauag

SEQ ID NO: 1370346 - RNA, 19 nt, Human
uugcugccaucccacuccu

SEQ ID NO: 1370347 - RNA, 23 nt, Human
uuuaauauuaaccauauucuaau

SEQ ID NO: 1370348 - RNA, 25 nt, Human
uuuacuccuacauacauaacaaaug

SEQ ID NO: 1370349 - RNA, 30 nt, Human
uuugguuuuaagaucaaauagucuuucaaa

SEQ ID NO: 1370350 - RNA, 18 nt, Human
uuuuuucuccucuuuaca

SEQ ID NO: 1370351 - RNA, 24 nt, Human
aagccccagcgccgggaaccccaa

SEQ ID NO: 1370352 - RNA, 19 nt, Human
aaggccccagggccuccaa

SEQ ID NO: 1370353 - RNA, 19 nt, Human
accagcuccgaccucuccc

SEQ ID NO: 1370354 - RNA, 19 nt, Human
acccugaggaggguuuggg

SEQ ID NO: 1370355 - RNA, 21 nt, Human
agcagaagccccagcgccggg

SEQ ID NO: 1370356 - RNA, 23 nt, Human
agcagggccaccacaaccucggu

SEQ ID NO: 1370357 - RNA, 18 nt, Human
agcuccagaauaguguag

SEQ ID NO: 1370358 - RNA, 21 nt, Human
agcugccuuucagcccuucca

SEQ ID NO: 1370359 - RNA, 21 nt, Human
aggcagaguuagaagcaugug

SEQ ID NO: 1370360 - RNA, 21 nt, Human
agggagcauggcuggaacuca

SEQ ID NO: 1370361 - RNA, 23 nt, Human
augagcagggccaccacaaccuc

SEQ ID NO: 1370362 - RNA, 21 nt, Human
augaugccguccagagccuca

SEQ ID NO: 1370363 - RNA, 18 nt, Human
caccaggcaugaggucac

SEQ ID NO: 1370364 - RNA, 20 nt, Human
cagaguucauccaaggcccc

SEQ ID NO: 1370365 - RNA, 23 nt, Human
cagcagggccaccuggcgggccc

SEQ ID NO: 1370366 - RNA, 25 nt, Human
cagggccaccuggcgggcccgaggc

SEQ ID NO: 1370367 - RNA, 23 nt, Human
cagugucugcagggccuccaggg

SEQ ID NO: 1370368 - RNA, 23 nt, Human
cauguagaugccuugcaugauuu

SEQ ID NO: 1370369 - RNA, 18 nt, Human
cccagcgccgggaacccc

SEQ ID NO: 1370370 - RNA, 20 nt, Human
cccagggugggcugggugug

SEQ ID NO: 1370371 - RNA, 22 nt, Human
ccccaggaaaugcuuguugcuc

SEQ ID NO: 1370372 - RNA, 23 nt, Human
ccccaggaaaugcuuguugcucu

SEQ ID NO: 1370373 - RNA, 22 nt, Human
ccccaggaagucuccaaauucc

SEQ ID NO: 1370374 - RNA, 19 nt, Human
ccccagggccuccaagaug

SEQ ID NO: 1370375 - RNA, 19 nt, Human
ccguccagagccucacagc

SEQ ID NO: 1370376 - RNA, 22 nt, Human
ccucacagccaaucuccucauc

SEQ ID NO: 1370377 - RNA, 19 nt, Human
ccuccagcagauccuggcu

SEQ ID NO: 1370378 - RNA, 18 nt, Human
ccucggucaugaaggagc

SEQ ID NO: 1370379 - RNA, 22 nt, Human
ccucugagcugccuuucagccc

SEQ ID NO: 1370380 - RNA, 19 nt, Human
ccuuggccucguccuucuc

SEQ ID NO: 1370381 - RNA, 22 nt, Human
ccuuggccucguccuucuccug

SEQ ID NO: 1370382 - RNA, 22 nt, Human
cgaggccagcugcaucaucucc

SEQ ID NO: 1370383 - RNA, 18 nt, Human
cgccgggaaccccaaggg

SEQ ID NO: 1370384 - RNA, 23 nt, Human
cgccgggaaccccaagggcauaa

SEQ ID NO: 1370385 - RNA, 21 nt, Human
cgcugugcacacacacguuca

SEQ ID NO: 1370386 - RNA, 24 nt, Human
cgggcagcagggccaccuggcggg

SEQ ID NO: 1370387 - RNA, 23 nt, Human
cgguaccacuccagcaccgagcu

SEQ ID NO: 1370388 - RNA, 24 nt, Human
cguccuugccugcgggguuggaga

SEQ ID NO: 1370389 - RNA, 26 nt, Human
cucagccuuggccucguccuucuccu

SEQ ID NO: 1370390 - RNA, 23 nt, Human
cuccagcaccgagcugagcauga

SEQ ID NO: 1370391 - RNA, 18 nt, Human
cuccucaucaggaucccc

SEQ ID NO: 1370392 - RNA, 22 nt, Human
cucgcacaggccgcuggcugcc

SEQ ID NO: 1370393 - RNA, 22 nt, Human
cucugagcugccuuucagcccu

SEQ ID NO: 1370394 - RNA, 18 nt, Human
cuggagccucugagcugc

SEQ ID NO: 1370395 - RNA, 23 nt, Human
cuggagccucugagcugccuuuc

SEQ ID NO: 1370396 - RNA, 18 nt, Human
gaccucucccgcaugccc

SEQ ID NO: 1370397 - RNA, 18 nt, Human
gaggaggguuuggggcuc

SEQ ID NO: 1370398 - RNA, 22 nt, Human
gccccagcgccgggaaccccaa

SEQ ID NO: 1370399 - RNA, 19 nt, Human
gcuccagaauaguguagag

SEQ ID NO: 1370400 - RNA, 23 nt, Human
gcucgcucaugggccuucccaga

SEQ ID NO: 1370401 - RNA, 22 nt, Human
ggagcuccagaauaguguagag

SEQ ID NO: 1370402 - RNA, 19 nt, Human
ggaguccuucccuggagcc

SEQ ID NO: 1370403 - RNA, 22 nt, Human
ggcaugaggucacuucaucaaa

SEQ ID NO: 1370404 - RNA, 20 nt, Human
ggccagcagcagguccuuua

SEQ ID NO: 1370405 - RNA, 18 nt, Human
gggaucaccuccagcgcc

SEQ ID NO: 1370406 - RNA, 19 nt, Human
ggggcacaugagcagggcc

SEQ ID NO: 1370407 - RNA, 18 nt, Human
gggguuggagauggggaa

SEQ ID NO: 1370408 - RNA, 21 nt, Human
guuggucucuuccuuaucucu

SEQ ID NO: 1370409 - RNA, 18 nt, Human
ucagugggagggggcaca

SEQ ID NO: 1370410 - RNA, 18 nt, Human
ucccagaguucauccaag

SEQ ID NO: 1370411 - RNA, 24 nt, Human
ucccuggagccucugagcugccuu

SEQ ID NO: 1370412 - RNA, 18 nt, Human
ucucauauagcuccuuuu

SEQ ID NO: 1370413 - RNA, 23 nt, Human
ucugcagggccuccagggucuga

SEQ ID NO: 1370414 - RNA, 27 nt, Human
ucugcuggggccccaggaagucuccaa

SEQ ID NO: 1370415 - RNA, 18 nt, Human
ucugucuucucuggcacc

SEQ ID NO: 1370416 - RNA, 20 nt, Human
ugagcagggccaccacaacc

SEQ ID NO: 1370417 - RNA, 19 nt, Human
ugauuucugggaucaccuc

SEQ ID NO: 1370418 - RNA, 18 nt, Human
uggcauaaucuucuuuau

SEQ ID NO: 1370419 - RNA, 19 nt, Human
ugggagggggcacaugagc

SEQ ID NO: 1370420 - RNA, 23 nt, Human
uggggccccaggaagucuccaaa

SEQ ID NO: 1370421 - RNA, 21 nt, Human
ugucugcagggccuccagggu

SEQ ID NO: 1370422 - RNA, 24 nt, Human
uguggcauaaucuucuuuaucaug

SEQ ID NO: 1370423 - RNA, 21 nt, Human
uguggcucagcugcauguaga

SEQ ID NO: 1370424 - RNA, 21 nt, Human
uguuguugccaccuucugucu

SEQ ID NO: 1370425 - RNA, 23 nt, Human
uucccagaguucauccaaggccc

SEQ ID NO: 1370426 - RNA, 25 nt, Human
uuguugccaccuucugucuucucug

SEQ ID NO: 1370427 - RNA, 27 nt, Human
uuguugccaccuucugucuucucuggc

SEQ ID NO: 1370428 - RNA, 22 nt, Human
uuuguuggucucuuccuuaucu

SEQ ID NO: 1370429 - RNA, 24 nt, Human
aacugaggccccagcagggggagg

SEQ ID NO: 1370430 - RNA, 24 nt, Human
acagcagcaggcgccgcccucuuc

SEQ ID NO: 1370431 - RNA, 20 nt, Human
agagagcuggcggcugcagg

SEQ ID NO: 1370432 - RNA, 25 nt, Human
agagcaguccaggaaagggguguag

SEQ ID NO: 1370433 - RNA, 23 nt, Human
agaggggcuggcaggccugcucu

SEQ ID NO: 1370434 - RNA, 18 nt, Human
agcuggcggcugcaggug

SEQ ID NO: 1370435 - RNA, 23 nt, Human
aggaaagggguguaggaaaaugc

SEQ ID NO: 1370436 - RNA, 19 nt, Human
aggaaagguauauggcggc

SEQ ID NO: 1370437 - RNA, 21 nt, Human
aggcaccgcaaucccagccca

SEQ ID NO: 1370438 - RNA, 20 nt, Human
aggcgccgcccucuucuugg

SEQ ID NO: 1370439 - RNA, 21 nt, Human
aggggcuggcaggccugcucu

SEQ ID NO: 1370440 - RNA, 21 nt, Human
auagaauguagcaaaaggccc

SEQ ID NO: 1370441 - RNA, 21 nt, Human
aucuugucagcagcccuucca

SEQ ID NO: 1370442 - RNA, 19 nt, Human
augaucucacccuccauga

SEQ ID NO: 1370443 - RNA, 21 nt, Human
caaggaacauacccagagagc

SEQ ID NO: 1370444 - RNA, 23 nt, Human
caaguuacagauggggaaacuga

SEQ ID NO: 1370445 - RNA, 21 nt, Human
caauagaacgggaucucagug

SEQ ID NO: 1370446 - RNA, 21 nt, Human
cacaauggaauacaaaaggaa

SEQ ID NO: 1370447 - RNA, 22 nt, Human
cacacaccucucauggaacccc

SEQ ID NO: 1370448 - RNA, 22 nt, Human
caccaaggcugcaaaugggggc

SEQ ID NO: 1370449 - RNA, 25 nt, Human
caccuauaaggacguuacagaucua

SEQ ID NO: 1370450 - RNA, 21 nt, Human
cagcagcaggcgccgcccucu

SEQ ID NO: 1370451 - RNA, 18 nt, Human
cagcagggggaggggaug

SEQ ID NO: 1370452 - RNA, 23 nt, Human
caggguaacacccaggacuggag

SEQ ID NO: 1370453 - RNA, 19 nt, Human
ccaucagccauucucaucu

SEQ ID NO: 1370454 - RNA, 24 nt, Human
cccccuagugacaccuauaaggac

SEQ ID NO: 1370455 - RNA, 24 nt, Human
ccgcaaucccagcccacgccuccc

SEQ ID NO: 1370456 - RNA, 23 nt, Human
cgcaaucccagcccacgccuccc

SEQ ID NO: 1370457 - RNA, 19 nt, Human
cgccgugccgggccagcgc

SEQ ID NO: 1370458 - RNA, 18 nt, Human
cuagaagcuuccacaaug

SEQ ID NO: 1370459 - RNA, 22 nt, Human
cugaggccccagcagggggagg

SEQ ID NO: 1370460 - RNA, 21 nt, Human
cuggagcuuggaucuccugcc

SEQ ID NO: 1370461 - RNA, 26 nt, Human
cugucacacaccucucauggaacccc

SEQ ID NO: 1370462 - RNA, 21 nt, Human
cuucucagccuccuagaagcu

SEQ ID NO: 1370463 - RNA, 21 nt, Human
gacuauggagaaugagaggaa

SEQ ID NO: 1370464 - RNA, 20 nt, Human
gcagcccuuccaugacaccc

SEQ ID NO: 1370465 - RNA, 18 nt, Human
gcaggggugggcuggggg

SEQ ID NO: 1370466 - RNA, 19 nt, Human
gcaggggugggcugggggc

SEQ ID NO: 1370467 - RNA, 19 nt, Human
ggaagugacuuccccccuc

SEQ ID NO: 1370468 - RNA, 20 nt, Human
ggcacaguggugaaaccugc

SEQ ID NO: 1370469 - RNA, 21 nt, Human
ggcacaguggugaaaccugca

SEQ ID NO: 1370470 - RNA, 20 nt, Human
ggcccguggucaaacugaua

SEQ ID NO: 1370471 - RNA, 18 nt, Human
ggcugcaaaugggggcag

SEQ ID NO: 1370472 - RNA, 19 nt, Human
gggcaggggugggcugggg

SEQ ID NO: 1370473 - RNA, 21 nt, Human
gggcaggggugggcugggggc

SEQ ID NO: 1370474 - RNA, 21 nt, Human
ggggaagguuggugggcucuc

SEQ ID NO: 1370475 - RNA, 22 nt, Human
ggggcaggggugggcugggggc

SEQ ID NO: 1370476 - RNA, 21 nt, Human
gggggcaggggugggcugggg

SEQ ID NO: 1370477 - RNA, 23 nt, Human
gugaaaccugcaaggaacauacc

SEQ ID NO: 1370478 - RNA, 23 nt, Human
uacaaaaggaaagguauauggcg

SEQ ID NO: 1370479 - RNA, 18 nt, Human
uacccagagagcuggcgg

SEQ ID NO: 1370480 - RNA, 19 nt, Human
uagaacgggaucucagugg

SEQ ID NO: 1370481 - RNA, 22 nt, Human
ucagacugccugucacacaccu

SEQ ID NO: 1370482 - RNA, 22 nt, Human
ucagcagcccuuccaugacacc

SEQ ID NO: 1370483 - RNA, 24 nt, Human
ucagcagcccuuccaugacacccu

SEQ ID NO: 1370484 - RNA, 20 nt, Human
uccacaauggaauacaaaag

SEQ ID NO: 1370485 - RNA, 20 nt, Human
uccaggaaagggguguagga

SEQ ID NO: 1370486 - RNA, 19 nt, Human
ucccagcccacgccucccg

SEQ ID NO: 1370487 - RNA, 23 nt, Human
ucuguggcuggaacacacgagac

SEQ ID NO: 1370488 - RNA, 22 nt, Human
ucuugucagcagcccuuccaug

SEQ ID NO: 1370489 - RNA, 20 nt, Human
ugagagaagggaagugacuu

SEQ ID NO: 1370490 - RNA, 22 nt, Human
ugauacgggguggggaagguug

SEQ ID NO: 1370491 - RNA, 18 nt, Human
uggaauacaaaaggaaag

SEQ ID NO: 1370492 - RNA, 22 nt, Human
ugggccaucaguuaauuacauc

SEQ ID NO: 1370493 - RNA, 24 nt, Human
ugggcucucagccaucagccauuc

SEQ ID NO: 1370494 - RNA, 18 nt, Human
uggggcacaguggugaaa

SEQ ID NO: 1370495 - RNA, 21 nt, Human
ugggggcaggggugggcuggg

SEQ ID NO: 1370496 - RNA, 23 nt, Human
ugggggcaggggugggcuggggg

SEQ ID NO: 1370497 - RNA, 24 nt, Human
uucccuaacaugaucucacccucc

SEQ ID NO: 1370498 - RNA, 23 nt, Human
uucuuuuccccauacucucagcc

SEQ ID NO: 1370499 - RNA, 25 nt, Human
uuuauuaaaucaauagaacgggauc

SEQ ID NO: 1370500 - RNA, 21 nt, Human
aaaaggccacagguagcgcag

SEQ ID NO: 1370501 - RNA, 21 nt, Human
aagcagccaggauggagcugg

SEQ ID NO: 1370502 - RNA, 18 nt, Human
acacagugaucuccaucu

SEQ ID NO: 1370503 - RNA, 22 nt, Human
acaggaaguagcagucagucca

SEQ ID NO: 1370504 - RNA, 22 nt, Human
accuucaucuccuuccugggaa

SEQ ID NO: 1370505 - RNA, 19 nt, Human
agagccauuuuuggccaga

SEQ ID NO: 1370506 - RNA, 23 nt, Human
agagcucagccacuacuccuggc

SEQ ID NO: 1370507 - RNA, 25 nt, Human
agaguucugggugggagacuugggg

SEQ ID NO: 1370508 - RNA, 19 nt, Human
agcagccaggauggagcug

SEQ ID NO: 1370509 - RNA, 18 nt, Human
aggcagcugguugugguu

SEQ ID NO: 1370510 - RNA, 19 nt, Human
aggccuccugaauguggua

SEQ ID NO: 1370511 - RNA, 19 nt, Human
aggcucuccugggucuccu

SEQ ID NO: 1370512 - RNA, 19 nt, Human
agggacuccagaguuuugc

SEQ ID NO: 1370513 - RNA, 22 nt, Human
aggugugagcugggccuguggg

SEQ ID NO: 1370514 - RNA, 21 nt, Human
caagcagccaggauggagcug

SEQ ID NO: 1370515 - RNA, 18 nt, Human
cacucugcucccuggagc

SEQ ID NO: 1370516 - RNA, 23 nt, Human
cacucugcucccuggagcugggu

SEQ ID NO: 1370517 - RNA, 22 nt, Human
cagcgaucacagagcucagcca

SEQ ID NO: 1370518 - RNA, 20 nt, Human
caggcccaagggugccccuc

SEQ ID NO: 1370519 - RNA, 21 nt, Human
caguccaggcugggccccucc

SEQ ID NO: 1370520 - RNA, 21 nt, Human
ccaggcugggccccuccaucc

SEQ ID NO: 1370521 - RNA, 22 nt, Human
ccaucgauuccuggggcaccgg

SEQ ID NO: 1370522 - RNA, 21 nt, Human
cccagacucugagugggaggc

SEQ ID NO: 1370523 - RNA, 24 nt, Human
cccccugcucaggccagcugggaa

SEQ ID NO: 1370524 - RNA, 22 nt, Human
ccccgggcccagccgcaagugc

SEQ ID NO: 1370525 - RNA, 22 nt, Human
ccccuccauccucgacacucug

SEQ ID NO: 1370526 - RNA, 24 nt, Human
ccccuccauccucgacacucugcu

SEQ ID NO: 1370527 - RNA, 24 nt, Human
cccgggcccagccgcaagugcugg

SEQ ID NO: 1370528 - RNA, 23 nt, Human
ccucucugggugauaauggaaac

SEQ ID NO: 1370529 - RNA, 24 nt, Human
ccugcuggcccaggcucuccuggg

SEQ ID NO: 1370530 - RNA, 27 nt, Human
ccuucaucuccuuccuggggggccgcc

SEQ ID NO: 1370531 - RNA, 19 nt, Human
cgagccaggugcuucuacc

SEQ ID NO: 1370532 - RNA, 22 nt, Human
cgccugcuuccccuuugagucc

SEQ ID NO: 1370533 - RNA, 24 nt, Human
cuaccuucaucuccuuccugggaa

SEQ ID NO: 1370534 - RNA, 18 nt, Human
cuccuggccagaggacau

SEQ ID NO: 1370535 - RNA, 23 nt, Human
cuccugggucuccuuucuguccu

SEQ ID NO: 1370536 - RNA, 19 nt, Human
cugaaggcccaacguagca

SEQ ID NO: 1370537 - RNA, 18 nt, Human
cuggcccaggcucuccug

SEQ ID NO: 1370538 - RNA, 19 nt, Human
cugggugggagacuugggg

SEQ ID NO: 1370539 - RNA, 23 nt, Human
cuguccacuuuccggcagcuuca

SEQ ID NO: 1370540 - RNA, 20 nt, Human
cuuuggggcccuucucucca

SEQ ID NO: 1370541 - RNA, 18 nt, Human
gaaguagcagucagucca

SEQ ID NO: 1370542 - RNA, 18 nt, Human
gacacucugcucccugga

SEQ ID NO: 1370543 - RNA, 24 nt, Human
gacccagacucugagugggaggcc

SEQ ID NO: 1370544 - RNA, 19 nt, Human
gagcgugggugggucuggu

SEQ ID NO: 1370545 - RNA, 23 nt, Human
gauaauggaaacagagacaggaa

SEQ ID NO: 1370546 - RNA, 20 nt, Human
gcagccgcuguuccaccccu

SEQ ID NO: 1370547 - RNA, 19 nt, Human
gcccaggcccaagggugcc

SEQ ID NO: 1370548 - RNA, 23 nt, Human
gcgggggcagguucucccggcgg

SEQ ID NO: 1370549 - RNA, 19 nt, Human
gguugcugggaacacuugc

SEQ ID NO: 1370550 - RNA, 20 nt, Human
ucacugcuccccgggcccag

SEQ ID NO: 1370551 - RNA, 23 nt, Human
ucaguccaggcugggccccucca

SEQ ID NO: 1370552 - RNA, 20 nt, Human
uccacaucacagcgaucaca

SEQ ID NO: 1370553 - RNA, 19 nt, Human
ucccuggagcuggguccac

SEQ ID NO: 1370554 - RNA, 23 nt, Human
uccucgacacucugcucccugga

SEQ ID NO: 1370555 - RNA, 21 nt, Human
ucuccugggucuccuuucuga

SEQ ID NO: 1370556 - RNA, 21 nt, Human
ugaggccuccugaauguggua

SEQ ID NO: 1370557 - RNA, 19 nt, Human
ugauaauggaaacagagac

SEQ ID NO: 1370558 - RNA, 21 nt, Human
ugccgguggcuuuggggcugg

SEQ ID NO: 1370559 - RNA, 19 nt, Human
ugcucaggccagcugggaa

SEQ ID NO: 1370560 - RNA, 20 nt, Human
ugcucaggccagcugggaac

SEQ ID NO: 1370561 - RNA, 18 nt, Human
ugcuucuaccuucaucuc

SEQ ID NO: 1370562 - RNA, 22 nt, Human
uggaggcugaugaggccaggag

SEQ ID NO: 1370563 - RNA, 24 nt, Human
uggaggcugaugaggccaggagca

SEQ ID NO: 1370564 - RNA, 18 nt, Human
uggauaggguguguccca

SEQ ID NO: 1370565 - RNA, 24 nt, Human
uggcaggcuggccuccugaggccu

SEQ ID NO: 1370566 - RNA, 19 nt, Human
uggcccaggcucuccuggg

SEQ ID NO: 1370567 - RNA, 19 nt, Human
uggcuuuggggcugggugg

SEQ ID NO: 1370568 - RNA, 19 nt, Human
uggcuuuggggcugggugg

SEQ ID NO: 1370569 - RNA, 24 nt, Human
ugggccccuccauccucgacacuc

SEQ ID NO: 1370570 - RNA, 21 nt, Human
uggggcccuucucuccaucga

SEQ ID NO: 1370571 - RNA, 18 nt, Human
ugggugggagacuugggg

SEQ ID NO: 1370572 - RNA, 19 nt, Human
ugguggcaggcccccugcu

SEQ ID NO: 1370573 - RNA, 18 nt, Human
uguccacacggaucugua

SEQ ID NO: 1370574 - RNA, 26 nt, Human
uguccacuuuccggcagcuucacaug

SEQ ID NO: 1370575 - RNA, 20 nt, Human
uuccuggggcaccgggcaau

SEQ ID NO: 1370576 - RNA, 20 nt, Human
uugaauguuaaaaggccaca

SEQ ID NO: 1370577 - RNA, 25 nt, Human
uuggggcugggugggcauacucuug

SEQ ID NO: 1370578 - RNA, 21 nt, Human
uuuggccagaguucugggugg

SEQ ID NO: 1370579 - RNA, 19 nt, Human
uuuggggcccuucucucca

SEQ ID NO: 1370580 - RNA, 22 nt, Human
uuuuacaaaaauuaaaaauguc

SEQ ID NO: 1370581 - RNA, 18 nt, Human
aagcggaagacuaaugac

SEQ ID NO: 1370582 - RNA, 18 nt, Human
aauaggagugaggaggca

SEQ ID NO: 1370583 - RNA, 20 nt, Human
acaaaggcaaagagaauagg

SEQ ID NO: 1370584 - RNA, 23 nt, Human
agacuuugacaugugugaaaaca

SEQ ID NO: 1370585 - RNA, 23 nt, Human
agcaauggaaaggaagugucaga

SEQ ID NO: 1370586 - RNA, 24 nt, Human
agccagcgucugggggguccucga

SEQ ID NO: 1370587 - RNA, 18 nt, Human
aggaaguggggaagaggg

SEQ ID NO: 1370588 - RNA, 22 nt, Human
aggcaaagagaauaggagugag

SEQ ID NO: 1370589 - RNA, 20 nt, Human
aggcaggaauaacgcugggu

SEQ ID NO: 1370590 - RNA, 19 nt, Human
aguggggaagaggcugcag

SEQ ID NO: 1370591 - RNA, 22 nt, Human
caaagacagcaucuuccuggaa

SEQ ID NO: 1370592 - RNA, 21 nt, Human
cacagccuagcuccuuccuuu

SEQ ID NO: 1370593 - RNA, 19 nt, Human
cacucccaggaagugggga

SEQ ID NO: 1370594 - RNA, 19 nt, Human
cagcaaugaacaaaaggaa

SEQ ID NO: 1370595 - RNA, 22 nt, Human
cagcgucuggggagaagaugac

SEQ ID NO: 1370596 - RNA, 19 nt, Human
cagucuguucaggccaagc

SEQ ID NO: 1370597 - RNA, 18 nt, Human
cauugugaccagacggga

SEQ ID NO: 1370598 - RNA, 19 nt, Human
cauuucaccuuucucagua

SEQ ID NO: 1370599 - RNA, 18 nt, Human
ccucugggugcugcugug

SEQ ID NO: 1370600 - RNA, 23 nt, Human
ccuguagaucauugugaccagac

SEQ ID NO: 1370601 - RNA, 18 nt, Human
ccuuugcacaggauggcu

SEQ ID NO: 1370602 - RNA, 24 nt, Human
ccuuugcacaggauggcucugcgg

SEQ ID NO: 1370603 - RNA, 19 nt, Human
cgcugggucacucccagga

SEQ ID NO: 1370604 - RNA, 20 nt, Human
cucuuccuuggcuuucuugg

SEQ ID NO: 1370605 - RNA, 23 nt, Human
gaagaggcugcagccaagaagaa

SEQ ID NO: 1370606 - RNA, 20 nt, Human
gcaaagagaauaggagugag

SEQ ID NO: 1370607 - RNA, 22 nt, Human
gcuuucuugguaacagcaauga

SEQ ID NO: 1370608 - RNA, 19 nt, Human
gggcaaacgacacaaguca

SEQ ID NO: 1370609 - RNA, 19 nt, Human
gggcuauaggggaaauagg

SEQ ID NO: 1370610 - RNA, 21 nt, Human
gucagucuguucaggccaagc

SEQ ID NO: 1370611 - RNA, 22 nt, Human
uaacagcaaugaacaaaaggaa

SEQ ID NO: 1370612 - RNA, 20 nt, Human
uaagcaucucucucaguuga

SEQ ID NO: 1370613 - RNA, 19 nt, Human
uacacaaaggcaaagagaa

SEQ ID NO: 1370614 - RNA, 21 nt, Human
uacacaaaggcaaagagaaua

SEQ ID NO: 1370615 - RNA, 20 nt, Human
ucccuagauagcuuucuucc

SEQ ID NO: 1370616 - RNA, 24 nt, Human
ucccuagauagcuuucuuccucuc

SEQ ID NO: 1370617 - RNA, 26 nt, Human
ucuguucaggccaagcaauggaaagg

SEQ ID NO: 1370618 - RNA, 18 nt, Human
ugacaugugugaaaacau

SEQ ID NO: 1370619 - RNA, 19 nt, Human
ugaggaggcaggaauaacg

SEQ ID NO: 1370620 - RNA, 19 nt, Human
ugauucuagaucucguccc

SEQ ID NO: 1370621 - RNA, 21 nt, Human
ugggucacucccaggaagugg

SEQ ID NO: 1370622 - RNA, 20 nt, Human
uuucaccuuucucaguaauc

SEQ ID NO: 1370623 - RNA, 23 nt, Human
uuucuugguaacagcaaugaaca

SEQ ID NO: 1370624 - RNA, 18 nt, Human
uuuuuuuuuuuuuuucug

SEQ ID NO: 1370625 - RNA, 19 nt, Human
uuuuuuuuuuuuuuucugu

SEQ ID NO: 1370626 - RNA, 24 nt, Human
aaucuccacccccagguucaggag

SEQ ID NO: 1370627 - RNA, 29 nt, Human
auccgguuacucccuuucccuuccccaag

SEQ ID NO: 1370628 - RNA, 19 nt, Human
cacagccaacacccuugcc

SEQ ID NO: 1370629 - RNA, 24 nt, Human
cacccccagguucaggagaugcuu

SEQ ID NO: 1370630 - RNA, 26 nt, Human
cacccuugccuucuguuuucuaaggg

SEQ ID NO: 1370631 - RNA, 24 nt, Human
caucugccccguuguuuacuaaca

SEQ ID NO: 1370632 - RNA, 25 nt, Human
cauuggaggcugcagcaugcagagg

SEQ ID NO: 1370633 - RNA, 20 nt, Human
ccaaccgauguucuuggauc

SEQ ID NO: 1370634 - RNA, 18 nt, Human
ccaaccgcagcuccugca

SEQ ID NO: 1370635 - RNA, 23 nt, Human
ccaaccgcagcuccugcagagug

SEQ ID NO: 1370636 - RNA, 21 nt, Human
ccaaugauaggaacacaauuu

SEQ ID NO: 1370637 - RNA, 20 nt, Human
ccaucuuuacucugaauguu

SEQ ID NO: 1370638 - RNA, 20 nt, Human
ccccagguucaggagaugcu

SEQ ID NO: 1370639 - RNA, 24 nt, Human
ccgguuacucccuuucccuucccc

SEQ ID NO: 1370640 - RNA, 18 nt, Human
cucccuuucccuucccca

SEQ ID NO: 1370641 - RNA, 21 nt, Human
cugaauguuaacaucugcccc

SEQ ID NO: 1370642 - RNA, 20 nt, Human
ggaggcugcagcaugcagag

SEQ ID NO: 1370643 - RNA, 22 nt, Human
gggaaagaggaauuuccaguau

SEQ ID NO: 1370644 - RNA, 18 nt, Human
guaacccuuugcguucug

SEQ ID NO: 1370645 - RNA, 23 nt, Human
guuuacuaacaauucaagacacc

SEQ ID NO: 1370646 - RNA, 21 nt, Human
ucaaucuccacccccagguuc

SEQ ID NO: 1370647 - RNA, 22 nt, Human
uccacagccaacacccuugccu

SEQ ID NO: 1370648 - RNA, 18 nt, Human
uccccaaccgcagcuccu

SEQ ID NO: 1370649 - RNA, 23 nt, Human
ugcauucugauucauaauugguc

SEQ ID NO: 1370650 - RNA, 24 nt, Human
uggaggcagcagcaaaaugcaaag

SEQ ID NO: 1370651 - RNA, 22 nt, Human
uuacucccuuucccuuccccaa

SEQ ID NO: 1370652 - RNA, 22 nt, Human
uucacguuagcaccguagucaa

SEQ ID NO: 1370653 - RNA, 21 nt, Human
uucauaauuggucccucaggg

SEQ ID NO: 1370654 - RNA, 18 nt, Human
uuccccaaccgcagcucc

SEQ ID NO: 1370655 - RNA, 20 nt, Human
uucccuuccccaaccgcagc

SEQ ID NO: 1370656 - RNA, 19 nt, Human
uuggcugguucacguuagc

SEQ ID NO: 1370657 - RNA, 19 nt, Human
uuuccacagccaacacccu

SEQ ID NO: 1370658 - RNA, 24 nt, Human
uuugccaucuuuacucugaauguu

SEQ ID NO: 1370659 - RNA, 24 nt, Human
aaagaauccaauaugagacccaaa

SEQ ID NO: 1370660 - RNA, 18 nt, Human
aacacggaagggacagau

SEQ ID NO: 1370661 - RNA, 23 nt, Human
acucagguccaaaaucuucagcc

SEQ ID NO: 1370662 - RNA, 20 nt, Human
agaaugcaaauguauauuca

SEQ ID NO: 1370663 - RNA, 21 nt, Human
agaaugcaaauguauauucau

SEQ ID NO: 1370664 - RNA, 21 nt, Human
agggcuuucuucagcuuaaaa

SEQ ID NO: 1370665 - RNA, 21 nt, Human
aucagcuucaguacuuacuag

SEQ ID NO: 1370666 - RNA, 25 nt, Human
caaauaacaauuaaauuaaauaaga

SEQ ID NO: 1370667 - RNA, 23 nt, Human
cagaaagaauccaauaugagacc

SEQ ID NO: 1370668 - RNA, 24 nt, Human
cagauagggagccggaaugugaca

SEQ ID NO: 1370669 - RNA, 26 nt, Human
caggcaucuguccaaauaucagcuuc

SEQ ID NO: 1370670 - RNA, 22 nt, Human
cauuugcauuuuaagagcauga

SEQ ID NO: 1370671 - RNA, 26 nt, Human
ccaauaugagacccaaaguuaccagu

SEQ ID NO: 1370672 - RNA, 20 nt, Human
ccacugaucccaaaagagca

SEQ ID NO: 1370673 - RNA, 23 nt, Human
cccagagaauacauggggcugcu

SEQ ID NO: 1370674 - RNA, 18 nt, Human
ccccaaagacaacuggcu

SEQ ID NO: 1370675 - RNA, 20 nt, Human
ccugcugagcuuucuuuccc

SEQ ID NO: 1370676 - RNA, 21 nt, Human
cuaaaaccugucuucccuaga

SEQ ID NO: 1370677 - RNA, 21 nt, Human
cuugcucuuuuugccuauagg

SEQ ID NO: 1370678 - RNA, 20 nt, Human
gacaacuggcuauaauuccc

SEQ ID NO: 1370679 - RNA, 23 nt, Human
gaucugaaguuagcuucaucaag

SEQ ID NO: 1370680 - RNA, 22 nt, Human
gcuugcucuuuuugccuauagg

SEQ ID NO: 1370681 - RNA, 20 nt, Human
ggguauccaggaagugagaa

SEQ ID NO: 1370682 - RNA, 27 nt, Human
uaaaaagaugaucaguggaaaaacugg

SEQ ID NO: 1370683 - RNA, 23 nt, Human
uaaagaaugcaaauguauauuca

SEQ ID NO: 1370684 - RNA, 22 nt, Human
uaacacaaauuuauugggugga

SEQ ID NO: 1370685 - RNA, 21 nt, Human
uaacuaccuuaagccucaggu

SEQ ID NO: 1370686 - RNA, 20 nt, Human
uaagccucagguucaucauc

SEQ ID NO: 1370687 - RNA, 21 nt, Human
uaccaguuccugcugagcuuu

SEQ ID NO: 1370688 - RNA, 20 nt, Human
uacuagcugagugaucugga

SEQ ID NO: 1370689 - RNA, 18 nt, Human
uaugagacccaaaguuac

SEQ ID NO: 1370690 - RNA, 22 nt, Human
uccaaauaucagcuucaguacu

SEQ ID NO: 1370691 - RNA, 24 nt, Human
ucccagagaauacauggggcugcu

SEQ ID NO: 1370692 - RNA, 21 nt, Human
uccccaaagacaacuggcuau

SEQ ID NO: 1370693 - RNA, 20 nt, Human
ucccuagacaccauugacug

SEQ ID NO: 1370694 - RNA, 21 nt, Human
uccucacaggguauccaggaa

SEQ ID NO: 1370695 - RNA, 22 nt, Human
ucuagcccacugaucccaaaag

SEQ ID NO: 1370696 - RNA, 22 nt, Human
ucuagcucugcaaguuucuguc

SEQ ID NO: 1370697 - RNA, 18 nt, Human
ucugcaaguuucugucgc

SEQ ID NO: 1370698 - RNA, 24 nt, Human
ucuucagcccacaucaaagacuuc

SEQ ID NO: 1370699 - RNA, 24 nt, Human
ugaaaaagucuccccaaagacaac

SEQ ID NO: 1370700 - RNA, 24 nt, Human
ugaaaagggacaaaaaaaggggua

SEQ ID NO: 1370701 - RNA, 21 nt, Human
ugaacaguguguguauagccu

SEQ ID NO: 1370702 - RNA, 24 nt, Human
ugacaaguggagcuuaauuugggu

SEQ ID NO: 1370703 - RNA, 22 nt, Human
ugagaagagguuucccauacaa

SEQ ID NO: 1370704 - RNA, 24 nt, Human
ugaucuggagcaauuaacuaccuu

SEQ ID NO: 1370705 - RNA, 18 nt, Human
uggagcaauuaacuaccg

SEQ ID NO: 1370706 - RNA, 20 nt, Human
uggagucaggcaucuguccc

SEQ ID NO: 1370707 - RNA, 20 nt, Human
uggcuugcucuuuuugccua

SEQ ID NO: 1370708 - RNA, 21 nt, Human
uuagugaggcaauaauaaugu

SEQ ID NO: 1370709 - RNA, 18 nt, Human
uucaucauuugcauuuua

SEQ ID NO: 1370710 - RNA, 19 nt, Human
uugggucuuuugauucuuu

SEQ ID NO: 1370711 - RNA, 24 nt, Human
uuuaucaucuuuggaucuucuuuu

SEQ ID NO: 1370712 - RNA, 23 nt, Human
uuucuauuugcuaaaaguaauug

SEQ ID NO: 1370713 - RNA, 19 nt, Human
aaagaacaggggagagucc

SEQ ID NO: 1370714 - RNA, 19 nt, Human
aaagugcugggauuacagg

SEQ ID NO: 1370715 - RNA, 24 nt, Human
aaagugcugggauuacaggcuuga

SEQ ID NO: 1370716 - RNA, 20 nt, Human
aaaugccagaggcggugacc

SEQ ID NO: 1370717 - RNA, 20 nt, Human
aaccaaagauccccgccggg

SEQ ID NO: 1370718 - RNA, 19 nt, Human
aaccuagaccaaucaaacc

SEQ ID NO: 1370719 - RNA, 20 nt, Human
aacuuggcucaugagcagaa

SEQ ID NO: 1370720 - RNA, 24 nt, Human
aagucgaggcugcagugagcugag

SEQ ID NO: 1370721 - RNA, 19 nt, Human
aagugcugggauuacaggc

SEQ ID NO: 1370722 - RNA, 19 nt, Human
aagugcugggauuacaggc

SEQ ID NO: 1370723 - RNA, 26 nt, Human
aagugcugggauuacaggcuugagcc

SEQ ID NO: 1370724 - RNA, 19 nt, Human
acaggguuucgccgugcua

SEQ ID NO: 1370725 - RNA, 20 nt, Human
acaggguuucgccgugcuag

SEQ ID NO: 1370726 - RNA, 19 nt, Human
acugggcuacguagcugaa

SEQ ID NO: 1370727 - RNA, 24 nt, Human
agacaggaggauuucuugagccca

SEQ ID NO: 1370728 - RNA, 18 nt, Human
agacaggguuucgccgug

SEQ ID NO: 1370729 - RNA, 19 nt, Human
agagacaggguuucgccgu

SEQ ID NO: 1370730 - RNA, 20 nt, Human
agccucucugccaagcugga

SEQ ID NO: 1370731 - RNA, 24 nt, Human
aggcacaguggcucacaucuguaa

SEQ ID NO: 1370732 - RNA, 18 nt, Human
aggcaggcggaucacuug

SEQ ID NO: 1370733 - RNA, 21 nt, Human
aggcaucacuauaguuuaaaa

SEQ ID NO: 1370734 - RNA, 19 nt, Human
aggcuggagugcaguggca

SEQ ID NO: 1370735 - RNA, 20 nt, Human
agucagccagaaaccucuga

SEQ ID NO: 1370736 - RNA, 23 nt, Human
agucgaggcugcagugagcugag

SEQ ID NO: 1370737 - RNA, 21 nt, Human
agugcaguggcacgaucggcu

SEQ ID NO: 1370738 - RNA, 22 nt, Human
agugcaguggcacgaucggcug

SEQ ID NO: 1370739 - RNA, 24 nt, Human
agugcugggauuacaggcuugagc

SEQ ID NO: 1370740 - RNA, 24 nt, Human
aguggcucacaucuguaauccugg

SEQ ID NO: 1370741 - RNA, 21 nt, Human
aucacagcuacucggaaggca

SEQ ID NO: 1370742 - RNA, 23 nt, Human
aucacuugagcccaggaguucaa

SEQ ID NO: 1370743 - RNA, 19 nt, Human
aucaugccacuguacucca

SEQ ID NO: 1370744 - RNA, 18 nt, Human
augccacuguacuccaac

SEQ ID NO: 1370745 - RNA, 21 nt, Human
caaaaagugcaccaggaaggc

SEQ ID NO: 1370746 - RNA, 24 nt, Human
caaagugcugggauuacaggcuug

SEQ ID NO: 1370747 - RNA, 18 nt, Human
caaccaaagauccccgcc

SEQ ID NO: 1370748 - RNA, 26 nt, Human
caaccuagaccaaucaaaccagaagc

SEQ ID NO: 1370749 - RNA, 24 nt, Human
cacaggcacacgccaccacaccca

SEQ ID NO: 1370750 - RNA, 24 nt, Human
cacaucuguaauccuggcauucug

SEQ ID NO: 1370751 - RNA, 21 nt, Human
caccaugccuggcccaucuga

SEQ ID NO: 1370752 - RNA, 24 nt, Human
caccucugccucccaaagugcugg

SEQ ID NO: 1370753 - RNA, 27 nt, Human
cacgaucggcugucugcaagcuccgcc

SEQ ID NO: 1370754 - RNA, 21 nt, Human
cagaacgacaaaugccagagg

SEQ ID NO: 1370755 - RNA, 23 nt, Human
cagaacgacaaaugccagaggcg

SEQ ID NO: 1370756 - RNA, 19 nt, Human
cagcaccaucagcaucgcc

SEQ ID NO: 1370757 - RNA, 27 nt, Human
cagccagaaaccucugauuccaccacg

SEQ ID NO: 1370758 - RNA, 28 nt, Human
cagccagaaaccucugauuccaccacgu

SEQ ID NO: 1370759 - RNA, 23 nt, Human
cagccucccgagcagcugggacc

SEQ ID NO: 1370760 - RNA, 18 nt, Human
caggagaagaccagggug

SEQ ID NO: 1370761 - RNA, 20 nt, Human
caggagaagaccagggugga

SEQ ID NO: 1370762 - RNA, 22 nt, Human
caggccauucuucugccucagc

SEQ ID NO: 1370763 - RNA, 24 nt, Human
caggcugcaaccuagaccaaucaa

SEQ ID NO: 1370764 - RNA, 24 nt, Human
caggguuucgccgugcuagccagg

SEQ ID NO: 1370765 - RNA, 24 nt, Human
caucuguaauccuggcauucuggg

SEQ ID NO: 1370766 - RNA, 19 nt, Human
ccaaagugcugggauuaca

SEQ ID NO: 1370767 - RNA, 22 nt, Human
ccaaagugcugggauuacaggc

SEQ ID NO: 1370768 - RNA, 23 nt, Human
ccaaagugcugggauuacaggcu

SEQ ID NO: 1370769 - RNA, 19 nt, Human
ccaaccaaagauccccgcc

SEQ ID NO: 1370770 - RNA, 22 nt, Human
ccaaucaaaccagaagcucugc

SEQ ID NO: 1370771 - RNA, 18 nt, Human
ccacuguacuccaaccuc

SEQ ID NO: 1370772 - RNA, 23 nt, Human
ccagaaaccucugauuccaccac

SEQ ID NO: 1370773 - RNA, 24 nt, Human
ccagaggcggugaccgcguccucu

SEQ ID NO: 1370774 - RNA, 20 nt, Human
ccagcgccgcaccgcgcacc

SEQ ID NO: 1370775 - RNA, 19 nt, Human
ccaggguggagagggaaaa

SEQ ID NO: 1370776 - RNA, 20 nt, Human
ccagugugaagccuaagugg

SEQ ID NO: 1370777 - RNA, 24 nt, Human
cccaaagugcugggauuacaggcu

SEQ ID NO: 1370778 - RNA, 19 nt, Human
ccccacccuagaccugcug

SEQ ID NO: 1370779 - RNA, 23 nt, Human
cccggguucaggccauucuucug

SEQ ID NO: 1370780 - RNA, 21 nt, Human
ccuccagcuuggcgacccagc

SEQ ID NO: 1370781 - RNA, 24 nt, Human
ccucccggguucaggccauucuuc

SEQ ID NO: 1370782 - RNA, 18 nt, Human
ccucucugccaagcugga

SEQ ID NO: 1370783 - RNA, 19 nt, Human
ccugguucaaagcacccac

SEQ ID NO: 1370784 - RNA, 19 nt, Human
ccuuuugacagaaucccca

SEQ ID NO: 1370785 - RNA, 21 nt, Human
cgccagcgccaaccaaagauc

SEQ ID NO: 1370786 - RNA, 24 nt, Human
cgccagcgccaaccaaagaucccc

SEQ ID NO: 1370787 - RNA, 23 nt, Human
cgccgggaaagccucucugccaa

SEQ ID NO: 1370788 - RNA, 24 nt, Human
cgccgugcuagccaggauggucuc

SEQ ID NO: 1370789 - RNA, 19 nt, Human
cgccucccggguucaggcc

SEQ ID NO: 1370790 - RNA, 24 nt, Human
cggaucacuugagcccaggaguuc

SEQ ID NO: 1370791 - RNA, 21 nt, Human
cguccagggaccagcaccauc

SEQ ID NO: 1370792 - RNA, 25 nt, Human
cgugauccgcccaccucugccuccc

SEQ ID NO: 1370793 - RNA, 23 nt, Human
cuaauuuuuuguauuuuuaguag

SEQ ID NO: 1370794 - RNA, 21 nt, Human
cucacaucuguaauccuggca

SEQ ID NO: 1370795 - RNA, 19 nt, Human
cuccaaccucuuucuuguc

SEQ ID NO: 1370796 - RNA, 22 nt, Human
cuccugaccucgugauccgccc

SEQ ID NO: 1370797 - RNA, 24 nt, Human
cucgcucugucgcccaggcuggag

SEQ ID NO: 1370798 - RNA, 20 nt, Human
cucugucgcccaggcuggag

SEQ ID NO: 1370799 - RNA, 21 nt, Human
cugcaagcuccgccucccggg

SEQ ID NO: 1370800 - RNA, 20 nt, Human
cugcagugagcugagaucau

SEQ ID NO: 1370801 - RNA, 21 nt, Human
cugcagugagcugagaucaug

SEQ ID NO: 1370802 - RNA, 23 nt, Human
cugccucagccucccgagcagcu

SEQ ID NO: 1370803 - RNA, 19 nt, Human
cuggcauucugggaggcca

SEQ ID NO: 1370804 - RNA, 22 nt, Human
gaccucgugauccgcccaccuc

SEQ ID NO: 1370805 - RNA, 21 nt, Human
gagacggagucucgcucuguc

SEQ ID NO: 1370806 - RNA, 24 nt, Human
gagcagcugggaccacaggcacac

SEQ ID NO: 1370807 - RNA, 24 nt, Human
gaggcugcagugagcugagaucaa

SEQ ID NO: 1370808 - RNA, 24 nt, Human
gaucacuugagcccaggaguucaa

SEQ ID NO: 1370809 - RNA, 18 nt, Human
gauuacaggcuugagcca

SEQ ID NO: 1370810 - RNA, 21 nt, Human
gauuacaggcuugagccacca

SEQ ID NO: 1370811 - RNA, 24 nt, Human
gauuacaggcuugagccaccaugc

SEQ ID NO: 1370812 - RNA, 24 nt, Human
gcccaggaagucgaggcugcagug

SEQ ID NO: 1370813 - RNA, 23 nt, Human
gcccaggcuggagugcaguggca

SEQ ID NO: 1370814 - RNA, 25 nt, Human
gccgugcuggaaaaggcggccacac

SEQ ID NO: 1370815 - RNA, 22 nt, Human
gcgcacccgcgccgccugcgcg

SEQ ID NO: 1370816 - RNA, 25 nt, Human
gcucugucgcccaggcuggagugca

SEQ ID NO: 1370817 - RNA, 19 nt, Human
gcuggagugcaguggcacg

SEQ ID NO: 1370818 - RNA, 23 nt, Human
ggaucacuugagcccaggaguuc

SEQ ID NO: 1370819 - RNA, 24 nt, Human
ggauuacaggcuugagccaccaug

SEQ ID NO: 1370820 - RNA, 20 nt, Human
ggucucgaucuccugaccuc

SEQ ID NO: 1370821 - RNA, 23 nt, Human
guagcugaaaagaacaggggaga

SEQ ID NO: 1370822 - RNA, 23 nt, Human
gucaggccccccacccuagaccu

SEQ ID NO: 1370823 - RNA, 18 nt, Human
guccagggaccagcacca

SEQ ID NO: 1370824 - RNA, 24 nt, Human
gugauccgcccaccucugccuccc

SEQ ID NO: 1370825 - RNA, 24 nt, Human
uaagacaccgccaggcaucacuau

SEQ ID NO: 1370826 - RNA, 21 nt, Human
uaaguggagaaccacugggcu

SEQ ID NO: 1370827 - RNA, 24 nt, Human
uaauuuuuuguauuuuuaguagag

SEQ ID NO: 1370828 - RNA, 18 nt, Human
uacaggagaagaccaggg

SEQ ID NO: 1370829 - RNA, 22 nt, Human
uacaggcuugagccaccaugcc

SEQ ID NO: 1370830 - RNA, 20 nt, Human
uaccuccagcuuggcgaccc

SEQ ID NO: 1370831 - RNA, 21 nt, Human
uacggugggcgccugccuaac

SEQ ID NO: 1370832 - RNA, 23 nt, Human
uagaccaaucaaaccagaagcuc

SEQ ID NO: 1370833 - RNA, 18 nt, Human
uagagacaggguuucgcc

SEQ ID NO: 1370834 - RNA, 21 nt, Human
uaguagagacaggguuucgcc

SEQ ID NO: 1370835 - RNA, 24 nt, Human
uaguagagacaggguuucgccgug

SEQ ID NO: 1370836 - RNA, 25 nt, Human
uaguagagacaggguuucgccgugc

SEQ ID NO: 1370837 - RNA, 23 nt, Human
ucacuugagcccaggaguucaag

SEQ ID NO: 1370838 - RNA, 25 nt, Human
ucaggccaggcacaguggcucacau

SEQ ID NO: 1370839 - RNA, 25 nt, Human
ucaggccauucuucugccucagccu

SEQ ID NO: 1370840 - RNA, 23 nt, Human
uccaccacguucuccaaaaagug

SEQ ID NO: 1370841 - RNA, 24 nt, Human
ucccaaagugcugggauuacaggc

SEQ ID NO: 1370842 - RNA, 23 nt, Human
ucccgagcagcugggaccacagg

SEQ ID NO: 1370843 - RNA, 24 nt, Human
ucccggguucaggccauucuucug

SEQ ID NO: 1370844 - RNA, 24 nt, Human
ucccuggaugauuccagugugaag

SEQ ID NO: 1370845 - RNA, 24 nt, Human
ucgcccaggcuggagugcaguggc

SEQ ID NO: 1370846 - RNA, 24 nt, Human
ucgccgugcuagccaggauggucu

SEQ ID NO: 1370847 - RNA, 24 nt, Human
ucgcucugucgcccaggcuggagu

SEQ ID NO: 1370848 - RNA, 19 nt, Human
ucucgcucugucgcccagg

SEQ ID NO: 1370849 - RNA, 22 nt, Human
ucucgcucugucgcccaggcug

SEQ ID NO: 1370850 - RNA, 23 nt, Human
ucucgcucugucgcccaggcugg

SEQ ID NO: 1370851 - RNA, 24 nt, Human
ucucgcucugucgcccaggcugga

SEQ ID NO: 1370852 - RNA, 26 nt, Human
ucucgcucugucgcccaggcuggagu

SEQ ID NO: 1370853 - RNA, 23 nt, Human
ucucucagacuuggguuugcagg

SEQ ID NO: 1370854 - RNA, 23 nt, Human
ucugccaagcuggaaagcgcuga

SEQ ID NO: 1370855 - RNA, 22 nt, Human
ucuggucugggcaugauggcau

SEQ ID NO: 1370856 - RNA, 24 nt, Human
ucugucgcccaggcuggagugcag

SEQ ID NO: 1370857 - RNA, 23 nt, Human
ugaccucgugauccgcccaccuc

SEQ ID NO: 1370858 - RNA, 22 nt, Human
ugagcugagaucaugccacugu

SEQ ID NO: 1370859 - RNA, 24 nt, Human
ugauccgcccaccucugccuccca

SEQ ID NO: 1370860 - RNA, 18 nt, Human
ugauuccaccacguucuc

SEQ ID NO: 1370861 - RNA, 21 nt, Human
ugcccaggcugcaaccuagac

SEQ ID NO: 1370862 - RNA, 24 nt, Human
ugccucagccucccgagcagcugg

SEQ ID NO: 1370863 - RNA, 18 nt, Human
ugcgaguaagacaccgcc

SEQ ID NO: 1370864 - RNA, 19 nt, Human
ugcuggaaaaggcggccac

SEQ ID NO: 1370865 - RNA, 20 nt, Human
uggagugcaguggcacgauc

SEQ ID NO: 1370866 - RNA, 21 nt, Human
uggagugcaguggcacgaucg

SEQ ID NO: 1370867 - RNA, 22 nt, Human
uggagugcaguggcacgaucgg

SEQ ID NO: 1370868 - RNA, 21 nt, Human
uggcauacaacugugaucaca

SEQ ID NO: 1370869 - RNA, 24 nt, Human
uggcauucugggaggccaaggcag

SEQ ID NO: 1370870 - RNA, 25 nt, Human
uggcauucugggaggccaaggcagg

SEQ ID NO: 1370871 - RNA, 19 nt, Human
uggcucacaucuguaaucc

SEQ ID NO: 1370872 - RNA, 24 nt, Human
uggcucacaucuguaauccuggca

SEQ ID NO: 1370873 - RNA, 21 nt, Human
ugggaccacaggcacacgcca

SEQ ID NO: 1370874 - RNA, 24 nt, Human
ugggaccacaggcacacgccacca

SEQ ID NO: 1370875 - RNA, 24 nt, Human
ugggaggccaaggcaggcggauca

SEQ ID NO: 1370876 - RNA, 18 nt, Human
ugggauuacaggcuugag

SEQ ID NO: 1370877 - RNA, 21 nt, Human
ugggauuacaggcuugagcca

SEQ ID NO: 1370878 - RNA, 22 nt, Human
ugggauuacaggcuugagccac

SEQ ID NO: 1370879 - RNA, 24 nt, Human
ugggauuacaggcuugagccacca

SEQ ID NO: 1370880 - RNA, 25 nt, Human
ugggauuacaggcuugagccaccau

SEQ ID NO: 1370881 - RNA, 20 nt, Human
ugguucaaagcacccaccga

SEQ ID NO: 1370882 - RNA, 22 nt, Human
ugugagacgugccgaaugucag

SEQ ID NO: 1370883 - RNA, 22 nt, Human
uuaguagagacaggguuucgcc

SEQ ID NO: 1370884 - RNA, 24 nt, Human
uuaguagagacaggguuucgccgu

SEQ ID NO: 1370885 - RNA, 25 nt, Human
uucaaagcacccaccgagucagcca

SEQ ID NO: 1370886 - RNA, 22 nt, Human
uuccugguucaaagcacccacc

SEQ ID NO: 1370887 - RNA, 22 nt, Human
uugagcccaggaguucaagacc

SEQ ID NO: 1370888 - RNA, 18 nt, Human
uuuaaaacucccuggaug

SEQ ID NO: 1370889 - RNA, 24 nt, Human
uuucuugagcccaggaagucgagg

SEQ ID NO: 1370890 - RNA, 22 nt, Human
uuucuuguccuuuccugguuca

SEQ ID NO: 1370891 - RNA, 24 nt, Human
uuucuuguccuuuccugguucaaa

SEQ ID NO: 1370892 - RNA, 22 nt, Human
uuuuguauuuuuaguagagaca

SEQ ID NO: 1370893 - RNA, 23 nt, Human
uuuuuaguagagacaggguuucg

SEQ ID NO: 1370894 - RNA, 24 nt, Human
uuuuuaguagagacaggguuucgc

SEQ ID NO: 1370895 - RNA, 21 nt, Human
uuuuuguauuuuuaguagaga

SEQ ID NO: 1370896 - RNA, 20 nt, Human
aacaggcuguagcuuuaggc

SEQ ID NO: 1370897 - RNA, 23 nt, Human
aagcuccccgagugagcaauucc

SEQ ID NO: 1370898 - RNA, 21 nt, Human
aauuccugucccuuuuaaggg

SEQ ID NO: 1370899 - RNA, 24 nt, Human
accagcuguucuaagaacuagagg

SEQ ID NO: 1370900 - RNA, 22 nt, Human
acuccugucucaagagccaagc

SEQ ID NO: 1370901 - RNA, 25 nt, Human
acucuaagggggugcgugugagagg

SEQ ID NO: 1370902 - RNA, 22 nt, Human
agaaggaagggguuuauucggc

SEQ ID NO: 1370903 - RNA, 23 nt, Human
agaaggaagggguuuauucggcc

SEQ ID NO: 1370904 - RNA, 21 nt, Human
agcuccccgagugagcaauuc

SEQ ID NO: 1370905 - RNA, 21 nt, Human
aggaagacugguuuucaaugu

SEQ ID NO: 1370906 - RNA, 24 nt, Human
agguccccaugacucaggucagga

SEQ ID NO: 1370907 - RNA, 22 nt, Human
auuaacacugaacagcaacaaa

SEQ ID NO: 1370908 - RNA, 20 nt, Human
auuugcucuuucugcaacau

SEQ ID NO: 1370909 - RNA, 18 nt, Human
caaaaacaacagcacuga

SEQ ID NO: 1370910 - RNA, 18 nt, Human
caacaaaaaagggugcgg

SEQ ID NO: 1370911 - RNA, 19 nt, Human
caacagcacugagacugcu

SEQ ID NO: 1370912 - RNA, 22 nt, Human
caacagcacugagacugcuguc

SEQ ID NO: 1370913 - RNA, 19 nt, Human
cagagccccugugccgcca

SEQ ID NO: 1370914 - RNA, 23 nt, Human
cagcacugagacugcuguccugg

SEQ ID NO: 1370915 - RNA, 19 nt, Human
cagugucugaugagagccc

SEQ ID NO: 1370916 - RNA, 21 nt, Human
caugacucaggucaggagcuc

SEQ ID NO: 1370917 - RNA, 21 nt, Human
cccaugacucaggucaggagc

SEQ ID NO: 1370918 - RNA, 19 nt, Human
cccugugccgccacacagc

SEQ ID NO: 1370919 - RNA, 18 nt, Human
ccugucaaaaacaacagc

SEQ ID NO: 1370920 - RNA, 24 nt, Human
ccugugaggcaggcauucugucgg

SEQ ID NO: 1370921 - RNA, 18 nt, Human
ccuuucugcccugggaug

SEQ ID NO: 1370922 - RNA, 23 nt, Human
cggggugggaggccuccugggca

SEQ ID NO: 1370923 - RNA, 18 nt, Human
cuacaguucacuggaggc

SEQ ID NO: 1370924 - RNA, 19 nt, Human
cucaagagccaagcucccc

SEQ ID NO: 1370925 - RNA, 22 nt, Human
cucaagagccaagcuccccgag

SEQ ID NO: 1370926 - RNA, 23 nt, Human
cucauaauauucaccaaaugaag

SEQ ID NO: 1370927 - RNA, 21 nt, Human
cuccuccaagggguuuccaaa

SEQ ID NO: 1370928 - RNA, 19 nt, Human
cugcaacaucuggcaucau

SEQ ID NO: 1370929 - RNA, 18 nt, Human
cugcaggcugaugccaug

SEQ ID NO: 1370930 - RNA, 19 nt, Human
cugcaggcugaugccaugu

SEQ ID NO: 1370931 - RNA, 21 nt, Human
cuggaggcuggaaaguccaag

SEQ ID NO: 1370932 - RNA, 18 nt, Human
cugucugcuuguggauuu

SEQ ID NO: 1370933 - RNA, 18 nt, Human
gaacuagaggaacaggcu

SEQ ID NO: 1370934 - RNA, 18 nt, Human
gacaagcucuccgggauc

SEQ ID NO: 1370935 - RNA, 27 nt, Human
gacuccugucucaagagccaagcuccc

SEQ ID NO: 1370936 - RNA, 18 nt, Human
gccugagagcucaguaac

SEQ ID NO: 1370937 - RNA, 18 nt, Human
gccugccuuggcugugga

SEQ ID NO: 1370938 - RNA, 21 nt, Human
gcuuguggauuucauuucugc

SEQ ID NO: 1370939 - RNA, 23 nt, Human
gggugggaggccuccugggcagg

SEQ ID NO: 1370940 - RNA, 22 nt, Human
guaauucgaucugaacaaaaca

SEQ ID NO: 1370941 - RNA, 21 nt, Human
gugagagggucgugaucgauu

SEQ ID NO: 1370942 - RNA, 20 nt, Human
ucauacgugucauuucucau

SEQ ID NO: 1370943 - RNA, 20 nt, Human
ucauugccugccuuggcugu

SEQ ID NO: 1370944 - RNA, 21 nt, Human
uccccgagugagcaauuccug

SEQ ID NO: 1370945 - RNA, 28 nt, Human
ucuguaaucgauaacauaaccggggucc

SEQ ID NO: 1370946 - RNA, 22 nt, Human
ugagacugcuguccuggugggu

SEQ ID NO: 1370947 - RNA, 19 nt, Human
ugagagcucauugccugcc

SEQ ID NO: 1370948 - RNA, 22 nt, Human
ugagcaauuccugucccuuuua

SEQ ID NO: 1370949 - RNA, 19 nt, Human
ugaugccauguggguggug

SEQ ID NO: 1370950 - RNA, 19 nt, Human
ugccaggggucucacccag

SEQ ID NO: 1370951 - RNA, 21 nt, Human
ugccaggggucucacccagcu

SEQ ID NO: 1370952 - RNA, 22 nt, Human
ugccauguggguggugcccucc

SEQ ID NO: 1370953 - RNA, 20 nt, Human
ugcccugggauguucucccu

SEQ ID NO: 1370954 - RNA, 21 nt, Human
uggaaggcuaugcaggagucu

SEQ ID NO: 1370955 - RNA, 20 nt, Human
uggcagaucuccuccaaggg

SEQ ID NO: 1370956 - RNA, 21 nt, Human
uggcaucauggaccacuucug

SEQ ID NO: 1370957 - RNA, 21 nt, Human
uggcaugcucuauguguccuc

SEQ ID NO: 1370958 - RNA, 20 nt, Human
uggcggauaaggggaaggcg

SEQ ID NO: 1370959 - RNA, 24 nt, Human
uggcuguggaauaggcccaugccg

SEQ ID NO: 1370960 - RNA, 21 nt, Human
ugugccgccacacagcccuua

SEQ ID NO: 1370961 - RNA, 20 nt, Human
uguggaauaggcccaugccg

SEQ ID NO: 1370962 - RNA, 23 nt, Human
uguggcagaucuccuccaagggg

SEQ ID NO: 1370963 - RNA, 19 nt, Human
uuagcguguugcacuguug

SEQ ID NO: 1370964 - RNA, 18 nt, Human
uuauuugcucuuucugca

SEQ ID NO: 1370965 - RNA, 18 nt, Human
uucagguccccaugacuc

SEQ ID NO: 1370966 - RNA, 18 nt, Human
uuccugucccuuuuaagg

SEQ ID NO: 1370967 - RNA, 22 nt, Human
uugcaaguaccugagagcucau

SEQ ID NO: 1370968 - RNA, 18 nt, Human
aaacaaaauagugauaac

SEQ ID NO: 1370969 - RNA, 22 nt, Human
aacacugaaaagccaaagucca

SEQ ID NO: 1370970 - RNA, 20 nt, Human
acacuguuuuguuggcuuua

SEQ ID NO: 1370971 - RNA, 19 nt, Human
accuaaagacaaaagaaag

SEQ ID NO: 1370972 - RNA, 20 nt, Human
accuaaagacaaaagaaagg

SEQ ID NO: 1370973 - RNA, 22 nt, Human
acgaccuuguuaccauauaugc

SEQ ID NO: 1370974 - RNA, 20 nt, Human
aggccgggugugguggcuca

SEQ ID NO: 1370975 - RNA, 22 nt, Human
aggccgggugugguggcucaca

SEQ ID NO: 1370976 - RNA, 21 nt, Human
auaagguauacauauuaaaac

SEQ ID NO: 1370977 - RNA, 18 nt, Human
auagaguaugcuuucaaa

SEQ ID NO: 1370978 - RNA, 18 nt, Human
aucaaguuuuuacuucau

SEQ ID NO: 1370979 - RNA, 24 nt, Human
aucacucuuuaggggaaaaaacac

SEQ ID NO: 1370980 - RNA, 22 nt, Human
caaaguccacccucuucuucuc

SEQ ID NO: 1370981 - RNA, 22 nt, Human
cauccaagacucuccuccucaa

SEQ ID NO: 1370982 - RNA, 24 nt, Human
ccuaaaccuaaagacaaaagaaag

SEQ ID NO: 1370983 - RNA, 23 nt, Human
ccucaauuugaaaccauguuuau

SEQ ID NO: 1370984 - RNA, 21 nt, Human
ccuccuaaaccuaaagacaaa

SEQ ID NO: 1370985 - RNA, 24 nt, Human
cugaggaugccugugccucugccc

SEQ ID NO: 1370986 - RNA, 21 nt, Human
cuucuucucucuuauuacucc

SEQ ID NO: 1370987 - RNA, 20 nt, Human
gaggaugccugugccucugc

SEQ ID NO: 1370988 - RNA, 18 nt, Human
gguggcucacaccuguaa

SEQ ID NO: 1370989 - RNA, 23 nt, Human
ggugugguggcucacaccuguaa

SEQ ID NO: 1370990 - RNA, 18 nt, Human
guagacuggauaugugaa

SEQ ID NO: 1370991 - RNA, 24 nt, Human
gugaaagcaaaugcacacgaccuu

SEQ ID NO: 1370992 - RNA, 18 nt, Human
gugugguggcucacaccu

SEQ ID NO: 1370993 - RNA, 22 nt, Human
uaaaacauacauccaagacucu

SEQ ID NO: 1370994 - RNA, 21 nt, Human
uagcauuuggcuagaggcaga

SEQ ID NO: 1370995 - RNA, 20 nt, Human
uaggauaaacauccaguauc

SEQ ID NO: 1370996 - RNA, 21 nt, Human
uagguccuagcuuuacuuucc

SEQ ID NO: 1370997 - RNA, 23 nt, Human
uauacauauuaaaacauacaucc

SEQ ID NO: 1370998 - RNA, 25 nt, Human
uaucuuaguaucuccuccuaaaccu

SEQ ID NO: 1370999 - RNA, 22 nt, Human
ucauuguauauaagccaaaaaa

SEQ ID NO: 1371000 - RNA, 18 nt, Human
uccaagacucuccuccuc

SEQ ID NO: 1371001 - RNA, 22 nt, Human
uccaagacucuccuccucaauu

SEQ ID NO: 1371002 - RNA, 23 nt, Human
uccaagacucuccuccucaauuu

SEQ ID NO: 1371003 - RNA, 23 nt, Human
uccuaaaccuaaagacaaaagaa

SEQ ID NO: 1371004 - RNA, 23 nt, Human
ucucuuauuacuccaaccaaacu

SEQ ID NO: 1371005 - RNA, 23 nt, Human
ucuucucauccucucacucauca

SEQ ID NO: 1371006 - RNA, 18 nt, Human
ugaaaagccaaaguccac

SEQ ID NO: 1371007 - RNA, 21 nt, Human
ugauuaccaacgaaaaacuaa

SEQ ID NO: 1371008 - RNA, 27 nt, Human
ugcccauaacuauauauagaguaugcu

SEQ ID NO: 1371009 - RNA, 19 nt, Human
uguuacacuguuuuguugg

SEQ ID NO: 1371010 - RNA, 20 nt, Human
uuacuggaccagguagacug

SEQ ID NO: 1371011 - RNA, 23 nt, Human
uuuaggggaaaaaacacugaaaa

SEQ ID NO: 1371012 - RNA, 23 nt, Human
uuucauagccacauauuaugugu

SEQ ID NO: 1371013 - RNA, 19 nt, Human
aacauggagaaaccccguc

SEQ ID NO: 1371014 - RNA, 20 nt, Human
aacauggagaaaccccgucu

SEQ ID NO: 1371015 - RNA, 21 nt, Human
accccgucuguacuaaaaaca

SEQ ID NO: 1371016 - RNA, 24 nt, Human
acccuuugcuugcucccauuguuu

SEQ ID NO: 1371017 - RNA, 24 nt, Human
accugaggucaggaguucgagacc

SEQ ID NO: 1371018 - RNA, 19 nt, Human
accuggcacaugaaacaca

SEQ ID NO: 1371019 - RNA, 24 nt, Human
acuggccgggugcaguggcucacg

SEQ ID NO: 1371020 - RNA, 23 nt, Human
agaucaccugaggucaggaguuc

SEQ ID NO: 1371021 - RNA, 24 nt, Human
aggcggagcuugcagugagcugag

SEQ ID NO: 1371022 - RNA, 21 nt, Human
aggugugguggccagcgccug

SEQ ID NO: 1371023 - RNA, 24 nt, Human
aggugugguggccagcgccuguag

SEQ ID NO: 1371024 - RNA, 24 nt, Human
aguggcucacgcccguaaucccag

SEQ ID NO: 1371025 - RNA, 21 nt, Human
aucaccugaggucaggaguuc

SEQ ID NO: 1371026 - RNA, 21 nt, Human
caccagggccuccgggccccc

SEQ ID NO: 1371027 - RNA, 21 nt, Human
caccagggccuccgggccccc

SEQ ID NO: 1371028 - RNA, 23 nt, Human
caccugaggucaggaguucgaga

SEQ ID NO: 1371029 - RNA, 22 nt, Human
cacgcccguaaucccagaacuc

SEQ ID NO: 1371030 - RNA, 24 nt, Human
cacgcccguaaucccagaacucug

SEQ ID NO: 1371031 - RNA, 24 nt, Human
cagaacucugggaggccggggcgg

SEQ ID NO: 1371032 - RNA, 24 nt, Human
cagaucaccugaggucaggaguuc

SEQ ID NO: 1371033 - RNA, 27 nt, Human
cagaucaccugaggucaggaguucgag

SEQ ID NO: 1371034 - RNA, 22 nt, Human
cagauggauuccuccuggccuc

SEQ ID NO: 1371035 - RNA, 24 nt, Human
cagccugaccaacauggagaaacc

SEQ ID NO: 1371036 - RNA, 19 nt, Human
caggaacaaagucuuauuc

SEQ ID NO: 1371037 - RNA, 18 nt, Human
ccaccagggccuccgggc

SEQ ID NO: 1371038 - RNA, 22 nt, Human
cccagaacucugggaggccggg

SEQ ID NO: 1371039 - RNA, 19 nt, Human
cccagggccaccagggccu

SEQ ID NO: 1371040 - RNA, 22 nt, Human
ccuccgggccccccaacugcac

SEQ ID NO: 1371041 - RNA, 23 nt, Human
ccugaccaacauggagaaacccc

SEQ ID NO: 1371042 - RNA, 24 nt, Human
ccugaccaacauggagaaaccccg

SEQ ID NO: 1371043 - RNA, 22 nt, Human
ccugaggucaggaguucgagac

SEQ ID NO: 1371044 - RNA, 21 nt, Human
ccuguagucccagcuacuugg

SEQ ID NO: 1371045 - RNA, 18 nt, Human
cgcccguaaucccagaac

SEQ ID NO: 1371046 - RNA, 23 nt, Human
cgcccguaaucccagaacucugg

SEQ ID NO: 1371047 - RNA, 24 nt, Human
cgcccguaaucccagaacucuggg

SEQ ID NO: 1371048 - RNA, 25 nt, Human
cgcccguaaucccagaacucuggga

SEQ ID NO: 1371049 - RNA, 23 nt, Human
cgccuguagucccagcuacuugg

SEQ ID NO: 1371050 - RNA, 24 nt, Human
cgccuguagucccagcuacuuggg

SEQ ID NO: 1371051 - RNA, 24 nt, Human
cgggcagaucaccugaggucagga

SEQ ID NO: 1371052 - RNA, 20 nt, Human
cggggcgggcagaucaccug

SEQ ID NO: 1371053 - RNA, 26 nt, Human
cggggcgggcagaucaccugagguca

SEQ ID NO: 1371054 - RNA, 20 nt, Human
cuacccuuugcuugcuccca

SEQ ID NO: 1371055 - RNA, 19 nt, Human
cucacgcccguaaucccag

SEQ ID NO: 1371056 - RNA, 22 nt, Human
cucacgcccguaaucccagaac

SEQ ID NO: 1371057 - RNA, 21 nt, Human
cuccgggccccccaacugcac

SEQ ID NO: 1371058 - RNA, 22 nt, Human
cuugcagugagcugagauugug

SEQ ID NO: 1371059 - RNA, 19 nt, Human
gaacaaagucuuauucaug

SEQ ID NO: 1371060 - RNA, 23 nt, Human
gagaccagccugaccaacaugga

SEQ ID NO: 1371061 - RNA, 21 nt, Human
gagcuugcagugagcugagau

SEQ ID NO: 1371062 - RNA, 23 nt, Human
gagcuugcagugagcugagauug

SEQ ID NO: 1371063 - RNA, 22 nt, Human
gagugcggcuucuguucagggc

SEQ ID NO: 1371064 - RNA, 23 nt, Human
gagugcggcuucuguucagggcu

SEQ ID NO: 1371065 - RNA, 24 nt, Human
gaucaccugaggucaggaguucga

SEQ ID NO: 1371066 - RNA, 22 nt, Human
gcugagccaggagaauggcgug

SEQ ID NO: 1371067 - RNA, 24 nt, Human
ggagcuugcagugagcugagauug

SEQ ID NO: 1371068 - RNA, 21 nt, Human
ggauaccuggcacaugaaaca

SEQ ID NO: 1371069 - RNA, 25 nt, Human
ggcagaucaccugaggucaggaguu

SEQ ID NO: 1371070 - RNA, 21 nt, Human
ggcgggcagaucaccugaggu

SEQ ID NO: 1371071 - RNA, 25 nt, Human
ggcgggcagaucaccugaggucagg

SEQ ID NO: 1371072 - RNA, 24 nt, Human
gggugcaguggcucacgcccguaa

SEQ ID NO: 1371073 - RNA, 24 nt, Human
gguggccagcgccuguagucccag

SEQ ID NO: 1371074 - RNA, 18 nt, Human
guuuucucagagaagagg

SEQ ID NO: 1371075 - RNA, 24 nt, Human
uaaccaggugugguggccagcgcc

SEQ ID NO: 1371076 - RNA, 23 nt, Human
uaguaaguccucuguaaauguuc

SEQ ID NO: 1371077 - RNA, 19 nt, Human
ucaauaccaugagaacagg

SEQ ID NO: 1371078 - RNA, 20 nt, Human
ucaccugaggucaggaguuc

SEQ ID NO: 1371079 - RNA, 19 nt, Human
uccaggccugacggaacuu

SEQ ID NO: 1371080 - RNA, 23 nt, Human
ugagccaggagaauggcgugaac

SEQ ID NO: 1371081 - RNA, 24 nt, Human
ugagccaggagaauggcgugaacc

SEQ ID NO: 1371082 - RNA, 21 nt, Human
uggcucacgcccguaauccca

SEQ ID NO: 1371083 - RNA, 22 nt, Human
uggcucacgcccguaaucccag

SEQ ID NO: 1371084 - RNA, 20 nt, Human
ugggaggccggggcgggcag

SEQ ID NO: 1371085 - RNA, 24 nt, Human
ugggaggccggggcgggcagauca

SEQ ID NO: 1371086 - RNA, 24 nt, Human
ugguggccagcgccuguaguccca

SEQ ID NO: 1371087 - RNA, 18 nt, Human
ugugguggccagcgccug

SEQ ID NO: 1371088 - RNA, 22 nt, Human
ugugguggccagcgccuguagu

SEQ ID NO: 1371089 - RNA, 25 nt, Human
uuaaccaggugugguggccagcgcc

SEQ ID NO: 1371090 - RNA, 19 nt, Human
uugcagugagcugagauug

SEQ ID NO: 1371091 - RNA, 22 nt, Human
uugcagugagcugagauugugu

SEQ ID NO: 1371092 - RNA, 18 nt, Human
aaaaagacaaacaaccaa

SEQ ID NO: 1371093 - RNA, 18 nt, Human
aaaacaguuuggcaguuu

SEQ ID NO: 1371094 - RNA, 19 nt, Human
aaagugcugggauuacagg

SEQ ID NO: 1371095 - RNA, 24 nt, Human
aaagugcugggauuacaggcaaga

SEQ ID NO: 1371096 - RNA, 22 nt, Human
aacagccaaaggaugggaacag

SEQ ID NO: 1371097 - RNA, 22 nt, Human
aacaugugacugcagcagccuu

SEQ ID NO: 1371098 - RNA, 18 nt, Human
aagugcugggauuacagg

SEQ ID NO: 1371099 - RNA, 19 nt, Human
aagugcugggauuacaggc

SEQ ID NO: 1371100 - RNA, 26 nt, Human
aagugcugggauuacaggcaagagcc

SEQ ID NO: 1371101 - RNA, 18 nt, Human
acaacucaacaaaaaaag

SEQ ID NO: 1371102 - RNA, 19 nt, Human
acaucauccccaagccaug

SEQ ID NO: 1371103 - RNA, 25 nt, Human
acccuguugcccaggauggucucaa

SEQ ID NO: 1371104 - RNA, 19 nt, Human
accuuccccagcaccaccc

SEQ ID NO: 1371105 - RNA, 25 nt, Human
accuuccccagcaccaccccacuag

SEQ ID NO: 1371106 - RNA, 22 nt, Human
acuaaaguccacuucauacauc

SEQ ID NO: 1371107 - RNA, 19 nt, Human
acuacaggaguaugccacc

SEQ ID NO: 1371108 - RNA, 20 nt, Human
acucagccuaucaaagugcu

SEQ ID NO: 1371109 - RNA, 18 nt, Human
agacaggcuacagugugg

SEQ ID NO: 1371110 - RNA, 19 nt, Human
agcccaucagagacagucc

SEQ ID NO: 1371111 - RNA, 23 nt, Human
agcugggacuacaggaguaugcc

SEQ ID NO: 1371112 - RNA, 22 nt, Human
aggucucacccuguugcccagg

SEQ ID NO: 1371113 - RNA, 18 nt, Human
aguagcugggacuacagg

SEQ ID NO: 1371114 - RNA, 20 nt, Human
aguagcugggacuacaggag

SEQ ID NO: 1371115 - RNA, 18 nt, Human
agucaaccuuccccagca

SEQ ID NO: 1371116 - RNA, 22 nt, Human
agugcaguggugcaaucaacag

SEQ ID NO: 1371117 - RNA, 24 nt, Human
agugcaguggugcaaucaacagcu

SEQ ID NO: 1371118 - RNA, 25 nt, Human
agugcaguggugcaaucaacagcuc

SEQ ID NO: 1371119 - RNA, 18 nt, Human
aucaacagcucaccacag

SEQ ID NO: 1371120 - RNA, 19 nt, Human
caaaaaaagacaaacaacc

SEQ ID NO: 1371121 - RNA, 22 nt, Human
caaacaaaaacuuguaaaugca

SEQ ID NO: 1371122 - RNA, 25 nt, Human
caaacuccugggcucaagucauccu

SEQ ID NO: 1371123 - RNA, 25 nt, Human
caaagccuuuuagucaaggccaccc

SEQ ID NO: 1371124 - RNA, 18 nt, Human
caaagugcugggauuaca

SEQ ID NO: 1371125 - RNA, 21 nt, Human
caaagugcugggauuacaggc

SEQ ID NO: 1371126 - RNA, 22 nt, Human
caaagugcugggauuacaggca

SEQ ID NO: 1371127 - RNA, 27 nt, Human
caaagugcugggauuacaggcaagagc

SEQ ID NO: 1371128 - RNA, 19 nt, Human
caacaaaaaaagacaaaca

SEQ ID NO: 1371129 - RNA, 22 nt, Human
caacaaaaaaagacaaacaacc

SEQ ID NO: 1371130 - RNA, 21 nt, Human
caaccuccgcuguacacagcu

SEQ ID NO: 1371131 - RNA, 18 nt, Human
caccccacuagcagccca

SEQ ID NO: 1371132 - RNA, 19 nt, Human
cacccuguugcccaggaug

SEQ ID NO: 1371133 - RNA, 22 nt, Human
cacccuguugcccaggaugguc

SEQ ID NO: 1371134 - RNA, 24 nt, Human
cacccuguugcccaggauggucuc

SEQ ID NO: 1371135 - RNA, 20 nt, Human
caccuuugacuuagaagaau

SEQ ID NO: 1371136 - RNA, 18 nt, Human
cacgcaggcuagagugcg

SEQ ID NO: 1371137 - RNA, 22 nt, Human
cacuauucacaacagccaaagg

SEQ ID NO: 1371138 - RNA, 23 nt, Human
cacugcacaacaagggaacuaaa

SEQ ID NO: 1371139 - RNA, 23 nt, Human
cacuucauacaucauccccaagc

SEQ ID NO: 1371140 - RNA, 18 nt, Human
cagcaguuccacuccugg

SEQ ID NO: 1371141 - RNA, 26 nt, Human
cagcccaucagagacaguccggcaac

SEQ ID NO: 1371142 - RNA, 24 nt, Human
cagcuucgaccuuccaagcucaag

SEQ ID NO: 1371143 - RNA, 18 nt, Human
caugugacugcagcagcc

SEQ ID NO: 1371144 - RNA, 24 nt, Human
ccagccucccacugacaaaaaggg

SEQ ID NO: 1371145 - RNA, 18 nt, Human
cccaaaggacugaaaaua

SEQ ID NO: 1371146 - RNA, 22 nt, Human
cccacugacaaaaagggacaaa

SEQ ID NO: 1371147 - RNA, 22 nt, Human
cccagcccagccucccacugac

SEQ ID NO: 1371148 - RNA, 22 nt, Human
ccccaagccaugugcccugggu

SEQ ID NO: 1371149 - RNA, 22 nt, Human
ccccagcaccaccccacuagca

SEQ ID NO: 1371150 - RNA, 28 nt, Human
ccucccacugacaaaaagggacaaaagu

SEQ ID NO: 1371151 - RNA, 19 nt, Human
ccuccucucccagcccagc

SEQ ID NO: 1371152 - RNA, 18 nt, Human
ccuggccuguccuaaggc

SEQ ID NO: 1371153 - RNA, 20 nt, Human
ccugggcucaagucauccuc

SEQ ID NO: 1371154 - RNA, 23 nt, Human
ccugggcucaagucauccuccug

SEQ ID NO: 1371155 - RNA, 31 nt, Human
cuaaggccauaaaaaggagucaaguacugag

SEQ ID NO: 1371156 - RNA, 19 nt, Human
cucaacaaaaaaagacaaa

SEQ ID NO: 1371157 - RNA, 19 nt, Human
cucaagcaauccucaugcc

SEQ ID NO: 1371158 - RNA, 19 nt, Human
cucaagucauccuccugac

SEQ ID NO: 1371159 - RNA, 23 nt, Human
cuccugggcucaagucauccucc

SEQ ID NO: 1371160 - RNA, 25 nt, Human
cuccugggcucaagucauccuccug

SEQ ID NO: 1371161 - RNA, 18 nt, Human
cuuccccagcaccacccu

SEQ ID NO: 1371162 - RNA, 24 nt, Human
gaaaagcaccugguugaaccaaag

SEQ ID NO: 1371163 - RNA, 26 nt, Human
gaaccaaagccuuuuagucaaggcca

SEQ ID NO: 1371164 - RNA, 23 nt, Human
gaccuuccaagcucaagcaaucc

SEQ ID NO: 1371165 - RNA, 26 nt, Human
gaguagcugggacuacaggaguaugc

SEQ ID NO: 1371166 - RNA, 18 nt, Human
gauuacaggcaagagcca

SEQ ID NO: 1371167 - RNA, 19 nt, Human
gauuacaggcaagagccac

SEQ ID NO: 1371168 - RNA, 23 nt, Human
gauuacaggcaagagccacugca

SEQ ID NO: 1371169 - RNA, 18 nt, Human
ggaagccaggaguuaagc

SEQ ID NO: 1371170 - RNA, 19 nt, Human
ggauaaacaaaauguggua

SEQ ID NO: 1371171 - RNA, 22 nt, Human
ggauuacaggcaagagccacug

SEQ ID NO: 1371172 - RNA, 25 nt, Human
gggaacagcacagggguccaucaac

SEQ ID NO: 1371173 - RNA, 25 nt, Human
gugacugcagcagccuuucuuuuag

SEQ ID NO: 1371174 - RNA, 21 nt, Human
uaaagagcacuuacaacucaa

SEQ ID NO: 1371175 - RNA, 23 nt, Human
uaaagcaccuuugacuuagaaga

SEQ ID NO: 1371176 - RNA, 18 nt, Human
uaacaugugacugcagca

SEQ ID NO: 1371177 - RNA, 21 nt, Human
uaacucagcaguuccacuccu

SEQ ID NO: 1371178 - RNA, 24 nt, Human
uaaggucucacccuguugcccagg

SEQ ID NO: 1371179 - RNA, 24 nt, Human
uacaggcaagagccacugcaccca

SEQ ID NO: 1371180 - RNA, 24 nt, Human
uacagugugguugugucacgcagg

SEQ ID NO: 1371181 - RNA, 18 nt, Human
uacccuauaacaugugac

SEQ ID NO: 1371182 - RNA, 19 nt, Human
uagagugcaguggugcaau

SEQ ID NO: 1371183 - RNA, 21 nt, Human
uagagugcaguggugcaauca

SEQ ID NO: 1371184 - RNA, 22 nt, Human
ucaaagugcugggauuacaggc

SEQ ID NO: 1371185 - RNA, 23 nt, Human
ucaaagugcugggauuacaggca

SEQ ID NO: 1371186 - RNA, 24 nt, Human
ucaacaaaaaaagacaaacaacca

SEQ ID NO: 1371187 - RNA, 24 nt, Human
ucaaguacugaugcaugcuacacc

SEQ ID NO: 1371188 - RNA, 25 nt, Human
ucaagucauccuccugacucagccu

SEQ ID NO: 1371189 - RNA, 21 nt, Human
uccaaaaaguuaaauguugaa

SEQ ID NO: 1371190 - RNA, 22 nt, Human
uccacuucauacaucaucccca

SEQ ID NO: 1371191 - RNA, 23 nt, Human
uccaucaacagauaaauggauaa

SEQ ID NO: 1371192 - RNA, 18 nt, Human
ucccagcccagccuccca

SEQ ID NO: 1371193 - RNA, 22 nt, Human
uccccaaaggacugaaaauagg

SEQ ID NO: 1371194 - RNA, 19 nt, Human
uccccaagccaugugcccu

SEQ ID NO: 1371195 - RNA, 27 nt, Human
uccccagcaccaccccacuagcagccc

SEQ ID NO: 1371196 - RNA, 21 nt, Human
uccucacucuccauuucuaca

SEQ ID NO: 1371197 - RNA, 21 nt, Human
uccugggcucaagucauccuc

SEQ ID NO: 1371198 - RNA, 24 nt, Human
uccugggcucaagucauccuccug

SEQ ID NO: 1371199 - RNA, 20 nt, Human
ucuacagugugcuguuccuu

SEQ ID NO: 1371200 - RNA, 23 nt, Human
ucucaaacuccugggcucaaguc

SEQ ID NO: 1371201 - RNA, 19 nt, Human
ucucacccuguugcccagg

SEQ ID NO: 1371202 - RNA, 20 nt, Human
ucucacccuguugcccagga

SEQ ID NO: 1371203 - RNA, 26 nt, Human
ucucacccuguugcccaggauggucu

SEQ ID NO: 1371204 - RNA, 27 nt, Human
ucucacccuguugcccaggauggucuc

SEQ ID NO: 1371205 - RNA, 19 nt, Human
ucucccagcccagccuccc

SEQ ID NO: 1371206 - RNA, 23 nt, Human
ucuggaguagcugggacuacagg

SEQ ID NO: 1371207 - RNA, 22 nt, Human
ucuuucuuucuuucuuugagac

SEQ ID NO: 1371208 - RNA, 20 nt, Human
ucuuucuuucuuugagacag

SEQ ID NO: 1371209 - RNA, 19 nt, Human
ucuuucuuucuuuucuuuc

SEQ ID NO: 1371210 - RNA, 24 nt, Human
ucuuugaagaagacacacaagugg

SEQ ID NO: 1371211 - RNA, 23 nt, Human
ugacaaaaagggacaaaaguccc

SEQ ID NO: 1371212 - RNA, 25 nt, Human
ugacaggaacguaaaauggugcaga

SEQ ID NO: 1371213 - RNA, 22 nt, Human
ugagcacaugaaaauauguaua

SEQ ID NO: 1371214 - RNA, 19 nt, Human
ugagcucugggccucuccc

SEQ ID NO: 1371215 - RNA, 19 nt, Human
ugcaaucaacagcucacca

SEQ ID NO: 1371216 - RNA, 28 nt, Human
ugcccaggauggucucaaacuccugggc

SEQ ID NO: 1371217 - RNA, 19 nt, Human
ugcccuggccuguccuaag

SEQ ID NO: 1371218 - RNA, 21 nt, Human
ugccucaaucucuggaguagc

SEQ ID NO: 1371219 - RNA, 24 nt, Human
ugccucaaucucuggaguagcugg

SEQ ID NO: 1371220 - RNA, 27 nt, Human
ugccuccucucccagcccagccuccca

SEQ ID NO: 1371221 - RNA, 22 nt, Human
ugcugggauuacaggcaagagc

SEQ ID NO: 1371222 - RNA, 18 nt, Human
uggaaaacaguuuggcag

SEQ ID NO: 1371223 - RNA, 22 nt, Human
ugggacuacaggaguaugccac

SEQ ID NO: 1371224 - RNA, 23 nt, Human
ugggacuacaggaguaugccacc

SEQ ID NO: 1371225 - RNA, 24 nt, Human
ugggacuacaggaguaugccaccg

SEQ ID NO: 1371226 - RNA, 22 nt, Human
ugggauuacaggcaagagccac

SEQ ID NO: 1371227 - RNA, 22 nt, Human
ugggauuacaggcaagagccac

SEQ ID NO: 1371228 - RNA, 24 nt, Human
ugggauuacaggcaagagccacug

SEQ ID NO: 1371229 - RNA, 24 nt, Human
ugggauuacaggcaagagccacug

SEQ ID NO: 1371230 - RNA, 22 nt, Human
ugucacgcaggcuagagugcag

SEQ ID NO: 1371231 - RNA, 22 nt, Human
uguccuaaggccauaaaaagga

SEQ ID NO: 1371232 - RNA, 22 nt, Human
ugugacugcagcagccuuucuu

SEQ ID NO: 1371233 - RNA, 19 nt, Human
ugugguaaaaugugggaua

SEQ ID NO: 1371234 - RNA, 24 nt, Human
ugugucacgcaggcuagagugcag

SEQ ID NO: 1371235 - RNA, 21 nt, Human
uguuccuugccuccucuccca

SEQ ID NO: 1371236 - RNA, 20 nt, Human
uuagucaaggccacccaugu

SEQ ID NO: 1371237 - RNA, 26 nt, Human
uuauagagauaaggucucacccuguu

SEQ ID NO: 1371238 - RNA, 20 nt, Human
uugagugacaggacuugggc

SEQ ID NO: 1371239 - RNA, 18 nt, Human
uuggcaguuuuccaaaaa

SEQ ID NO: 1371240 - RNA, 22 nt, Human
uuuccuuucccuaauucucaca

SEQ ID NO: 1371241 - RNA, 22 nt, Human
acacaugcaaagucucagaauc

SEQ ID NO: 1371242 - RNA, 23 nt, Human
acaucuccgcuuaauaucauaca

SEQ ID NO: 1371243 - RNA, 18 nt, Human
agaagacagaucgugaaa

SEQ ID NO: 1371244 - RNA, 20 nt, Human
agcagaagacagaucgugaa

SEQ ID NO: 1371245 - RNA, 22 nt, Human
aggaaggccauuucaggagaag

SEQ ID NO: 1371246 - RNA, 21 nt, Human
aggagaagggggaucaggagc

SEQ ID NO: 1371247 - RNA, 19 nt, Human
aguggcauuugcacuucau

SEQ ID NO: 1371248 - RNA, 21 nt, Human
auaaaaauacacacaccugga

SEQ ID NO: 1371249 - RNA, 24 nt, Human
augaacaaaugccacaucuccgcu

SEQ ID NO: 1371250 - RNA, 24 nt, Human
cagaacaacagcuugaugacagag

SEQ ID NO: 1371251 - RNA, 20 nt, Human
cagacuguggaggaacugga

SEQ ID NO: 1371252 - RNA, 19 nt, Human
cagcaaugaagaggaaaca

SEQ ID NO: 1371253 - RNA, 22 nt, Human
caggcaguggcauuugcacuuc

SEQ ID NO: 1371254 - RNA, 25 nt, Human
ccagcaaugaagaggaaacauggcc

SEQ ID NO: 1371255 - RNA, 18 nt, Human
ccugaaggaugauaagga

SEQ ID NO: 1371256 - RNA, 25 nt, Human
cuccagcaaugaagaggaaacaugg

SEQ ID NO: 1371257 - RNA, 18 nt, Human
gaccuggauuggcaggaa

SEQ ID NO: 1371258 - RNA, 21 nt, Human
ggagcagaguccagcagaaga

SEQ ID NO: 1371259 - RNA, 20 nt, Human
ggccauucagacuguggagg

SEQ ID NO: 1371260 - RNA, 21 nt, Human
ggccauucagacuguggagga

SEQ ID NO: 1371261 - RNA, 19 nt, Human
gggugaugcaaggagaagg

SEQ ID NO: 1371262 - RNA, 24 nt, Human
uaaaaauacacacaccuggaugac

SEQ ID NO: 1371263 - RNA, 21 nt, Human
uacauaaaaauacacacaccu

SEQ ID NO: 1371264 - RNA, 23 nt, Human
uacauaaaaauacacacaccugg

SEQ ID NO: 1371265 - RNA, 24 nt, Human
uaucuauugaugaacuucugcaca

SEQ ID NO: 1371266 - RNA, 27 nt, Human
ucaguccaggcaguggcaacgagaccc

SEQ ID NO: 1371267 - RNA, 22 nt, Human
ucugcacauacggaaaugcugg

SEQ ID NO: 1371268 - RNA, 19 nt, Human
uggcacauagucauuauau

SEQ ID NO: 1371269 - RNA, 22 nt, Human
uggcacauagucauuauaugua

SEQ ID NO: 1371270 - RNA, 20 nt, Human
uggcaggaauggggaggaaa

SEQ ID NO: 1371271 - RNA, 20 nt, Human
uggcaggaauggggaggaag

SEQ ID NO: 1371272 - RNA, 24 nt, Human
uggcaggaauggggaggaaggcca

SEQ ID NO: 1371273 - RNA, 19 nt, Human
uggcaggaauggggaggag

SEQ ID NO: 1371274 - RNA, 18 nt, Human
uggguguagggagacuuc

SEQ ID NO: 1371275 - RNA, 18 nt, Human
uugaugacagagcucuuu

SEQ ID NO: 1371276 - RNA, 19 nt, Human
aaagugcugggauuacaga

SEQ ID NO: 1371277 - RNA, 24 nt, Human
aaagugcugggauuacagauguga

SEQ ID NO: 1371278 - RNA, 26 nt, Human
aacuaguuuuauuuuuuguauuuuua

SEQ ID NO: 1371279 - RNA, 20 nt, Human
aaggugcugggauuauaggc

SEQ ID NO: 1371280 - RNA, 24 nt, Human
aaggugcugggauuauaggcgugu

SEQ ID NO: 1371281 - RNA, 24 nt, Human
aagugauccgcccgccucggccuc

SEQ ID NO: 1371282 - RNA, 18 nt, Human
aagugcugggauuacaga

SEQ ID NO: 1371283 - RNA, 21 nt, Human
acaaaacauacaaucucacaa

SEQ ID NO: 1371284 - RNA, 21 nt, Human
acacccuucuaacuaccaccc

SEQ ID NO: 1371285 - RNA, 18 nt, Human
accauguuggccaggcug

SEQ ID NO: 1371286 - RNA, 21 nt, Human
acccaggugaagaaacagaac

SEQ ID NO: 1371287 - RNA, 18 nt, Human
acgggguuucaccauguu

SEQ ID NO: 1371288 - RNA, 23 nt, Human
acgggguuucaccauguuggcca

SEQ ID NO: 1371289 - RNA, 24 nt, Human
acgggguuucaccauguuggccag

SEQ ID NO: 1371290 - RNA, 23 nt, Human
agaaccccuccaagugccucauu

SEQ ID NO: 1371291 - RNA, 20 nt, Human
agaaccccuccaagugccuu

SEQ ID NO: 1371292 - RNA, 22 nt, Human
agagacagggucuuguucuguc

SEQ ID NO: 1371293 - RNA, 20 nt, Human
agaggcucauguuuacucac

SEQ ID NO: 1371294 - RNA, 20 nt, Human
agguggagugcagugguguu

SEQ ID NO: 1371295 - RNA, 21 nt, Human
agugcagugguguucauagcu

SEQ ID NO: 1371296 - RNA, 22 nt, Human
agugcagugguguucauagcuc

SEQ ID NO: 1371297 - RNA, 22 nt, Human
auuuuuuguauuuuuaguagag

SEQ ID NO: 1371298 - RNA, 23 nt, Human
caaagguacaauuugaaauacgg

SEQ ID NO: 1371299 - RNA, 24 nt, Human
caaagugcugggauuacagaugug

SEQ ID NO: 1371300 - RNA, 24 nt, Human
caaggugcugggauuauaggcgug

SEQ ID NO: 1371301 - RNA, 19 nt, Human
cacaaugacaacuccuucc

SEQ ID NO: 1371302 - RNA, 21 nt, Human
caccauguuggccaggcuggu

SEQ ID NO: 1371303 - RNA, 24 nt, Human
caccauguuggccaggcuggucuc

SEQ ID NO: 1371304 - RNA, 27 nt, Human
caccauguuggccaggcuggucucaaa

SEQ ID NO: 1371305 - RNA, 25 nt, Human
caccauuuaaauaaauuuguugucu

SEQ ID NO: 1371306 - RNA, 18 nt, Human
cacccaggugaagaaaca

SEQ ID NO: 1371307 - RNA, 23 nt, Human
caccccagaaccccuccaagugc

SEQ ID NO: 1371308 - RNA, 26 nt, Human
caccccagaaccccuccaagugccuc

SEQ ID NO: 1371309 - RNA, 22 nt, Human
caccguccaccgugcccagccg

SEQ ID NO: 1371310 - RNA, 20 nt, Human
cacuacaguuuagugcaccu

SEQ ID NO: 1371311 - RNA, 23 nt, Human
cacugcaaucuugagcuccuggg

SEQ ID NO: 1371312 - RNA, 23 nt, Human
cagaaccccuccaagugccucau

SEQ ID NO: 1371313 - RNA, 20 nt, Human
caggcaccccagaaccccuc

SEQ ID NO: 1371314 - RNA, 24 nt, Human
cauguuggccaggcuggucucaaa

SEQ ID NO: 1371315 - RNA, 21 nt, Human
ccaaagugcugggauuacaga

SEQ ID NO: 1371316 - RNA, 22 nt, Human
ccaaagugcugggauuacagau

SEQ ID NO: 1371317 - RNA, 24 nt, Human
ccaaagugcugggauuacagaugu

SEQ ID NO: 1371318 - RNA, 22 nt, Human
ccaaggugcugggauuauaggc

SEQ ID NO: 1371319 - RNA, 24 nt, Human
ccaaggugcugggauuauaggcgu

SEQ ID NO: 1371320 - RNA, 27 nt, Human
ccagaaccccuccaagugccucaucac

SEQ ID NO: 1371321 - RNA, 18 nt, Human
ccugaccucaagugaucc

SEQ ID NO: 1371322 - RNA, 19 nt, Human
ccugaccucaagugauccg

SEQ ID NO: 1371323 - RNA, 22 nt, Human
ccugaccucaagugauccgccc

SEQ ID NO: 1371324 - RNA, 21 nt, Human
ccugggcucaggugaucuucc

SEQ ID NO: 1371325 - RNA, 18 nt, Human
cgcacgcgccguacuccg

SEQ ID NO: 1371326 - RNA, 19 nt, Human
cggaggauucgcaaucgcg

SEQ ID NO: 1371327 - RNA, 24 nt, Human
cgggguuucaccauguuggccagg

SEQ ID NO: 1371328 - RNA, 24 nt, Human
cucacugcaaucuugagcuccugg

SEQ ID NO: 1371329 - RNA, 26 nt, Human
cuccugaccucaagugauccgcccgc

SEQ ID NO: 1371330 - RNA, 23 nt, Human
cuccugggcucaggugaucuucc

SEQ ID NO: 1371331 - RNA, 20 nt, Human
cugacuguguuucuuuaugg

SEQ ID NO: 1371332 - RNA, 23 nt, Human
cugucuuagccucccaaggugcu

SEQ ID NO: 1371333 - RNA, 24 nt, Human
cugucuuagccucccaaggugcug

SEQ ID NO: 1371334 - RNA, 25 nt, Human
cuuccugucuuagccucccaaggug

SEQ ID NO: 1371335 - RNA, 24 nt, Human
gaacucgccaccauuauucccugg

SEQ ID NO: 1371336 - RNA, 22 nt, Human
gacacccuucuaacuaccaccc

SEQ ID NO: 1371337 - RNA, 24 nt, Human
gaccucaagugauccgcccgccuc

SEQ ID NO: 1371338 - RNA, 24 nt, Human
gagacgggguuucaccauguuggc

SEQ ID NO: 1371339 - RNA, 18 nt, Human
gauuacagaugugaggca

SEQ ID NO: 1371340 - RNA, 23 nt, Human
gccucggccucccaaagugcugg

SEQ ID NO: 1371341 - RNA, 23 nt, Human
gcuggucucaaacuccugaccuc

SEQ ID NO: 1371342 - RNA, 24 nt, Human
ggcuggucucaaacuccugaccuc

SEQ ID NO: 1371343 - RNA, 23 nt, Human
gggguuucaccauguuggccagg

SEQ ID NO: 1371344 - RNA, 23 nt, Human
guagagacgggguuucaccaugu

SEQ ID NO: 1371345 - RNA, 24 nt, Human
gugauccgcccgccucggccuccc

SEQ ID NO: 1371346 - RNA, 24 nt, Human
gugaucuuccugucuuagccuccc

SEQ ID NO: 1371347 - RNA, 20 nt, Human
gugcugggauuauaggcgug

SEQ ID NO: 1371348 - RNA, 23 nt, Human
gugguguucauagcucacugcaa

SEQ ID NO: 1371349 - RNA, 19 nt, Human
uaaugcuggugauggaacu

SEQ ID NO: 1371350 - RNA, 22 nt, Human
uagagacagggucuuguucugu

SEQ ID NO: 1371351 - RNA, 22 nt, Human
uagagacgggguuucaccaugu

SEQ ID NO: 1371352 - RNA, 24 nt, Human
uaguagagacgggguuucaccaug

SEQ ID NO: 1371353 - RNA, 26 nt, Human
uaguagagacgggguuucaccauguu

SEQ ID NO: 1371354 - RNA, 19 nt, Human
ucacuacaguuuagugcac

SEQ ID NO: 1371355 - RNA, 24 nt, Human
ucacugcaaucuugagcuccuggg

SEQ ID NO: 1371356 - RNA, 23 nt, Human
ucaucaaaaauauuucuuuugaa

SEQ ID NO: 1371357 - RNA, 18 nt, Human
ucccaaagugcugggauu

SEQ ID NO: 1371358 - RNA, 23 nt, Human
ucccaaagugcugggauuacaga

SEQ ID NO: 1371359 - RNA, 24 nt, Human
ucccaaggugcugggauuauaggc

SEQ ID NO: 1371360 - RNA, 18 nt, Human
ucggccucccaaagugcu

SEQ ID NO: 1371361 - RNA, 19 nt, Human
ucuuguucugucacacaag

SEQ ID NO: 1371362 - RNA, 20 nt, Human
ucuuguucugucacacaaga

SEQ ID NO: 1371363 - RNA, 21 nt, Human
ucuuguucugucacacaagaa

SEQ ID NO: 1371364 - RNA, 20 nt, Human
ugaaauacggggacacccuu

SEQ ID NO: 1371365 - RNA, 22 nt, Human
ugacaacuccuucccucuagaa

SEQ ID NO: 1371366 - RNA, 18 nt, Human
ugaccucaagugauccgc

SEQ ID NO: 1371367 - RNA, 24 nt, Human
ugaccucaagugauccgcccgccu

SEQ ID NO: 1371368 - RNA, 19 nt, Human
ugacuguguuucuuuaugg

SEQ ID NO: 1371369 - RNA, 18 nt, Human
ugcugggauuacagaugu

SEQ ID NO: 1371370 - RNA, 24 nt, Human
ugcugggauuacagaugugaggca

SEQ ID NO: 1371371 - RNA, 19 nt, Human
uggagugcagugguguuca

SEQ ID NO: 1371372 - RNA, 24 nt, Human
uggccaggcuggucucaaacuccu

SEQ ID NO: 1371373 - RNA, 18 nt, Human
ugggauuacagaugugag

SEQ ID NO: 1371374 - RNA, 19 nt, Human
ugggauuacagaugugagg

SEQ ID NO: 1371375 - RNA, 20 nt, Human
ugggauuacagaugugaggc

SEQ ID NO: 1371376 - RNA, 21 nt, Human
ugggauuacagaugugaggca

SEQ ID NO: 1371377 - RNA, 23 nt, Human
ugggauuacagaugugaggcacc

SEQ ID NO: 1371378 - RNA, 23 nt, Human
ugggauuacagaugugaggcacc

SEQ ID NO: 1371379 - RNA, 24 nt, Human
ugggauuacagaugugaggcaccg

SEQ ID NO: 1371380 - RNA, 21 nt, Human
ugggauuauaggcguguguca

SEQ ID NO: 1371381 - RNA, 21 nt, Human
ugggauuauaggcguguguca

SEQ ID NO: 1371382 - RNA, 24 nt, Human
ugggauuauaggcgugugucauug

SEQ ID NO: 1371383 - RNA, 24 nt, Human
ugggcucaggugaucuuccugucu

SEQ ID NO: 1371384 - RNA, 21 nt, Human
uguauuuuuaguagagacggg

SEQ ID NO: 1371385 - RNA, 19 nt, Human
ugucacacaagaacaagug

SEQ ID NO: 1371386 - RNA, 18 nt, Human
uuaguagagacgggguuu

SEQ ID NO: 1371387 - RNA, 22 nt, Human
uuaguagagacgggguuucacc

SEQ ID NO: 1371388 - RNA, 24 nt, Human
uuaguagagacgggguuucaccau

SEQ ID NO: 1371389 - RNA, 23 nt, Human
uuguauuuuuaguagagacgggg

SEQ ID NO: 1371390 - RNA, 21 nt, Human
uugucaggcaccccagaaccc

SEQ ID NO: 1371391 - RNA, 24 nt, Human
uuucaccauguuggccaggcuggu

SEQ ID NO: 1371392 - RNA, 24 nt, Human
uuuuuaguagagacgggguuucac

SEQ ID NO: 1371393 - RNA, 21 nt, Human
uuuuuguauuuuuaguagaga

SEQ ID NO: 1371394 - RNA, 24 nt, Human
uuuuuuguauuuuuaguagagacg

SEQ ID NO: 1371395 - RNA, 18 nt, Human
aaaagcaaacaaaacaga

SEQ ID NO: 1371396 - RNA, 21 nt, Human
aaacaaaacagauacguuccu

SEQ ID NO: 1371397 - RNA, 25 nt, Human
aaagcaaacaaaacagauacguucc

SEQ ID NO: 1371398 - RNA, 19 nt, Human
aaauccuccccaggacuuc

SEQ ID NO: 1371399 - RNA, 19 nt, Human
acaaaacagauacguuccu

SEQ ID NO: 1371400 - RNA, 22 nt, Human
acagcaaacagcccagaggccc

SEQ ID NO: 1371401 - RNA, 18 nt, Human
acagcccagaggccccaa

SEQ ID NO: 1371402 - RNA, 18 nt, Human
accgugcccuccagggag

SEQ ID NO: 1371403 - RNA, 24 nt, Human
accugggcaaaagcaaacaaaaca

SEQ ID NO: 1371404 - RNA, 19 nt, Human
acucggcucagcuccgcgg

SEQ ID NO: 1371405 - RNA, 22 nt, Human
agcaaacagcccagaggcccca

SEQ ID NO: 1371406 - RNA, 22 nt, Human
aggagucggaggcugcagggcu

SEQ ID NO: 1371407 - RNA, 25 nt, Human
auccuccccaggacuuccggcccac

SEQ ID NO: 1371408 - RNA, 21 nt, Human
cacagcaaacagcccagaggc

SEQ ID NO: 1371409 - RNA, 23 nt, Human
cacagcaaacagcccagaggccc

SEQ ID NO: 1371410 - RNA, 22 nt, Human
cagcaaacagcccagaggcccc

SEQ ID NO: 1371411 - RNA, 23 nt, Human
caggagucggaggcugcagggcu

SEQ ID NO: 1371412 - RNA, 21 nt, Human
ccauuccagccuccacucggc

SEQ ID NO: 1371413 - RNA, 20 nt, Human
cccacccuucuuccuacucc

SEQ ID NO: 1371414 - RNA, 20 nt, Human
ccccaggacuuccggcccac

SEQ ID NO: 1371415 - RNA, 21 nt, Human
ccgcccacgagccucacacua

SEQ ID NO: 1371416 - RNA, 19 nt, Human
ccucgagccaggcuggucc

SEQ ID NO: 1371417 - RNA, 19 nt, Human
cgcuuggcuccgcccacga

SEQ ID NO: 1371418 - RNA, 23 nt, Human
cggcggaaacccgagcccgaaca

SEQ ID NO: 1371419 - RNA, 23 nt, Human
cggcuuccucgagccaggcuggu

SEQ ID NO: 1371420 - RNA, 26 nt, Human
cuacuuccgaccuggcagucccuguc

SEQ ID NO: 1371421 - RNA, 22 nt, Human
cuccacagcaaacagcccagga

SEQ ID NO: 1371422 - RNA, 19 nt, Human
cuccacucggcucagcucc

SEQ ID NO: 1371423 - RNA, 24 nt, Human
cugcaucgccaucugcuggccgcg

SEQ ID NO: 1371424 - RNA, 18 nt, Human
cuguguguaaauccuccc

SEQ ID NO: 1371425 - RNA, 22 nt, Human
gagcccgaacagagggauccgg

SEQ ID NO: 1371426 - RNA, 21 nt, Human
gcaaaagcaaacaaaacagau

SEQ ID NO: 1371427 - RNA, 22 nt, Human
ggaaacccgagcccgaacagag

SEQ ID NO: 1371428 - RNA, 21 nt, Human
ggacuuccggcccaccagcuc

SEQ ID NO: 1371429 - RNA, 26 nt, Human
gugcagaugcucugcccaggccugcc

SEQ ID NO: 1371430 - RNA, 22 nt, Human
uccacagcaaacagcccagagg

SEQ ID NO: 1371431 - RNA, 18 nt, Human
ugcccaggccugcggaag

SEQ ID NO: 1371432 - RNA, 19 nt, Human
ugcccaggccugcggaagc

SEQ ID NO: 1371433 - RNA, 24 nt, Human
uuuauuguaacuuggaagcccacc

SEQ ID NO: 1371434 - RNA, 22 nt, Human
uuuuuuuuuuuuuuuuuggguu

SEQ ID NO: 1371435 - RNA, 23 nt, Human
uuuuuuuuuuuuuuuuuuugggu

SEQ ID NO: 1371436 - RNA, 24 nt, Human
uuuuuuuuuuuuuuuuuuuuuggg

SEQ ID NO: 1371437 - RNA, 20 nt, Human
aaaaggccagaaagaaaaca

SEQ ID NO: 1371438 - RNA, 22 nt, Human
aaacaaaagggggguaauauga

SEQ ID NO: 1371439 - RNA, 23 nt, Human
aaacaaaagggggguaauaugaa

SEQ ID NO: 1371440 - RNA, 22 nt, Human
aaagaaccccccccuuccccca

SEQ ID NO: 1371441 - RNA, 19 nt, Human
aaagccacaaaccacagaa

SEQ ID NO: 1371442 - RNA, 20 nt, Human
aaaggagcagucccacugca

SEQ ID NO: 1371443 - RNA, 18 nt, Human
aaaggcugaggaaccaaa

SEQ ID NO: 1371444 - RNA, 22 nt, Human
aacacacacauacacacacaca

SEQ ID NO: 1371445 - RNA, 24 nt, Human
aacaggcacugcauggcccgcagg

SEQ ID NO: 1371446 - RNA, 19 nt, Human
aaccaaagaaaacagggac

SEQ ID NO: 1371447 - RNA, 19 nt, Human
aacuaggccccaagccuga

SEQ ID NO: 1371448 - RNA, 24 nt, Human
aagaaaaagccacaaaccacagaa

SEQ ID NO: 1371449 - RNA, 19 nt, Human
aagaauccucuaucagguc

SEQ ID NO: 1371450 - RNA, 18 nt, Human
aaguaagacacagcaaga

SEQ ID NO: 1371451 - RNA, 19 nt, Human
aagugcccucugggcucag

SEQ ID NO: 1371452 - RNA, 21 nt, Human
acaaggcaguaacaguuccaa

SEQ ID NO: 1371453 - RNA, 24 nt, Human
acacacauacacacacacacacag

SEQ ID NO: 1371454 - RNA, 20 nt, Human
acagaaauuuuaaagaaccc

SEQ ID NO: 1371455 - RNA, 21 nt, Human
acagagcuucccuaucaaaga

SEQ ID NO: 1371456 - RNA, 20 nt, Human
acauaauaggauugcagggu

SEQ ID NO: 1371457 - RNA, 18 nt, Human
accaauggggagaugcag

SEQ ID NO: 1371458 - RNA, 18 nt, Human
accauagcagagcucuga

SEQ ID NO: 1371459 - RNA, 19 nt, Human
accgccaaaccgucucagc

SEQ ID NO: 1371460 - RNA, 23 nt, Human
accucggggcucccaccccuuua

SEQ ID NO: 1371461 - RNA, 21 nt, Human
acgcuaccagucucugcgaac

SEQ ID NO: 1371462 - RNA, 19 nt, Human
acuugauaauucuuuuucu

SEQ ID NO: 1371463 - RNA, 23 nt, Human
agaaagaaaacaguaauuucagg

SEQ ID NO: 1371464 - RNA, 20 nt, Human
agaaguagccacacuugacu

SEQ ID NO: 1371465 - RNA, 22 nt, Human
agaaucccaaacaagaauccuc

SEQ ID NO: 1371466 - RNA, 25 nt, Human
agacacagcaagagggcacacuagc

SEQ ID NO: 1371467 - RNA, 18 nt, Human
agccauaggggaaagggg

SEQ ID NO: 1371468 - RNA, 27 nt, Human
agcgauaggggcgacugcuccggaaag

SEQ ID NO: 1371469 - RNA, 22 nt, Human
aggagauucuggaggucuuucu

SEQ ID NO: 1371470 - RNA, 20 nt, Human
aggcagagggauuggacugu

SEQ ID NO: 1371471 - RNA, 18 nt, Human
aggcaguggucccugggc

SEQ ID NO: 1371472 - RNA, 18 nt, Human
aggcugugcagcuccucc

SEQ ID NO: 1371473 - RNA, 24 nt, Human
agguagguagggaaagggagaguu

SEQ ID NO: 1371474 - RNA, 19 nt, Human
aggugagcgcugcagcugc

SEQ ID NO: 1371475 - RNA, 19 nt, Human
auaaagcagcaccguuccc

SEQ ID NO: 1371476 - RNA, 23 nt, Human
caaaacaaaggacaguggugagc

SEQ ID NO: 1371477 - RNA, 21 nt, Human
caaaagggggguaauaugaac

SEQ ID NO: 1371478 - RNA, 27 nt, Human
caaagcagaaucccaaacaagaaucuu

SEQ ID NO: 1371479 - RNA, 19 nt, Human
caacaggauucugcacaca

SEQ ID NO: 1371480 - RNA, 18 nt, Human
caacugcaggagcagcga

SEQ ID NO: 1371481 - RNA, 23 nt, Human
caagagggcacacuagcaaagca

SEQ ID NO: 1371482 - RNA, 21 nt, Human
caaggaccaacuccauccccc

SEQ ID NO: 1371483 - RNA, 20 nt, Human
cacacacauacacacacaca

SEQ ID NO: 1371484 - RNA, 22 nt, Human
cacacacauacacacacacaca

SEQ ID NO: 1371485 - RNA, 26 nt, Human
cacacacauacacacacacacacacu

SEQ ID NO: 1371486 - RNA, 22 nt, Human
cacacauacacacacacacaca

SEQ ID NO: 1371487 - RNA, 21 nt, Human
cacugcauggcccgcaggcug

SEQ ID NO: 1371488 - RNA, 22 nt, Human
cacuugacugcccggugcaccu

SEQ ID NO: 1371489 - RNA, 24 nt, Human
cacuuuaaaaaaaggauuccuaaa

SEQ ID NO: 1371490 - RNA, 23 nt, Human
cagaaacaaaaaacaaaaggggg

SEQ ID NO: 1371491 - RNA, 18 nt, Human
cagagcuucccuaucaaa

SEQ ID NO: 1371492 - RNA, 20 nt, Human
cagaggucccugcuaccucc

SEQ ID NO: 1371493 - RNA, 24 nt, Human
cagcauaauacauccagacaugaa

SEQ ID NO: 1371494 - RNA, 24 nt, Human
cagcgauaggggcgacugcuccgg

SEQ ID NO: 1371495 - RNA, 19 nt, Human
caggaucuugcgcacaucc

SEQ ID NO: 1371496 - RNA, 20 nt, Human
caggcccauucccagguucu

SEQ ID NO: 1371497 - RNA, 30 nt, Human
cagguaauacacuuuaaaaaaaggauuccc

SEQ ID NO: 1371498 - RNA, 19 nt, Human
cauaaccgaauccucaacc

SEQ ID NO: 1371499 - RNA, 23 nt, Human
caugcgauaaugccaggcagugg

SEQ ID NO: 1371500 - RNA, 21 nt, Human
cauuugccaagccuaugccac

SEQ ID NO: 1371501 - RNA, 21 nt, Human
ccaaacucuaugguuuccuua

SEQ ID NO: 1371502 - RNA, 21 nt, Human
ccaaccaaagaaaacagggac

SEQ ID NO: 1371503 - RNA, 22 nt, Human
ccaagucacacccauggaccgg

SEQ ID NO: 1371504 - RNA, 22 nt, Human
ccacagaaauuuuaaagaaccc

SEQ ID NO: 1371505 - RNA, 22 nt, Human
ccaggagaaaaggccagaaaga

SEQ ID NO: 1371506 - RNA, 21 nt, Human
cccauucccagguucuccggg

SEQ ID NO: 1371507 - RNA, 18 nt, Human
cccccauaacacacacau

SEQ ID NO: 1371508 - RNA, 26 nt, Human
cccccccuucccccauaacacacaca

SEQ ID NO: 1371509 - RNA, 19 nt, Human
ccccccuucccccauaaac

SEQ ID NO: 1371510 - RNA, 21 nt, Human
ccucuaaccaggagaaaaggc

SEQ ID NO: 1371511 - RNA, 18 nt, Human
ccucugggcaccuguugg

SEQ ID NO: 1371512 - RNA, 21 nt, Human
ccugagcgauggccucuagcc

SEQ ID NO: 1371513 - RNA, 20 nt, Human
ccugcccagggcuucagagc

SEQ ID NO: 1371514 - RNA, 19 nt, Human
cggaggugagcgcugcagc

SEQ ID NO: 1371515 - RNA, 18 nt, Human
cggcaguauugaaaugga

SEQ ID NO: 1371516 - RNA, 27 nt, Human
cgggaagggagcaaagcgggaggcggc

SEQ ID NO: 1371517 - RNA, 21 nt, Human
cuagaggccuuucagugccca

SEQ ID NO: 1371518 - RNA, 22 nt, Human
cucaaagcagaaucccaaacaa

SEQ ID NO: 1371519 - RNA, 23 nt, Human
cucagaguaggaaaugaccgccc

SEQ ID NO: 1371520 - RNA, 20 nt, Human
cuccaucccccuguguguca

SEQ ID NO: 1371521 - RNA, 26 nt, Human
cuccugcacagccaugaugcucuucc

SEQ ID NO: 1371522 - RNA, 19 nt, Human
cuccuuuaccaucauccca

SEQ ID NO: 1371523 - RNA, 18 nt, Human
cucuccuuucuucauccu

SEQ ID NO: 1371524 - RNA, 22 nt, Human
cugacgaacuguaacguccaaa

SEQ ID NO: 1371525 - RNA, 18 nt, Human
cugaucaggcccauuccc

SEQ ID NO: 1371526 - RNA, 19 nt, Human
cugcccaaccaaagaaaac

SEQ ID NO: 1371527 - RNA, 18 nt, Human
cuggaauuccggagguga

SEQ ID NO: 1371528 - RNA, 19 nt, Human
cuggaggucuuucucugac

SEQ ID NO: 1371529 - RNA, 21 nt, Human
gaaaaagccacaaaccacagg

SEQ ID NO: 1371530 - RNA, 24 nt, Human
gaaaacagggacauucaacaggau

SEQ ID NO: 1371531 - RNA, 31 nt, Human
gaaauuuuaaagaaccccccccuucccccaa

SEQ ID NO: 1371532 - RNA, 19 nt, Human
gaccuuuucuucuugcugg

SEQ ID NO: 1371533 - RNA, 23 nt, Human
gaccuuuucuucuugcuggaguc

SEQ ID NO: 1371534 - RNA, 20 nt, Human
gaucaggacaacucuaggac

SEQ ID NO: 1371535 - RNA, 28 nt, Human
gaugcucuuccauacuucaguccugccc

SEQ ID NO: 1371536 - RNA, 18 nt, Human
gccagaaagaaaacagua

SEQ ID NO: 1371537 - RNA, 26 nt, Human
gcuaggccuuguccucaagucagcug

SEQ ID NO: 1371538 - RNA, 19 nt, Human
ggaggugggaagauacaac

SEQ ID NO: 1371539 - RNA, 23 nt, Human
ggaguauguacccucugggcacc

SEQ ID NO: 1371540 - RNA, 21 nt, Human
ggcagcaacacgucuggcucc

SEQ ID NO: 1371541 - RNA, 23 nt, Human
ggccagaaacaaaaaacaaaagg

SEQ ID NO: 1371542 - RNA, 24 nt, Human
ggccagaaagaaaacaguaauuuc

SEQ ID NO: 1371543 - RNA, 26 nt, Human
gggaagggagcaaagcgggaggcggc

SEQ ID NO: 1371544 - RNA, 20 nt, Human
gggcaaagauaucuccaaau

SEQ ID NO: 1371545 - RNA, 19 nt, Human
gggcaaggaagagggcucu

SEQ ID NO: 1371546 - RNA, 20 nt, Human
guccaaacuguccaagaagc

SEQ ID NO: 1371547 - RNA, 20 nt, Human
gugacucuuacuucccaucc

SEQ ID NO: 1371548 - RNA, 24 nt, Human
guggucccugggcaugcgauggug

SEQ ID NO: 1371549 - RNA, 25 nt, Human
guggucccugggcaugcgauggugg

SEQ ID NO: 1371550 - RNA, 27 nt, Human
uaaaaggaagguagguagggaaaggga

SEQ ID NO: 1371551 - RNA, 22 nt, Human
uaaagaaccccccccuuccccc

SEQ ID NO: 1371552 - RNA, 27 nt, Human
uaauaugaacaaaauacuacucaaaac

SEQ ID NO: 1371553 - RNA, 21 nt, Human
uaaucuguaacuaggccccaa

SEQ ID NO: 1371554 - RNA, 21 nt, Human
uacaagucaagggcaaagaua

SEQ ID NO: 1371555 - RNA, 20 nt, Human
uaccaucaucccacuuccaa

SEQ ID NO: 1371556 - RNA, 26 nt, Human
uagaggggccagaaacaaaaaacaaa

SEQ ID NO: 1371557 - RNA, 23 nt, Human
uaggaaaugaccgcccuacuaaa

SEQ ID NO: 1371558 - RNA, 22 nt, Human
uaggaaguaggccagagucuca

SEQ ID NO: 1371559 - RNA, 19 nt, Human
uaggacaaggcaguaacag

SEQ ID NO: 1371560 - RNA, 20 nt, Human
uaggacaaggcaguaacagu

SEQ ID NO: 1371561 - RNA, 20 nt, Human
uaggccccaagccugaucag

SEQ ID NO: 1371562 - RNA, 20 nt, Human
uaucuguauaggauggacua

SEQ ID NO: 1371563 - RNA, 22 nt, Human
uaugaacaaaauacuacucaaa

SEQ ID NO: 1371564 - RNA, 24 nt, Human
uaugcaaaaauaaaaaucuccaaa

SEQ ID NO: 1371565 - RNA, 21 nt, Human
uauggaagaaaaagccacaaa

SEQ ID NO: 1371566 - RNA, 23 nt, Human
uauguacccucugggcaccuguu

SEQ ID NO: 1371567 - RNA, 23 nt, Human
uauugagggcagcugaaagugcc

SEQ ID NO: 1371568 - RNA, 22 nt, Human
ucaacaggcacugcauggcccg

SEQ ID NO: 1371569 - RNA, 22 nt, Human
ucaauacacauaaucaagggaa

SEQ ID NO: 1371570 - RNA, 19 nt, Human
ucacccagccuccugggcc

SEQ ID NO: 1371571 - RNA, 20 nt, Human
ucagcgccucacccagccuc

SEQ ID NO: 1371572 - RNA, 20 nt, Human
ucagugcccaguccuccggc

SEQ ID NO: 1371573 - RNA, 20 nt, Human
uccaagacauuguuaggaag

SEQ ID NO: 1371574 - RNA, 20 nt, Human
uccagacaugaaucuugaag

SEQ ID NO: 1371575 - RNA, 31 nt, Human
ucccccauaacacacacauacacacacacag

SEQ ID NO: 1371576 - RNA, 23 nt, Human
ucccgcucaccucggggcuccca

SEQ ID NO: 1371577 - RNA, 21 nt, Human
ucccugcuaccuccccagggg

SEQ ID NO: 1371578 - RNA, 21 nt, Human
uccucaagucagcugaaucau

SEQ ID NO: 1371579 - RNA, 26 nt, Human
uccuuggcuccuagcacuaauccauu

SEQ ID NO: 1371580 - RNA, 23 nt, Human
ucgucuacaagucaagggcaaag

SEQ ID NO: 1371581 - RNA, 20 nt, Human
ucuaaccaggagaaaaggcc

SEQ ID NO: 1371582 - RNA, 26 nt, Human
ucuaggacaaggcaguaacaguucca

SEQ ID NO: 1371583 - RNA, 21 nt, Human
ucucagcgccucacccagccu

SEQ ID NO: 1371584 - RNA, 19 nt, Human
ucuccaaaacaaaggacag

SEQ ID NO: 1371585 - RNA, 21 nt, Human
ucuccugagcgauggccucua

SEQ ID NO: 1371586 - RNA, 19 nt, Human
ucuguaacuaggccccaag

SEQ ID NO: 1371587 - RNA, 21 nt, Human
ucuucuugcuggagucaaggc

SEQ ID NO: 1371588 - RNA, 18 nt, Human
ugaccugacuuaaggacc

SEQ ID NO: 1371589 - RNA, 19 nt, Human
ugacugcccggugcaccuc

SEQ ID NO: 1371590 - RNA, 21 nt, Human
ugagagaauggacaaggacca

SEQ ID NO: 1371591 - RNA, 18 nt, Human
ugagggcagcugaaagug

SEQ ID NO: 1371592 - RNA, 22 nt, Human
ugcaaaaauaaaaaucuccaaa

SEQ ID NO: 1371593 - RNA, 22 nt, Human
ugccaggcaguggucccugggc

SEQ ID NO: 1371594 - RNA, 24 nt, Human
ugcccaaccaaagaaaacagggac

SEQ ID NO: 1371595 - RNA, 23 nt, Human
ugcccagggcuucagagcuugcu

SEQ ID NO: 1371596 - RNA, 19 nt, Human
ugcuaggccuuguccucaa

SEQ ID NO: 1371597 - RNA, 23 nt, Human
uggaagaaaaagccacaaaccac

SEQ ID NO: 1371598 - RNA, 24 nt, Human
uggaagaaaaagccacaaaccaca

SEQ ID NO: 1371599 - RNA, 19 nt, Human
uggcuccuagcacuaaucc

SEQ ID NO: 1371600 - RNA, 26 nt, Human
ugggcacacaacugcucaccugugca

SEQ ID NO: 1371601 - RNA, 19 nt, Human
uggugacagucuggauguu

SEQ ID NO: 1371602 - RNA, 20 nt, Human
uggugacagucuggauguuc

SEQ ID NO: 1371603 - RNA, 18 nt, Human
uguccauuugccaagccu

SEQ ID NO: 1371604 - RNA, 21 nt, Human
ugucucagagaagcccauaac

SEQ ID NO: 1371605 - RNA, 21 nt, Human
uguggccuuucuccuuuacca

SEQ ID NO: 1371606 - RNA, 20 nt, Human
uucauaaacccucgcucagg

SEQ ID NO: 1371607 - RNA, 18 nt, Human
uucccggguugcgggccu

SEQ ID NO: 1371608 - RNA, 21 nt, Human
uucuccuuuaccaucauccca

SEQ ID NO: 1371609 - RNA, 26 nt, Human
uucuucauccucuuagaugucgucua

SEQ ID NO: 1371610 - RNA, 21 nt, Human
uugcgggccuuucagcugcgc

SEQ ID NO: 1371611 - RNA, 22 nt, Human
uuuaaagaaccccccccuuccc

SEQ ID NO: 1371612 - RNA, 24 nt, Human
uuuaaagaaccccccccuuccccc

SEQ ID NO: 1371613 - RNA, 22 nt, Human
uuugccaagccuaugccaccag

SEQ ID NO: 1371614 - RNA, 20 nt, Human
uuuuagcucuugccaagguu

SEQ ID NO: 1371615 - RNA, 28 nt, Human
aaagaacuacacaaauuccagauaccac

SEQ ID NO: 1371616 - RNA, 19 nt, Human
acaaauuccagauaccaca

SEQ ID NO: 1371617 - RNA, 20 nt, Human
accgguagcaccgcggagca

SEQ ID NO: 1371618 - RNA, 21 nt, Human
caaagaacuacacaaauucca

SEQ ID NO: 1371619 - RNA, 18 nt, Human
caccagccagagaggaac

SEQ ID NO: 1371620 - RNA, 19 nt, Human
cccaccagccagagaggaa

SEQ ID NO: 1371621 - RNA, 20 nt, Human
cccaccagccagagaggaac

SEQ ID NO: 1371622 - RNA, 22 nt, Human
cuugcagcccaccagccagaga

SEQ ID NO: 1371623 - RNA, 24 nt, Human
gacagggggcaaagaacuacacaa

SEQ ID NO: 1371624 - RNA, 18 nt, Human
ggcugugcgggcgggccc

SEQ ID NO: 1371625 - RNA, 18 nt, Human
gggcccuccgcuugcagc

SEQ ID NO: 1371626 - RNA, 23 nt, Human
uaccacacuugucaccgguagca

SEQ ID NO: 1371627 - RNA, 20 nt, Human
ugagacagggggcaaagaac

SEQ ID NO: 1371628 - RNA, 19 nt, Human
uggguagaaagaaaaaagc

SEQ ID NO: 1371629 - RNA, 22 nt, Human
uggguagaaagaaaaaagcugg

SEQ ID NO: 1371630 - RNA, 23 nt, Human
aaacaugcgagauaaacagagga

SEQ ID NO: 1371631 - RNA, 19 nt, Human
aagagggacaagccugcca

SEQ ID NO: 1371632 - RNA, 24 nt, Human
aaugcacaucuacugcuaaaugac

SEQ ID NO: 1371633 - RNA, 24 nt, Human
acuacaauauggauauguccuacc

SEQ ID NO: 1371634 - RNA, 25 nt, Human
agaaacauggagaagaaccgguacc

SEQ ID NO: 1371635 - RNA, 23 nt, Human
auaacacugacucccaagaauac

SEQ ID NO: 1371636 - RNA, 21 nt, Human
auagaauacucuucaguucua

SEQ ID NO: 1371637 - RNA, 28 nt, Human
caaaacucuccuaguaacagcauccucc

SEQ ID NO: 1371638 - RNA, 22 nt, Human
caaaauaauacucugcugaaac

SEQ ID NO: 1371639 - RNA, 18 nt, Human
cacaacacuuauuuguag

SEQ ID NO: 1371640 - RNA, 23 nt, Human
ccagacaccuugggaacuacaau

SEQ ID NO: 1371641 - RNA, 24 nt, Human
ccaucaccacaaauaccaagagua

SEQ ID NO: 1371642 - RNA, 25 nt, Human
ccuacaauaagcucgacauuaaaga

SEQ ID NO: 1371643 - RNA, 23 nt, Human
ccucccaucaccacaaauaccaa

SEQ ID NO: 1371644 - RNA, 20 nt, Human
cuagaaucucuuaggaaauu

SEQ ID NO: 1371645 - RNA, 23 nt, Human
gaagaacuauaaacugcuuagca

SEQ ID NO: 1371646 - RNA, 20 nt, Human
gcuacaauuuauugagcacu

SEQ ID NO: 1371647 - RNA, 20 nt, Human
gucuguguuuggaagauaaa

SEQ ID NO: 1371648 - RNA, 24 nt, Human
uaaauacauacacaguacucacaa

SEQ ID NO: 1371649 - RNA, 22 nt, Human
uaacacugacucccaagaauac

SEQ ID NO: 1371650 - RNA, 19 nt, Human
uaagacaguuugaagcaca

SEQ ID NO: 1371651 - RNA, 22 nt, Human
uaagcucgacauuaaagacuga

SEQ ID NO: 1371652 - RNA, 21 nt, Human
uacaaaauaauacucugcuga

SEQ ID NO: 1371653 - RNA, 24 nt, Human
uacacaguacucacaauagcccca

SEQ ID NO: 1371654 - RNA, 18 nt, Human
uacucuuugucaaacacu

SEQ ID NO: 1371655 - RNA, 22 nt, Human
uccaaagauguuuguccuggaa

SEQ ID NO: 1371656 - RNA, 19 nt, Human
uccacugcaguaucucaaa

SEQ ID NO: 1371657 - RNA, 20 nt, Human
uccuggauaacuuaaaaaaa

SEQ ID NO: 1371658 - RNA, 26 nt, Human
ucuacugcuaaaugacuacucucaaa

SEQ ID NO: 1371659 - RNA, 26 nt, Human
ucucauaauaaugcacaucuacugcu

SEQ ID NO: 1371660 - RNA, 24 nt, Human
ucuccuaguaacagcauccuccca

SEQ ID NO: 1371661 - RNA, 26 nt, Human
ugaaauagaaaucaauuuaagccccc

SEQ ID NO: 1371662 - RNA, 19 nt, Human
ugcuuagcagggagaaaac

SEQ ID NO: 1371663 - RNA, 18 nt, Human
uggauauguccuacccag

SEQ ID NO: 1371664 - RNA, 18 nt, Human
uggcauacauauacaaaa

SEQ ID NO: 1371665 - RNA, 26 nt, Human
uuaaaaguucucuaacucucaaccag

SEQ ID NO: 1371666 - RNA, 27 nt, Human
uuaauucuggagaaacauggagaagaa

SEQ ID NO: 1371667 - RNA, 20 nt, Human
uuugcuucaaguccugaagu

SEQ ID NO: 1371668 - RNA, 22 nt, Human
agcgcccccccagcuaccgccc

SEQ ID NO: 1371669 - RNA, 18 nt, Human
augcagccccuggguggg

SEQ ID NO: 1371670 - RNA, 27 nt, Human
caagccgagccccagggagccucgcaa

SEQ ID NO: 1371671 - RNA, 21 nt, Human
caccggggcccccgccaacaa

SEQ ID NO: 1371672 - RNA, 18 nt, Human
ccacaugcagccccuggg

SEQ ID NO: 1371673 - RNA, 19 nt, Human
ccaccccggcccgcgcccc

SEQ ID NO: 1371674 - RNA, 18 nt, Human
ccagggccgcgcuccaug

SEQ ID NO: 1371675 - RNA, 20 nt, Human
cccccagcuaccgccccaga

SEQ ID NO: 1371676 - RNA, 22 nt, Human
ccccccagcuaccgccccagac

SEQ ID NO: 1371677 - RNA, 24 nt, Human
ccccggcccgcgcccccgggcccc

SEQ ID NO: 1371678 - RNA, 23 nt, Human
ccccgggccccagggccgcgcuc

SEQ ID NO: 1371679 - RNA, 18 nt, Human
cccgccaacaacgccgcc

SEQ ID NO: 1371680 - RNA, 21 nt, Human
cccggcccgcgcccccgggcc

SEQ ID NO: 1371681 - RNA, 24 nt, Human
cccggccgcccgcccgugcguccg

SEQ ID NO: 1371682 - RNA, 19 nt, Human
cccugggucggggcggggu

SEQ ID NO: 1371683 - RNA, 20 nt, Human
ccgcgcccccgggccccagg

SEQ ID NO: 1371684 - RNA, 23 nt, Human
ccgcgcccccgggccccagggcc

SEQ ID NO: 1371685 - RNA, 19 nt, Human
ccggcccgcgcccccgggc

SEQ ID NO: 1371686 - RNA, 21 nt, Human
ccuggcccggcaggggagggg

SEQ ID NO: 1371687 - RNA, 21 nt, Human
cgccaacaacgccgcccggcc

SEQ ID NO: 1371688 - RNA, 26 nt, Human
cgcccccgggccccagggccgcgcuc

SEQ ID NO: 1371689 - RNA, 26 nt, Human
cgcccgggccgggccuccaccggggc

SEQ ID NO: 1371690 - RNA, 20 nt, Human
cggcaggggagggguggggu

SEQ ID NO: 1371691 - RNA, 23 nt, Human
cgggccgggccuccaccggggcc

SEQ ID NO: 1371692 - RNA, 24 nt, Human
cggggcgggguccccugggccgcc

SEQ ID NO: 1371693 - RNA, 20 nt, Human
cgggggccgccuuauugcug

SEQ ID NO: 1371694 - RNA, 23 nt, Human
cgggggccgccuuauugcugagg

SEQ ID NO: 1371695 - RNA, 23 nt, Human
cggggugagguccgggggccgcc

SEQ ID NO: 1371696 - RNA, 22 nt, Human
cggucccuccgcaccccugccc

SEQ ID NO: 1371697 - RNA, 19 nt, Human
cuccauggcucccggccgc

SEQ ID NO: 1371698 - RNA, 19 nt, Human
cugagguccggcugguugg

SEQ ID NO: 1371699 - RNA, 20 nt, Human
cugggccgcccggggggguc

SEQ ID NO: 1371700 - RNA, 21 nt, Human
gacagcagccccguuaggagg

SEQ ID NO: 1371701 - RNA, 18 nt, Human
gaggccagggcccagccc

SEQ ID NO: 1371702 - RNA, 20 nt, Human
gagggguggggugcuccgag

SEQ ID NO: 1371703 - RNA, 19 nt, Human
gcccccgggccccagggcc

SEQ ID NO: 1371704 - RNA, 18 nt, Human
gccgagccccagggagcc

SEQ ID NO: 1371705 - RNA, 24 nt, Human
gggaagcccaccccggcccgcgcc

SEQ ID NO: 1371706 - RNA, 18 nt, Human
ggggagggguggggugcu

SEQ ID NO: 1371707 - RNA, 18 nt, Human
ggucggggcggggucccc

SEQ ID NO: 1371708 - RNA, 23 nt, Human
guccgucggucccuccgcacccc

SEQ ID NO: 1371709 - RNA, 22 nt, Human
gugggggccggcgcggggugag

SEQ ID NO: 1371710 - RNA, 18 nt, Human
uccccugggccgcccggg

SEQ ID NO: 1371711 - RNA, 20 nt, Human
ugagguccgggggccgccuu

SEQ ID NO: 1371712 - RNA, 22 nt, Human
ugcugagguccggcugguuggg

SEQ ID NO: 1371713 - RNA, 20 nt, Human
uucacguauuuucuucuugc

SEQ ID NO: 1371714 - RNA, 25 nt, Human
aaacaaaacaucuugauuacuagaa

SEQ ID NO: 1371715 - RNA, 19 nt, Human
aaauagaguugaaguuuac

SEQ ID NO: 1371716 - RNA, 21 nt, Human
aacaccuagcuuuuaaaaaug

SEQ ID NO: 1371717 - RNA, 24 nt, Human
agagaaguguccauucauauccuu

SEQ ID NO: 1371718 - RNA, 22 nt, Human
aguguccauucauauccuuugc

SEQ ID NO: 1371719 - RNA, 18 nt, Human
caaauacuacacuuaaga

SEQ ID NO: 1371720 - RNA, 18 nt, Human
caaguaugacugucauaa

SEQ ID NO: 1371721 - RNA, 21 nt, Human
cauauacccaccaagcauccc

SEQ ID NO: 1371722 - RNA, 23 nt, Human
cauauacccaccaagcaucccuu

SEQ ID NO: 1371723 - RNA, 23 nt, Human
cauuaaaauacucaaaauuaaua

SEQ ID NO: 1371724 - RNA, 24 nt, Human
gccuauguuuugauaagguuguuu

SEQ ID NO: 1371725 - RNA, 27 nt, Human
uaaacaaaacaucuugauuacuagaag

SEQ ID NO: 1371726 - RNA, 21 nt, Human
uaaaugucuucuuuagagaag

SEQ ID NO: 1371727 - RNA, 19 nt, Human
uaaggcaaguaugacuguc

SEQ ID NO: 1371728 - RNA, 26 nt, Human
uaagguuguuuuuuuuuucuuguaaa

SEQ ID NO: 1371729 - RNA, 25 nt, Human
uacauuagcaaauuuaaacaaaaca

SEQ ID NO: 1371730 - RNA, 21 nt, Human
uaggaagcaauucauuuaaaa

SEQ ID NO: 1371731 - RNA, 24 nt, Human
uaguaagguauaauuuauauacag

SEQ ID NO: 1371732 - RNA, 22 nt, Human
ucccugaugauuagugauacug

SEQ ID NO: 1371733 - RNA, 24 nt, Human
ucugaguaagauaacaccuagcuu

SEQ ID NO: 1371734 - RNA, 18 nt, Human
ucuuccacagucucacua

SEQ ID NO: 1371735 - RNA, 23 nt, Human
ucuuuagagaaguguccauucau

SEQ ID NO: 1371736 - RNA, 22 nt, Human
ugcaaccaaauagaguugaagu

SEQ ID NO: 1371737 - RNA, 19 nt, Human
ugugaggguuccuucucuu

SEQ ID NO: 1371738 - RNA, 25 nt, Human
uguuuuguuuuccuaguaggaagca

SEQ ID NO: 1371739 - RNA, 19 nt, Human
uugauaagguuguuuuuuu

SEQ ID NO: 1371740 - RNA, 22 nt, Human
uuguaaauauguuuaaguuccu

SEQ ID NO: 1371741 - RNA, 23 nt, Human
uuuugauaagguuguuuuuuuuu

SEQ ID NO: 1371742 - RNA, 19 nt, Human
gguggcccuugucguggug

SEQ ID NO: 1371743 - RNA, 24 nt, Human
ugguggcccuugucgugguggccu

SEQ ID NO: 1371744 - RNA, 24 nt, Human
aaaaagaagauaaacauuugaaaa

SEQ ID NO: 1371745 - RNA, 25 nt, Human
aaacaaaaaggguauauaugcacag

SEQ ID NO: 1371746 - RNA, 21 nt, Human
aaacaaaguucuaagcacaug

SEQ ID NO: 1371747 - RNA, 20 nt, Human
aaaguagaaacaguguucac

SEQ ID NO: 1371748 - RNA, 18 nt, Human
aacaaaguucuaagcaca

SEQ ID NO: 1371749 - RNA, 21 nt, Human
aacaaaguucuaagcacaugg

SEQ ID NO: 1371750 - RNA, 26 nt, Human
aacuaaucuaugaugaaaacccccuc

SEQ ID NO: 1371751 - RNA, 24 nt, Human
aagccaaaaagaagauaaacauuu

SEQ ID NO: 1371752 - RNA, 21 nt, Human
aagcgauccuucugccuuagc

SEQ ID NO: 1371753 - RNA, 23 nt, Human
aaggaauuuuuuuuucagagaga

SEQ ID NO: 1371754 - RNA, 22 nt, Human
aaguagcugggacuauuaggcc

SEQ ID NO: 1371755 - RNA, 25 nt, Human
aaguagcugggacuauuaggcgugu

SEQ ID NO: 1371756 - RNA, 21 nt, Human
acaaaguucuaagcacauggc

SEQ ID NO: 1371757 - RNA, 24 nt, Human
acaacacagauuuaagagacaaaa

SEQ ID NO: 1371758 - RNA, 24 nt, Human
acuaagaaaaaauaaaaaagaaga

SEQ ID NO: 1371759 - RNA, 19 nt, Human
agaaaaaauaaaaaagaag

SEQ ID NO: 1371760 - RNA, 22 nt, Human
agacaaaaguagaaacagggga

SEQ ID NO: 1371761 - RNA, 19 nt, Human
agacaaaaguagaaacagu

SEQ ID NO: 1371762 - RNA, 22 nt, Human
agagacugugauuguaaaugug

SEQ ID NO: 1371763 - RNA, 18 nt, Human
agccuccaaaguagcugg

SEQ ID NO: 1371764 - RNA, 20 nt, Human
aggcgugugccaccacgccc

SEQ ID NO: 1371765 - RNA, 23 nt, Human
agugcaguggugcgaucuuggcu

SEQ ID NO: 1371766 - RNA, 24 nt, Human
agugcaguggugcgaucuuggcuc

SEQ ID NO: 1371767 - RNA, 23 nt, Human
aucuucacaaaaaugacacugaa

SEQ ID NO: 1371768 - RNA, 21 nt, Human
augaugaaaaccccugaaagu

SEQ ID NO: 1371769 - RNA, 22 nt, Human
auugcagugcaguggugcgauc

SEQ ID NO: 1371770 - RNA, 24 nt, Human
caaaaacaaaaaggguauauaugc

SEQ ID NO: 1371771 - RNA, 23 nt, Human
caaaguagcugggacuauuaggc

SEQ ID NO: 1371772 - RNA, 21 nt, Human
cacaaaaaugacacugaagau

SEQ ID NO: 1371773 - RNA, 24 nt, Human
cacaacacagauuuaagagacaaa

SEQ ID NO: 1371774 - RNA, 25 nt, Human
cacaacacagauuuaagagacaaaa

SEQ ID NO: 1371775 - RNA, 24 nt, Human
caccacgcccgguuaauuuuugua

SEQ ID NO: 1371776 - RNA, 18 nt, Human
cacuccguaacccagauu

SEQ ID NO: 1371777 - RNA, 23 nt, Human
cacugcaaccuccgucucccggg

SEQ ID NO: 1371778 - RNA, 22 nt, Human
caggaaaaaaaaugauuagaaa

SEQ ID NO: 1371779 - RNA, 19 nt, Human
caguggugcgaucuuggcu

SEQ ID NO: 1371780 - RNA, 26 nt, Human
ccaaaguagcugggacuauuaggcgu

SEQ ID NO: 1371781 - RNA, 19 nt, Human
ccauguuggcuaggcuggu

SEQ ID NO: 1371782 - RNA, 22 nt, Human
ccauguuggcuaggcuggucuc

SEQ ID NO: 1371783 - RNA, 19 nt, Human
cccacagaguuuaaccauc

SEQ ID NO: 1371784 - RNA, 21 nt, Human
cccacagaguuuaaccaucau

SEQ ID NO: 1371785 - RNA, 19 nt, Human
cccggguuuaagcgauccu

SEQ ID NO: 1371786 - RNA, 20 nt, Human
cccggguuuaagcgauccuu

SEQ ID NO: 1371787 - RNA, 18 nt, Human
cccucucuauaauagaac

SEQ ID NO: 1371788 - RNA, 26 nt, Human
ccuucugccuuagccuccaaaguagc

SEQ ID NO: 1371789 - RNA, 26 nt, Human
cuaagccaaaaagaagauaaacauuu

SEQ ID NO: 1371790 - RNA, 24 nt, Human
cucacugcaaccuccgucucccgg

SEQ ID NO: 1371791 - RNA, 23 nt, Human
cugcaaccuccgucucccggguu

SEQ ID NO: 1371792 - RNA, 24 nt, Human
cugcaaccuccgucucccggguuu

SEQ ID NO: 1371793 - RNA, 23 nt, Human
cugccuuagccuccaaaguagcu

SEQ ID NO: 1371794 - RNA, 24 nt, Human
cuuagccuccaaaguagcugggac

SEQ ID NO: 1371795 - RNA, 20 nt, Human
cuuugagcuugguuaaguga

SEQ ID NO: 1371796 - RNA, 18 nt, Human
gaggggggagaaaaucag

SEQ ID NO: 1371797 - RNA, 20 nt, Human
gauagaccggauuacuuucu

SEQ ID NO: 1371798 - RNA, 19 nt, Human
gcagcugaacuugacagga

SEQ ID NO: 1371799 - RNA, 19 nt, Human
gcagugcaguggugcgauc

SEQ ID NO: 1371800 - RNA, 18 nt, Human
gccauguuggcuaggcug

SEQ ID NO: 1371801 - RNA, 20 nt, Human
gccauguuggcuaggcuggu

SEQ ID NO: 1371802 - RNA, 21 nt, Human
gggauauauaucucugucucu

SEQ ID NO: 1371803 - RNA, 19 nt, Human
gggguuuugccauguuggc

SEQ ID NO: 1371804 - RNA, 23 nt, Human
gggguuuugccauguuggcuagg

SEQ ID NO: 1371805 - RNA, 23 nt, Human
guagaguugggguuuugccaugu

SEQ ID NO: 1371806 - RNA, 19 nt, Human
guagcugggacuauuaggc

SEQ ID NO: 1371807 - RNA, 20 nt, Human
uaacacaaaagucccuuaua

SEQ ID NO: 1371808 - RNA, 21 nt, Human
uaacacaaaagucccuuauaa

SEQ ID NO: 1371809 - RNA, 24 nt, Human
uaacacaaaagucccuuauaacuc

SEQ ID NO: 1371810 - RNA, 21 nt, Human
uaacagagaaacuaagccaaa

SEQ ID NO: 1371811 - RNA, 28 nt, Human
uaacagagaaacuaagccaaaaagaaga

SEQ ID NO: 1371812 - RNA, 22 nt, Human
uaagccaaaaagaagauaaaca

SEQ ID NO: 1371813 - RNA, 27 nt, Human
uaagcgauccuucugccuuagccucca

SEQ ID NO: 1371814 - RNA, 23 nt, Human
uaaugugggagaugggauauaua

SEQ ID NO: 1371815 - RNA, 22 nt, Human
uaauuuuuguauuguuaguaga

SEQ ID NO: 1371816 - RNA, 18 nt, Human
uaccaaaaacaaaaaggg

SEQ ID NO: 1371817 - RNA, 20 nt, Human
uagaauucgcacucuucauc

SEQ ID NO: 1371818 - RNA, 22 nt, Human
uagaguugggguuuugccaugu

SEQ ID NO: 1371819 - RNA, 23 nt, Human
uagccgcugugcagcugaacuug

SEQ ID NO: 1371820 - RNA, 24 nt, Human
uaguagaguugggguuuugccaug

SEQ ID NO: 1371821 - RNA, 25 nt, Human
uauacuaagaaaaaauaaaaaagaa

SEQ ID NO: 1371822 - RNA, 25 nt, Human
uauauccccaaaguuugaaaacaaa

SEQ ID NO: 1371823 - RNA, 24 nt, Human
ucacugcaaccuccgucucccggg

SEQ ID NO: 1371824 - RNA, 25 nt, Human
ucacugcaaccuccgucucccgggu

SEQ ID NO: 1371825 - RNA, 19 nt, Human
uccccaaaguuugaaaaca

SEQ ID NO: 1371826 - RNA, 20 nt, Human
ucccggguuuaagcgauccu

SEQ ID NO: 1371827 - RNA, 23 nt, Human
ucccggguuuaagcgauccuucu

SEQ ID NO: 1371828 - RNA, 24 nt, Human
uccguaacccagauugcagugcag

SEQ ID NO: 1371829 - RNA, 23 nt, Human
ucucacuccguaacccagauugc

SEQ ID NO: 1371830 - RNA, 24 nt, Human
ucucacuccguaacccagauugca

SEQ ID NO: 1371831 - RNA, 24 nt, Human
ucucccggguuuaagcgauccuuc

SEQ ID NO: 1371832 - RNA, 24 nt, Human
ugaaaugagcagagacuuuaggua

SEQ ID NO: 1371833 - RNA, 19 nt, Human
ugauuagagagacugugau

SEQ ID NO: 1371834 - RNA, 20 nt, Human
ugauuagagagacugugauu

SEQ ID NO: 1371835 - RNA, 21 nt, Human
ugcacaggaaaaaaaaugauu

SEQ ID NO: 1371836 - RNA, 24 nt, Human
ugcagugcaguggugcgaucuugg

SEQ ID NO: 1371837 - RNA, 23 nt, Human
ugcaguggugcgaucuuggcucc

SEQ ID NO: 1371838 - RNA, 24 nt, Human
ugccauguuggcuaggcuggucuc

SEQ ID NO: 1371839 - RNA, 18 nt, Human
uggaauaaaucuucacaa

SEQ ID NO: 1371840 - RNA, 24 nt, Human
uggcuaggcuggucucaaacuccu

SEQ ID NO: 1371841 - RNA, 23 nt, Human
uggcuuugagcuugguuaaguga

SEQ ID NO: 1371842 - RNA, 25 nt, Human
ugggacuauuaggcgugugccacca

SEQ ID NO: 1371843 - RNA, 23 nt, Human
ugggguuuugccauguuggcuag

SEQ ID NO: 1371844 - RNA, 24 nt, Human
ugggguuuugccauguuggcuagg

SEQ ID NO: 1371845 - RNA, 28 nt, Human
uguaacagagaaacuaagccaaaaagaa

SEQ ID NO: 1371846 - RNA, 18 nt, Human
uuaguagaguugggguuu

SEQ ID NO: 1371847 - RNA, 18 nt, Human
uuaguagaguugggguuu

SEQ ID NO: 1371848 - RNA, 18 nt, Human
uuaguagaguugggguuu

SEQ ID NO: 1371849 - RNA, 24 nt, Human
uuaguagaguugggguuuugccau

SEQ ID NO: 1371850 - RNA, 21 nt, Human
uucacaaaaaugacacugaag

SEQ ID NO: 1371851 - RNA, 18 nt, Human
uugaaagguuauuaaaug

SEQ ID NO: 1371852 - RNA, 24 nt, Human
uugccauguuggcuaggcuggucu

SEQ ID NO: 1371853 - RNA, 24 nt, Human
uugggguuuugccauguuggcuag

SEQ ID NO: 1371854 - RNA, 21 nt, Human
uuuuaccaaaaacaaaaaggg

SEQ ID NO: 1371855 - RNA, 23 nt, Human
uuuugccauguuggcuaggcugg

SEQ ID NO: 1371856 - RNA, 20 nt, Human
uuuuuguauuguuaguagag

SEQ ID NO: 1371857 - RNA, 21 nt, Human
aaagaaacaaaaacccucuga

SEQ ID NO: 1371858 - RNA, 19 nt, Human
acaauccagcaauccuacc

SEQ ID NO: 1371859 - RNA, 19 nt, Human
accagggaggagccagcug

SEQ ID NO: 1371860 - RNA, 21 nt, Human
acgcagccccaugaugcccaa

SEQ ID NO: 1371861 - RNA, 21 nt, Human
acgucagccguaugagggucc

SEQ ID NO: 1371862 - RNA, 20 nt, Human
agagcuccccgcgggcccuc

SEQ ID NO: 1371863 - RNA, 18 nt, Human
agcagaacaguaucccag

SEQ ID NO: 1371864 - RNA, 25 nt, Human
agcagccacaucacgcagccccaug

SEQ ID NO: 1371865 - RNA, 24 nt, Human
agccuggccgacagagugagaucc

SEQ ID NO: 1371866 - RNA, 24 nt, Human
aggagauaacgccuguagucccag

SEQ ID NO: 1371867 - RNA, 21 nt, Human
aggcagagcucagguggucac

SEQ ID NO: 1371868 - RNA, 25 nt, Human
aggcagagcucagguggucacgcgg

SEQ ID NO: 1371869 - RNA, 19 nt, Human
aggcagaucacaucaggga

SEQ ID NO: 1371870 - RNA, 18 nt, Human
aggcugagaugggaggau

SEQ ID NO: 1371871 - RNA, 24 nt, Human
aucaaaaugaccaaacaauccagc

SEQ ID NO: 1371872 - RNA, 19 nt, Human
augaugcacggauaaacac

SEQ ID NO: 1371873 - RNA, 21 nt, Human
auugcauuccagccuggccga

SEQ ID NO: 1371874 - RNA, 24 nt, Human
auugcauuccagccuggccgacag

SEQ ID NO: 1371875 - RNA, 21 nt, Human
caccauggugcagaccuuccg

SEQ ID NO: 1371876 - RNA, 23 nt, Human
caccucugucuuccugcugaggg

SEQ ID NO: 1371877 - RNA, 19 nt, Human
cacgacggagagaggccca

SEQ ID NO: 1371878 - RNA, 20 nt, Human
cacuucagaaaagccagggg

SEQ ID NO: 1371879 - RNA, 27 nt, Human
cagagugagaucccaucacagccuguu

SEQ ID NO: 1371880 - RNA, 22 nt, Human
cagcagcagaacaguaucccag

SEQ ID NO: 1371881 - RNA, 19 nt, Human
cagccacaucacgcagccc

SEQ ID NO: 1371882 - RNA, 20 nt, Human
cagccuggccgacagaguga

SEQ ID NO: 1371883 - RNA, 20 nt, Human
cagcucaaccccaugaacuc

SEQ ID NO: 1371884 - RNA, 19 nt, Human
cagcugaggaacacacagg

SEQ ID NO: 1371885 - RNA, 21 nt, Human
caggagaccaccugccaccac

SEQ ID NO: 1371886 - RNA, 21 nt, Human
cauaaagagcaugcaacccag

SEQ ID NO: 1371887 - RNA, 18 nt, Human
caucagggaaggacagca

SEQ ID NO: 1371888 - RNA, 22 nt, Human
cauuccagccuggccgacagag

SEQ ID NO: 1371889 - RNA, 24 nt, Human
cauuccagccuggccgacagagug

SEQ ID NO: 1371890 - RNA, 18 nt, Human
cauugcauuccagccugg

SEQ ID NO: 1371891 - RNA, 21 nt, Human
cauugcauuccagccuggccg

SEQ ID NO: 1371892 - RNA, 24 nt, Human
cauugcauuccagccuggccgaca

SEQ ID NO: 1371893 - RNA, 25 nt, Human
cauugcauuccagccuggccgacag

SEQ ID NO: 1371894 - RNA, 26 nt, Human
ccaccugccaccacuucagaaaagcc

SEQ ID NO: 1371895 - RNA, 22 nt, Human
ccagauccugcuacccaggaga

SEQ ID NO: 1371896 - RNA, 19 nt, Human
ccauugcauuccagccugg

SEQ ID NO: 1371897 - RNA, 20 nt, Human
ccauugcauuccagccuggc

SEQ ID NO: 1371898 - RNA, 24 nt, Human
ccauugcauuccagccuggccgac

SEQ ID NO: 1371899 - RNA, 24 nt, Human
cccaggcagaucacaucagggaag

SEQ ID NO: 1371900 - RNA, 20 nt, Human
cccugcacucuaggucugag

SEQ ID NO: 1371901 - RNA, 20 nt, Human
cccugcacucuaggucugag

SEQ ID NO: 1371902 - RNA, 18 nt, Human
ccggggccucugugcacc

SEQ ID NO: 1371903 - RNA, 20 nt, Human
ccucugugcaccauggugca

SEQ ID NO: 1371904 - RNA, 23 nt, Human
ccugcugaggggggcuucuccca

SEQ ID NO: 1371905 - RNA, 18 nt, Human
ccuguagucccagcuacu

SEQ ID NO: 1371906 - RNA, 22 nt, Human
ccuguagucccagcuacuucag

SEQ ID NO: 1371907 - RNA, 19 nt, Human
cgccuguagucccagcuac

SEQ ID NO: 1371908 - RNA, 25 nt, Human
cgggguggggagguugcacugagcc

SEQ ID NO: 1371909 - RNA, 23 nt, Human
cuccuuguccuuuccugcuccag

SEQ ID NO: 1371910 - RNA, 20 nt, Human
cugcacucuaggucugaggc

SEQ ID NO: 1371911 - RNA, 21 nt, Human
cugcacugccacgcuugcugc

SEQ ID NO: 1371912 - RNA, 22 nt, Human
cugcuacccaggagaccaccug

SEQ ID NO: 1371913 - RNA, 18 nt, Human
cuuuccucuuccucuucc

SEQ ID NO: 1371914 - RNA, 25 nt, Human
cuuucuggccucacccagcuccggg

SEQ ID NO: 1371915 - RNA, 24 nt, Human
cuuugcuuuccucuuccucuucca

SEQ ID NO: 1371916 - RNA, 18 nt, Human
gaaaagaaacaaaaaccc

SEQ ID NO: 1371917 - RNA, 18 nt, Human
gagccccaggcagaucac

SEQ ID NO: 1371918 - RNA, 18 nt, Human
gagcuaucugcacugcca

SEQ ID NO: 1371919 - RNA, 22 nt, Human
gagguugcacugagccaaguug

SEQ ID NO: 1371920 - RNA, 22 nt, Human
gcaauccuaccucugaguaugc

SEQ ID NO: 1371921 - RNA, 21 nt, Human
gcacauuccccgcugacccca

SEQ ID NO: 1371922 - RNA, 24 nt, Human
gcauuccagccuggccgacagagu

SEQ ID NO: 1371923 - RNA, 23 nt, Human
gcccagauccugcuacccaggag

SEQ ID NO: 1371924 - RNA, 20 nt, Human
gccccacuggugggucccug

SEQ ID NO: 1371925 - RNA, 21 nt, Human
ggaaggcaguuuuuccacaga

SEQ ID NO: 1371926 - RNA, 20 nt, Human
ggagguugcacugagccaag

SEQ ID NO: 1371927 - RNA, 23 nt, Human
ggagguugcacugagccaaguug

SEQ ID NO: 1371928 - RNA, 24 nt, Human
ggagguugcacugagccaaguugg

SEQ ID NO: 1371929 - RNA, 18 nt, Human
ggaugcaaacgauggagc

SEQ ID NO: 1371930 - RNA, 23 nt, Human
ggcguucccuuuaagcucugccc

SEQ ID NO: 1371931 - RNA, 18 nt, Human
ggggaucucccugcacuc

SEQ ID NO: 1371932 - RNA, 24 nt, Human
ggggcccaucccuggaugaaggag

SEQ ID NO: 1371933 - RNA, 19 nt, Human
ggugcagaccuuccaggcc

SEQ ID NO: 1371934 - RNA, 21 nt, Human
guggaaggcaguuuuuccaca

SEQ ID NO: 1371935 - RNA, 23 nt, Human
gugguauuuuuguugcuccacuu

SEQ ID NO: 1371936 - RNA, 19 nt, Human
uaaacacacugcaggagcc

SEQ ID NO: 1371937 - RNA, 18 nt, Human
uaagggaaguaagcagcc

SEQ ID NO: 1371938 - RNA, 23 nt, Human
uagcucagguacagauucagcag

SEQ ID NO: 1371939 - RNA, 19 nt, Human
uagcuccggacucagggga

SEQ ID NO: 1371940 - RNA, 19 nt, Human
ucacagaaggcagagcuca

SEQ ID NO: 1371941 - RNA, 21 nt, Human
ucagcgacucucuggugcccu

SEQ ID NO: 1371942 - RNA, 19 nt, Human
uccagccuggccgacagag

SEQ ID NO: 1371943 - RNA, 20 nt, Human
uccagccuggccgacagagu

SEQ ID NO: 1371944 - RNA, 23 nt, Human
uccagccuggccgacagagugag

SEQ ID NO: 1371945 - RNA, 24 nt, Human
uccagccuggccgacagagugaga

SEQ ID NO: 1371946 - RNA, 21 nt, Human
ucccagccccacugguggguc

SEQ ID NO: 1371947 - RNA, 24 nt, Human
ucccucgcaugcacaguucacagu

SEQ ID NO: 1371948 - RNA, 18 nt, Human
uccgugggaacgauucug

SEQ ID NO: 1371949 - RNA, 27 nt, Human
uccuaugaaugugcuggacccgccgcu

SEQ ID NO: 1371950 - RNA, 18 nt, Human
uccugcuacccaggagac

SEQ ID NO: 1371951 - RNA, 19 nt, Human
ugacuccuuugcuuuccuc

SEQ ID NO: 1371952 - RNA, 18 nt, Human
ugagaugggaggauuguu

SEQ ID NO: 1371953 - RNA, 20 nt, Human
ugcaaacgauggagcugcug

SEQ ID NO: 1371954 - RNA, 24 nt, Human
ugcauuccagccuggccgacagag

SEQ ID NO: 1371955 - RNA, 19 nt, Human
ugcccucgugaucagcagc

SEQ ID NO: 1371956 - RNA, 18 nt, Human
uggcgcugcugaucucac

SEQ ID NO: 1371957 - RNA, 20 nt, Human
uucccuuuaagcucugccca

SEQ ID NO: 1371958 - RNA, 19 nt, Human
uugaucucauaaagagcau

SEQ ID NO: 1371959 - RNA, 24 nt, Human
uuggcaccauugcauuccagccug

SEQ ID NO: 1371960 - RNA, 19 nt, Human
uuuuuuuuuuuuuuuugcc

SEQ ID NO: 1371961 - RNA, 18 nt, Human
uuuuuuuuuuuuuuuuug

SEQ ID NO: 1371962 - RNA, 20 nt, Human
aaagaucuggugguggagac

SEQ ID NO: 1371963 - RNA, 20 nt, Human
aagaagaacaaagagguugg

SEQ ID NO: 1371964 - RNA, 25 nt, Human
acggaacccagcgaaagugcacgcc

SEQ ID NO: 1371965 - RNA, 23 nt, Human
agaagaacaaagagguuggagag

SEQ ID NO: 1371966 - RNA, 22 nt, Human
agacaggaagaggaaaacagag

SEQ ID NO: 1371967 - RNA, 18 nt, Human
agagguuggagagggaac

SEQ ID NO: 1371968 - RNA, 26 nt, Human
aggaaagaaguacuccauaaagaaaa

SEQ ID NO: 1371969 - RNA, 21 nt, Human
aggcuguaagagcaccugagg

SEQ ID NO: 1371970 - RNA, 19 nt, Human
caccugagggggagguagg

SEQ ID NO: 1371971 - RNA, 24 nt, Human
caggaagaggaaaacagaggaaag

SEQ ID NO: 1371972 - RNA, 19 nt, Human
ccacggagaaagaucuggu

SEQ ID NO: 1371973 - RNA, 21 nt, Human
ccccgcccccuccccuccccg

SEQ ID NO: 1371974 - RNA, 18 nt, Human
cccugcggagacaggaac

SEQ ID NO: 1371975 - RNA, 18 nt, Human
ccugcggagacaggaacg

SEQ ID NO: 1371976 - RNA, 20 nt, Human
cggaacccagcgaaagugca

SEQ ID NO: 1371977 - RNA, 20 nt, Human
cgggagaacccugggcggcg

SEQ ID NO: 1371978 - RNA, 22 nt, Human
gaacaaagagguuggagaggga

SEQ ID NO: 1371979 - RNA, 21 nt, Human
gaacccagcagggcccuggcg

SEQ ID NO: 1371980 - RNA, 26 nt, Human
gcgggggcgggggugcgggcggcagu

SEQ ID NO: 1371981 - RNA, 19 nt, Human
ggagaaagaucugguggug

SEQ ID NO: 1371982 - RNA, 21 nt, Human
ggaggggagacaggaagagga

SEQ ID NO: 1371983 - RNA, 21 nt, Human
ggcaagaagaacaaagagguu

SEQ ID NO: 1371984 - RNA, 23 nt, Human
ggcaguggcgggagaacccuggg

SEQ ID NO: 1371985 - RNA, 18 nt, Human
ggcggcggcuguggaggc

SEQ ID NO: 1371986 - RNA, 22 nt, Human
gggaggggagacaggaagagga

SEQ ID NO: 1371987 - RNA, 18 nt, Human
gggcaagaagaacaaaga

SEQ ID NO: 1371988 - RNA, 19 nt, Human
gggcggcggcuguggaggc

SEQ ID NO: 1371989 - RNA, 21 nt, Human
gguuggagagggaacgggagc

SEQ ID NO: 1371990 - RNA, 21 nt, Human
uaagagcaccugagggggagg

SEQ ID NO: 1371991 - RNA, 19 nt, Human
uaagccccgcccccucccc

SEQ ID NO: 1371992 - RNA, 18 nt, Human
uacuccauaaagaaaacu

SEQ ID NO: 1371993 - RNA, 22 nt, Human
ucccucuagggaucgaacgccc

SEQ ID NO: 1371994 - RNA, 23 nt, Human
ucccucuagggaucgaacgcccu

SEQ ID NO: 1371995 - RNA, 18 nt, Human
ugaccccggguaagcccc

SEQ ID NO: 1371996 - RNA, 21 nt, Human
ugcggagacaggaacguggcg

SEQ ID NO: 1371997 - RNA, 21 nt, Human
uggagagggaacgggagccuc

SEQ ID NO: 1371998 - RNA, 23 nt, Human
ugggaggggagacaggaagagga

SEQ ID NO: 1371999 - RNA, 23 nt, Human
uguaagagcaccugagggggagg

SEQ ID NO: 1372000 - RNA, 18 nt, Human
uguggaggcgggcggccc

SEQ ID NO: 1372001 - RNA, 18 nt, Human
uuagcagaggaauccacg

SEQ ID NO: 1372002 - RNA, 20 nt, Human
uuuuuuuuuuuuuugggagg

SEQ ID NO: 1372003 - RNA, 24 nt, Human
uuuuuuuuuuuuuuuuugggaggg

SEQ ID NO: 1372004 - RNA, 26 nt, Human
uuuuuuuuuuuuuuuuuuuuuuuggg

SEQ ID NO: 1372005 - RNA, 18 nt, Human
aaacucaagucaaugcug

SEQ ID NO: 1372006 - RNA, 22 nt, Human
aaagaaacaaaauacagggugg

SEQ ID NO: 1372007 - RNA, 24 nt, Human
aaagugcugggauuacaggcguga

SEQ ID NO: 1372008 - RNA, 26 nt, Human
aagaaacaaaauacagggugggaaaa

SEQ ID NO: 1372009 - RNA, 18 nt, Human
aagucaauucaaacucaa

SEQ ID NO: 1372010 - RNA, 24 nt, Human
aagugaucuauuggucuuggccuc

SEQ ID NO: 1372011 - RNA, 19 nt, Human
aagugcugggauuacaggc

SEQ ID NO: 1372012 - RNA, 19 nt, Human
aagugcugggauuacaggc

SEQ ID NO: 1372013 - RNA, 26 nt, Human
aagugcugggauuacaggcgugagcc

SEQ ID NO: 1372014 - RNA, 25 nt, Human
agaaacaaaauacagggugggaaaa

SEQ ID NO: 1372015 - RNA, 23 nt, Human
agacugaagaccuugccacaauc

SEQ ID NO: 1372016 - RNA, 19 nt, Human
aggcuuugccacacucagu

SEQ ID NO: 1372017 - RNA, 27 nt, Human
agggugggaaaagugacucaugucugu

SEQ ID NO: 1372018 - RNA, 26 nt, Human
agucuggucucaaacuccugaccucc

SEQ ID NO: 1372019 - RNA, 24 nt, Human
caaagugcugggauuacaggcgug

SEQ ID NO: 1372020 - RNA, 21 nt, Human
cacuaaaggcuuugccacacu

SEQ ID NO: 1372021 - RNA, 21 nt, Human
cauaagaugaagcuagacuga

SEQ ID NO: 1372022 - RNA, 26 nt, Human
cauuauggauucuccaaugauuugaa

SEQ ID NO: 1372023 - RNA, 22 nt, Human
ccaaagugcugggauuacaggc

SEQ ID NO: 1372024 - RNA, 22 nt, Human
ccaaagugcugggauuacaggc

SEQ ID NO: 1372025 - RNA, 24 nt, Human
ccaaagugcugggauuacaggcgu

SEQ ID NO: 1372026 - RNA, 22 nt, Human
ccugaccucaagugaucuauug

SEQ ID NO: 1372027 - RNA, 21 nt, Human
cuaaaggcuuugccacacuca

SEQ ID NO: 1372028 - RNA, 21 nt, Human
cugaagaccuugccacacuga

SEQ ID NO: 1372029 - RNA, 20 nt, Human
cugaagacuuugugauaauc

SEQ ID NO: 1372030 - RNA, 19 nt, Human
cuuauaagguuucucucca

SEQ ID NO: 1372031 - RNA, 19 nt, Human
cuuguaagguuucucucca

SEQ ID NO: 1372032 - RNA, 19 nt, Human
cuuguaagguuucucucca

SEQ ID NO: 1372033 - RNA, 20 nt, Human
gaacugcaagguaugaacaa

SEQ ID NO: 1372034 - RNA, 21 nt, Human
gaagcuagacugaagaccuug

SEQ ID NO: 1372035 - RNA, 18 nt, Human
gauuacaggcgugagcca

SEQ ID NO: 1372036 - RNA, 20 nt, Human
gauuacaggcgugagccacc

SEQ ID NO: 1372037 - RNA, 24 nt, Human
gauuacaggcgugagccaccccgc

SEQ ID NO: 1372038 - RNA, 22 nt, Human
guaugaagucuccuguuuugca

SEQ ID NO: 1372039 - RNA, 19 nt, Human
gucuuggccucccaaagug

SEQ ID NO: 1372040 - RNA, 18 nt, Human
uaagaugaagcuagacug

SEQ ID NO: 1372041 - RNA, 22 nt, Human
uacaggcgugagccaccccgcc

SEQ ID NO: 1372042 - RNA, 23 nt, Human
uacaggcgugagccaccccgccu

SEQ ID NO: 1372043 - RNA, 20 nt, Human
uacagggugggaaaagugac

SEQ ID NO: 1372044 - RNA, 22 nt, Human
ucaaugcugaauugacucuaau

SEQ ID NO: 1372045 - RNA, 23 nt, Human
ucaaugcugaauugacucuaaug

SEQ ID NO: 1372046 - RNA, 18 nt, Human
ucacaaacucuuacauuu

SEQ ID NO: 1372047 - RNA, 24 nt, Human
ucccaaagugcugggauuacaggc

SEQ ID NO: 1372048 - RNA, 21 nt, Human
ucccuauaccauggauugccu

SEQ ID NO: 1372049 - RNA, 19 nt, Human
uccugcugcauucauuaca

SEQ ID NO: 1372050 - RNA, 20 nt, Human
ucuuggccucccaaagugcu

SEQ ID NO: 1372051 - RNA, 19 nt, Human
ugaccucaagugaucuauu

SEQ ID NO: 1372052 - RNA, 20 nt, Human
ugacugaaggucuugccaca

SEQ ID NO: 1372053 - RNA, 18 nt, Human
ugagccaccccgccuggc

SEQ ID NO: 1372054 - RNA, 22 nt, Human
ugccugauggugaauaaguguu

SEQ ID NO: 1372055 - RNA, 24 nt, Human
ugcugggauuacaggcgugagcca

SEQ ID NO: 1372056 - RNA, 24 nt, Human
uggccagucuggucucaaacuccu

SEQ ID NO: 1372057 - RNA, 18 nt, Human
uggccucccaaagugcug

SEQ ID NO: 1372058 - RNA, 18 nt, Human
ugggaaaagugacucaug

SEQ ID NO: 1372059 - RNA, 18 nt, Human
ugggauuacaggcgugag

SEQ ID NO: 1372060 - RNA, 19 nt, Human
ugggauuacaggcgugagc

SEQ ID NO: 1372061 - RNA, 21 nt, Human
ugggauuacaggcgugagcca

SEQ ID NO: 1372062 - RNA, 22 nt, Human
ugggauuacaggcgugagccac

SEQ ID NO: 1372063 - RNA, 23 nt, Human
ugggauuacaggcgugagccacc

SEQ ID NO: 1372064 - RNA, 23 nt, Human
ugggauuacaggcgugagccacc

SEQ ID NO: 1372065 - RNA, 24 nt, Human
ugggauuacaggcgugagccaccc

SEQ ID NO: 1372066 - RNA, 25 nt, Human
ugggauuacaggcgugagccacccc

SEQ ID NO: 1372067 - RNA, 21 nt, Human
uggugaauaaguguugacugc

SEQ ID NO: 1372068 - RNA, 22 nt, Human
ugucacauucuucacauuugua

SEQ ID NO: 1372069 - RNA, 23 nt, Human
ugucuguuggccagucuggucuc

SEQ ID NO: 1372070 - RNA, 21 nt, Human
ugugaaucacgcccaagauuc

SEQ ID NO: 1372071 - RNA, 19 nt, Human
uguuggccagucuggucuc

SEQ ID NO: 1372072 - RNA, 23 nt, Human
uuacacuuguaagguuucucucc

SEQ ID NO: 1372073 - RNA, 24 nt, Human
uucaaaaucucucauuauggauuc

SEQ ID NO: 1372074 - RNA, 24 nt, Human
uuguaagcuuucucuccaguauga

SEQ ID NO: 1372075 - RNA, 19 nt, Human
uuuguaagcuuucucucca

SEQ ID NO: 1372076 - RNA, 19 nt, Human
uuuguaagguuucucucca

SEQ ID NO: 1372077 - RNA, 19 nt, Human
uuuguaagguuucucucca

SEQ ID NO: 1372078 - RNA, 18 nt, Human
aaacagccugcuguuuuc

SEQ ID NO: 1372079 - RNA, 21 nt, Human
aaacagccugcuguuuucuga

SEQ ID NO: 1372080 - RNA, 21 nt, Human
aaacugagagcaucaccauuu

SEQ ID NO: 1372081 - RNA, 19 nt, Human
aaacugcagccaucacuca

SEQ ID NO: 1372082 - RNA, 19 nt, Human
aacauuauaacaaaagccu

SEQ ID NO: 1372083 - RNA, 26 nt, Human
aagcagcaggugaaaggaggucagga

SEQ ID NO: 1372084 - RNA, 21 nt, Human
acaguuucuguugggcuuuug

SEQ ID NO: 1372085 - RNA, 19 nt, Human
acccgggcacccgcacccc

SEQ ID NO: 1372086 - RNA, 19 nt, Human
agaagaucugagaaacagc

SEQ ID NO: 1372087 - RNA, 19 nt, Human
agagaaacugagagcauca

SEQ ID NO: 1372088 - RNA, 27 nt, Human
agccaggaaauagaugaaaagggaccc

SEQ ID NO: 1372089 - RNA, 24 nt, Human
agcuccgccccucacccgggcacc

SEQ ID NO: 1372090 - RNA, 19 nt, Human
agguaggucagaggauucu

SEQ ID NO: 1372091 - RNA, 20 nt, Human
agguauagaaggggcgugga

SEQ ID NO: 1372092 - RNA, 24 nt, Human
aggucagaggauucuuuuuauggc

SEQ ID NO: 1372093 - RNA, 21 nt, Human
aguucccagggcccccagaau

SEQ ID NO: 1372094 - RNA, 18 nt, Human
auggccaacuggaagaug

SEQ ID NO: 1372095 - RNA, 21 nt, Human
caaaagaggcauaaucuaaua

SEQ ID NO: 1372096 - RNA, 23 nt, Human
caccagacugggaggcugagggc

SEQ ID NO: 1372097 - RNA, 20 nt, Human
caccgcccagcccucgugcc

SEQ ID NO: 1372098 - RNA, 22 nt, Human
cagaauaguucaccaggcucca

SEQ ID NO: 1372099 - RNA, 18 nt, Human
cagaggauucuuuuuaug

SEQ ID NO: 1372100 - RNA, 22 nt, Human
cagcaggugaaaggaggucagg

SEQ ID NO: 1372101 - RNA, 18 nt, Human
caucaccauuucuucagu

SEQ ID NO: 1372102 - RNA, 21 nt, Human
caugaccuaaaaucagacaag

SEQ ID NO: 1372103 - RNA, 18 nt, Human
caugaggcuuuaguuagc

SEQ ID NO: 1372104 - RNA, 23 nt, Human
ccagagccugggguggaauacgg

SEQ ID NO: 1372105 - RNA, 20 nt, Human
cccaugaagcuuucuuaagg

SEQ ID NO: 1372106 - RNA, 22 nt, Human
cccccagcuccgccccucaccc

SEQ ID NO: 1372107 - RNA, 20 nt, Human
cccgcaccccaccgcccagc

SEQ ID NO: 1372108 - RNA, 23 nt, Human
cccgcaccccaccgcccagcccu

SEQ ID NO: 1372109 - RNA, 18 nt, Human
cccucgggaagaaagccc

SEQ ID NO: 1372110 - RNA, 20 nt, Human
cccucgggaagaaagcccgc

SEQ ID NO: 1372111 - RNA, 21 nt, Human
cccucgggaagaaagcccgcu

SEQ ID NO: 1372112 - RNA, 18 nt, Human
cccucgugccgcccucgg

SEQ ID NO: 1372113 - RNA, 23 nt, Human
ccgaagugcccaacauuauaaca

SEQ ID NO: 1372114 - RNA, 18 nt, Human
ccgcaccccaccgcccag

SEQ ID NO: 1372115 - RNA, 20 nt, Human
ccucgggaagaaagcccgcu

SEQ ID NO: 1372116 - RNA, 25 nt, Human
ccugucuacauuucuuccucucagg

SEQ ID NO: 1372117 - RNA, 21 nt, Human
cugcuguuuucugaggcccga

SEQ ID NO: 1372118 - RNA, 22 nt, Human
cuuccucucagguauggggcag

SEQ ID NO: 1372119 - RNA, 22 nt, Human
gaagcuuucuuaagggaaaaug

SEQ ID NO: 1372120 - RNA, 21 nt, Human
gaauacggucauggaccauac

SEQ ID NO: 1372121 - RNA, 18 nt, Human
gaggauucuuuuuauggc

SEQ ID NO: 1372122 - RNA, 18 nt, Human
gagggccuuccccgagcc

SEQ ID NO: 1372123 - RNA, 22 nt, Human
gauaucacaaaagauacagcug

SEQ ID NO: 1372124 - RNA, 18 nt, Human
gcaccaacuagaaccuag

SEQ ID NO: 1372125 - RNA, 23 nt, Human
gccuuccccgagccuuucugcug

SEQ ID NO: 1372126 - RNA, 18 nt, Human
gccuuggggagaaaaagc

SEQ ID NO: 1372127 - RNA, 19 nt, Human
gccuuuuauggagaccuca

SEQ ID NO: 1372128 - RNA, 18 nt, Human
gcgugccacuuugcaaag

SEQ ID NO: 1372129 - RNA, 19 nt, Human
gcugaagagaugcauaggg

SEQ ID NO: 1372130 - RNA, 22 nt, Human
gcugauagggaaggcagagaaa

SEQ ID NO: 1372131 - RNA, 21 nt, Human
ggaaauagaugaaaaccuauc

SEQ ID NO: 1372132 - RNA, 22 nt, Human
ggacaaaagaggcauaaucuaa

SEQ ID NO: 1372133 - RNA, 21 nt, Human
ggagccucccagagccugggg

SEQ ID NO: 1372134 - RNA, 24 nt, Human
ggcccccagaauaguucaccagga

SEQ ID NO: 1372135 - RNA, 19 nt, Human
ggcgugccacuuugcaaag

SEQ ID NO: 1372136 - RNA, 21 nt, Human
gggagccucccagagccuggg

SEQ ID NO: 1372137 - RNA, 19 nt, Human
ggggucucaugaccuaaaa

SEQ ID NO: 1372138 - RNA, 24 nt, Human
uagccugggccuauguuucuccca

SEQ ID NO: 1372139 - RNA, 18 nt, Human
uaguaugcuaacaagcag

SEQ ID NO: 1372140 - RNA, 22 nt, Human
uauaacaaaagccuaaaacaag

SEQ ID NO: 1372141 - RNA, 19 nt, Human
uaucacagaacccgaguuu

SEQ ID NO: 1372142 - RNA, 19 nt, Human
uauggccugccuuggggag

SEQ ID NO: 1372143 - RNA, 23 nt, Human
uauuauguuuauucauaauuuga

SEQ ID NO: 1372144 - RNA, 21 nt, Human
ucacccgggcacccgcacccc

SEQ ID NO: 1372145 - RNA, 20 nt, Human
uccgccccucacccgggcac

SEQ ID NO: 1372146 - RNA, 27 nt, Human
ucucccauaaauaaaggacagcagaga

SEQ ID NO: 1372147 - RNA, 21 nt, Human
ucucuaaaccugucuucuugg

SEQ ID NO: 1372148 - RNA, 24 nt, Human
ucuguugggcuuuuguaaacaaug

SEQ ID NO: 1372149 - RNA, 23 nt, Human
ucuuccucucagguauggggcag

SEQ ID NO: 1372150 - RNA, 18 nt, Human
ugaaaugggggucucaug

SEQ ID NO: 1372151 - RNA, 19 nt, Human
ugagaaacugcagccauca

SEQ ID NO: 1372152 - RNA, 19 nt, Human
ugaggcccgaagugcccaa

SEQ ID NO: 1372153 - RNA, 21 nt, Human
ugauugaagcauggacaacac

SEQ ID NO: 1372154 - RNA, 21 nt, Human
ugcauagggugagguauagaa

SEQ ID NO: 1372155 - RNA, 22 nt, Human
uggagaaaugggauuggacaaa

SEQ ID NO: 1372156 - RNA, 21 nt, Human
uggauagggaugauugaagca

SEQ ID NO: 1372157 - RNA, 25 nt, Human
uggcaugaggcuuuaguuagcccau

SEQ ID NO: 1372158 - RNA, 24 nt, Human
uguucuguucuccgaaagcucucu

SEQ ID NO: 1372159 - RNA, 19 nt, Human
uuauggagaccucauugga

SEQ ID NO: 1372160 - RNA, 20 nt, Human
uucucccauaaauaaaggac

SEQ ID NO: 1372161 - RNA, 18 nt, Human
uuuguaaacaaugaaaau

SEQ ID NO: 1372162 - RNA, 22 nt, Human
uuuuuauggccaacuggaagau

SEQ ID NO: 1372163 - RNA, 21 nt, Human
uuuuuuuuuuuuuuuccguuu

SEQ ID NO: 1372164 - RNA, 21 nt, Human
aaaccagcacuagaugugcaa

SEQ ID NO: 1372165 - RNA, 20 nt, Human
aaaguuucuagggcagcaug

SEQ ID NO: 1372166 - RNA, 23 nt, Human
aacccccacaagcacacacgcac

SEQ ID NO: 1372167 - RNA, 23 nt, Human
aaucuggccaucaaugcagccag

SEQ ID NO: 1372168 - RNA, 21 nt, Human
acaaaaguuucuagggcagca

SEQ ID NO: 1372169 - RNA, 23 nt, Human
acacacacucucucacagacaua

SEQ ID NO: 1372170 - RNA, 18 nt, Human
acacacuacccaaccccc

SEQ ID NO: 1372171 - RNA, 18 nt, Human
acacacuacccaaccccc

SEQ ID NO: 1372172 - RNA, 22 nt, Human
acacacucucucacagacauaa

SEQ ID NO: 1372173 - RNA, 23 nt, Human
acacgcacgcacacacacacaca

SEQ ID NO: 1372174 - RNA, 22 nt, Human
acacuacccaacccccacaagc

SEQ ID NO: 1372175 - RNA, 19 nt, Human
acgcacacacacacacaca

SEQ ID NO: 1372176 - RNA, 29 nt, Human
acgcacgcacacacacacacacacucucu

SEQ ID NO: 1372177 - RNA, 20 nt, Human
acugugcugacugagcacgg

SEQ ID NO: 1372178 - RNA, 22 nt, Human
agaauuaaaaacaaaaacaaac

SEQ ID NO: 1372179 - RNA, 24 nt, Human
agcccccuaaaauguacaaacuaa

SEQ ID NO: 1372180 - RNA, 20 nt, Human
agucaauggucaagacaguu

SEQ ID NO: 1372181 - RNA, 23 nt, Human
auuaaauaagcaaaagcaaaaau

SEQ ID NO: 1372182 - RNA, 23 nt, Human
caagagcaguauuuccaacaaag

SEQ ID NO: 1372183 - RNA, 19 nt, Human
cacacacacuacccaaccc

SEQ ID NO: 1372184 - RNA, 21 nt, Human
cacacacacuacccaaccccc

SEQ ID NO: 1372185 - RNA, 22 nt, Human
cacacacgcacgcacacacaca

SEQ ID NO: 1372186 - RNA, 20 nt, Human
cacacgcacgcacacacaca

SEQ ID NO: 1372187 - RNA, 23 nt, Human
caccgagaccagaauuaaaaaca

SEQ ID NO: 1372188 - RNA, 19 nt, Human
cagcagaacaccuuuuucu

SEQ ID NO: 1372189 - RNA, 21 nt, Human
cagcaugaauauaaaccaugu

SEQ ID NO: 1372190 - RNA, 20 nt, Human
cauagucaauggucaagaca

SEQ ID NO: 1372191 - RNA, 21 nt, Human
cauccaaugccugucggccac

SEQ ID NO: 1372192 - RNA, 23 nt, Human
caugguaaugaacuccaggaaga

SEQ ID NO: 1372193 - RNA, 22 nt, Human
cauuuacaaucacauccuguuc

SEQ ID NO: 1372194 - RNA, 23 nt, Human
ccaacccccacaagcacacacgc

SEQ ID NO: 1372195 - RNA, 19 nt, Human
ccacaagcacacacgcacg

SEQ ID NO: 1372196 - RNA, 33 nt, Human
ccccacaagcacacacgcacgcacacacacagu

SEQ ID NO: 1372197 - RNA, 28 nt, Human
cgcacacacacacacacacucucucaca

SEQ ID NO: 1372198 - RNA, 22 nt, Human
cuuccaucacugaaugaaaauc

SEQ ID NO: 1372199 - RNA, 18 nt, Human
cuuuucccagauccuuaa

SEQ ID NO: 1372200 - RNA, 28 nt, Human
gaaaauacacacacacuacccaaccccc

SEQ ID NO: 1372201 - RNA, 18 nt, Human
gaauuuauagacugugcu

SEQ ID NO: 1372202 - RNA, 25 nt, Human
gcacacacgcacgcacacacacaca

SEQ ID NO: 1372203 - RNA, 21 nt, Human
gcacacacgcacgcacacagu

SEQ ID NO: 1372204 - RNA, 25 nt, Human
gcacgcacacacacacacacacucu

SEQ ID NO: 1372205 - RNA, 18 nt, Human
ggcagcaugaauauaaac

SEQ ID NO: 1372206 - RNA, 19 nt, Human
gucagguuuacaauuguuc

SEQ ID NO: 1372207 - RNA, 19 nt, Human
uaagaaacugugucauagu

SEQ ID NO: 1372208 - RNA, 18 nt, Human
uaagcuaaggaaaacaua

SEQ ID NO: 1372209 - RNA, 20 nt, Human
uaagcuaaggaaaacauaca

SEQ ID NO: 1372210 - RNA, 22 nt, Human
uacacacacacuacccaacccc

SEQ ID NO: 1372211 - RNA, 24 nt, Human
uacacacacacuacccaaccccca

SEQ ID NO: 1372212 - RNA, 28 nt, Human
uacauaaaagaaaguuaauaaggacagu

SEQ ID NO: 1372213 - RNA, 30 nt, Human
uauuaaacuucuucucuuuucccagauccu

SEQ ID NO: 1372214 - RNA, 22 nt, Human
ucaagacaguucagcaagagca

SEQ ID NO: 1372215 - RNA, 22 nt, Human
ucaauggucaagacaguucagc

SEQ ID NO: 1372216 - RNA, 23 nt, Human
ucuagguucugcauccaaugccu

SEQ ID NO: 1372217 - RNA, 21 nt, Human
ucucucacagacauaaagagu

SEQ ID NO: 1372218 - RNA, 18 nt, Human
ugaaaccagcacuagaug

SEQ ID NO: 1372219 - RNA, 21 nt, Human
ugacagaacagguucugagga

SEQ ID NO: 1372220 - RNA, 23 nt, Human
ugagagacugagacucuuccagu

SEQ ID NO: 1372221 - RNA, 24 nt, Human
ugagagacugagacucuuccauca

SEQ ID NO: 1372222 - RNA, 23 nt, Human
ugauucaggaggucgaaggaaaa

SEQ ID NO: 1372223 - RNA, 21 nt, Human
uggaauaucaccauaagcuaa

SEQ ID NO: 1372224 - RNA, 20 nt, Human
uggcucuagguucugcaucc

SEQ ID NO: 1372225 - RNA, 24 nt, Human
uggcuuuuuuguuuguuuguuuua

SEQ ID NO: 1372226 - RNA, 22 nt, Human
ugggaguuucuccuuguuuuuu

SEQ ID NO: 1372227 - RNA, 20 nt, Human
uggucaagacaguucagcaa

SEQ ID NO: 1372228 - RNA, 18 nt, Human
uuaaagggagauccaaag

SEQ ID NO: 1372229 - RNA, 21 nt, Human
uuaaauuucugaaaccagcac

SEQ ID NO: 1372230 - RNA, 23 nt, Human
uuaaauuucugaaaccagcacua

SEQ ID NO: 1372231 - RNA, 22 nt, Human
uuaguacaugguaaugaacucc

SEQ ID NO: 1372232 - RNA, 21 nt, Human
uucauugggaguuucuccuug

SEQ ID NO: 1372233 - RNA, 24 nt, Human
uucugcucucuauggcuuuuuugu

SEQ ID NO: 1372234 - RNA, 26 nt, Human
uuuuuguuuguuuguuuuaaaauuuu

SEQ ID NO: 1372235 - RNA, 18 nt, Human
aaggccacagguggacug

SEQ ID NO: 1372236 - RNA, 22 nt, Human
aagguucuuguauucucacugc

SEQ ID NO: 1372237 - RNA, 20 nt, Human
accuagugcucccagacuca

SEQ ID NO: 1372238 - RNA, 21 nt, Human
accuugacucccagccagcuc

SEQ ID NO: 1372239 - RNA, 23 nt, Human
acucuacagacuggacaaggcca

SEQ ID NO: 1372240 - RNA, 24 nt, Human
acucugaguuccugagccccacaa

SEQ ID NO: 1372241 - RNA, 21 nt, Human
agacccgagggguggccuggu

SEQ ID NO: 1372242 - RNA, 21 nt, Human
agccuguugcuuuucagagaa

SEQ ID NO: 1372243 - RNA, 19 nt, Human
aggaaggaagggcaggcug

SEQ ID NO: 1372244 - RNA, 26 nt, Human
aggcaagaggugggaaggagggaccc

SEQ ID NO: 1372245 - RNA, 20 nt, Human
aggcaagaggugggaagggg

SEQ ID NO: 1372246 - RNA, 23 nt, Human
aggcaagaggugggaagggggac

SEQ ID NO: 1372247 - RNA, 19 nt, Human
aggccagggauggugggga

SEQ ID NO: 1372248 - RNA, 22 nt, Human
aggcuaccuggaaacccggaac

SEQ ID NO: 1372249 - RNA, 24 nt, Human
caccacguaggcuaccuggaaacc

SEQ ID NO: 1372250 - RNA, 18 nt, Human
cacgccugggucuccagg

SEQ ID NO: 1372251 - RNA, 19 nt, Human
cacguaggcuaccuggaaa

SEQ ID NO: 1372252 - RNA, 23 nt, Human
cagacuggacaaggccacaggug

SEQ ID NO: 1372253 - RNA, 25 nt, Human
cagagcucggccucucagagaccgc

SEQ ID NO: 1372254 - RNA, 22 nt, Human
cagggccaaggccgcugacacc

SEQ ID NO: 1372255 - RNA, 19 nt, Human
ccacagguggacuggaggc

SEQ ID NO: 1372256 - RNA, 22 nt, Human
ccaccaucuugccacccgggag

SEQ ID NO: 1372257 - RNA, 20 nt, Human
ccaggguccucaagggugug

SEQ ID NO: 1372258 - RNA, 22 nt, Human
cccugcaccuccagccauccac

SEQ ID NO: 1372259 - RNA, 18 nt, Human
ccucaagggggagacaga

SEQ ID NO: 1372260 - RNA, 21 nt, Human
ccucaagggggagacagaguc

SEQ ID NO: 1372261 - RNA, 21 nt, Human
ccucaaggguguggaggcaag

SEQ ID NO: 1372262 - RNA, 21 nt, Human
ccucaccucauguuccuccug

SEQ ID NO: 1372263 - RNA, 20 nt, Human
ccuccgggucccgcgccgcg

SEQ ID NO: 1372264 - RNA, 26 nt, Human
ccuccuggcccugcaccuccagccau

SEQ ID NO: 1372265 - RNA, 20 nt, Human
ccugcgcgccaccaucuugc

SEQ ID NO: 1372266 - RNA, 21 nt, Human
ccuggcccugcaccuccagcc

SEQ ID NO: 1372267 - RNA, 19 nt, Human
ccuguugcuuuucagagaa

SEQ ID NO: 1372268 - RNA, 21 nt, Human
ccuucacuccuggccugugug

SEQ ID NO: 1372269 - RNA, 22 nt, Human
cucagagaccgcugcaggcccu

SEQ ID NO: 1372270 - RNA, 27 nt, Human
cuccucuaggcacgccugggucuccag

SEQ ID NO: 1372271 - RNA, 25 nt, Human
cuccuggcccugcaccuccagccau

SEQ ID NO: 1372272 - RNA, 21 nt, Human
cugaagcacaagacccgaggg

SEQ ID NO: 1372273 - RNA, 24 nt, Human
cugcccaacuggauggaaaauaaa

SEQ ID NO: 1372274 - RNA, 21 nt, Human
cuucgaccuugacucccagcc

SEQ ID NO: 1372275 - RNA, 23 nt, Human
cuugacucccagccagcuccagc

SEQ ID NO: 1372276 - RNA, 22 nt, Human
cuuggcuucuggaacaccacgu

SEQ ID NO: 1372277 - RNA, 20 nt, Human
gacccgagggguggccuggu

SEQ ID NO: 1372278 - RNA, 19 nt, Human
gacuggaggcaggacaggc

SEQ ID NO: 1372279 - RNA, 22 nt, Human
gaggcaggacaggcucuccugc

SEQ ID NO: 1372280 - RNA, 18 nt, Human
gccacucuucacagggug

SEQ ID NO: 1372281 - RNA, 24 nt, Human
gcugaagcacaagacccgaggggu

SEQ ID NO: 1372282 - RNA, 18 nt, Human
ggaaggacaaguccuccu

SEQ ID NO: 1372283 - RNA, 19 nt, Human
ggacuggaggcaggacagg

SEQ ID NO: 1372284 - RNA, 21 nt, Human
ggcccaccuagccuuucccug

SEQ ID NO: 1372285 - RNA, 18 nt, Human
ggcuguuggacgcgaugg

SEQ ID NO: 1372286 - RNA, 26 nt, Human
gguguggaggcaagaggugggaagga

SEQ ID NO: 1372287 - RNA, 24 nt, Human
ucacauagagguagugagaagccu

SEQ ID NO: 1372288 - RNA, 19 nt, Human
ucagggccaaggccgcuga

SEQ ID NO: 1372289 - RNA, 21 nt, Human
uccaacuucaacaucugugac

SEQ ID NO: 1372290 - RNA, 23 nt, Human
uccugcgcgccaccaucuugcca

SEQ ID NO: 1372291 - RNA, 23 nt, Human
ucuaggcacgccugggucuccag

SEQ ID NO: 1372292 - RNA, 27 nt, Human
ucuccuggcuaauaauaaauauccagg

SEQ ID NO: 1372293 - RNA, 18 nt, Human
ucuguggacaccagcagg

SEQ ID NO: 1372294 - RNA, 21 nt, Human
ugaaaaaacuucgaccuugac

SEQ ID NO: 1372295 - RNA, 23 nt, Human
ugaggccagguggacuuggugcc

SEQ ID NO: 1372296 - RNA, 20 nt, Human
ugagggaaaaggaagcacag

SEQ ID NO: 1372297 - RNA, 23 nt, Human
uggaaaauaaaagguucuuguau

SEQ ID NO: 1372298 - RNA, 24 nt, Human
uggaaacccggaacuggcuuugga

SEQ ID NO: 1372299 - RNA, 18 nt, Human
uggaggaaggaagggcag

SEQ ID NO: 1372300 - RNA, 18 nt, Human
uucaacaucugugaccuc

SEQ ID NO: 1372301 - RNA, 24 nt, Human
uuccagggcugcuuucuccuggcu

SEQ ID NO: 1372302 - RNA, 18 nt, Human
uuucagagaacuugauug

SEQ ID NO: 1372303 - RNA, 19 nt, Human
uuugugaaugccacucuuc

SEQ ID NO: 1372304 - RNA, 22 nt, Human
uuugugaaugccacucuucaca

SEQ ID NO: 1372305 - RNA, 18 nt, Human
cagccuacagccucuccu

SEQ ID NO: 1372306 - RNA, 21 nt, Human
cagccuacagccucuccucag

SEQ ID NO: 1372307 - RNA, 18 nt, Human
caucgcauuugagccccc

SEQ ID NO: 1372308 - RNA, 25 nt, Human
cccgcgcgcguuaccguggcgaccg

SEQ ID NO: 1372309 - RNA, 20 nt, Human
ccucaggaggacagaggggg

SEQ ID NO: 1372310 - RNA, 26 nt, Human
cgacaggcacagccuacagccucucc

SEQ ID NO: 1372311 - RNA, 24 nt, Human
cuccucaggaggacagaggggguc

SEQ ID NO: 1372312 - RNA, 20 nt, Human
uaccguggcgaccgaggccc

SEQ ID NO: 1372313 - RNA, 23 nt, Human
ucaaagcacguugcaaacaaauc

SEQ ID NO: 1372314 - RNA, 21 nt, Human
accucccucuugggcuccagc

SEQ ID NO: 1372315 - RNA, 24 nt, Human
accuccuccucccccuccuuccug

SEQ ID NO: 1372316 - RNA, 21 nt, Human
agaggaagacgcuggacagug

SEQ ID NO: 1372317 - RNA, 22 nt, Human
agaggcucuggggcucagcuac

SEQ ID NO: 1372318 - RNA, 19 nt, Human
agcuucugcaccaggaaga

SEQ ID NO: 1372319 - RNA, 21 nt, Human
aggagccagggagggcagagc

SEQ ID NO: 1372320 - RNA, 19 nt, Human
aggcgugaugggaggaggg

SEQ ID NO: 1372321 - RNA, 20 nt, Human
aggcgugaugggaggagggg

SEQ ID NO: 1372322 - RNA, 19 nt, Human
aggggcucgggccugggcc

SEQ ID NO: 1372323 - RNA, 19 nt, Human
agguggcucugguaugggg

SEQ ID NO: 1372324 - RNA, 19 nt, Human
aucucuggcaccuccuccu

SEQ ID NO: 1372325 - RNA, 23 nt, Human
caccuccuccucccccuccuucc

SEQ ID NO: 1372326 - RNA, 19 nt, Human
cacggaaggcucccccucc

SEQ ID NO: 1372327 - RNA, 21 nt, Human
cacuugccucugcuucucccg

SEQ ID NO: 1372328 - RNA, 21 nt, Human
cagagcaggggcagaggaaga

SEQ ID NO: 1372329 - RNA, 22 nt, Human
cagagccuucccgcacagggcu

SEQ ID NO: 1372330 - RNA, 20 nt, Human
cagcagcagcuuauucagcg

SEQ ID NO: 1372331 - RNA, 21 nt, Human
caggagccagggagggcagag

SEQ ID NO: 1372332 - RNA, 19 nt, Human
caucaaggggauuucugcc

SEQ ID NO: 1372333 - RNA, 20 nt, Human
ccacgcacugggccacgguc

SEQ ID NO: 1372334 - RNA, 20 nt, Human
ccacuggucagagccugugu

SEQ ID NO: 1372335 - RNA, 25 nt, Human
ccagagccuucccgcacagggcuga

SEQ ID NO: 1372336 - RNA, 22 nt, Human
ccagcaccagggaaaaugcugg

SEQ ID NO: 1372337 - RNA, 18 nt, Human
ccccaaagguuagagucc

SEQ ID NO: 1372338 - RNA, 19 nt, Human
ccccucuuccugcuccucc

SEQ ID NO: 1372339 - RNA, 20 nt, Human
ccccucuuccugcuccuccu

SEQ ID NO: 1372340 - RNA, 19 nt, Human
ccccuggggaaacguccug

SEQ ID NO: 1372341 - RNA, 21 nt, Human
ccccuggggaaacguccugcu

SEQ ID NO: 1372342 - RNA, 20 nt, Human
ccgcugcccgccugcugcgc

SEQ ID NO: 1372343 - RNA, 25 nt, Human
ccggcagacccaggggcguuggacu

SEQ ID NO: 1372344 - RNA, 23 nt, Human
ccuccucccccuccuuccugggc

SEQ ID NO: 1372345 - RNA, 19 nt, Human
ccucugcuucucccggcug

SEQ ID NO: 1372346 - RNA, 18 nt, Human
ccugggcuccuucaccuc

SEQ ID NO: 1372347 - RNA, 20 nt, Human
ccugggcuccuucaccuccc

SEQ ID NO: 1372348 - RNA, 23 nt, Human
ccugggcuccuucaccucccucu

SEQ ID NO: 1372349 - RNA, 20 nt, Human
cgggaggggcgaugaaagug

SEQ ID NO: 1372350 - RNA, 18 nt, Human
cuaguccaggagccaggg

SEQ ID NO: 1372351 - RNA, 20 nt, Human
cuccuccucccccuccuucc

SEQ ID NO: 1372352 - RNA, 24 nt, Human
cucucgccccucuuccugcuccuc

SEQ ID NO: 1372353 - RNA, 22 nt, Human
cucuggcaccuccuccuccccc

SEQ ID NO: 1372354 - RNA, 26 nt, Human
cucuuggaucucuggcaccuccuccu

SEQ ID NO: 1372355 - RNA, 21 nt, Human
cugcgcucucgccccucuucc

SEQ ID NO: 1372356 - RNA, 20 nt, Human
cugcugcgcucucgccccuc

SEQ ID NO: 1372357 - RNA, 20 nt, Human
cugcuggcucuuccuuucuc

SEQ ID NO: 1372358 - RNA, 18 nt, Human
cuggaagccgggcucuag

SEQ ID NO: 1372359 - RNA, 21 nt, Human
cuggcucuuccuuucucuucc

SEQ ID NO: 1372360 - RNA, 19 nt, Human
cuucaaccucuuccugggc

SEQ ID NO: 1372361 - RNA, 19 nt, Human
cuugccucugcuucucccg

SEQ ID NO: 1372362 - RNA, 21 nt, Human
gagaggcucuggggcucagcu

SEQ ID NO: 1372363 - RNA, 20 nt, Human
gaggaggggcagggauggug

SEQ ID NO: 1372364 - RNA, 22 nt, Human
gauuucugccuggaaccgggag

SEQ ID NO: 1372365 - RNA, 22 nt, Human
gccucucuucacuuggggacuc

SEQ ID NO: 1372366 - RNA, 18 nt, Human
gccuuuguugaacagcuu

SEQ ID NO: 1372367 - RNA, 20 nt, Human
gcucagagggguggucagcu

SEQ ID NO: 1372368 - RNA, 23 nt, Human
gcucgggccugggccgcugcuuu

SEQ ID NO: 1372369 - RNA, 19 nt, Human
gcucuuccuuucucuucca

SEQ ID NO: 1372370 - RNA, 20 nt, Human
gcugaggauggggggcggcg

SEQ ID NO: 1372371 - RNA, 19 nt, Human
ggaggaggggcagggaugg

SEQ ID NO: 1372372 - RNA, 20 nt, Human
ggaggaggggcagggauggu

SEQ ID NO: 1372373 - RNA, 19 nt, Human
ggccgcaggggcuucuuca

SEQ ID NO: 1372374 - RNA, 19 nt, Human
ggcgcaggcgagugcggcc

SEQ ID NO: 1372375 - RNA, 21 nt, Human
ggcgcagucgucacuuccucg

SEQ ID NO: 1372376 - RNA, 23 nt, Human
ggcugcucucuagguccucccau

SEQ ID NO: 1372377 - RNA, 20 nt, Human
gggcgcaggcgagugcggcc

SEQ ID NO: 1372378 - RNA, 21 nt, Human
gggcucuaguccaggagccag

SEQ ID NO: 1372379 - RNA, 21 nt, Human
gggcuucuucagcagcagcuu

SEQ ID NO: 1372380 - RNA, 20 nt, Human
guccugcuggaagccgggcu

SEQ ID NO: 1372381 - RNA, 21 nt, Human
guccugcuggaagccgggcuc

SEQ ID NO: 1372382 - RNA, 21 nt, Human
guggggccgcaggggcuucuu

SEQ ID NO: 1372383 - RNA, 20 nt, Human
uagcucaaagcuccgcucag

SEQ ID NO: 1372384 - RNA, 20 nt, Human
uaguccggagcagcgugcga

SEQ ID NO: 1372385 - RNA, 21 nt, Human
uagugcccuucgugacuuccc

SEQ ID NO: 1372386 - RNA, 22 nt, Human
ucaccucccucuugggcuccag

SEQ ID NO: 1372387 - RNA, 22 nt, Human
uccacuggucagagccugugua

SEQ ID NO: 1372388 - RNA, 21 nt, Human
ucccauggcugccacaccaag

SEQ ID NO: 1372389 - RNA, 23 nt, Human
ucccuuggcuucuccgaggccug

SEQ ID NO: 1372390 - RNA, 19 nt, Human
uccuccucccccuccuucc

SEQ ID NO: 1372391 - RNA, 19 nt, Human
ucucccggcugcucucuag

SEQ ID NO: 1372392 - RNA, 19 nt, Human
ucucuggcaccuccuccuc

SEQ ID NO: 1372393 - RNA, 21 nt, Human
ucucuggcaccuccuccuccc

SEQ ID NO: 1372394 - RNA, 22 nt, Human
ucuuccugcuccuccuucucuu

SEQ ID NO: 1372395 - RNA, 19 nt, Human
ugaaguagaggccagagcc

SEQ ID NO: 1372396 - RNA, 21 nt, Human
ugaggggcucgggccugggcc

SEQ ID NO: 1372397 - RNA, 21 nt, Human
ugccuggaaccgggagcccac

SEQ ID NO: 1372398 - RNA, 20 nt, Human
ugcggccgauuuucaccugc

SEQ ID NO: 1372399 - RNA, 19 nt, Human
ugcucggaggggugcgggg

SEQ ID NO: 1372400 - RNA, 21 nt, Human
ugcuggaagccgggcucuagu

SEQ ID NO: 1372401 - RNA, 23 nt, Human
ugcuuugguuuccgcacggaagg

SEQ ID NO: 1372402 - RNA, 23 nt, Human
uggacagugaggucggacacugg

SEQ ID NO: 1372403 - RNA, 21 nt, Human
uggaucucuggcaccuccucc

SEQ ID NO: 1372404 - RNA, 26 nt, Human
uggcucgaugcucacugggguggccu

SEQ ID NO: 1372405 - RNA, 22 nt, Human
ugggaggaggggcagggauggu

SEQ ID NO: 1372406 - RNA, 19 nt, Human
ugggcuccuucaccucccu

SEQ ID NO: 1372407 - RNA, 18 nt, Human
uggggccgcaggggcuuc

SEQ ID NO: 1372408 - RNA, 19 nt, Human
ugguuggugccagcaccag

SEQ ID NO: 1372409 - RNA, 22 nt, Human
ugguuggugccagcaccaggga

SEQ ID NO: 1372410 - RNA, 18 nt, Human
uuagagucccauugcggc

SEQ ID NO: 1372411 - RNA, 21 nt, Human
uucaacagucgcccauccccu

SEQ ID NO: 1372412 - RNA, 23 nt, Human
uucccuuggcuucuccgaggccu

SEQ ID NO: 1372413 - RNA, 24 nt, Human
uuccugcuccuccuucucuuggau

SEQ ID NO: 1372414 - RNA, 24 nt, Human
uuccugggcuccuucaccucccuc

SEQ ID NO: 1372415 - RNA, 21 nt, Human
uugcggccgauuuucaccugc

SEQ ID NO: 1372416 - RNA, 22 nt, Human
uuggaucucuggcaccuccucc

SEQ ID NO: 1372417 - RNA, 25 nt, Human
aaaaaacagauauacauuucgagaa

SEQ ID NO: 1372418 - RNA, 24 nt, Human
aaagaacccauccaaucaacaugu

SEQ ID NO: 1372419 - RNA, 19 nt, Human
aaagcaggacuucgaccuu

SEQ ID NO: 1372420 - RNA, 19 nt, Human
aaaguccuuucugucaccu

SEQ ID NO: 1372421 - RNA, 24 nt, Human
aaagugcugggauuacaggcguga

SEQ ID NO: 1372422 - RNA, 26 nt, Human
aagcgauucucgugccucaggccccc

SEQ ID NO: 1372423 - RNA, 20 nt, Human
aaguagcugggacuauaggc

SEQ ID NO: 1372424 - RNA, 22 nt, Human
aaguagcugggacuauaggcau

SEQ ID NO: 1372425 - RNA, 24 nt, Human
aaguagcugggacuauaggcaugc

SEQ ID NO: 1372426 - RNA, 19 nt, Human
aagugcugggauuacaggc

SEQ ID NO: 1372427 - RNA, 19 nt, Human
aagugcugggauuacaggc

SEQ ID NO: 1372428 - RNA, 26 nt, Human
aagugcugggauuacaggcgugagcc

SEQ ID NO: 1372429 - RNA, 24 nt, Human
aauuuuuguauuuuaguagagaca

SEQ ID NO: 1372430 - RNA, 20 nt, Human
acaggguuucaccauauugg

SEQ ID NO: 1372431 - RNA, 24 nt, Human
acaggguuucaccauauuggccag

SEQ ID NO: 1372432 - RNA, 25 nt, Human
acucuguugcccaggcuggagugca

SEQ ID NO: 1372433 - RNA, 21 nt, Human
acugccaugacugagucaaau

SEQ ID NO: 1372434 - RNA, 19 nt, Human
agaaagcaggacuucgacc

SEQ ID NO: 1372435 - RNA, 22 nt, Human
agcaaaugggacuaucauaaga

SEQ ID NO: 1372436 - RNA, 22 nt, Human
agcgauucucgugccucaggcc

SEQ ID NO: 1372437 - RNA, 22 nt, Human
aggcuaagaagguucaagucug

SEQ ID NO: 1372438 - RNA, 19 nt, Human
aggcuggagugcaguggca

SEQ ID NO: 1372439 - RNA, 20 nt, Human
agggagcuugguuucggacc

SEQ ID NO: 1372440 - RNA, 20 nt, Human
agugcaguggcauaauuucg

SEQ ID NO: 1372441 - RNA, 24 nt, Human
agugcaguggcauaauuucggcuc

SEQ ID NO: 1372442 - RNA, 20 nt, Human
auaaguggugaagaacucca

SEQ ID NO: 1372443 - RNA, 22 nt, Human
aucccguuucucuugucuuuca

SEQ ID NO: 1372444 - RNA, 24 nt, Human
augauccaccugccucggccuccc

SEQ ID NO: 1372445 - RNA, 19 nt, Human
augggcuagauuuucagau

SEQ ID NO: 1372446 - RNA, 24 nt, Human
caaagugcugggauuacaggcgug

SEQ ID NO: 1372447 - RNA, 23 nt, Human
caaccuccaccucccgaauucaa

SEQ ID NO: 1372448 - RNA, 18 nt, Human
caccauauuggccaggau

SEQ ID NO: 1372449 - RNA, 22 nt, Human
caccauauuggccaggaugguc

SEQ ID NO: 1372450 - RNA, 24 nt, Human
caccauauuggccaggauggucuc

SEQ ID NO: 1372451 - RNA, 23 nt, Human
caccgggaagggagcuugguuuc

SEQ ID NO: 1372452 - RNA, 23 nt, Human
caccugccucggccucccaaagu

SEQ ID NO: 1372453 - RNA, 22 nt, Human
cacucuguugcccaggcuggag

SEQ ID NO: 1372454 - RNA, 21 nt, Human
cacugcaaccuccaccucccg

SEQ ID NO: 1372455 - RNA, 19 nt, Human
cagaaucuacuuggucucu

SEQ ID NO: 1372456 - RNA, 24 nt, Human
cagagucucacucuguugcccagg

SEQ ID NO: 1372457 - RNA, 21 nt, Human
caggcccccaaguagcuggga

SEQ ID NO: 1372458 - RNA, 24 nt, Human
caggguuucaccauauuggccagg

SEQ ID NO: 1372459 - RNA, 23 nt, Human
caugcaccaucaugcccagcuaa

SEQ ID NO: 1372460 - RNA, 21 nt, Human
caugcccagcuaauuuuugua

SEQ ID NO: 1372461 - RNA, 22 nt, Human
ccaaagugcugggauuacaggc

SEQ ID NO: 1372462 - RNA, 22 nt, Human
ccaaagugcugggauuacaggc

SEQ ID NO: 1372463 - RNA, 24 nt, Human
ccaaagugcugggauuacaggcgu

SEQ ID NO: 1372464 - RNA, 24 nt, Human
ccaccucccgaauucaagcgauuc

SEQ ID NO: 1372465 - RNA, 18 nt, Human
ccaggacauccuguccgc

SEQ ID NO: 1372466 - RNA, 19 nt, Human
cccaaguagcugggacuau

SEQ ID NO: 1372467 - RNA, 24 nt, Human
cccaaguagcugggacuauaggca

SEQ ID NO: 1372468 - RNA, 24 nt, Human
ccccaaguagcugggacuauaggc

SEQ ID NO: 1372469 - RNA, 21 nt, Human
ccguaagauccuggggcuccu

SEQ ID NO: 1372470 - RNA, 24 nt, Human
ccucucccaagcaagcagugaggu

SEQ ID NO: 1372471 - RNA, 20 nt, Human
ccugaaucacuuccagaaau

SEQ ID NO: 1372472 - RNA, 18 nt, Human
cuaugauccaccugccuc

SEQ ID NO: 1372473 - RNA, 24 nt, Human
cucacucuguugcccaggcuggag

SEQ ID NO: 1372474 - RNA, 24 nt, Human
cucacugcaaccuccaccucccga

SEQ ID NO: 1372475 - RNA, 23 nt, Human
cugcaaccuccaccucccgaauu

SEQ ID NO: 1372476 - RNA, 24 nt, Human
cugcaaccuccaccucccgaauuc

SEQ ID NO: 1372477 - RNA, 23 nt, Human
cugccucggccucccaaagugcu

SEQ ID NO: 1372478 - RNA, 19 nt, Human
cuggucuccucacaucgua

SEQ ID NO: 1372479 - RNA, 18 nt, Human
cuugaagcuguaacagau

SEQ ID NO: 1372480 - RNA, 22 nt, Human
cuugcugcugaauguccucaga

SEQ ID NO: 1372481 - RNA, 24 nt, Human
cuugcugcugaauguccucagacg

SEQ ID NO: 1372482 - RNA, 23 nt, Human
gaaguuuuaaaaaacagauauac

SEQ ID NO: 1372483 - RNA, 21 nt, Human
gaccuaugauccaccugccuc

SEQ ID NO: 1372484 - RNA, 21 nt, Human
gaccuaugauccaccugccuc

SEQ ID NO: 1372485 - RNA, 22 nt, Human
gagccaccaugcccggccccag

SEQ ID NO: 1372486 - RNA, 20 nt, Human
gaggggacaaucccaccauc

SEQ ID NO: 1372487 - RNA, 25 nt, Human
gauaaguggugaagaacuccaugaa

SEQ ID NO: 1372488 - RNA, 18 nt, Human
gauuacaggcgugagcca

SEQ ID NO: 1372489 - RNA, 21 nt, Human
gauuacaggcgugagccacca

SEQ ID NO: 1372490 - RNA, 24 nt, Human
gauuacaggcgugagccaccaugc

SEQ ID NO: 1372491 - RNA, 22 nt, Human
gcaaccuccaccucccgaauuc

SEQ ID NO: 1372492 - RNA, 22 nt, Human
gcccagcuaauuuuuguauuuu

SEQ ID NO: 1372493 - RNA, 24 nt, Human
gcccaggcuggagugcaguggcau

SEQ ID NO: 1372494 - RNA, 19 nt, Human
gcgugagccaccaugcccg

SEQ ID NO: 1372495 - RNA, 24 nt, Human
ggacuauaggcaugcaccaucaug

SEQ ID NO: 1372496 - RNA, 24 nt, Human
ggauuacaggcgugagccaccaug

SEQ ID NO: 1372497 - RNA, 20 nt, Human
gggagagggcaguccuggag

SEQ ID NO: 1372498 - RNA, 22 nt, Human
ggggagagggcaguccuggagg

SEQ ID NO: 1372499 - RNA, 19 nt, Human
ggggcugggaaguaaggaa

SEQ ID NO: 1372500 - RNA, 24 nt, Human
gguuucaccauauuggccaggaug

SEQ ID NO: 1372501 - RNA, 22 nt, Human
gucacaacugacugccaugacu

SEQ ID NO: 1372502 - RNA, 24 nt, Human
gugaggugugcauuguuagaggug

SEQ ID NO: 1372503 - RNA, 20 nt, Human
gugcauuguuagaggugcac

SEQ ID NO: 1372504 - RNA, 22 nt, Human
gugccucaggcccccaaguagc

SEQ ID NO: 1372505 - RNA, 19 nt, Human
uaaaaaacagauauacauu

SEQ ID NO: 1372506 - RNA, 21 nt, Human
uaacugcaaugauccuugggu

SEQ ID NO: 1372507 - RNA, 19 nt, Human
uaaguggugaagaacucca

SEQ ID NO: 1372508 - RNA, 23 nt, Human
uaauuuuuguauuuuaguagaga

SEQ ID NO: 1372509 - RNA, 23 nt, Human
uacaggcgugagccaccaugccc

SEQ ID NO: 1372510 - RNA, 20 nt, Human
uagaagguggggcugggaag

SEQ ID NO: 1372511 - RNA, 20 nt, Human
uagagacaggguuucaccau

SEQ ID NO: 1372512 - RNA, 19 nt, Human
uaguagagacaggguuuca

SEQ ID NO: 1372513 - RNA, 26 nt, Human
uaguagagacaggguuucaccauauu

SEQ ID NO: 1372514 - RNA, 19 nt, Human
uaucauaagagguauagaa

SEQ ID NO: 1372515 - RNA, 21 nt, Human
ucaaccaaaugggaacuccua

SEQ ID NO: 1372516 - RNA, 26 nt, Human
ucacauuggucuuuagacaaccuugg

SEQ ID NO: 1372517 - RNA, 24 nt, Human
ucaccauauuggccaggauggucu

SEQ ID NO: 1372518 - RNA, 24 nt, Human
ucacucuguugcccaggcuggagu

SEQ ID NO: 1372519 - RNA, 18 nt, Human
ucacugcaaccuccaccu

SEQ ID NO: 1372520 - RNA, 19 nt, Human
ucacugcaaccuccaccuc

SEQ ID NO: 1372521 - RNA, 22 nt, Human
ucacugcaaccuccaccucccg

SEQ ID NO: 1372522 - RNA, 26 nt, Human
ucacugcaaccuccaccucccgaauu

SEQ ID NO: 1372523 - RNA, 19 nt, Human
ucagauuuuaacagagaca

SEQ ID NO: 1372524 - RNA, 20 nt, Human
ucagcuggggauucugggaa

SEQ ID NO: 1372525 - RNA, 24 nt, Human
ucccaaagugcugggauuacaggc

SEQ ID NO: 1372526 - RNA, 21 nt, Human
ucccgaauucaagcgauucuc

SEQ ID NO: 1372527 - RNA, 18 nt, Human
ucggccucccaaagugcu

SEQ ID NO: 1372528 - RNA, 23 nt, Human
ucucacucuguugcccaggcugg

SEQ ID NO: 1372529 - RNA, 24 nt, Human
ucucacucuguugcccaggcugga

SEQ ID NO: 1372530 - RNA, 26 nt, Human
ucucacucuguugcccaggcuggagu

SEQ ID NO: 1372531 - RNA, 27 nt, Human
ucucacucuguugcccaggcuggagug

SEQ ID NO: 1372532 - RNA, 21 nt, Human
ucucuggucuccucacaucgu

SEQ ID NO: 1372533 - RNA, 24 nt, Human
ucucuggucuccucacaucguaaa

SEQ ID NO: 1372534 - RNA, 24 nt, Human
ucuguugcccaggcuggagugcag

SEQ ID NO: 1372535 - RNA, 23 nt, Human
ugaaaagcaaaugggacuaucau

SEQ ID NO: 1372536 - RNA, 18 nt, Human
ugagacagagucucacuc

SEQ ID NO: 1372537 - RNA, 22 nt, Human
ugagacagagucucacucuguu

SEQ ID NO: 1372538 - RNA, 18 nt, Human
ugcccaggcuggagugca

SEQ ID NO: 1372539 - RNA, 21 nt, Human
ugcccaggcuggagugcagug

SEQ ID NO: 1372540 - RNA, 22 nt, Human
ugcccaggcuggagugcagugg

SEQ ID NO: 1372541 - RNA, 24 nt, Human
ugcccaggcuggagugcaguggca

SEQ ID NO: 1372542 - RNA, 21 nt, Human
ugccucaggcccccaaguagc

SEQ ID NO: 1372543 - RNA, 24 nt, Human
ugccucaggcccccaaguagcugg

SEQ ID NO: 1372544 - RNA, 21 nt, Human
ugccucggccucccaaagugc

SEQ ID NO: 1372545 - RNA, 24 nt, Human
ugccucggccucccaaagugcugg

SEQ ID NO: 1372546 - RNA, 24 nt, Human
ugcugggauuacaggcgugagcca

SEQ ID NO: 1372547 - RNA, 23 nt, Human
uggagugcaguggcauaauuucg

SEQ ID NO: 1372548 - RNA, 24 nt, Human
uggagugcaguggcauaauuucgg

SEQ ID NO: 1372549 - RNA, 24 nt, Human
uggccaggauggucucgaucuuuu

SEQ ID NO: 1372550 - RNA, 21 nt, Human
ugggacuauaggcaugcacca

SEQ ID NO: 1372551 - RNA, 22 nt, Human
ugggacuauaggcaugcaccau

SEQ ID NO: 1372552 - RNA, 18 nt, Human
ugggauuacaggcgugag

SEQ ID NO: 1372553 - RNA, 22 nt, Human
ugggauuacaggcgugagccac

SEQ ID NO: 1372554 - RNA, 23 nt, Human
ugggauuacaggcgugagccacc

SEQ ID NO: 1372555 - RNA, 24 nt, Human
ugggauuacaggcgugagccacca

SEQ ID NO: 1372556 - RNA, 25 nt, Human
ugggauuacaggcgugagccaccau

SEQ ID NO: 1372557 - RNA, 19 nt, Human
uggguagagcagauucuuc

SEQ ID NO: 1372558 - RNA, 24 nt, Human
ugugcugucagaggggacaauccc

SEQ ID NO: 1372559 - RNA, 22 nt, Human
uguuagaggugcaccgggaagg

SEQ ID NO: 1372560 - RNA, 24 nt, Human
uuaguagagacaggguuucaccau

SEQ ID NO: 1372561 - RNA, 23 nt, Human
uucaagcgauucucgugccucag

SEQ ID NO: 1372562 - RNA, 21 nt, Human
uucucgugccucaggccccca

SEQ ID NO: 1372563 - RNA, 25 nt, Human
uucucgugccucaggcccccaagua

SEQ ID NO: 1372564 - RNA, 24 nt, Human
uugcccaggcuggagugcaguggc

SEQ ID NO: 1372565 - RNA, 22 nt, Human
uuggucuuuagacaaccuugga

SEQ ID NO: 1372566 - RNA, 19 nt, Human
uuucaccauauuggccagg

SEQ ID NO: 1372567 - RNA, 20 nt, Human
uuucaccauauuggccagga

SEQ ID NO: 1372568 - RNA, 19 nt, Human
uuucucuugucuuucaggc

SEQ ID NO: 1372569 - RNA, 23 nt, Human
uuuuaguagagacaggguuucac

SEQ ID NO: 1372570 - RNA, 19 nt, Human
uuuuuguauuuuaguagag

SEQ ID NO: 1372571 - RNA, 20 nt, Human
uuuuuuuuucugagacagag

SEQ ID NO: 1372572 - RNA, 26 nt, Human
uuuuuuuuuucugagacagagucuca

SEQ ID NO: 1372573 - RNA, 18 nt, Human
uuuuuuuuuuuuuuucug

SEQ ID NO: 1372574 - RNA, 21 nt, Human
aaagauuaagaaaaaccaagg

SEQ ID NO: 1372575 - RNA, 19 nt, Human
acaaaacauagugccauca

SEQ ID NO: 1372576 - RNA, 20 nt, Human
acuuuuuucuuuuuuucuuu

SEQ ID NO: 1372577 - RNA, 21 nt, Human
auacaaaacauagugccauca

SEQ ID NO: 1372578 - RNA, 23 nt, Human
auauagcaauaguuuucacaaga

SEQ ID NO: 1372579 - RNA, 21 nt, Human
aucagaaacuuagggauuuau

SEQ ID NO: 1372580 - RNA, 26 nt, Human
augaugaugcugacauaacuuuuuuc

SEQ ID NO: 1372581 - RNA, 23 nt, Human
caaauacacaaagauuaagaaaa

SEQ ID NO: 1372582 - RNA, 18 nt, Human
cagaaacuuagggauuua

SEQ ID NO: 1372583 - RNA, 21 nt, Human
cauugcacuuacaguaaauga

SEQ ID NO: 1372584 - RNA, 22 nt, Human
ccaguauucaugggucucuuuc

SEQ ID NO: 1372585 - RNA, 22 nt, Human
gcauauagcaauaguuuucaca

SEQ ID NO: 1372586 - RNA, 21 nt, Human
uaagaaaaaccaagggagcau

SEQ ID NO: 1372587 - RNA, 22 nt, Human
uagugccaucagcuuugucuaa

SEQ ID NO: 1372588 - RNA, 27 nt, Human
uauuuuguuguauuuuucaucuagagu

SEQ ID NO: 1372589 - RNA, 22 nt, Human
ugcaaauacacaaagauuaaga

SEQ ID NO: 1372590 - RNA, 20 nt, Human
uuuuucuuuuuuucuuucuu

SEQ ID NO: 1372591 - RNA, 23 nt, Human
aaccccagcccccuagguucugg

SEQ ID NO: 1372592 - RNA, 24 nt, Human
aagaaucugggggcuggcucagug

SEQ ID NO: 1372593 - RNA, 20 nt, Human
aagcacucagggaaauaggu

SEQ ID NO: 1372594 - RNA, 26 nt, Human
aagucucugacaugucuuuucaacuc

SEQ ID NO: 1372595 - RNA, 21 nt, Human
aaucugggggcuggcucagug

SEQ ID NO: 1372596 - RNA, 23 nt, Human
accacagccuggggcuggaagca

SEQ ID NO: 1372597 - RNA, 18 nt, Human
agccaaagaaucuggggg

SEQ ID NO: 1372598 - RNA, 20 nt, Human
agccauaggccucacucuac

SEQ ID NO: 1372599 - RNA, 25 nt, Human
agcuaaccccguguagauauuaugc

SEQ ID NO: 1372600 - RNA, 21 nt, Human
agcuggcagcaaccccagccc

SEQ ID NO: 1372601 - RNA, 23 nt, Human
agcugguagcagggacaggugcu

SEQ ID NO: 1372602 - RNA, 21 nt, Human
agcuguguucugaguuccacc

SEQ ID NO: 1372603 - RNA, 19 nt, Human
aggcagagguuucugugac

SEQ ID NO: 1372604 - RNA, 24 nt, Human
aggcagcaccacacccaggucugc

SEQ ID NO: 1372605 - RNA, 27 nt, Human
aggcaggaaucaaaauagaggggaccc

SEQ ID NO: 1372606 - RNA, 29 nt, Human
aggccuccagucgagcuggcagcaacccu

SEQ ID NO: 1372607 - RNA, 19 nt, Human
agggauugauccuggcuca

SEQ ID NO: 1372608 - RNA, 19 nt, Human
agugagguuuccucagucc

SEQ ID NO: 1372609 - RNA, 23 nt, Human
caaccccagcccccuagguucug

SEQ ID NO: 1372610 - RNA, 18 nt, Human
caccacacccaggucugc

SEQ ID NO: 1372611 - RNA, 21 nt, Human
caccuguacaauuccugcacu

SEQ ID NO: 1372612 - RNA, 19 nt, Human
cacucugcagccaaagaau

SEQ ID NO: 1372613 - RNA, 20 nt, Human
cagcaccacacccaggucug

SEQ ID NO: 1372614 - RNA, 20 nt, Human
cagcccccuagguucuggcc

SEQ ID NO: 1372615 - RNA, 21 nt, Human
cagccucuccuccccacacca

SEQ ID NO: 1372616 - RNA, 21 nt, Human
cagcgaagagaacauucaggu

SEQ ID NO: 1372617 - RNA, 19 nt, Human
cagggcagaggaacgugga

SEQ ID NO: 1372618 - RNA, 21 nt, Human
caggggcuuggaagauccuga

SEQ ID NO: 1372619 - RNA, 18 nt, Human
cauccucaggccgggagg

SEQ ID NO: 1372620 - RNA, 23 nt, Human
cauuagggaauuuuucaguagga

SEQ ID NO: 1372621 - RNA, 21 nt, Human
cauuuaucugcagaggcccug

SEQ ID NO: 1372622 - RNA, 22 nt, Human
cauuucaaguaccaacugcuuu

SEQ ID NO: 1372623 - RNA, 20 nt, Human
ccagggcagaggaacgugga

SEQ ID NO: 1372624 - RNA, 19 nt, Human
ccaggucucagccugugcu

SEQ ID NO: 1372625 - RNA, 19 nt, Human
ccccagcccccuagguucu

SEQ ID NO: 1372626 - RNA, 21 nt, Human
cccccuggacucaacaggggc

SEQ ID NO: 1372627 - RNA, 23 nt, Human
ccuggggcuggaagcaggccucc

SEQ ID NO: 1372628 - RNA, 21 nt, Human
ccuucauccucaggccgggag

SEQ ID NO: 1372629 - RNA, 27 nt, Human
cgagcuggcagcaaccccagcccccua

SEQ ID NO: 1372630 - RNA, 18 nt, Human
cgggaagggagggugugu

SEQ ID NO: 1372631 - RNA, 26 nt, Human
cguggacccagcgaugucagccucuc

SEQ ID NO: 1372632 - RNA, 19 nt, Human
cugacacugagaaacuggg

SEQ ID NO: 1372633 - RNA, 20 nt, Human
cugaggcugcaucagggucc

SEQ ID NO: 1372634 - RNA, 27 nt, Human
cuggaaguuacucugccugacuccuag

SEQ ID NO: 1372635 - RNA, 21 nt, Human
cuggcagcaaccccagccccc

SEQ ID NO: 1372636 - RNA, 20 nt, Human
cuggcgggaagggagggugu

SEQ ID NO: 1372637 - RNA, 18 nt, Human
gacccagcgaugucagcc

SEQ ID NO: 1372638 - RNA, 20 nt, Human
gagcccccuucauccucagg

SEQ ID NO: 1372639 - RNA, 21 nt, Human
gaggcuggggaaaggcaggaa

SEQ ID NO: 1372640 - RNA, 20 nt, Human
gagguuucugugaccuaaaa

SEQ ID NO: 1372641 - RNA, 25 nt, Human
gauuaaguaaaauagauuccucaaa

SEQ ID NO: 1372642 - RNA, 23 nt, Human
gcagagguuucugugaccuaaaa

SEQ ID NO: 1372643 - RNA, 19 nt, Human
gcagccccagccucccugu

SEQ ID NO: 1372644 - RNA, 18 nt, Human
gccccagccucccugugu

SEQ ID NO: 1372645 - RNA, 21 nt, Human
gccuggggcuggaagcaggcc

SEQ ID NO: 1372646 - RNA, 26 nt, Human
ggagaaaucagcccaaacucuggcgg

SEQ ID NO: 1372647 - RNA, 20 nt, Human
ggcucagaaauggugagcag

SEQ ID NO: 1372648 - RNA, 22 nt, Human
gggaggagauugaagucucuga

SEQ ID NO: 1372649 - RNA, 25 nt, Human
ggguguguguuugucuaaauaguuu

SEQ ID NO: 1372650 - RNA, 20 nt, Human
gucugugggagccugucugg

SEQ ID NO: 1372651 - RNA, 22 nt, Human
gugggaagcucucaguuccugc

SEQ ID NO: 1372652 - RNA, 19 nt, Human
uaaaagggcgcuaccugug

SEQ ID NO: 1372653 - RNA, 23 nt, Human
uagcagggacaggugcugggugg

SEQ ID NO: 1372654 - RNA, 20 nt, Human
ucaauuccucccaggucuca

SEQ ID NO: 1372655 - RNA, 18 nt, Human
ucagaucugugggugaca

SEQ ID NO: 1372656 - RNA, 18 nt, Human
ucagcacaggcucagagc

SEQ ID NO: 1372657 - RNA, 21 nt, Human
ucccugugugucucaugcccc

SEQ ID NO: 1372658 - RNA, 19 nt, Human
uccuaggugccaaggaguc

SEQ ID NO: 1372659 - RNA, 19 nt, Human
uccucaguccauacauggc

SEQ ID NO: 1372660 - RNA, 20 nt, Human
uccugggagcagccccagcc

SEQ ID NO: 1372661 - RNA, 20 nt, Human
uccugggagcagccccagcc

SEQ ID NO: 1372662 - RNA, 23 nt, Human
ucugcagccaaagaaucuggggg

SEQ ID NO: 1372663 - RNA, 19 nt, Human
ucuugugagccugcuuccu

SEQ ID NO: 1372664 - RNA, 22 nt, Human
ugaaaucugugaggccccucac

SEQ ID NO: 1372665 - RNA, 23 nt, Human
ugacuccuaggugccaaggaguc

SEQ ID NO: 1372666 - RNA, 23 nt, Human
ugagaaacugggugucucuggga

SEQ ID NO: 1372667 - RNA, 22 nt, Human
ugagaccagggauugauccugg

SEQ ID NO: 1372668 - RNA, 19 nt, Human
ugcaucaggguccuuggcc

SEQ ID NO: 1372669 - RNA, 19 nt, Human
ugcuggggaggagaggugg

SEQ ID NO: 1372670 - RNA, 21 nt, Human
ugcugggugggaagcucucag

SEQ ID NO: 1372671 - RNA, 18 nt, Human
ugcuuccuuuuccaagaa

SEQ ID NO: 1372672 - RNA, 18 nt, Human
uggaagauccugaggcug

SEQ ID NO: 1372673 - RNA, 21 nt, Human
uggaauaugucaucugugaca

SEQ ID NO: 1372674 - RNA, 22 nt, Human
uggacucaacaggggcuuggaa

SEQ ID NO: 1372675 - RNA, 18 nt, Human
uggcagcaaccccagccc

SEQ ID NO: 1372676 - RNA, 23 nt, Human
uggccaaaauucacacuggaagu

SEQ ID NO: 1372677 - RNA, 24 nt, Human
uggccaaaauucacacuggaaguu

SEQ ID NO: 1372678 - RNA, 18 nt, Human
uggccaggccacucugca

SEQ ID NO: 1372679 - RNA, 18 nt, Human
uggcucaccuggagugug

SEQ ID NO: 1372680 - RNA, 18 nt, Human
uggcucagugccaggcag

SEQ ID NO: 1372681 - RNA, 19 nt, Human
uggggaggagaggugggcu

SEQ ID NO: 1372682 - RNA, 19 nt, Human
ugucagccucuccucccca

SEQ ID NO: 1372683 - RNA, 19 nt, Human
ugugagccugcuuccuggg

SEQ ID NO: 1372684 - RNA, 18 nt, Human
ugugugaguuggccaggc

SEQ ID NO: 1372685 - RNA, 24 nt, Human
uguguguuugucuaaauaguuugg

SEQ ID NO: 1372686 - RNA, 20 nt, Human
uguguucccuccuuuaaccu

SEQ ID NO: 1372687 - RNA, 24 nt, Human
uuaaagccaccaaaggcauuuucc

SEQ ID NO: 1372688 - RNA, 18 nt, Human
uucacccccaucuaagug

SEQ ID NO: 1372689 - RNA, 24 nt, Human
uugauccuggcucaccuggagugu

SEQ ID NO: 1372690 - RNA, 19 nt, Human
uuggaagauccugaggcug

SEQ ID NO: 1372691 - RNA, 18 nt, Human
uuggucagccgcccuccu

SEQ ID NO: 1372692 - RNA, 18 nt, Human
uuuggcgcuuggucagcc

SEQ ID NO: 1372693 - RNA, 27 nt, Human
uuuuccagcaaccuuuaacauccuggg

SEQ ID NO: 1372694 - RNA, 20 nt, Human
aaaaagcaacaagaguuuaa

SEQ ID NO: 1372695 - RNA, 21 nt, Human
aaaacaaugucagucauuuuc

SEQ ID NO: 1372696 - RNA, 21 nt, Human
aaggcggccgccggcaccugc

SEQ ID NO: 1372697 - RNA, 19 nt, Human
aagugcugcuccaccaagc

SEQ ID NO: 1372698 - RNA, 24 nt, Human
agaaagacugggcuggggcagcua

SEQ ID NO: 1372699 - RNA, 19 nt, Human
agaaagagccaccgccucc

SEQ ID NO: 1372700 - RNA, 18 nt, Human
agaggaagaaaagucugg

SEQ ID NO: 1372701 - RNA, 18 nt, Human
agcacacaccuccucuuc

SEQ ID NO: 1372702 - RNA, 21 nt, Human
aggguaucuuuuaaaaguuuu

SEQ ID NO: 1372703 - RNA, 21 nt, Human
aguggacagagggcagggccu

SEQ ID NO: 1372704 - RNA, 21 nt, Human
aucucugggagaugaggcgcc

SEQ ID NO: 1372705 - RNA, 22 nt, Human
caacuccuccugcccggcggcc

SEQ ID NO: 1372706 - RNA, 26 nt, Human
cacguccuuccacgcgacugacucau

SEQ ID NO: 1372707 - RNA, 21 nt, Human
cacucuaacauagaggacagg

SEQ ID NO: 1372708 - RNA, 19 nt, Human
cagcuuaaccacagcucca

SEQ ID NO: 1372709 - RNA, 26 nt, Human
caguaaaugugcuucugaugcacucu

SEQ ID NO: 1372710 - RNA, 19 nt, Human
caguggagaaagugcgagg

SEQ ID NO: 1372711 - RNA, 26 nt, Human
cccaaacuaugucgagaggaagaaaa

SEQ ID NO: 1372712 - RNA, 21 nt, Human
ccccaaacuaugucgagagga

SEQ ID NO: 1372713 - RNA, 25 nt, Human
cccuucacacuccaaguuggaacag

SEQ ID NO: 1372714 - RNA, 24 nt, Human
ccucuuggcuacacacccaagacu

SEQ ID NO: 1372715 - RNA, 27 nt, Human
ccugacccauggccccaggcuaagggc

SEQ ID NO: 1372716 - RNA, 18 nt, Human
ccuggcugcuccagggag

SEQ ID NO: 1372717 - RNA, 19 nt, Human
ccugggcacgugggaaugu

SEQ ID NO: 1372718 - RNA, 20 nt, Human
cgacugccgcucccacuccc

SEQ ID NO: 1372719 - RNA, 18 nt, Human
cuacacacccaagacucc

SEQ ID NO: 1372720 - RNA, 22 nt, Human
cuccucuuggcuacacacccaa

SEQ ID NO: 1372721 - RNA, 23 nt, Human
cugauaaaggcaucguccuccuc

SEQ ID NO: 1372722 - RNA, 20 nt, Human
gaacgaguugaggcgucccc

SEQ ID NO: 1372723 - RNA, 24 nt, Human
gagagcaauucuuauccagaaauc

SEQ ID NO: 1372724 - RNA, 22 nt, Human
gagcaauucuuauccagaaauc

SEQ ID NO: 1372725 - RNA, 26 nt, Human
gccacgcuccacguccuuccacgcga

SEQ ID NO: 1372726 - RNA, 23 nt, Human
gcccuuggcuguccucggggcca

SEQ ID NO: 1372727 - RNA, 21 nt, Human
gccuggcugcuccagggagca

SEQ ID NO: 1372728 - RNA, 21 nt, Human
gcguucuccucaauaucuucc

SEQ ID NO: 1372729 - RNA, 18 nt, Human
gcucugggggucuagggc

SEQ ID NO: 1372730 - RNA, 22 nt, Human
gcuuaaccacagcuccaaacgc

SEQ ID NO: 1372731 - RNA, 20 nt, Human
ggcagggccucucuguucuc

SEQ ID NO: 1372732 - RNA, 19 nt, Human
gggaccucugcagcugcuc

SEQ ID NO: 1372733 - RNA, 20 nt, Human
gggcagcuagggauucucgc

SEQ ID NO: 1372734 - RNA, 18 nt, Human
gggcagggccucucuguu

SEQ ID NO: 1372735 - RNA, 19 nt, Human
gguggaggaugucaaacug

SEQ ID NO: 1372736 - RNA, 24 nt, Human
gugaaugccggggagaaagacugg

SEQ ID NO: 1372737 - RNA, 23 nt, Human
gugcuugaggaguccauagcuca

SEQ ID NO: 1372738 - RNA, 21 nt, Human
guggcgggguggcagacggca

SEQ ID NO: 1372739 - RNA, 23 nt, Human
uaagaaagagccaccgccuccuu

SEQ ID NO: 1372740 - RNA, 22 nt, Human
uauccagaaaucaucuagaaau

SEQ ID NO: 1372741 - RNA, 28 nt, Human
uauccagaaaucaucuagaaauaauuuu

SEQ ID NO: 1372742 - RNA, 25 nt, Human
ucagacacuugcacauucacacacc

SEQ ID NO: 1372743 - RNA, 21 nt, Human
ucagcuuaaccacagcuccaa

SEQ ID NO: 1372744 - RNA, 21 nt, Human
ucauacagacugucccaguaa

SEQ ID NO: 1372745 - RNA, 24 nt, Human
ucauacagacugucccaguaagcc

SEQ ID NO: 1372746 - RNA, 18 nt, Human
uccaccaagcugagaaga

SEQ ID NO: 1372747 - RNA, 24 nt, Human
uccagggucuccaaggaagaucuc

SEQ ID NO: 1372748 - RNA, 24 nt, Human
uccauagcucauggcuccucuugg

SEQ ID NO: 1372749 - RNA, 18 nt, Human
ucccagcuggcaaacgcc

SEQ ID NO: 1372750 - RNA, 21 nt, Human
ucccagcuggcaaacgccuca

SEQ ID NO: 1372751 - RNA, 22 nt, Human
uccccaaacuaugucgagagga

SEQ ID NO: 1372752 - RNA, 19 nt, Human
uccccuugguggguaggag

SEQ ID NO: 1372753 - RNA, 22 nt, Human
ucccggagcccaaaaaggcggc

SEQ ID NO: 1372754 - RNA, 20 nt, Human
ucccugagugaacgaguuga

SEQ ID NO: 1372755 - RNA, 18 nt, Human
ucuccaaggaagaucucu

SEQ ID NO: 1372756 - RNA, 25 nt, Human
ucuccaaggaagaucucugggagau

SEQ ID NO: 1372757 - RNA, 19 nt, Human
ucuguaaagggcgggacug

SEQ ID NO: 1372758 - RNA, 21 nt, Human
ucuuggcuacacacccaagac

SEQ ID NO: 1372759 - RNA, 21 nt, Human
ugagaagaaauggcccuuggc

SEQ ID NO: 1372760 - RNA, 20 nt, Human
ugccgcucccacucccgggg

SEQ ID NO: 1372761 - RNA, 21 nt, Human
ugcucgaaggcgcuggugcug

SEQ ID NO: 1372762 - RNA, 22 nt, Human
ugcucgaaggcgcuggugcugc

SEQ ID NO: 1372763 - RNA, 18 nt, Human
uggcaaacgccucaaaca

SEQ ID NO: 1372764 - RNA, 18 nt, Human
uggcacacucuuugacac

SEQ ID NO: 1372765 - RNA, 19 nt, Human
uggcgggguggcagacggc

SEQ ID NO: 1372766 - RNA, 20 nt, Human
ugggugaaccugagagaguu

SEQ ID NO: 1372767 - RNA, 21 nt, Human
uggugcugccgcccuggccug

SEQ ID NO: 1372768 - RNA, 27 nt, Human
uguaaagggcgggacuggcucuggggg

SEQ ID NO: 1372769 - RNA, 23 nt, Human
uguuaagaaagagccaccgccuc

SEQ ID NO: 1372770 - RNA, 24 nt, Human
uguuaagaaagagccaccgccucc

SEQ ID NO: 1372771 - RNA, 20 nt, Human
uucacacacccacacgcccc

SEQ ID NO: 1372772 - RNA, 23 nt, Human
uucacacacccacacgccccagg

SEQ ID NO: 1372773 - RNA, 18 nt, Human
uuccaguaguaaguaagu

SEQ ID NO: 1372774 - RNA, 19 nt, Human
uucuuauccagaaaucauc

SEQ ID NO: 1372775 - RNA, 22 nt, Human
uucuuuauccccuuggugggua

SEQ ID NO: 1372776 - RNA, 22 nt, Human
ccacggcaaggcugcgaacaca

SEQ ID NO: 1372777 - RNA, 21 nt, Human
aaaaagggagacauccagagc

SEQ ID NO: 1372778 - RNA, 25 nt, Human
aaacagacaugcaaguaggagagau

SEQ ID NO: 1372779 - RNA, 23 nt, Human
aaagugcugggauuacaggcaua

SEQ ID NO: 1372780 - RNA, 19 nt, Human
aacaagggaagacaaccau

SEQ ID NO: 1372781 - RNA, 19 nt, Human
aagugcugggauuacaggc

SEQ ID NO: 1372782 - RNA, 21 nt, Human
aagugcugggauuacaggcau

SEQ ID NO: 1372783 - RNA, 26 nt, Human
aagugcugggauuacaggcauaagcc

SEQ ID NO: 1372784 - RNA, 20 nt, Human
aauccuucccuuuuuuuuuu

SEQ ID NO: 1372785 - RNA, 19 nt, Human
aauggagggaccggcugga

SEQ ID NO: 1372786 - RNA, 21 nt, Human
acaaaaagggagacauccaga

SEQ ID NO: 1372787 - RNA, 25 nt, Human
acaaaaagggagacauccagagcug

SEQ ID NO: 1372788 - RNA, 21 nt, Human
acaauaugaaaucagugcacc

SEQ ID NO: 1372789 - RNA, 23 nt, Human
accuacucccuguucauacacgc

SEQ ID NO: 1372790 - RNA, 23 nt, Human
accucagccucccaaagugcugg

SEQ ID NO: 1372791 - RNA, 22 nt, Human
acugucuuuucauccaugagaa

SEQ ID NO: 1372792 - RNA, 19 nt, Human
agccaccacaccuggccua

SEQ ID NO: 1372793 - RNA, 22 nt, Human
agccaccacaccuggccuauac

SEQ ID NO: 1372794 - RNA, 24 nt, Human
aggugaucugcccaccucagccuc

SEQ ID NO: 1372795 - RNA, 19 nt, Human
agugcaguggugugaucuc

SEQ ID NO: 1372796 - RNA, 20 nt, Human
agugcaguggugugaucucg

SEQ ID NO: 1372797 - RNA, 23 nt, Human
agugcaguggugugaucucggcu

SEQ ID NO: 1372798 - RNA, 24 nt, Human
agugcaguggugugaucucggcuc

SEQ ID NO: 1372799 - RNA, 25 nt, Human
auuuuguuuccuuauacuucucuca

SEQ ID NO: 1372800 - RNA, 24 nt, Human
caaagugcugggauuacaggcaua

SEQ ID NO: 1372801 - RNA, 27 nt, Human
caaguguuucucaugccuuagccuccc

SEQ ID NO: 1372802 - RNA, 20 nt, Human
cacugcaaccuccaccuccc

SEQ ID NO: 1372803 - RNA, 21 nt, Human
cacuuauggaaaauagaaccu

SEQ ID NO: 1372804 - RNA, 21 nt, Human
cagccuuguucuuuuugcuca

SEQ ID NO: 1372805 - RNA, 23 nt, Human
ccaaagugcugggauuacaggca

SEQ ID NO: 1372806 - RNA, 24 nt, Human
ccaaagugcugggauuacaggcau

SEQ ID NO: 1372807 - RNA, 23 nt, Human
ccacaaaaagggagacauccaga

SEQ ID NO: 1372808 - RNA, 20 nt, Human
ccauauuuuucuucuugcag

SEQ ID NO: 1372809 - RNA, 24 nt, Human
cccaaagugcugggauuacaggca

SEQ ID NO: 1372810 - RNA, 18 nt, Human
cccaaguaguugggauua

SEQ ID NO: 1372811 - RNA, 20 nt, Human
cccaaguaguugggauuacu

SEQ ID NO: 1372812 - RNA, 24 nt, Human
ccccuggcuggagugcaguggugu

SEQ ID NO: 1372813 - RNA, 19 nt, Human
cccucccucccuuccuucc

SEQ ID NO: 1372814 - RNA, 22 nt, Human
cccucccucccuuccuuccgga

SEQ ID NO: 1372815 - RNA, 19 nt, Human
cccuccuuuccuuccuuuc

SEQ ID NO: 1372816 - RNA, 23 nt, Human
cccugauaauuauacuucucuca

SEQ ID NO: 1372817 - RNA, 22 nt, Human
cccuggcuggagugcaguggug

SEQ ID NO: 1372818 - RNA, 24 nt, Human
ccugaccucaggugaucugcccac

SEQ ID NO: 1372819 - RNA, 20 nt, Human
ccuuccuuuccuuuccuuuc

SEQ ID NO: 1372820 - RNA, 22 nt, Human
ccuuuccuuuccuuucccuccc

SEQ ID NO: 1372821 - RNA, 23 nt, Human
cgcccuccccuuuugaaauccuu

SEQ ID NO: 1372822 - RNA, 20 nt, Human
cgcucuauccccuggcugga

SEQ ID NO: 1372823 - RNA, 22 nt, Human
cuauacugucuuuucauccaug

SEQ ID NO: 1372824 - RNA, 24 nt, Human
cucacugcaaccuccaccucccag

SEQ ID NO: 1372825 - RNA, 23 nt, Human
cuuagccucccaaguaguuggga

SEQ ID NO: 1372826 - RNA, 18 nt, Human
cuuuccuuccuuuccuuu

SEQ ID NO: 1372827 - RNA, 23 nt, Human
cuuuuuuuuuuuuuuuuuuuggg

SEQ ID NO: 1372828 - RNA, 24 nt, Human
gaccucaggugaucugcccaccuc

SEQ ID NO: 1372829 - RNA, 19 nt, Human
gagaauuuugucaagagcu

SEQ ID NO: 1372830 - RNA, 24 nt, Human
gaugucaccccugguggccaagcu

SEQ ID NO: 1372831 - RNA, 18 nt, Human
gauuacaggcauaagcca

SEQ ID NO: 1372832 - RNA, 21 nt, Human
gauuacaggcauaagccacca

SEQ ID NO: 1372833 - RNA, 18 nt, Human
gcaaccuccaccucccag

SEQ ID NO: 1372834 - RNA, 22 nt, Human
gcaaccuccaccucccaguuuc

SEQ ID NO: 1372835 - RNA, 23 nt, Human
gcuggccucgaacuccugaccuc

SEQ ID NO: 1372836 - RNA, 19 nt, Human
ggauuacaggcauaagcca

SEQ ID NO: 1372837 - RNA, 18 nt, Human
ggccaagcuguaaaauuu

SEQ ID NO: 1372838 - RNA, 20 nt, Human
ggcggguuccccugauaauu

SEQ ID NO: 1372839 - RNA, 24 nt, Human
ggcuggccucgaacuccugaccuc

SEQ ID NO: 1372840 - RNA, 19 nt, Human
ggguauuuuguuuccuuau

SEQ ID NO: 1372841 - RNA, 18 nt, Human
gggucaggcaaaaagagc

SEQ ID NO: 1372842 - RNA, 18 nt, Human
ggucugggguaaggagcu

SEQ ID NO: 1372843 - RNA, 22 nt, Human
ggucugggguaaggagcugggg

SEQ ID NO: 1372844 - RNA, 24 nt, Human
gugaucugcccaccucagccuccc

SEQ ID NO: 1372845 - RNA, 19 nt, Human
guucgggugggcaucaugg

SEQ ID NO: 1372846 - RNA, 22 nt, Human
guuucucaugccuuagccuccc

SEQ ID NO: 1372847 - RNA, 24 nt, Human
uaacagcgauuuuuagggaacaag

SEQ ID NO: 1372848 - RNA, 19 nt, Human
uaacuguacaaauugauug

SEQ ID NO: 1372849 - RNA, 19 nt, Human
uaaggucugacugccugca

SEQ ID NO: 1372850 - RNA, 24 nt, Human
uaauacuuuuauaauuucuuaugc

SEQ ID NO: 1372851 - RNA, 22 nt, Human
uacaggcauaagccaccacacc

SEQ ID NO: 1372852 - RNA, 23 nt, Human
uagaauaacagcgauuuuuaggg

SEQ ID NO: 1372853 - RNA, 22 nt, Human
uaguaaagacaugguuucgcca

SEQ ID NO: 1372854 - RNA, 18 nt, Human
uauaguguggagccagga

SEQ ID NO: 1372855 - RNA, 20 nt, Human
uauaguguggagccaggaac

SEQ ID NO: 1372856 - RNA, 19 nt, Human
uauggaaaauagaaccucc

SEQ ID NO: 1372857 - RNA, 19 nt, Human
ucacugcaaccuccaccuc

SEQ ID NO: 1372858 - RNA, 23 nt, Human
ucacugcaaccuccaccucccag

SEQ ID NO: 1372859 - RNA, 24 nt, Human
ucacugcaaccuccaccucccagu

SEQ ID NO: 1372860 - RNA, 27 nt, Human
ucacugcaaccuccaccucccaguuuc

SEQ ID NO: 1372861 - RNA, 18 nt, Human
ucagccucccaaagugcu

SEQ ID NO: 1372862 - RNA, 30 nt, Human
ucauacacgcccuccccuuuugaaauccuu

SEQ ID NO: 1372863 - RNA, 22 nt, Human
uccacaaaaagggagacaucca

SEQ ID NO: 1372864 - RNA, 28 nt, Human
uccagagcugaagaguuuucccugagaa

SEQ ID NO: 1372865 - RNA, 19 nt, Human
uccaugagaaacauaacac

SEQ ID NO: 1372866 - RNA, 24 nt, Human
ucccaaagugcugggauuacaggc

SEQ ID NO: 1372867 - RNA, 24 nt, Human
uccccuggcuggagugcaguggug

SEQ ID NO: 1372868 - RNA, 18 nt, Human
ucccuuuuuuuuuuuuuu

SEQ ID NO: 1372869 - RNA, 18 nt, Human
ucccuuuuuuuuuuuuuu

SEQ ID NO: 1372870 - RNA, 19 nt, Human
uccuuccggacaaggguug

SEQ ID NO: 1372871 - RNA, 18 nt, Human
uccuuucccucccucccu

SEQ ID NO: 1372872 - RNA, 24 nt, Human
ucgccaggcuggccucgaacuccu

SEQ ID NO: 1372873 - RNA, 20 nt, Human
ucucgcucuauccccuggcu

SEQ ID NO: 1372874 - RNA, 23 nt, Human
ucucgcucuauccccuggcugga

SEQ ID NO: 1372875 - RNA, 21 nt, Human
ucugcccaccucagccuccca

SEQ ID NO: 1372876 - RNA, 21 nt, Human
ucugguagugugaugcuucca

SEQ ID NO: 1372877 - RNA, 19 nt, Human
ugaacaacugcauauggug

SEQ ID NO: 1372878 - RNA, 18 nt, Human
ugaccucaggugaucugc

SEQ ID NO: 1372879 - RNA, 20 nt, Human
ugaccucaggugaucugccc

SEQ ID NO: 1372880 - RNA, 21 nt, Human
ugaccucaggugaucugccca

SEQ ID NO: 1372881 - RNA, 24 nt, Human
ugaccucaggugaucugcccaccu

SEQ ID NO: 1372882 - RNA, 18 nt, Human
ugagacagagucucgcuc

SEQ ID NO: 1372883 - RNA, 22 nt, Human
ugagacagagucucgcucuauc

SEQ ID NO: 1372884 - RNA, 19 nt, Human
ugagguucgggugggcauc
